United States Patent Application Publication US 2022/0090207 A1 - sequence listing, part 14

SEQ ID NO: 199202 - DNA, 90 bp, Homo sapiens
  chr3:173113694-173113784
  hyper
ctctgaggggggcaggattgggtctggaggatggtctggcttgattcagactcctgcacccgacaacgccacggagtgaggggagaggga

SEQ ID NO: 199203 - DNA, 263 bp, Homo sapiens
  chr3:173115694-173115957
  hyper
gaagggagcgagcgactgtgcggcgctcacgctgccagagcccgggcggagtgcagtcgcctccaaagccttagagcggcgccccagtcactgcagctcttcaccctagagctgtgccctgggaccacagagaccaagagcatggaaatcggctgagaggtacaaaagaaataaggaacagattacgagaaagcggggagggtttcctggcgaaatacggaggctgagcagatggaggaacaatgccgcctccagaagaaaac

SEQ ID NO: 199204 - DNA, 172 bp, Homo sapiens
  chr3:173303225-173303397
  hyper
gatattttgcagggggaattggctgttttcatgttgtctcctcccccacccctctcttcctaccccttcccgcttcccgcttctctcaaccggacactaaagggttacagggtcactgcaccggatagagacagtagaagtgggtggctggccacacatgttgtcttgtaat

SEQ ID NO: 199205 - DNA, 825 bp, Homo sapiens
  chr3:174158445-174159270
  hyper
attagattcaaagactatgtataaaatatatgcaaattataaacgaaacatatcttttgatgggcaccatgggggcaagtttccagttttgcccattaaaaaaaaaatccttcccaatttttgaggcttgtgccattgaacactgctgcccgcggctcttcttcccacttggctcgacaaacgcgtcttttattatgactcagcccagcccgttccttgccaagcggctgacgctcgcggcggaggcgccggggccgccgctcgggggcgagggttcgcgccgcggctcgcgcccgcttctcccgctttacggctgctgaaaatccggcctggcccggcagccgtaccgcagacgagcccgcgcccgcgccgctcaggtaatcggagtccttttcttttcaaagttttgccaaaacaagctccgcgctctgaggcggcgcggcctcggccgagcggtccgtgtctccttgctcctccgtcctacccaagctggcgcgactgagctgtgggccgcacccctgcgcggggcccggggcgccgacccggcgtgaagtacgggggccgaggggcgcccggccggcggcgggttctgagcgactccgcggggtggcgcgcggggcacctggctctggcagtccgcgaggcgcgctggccaaaggagctcccaacccgctccaaggcccccgcccacctcccgaagccgcttgtcttaggagaggagcgtagcagctccgagtccccgcttctgacacgttcacacacgtatgcagtgcacgccggccaggcagcccgacacggcgcgctagcggggcgcaggtaaagagc

SEQ ID NO: 199206 - DNA, 99 bp, Homo sapiens
  chr3:174159306-174159405
  hyper
cacagttccgcccccgcgcgtggaatgccgctccagtggacgcccaggatggctttcttaaggaagtttatgagaagccatggaaagagcagcctggga

SEQ ID NO: 199207 - DNA, 90 bp, Homo sapiens
  chr3:176915778-176915868
  hyper
cgcgtgtccggggggcggcccggcggcgttgggggctgggcgcacacgcggcgggcatgtgggggagtgcggcgcggcatcatatggaca

SEQ ID NO: 199208 - DNA, 159 bp, Homo sapiens
  chr3:178789082-178789241
  hyper
gtgcatgcatacacacgaacccacacacgcacctcaacccggtatggatgccatcacgaaggatggaatcccccgactcccacggggcgggggcaactgagagggccaaggcagctgcacgcacagatgatccacctggtccacgtgaaatgcctgaaa

SEQ ID NO: 199209 - DNA, 176 bp, Homo sapiens
  chr3:178866990-178867166
  hyper
tagctgagacaaacgcttagatctttcattcatagacctgagacactgactcatgtgacttgtctctttactaagtgtattatgtgatgcctgttccatggctcttaagtggctcggaaaggtagggtagggcccgggattgggctatgtaaacaccagacgttcagccggcgtgt

SEQ ID NO: 199210 - DNA, 40 bp, Homo sapiens
  chr3:179064154-179064194
  hyper
atggattagctggcacgacccagaccgataaactggctca

SEQ ID NO: 199211 - DNA, 147 bp, Homo sapiens
  chr3:179169640-179169787
  hyper
gaagaccccaaaggccccatttaggtttcccattctggaattctaaatgtcagaaagtaaactgaagcccagagttgcacaaccttgcgttgcagtccccgctcttccatcactagttgtaggaccgtgtaccgtctcgggcctaag

SEQ ID NO: 199212 - DNA, 100 bp, Homo sapiens
  chr3:179754078-179754178
  hyper
ggtttcctctgtttcgattccttgatcctgtttaaagaaacaggctcagggaatgcacagaaaacaaacttccccaatcgaagttctgaggtcttccctc

SEQ ID NO: 199213 - DNA, 226 bp, Homo sapiens
  chr3:180397084-180397310
  hyper
ttccagtagcttgttctcctcgttcgccaccgggatggcgaacccatcctcccagtgcagctcagccaggaattcgctactcatgactgcaaacggatagagaagatacagagcaaagatccgccttcttgtacagcgggtgagcagcacccgcgtcaagcccaggcacctgcacagtgccgcggcaattgccgggggagccctagcaaccttcccgcgtccttag

SEQ ID NO: 199214 - DNA, 55 bp, Homo sapiens
  chr3:181413014-181413069
  hyper
cgccgtttcgcccacggggtgcggggaacgaacccaactggacacactgtgcacc

SEQ ID NO: 199215 - DNA, 104 bp, Homo sapiens
  chr3:181421145-181421249
  hyper
ttattgacggaaatcggcttaatttttcataaaagaatggctttttaaaatattgaatactatggctatgcaaggtttatgatacctttatgtttattcttccc

SEQ ID NO: 199216 - DNA, 64 bp, Homo sapiens
  chr3:181428196-181428260
  hyper
agagtggaaggaaacttagacgaggctttgtttgactccgtgtagcgacaacaagagaaacaaa

SEQ ID NO: 199217 - DNA, 241 bp, Homo sapiens
  chr3:181429366-181429607
  hyper
agtaccctgcaccaaaaagtaaatcaatattaagtttaaagaaaaaaaaacccacgtagtcttagtgctgtttacccacttccttcgaaaaggcgtgtggtgtgacctgttgctgcgagaggggatacaaaggtttctcagtggctggcaggctggctctgggagcctcctccccctcctcgcctgccccctcctcccccggcctcccccgcgcggccggcggcgcgggaggccccgcccc

SEQ ID NO: 199218 - DNA, 188 bp, Homo sapiens
  chr3:181429718-181429906
  hyper
tgtctattaacttgttcaaaaaagtatcaggagttgtcaaggcagagaagagagtgtttgcaaaagggggaaagtagtttgctgcctctttaagactaggactgagagaaagaagaggagagagaaagaaagggagagaagtttgagccccaggcttaagcctttccaaaaaataataataacaatca

SEQ ID NO: 199219 - DNA, 88 bp, Homo sapiens
  chr3:181429966-181430054
  hyper
tttgcctctctctttttttcccccaaattattcttcgcctgattttcctcgcggagccctgcgctcccgacacccccgcccgcctccc

SEQ ID NO: 199220 - DNA, 36 bp, Homo sapiens
  chr3:181430331-181430367
  hyper
gagaaccccaagatgcacaactcggagatcagcaag

SEQ ID NO: 199221 - DNA, 252 bp, Homo sapiens
  chr3:181430443-181430695
  hyper
cgctgcacatgaaggagcacccggattataaataccggccccggcggaaaaccaagacgctcatgaagaaggataagtacacgctgcccggcgggctgctggcccccggcggcaatagcatggcgagcggggtcggggtgggcgccggcctgggcgcgggcgtgaaccagcgcatggacagttacgcgcacatgaacggctggagcaacggcagctacagcatgatgcaggaccagctgggctacccgcagc

SEQ ID NO: 199222 - DNA, 209 bp, Homo sapiens
  chr3:181433437-181433646
  hyper
ctacttgattcgctcgtcttcccccacccacggggaccaggaaccaacaatcgggcacttttaagagcacgggtttgcttcccacaatttcaagagcttgtgtcaacttgctacaactttggagaagttggaatccggcagcgtcttccacccttgagtaaagtacccgctgcagccactaagttagctcatcccgttggtttgcatct

SEQ ID NO: 199223 - DNA, 47 bp, Homo sapiens
  chr3:181444767-181444814
  hyper
tctagcgccctctttttttttttttttttttttttttttttgcctga

SEQ ID NO: 199224 - DNA, 292 bp, Homo sapiens
  chr3:182510867-182511159
  hyper
gttcaggactgtgcgtatgcgtgtcgggagacgcgtgaaccaaagaagccacagagcccgaaaaagacctgcaacaggaggtagagaccgaggaatcggccccaagctgcagactccggagatggccagacccacagacacgacttaatcccactcccagaacggggaggagggtggcagtggacagaaacagcgttcgagaacccggcacctttccacgctcgcttcttcccggacccacaacacagaaaccccccaactcggaacggcggcggggcgcgccaggcccccc

SEQ ID NO: 199225 - DNA, 170 bp, Homo sapiens
  chr3:182511623-182511793
  hyper
ctcggcccggggtggcggggaaaggccggcggcgcggagccgggaggccagggcgtgggcgcccggctaggccgcagcggagacgggcgcggggcccagagccggagaagccccgtgcggctcccgggctcgtctcgcctccaagcccgggccgccgaggctggcgccga

SEQ ID NO: 199226 - DNA, 192 bp, Homo sapiens
  chr3:182697832-182698024
  hyper
cccggcttcggggcggggggaggctactcacccggaaccccagaccccagtccccgaccagacacaatggagccggcagaggggcaggggcaaggccgttgccccctcccctccccccgccccaacgcctcccccacccgcgccgggccccggcaaggggcaccggggccgctccccgcgccccaaactccc

SEQ ID NO: 199227 - DNA, 145 bp, Homo sapiens
  chr3:182698591-182698736
  hyper
tctctggtgggggcgccgggggacaccccacctccgtttcctacgcggttccttccggacgaccacggccgggtctacgcaggctggaagcgggcacgagcggcggcggataagttgagcagctgggggcggctgaaacggatgg

SEQ ID NO: 199228 - DNA, 47 bp, Homo sapiens
  chr3:182896564-182896611
  hyper
aagcaatcttggcactaacacgaacaccccatgaacgctcgcaggga

SEQ ID NO: 199229 - DNA, 214 bp, Homo sapiens
  chr3:182970889-182971103
  hyper
gaacaaactggggcggggcccatcaccttcacctacgcgccgggagggtggcggctggcgggcggggccgggctcgggccgtgacgccgagagtgcggggcgcgcggctgggagcctcgcgcccccgcccgggcccgcccccatcccgcccgcatacagcccgcatcccgccggggaagcgagcccagtccagcgctgcccgtccagtcctcgc

SEQ ID NO: 199230 - DNA, 585 bp, Homo sapiens
  chr3:182971342-182971927
  hyper
agtttgctgtaagtttccttactttgttactgaggcccccagagctccacgcataagtggtgtgaccagaaaccttttaacaagacccgcctgagcctgcgttagagctcccgctcggaaagtaaaagaccatcctaatccgcggcgctgcggaaccggtgtcccgtgtgggaggaaccgcggcgttccctgggcgtagggcccgcgaggccagcacagtccgcctcttggcggagcgccctgggccggtggttccgcgcggagttagtctgtggtcagttacgtggtgaaaacacggctgtgccgcggccgcatctttccgcggccgaggcctctctgggtgggagtgttggcttcctttccggatcgctaaatggggaaagttctggccgctcggcgggatacgtctccaggccacggatggttcgttctccgtgccgcggccccgagctgggctccctgggtctccagcgcgggctcccggcattgggggctgcgggccggcccctccgccccgcccccgccccgccgcgcctcctcggccgagcggctcgcggtctccggcgcgggaggctccgagtctgc

SEQ ID NO: 199231 - DNA, 86 bp, Homo sapiens
  chr3:182972458-182972544
  hyper
tgcggccacccgcctccggctggagggctgaattcgagtcgaaagcccgtgtcgggctggaaagaagaaaccgccaacctgagaac

SEQ ID NO: 199232 - DNA, 279 bp, Homo sapiens
  chr3:183145652-183145931
  hyper
attaataaaacgcaggaaaaattaaagcttcgtttaccgacatgagtgatcactgtggccagtcgccgggtgagctcctggggaggcatctcttcttttaagcaagacagcatttcactgaaaaaccattccgtataaataaagccaaacaaaactgtttctaccgctgcggtggatgattttttaaaggcatctccgcccaaggatgctctgccctcgccctcttcctggctctccaggcaagaaacgagagtccctcgcagcctaggccagctctcc

SEQ ID NO: 199233 - DNA, 47 bp, Homo sapiens
  chr3:183146025-183146072
  hyper
aggaagcaagtcgccaatctcgccggaaccgcgccccggctcctccg

SEQ ID NO: 199234 - DNA, 821 bp, Homo sapiens
  chr3:183165026-183165847
  hyper
acagtctcccgccccgtttcttcacctcagttctctaaagattgaaggtcaagaggagggtttcttgccctggagcctgcgatagggtgggcccttgcggttcttgggcggaaacggcgatagggacacccagggcctaaggaggctggggacagagcagatcctcccagcccccaacatcaccccggagtagatgcagacccccagggtcccggaggccgagaccacaccccgcgggcacgagcccgattggcagattgtagccgagtggtttcaacggtgacgccccccacccgaatgcctcgctgggattggctcatttcttggttcagacctggacggtggccagaggaggacaagaggcttttacaccgaacggaggtgatgtggacgacaacggagacgcagccgcacttcaccaagcggccggtccgaggggacatggcggcaacctctgcagcgtcagtgctgctggcgggtgcaagaaactggtggcgacactgcctgagcccgctgctgttgccaaggtgacgaggcataaagccgcggtggatcggtgcgtgggggcgcggggtgggtggtgaagggagaacgaagctcgagcggaaagacaggaccgcgaccgcttgtcaggggattcggcttccagtcccccttccagagggcgtccttctgcagccaggcctctgtcttcccccgcccccacacggtacgagctacagaatgcttttctgttttctctttttctatagtaaggaagcgctttcctttctcccccgtttattcatttgcttacttctggttcccgtgtccttttaaca

SEQ ID NO: 199235 - DNA, 572 bp, Homo sapiens
  chr3:183542793-183543365
  hyper
gccgccggcagctccgaggtcgcgtgggatccgggctccaggcgcctccgctctgccgcccaccccatccctctggctccgggcctccgcgtcctcccaccacagggtggggactcgttgcggtccctacccagcccatacctgtacgacgtggtcactgctgcagccgcgtccgcgtcgccgatgggcagcacgtagaccccgcgggcgccgggcgcaggtggcgcggaggactgcgcggaggatttgcccctgcggccgcccgcccccggtccgcgccccggcggcggatccttgggcccggcgggcgtggtccacaagccgaagtcccgctggtactgagtgagcggcacgtcccggccggaatcccgggcgcccgcgggaggctggcccctgcgcgaggcggcgccgcccgtgcccggctcctcgctgtcgaggtccgagtagccgtgcagagtgagcggcaccgccacgtcggagcggtccagctggttccagcgccgcgccaggcagcacaggcggctgatacagggccacgccatgccagccccggcgcccgccgccccgctccc

SEQ ID NO: 199236 - DNA, 33 bp, Homo sapiens
  chr3:183543503-183543536
  hyper
gccggggccggctgcgcacggctggagctggag

SEQ ID NO: 199237 - DNA, 300 bp, Homo sapiens
  chr3:183602745-183603045
  hyper
cgcggctgagcggcagccgaaccagccacggtgcccggacgactggctggcgcccttctgtcccaccgcttcccctcccactgctcagctggctccgggagcgacctgcgagagtggcccggcctcccggcatttgcagatgaggaggatggggccagagcgaagagggacaactgtcattttttcgagtaacggcacataccaggcgctttgcctaagatcgcatttaatcgtcacagcactgctagaggtagatgtcatcactgtttcactttgcctctggtcagaggggataggact

SEQ ID NO: 199238 - DNA, 86 bp, Homo sapiens
  chr3:183851915-183852001
  hyper
gtccccctaggcgggcgccggagcacgacgggtcaagtcggaatcgccacgtggaaacagctctcagcatcgcgaactccaaatcc

SEQ ID NO: 199239 - DNA, 72 bp, Homo sapiens
  chr3:184053512-184053584
  hyper
aagggaggttttgcgaccccgtgtagtgtgactgggctggcttagtgagtgttcgccgcccctgccttcagg

SEQ ID NO: 199240 - DNA, 260 bp, Homo sapiens
  chr3:184098372-184098632
  hyper
cgggggcagaagggcgcggtgcctgggacccgggacccgcgggcagcccccggggcggcacacggcgcgagctgggcagcggcctccagccaagcccgtccccgcaggctgcaccttcggcgggaaggtctatgccttggacgagacgtggcacccggacctaggggagccattcggggtgatgcgctgcgtgctgtgcgcctgcgaggcggtgagtgcaccccgcggccggcccgggccctggcgggtggggagcgccg

SEQ ID NO: 199241 - DNA, 1017 bp, Homo sapiens
  chr3:184278877-184279894
  hyper
cggacactggccgtcgccctcacgtacgctcgaggaactcttcctcctctgcaataaagctccttacactctacagcgatgacttaatcccacgtcctccactgctaagctagtaacacaagcctctgtcttgtccattgcggtagcacccgcaggtactacagtctgacacattgtgggcgctcacaaagatgtgctgaatgaatgactaaatacgcagcccagtgaaagaatgaagaaacgatgaagtcccttgtcacaggatacatcgcggtgggggtccccccaagtagcactaagctacagccacatgagggcgtcgcagggcagacgcgggccacatgggggcgcccccggtccgtcttagctggttggcacctcctcggactcagtttaggttactaatcgccaatgggcgccaggaggcggggttctccctctgatggacagcatcgctccgcccaatctaattcatcttttccttagccccgcccactccggcccctgagaccccgagggtgggcctggcggagacaccgccaactgaactccagctgagtgctctcgaggccgaaccagcgggcctggcggtctgtgagtgggtggccagccgctaggggcggggcctcagcgttgacgggcaggcaggccgtcccacccctctcgcccagagcggccgcgccagcgctggggacagcagaagtgagtacgtgagcggcgcagcaagatcccagctcggaccccggacggcgcgcgcccccgaagccccggatcccagtcgggcccgcagctgaccgccagattactgtgcatcccgaatcacgaccacctgcaccctcctgccccggcccgccccccaagtcctcaggcacccagctccccggcgccccggatcctcctggaccggtccgtccagattcccgcgggaccgacctgtccgcatccccaggaccgccgggctcggtgcaccgcctcggtcccggagccgcccgcctggattgcattccctcctctcct

SEQ ID NO: 199242 - DNA, 242 bp, Homo sapiens
  chr3:184279929-184280171
  hyper
gcccgccgagcgcaccctctctcgggtgcctgcagccccgccggcgcggcccggcccggcgcggcccggctcggctcctagagctgccacggccatggccagagcccgcccgccgccgccgccgtcgccgccgccggggcttctgccgctgctccctccgctgctgctgctgccgctgctgctgctgcccgccggctgccgggcgctggaaggtgagcggcgtcggggggcgcgcccgggaa

SEQ ID NO: 199243 - DNA, 71 bp, Homo sapiens
  chr3:184319719-184319790
  hyper
cgggggccggctccgccgccggtggtccccgccgctcctggcggccgcacctccgggcaggccacttggat

SEQ ID NO: 199244 - DNA, 103 bp, Homo sapiens
  chr3:184320096-184320199
  hyper
ttgactgggttatctctgcggagatccgccgcccaccccaaaaaggagaaagaaaaggcttagcacacggtcccacccaccgcccctcgatcctccttgttgc

SEQ ID NO: 199245 - DNA, 114 bp, Homo sapiens
  chr3:184322331-184322445
  hyper
ggtctggcctggggggcgcctcccgccccctcttggggaaggtgctcggagactcccgggccctgggcggagagtgtggggaggctgggctaaaggcagagacccaggccgagg

SEQ ID NO: 199246 - DNA, 301 bp, Homo sapiens
  chr3:184870307-184870608
  hyper
ggcagagcccggagccccgcggccgcagagttccggcagcgaccccggacggcccggcgggcgtcccccggaccgcggcggaaggcgggaagacgcggctcgacttacagtgacaccatcctaggtgacagcaccagtgcagcttgaagcacttgccatggctgtgcgtggcacagatagacagcccgtcgcacggctggaagtcgggtctgcgggcggcgcaactccgcgccagggcctgagcctcatctagtttctcgctcttccaaccccgctccgacgccggcgaggccgccgcact

SEQ ID NO: 199247 - DNA, 276 bp, Homo sapiens
  chr3:185541156-185541432
  hyper
tagaaagaaaggtgggcgccccgtgtctcgggacaaggcgaggagggtgcgagcccgggtcggaccccaggtatagccgtgggtggcattaccggaaaaacaaatttaataaagagcggcgccaatttgaaaggatgagctcatttgaaactcaagctgcagggctggcgcggccccgctgctctcccggcccccacctctccattccgctaatccggggcccgaaggctccaccgggctcccctccctgccctctcctcccggtggccccgagaa

SEQ ID NO: 199248 - DNA, 236 bp, Homo sapiens
  chr3:185542334-185542570
  hyper
ggcgccccaaggctgcggccccgagggcgagggcagagtccagagctgtggggggaggggagcgggccgtcccaggagcgggccggcggcgagagttgagggtctggtgcgtggaagtgagcgtgcgggcgcgggagccgccgccgggcgccgcccgccggactcggcctccctcccggcgccgtcccggcctgagcggggcgaggcggggggagggggccgcgctgagtgctcac

SEQ ID NO: 199249 - DNA, 336 bp, Homo sapiens
  chr3:185543221-185543557
  hyper
ccccgcgccaggcgggcggaagcgggtcgcggccccgggctggggctccgggcgccggaaccccgggcgggcgcggcgccgaggccgggcgagcggcggggcggggaaggcgcgccccgggcgcgggtgggagcgcgcgagggggcgacggggagccgcgggcgtgggagggagaggggctgcgagtgagcgcggagaggggtgtgcgcaaggtggaccggatgtgagtgcgctgctgccagggcaagcgggaaggtgtgtcccggaggtgagaggcgagggcaggctgggagacaacaactttcgcagcgacttggccggggctggcgccctgcg

SEQ ID NO: 199250 - DNA, 239 bp, Homo sapiens
  chr3:185543684-185543923
  hyper
cctcgcggaccgtgctcgcggggaagtggttcccggtcccgggcctcagtttcccgaccggggagggaaggcggaaggccagcgcggagtcacgtcctctccgcccagaccccgcgtgtccggaaccccgcggcaggcggcagcctgacgttggcagctgctctctattctgggaagtgccgagggcttcccgggcggcggcggcgaaagccaggtggcgggtggggaaacgaacgccg

SEQ ID NO: 199251 - DNA, 713 bp, Homo sapiens
  chr3:185825460-185826173
  hyper
cccgcgccccgggcgcccccaggaaaactttagcacagcgcagcggcgcgatccaggcccctcccctgtggcgcgcagcgggcccggttttatgaatgggagagcgagccgcggccgccacatcaggtagaggctgtaactggatctctagcgctgggccccattcacaaaacaagacacacttccacccaattctcagccttccccattcatgaaaactccttcagctgcgcccccgcccccatttccaacgcacgcccagcctccgacgcaggcccctcaccccagcgttttaggaagaaagctcaatgcttcattcacaaaaagggaagaaaaaaaaaaaagccgcagggagcagcgagccaacgaaagaaacccgcttcattcataaagtcacccacattcataaaaacgaggtgcggcgcccggcgctaccaaccgcttccaatccccccacccccaacatctctccctggcaccccctcgtcgaccaggagttcggttcccccccgagttttctccaccctctgaaaatgcggccggaaccctaatccgctgcgaggctgcagcatctttcggtgctgtcccctccacacccgtgttatccccaccatccccaggccgctgttccggtgcgccccgattttctcgagtcgccgcacagccggacgccctcagcctgctgggtgggagcagggcgactggatgtccac

SEQ ID NO: 199252 - DNA, 1075 bp, Homo sapiens
  chr3:185826425-185827500
  hyper
gatcccccatccactcgggagcccccgcactcgcgctccggggcgcctcccccacgacgtgtggaaagccgctctccccgcgctccggaaccgttagccgcacccgcccgacgcctcccaggaaccaaaccggaccgggccgcggggggagggggcggtcaacccggggggggtcaccccagctactgcaccccgactttgaagattctgaatcagcccgtgaactctagccggctgggcctgtcggaccagtggccggacgccccttccgatctcccccctgcccccgcaaagccccctcacctgaggcggcctctctcctccccttgcagcggccccggcggcgcaggcgcgctcacgcacgcgcgcagcgggcctgggcgcctgggcgaaaggctgggccgaaccgctccgaagacggtgaaccgctccgcgcaccagcggctggactctgcgccgcagctgccaaccaggctggagcgctggcccggccccccgcggctcgctgctccgcccgccgccattggcccgcggccctagcccagccttgttcccattggccagaggccgttcccgcggctgtccatcacctcttgtttaccctgtctgcgggcaaatccaaccaagccgccccatcaactccggcccccattggccagcggtgcatctctctccaccccctcaggggtctgttttacataatttatgcaccgggggccattggccaatcagcacaggcttgtttatataatgaatgtaaggacgtttttcattcataaaaaacgcgacctgagggggaagcttagctgagtcagtgaagcacttaaaggggccgaggccaggaggagccgccgttacttcccttctcgccgctctcccgacttttcaccgaggcacgactcttcccccttacccactcacccccacttctccatccagcaaagccccgaccagaattgggtctcttggcgccagacgttcgcagctgcagcaccaagcaaagttatcattttagaattcaggggagaggaattcgtcattccacacaaactcgctgaccgacctgggcgtttag

SEQ ID NO: 199253 - DNA, 290 bp, Homo sapiens
  chr3:186079331-186079621
  hyper
aaaagcatctcctgcttctcggactgcctggagcgcgaactggatatcaaggagccaaggttaagtccagaagaagaaggaaatccgaccagttgctttagcaaactgcctggagcaaggccgcctcccacccgcacagctttgaggcttgagggggcctctcagtcgcagagagagccgagccccaccctgtgcgttccccaagcctgcacccctcgagcggggcatcccttcctgcagggctttgtggcaggtggaactgtcggggtgggcgccgtggctttggctgc

SEQ ID NO: 199254 - DNA, 47 bp, Homo sapiens
  chr3:186544979-186545026
  hyper
ctctgactttcttctcggaattgcagggcgaccggcagcaccaagaa

SEQ ID NO: 199255 - DNA, 65 bp, Homo sapiens
  chr3:187455277-187455342
  hyper
accagaaagccccattttctcgctcacacataagagcacaaacaccagccctgcgcgccggggca

SEQ ID NO: 199256 - DNA, 446 bp, Homo sapiens
  chr3:187456666-187457112
  hyper
aaggggtagggatgagaatctgggaagttaaaatgaagtaagtgcatttattggaaattaggagtcccgtggttccgggagctcaaaccgaatggtgtttttaccgctgcctaacgctagagagagccctccatcaaggtttgaaaccgtcaacccctttctcgcccctcccctccttcccattgacctagtttggccagagcctcccgatttggagaatgccttccgcccttcccccctcctctccagccagagaggctacagaggctgttggattattggtaatctaataactccaataacccgctgaaaaatccaaagggaaatctgaaagtgtaaagcactgtttagggacaaggacaaggaattttaataaggctgcaactgccgtagtgaaccccgcatcaggggccctgccgtggggctcccggtctcagcagtgtttc

SEQ ID NO: 199257 - DNA, 523 bp, Homo sapiens
  chr3:187457654-187458177
  hyper
tcagccaaggtccttattcacgttaatgaagatggaaggcactaactgtccttggaaagcgatgagtcaaacttgaccgcgcttcaaactcgttcccagattcgtttccagtccgaacagaggcgcgtttctccgacgcggcctccgacggctcccgcagtgggaggggccgaactcgatccccgccgacccgggcgggggcgacggcgctgtctccccctgcagagcgcgcctgctgccgctaggggccgccagcatgcggacgcgcgtttgccatcttaagtcacgagctcggagaaagaaaactttacggaggaactgttgtggcacaaattctggcctatccacatgacccccaccccctcacacacacacacccggtttctcgccaggctactatgcagaggatgttaggaaggggaagagagcgatttcagaatcgaggctcgccctgcaagtctttggtccaggccttaacccccctcttaacacgcaaacccccgagctccgagacccacaccct

SEQ ID NO: 199258 - DNA, 395 bp, Homo sapiens
  chr3:187458574-187458969
  hyper
tggtgtgttcgaagcgggttatttgtggtttttcttagtgcaaatagatgctcatcgctgagtgatgggcaagcagcgaggcctttctgattttcatccctcttgccaaaactttggaggttgtatgccatccccattggagggtgccctccttctgtcagtcctagcatctggtcagggtaccgccgcccgggaggtggaacggcgagcccaccgcccatggccgcgaactcgatctcagcccaccgctaggtggcaggccagcccgtccgagaatcgccgcgcggccgcagcttccacaccgatccctacccgcccctctttattttctgtctggtgggggcgagggttgggggtgtgattgcctctaaaagcaaagctagaaaacatttaat

SEQ ID NO: 199259 - DNA, 454 bp, Homo sapiens
  chr3:187459209-187459663
  hyper
atcttctcggaggaaaggggcgctgggggccgagtgctggatcccactcaggctcactgcgcctggcaaagcgggggagtggggagtcgggtatggtcttttggtgaagttgtgggtctcggagtggacatcgggagggttgggaggggccgttcctggtttccactggggcaaagagaaaccagccagttctgccaccacgctgcaccctcgctgtgctcgcggcggcagcggcggtcccacttgttgcgcagtgctggaaaccggcacgcgccattcgatgttgattcacagagggctacagaccagcctaccattgctccacgccatccacaaacctcctcaacacaccccctacacatacgtcctgccaccgccggcaaaactacagcatttccagccactatggtgttttacaccaaaacatccctcactatctcggtatcagacaggc

SEQ ID NO: 199260 - DNA, 367 bp, Homo sapiens
  chr3:187462445-187462812
  hyper
aaaagaccgaggccgatggaagagagccagcggggcgagcgagcgggcagcctccctttttgcctcccggagttacccagaaggacaggggaagggaaggaagaagaggcgaggaaaaagaggagggagggaagcggaggccaggagcgacggagcaaggaaagcagtttgcaagcgagaaaagagggaaaaaacacagccgcacgaatccagagagatcacaagccgtacgcaagcagcagcagaaagagcgagagcgcgagcgcgcgtcctctccgcggtctggggccagacagcccccagactagcccgaatcaccccccaagcactgtctcgtcctctctgctccggccgccccctaattccc

SEQ ID NO: 199261 - DNA, 207 bp, Homo sapiens
  chr3:189838066-189838273
  hyper
tgtagggcactctgcgctggaagtcgctgcgcacatcctcgctgacgcggtggcgggatgcggggcccccgaggcgctgggtctcacagctgcgataacagcgcgcccgccccaacaaggagcggaaaaggggcagctcagcgccggggccctcgccggggggcgggggcgggagcgggtggcgcgccgcgcagtggcgggcacagc

SEQ ID NO: 199262 - DNA, 73 bp, Homo sapiens
  chr3:190231324-190231397
  hyper
ggactgcggagatcgcatctacatcctgccgcgctctgtgccggcacagggtggttgcgaaaatcgtgcagtc

SEQ ID NO: 199263 - DNA, 70 bp, Homo sapiens
  chr3:192128140-192128210
  hyper
gatgagaaattctcagaggcagagcgagggaactgcagcttgggtctgctccgtccggtccctcccacaa

SEQ ID NO: 199264 - DNA, 72 bp, Homo sapiens
  chr3:192445501-192445573
  hyper
gtcacagggaagcgctgctaaaaataaacgccggaccggattttcctctgcaaactagaaaatggattggac

SEQ ID NO: 199265 - DNA, 546 bp, Homo sapiens
  chr3:192635622-192636168
  hyper
tcttcatgcaaaacgcgccgagtagcagctccgcggcagcgcggcacccacccccgccccccaccccgcccccctgggcctcctcccctcgcaggctcccaggctttggccccggctcgtgggcgggttggcgggcgggcgtctgggcgggcagtcccccgctccgtgcgctctgggcgtgcgagcttcgggaggagctggactgcagcgagggtgcgtgtgtggccccgacacccttttctccggccccacgcccgccccgatgctgcgcgtccctgccctgccctggccctctctggcagcggcaacggcggtcgtagagccaactggagcctcccccgggcgaggaaagtgaagtggaaacaatgtgaaattcaccagctctgaaatcaacaagctgccggctccggtgttacggagccagcaccagcgtctccatttaaagggacagcgcacccagtggaaaggaaaataaataaatgacagaggtctgcacgcatataccacttgccaatccgtacttgggaagacgcgcgaggtgtggat

SEQ ID NO: 199266 - DNA, 444 bp, Homo sapiens
  chr3:193721237-193721681
  hyper
agcgcacgccctgcctcggccctgcagctcccgggggaaatgaatcacacgccgggctgcaaagagcagcatgttctcctctccagaccaaggccgtaaataataatgcgttctttccctacgtggagaccctcaccttttgtcttgtgcattccgtaaaaagctcaggagtttccttccggctgcctggcctcccctccttgccccggggggttaggagtgctctgttctgacttaggcgtttccctagggtggagctcctgggcctgggttgggcctgggcgtgtggctccgtgatcgtaagtcccctctggctcttgcacaacagaccgaggctggagcagggcagggaggccgcagtggggcctgggttaggaggggggtggtttgacatctctagtggtaagtgatggtgagcccggttcccgccgtggtggccacgga

SEQ ID NO: 199267 - DNA, 131 bp, Homo sapiens
  chr3:193775945-193776076
  hyper
agaaaaaaagaaggaaagagcgctgaaggacccacccagggaggaggctgagccgcgctccctctagcctccccagaggtgcattcgttaggttcccgccccggccccagccccagccccagcatcagctc

SEQ ID NO: 199268 - DNA, 213 bp, Homo sapiens
  chr3:193852644-193852857
  hyper
cacacaccccccacacgcagcgcgcgccaatgagcccgggccaggcgcagggggcggggttttcccaggctcgagcacagcagctgctatttaccttcttggcttctcccggggaccaggaaccggcccccgctctccgccgcccgtcgccgccccccgcctccctgcccccggggcgcgcgcacacacactcactcacacacgcacgcacac

SEQ ID NO: 199269 - DNA, 484 bp, Homo sapiens
  chr3:193853887-193854371
  hyper
ttcgcgtgcagtcccagatatatatagaggccgccagggcctagggatcacacaggatccggagctggtgctgataacagcggaatcccccgtctacctctctccttggtcctggaacagcgctactgatcaccaagtagccacaaaatataataaaccctcagcacttgctcagtagttttgtgaaagtctcaagtaaaagagacacaaacaaaaaattctttttcgtgaagaactccaaaaataaaattctctagagataaaaaaaaaaaaaaaaggaaaatgccagctgatataatggagaaaaattcctcgtccccggtggctgctaccccagccagtgtcaacacgacaccggataaaccaaagacagcatctgagcacagaaaggtaagggcggtacctgtatctctttgcagcccctcaaaattaagtaggggttggggggcttctttctgtcttgaaaccccgggatggcagattc

SEQ ID NO: 199270 - DNA, 33 bp, Homo sapiens
  chr3:193858570-193858603
  hyper
tcaggcctggcctaattatacggcctcgggcac

SEQ ID NO: 199271 - DNA, 246 bp, Homo sapiens
  chr3:193858636-193858882
  hyper
ctgatcgctcggggagataaggcacgactccaaactgcgtccggatgcgggccgcgggccccggctgccgcgcgcattagcctctcaatggagcccttccggggccccggccccccgccgtctccagcagcatccggagcgggaaaggcgccgaactggaagggggtgggggtgctcttcggtcaacacgagagccctctccaagcgcagaagcgcgactccggaggctcgcccctcctcgcgccc

SEQ ID NO: 199272 - DNA, 282 bp, Homo sapiens; identical to SEQ ID NO: 3063
  chr3:193858949-193859231
  hyper

SEQ ID NO: 199273 - DNA, 115 bp, Homo sapiens
  chr3:194278585-194278700
  hyper
cacacctaaacatcccgggcgcttccagcaaatctcagtacatggtgagatgcaggagggaaatcacgcagctgagacctatggtactccaggaggttttcggtgacattagccc

SEQ ID NO: 199274 - DNA, 496 bp, Homo sapiens
  chr3:194353932-194354428
  hyper
cgcctcccccatggcgcggctgggcgcgcggcgcggggccggggacctgggcgcagcctccctcgccgcgggcaagccccgagcgccgccgccccgcgtgcccttctctgggttccgttccgccgcggcgcctccggccgagcgcaccgaccgcgggcagagaagggcgcgctcccgggcgcgggcggcggcggcgaaggcgccggggaaaagtttccgggaccgcgcgctccccacccctcgcgctattgtcgggggtcggcagggcggaggccgccccccagcggcgggagccgggagctgcgcgcgcacaaagactgcggcccccgccccccgccgacctcttcgcggtcacccacctccaacatcctggccggagcggggcgggcggctgggctcgcggacggccgagtccctgccggtcgctgtaaggcacggcgtcccttcctgcgtattgtccacatttcctgagccaacagcaattagttgcgctgct

SEQ ID NO: 199275 - DNA, 156 bp, Homo sapiens
  chr3:194407279-194407435
  hyper
attctgtgtgcgcgcgtgtctcccccgcaccaaccttttttgcacactcgaagctgaatattttcttttttagagaatttacccgcacctcctgcggggttcctaagcactctctctgctcccctccccccaactccctaccacagggccgctccc

SEQ ID NO: 199276 - DNA, 153 bp, Homo sapiens
  chr3:194407836-194407989
  hyper
caagatctggagcaagagcgaggcgggccgtcagggcaccaagatgaagctgacggtgagtgcgcagggtatccgcatggtgcacgccgaggagcgcgcgctgcgccgcccgggccacctctacctgctgcaccgcgtcacctactgcgtggc

SEQ ID NO: 199277 - DNA, 101 bp, Homo sapiens
  chr3:194408028-194408129
  hyper
gcacgagctgaagcacaaggccgtgatgctgcgctgccacgccgtgctggtgtccaagcccgaaaaggcgcaggccatggccctgctgctctaccagacgt

SEQ ID NO: 199278 - DNA, 219 bp, Homo sapiens
  chr3:194980292-194980511
  hyper
ctcccgccccaggtacaggcctgggaagccctcatctcaccgcgaggacagtcgcgtgcgacaggcctgtaaggtggcatccgagtccctcccgcaattaaggacgccgggctccaggccagcgccagggacagacccagcaccagggcggcccccggagccggcctctggcggcctcgggtcttttgccaaattccccaccggcgccaggataccgag

SEQ ID NO: 199279 - DNA, 253 bp, Homo sapiens
  chr3:195599433-195599686
  hyper
ggggatggagctcaggcctcaggaccaggctgtgtgccaccggccctcctccccaacagcccccgtgacccaccatgccccgtacaggcctgtttgcacacggccttacccacaactctctaggtgggtcaggcagctttccctatggtttgcaaataaggaggcacgctggaagctgctgcagcaggcaacatgacctgtccacggttaccagaaagatcccagcagacctgggacccaacgccagctttca

SEQ ID NO: 199280 - DNA, 832 bp, Homo sapiens
  chr3:195622064-195622896
  hyper
cgaaggggtctggggcccaggtatctggctatcccctagccttccccattacctgcggtccctcctcgcccccagccaggcgctggtaagcagatctctcccccatggagccccaaatcccagcggctgcggtcagggagagaagcagcgcccgcagcccccgccccgcagcggcaccggcagcgtcactgccctgcgtcctggggggccgggcctcgagcatcctccagaagtgcagggccgctactgcgtctcagcccccatagcctcatccgccatcggccggcggccgggtggtcgcgcccctcctcctgccggcctgcggccattccctcctgcagcccgtcccagctccgttcctcctctccggggcgcggctcccaccctctcccagtgagccagctgtgccagccccgggctgacccccaccgagagccggggctctgccttcgccggccgcggaaccgggctccactcagccctcagcccgcctccagggccccagagccaccaactggggccttggggattcacgagtcccccgtattcacggtaaggggccatccgagaagcccacagcagaggggcctccgtccgactccatctgagaccccctcctccgaggcatcccggggctgcagcccaccccgcccccagcctgccccggcggccactctgctcccagaacgccgggcgcccacctgccccgcagctcggccctgcgctcagccggctccgcgccgcctcccagcgcccgcctcccgcgcaggccacgcccccgccccgaggcccccgcggccggttccccgcgcgccactcccgcaacgccgca

SEQ ID NO: 199281 - DNA, 33 bp, Homo sapiens
  chr3:195636198-195636231
  hyper
gccctcctcctgcaccgccgggcccaccccgcc

SEQ ID NO: 199282 - DNA, 462 bp, Homo sapiens
  chr3:195808908-195809370
  hyper
ctcacactagcgcgtcctccgtcccgagccgccacccgatatcccgacgctctgaggggatggcggcccctaaccggcggtttatagcctggccccgcccccggcccccaggggggctgtgcgtcacttcctgaggcacgtacgctcgcgaggtgctctgacagatcgcccggggggcggggatgcgcgcgcagcgggcggggccctatgcggagggcgctgcgggcgaggcgaaggccaagggaaaaggcgccaaggcagcaggtgccccgaggagccgcgcgatgggcgcactggcctctgcctcggcgccttcctccaccctggtagcctggcagcctccgcctgaccttgaccaacctccagtccctgcagtgctaggtccaatctgttggcgttgacgcttaaatgttggatattgcactgcggcagtgccttgaaatgtacgtgcaggatggaatg

SEQ ID NO: 199283 - DNA, 677 bp, Homo sapiens
  chr3:197025626-197026303
  hyper
ttaagttactcttcgtcccttagtaataggcttggggggaggggtttcattacagaaggacatatgaaatagagacactggttaacttggcaagagtttgagggttatagtacaagatttttaagcctaactgattaattccgagtatggtatacttaagggtgggcagagaaggtttgttcattcattcgctcattcattcattcattcatttccctcaagcctgcgtccccgcccggtcagcatcgcaggtgttacccaaactctgacggtccctttaagaactcacccggagtcgcgccctccgaagctgagccgccctcggccagcgctgcaggtttgtttcgtgcgcacctccgggcggaattaccggccggctgggaccccgctcccggtctgagccacccaggttatagaaggggaatctcgggaagctttccaagtcactgcccacgtcttcgaacttcctcggggtgacgaggacctccctattaggaggtccagagagaatttgcccaaagttaccccgagtgagtgacagaactggaaacccggagatcctgtctttcaaaaccggaaggctcttcccagtaaacctgacggcctctgactgaggccgtatccattggctaccaaagggaaggccgaggaacctcgtattgtaaccttaacagcta

SEQ ID NO: 199284 - DNA, 96 bp, Homo sapiens
  chr3:197222652-197222748
  hyper
ctttcctaggctggccgggctcggctggggcatggagagtgtcagttgcatgatttttcttcacttacagggccccccgtccctttcctttttttt

SEQ ID NO: 199285 - DNA, 213 bp, Homo sapiens
  chr3:197476866-197477079
  hyper
gtgggagccacggcgacttcttcgccgccgccgaaggcccgcagcaatgaaaacctcgacaaaatagatatgtctttgggtgaggggccgagttggaccgagttggagtgcgggggagggcgcgggtggaagccggcggcgcggtttgtgggggcaggggcggtcggcagcagttgccggcggagttttctcgctggtgggcggacccgagcg

SEQ ID NO: 199286 - DNA, 47 bp, Homo sapiens
  chr3:197807181-197807228
  hyper
gctacctgtcctgggcatccacgtcccggcacctgcgcgccaggcgg

SEQ ID NO: 199287 - DNA, 210 bp, Homo sapiens
  chr4:331352-331562
  hyper
cacaaggttaaaaaatgacccctgggctgtgccaggccaagcacgaagagaaagccccgcctgaaactgcctggaggccccccggctgtcactctcgccacattccgtggagtatgtggttgcaacttctgtcactcaaggtctgatggcggggagattggagccgtatccaatcagcgcactggagtgaaaactgcccaatcaggcacg

SEQ ID NO: 199288 - DNA, 145 bp, Homo sapiens
  chr4:657712-657857
  hyper
ccccggcagacacgggggcgcagcggcggcacagcccgggggacgcagccccggattccgtccctgcccgccggccccgcgcaccccggatggggcctcgctcgggctccgcgcctccctgcagacgggcgcttggggcggggtc

SEQ ID NO: 199289 - DNA, 203 bp, Homo sapiens
  chr4:667540-667743
  hyper
agctgattccactatcggggtcacgctcggtggaggacacggtcctgcagcctcgcatgcgtcccaagcccccttccagagctggagttctccaaatagcacaggagctccacaggaaagccgagcagaccccgccccggccccgcccgcggtcactcactgtagcgcgtggctccgtaggccacaccgaggaacagggcgga

SEQ ID NO: 199290 - DNA, 209 bp, Homo sapiens
  chr4:819437-819646
  hyper
aagcgaggaggaggccgggcgcgggccgggaccgcgggggccgcttcagcaccgcggcagtggacagcgcccgccccggaccccgcgcgcgcggagcccgggagagaaacgggggctgcggggagaagccggggtcggggggagaaacgggggccggagggagaggccggagccggggggagaagccggagccggggaggagagacccg

SEQ ID NO: 199291 - DNA, 396 bp, Homo sapiens
  chr4:1004393-1004789
  hyper
tgggatggtgactccgcggagtcgagggtgtgaggcgggatgtgggcaggccgtgaggtttgtgttgcaagactgggaggcaggatgaggggaggccatggggcggctggaggtgcggcctgggagccctgcgtgctgggccctgggcagggacggcaggcgaggcgtgtggaggaagagccgcgaagagctgggcgctgtcttctccacgcctccgtttcttcatctgctcctggggccgcctgcccggtagcggagattgaatcgcatgttgacgtctattacgatgattaatgttcttgtcattcccgtcactagcaggtgagaggctgggaggcctcaggtgggaacatacctttggccaaaggcaccaggtaacccgaacgccccggggag

SEQ ID NO: 199292 - DNA, 301 bp, Homo sapiens
  chr4:1049489-1049790
  hyper
ctgctgttaactcggttaactcgagtgagataacaaagttctttgacactttttaggtaaatgcaaactaaaagattagaactaaccccataagcctcttttccaaccctgtgtggtcccggctggcgggagagacctgggctctgagactctctgggagccacgtgcacgggggcgtctcctgcaggagaccccaccctcctgacggatgaggaggctccacccacgcaggccgcatctgcagggtgagctcaggcccggaattcatctctggacctgacggagattcacccgctgaagc

SEQ ID NO: 199293 - DNA, 140 bp, Homo sapiens
  chr4:1243421-1243561
  hyper
cgagccctgatttaccgtccgagagccggcggcacatgggaccccgagaggagaagcgcgcctgccccagtgcgtccccaggcgggggagccccgactcctggagggaccgcgtcctgcccggcccgggaagttcagggc

SEQ ID NO: 199294 - DNA, 218 bp, Homo sapiens
  chr4:1332660-1332878
  hyper
tagcttcgttcgaaatggatgaaggggtgggaaggacaggcgaggtggccccgggatttctttggcaggtgtgccttcgggaaggaactttgcctgagaggatgagtcattccctggtggttcattgtggggattttccatggaaatccgtgtgtacgttgtagtcgcttgccttaatgcattcccggttttatttttcagtctctgctttctatccg

SEQ ID NO: 199295 - DNA, 268 bp, Homo sapiens
  chr4:1397780-1398048
  hyper
ggcctgtccttccctcccgccgcccgcgtctcctctcggtcccttgcttgtttctttctatggagagggtccccctcgccccgcgctgcccgttctcgcggcgccgggcgtttttgcctgagcggggctggacgggtgctgcgggccgggcccggctgcggagatcacagcggagtggaagctctgatcgatccgcagggctgatacacacttaattaaactcattttgtgtagtgtacaaactagttaaggccatttaatttatttc

SEQ ID NO: 199296 - DNA, 229 bp, Homo sapiens
  chr4:1794972-1795201
  hyper
cgcggaccgtcccccactggctgcggcgcgcggggcagcccaggctcagtgcgcggtggcggcggcgtcgcgggcagctggcgccgcgcggtcctgctctgccggtcgcacggacgcaccggcgggccgccggccggagggacggggcgggagctgggcccgcggacagcgagccggagcgggagccgcgcgtagcgagccgggctccggcgctcgccaggtccgtgct

SEQ ID NO: 199297 - DNA, 688 bp, Homo sapiens
  chr4:1795801-1796489
  hyper
ccggcccgtgcgggcagaggcgttggggacgggaaccggccccgggtcggaggggccgccgggtgtgagtgacgccccggggttagagcccggattccgctgcctccttgccggagagcgcggccagagctagcgcggcgacttgtggtgcgcccggagccgcagctaccctccaagtgcgaggccaccacggggagccaggctgggggttggcgtccgcagccccgatcccctgcgactccctagccctggcctgtcgggagggcgcggggggccccatttccacgattcccgctgttgttattcgggttctgcgcagacggaaagttcccattgttggcgtccccctcccccgggccccagtttgtggccagcttcggccaaggcgagagaccggacttctaagggtgggtgtgcgcgtcagcgaagcccggcccctgcccgcccgaagaggcagcagcctccagcgtccccgctgccgaccctgcccctgcctgggggccgagggcgcttccccgtgggtgcgcgccgagctccaggcaagcgaggggcgcgtgtcccagcgtcgcgggccctagactgggctggcggtccaggtcccgcgggacgtcgagggtctgaagggaggtcccaaggggcgaggggaggggaaggggcgcccggccggacctgcacacgcgccgcggtt

SEQ ID NO: 199298 - DNA, 523 bp, Homo sapiens
  chr4:1796598-1797121
  hyper
aggccttggcccggtgagctcgcgccccacccgggccgaggcccgaacagccgcttctttgtacctcgacgcggccacagaccgcgcattgatggcggctcggcggctcgcggggaggtgtgagcgaccgcgggcgcggcgggccggggagggcgcctggagggccgaggcagatggcgtccgccccgcccgcgcccccgcgcccctttctccgtcggcggctgcagcctcccggaacaatgtcattttttttatgaatgaaagtggcccggcgcttgaatgtgcgtgtcattcagcggcgtgacaggggccgtcgggaggtcagcgcgcgcttttagcgtctgctcgggcggccccgcttccaggggtgccggaggggcggccgcggggggagcttggctttcgcattctcattcagataaagatattactccctacggcccgggaatgtcagccagccccggggaagggcggcggccaggctgcggagcctctcctggaccccctgcgggcgcgcggggcc

SEQ ID NO: 199299 - DNA, 960 bp, Homo sapiens
  chr4:2043448-2044408
  hyper
agctccagccacagatttcccacttcctcagcttttctcccgccggccttgcgctctggaggtctcgccccggcgccgcctcctccaggcagtcctctagactgcatccgccatgggcctggacgctgctcccgggggcagcccccggccagggccaggcacacccgattcctggagcgtcctaggttcctctaaacccgcggccagcgcagtctcgggtttccatgacgacgacgtcggatggggaacccgggcggggtcgggtcggagcgcatgcgcgttgcgcgccggacgcggaacgtctgccggtgtccccgcgctgctggtcccggggtccctgaaccgcggtaagggcggtggtgcgggcgtccgaatgggcgttttctagatacggggcgcggactagaggctcgctgggcccggagaccggcggactggagtcggggaaccggaggtggggagggggctcccgggcccggggtgggtgggtccagggctcccaggcctggggcttggacaagggtcgtggggcccgcgggaggggacgggggctcaccggcccggggcgggcggggcgggcgccgctgacccctcgctggcttcagggcggccccgctccctctgctggccatggcccccccgcccgcgtgccggtccccgatgtcaccgccgccgccgccgctgctgctgctgctgctgagtctggcgctgctgggcgcccgggcccgcgccgagcccgccgggagtgccgtccccgcgcagagtaggtgccgggggccgggttccggggagcggggcggggctggcgacaggggcgtgcggggccggggctctgcggggaggaccgcgcctcgcctttgttcccgggagcgggtcctccccttcgcgggagatggtggcttggggagtggggacgtgcgctctttggcactgggtggacgggcccagagtgcgtggggg

SEQ ID NO: 199300 - DNA, 119 bp, Homo sapiens
  chr4:2061357-2061476
  hyper
cccgctgcccgccgcgcccgggccggccgccgcgccccccgcgcccccacctgccccggtggctcagcctcacggcggggcggggggcgcggggccgccgggggggcgcggcgtgtgca

SEQ ID NO: 199301 - DNA, 84 bp, Homo sapiens
  chr4:2418904-2418988
  hyper
ccgcccttggtcgccgcggtgaccccacccgagccgtgacctcccccaagatctcagggcccgggcctccccgctgcgccggcc

SEQ ID NO: 199302 - DNA, 852 bp, Homo sapiens
  chr4:2419032-2419884
  hyper
gccgggatcctgaacaccgccgcgccttcatcccgcgccgagcgcgcccggccctgctccggctgcagcgggcacgagccccaggcgggcggcggggacgcagcgcccgcagtgcgactggcgcagccgctgaggcacggggcgcgccgcccggaccccgaccccgcggcgctaggagaggcgcgggcgccggctggagagccgcacctcccgccccgccgaggctgctggccacgggcgcgctcgccccaagggccgggcggaggacctgtcccggattccagaggacgtgggtggggaagggacaaggatagggacaagggaggggacgcgaactgggccgaggtgtgggtcagtcctggttcgggaagggaggccgttggcagggccatcaggatcctctctggacatggaaggacgggtctgccctggacccagggattgggaaatgtgggttctctcagaacctggggaagtggggagagggtctgttctggagtgcggagggagatctattccgggcccaggacaatgggggtgggggcaggacgggaatgagggggcattcctggtgcagggaggggagacggagaagtagtagggggtctgctccgggcccgcgggctggggaccacgaagtgtaggagggcaccgtccaggaccgggatgaggagggagaggggcccgttgtggccctggatagagggggagggaaagtgcgccccggcccgagaggaggagcaggagggtcagtcctggacccgggcttaggaagccgggagggaggttcggatccgcctcagagacagggcgatgaagatctgtccaagtcttggagtggagggaaggatg

SEQ ID NO: 199303 - DNA, 136 bp, Homo sapiens
  chr4:2965827-2965963
  hyper
ctgctgctgaaagcgcgtcaaggtgggtgcgcggcaggcgcccccgaccccccccccagagaaccccgaatcccggggaaccctggcccccctgaaggaacccgacatccccggagaaccccgatttccctggaga

SEQ ID NO: 199304 - DNA, 154 bp, Homo sapiens
  chr4:3445267-3445421
  hyper
ctctgggattaaccccggtgggtgccacttagggccagagcctctcccaggtgggacctgcgtctcatggtggctgcgcggccatcgctggggccaaggcgccgcctggtggtgaggccgggccctgcagccacacaggcgtgccccaggcagg

SEQ ID NO: 199305 - DNA, 74 bp, Homo sapiens
  chr4:4250037-4250111
  hyper
gctgtttagttagcgagcagctagggtggagtcggcctcaaaggttccgctctcatgtcggcaagtgtgatttg

SEQ ID NO: 199306 - DNA, 161 bp, Homo sapiens
  chr4:4389011-4389172
  hyper
cgggtcgcccgggtgcggcggccccaggaccggggaccgggtctggaggtgctgggcaggggcggcgcccccttccctggccgcggtgcgcccttgcgcccggcgcttgggtcctgcgagatgagggtctagaaatacacagcaccacccgacccccgcat

SEQ ID NO: 199307 - DNA, 146 bp, Homo sapiens
  chr4:4854523-4854669
  hyper
ctctctctagctcagcccggcctgctgcggcctggggccactgctcctgggtcctcaggactgcctgggggaaggtagtgcattgtgcagcgcgcggtccagaagtgaaaagggaggcgcggagataagctgccggcggaagttcc

SEQ ID NO: 199308 - DNA, 198 bp, Homo sapiens
  chr4:4856359-4856557
  hyper
tacaagtcagttatcttcctcgcattccctcccaccccctgccggaactgagatggggcccacggcgggctgcgcagggcagagctggaggggagaagggccagccttcctccgccggggtgggcagagccagaatggaagacgtttggtcgaccctggagcctcggggtctgcctgacatctccgggcttaaataac

SEQ ID NO: 199309 - DNA, 769 bp, Homo sapiens
  chr4:4856593-4857362
  hyper
cgttacgcctgattggtctaattgctttgaaatgggatatattatctataattatagagctctaggagagccggccggcctctcctttcatcttcccaagtgcaccctcacgtcgcgatcacattaatttgggccatttgaaagcgaggggggaggctggggctctcttctcctgctgatcctggtcctgctcacccccttccaaatttaaagacacaaggaagcccgggcctgggacggtagggagagcagacagtgggggaagggggggggggtgggggcagaagccgggagtggggcttgtcaatttcgccttggcgccgggtgaaatccactccacgcggactgtaccaccgcacaagttgcacccactttgaggaggatttagcaagaaggaggaaacattttcacaaagagtttgtattttgacttcgctgttaaaaggaggtaccaaaactcctgaaaagcgcaagttctgcctaggtctccggaaagcagaacgctgtttttctccaggtctgtgtcgtggatcttcaaccagtagctgaagactccctggagttctcagggctcggagtttttctctggaacgctgtgaagtcctcccgaagttagtgactcccagtttgctgaacctgactcccagcccctcacttctaggcgacagaggccaaaagagtggagatggctgggtcgggaggcccccttcgcagattgggagaccccgtgacagtgctttctgtctgcccgtcaacccccaccccctccc

SEQ ID NO: 199310 - DNA, 153 bp, Homo sapiens
  chr4:4857407-4857560
  hyper
cgattggtgaattcccaccaaaataaatcgttccgggtaatcggttttcatagcacattcattctattaaagaggactgtttggggctcgctaattgccgggggatcccactgagctgcacatttttaaaaaatgcacgcgggattcctgggc

SEQ ID NO: 199311 - DNA, 198 bp, Homo sapiens
  chr4:4857909-4858107
  hyper
gggcggggagtgctttaggatgcctgaaaatgaggggagatggagcgagaggggaggggagagaagtctagaggatggaagcggagcgccagtccccgagctttatctgctggggccagccctgcccttgccaggcatgaattactgcccggctttctcggctgcagcggcagcgcagagaaatgccgggggtacaaa

SEQ ID NO: 199312 - DNA, 139 bp, Homo sapiens
  chr4:4858130-4858269
  hyper
cgagataacaggctcagccccagggcctgcctgctcgctgaacccctgggccgggaaatcggtaaagtcctagacaaaaaataactcagagaagtctccctctcactgcccctgtaactcgtggctttcctcccgcggg

SEQ ID NO: 199313 - DNA, 360 bp, Homo sapiens
  chr4:4858329-4858689
  hyper
ttgagactgccggcacctttctttctctcgcaatccaggggcagagcaatgggaaagccccgcgcttttctgacacggaattgagtctgaacccccttctctgccgatgcactcttctcgcctagcaacgtttacacgcggttaacctgccgcgcggggcgacagcagacacgaacccaggccgaacctataaagaagacaccgtggcgttcagacccggctcgggaagccgaggggctggctgcggggccggtgctgcggggccaggcgatttgctccccggaggcaggggcgcgacttcaagggcccgtgcgccgggtgcagcctttgatccggccgccgctggcgccttaaaacaac

SEQ ID NO: 199314 - DNA, 129 bp, Homo sapiens
  chr4:4867886-4868015
  hyper
aacagggtgtgcacacagaaggtgctcgataattgtttgctagatcggagcggcacgctggtgtggggagaacacccagagccacagtcagccgggtccggccggaaatcgcggctgcgcttccggcac

SEQ ID NO: 199315 - DNA, 129 bp, Homo sapiens
  chr4:4868255-4868384
  hyper
cctaggagatttttatagcgcaaaggactgcagctcagagaggtgacatggttttcccaaggttacacagttaatgaaggacatagcaggaattccaacacggattccactcgaggatccggtttttcc

SEQ ID NO: 199316 - DNA, 73 bp, Homo sapiens
  chr4:4868464-4868537
  hyper
cggagcgcagaatccgggaactagttctgaatttaactccttgcgctctaaccacgaacaggcactgtccctt

SEQ ID NO: 199317 - DNA, 466 bp, Homo sapiens
  chr4:4870849-4871315
  hyper
ggctagcgcaccagcggggtgcaataaagatcggcctttgtgtgtgtgtggtgggggggaggagtggggggtaggtagttaaaagcgaattcaaaagcccgccctcaatttggggcctgattaggggcagatggaaggaagggtccccgaccctacgtggcagcctttgttgcacattttacaggcgaggagacagtggtgggatccaagcccgctgctgtgggacctcaggagttgctttctccttcaccagctgggtgcagattttgatgatgcacagggcgcggcctgacagtgcgtgtgtgcgcccaccgggcgctgctgccagagtttgcggggttcagggagcgggaggagggtctgagagaccccaaagcctcccctttgcgagaccactccttgcttcccccgcctggcgctttccataaccctctgcggcgccctgcctctttgttgccccttagat

SEQ ID NO: 199318 - DNA, 370 bp, Homo sapiens
  chr4:4871384-4871754
  hyper
aaagaaaaccccgttccctctctgatgactctcgtggcacccgggtggcagcaggggcttctccaccggagaaacagccacatcgactaaaagggaatgtgtgaggcaggctgagaccttgggtggggccccccacctctcgagttttccaagactcaggttccatctctgttaaatggacacaatcctgacccctggcaggtcctgaaagagtagaagggaaggggttctccacgggctgtaccatcacttgcgtccccagttcggtgatggtggtgaggtcatcacagttgttccgcctgcggtgactgcagctgacatgtatgcgcgcttgcctatggatcacaacccttagaatctaagttttcca

SEQ ID NO: 199319 - DNA, 242 bp, Homo sapiens
  chr4:4872215-4872457
  hyper
ggagagtgttcttgctcttggaaagtgtcagaaagtgcctgtgcgccactctggacccggaattaagacaccttcacctcttttaatcttctccctatgacgcaggcactcttattaatctgtttcaagtgagaaaaccgaggcacagagagcgtatgtgacttgccaaatgtcacataggtgtctaagacccggcctgtatttcccaccaacctctgccgctgcttctggcatgaatgcag

SEQ ID NO: 199320 - DNA, 71 bp, Homo sapiens
  chr4:4872706-4872777
  hyper
gttcgtgatttggccgagatccggcagaaaggctggacagacccggcatccccaattttagtccagcttcc

SEQ ID NO: 199321 - DNA, 230 bp, Homo sapiens
  chr4:4872909-4873139
  hyper
gcggagcggtcaaggcaggcctctcggcggaggcgacttaagggttgagacttgaagggtgaggtggagccgtagtttgaagaaggaatctcccattgagaggggtcggcaaatgcaaaagccccaaggagagctgaggccggcgcggctggaaccggccttaggcgagtttggagtaggcttagcgttttgtgatgctctggcggccacttggaggagaaagatggggg

SEQ ID NO: 199322 - DNA, 349 bp, Homo sapiens
  chr4:4873528-4873877
  hyper
aggtgcgtgccagctgtaggagcctgctccgcctgccctcctggaacgcagtcatcctccaggccctgcccgcgcccatttcgcggcccaggaaactgaggtgtggaagcctgtgaagggagggactgctacctatcgattcgtaccggatccagaccctgtgctaaacgctcggcgtgcatggtgccccttaatcctcacaaaagtcgagcgacttagggaggaatattatcccattgcacacacgagcacactgctgcgcagaggcacgaaggtacctgcccagggtctcagctagtcccatttccaacccaggaaggcaagggagcaacccgggaagcaaaatgta

SEQ ID NO: 199323 - DNA, 70 bp, Homo sapiens
  chr4:5052365-5052435
  hyper
ttccctgcagtcccggagagctgggcccgcaggactgcaaggcagggggacctgcctgtccctcagggag

SEQ ID NO: 199324 - DNA, 289 bp, Homo sapiens
  chr4:5052556-5052845
  hyper
accctcatgctagcctcgcccctaaatcggacgccgatgccgcccaattttgggggaatcccgagactcatgcccagccattcccagggagaatggtttggggcaaactatggctgtctggggcctcagtttccccatgtacaatgaaggggtcagattagtatctaatcttaaggggtcagaaagtaaacagatactttcattcattaaacactgagaaaaaccttaagaggaacagcgtcggttggagagccagcagacactccactgcccatcccaatatgaatgg

SEQ ID NO: 199325 - DNA, 100 bp, Homo sapiens
  chr4:5712784-5712884
  hyper
aaagttaaaggggtggaaaccgggcccccctccggaagggtccggggctgggaggcgcgtctgtctctgggcatgctcagtgcaggggcagggctggggc

SEQ ID NO: 199326 - DNA, 78 bp, Homo sapiens; identical to SEQ ID NO: 40248
  chr4:5713393-5713471
  hyper

SEQ ID NO: 199327 - DNA, 166 bp, Homo sapiens
  chr4:5890606-5890772
  hyper
ggaacgttcttgtccctccaggatcgcgcccaaggaccgctcccctcttgcctctccttccatagcctccgtttatccttcccgagtgcctctccctgaatgcaccaagcactttttccatctcggaccccaagcctttattcacgctgtaccctctccctgaata

SEQ ID NO: 199328 - DNA, 76 bp, Homo sapiens
  chr4:5891819-5891895
  hyper
ccctgtcaatgaccggaaattgcagatggggacactgtccctccccaactcctacactcccttccttggagttgtt

SEQ ID NO: 199329 - DNA, 206 bp, Homo sapiens
  chr4:6201673-6201879
  hyper
ggggctgggggcgggaccgggagggggtgttgggggaagcgacgcagcggctgggagattttgcaagggggtctgaagaggagtgggggatgggtatggaagggtgggggaccactgaggtgggatgcgagagtggaagggggacccagagggggcgcgatggccggaggagggggagatggacgatggggcggggcggcaccggt

SEQ ID NO: 199330 - DNA, 73 bp, Homo sapiens
  chr4:6202658-6202731
  hyper
gcttgcaggtaaagcggggctggggccgtcctggccgtcagtggtcaggaagacgcagcgaccccggagatcc

SEQ ID NO: 199331 - DNA, 780 bp, Homo sapiens
  chr4:6271380-6272160
  hyper
cgccttctggcccctcgggcccaaccacgcagggggagtgccgggccgcagctaggcgaggcgcaccgtgattggcggagatgtggagtgattggcggctacaccggccactcagcaggccgagctggcgccgcatccggggggccgcgtctggagtggagggaggccgaaggccccgcccctgccccgccccctcgtgcagaaggccgcgctagccggctcttcagcagcgagtgcagattgctcccccgcggccgcagatctcccgtttgcgccgcgttcagctgctcccgaacaacttttctgccggcccagaggccccagggcgtcgcagcgccgcgtgcggcccactcacgggccggtgagtacttcggcgctggggcagtggcgcggtggctgtgggcagcgcgcaggaggcgggcaagagccctgaggcactgtcctcttcgggcctcagtttccccttccgagctgatgggtggctggccccaaagtcccgacaaggtccccgaagttggagggccgggggtcccgcccgctctgcaacgcgcaaggcgacccctgttccgggcccgaacgggtcacccggggggcgcgccccggtcccccgcgcgctgtcgcctggagccccgccgcgggcgggacagcaggcccgagaggcggagcggccggcgggcaggccccctccccgcgccccgcgccatcccccccgagttgccccgtcatgcccctcccccgcggtcccgggacccacggccgccctcggtgcccgcccggccg

SEQ ID NO: 199332 - DNA, 223 bp, Homo sapiens
  chr4:7069843-7070066
  hyper
gcctcagccaatccgtaatcgcttttcctgttatggacaggcaatagtcaccaataattgtgggtcacggaagagcatctttccccaccccccggtgggcggggcctgaggcgtaccggaggccctgaagaggtgaaaggtgaagtgagcattgggaggagcctcctgtgggcgtggcgatgccgggaggagccaatgaggaggcagcgtgagggggcggggc

SEQ ID NO: 199333 - DNA, 164 bp, Homo sapiens
  chr4:7194882-7195046
  hyper
ccctacccgggacaccgcgggacacccgggcgggaccgccacggcccccaccccagatccccactatggtcatcaggggcgggttcttggcgacttgggcacttgggtcacctcggccgcgcccctactggcctctggtcactggttacttggggagaggtcct

SEQ ID NO: 199334 - DNA, 682 bp, Homo sapiens
  chr4:7940410-7941092
  hyper
cttccactctccaggcgctgagagctacaaagttcaatctggctttccagattttttttttcttcccattactaacggaagaaatcaagaagctccgggcagtagggccctgctccctccaatcagagcccagcccggggccagagcaggaagcgcggcggtgggacgcgcggtgacagccccgcgccccccggggcccgccggccaggggagaggacggtgcggccgctgcgcgacagctccgggcccgcgcctctcgcttccacccgccgggcaggtgagaggataaatcacggggcggggcagtgcgcccccaccaaccgcgccccccgcgcacggacccccattacactcgcgtcccaggcggggtcgacccagacgagccacggggcggcgcagagccccactcgcagggcggccgggacccacgcgcgtgggtccacgcaacaacctataggtgacaaaacactcaggaagccgtcatgcggggccaagaaagagcccccatccagagtcacggaccccctcgtccgagggtccgcgcagtcccctcggtaagtcggacgaagcagtctcgctacgggggagggcggcggagcctcccactcttggtgacccggaccccgccccacgagtgggtcttcgcagggccccctctgacgcacacggggaccagccacgc

SEQ ID NO: 199335 - DNA, 32 bp, Homo sapiens
  chr4:7941129-7941161
  hyper
cgcagtcccctccgggcagacgcggggagctg

SEQ ID NO: 199336 - DNA, 522 bp, Homo sapiens
  chr4:7941191-7941713
  hyper
ggacgaccgggacccccgcgcgggcccacgcggcgtcgcagcaggcgcggagcccccggtaccacccgaggccgagacaaagcccaggcgcacggaccccggaccctgcggagccccgctcggagcttccacgcccggggcagagacccccgccgggtccggagaccctgccgccagtcgcgccgtctcacctcaggccgccacctcgcagcgctcgctcctcgccgcggcgcctgggccgactggagcgcagctgaacagccgacagagccgcagccgccttaacaatggagccccggggcggggccgccgccgccgcctcagcccgtgtaccccgctcgagatccggctcggctcgcggagctgcagccggcgtggggctgcggccgggacagacaccacgcaggcgcacacggccccgcccgccgcccgccgtcccgcccccagcggagccgggcgcccagggcccgccccccggccaatgggaagcgagctgcgcggagtgggcggggcctgagggaa

SEQ ID NO: 199337 - DNA, 626 bp, Homo sapiens
  chr4:8159729-8160355
  hyper
gcggctgggctccagcgctgtgggatttttccagccccgcacagaggctgtcagatcccggagggtgggtgcggcgggaaaggcaggggtgcgacgcgcaggggcgaggggctggagacgcgcagagatcgggtcggggccgggtctgacacatgcgggctccgggtccccagatctgctgcggagagtcctgggcgccgagggtcggcctgacgcccccaacccaggcgctgccagagcggcgcaagggcggcgcccccagctgcaaagccccgcctatcatctcacctctgcgtgcctaggtctgctggggccccggcccttcgcccggaccccaggcccccgcgcggaccctgaccgctttctgcagcctggaacaacccggacccccgtgagaagcaaagaaggggcgccttccagacatcctggcgcagccacgccggccggcgcgctgggaaaggatccccggcccgcgccactgagctacgcgctccgggcgcagggcagagggctgcgctctggcccctcggggctgcaaaatcctggagcaaaagttgggtggagccgctgggtgattttccccggcgttgcaggtgcagcctccgaatgccacccagcccttgcgg

SEQ ID NO: 199338 - DNA, 111 bp, Homo sapiens
  chr4:8160429-8160540
  hyper
cggagtcggggcggcccggcgctgcgacagccagaccctcgggcccgcaggtgccgcgcccgcgctatcctccgcccgcccgccggctccgcgcccgctccttgcgcacac

SEQ ID NO: 199339 - DNA, 88 bp, Homo sapiens
  chr4:8201024-8201112
  hyper
ggagacagccccgtggggccagccagcgctgggccaggagcggccacctggttcctgcgtgctacggccctgtgggcctgggagctgc

SEQ ID NO: 199340 - DNA, 42 bp, Homo sapiens
  chr4:8594310-8594352
  hyper
cccttggacggggcggggcactccgcccggggcaggcagggg

SEQ ID NO: 199341 - DNA, 131 bp, Homo sapiens
  chr4:8609443-8609574
  hyper
gttcctttgagctccgccccgcgcctggcggggtccccagtgcttcccaccgcagaggggtgcgtttccgggaggcgccggcagagggcagtgctgcagcgcgcatgctgcccgcccgtcctgcttcccgg

SEQ ID NO: 199342 - DNA, 83 bp, Homo sapiens
  chr4:8863155-8863238
  hyper
ggccggtcagaagtagggagaatcacgctcgggaaaggggggtagggaacgacgggggagcctcggtgaccagggcagatgca

SEQ ID NO: 199343 - DNA, 92 bp, Homo sapiens
  chr4:8894036-8894128
  hyper
aactacactcacagtagctcctccactgggtctccgcgtcctcgctggcctaactccgcaaacacgccctccccggacgcaggctgggtttg

SEQ ID NO: 199344 - DNA, 310 bp, Homo sapiens
  chr4:8894331-8894641
  hyper
cgggttcccgagagcggcggggggtccaaaggcgcgggcaccgatggcgggcggggccctcctgggtcctctgcccgccgccacccctcggcccaccccgcccgcagcatctgcgcgttttaagccggataagacgcttccttccctgtttgtctgggtttctttctcggttgctcaaggctctgatgtgacctctccaagaaaggacaccaatggccgcgcccccgccccacgacgctgcggacagcaagccgactccccccacccggccgcctgccccctccccgcgtcggtgcgcgccttggctccg

SEQ ID NO: 199345 - DNA, 105 bp, Homo sapiens
  chr4:9534314-9534419
  hyper
ggaggctcagtggccggccccgggttgaagttggtaactgagcggcaactccggcgggcgcggagttacagctcgtgacggcctccgagacgccagctgcccctt

SEQ ID NO: 199346 - DNA, 209 bp, Homo sapiens
  chr4:9684933-9685142
  hyper
atccctcaagtggcccggaacactgtgattactgcacaccaatcccacgcccataaacctggtttatgacgttttgtaacagggtatcttgacagtagcatgaggacatttaacgagacaagaacattccccactgaccagccagatggtttgagggaacaggatgctgtgctcagtttaatattctgctgaaccgaccattagccaga

SEQ ID NO: 199347 - DNA, 58 bp, Homo sapiens
  chr4:10089890-10089948
  hyper
aggccgggaaacacgctcatactcactgcgtaaatcccaccgtcgtgggccttgcttc

SEQ ID NO: 199348 - DNA, 236 bp, Homo sapiens
  chr4:10090133-10090369
  hyper
tttactgggctctgacgacgagtctgcagatgtggggagggcgatgtctaagttctgcatgtcaggactagcattaggcagcctgcggctctgagcagtcacgggagcaggcagacaagccattccccaccccaaaacccatcccagttcttacctggccgtcagcactggctgtggcaaatctgttcccatcaggagagaatcgcacacagttgacaaagcggctgtggtcctgc

SEQ ID NO: 199349 - DNA, 41 bp, Homo sapiens
  chr4:10458331-10458372
  hyper
cgtcccgctcgccgcgagggaaggccggggttcttccaacc

SEQ ID NO: 199350 - DNA, 39 bp, Homo sapiens
  chr4:10459327-10459366
  hyper
gggtcccgcggagggcggccttggcgcctgcctccctgg

SEQ ID NO: 199351 - DNA, 257 bp, Homo sapiens
  chr4:11429249-11429506
  hyper
tgcaaaggaggaggaagagggaggatgcaacccttggcccaagagagcgccctgagtgtgcgaggaatcgctggctcccaggggagggaaagagatggaagacctatagcgcctataactgcagagttatagacctataactgcagagcccagcacaccccatcccgcgccggcacccggctttggctccagcttcttcttcccatcatccgcctacgttctgggtctgtcctccgcttcctgggacaggctggggc

SEQ ID NO: 199352 - DNA, 320 bp, Homo sapiens
  chr4:11430339-11430659
  hyper
ccagcccgtccggcgccctaaataggctcctaggctgggccatgggcagcactgccgagcacccgcggcgggtagagcaagtttctggatggcccggggcaggcgggcggggagaaggcgcaggcacccactgagacccggctgtcgtggcggcgactcctggctgccagggcgcagaggaccttgcaggcgggcgttttggtgctcaatcccgaggagggggaggagcgggaggaggagcgggagcaaaaggaggggacggaggaggccgggcccggagggagagcgcgttgggcagaggaggatcgcgagcgcccact

SEQ ID NO: 199353 - DNA, 569 bp, Homo sapiens
  chr4:11430707-11431276
  hyper
ctggtgctccgctctgcgctcagctgctccgcacagccccgcctggcacgcagctccagcggctggtcgggtagtagtcggtcccgcccacccggtgcggtggcccctggggtttcagtccaaggggagggaccagcgctccaagaaggtgaggctgctgggatgggtgactccgccgtcactgcaaacacgggacgtcccgtctactcccttacgcctgcttggtctgagcccgagtctacctcttctctaagtcgccagctcggcacttgtacccgggacctgtgctcctcccacgtgagtctgcaccatgcgtattcccttcctggcaggtgacccaccttaggcgctggcgctccttccgccccccgggaagcaggaggtgccatcctctccaattcgctctgcagccggactgggaccggagcggcggcctgggccagaatccgcgtgaggagccggcttcaaagagcgccctgtcgccattgaacactccttttcctttggtttagcgtcggagagcggacgccaatttgccaggagagcgcggaaaattcagcttttttttt

SEQ ID NO: 199354 - DNA, 44 bp, Homo sapiens
  chr4:13550560-13550604
  hyper
aaaccagattgtgcgcgcggttctgagacgtagccaagcgacct

SEQ ID NO: 199355 - DNA, 33 bp, Homo sapiens
  chr4:13655883-13655916
  hyper
ttcctcagtagagggcgccggaggacaccgcag

SEQ ID NO: 199356 - DNA, 204 bp, Homo sapiens
  chr4:16084503-16084707
  hyper
gtctgtccacgctcctctttgttgtccggtcggcgtgttctggcagggtgcgccttgagcaccccagttctccatctagcgatagccgcgggtccccgcgcatgcaagcagaagggccgtggagcgagaggctgggaaggtgcttcaagccaggggtgcatgctttctcccacggacgcggggagatggcctcgctttgtaccc

SEQ ID NO: 199357 - DNA, 140 bp, Homo sapiens
  chr4:16228990-16229130
  hyper
cgagcgtggtgtcgagaccaccaccagctggggcggtgggagcgaaggtgccccaggctcggggaaggtggaaaccttttccccgctccccaagtgattgttgcgcgctccggtgaggggacagtggtacctcgatttcc

SEQ ID NO: 199358 - DNA, 120 bp, Homo sapiens
  chr4:16229202-16229322
  hyper
cgaacactaagcttcctggaaacttccctagacctaaacttgagaaccgcatataaatgggccttgagggttctgtcgtcagtagcgggttacgtgattgcaaacgagcaagtttaaaac

SEQ ID NO: 199359 - DNA, 173 bp, Homo sapiens
  chr4:17578690-17578863
  hyper
cgccccgcctccgccccacccatcgtgtgacgtcaccatatcggtcccgcccctctacttcgcgttgctcccgggactgtcaaccgcgtccggaagccccgccttttcgcccccgcccgcatgcgcgggcgcacacgaatgcgggcgcacacgaatgcgggcgcacacgaatg

SEQ ID NO: 199360 - DNA, 215 bp, Homo sapiens
  chr4:17812373-17812588
  hyper
tacttccggccgagtcaaggcccctcccccttagaaacgccacttccctccgtgaaaacggctggacaaggttgaacctagacgcatgcgcccaaagcgcggggtgcgaggtgggtggacccatcgcttcccgctctcttctcccaaagcgcttacggcagtctcgcgggatttccccctctcgcgggaattatttgaacgttcgagcggtaaat

SEQ ID NO: 199361 - DNA, 106 bp, Homo sapiens
  chr4:18024246-18024352
  hyper
ttcggtattcaaggcgaagagatctcggaaagccagaatatttgcaaggactaggaaaaagatgcgggtttttttcactgaaaattacttgcaggggactgggtgt

SEQ ID NO: 199362 - DNA, 132 bp, Homo sapiens
  chr4:20253377-20253509
  hyper
cgctggcagccccggcctcacctctcccctctccccagcgaggtgcgggctcccagagcggagccagggggcgggcctgggcctcgaggggcggggtcagggggcggaggctcgggcggctatataaggccc

SEQ ID NO: 199363 - DNA, 82 bp, Homo sapiens
  chr4:20253975-20254057
  hyper
cgacctcgctccctggagcgggaggccaggaaagcagcgggagaggggaaggggctagaaggagaaggactacccgggactg

SEQ ID NO: 199364 - DNA, 370 bp, Homo sapiens
  chr4:20254323-20254693
  hyper
cgcacacactactgccattcagctgccgcctggctctgcctggagtagtggatcccacccgcccacctgccaccgagccattctccagtacgccccagcaggacgctgacacctccaaccttggcctttgcctttccactccttccggtctgcctggtttttaagtccgcccccagtcagtccccactcagtcttcgcagcagctctcatcctccacttggcctcttggagttcctcgccggagtgctgactagtggatatttctgcccggctgcggcggcccgactgcccttttgtcttttctgcgtgacctcggggcaggtcctggtgcagagcgtcgccaaggacgccgagcgggaggcgggattgc

SEQ ID NO: 199365 - DNA, 207 bp, Homo sapiens
  chr4:20255120-20255327
  hyper
tgggagacagaagacgcgtgatctcctctccgctgctcttggggtctccttgcagccctggccaggcggattcatcctcaggacctaaagttgcccaaggagctcctgctctgccagaggagggtggagagggcggtgggaggcgtgtgcctgagtgggctctactgccttgttccatattatttggtgcacattttccctggcact

SEQ ID NO: 199366 - DNA, 429 bp, Homo sapiens
  chr4:22517070-22517499
  hyper
ctggaccctgctccaaagttgagcggagagataagaaagagccgagcgggagaggacccagcgtcgcgggagatactcacagggtgaccgtgcggttgggcagagtatctgggggcaggacctgcgcgagttccaggctgctgcacaccaccttgccctcggcggcgcccgccgccctgccagcccctcggggccgcccatcgtgcttgcagccggcgggcagcgccgcggcgccgccgccgccgccgcctcccagcagcgcgagcagcgctaacagcgagagcggcagcaacagcggcggctgcgcgcggccccgccggcgtccgggtggctccatgctgcgggccggggcctgcggggcgagcggcggcgcactggcctagcgggccgccccggagcccgggcgggcaggagcgcggcgcgggccca

SEQ ID NO: 199367 - DNA, 106 bp, Homo sapiens
  chr4:24914300-24914406
  hyper
gcgggtgcggcagccgcggccacttggagtgcgcgcccccctctcgtccctcccagctcggcctctctgggggcgcgggcccggggctggcggccgctcggcccgg

SEQ ID NO: 199368 - DNA, 107 bp, Homo sapiens
  chr4:25031937-25032044
  hyper
ctcaggtcctcaccgtcctccccgggggccaacactccacccacgtcccccacacaaaggcaaagaaggggcctggggagtgggtcagggtcgcgctggcccggcgc

SEQ ID NO: 199369 - DNA, 237 bp, Homo sapiens
  chr4:25032103-25032340
  hyper
aggggtcccactcacagggagctgatgtcgcccggcacgatcctgggcacccaggaagagcccacgcagatgatagactccttggtacagctgcaagtggcggggcagcgcgccagccgcctcacctgcgcgctccgcggtatcaggcacgcggcgcccagcagcagcagcagcagcccgagcgctccgcagccgcctctccgcagcgccatgcccggtccccgctccccgcccggg

SEQ ID NO: 199370 - DNA, 206 bp, Homo sapiens
  chr4:25161829-25162035
  hyper
agagccccggggtcgcggcggctggggaggggaccgacagctcggtaccttctccagaagcagccgtatgaggtgctcatgcgagcggcgggcctcacagccctgccgcacgtaagccggcgacaccagccgctctcccgccgcgaagctctcgcggttcatgacagcggtggcgacagtggcgaataagcgggagcactagctcc

SEQ ID NO: 199371 - DNA, 127 bp, Homo sapiens
  chr4:25235355-25235482
  hyper
gtcagggagaagccgcttttggttgcaggagggcacctctttgaaaattactcaccttcccgccctccactgggagtaaagcgagctgtgcccagcttctccccgcgctcacggaagcaggtggcgg

SEQ ID NO: 199372 - DNA, 179 bp, Homo sapiens
  chr4:25656879-25657058
  hyper
agcccccttccttttcctcagcttgacggtcccagcctttcccattgcggacctagagcccagactcccagggcagaaagcgccccacagactgataaaggtgaacaatccaggctttgtttccaagggctttatccctgactttccaactggcttttatctgtgtcttcacgtctctg

SEQ ID NO: 199373 - DNA, 74 bp, Homo sapiens
  chr4:25657493-25657567
  hyper
acctgcggagggagcgctggtgagtaccgccgccggggcaggggcgcttcctcgctctttcaaggactttgatt

SEQ ID NO: 199374 - DNA, 281 bp, Homo sapiens
  chr4:25864009-25864290
  hyper
gacaagaaggggtctcgagggtaacccgacccgggtctagagagagtccaggagggaaaggaatgagcacgagcgagagagcagcttggcaagtccggtccaagcgcccctctccacgcccggggtacctatcccaggtgccgggaacgcccggggcgcagcgacgaggaagagagaaaactagcagcggcgtccccgccccgcgtggcgggtgtccccggccgcccccacccgcgtccccggggccccgcgcggaggggaagacccgggcagggtccggc

SEQ ID NO: 199375 - DNA, 392 bp, Homo sapiens
  chr4:25915659-25916051
  hyper
cacagcacggaatcccggggaaggcggagggcggggtccgaggccccgcctgtgaccccacccctttcctggccccgcccccagccttgaggccccgcctctgactccacccctgtctctttctccgctccgcccctcctcctcgtccctccctcaaggcccggaagcgaaagcctctccacctcttccgagcggggtcacggcccggccgtcggtaacctggtttccgagagtgccgggcggtcggcgggtcagggcagcccggggcctgacgccatgtcccggaacctgcgcaccgcgctcattttcggcggcttcatctccctgatcggcgccgccttctatcccatctacttccggcccctaatgagattggaggagtacagtgagtg

SEQ ID NO: 199376 - DNA, 127 bp, Homo sapiens
  chr4:27086305-27086432
  hyper
tttttcctaatgaacgtttctttctctccttacgcttatcggttttaacacatgccatttaccacctcccacccgctgattagggggctggaaacgggcttacatcactgtcagggcaggagaggaa

SEQ ID NO: 199377 - DNA, 104 bp, Homo sapiens
  chr4:27086484-27086588
  hyper
gcagtgcttaggagaatgcgggacccaaatgaaattccgcgtctccccgcggcgggtgccgcagagccaccggcgaggggcgggcgccaccacgtgactgatta

SEQ ID NO: 199378 - DNA, 212 bp, Homo sapiens
  chr4:30721577-30721789
  hyper
actttttctccccttggcaaactggatttttttttttaagctacttggcagctgtctctgactccacctccccctccacccccgcccgaaagcctttggcttttcttcggaaatccagacagaattgggcatctttgttaattgccgttggggacgcccggccgtgcgctttcgccggctaacgtcgcctgtgctccgagcctggtttgctc

SEQ ID NO: 199379 - DNA, 234 bp, Homo sapiens
  chr4:30722009-30722243
  hyper
agatcccactgctccgacatgcgggccgaatgcaggtgagaaaaggcacggactctgcggctgcgaacccaaacttgggcaccgcacggtgcgcactgctcagccttcgcccccgtgggcgaaaggctgctgcggtttcaggcggctgcttcgtgactaatgaccttgcgcagagttgttaagaaaaaagagaaacccgcgctctccggggtgagaagggactgactctgggcg

SEQ ID NO: 199380 - DNA, 197 bp, Homo sapiens
  chr4:30722273-30722470
  hyper
cgcgccggggggaccctgacactgaccgctctgtgacgcgagtagtctcccctgcaccgtgcccgaagcgacgtgccgggggatttttcattctcgatctgttgactggctcccccgctgcatgagcagagtcggagttgagactggcttgttgctggccccagcgcctggtgcaggaagcgactcacgtttgtctg

SEQ ID NO: 199381 - DNA, 249 bp, Homo sapiens
  chr4:30722590-30722839
  hyper
ccccacctcttcccagccccactgcccgtctgccggagcggttctggccccttccgacagagcggggactagagccggggattctccgcccgctgaggggatgactctgggttgggggagcgccgaacccgcggcgcgcagtgtcccgtgaactgtgagtactgcgactgaacggcggcaggcgagcgggcgattagcacccattgcatgaattatgaaacaataactttcggaagaagcaggaggaaa

SEQ ID NO: 199382 - DNA, 799 bp, Homo sapiens
  chr4:36245409-36246208
  hyper
taacaagcagggtgcggggcagcacagacacccgggcaaattcatgatctctaccgagtaaataacttggtgcctgaaactcactacagcttcttcttatttaaaggtaggggagaggaatggagggagtgtccagctgtctatccggatcctcaccctcccgggtcaaatcccagaagtggagttcttggatcacttaccggcttctggtttcctttcagacgcccacacgcgggagcgaaatccaaggggcggacaccagagccgagcactttgcgctgaggaaatttacccggtgaagtgtcgaaaagccccagcccctccagacagggtcctcccacccccgcgtgggccatcccggcccagccttcccgaggccccgggtactcgccttgcgctcgggtcgcggagttcgaaaagcgaggtgaggcggcgctgggaagctcagcgccggcgtctctcccagccttgggcgctcggtcctcgcccctctgccggaggcgccaggcctcctctttcccggtccccgccggctgtccgcagtcgcctctgctgcctggcggcggccgcgcgggcggcgctgttagtggggccggcgtgtcgcggccgccgcacctggaggcggggagcgcgggccgcggacccgcgctcagctccggaaacgccgagcccggcgcccgcgccttgctcaggtgctcccgcgcctcgcctcggccgccgcttcctctccgcccgcgggggcggggagcaggcgccccgcgcgggggaagccggagctcaacggcgggggcggcccagc

SEQ ID NO: 199383 - DNA, 145 bp, Homo sapiens; identical to SEQ ID NO: 109945
  chr4:36246257-36246402
  hyper

SEQ ID NO: 199384 - DNA, 357 bp, Homo sapiens
  chr4:37455073-37455430
  hyper
tcatacagggctggccatggaactcacagcaggtctaggcggcgaatgccagaaataaggaggaaactgaaaaatgccaagttctcggggtttgggagtacacaactatttgccagcgggtgcatttgttttgtgtatccccgtactccagtcccttgatcataggaagctcccttctctccagcgcaacattggagtaagcaccccggagtttcccgtgatggcaggcggttggcgcggtcgtttgtgctcagaggccaacaagcgcgtggattttctgcttcagtgcgcccgggactgccaccccggccccggggatgtcggacatcgtactccagggtttcgagccctagcccc

SEQ ID NO: 199385 - DNA, 344 bp, Homo sapiens
  chr4:37455485-37455829
  hyper
gcagcccgggccacgtgacgcgcgggcccaatgacagcgctggggcggccgctgcgagctcggcgggctcagggcagcgcggagccgctagcgtctcccggcgcggctgcccgaggccggcgaagccatgggcgccgggaccccgccgccgccgccgccgccgccgtctggccccaggtagggacaatcccccgccccgcgcgcgcaaagagggctttagtcctgcggaacttggctttggggcgagctttcccccacttctctccgagtcgcctacttttaagtttaatttcttgatttgcttttgccctgaaaaaaaaaattagagacgcaattcaaagttt

SEQ ID NO: 199386 - DNA, 86 bp, Homo sapiens
  chr4:37688564-37688650
  hyper
gtcgctgggactaggcgggcgtgggaagagaaagagggagcgcgccccgagaagcactggacagtcagaagcggccagcactggag

SEQ ID NO: 199387 - DNA, 211 bp, Homo sapiens; identical to SEQ ID NO: 3243
  chr4:37978651-37978862
  hyper

SEQ ID NO: 199388 - DNA, 155 bp, Homo sapiens
  chr4:38666037-38666192
  hyper
ggcctttatttctcgtcggcggcgccctgcaccgcgcctcgcaaagtaagtcccgtctccctcacctctgctccgcaccctggtccctgccgcccccctcctcggccagtctggtttcattttttctcctggagggggccgcggggaatgggtcg

SEQ ID NO: 199389 - DNA, 327 bp, Homo sapiens
  chr4:38666461-38666788
  hyper
gccccagaaatctccgtgctctccgcgtgtggcaacgttgtttggagaaaggtagcgccgcggccgcgcgctcctgctcctccccctcccggtgcccccccaccaccaccacaacccaggctcccgcgtccttcccctcccctccctccgcccgcgccccccgccgcccccctcccaggacacggcgcgcggccgctcgcccgccacagcaaacttggagcagtctcccggccctctggaaagaaacttagggcaattgggattggaggcagcatcccattctcggttctggagcccaggagctgccagggcgtctggatcctccgg

SEQ ID NO: 199390 - DNA, 740 bp, Homo sapiens
  chr4:38868924-38869664
  hyper
ccaaagctaatacatcggagttttaacccacagctccaaactggccttctggaaagtgggttttcgttgtttgtttggggtttgtttgttttaaatctatcacactcccaccgacagggcaagggagtgctgcttaacgcagaatcaggagatcaaactttagctgaatttgagcgacctcttcccagtgacacggcggggggttttccaagcccttttaaggaaaggaaagggatctggcgaaccccgagacccacccgccctgggctggagaggcggcgcgctctggctttccgcgctggcacaggggtgggacaagccaagtttccaggagactcgcccagcgcgggcccggccctcgcagcgtgggggtggccgggcgtccccgcggcgctcctcgtggggcggggcgcaggcggggcggggccccctctccagccgcccgccctccggccgcgtccccgccggccctgcagacgtggcggggcgggacccgctgggcactcccgcgcgtactcggccgcctgagcggtaagagccccgggcactcggtccccatccccttccccggggggcgggcgagcgcgggggcggctgcccgggggtggtgggaacaccataccttggcgcctcgtccgggacccacgaatcctgccctctgcgttagtgagaagcagtggtcagggaggacccggctctggggtgagggtctggggcggcgcggccgagggacctgcgtg

SEQ ID NO: 199391 - DNA, 196 bp, Homo sapiens
  chr4:39047091-39047287
  hyper
actggaaaccatttcggattttttttttcctctccttattacttgcaggcaattttgacctaagtttttaagcttttcttttaaataataccctcgcccccggagtgtggagaataagacggggacttcattttcccgagacccggcgtgcctggtgaaacttttgcatttaggcatttatttcagtgcatgctct

SEQ ID NO: 199392 - DNA, 263 bp, Homo sapiens
  chr4:39183810-39184073
  hyper
acatcttagtcatcgcggtccaaaatttacgcacgcgcctttgagggctcacagagcccgtctctcccggacgaatctcatccaatcagagccagccaggaagccgaggctcagcaaggcctcgcgacgcccaacttcccagggttagcgtctctgatgtcatgtgattccaccctccgcctctcacccaccctcgcagagggcggtgcgcttggcccggcccctcgaggcaccgcctttcaattagcactcgctgattggtc

SEQ ID NO: 199393 - DNA, 215 bp, Homo sapiens
  chr4:39529280-39529495
  hyper
agctgggcaaatccgctttggccagctcagcggctccgcccctaccgcgagcggcgctgggcggggctgcgtgcgtggcgtgtccgctggaccaggggacgggggcgcgccgcaggtgtaggagctttgcgcgcctacctggcggtcgtgggtcgaggaggggtcaagaattgttgtctagcagccctctccccgctgccctgtcctggccgagg

SEQ ID NO: 199394 - DNA, 248 bp, Homo sapiens
  chr4:39529737-39529985
  hyper
agtcagattcctcctgacccaccgcttctgggaaagaggcgcctcccgtcaggaggatgctgagttcctcatgactggaccagtgagtgtccactccctggtccctggcgagagaggcgggacccccacgccctcctggcgctctttgcagagatgttcctcaggcccaatccgggatttgggatgtctgtgcgtgctgtggagcagagagtttgcaacatgtaagtgccgtgcgtgaggaagagtaa

SEQ ID NO: 199395 - DNA, 138 bp, Homo sapiens
  chr4:41216265-41216403
  hyper
gtggccgcggagccccggggccgggagcagaggagaagccgccgggggaacccgcagccgctcgccgcacgctgctgccgctacccgggtgtttccccagcactctcgtgctgccccggaatccggggcaaaggcaag

SEQ ID NO: 199396 - DNA, 315 bp, Homo sapiens
  chr4:41218383-41218698
  hyper
aggtcggtctcttcccgacggagaggaaaacccgcggtggagtccgcggcggcgggggggggggggggggggggggcggggcggcgcgcgcaggcgcagaggccgccaggttgggccgaggaggcgccctgctccacacctgatgcaatcagccttccggaaacgggtcccgctgccgcgctcacccaggaaacacttccgcgccctcctctggccgctgagctcccggggacgggttcccaaactcccccggcccgacttcgccacgggcggtgttctgcgccccgtcggggatacgccggagaagtcgggaag

SEQ ID NO: 199397 - DNA, 85 bp, Homo sapiens
  chr4:41752227-41752312
  hyper
tctttataggggcatttaggcgttcagtgtttgccaaactaagtggtttaattcgatgctagtgccggggagtggatgggctccc

SEQ ID NO: 199398 - DNA, 177 bp, Homo sapiens
  chr4:41991961-41992138
  hyper
aagtctgcatacctccgtttaccctaacttgtcatgaacataaaacctcttatattgcaggcaaaaatctgaggttcacagattagtagggcaagtagctgattccgaagtgtgtacttgcctttatgatactggatacacactggtgttaacaaggagaacgatgtacgtggcaga

SEQ ID NO: 199399 - DNA, 46 bp, Homo sapiens
  chr4:42401057-42401103
  hyper
ctgacttcagagcggaataaatcacgaccccagcagagaaaattta

SEQ ID NO: 199400 - DNA, 209 bp, Homo sapiens
  chr4:42657889-42658098
  hyper
gagtgggaatcagcgatgatggcaagatagatttctgaaaaacatgttattccaccctctgcaggattcaagtacaggtttatgggagaggacaaacaaaccttgggatatttacagtcttggctttgacgcgagcaaaatcaaataatatttacagagtgcctgccacatggcaggcaggatgttgagggctcctcggagacgatgaa

SEQ ID NO: 199401 - DNA, 138 bp, Homo sapiens
  chr4:42659535-42659673
  hyper
cggcaggcgaaggcgaaagggtctgggactacaaggtttagctcccagccagagcaggaaaggaacgactgactgttcgccatctgggtgtaattctaacctctctgcacgcccagcccgactcgtggcctgagccgc

SEQ ID NO: 199402 - DNA, 34 bp, Homo sapiens
  chr4:44449403-44449437
  hyper
gtgaaatgtaaatcgtgtctactgcataagggaa

SEQ ID NO: 199403 - DNA, 164 bp, Homo sapiens
  chr4:46391189-46391353
  hyper
gcaaccacagcgggaaaagctaggggcaggcagcccacttttgcaattactctacattacagtgaactgcggtcctcacgtcttcttttcttcactccccttaacaaaataaaataaataatttcccttcctgcccacccacggttgcccaagaccaagtctta

SEQ ID NO: 199404 - DNA, 285 bp, Homo sapiens
  chr4:46391393-46391678
  hyper
tttgacagctgctctggagccgaggatcacaataagagaaggcgcgtgaggctccggcagcaaacaccagccaggcaggcagcggtaatcacagtgagcaaagttgaagactataaaagagccaggctaacgtgctgccgagcaggtgtcctggattttattgtagttgcaaatatgcttctggtgataagtatcgaaattattttttaagtgcgctggggaggagggaggtgcgggaattgagcctcctccgtttccagggagcctctgaaagtggggtggggg

SEQ ID NO: 199405 - DNA, 157 bp, Homo sapiens
  chr4:46392515-46392672
  hyper
tccctggggccgcgccctgccgcccgtcccccaacatcaccctactgtggagcgacgtggctgctaagaggtaaagaggttccgctcctgctggagggcaaggggactaatcacgcctttacttagtcatcaacgcatccacgcaggaccaagttca

SEQ ID NO: 199406 - DNA, 184 bp, Homo sapiens
  chr4:47465718-47465902
  hyper
taaagctacgactcgcccacgtgactctcgccggcggggaggggcgtggacccaagaagtccctgtgcgcttgcgcagagaccgaactaccgctttccccgtaaccagggagactgcagtttgcagtgatgtggctaagatacccttgtgctattaaaggcacatttacgtatctttcaacgca

SEQ ID NO: 199407 - DNA, 93 bp, Homo sapiens
  chr4:47839530-47839623
  hyper
aagtccactagatgcttggagggcaccgtgcggaggagggactctgcaggaaaggtggcatcacccccggcatggagaccggggtctccggat

SEQ ID NO: 199408 - DNA, 172 bp, Homo sapiens
  chr4:47839675-47839847
  hyper
cggacgccgggcgaccggggtggtggtcgggaccagggccgtgcgcctgggaactgggtgcagggcgctgagcgcggaactgtcagagcgggagctcaccggcggctggggaaggaggtggcatcgggcggaggagaggacgggggcgggaggggctgaccctgaattcacc

SEQ ID NO: 199409 - DNA, 181 bp, Homo sapiens
  chr4:48271901-48272082
  hyper
cccaatcaccccgccccgccccgattgctggccccgtggacgccctaccccgcctctgatcctgcaggcccgcccagtcctcgatcgccccgccccggtcgcttgggccctgggtggcaggtttgcgcagccctgcggcgatttcaaggcaagtgaccggaatgggtcggaagcgcgtccc

SEQ ID NO: 199410 - DNA, 198 bp, Homo sapiens
  chr4:48272083-48272281
  hyper
gtgagtttcagggagcgtcccttaggtttccgggggcggcgttgaacctccctagccccagtcttcccatcccaggagacccgcccctagtggctcgaacgcccctagccaggagagccccgagtagtgccacttgtggaagactacgtgcctgtcggaattaggaaccgcacctccccttccgctaagcggtgggag

SEQ ID NO: 199411 - DNA, 256 bp, Homo sapiens
  chr4:48908455-48908711
  hyper
gcctactggagtccgctgccatccctggccagaagcagccagcgccaccccaagctccccagcccctcgcccgtgccggggccgccggggtccgagttaggggagagtggggggcggccaccgctgcaccgcgcggccttcgaaggactgccctgcggcgccgcgttcccccgaggccaccccctcccgccgtcaacactccccggggcgggggctcacctgtgtggtctgggtcgcctccgaggccgagtccctc

SEQ ID NO: 199412 - DNA, 266 bp, Homo sapiens
  chr4:52710820-52711086
  hyper
cgcgccccacgcccggggggcgcgacttctcccaggcgtgctgggagggcgcttgaggggtttcctttagggtttgtctccagtcaacgggtatgaaggggaaaggcggtcccgccgaattctgggacttgtagtcgcggccgcgcccggccgcggttgggttgggtgcacgtgggtaactgtggaaacgggtcccggcatgcagcgcgcccttggagccttcctgctcggccaactcgtgctttattccccggccagctcctgcg

SEQ ID NO: 199413 - DNA, 253 bp, Homo sapiens
  chr4:53617148-53617401
  hyper
ctggagcccaaggtcggccggggttgggttcctgtcgccgcacgcgtggcccgcccgaaacccgctacaaagtagcggcgtgtctgccctagggaggcaaagcgcaaacttgttaccgcgccgggacctgccccgggattctcccagcggctccgcaggacgcagcgcctgtgcctcgcgcggccctgggacgggcacggccgtccgccccctgggccgccgagggctgctttacccctccgttctggccgcg

SEQ ID NO: 199414 - DNA, 241 bp, Homo sapiens
  chr4:53617560-53617801
  hyper
ccaagaagaaggctcgcggcgggaactgaagtgagcggggacacacgagggctgggaagatcctgggttggggcggagcggggctgggaagatcctgggttggggcggggcggggcaccgcagagcggacagccggattcaggcaccaggaacccaccggtcccactggccaggtgctccgagctgggtgattttctcccgctcaagactaggaacatacctgcgctttcggcgcagggaa

SEQ ID NO: 199415 - DNA, 332 bp, Homo sapiens
  chr4:54967511-54967843
  hyper
agcccccatccctctttaatcctgtgacttcgcatcctgcgcatcgaagacctttatttgctttgcacgtctcttttcttccccgctaagcaaccacgtgccttgaaatgggaaagggatacagatgttcggctgggcttccccgggtgggtccctgaaatgcgtcctggttagcacatggggtgggagcaccttgcccgagccttacctctctaccctctcttcgccggtccgcaggaggctctgacgccagccaggtacccaatggcaagaggatgaggacggcgttcactagcacgcaactcctggagctggagagagaattctcttcc

SEQ ID NO: 199416 - DNA, 194 bp, Homo sapiens
  chr4:55094320-55094514
  hyper
gcgatgaaggtgaacgcgctcccctcccccgctgtcgctgggaagccccactctgcccaggtctggttcctggagcatcagcgccccctttccctcgccggcaggatcgtttcctcccgacactggcctctcgccttgggcgcagggtttggggctcagctgtcaattccaaggaattcgtagggttcgaccca

SEQ ID NO: 199417 - DNA, 31 bp, Homo sapiens
  chr4:55095430-55095461
  hyper
atcaattacaaaacgcggtttttgagcccat

SEQ ID NO: 199418 - DNA, 208 bp, Homo sapiens
  chr4:55524012-55524220
  hyper
agggaggggaggcgaggaggggcgtggccggcgcgcagagggagggcgctgggaggaggggctgctgctcgccgctcgcggctctgggggctcggctttgccgcgctcgctgcacttgggcgagagctggaacgtggaccagagctcggatcccatcgcagctaccgcgatgagaggcgctcgcggcgcctgggattttctctgcgtt

SEQ ID NO: 199419 - DNA, 138 bp, Homo sapiens
  chr4:55524294-55524432
  hyper
gcctgtgcctgggagggtggtacccgccagggtgcatccggagagaggactgcgggccctcagtgcccgtgcgttccagcctccggggagactccaggtggccctcggactctccggcgccctgcctcgctcacctgc

SEQ ID NO: 199420 - DNA, 229 bp, Homo sapiens
  chr4:55561714-55561943
  hyper
tccaccatccatccatccaggaaaatcagacttaatagtccgcgtgggcgacgagattaggctgttatgcactgatccgggctttgtcaaatggacttttgagatcctggatgaaacgaatgagaataagcagaatgaatggatcacggaaaaggcagaagccaccaacaccggcaaatacacgtgcaccaacaaacacggcttaagcaattccatttatgtgtttgtt

SEQ ID NO: 199421 - DNA, 91 bp, Homo sapiens
  chr4:55564469-55564560
  hyper
gttgaccgctccttgtatgggaaagaagacaacgacacgctggtccgctgtcctctcacagacccagaagtgaccaattattccctcaagg

SEQ ID NO: 199422 - DNA, 75 bp, Homo sapiens
  chr4:55569950-55570025
  hyper
caacgttgactatcagttcagcgagagttaatgattctggagtgttcatgtgttatgccaataatacttttggat

SEQ ID NO: 199423 - DNA, 45 bp, Homo sapiens
  chr4:55592094-55592139
  hyper
ggttcagagttctatagattctagtgcattcaagcacaatggcac

SEQ ID NO: 199424 - DNA, 43 bp, Homo sapiens
  chr4:55593675-55593718
  hyper
aatgggagtttcccagaaacaggctgagttttggtcagtatga

SEQ ID NO: 199425 - DNA, 34 bp, Homo sapiens
  chr4:55598031-55598065
  hyper
cacaggctcatacatagaaagagatgtgactccc

SEQ ID NO: 199426 - DNA, 96 bp, Homo sapiens
  chr4:55602683-55602779
  hyper
gatggcacctgaaagcattttcaactgtgtatacacgtttgaaagtgacgtctggtcctatgggatttttctttgggagctgttctctttaggtaa

SEQ ID NO: 199427 - DNA, 61 bp, Homo sapiens
  chr4:55991393-55991454
  hyper
ccacagaggcggcccgggtctccacgcagagccacagggcgacggccagcagcaccttgct

SEQ ID NO: 199428 - DNA, 133 bp, Homo sapiens
  chr4:55991493-55991626
  hyper
tcgggagccggttctttctcccagcgcctgtctagagaaggaggcgcggaggtggaactcgcggcaccccgcagcgcaggacagttgagcgcacagggctagggagcccgggcgccgaccgcggctgcagggg

SEQ ID NO: 199429 - DNA, 61 bp, Homo sapiens
  chr4:55991802-55991863
  hyper
cggggccatgcggggcggggccggagcggaggaggggctctcccgtgcggccagccccgcc

SEQ ID NO: 199430 - DNA, 39 bp, Homo sapiens
  chr4:55992221-55992260
  hyper
gtatgccgggtcgcaagctggcagcgactcctgccagta

SEQ ID NO: 199431 - DNA, 34 bp, Homo sapiens
  chr4:56412390-56412424
  hyper
aatcggccgcagctccgggcgccctcaagccgcc

SEQ ID NO: 199432 - DNA, 106 bp, Homo sapiens
  chr4:57687532-57687638
  hyper
ttagagctgggagcgaagcccaagcaagaactaaagagggtggctgactccacaaagccacccccacaacccccagttcgcgttcctccacctggcaggtcctctg

SEQ ID NO: 199433 - DNA, 219 bp, Homo sapiens
  chr4:57687887-57688106
  hyper
gcgctcgtgcgacggggcgcggggagggcgggggaaggggcggggcgagaatgggaggaaaagcagcggtaggtggcgagggaagaggggcggcgggaagaggagcggcgggaagaggagccgtgaagggtcgggggagaaccggaaagggctgggaaggagaaaggtagaaggacgggggagggggccatggggaaggaggggcgagggagatagagg

SEQ ID NO: 199434 - DNA, 143 bp, Homo sapiens
  chr4:57775639-57775782
  hyper
agcaattagaaaagtcgatgttgggccaaattacccaatagcttgggctgttcagccccgggacagccttcgccctctgttttctgtgatggcatttgcttccaacttttgttggtacgtagaactaaaccggtttgtgttta

SEQ ID NO: 199435 - DNA, 205 bp, Homo sapiens
  chr4:57843820-57844025
  hyper
cccgagacgaaagcgcgtgggtacttgggagctgtcctggttggttttgcgtctaatcccgtcagttctcgcgatttaagctctgagactgagaacctacttaaagctatggcaaaggcactggaggattgagctaggtgggcagaaaagagcagtgagtgttttgggttttttcactttcaggcttaacgcctcactgctagca

SEQ ID NO: 199436 - DNA, 227 bp, Homo sapiens
  chr4:57977107-57977334
  hyper
ccctttctggaacctcttaactgcctgcacctccctccccgctttgtctcccagtggcattcaacaagactctgtgctttttttgtgctgagccgttttcagtgagtactggaatccgtgtgagagctgtgcccttgttttgagttcttgctgaactgctcgccctccagcaagcctctcgggagaacagagcgcagctgagaggagcaggggtcccagctccttcc

SEQ ID NO: 199437 - DNA, 92 bp, Homo sapiens
  chr4:57977364-57977456
  hyper
cgcccccagtcttcaccagcattccaggaggtttttgatataaacggtggactcttcctcagtctttctgcgaagtgctctgcaaactcaac

SEQ ID NO: 199438 - DNA, 44 bp, Homo sapiens
  chr4:66536636-66536680
  hyper
tccgtggctagtttcttaaacacccataccgcttaccgctgctg

SEQ ID NO: 199439 - DNA, 730 bp, Homo sapiens
  chr4:71767778-71768508
  hyper
tggagcccagctgagcggctccgagagctctgccatgactcctaaccgggtggacaggggggccgggcagccgcggcgcacacgctgggcgtcgtccctagcagcagaggagaccagaaggtgagagtccccatgccgcagccggagggccggggtgggcttgcaccgctatcgcgagagctcgtgaggtgggggcggcggggagctggggaggggctcgcggagagcctgccccgcctccctttccttcccctcccctggagtgattcaagacgagcgctacccacttccgccccctccccctgccattggaactagctgagccgaactagttgcggccaccgagcagccggctctcggcacctcctcctccgcctccctgtctcctgttccattcgcctttcctcttctttcctggcccacgccgctccgaggcctcgcgaccgccgagcctgcagcctgccccgcggccaacatgagcttcttgttgtgagtagccaggccccgcacgcgccggctttgttcgggtggacctgggcccccgcccgccgcccgccgcccgtcgcccgccctcgtcccgaccctcctggcccagcgctcccggggcccggcgtcaccaccaagcggggccccgggactgcgcggagcgctcggactacctaaccgccgcctccccatagggcttcgagtactcgtgggctcctgcagccctgaggaggttcttcccccc

SEQ ID NO: 199440 - DNA, 153 bp, Homo sapiens
  chr4:71768550-71768703
  hyper
cgtctctgccttcgctcgcattcccgggcttgtttgtgcgcttctcgtgggtatctcccactcgcctgcacaatccgtatccaagcggtgctcggttgaatggctccgtcgcggctgcccattgctcttttctgggtcccaagcacagaagat

SEQ ID NO: 199441 - DNA, 206 bp, Homo sapiens
  chr4:73433657-73433863
  hyper
cttctgagagcatcgggcttcaccttgagcctccaaagggttgggggcagggccgaaaagaaacagagctgcactcaacttagctttaaaaagaggaggagttgtgcagagggggaggggagaaggcggccggcgcctgcagcctctgcccaggaaaacggagggcaggaaacgtctccagcccccctccccaactgtcaaatcct

SEQ ID NO: 199442 - DNA, 125 bp, Homo sapiens
  chr4:73434679-73434804
  hyper
tccacttcaccttctcaccccgtcctcccaacacagagtgtgcaggagcgagaaggtgctgtaagcgggcacaggctaagcctgggagagggggaagggacgaggggctttccaactatctctgc

SEQ ID NO: 199443 - DNA, 87 bp, Homo sapiens
  chr4:73435243-73435330
  hyper
gagcctctccttctccgcctagggcgagaggaggggagggtccaggggcgccaccggtcccgactggcgggacgcgcgttgagttaa

SEQ ID NO: 199444 - DNA, 224 bp, Homo sapiens
  chr4:74702525-74702749
  hyper
cgctgctcgcgctgctgctcctgctgacgccgccggggcccctcgccagcggtgagagctcctggcactggggtgcatcccagcctctgcggggccgctgcgttccagggaactctcccagcaacctgccctataaaaatgtctttcttccccagctggtcctgtctctgctgtgctgacagagctgcgttgcacttgtttacgcgttacgctgagagtaaacc

SEQ ID NO: 199445 - DNA, 150 bp, Homo sapiens
  chr4:74904434-74904584
  hyper
atgcatggttgagactggaaagcccggagcggccgggccagggaaattcccggagctccagatcgatccggagtcccgaaggaaggcgacggccccgcccccggggtggagtcggatacgggtagggggagcccactggtgacgcctacg

SEQ ID NO: 199446 - DNA, 265 bp, Homo sapiens
  chr4:74964975-74965240
  hyper
gccagggaaattcccggagctccagatcgatcccgagttcggaaggaaggcgatggccccgcctctggggtggaggggggtcggggcactcacgagtgacgtccgggtctgactgtcttgcgtaactcccgccaactgtgggatgttctctttctgccccgaatccctggagcgggagcgagagcccgccgctctcagagataccgagataaccgcctgcgaggaggcgcttcgtgaacccagtgcagtgcgtcgtgggtcagat

SEQ ID NO: 199447 - DNA, 241 bp, Homo sapiens
  chr4:75858217-75858458
  hyper
ggcccagtcatcgccgcggggcccgggtgggaggggtttggcagcggcaggcgcggcggcggcggcggaggcggaggcggccccgggctcgggcggctgggatggagcagaagagcgcggagcaccggagggcacgcagctgacggagctgcgctgcgttcgcctcgtttgcctcgcgccctccactggagctgttcgcgcctcccggctcccaccgcagcccacccggcagaggagtcgc

SEQ ID NO: 199448 - DNA, 49 bp, Homo sapiens
  chr4:75858524-75858573
  hyper
ataccaggctaccatggtctacaagactctcttcgctctttgcatctta

SEQ ID NO: 199449 - DNA, 290 bp, Homo sapiens
  chr4:75858629-75858919
  hyper
tagctagcgcgtggtcggggctgaagctaggagatccggcagtgagtcgccgcgcgcctccgggtgagtgcgcaggtgtgtgcgcacttagatttggggtgacgtgcacctttggcggtcccgaaccgtactgagggaggggacgatggggtccttcctgccgcagcccgcgcccgcacaaactccagctttgtagaacaggtggctgtcttagctgcgtgttcgaacccagagtgggcaacacggactgcgcctcaaggcttctctttcttcaccagggtttcggagcg

SEQ ID NO: 199450 - DNA, 365 bp, Homo sapiens
  chr4:75858998-75859363
  hyper
gggaggttcgcatctgggaaggcttcagcagcggctgcgcgcctggcggggctggtttgctttctcgagtcttggcggtctctgatctccggcgtcccttcctagttatgcttaggatgatgtggcactaacagcagcggcccggccttggtcaggctcgcaatcgtcactgggggtagcaaggctaccttctgccccagaactccccaaaaacgtatcccatagaagaaactattaacttggctaaactagcatcctctcccctccccctgcaccacctctgaaaggcttcgtaggagccactctcgggtttcgggaccacagacggcgacgacctctggcagcggggatggggaagaggggag

SEQ ID NO: 199451 - DNA, 506 bp, Homo sapiens
  chr4:75859428-75859934
  hyper
gttcaggtacctattttttccagaaaacgtctcccgaaaagggacaactggctgtggatatggtgctgctgggaaaagtagcccgactgcgcggccactggcattttcagtttaaatgtgacccaaagtcacatagcgcaaaccgattctactcgtgctttagtctgtatatcctccctctgagttcgtcgggttcctacagttgtggacacgagtcgtcgcaatcccttgaaaagaagctagcggttttcaggcagctcacagtgggtaatgcagttataaggaaaagtttcccaacttgaaactatagcgtattttctctacttagtgaacgtccgtctgagaaaacctctttctcgctggtatctcggcacggtttggagacgcgtccgcggacagttcccgaatactcgcaggcggctttggctgcccagcctcgggctgagatgagagagcctaggtccggcaggtgcaataggcagcggagctcccggctggctgcgggt

SEQ ID NO: 199452 - DNA, 133 bp, Homo sapiens
  chr4:76555905-76556038
  hyper
ttctgccttccccagcgggaggaggcgattgtgatgcccacgcgaagggtaaaggtggcggttatgtaggactgcgaagactatgcaaaatgcgatacggtttccctcatagcatcgccgctggggcaggggc

SEQ ID NO: 199453 - DNA, 205 bp, Homo sapiens
  chr4:77135172-77135377
  hyper
ggcccggcctggccgctcccagcgccctgcaccgcaggcccagcgctcgccccaccgaaattgccgaacctggttcacacactcatttactcattccgcagataggtctgagggcctcccatgggccacgcgctggggattcaaggtggctgggacattcccctgctctagaggcgctcgcaagttagcggggacaccgttaccg

SEQ ID NO: 199454 - DNA, 341 bp, Homo sapiens
  chr4:77172534-77172875
  hyper
ttgctatctctttatcgctcctcctgccttcttcctttctttccttcagtaaacgttttttgaaacgatgatgagcaaaaaacgcctgatccagtctatggcgcgtttcggtgggaagatgaacacgccttcccagcagagtaaaacgtgattacaccaaggaccggtaccctctcccttccctcggccaggtccacgtccccaggcgtcggagaaggggttggaccgcgcagcggggcgtcagagttgccaggcgcccggggcaaataccggcagcggtggttgtgcggtgtcctagcaacggggcggcagcagggcacacacaccgcccaagcccggac

SEQ ID NO: 199455 - DNA, 35 bp, Homo sapiens
  chr4:77172935-77172970
  hyper
ttggccccggtgcgcgagggcgtgaactgcaggtc

SEQ ID NO: 199456 - DNA, 100 bp, Homo sapiens
  chr4:77173055-77173155
  hyper
gggcgaggggagaggtccagcctgccttccctcctcaatgcttcctgtacgtacaacataatacgctgagataaccaacgcttggcgctgctctttgcaa

SEQ ID NO: 199457 - DNA, 202 bp, Homo sapiens
  chr4:77227271-77227473
  hyper
agctggcggcggagcggagcttccactagggctcccagtttccccgcaccgcgcccgccgtcctccgggccacccatcccacccgaacgcgccaccgctctagcccgcgctccagcccgcgcgtcaccgacgcccgcggcctctcccacctctaagttccaggaagctctcggcctctagctgaccgcgttgctgctgagct

SEQ ID NO: 199458 - DNA, 504 bp, Homo sapiens
  chr4:77227525-77228029
  hyper
cctcgcgggcagcaggcggaagaaggaagggcggtggggcaggtcccggctgcgcggggcagttgtgcgcacttgggttcttcacgcgggacacacgtggaacgccgacccctgcgcccctggccgctggcaactggcaaggccgggaacagaaagtgtagggacagaagagcgctggagtcttccccgggagggagcccggggctgcagcccaggggcggggagcggggcggggctgggaaagttgagtactggtcgctcagggccgggctccgccggagtgcccggcgcagaaaccgtaaaaggctggagcgggcggggtaggtgtggctctgtgtgcgtgacctgagccccggtcccagtccctgtagtctcctgcggccgcggcctctcagccatgggcgccgtctggtccgccctgctggttggagggggtctggccggagcacttttcgtttggctgctgcggggcggccctggcgacaccgggaaggacggggatgc

SEQ ID NO: 199459 - DNA, 385 bp, Homo sapiens
  chr4:77610246-77610631
  hyper
tctgcattttacaacggggggaggttaattaaggcacctttctgattgaatgggcagagggactgagggtgtgtgcttcggtccggtccccttaataccgtaaggacccaaggaccgcggaggggcgagtggagcgcgacgcttccaccccagaatccgttttcaaaccttagggagccttctttgccattgaaatgcaaatccggtcctgagctcccgggccaatccgggaggcttcctgtgggattacctggtggcgagcgagcgccgagccagcgccgagccagcgcggcccctcgggtgcggcgggcgcggggtggactgagcgggcccgggcgggacgagaggtgggcgagcgccccgcaccctcggcgcgccgcgcggg

SEQ ID NO: 199460 - DNA, 472 bp, Homo sapiens
  chr4:77818185-77818657
  hyper
gcggggaagccctgcttgtcgcagcctcgacggtggcgggaggcgagtgagccactgcaggcacaggcgccggctcagctagcgcgccttcttcccgctccctggaagccccgcggtcatcctgggcaggcagagcccgtgccggcttctcctccgcggtggccgagtgcgggagtgcgccgagctctcccggcagtacagccaggttgttctggaggcattcccagcagcagcggccctgcgtcttcgccgccgcgcagctcgctctcgcctgggcccctgccgctgcagctgcgggcaccggcggcctctgtccgggactgcccttcgatccgccgcccttcccgggcgccctacgggagtcgctgcccgggagtccattgcaagctgcgtcggcggctctggctgctgcacctgctggctcctcctccggctccttctcgcgccgccgccgcctgggctgctgctgggg

SEQ ID NO: 199461 - DNA, 406 bp, Homo sapiens
  chr4:77818754-77819160
  hyper
tcccccaaaaggtccctgtatctcctcttgagcaccacgtacttggtgccgtcggggtcctggcgcactgcggcgaccgagttgacgaagcccttgaagagctcgcggcggtgctggtgctggctgggggacgcgtcggggtctcggagaaagctcttgaagtggctcagcaaggcagcgttggtcacgcggcccccagcctggcacagaaagtccagtagtgcctcctggctcagctctcgggccatcgctgccttgtcctccgccccagaggtgtctgagtctcgccctcccggggctctccccagccagaggaaaccctggccgggcgagtgtcacctgcgcccggggcggcactagccgcccccatcagccgcggaggccagcgctgcccgcagcccgtgag

SEQ ID NO: 199462 - DNA, 267 bp, Homo sapiens
  chr4:77819271-77819538
  hyper
cgcaacgagtcctcacagcgaaagttcccgggatagggccgagtcggtttcacctgcgccctggcggcacctcctccctgcctctgggggaagggtcaggcccgcctcctcgtgtccctccgccccctgaggtctcccccaccccctgccacccatcccagaagagtcaggccggagagccagccggtaggtgaggttggcggcgaaccgagccggcagcgaactgctctgcggccggggaagtggaaggcaggtaggcgaccggcc

SEQ ID NO: 199463 - DNA, 156 bp, Homo sapiens
  chr4:77819573-77819729
  hyper
cgatagaaggtccgttcctgtcctccggtgctttgatgagttcaggctgaagccgatgggggaggaggagaagctgcaagttaacaggcaatctgagttatctttctttattaacgctgtagaggagtacttcagatttctcgaggctgtattgag

SEQ ID NO: 199464 - DNA, 120 bp, Homo sapiens
  chr4:78979307-78979427
  hyper
gtgcagtttaaaaatctcagcaggttttatggtatttcggtgaggtggaagtttttctgggaagggtgaggtggaagtgaaactggaataggctttttctgataagattcctactcctga

SEQ ID NO: 199465 - DNA, 692 bp, Homo sapiens
  chr4:78979792-78980484
  hyper
agtacggagaagcacgaaccagcctgcttcccagaacaaaagtggttaataagagtttaggttcattcttttacttcaccctccgcctcctggttttcctccgaggctccaagctacctgtaaaaccccggagccgcaggagagaaaaggaagccgtgagactagttgtcgccatgatatcaaatgcaatccgggctcagccaaataaatgagtcaataagtaaatcaagagtttggggtcatgggatgccgggcctggggacgcgaggcgctgtgagctccctcctgctccgaggagccagggaagtcgccccgccagtgcttagggagggggaagggagccggcgggctgggaggaagacggcttaatccacagcgcctggctctcggcttcccctcccggctccattcattattcatccagctgcgggaagaagagttcacctgcccagccgcaaaccagagccgcggctgggcggcggcggcgggcgcagggcgggccgccttctccgccctggtgcctaggaaggggcgcggggcggctcccgggagtcgagctctggcgcaggactgggggctgcgggaggcccggggaggacaaagctctgcctcgggtcgacctccagtcactggagcagctgccttttctttgctggcttcccaagagaaaggccttgggaatccacgcacaa

SEQ ID NO: 199466 - DNA, 213 bp, Homo sapiens
  chr4:81105153-81105366
  hyper
ccgccgaggggcccgcagtagctgcgctcccggggaaggagccccacagtccccaggtaaggaagccgcggggcaggcgaagggcggggaaggaggagcctgagcgttccggtacccaaccctctctctttcttgaccttcctcccctctgccccttcatcctgggcgcggagggcggaacagtttctggaccagagcacccgcgagaagcag

SEQ ID NO: 199467 - DNA, 150 bp, Homo sapiens
  chr4:81124731-81124881
  hyper
gccacctgcaggaataaacacgcgagaacatccaccgcttccttgcaccccgaaaccctgcacaaagacacatacattcaccgcccccccgcccccccaacgcgcacacacacgtcctctcctcccaggaacctcattcaaatatttacc

SEQ ID NO: 199468 - DNA, 265 bp, Homo sapiens
  chr4:83719069-83719334
  hyper
atcgcccgcccgtcctccctcgctgggagccgattcagcctgtgccgagcctctcccttcgcgcgcctctgcgcacagcggtggcaccgcaggactccgggtcccccccggctctccatcgggaagccggcaaatgcgcttcctcaggcagaccgcggcggggtgggggcggggggggggcggaagttgaaatactgggacagaaacacctgcccgtcccaagggacggaaaactggatgccaagggggccgcggcgcgcagcgg

SEQ ID NO: 199469 - DNA, 217 bp, Homo sapiens
  chr4:83720038-83720255
  hyper
cgctccgaaggagcgcggaagaaagccctgcttagctacagccaatcaggagcgcccgtgcggcgcttatagacaaaggcgcccccctttcggcttttcggggccgaactggggagcccgctgggcgggagttggccgcctccgcccgggggcgggtggaaggtggctcccggggcagggagcctgcagggcggctcacagcgcttctgctcttgtg

SEQ ID NO: 199470 - DNA, 207 bp, Homo sapiens
  chr4:83821725-83821932
  hyper
tcttcaggctcaggcccttccgattggctgctgggacacaacgtggcctgtcattggctacggcaccggcgcagggccttcggagaggaagtgtggaagtcccgcgcctctaaagcccgcctttcgtgacaaataaaggtcgtagccgcagagtcaacgggcggagctaaagtggtcgtgattcatgctgtcgcgggaaccccgaag

SEQ ID NO: 199471 - DNA, 46 bp, Homo sapiens
  chr4:84030840-84030886
  hyper
gggcttcaggaggcggggagtgggtgggtgggcttcttaccttctc

SEQ ID NO: 199472 - DNA, 137 bp, Homo sapiens
  chr4:84030916-84031053
  hyper
agcggcagctgcgcgcggggctcttcgatcaaccctcaccccgccggattacgcctcccgccagcccagctctgggacccctgggtctcctctgctgggaccagacctgcctgccggtaaattcttaagagcagccc

SEQ ID NO: 199473 - DNA, 224 bp, Homo sapiens
  chr4:84205947-84206171
  hyper
tgacgtcattccccggcaggcatgcgcagtggcacccgcaggatgcaatcctagtctgccaggctgggcggcggtgtgggcagaacctttcctcatccttacttgtgaaattggggtcatcgtggtcgcttactctagggaggaatacttaatgaaaaagggatttctattggcaaaaggcaaaaaaattacaataaatttagttgtaattttttacaactcga

SEQ ID NO: 199474 - DNA, 512 bp, Homo sapiens
  chr4:85419891-85420403
  hyper
actgggatgctctgctctttcggtcgcgcggctgattcgcattcgacgctcactgtgcccggggagaaagcgcatccagcccgcgggagatctagcctctgtgcgggcttcctccgcccacgctgccccgggctgctgcgccagaaagggcagtgccacggatccccgcggctcccaggtcctcacctccacccgccttgccctctggcccacggggcactggagttgcaatattgaaaagaaaaagggggaggaaaaacacagaaaaacaaaagactaagtgtgaaaagtctgacggctgggtttcggcgccgctcgtcagtccacttctgcaaacgggcccggcgacccccgccccacccccgctccctctctccctctcactctcagcctttgactctcctctctggcattttcttcgcggcttcccaggcttcggtcttctaagtcctgtcctctggccaaactgaccctctccgcggctcctccgctctttctctcctttcctctct

SEQ ID NO: 199475 - DNA, 116 bp, Homo sapiens
  chr4:85503740-85503856
  hyper
ggcgtttgaagcagcagtgttgagcgctgttaacatttagcgggcgtctttgagtagctcctccagccctcgcagcggcccagggactagcctgcaagttctcaacgctcacttcc

SEQ ID NO: 199476 - DNA, 250 bp, Homo sapiens
  chr4:85503985-85504235
  hyper
cgtcacctcacggggaggcggggctgtgggaaccgcagtgcagcgcagaggggcggggcctgcggcgcgagacctggtgcgggaggcccgggcagggagaagtgtgcggggccgggacaagccggctccgagtccggctccggggggcggggcgggaggggcctgcgcggcggcgggagcccagagccgcgctaaagcgggtcaagcgtcctccttttctccccgccccttctcctcctcctacctgggc

SEQ ID NO: 199477 - DNA, 321 bp, Homo sapiens
  chr4:85886793-85887114
  hyper
ggctccttccataatcgaagggcttccagcgtagggcgtagggggagaggcccgaagccctggagacagcgcccgagggatggaggccgcgctcggctgcgctcaggtccgggtggctccgggagctgagaccccgcaggatgcagcgggggggggccagggcctgatcccctacccctgcgagccagggccgcctacgcccccactgcttcccacaggtaacgtccagccctctcctcccctatcccccgaaatatcccggttccgctccgctccgctcgccgcccgtgaccccgaccccgacccgtccgcgacggcgcc

SEQ ID NO: 199478 - DNA, 518 bp, Homo sapiens
  chr4:85887200-85887718
  hyper
acagcagctgggccgcggcctgtccctagggggagcgggcgcagggccgcgagtgggcagcgcctccgccccgcacgaacaaagcggccaggcgcgccgggccgaggcagcaccgcctctccgggagcgcggggggcggggaggatggcgggggtactcacctgagggccggcggagggcgcgggcgggacaggcccaggagacgggaccgcggcgggccggggctccgcgccgagggcgcacgggctacggggaaggggcgaccggcgcgacgtccgcggcggggcccgggagccccgcgccgcgggccgggggccggggcccgagctcgattctgcggccgcgaggtatgggaaccggtccgccgggccaggcagcggtgctaggcagcaggggcagcgacgccgccgcctttcccttctcctgcccccgtccctgctccgccgcgtcctcgtcctcgctgggtccccgccgccgccgcctcagcctcggcgctcctcgggtttcttctctccatc

SEQ ID NO: 199479 - DNA, 407 bp, Homo sapiens
  chr4:85887958-85888365
  hyper
tccttcccttccctcggcttcccgctcttgcctcactctcagcggctgccttcgcccctgtctgcagacagcgccgctggatgctcccagctggacttcaaccccactcctctcagtccctctccccactgccttccagacgcgcctcttccccgccccgcgcccctctctcctctcccacccctgcccctctccgcggcgctcaccctcctcagtcccagtttctgaaaggactcagctgagaaaggacaactgggttccgctttccttaaccctacaccctttagctggatgctgtcagaggcgatggagaaacgcaaaggtgcgttaattttactctagccagagtataaaagaactgcccacgccagctattgtactacgcagcttcgaaactcctgcacgct

SEQ ID NO: 199480 - DNA, 63 bp, Homo sapiens
  chr4:85888399-85888462
  hyper
gttgaggagctcggtctcaaatggtgccttccgtcagtgaccttgagtcggttgcctaagatt

SEQ ID NO: 199481 - DNA, 206 bp, Homo sapiens
  chr4:86851234-86851440
  hyper
aagcagccgcagccacagccttggtgaggagcaaccgcagccctgccagctccctcccagttctcattgagaaaaggggagacggagcaggaggagggggaggagatgctccctgcaaagctgcctccccccacagatccaaagagcctcttggaatgggcactcgactgttctgacgttgtgattctctcgggagtttgaagaca

SEQ ID NO: 199482 - DNA, 197 bp, Homo sapiens
  chr4:87515019-87515216
  hyper
aggctgagaggcagcgaagagtaagggaggagccagcacttacgcatttttcactctcctcctcactccctagggtcatagttttgattctgaagttagaagtgtgggggtcgtcggctgcattttcaacttggcctaaaagttggagttcaccacactgcaggcgctaggaactctgccgctcggtcaccaacctg

SEQ ID NO: 199483 - DNA, 32 bp, Homo sapiens
  chr4:87813018-87813050
  hyper
ctccaacaccgctgcgccaaaatgtgtctgat

SEQ ID NO: 199484 - DNA, 340 bp, Homo sapiens
  chr4:87813080-87813420
  hyper
cctgcacaggaaccacccgccccggcccgggcactttgagcagagcaatccttcccaggttttccctcattcaaaacactcagcaccactcccgcgtccccgcccttgcacgccgattcggggcgagtcccctacccttccccggacggacgcgcagggcccgggaggaactggttcccgggacgggtgggggcctcggccgcccacagagcccgcggagaagggaacggcctcagcctcggctccttcccacacctgggccccaccctgcctccgactcgccaggaatgcgctgtgtgcgcggggcttccagggtggcgggtccccgcgagccggcgcc

SEQ ID NO: 199485 - DNA, 327 bp, Homo sapiens
  chr4:87813512-87813839
  hyper
acacgcctcggggccgcgccgcaggcacacgcctccttcccgctcgccgcgggcgccgagtctggggctcctcgcgtcacacgggagcctcaacaaagggctttgtggggccctccccacccgccagggaggggacgccgggcccgggagacgcgccccgcggggtccgctctctggtaaccgggccggggcaggccgcgctctcggaatccagccaaccagccagagagggctgtaagccagacctttcctgggaaggacgctttccaatgtagggggctgcatccaagcgatctggacttcgtttgcgggcgccatttaaagaaa

SEQ ID NO: 199486 - DNA, 809 bp, Homo sapiens
  chr4:87856624-87857433
  hyper
aaaaacaggggacggggacatgggaagagacccatgctcctccctcacgcgcagcccccaagtcagacgtttgcctgtgcaccccgcgttttgcggagagctgtcccgttgttgggacctgctacttgagttgcgtaatgagtcccagaagtttctcggggggagggggcggggaaaagtggggttcttctctcctgcaccccgggacccttccctgtgcctgtcgtggagagagatgagggcttcccgccgcgtctcgctgagagcaggagggaggcgtgtgtcggtggtccgtagcctccggggaggagttggagccaccttctgagacttaacttcagggacagagggagaggcgtctttagtatgggactggttaatttctcttgataatgcttttttccctcgggtgtcccatcctctgtggccgtcgcaaccccaccctccgacggtgcgagcgccggagccagcgaatgagaggggagagaaggtggagagtgtgaatcacacgttaccttagtgtaatggtagttgcattaatggagctgcgacgggcctgcgggcggttcgataccgtccggctagttttctcttcccggagcttctccaccaccagcacccgcaaattgttatgcagatcatcccgggaaggcacttggctttggaggtggagatgtgtccgaatctcccttgaaccagtctctgttagggggaaaggccttgcagccaagtgatttgttttaagggtggagccggagataattttaaacaccctcccccttggtgcacgttgcggggtgtgactcacc

SEQ ID NO: 199487 - DNA, 42 bp, Homo sapiens
  chr4:88887030-88887072
  hyper
gagcagctgtcaggcagagagggtccccaaggcagaactggg

SEQ ID NO: 199488 - DNA, 212 bp, Homo sapiens
  chr4:89079573-89079785
  hyper
ggatctcaggatgcgtgcgctcggaggcagcgctttaacaattaaggatgtaaatgttgggatgagtcacccggaccttccaaacaaactctaaagcagcagtttccacttaacaagaccaccaagcatgtgcacggtgcgttcctaaatcctacccagttcctccacaggctgcctccttgccgcgtctctcaatctcagtgggagtggcg

SEQ ID NO: 199489 - DNA, 393 bp, Homo sapiens
  chr4:89377924-89378317
  hyper
caacgcttaacaaactttggcttccgttatccctccctctggaaatgcgtgtgtcagggtgcctcctagtggaactgcagcgtttcctcgaaagccattccgtccaggagttaaggtggccgctgcccgcccgggacactttctcagtccagcccatcggcctttaccccagccaacgacctgttgcctttggccgcctgccaagtcactctcattacagtttccttttccttttcgattccgccccctaaaaacaacaacaaacattatgtttcgttttccactggagctgcaggccccgcccccaaacagcacgtggggggcgtggcgtcccggcaggggctcagtagctgaggctgcggttccccgacgccacgcagctgcgcgcagctg

SEQ ID NO: 199490 - DNA, 151 bp, Homo sapiens
  chr4:89513528-89513679
  hyper
gccgccattggcgcgggcccatcccagaacggcgcccattggcccggtgcgaagccattcacccagcgcattccgccgcccgcaggcttgcggggaaacttccttattattgtgacgccgaaaacggagaaaccccgggtccggcgagagg

SEQ ID NO: 199491 - DNA, 209 bp, Homo sapiens
  chr4:90228653-90228862
  hyper
ccctgtgcaaaatgtgggaccgaatcccttccgcatccctacagagcacaccaccaggctccggtcccccgcgctggccgccaggcggaggtgcgcagggggcgtctcctacctgctctgcccggctccgcggcgcggcggggccactgcctgcgctgtggcgggggcttcccgtcgcatatcccaagcaccgtctctcggcgccacac

SEQ ID NO: 199492 - DNA, 234 bp, Homo sapiens
  chr4:91048333-91048567
  hyper
gggaaaaggccaggtcagcacggtgggatactgcttcccctaaaatgaaaactcagcagcgggccagcagtgggtgtgcgcgcgtcgatgccagaggatgcgtgcgtggaatccggcggacgcagtgggccgggcaccgccctccaagccgccccgcccagcccaccacactcctccttgtataaaggccgcgcttgggcccgccctcctcacagccccggagcgcggcctgcc

SEQ ID NO: 199493 - DNA, 91 bp, Homo sapiens
  chr4:91048568-91048659
  hyper
gggaggtggatctcgcgctccccacacagtcacactccgcgcactcacacacttggaagcgcctccccacgtccctcccctgccctcctct

SEQ ID NO: 199494 - DNA, 51 bp, Homo sapiens
  chr4:91048895-91048946
  hyper
gggaccaggaaggacacccccgtgccccgaagacataaatccctgagtgcc

SEQ ID NO: 199495 - DNA, 196 bp, Homo sapiens
  chr4:91049201-91049397
  hyper
ggcccgcgactcccagtgcgccgcgtggccatttcctccacgctgctgcgtggtttgctgcctgcggccgcggcggccgctccagggcgatgcggagcgctggccaaggcggcgagagttggcgcaggcttcgggtcgctccccttcctcgccactcgcgtcccgcaggtagaggcgaccggtcagcgctggcgcc

SEQ ID NO: 199496 - DNA, 87 bp, Homo sapiens
  chr4:92905822-92905909
  hyper
gatgaacaggtcagacggggaaggagggaagcagtccaactagctgaaaagatcatggtctattaaactttaccacagatctcagtg

SEQ ID NO: 199497 - DNA, 91 bp, Homo sapiens
  chr4:93224881-93224972
  hyper
ttccccctctctccgcctgacagcaccgctctctcgcaggctcgctccttctcctaggtgatccatttctaggcaacgtggggctggtgct

SEQ ID NO: 199498 - DNA, 163 bp, Homo sapiens
  chr4:94749562-94749725
  hyper
gcaccagccgagagccggctccgcaccgctcccgcaccccagccgccggggtggtgacacacaccggagtcgaattacagccctgcaattaacatatgaatctgacgaatttaaaagaaggaaaaaaaaaaaaaaacctgagcaggcttgggagtcctctgca

SEQ ID NO: 199499 - DNA, 167 bp, Homo sapiens
  chr4:94749755-94749922
  hyper
ctttgattggctgctcgcacgcgcctgcccgcgccctccattggctgagaagacacgcgaccggcgcgaggagggggttgggagaggagcggggggagactgagtggcgcgtgccgctttttaaaggggcgcagcgccttcagcaaccggagaagcatagttgcacg

SEQ ID NO: 199500 - DNA, 34 bp, Homo sapiens
  chr4:94750522-94750556
  hyper
ccagcaaacaggtgaatggggtgcagaagcagag

SEQ ID NO: 199501 - DNA, 54 bp, Homo sapiens
  chr4:94753547-94753601
  hyper
atcaagcgattgcttctaacacatttccatttcgctctcaataagcagacccaa

SEQ ID NO: 199502 - DNA, 60 bp, Homo sapiens
  chr4:95678999-95679059
  hyper
aaaaaaattccagaggcagccgaggagcgagagggaaaaaaaaaaaaaaaaaaaaaaaaa

SEQ ID NO: 199503 - DNA, 221 bp, Homo sapiens
  chr4:96469413-96469634
  hyper
tcagagactcagtgaagatcctgctaccccagtcttggcacagcgcggggagcctctgcgcatcatgcgcttcggggtgcatctacggtatgtcacacagccacccgcaccgagagtctttccaaacctccgtgtgtgcaatatgcaacaacgtgcgcgtgcggagctgaaagggcacaagacactccaggctcccacacgtatggagacggatcggctgc

SEQ ID NO: 199504 - DNA, 133 bp, Homo sapiens
  chr4:96469635-96469768
  hyper
tgtccacaccccgttcgtccctggtccattcgtgcccatctcagaagatagattaaacataataataataataattattattattataatcaaagcttcttgactagttgggaaagtggaatttagagtggtt

SEQ ID NO: 199505 - DNA, 429 bp, Homo sapiens
  chr4:96470264-96470693
  hyper
cacttgggaagtccagggaggcgcaaggcggccacctccgccgctccccccagcagcaggagcagccgcagctccgccgcacgccgaagtctggactgctctccgggtcccctcgcctgtgaggaacacacacagacaccgggggtgggggtgggggtgggggttgaagtggggggagttggaggaggagggaacggagggaggaagcttgggcaccgtcaggcgctctggtctccaatctcagtgttctcacgccggcggagagatgtcccggctgtcgctgctgggtggccaaggaggttcacatcctagagtagggcgcacgggtgcgcgaaggcgctcgccaaggaggcgtagagggcgcagcacaactcctctggggggtaaccgggggcgggagcacgcccgcccgccttatgtaagcaagga

SEQ ID NO: 199506 - DNA, 46 bp, Homo sapiens
  chr4:96471192-96471238
  hyper
ctgacaagggtggtgatgcgataccgagagaaactctcttagaaaa

SEQ ID NO: 199507 - DNA, 76 bp, Homo sapiens
  chr4:99850526-99850602
  hyper
gcggttctcaacgcggcggacactcgcttgctggagggtggtttcagtcctctgctcttccgcctggatagctgcg

SEQ ID NO: 199508 - DNA, 154 bp, Homo sapiens
  chr4:100729523-100729677
  hyper
catagagaggaaggaaaaagcgatggatctaatcttgacttcaggtaaaacagctcccccgcgcccaccaacgcggtattactgccacctagtgatagcatatcctcatcacagaggtcctgcctgtggaagtggaggggaagaggtgtagtaa

SEQ ID NO: 199509 - DNA, 257 bp, Homo sapiens; identical to SEQ ID NO: 110403
  chr4:100867945-100868202
  hyper

SEQ ID NO: 199510 - DNA, 119 bp, Homo sapiens
  chr4:101111126-101111245
  hyper
ccagttgcaaccatggtcaacggctctgtttccttcgcgaggcgcaacggcctttcctgagcgctggaaaaaatgaggcgagaagagacggatttgcaaaagcaggcgagtcgtgcaga

SEQ ID NO: 199511 - DNA, 216 bp, Homo sapiens
  chr4:101111971-101112187
  hyper
atctgtgcatttccttgtcctggggctttgctgtgtcatcctgaacacttggcttaaatctgttgcaacgtccactgagcatcatttatgcacttatttctggcctctaacccagtcaactctactctgcctcccagggtttctgtatcctcctctgctgcaagcggtcagatctagttttcctttcccgcatcgaaggctcgccagcattttaag

SEQ ID NO: 199512 - DNA, 80 bp, Homo sapiens
  chr4:102269360-102269440
  hyper
gccaaaacggcgacgaataaacaacttaccttgcggagaagagctacgactgcgatgcggtgtacggttgtttttgcttt

SEQ ID NO: 199513 - DNA, 91 bp, Homo sapiens
  chr4:102711787-102711878
  hyper
ggatgtaagagcaggcccctgagcagtttcacttcctctgggcgcccagcagagcggagccctggccttgcgggcatgagccccggggctg

SEQ ID NO: 199514 - DNA, 341 bp, Homo sapiens
  chr4:103681575-103681916
  hyper
cgcttcagtagagaacgactgcagtaagtaaactgctagtagcaacactgttcccctatctaaacttcccctttccagagttactgatgtcccaacatgggtcggtcgctcagtctccgtcaagcccgtaccccatagcttgggcatttccccccgcagatcacaagatgcaaaggggaagttactaccaaaccgacgagaatggcccagagctgggggctgccaggcggttcctgggcccctctcagcaccagaagaaggcgggcgcaggctcgccgcgggtcggccgcacgccatacctggatcaggccctgctggaacaaggcgctgtgcacgcagcc

SEQ ID NO: 199515 - DNA, 103 bp, Homo sapiens
  chr4:104020935-104021038
  hyper
ttactttaagcagcgagctgatggcgttctccagaactcggtttgagcaacaaacttgagacaacctttgtctggaagcaagtcaagcgcttaataatgcatg

SEQ ID NO: 199516 - DNA, 42 bp, Homo sapiens
  chr4:106067031-106067073
  hyper
aaacagaaggtgggccggggcggggagaaacagaactcggtc

SEQ ID NO: 199517 - DNA, 281 bp, Homo sapiens
  chr4:106067220-106067501
  hyper
gatagagacgcgggcctctgagggtaaggtgggcgcaagcggaggtgtggtgcggggagaggtgccagtgggtggaggcgggggccagagcgagggcacgtgcgggtacactccggaggaggtgggtgcgcgcgggggcgtgtgcgcgggacctcgaagtggtggtggagtgcagaccagcaaaaagtttcaaagggaaatcttagatgtcacgtctttgtccaggcacccgtgccatcccaacctcccacctcgcccccaaccttcgcgcttgctctgct

SEQ ID NO: 199518 - DNA, 295 bp, Homo sapiens
  chr4:106067841-106068136
  hyper
ggcagtggcagcggcgagagcttgggcggccgccgccgcctcctcgcgagcgccgcgcgcccgggtcccgctcgcatgcaagtcacgtccgccccctcggcgcggccgccccgagacgccggccccgctgagtgatgagaacagacgtcaaactgccttatgaatattgatgcggaggctaggctgctttcgtagagaagcagaaggaagcaagatggctgccctttaggatttgttagaaaggagacccgactgcaactgctggattgctgcaaggctgagggacgagaacgag

SEQ ID NO: 199519 - DNA, 277 bp, Homo sapiens
  chr4:106068588-106068865
  hyper
tgatagggtgtttttcgacccttttatcagctgtagggtctgggtctgggtttgtgtctgcctcctcctaccttcttatccccctttagggggctgtacgaagtgaatgtcacagggagtggaattggagtacactgagtgggttttttttttccttaagtccgcgcgttttgttagcggcgctgagtgaaagaggaaagaatagtttctctggttccccaaacaagaccagaactcacttttctcaaggtacataagtcagcgctgggctgagcct

SEQ ID NO: 199520 - DNA, 146 bp, Homo sapiens
  chr4:106111516-106111662
  hyper
gctggcaaacattcagcagcacaccctctcaagattgtttacttgcctttgctcctgttgagttacaacgcttggaagcaggagatgggctcagcagcagccaataggacatgatccaggaagagcagtaagggactgagctgctg

SEQ ID NO: 199521 - DNA, 4461 bp, Homo sapiens
  chr4:106155053-106159514
  hyper
aattcaactagagggcagccttgtggatggccccgaagcaagcctgatggaacaggatagaaccaaccatgttgagggcaacagactaagtccattcctgataccatcacctcccatttgccagacagaacctctggctacaaagctccagaatggaagcccactgcctgagagagctcatccagaagtaaatggagacaccaagtggcactctttcaaaagttattatggaataccctgtatgaagggaagccagaatagtcgtgtgagtcctgactttacacaagaaagtagagggtattccaagtgtttgcaaaatggaggaataaaacgcacagttagtgaaccttctctctctgggctccttcagatcaagaaattgaaacaagaccaaaaggctaatggagaaagacgtaacttcggggtaagccaagaaagaaatccaggtgaaagcagtcaaccaaatgtctccgatttgagtgataagaaagaatctgtgagttctgtagcccaagaaaatgcagttaaagatttcaccagtttttcaacacataactgcagtgggcctgaaaatccagagcttcagattctgaatgagcaggaggggaaaagtgctaattaccatgacaagaacattgtattacttaaaaacaaggcagtgctaatgcctaatggtgctacagtttctgcctcttccgtggaacacacacatggtgaactcctggaaaaaacactgtctcaatattatccagattgtgtttccattgcggtgcagaaaaccacatctcacataaatgccattaacagtcaggctactaatgagttgtcctgtgagatcactcacccatcgcatacctcagggcagatcaattccgcacagacctctaactctgagctgcctccaaagccagctgcagtggtgagtgaggcctgtgatgctgatgatgctgataatgccagtaaactagctgcaatgctaaatacctgttcctttcagaaaccagaacaactacaacaacaaaaatcagtttttgagatatgcccatctcctgcagaaaataacatccagggaaccacaaagctagcgtctggtgaagaattctgttcaggttccagcagcaatttgcaagctcctggtggcagctctgaacggtatttaaaacaaaatgaaatgaatggtgcttacttcaagcaaagctcagtgttcactaaggattccttttctgccactaccacaccaccaccaccatcacaattgcttctttctccccctcctcctcttccacaggttcctcagcttccttcagaaggaaaaagcactctgaatggtggagttttagaagaacaccaccactaccccaaccaaagtaacacaacacttttaagggaagtgaaaatagagggtaaacctgaggcaccaccttcccagagtcctaatccatctacacatgtatgcagcccttctccgatgctttctgaaaggcctcagaataattgtgtgaacaggaatgacatacagactgcagggacaatgactgttccattgtgttctgagaaaacaagaccaatgtcagaacacctcaagcataacccaccaatttttggtagcagtggagagctacaggacaactgccagcagttgatgagaaacaaagagcaagagattctgaagggtcgagacaaggagcaaacacgagatcttgtgcccccaacacagcactatctgaaaccaggatggattgaattgaaggcccctcgttttcaccaagcggaatcccatctaaaacgtaatgaggcatcactgccatcaattcttcagtatcaacccaatctctccaatcaaatgacctccaaacaatacactggaaattccaacatgcctggggggctcccaaggcaagcttacacccagaaaacaacacagctggagcacaagtcacaaatgtaccaagttgaaatgaatcaagggcagtcccaaggtacagtggaccaacatctccagttccaaaaaccctcacaccaggtgcacttctccaaaacagaccatttaccaaaagctcatgtgcagtcactgtgtggcactagatttcattttcaacaaagagcagattcccaaactgaaaaacttatgtccccagtgttgaaacagcacttgaatcaacaggcttcagagactgagccattttcaaactcacaccttttgcaacataagcctcataaacaggcagcacaaacacaaccatcccagagttcacatctccctcaaaaccagcaacagcagcaaaaattacaaataaagaataaagaggaaatactccagacttttcctcacccccaaagcaacaatgatcagcaaagagaaggatcattctttggccagactaaagtggaagaatgttttcatggtgaaaatcagtattcaaaatcaagcgagttcgagactcataatgtccaaatgggactggaggaagtacagaatataaatcgtagaaattccccttatagtcagaccatgaaatcaagtgcatgcaaaatacaggtttcttgttcaaacaatacacacctagtttcagagaataaagaacagactacacatcctgaactttttgcaggaaacaagacccaaaacttgcatcacatgcaatattttccaaataatgtgatcccaaagcaagatcttcttcacaggtgctttcaagaacaggagcagaagtcacaacaagcttcagttctacagggatataaaaatagaaaccaagatatgtctggtcaacaagctgcgcaacttgctcagcaaaggtacttgatacataaccatgcaaatgtttttcctgtgcctgaccagggaggaagtcacactcagacccctccccagaaggacactcaaaagcatgctgctctaaggtggcatctcttacagaagcaagaacagcagcaaacacagcaaccccaaactgagtcttgccatagtcagatgcacaggccaattaaggtggaacctggatgcaagccacatgcctgtatgcacacagcaccaccagaaaacaaaacatggaaaaaggtaactaagcaagagaatccacctgcaagctgtgataatgtgcagcaaaagagcatcattgagaccatggagcagcatctgaagcagtttcacgccaagtcgttatttgaccataaggctcttactctcaaatcacagaagcaagtaaaagttgaaatgtcagggccagtcacagttttgactagacaaaccactgctgcagaacttgatagccacaccccagctttagagcagcaaacaacttcttcagaaaagacaccaaccaaaagaacagctgcttctgttctcaataattttatagagtcaccttccaaattactagatactcctataaaaaatttattggatacacctgtcaagactcaatatgatttcccatcttgcagatgtgtaggtaagtgccagaaatgtactgagacacatggcgtttatccagaattagcaaatttatcttcagatatgggattttccttctttttttaaatcttgagtctggcagcaatttgtaaaggctcataaaaatctgaagcttacattttttgtcaagttaccgatgcttgtgtcttgtgaaagagaacttcacttacatgcagtttttccaaaagaattaaataatcgtgcatgtttatttttccctctcttcagatcctgtaaaatttgaatgtatctgttttagatcaattcgcctatttagctctttgtatattatctcctggagagacagctaggcagcaaaaaaacaatctattaaaatgagaaaataacgaccataggcagtctaatgtacgaactttaaatattttttaattcaaggtaaaatatattagtttcacaagatttctggctaatagggaaattattatcttcagtcttcatgagttgggggaaatgataatgctgacactcttagtgctcctaaagtttccttttctccatttatacatttggaatgttgtgatttatattcattttgattcccttttctctaaaatttcatctttttgattaaaaaatatgatacaggcatacctcagagatattgtgggtttggctccataccacaataaaatgaatattacaataaagcaagttgtaaggactttttggtttctcactgtatgtaaaagttatttatatactatactgtaacatactaagtgtgcaatagcattgtgtctaaaaaatatatactttaaaaataatttattgttaaaaaaatgccaacaattatctgggcctttagtgagtgctaatctttttgctggtggagggtcgtgcttcagtattgatcgctgtggactgatcatggtggtagttgctgaaggttgctgggatggctgtgtgtgtggcaatttcttaaaataagacaacagtgaagtgctgtatcaattgatttttcc

SEQ ID NO: 199522 - DNA, 240 bp, Homo sapiens
  chr4:106159634-106159874
  hyper
ttttgtaattttctgaatcctttgttgtcatttcagcagtttacagcatcttcattggaagtatattccatctcaaacattctttgttcatccataagaagcaacttcttatcaagttttttcatgacattgcagtaactcagccccatcttcaggctctacttctaattctggttctcttgctacatctccctcatctgcagtgacctctccacggaagtcttgaactcctcaaagtaa

SEQ ID NO: 199523 - DNA, 180 bp, Homo sapiens
  chr4:106160114-106160294
  hyper
tgttgtattaacaggcacgaaaacagcattaatcttgtgcatctccatcggagctcttgggtgactaggtgccttgagcagtaatattttgaaaggaggttttggttttgttttttgttttttttttttgttttttagcagtaagtctcaacactgggcttaaaatattcagtaaactat

SEQ ID NO: 199524 - DNA, 120 bp, Homo sapiens
  chr4:106161134-106161254
  hyper
cggctggttgatagagcaggcagaatgcacacaacatttatcagattatgtttgcaccatttaccagattatgggtacggtttgtggcaccccccaaaaattagaatagtaacatcaaag

SEQ ID NO: 199525 - DNA, 2721 bp, Homo sapiens
  chr4:106161374-106164095
  hyper
tagacatacttaacacgtgggattgccacaaaccttcagtttgtaaaagtcacagtaactgtgactcacaaaagaacaaagcacaataaaacgaggtatgcctgtatttttaaaaaaagctttttgttaaaattcaggatatgtaataggtctgtaggaatagtgaaatatttttgctgatggatgtagatatatacgtggatagagatgaagatcttaattatagctatgcagcatagatttagtcaaagacatttgaaaagacaaatgttaaattagtgtggctaatgacctacccgtgccatgttttccctcttgcaatgagataccccacactgtgtagaaggatggagggaggactcctactgtccctctttgcgtgtggttattaagttgcctcactgggctaaaacaccacacatctcatagataatatttggtaagttgtaatcgtcttcactcttctcttatcacccacccctatcttcccacttttccatctttgttggtttgcaacagccccttctttttgcctgactctccaggattttctctcatcataaattgttctaaagtacatactaatatgggtctggattgactattcttatttgcaaaacagcaattaaatgttatagggaagtaggaagaaaaaggggtatccttgacaataaaccaagcaatattctgggggtgggatagagcaggaaattttatttttaatcttttaaaatccaagtaataggtaggcttccagttagctttaaatgttttttttttccagctcaaaaaattggattgtagttgatactacatataatacattctaattccctcactgtattctttgtttagtttcatttatttggtttaaaataattttttatcccatatctgaaatgtaatatatttttatccaacaaccagcatgtacatatacttaattatgtggcacattttctaatagatcagtccatcaatctactcattttaaagaaaaaaaaattttaaagtcacttttagagcccttaatgtgtagttgggggttaagctttgtggatgtagcctttatatttagtataattgaggtctaaaataataatcttctattatctcaacagagcaaattattgaaaaagatgaaggtcctttttatacccatctaggagcaggtcctaatgtggcagctattagagaaatcatggaagaaaggtaattaacgcaaaggcacagggcagattaacgtttatccttttgtatatgtcagaatttttccagccttcacacacaaagcagtaaacaattgtaaattgagtaattattagtaggcttagctattctagggttgccaacactacacactgtgctattcaccagagagtcacaatatttgacaggactaatagtctgctagctggcacaggctgcccactttgcgatggatgccagaaaacccaggcatgaacaggaatcggccagccaggctgccagccacaaggtactggcacaggctccaacgagaggtcccactctggctttcccacctgataataaagtgtcaaagcagaaagactggtaaagtgtggtataagaaaagaaccactgaattaaattcacctagtgttgcaaatgagtacttatctctaagttttcttttaccataaaaagagagcaagtgtgatatgttgaatagaaagagaaacatactatttacagctgcctttttttttttttttcgctatcaatcacaggtatacaagtacttgcctttactcctgcatgtagaagactcttatgagcgagataatgcagagaaggcctttcatataaatttatacagctctgagctgttcttcttctagggtgccttttcattaagaggtaggcagtattattattaaagtacttaggatacattggggcagctaggacatattcagtatcattcttgctccatttccaaattattcatttctaaattagcatgtagaagttcactaaataatcatctagtggcctggcagaaatagtgaatttccctaagtgccttttttttgttgtttttttgttttgttttttaaacaagcagtaggtggtgctttggtcataagggaagatatagtctatttctaggactattccatattttccatgtggctggatactaactatttgccagcctccttttctaaattgtgagacattcttggaggaacagttctaactaaaatctattatgactccccaagttttaaaatagctaaatttagtaagggaaaaaatagtttatgttttagaagactgaacttagcaaactaacctgaattttgtgctttgtgaaattttatatcgaaatgagctttcccattttcacccacatgtaatttacaaaatagttcattacaattatctgtacattttgatattgaggaaaaacaaggcttaaaaaccattatccagtttgcttggcgtagacctgtttaaaaaataataaaccgttcatttctcaggatgtggtcatagaataaagttatgctcaaatgttcaaatattttgattgcctcttgaattcatttgctaattgtatgtgtgtgtgtttctgtgggtttctttaaggtttggacagaagggtaaagctattaggattgaaagagtcatctatactggtaaagaaggcaaaagttctcagggatgtcctattgctaagtgggtaagtgtgac

SEQ ID NO: 199526 - DNA, 230 bp, Homo sapiens
  chr4:106164712-106164942
  hyper
ggtgatccacgcaggtggttcgcagaagcagcagtgaagagaagctactgtgtttggtgcgggagcgagctggccacacctgtgaggctgcagtgattgtgattctcatcctggtgtgggaaggaatcccgctgtctctggctgacaaactctactcggagcttaccgagacgctgaggaaatacggcacgctcaccaatcgccggtgtgccttgaatgaagagtaagtg

SEQ ID NO: 199527 - DNA, 177 bp, Homo sapiens
  chr4:106180762-106180939
  hyper
tttgatttttcaggagaacttgcgcctgtcaggggctggatccagaaacctgtggtgcctccttctcttttggttgttcatggagcatgtactacaatggatgtaagtttgccagaagcaagatcccaaggaagtttaagctgcttggggatgacccaaaagaggtttgtttacttc

SEQ ID NO: 199528 - DNA, 107 bp, Homo sapiens
  chr4:106182911-106183018
  hyper
acaggaagagaaactggagtctcatttgcaaaacctgtccactcttatggcaccaacatataagaaacttgcacctgatgcatataataatcaggtaagtttaaata

SEQ ID NO: 199529 - DNA, 161 bp, Homo sapiens
  chr4:106190752-106190913
  hyper
cttttatttttcagattgaatatgaacacagagcaccagagtgccgtctgggtctgaaggaaggccgtccattctcaggggtcactgcatgtttggacttctgtgctcatgcccacagagacttgcacaacatgcagaatggcagcacattggtaagttgg

SEQ ID NO: 199530 - DNA, 376 bp, Homo sapiens
  chr4:106193708-106194084
  hyper
cttccctaccaggtatgcactctcactagagaagacaatcgagaatttggaggaaaacctgaggatgagcagcttcacgttctgcctttatacaaagtctctgacgtggatgagtttgggagtgtggaagctcaggaggagaaaaaacggagtggtgccattcaggtactgagttcttttcggcgaaaagtcaggatgttagcagagccagtcaagacttgccgacaaaggaaactagaagccaagaaagctgcagctgaaaagctttcctccctggagaacagctcaaataaaaatgaaaaggaaaagtcagccccatcacgtacaaaacaaactgaaaacgcaagccaggctaaacagttggcaggtaaattta

SEQ ID NO: 199531 - DNA, 3101 bp, Homo sapiens
  chr4:106196198-106199299
  hyper
ccacagaacttttgcgactttcaggaccagtcatgcagcagtcccagcagccccagcctctacagaagcagccaccacagccccagcagcagcagagaccccagcagcagcagccacatcaccctcagacagagtctgtcaactcttattctgcttctggatccaccaatccatacatgagacggcccaatccagttagtccttatccaaactcttcacacacttcagatatctatggaagcaccagccctatgaacttctattccacctcatctcaagctgcaggttcatatttgaattcttctaatcccatgaacccttaccctgggcttttgaatcagaatacccaatatccatcatatcaatgcaatggaaacctatcagtggacaactgctccccatatctgggttcctattctccccagtctcagccgatggatctgtataggtatccaagccaagaccctctgtctaagctcagtctaccacccatccatacactttaccagccaaggtttggaaatagccagagttttacatctaaatacttaggttatggaaaccaaaatatgcagggagatggtttcagcagttgtaccattagaccaaatgtacatcatgtagggaaattgcctccttatcccactcatgagatggatggccacttcatgggagccacctctagattaccacccaatctgagcaatccaaacatggactataaaaatggtgaacatcattcaccttctcacataatccataactacagtgcagctccgggcatgttcaacagctctcttcatgccctgcatctccaaaacaaggagaatgacatgctttcccacacagctaatgggttatcaaagatgcttccagctcttaaccatgatagaactgcttgtgtccaaggaggcttacacaaattaagtgatgctaatggtcaggaaaagcagccattggcactagtccagggtgtggcttctggtgcagaggacaacgatgaggtctggtcagacagcgagcagagctttctggatcctgacattgggggagtggccgtggctccaactcatgggtcaattctcattgagtgtgcaaagcgtgagctgcatgccacaacccctttaaagaatcccaataggaatcaccccaccaggatctccctcgtcttttaccagcataagagcatgaatgagccaaaacatggcttggctctttgggaagccaaaatggctgaaaaagcccgtgagaaagaggaagagtgtgaaaagtatggcccagactatgtgcctcagaaatcccatggcaaaaaagtgaaacgggagcctgctgagccacatgaaacttcagagcccacttacctgcgtttcatcaagtctcttgccgaaaggaccatgtccgtgaccacagactccacagtaactacatctccatatgccttcactcgggtcacagggccttacaacagatatatatgatatcacccccttttgttggttacctcacttgaaaagaccacaaccaacctgtcagtagtatagttctcatgacgtgggcagtggggaaaggtcacagtattcatgacaaatgtggtgggaaaaacctcagctcaccagcaacaaaagaggttatcttaccatagcacttaattttcactggctcccaagtggtcacagatggcatctaggaaaagaccaaagcattctatgcaaaaagaaggtggggaagaaagtgttccgcaatttacatttttaaacactggttctattattggacgagatgatatgtaaatgtgatcccccccccccgcttacaactctacacatctgtgaccacttttaataatatcaagtttgcatagtcatggaacacaaatcaaacaagtactgtagtattacagtgacaggaatcttaaaataccatctggtgctgaatatatgatgtactgaaatactggaattatggctttttgaaatgcagtttttactgtaatcttaacttttatttatcaaaatagctacaggaaacatgaatagcaggaaaacactgaatttgtttggatgttctaagaaatggtgctaagaaaatggtgtctttaatagctaaaaatttaatgcctttatatcatcaagatgctatcagtgtactccagtgcccttgaataataggggtaccttttcattcaagtttttatcataattacctattcttacacaagcttagtttttaaaatgtggacattttaaaggcctctggattttgctcatccagtgaagtccttgtaggacaataaacgtatatatgtacatatatacacaaacatgtatatgtgcacacacatgtatatgtataaatattttaaatggtgttttagaagcactttgtctacctaagctttgacaacttgaacaatgctaaggtactgagatgtttaaaaaacaagtttactttcattttagaatgcaaagttgatttttttaaggaaacaaagaaagcttttaaaatatttttgcttttagccatgcatctgctgatgagcaattgtgtccatttttaacacagccagttaaatccaccatggggcttactggattcaagggaatacgttagtccacaaaacatgttttctggtgctcatctcacatgctatactgtaaaacagttttatacaaaattgtatgacaagttcattgctcaaaaatgtacagttttaagaattttctattaactgcaggtaataattagctgcatgctgcagactcaacaaagctagttcactgaagcctatgctattttatggatcataggctcttcagagaactgaatggcagtctgcctttgtgttgataattatgtacattgtgacgttgtcatttcttagcttaagtgtcctctttaacaagaggattgagcagactgatgcctgcataagatgaataaacagggttagttccatgtgaatctgtcagttaaaaagaaacaaaaacaggcagctggtttgctgtggtggttttaaatcattaatttgtataaagaagtgaaagagttgtatagtaaattaaattgtaaacaaaacttttttaatgcaatgctttagtatt

SEQ ID NO: 199532 - DNA, 1601 bp, Homo sapiens
  chr4:106199359-106200960
  hyper
tgagtttgaagcagaattcacatcatgatggtgctactcagcctgctacaaatatatcataatgtgagctaagaattcattaaatgtttgagtgatgttcctacttgtcatatacctcaacactagtttggcaataggatattgaactgagagtgaaagcattgtgtaccatcatttttttccaagtccttttttttattgttaaaaaaaaaagcataccttttttcaatacttgatttcttagcaagtataacttgaacttcaacctttttgttctaaaaattcagggatatttcagctcatgctctccctatgccaacatgtcacctgtgtttatgtaaaattgttgtaggttaataaatatattctttgtcagggatttaacccttttattttgaatcccttctattttacttgtacatgtgctgatgtaactaaaactaattttgtaaatctgttggctctttttattgtaaagaaaagcattttaaaagtttgaggaatcttttgactgtttcaagcaggaaaaaaaaattacatgaaaatagaatgcactgagttgataaagggaaaaattgtaaggcaggagtttggcaagtggctgttggccagagacttacttgtaactctctaaatgaagtttttttgatcctgtaatcactgaaggtacatactccatgtggacttcccttaaacaggcaaacacctacaggtatggtgtgcaacagattgtacaattacattttggcctaaatacatttttgcttactagtatttaaaataaattcttaatcagaggaggcctttgggttttattggtcaaatctttgtaagctggcttttgtctttttaaaaaatttcttgaatttgtggttgtgtccaatttgcaaacatttccaaaaatgtttgctttgcttacaaaccacatgattttaatgttttttgtataccataatatctagccccaaacatttgattactacatgtgcattggtgattttgatcatccattcttaatatttgatttctgtgtcacctactgtcatttgttaaactgctggccaacaagaacaggaagtatagtttggggggttggggagagtttacataaggaagagaagaaattgagtggcatattgtaaatatcagatctataattgtaaatataaaacctgcctcagttagaatgaatggaaagcagatctacaatttgctaatataggaatatcaggttgactatatagccatacttgaaaatgcttctgagtggtgtcaactttacttgaatgaatttttcatcttgattgacgcacagtgatgtacagttcacttctgaagctagtggttaacttgtgtaggaaacttttgcagtttgacactaagataacttctgtgtgcatttttctatgcttttttaaaaactagtttcatttcattttcatgagatgtttggtttataagatctgaggatggttataaatactgtaagtattgtaatgttatgaatgcaggttatttgaaagctgtttattattatatcattcctgataatgctatgtgagtgtttttaataaaatttatatttatttaatgcactctaa

SEQ ID NO: 199533 - DNA, 327 bp, Homo sapiens
  chr4:106629796-106630123
  hyper
ttccgccccgccctgccgatccgtctgttcccggtggtcccttcggaaacggttcccgcactggccggctccgaaagcaggaaaacaaaggttcccacagtaggggcgggggaaacgtttggcagtgcgacagtaggaagtgacgttacttccctttttccggtccgccggattatgaatgacggccggcgcgagtattttccacataaggtggctgtcgtttttctcctggcgtctgtggaggcgagtggtctgcgggcagcagctcccagaggcagccttggaattccagctcggactgggcgggaaggcgcaggcggcccaggt

SEQ ID NO: 199534 - DNA, 181 bp, Homo sapiens
  chr4:106816201-106816382
  hyper
gcttctccgccctccggtgaaagctactgctcgcccctgcagtcaccacctgttcgggcggaacctgcggagcgtgcacctacgcctcgggctcctttcctcctccactcccctttcctgctgggcaccctgctttccctctcccagagagggtttgcaacttttctcccaggctggggct

SEQ ID NO: 199535 - DNA, 117 bp, Homo sapiens
  chr4:106816425-106816542
  hyper
cgcccctgcccccgagttgcctgccccgctgggcccccgggaggagcggagcgcgctcacccttcgcccggggctgggagggcggcgagtcgggcgcacgcgcaccccctgcccgcc

SEQ ID NO: 199536 - DNA, 360 bp, Homo sapiens
  chr4:106816842-106817202
  hyper
tcgctctacctgcaggcggccgccgagttcgacgggaggtgagctgggccccggggcgccctctcctccttcccgcgctaatttcacactcactgtcttgggtcacttttccccgcggggtttcgtggtcagagaggcgtctcctccatccagaagttgggccaccgcacagcgtggcgcgaggagagcggtccagcggctccgagtgcccgcccgaggcggagagggcgcgcccttgcgagtctgggaccccatccgcggccccccgagggcgactcgccccggctcgggaattaggactgagggagaggagccgctggagcctgggatctcggctctgagggcgcggtttagccacct

SEQ ID NO: 199537 - DNA, 264 bp, Homo sapiens
  chr4:108745750-108746014
  hyper
gctccaggccctcagcctttcggccgggagccaaactgccctgcctgccaagcccctccttctctgcaccttaaacagccgcgaggggagagtcggctgggattttcttcttaagaagtcgcgcaggtttttcgagctccactctgcgccaggagagccacggcagcaggaacgggcactgctgccaccgggccgacgggtgagtcactgtttggaaatggagtgggcgggcgagggtgtgagagaatgaatgatgtcaagagc

SEQ ID NO: 199538 - DNA, 320 bp, Homo sapiens
  chr4:108746071-108746391
  hyper
cggggccgcggtcaacactgagcgccgcgccgtgggccgagtggggcggggagacccagccctcggcgcgcacggagcctggccggtgctgcagcgccgccgagtgcggcctcgggggcggcggccgcgggagggacccggagagctgcttcccctagtcaggccgcggcgtgggagggcgagaccccgagcaaactttctagcggcttcggcccgagggtggtgacgcccggggctggtcgcggcggctgcggcagcgggctccatcccctggcaaatccccttcccgggagcaagtgccttcagctgggagtgtctgg

SEQ ID NO: 199539 - DNA, 191 bp, Homo sapiens
  chr4:108746519-108746710
  hyper
gcccccaccctccccgcccagggcatgcttcctcgattttgtggtctggaggagagatgtgtgccttagtctccttcctctgagcagtcatctcattcatttgcaacccatttcgggtaccccggtcctggcgttggaagggcacaggttaaaccccagattgtccagaaccactccggaggtcagggctg

SEQ ID NO: 199540 - DNA, 203 bp, Homo sapiens
  chr4:108911333-108911536
  hyper
accccgcgcctcccgggtgtagttgaaatatctcgcgtctgggcctgtgagggcccaagtctcactcccctcaaaattcagggttctgggccgatcctcagcttcctcgtttggaaaattctggctgcccccagggcccgctgaaggttccatggagagtggcggtgaatgcattttggaagcgggccgtgcaagagaagaaa

SEQ ID NO: 199541 - DNA, 416 bp, Homo sapiens
  chr4:109092685-109093101
  hyper
cgtgtgggggctgatattaacataagcagccgcctcttcgggtgcgagtgggatcccaggtccgggatgtggtgggtgcggtgcgggagaggcacccgccgcccccttcactcggatgttagaggcaagttgttcgtgtgaactcgagcgaacgactggaggttggctgttgtaggttcactccttcaggatgtgggtttcagggggcgttttgatgtgatttaattccgaccgtgaaaacaattgctaggggctggctggattgctgttggtttttcccctcctggtggctttgcttggtttgggtttagtttgggaacaaacttgttttatatcaacacttccttctacatcgggcgccgtcgcctcaactgcgcgtggggggcgaggcgcccaccccgcacaagaacagagga

SEQ ID NO: 199542 - DNA, 143 bp, Homo sapiens
  chr4:109094283-109094426
  hyper
cctcctttctgaaaaacttttctcaggcgcctgaacttggcatggggaccggcctcgaaaagccggcgggtagcacggccgcggtatccaacccttcgccctccttcccaccggccctccgcgtccctcggcccgccccccgg

SEQ ID NO: 199543 - DNA, 208 bp, Homo sapiens
  chr4:109541581-109541789
  hyper
ggttgccgtacaacgtggtggttccctgcatctctgcccacgtcggagaggtgcgtcggcttccgtacaacacggatactctctctctgacgcaacttcctgtcctgcgcaattctatttgacctttgaactggcaaaggcttttttcttcctcttccggggacgttgtctgcaggtatggatgttgttctcttttccctgtctttat

SEQ ID NO: 199544 - DNA, 78 bp, Homo sapiens
  chr4:109571439-109571517
  hyper
ttcaaatcccctgcgtcagcgagtgggcggggctcacctagattccttggcctccgcttctccggcttggccacgtta

SEQ ID NO: 199545 - DNA, 250 bp, Homo sapiens
  chr4:109684115-109684365
  hyper
agcctgggactgccttggcggccccggccggccttcctcccgttatccctcctggcgttctcttgcccggggcgtcggaggtcaccggtggcgtcaactagctaggatcatctcccttttaagtctggctctggcgttgccctttgccaagcccctcctcctcccccgccggggccgcgggcaggtcgccgggctagcagctcattcgccaccaccctgtcctgccaggccggctcggccctacccgccc

SEQ ID NO: 199546 - DNA, 142 bp, Homo sapiens
  chr4:110343714-110343856
  hyper
agcacatctacacatcgtccaccagatggcggtggaagcccaccgacattgtagactacgtaggaagagcgtccagatggaaaagcgggttggggctttctggtctggtttttttgttttgggtttttgtttgtttgttttt

SEQ ID NO: 199547 - DNA, 529 bp, Homo sapiens
  chr4:110481809-110482338
  hyper
ggtgaagccagagcgctgcggctgggggtgcctcacccgggccgagatagggtgcggggaccaccagacttcggcctgggagcagcagaataacctgggaggcagtttctgggctgcagctctcggtcaggagcaagtttccaaagccgctgcgccgcggggccggttccctcttggtgatcagtgcccgagcccctaaggagcccggaaacgatgaacggggcagtgaccgtcccgggtgtggacggtcgcaggagagtgaaatttccatcctgaaatctgcgagcacctccctttcccagaaggaagaaaaactcgcgttttgttcagacacccgagagacgggtgaatcatgagtgtgctggtgagtaacagttggcctgacaccgttgtattgtggtctgtggagaaccgtggcttggaggagtagagagtggatgtgcaccaaaaaagactagaagaaggggaaagcgctgagtttaaggaggattgcgatggagcctgacaggagcccgggagtgcaaactct

SEQ ID NO: 199548 - DNA, 211 bp, Homo sapiens
  chr4:110651657-110651868
  hyper
ccctcgcagagagcgctgcgagaggtccagctgagtttccggcttgaagacgtggttccattggcaatgtgggcagagtccggctgtcagctcgcagagcagggcttttcctccttgcgtcctctcccggtcctccagatctgctgtggccgcggttgggggagcgggatctggaagatgccaacccatgccttggcggtgcctgactcta

SEQ ID NO: 199549 - DNA, 220 bp, Homo sapiens
  chr4:111117165-111117385
  hyper
tcattttcagtcccacgagggctgagacctgtctggctcagtactgagtgaatggagagaagaggcgggaaatggtacctgaagcaggcctaggaagtggcctcagagaaaaagcaacaagtaaataagaggcagtatcgactgcagtgggctaggaatggcgggcgtacagtgaatggggtcagccagcaaagcgagggaaagcggactccggaagagc

SEQ ID NO: 199550 - DNA, 163 bp, Homo sapiens
  chr4:111537244-111537407
  hyper
aaaaagaaagaaagtgtgcgttgagcactgatcttaaatcggggacattatctgcgatctctttaagtggcagcagcagtttcttgcagaacaaagactcagtgttcgagctccaaaagcttctaggtaaagtttcattcagatgaaagcaactaaggcgaaa

SEQ ID NO: 199551 - DNA, 94 bp, Homo sapiens
  chr4:111537497-111537591
  hyper
tgcggggggttgacaagcataacaaaagatctcagcacatccctccccccacctccacaacgaccctcctagcgccatgaggatgaattctctg

SEQ ID NO: 199552 - DNA, 51 bp, Homo sapiens
  chr4:111542042-111542093
  hyper
attgcccatgcagcccagctcgtgagatcgcgggatggcggggcagtgagc

SEQ ID NO: 199553 - DNA, 52 bp, Homo sapiens
  chr4:111542757-111542809
  hyper
tttatctcactgcagcggcacattcacttttatagcctgtgctttcaagtat

SEQ ID NO: 199554 - DNA, 232 bp, Homo sapiens
  chr4:111543735-111543967
  hyper
caggggacgcaacccccgccgagttctcaagccaagctgcccccgtctcctccggaaggctcaagcgaaaaagtccggagacggaaagtcagcgggcaaacgaagacatgggatgtgggcagaagggcaccactcagagcgtctttagggagcaggcttccaagctccaaagcgaaacaagagtgggcaaagacccccttcttctctccctccctcccccaagaacccctcc

SEQ ID NO: 199555 - DNA, 260 bp, Homo sapiens
  chr4:111554139-111554399
  hyper
gcagttggtctccattccccgttatctgcaaaacagaagagaaggaaggctgtaagaagcggcggccgtcgagtgagcagggctcagatgagactacgttacactagctgttaggcgcctactgtgtgctaggcttcaggcgtgtttttccgacctgacagcctctggctgtgcagcagcatctccagcctagcctcgggcccaggacatttatttatcaagaggggatctccctccagagttgccgcaaaagtgcccag

SEQ ID NO: 199556 - DNA, 289 bp, Homo sapiens
  chr4:111554661-111554950
  hyper
ctgaaacgaacgggctcttggcctagggtgtttcaggagcgagctgagttcgggcctctcatccatcaggagccacttttccatatttagccacactttctcctagagatactaacccggccatttatttacttactacaaataattaccctaaagtatgatttaagatcgcagaggagagacactgggtggactgagcgagactgaggagagcagggcaaacgttcttggagggtttactgcccgccaaggacggagaaatagctctggtataactgctacccagttc

SEQ ID NO: 199557 - DNA, 102 bp, Homo sapiens
  chr4:113430517-113430619
  hyper
agttcggtgagatgcggggccgaggaggagaaggagtgggaccgtgggcgtgcaggtgtttcaaggatcctcctcctttcccccttccatctctgattccat

SEQ ID NO: 199558 - DNA, 366 bp, Homo sapiens
  chr4:113431158-113431524
  hyper
aactggggaaggaaaaacgcgttgggggcaaggagaaccgctcctgcagacctggcccctccttggccctaggggacccctgccgatgcccactcggtgccacgtggggcggccccaagggagatgcaccatcccccaaaccaagcgctttggaaaagaaactgcagagaataataagaagcatgggggggggggcggggggcggggtgtgtccgtggagtgatgagaaagctggtctttcatccctccttttttggacattccttaagtttaatcattaaagtggtccttaaaaaagaaggcagcagcttaacgctgctatttctgacaatctgccccacacactgtcagcgaagtgaaagatct

SEQ ID NO: 199559 - DNA, 299 bp, Homo sapiens
  chr4:113435475-113435774
  hyper
ggaggagcgtcagtccgctctgcaaactctttagatatgccaccatcatctcttcccagggtctttttcgtctcaagaagcgcccccaaaacgccacccttggctttgacaataagctccatcacaccttcagtaaatcagagcccgtctgaatgaaggatacccaaagccaagaaatgcaagaaacaaccgaggaatcagaaaggctacacctgccctgtgaagtgagatggtttccagggcgtggaaaggaggggcaggggaagggaggagggctcgactggggacaggaaagggaa

SEQ ID NO: 199560 - DNA, 242 bp, Homo sapiens
  chr4:113436585-113436827
  hyper
cgtcctcttcctccttcaactccaaggtctcggatttgacgaacatcctaccgaagagagaaaggggaaaaaggcagtgaggtgtaaggaaagaaacagaggcgcgatcttcgtgtcacaggggcgtgctccggcgcgcacccgagaagaccagctccgaatggcgcggagcaggaaggcgaaggaagaaacccaggcagtgctaaccaaggtcaggagcgccgctagcgctcgctgtgacc

SEQ ID NO: 199561 - DNA, 228 bp, Homo sapiens
  chr4:113438278-113438506
  hyper
gaggtcggataggggagcagttgatgagcttttagaggatgtgagaatgaaatcactcacatgttagagctgaaaggatccccctcattttacatacaggaaactgaggctccgggcactgatgcaggttttgctggggttaacccagtttatagcctggagggacagcaaggaggcttcctgcgtgggtggcagcgaaccgagcgggaggagcggcagagctgctgc

SEQ ID NO: 199562 - DNA, 71 bp, Homo sapiens
  chr4:113442552-113442623
  hyper
cctcttctttcccacgaaggaaagaaattaccgtaggagattttgccaatccatgccagctttctgattgt

SEQ ID NO: 199563 - DNA, 94 bp, Homo sapiens
  chr4:113444850-113444944
  hyper
taggggcctggaaccgaggtgtcagcagtaatttaaagaaggtattcagtccgccagcgtctcttttctccgtttcccccttccacccctccca

SEQ ID NO: 199564 - DNA, 81 bp, Homo sapiens
  chr4:114900505-114900586
  hyper
agataaactgccgtagtggaccggcctcctgatcaccttctccactttcccagggctattttccccagtcctttcctaggc

SEQ ID NO: 199565 - DNA, 552 bp, Homo sapiens
  chr4:114900650-114901202
  hyper
ctccacctccgcagaaactccgggcagcaattccttttccccgctgctagggagcctgaaggccaaagccgggtccctagccccgcggccggtccgcgcggagcccgcttggtctttgcgtagttggcgcacccggcgcaggcgctgcaaactgcgtgcgttttctcagctaacttatttagctttggcactccgagttcttttgcctcctccctcttttctctccagtgaatcacagaacggtactttcttcctgagctcccccgggaagagggggtgggggaaaaggactgtttagaggctcgatctttcctttttcttttccgggaggtggatggccaaggcagaggaggctttgccagagagagagctgcgtgctgctccagcccagcgggattccgggggatccgcctgggctaccgcgtcccaagagtgtcgcctcctgcccatcaccccgctagagggaaaggacggcggcgcgaatggggaagggtaaagcgggcacttcttttcgtggggctgttggtgaagagccccgtctcccatccctaa

SEQ ID NO: 199566 - DNA, 85 bp, Homo sapiens
  chr4:115519971-115520056
  hyper
tccttagccaacacgctaactccgaagcctcccttacgcccccgaaccaccgaaggcggcgacacctgattcagcgcacaaacac

SEQ ID NO: 199567 - DNA, 139 bp, Homo sapiens
  chr4:115520945-115521084
  hyper
tgtgtgttttggatttgaaggaggcaaaccgcatcggagagtgcaagtagatgcagtgcgtcggggcaaaaggacaatctgaggaggtgggcggggtacccaatctctatatacaagctttctggtttaattgagggtt

SEQ ID NO: 199568 - DNA, 193 bp, Homo sapiens
  chr4:118954450-118954643
  hyper
aggaagggaccgcgcgggtgcgccccacccttccagcgtcgcctcggggactcgcacccctttccctggccgcacaagacgtttcatccttggcggccgccgccaacccgccgggaggggcggtcggaactggcaggccggggcggaacccccggggtctccttgtcgaggcccgggcagccagatcctcagg

SEQ ID NO: 199569 - DNA, 304 bp, Homo sapiens
  chr4:119200550-119200854
  hyper
agctgaacacattacgatggatgatggaaacataaggtacatttcttttttgatatttctgagttaatctgaaacgccttagcggcaggacgttggaaagctaaagttggcccgttttgctggcttttgtagtttgagttaacaaccaactgaattagctgataagatctcaaaacagtgaggtaagtacacagctcggagttttataatgctttttttctcttgcagactatcaagaaatccaagtggtaatgggcgaagtttattcagcatccggcaatggacttatcgtagttggggaaac

SEQ ID NO: 199570 - DNA, 109 bp, Homo sapiens
  chr4:119273335-119273444
  hyper
ccgtccggagtttccgcggccgccccgaggccactaaccgtgtctgcagtcgcagtagccccagtccaccttgccacgggcgtctccgtagaaacaccagggtctgccc

SEQ ID NO: 199571 - DNA, 222 bp, Homo sapiens
  chr4:119273515-119273737
  hyper
ctccaggaagggtggcacctccgcccaccgcagacacggggcgccgaagtccgtcacgctgacccatggctcgccggcggggcagccccaggggtgcggccggggcgtgtgcccggcctggagggcgtgcgggcgctgggcagggagcgcccgcggggggcgcgggaagcgcgggagaggcggcggcggacgcgtcctcgggggccgctgctgggtgggaag

SEQ ID NO: 199572 - DNA, 201 bp, Homo sapiens
  chr4:119273903-119274104
  hyper
gctccccagcttctcgggcttggagcggagaagaggagggggcgggggcggggctgccgcgtccctcgaatcccccagccccctcccgcccccgcacgcggaccgccctcgcctccccaaccttgcctcccgccgctggtgccctgccgcgcctcggctcctgtcccctggcggcggccgcgggtggggaaatctggagct

SEQ ID NO: 199573 - DNA, 227 bp, Homo sapiens
  chr4:119274214-119274441
  hyper
tgccccctgggggcgggcgccggccgcgcaagctgctccggacctacgctcggcccctgccaggcccaccgcagtccgcccgcacggcactgccagctgctgggaccgagcccgagggtgcccgcgcggagcacggtcttggctgccccttgccagcatgcagcaccagcacagcccggcgttggcggctcccaaatctggcaccggcccctgccgtcatctctcct

SEQ ID NO: 199574 - DNA, 197 bp, Homo sapiens
  chr4:119757573-119757770
  hyper
attcattcttccatcaacaggttgcagtttcagctcttcattcattacgtattacttaaataactaatagttcaggtactgcactaccgttacatacgggaaagtacacgatctggacctaggggagattaccgtttaaaggcgaatctggcacgtgtacacgcacatttgatgacgtacccgtgcaatgcactaca

SEQ ID NO: 199575 - DNA, 36 bp, Homo sapiens
  chr4:120221341-120221377
  hyper
tctcccccacccacccgactgcgccactcaccagct

SEQ ID NO: 199576 - DNA, 50 bp, Homo sapiens
  chr4:120221611-120221661
  hyper
tctgcctccctccctcgctaaagcctcgccgctcccggagaccatctcga

SEQ ID NO: 199577 - DNA, 333 bp, Homo sapiens
  chr4:120549978-120550311
  hyper
gccagcctcctgccccgccccgccccgcgcggttctacgggcgcccaggtgtggtgggcggggccaggcgcagctgctgcgccccccccacccggggtccggcagtgttccgctctcgcaggctcttcagtcccctggttcccaggaggcggcggcggcggcggcagcggcagcgcccggcgagctctccggaagccaagtggcggcggctggaaggaggccgcgcggccgctggggtgcgctgtgtgccaagccgacttctggggagcgcgctaggtgactgggtgtgttctcagagtgccccagggagggaaggtcgcgatgtgggaagtt

SEQ ID NO: 199578 - DNA, 37 bp, Homo sapiens
  chr4:121843110-121843147
  hyper
ggagggaaggaaatcctgggcgtatgaatgagattct

SEQ ID NO: 199579 - DNA, 260 bp, Homo sapiens
  chr4:121843304-121843564
  hyper
gcaaagacgcagctcacacccgtaaccgaggaagagggaggctcccgccgcgctcacttcctgcgggagagaggaaagacatcttgcggcagggaggccggtggcagttccgcccctggaccggccggcagcggagcgcaccccgccgccacctacgtggcgctgcctgctcgggtggcgcagcgagtaaaggccacccccgccgtgccccgcggtccccggccttcccacggacgcctggcccggcccgggcgaggggc

SEQ ID NO: 199580 - DNA, 276 bp, Homo sapiens
  chr4:121843731-121844007
  hyper
gagaacctgtccggcacgtacatgcccagcattttcccgggcgcggcggccgccgcctctctcaacaccggcgcttagcgcccggcaggcggcacatcgaaatttggggtgccagggtagaggggagaaaccggcagggaaggaggaaatggagttttcctcccagaatccccacctccctgccgattccaggatcccccgcggctcagcccctcctcgtcccgggtcgggctcggcccggatccgttcctgccattcctgctgcgggggcgcggg

SEQ ID NO: 199581 - DNA, 138 bp, Homo sapiens
  chr4:121844206-121844344
  hyper
ctgggttttcaaaccttgccccgctgaaccattactccctgtaggggagtctcgcttgcttctcttcagatgcaaaacgaaatggaccttcacacagctggggcatcctccaaaacaactttatcaagttcctgactc

SEQ ID NO: 199582 - DNA, 351 bp, Homo sapiens
  chr4:121992861-121993212
  hyper
ggccgcccagcttcgaaagcagctaaattaaaaacaaacaaacaaacaaacaacaacaacaataaaaaaaaaaaaacgagggaaacctgctcctgcccctcatgccctcagctcctacggatagggcgcccttgagaagcttcttgggccttgaagatttgggggcgcgtgcctcgagcccccatctcggatgacccttcgggcgtgaacgctccttgtgctaggtctcagggtggcgggctaaggcgtcgggtctctggggcattgctttcctctccccacttaccttaaaaagatctgtttttcgtagggaaaatagaaaaaaatccctccccgtggtgtggtgtgcga

SEQ ID NO: 199583 - DNA, 259 bp, Homo sapiens
  chr4:121993736-121993995
  hyper
tcccagccctaacccctcccgcctcaccgctgcccgcccgccccctccctcctctgcccgttgcctccccctccgtccctccttctctccctcccgctgcgcgccagcgcgcacgcacacacacacacacacacacacactcatacacatacacacactcacacacagacaccctctccctccttttctctctccctgtagccctccctccctctctttctctcacacacacaccaccctgctcagcgacccagcgctc

SEQ ID NO: 199584 - DNA, 285 bp, Homo sapiens
  chr4:122744981-122745266
  hyper
aggcactgcccagcgtggcgagccaaagacgcccagagatgcagcgagcagcccgccggagcggcggctgttcttgcagttcaagtatcccgcgactattgaaatggaccaatgaaagcgctcgcggccttgacgtcattcaaggcgacagggtcgcaggcgagtgaagggtaaaccaaaggaaactgagcaggggcggggcaggagggagaaacaaactggctggggcgggagaaaacgcctgcgcggggcggggagaggtaggatttagggcccgacgcttcc

SEQ ID NO: 199585 - DNA, 178 bp, Homo sapiens
  chr4:123653964-123654142
  hyper
tcccagccagaatcgcgtctggccggtgggaagccgggaactccagccccctgtaggagaggagaaaggagcgaggttagtagtgaggtgcttccgctgactgctaagctaagtctttcctgaagacgtgggagcccgtgtgtttgatttttctgtcctcttcgggccagggaaagaa

SEQ ID NO: 199586 - DNA, 195 bp, Homo sapiens
  chr4:123748993-123749188
  hyper
actactctcacccactctgttttatatttttccgaattgacgaaagctgaaagagcaaaaacaaaaaccaaccagccaaccagcaaaaaatccagatgttgttaataaagtgccatagctttgtttcagtagtgaaaagaagtgcaaacactttaatcttccacctgcagtgactagctttgagaccttgagccg

SEQ ID NO: 199587 - DNA, 1571 bp, Homo sapiens
  chr4:124317731-124319302
  hyper
agaatttttagaggcactcccgaagttttaagaggatgtttattacacgagtctgtagggcaacatttccaagttggtacacataaacgaaagaggaaacgatagttaaggaaatcctgttccaggttttcgggcagcccgagtgattgacacatgatatcaccggaggcgtgtcctggagtggaggtggaggtggaggcaaggagctgaaattctgcgtagccggagtgagaccgctctgcaaaccactgcgtgctttgcagagtgattatcagcacagttccctgccctggataaggaacagctacagtcgctgttaaatgtgcctgaaaagcaatttgcaatctttgcattaggtaagtaccgtttccttccgtagacattttaggaaagataaggtgagaaatgttgacttttgcaaggaactgaacatttatttatttgaacttgctttccagctaaggttactggttgcatttcaaaacaccggtagcattcccactgctaaaactaatgctcttaaagtaaatgctaccgctaaaagaaaaagcagggtccctttcacctttccttaaccgaacagtagacgtttaaagtctgaaacgatcgaatttgtgaaacacagagccgttaatgcctttatgcgaagaggggctagcactcggtgtgtggaccaaatgcgtgtttgtttaggcattgttggcgaccgaatcccgagtgaagcattggtttaaaacctgaatttcccgtctctgtgtattgattcctaacgcgcagaggcgttgcttgaacgttgtttgaactcctaggcattccagggggcaaaagcacctcggcaaaaacgtgcaggactgcatgttactttggttcgcggctgacacgccgactgtgcgccggcctgtcaatcaccgggagcagcaacagggagcacatggcaacgggctgcgggcgagctggccagcggcccgcccggggtcccagcccttcgaagaaagggacattcacgagcttctatctctaattctctgtcgcaggcatttcggccgtggaaccccaggctcggaggactgggtgtgagcgctgcccgggagaggctgacctgccgggaccggagtgcccggggacgctgtgcccccacttgcccaacgtgcggaatcggctaagcgcgtcggcctgcgcggggcacaagggacgacgcccgcctttctctctccgagaaggatccccaaacctcactctcttcactcctccccgctaaaaaaaaaaaaaaaaagaaaagggtaaaaaaatccccctccccctcccggccgcggcagcctctgcctggcaggcgcgtgctccgaggtttcgccggggtactgcgcggctccgtgacccacccgccgacggcggttcgggccccgacccgggcgctgcggagtctcgaacgcccgtgacgtggatttttcgctcgtcaggaagccgccatcccttccttcgttccttgcgaggagcgactagaacccgagttctctgagcacaccgtgccgtcagctggcccgtcacgcactcgactccgccactcccctact

SEQ ID NO: 199588 - DNA, 196 bp, Homo sapiens
  chr4:124778304-124778500
  hyper
tttaaatgccccagcgggacatccagaggctgcaaaaacgggaaaaattatttggaacaatttgctttcgttcaagggcaaccattttacagctggtttattgctattcttgtgctgtttaagctgtctttcgtgtcaaaagtcctttcctgcttacagatcatcaggaagcattctgctgcgtgctgtttgccta

SEQ ID NO: 199589 - DNA, 360 bp, Homo sapiens
  chr4:125633141-125633501
  hyper
ggcctccagtttcagctgacagacaaaaggaactccgggattcccagcgccgggcaccaccttgggttggaaccgcccagaggagccacaggggagccacctcagagaggccacgagcgaaggtgcagcctccacaccgaggtctgcccttccagaggctgggagcgcctctgcaccccgccccgcaccgagattggggtgtgtcttttgaagggggagggggtgactgaggtccttgccaatcccagacgaggggtcgcctcccggtcggcttccgcctctgcgctcccgccccatgccccgctcccgctcccacccggccgacggcggtgcgagggaagagggcaaatctggggctcg

SEQ ID NO: 199590 - DNA, 96 bp, Homo sapiens
  chr4:125633621-125633717
  hyper
agccgccgccgtggccgccgctgccgctgttagggactctcagtctcagacacttgcttcgctgagaagtcgctgccagcagcgctcccaagactc

SEQ ID NO: 199591 - DNA, 257 bp, Homo sapiens
  chr4:125633784-125634041
  hyper
gcccccggcggctgccagttccagctttcccagcagaatcggtcgtgctcgccccagcccccaccggccaaccgccgccgccgccgccgtcagggcagtaactgtctcaggcagcccccggccggccggctccgccccgcccgcccagcccagaccccgcccccgcccccgcccccgccccgccgctcggcctttctttgcccgccggctccgcctccgcgtccttcccctcccccaccgcgctctcccgcagcatc

SEQ ID NO: 199592 - DNA, 43 bp, Homo sapiens
  chr4:126237611-126237654
  hyper
ttgcacactctatcagtatctcagctccttcgagtgttttggc

SEQ ID NO: 199593 - DNA, 45 bp, Homo sapiens
  chr4:128554021-128554066
  hyper
tgggaagcttctccgtctccctggcaacgcgacctgccaccaatt

SEQ ID NO: 199594 - DNA, 137 bp, Homo sapiens
  chr4:128703235-128703372
  hyper
cgatcctccccgccccgccttcccgcttctcccgcccccggatagctcagcagcctccattttccagatctttctcgaacccgcagcttcttgggcagccgttgcccgagtgctgacggaagcggccgaagtccggg

SEQ ID NO: 199595 - DNA, 130 bp, Homo sapiens
  chr4:128887030-128887160
  hyper
ctaaatgcaaaggcgccttacctggagggcttgtcagagccaggactgaaggtgggatctgctgcttgtaacctgcaggtccccggatgcgcaccccaacggcgcctgcgcctacgggggcctcagcctt

SEQ ID NO: 199596 - DNA, 218 bp, Homo sapiens
  chr4:130014786-130015004
  hyper
ttacgccatcgcgcgtcctagagtcctagcacgctattggctggctgtcaagcaatgggaggagtcgtgagaacctggatgacagcgggctgagccaccggcttggcgcggcggccaaactggtgggacagtgtctccaggtagtgaggcccaacctctttaaaacaaacaaacaaacaaacaaaaaaccaaaatgcaaacgtgagtagagaatgaaa

SEQ ID NO: 199597 - DNA, 57 bp, Homo sapiens
  chr4:134067733-134067790
  hyper
ccttggctggagctatctagcgggaggcggaggaccaggctctgttctgttcggccg

SEQ ID NO: 199598 - DNA, 297 bp, Homo sapiens
  chr4:134069896-134070193
  hyper
cctttagattgacacatgccatataatactcacttttaaaatgccctgccagtctctgctagggtcccttaattaggtaacccttgccaattagtgggccctgcgctactttttcccttctcgatgatttatttccatgatgcgtattagggaaaataccttaaaggaaaaagaatgttagcatcattggaaatcccgctcctaggagaggatatcgcagctgttgctattatgttttcgcatttgctgatgcaaacaggggaacctctctattccctccccattacctgcggctgg

SEQ ID NO: 199599 - DNA, 143 bp, Homo sapiens
  chr4:134070455-134070598
  hyper
gccagcccagaccacaggctcagaggctgaagcaggaggaaggaaggactggaaggaaaaagagacaggttagagggaaagaggcttgggaagaaaacagcagaaaagaaactgctcattacacttacagagaggcaagtaac

SEQ ID NO: 199600 - DNA, 102 bp, Homo sapiens
  chr4:140097254-140097356
  hyper
gcccctagaccatcccgtcgcgcggtccctgaggaccagcttcgcgaggatccagaaggcggtcactggacgtgcctgttacgagcccgtttttgttttgct

SEQ ID NO: 199601 - DNA, 201 bp, Homo sapiens
  chr4:140222460-140222661
  hyper
tccgcgggcgcttcgagggtaccacgcactgaaatgatgggcggggcctgccccgaccctcccggcctccacaggcaggccagcctccaggtttcccggcaagctccgaaacccagaggaggtggggaaaggaggtcaccgcgcctgcgtgttaggaagcgtgacccgggtgggaaaaccctccgcgtccgccattttggc

SEQ ID NO: 199602 - DNA, 1319 bp, Homo sapiens
  chr4:141071488-141072807
  hyper
gcttgcttccacctgcgagtgtatcacaaaccaggcgcgcgcacccgagccctccctccaccagggcggaaaccagagaacacaacccaaacaccgaaagtttctggtcgcaaactctactcatcttgccgtgtccagagacccggcactgggaacggcactggcttttgttccagggtcccccagctggcgaggtaaacgccacagcagtccttgatccccaaaggttgtgagagattctgtggcacgggaattttggagcctcccgaaaggagcccatttctccgcaatccatgcgcgtggggtgtacaaatacacgaaaagaggacgcggggtgggcaggcatgaaaccttcagtgcctcttaaattctcagtctcaggttcacaaagtgaatctcctcctccgtggaagggcgctaggggggcgggggctgggagagaaataggttggagaaagggaccggagctacagtcgagatgcgggaccggccccgcctccggctacaatcagaaaaactacagtgtgtcagtggttttcggtttcctgtttgtaaagcgagaacctcccccgactcgaactgtcgttcttcctcaaaaccaaccgagacggccccttcttcgcgctcggggcaggctcagccgcagggggagcggagaggagggacgcgggggcatggggggcgcggcggggcggggacagccgcgatgaagcgggcagggccacggggcgcagcacccctcccagcccagcggccccggggtctgagctgggccgcgaggcggacaaagcgcctcccgctccctcccccacggccacgttccaaaagggaggaagaaggcgggcaagagtggctggaggaggaggaagggaggaggaaggggagggggaggaggaagaggaggagggaaggtgctgccggcgggactgggcaggatcgcgccgacctgggaggggagggaggaggggttgagcgcccccggagaactgggaggagggaaggattcttgaagcccaagataaacaaattgttcctcttcacgtgcggggtggggggacgtggggagcgagcactgcggcgtcgcctcccctcccccaagccgactctttgtcaccgagcgccggcccgagcccccggcgaaagcccacggcagcactggcaccaccccggcgccggggactcacagaccgggaacgtgtgcgatttctaaaccgcacgacgggagggccgcccctgccgggctctgcgccgccgatcgctgggcggtctgcacgggaaacaggcgaaggcgcgcggccccggcacgctccaggattccc

SEQ ID NO: 199603 - DNA, 660 bp, Homo sapiens
  chr4:141073132-141073792
  hyper
gagaaagactccgtgcacgcaagtttaaaaggaaaaaaggaaagaatcccaagcgaagttgtgtggtggggcctcttggcgcaaaccctgggtattgctttcccctcccgccccctccaggccgctcccctcttaaccctcccagccgctccacctgccgggctagccccgagtcgcgagcaaagagcggagcgcacccgcgccccgcatccgcgcgcgctcccgcgagcacccccgcgcgcagccaccctcgctcgtttctcacccacttcaaagttcattcacaaaactctcagactttctcagcccaaagggggtgagctggggagaggaggcgagaggctctccttccccgcttcccccctaggggttgagggcctggtgcccgcccagaacctgcgacagcatcaatatttccacgcacccggcggatgtgctgagaggggtgggcgtagggggacgggtctggggaggcgaggcggcgcggctagaggtggggtggggagcggcgaagaggaggagcaaggtttcaactcaggggttcactctttcaaatcggtatcttaagaaagggaaggggggaaacttttccagcacctcactccgacgctcctctaggctccctccgcccctcgcagtcgtgactggcttctcccctct

SEQ ID NO: 199604 - DNA, 671 bp, Homo sapiens
  chr4:141073852-141074523
  hyper
tttttccctaagaaaagttgacgttaacccttaggcttcagcccacctcacccaccgtgcaaatcagacccttgtacccccatgtaagaagctccacgcgccccccaccaccaccaccacccccaacgcgcgccgcaagcccgctgcccgtgcgccctcaccatgatcagcgtgtggttcctctgctccgccgaggcagcctccgcatcttgctggggtttgctcgggtgctgctgtttgccggtgccggcgcccgatttcttggccctctgctccagggtccgctggtagaggctcacggtgtcccggcgctccagctccagctgctccacctgagcctgctggtacctgttctcgcagttgacgtggtgccgacggcagccctcgatgcgctggcggagccgctccaccacggtgctgtgcttgggaacggccgccgaaccgccgccggggcccccggagccgccgcatccaccggctgccgggtgattgctactcggagcagcgggagtactattgggagtattattcacaccgatcccggccccgccgaggctgctgttcaggctactgttgatgcaaatactactgccattcgcggcagcagcgggggctgcgaaatcccccatcctgctccccgggcacactattttggaagaactttttttatc

SEQ ID NO: 199605 - DNA, 685 bp, Homo sapiens
  chr4:141074706-141075391
  hyper
ggggaacgttatcggaataccatcagacacctatcaacaaaaagaatcacaacaaactgagccagcagcaaatcgggttgcaactcaaggggagatccgctccttgcttgccttctttttataatccattattttctaataaattccaggagatttccggtggttggcaagcattttctccctacataccgaaaaacacaccccatgtacacacacaagcatatgcctccagtgcggacacgcgcgacacacactcactccacaccgcatcggaaaacggcaagcttgcttattgcattttccttccacaaaaaagttttggtgtttatgccgccccgtgttctcaaagtactttggctgctcagttgcatttcacaggaacctagatatcgaatcctcgggctgggggaagtaaacacatggacagtccgaggcgactgcaaaagtagatcggtgaagtcctttgcaaaacgccgcgcagagagcagcacctaacgctcggctgggctgccgctgccgccgctgctcctgccaccatcacaatgatcaactgctcgccgccgccgccgccgccgcctcctcctcctcctctcgctcctccacctcctcctcctcctccatgccagcggagtgatatcaggacgcgcgagctcagtaaacacggcagcggcggcggctggaggcc

SEQ ID NO: 199606 - DNA, 372 bp, Homo sapiens
  chr4:141293944-141294316
  hyper
gatgtctaccttgtactcaacgaatattaaagcaggatgccgctttgtgtcaagtactagattacgatgaacggtgtcacgaagaacactccactcttgataccgtatatgtgaccttgagcaagaaatgtgttcacgctcaggcttcagttcctttctgtgggttgctgtgaggctccacaggggtaaggtaagcacaagtgctatgcctcagtaccactagggtattttctcaattctaaaatattaaatggccacgcactacagatttaataatagtttcggaggaggggcgtgaggagaggaacattccactagctcaactataagctttccgatttcggaaataagaaaaatatgaaaaagtctgct

SEQ ID NO: 199607 - DNA, 103 bp, Homo sapiens
  chr4:141294418-141294521
  hyper
ctttcctgaatgacttctctgtcgctcataccagcctctttcctgattttccacactgggattctcactccaattctcaggtttcctgatagacctgatgagc

SEQ ID NO: 199608 - DNA, 88 bp, Homo sapiens
  chr4:141294545-141294633
  hyper
cgcttctttactgtcattggctgtcgctgttccaggtcccgcccacagcgacctcaatcctgattggatgtcagtgtccttttgttat

SEQ ID NO: 199609 - DNA, 54 bp, Homo sapiens
  chr4:141295287-141295341
  hyper
tgggaggggaggctgaggtggggagggagcctagagagccgtaaaataaggatt

SEQ ID NO: 199610 - DNA, 102 bp, Homo sapiens
  chr4:141489128-141489230
  hyper
gacctggaaataagaaaggtgcagaacagaagggagcgaaattgagttcactcttaagccaagatttccccctgtgttcctattttccgtttcttttctcag

SEQ ID NO: 199611 - DNA, 204 bp, Homo sapiens
  chr4:141678017-141678221
  hyper
agcctgcgtgggtgcgtgtgtgctgtttgtgtttaaggttgacgctctatgggatagcgccaccccttttcccaggaaaagtgtttcaaggttccagacctggagctcggttagagacccggggtcggaagccaacgcagccaatggtcgtcgatgtttttgtttcctgcatccccagggcaagtcatgcgctaaacttgtcac

SEQ ID NO: 199612 - DNA, 60 bp, Homo sapiens
  chr4:142054594-142054654
  hyper
gtaagcggtccgtgtgtgtgtgtctgtatgtttgtgtgtgtgtgtgtgtgtgtgtataat

SEQ ID NO: 199613 - DNA, 176 bp, Homo sapiens
  chr4:142054757-142054933
  hyper
ctcaaattcaacctcaatcggcgacttaatctaggtggaggtaaagaggaagcgacccctcgacctttgagtacgggaataacttcctgagcgttacatttagcaaatgtatgtgcctctcgtaaacgaccctcccgtttgctggaagtactgccgtgagctccctgattacctgt

SEQ ID NO: 199614 - DNA, 71 bp, Homo sapiens
  chr4:142141958-142142029
  hyper
gggcattggcccccgcaggagtgggcggggaaggggcggagcgaacagaggtgggcggctcccgtcctatg

SEQ ID NO: 199615 - DNA, 456 bp, Homo sapiens
  chr4:142557229-142557685
  hyper
acaaagctgccacccgggtgtcttcttccaacatttcccctagttggacttcaaagtttccttcttgcagcctgtgcggggaccaagaggccggtctagagtagccgcccagcatccagatccgacatccttttccctttcctcaggaagacttggatgcgcgccagcccagcccgggtctccaggttcagctgcggaagcttcccacatggtgcccgtcgcttgggatgcggctatccttgtgccttctctgcaggtgtcccggcaggtagaggaggagaccggtggctggtgttcctgcagggcggggctggggctcctcgatgtccttgcgcttgccctgcaagttctgcgccccaggccccggcagggacggaaacaggccgggaagcagtgacacctggggcagtcagtcatccaggagccgccgccacccgccccacccccagtctccgc

SEQ ID NO: 199616 - DNA, 216 bp, Homo sapiens
  chr4:142557865-142558081
  hyper
tgtcgccccccaccctgcagccaggactcgatggaggtacagagctcggcttctttgccttgggaggggagtggtggtggttgaaagggcgatggaattttccccgaaagcctacgcccagggcccctcccagctccagcgttaccctccggtctatcctactggccgagctgccccgccttctcatggggaaaacttagccgcaacttcaatttt

SEQ ID NO: 199617 - DNA, 192 bp, Homo sapiens
  chr4:143767433-143767625
  hyper
cgagcgtgtgagcgtgtgcgcgcccaggaggagctgtaacctgctatttatagaccgaagcctcagtacccggggctgagaacccggaggaaactagcaggcggcggcgacggcgcagggcgccggccgcggcttcgcgaggctccagcagctcccccagcctctggcttcggccgcgctccctgctcgctc

SEQ ID NO: 199618 - DNA, 346 bp, Homo sapiens
  chr4:143768278-143768624
  hyper
ctgaggagaccagcttagagcagccctcggccacccaccgccagttcccacgtcgcggcgggtgactgaggccgagatgctcccaactagcgtatgacatgcctttgatatcccgggtgcgtggggacaaatccgccctgaatgtgttggggtatcaggaaaacggggtatgtaagcaagcagtctggacggagactaaaactcccccacttcctagcccctaacaagcccacaggggaaagcacgcaccctggttattccgggctgtgtagggtgtggggcaaatgactctccccatctgcgctttacaggtgccacctggcggctctctcggaaaggttttgat

SEQ ID NO: 199619 - DNA, 540 bp, Homo sapiens
  chr4:144256959-144257499
  hyper
cgcgcggcggggaccggcaggatggtggtctccccgcggttttgcctttcaggctctcaagtaaagaaaaccctcgaaactcctgatctcgagcacagcacaagctccgagctggcaccgggctgagtcaagatggcaagccccggactgaacattcgaatgtccctcagtcttccccgcgcccaagccccggtgcctctgccctagccgaggcctctgcggtcttcccgggcgaggagccgattgggggccgccggacggcggaggaccctgctcctgcttcccgaactacagatcccagggtgcctctcggactcgcgctccctccctcccttgctccctcccttcgtccgtctcctcccccggcccttgttgttttggctggaagcactccggcggagtttcagagaaagtctgggcagaaaccggagccgggcctgaacgtgggaaggggaggaggagagggaggaagaaggagcccggcggccgggagagggagggagggatcgggatctggggccgagccgctcaggacctgcc

SEQ ID NO: 199620 - DNA, 189 bp, Homo sapiens
  chr4:144257937-144258126
  hyper
gcgctgtgtctgtttcggaaagcgctctggggaggtcttgtccctagggggcggagcgcaaaggacagaagctccggcaccgagtcggggcagagtcccgctgagtccgagcgctgctgaggcagctggcgagacggcacgtctggaggcgaggcgggcgcactgaaaggaggccggcgcgcccgcggc

SEQ ID NO: 199621 - DNA, 300 bp, Homo sapiens
  chr4:144258375-144258675
  hyper
tccgcaagtcccccccggagaaaaagttgaagcgttatgtaagtagagctgcgggcaccactccgcgggcctcggcgtccacacccctccccagtcggctcgccggcggctgcagctggccgcgcgcggggctggttcttaaacgaatgccggtctctttccccttggcccctacccctggcgggctcgggacagggtgccttgcactccctcacgcccaggcatccacttggccggacaactttcttcctccaggttccagacagcctgctttgcgggcctgttcgccccataaaagga

SEQ ID NO: 199622 - DNA, 97 bp, Homo sapiens
  chr4:144622231-144622328
  hyper
atactctcttccccaggtgccacaaagggattgtccctcagggttgggagagagacggtgactgtactcgggtcagtcctgcgtctgtgagattgag

SEQ ID NO: 199623 - DNA, 540 bp, Homo sapiens
  chr4:146402787-146403327
  hyper
ggccgctcccccgcgccgtcctccggccccggccgcgctgcgctcacgccggccgggccgggaatttggagaggatccctggtcgcgcggcagcggcggcggcgcgcgggtgagcgggtgagcgtgtgagcgggcgggcgggcaggcgagtgcgccgggtattggcagctgaggagtggaggctgggcagctccgactccctgacgccagcgcgaccagatcaatccaggctccaggagaaagcaggcgggcgggcggagaaaggagaggccgagcggctcaacccgggccgaggctcggggagcggagagtggcgcagcgcccggccgtccggacccgggccgcgagaccccgctcgcccggccactcgtgctcccacacggacgggcgcgccgccaacccggtaaaacgaaacagacccgaaccgaactttcccttcatgccgcgtcccagccctcccctcggcgccccgggctttccagcgccgccgccgccgtctctgcacgcgtggggccgccgcggtcgtgctgggctgggggc

SEQ ID NO: 199624 - DNA, 442 bp, Homo sapiens
  chr4:146403447-146403889
  hyper
gcccgccgggctcccctggtgtctttgttgggtcttctgctgtgggaagcccagttcccgggcccccgagcctcggctcccgggcctgaccgcgctgggatctccccggccgcgctccccttccgcgcgctcctcacatctctcccgtgctgccgccgggccgaggcccgttcgcgtggcccgcggacccattgtgtcccccgcgccggcggggcgacccctgcgggagctggaggacgaccgctggcgctgctctccaaggcgcctggtggagcgggtctcgcgggcgggggaccccggcgccccgggcccctccacatcccgcacgggttttcttctcggccccagcaagcctctttggggtcgaggtcaaggaaagttcgcaccgagatcccctctaatttattcaaaggtttggcggcggcgcgtaattttttccccc

SEQ ID NO: 199625 - DNA, 264 bp, Homo sapiens
  chr4:146857461-146857725
  hyper
ccttctccttcctcgcacaaaatttccctacacacgcagccgcctgcgagtgattttatgtgcatatatattacatatgtgatattatcctcagaacctctagcgggcaggcgaagaaaggactgcacaggggcattttttttttttaaaggaaggggaaaaaagcacaacccaagccctttgcgtcgactcctgcgtaccgggaaggggaaagaaagaggaatgtttgcggagcggactgcttgcaagtgcccttgctcgcca

SEQ ID NO: 199626 - DNA, 43 bp, Homo sapiens
  chr4:147443081-147443124
  hyper
tctcactgagcgccgccatcactaccacgcgcctcagaataca

SEQ ID NO: 199627 - DNA, 270 bp, Homo sapiens
  chr4:147560617-147560887
  hyper
tttgacagccccctttatctgcttgatgtttttttcatgtctgcacagcaaatcaccccacacctccaaccaattttcccctctctctctcttaagtattcagcaggtcttgcctttcatattaatttttatgacctgggatgttgcctgtgcgcgtgttgtgttgtgtttcgttgtgtctacaggctcactttcctcctcctcctgcactctcggcttctttctgtggcttccctctttttctcttcacctctgttttcaggattatta

SEQ ID NO: 199628 - DNA, 174 bp, Homo sapiens
  chr4:148402740-148402914
  hyper
gcggacacgtgtagagttcggggaacttcacctctccacgttagggtttaggattcggagttttaggaagaggaagcccaatagttttccctgggtgaccccttttccccaggcatgcaagaactttgaggaacgccaagctctgtggcttgctccagcgccttcttgtgaagt

SEQ ID NO: 199629 - DNA, 33 bp, Homo sapiens
  chr4:148538935-148538968
  hyper
cagcagaagacacagcgccggtccaggaggcgg

SEQ ID NO: 199630 - DNA, 295 bp, Homo sapiens
  chr4:149362746-149363041
  hyper
accaaaagaagcttcgtccccttctcccttgcccttaaaattccaactgatgccataggaagcgtagcctgtctcaagagtttcgcgaatgctagcgaacgggaaatgcacgaatttccagagccccttttatacaggatctattaggatctatatctccttcaactgcccttatgcgctacacctccggctgagatttgggagcgtccgcaattgataaaggaaagaaatattattcaaacgtcctttaaaaattgtacagggaaaatgatccgaaattcatctttgggtaaag

SEQ ID NO: 199631 - DNA, 120 bp, Homo sapiens
  chr4:149363664-149363784
  hyper
gcccttttaaaagcgggtcacatgtccagataaagttcaggttgctatcccgcccccctgaacccttcctattggcccgaagagaagcaaggctccacgccgcacgggtcaggcgggctt

SEQ ID NO: 199632 - DNA, 93 bp, Homo sapiens
  chr4:149364560-149364653
  hyper
aatgggtggagggggtgggtcacataagtgggagaaacagacaggaggggggaaggaaccaaactgttttctaaggatcggttgtctgcatga

SEQ ID NO: 199633 - DNA, 78 bp, Homo sapiens
  chr4:149364662-149364740
  hyper
ggtttccctccaaccgccccctcctcgattctcctcccgcccacccaaatgctgcagttactaagcaaaaggatgggg

SEQ ID NO: 199634 - DNA, 408 bp, Homo sapiens
  chr4:149365460-149365868
  hyper
ccgtgcaggggcagccgccgcgatcactcgcccgccacccagcacccttgccccagggccgccagcgggcaactcgtctcctgcccgcatcccacctccgctcgccaacccgcgccctctgccctgggcgcgcaacctgccttgcccggggccgcccctgcgctctccggaccccctctcgccgctgtcagcgcaaagtgactgtcgctgcactcaccttttctaggacatggtggggaggctggggcgggggaaggggaacggctagactcccgccgccgctgctgccgccgccaccagcaagtccaatattggctgatcggcggtgaggatggagaggatgataatcccggcagtggcagtcgccctgctgacggtgggtagagcaatagtgctgttaccctacaa

SEQ ID NO: 199635 - DNA, 347 bp, Homo sapiens
  chr4:149365911-149366258
  hyper
gggcacccgcccgcccccagcggcggcggccgggcctctggcgggcccctctcccggggctgcgcgtccgctcggcgttgacagcggcgtccctgggagccgggaagtccggcaggaggatcccgcgcccgccgctccgcagcgccactctccgcgccccctccccgggccctgggtggccggtgacagctccggcggccgagcgcgtgtgtgagggggcggtcgcagggggagcctgcgcccccctccccgggtcacgccctcacgagcgggaggaggcggcaccgcgtccggccacccgcgggtgggaaacgggcaggggcgccggcagccgccctcccactacg

SEQ ID NO: 199636 - DNA, 118 bp, Homo sapiens
  chr4:150999236-150999354
  hyper
tagtttttggcctgcgcggttacgtttcccaggcggaggagcgcgcgtcgcggctgcgcccattaacgcgcggcgccgggcaggagccgtcaggcgggcggggctgcccgggacccgc

SEQ ID NO: 199637 - DNA, 552 bp, Homo sapiens
  chr4:150999589-151000141
  hyper
aggggccagacacggccctctcagccccgaacggcgcgcgctgcccggcgggcgggatccgggcgcggccgaggcggcggcgctgcaccccgggcctgggcccgcgcgactcccccgggggcctctcccacgctccgcgccccgccccacccttccttccttcctcccctcggcgctcccgggagcgctcggcagacgcccgagctttgtgggcgcccgcgggcccagcgcgagcctcgggcggcccaactttgcctctcccggtcggctcccgagcgggacttgtgaggcgtggccgggtggaggaggcgcttgcgggggcgtggggctccccggcaggcgggaggcacggagcaagtcgcactggacaatgacctgggcagctcggcgctgcggacacttttagctgagggcgcgggcgggtcggctcctccgcggctcctcggccccacctgcgcggagagggcgggatgccagagccaggtgtcccggcgcgttaagggccctcgcagtcagacgtccctgcaccggcgctcgcacccttagtcggcc

SEQ ID NO: 199638 - DNA, 145 bp, Homo sapiens
  chr4:151000581-151000726
  hyper
ctggacgagctgctggaaggtaggaggggagggcgccgcacggcaggtgcggcggagcgccggcaggtgcagtgggcgtgagccggcgcagcggggagcccgcggggtgctttccaagccgcacgggaattgatgcttctgtctg

SEQ ID NO: 199639 - DNA, 88 bp, Homo sapiens
  chr4:152246044-152246132
  hyper
tgtcgttgtccaccgagacggccattgacctctgactcatccagagataagtcatcaaccaggccacaagtcccaagccagcagctcc

SEQ ID NO: 199640 - DNA, 178 bp, Homo sapiens
  chr4:152246314-152246492
  hyper
gctgtgtggggcaggacccgagcggccccagagcgcgcagctctgggtccccgccgccccgtcccccgcgcctctcacctgcggccgagtggcccgagagcgcacggccccgggcgcggcgctggccaccaagttcgcggcgctcgcgtagctcttcctcctcgtcctcccgccgccg

SEQ ID NO: 199641 - DNA, 483 bp, Homo sapiens
  chr4:152246542-152247025
  hyper
gctgcggccccggcgccccagaacgcctgcacccggcgccccacgccaccgccctcgggccggggggaaggcggctcccggagaggaggcgtcggcggcggctgtggaaatggccacctccgcgaactccacctgcagccggccgggcagcggcagggcgcgggccgagccgattccccgcctccttgcggcgtcccggcggcctcttaatccctggcctttcccactcccactcccgctctcttcccccttcctctttgccttccccgccccgtagagctccaccgcggatcgggcgggttcggggctggcctcgcctcctcagggaggggttatcggcccctaaggccgccccacagccacacacgctggaaacaccagctcgacccaaacaaacgtgtgcaaaataaataaacgggataggaagaggggaaagaggaggtggcctggcctcttcctgccttttcacgatattccagtgtc

SEQ ID NO: 199642 - DNA, 900 bp, Homo sapiens
  chr4:152329838-152330738
  hyper
ccgccgtcaaacctttgggaagcaagaaatccgaaacgcccgtgacgtgcggcgttgtccgactccttccactaggcagaacccgagagacgagcctttggcgggacggtgaacgattgtgctgtgtacggcggtgtgcgtgcgtgagtaaagagtgtgtagctccggccaaacgctagcccccaagggcgcgagtgctacactgcgcccagctcaagtttctgtggaaactttccctcagaggctcctcctccttcaccttggaaaccggcgcgggccgtgcggcgcggcactgcctaagtccccggcgcacctggcggcggcgtgtcccagcggcagaggcggggccggcggcggcgggggcggggccggggcgcgctccccgaggcctccaggcaggttgggccccacccccgcccctgccccgccccggcccccgcccccgcccccgccccccccgcgctcactagggagaggctggggggaggcagtgacccacgcgcctcagcccgcggctgacgcaccttcgaaaagttgcgctccgaccttctcacgacctacattcttcccgggcactcctgagtttgagccgggcctggaggacctgggccaagactttcgagcggcggccgcccgaggtgcgaggagccagcccggctttcctcactgggtcccgcgcaggcgtccccgggaccgcagagcaaactttctggactatctgaggacacttgtccagcgagccccactgctcggggaggaggagccacggccggggacaggtaggtgctgtgctggccggagatttgcgcttgagggattcttttattttagagggttgaaggaggagggagagtcgaaatgtcccttctctgcatccgccaactgggcagggggtgcggg

SEQ ID NO: 199643 - DNA, 210 bp, Homo sapiens
  chr4:153600921-153601131
  hyper
tttctgggtgtcaccctccccggcagagttctgtagcctcgggcaccctaccagcttttgcgatcctccttcccaggagtaggaagtggaggcggcttaccccggccgacgggaacgagcgcgatcaccagggcgaagactagggctgcgcggggagcctgcatgtccgctcgcctcggcagaggcgcgctcaggatgctgcgccgggct

SEQ ID NO: 199644 - DNA, 275 bp, Homo sapiens
  chr4:153601161-153601436
  hyper
tttcctgcttgtttgggtcggtgctgacttgaaggagaggtgtgtgcctgttttttaggaagtgatgtaattctgcaggagcctgtcagaccagcaaggattgcaaaagagaagttgctgttgaagcactggttctattatcacgcctctccagccctttggagtcccggcctccagcttttgaaaccgtccccggggcaacagagtcccttgctcagatgtcgttcggtatctgggactgggaggggtcctggaccacacgcattctcactctg

SEQ ID NO: 199645 - DNA, 158 bp, Homo sapiens
  chr4:153856983-153857141
  hyper
tgtgtgtgtgtgtgtgcgcgcgtgtatataagagtgtgtgcgcgcccgtgtgcacaagagagggtgcctgggaggctgtcgcaaaggctcctttgtgaaaggcacttgcaggttcagaagccagcttggcgcctcctctcgcccgttccccgaggaca

SEQ ID NO: 199646 - DNA, 184 bp, Homo sapiens
  chr4:154073356-154073540
  hyper
gttgtcaagggaaccgcgtgtctggagggagaacaggctctccggagtttcccgggaaaccaccccccgcagaggcaggtgcggctggctgggcctcgcggggaagggctctctgggcggagtcggggcactcggggcctggggcgtggtcgccgggctgccgtgcgctcgggatcagtctttt

SEQ ID NO: 199647 - DNA, 57 bp, Homo sapiens
  chr4:154143758-154143815
  hyper
ttgcctctgcctcgcggttgatggaaaacagatgtcttactgctctgggcctgagca

SEQ ID NO: 199648 - DNA, 213 bp, Homo sapiens
  chr4:154144184-154144397
  hyper
tctcgtagtaagtcgtggctcgggctgtgccctgggaaccctcccgcccgggcaaggtccggtggccggagcgtgcgggaagcctgcccagagtccatttccggacgggcgctgcggggctggcagccggcctggagcgggtgcagtgggtcggcgcggcgcagagctgtcagcaacagggccgctgagcagcagaacctggacgccgcgcgg

SEQ ID NO: 199649 - DNA, 204 bp, Homo sapiens
  chr4:154714010-154714214
  hyper
tgcccctcatcttaggaagagtctagtctgagaacaaacagtttgccaactcctaccccgagctcttgcgcgtatctccttaaatatttcaagggtctgggccccagatgggtgctcggaaagcaaacgaagggtccagggaggccgaggccaacgcggagctcagcgcccccttcttgcctgaaggggcgcgctggaggagga

SEQ ID NO: 199650 - DNA, 252 bp, Homo sapiens
  chr4:155664784-155665036
  hyper
ccaactcagaaatctctcccaagaggactttccaccgaagactaccgcgaagtgccaggaactcgccccagtcccgacaggtgcaggacctttcgtgccgccacaccttgggactctacctccctaaataggccacttaaaagccagtagtgcaaccgggatcccgcggcgataaagaatcactgtgcagaaccctggagctgggagtcggcccgcccccctcccaaagaaaccgggatcccgcgtcctccc

SEQ ID NO: 199651 - DNA, 246 bp, Homo sapiens
  chr4:155665475-155665721
  hyper
aggatgaagaaccccatgctggaggtggtgtctttactactggagaagctgctcctcatctccaacttcacgctctttagttcgggcgccgcgggcgaagacaaagggaggaacagtttttatgaaaccagctctttccaccgaggcgacgtgctggaggtgccccggacccacctgacccactatggcatctacctaggagacaaccgtgttgcccacatgatgcccgacatcctgttggccctg

SEQ ID NO: 199652 - DNA, 61 bp, Homo sapiens
  chr4:156298073-156298134
  hyper
gctcttcggcccaacgtgtcgctggggcaaccacccagacgaaggaagtgacatcaccttc

SEQ ID NO: 199653 - DNA, 144 bp, Homo sapiens
  chr4:156588167-156588311
  hyper
gaggaggcgggcagaggtctgaaaaaatcgaatgccttatggaaaggaactgcaagggttcctttggggtgatcaaagagggagacacagacacagagagacaaaggcaaggaggactgtctgggagccacgcgggcgatacag

SEQ ID NO: 199654 - DNA, 55 bp, Homo sapiens
  chr4:156588401-156588456
  hyper
tgcactcgcgcggggaccgacaggtgccactgcagggtcccctctcccgctcact

SEQ ID NO: 199655 - DNA, 164 bp, Homo sapiens
  chr4:156589109-156589273
  hyper
caaaagctgcgatcgctgggctgcccagagaaggcagccggctaactgcccagcggctccacgaggtgtgcgcgtgtgtgcgagagagacaaatgatttactgcttagcagtcccatttctgttttcgttaggactgcggctcttggagaaagcgtgagcaggg

SEQ ID NO: 199656 - DNA, 42 bp, Homo sapiens
  chr4:156589363-156589405
  hyper
atgtgatttcaggctatggatttcgtgcgtctttctctgctc

SEQ ID NO: 199657 - DNA, 167 bp, Homo sapiens
  chr4:156680532-156680699
  hyper
cttcctgagctcgggaaggggaggtgcggcggaggcgtggggtcttcccggctctggccggccccaccagtgtgggaggctgagcgccagcggaagggaaggctccgggttcgcgtccccgcgctgcccccgatgcccagcctctcccggagcggtgacaggtgagg

SEQ ID NO: 199658 - DNA, 216 bp, Homo sapiens
  chr4:156680970-156681186
  hyper
ggtgatccgcaattacggccccgaggtgtgggaagacatcaagtaagtggccggctaccctggctgtggcccaggtcggcgcccagtgtgggaggccccccgcgcctcgcctggtcctcagcctgctggccgggtcgcgggcgcgcatccttggaggtgcctccgcgcctcgctcccggctcgctgcagctgcgctcccacgctccgggactggaa

SEQ ID NO: 199659 - DNA, 178 bp, Homo sapiens
  chr4:157891924-157892102
  hyper
gggaaagactcaccgttctgttccttgttgctggaaaactggaatttactactcaggttggattccgcctgagtcccctgtctctggccggccagggcagatgtcagcaggagaagcccgaagaggctcatttggctgactggggtgagagctcactcacggcgggcactttggaagc

SEQ ID NO: 199660 - DNA, 246 bp, Homo sapiens
  chr4:157892475-157892721
  hyper
ctggaagccaagtcggcggcgagcagtttctgatcaataacaaagctgccaatagatgcggctctccgggcgcccctctcccccgccccaccccccacccccgaagggggagggggaagaaacaaggcgagggcgccgcggcgggtcccacgggccggggcgccggagcggggccggggggctccgggccgacggcggcccgggcgcaggcggagagaggccgcggggctcccgctcctcagcccg

SEQ ID NO: 199661 - DNA, 149 bp, Homo sapiens
  chr4:157892762-157892911
  hyper
tccggcacctggcttgagttttccgcgaccaaagttcaccttgttcgggctcgtcccccgctcctcaaagcctggggcaattcggccgctcggggtcaccgcggggctccggttgttccccgtcccctccccccacgcctcgggctccg

SEQ ID NO: 199662 - DNA, 170 bp, Homo sapiens
  chr4:157997215-157997385
  hyper
cggtcgccaggttcccccgcggcccgcgctgtccccgctgcggccccgaccgcggcgcgccacggcgcaggctccgcggcccgagcaggcgcgtcagccgagctcggcggtggcgcgggcggctgggacgcagctgcccccgctcggcgcccgctgcacccttagcagcc

SEQ ID NO: 199663 - DNA, 102 bp, Homo sapiens
  chr4:157997663-157997765
  hyper
gtggcgcccgcggagacgctccgggtggagagatgcagagggccggggtaattaggaaacgcaaggttggccaggagggctccttgcgttgttttgtttatg

SEQ ID NO: 199664 - DNA, 34 bp, Homo sapiens
  chr4:158142724-158142758
  hyper
agagactcttggatttttgggcgctagcgcgcgc

SEQ ID NO: 199665 - DNA, 61 bp, Homo sapiens
  chr4:158143023-158143084
  hyper
gtgtgcgtttctggggtggtgtgtgtgcgtttctgtgtgtcagtgtgtgggtgtgagtgac

SEQ ID NO: 199666 - DNA, 148 bp, Homo sapiens
  chr4:159093901-159094049
  hyper
ttggtggagcagccgcagccaagcaagtaacttgtaaaatgaggaatgccatcacccctcgagtgtccatcccacataacttggggttagagcacaagcgttcccaggaactactcaccttaccatcttggccgtttcatttgtcttc

SEQ ID NO: 199667 - DNA, 639 bp, Homo sapiens
  chr4:159690017-159690656
  hyper
ctcccgccggggttacgtgagcccggggcgggcggccgccgggccaatggccgccgccggggccgccgcgctcctcccgcgccgccgccgccgccgtggggctgcgggctcctcccgcaggagataactgtcagcgcgcgaggcggtggcgggccggctcagtcatatgaccggcagccggcggctccggcgccgagcagagttactcagtcgcagcggccccgcgctcccgcaaggctgggcggccgcgccgccgcgatggccccgccaccgcggccgccgcccccggctgcgcgctgagccgccggccccccgagcgccacggccggagctgcggcggcggcatcatggccccgaccctgctccagaagctcttcaacaaaaggggcagcagcggcagctccgcggcggcgtctgcccagggcagggctcctaaggaaggacccgcctttaggtgagggggcgccggggggcaattctggcgcgggacccgagttggcttcggtgctcgccggggaggggacgggtaggggaaagggaagggactgtccaggacggcgctgcctatcgccggcacctggtcccgggcttgtcagcgtggacgcgcctgatccgagtgtggctccggaccctccgtga

SEQ ID NO: 199668 - DNA, 80 bp, Homo sapiens
  chr4:163085162-163085242
  hyper
gattctcgctcctcctccctaggcaggagctgctgccactcaacccgggggtgccccgcccccaccatctgacgtaacta

SEQ ID NO: 199669 - DNA, 258 bp, Homo sapiens
  chr4:163085479-163085737
  hyper
tctggaaggaagacggggcggagagagggggcagtggagcacggagaggaccgagtgggaggcgggtggggaggagacggagaaatagaatgaatctattcaaccattcttgaaaacatctccaatccttttcatcttcctgcccaaactttgctgcctctccctgccatttggttatttgaacggatccgtatttggtgttcctactcccttccctcggttcacggagcctctggagggagtcgctgctgcagaaac

SEQ ID NO: 199670 - DNA, 33 bp, Homo sapiens
  chr4:164253781-164253814
  hyper
gaactccacctcatcccggatcacgtgacggcg

SEQ ID NO: 199671 - DNA, 169 bp, Homo sapiens
  chr4:165304244-165304413
  hyper
ggataaaacttgggcgtctctctgcctcgactggtcactccacttcctggagctccagaaactccctcagcacctggataactgcgacactcacccgtgagcgcaggaccctcctggcgtcttaagtcccagctctcagtcccgctggccgcaggaacacaatgacatc

SEQ ID NO: 199672 - DNA, 259 bp, Homo sapiens
  chr4:166300444-166300703
  hyper
cgccgaagcccaggagcccggggcgcccgcggcgggcatgaggcggcgccggcggctgcagcaagaggacggcatctccttcgagtaccaccgctaccccgagctgcgcgaggcgctcgtgtccgtgtggctgcagtgcaccgccatcagcaggatttacacggtggggcgcagcttcgagggccgggagctcctggtcatcgagctgtccgacaaccctggcgtccatgagcctggtaagggcgctgccccctgacag

SEQ ID NO: 199673 - DNA, 82 bp, Homo sapiens
  chr4:169552543-169552625
  hyper
tggctttagaaatcgccggtggaacttgcctgttaccttcttacaattccccccgcccctgggcaacgcaaaagccgtccta

SEQ ID NO: 199674 - DNA, 115 bp, Homo sapiens
  chr4:169552932-169553047
  hyper
ctgcaaacgagatcgcattcagagcccagaagttgcaagctgggaataagcgagatctgaaagacccccaagaggagcttgtttgggagtgggggcagacggcgttttgcgccca

SEQ ID NO: 199675 - DNA, 597 bp, Homo sapiens
  chr4:169752909-169753506
  hyper
aacaagccgacaacatatctatgggcctaaaaaacttaaattctttcccgttattagcacttctcgatcgttccaggaaagcccgatttgtagcttggctgccccaggaaggggcctgcgaccagaaagatgcaaagggcgggacaaggttacgagtgggtgcggggaagcctccctaacctgggggccgcgtcccagagctgcgagccacgcctcctctctcccgcccgccgcgccgccggactcttattttgaagggcggcgggtgaaggctcggagcctcctgagtcacccggcgggcgaggtataaagcccgatacctgccccgcgcccggtccgcggagcccgctgcagctcccgctcgctccggacgcggaatcgggcagcagcgggaggcggcccggagagccgaggtaggcgcggggaatcggccctgaggctggtggaagaaatgtgtgaattaaagggagtgcagcgtgcagggtgggccgcgagtcgggagtgcagggctcgggacagggtgggggcggggaggacaagagactcgtcagcgcactttccacccggccggttccttcccgagccctctccctcccc

SEQ ID NO: 199676 - DNA, 274 bp, Homo sapiens
  chr4:169753535-169753809
  hyper
cggagctccagataggaatgtctgcatcatcttggcagggcccagacgggagaagatgctctgctgccacggacgatccctcccgctctcctaactcttctctgaacacctcgcacccccacggccccccgcccctctcttaatcttggccacgctccctgaggggtcagacctggggtgggagagcagagaaagcggggctggcagagacaggggtgagggccgggagaggcgatgacatcattccctggcagctggcggggagagggtgggg

SEQ ID NO: 199677 - DNA, 73 bp, Homo sapiens
  chr4:170192274-170192347
  hyper
ccacagcgccttccccgggagcgggcgcggcacctctcggagccacccgccgccgcgccggcctcccgcgctg

SEQ ID NO: 199678 - DNA, 40 bp, Homo sapiens
  chr4:170192665-170192705
  hyper
ggaggggctgggtccgcggaggcggcgggagcagccctgg

SEQ ID NO: 199679 - DNA, 290 bp, Homo sapiens
  chr4:170946845-170947135
  hyper
gagagcttcagtagcgaggcggcggctcgcagcacccacagccgcccgcactcctgcggcatcaggacacggcgccctcccgacgcggaacccgcattcacgttctccggagccctggccagcgcacgctcctccctgtccgggtaaactgaggcacagcgatgagagagatccagagcccagcgaaagcccccacggctgttcggcgtccccttcccccacgacacctaggaggctcgccggcagctggcagtggattccgcgctcctcgccctcggaaggttacggtt

SEQ ID NO: 199680 - DNA, 102 bp, Homo sapiens
  chr4:170947173-170947275
  hyper
cgccccgcacggatctcgaagcatcctgcgaccccctggagcccgctgcccggaccctgcggcgtctcgcagcgcagcctccgccgcagtctcagccagccc

SEQ ID NO: 199681 - DNA, 171 bp, Homo sapiens
  chr4:170947867-170948038
  hyper
gctctctctcccgcccggggcttccaccgcaacttctgtgggcgtcgcatcgcacgcgtgttcaaggacacccaggaaaaggcttcttagggtcccatcctggggcgctaaatgggaaccagtcaacccacccccaagcctaccctgtctccttgcaatcaaatgcaatca

SEQ ID NO: 199682 - DNA, 426 bp, Homo sapiens
  chr4:170948089-170948515
  hyper
cgctgtaagtcttaaacgtctcttaaagcaaagtccacagatggaagagtctggaaaaaaacccagcgggccgttccctggtgactttctgagtggtggggttccaggaatttttttttcattttctttaaaaatattatttgtaatttccacgttttttctaatgaaccataagttgattttttaattaaaaagtagagtactctaaaattattaagtacctacagaagtttcgctacacgatcctgcaatgttagtggcttcttctcctccttatctccctttttttttttttttttttaattttaaaagagaacagagactctcaatttctggggcgggaccaggctccttcccccggctttttagtgcccgccctcttggccacaccccactccggcctttttactcccgtaccgccctctt

SEQ ID NO: 199683 - DNA, 630 bp, Homo sapiens
  chr4:171010946-171011576
  hyper
caccgcgagatgtgtccccccgctgcgtctggcttcccgcgcgcggtgcccggagaacgccgccgaaactccccggctggacgctgcgttcggtctcccggtcctaaacgggtctggggctgtgtggcgagcccggcaaagtccacgccgcacgcgctcctgcggccgccagggcccaggccggttttgccccgccgcgggcctcgccgcgccccctcccgccccgcgccgtggcctatggccgcccgcggcgcgcgcctccccgtcccggatcatcgccctcagagcgcagggcgcggggtagcccaggcgcgaggcgcttgcagccccaggccaatgactcttgacctcgccgctgggaatcaccgcaacccggcgtccgcgttggccggcctaggcgccggcccagaggctagcccaggggctgaccgaggggaccggaagtgcccgtgatcctaatcctcgggaaccatctggcggcgacttgggtccactgcagggggctcccgagctgcgcccagccgggagcggccccaccctcgttcccgcgcgctccgctggcctcctctcagtcactgggactgtgcattttgcccgctcagaccatggctatgctaaatacccatcttt

SEQ ID NO: 199684 - DNA, 1620 bp, Homo sapiens
  chr4:174089776-174091396
  hyper
gggaggagcggagggaagagcccggggaaaggtgtagccgaggggagttccggatctggagctggaaagggcaggcagcggagagggcggcagccgtagcggtaggggtgggggaaagagggggaggagagccggaggagggggaaggagggaggggagagcggtggcggcggctgcgccgggctgtgagtctctcgccgccggaggaagatgaggctgaagattgggttcatcttacgcagtttgctggtggtgggaagcttcctggggctagtggtcctctggtcttccctgaccccgcggccggacgacccaagcccgctgagcaggatgagggtgagtgacccgcccggccccctccggcggcagcgaccggcaacttgttttgtttgcccgcgtgtggagggagcaggggcggcggggtcgcggcacggcgtgggcaccgcagctccgcaggtggtgctggcgcagcgcgggccgagggggtgccgagccccgcgcactccgacctccctggccgccgccggcccgccccctcgccgccccttcctccgctcttccccgccccgggctccgtcgccgacacccgcgctgccgcggcagcggctcgggcggccgctctccgcgccgggactgcgggcggagcgggcggagagccgggtccggggggctgcggccgcccggcgtcccgctctggggggccgggaccgcagcgctcacggcccggggacgcggggttggtccaggctgcggcctgtggcgcgtgcaggcctgaaggaggcgagatgccgatgccgccaccgctggtccggtggaccaggccccttggtccagcctcccctcccgcagccgcccgtctgggggtgttcgcagccccgggctcccccggcccgcccgccggggagtgggagggcgatggcgccccgcctccggctcttacggagagcgcgcctccccctcaactccggcggcggggagccggggtgcgatgcgcggccgaggcctcgcccggaccgccggtccccctcgcgtccctgggcgagggaggggcggttggccggagatggcggaggggcgtccccgccccgcctgcccgccgcccccagccctcagcgcctggggaagcccctgctgtggcagtgctcgggcgctatccgggggaagaggagcagttcctcttccttggctgcggcagggctgcttgggccggaaaactaacttgtgtcggcgcccggccgccccgcgccggctgccggctagctcaggccgacgccgaggggagcggcggcgcggagctcgcggcggctccgctgggacgcatttgtctgccgcccagggcgcgagtgttagcgctgacattccttggatttggagggtttagtcaggcgcctcggaacattagttacccggagccgcgccgcgcggggaagggaccgcgggcactgcggcttccctgacccggcagcgggcggcgcgcaccggcctcgcccccgaccctgacctgcttccccccggatgaaccgttgcaccacctgcttcctcctccccgctgggacagccaactgggccggctgccagtgggggtaggagagggtatgaggggctcacgaccgccgaggc

SEQ ID NO: 199685 - DNA, 56 bp, Homo sapiens
  chr4:174439741-174439797
  hyper
cttccctggacttccgcagtcccccttctccccattccagaacctgccgagcccct

SEQ ID NO: 199686 - DNA, 270 bp, Homo sapiens
  chr4:174440348-174440618
  hyper
ctttgggattggactttttcagtttcacacgaagagacttggagtatctggagaaggtttttgaagacgtttaggagggagggtgagttttctgctgagaaactcaatctgccatacagtagcggccccatctgggatctgtcactgctgacagcaccagagggcacagccgtgatcttctgcacagcctgcactccccgaaataccctccttaatcaaaggatgtctgcgcgcctgagctcagctgaccgcgccgggagcaccagggcc

SEQ ID NO: 199687 - DNA, 122 bp, Homo sapiens
  chr4:174443429-174443551
  hyper
gattacacccaactcggctgggatggctccgagccgtctgccctgacgtcagcgaggctccggccccgccgcggcaagataggcgagcgcggccgggcgcgggtgcggcactaatcactccc

SEQ ID NO: 199688 - DNA, 123 bp, Homo sapiens
  chr4:174458999-174459122
  hyper
ctctaggcaccccacgattagctgagtgatctagggcaaggacctaggcgtctctaagtcttagtttccccatctgaacaatgtggataatgacacgtacctggggtgggcaggctagagtaa

SEQ ID NO: 199689 - DNA, 56 bp, Homo sapiens
  chr4:174460221-174460277
  hyper
catgttagcggtttgctggatttcccttctccctcgctgttcaactgctagcatga

SEQ ID NO: 199690 - DNA, 259 bp, Homo sapiens
  chr4:175205245-175205504
  hyper
gtcgtgctgggcctttgaaaccggcttctttgctggtggctgcttggtgagccccgaggagacggcaaggctgcgcctggtattgggcggaggtcgcctctctccgccgtccttacagagaccccgggcggagacgaatgaccagatccgccttttcattcttttaaatcaaatggcgggaggggagccttgcttatatacccaactagtatatgcttttagtcacaacgaagtgggaagtatcgtggtagctcatcct

SEQ ID NO: 199691 - DNA, 92 bp, Homo sapiens
  chr4:175750738-175750830
  hyper
agcagtaaacccagaccctggcggagggctggggaagagaagacaatgtggtgcgtgaacgcccgtggaacggaagaaccagctgcttctag

SEQ ID NO: 199692 - DNA, 75 bp, Homo sapiens
  chr4:176922578-176922653
  hyper
tctccctcgctcttcgaggtgactcgtgggaccctgcgtcctagtgctgggtgtgaatcggctatttcacaccca

SEQ ID NO: 199693 - DNA, 57 bp, Homo sapiens
  chr4:176986729-176986786
  hyper
tagaaagtgcagactcgctataaaatgtgttaggtggtgagaacgctgatggttcac

SEQ ID NO: 199694 - DNA, 99 bp, Homo sapiens
  chr4:177240753-177240852
  hyper
cttaacttgctgccggtttcaagtgaaaataaatggtacataagtaatcaagaagtcgcagtcccagacctctgaccaaagaaccgaaaaaggacagcg

SEQ ID NO: 199695 - DNA, 69 bp, Homo sapiens
  chr4:177713159-177713228
  hyper
aagatttttctccaaagcagcgtgcactgagctcagtaactttggatcccacgtacacaagcttaaagc

SEQ ID NO: 199696 - DNA, 168 bp, Homo sapiens
  chr4:178230844-178231012
  hyper
cctccacgccccccgccccacgcgcgtttgcgttttcttaataaacccacagcaagacctagggcgggggtgaaccacagcgcatgcgccgtagggagcgacctcaacagctagggtgctgtttgggcggggcctgggcggggccagacgcgcgcgagatttgaattt

SEQ ID NO: 199697 - DNA, 190 bp, Homo sapiens
  chr4:180979814-180980004
  hyper
agccaaggcggcagccccggcgtccccgcccgcccggccccgcgcccccgcccggagcgcccccacccgttgcgcccccgccgggtcccgccgcgcagccccgccacgctgcagctggagcgaccgccgcggccggccccgcagaccggggaggaggaggaggaggggaagccggagagggaggcgcggg

SEQ ID NO: 199698 - DNA, 484 bp, Homo sapiens
  chr4:180980410-180980894
  hyper
cctccgcgcctggcaccgcagcaaggtacgtggcgcttcctggcgcggcttcttccctagcacaccccgcgcggatttttggctgcctagattcttccccttcccggagtggtcatcatttgtcaaactttacctccacctcgcacatgcgggcggccgctgcagccgccctccctggcggcatgggctccgctcgctgatgggaaccgagaggagggtgggggggaggatctgctggcagcggtggttctcatctggattaagatcgtatttcggaataactcgcaggtcttaccttccgggggtgtccttcattatgatgttccctgtgatgctggtaatggttttccttgctccttctgcacggaaggacgtacaagtttgcaggagaaggtacatgaaaagcaggtgaagtttgcagccacttgactccaagagaggagtaaccctttctttgcagtagccgctatggttttgaagcagc

SEQ ID NO: 199699 - DNA, 206 bp, Homo sapiens
  chr4:184019900-184020106
  hyper
tttctccggaggagagctccccgcccgccacccctttcctctcgaaagttttgtggtttccctagaagacgaaagaggttgagaaggttgcggagacttttgcaatcttccccgtccagaaactctaaaacctctcggcgtttggcccaggggagctatctggggtcaaggggagggagctggccgcacattccttcgcccgcctt

SEQ ID NO: 199700 - DNA, 39 bp, Homo sapiens
  chr4:184021278-184021317
  hyper
gggaaggggctcccgccccccgccgggccctgctagtgg

SEQ ID NO: 199701 - DNA, 365 bp, Homo sapiens
  chr4:184718835-184719200
  hyper
gcgcggcagatgcctgggaagatggagaagtttctgcagatcgcgcctcactccctggccatcgtcctgggcccggcagaggcgccggcgggggaaaggccaggggcagcccggcccgcgcccccggcccagccccgccagctcgcccggcaccacatcggctacgagatcttcgccgacttcaaagccgagaacatgcagcacttctggaacaagaaggtcacggccgcggtggccgagaccttcttcctgggctggatcgacgagcaggtcctgctgatccagggcaaggaggaacatctggaggcgctgcgcgaaggctggacgcgccgggccctgcggccgccctcgggcttccacatccg

SEQ ID NO: 199702 - DNA, 533 bp, Homo sapiens
  chr4:184719413-184719946
  hyper
gtcccattcccggtgcgccgcccccgcctgcccgcgggagcctccccggtggcgggcggtgcctgaggccggccaggtgggcgccgcggctcggcgggcggctcggagggcgcggcgctcggggcgcgtgagtgtccccctcccggcactgctccgcggctggagtgcgcgggccgggcggaggtgggcggggaggattccggggctcgggtcgcgcggggctcccagctggagcggcggctcaggtgcgcccgggacgcccttccctgggcggcgactgcgggggacgcgccgggaagctagggttgaggctgagtgttgcgcgcacgcatttctcaacgaggcaaggctgcagagttcgtcttaaatgtctcacctgcagcacatctctcaagtcgttttgtgtgtctgagggaaggaagagacacaaagaggccggaggaaaaaaaatctgatcctcaacaaaagagagcaaaacgtaaagaggggcagagtcgcccagaggtgaaggtcgccgccgcgtttccagtgct

SEQ ID NO: 199703 - DNA, 35 bp, Homo sapiens
  chr4:184826203-184826238
  hyper
cttatttttgtcgttgtttactgtaccaaagcatt

SEQ ID NO: 199704 - DNA, 47 bp, Homo sapiens
  chr4:184826657-184826704
  hyper
ctctggctttagcttcctttggggttggcgcaggtgggccaggcagc

SEQ ID NO: 199705 - DNA, 233 bp, Homo sapiens
  chr4:184826705-184826938
  hyper
caccgcagatctccccgttcccacgaaggctggctcgctgtctctctccgagcgggagggaccatcctaaaaatatgtaaatatccaagcgctggctccaggctggggcagctgccaaggtccccgcgccgccgccgggtgttttacatgaaaatgagaagcctgatgggaaccgcgttctaacttaaggcagcctggtgattagcatgagactgggcggctgtcctgcttcc

SEQ ID NO: 199706 - DNA, 266 bp, Homo sapiens
  chr4:184827291-184827557
  hyper
aagactgtctcccggggactgcagcggaggcagagccagccagcgccggggactgcgggccgtgcggctgataggcccgcggggacacgactcggacactgtcatccccacgcctcgcgctgagctgcccggcgcggagggtctgccgccgcccctccggcctcccgcacgcccgatcccgggtcagccccggaggcctcggctgcctcatttgtttgggtcttttgtgccgtggctcccagttggccaagcactcctgcgctgaa

SEQ ID NO: 199707 - DNA, 104 bp, Homo sapiens
  chr4:184827659-184827763
  hyper
cgtgcctttccccccaggaatctggaagctataagccgggcggattgcaaatgaagtgtaatgcattgtgggacgtgtgtaaaatcggagccttcgccgtgggg

SEQ ID NO: 199708 - DNA, 101 bp, Homo sapiens
  chr4:185396094-185396195
  hyper
taggggaggagagcgggcacccgagtctccatcctcagggtggcctgaaggttccaggagggcgtccggcgaaggcacggggctgcgaccatccagttagc

SEQ ID NO: 199709 - DNA, 281 bp, Homo sapiens
  chr4:185747618-185747899
  hyper
tccttgacactgacgggcgcggccccacagggtttcccccacgctccctggccggaagaccttttctgtctggtgtctgcagagcctgacgtgggcagcgcccgcagctcgcgccggtgcaggggagctgagggccgactgcgcgctgcaccacggcggccacctgctgtgcggttctgagggcttccgcggttctgagggcttccgcgtccctgccatgcccatcttggggcttcagaagccaacacgatggttttcgggctcacatcccaaaggctgct

SEQ ID NO: 199710 - DNA, 64 bp, Homo sapiens
  chr4:185937209-185937273
  hyper
ccactctggggcagcgtgtgtgacccaggccttcggaccgagaagggagaaaggaaatacgtcc

SEQ ID NO: 199711 - DNA, 83 bp, Homo sapiens
  chr4:185939294-185939377
  hyper
ggagcctcgtgtgccagccgcagccccacacctgccgggatgtccggacaaataaagcggtgtaaacaaaaaggggggagaag

SEQ ID NO: 199712 - DNA, 211 bp, Homo sapiens
  chr4:185939443-185939654
  hyper
tcccttgaacccggcggaacagcctattaaaggcttacttaattactttaatgactctggacaggctttaaaacgcactcggcgctgggacggcgggcttgctgggatttgtaaacaggcgatcatgtgagactcagcggtgggactaaaagaggcgacactgttttgtgagggtcctcgccccccggtgcccgcggccgctgcgcccctg

SEQ ID NO: 199713 - DNA, 68 bp, Homo sapiens
  chr4:186130483-186130551
  hyper
ctcaggaattaccagcgccgctgacacctgcagcaaaattttccatgaacagacggcatcctgtagag

SEQ ID NO: 199714 - DNA, 108 bp, Homo sapiens
  chr4:186434979-186435087
  hyper
ctctactgagagacgagaaggaagagcttgctccttatcattctggcttgttcacctgattccttcctcctaaccggggctggtttccatgctcgctcctgctggcag

SEQ ID NO: 199715 - DNA, 112 bp, Homo sapiens
  chr4:186706061-186706173
  hyper
ttgaatatttttgactctaaatatagtgaagtagttggctcttttttctaaaactacaatttactgatcagtgatatcaagagaaataagaacacagcagtgatcaacagga

SEQ ID NO: 199716 - DNA, 565 bp, Homo sapiens
  chr4:187645505-187646070
  hyper
gaatgcagctaggtcggaatctacttcctccttcaatccccagaaaatggaaacgcttcccccgcgacctttttctgccgagttagaccccaggccctccccgccgcgggcgcctggcctcccccgctgacaccccggacgcccaggcctgtgggacaaaaggcagtcgcggcgtcccgcgggcttcctagcccgggagtcggccccaggggccccaaagcgtgaccccaggccgacaactgcaagttcctaggcagaggggaagccccagcgccgagaagcccgctccgagaactccccgcgccgggcgcccagcctgagcgtcccgggcgcggagcccatccccggtgcgggcagggctccagccgcaggctcggcgcagggcggactcggccgaagcccggagggccggaggcgctgggacgcagcccggacaagagggcggacttgatctcggaaagtttgtgggactcaggcattttaacactgggaagacaaagagatccgatttccctgggactggtgaggggagcttggcggggaggggaacggcagggcagtcaag

SEQ ID NO: 199717 - DNA, 176 bp, Homo sapiens
  chr4:187646285-187646461
  hyper
tccatcatccaaagacgtgtttgtcccggccataattgctccaagtgcttacaggtcaatttcatacatggaacacctcgaaagtgggtgacctgatctccaagcccaaccggcttgtgccgcttgccgaattgtaaatctcagcaaaacccaaacacaccggaactccagccgtt

SEQ ID NO: 199718 - DNA, 38 bp, Homo sapiens
  chr4:187647035-187647073
  hyper
aaagaatgggcccgggtgggtggtcagtgaagactggg

SEQ ID NO: 199719 - DNA, 182 bp, Homo sapiens
  chr4:187647457-187647639
  hyper
gtttaaacttaaatgccaaaaggcatgcacgatttgaacaaagaactcaccagtctagccgagtcctcggccctgggctctaaagtcctcggcagctccgtgatcccctcgcggtgtagatatgtgttaagagccgggtttgaagtaccaactttgcctccccgggatcttcagcatgtccc

SEQ ID NO: 199720 - DNA, 393 bp, Homo sapiens
  chr4:187647669-187648062
  hyper
gacccaggcggccgcatctccggaggcttccgaccagggcaaacttaagcaccaaacgcaggcgaaaagagagtgcgcggggccggaacgagggcccgggagcagccaagtttgtcaggacgtgcccaggcagccagccgccgagttgaggagttgcggccgccggctgcggcgactcgctgcctctttccccactccctcccccttggaggcggtgggggaggggaggtgacgtcagcgccccgcctcgccccccgccccgggcgcggacgggattctccggctgggcgcgccaccccgacagtggcagcagcggccgtggaggctgcgggggtcccggcctctgcggtctctctggccggccgcagctgtggcgcgggtgaaacgcccgcc

SEQ ID NO: 199721 - DNA, 176 bp, Homo sapiens
  chr4:187648119-187648295
  hyper
gcgcctggagccgcctggagccccgctgcgcgcacttccccggctcgcggagcccctccggcggcgtttcccacgccgcggactgcaggtgatgctcttcctcttctgcagccgaaattcgtcgcgatgtgtcgcctgccagatttttgctgggcggaagcatgaacagtctctgc

SEQ ID NO: 199722 - DNA, 86 bp, Homo sapiens
  chr4:190123535-190123621
  hyper
tgcacactcgcaacgtggccccaggggagccgcggcctggcaacgcgcgcatcctgtggtagttcaggagcgccacctgtcgtgga

SEQ ID NO: 199723 - DNA, 191 bp, Homo sapiens
  chr5:92399-92590
  hyper
gggcacggggactgcggcgggtgggggcgcgagcggacgcgggagtaggggcgggtgggggcgcgggggtaggggcggggtgggggggggcgccggagtaggggcgggtgggggcgcgggggtaggggtggggtgggggcgcgagcggacgcgggagtaggggcgggtgggggcgccggggtaggggcggg

SEQ ID NO: 199724 - DNA, 82 bp, Homo sapiens
  chr5:368381-368463
  hyper
ctgggcgtgcaccgcgcactgtatcctgcctgagggtgtgggccagggcgctccctggctgtggccgcgtggggttagtggc

SEQ ID NO: 199725 - DNA, 259 bp, Homo sapiens
  chr5:373104-373363
  hyper
ggcacagggtcgcccgaggccttggtgctgacttcacattctcgctgttccaaatgagccccttcttggttgcagtgaactctgcagccgtgggcggacggctggtaatggccctgagactctccaaggtggctgaggttctgcgcggttggcagagtgctggcaggacacaggggttgcccaggctacagatccgggttcaggcccagccgtggggactgttcacctctgagagggcagccctgccccgcggccctgg

SEQ ID NO: 199726 - DNA, 285 bp, Homo sapiens
  chr5:374579-374864
  hyper
aggtgggaagaggccgcccttgcccaagggatgcccccacctcggtggactgttcatgcttcctcggaatagtcctgctttgtggcagaagaaatggggcagtttttgttacatttagtgcagtgaacaaacatccagtttttaccagctatgggagttgagggagaaatgagggctcagagaccagggagggaggggaacagagaggccgagtcccaaggccacccggtgccaccgtctccgggcttctggctgcctcacctcctcactcgggccctcgccccc

SEQ ID NO: 199727 - DNA, 1414 bp, Homo sapiens
  chr5:472580-473994
  hyper
ctcacccagccagggcaccccgggcgacctccgcgccaggtgcgacagctcaggccggagacctcgtctgtggggacgggccgtgtccggggccgccaccctgagaccgggcgcgggcaggacggaacctgggggggaaacggggcaggtactggctttaggagtctaaatccccaaacgctgagcagacggaagacgttcctgccactttacctgcagttcaaagacctggcgagggcctggaaacggcgctcggcccaggccgcttgcgggcgctgggcctgcagccgctgcaggtcgggccctgagtcctggcgctcgggaggtccctgagtcggtccccgagtcagtccccgggcgcggggctcggttgggggggcccggaaccttgggctggtttcacgcaaatccgtttggggcgagcctcggtttcccggcagcggtgggaaagggcgcgagcggccagccatggcgcgcggacccttcccgccggcggcgtcacagcggcgtctcctcctgctccagcgcgtgcggcggtgcgtggcacgagggcggcagcgacgccagcttcagcagcgcggggcggcggcgcgcgcgaggccgctggaacgagcgccggctgtgcacgcggcgcgccgccgccgaacgcgcgtgcgcactcggcagccctcggcgctccggccccgcccccggcgcaggccccgcccccggctcgccctcgggcggctctgcgggcgcaggcgcggcactctcggagttctgcgcaggcgctggcgtgggcgaggcggggctcggggctcgcggtcgctgtagccgcgcggggatctggggtttctctgggacagcggcggcggcggtgggcggaccgtggcgcggggacgagcggccggttagcggcgtgtcggagccggtgtcacctgcgggagaggaaggcgtgagcggcgcgcggagcccgggcgctggggcgggaggggcgtccccgggggcctcagctgtccccgagcccggcggctctcgcctcccctcccgcggcgcaccccaggctcggcgtccgctggggcctcctcccaggacccgggttcgcggggcagaggcggaagcagcaacagcgaagccccagcccggccccgccacgtccccccgccgggggtcccgggacagcggcctcctcggcgcaggaaggtcccgccccaggccctgcagcgcgggaggtcaaggtccccaaggggacctgcttcctccatctcaaaccgccctggcgtcccccgggtgcctcccaggcccccagagggagctcagaaagcccagaccccacggcccgcccctctccctgctctgagctggaggcagagtccgggtctgcggggccggccctccctgtatccctgtgagagggtcggggacccggggcgtc

SEQ ID NO: 199728 - DNA, 96 bp, Homo sapiens
  chr5:491127-491223
  hyper
ctctcttgaaccagacggaaaatcgccaattcttgtgagtctggttcagctggtggatttgtttgaggctgagttctcagaccggtgagggcggca

SEQ ID NO: 199729 - DNA, 263 bp, Homo sapiens
  chr5:676505-676768
  hyper
tggggcgctggcgccgcagaggtgggccccacagccttccacacaggggcatctgacccacggcccggccccttgcaaagccaaggccgcagagggggaaggtgcaggagctctgagatgaaagaggtgatgagtttgcggcaatgtaggaatgaaatacatcggccacaggaggacgcaggtgcaaaccaccgaaataaagccattgccacacaggcggacaggacggggctcagggagaaccgctgcttttctcgggtgcg

SEQ ID NO: 199730 - DNA, 377 bp, Homo sapiens
  chr5:676926-677303
  hyper
acacatgcacacatgcgcacacgtgcacacacgacacagaaacgcgcacacacgacgcagaaacatgcacacacgacgcagaaacgcgcacgcgcgcatacacgacgcagaaacgcacgcgcgcacacgacgcagaaacgcgcacacgtgcacacagaaacgcacacacgacgcagaaacgcgcacacgtgcacacgcagaaacgcgcacacgtgcacacacgacgcggaaacgcacacacgtgcacacagaaacgcgcacacgtgcacacgacgcagaaaaagcaaacggcacgatgcggtttcaaggtggtggccggagccgcctccttggtgccctttgccattttgccgcccgtgggaatcctggggcagaaa

SEQ ID NO: 199731 - DNA, 35 bp, Homo sapiens
  chr5:693798-693833
  hyper
ggaccccgatctctccgccccgcaggacgcgcgtt

SEQ ID NO: 199732 - DNA, 202 bp, Homo sapiens
  chr5:923627-923829
  hyper
aggtggaccccgacaggcccagataggaagcgcgttgtggcatttctgccgcaggacccctttcccttgcccgctagagggcggcgctgccccagagacgcacagccagcggcttagccaaggccccagcaccagcggccctgggccctgccctgaccctgtgctgactctgcagcagcctcagctccgagtcctagtgtct

SEQ ID NO: 199733 - DNA, 227 bp, Homo sapiens
  chr5:1004765-1004992
  hyper
acaggatgagccccgcctcccagaacgcggagtcgcggtggaagagggtgacgccgccgagagttcacgagcgtgtcccaagccgagtgaggagcgcgcgggggcgctcttgctcccaaggccgcacgagcgccaaggcctcgcggggagaatagccacggggggagacggggcccgcgctgcccccacgaacgctgttggtggggaccccacggctgcgcccgctg

SEQ ID NO: 199734 - DNA, 219 bp, Homo sapiens
  chr5:1061582-1061801
  hyper
acccgccgcacccgccgtgcgggatccctgagtctcacccgccgcacccgccgcacctgccgcatccgccatgcgggacccctgcgtctcacccaccgcacccgccgtgcgggatccctgtgtctcacccgccgcacccggctcatgggagttgggagcagctgtgcctgttaagcaccagtatttaaaacagcacaccagatcaggtgcggtggctca

SEQ ID NO: 199735 - DNA, 1239 bp, Homo sapiens
  chr5:1064042-1065281
  hyper
gtccacctgggccacggtgaagatacgcatccggcacttcctccacacctgcagacagggagggcatggctgtggggcctcagaggagcccgtcccggcccgcagcacgtggggtggccgtgctccggctggcgtgtccccgtcgcacgccccaccttgtgctggcgcagcaggaagggcagcagcatgagcatgccgccgtcgtgcacgatccaccacacgtcgatgtggcccccgccgaagcgctcctggttttgcggaaacgagtcgacgttcttggccaccagcagagcctggtgcgcggcggtggtgtcgcggacggtgtctgcggagagaggcggccgtccgcaggtcatctgaggccagggtgcggaaggggcctccccggggactcacagccagtgcaggggcgggcacggcgaggcgaggggggtccccacaaagcccccaccctcactccgtcagctcctccaaggaccagccagagactcacagcagagttcagctgctggtcatgtgtccagggaatcccccagcccctgcggggctctgggagaaggggagggagtgcctggacactttcagatggccgctcccagggccagggccttcgacagcctcagagcacacaccctcgggtcggtggcctcaaggcccatcgggacctgacagcgcacaggcctggggacgttgaggggacagcgaggagacagaggggacggcgaggagacagtgaagggatagcgaggagacggtgaagggacagtgaggggacggtgaggggacagcgaggagacggtgaagggacagcgaggggacggcgaggagacggtgaagggacagcaaggggacggtgaggggacagcgaggagacggcgaggggacagtgagggaacggcgaggggacggcgaagcgacggcgaggagacggcgaggggacagcgaggggacggcgaggagatggtgaggggaccgcgaggggacggcgaggagatggtgaggggacagtgaggggacggcgaagagatggtgaggggacggttaggggacagcgaggggatggcaaagggatgcagaggagactgaggggacacgggacagtgaggggacagcgaggggaggcagagggggacagtgaggggacagcaaggggacactgaggagacacacaggggacagtgaggggacggcgaggggatgcagaggggacaccaaggggacagtggggacgaaaagggg

SEQ ID NO: 199736 - DNA, 570 bp, Homo sapiens
  chr5:1111381-1111951
  hyper
aaacctccagattcccggaacgggggacgggaacacggaggacgcggcctgagcaaggccccggtggctgccccctccccagccagggcgcagtccttcctgttccgcctctggggggtgggcggctcctccagggtcaggcgggggcaggacgggccggcccgggctagtgttaccggacggccgcggcgcaggggaagggagagcgcgggggacgcaggacgccccggctcccgaaccgcccgggtctccaccgccacccctgtcccactagggaccacccaggggcccgggctccctccggaggcgcgctccagcccctccccgtttccatggctaccagcagcggcgtccacacctctgcccccggtcccacccgagctgaccgtaccgggagccctggcagggcccctcgccccctagcgctgccactaacgtggggtgggggccctcgtgggggaccgagaacaggcggtgggggcgcgggaaggggcgcctcctgtacccccggccccgccgcccgcctccgctcccggatgccgggcccagacccgcgctcggggcgctcgg

SEQ ID NO: 199737 - DNA, 390 bp, Homo sapiens
  chr5:1112011-1112401
  hyper
tcgggggtgcccggagcctccgtccgctcggcagtctcgtccccgccgccgtcggcgtgagcctccacgggcaccacggtgaagttggtgggcatggccgcctgcagccgacagtccccgtcccggcccggcccgcgctgcgccgctcccgccgacgccacgggacttggaggcaggggcggggtccgaccgagccgccccgccccgcccgggccacgtgacttcacctgcttgccccgcggccccacgaaaagttggcccgcggcgacttcctgcagggaccccaacccaggctgcgtctgtctgaccgccgcgacccgggacgcggggctttcgctgcctgcgctcccgaccatcgcagagcccgcgaatccccgctcagtctcctgc

SEQ ID NO: 199738 - DNA, 35 bp, Homo sapiens
  chr5:1140552-1140587
  hyper
caggtgcagctccagcgaggcggtgctccctgctg

SEQ ID NO: 199739 - DNA, 45 bp, Homo sapiens
  chr5:1345798-1345843
  hyper
aggccctcgggcagccggtggatgggccggcgacctccccgactc

SEQ ID NO: 199740 - DNA, 198 bp, Homo sapiens
  chr5:1801161-1801359
  hyper
gtactcctaatcgctgaaggtttcgcacaccattgcctgcctcatcagggccctagctctagcctgcggctgcaactgcatgaggctgcacctgccggcgcaacggggccgcttaacttttaggccattgatgaaaagtcaaacaagcgcacagtactcggtgtaatcaggggcatttttagcgagatacctgggatg

SEQ ID NO: 199741 - DNA, 306 bp, Homo sapiens
  chr5:1874586-1874892
  hyper
agagtggagttggagggagacggtgagggactgggagaccgggatggggagagagagggaggccgggctgtctcgtcagcagcaggcgtgcccagggaaacgcaggtggcatacatcgcatgcataatctcaggagacggccactttaaatcttaattggttgccttttaaatatcatttaagggctggcttccctgcctctctctctagttaagaaggtgtcgtgtcaaactctattaccttgctggacgtctctcccttaagttaaaaaaaaaaaaaaaaaaagaaaagaaaaaagaaaaaaaa

SEQ ID NO: 199742 - DNA, 85 bp, Homo sapiens
  chr5:1877239-1877324
  hyper
agaaagtttaaaatctaatcaaagaaatccctattttttcaaacttctagagttgggtgatgggaagtacgagttctgggtctca

SEQ ID NO: 199743 - DNA, 59 bp, Homo sapiens
  chr5:2743446-2743505
  hyper
gaacaaatgttgacatttgacgggcgcgggaggcagcgcccgcgccggccgccgggcaa

SEQ ID NO: 199744 - DNA, 775 bp, Homo sapiens
  chr5:2753590-2754365
  hyper
aaccacacccccatcctgcacacatcctcttcaggccatctcaacacacgcacacgcacacacacccacgaccacctctccctccacccacagacaccccgttcccacaggctgggccccctgcaacgacccagcggggggtttcaaccttgttgcgactccacatgggacatcctaattcagtccaggacagatatttttaatcaattactatagagctgaaaaacagagagagagagaaagcagccgggttgggcaagccgtcgacagtctgcgacatttttgcgcttcctgggagggaattcctccaagaagaggggtaaatgagaggcccacacgctggatggcaaacacaaacactgtcagatcagatggcaacctttagggttcctttacgatcagatcagtttaaatgaaaaaaaaatcgggtgtaatttttatcaccagggagcactggcctggagtatttccatttctaaagagcggttcccgctgtggtttcattagcatttggggctcatcctccctccccctcccttgacccacccccctccccccgccggacctctgccaggggcagaagagaaaacagccagttattatacaaacatcctcagtttggagctggagtgtctgctctggatacagtcgattctgacatcaattaaatatataaccagacacgtgcagtggcggggagggtcccctcacccagggtgcatctccagaaacgccgcctgcccttccccctctttagctcagtgttgggagtttg

SEQ ID NO: 199745 - DNA, 192 bp, Homo sapiens
  chr5:2754950-2755142
  hyper
agggagggaatgagcaggcacgcagggaaaacccagtaactgctttgcaaacgcgacccctggtcacaataacccaggcgatgggggcagtttcaggttcctggtgggccctgccccctttcctaggtgtgccctaggaggtggggaaaaaattaacactgtttctatttttctttattgtccctgcaacag

SEQ ID NO: 199746 - DNA, 189 bp, Homo sapiens
  chr5:3590922-3591111
  hyper
gcataatggagccctacaggaacaaggcagaaaaacaaataaatacaagtgcagctggcacggcgatggtgcctctgcccccgagcaaccgtctggtgacatcaaataagaagccctgagaactctcacaccgctgctgttgttcatattggaggcataatggaaatgatctggttaattaaggggagg

SEQ ID NO: 199747 - DNA, 94 bp, Homo sapiens
  chr5:3591458-3591552
  hyper
gctccgctcgccactgggtccctgcagccctgcaccctcggggcgctcattgtagactattcttggtccccaggggccaccggtccctgcctgg

SEQ ID NO: 199748 - DNA, 244 bp, Homo sapiens
  chr5:3591613-3591857
  hyper
cggccggacccaccgggggtctcaacagctgaggactgtctgactattgcctcaatgtcgccgacttgggtggcctcccagctgctgctgagggacggtgcgaagtcctagtgcgtttttaagcagactcctaagtctgcgcgcgagtcggggcgcggcgccaggtcaggccgcctccgtcgccaccgagccgcggcccagcgcagagccccgccatctggagctgacagtggccattgtgaag

SEQ ID NO: 199749 - DNA, 31 bp, Homo sapiens
  chr5:6449618-6449649
  hyper
ggtctctgccgtctctctggtctctctagct

SEQ ID NO: 199750 - DNA, 70 bp, Homo sapiens
  chr5:6687057-6687127
  hyper
aaaactttctgaggtttgagcgaggtgttttaacaccatggacagcgcccctggttcttcgacccggatg

SEQ ID NO: 199751 - DNA, 209 bp, Homo sapiens
  chr5:7396264-7396473
  hyper
cgcccgcgccggaggcccctgcgcgcagctccgggtgccggcagccgggccggccgaggcggcgcgggggtgggacgcgggcggccgcggcgagcggcgctgcccgggccgggcgcgcacggcgggcgccctgtgagcggccccgatgtggcaggaggcgatgcggcgccgccgctacctgcgggaccgctccgaggaggcggcgggcg

SEQ ID NO: 199752 - DNA, 71 bp, Homo sapiens
  chr5:9544614-9544685
  hyper
agctcccccaacccccggcccccaaaatgaaattattgcaagatctgcctggttctgctgtttgttgcctg

SEQ ID NO: 199753 - DNA, 376 bp, Homo sapiens
  chr5:9545120-9545496
  hyper
gttccccaggcctctgcatcccccgccttagtgtctttcattaaccaaggcgcttggcggagttgagcccaagtcccattgcctcccggttcccctgtaaggaaagcaggaaaacctgcccaagccggtggggctgcgaggtggccgctcccgaaccgccaagtcccgacctccgtgtcccctgcccccggctcgcggcagtgcgagcctggaggcgcgccgggggcgggcacagaccagtgtgcgcacctttccgggtgttgggcaggggtcccgtctcgcccaccgcgacactccggctccttacctctccatgctcagacctcggcacaggcgggtacacaaacttccagcccgtgcactagctcaactgtgg

SEQ ID NO: 199754 - DNA, 114 bp, Homo sapiens
  chr5:9545851-9545965
  hyper
tgggggcaccggcttgggggccacgagcacggtccccgagcgcgcggccaaccggtgggtgggcaggttcgcgcccagcagagacgaccctcgaggtggcaaagttgggtgtcc

SEQ ID NO: 199755 - DNA, 31 bp, Homo sapiens
  chr5:10333392-10333423
  hyper
gctctttcaagcttcctgcacgctcttagcg

SEQ ID NO: 199756 - DNA, 502 bp, Homo sapiens
  chr5:10354850-10355352
  hyper
ttttgctttttttgatgttccggttatcgtgcaaatgcttttctactttaggtatatttatgggggtatgagcgtctttcaaccttatgggttgcgattttggcgattttaaacgaaaatgaattatcaaacgccgtcatggagtgcaataatgagtgaaaaaagtttgatattatctatgtaatgagttgataacgacttatttttttttaaagaagtcttgcctttaataaatacctcaactataacatgtggcacttgatgtacattcgcgttccatcttcgtaaaaagcctgtggaataggtaggtattatcttttatagatgtggaaatgtaggcttcgttattttaatagcttgtcgaagctttacacaggtagtaagaggcagatttgaacctaggcattctgattgcaagtaatttccctttcattatgccacagtgtgtttattatatacactgagtgtagctaatcgccactggagacgcctttggaaaaaa

SEQ ID NO: 199757 - DNA, 141 bp, Homo sapiens
  chr5:10564330-10564471
  hyper
gtccccgcgccccgccccgccccgcctcggaaagcccccgcggtcccgcccaccccaggggctcgctcagcctccggagacttttttctttgagcgcagccgcctggtgccggtttccgccgagctggagcgcgcgggcca

SEQ ID NO: 199758 - DNA, 170 bp, Homo sapiens
  chr5:10988184-10988354
  hyper
caccaagttccaggagggggcgcgcgaggggcgctcacctgtcatggcatctttcctggaagtgtgttcgcctttagctccgtggtaggtggcgttgctgccggtgcactcgtagtctgttttcctttctttgaggctgatcatttcccgaggtgaagctggggcacttg

SEQ ID NO: 199759 - DNA, 162 bp, Homo sapiens
  chr5:11385588-11385750
  hyper
acctgtgtttgcttacatgtagatgttatttcggaaatagcagaagcatcgcattagtcacataaagatttttaaagccccaccccgacagggcaatcatgatctccctggtcgcaatcacaatctgtttgttttaatgagaaattcgggcagtaaatcttt

SEQ ID NO: 199760 - DNA, 87 bp, Homo sapiens
  chr5:11903281-11903368
  hyper
acctggctttcaggcggcgctttctggagcctggctgtctattgtcagcacgcagaagcccccgaaacctgtgaagccggctgcaaa

SEQ ID NO: 199761 - DNA, 58 bp, Homo sapiens
  chr5:14108555-14108613
  hyper
tcagttaaattcttctttgctaacttccatccttttatctgttatattattccagtct

SEQ ID NO: 199762 - DNA, 53 bp, Homo sapiens
  chr5:14108840-14108893
  hyper
gcccaggagattttaaagaagccacgtgtttacgaaaacgtcttctaggttaa

SEQ ID NO: 199763 - DNA, 38 bp, Homo sapiens
  chr5:14142660-14142698
  hyper
agccggggcataggcgttttgaactagaatattcgtcc

SEQ ID NO: 199764 - DNA, 1289 bp, Homo sapiens
  chr5:14142816-14144105
  hyper
cagcagccgaaagtcccctgggagatggggatacaccgagaggaatcccattttacaggagagctttgtacccttaggagtaccgtggcctccgggactggagcagataacctgttttcgggccctctatgttcactcaacaactattaagaagccccctccccgagccagggccagcgctgagcccactagggaggcacccgccccggcccgcgtcaccccgccttgcgggctagacgacgaaacgcctcggcgctcaggggaccgcgcaccggtgcaggagccagcgccccggttgggggcgcaatgccgggcctgggaaggtccgccccggctggtcagagctttcctgcgccttccaaggcttggagctgccccggggaagcagaccgaaccaaaccgaacgttcctgcagcctccccgccagccctgcgggagcccatccgcccaacgcggccccgcccctcccccaggctccgcccaccgccgagcccaggctcggcccttgacgaagttcgccggaaattaccgaagcccctcttttttttccttcctctccgttccctgttctcccttttcctttcacccgggttccctcggccgtgatttccccctcccccctccttccttccccattgaaatcaagatggaggctcgcggcagccgccggcgcccgtgatcccggaggtctcgccggccacgggcccccgccctcgcgactgcgcgtccgggaggcgcgtgctgctgcccgcgctccggccggcgcccgggaggccgtggctccgcgcctccgcccctcggccagctcgcggctaccgggcggagtcctcgtctatgtgggcgcgctccttgggccgagccgccgccgccgccccccgccgccccggggctctgcgtccgcgcgccgggcgcgggcagctgggtgctcggcgccgccaggcccggcgcggagcgggcggcacgcggcgctaggggcgcggggcccgaggcgggcgcggccgcgggcgccgccgcagccatgagcggcagcagcggcggagccgccgcccccgccgcgtcctccggccccgccgcggcggccagcgcggctggctcgggctgcgggggcggtgccggcgagggggcagaggaggcggccaaggacctggccgacatcgcggccttcttccgatccggtgagtgcaactgcggccggcccgcccagcggcgctgccccaagcgctcggccgacccgccgcggagctgccgagctccggccaccgcgcgctggtgcccgcccgtccgtccgt

SEQ ID NO: 199765 - DNA, 124 bp, Homo sapiens; identical to SEQ ID NO: 3833
  chr5:14144285-14144409
  hyper

SEQ ID NO: 199766 - DNA, 45 bp, Homo sapiens
  chr5:14145000-14145045
  hyper
aggaggaggaggaggcggcggcggcggcggcggcctcggggccgg

SEQ ID NO: 199767 - DNA, 180 bp, Homo sapiens
  chr5:14581606-14581786
  hyper
atcaacgggccttcgatgaaaagtgccaaggaggtcgccggatccgcccaagtggaattcccaagatgtttcccggggagcagcctcaggaacgcgcctggaccccaggagtagcttcccgccccgctgccgagcctcggaggtctccgcagttctggggcccgcgaccccgacagcgcg

SEQ ID NO: 199768 - DNA, 93 bp, Homo sapiens
  chr5:15499745-15499838
  hyper
agccaggaaacctccttcaccggggcggggcagggaaagtctggctctcctgggaccgactccctgctaagtcgccccaagttttccctccct

SEQ ID NO: 199769 - DNA, 127 bp, Homo sapiens
  chr5:15499947-15500074
  hyper
tgcccacgcacttaaaataggctgtacttgcagacaaactcaagggattccaaacgacgcctggaagttcatcttatagattgggggccaagcctgtaaaagaacaacagtaaaacagagccaacag

SEQ ID NO: 199770 - DNA, 235 bp, Homo sapiens
  chr5:16934317-16934552
  hyper
ctgatgttccccccacttgcactagggggcagagttctccccaagggggagccacggacccctgtggtgctcagacaggctacaggaggagtgagatccgtgcaaactgaatacaaatttctatattttcatcagattttctaagggacccagaacacaaaaacaacaaagttaagaatcattgccctaggggcagggcctccgttttcttacagatgcaagcaattaaacaccg

SEQ ID NO: 199771 - DNA, 57 bp, Homo sapiens
  chr5:16934582-16934639
  hyper
actggacaacgtgcaactcttgcagaaagttctggtgcctttcgacaagcatgaaaa

SEQ ID NO: 199772 - DNA, 98 bp, Homo sapiens
  chr5:16935458-16935556
  hyper
acaggaagcccgcacgttttgcaaaggaaataccagacaagacctttcttggagaaaggcaggtccccgctgaacattttattgggcttcctgcaccc

SEQ ID NO: 199773 - DNA, 266 bp, Homo sapiens
  chr5:16935617-16935883
  hyper
gggtgtcccagggcgccccgagagccagccacccacgcaaacggaaacgcaccttcgctacctcccggagcaaaatgcgagcgcgggacaggacgaaacaaaacctgcccgggcttactcatcagagactccgcggggggatggggggtgatttcaggagactcccagaaagttgcgccttccagggcttaggaaaaagtacccagggcgcgcggcgtggtgggcagacgcctctctccctgggctccggaggccaggtcggactg

SEQ ID NO: 199774 - DNA, 33 bp, Homo sapiens
  chr5:16936321-16936354
  hyper
agccgcgatccccgcgcgagcgcttggaggtga

SEQ ID NO: 199775 - DNA, 70 bp, Homo sapiens
  chr5:16936514-16936584
  hyper
ctggccccgcccgggcggagcgccccgcccccttcccgaccaggccccgcccactctaagcccgaagcag

SEQ ID NO: 199776 - DNA, 249 bp, Homo sapiens
  chr5:16936833-16937082
  hyper
tgccggggctgcggggccagatcaaagcggaagacggaggctaatcagaatttctggaagctgcattcccgtgttgactttctgtcctgcagtcgggtttgcttaagacgtttgcgtaacagcggggaaatgtagttttgaaactggaaggggacgtggccaatatcacctttaaaaatgtaacccttttctagacctcaaggaagcagagatggcagatggcactgagatggacgaatgatcaaaccc

SEQ ID NO: 199777 - DNA, 219 bp, Homo sapiens
  chr5:17216354-17216573
  hyper
gctgggacgcaggcgagcatgaaagcgatccaaacacagccagagggcgccaaaatgccgcaaataaaagttccaaaggcgtcaactggcttttgcgggaaggtaaaattggcttttgtgtaatcaaagagctaccgttgtcaacgatgtcacgttacgttatttttgtatgtccctcttgccaacaggtaagcaaagtgaacgcatcttcctaccccg

SEQ ID NO: 199778 - DNA, 48 bp, Homo sapiens
  chr5:17217633-17217681
  hyper
aggagggaggctgggcgggcggacgcgcggggggagggcactgggcag

SEQ ID NO: 199779 - DNA, 76 bp, Homo sapiens
  chr5:17987028-17987104
  hyper
aggtgtgggatcttgcggggggttgggggcggtgggaaatgaatgaaactgttttcaggcattagattctcataag

SEQ ID NO: 199780 - DNA, 188 bp, Homo sapiens
  chr5:24644974-24645162
  hyper
gctcttcctcacacggagagaaaggttctgctgatagagctgcagcactcgccatgggaaggttagagactgtggaagtgctggcttctgcgagcacacagcgatttgcaagtgaatgcgaggggagggcgcatccgagaggagggctttgcttgaaaggcgtcccctcccccgcagggcagaaagac

SEQ ID NO: 199781 - DNA, 121 bp, Homo sapiens
  chr5:29296854-29296975
  hyper
gcccatgcccatccggaactctagctggcccgcaagtgcgtgggcagccccggttcccgcctgtgcctctccctacacacctggcaagctgagggagccggctcccgcctcaaccagcaca

SEQ ID NO: 199782 - DNA, 54 bp, Homo sapiens
  chr5:31194641-31194695
  hyper
ggctcatctaggacagaaatgcttaggttgcaaggaaagtccaacactggactc

SEQ ID NO: 199783 - DNA, 54 bp, Homo sapiens; identical to SEQ ID NO: 111231
  chr5:31194760-31194814
  hyper

SEQ ID NO: 199784 - DNA, 498 bp, Homo sapiens
  chr5:31854442-31854940
  hyper
aggtgggaggggtaggggagcgggagaaggtataaaggaaatgcttcagtcgtgcagtcaccggcgattgtaattcagcggtgttaactttggttactccagccgaaaggctctgaccggggatttctggaaagttccctgacatcctgccccatacgatggttgtgattttagctgggggctccacccctgtaagaactcaggctgccgcggattatgaaacggagtggtcatgaagtgaattgatgtgggaaggtggagcttcttgcaatggctcggagggagaacttttggtgcaaacgagggtctagggtagggcgctttttcctctaacctgctccaggtttgccccaggaagctcctgagccctcggtgtaaacaaaggtgtctggatgagaagccccaaactccctgaaatcctccccagggcggtttccttttcccggcgaggggagtgaccggggaggggatcttggaatgccgtggggttttgacaag

SEQ ID NO: 199785 - DNA, 214 bp, Homo sapiens
  chr5:32709879-32710093
  hyper
tatccccagaaaccccagtttgccttttcaccgtcgcaagtgagaaccagagcgcgttaaaggcctcggagtaaaaaacgcagcgtctgggactgcggcacccgggttgagtcgggtgcaagtttctgccgaaagagggcgtcggtctgagactaaaagaaatttgtggacacggacgcctagtcaaatgaaagaccattttaacacattttca

SEQ ID NO: 199786 - DNA, 38 bp, Homo sapiens
  chr5:33936115-33936153
  hyper
ggagaggaaaactggagtggcgggtgggctttgcctgc

SEQ ID NO: 199787 - DNA, 52 bp, Homo sapiens
  chr5:34008090-34008142
  hyper
acagctccacgaccgagatgccctgcagtgccatggcgcttcccagtgcccc

SEQ ID NO: 199788 - DNA, 79 bp, Homo sapiens
  chr5:34486431-34486510
  hyper
tcagaataaaaagctcgagaatccgtgcccagtaggtggcgctgctcttccttctgttgggattcgattcagacccgct

SEQ ID NO: 199789 - DNA, 127 bp, Homo sapiens
  chr5:34655746-34655873
  hyper
cccatgcgcaatctcgcctgtcagttcaggctgtaggtttctcctttctaactcctgagcagaacaacactgaacggtggtagtcttgccttgccacccaatgagtgctagaaaacagtcacttcaa

SEQ ID NO: 199790 - DNA, 441 bp, Homo sapiens
  chr5:34655910-34656351
  hyper
ctttactttctgttcaatgattttggaaaacaaccttttagattctggtcagaaggggcttggatccgtgactttgaaacactcgccactaccacaaacgactttggaagttaatcagaaataaacagtatctgggatctcatccgtcctaaacccaggggtcagagcgtggggggcttccactaacttcaggttaagaggatgaaacagatccgcggagaagggtcccacgatccctggagactaaaagcaagccacgaacagccgggacgcgcgggccggggagatgcgccgggggctggagggcggagagcaccccccgcaggtcccggccagagcccggggccgggtcacctgactcgcggaatttggggccgcgaggggtggaatgggaggggaatggttagcgcctcccttcccgctcccactggatccaggtcg

SEQ ID NO: 199791 - DNA, 221 bp, Homo sapiens
  chr5:34656421-34656642
  hyper
gctcggcgcccactgacccccgcagcgggggaggaggagggactgcggcgcaggaagccgagcaggaagcgagcccggcggccgcgttttcctggggaagcggcgggcggggtggagcagccagctgggtccggggagcgccgccgccgcctcgatggggtgagtgcgcggcacggagttgggaggctcccggcgcggggtcccgggctcgtgtccccgcc

SEQ ID NO: 199792 - DNA, 401 bp, Homo sapiens
  chr5:34657034-34657435
  hyper
caatccgcctcccggctgaacttggaggaggtggggagggaggtgcgagcgggagactccgggtggctcccaggacgcggggtccgctattgttcctcctctgactccagggagcccctcggccggcccaagggcgggggcgagacccctctgggcctgcccctgccccctaccttgttttccccgccgcagctcggggagaacggatgctggagttggggcagactcggggccgccgggacttcgggagtaaggaggacgtggagccaccagaaaggcgcccgccatctcccgcgacccctgcctggtggggggtggggggtggggtgtcgtcctcaaccaccttcgctgccttcttgggcaggttggtgtcggtttagtttctgcggtttgcagggttg

SEQ ID NO: 199793 - DNA, 335 bp, Homo sapiens
  chr5:35230141-35230476
  hyper
ttagcccctctgagaagggacatccgggcgggaggcgggcggatcccgggcttccccgccggctgccgactctggctcctggctggcgttctctccaggagcccgcgccggtggccccgctctccccttcagcacgcgggcctcgaacccgcatcccggagagcggccgcccgcgcagcccctgccgcgcgccgtcggaggcggcctcagctcgccatgggtactcacttttgccagggagcaaagtctgccacatcagtcgatgagtacttcctgcacgaggacatgaagctccattgtgtggaaagctgtttcgcgaacggtcggtaaaatcc

SEQ ID NO: 199794 - DNA, 69 bp, Homo sapiens
  chr5:36607363-36607432
  hyper
ccacaggcgcacacgctggctgcttgcgttggcagcgacacacatccatggtacggctggttttcactc

SEQ ID NO: 199795 - DNA, 32 bp, Homo sapiens
  chr5:36690646-36690678
  hyper
gccgcttccgcggggagctctaaagggagctg

SEQ ID NO: 199796 - DNA, 128 bp, Homo sapiens
  chr5:36693116-36693244
  hyper
aggccttttgtcccgcgggctctcccagcggccccgcgctgcgtggccgttttgtgaagggcacaatccgatgttctgaggagaccacccagcttcctctcccagagtctaccagagaacaaaaccgc

SEQ ID NO: 199797 - DNA, 246 bp, Homo sapiens
  chr5:36693274-36693520
  hyper
ccagaccccctcccactggcctcctccctgccctgccaagcggggacggagagccagccggccctggcccggtgggaacccagttgatggtgcgcttattagctgtcctgagcgcggggacaaactttctgtacctgggccgctgctgccaccctgcggccaagacctttctctaggccccgatgacccagagcagcccggaccagacaacgtgcaaagaggagcgcttacagcaaactcctccct

SEQ ID NO: 199798 - DNA, 259 bp, Homo sapiens
  chr5:36745374-36745633
  hyper
tgctttctgcggctttgggagtgtcaggtagcaaaacgaagagagtagtcgactagaacggtggcggggaggaggaggagggattgtctgcagtggagtcgggagcctcctccggaccaggacaggtaaaaccggtctgccaggtctcagggggagcgggtggagacgtcccacctcacctggctgcgctccgactcaggctcagccggcaggttctggggcaatgggggaagggagaggggccgggcccttgtgggtc

SEQ ID NO: 199799 - DNA, 278 bp, Homo sapiens
  chr5:37370964-37371242
  hyper
tgcggtcctcttgcaactgacggtcgatgagccgtccagcattttccagagcttcctgcagggctgcggcagatgtagaggccggcatcgccgcgcccaacaaagaagacggcatctcggaaatcgtagacaccagggtccagaaaaagtcaaaaaccaaggagaaacaagaaaagatccaagaagttagcttagatccgccgcctagggcgcgcgcgccaaacgagcgccttggcgcctcgacatgacgcacttccgcttcatccggtggggaactg

SEQ ID NO: 199800 - DNA, 265 bp, Homo sapiens
  chr5:38258958-38259223
  hyper
gcgctcctccgcccagagccaccacgccccgagcgcccctgctgggctccggggcgaggacacagagcgggcagcgcaccgcctccctctccccgaccaacgtctgcttaactcgcttcagctctgccaggagctgagaaaagacgcaaacctcgccctcccccgagcccgggcggcgctagggatatttatttattaaaagaatgatcaattttccagacatagtagatagaggtggtggtccccgtgtttgaccgcagagagc

SEQ ID NO: 199801 - DNA, 113 bp, Homo sapiens
  chr5:38556094-38556207
  hyper
aagcagaggggcacgaaatcacctggcaggtcacctctccgaaggaaaaacatttcaagctccctcccatcccccaggtaacctctggcctcagaactcactgccctgcgtgg

SEQ ID NO: 199802 - DNA, 85 bp, Homo sapiens
  chr5:38556985-38557070
  hyper
tctcagaaggtcatggaagcgcaggggagagcgaggcggccgagcccaggcaaatcctcgagaaaggccgagtgcgcgacggctc

SEQ ID NO: 199803 - DNA, 160 bp, Homo sapiens
  chr5:38557400-38557560
  hyper
tctcttaatggggtgagatttttcctccgtacattgttcccatttccgcagtttcacttggcctcggttttctagcagagtaatcaccaaatgaaattagctggagagcgtttgatggcgcagaatcacggtctgaagatgtttacgctgtatgccggac

SEQ ID NO: 199804 - DNA, 42 bp, Homo sapiens
  chr5:39424510-39424552
  hyper
ggagttaattaggcggtcagcagccacctcagtgtcctagga

SEQ ID NO: 199805 - DNA, 41 bp, Homo sapiens
  chr5:39424612-39424653
  hyper
acacacacacacgacacaaaaggaggcgtttgttaaatgtc

SEQ ID NO: 199806 - DNA, 41 bp, Homo sapiens
  chr5:40680493-40680534
  hyper
aggtgaaagcaggttggaggcgggtccaggacatctgaggg

SEQ ID NO: 199807 - DNA, 336 bp, Homo sapiens
  chr5:40680627-40680963
  hyper
gggatgcggccctcgccgaagagagccaagaagggaagagcgcgctctccaaattgcttttgtaacttgttttcagtgagcattttattgattcagaatctatcgagaatagcactagcgagctacttttcccttgagatgggtcttattcatcttggcaatggagtgagttggattgtggggaggaagaggaatgggaaaatcagtttataaatattaatgtcagcaagagtgtgctgttggcaggacgtatcgcgagcctggagattttggtggccgcagttggtaagtggctacaatccagaaagtaggatcgagttgctccccttgtcttat

SEQ ID NO: 199808 - DNA, 189 bp, Homo sapiens
  chr5:40798280-40798469
  hyper
agtctgcgcatggcgctgcgggagggggcggagggggcgggcagggccgcgccgggggcgggcggggagggggtggggacgcgggagggcagccaccgagccgagtcaccgccctgcgccgccagcccaggccccgcagcctacgtcgggcgcagacgctccccctggcggggcgggcgggggctgcca

SEQ ID NO: 199809 - DNA, 471 bp, Homo sapiens
  chr5:41510364-41510835
  hyper
aaggctacccggcacgcgctcgcctggcctgagacccaccctggaagacgagtttccctcccgcgggcatcgtggcaagttaccacttagtggcagataaagcagggcggggcaggtggagcgggcgccgagcgcctagcccgcagcccctgcgcgcctacctggaatggctaaattggtgagggggatgctgtgcatgctctccggcagagttgccatccagtcggctaatttcagctcgtttttcccctgagacgaggccatcgtgccagtcggcgtgcagcgcgctggtcccagcactcctcgggcaggctggcaggctgctgccgctaatccaatgtttgctctagccccgctagagtttacactcctctctgcgccacacccacaggatggcgcagacacatgctaattttaataattattcaaaacaccccgtgctcccttagtgcctccgccagactccgctgg

SEQ ID NO: 199810 - DNA, 758 bp, Homo sapiens
  chr5:41870078-41870836
  hyper
agcgccaaagggctcgggagcgctgccaggagtcctcccgccccttctcagcctctccgcgcgcttctttatcgcgtctcgctccatcagggaagcgactgcagaaccaagcaaaggcggtcatccgaggggccggcgaggccaggaacgcgtcgccgcgtgtccgtgaccagggcaccgcgccacggatgccagatcccaggctggagagagcgggtaggggcagagaagaaaacgcgggcaccactcagggtttggtccacgttcttcctgcccatggccttcctcttcccccgcactttaccttgtaccaggttgccccagatccgcgggcagaggcgcagagccgaagcccggaggagaggagtttgagagccgccatcttcgggcggtgaggcaggaggaggctgcgggttggagcgcgcgtttgagcgtcggtgcgcgactgcgaaggaaacccgggcgggctggaggctcgacagcgcgtcgatgacgtcctcccggcctttcgagccgcacgccaccggcgcgctgctggctgctgcttttaaaagaagtgaggctgggcggggccccggcggggagaagaggctctgtgcagccggggcggatcgcggggaagttcctctcagcgcctcaggtgtctgggcgtgtgcagctgtgttggcgcacacttgccgctacagcccttctgtcagccctttagcttcgatggggcgctggtggccgcctccccctaggttgtggatgagtcttgg

SEQ ID NO: 199811 - DNA, 261 bp, Homo sapiens
  chr5:41904304-41904565
  hyper
atgacccggaaagacctttgccggcctgggccagccctcttccggagctgatgtctcctcccaccaaccaggagaggtccgccctaggccccgcccgtgccgggggatcaggtgattgcgggccaacacggtcacgtgaccggggcgcacccgccgattgtggccatggcggccgcagtctctagtgtggtgagacgagtggaagagctcggggatctggctcaggcccacatacagcaacttagcgaagctgccggtgaa

SEQ ID NO: 199812 - DNA, 236 bp, Homo sapiens
  chr5:42423573-42423809
  hyper
cgccgggaagacttcatcccagcaactcggaatgcttggcccgggcggcactcggcctctccgcagcagttctcgaactggcctccttgaacgtccgcttcgccttcgcttctgcaacctggatctgggggactgcgggccaggcgcggcgtgacccctggtgaacggtggccgccttttcccacccctgccctcccatcctcccttcccgtttcaccccgccccctctctcctcc

SEQ ID NO: 199813 - DNA, 119 bp, Homo sapiens
  chr5:42423971-42424090
  hyper
ggggccacgcgggccggaggccccggcaccattggccccagcgcagacgcgaacccgcgctctctgatcagaggcgaagctcggaggtactggagtggggctccgggagtctggcttta

SEQ ID NO: 199814 - DNA, 278 bp, Homo sapiens
  chr5:42424337-42424615
  hyper
gcggcagggagttgcgggcgacagacgaaccatcacactctggcgtctgctctggcccgcgagtagtgtacgtggaggggtttactccggagacagttttgttaaagtcataaaagttttgctagtgtgtttctgtttgccatcatctgcctggctgcggcaggaactgccgaggctgctgctgttgcgcggggaagaatccccggcagcgcgactggagagactggggaggtcgagctgtgcgcgtggacacagcgcgcagagcgcgcggtcttttg

SEQ ID NO: 199815 - DNA, 258 bp, Homo sapiens
  chr5:42949351-42949609
  hyper
gaaccaaaacaaaccgtaattccgacggaaaaacagcgagaaaagaaaacgaaatgaaactgacactaagcagaccgtatagagaagtagccctacagaacgcagggattaaagagagcttcagaggccaagaaccacctgtgtccgggaaatgagcattgctgccaccaggaaactgtccgctagggctcggcactactaaggacctcgctaacaataatctggctgcgctgggactcagcaagagcagacacccag

SEQ ID NO: 199816 - DNA, 34 bp, Homo sapiens
  chr5:42993813-42993847
  hyper
tcccgacctcagatgatccacccgccttggcctc

SEQ ID NO: 199817 - DNA, 183 bp, Homo sapiens
  chr5:42995428-42995611
  hyper
ctatgtgctctctagaattttaccggttttcatttgtctactaattttcgtgcattcgttactattgagtttcataatatctgggtgccctctgcccacgagctccggagagcataaatacccaggctgatggtagtgctaaaggttctgcttcatctcgtcaatcagcgcaaacgcttatgt

SEQ ID NO: 199818 - DNA, 334 bp, Homo sapiens
  chr5:43007484-43007818
  hyper
acctaggcaggcagcgtggggtggagttggcaaacgtcctgcaacccatgaagagccgctatggtaccactagcggttctaggacccaaaaactaacgaaactgctcaggagaagctgcaggcttgacccaccagaggtgctgccaccgagatcaattctgctcggacgaatgagcggtgctatgactcagaaagtgccagtccgaggaaccagggatactgggacatagtgaaaggagttagccagctttagggagactgtaagggaagggtccccagagaacctccgactggtgttttgtgcagataagggaacttgcacaagggacttgcc

SEQ ID NO: 199819 - DNA, 387 bp, Homo sapiens
  chr5:43017314-43017701
  hyper
atccaacgctggaatctttcagcccattttcctccccggctgtttttgaactactatccccaaatatcgaggatatctgacagagtgaaccatcagaataaggagcgattgccacagagttccatccagtaggggagggacttgatgtgcggggcaagcctgatgcccgggtcaggcgactgtgcctttcattctccacggagatcttgaacctagagtttccaagttccgaagagatgcggttgtcgacagctctcctagaatctctgatggctctgaacggggacaaaggtctagggcagagggatggtgtggaaggacccagccacggccattggaagagcagtttcctgcaatgtaatgctgtttgcgaccagcataagcttt

SEQ ID NO: 199820 - DNA, 303 bp, Homo sapiens
  chr5:43019347-43019650
  hyper
cttaggtgtaacatgtaccggtttagatctgacagagatatcacaattgtaggattgcatcttttagcaaggtttgtaatttcttctttctaggattggttctctgtaatttttgcttatttttaaattctctctttgtcttttgctctgagaacgatgttaccgatgtgtttgctttccatgtttacttgcattttagcctttatttttttaattttgattttatttaaatgttatgtattttttttctactaattttgagcgtctcagcttcctgcttctttacttacattctctcaggat

SEQ ID NO: 199821 - DNA, 259 bp, Homo sapiens
  chr5:43019887-43020146
  hyper
aagaacttcctaaaccatgttttactgtgcagaacggtgattgcacggagccgctgtacgcactagtaatttcatagcaccgttagctggcgctttttctgtcacaacacattaaaacgggttaaaatactgcaagcggattaaacacattaagaggattaaaacattaaaatgtctcaacacatttttctgacacaacacatttaaacggagtgggttcattcctccgaagaggatgtttaggcgtggaagcaccgct

SEQ ID NO: 199822 - DNA, 363 bp, Homo sapiens
  chr5:43020294-43020657
  hyper
agccctagcggacagttttcaggtggcagtaatgctcatttcctggaacagatggttcgtggcccttgaagcgctgcgatctgtaaagctagttctctgcaaggtttgcttagtgtctgttttatttcggtttcttttcttgctatgtttatctgtcggaattacagtttgttttggttctatgtaatctctaaaatgttatcgtttttcttttgactactaatttttgtgcattcattactattgagtttcataatacctggcttgcctccgcccacggcctccggaaagcataaatgtccaggctaatgggagtgctgaaggctctgcctcgttgatcagcacaaacgcttgtgtcctgct

SEQ ID NO: 199823 - DNA, 91 bp, Homo sapiens
  chr5:43040739-43040830
  hyper
tgtaccagaaaaatgtgttgcggcatttaatgtgttttaatccgttcaatgtgtttgataggtttaatatgttttaacccgttttaatggg

SEQ ID NO: 199824 - DNA, 195 bp, Homo sapiens
  chr5:43041028-43041223
  hyper
ctgagaaaacgcccagtgggcgccactggcaaacgtgctgatacaaaaccgccagctctgcataggaagcggagcctccagacagaacccggaacctgataccagcgaggctaagaccgagctcggctccccggctcctgagagaatgaaagtcaagaagcacgaatctgagacgctcaaaattagaagaaaaaa

SEQ ID NO: 199825 - DNA, 1169 bp, Homo sapiens
  chr5:43042087-43043256
  hyper
agggtggaaatcccaggcaccgcgaaatcgaaacttgctaggactaagaagccaacgacgcgcgaaaccgtggggtcctgcgacagagacgccggcggcgccgccacaggactgcgttctggaggccgagccggaacccgtgcggcggcgctgggaagagactgtgcccctgcagctcccctgtcaccggctccaaggagcgtcgggctccccccgcccagccctgcagcacccatccggcaacgccagactcggcgcaacgggggcagctgcgactttaaatctctcagatccgcggcctgagggctgccgccaccgagaaatggaggcacagagctgtgaacaagagaccacggctcgccgaaatggcggtgccaggagcctgaaagggaatgcagccggcggggttgtcaaggacaacatttgttttggcgcaaccagcggtgccgtcaccaagaaaccgtcgactctgagaaaaaaagagaagttcggctaccgagaaactccgtgcagcaagtgctgtgacagcaaaaccgccggcttcgcgccgctggcgaaagagccaacggaaacgccgggtgctgcgaccgcgaagccggcactagagggcctcggatggagaaagccccgcaccgagacgaggaaactgtgcacagcacgactagcagttgacacaaacagaaaagtgtctcgtctgctctctgggagaaagcgtggatcaaaaccagcaactcagtggagagaaccccgcagccactgaagaagttgcccacgtggcggtggggccagagaaacaccgcgatttcgacgacagccgtagggataccacagagaaacatgcgcggccacagaagtacatccagctccgcgcaatcagtggttctgcgatccagaaaccgccagctgggctagactagaaacttctaaaaaactgtcgtcccatagcagctttcctaaccacgacagacagtcgcctttagagagcacctaacggtgctgagaccggcctgggccagcaaaagcgcagagcggtgccagtgccaagaaacgcccgacttggtgaaaccaaccttgtgaccaccgattccactggcttcgcaggacgcaacgggcgaaggcgcggcggagaaaccgcaggctcccttcaccgattatgctgcgggctgggg

SEQ ID NO: 199826 - DNA, 253 bp, Homo sapiens
  chr5:43043288-43043541
  hyper
agcggcgctgggacccagcgatcagctgcccgtagcaaatgtctgtgcagttgcaaaagataatttttggccgtgagaaggttgccgccagagagcgtccgataacgctgacaaaggcgtggcgttgccagtgagaaacagccggcgctgggaaaggaacggtgcagcgaccgaccaactgcgcgctcggtgccaccaaagtgctactggctctacccactctgtcccccacgggcttagggaagtctgatgt

SEQ ID NO: 199827 - DNA, 35 bp, Homo sapiens
  chr5:43193140-43193175
  hyper
ttggaagaccgcacgaagtaaggaagagcctcttt

SEQ ID NO: 199828 - DNA, 344 bp, Homo sapiens
  chr5:43557421-43557765
  hyper
ggggtgagggggacgcttaccacaggcaggcccgacctactcggtagttctcaggagagacgtgcgagaccgacagttgacgcccgggaaataaaaacacggggggagggggcgtggaccctgcgccagggttcgctggcgcacaggtgtgttcaatgactcggctccggccgagacccgcggactgctgaggagtggtccctgggagactgtcacctgctccgttagcatcgggggaagggagtagaaacggaatcaaaatatgtgtcccctctttaattcaccctaggtgtttaccacagtaggtcacacctacgtttaacaagcttcgttctcttcccgtt

SEQ ID NO: 199829 - DNA, 274 bp, Homo sapiens
  chr5:44389052-44389326
  hyper
tggtggtggcgttggtggtgttggtcaccagcgctcttcgctcccccaggagttactttgttctcttctttactcctttcttcaccatgttagatgccaaaaaggtctgaaaaacagatgacagcacggtgaacaaaacccaagggaggtggggtggggaatagggggagatatctgcacccctctgcggttggcaccttctggtctctctctgcggagccccagcctgcgagccacttctacaagtatatccctttggagttgtcagaagtgg

SEQ ID NO: 199830 - DNA, 166 bp, Homo sapiens
  chr5:45696558-45696724
  hyper
catgctcgttactcttgctctacttctgcccagcgtgacattgaactcaagagccctcggaggagacattcattggtacacgtggagaaggactcggtgtatgtttgcatgaaagacaggggagagaggagagagagcaagactgaactagcgagtgtgtgttggt

SEQ ID NO: 199831 - DNA, 51 bp, Homo sapiens
  chr5:49737299-49737350
  hyper
gggagagagcttgggcaggtgatgtctagccaatctcgtggggagaggtcg

SEQ ID NO: 199832 - DNA, 118 bp, Homo sapiens
  chr5:50263366-50263484
  hyper
taacaaaagccacccgccagtcaaccagagtcagtcgctctctctctctccctttcttccctcctctcccccactcttcctcgtctcccgcccccgccccccatctttctccagctag

SEQ ID NO: 199833 - DNA, 216 bp, Homo sapiens
  chr5:50673739-50673955
  hyper
ctgagaagagaaggcgttgttgacctttcggggagcaagttaataactcagccgagttgatgaagtgacgttctttctgaaaggggtcgtctcctgggccccttttctcagtcggcatttagcaggtagggaggcagggcaaattcttctctccacgtgaagtcacaaagaattgatgagtttcaacagcatggatctgaagtcgtagataattct

SEQ ID NO: 199834 - DNA, 140 bp, Homo sapiens
  chr5:50674590-50674730
  hyper
aatgatcaactacatggaggtaacttgctctgggtttcctgagatctcgggcggacccgtccgtgttttgccagattcagtgcaaatgtagatttcagctgaaccggtcaggacttgagagatagctgtttcactctccg

SEQ ID NO: 199835 - DNA, 643 bp, Homo sapiens
  chr5:50678752-50679395
  hyper
tccccccttttcctagagcccgggagggacctcgtcaacaggtagacctacccaccagccactcgccaccggcggcagaaagtgagccccgcgcgcaacgcggccagccggactgcggggaccccaggagcgcagggcggaggagcagcgccacaggaggcgagggcgcaggcggcgcggccgggaaggaacgcgggaggggacagaaggaagaggaagaggaggagagggaggccagagccagaacagcccggcagcccgagcttcgggggagaacggcctgagccccgagcaagttgcctcgggagccctaatcctctcccgctggctcgccgagcggtcagtggcgctcagcggcggcgaggctgaaatatgataatcagaacagctgcgccgcgcgccctgcagccaatgggcgcggcgctcgcctgacgtccccgcgcgctgcgtcagaccaatggcgatggagctgagttggagcagagaagtttgagtaagagataaggaagagaggtgcccgagccgcgccgagtctgccgccgccgcagcgcctccgctccgccaactccgccggcttaaattggactcctagatccgcgagggcgcggcgcagccgagcagcggctctttcagcattggcaac

SEQ ID NO: 199836 - DNA, 223 bp, Homo sapiens
  chr5:50694001-50694224
  hyper
acaatgtcccaagccgtgatggaggatctctccacacctcccagagacttctgaagtgtagacagagaagttggttcacagggagcgaaggagggggaggggcggcagggaaggctgctgagtgtttgctgtgagcattgttactatcacatcctttaatttttatggtatttaagctgttggctccaagaagccagtttctctgtctcgaggaagccagtct

SEQ ID NO: 199837 - DNA, 339 bp, Homo sapiens
  chr5:52083691-52084030
  hyper
aaggggtgtgaaggcggagccactgggctggcaacaccctcccgaaggtccagcccttacccgccttcctaccaccttaggggatttggcccggagaacgagatcaccctctcaatgaaaggcagatgtccctttaaggtttgcttctacagcccgtggactttagcctaaacacggacccgcgaagctggctttatttgtccatgtctcggacagagcctgggaagctgccagtgagatttcagagaccaagagcgcgaaggggcgggcgatgtggcaatccgtctgggatgtgaaaagcgtggagcgcatttagaggaattcgacgaaaacacagga

SEQ ID NO: 199838 - DNA, 420 bp, Homo sapiens
  chr5:52284979-52285399
  hyper
gggccgctgtacgggagccaaggtgcggtgccccgcgtgtggacgagccgaggtgcagcccgcggggccgcagggccggggtggggcggggcgcggccggagcagatccggtgtttgcggaatcaggaggggcgggctggggcgggccctcggcgctgcaggagctgcccagaaacttttccctgctctcaccgggcgggggagagaagccctctggacagcttctagagtgtgcaggttctcgtatccctcggccaagggtatcctctgcaaacctctgcaaacccagcgcaactacggtcccccggtcagacccaggatggggccagaacggacaggggccgcgccgctgccgctgctgctggtgttagcgctcagtcaaggtaagcggggatttcgctctgcatcggctgcaggagg

SEQ ID NO: 199839 - DNA, 39 bp, Homo sapiens
  chr5:52285808-52285847
  hyper
atggcggcctgcagctccccagcgcggtgcttgctggct

SEQ ID NO: 199840 - DNA, 107 bp, Homo sapiens
  chr5:52776321-52776428
  hyper
gctccccacccccaaggagccgcgcacaccctcgctcgcggccgccctcccacagccccacacactgggagaccgcccaccgcaaaccgcggagacccccgtctaga

SEQ ID NO: 199841 - DNA, 329 bp, Homo sapiens
  chr5:52778273-52778602
  hyper
gtaaaaacatccgtcgcatcctgtttttgtcaggttctttaatctgctcttcgagtctctgcaggttatgaaatgggacgaataaaagtaaacagtctagtaaaagtcaatgcaagctgcacgtgttgtgtctgggtcactggtaactgacattgatatggctggggcgccctgtcttctccctctctccctccctccctctcgcccacctcccatctctgtgatcagggcttccccctccactgccttctttttccacccctccacccctttcgatttatttcctacttttctcccgcgtctctctcacttcccctcctccacgctca

SEQ ID NO: 199842 - DNA, 149 bp, Homo sapiens
  chr5:52778741-52778890
  hyper
ggccgctgccaggtcctgtacaagaccgaactgagcaaggaggagtgctgcagcaccggccggctgagcacctcgtggaccgaggaggacgtgaatgacaacacactcttcaagtggatgattttcaacgggggcgcccccaactgcat

SEQ ID NO: 199843 - DNA, 232 bp, Homo sapiens
  chr5:53813366-53813598
  hyper
aacctccttcagccgcgctcactacggcgcccggcttcgcggcaccggccactagagggcagtggccgccgcaaagccgacgcgggcggtgggctcggcggctcggccatcgcttgctctcgcctggcaaggggctctcggccgtggattagcgcagctggagacgtgggaggccgcgggccccgcccccgaccggcggcggctgcggcggcccagcgcggcagtcggcgct

SEQ ID NO: 199844 - DNA, 107 bp, Homo sapiens
  chr5:54469036-54469143
  hyper
cggcggggcggcagtcggcgcgggaatccccctcgccggcttcttattggccggcgccgcggtgtcgtcagagcccgggtgggattccccggcgcgcgccgcggccc

SEQ ID NO: 199845 - DNA, 135 bp, Homo sapiens
  chr5:54472071-54472206
  hyper
ccttccccgaccttcgtcagacccttttcaatgtatttgcacgtgcacacatagagtctggccctgtggatctttccccacaaatgagatctcattatacttatcatttttcaacttgttttctctaattcactg

SEQ ID NO: 199846 - DNA, 210 bp, Homo sapiens
  chr5:54472542-54472752
  hyper
atacagctccagcctgtgcggggcaggcgttagactgcagaaggggagagcttaggataaccgcactcaggtggcgcaaggaagtcagccacgaagaaaaagaaagggaaggaaaaacatcgtcccagactgataaactctctgctccccggtgtaacgtcgctcagtatagcgagagcatggatggacgaatgaagccctcttgatgca

SEQ ID NO: 199847 - DNA, 74 bp, Homo sapiens
  chr5:54518559-54518633
  hyper
gatcccagataaagcgctatgtagatccagcggttcgacttctccacgggggagagaaatgtcctaaatatgga

SEQ ID NO: 199848 - DNA, 182 bp, Homo sapiens
  chr5:54526985-54527167
  hyper
caaaccacaactgtttattggtgaaagactcagcttcctcatgtgctcgctgcaaaataaataaaataccagatgctagtatcgtacactatttacaacctgcagctgaccaagcaggtcctgaagccttctctgtggaccagtactgcactcttctgaggctacgggagaggtccagcagc

SEQ ID NO: 199849 - DNA, 257 bp, Homo sapiens
  chr5:54528085-54528342
  hyper
agcactgaatcgtgcgcgctggaaagacgggcggccagggagtggcgggggagtttggctgcgtccccagatgccgcgtgtacctgtttgataccccaggtacctgtttgcaagcgatgagcaaggaggtgaccccaagcagctggaagcagtctgcagccaccggcgtggtggtgaggaagcggtccagagtgttcaccgtcaggcacagcgactcgaaggagaggccgaattggcggtgcaccgggatcagccag

SEQ ID NO: 199850 - DNA, 197 bp, Homo sapiens
  chr5:54528383-54528580
  hyper
aggaggggggaggcgggcccgctgggcttagggtggagagggactgtggaagggaaggaagggccaagaagaatcggggagcttcccaggagaggggcaagaagatttcagaaagagaaacgcaatggaaactgggaaacgcgtgggccgtgctgagccggaacaccgggattgggacctggcgctgtgcagagagc

SEQ ID NO: 199851 - DNA, 238 bp, Homo sapiens
  chr5:54529891-54530129
  hyper
atcctgagttccaaacgaaagtcgggctagaattctgtcgacacgggaaaagttttcttcagtgacccaaacaagcaatagtgttaattcggttgcgtttgtcggttttgtttcggtgggtaccggagtagccagtgcccttccttccgccagcctcggggagcagagcctcagaagggccgtttgtgctgcggaatagattggagctccaccagccagccacgctttcgcgctcaaa

SEQ ID NO: 199852 - DNA, 328 bp, Homo sapiens
  chr5:56110212-56110540
  hyper
aaagcaccttctcacgtagagtccagggactaggaggactcacaacgcagcgatgggcagccaggccctgcaggagtggggacagagggaacccggccggtggcccgaccctgcagggaagaaggacgtgcggcgagaagcatcggattcggggagggccgggacctggccgagggtgacattaccgagcacttcctggcacagcgctggtcccctccccaaacgcgctatatgtggttctgtacgggactgcctttcccaaagacagccaaggaaaaactaaagatcgacggggacacccgcctcccttcctcgccccaacggtttc

SEQ ID NO: 199853 - DNA, 444 bp, Homo sapiens
  chr5:56246612-56247056
  hyper
cgaatcgctcccggcccctttcgggccccctcttggctgcctcgccttcctccccgagtcccaagtgtacaaactcacagacccgggacgaagcccggagtctgagaggcaactccaagtcgcttcttggagctcagcaagtttccaagcagagaagcaaaacccagagcagtcggctggcaccatcagtcccccatccctggcatctccggagtcctccaaatcccacccggctctccgaagccccaaacaactcgaaacgtaacacccttttctggaacgaactcgcgttctgagcacctagttcgcccctggggcccgggagccccaactccgaagccgatctcttcccctgcagcgtaggccagctcgaatcggacactcgcccccaaaccaaagcgcgagccccccatcctctctctcgagtccagagatgcagctcct

SEQ ID NO: 199854 - DNA, 277 bp, Homo sapiens
  chr5:57755330-57755607
  hyper
aagccgatccccagcgctgccggcgcacaaaagccagagggcaggtgaggagcccacctcgcgctgggatcggacccccgaaaaacccggaagcggcgggcgagggaccccgcgggcttgcccggcttggggtcgcccggacagacctcccgcccgcccggcagcccggcgccctccgcttgtcacctttcccagcactttgccccggcagtagcgcttcccagtcgtggggtcgacgataatccgcgagatctccggccccgagtgcgaatggtgg

SEQ ID NO: 199855 - DNA, 420 bp, Homo sapiens
  chr5:57755667-57756087
  hyper
tcggggggctgcggcggccgcttcttcttcgagtccgctccgcaacccttgcccagcgcctgctcgcacattttggtgctggcggctggctggtaggtgatagtccgcaaaagctccatggtcgccttgccgccccgcactgcccgctgccaccccctaggcgcggtcacacgtccgagccggccgtggtcctcgcacccttgcctctggtgccgactagcacccaacaccccggtccacttgtgcgagtgagagcgctcggcgaagtcttatatacggggaggcgggaagggggcggagactcgatacgcgacatcacgtcacggcctatgccccgccccacggccggccgagcgcgcgtggccgggaagcaagtcttgtcccgccacccgggtctcgcttcccagcggagccgcgcgc

SEQ ID NO: 199856 - DNA, 217 bp, Homo sapiens
  chr5:57756387-57756604
  hyper
ctcctccggccgtatgacagggctcgtctgcagctgccccgcagtgcctgcccgcgctgtgacgagctcgctggtgtctagctggggcagtgccgagaggccgtgggggtgaaaggccgggattcgtggagccgggcattcgagcccatcgcgctagggcagacacgggcccgcagccgggatcccgggccgatcggccaaccgtgccaggatccca

SEQ ID NO: 199857 - DNA, 37 bp, Homo sapiens
  chr5:57878673-57878710
  hyper
gggagactgggagaggtaacccaggagcgtttggaaa

SEQ ID NO: 199858 - DNA, 158 bp, Homo sapiens
  chr5:57878752-57878910
  hyper
gcctgtttaatggtttgcttgcttgccgggagttgtagttcaccgctcgcccgtttgccgggaacacccggagggcgagactacagctcccaggagtgcacggggctcctcggcagtacgcgtgtgcggcgccaggagaggacagctccagtgctgat

SEQ ID NO: 199859 - DNA, 228 bp, Homo sapiens
  chr5:57879190-57879418
  hyper
accctgggaacagagttgggtttctttacgctctgtgtggctgtgattggggctgtcttgatgagggatcgggctattcgcaatctttctaggctctgtaaagaggataagagtgtctgtctaaaatgaaaacccaagcaaacaaaagtcagaggagcatgcaatctcgtgttggcattgatctcctctcttggcatccggggtttgagatcgcggtgaaaactcacg

SEQ ID NO: 199860 - DNA, 139 bp, Homo sapiens
  chr5:58334875-58335014
  hyper
ctgccataccccgccatgctcggatgcccggtgccggcacatgagggctgctccttcatattgcccagcccggcagtgcaacgggggcggaggctgtgctcgcggggcggccggcctcggggaggcacggtctctccag

SEQ ID NO: 199861 - DNA, 210 bp, Homo sapiens
  chr5:58335353-58335563
  hyper
ttctcaactcctcgggcggcaggcgcagcgcggctccaacgccgcagctttccgggaacactccccctcacgcccctctcggccctcggcgctgcctggctcctcctcaacccccttacgaaaagattccgaattgcaaaagcctgtccctgtccgtgccacccgccgcgtccttcccctcgagctctgccccgggggccccgccacctc

SEQ ID NO: 199862 - DNA, 94 bp, Homo sapiens
  chr5:58335881-58335975
  hyper
aagtttcacaaacaaggttatttaggaccctcaaggtttctgagggtttaagttttagggtttctgggggttcgtttctaaaggcttaggattc

SEQ ID NO: 199863 - DNA, 244 bp, Homo sapiens
  chr5:59187968-59188212
  hyper
ttatcaggaaagggaccaaacgtgggccccacatccacctccacgcctgagttaagaatctggagctgactcctcagaatggctgtaattggtcctttactcatttccttggagaagcagcggtcaacttctactaaaactcccggttgataggcggcttccctgccctgtcttccggagcacttacgttaaggggaaatcactataatcaaatctctacgtcttgcctgctgctaaaacaagg

SEQ ID NO: 199864 - DNA, 49 bp, Homo sapiens
  chr5:59188327-59188376
  hyper
cctcacccccttgtctctctcaaggattgctgaacattttgctccaaac

SEQ ID NO: 199865 - DNA, 201 bp, Homo sapiens
  chr5:59189507-59189708
  hyper
gccttcctgatgctgctgctgctgctgccgccgccgccgcttctgcagcccagcagaggctggtgcttagcttctcacttgaaggcgccagagcctcagggctaccgagagggggccctgccagcgggaggggtcacagaacgcggcagggctccttccaccgaggctatggcagagacacgctcccgggctccccaagtc

SEQ ID NO: 199866 - DNA, 74 bp, Homo sapiens
  chr5:59190083-59190157
  hyper
tcttagagaaatggagtttggcgattcctggctggttctcagagcttgttgacgatgagccccatgctggtgct

SEQ ID NO: 199867 - DNA, 335 bp, Homo sapiens
  chr5:59996101-59996436
  hyper
gtgcgaacttgcccggggcgaaatctgttgcccaccctggtcccaccgtgcgagcacacctaggcaggtgcgactaaggggccgggggcgtctccccagcgctggaaaacgctgtgcagcgcccttcccagatttctgcgtccgcgcaacacaaacacacgcaacgctatctctacaaaagggtcaataataggtgttatccagcgaccgaaacccagctttgggccgcgtggataaatacctgtcctccctaccaagtgcactgtgagcctggaggtgctgctaacgctgggagaagcggtagtgaaatgaagcgaggcgacagcttttaccag

SEQ ID NO: 199868 - DNA, 203 bp, Homo sapiens
  chr5:60626141-60626344
  hyper
cagaaaaatactggacggatatacaaaaacataatgccacaaaaattttcctaacaagtaaggcagctgcggaaagtcggccagcgtcccgaccccagggacctgcagcctgggacttgtgaaggcccactgtgtagctcgaggtttccagggcctcggccccgaatgggcgattttctttaaaacgccgaagcgcgctatcc

SEQ ID NO: 199869 - DNA, 219 bp, Homo sapiens
  chr5:63257392-63257611
  hyper
gcaccgcgcagaagatgagcgtgcccagcagcagagaggtgatcacttggtagctgacggtcacgtcggagataccagtagtgttgccgccggtctcaaagggagccggtggtgatgtggtgttgttgccctgaccagggctgagcacatccatgcctgcgcgcccggcgcgggaagggggagggaagaaaaagcagcgcgaagattcgcctcgcccct

SEQ ID NO: 199870 - DNA, 95 bp, Homo sapiens
  chr5:63257861-63257956
  hyper
tttgccgctcccgaactggctgccggagctggagtctccccactagcaaacagtctccaatcccagaaatatctagaaccgagaagccccatcct

SEQ ID NO: 199871 - DNA, 195 bp, Homo sapiens
  chr5:63802607-63802802
  hyper
tgcaagatggtgggtgaaaactgcgcctctttttttttttttttaattgagagggggtggggggagtcatgtatgttaatcatttgcctgagtgccagccactcccccaccctcagctcctcaatgccgatcacgtggcacatgcactatttttaaatctgcagtcccccaaattcagggtgacaccctggtcgt

SEQ ID NO: 199872 - DNA, 58 bp, Homo sapiens
  chr5:63986116-63986174
  hyper
ctctttctggcatcgagtggggacagctaaggtctccaggctgctgatgaagtgaggg

SEQ ID NO: 199873 - DNA, 49 bp, Homo sapiens
  chr5:63986984-63987033
  hyper
caggctgatagccctactggtggagcgcgaggacaggaagataacccaa

SEQ ID NO: 199874 - DNA, 360 bp, Homo sapiens
  chr5:64398804-64399164
  hyper
gcaaccccggtgcttcagtgctcccgacctttctctgccgcccctcgcctcggcggccgccgggagcggctgtggggtgcgccggtcgccccgggcccgagcgggaggagagtcccgccccgccgcgccccgcctccgggcgccccgacgctgccggcgcggacgccattgctgcggccgctgtttgttattaaactgcccagagaaagggcttcgagtaaaaacaccaactttccagtcggggcggcgcaggtccccgggccctggaaagttctgggacggccgaggtctccccggacacccgcacccacgcccccgtcgtgccctttctggcttttggcttcctctcctcgatttccc

SEQ ID NO: 199875 - DNA, 189 bp, Homo sapiens
  chr5:64777664-64777853
  hyper
tagatctcactaccggcccccagccaacttgaattgcagcaggagaaaattttggcagcttttcctcggaggcagagcacactgacgtcagtctgcagatgtgcctgggctgcgtcgggtgcgcatgtgtcctgggtcgtcacgtggagggggaggggaggtagaggtacaatcggggtaaccaactac

SEQ ID NO: 199876 - DNA, 162 bp, Homo sapiens
  chr5:65017234-65017396
  hyper
actacaagccgaccggcgctccctgcagaggctgtgctctcgtggacaagctggaagctcccggtcatgttcattcacatggaatactatcgcatccaaacagtggcgcagggccaggcggcattcatggctgatttccaccaaatcgcatcatccatctgc

SEQ ID NO: 199877 - DNA, 360 bp, Homo sapiens
  chr5:65893006-65893366
  hyper
ccccctgtgggttattgacttccctgtggctgttacccccgtgtgtgtgtctcagtgtgctgcctgatggtgtgtttttaaaatgtcagagaagcaaactccttcgtgtttgtatctgacttggttgatctgtgaaaggatgcgatctggacatctggcgtgtccccacaactcacctctgattctccaaagtgggcgttgtttcccaccgaagcgcttgggccgaggggcagggagttgagggggagaaatggtgccttgggggtaagaggcaggagtagggtggggggcagcggtagccgcggagttgcctgcggaggtttcagtggcgccagccccctgggatcgcccgcgggtggt

SEQ ID NO: 199878 - DNA, 189 bp, Homo sapiens
  chr5:66124999-66125188
  hyper
gatgcactgatctggcatgccgtcaagtgtctgggaagtctgtcgaggggtagcaactcctttcaattctgggaacgcaggactcagttttgtgtcgggatcaacctccgctcggcggcatctgtctgatcgccttgcagttgtgtgcagctgctgggaattttccccgtcagtgaaatgaaagttttt

SEQ ID NO: 199879 - DNA, 1079 bp, Homo sapiens
  chr5:66299576-66300655
  hyper
cctttcaaggtctaacgtacttgaaggggcaatacttgtagcatttgccacataaatgccaggtagtgtctttccacatcggggctcaccattacctagatctgtagttgccggccatgaagccaaacaggtgtgcaccgtggtcattgatggaacagatgtaaactcataaatttagtttactgaggttttcggtgagtgtggcttcccgtccgcgtgcttttcctatacaaccagcggcgtcctggcggaggagtcactgtggacttccccggagcgttgtcactgccatccctcccgcggtgaatcacaggtcggcctcaggtgcgcgcagcacacacccggagcagccgcgggtttatttatttatttccgggacggatccattccgggctccggggagggggagcggcggcccaggctgcggggctgtcccggcaccggctggggtcgcgccgcggccgcctgctccctttcccgtgagcccccgctcctcaggcgcggccggggctggtggggggtgggggatgcaggaaagctgggggcgcggccaccaagctgtccagggacaaggccctgccgcctcctcccagccggaccctggaagggtccacaaaggtgtcaggttcaagtcctccaataggcccattttttaaaagtgcttttaagtttccgcttttttcaggaggggagggcaagagcagctttttctattcaaattcttttccttgtatgtagataccaaaaggaaactcggcactgggcatgttcggatgtgaatggttttgctgataagcaacagcctccggaaccaaagcctcaaaatagtcgtctcccccgcccctcgcagaagcggcgagtggtatctgccaaacagatgacaaagtacctccgactgaatcccacagacagcgctttgagcagaacgcacggctcaactcatgtaattactgtttatagctggccgagcctgactaggagagggcagacccgagaggaaatcagtttcccggacctttgagaggaggctgtgtgttaattaaaggctaggacgggacgggtacttctcagacatgctc

SEQ ID NO: 199880 - DNA, 41 bp, Homo sapiens
  chr5:68179341-68179382
  hyper
agctctgcagaggtaggagtacccaaagaacccaccaaagt

SEQ ID NO: 199881 - DNA, 153 bp, Homo sapiens
  chr5:71404207-71404360
  hyper
ggctgcagctctcagaaaggacaatgggaccccaagttgcggggtggggctgctgcttttagaagtcccagcctcgggagtggtagcttgaagggggtcggtgagggagacgtcagcgggtagggtcagctcctcgcccggtgctcgcaccag

SEQ ID NO: 199882 - DNA, 130 bp, Homo sapiens
  chr5:72113263-72113393
  hyper
aatcaagctattttcggaatgactttctttaaaaatgatcgcgtgttgcttactgattttaaaaatcaactggattttgcaaggattgcttagagtttaagtctgttatcttaatcgctaatcaggatgg

SEQ ID NO: 199883 - DNA, 81 bp, Homo sapiens
  chr5:72416165-72416246
  hyper
tttctcccagattcctcgcgcgcacggccacgagcgcggaggctgccaaacccgccagccctgggttccgaagccgcccct

SEQ ID NO: 199884 - DNA, 269 bp, Homo sapiens
  chr5:72594501-72594770
  hyper
ggactgtcctgagtgcatttttttcctcccttatagtctgttaaattgactaataaacccaacgcagcgttctctgtgcagcttcaaaaaactcagtaatttcgttagaaaacgttgaaatccgaccccaaagtattcagcccaaatgtttagttaaagtaaccccgtgggttaataaactaaacaaaggcaacccatgcaaaaccggagcaatgaaaaccaggctacataaacgaagggaagtttataagaactctttgggaggaaaa

SEQ ID NO: 199885 - DNA, 316 bp, Homo sapiens
  chr5:72733185-72733501
  hyper
ctccagcaaactaacatcttgataagtccgctgacaacaaaataaacagtggagaaggctggagggcggggggcgccgtggcccgcggctggttcgcagcagctcggcggccttctgcgaggggaaggcgggccgctctcggctttgtgcttggggctttaggaggggggcggttggaggagagagagaagccgaattatctccctttccgcgtctcattcccgtggatggagggccccgggagcgtttgacgatggcagtttggggcgtgcgcgctgcctcgtcggcccctacgacgtcaggcgccggagctgcc

SEQ ID NO: 199886 - DNA, 198 bp, Homo sapiens
  chr5:72733588-72733786
  hyper
ttcaagggctgacgcctggaaaacaccgccaggcccctggccgaaggaggtaactaaccgagtcgaaacggcgatcagaaattaattcagtgccctgctcaggagcaaaaccgtcaaaaccccatcgagatgttggcgcaagcggattcacacacaaaggaaaacaataaaagtctcgttagatcatttttctggaca

SEQ ID NO: 199887 - DNA, 105 bp, Homo sapiens
  chr5:72742464-72742569
  hyper
gttgtttttcatctgccaaacgtcaagggagcctctagtgcctggacagggcggactcccttccccggcaccctcttcctccctaccccaggtcgggggttgggg

SEQ ID NO: 199888 - DNA, 216 bp, Homo sapiens
  chr5:72744481-72744697
  hyper
cccgtcagctgaggagggggtggcggggcccgggcgggcgaatcagaacgccaggcgcccaggaacgtgcgggacgggtgagagtctaagaacagagctcggcgaggccagggctgagtccaggagagggcggaccttcctcggcttatagcagaagggggcctgtcacatggtgtgcacgtcagagcgctgccgagggaaggaaagcaagcctag

SEQ ID NO: 199889 - DNA, 300 bp, Homo sapiens
  chr5:72747520-72747820
  hyper
aggagcccctgcgcgggggtcacgtggattacgctaggtgagagccggagaggctgcgccaccgtcgggaggctccctgcctccgccctttgtcctttgcccctgaccatgagcgccccaagcccagggacctccttagggggatgaaggctggaagagacctgggggctcagacttacggggaaggaacctaggctattccttgtgcatcccaggattttacccatgaacgtgaacatgaacgtgttttcaaccccagcggttcccctggcgcctcgaccctcctttgaagagtcattc

SEQ ID NO: 199890 - DNA, 133 bp, Homo sapiens
  chr5:72747850-72747983
  hyper
ctgtcactgtgagccctgaaaagagacagaagaaaacgcgagtgcctggcctgagggtgctccgtcccgtgggtagccaggtaggtagttattctgcccgatgatgaggtcctcctgacgcccccgcgaaagg

SEQ ID NO: 199891 - DNA, 1143 bp, Homo sapiens
  chr5:72921423-72922566
  hyper
agcttgcaaagctctcggccagggaacatgagcttcaaataagagggcaaatgctgtttttaaaaataatatttcctattgtaatagacccgggccgtattatgtcacgggtgtggtggcttttggctgggaacagcctgagcctccctcgggcctggcacaactcctttcgcgagcgggcagcccagcgcctccctcgggaggcgccaaggcgtgggggcgcccggggcgcaactggcactcctgtggcccgccaggtccgcgccagcctccgcgcctccgatctccggaggccaacggccgcagccccgcagcgggagggggctggcggagacagcgcggtaggggcagcttcaggtttcctcctggagccggtgtcgggcgcggccggcgggcgggcctcgccatgtgatgcggccgccgcgagccgggccgggaggtgggcaggcggggatccagtggcagcggggaggcgcggggggagcggggggagcgggggcggcacccgctgctggcgcagccagccgggcccgggcgcgcggccgcggctccaccccctaaaccttggcttcagcccggccgccgccaggcgttggcatcgccggggagagccttccggactccgggcggcggctggctgggggcgcgttccgaggcgccctcaggcagggcgcgggggcagagcctcgcctgggttctggaggctgcggggccatcgctccaggtaaatgctctttgggactccatcgtctgcgtttccctgcagctctgggcggaaaagtttgtccacctgagttcgcatccgcagggccactttctccagggtccccagggatgcgagggtcagcagaggtgaccggggaaccgctgcaggcgctgcggcgcgagggctgggcgccgcctcccgctccctcgggagcggcaacaagtggagagggcggcgcagcctcgtgcggcggcggcagctgcggagcgcggggtcgctcgggcgcactgagagccgggggctgggcgggtgaaagccccgccagtgtccttcgggagacagggaaataaacagcactcctgcggtggagaagggagaacgtcgagagttggtgtccgcccttcccatccatgcttcagctccgggactgagggtgc

SEQ ID NO: 199892 - DNA, 193 bp, Homo sapiens
  chr5:73843885-73844078
  hyper
tgaggaagggacatccgctcccgcccgccagcttcatgaaggggagatcagcccaggctaacagtgggtggtggtggatcccaagcaccaagaatacagaatgcccttgctgaagaatcaagcaatgagttggagcttatgggaagcaggtgtctaagcaagaaggcaccggtgcagccgctggtgcccagag

SEQ ID NO: 199893 - DNA, 264 bp, Homo sapiens
  chr5:73935724-73935988
  hyper
ccggggaggatgcaacgtgggccaaccatcccgcgcgctcggccctggaggctgcggggagcgacgcagcgcgacattcacccccaggaaagcgctgctttccgcagaggagagaggctgactgtatccttagctcggctcctcgcttccccagcggctcgccccagacattgcaccgcggaggggaggccggtcgacctctccggcgatgcccggcttctgcctgctgtgggagggcagcggcgggcaccgtgatctccgcac

SEQ ID NO: 199894 - DNA, 516 bp, Homo sapiens; identical to SEQ ID NO: 41639
  chr5:73936032-73936548
  hyper

SEQ ID NO: 199895 - DNA, 202 bp, Homo sapiens
  chr5:73936857-73937059
  hyper
ttcgagtgtctgcgcctctttgggccagcctggttaatggacagccccggatctgagggacccaccttaggggagcgcagcccggggctgtgcgcttggtgatgccagagcccgcgagatgctctaaaaagggctgcaaggggcgagctgggtatccgcaggacaggccctgggcacgcatagacagcgccttgggtaggac

SEQ ID NO: 199896 - DNA, 302 bp, Homo sapiens
  chr5:74161900-74162202
  hyper
cgggtctggtgctggcgggggcgcggggcccggcgcggccgtctcggcctcacccagcggtccgcgccggggagagggagcgcactcacctcagacgcgccccgggagccgctggaagagcccgggaaaggaggcggagccgcgcgaatgaatggagccggcggctgctcgctggcgacctccggccggtcccaggccgcacagctcgcggctgccagggcgagtgcggctgcctcccgctcgccccggacgcccggctcctcgtcgcgggtcggccgcggcccaccgtgccctccgacgac

SEQ ID NO: 199897 - DNA, 103 bp, Homo sapiens
  chr5:74162616-74162719
  hyper
gccccgcgtaggccctcctgaaatttacccagagtgggcgcggccatcccggcctcgggacaggggtgcagagggcacgggcgaggaccgccggcctccgccc

SEQ ID NO: 199898 - DNA, 260 bp, Homo sapiens
  chr5:74348635-74348895
  hyper
cggctccgaaaggcaagcgtcacgaagccgggctcagtagctcccccgggccccctgcgcctcgcagcggcgcgggccaggctgggcggcgctgggctctgaagggccaggacggcgggatgcccctgctcccggcaagggcgcgcccacgagccgcttcttggcacttggggagagtcccgggaaagcccggcgccggcgcgctcgcgactccagcctggcggctccactccgcccgcgagcccaggaagccggctccg

SEQ ID NO: 199899 - DNA, 590 bp, Homo sapiens
  chr5:74348906-74349496
  hyper
cgttatccaggacacgctccgcgcccgccgcccgctgccctttccccccgctggcctcggggaacttccccgcgtctggccgcaggcggcggctgccgcggggagccccgaagttgcggcgtctgctaggcgcgcgccgggtcgcccacccggcccgtgacgctgtgtccgtccgccgcgcgctctggtggccccggggctcctgcaggcgcggagagaggccggggttcagcccggttccccgcgcggctccgagagggcgcccccgcctgccgcctggagatggacgcggcgccgaagttttccccggcgggaaaacgaaagtcgtgaggagcagagggtcggggcgtcccggcggagacgaggctgagaccgggttaacatctccagccccgggcgaccctcgctcccccgcgtggccaagtcgacttacgagagggagcgggccagccccgaacgcggggtccgtgcggctgcggaggccgccccggcgggggccgagggttgcgctctgggttcccaggctctccgcggcggctcgctctcgccgcgctcctccgtcgccctgctggggagccgctctcgcccgg

SEQ ID NO: 199900 - DNA, 291 bp, Homo sapiens
  chr5:75378714-75379005
  hyper
agtcccaggcccggaaatagaatacaaaccctctttttgtccggtgctaacagagtccagcagtcagaactccctcgcgtctcacgctggacctgacccggggcgccgccaagtgcgcaacgcacagtcacagttggtgactaattaaggactgccgcccctctccttcacctgctacaaactcagagccctgacttctccagaagtacctaccacttggaggtggctctccttccccgccccctgccccagtcccacaccgcagcagcgcctcagcaccgcgacttgccg

SEQ ID NO: 199901 - DNA, 373 bp, Homo sapiens
  chr5:75379694-75380067
  hyper
gtgtggtttgaccggcagggataggcagattcaaatctagcagcctagagccccgggctgggtacctggacctataccttcatagctgccttaggctcaacttttcggcggggatccctctgcagacgtgcaggtggcgggagagcagaggtagccgcagtaagtgctgagagagcctgaaagaaacaccatgaattttcaaactctcccacatacattcccgaagcgcctgtctggcgtctaagagagagcaagagagggctggagagcaggggagcccgcggggctgaggctctttgtcagcgcctgcacttcctacgttacaacgccttcattcagcaaaaaccttttgggcgcctgctgtgcgccaggc

SEQ ID NO: 199902 - DNA, 1185 bp, Homo sapiens
  chr5:75698274-75699459
  hyper
ttccacaattgtcaaataggtgagggcacaggtacggaagcgtcccgcattccctccagattttatcacgctgagacacaaagagaaaaatagctcctggcgaccgcatgaaaaccccgatttcaaaacagccacatgcagtttaatttccttaaaagcttagccggaaaaggtttctgtggcttgcgaccccagctgggcttgagagaaggctctgcacactggggcgggggcgggcacaaggtgatcggagggagggggatgactcgcagttgtgttttgagtggttgccttgggttatcttgttcctccagcacacacacactcagtttcttgtcataaggggaaccctgttattttgtagacaaaaagtgacagaagcaactttcgaagcaaaaaaaaaaaaaaaacaaaaaaaaacaaaaccaaaaagacgaagaagaagaacaaaagtcaacgtgaaatctccccagaggaaaaggaaccgcgctgtttgtccctcagtaactgagcaacaccccggacacgaagggctccctgtgacttctgcggtttttcttgcacttctccgcgttggttcacttccaccctcgaaactctccagaagcgagaaataaggcggggtggccgccacccccaggccaccagctgtgcgggggccccagctgcagggggtcccggcccagcgtccctctcggccccttccctctcccccgggggagaaggggcgggtccacgcggcctgggcgctgcgcccgacacgcggtaggggtcgctgcgtctcggcgcgcgctcccaccgcggtgaataacggggcctggctggaggagaaaggaaacctgctgcgggaggcggcggcgaccggccagggagcgagggaggagagttcacttttacttcagtgtcagcgcgcggcggccgtggctggctctggcgagagagcaccgagggagtgggtcgcagatcttcgggcggctaggggaaatcggcgagaggcgggatccgagcgcgccggcggggcgcagagcccgcgagcctggccagcgagggtagccgcggggggcgcgccccgggcgggcccccggagacgcgcaggatgccacacgaagagctgccgtcgctgcagagaccccgctatggctgtaagtgcgccgggcgcgcggggttcctgctggccttggggag

SEQ ID NO: 199903 - DNA, 40 bp, Homo sapiens
  chr5:75700173-75700213
  hyper
ccagattaacaccaaccacgtggcttcatgtgcagagttc

SEQ ID NO: 199904 - DNA, 121 bp, Homo sapiens
  chr5:76011053-76011174
  hyper
aactgtaatatcgttcaagaacgtgtgaaggacacttggaaagttaccaggccatttctctcctgggcgcccgcggccctagaacgccggcctcaccggcagacgcgcgccctcctcccag

SEQ ID NO: 199905 - DNA, 331 bp, Homo sapiens
  chr5:76011833-76012164
  hyper
accgcggggagggggcgccgagcggctccagcgcagagactctcactgcacgccggagggcgcccttcctcgctcgcgcccgcgcgaccgcgcgccccagtcccgccccgccccgctaaccgccccagacacagcgctcgccgagggtcgcttggaccctgatcttacccgtgggcaccctgcgctctgcctgccgcgaagaccggctccccgacccgcagaagtcaggagagagggtgaagcggagcagcccgaggcggggcagcctcccggagcagcgccgcgcagagcccgggacaatggggccgcggcggctgctgctggtggccgc

SEQ ID NO: 199906 - DNA, 294 bp, Homo sapiens
  chr5:76012199-76012493
  hyper
gcacccgggcccgcaggccaggtgagagatgcacgggaatggggtgcgcgggcggagggacgccgaggggagactgcgggggtcactgttgcgccttctcctcacccctgcctcagtttcctccgaaagccaaactggcatttgggctgagatctggagttttttccagtcacgtttaggtggggcgtgccacccccttcgcgggcccagccgatgcccctttggactcgatcttggagggtgcagcccgcctgccacggggtgttggatatggaggaggatggagcggaagcc

SEQ ID NO: 199907 - DNA, 407 bp, Homo sapiens
  chr5:76114443-76114850
  hyper
cgcatccctcctcctgcagggtccaccgcaccgggaagccctgtctgtatcagttaccaaccacaattgcagtgagtacgaatcgtggctttcccacagtcaggaaaggcaagggagaccgacgacccgcttctctaggagtaagtaaagattaaaggtagttcgcggtatagcctaggcagggattaacccgtggtcccagcgctcctgctatttgcattccaaagcagacacctcatgcgctcaaccccgcccgcaggcggctcccgcagtctaagggacctggcgcgagtccgggaagcggagggcgcagctgcgcagggaagggggccgggggcgggaccagggcgcgcgttccggtcccggggcgtggcctcccgcaggtgagtacgctgctccttcggttt

SEQ ID NO: 199908 - DNA, 282 bp, Homo sapiens
  chr5:76114880-76115162
  hyper
cgcagcagaggctccgattcggggcaggtgagaggctgactttctctcggtgcgtccagtggagctctgagtttcgaatcggcggcggcggattccccgcgcgcccggcgtcggggcttccaggaggatgcggagccccagcgcggcgtggctgctgggggccgccatcctgctagcagcctctctctcctgcagtggcaccatccaaggtgagaaacctggccaaggagggctcttatctctgaggagctggggtcctgggcacgctgggcagacggtggg

SEQ ID NO: 199909 - DNA, 218 bp, Homo sapiens
  chr5:76115225-76115443
  hyper
ccccttggtggctttgatgtgaggtctctgcgccaaggaggcacccaggtgggacatgcgggagcagctgaagtcagcggagccgggcagaggcagagatttccccaaagaccccacttcccgtagaggctgtcatgctgggcacctccaggccccagcgtgggttcggggaaagggagggaaggaaggagtagctgtgtctaaagggtacgcagagg

SEQ ID NO: 199910 - DNA, 217 bp, Homo sapiens
  chr5:76326226-76326443
  hyper
gcgccgttgtttccggctcaactggggagctgctggagctcttctggcctctggttttccgactgcttatccgacgctcctccctctgtctctgtagctggagaaggtagtttccaggaaagttttccggtttgcaggccgcgcacatcgggcaggggccatcctcggtccccttgctcgttgctcgcagccccgttcggctacaagtgagtttcag

SEQ ID NO: 199911 - DNA, 182 bp, Homo sapiens
  chr5:76383033-76383215
  hyper
gaaaacctccgcgcgtgccccttaaagacacagcgctgcattcacacgtctgcggggaaaggggggccgtcacgtgtggccttcgcccgaaagcggtaggggagtcgctctgaaaccgccaaggatcgcgagcgacagatttgtgttggccagggttttaagatgacgcaatagctgagtgt

SEQ ID NO: 199912 - DNA, 70 bp, Homo sapiens
  chr5:76507202-76507272
  hyper
ggttgtcactaaggaggagtttacttttcatttgtggagatgatgggagcccaggaaatgtggtcagaaa

SEQ ID NO: 199913 - DNA, 32 bp, Homo sapiens
  chr5:76924480-76924512
  hyper
ccccacgagacccctcccgccgttcaaggtca

SEQ ID NO: 199914 - DNA, 270 bp, Homo sapiens
  chr5:76926856-76927126
  hyper
gtgccccgaagagtttacgcactgtgcaaacacaccaaatgtgtgcagtcttcaccacgcccctgcacattctgtgcactgcacagattcacaggtctgcagtcaggcatgtgtcaaagttcgacccacaggtgtacaaatgaagataaacgtgtacccatgtagcttaatagcatgccttataacactgatgtgctatagaattttcagaaacgctggaaatttggaaattgatgacaggctgtggatgacatagtttcaaaatcgaaa

SEQ ID NO: 199915 - DNA, 191 bp, Homo sapiens
  chr5:77148195-77148386
  hyper
gtttctgcaattatggcttaaacgggtgaatttgggactgtggaggaccctaattggcctaaatttgatattttgcatatttgcataatgaggaaattggtagaaaattgtgttcattcatttgtgaaaaatcctatgaattttatgaatttgaaagctctgtttgtgcagactgtgactttgcctgctga

SEQ ID NO: 199916 - DNA, 57 bp, Homo sapiens
  chr5:77268310-77268367
  hyper
gatttttattaggttaaagacgagttcacagatggtaaatcgcgtggagagaaatga

SEQ ID NO: 199917 - DNA, 122 bp, Homo sapiens
  chr5:78281720-78281842
  hyper
cagtctgattgcacggtgccctttggaaggtgcggttactttcaagttgccctgggaggatttggagtgttgcgtggtcattgaataaatagctcattcgcttgtccggatatgaccccact

SEQ ID NO: 199918 - DNA, 210 bp, Homo sapiens
  chr5:78531492-78531702
  hyper
ctaacaggctgggggcgagccccacatagttcagcacaccgttccccgcggcaacacgctacttctgaacgcaggagcgactctccgtccgggctccctccaggagaatggaggcaaatgtacattcgagggtctcaatacctggaattcgaaacgtctcagttcctccgccttagttcctcttttcccgggttcggaggccacctgtgc

SEQ ID NO: 199919 - DNA, 206 bp, Homo sapiens
  chr5:79551152-79551358
  hyper
gctgagttttcccttcgcccagacctgcgcccggtagtttggaagtcaggcttcgagacattctcaaaggtacagagcccacgctcgactacgagatgccaagcgcaacctgcctgggttgtttgacccgagttttattcagggcatagcaaaggagacggtgcctaaacccacttttcttcctggattcatccgacaagcagagt

SEQ ID NO: 199920 - DNA, 274 bp, Homo sapiens
  chr5:79551988-79552262
  hyper
ggagcaggctcgacccgggctcgcacttccgctggcgtcaggcgggtgggctgctgcgatcacttcccggttggggcgccgagctccggagtcggccgccagcctttgggccccacgctccgggtctggtgcgcggtctggccgcgctcgggccctcgccaaatgagagcgcagcgcctctccgccttcggatccagagaaagagcttgttgctgcctctaaaaggttggagccttagtaagcggttcctgcctttcctgcacagaccagaccg

SEQ ID NO: 199921 - DNA, 329 bp, Homo sapiens
  chr5:79783875-79784204
  hyper
tgccaccagtgcccggttagcaggggcgccagcctgggcgcctgcgcggacggcgggcgtcgtcaccatggcagcatccgctggaggcccaggtaagcgccgagcgcgcggcctctgcctggaggtggggcgctttgagaggctccgccggccgtaccctccctttgcgggctcccgcggtcttccttgctagggacctgggagcgcgccgcgcagaaccgggcggctgggcttggagcccgctctgcactcggggcgcgcccgcgatcgcctggcaaggaccttggtttgccgggtgggctctaagggacaggcgttaggggaggtcg

SEQ ID NO: 199922 - DNA, 41 bp, Homo sapiens
  chr5:79865662-79865703
  hyper
aaggcaggaggcgcgagggtgagctcgcgtggagcgcgccc

SEQ ID NO: 199923 - DNA, 90 bp, Homo sapiens
  chr5:79865744-79865834
  hyper
cggcggccctcggctggccctgggtctctcatcctgctcggggcactgcaatgtcagggtgagcgggaggtgcgggcttcaggggcttgc

SEQ ID NO: 199924 - DNA, 224 bp, Homo sapiens
  chr5:80256566-80256790
  hyper
agcgtgcgctacaacgaggggcacgccctgtacctggcctttctggcgcgcaaggagggcaccaagcgcggcttcctgagtaagaagacggccgaggcgagccgctggcacgagaagtggttcgccctctaccagaatgtgctcttctacttcgagggcgagcagagctgccgcccggcgggcatgtacctcctggagggctgcagctgcgaacgaacgcccgc

SEQ ID NO: 199925 - DNA, 110 bp, Homo sapiens
  chr5:82372772-82372882
  hyper
aaagcccctagggcgagataaggagttgcaacaaaacaagcggaaactcgagaagcgctaatgcttcaaagggtcaatgaccacacataatctacgtagccaacgtgtta

SEQ ID NO: 199926 - DNA, 173 bp, Homo sapiens
  chr5:82767810-82767983
  hyper
tccccccaaactgcaataagccgccttccaaggtaatcacgtttcttttgttccccccttaaaaaacaaaaacaaaaaacttatagaaaaaaacccgcgagcttagaaaaaagaagcaattggtagaaggctttaattaaggcaaagagctgtaaggcgaagttaagaaaatg

SEQ ID NO: 199927 - DNA, 325 bp, Homo sapiens
  chr5:82769369-82769694
  hyper
agctgacaaatgaatggctagtgtgaaatccctgcctttcccgtgctccaaggcagcagggagggaggagcgagggaggcggtgcgctccttcggatctgcccccagttcagctcacaagacttgcagaacctagatgtctaggaattgggagttttgcggcgggtgtgggcgccccctgatggagaagtcccgcacaggcggagaaaaacaagccccccagaccaagcgagcatctttcacaaccttgtgttcaaggatggaaggccctagttttcccttaagtcattcattttgcactccacaatctgcggcgtacatctagg

SEQ ID NO: 199928 - DNA, 152 bp, Homo sapiens
  chr5:83679417-83679569
  hyper
aagagttaacactggtactcggagggggtgcgcagctaagctccaggcccctggggtcagactaggagaggcgggttcctggggtttgctgtaatcgatgctgctcctctgggatggggaggcaggagaaagctgaagtgacctgtgagact

SEQ ID NO: 199929 - DNA, 68 bp, Homo sapiens
  chr5:83680369-83680437
  hyper
aagagaggagcctttcctccccttttgcctgcgctccggcgcgcggaggtgggtgagctccggggagc

SEQ ID NO: 199930 - DNA, 118 bp, Homo sapiens
  chr5:83680497-83680615
  hyper
gcgggctcccgcggccgccccgggtctgctgcgcgggcaggcagacccaccggcagacaggcggaccgggcgctcggctgtcgctgttctccgcgcggcggctgcggggcttctgact

SEQ ID NO: 199931 - DNA, 438 bp, Homo sapiens
  chr5:87437087-87437525
  hyper
ccagagctcggagaactgcgcgtccaggagcgcgggcgcggccggggaaaagggaggaggcggcaggagggggcaggaggtggagggaggaggaggatcggtctgaatatgcatgaggcacccagcactgccctcttccccggcagctgctcgggcgggggcgaaggagggaaggggaggggaggggaggaaatgaggctggggcggggtggccagagcagccgcagaggctgacgcgggtttggagaacggaagagatgatttgcatggcgcctggtgattggctgatggccgggggctgggtctgagaggcggcccctgaatggtttaacggaggaaattacaagattcattcgactaaagaaagccggggcgggcctggtcggcgcaatatgcagcctgtccgcaagggggcgcgatggcctatctttgttctgg

SEQ ID NO: 199932 - DNA, 44 bp, Homo sapiens
  chr5:87437944-87437988
  hyper
tcacaggctgtgcacgctcttccacacaccgaggcacacaccca

SEQ ID NO: 199933 - DNA, 94 bp, Homo sapiens
  chr5:87957200-87957294
  hyper
aagtcaaaccatcaagcacagtgatgtgctgctttttgaacaaatatggctcaaaactccgtatttccctgaataaagtcgattatctgcactt

SEQ ID NO: 199934 - DNA, 49 bp, Homo sapiens
  chr5:87962917-87962966
  hyper
aacgagatctgttgccttcagagtttattccgaacttttctttttcctt

SEQ ID NO: 199935 - DNA, 370 bp, Homo sapiens
  chr5:87963002-87963372
  hyper
catctattaatatcagaaaataaaaccagctattaaggtgcagcaagctgttacgagtgagcagcagcatccgtcccttcacaggcctctatttgcattgtaaattgcttctttctcacgcaagactctttagcctctctctatagagatgtataaagccaacggcaatttccagcgcaggttaaggaggaaggaaaaaaaaatcccattctatagaagtgacagctgattcaaggatctgttcctgatcctttttggttaggcaccatggctttttaccaagcggtggcagcttgattgcacatatcttgtgtgtatgtgttttagggggaagatcctcgatttcacagggcttctaggctgggaagga

SEQ ID NO: 199936 - DNA, 169 bp, Homo sapiens
  chr5:87969872-87970041
  hyper
aatgtaccagggacgcgccataggggtcatctatttgaggaggaagaaaaagcgggtgtgtgtgtgtgtgtgtgtgtgtgtgtgtgtgcgcgcgcgcgcgcgcgtctgccttccacggaaagagagacggagagatgtgggagggtgggggtggaagtatgcagacaga

SEQ ID NO: 199937 - DNA, 599 bp, Homo sapiens
  chr5:87970918-87971517
  hyper
tcacacttcaagcctccttcctcaaacaatccgatgggaaggacctggctgttcaggggaagcctttgctggcctctctttttacatggggtgaagtcgaaccccaatctaggagccctggcctagatggctccgcagatgagtcccagacgtggccatggaaagactgatctctctctgctcagagcgcctgcctcggtgctcactagcgcaagcacctcccaacacacatacatacatacacacacacacacaacacagcactcccatcacattaaaacgcgcgctcatgatcctgccgttaatgaagccgaggcgcataatgagtgcacaggtaaataggtaccgaaaccagaagacttcaccagtcggctgggcgatttacctctccctacagggagcacttgtagttatcgtgttttaggagtgatttgctgttgtctgtggtctctcgctcctcttcttgtggagagaagccaaaaaatatatatgttccgtggtcagagtcttctttctgataagctacccgagcattggtctaaaacatctgttttatctgttgattttggtttgttgttttggggagtgttgcttttctg

SEQ ID NO: 199938 - DNA, 57 bp, Homo sapiens
  chr5:87975971-87976028
  hyper
ctttctgtagctagctcccacgaagctgggattttcaacctcttgtttattcgtaaa

SEQ ID NO: 199939 - DNA, 254 bp, Homo sapiens
  chr5:87976663-87976917
  hyper
atgcagttgcccaccgtcccttggttttatgagagagacccaagcagaggtcggagccttgacctcctcaggttcatgacccaggcctcttcaccgcctttcccagttcagcactgactaaagaagatatctttacaaattaggaaaagaaaagagttcattatcctccctgaagcggggaaatgagtgagtcaaagacacagactcacaggcagcggttggcgccgggcacacgaaccggccgagccctcctg

SEQ ID NO: 199940 - DNA, 339 bp, Homo sapiens
  chr5:87979353-87979692
  hyper
tcttttgagtggggcgaggctctagctttcccctcctcctttcttgatctcggcaaacaaaaccattctaccacttgagccatctgccgcaggtgtaatggatggcagggggccgacctaaccacactccagtctcttctaggtcgtcaccgctctgcaccaaacaaatgagtcctgtttcaccactagggtgccgaggtggatggtggatgctggcccccgcccctggcagcgctcagcccttagaaaccagagccagctgacaacacgcgaaacacacaggcacagcgaaaacgccgagccgacgctcattccctctgccccctccctctgctctct

SEQ ID NO: 199941 - DNA, 63 bp, Homo sapiens
  chr5:88180346-88180409
  hyper
tctaatcagtttggaaatatttaccgaggaagcagcttcctcggagttccccccctcccccca

SEQ ID NO: 199942 - DNA, 43 bp, Homo sapiens
  chr5:89770671-89770714
  hyper
gtagggctcactccgcggtcctggtgccgcgtgcaggtcggtg

SEQ ID NO: 199943 - DNA, 306 bp, Homo sapiens
  chr5:89854217-89854523
  hyper
ccatggtgagttccttgtgccgaagggggcaactagaaagtttagccaaaggagacgattagaaagcactgaccgcgcacttacattgggacgcccaggcagaggcaagactcgcgcgctcctaagccgaggcaggtcagcctaggcgcctggctgctggaagagtccattagggatggccaaggcagggtgttcccgacgccagagcgcggacctggctgcccgctgcggagagcagagtgcgcagcccggggcggccacccccgctccgctggtcaggtgagcgctgccccgggagccatgggt

SEQ ID NO: 199944 - DNA, 31 bp, Homo sapiens
  chr5:89854969-89855000
  hyper
ccccctacccgccctttccaaagatgtctga

SEQ ID NO: 199945 - DNA, 121 bp, Homo sapiens
  chr5:90676143-90676264
  hyper
gagcgagccgcggcgcttccgctttacacgccccagccggcgaccggttccatctggctcgggccactctgacacctttagtttcggcaagggatattggggtggcgaaggggaggcgggg

SEQ ID NO: 199946 - DNA, 49 bp, Homo sapiens
  chr5:90678446-90678495
  hyper
tgcctgcatgcattacggcttaacacacgatgaacgtcaaggagaatcc

SEQ ID NO: 199947 - DNA, 60 bp, Homo sapiens
  chr5:92915385-92915445
  hyper
gaggaaagcgctcttgttggttttaattgagcctcttcctttcaacacaccccctctgtc

SEQ ID NO: 199948 - DNA, 150 bp, Homo sapiens
  chr5:92915595-92915745
  hyper
tccgctgacactatcgcccacatcagacaggcagccatcgatcgcgttacattaggggatggcgttacaaacggcgtccgcaggtgggcggctgcagccaagctcgccaggttcaggccgtaaccaggcaaggcgcgggcacaagggcca

SEQ ID NO: 199949 - DNA, 62 bp, Homo sapiens
  chr5:92918896-92918958
  hyper
atatacagacattcgcgcagatccccctttcggaaacattgctctgcgagtcctcccgttta

SEQ ID NO: 199950 - DNA, 44 bp, Homo sapiens; identical to SEQ ID NO: 4111
  chr5:92946750-92946794
  hyper

SEQ ID NO: 199951 - DNA, 134 bp, Homo sapiens
  chr5:92957179-92957313
  hyper
ggtcgtccgaggcgcggctggccgcccgaggcctccgcctctccgggccaatggaagcgctgggcgggaagggccactccctctccctccgggaaaccacccactcccgagactcggcgcgcgcggggattggt

SEQ ID NO: 199952 - DNA, 218 bp, Homo sapiens
  chr5:94619388-94619606
  hyper
tttgctaaaccagagcgagatgttttctttcgactgtttcatctacttagaattaatagcatttctcctcccgcctcccggcccccgccccccgctccccgggtggtgaacgcctgaagagggaggcgtggtcccgcgcaccttgtctccggccgcgccaccggcactcacctggctgctgccgtgctcctcgcccgtctccggggcccgagactccg

SEQ ID NO: 199953 - DNA, 123 bp, Homo sapiens
  chr5:94620206-94620329
  hyper
agagccgggcctggaaggaggaggacgccgccggcggctctggctcgcccgccgcggcagcccggggctccatcctccaccccctgctcctcctctcccctcctcctcctcctcctcctcctg

SEQ ID NO: 199954 - DNA, 92 bp, Homo sapiens
  chr5:94621134-94621226
  hyper
agacgagagtttaatttcttctgtcttgacttcatccccatccacccctcccttttctttatttgcctctgcactggtctcttatgatcagg

SEQ ID NO: 199955 - DNA, 108 bp, Homo sapiens
  chr5:95194595-95194703
  hyper
ttccagcaggtggcgctgcaccccgcgcggacccggcttgcctctcggccccagggaggtcggttgatgagcagtcgggaagtgggtctgcgcgcaccccgctgcagc

SEQ ID NO: 199956 - DNA, 95 bp, Homo sapiens
  chr5:98107032-98107127
  hyper
ttctagctccctccccgatttttctttgtacaatataaagtcgtttgtaacttgcagctcacgggcttgaggagtggctgcggtataagcgacta

SEQ ID NO: 199957 - DNA, 208 bp, Homo sapiens
  chr5:98108684-98108892
  hyper
gctgccagcgaattccggcggcagttcgcgggtaccttcccagcccatcctatctgctccggaccgcgggtgacattcagatttccaacaccgccccgagcttgctttaccagacaccctcaaacgactcggaacgcggttccgcagatgtgattggctgaaaggggacctgccgcgcggcgctctgtaaaagcgcctgcttcctcca

SEQ ID NO: 199958 - DNA, 447 bp, Homo sapiens
  chr5:98109213-98109660
  hyper
attggcaggctgagtcgggctgacgtgcggtcacaaccaatggggaggaagggagggacacggcgggggattatggcgtcgtggattggcgggcacagggcggggcgggacggcagtgcgggactgagattgatcgaccgcgggggctgccgcgcagagatatccgggccgccggtgggtggtcgctagggctgggccagcctcttggaggtccacgcccgccgagcccacgctggctggggccggggtgccggcgcgctcgggactcgtctcagcagtcgctcacggtctttgtgtcttctcttccgcccctttccctgcctgccgcctccggccgccacgatgcccctgcgccccgctgctgccgccgcggactggctgcgccggctgcgcgctgcttgctgcggcggtggtggcgccccatctgctacacgggcctgaagaagg

SEQ ID NO: 199959 - DNA, 203 bp, Homo sapiens
  chr5:98109927-98110130
  hyper
gaggggagccagccccggggcctagggctttgttcccaaatagccccaggtctcgaaggcgctcgccggggcggaagggcggcgtggcgcaacgggaaaggcctcccgagcccctgacacgcacctctgtcgggctccgggccacagtaacgcagccacccaccgggcggccgccgggcgcagagacgagccttctctccacc

SEQ ID NO: 199960 - DNA, 115 bp, Homo sapiens
  chr5:100236035-100236150
  hyper
ccgggatctggagccgaacctccattccagtttactcaaaactcaaaactggcctctccacgtggcttgggtagaaagacagtcaatgagatgatttgatggttttatgagtcaa

SEQ ID NO: 199961 - DNA, 100 bp, Homo sapiens
  chr5:100238183-100238283
  hyper
tgaaaacaggcaaccgtttggtgaataaagacatttctcttgagttctgcccacagattaaaaggacaaggacacacgttctttgttgacacttctgcag

SEQ ID NO: 199962 - DNA, 344 bp, Homo sapiens
  chr5:100239724-100240068
  hyper
ctgaaaaaaaagcagctaccatggacctctcttttaaacgcaagtacacccacacacattcggataccaaggaaggaaggaaagaaagaaaggaaagaaaagggaggggaggaaggaagagcaaagtcctctctaaaagtctcaattatatatatagcctctgattgtcacctctcctccgtcccaccatttttcgtacttgtattgggtggcagggacacttttcaagagttctgtgttcgattgttcactctgagtacctctccaccatcctccagtcgttgccctcattgggagagatgcttgctactctgctagtaccacgccttggttccggtctttac

SEQ ID NO: 199963 - DNA, 224 bp, Homo sapiens
  chr5:100240289-100240513
  hyper
gaattctgagttgcttgtcgcctgacagcttaaaatagcaacgaaaacagccagcatctttgcttaaaaacccaaggttcccgccagtgtttaccatacttcctctagagtttaagaagttaagaacttccgagatcttgaatttcctctttgcagcacagcgaacggggtcgggtataaaaatgctccaaggagcaagtaattacgaacgtttattgacacta

SEQ ID NO: 199964 - DNA, 399 bp, Homo sapiens
  chr5:101631635-101632034
  hyper
agtgaagcagaaagcctccaggtgtgttgcagcgctggagacattgaggatggaagttcctccagccgtaagacccctcctcaaactcggacagcgacagtgaccggagcttctcttcggagacattgggaggggctgaaggcagagatggctctggtgacttctggggctcctggggcttctgaagctcctgtggctgagaattctctctttgggggtcagaggacaaggcagagacttcgatttgggagggcgacgcagacaagcggcgcaggatgtctgggctggaggggacaaaagccaagttctcaatacctttggcgctcttcatgtctggatgggttctcccgactccggtgcttcagagcagcagagccaggtccctctctggctcctccc

SEQ ID NO: 199965 - DNA, 221 bp, Homo sapiens
  chr5:101632074-101632295
  hyper
ctcctggccctccagcctccagcgcactctccgccaccgcctgaaccttcctactccagctcgcagctgtctggagcgcagagcgctgagcgggggcgttagcgccccagcctgtggctttggcgctcagctgtgcctcacccgtcgcctcaaggaccaaccggaaggcgcggcgtgggcgtgccacccggcggcggccgagtagagggggcgagagttct

SEQ ID NO: 199966 - DNA, 49 bp, Homo sapiens
  chr5:102090424-102090473
  hyper
ggtccttccttctctcgggaaacgttcttctggcgcgaagctgggcgga

SEQ ID NO: 199967 - DNA, 199 bp, Homo sapiens
  chr5:102201407-102201606
  hyper
ccccaggcttgggcgcaaccttgtgaaactactaatgtattaaagaacctcagctgggatttgctgaggacaaatgctgtaacgtgttagtcatccattatctgcttctatttttgcaggttctgaatgatgactgacgcgggtttgggtgatacccctcacagcccctgtcattccggagtcataaggcacccgcgcg

SEQ ID NO: 199968 - DNA, 125 bp, Homo sapiens
  chr5:107005046-107005171
  hyper
cggtactattaataaatagcacctaggagggcaccgagaccggcacacagctggaagctagcctctgtcccagagaaagcagtgcggtatgggcctagcggggccgacttctgtgcacaggccgg

SEQ ID NO: 199969 - DNA, 298 bp, Homo sapiens
  chr5:107005685-107005983
  hyper
cgctctctctgcgcgcaccgggaaaagagaagggaaaattaaaattaaaaaaaaaaaaaaaaaaaaaaaaactttgggggatgtttggcgggttctctccgcagtccctgcggacccacgctccaggaaggagctcccggctgcgcacactgggggctccccgcgccgggaaccggatgccagccagatgccggggctgggaagcagagaagtccctactccccggctcccgcccttttccgagtctcccggcgccccgcagaagcagttggtctaggcagccccggggactcccagg

SEQ ID NO: 199970 - DNA, 449 bp, Homo sapiens
  chr5:107006260-107006709
  hyper
cacacacatccagagcaccagaaacaccagcgtcaacatctccacgtgcaacatcacgcctggccagcggcggagcccccgacgcgccactccggggagagagcggggatccggagggagggaggcaggcaaagggacagagagagagcgggcgccaaataaatatgaataaataaaaatgaaagtgggcgagaaaggaaagaggcgcccaccaagctggggaggggtaggagagcgagaagaaaagaaggcggtgggatggggggtgataaagacaaactcgcacccccactggagggttcaggaggaaaaaggaatcacaagatggagagaagcgtgcgtgtgtgtggtggcggcggcgagggcgggggaagaggtgccaagctgtgtctcgggcggcggcggcaggccggtcaccccgggagagggaggtgcgcgccgggccgggc

SEQ ID NO: 199971 - DNA, 102 bp, Homo sapiens
  chr5:107007963-107008065
  hyper
acttgcgtggaaagccgacagcggcggcgacccagtggcagcagcctcagcagagcgcgaggccgcacgcgtgaacgtggacgtgggcggggggatggggct

SEQ ID NO: 199972 - DNA, 145 bp, Homo sapiens
  chr5:107008360-107008505
  hyper
ttggtttgctccacgagaaagaggcgttttcctaatctcccttccccacgcctcctaccccctcccccgccccaccttctagaaacctgactaattgaattactgggagtgccgaggcgccctctcctgcgccggagcccggcag

SEQ ID NO: 199973 - DNA, 206 bp, Homo sapiens
  chr5:107359033-107359239
  hyper
gattttggacataaacgtcatatatactgagacacaaaattgagtggttgaaataggtagataaagtagctgttgtttcaagaattgaaaatggaagtggtttgtattatcccattactacaaattggtggaaatggaacaccacctcatgttcccggctagtgtctaaagtctcgtaatccacctatgtcgcgtttccctggcag

SEQ ID NO: 199974 - DNA, 265 bp, Homo sapiens
  chr5:109024744-109025009
  hyper
aagccctcttctcttgcatttcctccagcccgtcaccaagtactcttccaggcacgccaggcccgagtgtcctaggataggaaacctgagcaacaaagggaagtggggtgtaagctcaacccctgttggacgtgggggtgctggcgcctgaacgcccccgaaggcctcaactcccagaaagctgcctgccaggtcacaagagccctgtgaggtcttcctatcgccgggacactgggaggcaggcgcggggcgggtccgccgggcg

SEQ ID NO: 199975 - DNA, 637 bp, Homo sapiens
  chr5:110074663-110075300
  hyper
gtgctccgaagacttccgggtttccaacgtgacttccggttgtcagaatttacccctgacgcggcggcggccgacgggaagctgtgtgtgcttaggtcgtggtggccccggtggtggtgggctccgggcgggctcgcgtcatcctgcccccgctgcgatgcatccgcggcgcccggacggatttgatggcttgggctaccggggtggtgcccgggacgagcagggctttggcggcgccttccctgcaaggtccttcagcaccgggtcggacctgggccactgggtgacgactcccccagatatccccggcagccgcaacctgcactggggcgagaagagcccgccctacggcgtgcccaccacctccaccccgtacgaaggccccacggaggaacccttttccagtggcggcggcggcagtgtgcaggggcagagcagtggtgagaagcatggggaccgacacagggatgaggggttactggggccgcggcttgcggcctgcagaccccggaagcggcgcagaggatcccgcctcctattccttctcatcctatcgcgcgccacaccctttgccctcctttggtcctctgcccctgaggctggcctcctcttcctcacaaacgaattctcctggatc

SEQ ID NO: 199976 - DNA, 1030 bp, Homo sapiens
  chr5:110847625-110848655
  hyper
ttggcatcacctccgcgaagcctggtgggacgcggctgcccctgcgctgtctgtgcacctcctaagaaccaggaagcgcggtgacctccaaagaacaggactgtcccaaatcaagcgggattaccaccgcccctctcccatttaacagctgaggacactgaggtctaatggattccaagtacttaaataggtgagcggcgcgcaggggcgagttgcaagccctgggatccttccagctcgccgcttcccctcccaggggctcaggtttctctttcatctgtgaggtcctctcccgcccggacgccggggcccgccatccccaacgtccaccgcgagctccccagatccatggtctggagcaggtccagaagacgcacctggcaggacgccccgggcgccacagtcgccctccacacgggccaccccaatcctgccgcggctccgtggctctccttacctttacctgaggtgaagcaaggacgtggaagcagctacggcgcgctaccaagcacctcacaccgctctcaacagtactgctcagcctcccggcccgccgatgcgcaggcgacagcagccaacttgtaagtcaccgctggtcgcagccaactggaaggcacccagcgcctcagggcaaggcgggccgagcccccagccccgccccctggcccgatcccgggggctccggggagggggggctgagaggaggtggccggaacaacgtgcgcttgttcggattggctggcgcgggagcgtgtggagggctgattggtggccgataaatggaatgattccgcgtgggtgtgggctggcccgagccgcgccagggttccctggatgtctggggttgcctgcaggtttggattggttgggttgggttgtcctgtgatcacttaattgtgaaagaattttgtcaagcagtaaaccgactgggagaaattgaaacagaaggcgaagtgaaggatcacagtgagggataaggtccaaattcatcccgcttgtggatatcctagtatctcgcaactacgctact

SEQ ID NO: 199977 - DNA, 74 bp, Homo sapiens
  chr5:111093930-111094004
  hyper
cacacagtcacacgcgcacaaccagccagagctgcggcctggcgtgatcggcccaagacatactcccctggtgc

SEQ ID NO: 199978 - DNA, 99 bp, Homo sapiens; identical to SEQ ID NO: 111818
  chr5:111496549-111496648
  hyper

SEQ ID NO: 199979 - DNA, 192 bp, Homo sapiens
  chr5:112257954-112258146
  hyper
gagcagcggcaggcggggaccgcggcgcgtctacgcgtcctccactcgcctccgctcgccccgcccggccgccgcgcgcccctcctcggccgccgcgcgcccctcctcccccgcccagcgccagggggacagcgccacaccctggcgggggcgggcctgcaactccgcggacgctgcgaggtggcctgcctg

SEQ ID NO: 199980 - DNA, 36 bp, Homo sapiens
  chr5:112629391-112629427
  hyper
gagcccaggaattgcaaatgcgcttgcctcaaagac

SEQ ID NO: 199981 - DNA, 469 bp, Homo sapiens
  chr5:112629778-112630247
  hyper
tgagaggttgtttcttttttaagccactcatttcagactgaaatatcaagccagttcaggtcatttcctgagtagcactacaagttaaaacaagatccagaaaatctactaatcttcaattgcgctgcctccagactgggagcacagggggatagggtgtagggctgtggggaggtcgaggggagggggatttgtggaaaagcaaacgcccgagaaaccctagctcccgacctcagctgtttcttacctcactcagctcggccgaggagtcgtttccatatttcatggcaactccggaattcatgatgcacttttcagagctgggctctcagtcccccaggtctcggagcttaagagttggacttcacaggctcaatatccactgcttggtcccttctgccacattttagtctagacagccattttcacccaggacagttgcgaagcgcaaacggaggatgcaggcact

SEQ ID NO: 199982 - DNA, 128 bp, Homo sapiens
  chr5:112630698-112630826
  hyper
gctagagggagaaaagggtgggggcgagtagcctggaggccgagcagaggagaccgtgctgggagagcagagcaggcatccttccagttctctgcaatagtaattaaggacccgagtccaggaggggg

SEQ ID NO: 199983 - DNA, 149 bp, Homo sapiens
  chr5:112823814-112823963
  hyper
ggccaacttttcccgcgagcttctgagcaacttgccgcaagttggggcgagggggcagagcaggggtcaagggcgcgcggagggactgatctcgctcctgtcggtttcctcgtacctccccgcgtacctgctgatgtatccgtccccgt

SEQ ID NO: 199984 - DNA, 126 bp, Homo sapiens
  chr5:113391139-113391265
  hyper
cctcctgaggggagcgggcgggagattcccggctctcccctccgccgccgcggcgcgttctacgccgggggaagccggctggcgggcgcgcggccttaacccgtgcgacgccgggcagctcctgcg

SEQ ID NO: 199985 - DNA, 218 bp, Homo sapiens
  chr5:113696733-113696951
  hyper
cggcaaggaagccctgggacctccggattcgggctgccggagggcctgagcgccagagcccaggacccggcggccgggggcgccatcccctcatgttctggagaaggcgcaaatgtgagctggcggtagcggggaaagccctccgcccccgccaggggggacccgggaagcccggccggctctgtcggcagactgcggggatcccctcctccggcccc

SEQ ID NO: 199986 - DNA, 97 bp, Homo sapiens
  chr5:113698167-113698264
  hyper
cctgctgctgctgctgctgctcgtcgcgccggggcagccagctcaatgtgagcgagctgacgccgtccagccatgccagtgcgctccggcagcagta

SEQ ID NO: 199987 - DNA, 56 bp, Homo sapiens
  chr5:113698330-113698386
  hyper
cgccgccagccccacgggcagcctcggcagtctgggctccgggcccccgctctcgc

SEQ ID NO: 199988 - DNA, 251 bp, Homo sapiens
  chr5:113699119-113699370
  hyper
ctaaacaactcggagatgaaccctttccgcgtgcagccaaagttctcgaggcagttaagagtgctcagcgcattcgggcaccttaagtaagtggttctggaagtcggtggggaaaccatctgtaattcatcccctcgtgaattatgtttagaagggccctttcaacccgctctcttgaactcagaagtaagttcctctggttttgctagcctggaacagcggcgctcgcttcggtcctctatggcgtggac

SEQ ID NO: 199989 - DNA, 35 bp, Homo sapiens
  chr5:113699663-113699698
  hyper
gtctgatcatcgtgtaccacgccagggaaatacag

SEQ ID NO: 199990 - DNA, 57 bp, Homo sapiens
  chr5:114515671-114515728
  hyper
cttgcctttagctatcaattccatgatgtagccaaattcactcatctccccagactc

SEQ ID NO: 199991 - DNA, 131 bp, Homo sapiens
  chr5:114515769-114515900
  hyper
cgggtgtatcgaatttgtcctttcttttctctttttctgtttttagtctgagttttgccgagctccccgcccataagctgttaaccaggaaaagaggggaagcgccggggaaagcaagaagcgggcttggg

SEQ ID NO: 199992 - DNA, 65 bp, Homo sapiens
  chr5:114516274-114516339
  hyper
acgaatacagaggaggcgcaacaaaggggctggctgccagcgccggaaaataaataaataaatac

SEQ ID NO: 199993 - DNA, 289 bp, Homo sapiens
  chr5:114632026-114632315
  hyper
ccgcgcctcccgccggcgctgcagagggcacctgttcagccagggcctgcagcccctcgcctgccgccagagcagctctcggttctcccggatttacctgttgaggcgctggcgtcgctcccacgccggtcccggtggccgcgcccgcccctgccacagccccggctaccgcggtggccgcagccgctaccacaaccgtcgtcagtgcggccatgtttacccgccgagctactcgggccgcggcggccaccggtgcctggggattcgtggcaggcgcaccctggcctct

SEQ ID NO: 199994 - DNA, 146 bp, Homo sapiens
  chr5:115421021-115421167
  hyper
gctgaggtctgtacggaagcgtgtggtctgcaagcgtggggtctgcgtcactgttcgcggagtttggtatcagaagttcccgggtgctgccttcagtgctgccgaatcacgtggaacggtattccgtttccgatttcagttccggt

SEQ ID NO: 199995 - DNA, 62 bp, Homo sapiens
  chr5:115911175-115911237
  hyper
tgaagtaagcaaataaactacagtgcagagaatggcgtttttaacgacggcgatctatttta

SEQ ID NO: 199996 - DNA, 119 bp, Homo sapiens
  chr5:115911590-115911709
  hyper
aagtaacatcgggcggcccagcagttctcggagagatatttactagtcatggagttggctgagaaaagcaagtgcggagatcggggtctcagtcccacttaggccgagtttctttatat

SEQ ID NO: 199997 - DNA, 205 bp, Homo sapiens
  chr5:118407068-118407273
  hyper
ctccgggcctcgccctccggggctcgggatgagtcgcgggccccagctgagcggctccggctccaggcgcctgtcgctgcttctgccgtcgccaccgaagagcggccgccgcccctgagggaaggagggagggaagcagccgctgacccgtggcatgagctggatgcggtgtccgttgcaggactagggcgccgacatgaacctg

SEQ ID NO: 199998 - DNA, 202 bp, Homo sapiens
  chr5:118604806-118605008
  hyper
cgcgaaattttactcggttccagtgccgcactgaggatccaagaccccttttaggaacccttacctattcagggcgacctcttaaccacctcctgccgtgagcctcattccttccctccctttgtaactgggttcccgctatttgtcacgtcctcctgtaaccgcacatactggcgaaagcactgcccgggttatcagggtg

SEQ ID NO: 199999 - DNA, 55 bp, Homo sapiens
  chr5:119799801-119799856
  hyper
gtggcatctgggagatatctcgaagggcaacgtcgaggggactgcaagcgtcaac

SEQ ID NO: 200000 - DNA, 42 bp, Homo sapiens
  chr5:119801506-119801548
  hyper
aaattgtaatcctgtttctgaagccaacggggaggagactga

SEQ ID NO: 200001 - DNA, 223 bp, Homo sapiens
  chr5:121413811-121414034
  hyper
ccaccaagcaatgccaagggtgggattcagacccttccccagtcaaggcggctgctcggacgtggcacccttccctttcccctttctcagtcctggaaggcaacggggagcggcgcggcagtcccggagagcgggcagtgtctggagtgaaggaaggaggagagattttaaactttctggcacgtttgcaaagttacacaagccgttctggcccggccgcccc

SEQ ID NO: 200002 - DNA, 136 bp, Homo sapiens
  chr5:121414090-121414226
  hyper
ctctgcccctccctctctcccgtccctgccctcctccccccagacacgttgcacagggagcgttaaggggaaagaacaaaacggaacacacatcctgagacacactggcttaatctggggcgaacatgcaggaatt

SEQ ID NO: 200003 - DNA, 134 bp, Homo sapiens
  chr5:122371731-122371865
  hyper
ccagcgtggagaccacgcagcgggcgggcggctgcaagccctgggctccgagcgcctctcctgtgcgggtcccgcccccctccccgcattcctctcgttctgctcccgagcccaggccacgctgaaggaagtac

SEQ ID NO: 200004 - DNA, 199 bp, Homo sapiens
  chr5:122372079-122372278
  hyper
tccagtccccctgcgcccgggaagcctccacctcgcccgccctgacaccgaggtcccagtatccaaagcgcccccagggccccgcccgcaacaggggaagttgcagcccgccgctctcggtcaccttggccgtcaccgaggggcctcgcttgcggaagccctcggcccccgaagaaaacacaagtgcgccgagccccac

SEQ ID NO: 200005 - DNA, 319 bp, Homo sapiens
  chr5:122372638-122372957
  hyper
gggctaggctgggagcacctccaggaatttaccgcgtaggcgcggattaaacttggacgggaagaccaggactctcgggcttccgcgtccgcccggcagctagcgctccgcgggactgggaactctgcagccggtcccggtgtgattgctgccgccttgggagcagcctccgccgcggccgccgagttccaatggcccattggaaccttttgctaggttttggacgcttagcagaactttgacatcgctggaggcgtggagccctgttgcactcgaataatggcctctctttgagatgattcacgtctagggaacactg

SEQ ID NO: 200006 - DNA, 216 bp, Homo sapiens
  chr5:122424220-122424436
  hyper
cggccaagcttgagtccctccaggaccagctgctctcggtctcaggaccctcggtcctacgcctccctgcaccgacaagcctccctcctgggctgcagacagagggtttcactgcagcgcgcaacccgtcccgctccgcccccaacttttctccccggaggatttatgttagaggttgcgtggcgggcgagtggactctggcacccagaagcactt

SEQ ID NO: 200007 - DNA, 433 bp, Homo sapiens
  chr5:122434730-122435163
  hyper
tggcacccgcgatagactggccgtctcccccaccccgccccgtctggtgattttaaatcgtctcctgtgtaattgtaaaaagaggaaagctgaatacccagacgaccagtatagaatctcttcgagacagcagattgggcaagagacgggctttttttcgcaatacaaggataaacacatcctgaaactccagatagaaacctcaggaatgggcgagagggtcagaaggaacgagagacagtagggaagagagagagagagacagagacagagggagagatgcagagagactgaaacgggaggaagaagcctggaactgtcggttccgtggagagcggacatgctatctgcgcccagatccgaaggctttttggggagcctagagtcctggcccggtaccaggcagatctgggtgcggcgaattccaagggag

SEQ ID NO: 200008 - DNA, 102 bp, Homo sapiens
  chr5:122435201-122435303
  hyper
cggtgcccccaaggcatcaccttcctcgaaggtggcttacccaggcgggcggtgatgctgttgtctcgggagtttactcaaagatgggccgctcggggcggc

SEQ ID NO: 200009 - DNA, 105 bp, Homo sapiens
  chr5:122435413-122435518
  hyper
cgccggcttgtgggcaccagcagcgctgcggccgccgcgcccccgccggagctgccggagtggctgcgggacctgcctcgcgaggtgtgcctctgcaccagtact

SEQ ID NO: 200010 - DNA, 887 bp, Homo sapiens
  chr5:124082479-124083366
  hyper
cttaagagaaaaggagggggggagtagagggaggaggaggagaagaaagggtgggatgagaaactgggcaagaggagaaaaagaaaggtgtggaggaggagacagcagatgattcagtgagctgataaaccagttataacagcattcgctcggggcggggggcggggggcttggggcggtggggtggggaaaataacggcgtttaaaatgggctcagtcttcgaaacctaaaggatgtgatgttttcctgtcttatgttgttttaagaaaaaggaactgagttcctagtatagctcccgaggggagtggaatcctctgtcgctcaggtcagccagtcatgtggtaattcgataattagagtcaaaataaggtttttgttttctttttttttttttttaaggcgacccttttcgggagtttttccctcttatactcgcagcaaacggtgtgtctcccttttatttattttttctctcctctcccttcgcccagcccctcctgtgtttagtcagatggccccggagcttggcttagtatttttaattagctggcgtttggaagctaaaagcagtaatgaattgttgatggattggaagtggagagtcgctttgctggaaatgtcggggctgggagagggggatgggcgagttagtaacaaccaaccatctaaaaggagcgattttgttacagtgcaagcctttcacatcacgtgaggatcaagggctcaattggttgtcgtgagaacaaaaatggtgacaagcgtatcaagaaaatactgatctggtctttaaaaaaaaaaaagctgaaagtctctcccctccccctgcacacactcccccaacctcctccccccgcccccccgcagtgggcgaagctacaagttatga

SEQ ID NO: 200011 - DNA, 57 bp, Homo sapiens
  chr5:124084138-124084195
  hyper
tcatttctatgcataaaactcgcacattcccctgcatgaagtccccgctaagtgcta

SEQ ID NO: 200012 - DNA, 74 bp, Homo sapiens
  chr5:124084302-124084376
  hyper
attataatctcttcaacaaatttattattaaagaagatggaccatcaaatgtcacagaccgtcctgtgtatttt

SEQ ID NO: 200013 - DNA, 125 bp, Homo sapiens
  chr5:124084646-124084771
  hyper
ttgagatatacacacgtataaaacacacactgagagcgggtgggggtgctgtggggggtggttgtggagacaaagcgttttattttccaaccagattggggttgaggaacctcccgcagtaagaa

SEQ ID NO: 200014 - DNA, 85 bp, Homo sapiens
  chr5:124084977-124085062
  hyper
ggctggctgtgtggaactgactgcgagcattttgccggcttcccttccttgttccaaggacttcgcagcccaactcccaagactg

SEQ ID NO: 200015 - DNA, 108 bp, Homo sapiens
  chr5:125930478-125930586
  hyper
cagctccaaaatgacgtcgattctgcatagcacacaaggacctaaaatctaagtttttgttttaaaggcaccctacacgagaaaacttttactgtggagcttcaaaat

SEQ ID NO: 200016 - DNA, 181 bp, Homo sapiens
  chr5:125931062-125931243
  hyper
tggaacaatgggagtgctacagggaggagtgggctgctgccatctggtgaaagactccgggagccacagttccagctgggaattcttttcagcaaaatattggcgctgaagtacagtaggctatagcaggggttctgaaactgtaaaatgcgtgtaatgacctggtcgtcgtggtaaatgc

SEQ ID NO: 200017 - DNA, 206 bp, Homo sapiens
  chr5:127420028-127420234
  hyper
cggctaaaggcagcgaggaagccaagggccgcttccgcgtgaacttcgtggacccagctgcctcctcgtcggctgaagacagcctgtcagatgctgccggggtcggagtcgacgggcccaacgtgagcttccagaacggcggggacacggtgctgagcgagggcagcagcctgcactccggcggcggcggcggcagtgggcaccac

SEQ ID NO: 200018 - DNA, 102 bp, Homo sapiens
  chr5:127536982-127537084
  hyper
ttgacatttctcagatttcacgataagagggaagcgaagaaaaaagcacgtgacttgaaaatgtttttctctttttaaagccacatctttctgcttcatttt

SEQ ID NO: 200019 - DNA, 86 bp, Homo sapiens
  chr5:127537230-127537316
  hyper
ggtagtgatgcgaataacatgctttgagaagtcagaaggctggcgtctcttcctccggagctcacggaggagtctctctggtttcc

SEQ ID NO: 200020 - DNA, 34 bp, Homo sapiens
  chr5:129240901-129240935
  hyper
ctccagcggccgagggggagcccgaggaggagga

SEQ ID NO: 200021 - DNA, 143 bp, Homo sapiens
  chr5:129240962-129241105
  hyper
cggccggccggggagtagccacaacggcagcggggacgggggcgctgccgccccgagcgcccgaccccgggacttcctgtacgtgggggtgatgaccgcgcagaagtacctgggcagccgcgcgctggccgcgcagcggacct

SEQ ID NO: 200022 - DNA, 273 bp, Homo sapiens
  chr5:129241140-129241413
  hyper
tccagccagcagccccccaacgccggccagcccccgccacccctgcctgtcatcgcgctaccgggtgtggacgactcctatcctccccagaaaaagtccttcatgatgatcaagtacatgcacgaccactacctggacaagtatgagtggttcatgcgcgccgacgacgatgtctacatcaaaggtgacctccctgcgccggctttccagcctgccagtctccccgactcctttctctgtaaccggtcctagcccctgcccagcccctccgct

SEQ ID NO: 200023 - DNA, 55 bp, Homo sapiens
  chr5:130970375-130970430
  hyper
ccaactcagaaaatacgacttagtaatggtgctttcttaacgacactcagaagcc

SEQ ID NO: 200024 - DNA, 115 bp, Homo sapiens
  chr5:130970643-130970758
  hyper
accagcctcacctcgggagtccgctcgggtggcttcttcctcaacgcctgcctagcgccagggtccacgggtgagttcatggccacggcccgggtactccgcagcctgcccttag

SEQ ID NO: 200025 - DNA, 197 bp, Homo sapiens
  chr5:131133198-131133395
  hyper
gtacccgtggggccgcggccaaggctggactttgagcccaggaccccaggaccgcccttagaaggctgcgccggcccgcgagaggtctgggatctggacagcgcgggggctggctcacagggactggtgaaggaaactgccgggacccctgccacagccatggctccccgcaaagacgacctcgagcaggcactgcg

SEQ ID NO: 200026 - DNA, 490 bp, Homo sapiens
  chr5:131563041-131563531
  hyper
tgggagggtgcagaacgggcttagccaatatgaagaggcccctcagggccaggcggacgccgcgcccccgctcccaacagccggcagcccggggtcaggccgccacttcccgggagcctgacagggaagagcggccaagttcccagccccgcccgacagccgagggaactgcacgaagggcgccgctgacctcaccaccctgagctcgggaaggcttgcgggcggcggcacaagaacccagacgggtgcagaaacagggcggagggtgcagggtggcggcccggactgcgctgctggcggctagcggcgcgacccccggccccggatccggccccggcccctaactctcagccccgcgcgggcagaacgcaccgcctggcgaccccagcccgcgccccagcgctaaggttgatctggcggctgagcgggcggggcgctcacctggacactcgcagctcccggcgtttccagaacctcccgcggcgtcgcc

SEQ ID NO: 200027 - DNA, 278 bp, Homo sapiens; identical to SEQ ID NO: 41939
  chr5:131563558-131563836
  hyper

SEQ ID NO: 200028 - DNA, 215 bp, Homo sapiens
  chr5:131825630-131825845
  hyper
tgaatccattctacgccttcctgacagccacagcgcccacaacgctaagaccaggacgctaacccttccggcccggtttcccctcctctggagaagtggcccaaggaacacctgtggcgcctcttcccgcagtctccgtaggtcacgattccctccagccacctgggcagtaagccagcccttgccaccagcacagggagcccaaaacctgtcgc

SEQ ID NO: 200029 - DNA, 238 bp, Homo sapiens
  chr5:131831522-131831760
  hyper
cgctgatggccgctgcggagcttcatttcttataaacaccgccgttgggaggaaagagaactcagccccctgtcagtcccatggggccccgaggccgggggaggctcctgggccaggcccagcggccgcgacctggagcggggcttgatgggatcagcactctcctcccccgcgccaatgggtgctgcagaacggcccacgcccactgccgttcgcccggggcgcccctggcaggctt

SEQ ID NO: 200030 - DNA, 182 bp, Homo sapiens
  chr5:132072698-132072880
  hyper
tccgctgcctccctgcgcttgctccgaggcgcaaaggcctcaccaggtgtgcagcatccaaagagccccaccgtggccacccccagacgccccgctcagcaggaagggctgcgagccagagcgcatcctccagcacagcgcctttttgataagcggcgcaggccccacgggatgcagcagcg

SEQ ID NO: 200031 - DNA, 805 bp, Homo sapiens
  chr5:132386958-132387763
  hyper
tttcaggccaggcagcgtgtcacttgcctgtgttccttgttagggcctaccaccgggtaggtgcttggaatgtgctgtggattaaaggcttaaatcctgcgggcccctcaatctgatctaaggacatgagtggcttagagaacggcgcaacaaggctaagcgaaagaaaacaaagcggtgtggctgggagtgggctccttccctccgctggtgagggtgcgatcttagactcttgagagaacccgacataaaggccgcgttccaatggcggccttctcccctaccggccaacctgccccgaaaagagcagaaggcaccctgcgggatctgcagatcagcttgcgtctcattctggggcaccgacacggtggaatgcaagacaccccactaccggaagtttctttgatgttaagaaaaacggcggaagtaggccgcagcgcttcctcagtatagtgcctcgagctggctcgcctactttctacggtaaagggaggtgctccacatctctatgcagctgtgcagcgccgcaggttccatgcgcaggctcggttggctaaatgcgctttccagccatctttcagccacccagtcctttcccaggttctcgagccaggacgtgacgtattcagacgtactgggggcggggcctcaaggggaaaagcgcctgagccgggatatcgcgagaacatcccgttctttcgtagctctggtgctgcggctccgctctcgtcgcaacgagatctttcgagatcttctccgcccccgctaccggcgcctcctctgcggccactgagccggagccggc

SEQ ID NO: 200032 - DNA, 902 bp, Homo sapiens
  chr5:133862723-133863625
  hyper
gtaccaggaagatgccggcttgtggcggaccccgtttgggacgcacacacctgactctcaaatgagtgacattgcagcccccgcccccacctagcgctgctgcagtccctttgccggatccccggccccgccccgcccccggcagtggcatcttcccggcctcacctccttcctccctctccctcccttcttcccacccactcgcctgcgcctgcggagcggcgcccgcccgcctcctccccgcctgggtgcagacttgtggctccccatggtttcttcccgcccatccctgggtcctgagacatcctctcctctcggccaagggacgagaggggtcaacttggcgattcgcagctgttctgccagaggatggggttgcctgcgagacagccaggaaggcttcactctagcttccagaggcccagccctgtcccctactacacacagctaccaccccacccgcccctggggctcggctgcccttcccggtgtctcttaaacccctcccccgacctgggtgttaagcccacccacctcccggcgccgcccccggtcgaacagcctcttgcccttccttcgcctgggccggagccccccgcagcctcctccggctcctcctcccggctccggcggtcggaatcacgccggcgcgcctccagcctgcggtcccgcggactgcctccaggggcgggctggaggcgcgcgcaactcccctcccaatcccctcagccactgccgctggcctgggcacttttttaccagcttggctgctggcctcttgctggaggctgggggaggtgaagggtcactgggtgtctttgccgtatgccgaaggcacactgcggccggcgattctggtctctgcagatttccaaacctcgccgctgcgtctagcacccctg

SEQ ID NO: 200033 - DNA, 33 bp, Homo sapiens
  chr5:134364994-134365027
  hyper
cggttcttgaaccagacctgggggaggggacgg

SEQ ID NO: 200034 - DNA, 169 bp, Homo sapiens
  chr5:134365094-134365263
  hyper
gtcggcccgctgccctccgaacgtcgtttctctccttcgaccgatatttccgctcctgcattccctccacaatggttcctttcctgtccccagaaaatactaatttctttttccgatctttatcctctcccgaaattatatccgttttcttctccgaatacggattctc

SEQ ID NO: 200035 - DNA, 205 bp, Homo sapiens
  chr5:134366513-134366718
  hyper
aggcacctttcaggcttctccgaggcagccagacaggacctgcctttccctttcgttttcgggataaggccaacagctcccgaggtccccagcggcagggaatccactgcccagtctctggcccagggtatcctgctaacatctgagtgggtcctgggccccatagggcatgggggagtcccctgggggcacaggtctttgggct

SEQ ID NO: 200036 - DNA, 124 bp, Homo sapiens
  chr5:134367305-134367429
  hyper
ccctccctctagggttcctgggaactgtccccactggaaagcgcccgccgggtgctggtcgtcagtaggcacctctagtctggtgtgccgcggagaagagcccaagaatcggagctggagccgc

SEQ ID NO: 200037 - DNA, 185 bp, Homo sapiens
  chr5:134370268-134370453
  hyper
aaatgacttgtttcgcctagaatcaactcccgtctcggccgcctcgaagtccccagccctggcgagaacagcccaggatgagtgaatgtttgccgaacaggatcgcaccgagcgggcgccttcgagccagcgccggggcgggggcagagcccggggcccgttccggcagctcccagcggtgtcct

SEQ ID NO: 200038 - DNA, 70 bp, Homo sapiens
  chr5:134374377-134374447
  hyper
cattactgcgatcccggctttggggccctgcctttgccgcgggagaataggctccaatttacgaagctgg

SEQ ID NO: 200039 - DNA, 219 bp, Homo sapiens
  chr5:134463605-134463824
  hyper
ttctgaatggcttttcgggccagcctgtgaggagtcctgcctgccctgactgttgactcatcctgggtggaattatgtacagaaattagtcaacagaggccattcccgggaccacaggcagctggctgcaggcattgcgcaggcgccgtgcctgctgggagtgtcttttcggacacagagcatgggcttcgtgggtgcgcttccagggctgggatttct

SEQ ID NO: 200040 - DNA, 213 bp, Homo sapiens
  chr5:134527188-134527401
  hyper
gggcctcaggtgcgcgctccccgaagctctcctgccacctgttggccgccggtggtgctgacgctacggggagaagccacgcttcagtggcttgcctggaattcatgacttgtgcgctccacgtcctgggctggccgacctgctgagggtatctctgagagcaggagccaggccgtcccgggctctcctgcgacagtgcggtgggagagcctt

SEQ ID NO: 200041 - DNA, 236 bp, Homo sapiens
  chr5:134824589-134824825
  hyper
ggcttccacccggcggagggcagaagcgtcttcttggctggctagagaagctccgccggagtggcctcctcccctcccccaggccggggaggaggccgccgagggctctccaattggagagcctttcatctctttgtttttacagtgattaacccgtccgagcgcgctccgagcgtggctccaggcagcgcagggggaggggagaggacggctgggcaagggaagggagggaggag

SEQ ID NO: 200042 - DNA, 68 bp, Homo sapiens
  chr5:134825315-134825383
  hyper
tttttatgtcatgtggatttaatctagttagacgattttatgcttaaaattgcattgttaacagcaat

SEQ ID NO: 200043 - DNA, 65 bp, Homo sapiens
  chr5:134827197-134827262
  hyper
attatgagtttgttacaaaccgagcttctttcttctccaaccccacccccacccgcagctctgga

SEQ ID NO: 200044 - DNA, 79 bp, Homo sapiens
  chr5:134870344-134870423
  hyper
cttttctaaatcacactgaagtggtggctggggtcagttctgagccagtcacaaaggaggttttgtggagttcagaaag

SEQ ID NO: 200045 - DNA, 109 bp, Homo sapiens
  chr5:134879162-134879271
  hyper
tgaattattagtactcccctcgagttaaagggggaggaaagcgcctcattttctatgcccccaagggacggaccgagcgggcagcctctaaacaatgtatttatcactt

SEQ ID NO: 200046 - DNA, 31 bp, Homo sapiens
  chr5:134880614-134880645
  hyper
ttaccgctgcctggcctggaaggataggagg

SEQ ID NO: 200047 - DNA, 230 bp, Homo sapiens
  chr5:135468336-135468566
  hyper
caggcctggccatcgacgcgaaggcctccagctgatcggaagtcggcgttggccggcgcggagcccggcgcggaggcttctttcagccgcccgggcaagacacccctccctcggtcccgcagcggtcactccgcctctggcgcgcatgcgccgaccccagcgggcgtcctcccgggctccctctccctccctccctcatccgggtcctgggcgagcgggcgccgtgcgcg

SEQ ID NO: 200048 - DNA, 247 bp, Homo sapiens
  chr5:135528891-135529138
  hyper
ggggcgggactggcggcggctgcccgggggagcggctgcgaaccaatgagggcaagagaggacgcggctgcgactgcccccagcccggcctcacatcactcagggacagagggacagagacagggacagagagagagagagaaagagagaaaagcacagggtcacaggaagactgacgggcaaagacacagttacagacctatgaacagagccacacgccaaacagggacaaaccgttgaggtaagc

SEQ ID NO: 200049 - DNA, 33 bp, Homo sapiens
  chr5:136833978-136834011
  hyper
acacacacacaccccaaccccgcttcaggggtc

SEQ ID NO: 200050 - DNA, 73 bp, Homo sapiens
  chr5:137474816-137474889
  hyper
gggctcgagggggcggtagagcgggtggtgggggctcgaggggacggtggctggtgggcaaccacacaccatt

SEQ ID NO: 200051 - DNA, 61 bp, Homo sapiens
  chr5:137474919-137474980
  hyper
gcctctgtgaagcgaccctgtcccgcagggacctctctgtgcatagggtcaggctaattga

SEQ ID NO: 200052 - DNA, 223 bp, Homo sapiens
  chr5:137667464-137667687
  hyper
ggccaaagttacggcctctgagcaagaatatcaacagccgcaggcgttgaccattcaaaccttccgccagcccagtaacctatccccgctcgcctctaagctgcgtcagccaatctccgcgcgcgcgcccagggcctcatggcctatcgttgggctcgcagatcacctgggggcgtgtgcttgctctggaaatggtaagacttgccccgccccatagccagag

SEQ ID NO: 200053 - DNA, 113 bp, Homo sapiens
  chr5:137911538-137911651
  hyper
gtgcccgagtgcacgccagcgttccctggggcgagcccgggcgcgtgcacaccccccgggcgtggacgtgttcccagctcccgctcctggaggacggcgccatcttgtcttgt

SEQ ID NO: 200054 - DNA, 81 bp, Homo sapiens
  chr5:138088596-138088677
  hyper
agaagactgtgactccgggacacctgtgacactcttgaggggagcgtgcccagtacccctggtcgcgtctctgggattccg

SEQ ID NO: 200055 - DNA, 277 bp, Homo sapiens
  chr5:138089667-138089944
  hyper
aggcgttcctgccccctcccccttcccggccgctgagacttcccgatggggcggcggggacgcgggctcggcgaaccgggaggctggagcccgggcttctcccatacagcttcgccgtaggtgggccacacccgtgtggacttttggcgtgaccgtccacttggactcggggattactcagctttcctgggtttcttgtcggttggacgcacttagctttcagccctagttttcaggagtggcattagagaggtttttttttttttttaattgttgt

SEQ ID NO: 200056 - DNA, 338 bp, Homo sapiens
  chr5:138609205-138609543
  hyper
agttactgcagctcggcgaagaatcccactgcagggcactagggaggccggtcctgcagaggtcagcagtaggagtgactggcttaatctattcgaaaacctcctggaaagatcccgaagaccgtggaccaaggtgacctgcgtgggtgagcgatccattagccgaatgacagcgctgccgcagaaagccagaaaaaggatatgcgtgggaagcgcaaaagcgtgggctgggcctgcagcaacggaaaggcgccacgctcgtgagcggaaccagcgttccgggggcgctcagtgtgggcaggcaggaagcctggctccactaggacacacagattctc

SEQ ID NO: 200057 - DNA, 1063 bp, Homo sapiens
  chr5:139016856-139017919
  hyper
tccgtgtggtgagcgtgcctcctttgtggtgtgggtggcctatggtggtgcttcctttcacaaattgtgtgtccgtgtgacacccccccccccctcagccgctgtgcccctttgcgggtcagtgtgttgtttgacctcggccgcgggtgcccccacccctgccggccccgccgcccctcccccgcaccgtccgcccgcgccgcgcggcgatcgatcgccattgattgtccctgacgagctgctccactttccagccaatgtcaggaggggggatctccgccgccctggcggtgtcatttccacacactccctgggctgccgccagcgcgggcgcctcgaagagccggcctggatcgcccggagctcgggctggaccgcccacaccgcgcgaggaagcccccgatggcgtggcccgaccccagtctgccggcctgcccgccctaggcctctgcacccaagcccccttcccagcgctggtggatgttgtcaccacaggagtttaagctgggccgggtatggggagggacgctgtgtcgggtgcgccctgcgcttgccctggtgggggcgcggggctgtttccggcgggcggaggcgccagcaggccaactttgccgcggcccaaacagatgctaatgattttccgggaggcgccggttatctctggccccagccggccggtgtgctgggactgggctcccggcacagacaccacctcgccccccaccctcaccctcctgagccccacctaataaccacttgtccccgagtggacgggttgggggggcgtcggggggagtccgcaggctgccccgggtgtcctggaactgttgctgtgtgggattatttgcgcctcctccacccaggatgctaccgtctttctgagcacttcgcaaagccaaacacacacccgagcacgggaaactgaggttcatagaagctcggcccaaggtcatgccgacccattccctgctcagctgagtgggtcaccctctgaaaaccatcccgtcggaggacccgcagccccctgtccccttctcgctcaggggcctgagccagtttccag

SEQ ID NO: 200058 - DNA, 64 bp, Homo sapiens
  chr5:139039951-139040015
  hyper
ttcctggccaggatccggccagggcagattggaggagcctggtattgcccggcctgggcaagga

SEQ ID NO: 200059 - DNA, 205 bp, Homo sapiens
  chr5:139047725-139047930
  hyper
ctgccactccctccgcctcccagacctctggggccatgaatcatttatgaggcaaaaatgaaaccaattaaggacaaactttgaaagcctctaattgctgcgcctggtggcaccgtggaatgaggggaggccagccttctcggtgcggaatctccttggcccaggccttcccaggctgcccgtcccgccgcggctcagggcgcct

SEQ ID NO: 200060 - DNA, 459 bp, Homo sapiens
  chr5:139088871-139089330
  hyper
cggggaggcaggtggagctgcgtcctcatctttgttcccatctggagcgcgtttggcgcggcgtggcgggggcggggctgcgcccccgcggtgcccggagagactggcccgcccgcttatctgatctgcggctaattgaaactccctgctcgcgaaggtcagctcggtcccctgacagctgccgagccgagccgggccggatggaaaacccgggctgtgcagggcccggcggggcgctgaggggaggggttgtggggggctgcctctgcggcaaagtagacaaaggcggcccctccctccctgtgcgcgctgctgggggtcgccagaggtagcggccttcgccctcaccctgcagggtgttccagccggggtcacatggcctaaggctacagaggaggggggcgcccttaatccctacgtgcccgcccaccccgctcccacgccggggccctgtctggg

SEQ ID NO: 200061 - DNA, 61 bp, Homo sapiens
  chr5:139091111-139091172
  hyper
cctttccacttactgcggcaagtactgcgaggaagcttaaccctctcgctacttggagggt

SEQ ID NO: 200062 - DNA, 36 bp, Homo sapiens
  chr5:139175356-139175392
  hyper
tcctcctccagctcacggctccgctccctccctcct

SEQ ID NO: 200063 - DNA, 322 bp, Homo sapiens
  chr5:139175997-139176319
  hyper
cggcagccaccttcacgaggctgcagctttgaggatttatttctgtttccagtttcccaactttgacagccctgcttggcggccaggcctccccggctctgcagctagagcgggggctcgcacgggggcgtggcagtcagggctgaggaggcacataatggccgaggcggcagcgggagggaggggtcccaggagcgggctgctggggctgggtgcagagggagtccagactggggacaaccctgcccagcgggccccctcggaggaggaggtattcagctgttcctagaggatgcagggactccccggaatgatcactggg

SEQ ID NO: 200064 - DNA, 63 bp, Homo sapiens
  chr5:139227938-139228001
  hyper
ggaaggggctggcaggcaggctgcccaggctgccgccgagcgcgcaggtcccgcgccgcggtc

SEQ ID NO: 200065 - DNA, 122 bp, Homo sapiens
  chr5:139284463-139284585
  hyper
cttgcggtgggtctccacaacctcgaggcacccccggccgtacaggcgggttgcctgtgcctctcatgcctgcaggtctggcctcagccccgtgggataccgccatctggggaacaccttta

SEQ ID NO: 200066 - DNA, 636 bp, Homo sapiens
  chr5:139487907-139488543
  hyper
attgcagacatccccgcaccctccctcttggagacccaggcggtgcagcaacgttctctcccaccccccgcagcgagaaacgaatgaaccccctcctactttcaaaagagaacaaaataacacgccccttaagaaaagaggcgatcctacctccgcaggcgctggagaccaccagtgatgcgtttgcttagcaatccctgagccccatttcccctggccgccttcgccctggggcctgggactgtgcgctagacgtggctgacactccctgcacggcaaccctggaaggagggagaggaaggagagttctataacccaggcttcactgccaacccctcctctgttcggttccccccaccccactaccaccaaatgcatacacccgcccaggatgcgttgtaaaaacaaaacaaaaccaggaaaaaaaaaaaaaaaacctttggtgctgacatcgcagatgaagccgggcccaaagatgggtggcccgaacaaggcatttttactgccccacagcgctgggtcagctccacagctcctctgcctttgtccgagggcaaaaggaacggatgtgaagctgaggggtcttctctgtgagcggcggtgggccccggaggcgggctgtgatgtttgtagggg

SEQ ID NO: 200067 - DNA, 265 bp, Homo sapiens
  chr5:139554319-139554584
  hyper
ctcgggaagtaagcccccaaccctagttgggtctggaccaacaagacacgaggaggcagcagcccacagccgacccctcatgccacgcactgagcagggttccgcatggacgctggtcttgcctcccaggcgcctgaactagcggagttggggtatcgggtggagtctcggagaaccaatccaatctgagggggacgcctgtgggagtcctaagtatccagcgcagctgggaggcccacgttgggaagtcggagaccgaccccgc

SEQ ID NO: 200068 - DNA, 151 bp, Homo sapiens
  chr5:139725997-139726148
  hyper
gagctcaggagattccgccgggcaccgtctgccgcccgcctctgcgtgcaagcctggccgggacccaggcgcagctcgctcttcttgagtgtcttgtcttgctcactcagcccgcccgcgcggccgcccgaccccgcgcgcctaggtcagg

SEQ ID NO: 200069 - DNA, 422 bp, Homo sapiens
  chr5:139927089-139927511
  hyper
gtggggcctgggactttggacgcatttccagctttctctgaaccgggctggcttcctagcagatagggcgggaccgtcgggttgagtgacggccggtggcccgccctgggcgtgacgttgttctagtgttgttgccagcagctgcacgtggtcggctgagtccgcctcagactcagagctgcgctcctcgacctcaacgccaggcggttactttgctgctcctcccgctcgctatgtcaacgtccactagctgcccgattcccgggggccgggaccagctgcccgactgctacagcaccacgccggggggcacgctatacgccactacccccggaggtcagcgggccgggcaggggtccgcaggctgcggacatattagcgcgtgcgtgttgttgcggggcgggggtaggggagggacagac

SEQ ID NO: 200070 - DNA, 206 bp, Homo sapiens
  chr5:140011816-140012022
  hyper
ggctgcacacctgccgccgccagtgcggcgcacacgcctgtgggcgtctccattcctgtgttgcgcagcgctagattctggatggccgggaacttgtggggacagagagccgccatcagtccgcgttcgcccagtccaggattgtcagacaggtctaggctggtaagggccgggaaggcgcgaacctgttcgcaggaaaaggcagg

SEQ ID NO: 200071 - DNA, 125 bp, Homo sapiens
  chr5:140012520-140012645
  hyper
gtgcaccagcggcagcagcagcagcaacaagcaggacgcgcgctcctggggagagagcagaggtctaggaggccccatccaacccctgtggctcccgagtggcacgcgttcgaccccaagaccct

SEQ ID NO: 200072 - DNA, 132 bp, Homo sapiens
  chr5:140027367-140027499
  hyper
agcggaaaggctgcgaacgcaaagcagtgtgggttgattctgaggtgcactgtgggaaagagcttgtcgctgcggtgttgctgttggagactcgattgttggtgacagcgaaagaacgataacaaaatgccg

SEQ ID NO: 200073 - DNA, 274 bp, Homo sapiens
  chr5:140346034-140346308
  hyper
tccccctctgtcttcccttctgtttccttttccctccccctggagctgtagcggcagcagcagcaggaagccgagccgggttgagcgactcggaggcgagcggaggagctggaatatggggagtcagcgaggacggtggggccaggagcccttgggagggcctacggagggagcggccccaggcgctttctagagcgtgagcggtgggggagcaggcgcagggtggcacgagcggaggcggggcccgggcgtggggcacggctggggaagctgc

SEQ ID NO: 200074 - DNA, 232 bp, Homo sapiens
  chr5:140855366-140855598
  hyper
aaggaaagtgaagttcctggcgctagcgcgtgtcctgctcagagagcccggcgctagctcattcttcgtgcagttattggctgggactctgtgtgccgctgtcggccaatgaagacgctggagatcgggcccctgcccgtcccctttctgcgccccgggatgaggcagagactgaacagccggcgagcaaatcaacggcatccagaaagccatgtcggactcggcgcccagc

SEQ ID NO: 200075 - DNA, 102 bp, Homo sapiens
  chr5:140904508-140904610
  hyper
ctcatttgcttgacccgggtactggaaactgggcaaggtccattacgccacctgttgaccgtgtgcagccctcatcccacatgtcagcgggactccaccttc

SEQ ID NO: 200076 - DNA, 60 bp, Homo sapiens
  chr5:141030747-141030807
  hyper
agcggtgagggggcggggccgggggggtgctgagctctttcctctgttacttctggtttg

SEQ ID NO: 200077 - DNA, 216 bp, Homo sapiens
  chr5:141030884-141031100
  hyper
ccaggagtccccattcagggccaagctcacttttcggggcggcggctgcatctccgctccagcaaggcggtcagccactggactccggaactggaggaagccccgcccactatggagccccgccccaggccaggtcaggccccgccctctgcccgcccacgacttgtccggcgacgtcgcagggcgcggaagcgagagggggccaccgagaaacta

SEQ ID NO: 200078 - DNA, 80 bp, Homo sapiens
  chr5:141031150-141031230
  hyper
cggggcggacgcagcgtccgctgggcggtgggaagaaccccaggcatctgagtcaagacgcctaagttctatttgtagtg

SEQ ID NO: 200079 - DNA, 224 bp, Homo sapiens
  chr5:141255434-141255658
  hyper
cacccacctactcccgcgccccccaccccctacaaacacagctagacctccggcttgtcataaaaactttctgggcggccccttccctggcagctcccgagggttgacccagagcaggtgctagaagcctcgcggcgtcttcctgcacgaagcgacccaagcagccccagtccgcaccgccttggtcagcgggcgctcccagcacacacccagcgcgcggagcg

SEQ ID NO: 200080 - DNA, 990 bp, Homo sapiens
  chr5:141255691-141256681
  hyper
gttgcggagattagggggtggcgggggggacggcggcagtttcttgggctctggcggccccacccccaccccggcagcgcccagcctccaggaacccaaggcaaggctagggcgcggcgtggtgagaacgcgcttcggctagtggggggagcccttgcgccccccgcacccaggccaccgcggggaatccctcctccccggcatctccggcctcggcctagggtcccccgcaagccggagccggcgcgagcggcgcagcgggcgccaggagggggcggggagggagccggcgccggaatcacaaagccgcgaacccggctaggcggggacattctcataaaaccgaccctctcgtggcgagcagagggggttttttgccctacgctcaatcctccaaggcctcagtgccgcccccagtctttcctggcagaagaaatagtagccgaccactgttggggaaactgaggccagaattctgacttacagagggtagctggggggaaggggtgcgagaccacctcgcctacaaattctgctcctatgcctgccgcgatctccgttctggctccagggcctgcccgcgcacacactggcctacagcggggaccaggcggagggggcgctcaggtgtgagacgaacccaggtgtgcgggacccaccaaggtgtgtgggacccaggtgtgctggagacccaggtggctcagaaaactcagctaaatggctggaagagggtcgcaatcaccgtcccaggctagcaccctctacaaaggaacctggggccccagagctccggggaggcgggatggcttggccagccaggtccagcttgttcccggaacaccagccggttcggcccgggagtgggggttggggaggcgccgactgggaagccggcaggccggcccagccttcccgctgtgccgatatttacaataataatgtcgcgattaacgtggcggggcgcttggggctcgccgaacgaccccggcg

SEQ ID NO: 200081 - DNA, 780 bp, Homo sapiens
  chr5:141257230-141258010
  hyper
cagtgggcgctggtgtgcgggaggtatgtctgtgtgcacatatgcagggatgtatgtatgtgtgtatatatgtccacggtctggccctctgggtgcccgcgagaagctggaagcggctgagtgagccgaggtagttgcccaacaagtgtgtatgtatgtgttgtggacaacggtccttgcttgctccgtcctccgggagacccccaccaaactgggggccgcgcgcttccccaaacccatcctccacgccgcgcgctcctggagtctccttatccccgtctctccgagcgcgcccaggtttgggacgcggggactagggttctgctcagcaccccctcccctccctcggcttctcgccgcggacctgggaggacggaatccctcagccgcatcccctgctatgggctcccagcagcccccacctcagccccctcgcgccgagctcgtgttgggcccccgcggcctcgctccgccgagcgcccctccctcagctcccgccggccatgaccgcttcgggccccaagccgctgctgcctccaccgccgccggatccttacccgcctccgggcagcgccggccgcccgccccgctgtccatgagccgccgccggccccggcctgggctgcggctccgcacggctggggctggagctgcagttcgggctccggctccggctccggctggctctgggcgcagcagcccggcggctttgcgtccgcgccgcgctcccgctccccgagtgtgtgaggcggcggcggcggcggcggcggcggcggcggc

SEQ ID NO: 200082 - DNA, 265 bp, Homo sapiens
  chr5:141704448-141704713
  hyper
tgtaaatcctgaagccggggcaggttagccgccgctgtactcgcagacgccggtcggaggaaccggcaaggctccctgcgctccacagcgccagctccgcgctgtcagctcagctcgctacctccgcggcgatgttgcaaccactgcctgggaaaatggcttttttatgaatgggagggaagggagcgccagtgcgcacgcgtgccgttcgcgattctatgaatgggtgggcacaacagaccctgagcgcgcatgcgctccgctc

SEQ ID NO: 200083 - DNA, 84 bp, Homo sapiens
  chr5:141705342-141705426
  hyper
gtaccccccggggcgattctggcaactcagccagaggaagcctggccctcgcctcccagcgttccccccgccccccgccccagt

SEQ ID NO: 200084 - DNA, 341 bp, Homo sapiens
  chr5:141736299-141736640
  hyper
gaaccctcgggaggacgcccctccgccccctgcccaccccctcggcgggacatggccccgggccgggacgtccttcagattggtgcgccgccgccgcggccgtctcctcccgtcgggcggggtggggggtggtgagggacgcgatccaggtcgtggcctggcggcggctccggccacagcccccgcattccggccgcgcgcccccggaggtgacgccttgaggaagctgtatttttttgggggggagccgcagggaaccgttgggagaggggccctgtgtgtgtccctttaagagccggagcgctgcctccgcctcgcaggcgcccggagcctcacaaaag

SEQ ID NO: 200085 - DNA, 75 bp, Homo sapiens
  chr5:141931231-141931306
  hyper
cttctcctacactgacacgtaattgtcagattgttttatgagagcagcttcctgcccgcttcctgcctggcttcc

SEQ ID NO: 200086 - DNA, 32 bp, Homo sapiens
  chr5:141931539-141931571
  hyper
ccctcccctccggagctgatttggctcctgaa

SEQ ID NO: 200087 - DNA, 398 bp, Homo sapiens
  chr5:142781875-142782273
  hyper
gtttaagttgcaaataacccagccacattaattggccctaatgaaccatgccagagggtcttaagtggtattacaaggttgcaattatcaagtctgcaaccccaaacgtcaaactagcacttgtaaaaatcgcagcacaaaaccattacggttacagggggtctttttctaaaaggggccacttagaaacctcaggcgcgaattaacaacaaacgctaaagagcaagcccttgcggggcgggggtggagaagagaaaaaagtgcgaggttaaaagagaagtacgtccagacctgttgagttctctctccgacacgcccacttctaacagataacgccggccccggccgcagtctccaagttgcgggctgtcagccccccgcgtgtgcaccctcacgcg

SEQ ID NO: 200088 - DNA, 512 bp, Homo sapiens
  chr5:142784163-142784675
  hyper
ctcccgcccaatgtgctcacactcgaaggaagttgcacgccaaatgcaaaacctccagcgagctggatttctttgcactttttttttattattatgattaaggaaagcagggggcggcaggcttaaaagcaagttgcaggcgaaatagtaagttgctggcgaaatatagccccccttccgaaactcctgacctcttcttccaccccggccagggcccgcgtccaagttcccggtgcaggccccacccccgaatcttgacatttgctgccctcgactctgtgcgttgctcaccctatcacgttcataggacccctgcccctacaaataaaacaaaatacaggcagctttaaaatgccagcgttcaactccctacagatgttcctgttaggagcttccccctcagtccaaggggaagggaactcgtggtccgtcctgagaaaggagagggccgtggggcgaggggtgcccgtgcgggaagcccccgccccagctcccttccccagctcgccgcg

SEQ ID NO: 200089 - DNA, 46 bp, Homo sapiens
  chr5:142785272-142785318
  hyper
aaccctcagccagaagaatttttatgaagggcgctgagcaactcca

SEQ ID NO: 200090 - DNA, 55 bp, Homo sapiens
  chr5:143584779-143584834
  hyper
tggcaatcgcgtgcccaccgccggagcgcggcgtccccgtgcagtcctggcaacc

SEQ ID NO: 200091 - DNA, 437 bp, Homo sapiens
  chr5:145214426-145214863
  hyper
ggaaagctccacacgtcggtcatctgcaactccacggagctcacgagctgggattcccggaggctcttcctaaaaggaaagcctcttctttcagctggggcaggtgtgaacgtgatgccaagcacggccccttttcccgctccctgtaaagggagtcttcgaggaaatccctctcgacccacacatccctgaagcaaagcccgcagctggaaagagacactggcggtgccagcttccgcgtggatgaaggagaggagagaggggcaagcagcggaggcagcgcgggatacggaaggtggaagcggggcggtacctttcggagaaagctggcgaccacctgctcgaaggggtacttgtacacctggtgcacatccaccgagacccccatccccgcgcgccgcgggccccgcgcaccggccacgcctccgcgagctcag

SEQ ID NO: 200092 - DNA, 31 bp, Homo sapiens
  chr5:145215152-145215183
  hyper
tgcctgggagccatcacgccccgccccagga

SEQ ID NO: 200093 - DNA, 266 bp, Homo sapiens
  chr5:145583394-145583660
  hyper
agccgggctgggccggggccggcgaacgtgggcgttgggggctcgcgggggcgtgggggaggggaggtggcgtggggggcggcgctgaggggccgcggccgggaggtcccggcgacgccttccctgtagtactatcaccattgtggtgggggtgagggtgggagaggagcgctggggacggagaggcgccgtgaatatggggactgggggggcaggcaaggacagcgaaggcttttcaaacgcaaatatcggggtgctggaagggg

SEQ ID NO: 200094 - DNA, 94 bp, Homo sapiens
  chr5:145718301-145718395
  hyper
aatcggaaaggtctggcgggttggagccagcggggcggggcggactgggagaggccaggccaggcccgggtataaaggctgtggagggggcggc

SEQ ID NO: 200095 - DNA, 160 bp, Homo sapiens
  chr5:145718501-145718661
  hyper
ttcctggcaggctgcttgtaagatgagtgaagaagcaggtgggggagaggggaggcagcgagcgagagggcgaggggagcgcgggcgctgagcagcgctcacttggagagcggcaagcaagctagacaagcctgattccatgtcacccgctgccaccctg

SEQ ID NO: 200096 - DNA, 165 bp, Homo sapiens
  chr5:146256762-146256927
  hyper
ttcccttcctgcccgcacagcactagtgcttatgtcagaacaagctgggagagagggagagacgacaatttcacctcttggcaaagctcagcttgctgaacccttttgctttctgctggctgttgattcagcagaaactactgctgcagaattcataatggtgat

SEQ ID NO: 200097 - DNA, 148 bp, Homo sapiens
  chr5:146258482-146258630
  hyper
aagcgactagcttgcaggttcaggtggaacgcatagacgcgctcttccaacctcctcccctctcgcgccactcagctaagggccacgtctacgctagcacccagagcccctagctccctgcctttctccggacgcctgaacttgagaa

SEQ ID NO: 200098 - DNA, 129 bp, Homo sapiens
  chr5:146614481-146614610
  hyper
cccgcctccttccctggccaaggagccgcccctccggggtagctgtgcgctgggcggcgctcggaccccttggcagccgcaggtgcctccccagcccagcccagctcagtccagcgcagcccagcccag

SEQ ID NO: 200099 - DNA, 47 bp, Homo sapiens
  chr5:146832965-146833012
  hyper
gccgcgctccgccacccggaccccgggtctccgtccctccccgggga

SEQ ID NO: 200100 - DNA, 166 bp, Homo sapiens
  chr5:148033556-148033722
  hyper
ccgccgcgtccccaccggcacccgtgggctcctggggtcccgacccccggcgcacttgccgcacatacccgctgccagaggcgagggagcgaggtgccctggcagattcgagcggccacccccagccgctgagccgagcttctgctgccgccgctgccgctgcgct

SEQ ID NO: 200101 - DNA, 140 bp, Homo sapiens
  chr5:148520919-148521059
  hyper
aggacacaaggcctcgtccatctcacaaggcctcgtccatctcccatcacaccctagggcccaggcagaagcccggcggggcggggcctcggacacgcgccggtgcgtccagcaggtggcagcagcgagcggccgcgccc

SEQ ID NO: 200102 - DNA, 44 bp, Homo sapiens
  chr5:148521331-148521375
  hyper
gtccggggtgcgcgcgagcaggcgctgccaaccccacttctgcc

SEQ ID NO: 200103 - DNA, 272 bp, Homo sapiens
  chr5:148650951-148651223
  hyper
gaaggtgctcaagaaagacccgcggcgaatggagaagacaagcccaaagccaggaaatgggtggcggctgcagggaagggggttttgattccctaggataaaaacgcgctccaacagtctccgcattccggcatggagccggctgaggggtgcggtggtaagaccccatcgctagcggagtgcaagcaaagccgcacacctcctgggtccgggctggggcaggccgcgcgggcgcgggaacgaacgcgtgcggacggggaaaagggtcctcc

SEQ ID NO: 200104 - DNA, 106 bp, Homo sapiens
  chr5:148724797-148724903
  hyper
caagtaagctccatgcgggcacagctatgatctgctttctttgctgccgaccctgcgcccagcacggagactgtagttactactaggacctcgcctacccgcggaa

SEQ ID NO: 200105 - DNA, 148 bp, Homo sapiens
  chr5:149379996-149380144
  hyper
cctagatccctcacgctcagcacagccccgcccctgttacctgaacgccccacagcagtgcccgggggctgagcggccggggcgtcccaccgccggcagccacagcttcctcctccgcccgggacctctggccggaagcagtccgttc

SEQ ID NO: 200106 - DNA, 184 bp, Homo sapiens
  chr5:149681825-149682009
  hyper
ctcgccagcctccccgggcccgtcggccacgaagctcggcttggcccagtcccaggacaggtagccgaagctgagcaggctgaccagggagaagccagtgagggtgtgcatcgccaagccggcccgcgcgtcccggcgcgccgggctcctggggcctcaccacctcgcgcgcccagggcgcacc

SEQ ID NO: 200107 - DNA, 54 bp, Homo sapiens
  chr5:149682691-149682745
  hyper
agcctctctgagtgccagccctggaaggaaagcccatcatttcctagtccaacc

SEQ ID NO: 200108 - DNA, 107 bp, Homo sapiens
  chr5:149829576-149829683
  hyper
ctagacagacttccgccatcctgactcccgccctggcagccttggagcggcagcgccccttgtgtggagcaggggaataacaacaacaaaacggccttaattaaagc

SEQ ID NO: 200109 - DNA, 32 bp, Homo sapiens
  chr5:150400618-150400650
  hyper
atgtcacctccgtgcctgagctgctccccttc

SEQ ID NO: 200110 - DNA, 289 bp, Homo sapiens
  chr5:150536746-150537035
  hyper
cgcaggcagccctcccccgacaccacacacaagccattttataagcagctggagggtccaacgctcttgctctcagtcttgggcctcagccacacccttctctgcgggtcctttgactggcgtccagctgaccccaaccccggaccttcaaagtctcttgagcccccccaaattaaggccggcaggaccagcccctggctcagctccggcgcccaggaccctcaaccagaccctctgcagcaacgggactccctcccctccccctagccagggcgccctccgcccgcgc

SEQ ID NO: 200111 - DNA, 514 bp, Homo sapiens
  chr5:150603038-150603552
  hyper
ccccagggatgctgatactgcgagtctgtggaacactcttcgagcagccctgagattatcagcctttaacccccggggggaggaagccgaaggcccagagaggtcaagtcacttgtccatggccacacagcgaacagccccagaccgaaagcagagggcacctgccacagacacacgacatctccccacccgaggcagcgggaatcagctgcctttccctggcccgggtgccgtgtttgtaaactcggctgcttggtgcggctcgggccggggtaaagggcgcctcccagcagagcctccctcgtctctgagctggcctctccaggttctccgtccggtatcccgggccgaccagagagagcccggggcgccgagtcctctgcggcggagcgattccgcactcccctctcctctgaaagcaaacttctccgccggcgccctttacctttttcgggggtttgcagctgctcagcctgctgtgtctgcagcccatcctcctccgggggctcccgga

SEQ ID NO: 200112 - DNA, 184 bp, Homo sapiens; identical to SEQ ID NO: 4325
  chr5:150603589-150603773
  hyper

SEQ ID NO: 200113 - DNA, 119 bp, Homo sapiens
  chr5:151066500-151066619
  hyper
gtttagagacaggcaacaggaaaccactcagagctctgggctgggtctatctcccctccaccccgtggtccctcctcctcctgtctcctccttcccccggcctcctccttctcccatag

SEQ ID NO: 200114 - DNA, 293 bp, Homo sapiens
  chr5:151150270-151150563
  hyper
cgctccacatgcttcatttccaaaattctcagcaaaactccgcgggagaccctggtcacatgcctggaacgagaacaaaccggggcgtgtctgtgccggacggctgggaaccaaagctatttccatagaaatagggccggccagccttgagttgtagccccgccagtgcctgaaacgccaggaggaggggacgagttgccttttaaaggcgtagcgacgagaataagcccccacccgcggcaattcgaggctgaacaatagtggtgcagctcgggacgtggtgcgagggccca

SEQ ID NO: 200115 - DNA, 151 bp, Homo sapiens
  chr5:151150681-151150832
  hyper
tcaggccttccaccggcgaccttccggcgggagcctgcgggcggcgcaggaacgaccctccttcctctgccccgcagcagtgctgagtaatggtgagagcagcaaggcccttggccgccgcacgtaagaaaaaagttgtaataaaaagaaa

SEQ ID NO: 200116 - DNA, 41 bp, Homo sapiens
  chr5:153854289-153854330
  hyper
gactaattcgtttccgtttttgttcttccccgttcccataa

SEQ ID NO: 200117 - DNA, 55 bp, Homo sapiens
  chr5:153854360-153854415
  hyper
agaactttgctcttgttcttgaaatacattctttatctgccggcttcccttgatt

SEQ ID NO: 200118 - DNA, 240 bp, Homo sapiens
  chr5:153854935-153855175
  hyper
ttaattagagaagacggcgtcggggcggatcatatggagggacaagagagaaagagccagatagggaaatggagatagggctgaggttctaaattcgctccaaaagggtggaagagtgcgtctttgagcccttgggttcgacagtccctccttcttgcatgttgccgccaagggccgccctcggttgggctgggggtggatatatatatatttctctttctcttaatgtattaaaaaaaa

SEQ ID NO: 200119 - DNA, 52 bp, Homo sapiens
  chr5:153857881-153857933
  hyper
gggggagtggctatcccaggttttacgctcagcccgcgccactctagtccgc

SEQ ID NO: 200120 - DNA, 92 bp, Homo sapiens
  chr5:153862577-153862669
  hyper
ctgggagctccaaggttctgtttgcagacgggaaactagcccagagaggggaaggaactttcctaagggcacacggccgatgagtggcagac

SEQ ID NO: 200121 - DNA, 165 bp, Homo sapiens
  chr5:154317541-154317706
  hyper
gtccctggactctcgcctgcgcccgggcccacgcggacaaggaagacggaggtccgcgcggcgaagccaaagaggcccccgggcacggcatcgctgcagcgggcgcagtaccagttgggggagggcggcagcgtccgcggctcctgccccataactacaagccgt

SEQ ID NO: 200122 - DNA, 168 bp, Homo sapiens
  chr5:155107916-155108084
  hyper
atgctgcgggagctgcggccgccttccgctcagcctctggtcccaggcgagcctggcgagccggcgaagcaccggcggggaggaggactagaacaggaggaggggcacggcggattgaagcgagctgggctgtgagcaagggacacccacagcctggagaaacagccc

SEQ ID NO: 200123 - DNA, 255 bp, Homo sapiens
  chr5:155108849-155109104
  hyper
cagcataagcgcttagagatccgcagccgcctgggcgcgctaagagatcgtgggcagacctagcccttagggcagcctaagcgcgcttcactaaagaaaaaagactgttggtatattaaagaagtgtgtgtgtgagagagaaagagacagagaaagagacagagagacatgggtgggggcaccaggaaaggtagcccgagtaggaggtgctagtgaaatttatcttttgctgacggatccagcctccggaatgcc

SEQ ID NO: 200124 - DNA, 240 bp, Homo sapiens
  chr5:157001858-157002098
  hyper
gaaactgaggaccaaagaaggcggccgtcgggttggcgtggaaagagagccctggtttccagtgccaccgcggacctcaacccgtggcgtggccttgggcaagtcctttcccttttgtgggcctcggtttccccatctgtgaaatgggtgcgtttgacttggccttcagtagggctcctgccagctcggggatccgaagtgtgtggctgcagatacccagcgagccatcccctagccaag

SEQ ID NO: 200125 - DNA, 243 bp, Homo sapiens
  chr5:157002204-157002447
  hyper
ggatgctcggcgttggcgagtgcagcgggcggtagagagaaagacagagagagaggcggagcggacacgagggaccgtgagaaaacggaggaggataagccccgagaacggcggaaagagaagccaaaagcagaaaaacagaggaaggagaaggcgagaagggaaggctagccagtgagcggaccggctgttttctggctgcgccgggtttccccgacctctgccacctcccagggcgcagaa

SEQ ID NO: 200126 - DNA, 287 bp, Homo sapiens
  chr5:157002817-157003104
  hyper
ggctcccagccctctgccgagacgctccgcctccagccccgcgggcctccgccaggggatggaggaggggaggctccagcccggagggggctggagggaggggccggggaggagctggcgagactcgggggagcggggctggctcaggtgagggagaccgcggggaagggagaatccgagccccccaggaggagggatttgtggtggacgcggcctgtagagggtcggggactcgggcttctaggagttaaactggacccctctccgcacagcggcccgtttactgt

SEQ ID NO: 200127 - DNA, 64 bp, Homo sapiens
  chr5:157285888-157285952
  hyper
cccccctcccccacgtgggcctcggccacaactgccccccgatactcacgctttgtccaccagc

SEQ ID NO: 200128 - DNA, 108 bp, Homo sapiens
  chr5:158526600-158526708
  hyper
tttttttctcagacgatgaactcgcacttagaagatcaaggcgggctggaaagcaaatttttaaaaaatgtaaacctctgctcaaaactgagcgataacccgaaaaaa

SEQ ID NO: 200129 - DNA, 1211 bp, Homo sapiens
  chr5:158634801-158636012
  hyper
catcatctcccaaaccgcaaagacagggagtctactctgaatacaaaggccatctttcaacttaaggaacagagagaggaaataaaactgctacctctgccatcggccgctcagcctgggtcacgactgcagcaccgacagctcattcttttgggcatgattcaagattcagtaaaactgcacactccgtattttaaaaaataaaaagacacacagtcctctccttccctttcagactagtttcctctttactgcagactgcgacgcaaggccatccactaatctttgatgcctgctcactgcacaggccccttcctctctccccgcacctcctcccacaacgcctgcagatctcagatgcgtttgaactacagtaaccccaacccagctcgcggcaagcaggcagcgcagcagcagtagcagcagcaaccgggccgccgccgccgcggggctaagagattacgttcagcaaaaactcttccaggaaagaggctcgagagctcccctcctatctcgccaagggtgctgactctgtcgcgccacgccacgtaccaaaaggctcgcgaagaaaaacgcgggcgaagttcagcatccccgaacagaaagggaactcattccagaaagggggttcacgggtctgagggtccttgggtggggaaagcagtattggagggagaagacagaagggatggcaagacagaggaaaccacggggacaaaaaggaagggatgaggagccctcttactataaaagggactgacggacgggatgcagagcaatgggcccccctcgaaaaatggactggcaggcccttccgcacccccaaacaacctcgcaccacctgaaagcggggagcttgagtttggggctgcgtagatcaaagcagggtaagacgaagggaaagagggaggggagcttggaagcaaagtgaacaaagaggcaaaagaggcaaagttggaaatggaaacgagaaagggagctggaaaggggccgctctggaagggtcttgaaaaaggcctagaaatgggatgctggggaggcaaagggggacagccccgaggaagggcatctcaggaatgtaagggagcgctccaggccctgggaagaggaagggatgggagggcggggaggcagccgaggcccgggagctggaacagagggggctttgcgcggggcccaggaggggagagcagggtcggagggaggcgacc

SEQ ID NO: 200130 - DNA, 82 bp, Homo sapiens
  chr5:159343305-159343387
  hyper
cccctgcccccgccccgccccccgcagagggcgcgccctgggagcggcgggggacgcggctggcttcccggcttgcggggtg

SEQ ID NO: 200131 - DNA, 142 bp, Homo sapiens
  chr5:159546857-159546999
  hyper
cacttctttcaaaggcggccgaggggaggagtaacaagggaatgcgggaggggaaccgcttcccaagaatctctgcgcagagatccttagaataaatgttatttctaggcgcggacttcttgcggccgcgtgtgggcacgac

SEQ ID NO: 200132 - DNA, 61 bp, Homo sapiens
  chr5:159738988-159739049
  hyper
cacgggcaacttcagcggccagagcgtaccccgggctccgacccccggtgtccctatcctc

SEQ ID NO: 200133 - DNA, 247 bp, Homo sapiens
  chr5:159739186-159739433
  hyper
caacaacttgcagaatttttatcttcccttttgcaaaagttgcagagaaagttgtcaactccgctagctcgctcgaggctggggctctggcggcggccacaggctcgccgtccccaactcctcccccgccgcccagcctttgtcctgctcccacatcctgccctcgagccggggcgaaactcacgcatcctctctgggcgtggggggctgcgagcgccgggcccctcccagtgccgagccagccgtg

SEQ ID NO: 200134 - DNA, 173 bp, Homo sapiens
  chr5:159826416-159826589
  hyper
tctttctagccactgcgtatgcaagatcatgataggcgcaggtgtctggggaggcagagcatttaaccattacattttacagttaaaatcaatagccaggagaatgggggcaggaacttggtggctgggcagacgctccaggggcaaacgcctgggatcgtggctttgtcact

SEQ ID NO: 200135 - DNA, 221 bp, Homo sapiens
  chr5:160975998-160976219
  hyper
ctcctcagggtcctgttccgtgctgcactcttgacccacttaccttctgataacctttcccctcccccaccttggtcagagggtcatctgggggtagtttgtggggatgactccgggggaagtgtggaggcgggagggctttaaaaggggggaatccgacagctcctctgggatggatgataaacaggaaaagaaagccgagttccttcaccgaccaaggg

SEQ ID NO: 200136 - DNA, 138 bp, Homo sapiens
  chr5:161275675-161275813
  hyper
attattatttttttcccgctgtctttcttcttttcttctcctctttcttaggcatatttgaatgtattccgcagggtgggtggtggcatgttgttttggtcttttatttatttatttatttgcaagggggagctgggg

SEQ ID NO: 200137 - DNA, 328 bp, Homo sapiens
  chr5:162887214-162887542
  hyper
tggccgtttacggcaccggcaggccccggatgaaagaactgaaatccagaaaagttcacatgcaacgaacaatgggacagaattggaaccagtgaagccggaactcactacaccgtcccctaagtgacgccaaaatgcactttctaacgtctccggagggaagtgcgcttgcgcaaatgctaggttacacttgagtaactccgggaatgactgggtgggtggggcggggaacagtaacggtctcctattggatggcagcctaaactcgcaggccagctaattggacgcaatcagaacccagcattctttcttcgtgttcctgtgcggg

SEQ ID NO: 200138 - DNA, 118 bp, Homo sapiens
  chr5:162930156-162930274
  hyper
aacttctcattgggtattttcgagactactacggggaatcagctaccagcttactgccatgtggagaactgcacgagattccgggattggaatcaaaatgctaatttaaaaggtcaag

SEQ ID NO: 200139 - DNA, 63 bp, Homo sapiens
  chr5:162930320-162930383
  hyper
gaagcgaacaaagacccagcaagagaaggcagaggctaagacccatcccgtatctgctctcct

SEQ ID NO: 200140 - DNA, 48 bp, Homo sapiens
  chr5:162931957-162932005
  hyper
aattatgggtaaagtccaaggatctgcgttttgaagaggtacctaagt

SEQ ID NO: 200141 - DNA, 163 bp, Homo sapiens
  chr5:166406476-166406639
  hyper
aagttatctatgtagatggtgtcagggagcgaagctactgaccgagctgctggtaaatgtttttcacttcttactctttaatgcttaaggcttttttccccttttctttctttcttgtttcctttctgttgctcctcattctgcaatcgctcctgaatcagct

SEQ ID NO: 200142 - DNA, 152 bp, Homo sapiens
  chr5:167000608-167000760
  hyper
ctttgatgcacatacgttgtcacaattcattgactctcctctcttctctgttcttacactcaagcctagcggtgctttcgccaggcagcagcagcctctcctgcgagttttaggcatgtatgcagctcagtttgatcgagcgttccttttct

SEQ ID NO: 200143 - DNA, 223 bp, Homo sapiens
  chr5:167718508-167718731
  hyper
ccctggcaggggcagcgtaagggtggccggcggctgggactgtcccacgagggggcgcgtctcgggccctaggacccgccctcgaggcgctgcgcgcggggaggggacccgggaacccaggcgcccggcgctccgcctcccgtttccggggcagcgcggttacctgcaccgcccgagccgcacctggcggaggcagaagtcacaaacccggcgagctcagagc

SEQ ID NO: 200144 - DNA, 377 bp, Homo sapiens
  chr5:167718952-167719329
  hyper
cgggcggcgccgggtcggggctgcagggccgcatggacagcggcgccaccccggccggcccctactagggccccccatctgcgggcgccaccccccggatcatggtgcctcggcggccgcccgggctaagagcggccggctggagccgctgagcccccgctgcggccgggagctgcatgggggagcgccggcagcgcttgggaagatgccccggccggagctgcccctgccggagggctgggaggaggcgcgcgacttcgacggcaaggtctactacatagaccacacgaaccgcaccaccagctggatcgacccgcgggacaggtaggaccctggaaccctcctccgtgcccccacacccccgcctgggcccccac

SEQ ID NO: 200145 - DNA, 101 bp, Homo sapiens
  chr5:168727254-168727355
  hyper
gtcagcgggccctgcgtctggaaccctcacccctggagaggcactgctctttgcccatcgctgggggtttcgagacctctctttccagatctgaccaagcc

SEQ ID NO: 200146 - DNA, 171 bp, Homo sapiens
  chr5:169930945-169931116
  hyper
ccgtgcagccctcgcccccgccccgcccctccgtagttgcccgcccgccgccccctccgccgccccctccgccgctccgactctcgccccgagcgctggcagcaggcagcaggcagcaggcgggcgcgctgtggctccgcgccgcgcggtccgggctctgttcattcatga

SEQ ID NO: 200147 - DNA, 36 bp, Homo sapiens
  chr5:169931484-169931520
  hyper
caattcagagtagacaaaccacggggatttctttcc

SEQ ID NO: 200148 - DNA, 64 bp, Homo sapiens
  chr5:170289638-170289702
  hyper
gcctcttcggaggaggaaacccgggccgggcgcgggcgcgggcgcggacgcgaggatcgcagag

SEQ ID NO: 200149 - DNA, 42 bp, Homo sapiens
  chr5:170289734-170289776
  hyper
tcgggctgctctgacatccccgttcagttattcagcaaacat

SEQ ID NO: 200150 - DNA, 53 bp, Homo sapiens
  chr5:170737718-170737771
  hyper
ccgccccaaacacacaggcacacacacacacacacacacgcgcacacacacgg

SEQ ID NO: 200151 - DNA, 720 bp, Homo sapiens
  chr5:170845924-170846644
  hyper
cagctgggatcccgtgaaccgaccccagagccccggagggggcgaggggtgggaaggagagatgcccgggagcccccttcgcagcggcagggacgtaagaagaggacgggggctcacttaagtgggtagccagtcaagagggtggctgggaaactccacgatcgcagggcgggtaaaagcgacccccattcagtggagccgccccggggctgggtttgacccgcccctctcggctctccactagagcgctggtgagtgagtgcgagtagcgaatgtgggcaggtgaggacgttccgtacctaactgcgttcttggggagcatcgcctgcccaatttgggcaacgtttgcgcggaggagcggtcactgcgctcgggcgcagagctccgacggcttccagcgctcaccagcttcagtctcgcgggtcctgcccctttggagctgccggtcccgtctccgagagtctgagcgcctcccctccaaccccgagccgccaggagaaggaggaggaggcagcgagaggccgcggcaggcaggcgagcaggcagggccgcctttgatgtgggctgggcgcacccaggcgagctgagcgcccgtccggccgcgccccgaggggggagcccccaggccccgcatcctcattgtgccggctcgggcccgggcccgcccccggccccccgccccctcgccgcccgcgcgtagaaaacgccccggccgccgcc

SEQ ID NO: 200152 - DNA, 146 bp, Homo sapiens
  chr5:170847120-170847266
  hyper
gcggcggaggcgcccggtcccggccgcgcggagcggacatgtgcaggctgggctaggagccgccgcctccctcccgcccagcgatgtattcagcgccctccgcctgcacttgcctgtaagcgcccgcgcgcggggctgcccacctt

SEQ ID NO: 200153 - DNA, 113 bp, Homo sapiens
  chr5:170847375-170847488
  hyper
gtcccactgaccgcttctccatctgtttcccgcaggtgtttacacttcctgctgctgtgcttccaggtacaggtacgtgggctcctgactttgacctcctcccgcccctgcct

SEQ ID NO: 200154 - DNA, 85 bp, Homo sapiens
  chr5:171541758-171541843
  hyper
ttacaggcgtgagccaccgcacccggccggttatttttattttcttccgttttttaggaacctagagacgcgtgcccatttgata

SEQ ID NO: 200155 - DNA, 283 bp, Homo sapiens
  chr5:172068385-172068668
  hyper
gccaacgccgcgcccgacgcagcgatgggcaacacggtgcaccggaccctgccaggtacgccggggagccctgcccgggaggcgggcgccgggcttctctcctccgggggacccgctgggtgactctggagagctaccccacggcccttggagccctcggctcgcagcgggctggagtctccggtacctcccggacctcagctcggcgcgcgccccgcggctgggctttgcgccccgggagggcgggtaccgcgtcctggttaccttggggaccccagtcctc

SEQ ID NO: 200156 - DNA, 161 bp, Homo sapiens
  chr5:172197154-172197315
  hyper
cctactaacctgatcgtagagtggggtactgcaggaactgcacccagattccgcgctgtcagggacgctagtactcaggggaaggctgagccccatgggggtcgactgtttgctgcacagctccgggcaggaagccgaaaacgcttcgtatcctcctggga

SEQ ID NO: 200157 - DNA, 275 bp, Homo sapiens
  chr5:172234232-172234507
  hyper
tactattttttaaacgtcaattgatgccaggaatattctgccagccctccaagggtggtttcagcaggcttacttcctggtcataatcacttcctccatccccggcttctgtcatgctcagccctgacctcaccaccgacccgccctgcccctcccattagctgcgtcaccactgcctgcccccacgtttagcccagcccccagcccagatctcagccttgggtgaaaagtgtcagcccgcacactttctgttttacctccggccgctcttttaa

SEQ ID NO: 200158 - DNA, 446 bp, Homo sapiens
  chr5:172385502-172385948
  hyper
accttgcatagaataaaccccgtcggttcttaacccgaagagagtcgagacccagagcccttttccttccctgccgccacggtgcccacggagggggcgtggttgatctccctcacagctccgtcgggaccagagacccggggaccttttacacccagggtccgcgcaaagtgtcggcctagccagtggttgggtggcgcccgggcctccaggcagtcttccaggggtcggcgaacgaaacgcggagctcgggagcgacccggcggggccaggcacgggcagaagggccaagagggccacaggtgggcgcggagcggccggagtgggcggggactggatgagaggggcggggtctaggagagaggggcggggcggcggccacaaacccgcaggcacgccgccggccgccgtttagtcccagagatagaaaaaagtagaggtaggag

SEQ ID NO: 200159 - DNA, 206 bp, Homo sapiens
  chr5:172410475-172410681
  hyper
agtgccaggcacacgggaattcagaatagtaagggacaactattgttaagttctctatgtctgttgcataagtagatgaggctgtagataactacactctttgtctaaaagggccaagttctcatcagaacactttgctgagccccgggtgaccgaatccctagctctggggtgagcgacatgcctccaaggagctgcagccagga

SEQ ID NO: 200160 - DNA, 197 bp, Homo sapiens
  chr5:172483102-172483299
  hyper
ctcccatcctgggcgtgctgccgggtatcgcagacggcccacgcccacactgcagaggccggcaccgagcccccgctccgccctctcttcctggtttttcccggcaacccgcccctccggcgacacgtgacaggggtgcccggccggactcagcccctgattggccgggctgtggaacgcctcgcgattggcccgag

SEQ ID NO: 200161 - DNA, 209 bp, Homo sapiens
  chr5:172571552-172571761
  hyper
cggctccccaagacgtccacgtccggatctgtaaccaagagattgtcaaatttgacctggaggtgaaggcgcttattcaggtactgatcccgggacccctgccgggctccagcagccctaacccaagctctgctggtctgtgagcttggcagtgtcactcccgaactttccccacttggtttcccagaccacaggctccgccccatggt

SEQ ID NO: 200162 - DNA, 173 bp, Homo sapiens
  chr5:172656561-172656734
  hyper
gggggtcgccatgtaaacacggggtgttgttactttaggatacttctgaccctgtcccggcctgagtcctcgctccctgactcagcatccacgcaggaaagcctcgccccagccaggcaagggcagtccctgccggctccttgagttctgccgtctacagcttgccccatcat

SEQ ID NO: 200163 - DNA, 178 bp, Homo sapiens
  chr5:172664032-172664210
  hyper
gcgccagccgtcagtaacaggcctgggctgccacgccgaaatcacgcctcgagtttctgagccagggactactgggggtctggaattgttagtctagtctgtggaggatgccttttcttaaatgtggggcgttcaaggcccaggaaacctcgtccccccacctcttcacctcccaacc

SEQ ID NO: 200164 - DNA, 162 bp, Homo sapiens
  chr5:172665286-172665448
  hyper
atccaaattccagggtggctcgagcgcattctccgtgaataaattattattaattgaaaagcgatcggcgcagccggagccggcccccctttcgtgcaatcagcagggctggtcgcaaaaggtatatatgattaattgaaagataagctggaactatcaccg

SEQ ID NO: 200165 - DNA, 209 bp, Homo sapiens
  chr5:172665949-172666158
  hyper
cggatttttcctgcctcgggactcgcctcattcaggtggctcagctggcaccaaatccttctcatttccacgcttgttcagtgcccacggggtgtgccaggcgctctcacggatctcgtcacggatcctcttattccgactgcaggcctgaggagaatgaggttcagagacgtggagtaagttgctcagggtcacacagatgggaaagg

SEQ ID NO: 200166 - DNA, 151 bp, Homo sapiens
  chr5:172672326-172672477
  hyper
ggtacacacaggcgccctaagtgcacagtcactttctctgtgtgtgcgtgttttacgcgcatacggtgaaaaaaaactttccaagggcacagaagaccatactgtgggtgcccctcgccgcccccagcgtccctgccgcactctggagctg

SEQ ID NO: 200167 - DNA, 133 bp, Homo sapiens
  chr5:172721006-172721139
  hyper
gtagagacctggccgtccgtgtgaagaggtcttcaaacccgtttggcgtgaggattcccctgcctttgcccgcttgataaaaaacgcgcggtgttctctctccatggccgccaggtggcgatgtggaatagga

SEQ ID NO: 200168 - DNA, 214 bp, Homo sapiens
  chr5:172755663-172755877
  hyper
gtgtgagcgcggccggagatgcgtgcgcgtgtgcgggtgctccagggcaatggtcgaaaggactgtacaatataagagcgaatccaagctccagttgctgttaaagggggacggtgtgctctgggacagtgtccctggggcccctggctcgcgtcacacccacatcgggttgggaaagtttcctctttccgccgtttggaattcagtgagattc

SEQ ID NO: 200169 - DNA, 72 bp, Homo sapiens
  chr5:173043700-173043772
  hyper
ttgcattgtggggcgggaagttttctgtggccatctccggcgttctttataggcagcggcctagccgagaga

SEQ ID NO: 200170 - DNA, 192 bp, Homo sapiens
  chr5:173345561-173345753
  hyper
catcgtcataggatcggactgaagcctttctccctctagcctctgaatggaaaccaactcagttcaaactaaatgcatcttgtgcatgggccagatcctcatctgccccgtttacttacataacacatactagtcaatcgaaaatagtgatcctctgccctctacctgccacacattcgtgattgaatattt

SEQ ID NO: 200171 - DNA, 471 bp, Homo sapiens
  chr5:174119516-174119987
  hyper
tcctcctgtgcagacgaggaaactgagtcacacgagaggaagcaattgctgatagttcacagttgccacgccctcctcatgcctttacagacatcccaggcctttgatcaaactagggagaggttagaagaaaggcgagacgggcctcagaagaatttggatctgttgaaaaaggattttaggacaagaacgaaacaagacgcgttttcatgggaacgcaaacccagtaacttctcagagccagggcttcgcagagaaactgcatcaaaaggaaaagagtctggtcccaacctttatttctcccaaggcatgaaactcctgatttcaaaccacttctctttgcctctgaaagaaaacaagaaaaagatggggctgtgtagttcttccaacagtgaaaaaaagaaagaaaagagagaagaagaaaactgtttcgggtttcgaaacagaaagggcctccttcccctttatcga

SEQ ID NO: 200172 - DNA, 233 bp, Homo sapiens
  chr5:174120134-174120367
  hyper
ctcaagtctcagggcgaagtcctgctgctttgagacgtttacagctttgattgaggaaagctattcagggctggggcgaggatctgtttgttttcaggaggaagcctctgtgagcctgccccctcccccctgtgtttccagagttgctggagagataaaagccatacctccttttgaccttcattggacagtaggagccccgactcagcgtggaataataaaggcatatcatg

SEQ ID NO: 200173 - DNA, 100 bp, Homo sapiens
  chr5:174120406-174120506
  hyper
ctctgacttaaaggggggtgtcgggggctggggcagggaatggggaggggttcggtttatttactcaagcacctactgtgtgctgctgatggggaacttc

SEQ ID NO: 200174 - DNA, 206 bp, Homo sapiens
  chr5:174150698-174150904
  hyper
ccccattaccctccgaggcaaacactggcattcaaacacgcacgacaaacacaggctcaaacaaactcatgaatgcacacttgcactgtcttgagaaaaaggtcggatccggatcgcgctcagaaaggaggttcaggagacaagtacagagatttcaactttctaaaagtgcgctggatttgctttctagtgagagagatggggac

SEQ ID NO: 200175 - DNA, 179 bp, Homo sapiens
  chr5:174151264-174151443
  hyper
aaatgggactcggcgaacttccgctttaaataatcgctcttaattaggtctcgggcttttcagtttcggcgtgattataacccttcagggatcgcctaataacaactctgctgactgctcctgtaattaactcctaatttatttcaaacaggaaaaaaaaaaaaaaaaaaaaaaaggag

SEQ ID NO: 200176 - DNA, 815 bp, Homo sapiens
  chr5:174151769-174152584
  hyper
ggagcgccgcgtcaaggtctccagcctgcccttcagcgtggaggcgctcatgtccgacaagaagccgcccaaggaggcgtccccgctgccggccgaaagcgcctcggccggggccaccctgcggccactgctgctgtcggggcacggcgctcgggaagcgcacagccccgggccgctggtgaagcccttcgagaccgcctcggtcaagtcggaaaattcagaagatggagcggcgtggatgcaggaacccggccgatattcgccgccgccaagtgagtgcgcgccggggcaggagtaggaggtagcgcggggtactggagggagcggggggcgggtgttccagggctgagggtaccgagacccttctgcgtgcgctacactcccgggaaagcaagcccagggcctctggactcctgggtgcccggggcgttcggcgcgcccagtgcgccgtccgcatccaagacaccctctgggtaataaccgcgctgtgtgtgtctgagactccctcgacatacagattgttttttcaagagcgaaccccagctgggtttacggggtcgctcggtggtccgtttctacagccctcggccctgcgctctggccacttggcttgtttttgtttcactgttccccggagtctctgcctggggagtgaaggagttggatccatgttcagtgagcacttggatgtaccaggaacgagacaggttcaaaactcaaccctgagagttgtgcccccattttaaagatgagctaactgggcttagccagacattgaggagaaaccattttctttcgtgagtcccgcgggtgtc

SEQ ID NO: 200177 - DNA, 92 bp, Homo sapiens
  chr5:174162402-174162494
  hyper
cgccaggagcggtgcgcccagcgcagggggctcctagtcacctcgacccttccggcgcccttccctccttagctgcacctggcaagccagca

SEQ ID NO: 200178 - DNA, 101 bp, Homo sapiens
  chr5:174162904-174163005
  hyper
gccgagcagataataacagccccctgtaactgagcgcttcccaagtgccagacactgttgctcggcgatttacaccaatcaactcacgggtgctagtgagt

SEQ ID NO: 200179 - DNA, 207 bp, Homo sapiens
  chr5:174178424-174178631
  hyper
gggcgcgggcgggagcggaacccgcgttaattactgtacgtttccactgtaaagagtgtcagccggggagcggggccgccgcgcctgcccggccccggcgcacaaaagcttcatatattctgaatgaaggcgaatcgcagcctcggcctccttgaaaagagccgtgagggagacttaattctctccctttcagctgtgctcagactg

SEQ ID NO: 200180 - DNA, 47 bp, Homo sapiens
  chr5:175084696-175084743
  hyper
tctgcacaggtggcggttgcccggtcaagggcgggctcacaatctgc

SEQ ID NO: 200181 - DNA, 75 bp, Homo sapiens
  chr5:175084744-175084819
  hyper
gggcggggagagggaaggagccagggagaaaagggagagaaagagggggcagtgtggcagaaaggaagaggaagg

SEQ ID NO: 200182 - DNA, 228 bp, Homo sapiens
  chr5:175200304-175200532
  hyper
cgggcagtctccgccgctcccggccccgcttcccccgcgccgtgggctccgcggggtggctttgttggggcagcagcaggcaggatttatttccggcgttgtttatgcgcagcacgtctggaacagggcccttggtgattaaaacgcctcgggacagaaaagccgaactgaaacattggtgaaaatacaaaaaggaaaacaaaacagcggcatcgacagggacatctc

SEQ ID NO: 200183 - DNA, 339 bp, Homo sapiens
  chr5:175875017-175875356
  hyper
gttagagagcagccgaaatcagccgaatgccattcgggatgctccggagcttctcgaggcacattcgggccctctcggctctgcaagactgcactggaatcttaggtctcctttcgtcgcctaatcttagcagatcctttcgtcgcctaaatggtaagagcgacttgtaccgacagtccctcggcaatttccggaagtgttcgggataggcccgagcgtggcgccctctggcggcggccagaggtggcggggggcggggggaggttagtgggccagcgcgcgcagacgcagttgcgcgccggcggccgttcagaccggatgtggttgtggctgaggtca

SEQ ID NO: 200184 - DNA, 246 bp, Homo sapiens
  chr5:175969792-175970038
  hyper
gcggtctgttccccggacctgcagccgctccagggcagggcttaggccgctctggctccccggcggccggcacagggggcgtcggggaaatgtttaggacggacatggcgaggccaaagaactgcagcgcgtctccggctcgcggtgccggacgcctgggtcccagccgcagctgggactcgccgggggtggcggtcgggacgtgcgcggggcgcagggcacgcgggggctcggagttccccgggg

SEQ ID NO: 200185 - DNA, 62 bp, Homo sapiens
  chr5:176038451-176038513
  hyper
atccgtgggactggcgtctccaggcagcacgccaggcaaggagaaaacctcagcgtgtcgga

SEQ ID NO: 200186 - DNA, 209 bp, Homo sapiens
  chr5:176057164-176057373
  hyper
cgcgcatcccccgggtctccctccattttccatccccttccccagctccctcctgtcgccccagtcccctctccatcctcatcccgttccccatccccggcgcgcggccgcctcacctggatgcggggccggggctggggatggagcggcggctgcggcgggcggacgcgggggctccgctaggccaggccggggtggaccaggggccg

SEQ ID NO: 200187 - DNA, 44 bp, Homo sapiens
  chr5:176074862-176074906
  hyper
gtagctacagaggcccggattgctgggggcgggtcctagcgaca

SEQ ID NO: 200188 - DNA, 165 bp, Homo sapiens
  chr5:176449527-176449692
  hyper
gctgcggaatcagcgacaggtttccgaatccacggcacacgctctgaggtaccagaggtagcaaagcaaaataagcgcggggtcccgcacggcagcgcgggtgcagcgcccaaacctcgcgagatttgttggctgggccaagtaccacccaccaaatctcgcgat

SEQ ID NO: 200189 - DNA, 294 bp, Homo sapiens
  chr5:176738658-176738952
  hyper
tactgtcctagggcggtgcatccttcaagctgggagccaggtccagtccaggcccgtgtcagcgaggtcgccgcccggaattcagccaagggtccttcctcacctctctcacggcgctccaggaactcggccgcctgcagcaggacctggatgttgctggccaagggttccatgtcggcgacagctggcggcgggccggcctagggtgccggccggagcaagcggctgcagcacttttgttacaaagtaactgacacggtgcaacaaacacaggggcccgccccgcccccggga

SEQ ID NO: 200190 - DNA, 317 bp, Homo sapiens
  chr5:176739235-176739552
  hyper
ggggcctggtggtcccctgaaagcgccgggcccagccgctgcacgtgggtgccgcgggggcggggcctccggccgccgctcgcccattcgcacatggcttctcaaggatcgctgttgtcatcctcggggcggggtcggggagcctctgatgccctattggctggcgctctgccccgccctctcccgccgctgatccacacgttcgggcgggaaaagaagcaggtttcaaatttgaaaacccaagcgatggggcggggttgagaggggagctgggcctcaatgcgcaggcgccggcggaggggcggcggacccggctc

SEQ ID NO: 200191 - DNA, 50 bp, Homo sapiens
  chr5:177019030-177019080
  hyper
attctagggcacccgctctctctcaggtaaaagccgcgccccaatcaggt

SEQ ID NO: 200192 - DNA, 223 bp, Homo sapiens
  chr5:177540465-177540688
  hyper
cccgccccccacatccgggggccggggccgggctgtgggcttgccgcgcgccggtgagtcaggccgggttttccctccgcctttggggcaggcgatcgagcgccgcggagcgcgtccctccctcgccaatccggctccggcgccggcgcccgcccgcgttttcccggcgcctgccgctccgccgctccgacccggcacgcagtcccggcccgagccgacgcct

SEQ ID NO: 200193 - DNA, 243 bp, Homo sapiens; identical to SEQ ID NO: 42413
  chr5:177540787-177541030
  hyper

SEQ ID NO: 200194 - DNA, 130 bp, Homo sapiens
  chr5:178016441-178016571
  hyper
ctgaggctttcctccgccgtgaccaccgcctctccaggtgtaccagcgttggttaggaacagtaggtgctactggtcacagtcaccagatacttcccacgagcctcatctttatccccgactctggccgc

SEQ ID NO: 200195 - DNA, 34 bp, Homo sapiens
  chr5:178017936-178017970
  hyper
cggacttcggtgcgggaaacaaaaatggtaagac

SEQ ID NO: 200196 - DNA, 564 bp, Homo sapiens
  chr5:178287036-178287600
  hyper
agacgtcggaggagccgggtcacgaggctggagcttcctgcttgcagagtgcggcggggaggcgcggcccgggaacgcgggatcctggggaggtgagcggcatggctggctgtgccgggaggaggcggcgcctggcgccagggcgacctgaggccgcggggctccgagggcctctgtgggcgcgggggggcacccccgcgtctgtcaccggcccccgcgccaggacttggactctcgcccctcacgggccgctccggtgccgctgccgacgcccctgcctctggctcgcgccgcccgccgtgaacgcggggccaggcgtttcctcccgggcccaccctgcgcgcgccgtgtgggcctcgcggactcggggcgccgggaccccgagcgcagggcagaggcagccgggcccggtttctgagtcagtccccaggacggccactcctcctgcctcgggacacccagcgctttcctcttcaaagccgttttccgtggagtcgggagacgattcgttggcgggagagagaggaaccggctgggaaaggcttgaggcggagggaagtcgtc

SEQ ID NO: 200197 - DNA, 214 bp, Homo sapiens
  chr5:178423619-178423833
  hyper
ctgagcctgacattgcgaaggactgcataaactgggtttgggaggtggatgggcccttccctgttcaggacgagcctgacagctcccagcacacagcagcctcctgcttggcatgaccaaggcagccactgcccctgtctggaggacagaccatcaggaagcgggggcagcagctgggggactggcagggggtcctcgccgtgtaggagggagg

SEQ ID NO: 200198 - DNA, 110 bp, Homo sapiens
  chr5:178594471-178594581
  hyper
ttgctctggaaggagctgaattatctatgctcttccctccttcagtcaaggagacgtgggaggaaaccgggatggggatcagcagcctggaggccgcctccgctggaacc

SEQ ID NO: 200199 - DNA, 198 bp, Homo sapiens
  chr5:178770545-178770743
  hyper
cgggcgctccccatgcataaatggccccctgctcagaccagtcaaaacaacctgctttccagccaagcccttcagttggagcacgaggctcactaaagcacgggaagggcgcggaaagtcctcagcgcaggccttgccctcccaagggactcccaggtaacccttttccaaaacccaggcgagagcagcggagagaaa

SEQ ID NO: 200200 - DNA, 149 bp, Homo sapiens
  chr5:179234473-179234622
  hyper
tgaccagcccagaaccgtaccggcttcccggggcaggggcggcccgagagcgccgctaacgggagcaacgggccctgcccccggtggtgtaggggccacctcgccccgcccagcccagcccgatattgatgggggcccacgccttcatt

SEQ ID NO: 200201 - DNA, 752 bp, Homo sapiens
  chr5:179245837-179246589
  hyper
ctgggcatgcacgccgggccctggagggtgggaaggggccagtggacgcggggagcctgcggggtgggactgcatcgggaaaggggaaggagtcagaggcgagaagggggagagtgtctgtctggctccagccgctgcacgctcttcctgctcaggggactcacggtgaccccggagccactccccagcccagcctccaggtaagaggtcactgagatgggtggcagcaggggccggggatccccctattacgacagcggtcatgggacgctgactcactgccggccagaccacctgacctccgcggcgggaggagagggccctgccagggggttcccgccgcgccttgtttacctccgggaggcctcggcctcgcgtgggggcagggcggccgctggggccgcaaggcgtgcggggaagggccagagccgggtgtccaccccagcttcccaaagactccctcttctgtgcttccttctcccctccccgccccccccccagtctcttcacatgcccctagcccccgcggaaacttcccgcgatcccaaacgggccaaatggcgagaaagcaaaggagctccttcttgggggtgagtggggcgccttgagcgcttcctcaaagctatgttcccagagccacaggccttccttgtgtccctcaccctgctcagaccgggccatagccgggggctggggcaggaaagccggccctcggcgggggccacgtggctctcaggcgcctgggctgctga

SEQ ID NO: 200202 - DNA, 252 bp, Homo sapiens
  chr5:179498002-179498254
  hyper
taagaaaaacggcacgtttttatattagaaaagggccgcatccttccagatctagcgcagccttaagtccgtgatttgaggaacctgccgcttccaaaatacaggctgagacgtcctccccatgaagtagttttgcgctcttgcaccacctcctttgtctacgctgtccctgcaaactcctagctcaatgccctccagcaaacgagctgcctgaacgcaaagatgaccgttccaagtcttttttaaaagaag

SEQ ID NO: 200203 - DNA, 504 bp, Homo sapiens
  chr5:179498363-179498867
  hyper
agccagggccagagccggggccgggaaccctagtcccgccgcctacgcgggatgcagcgaccaccgcccgccgcccccgggccggcactcacctccgtggaggggcagcggcgccagcacctggccgcggacctcggccttgggggagtcaagcccgtagcgcccgcggtcgatgcgaaacgtgagcggggcgccgcggccgggctcctgcaccgtcacgttgatgagcgccgtgtagtactcctggctcgcgttgtctgcccgtgccggccacaggctgcaggtcagcagggcgagcgcggcgagccgggcagggcccgcccgccccgcgcagctcatcgtccctccggcagccgccgctgctcgcggaccgggctccggggccggcgcctagaggcggggcgggcgcggcccgggcggcggcgggagcgcgcgcgcgcggcctgcgcggggccgagcccgagcgcggccctcctggacgccgcggccccgccgctcgccgcc

SEQ ID NO: 200204 - DNA, 329 bp, Homo sapiens
  chr5:179498897-179499226
  hyper
gcccatgggccctcggcgagggcggcgtctcaggtcgcacgcgggcgtctcttcggggtcccaggagggttgtagaagcgtgccccctccatccccccgggtcggtcccaccgaatgggaggcgcctcgcaaggacgcggcgggggaggggaagggcggcacgggaggaagcgccccgaggagggtcagcggaacacaaagtccctctcgcgcggctgccgcctgaggcgcgtgtccgccgccgccccgcccccccgctggtctagcggcaacgcgcaggcctaaggcgcagtcccgccccgagcgcatgcgtgccagggcctgtccgc

SEQ ID NO: 200205 - DNA, 96 bp, Homo sapiens
  chr5:179499256-179499352
  hyper
ccgggtcagccgctggtgctggttgtttctctgtcaggcgtgatagccgcagggcgtggagcccgggagatttgcgaggacgtatggaaatgtgtg

SEQ ID NO: 200206 - DNA, 172 bp, Homo sapiens
  chr5:179779476-179779648
  hyper
ccacggtcccgcagccacgcgggacagcgcgggagcgccgcgggaatcggacgcccggccccgctccccgccccggactccctctcgtggcttcgggccgaggttcgggcagtgactgcctcttccccgcgcaaagaggcggtaacgcggcagcgacccttctagggaccag

SEQ ID NO: 200207 - DNA, 136 bp, Homo sapiens
  chr5:179781292-179781428
  hyper
ttttttttcttaaaaaaatcctgaaattctaaacggatcctcctcagtcgtgtaaaaaaaaaaagatttttacatctcgtctagagcatttttctaacataatccctccctagtttcaccgcgactctgcaagccc

SEQ ID NO: 200208 - DNA, 141 bp, Homo sapiens
  chr5:180018679-180018820
  hyper
tcctcttggcaggcgctggggccctctgagagcaggcaggcccggcctttgtctccgcgaggcccaccccggcccgcaccttcgctttgcggtctgaccccacgcgcccccctgcagggctgggcccgggtgaggggagct

SEQ ID NO: 200209 - DNA, 207 bp, Homo sapiens
  chr5:180047119-180047326
  hyper
agcaggtgggtcgggcaggaggtgtgggttgggcaggctggtgctggcctcacccaggtgcagccgctctcgggggaattcccactggctggcatcgtaggacaggtattcgcattgctcctccagaggcacctccccggggtccatgatgatggacaggtagcccgtcttgatgtctgcgtgggccggctgcggggaggggacagg

SEQ ID NO: 200210 - DNA, 62 bp, Homo sapiens
  chr5:180230099-180230161
  hyper
cccagcctggagccgcgcctgaagtgggcccgcagtccaggaaaggcgttcaccaaacccta

SEQ ID NO: 200211 - DNA, 596 bp, Homo sapiens
  chr5:180479642-180480238
  hyper
gtcggcgctgcccccggccacgtcctgcctgcgggcgggtcctccctggggagccgggagggacgtgggagctgcgaggccgcgcgcacgtggttcggttctcacttcttccaaaagcgtggtaagaaccgagggagaagccggatgtttgcaaacaagcgaggagacgacttgcggaccagacggcgcgggtgcgagcaggagctccccggacatccgccgccagccaagcccctgggaccctcccgcctgcggacgcggggcgagggcgggaagacgcggggcgagggcggcgctgcggccgcagaagcctcgagccgggctggggcgcggttccctcccgcacgccccgcggcgcgcccccgccccctccgccgcgcgcgcccccgccccctccgccgcgcgcgctcccgctccacgcccgtttcccaggcggctgcggtggcgcccggagaaggtcccgcgggaggtttcccggcacgcggcgggcaggccggtctcgcctctcggtgctcagcggcgcctggaccgacacggcccccgcgggtgttttccagacgtgttcgtacccggagcctctgcgtggaagagcgcgt

SEQ ID NO: 200212 - DNA, 828 bp, Homo sapiens
  chr5:180480302-180481130
  hyper
gcggagaagccgaggtaccggcgcgggcggcggggcggggaggggcaccggccggtgctgaaccccggggccgcggaggcgcctccccccaggacgcggcgcgggaaggcggcctggaaggggcgggggcgcgcactcagccctctccgctcccgtttcccttcagaaaagctgaggaagcaggcggagaagagacaaggtgagcggggacagggcgttctgcacgcacctgcccaagtgccaaaacccgccgtcatctaaaggctgtgggtcccgttacgagggtttattccagcgcgaggtgtcagggcggccaccggggaacggggatcggtgaccccggtggggaagggggaagatcgttcatatggacaaaagcggaggtgcggaacggctgcattttccacggaggctagtgcacagatgtcagggttgaccggctgctgtcgttacgccctcggagcttcacatcacactgtacagagggagcggtgaccagggtctctgctgccagcgccacctcgtccaggttttcatagcgcacagggagtcgggcggatgcgcaacatctccgcacagggtcaggaagcggcggtcaggcaccgagaaaacagcccagttacgtgaggcagtgtccggggcttaacgtttccgccgagctaatagatttgggaggctccgaccctgattttcacactagcaggagggagggcgctgggtcaccctcctatgcagaagggcagccaagggtgcgcacttccccatcccctgcctggagcctcacttccagcccagcctgggcccgcagaccaccgcgggtgggagtgc

SEQ ID NO: 200213 - DNA, 61 bp, Homo sapiens
  chr5:180595002-180595063
  hyper
ccctgcccgggcagtccccctactccccacctctactgccccctgccggtgtctcaaaaaa

SEQ ID NO: 200214 - DNA, 83 bp, Homo sapiens
  chr5:180632776-180632859
  hyper
cacacacacacaaacctcagcgctctcttgtcccccagctgtctccacagccccgcagcagagctgcctgtgttatccgcttc

SEQ ID NO: 200215 - DNA, 55 bp, Homo sapiens
  chr5:180633225-180633280
  hyper
gtcgtctcttagcgcgctcccttctcagggccggctctgtgcccgcactctatct

SEQ ID NO: 200216 - DNA, 338 bp, Homo sapiens
  chr5:180673932-180674270
  hyper
gctgtgccctgtcctcgcccagctcccggcataggcatgcgctctgggccggggccggggccccccgcctccccgggaggaatcgctgggttgactctgggtcagcaaagggagcccggccctttctagcggggggacgtcctgcagccgctggaggaggctgagtcacgcttttcccaccagaagtctacctgtgcctgcgcccgccggacctgccggcctcttccttctcatccagggggcctcttctccagcctcacggaggtgggaagcttgctggaggcccctacctgccttttggggaagaccccgaggctggcccacgccctgctggcagg

SEQ ID NO: 200217 - DNA, 75 bp, Homo sapiens
  chr6:391098-391173
  hyper
taagcatgtcagacacgcagagacagtatttgaatcaagcttaatagctcaagggagctgggccatttcctattt

SEQ ID NO: 200218 - DNA, 76 bp, Homo sapiens; identical to SEQ ID NO: 4514
  chr6:393764-393840
  hyper

SEQ ID NO: 200219 - DNA, 380 bp, Homo sapiens
  chr6:710673-711053
  hyper
actggcttttcttcttcttcttgtagtttgaaatggaaacgctgcactgctgagaaaataccacggaaatagaacccactgcattccaggaaaataaataagcaaggccacccaaattttcaatgagtgctcctgcagaatgcaggaaatggcaggagatccgtccgaggcaccccaggccgggtcgtgggtagagagcagggacgagggctgggaggggacgcaggcacagggtgagggtggcccgtctccagggagaactgcgcgctcacaggcggggccggcttcccgcatcagcccggccgggctgcaggttctgagcgagggggcggccgtgcctcactctgggcgggacgcggcctggtgcagggacgctcact

SEQ ID NO: 200220 - DNA, 143 bp, Homo sapiens
  chr6:711310-711453
  hyper
cccagagtgagtgtcagggaggaagccaggtcttccagggcgctgacaaggcagggccgggctccttccctccgttgtgtttctctgaaatgttcgaatcactggtgtgacgggagcacttaaagccgaaaaaggaaagacga

SEQ ID NO: 200221 - DNA, 294 bp, Homo sapiens
  chr6:1311048-1311342
  hyper
ggtgagctcccacctactagcggctccgtcgctttttgtgcaacaaaggcaggaaaaaggaggaaactcggcgtggcagggcagcgggctggaagtgcaccttcccggggccgaggcgcccgctccctggactaatgacgccgcgtggggatcacgccccgggcgccctggggtgaggaacggtcccccctttcgagattgtccgacactggtgccagtgaggtcacagcaaaagtcccaaaggaatattggaaagaaatggccgtgaaccggtttgttcttgcccccgccccc

SEQ ID NO: 200222 - DNA, 428 bp, Homo sapiens
  chr6:1311343-1311771
  hyper
ggaacacgccctctccgtcgttcctgttgactgtcagatcccgggaaccaagcggcggagctcggcggcatctgaggcttccgcagggacacaagtgcaggcacagcccagcaccctgcgccagacacagccgccccaggggaagaggaggacgctgctgtcctcccgcaggagtcaccagccaggtaaagaaaaaggtaaagtaagacaaagaaaagtgaaagtcggagcccatttagtgagcaagagtaaaggtcatccaaaaaggcgcatacaatttcaagcccaggagtgcattcattaaaacaagaggaaaagacaagatggtccttgaaaggagctcataggaaggggcacagcacaaggctcccgaaagaggtcactgcaagtgtcctgcgcaatttctgttcagcacctctgcagtgacg

SEQ ID NO: 200223 - DNA, 223 bp, Homo sapiens
  chr6:1312096-1312319
  hyper
ttggcgggaggaggaaggcggggccggccgacccaaaacaaacaacctgcgccagcgactttgccgccgcgctgcagtgtggcctccgcctggtgcgcgcccgttggggagctggggaactggggagccgccaccacctcggccacctcgttcccccaccccttgccgtccgcgctcaggccccgcccccgcggagccgccgcagggttatattgggccggcc

SEQ ID NO: 200224 - DNA, 46 bp, Homo sapiens
  chr6:1312708-1312754
  hyper
tcctccctctccgccccatagtccacccaacacttgcagcccctcc

SEQ ID NO: 200225 - DNA, 483 bp, Homo sapiens
  chr6:1312784-1313267
  hyper
gaaaagtgactatctcggaagaccagggtagagctcccgggagaaaaaggcgaagatccccggccccggatcgccatccccttccctggcaccagcttctctaggctgcgcgaaggaagagggtacgacgccggggagggactgggtgcgcgggcatgaagttggaggtgttcgtccctcgcgcggcccacggggacaagcagggcagtgacctggagggcgcgggcggcagcgacgcgccgtccccgctgtcggcggcgggagacgactccctgggctcagatggggactgcgcggccaacagcccggccgcgggcggcggcgccagagatacgcagggcgacggcgaacagagtgcgggaggcgggccgggcgcggaggaggcgatcccggcagcagctgctgcagcggtggtggcggagggcgcggaggccggggcggcggggccaggcgcgggcggcgcggggagcggcgagggtgcac

SEQ ID NO: 200226 - DNA, 602 bp, Homo sapiens
  chr6:1313302-1313904
  hyper
tactcgtacatcgcgctcatcgccatggccatccgcgactcggcgggcgggcgcttgacgctggcggagatcaacgagtacctcatgggcaagttcccctttttccgcggcagctacacgggctggcgcaactccgtgcgccacaacctttcgctcaacgactgcttcgtcaaggtgctgcgcgacccctcgcggccctggggcaaggacaactactggatgctcaaccccaacagcgagtacaccttcgccgacggggtcttccgccgccgccgcaagcgcctcagccaccgcgcgccggtccccgcgcccgggctgcggcccgaggaggccccgggcctccccgccgccccgccgcccgcgcccgccgccccggcctcgccccgcatgcgctcgcccgcccgccaggaggagcgcgccagccccgcgggcaagttctccagctccttcgccatcgacagcatcctgcgcaagcccttccgcagccgccgcctcagggacacggcccccgggacgacgcttcagtggggcgccgcgccctgcccgccgctgcccgcgttccccgcgctcctccccgcggcgccctgcagggccctgctgcc

SEQ ID NO: 200227 - DNA, 259 bp, Homo sapiens
  chr6:1316903-1317162
  hyper
agctggaattccgcggagccgcacctggcggcaggcacgccggccttcggaggggccgctcggtgcggctgcaggaccctgcactcaggcagcagcctcgcggtggcggtgggacctctcgagcccaacagctccttccagcatctgcccagaaaactgccttcctcgcaggcgcgggaggagggttcggggctcactgtgcccaggcccccaggcctggccgcgcccaagtggccccccgcgccgagggcagggctcg

SEQ ID NO: 200228 - DNA, 113 bp, Homo sapiens
  chr6:1379978-1380091
  hyper
gatttcgggggcagaagactcctcgaatgcagaccggctgtctgtggctggacccccagtgctgcaaaggaatctgatatacctggaggaaccaacctcgaggtccaaccaag

SEQ ID NO: 200229 - DNA, 227 bp, Homo sapiens
  chr6:1383450-1383677
  hyper
gtgtcctctgaggccgcaaagccgactggcttctggaggagcagcagcctcggcctcagcctcggctgggaaaagacgcagtcggggccctccgtgctccaaacttgaactactctgggtccccacgaggaggaggctgccctggggtcagaaactccgacggaaatgaaggggagggggcgtaggttccctggcacagctcggcctggagaggcagcctgggggcc

SEQ ID NO: 200230 - DNA, 87 bp, Homo sapiens
  chr6:1439168-1439255
  hyper
cgtgtgccaggctccctgcctcccacctgcatgcctcagagcagccacctgctccccccacccagcctttaccctgcatgtacccag

SEQ ID NO: 200231 - DNA, 231 bp, Homo sapiens
  chr6:1610585-1610816
  hyper
ggcccggactcggactcggcggccggcgcggcgcggcccggcccgagcgagggtggggggcggcgggcggcgcggggcggcggcgagcgggggccatgcaggcgcgctactccgtgtccagccccaactccctgggagtggtgccctacctcggcggcgagcagagctactaccgcgcggcggccgcggcggccgggggcggctacaccgccatgccggcccccatgagcg

SEQ ID NO: 200232 - DNA, 334 bp, Homo sapiens
  chr6:1610864-1611198
  hyper
gcgcctacgggccctacacgccgcagccgcagcccaaggacatggtgaagccgccctatagctacatcgcgctcatcaccatggccatccagaacgccccggacaagaagatcaccctgaacggcatctaccagttcatcatggaccgcttccccttctaccgggacaacaagcagggctggcagaacagcatccgccacaacctctcgctcaacgagtgcttcgtcaaggtgccgcgcgacgacaagaagccgggcaagggcagctactggacgctggacccggactcctacaacatgttcgagaacggcagcttcctgcggcggcggcggcg

SEQ ID NO: 200233 - DNA, 51 bp, Homo sapiens
  chr6:1612145-1612196
  hyper
cggcggcggcggcggccgcaggctacccgggccagcagcagaacttccact

SEQ ID NO: 200234 - DNA, 186 bp, Homo sapiens; identical to SEQ ID NO: 112753
  chr6:1612300-1612486
  hyper

SEQ ID NO: 200235 - DNA, 42 bp, Homo sapiens
  chr6:1614120-1614162
  hyper
ttcagtcaaaaactgctctacgtggcctgtgattcgctcggt

SEQ ID NO: 200236 - DNA, 165 bp, Homo sapiens
  chr6:1624812-1624977
  hyper
cgtgggggtgggggcagcaggtcccgagccccgggaactcccaccgttccgctccctctgggcgcacaaggctccgggtttccctgctttcggtccctgctgtgcgcgttcagttgcggctctcggcgccgtaaatcactaggtcgcggttaagaatgtgctgtg

SEQ ID NO: 200237 - DNA, 51 bp, Homo sapiens
  chr6:1625068-1625119
  hyper
tttttttttttttttttttttataacatgaagttgtcagggacgctcctat

SEQ ID NO: 200238 - DNA, 137 bp, Homo sapiens
  chr6:2841489-2841626
  hyper
ccactagcccatctcgatctccactctcagagccctgatttcccccgaggacaggcaaagaagaaccgtgctggctgctcggcatgtaagcacaaagctgatttctccttgttgtgaaatcgtctctagaatcgcac

SEQ ID NO: 200239 - DNA, 747 bp, Homo sapiens
  chr6:2841627-2842374
  hyper
gggttcctcctctctctccctgcagctgcagataggagccgcggcctggccctgggctgcctggaaaccgtcacaaacagctctgggaggaagggaattcagggagaagggacaacattctgatctcaggtttcagtcttgccttccgcctgcatctgtcgtcctccctccctccctccctcgcgggctggcccggcctgtacccaggcgggggcgggggatcagaggtcgtctgtctccgtcggggcgcccggaagggatgggggcgcgaagctggcggggagggcgagcgcagggagctgcgggtctgaggggcctgagcctggggggtggggggtgccgggctggaagctgagcgagggagcctggcctctccccgcgcccgcccccgcgccaccgctccgaggcccggccttacccgacaggccgccgaggcacgctccgggctccgagctgggtgcgaggtcaggaaggaggcaccgagggccgctgctcttatagcaggcggaagcgtcacccgggccagcagccgcgggcggggcggcggcccttcccggtgactgcgtaggagtccgagctcccgaggtcgcctaagtgcaagcagaagtgagcgtggcttccgggcagcgccctcctcaggggcgcggcttctttctcagttcaaagcctttccccgaatctctggcaaggacctgaaaagctttttcttactaaggtgtgaatgactgagacgacatattgtgacac

SEQ ID NO: 200240 - DNA, 156 bp, Homo sapiens
  chr6:2903557-2903713
  hyper
aggcaccgcttttataccgcagggtcgggcgcctcccacgctttctgcgtttaggcggagcctggcgggaccagcgggggcgccgcgcgtggtggccgaggtcagagctgggagcagggtcaggtcagggtccccccagtccgccccgcccggggc

SEQ ID NO: 200241 - DNA, 254 bp, Homo sapiens
  chr6:3162842-3163096
  hyper
atgcggcgagactgcggtctccgctggccgcacgctcttctgcatacagctccgcactacactcctctcccctaatcccgaggctggcgctgcagagtgagcgagcgcaggatcgctaagcgcgagccgaggcgccatcggaacactcttgcccccacccagacgtcgagtctgcaggtccagggcagagggcgctgggcggcgccgggaggcgcgaggcacccgggagagccggctccgtggcttcctactac

SEQ ID NO: 200242 - DNA, 241 bp, Homo sapiens
  chr6:3228680-3228921
  hyper
ctgcccgaccctctccgggagtgcataacgcccctgctggtacccaggagccctctgccccgggggttgacttttgttgctcgctagtgatggagtgggagtggccggtggcgctgcactgaccgtccggagggcagaaagagggtggggtcccgggggcggggctgtcggcggaacaaagggctctcagaaacgtgggatacgctgtgtaacccagtatttaaaaccacacgacaggcgc

SEQ ID NO: 200243 - DNA, 573 bp, Homo sapiens
  chr6:3229632-3230205
  hyper
agggcgcccagactggagctcgccggccggtattccagacccggccggcgtgcccgggtgagggtggggtctaccgagaggcagagagcagcggagggtctgtccacatgccctgctctcccggtaccaaggtctcggggcctgacctccgagtttctaatccagatcctgcagatgccgaaacgtcgagggctagcaattcccaaggtcatacagcaagttgaggacagggctcggactggaatctcgtcttttgggcacaccagacctcagggaaagtgaccgcatctcggccaaaagggctgtggcaggtgtcagcctcgaggtggcggctctggtgggaccaagctgcgccggaaggaacagagctagggcggcacccgcgcggcgagtgtagacacactcggagcggtcaccccctcgctgcgagctcccaggagcaaccctgatgctcagcgctggggggtggggttgggggccgctcagctccatgctgagtaacttgagctggccgcctgcctccttcatctaaccaattcatttctcagcttctgtttccgagccaaatctcca

SEQ ID NO: 200244 - DNA, 72 bp, Homo sapiens
  chr6:3231938-3232010
  hyper
cctggcttttctagggcgccatttccctgctacaggcaatctcccctcccccacgctgtcaatgatttgtgg

SEQ ID NO: 200245 - DNA, 72 bp, Homo sapiens
  chr6:3232260-3232332
  hyper
cgctgtggctgcgggaccctcacccggcgctgaaaaccctccacatcagctcctgctcggaaatgtctccgc

SEQ ID NO: 200246 - DNA, 1223 bp, Homo sapiens
  chr6:3455898-3457121
  hyper
cgctttccatccgcgtactgggacaggagtttgggtgcaaactagtaaaggctatggtgctccctttacacccaagtaaaggcatgtggtttgggggacggaaggagattaagccaatgcggaatgccctacacacactctagcaccaccactttggggacttcggttctcccgctggctcgggcttggacctcggtctgcagggagagggttggagggactgggcggctgcggcccttaccttgctgaccacgttctggacgaggccggcgcggatgccgtagtcccatgcgcggcagtcacagttggaggcgttgtcccccttgtccggaggggatggcaggggtggtgtgtcgcctccgtccgcgccgctgctgttgctccggttgcccgcagcctcccagggggcagtggcgaagggggtggtggggaggctggtccagttgcccatgtccccgccccggcctgtggtggtgacccctgccagctcggtgcctttgccggccccgcggcaccagaagttgggctggtccaggaggaacgagtccgagaactggctgaagccgatgaacagcgccgggatccaggtgagcagcacgagggtcttctgatagcccccgcccaggcccccgaggaagggcagcaccgacccgtcatagtccagcaacaagaggctcggggccgcagccgcggagcagcagctcgggtgcgggccgcctccaggatgcagtgggggcagcggctggatctccgcgccgccgccggggcccgcgcgtcccccgaggggcgccgaggccgccgcgtccccgggcggcagggagccgttctcctcggccggggccggctgccgcccaggcccgccgcccgccgcctcgcgccgccggtctatggccatggcccgggcccgcggctcccgcagaggcgcatagagcgcggcggaggctccgcgggcgccccgggcacagcgcgccgggccaggcgcctgcagccgctgccgccgaggagggcccgcggctcgagagagagcgctcggcggctccgggtgcgtcaggccgcccccatgtcacccgccggaccccgcgccccgggcgctgcggccccgctcgggcgccgggcagaggcgggcagaggccggccgggccctcagccgccgcggctcatcagttccgcggcccgggcgccggctgccgagcccgccgctctccgctgctccgcgccggacg

SEQ ID NO: 200247 - DNA, 706 bp, Homo sapiens
  chr6:3457537-3458243
  hyper
cccctgcccgttgcccgtttcgcgccgggcggggcgggggaggaggagacgcgcgtagcaggggtcgccggccggcgacgggtcccggcaaagtcggcgtgcgctgagaacgtgtgggccgggtcttctctgaggctgggctcccgcagccgcgcgggccccccacccactccgcgcgcgccaggtctccgtgacctctgtctcttcagaggtgcccggcggtcccgctgcccgcgccccgctcccagtcccaagcccgagggtcttcagccttcgggaacaaccctctgcgctttttccaggagcgaataaggttgatttttgtgtccgtggagcagggtcaaggaggcgcctttgccaatttcaggtcgccagtcccccgcagtgtctggccacctgcgacccgccgcacccactcccaaatcgccatttcttcccccactcctaagtgcatgcgatgtaagcacgatgctgggatatatctccaacacaagttataatacacacagtataaacgtgatggcattccccaccccctccctaagatcttgtattcacgtttggaacgccgtgtgcacaggcgcacacatctatactctcacacaagaagacaaacctctccctcctctcctgctccagcgccaaccttgcccagccagcgctgtataaataacaccagccctgcggcaaacggctacattagcat

SEQ ID NO: 200248 - DNA, 95 bp, Homo sapiens
  chr6:4775543-4775638
  hyper
gttgggtcaggaagccccttctttcgccaccgatggggcacgtccagggcccggcaggtgtgccctggcagtagatcttccctgggaagtggagc

SEQ ID NO: 200249 - DNA, 358 bp, Homo sapiens
  chr6:4775639-4775997
  hyper
cgggccagccctcgctgttctgagcgagggcctgtcgtgtagtccacaccgttccgcgaaaggaaccaccattgacagcctcgttcgattagaacccggacctccctggaatccagactcggtcccttcccagctgcgcttcggaggaggcggacgctccgagaggaacccagaggcctggcgtggggggagctgcgggcagagcggaggcagccgcgccctcgcgccgccctccgccgcgcccggctcccgccccccggatcccacccccggcctgccgcggagccagcgtgccagccggagctcgccgggccaccccgcggggcgcgcggcccgggctccgggtcttggcggcggc

SEQ ID NO: 200250 - DNA, 83 bp, Homo sapiens; identical to SEQ ID NO: 112795
  chr6:4776187-4776270
  hyper

SEQ ID NO: 200251 - DNA, 506 bp, Homo sapiens
  chr6:4948976-4949482
  hyper
accctgctctaactcaagagcgaagagcctgcatttcactcggcgtgaattctacactttctgagcagagtatctgacgaagcctctctacagaaagtgaataaacgttgttcagatgacttcgacaactcttgttgaaagtgactatgcagatgatgtaaatgatgtcgttcctttcatgagcctttggtgtacttgagctttcagcagcctgaggcaagactggacaagtgtggttttccccactttgcatgtgcagagctctgccaggaggataagctaaaggaatcacattatcaagataaaaagaatatgcaaatagtgcaggctgtgtggcctctcctttcttacagcaggccctccgctgtaggcgagggctacgtaaatcagccaaggagtctcttccagtttagccttcctggtgcccagtagacattcatggagtgcatggaggatggcacggtctgacgcccacaggctcccacgtggaaatcttgcacctctca

SEQ ID NO: 200252 - DNA, 556 bp, Homo sapiens
  chr6:5085081-5085637
  hyper
gaatgggcctccttccagcctctgcgtaggcaagatttccccagttgcgcgctgcaccggggactccccagcccgtgaggcagccaagaggagagcgctcagtgaccctctgggggcagagccgtcaggccaagttcatgggcaggaagactttgtgcacgtgggggtctctgaaggttgagcgcgagctctgcacccccacttcgaggcactcaagaagcggaacagacgcgagccccgccgggggtgcgggtgagggctgcagggagcccgcgaacgacagaaagtcgccccccgcattccaccggagcactcgggaacacggcttccaggtgtcccagcggccgcgcctccccgcccccggccctcccccgtcgcgggcaggttcaaccgggaggcggcgtggccccggagccggccccaggcccgcatcctcctcccacttcgccctgggcagccgcagctaaaagccggaggctccaaagtggaactacgttgtcttgtcgagcctggggcgactcgcctcggggagggcgagcctgaactgcagccctgc

SEQ ID NO: 200253 - DNA, 143 bp, Homo sapiens
  chr6:5851316-5851459
  hyper
aaaacattaacagcgggggacattcctctgctgaccccaaagttcagcaggtgcgggagagggaggggcggactcttctgtctgcacagggcttggggaggcatctcctcctcggggctcgcagacagggcttctcgtgccaa

SEQ ID NO: 200254 - DNA, 115 bp, Homo sapiens
  chr6:5997274-5997389
  hyper
aattcaatccgtggggggaatgcagattgggctgcgactcactgggtttgatttatgaactgttacactagcaattgtttacacattgcatttcagagcccgggcccaccctccc

SEQ ID NO: 200255 - DNA, 112 bp, Homo sapiens
  chr6:5997401-5997513
  hyper
cgggcttcgtgcgggaacctgctgcagcccccttggtctctctccatcctcctcccttcccccgtcccccccccccggggcccccgcagcttcctcccacagccaccttctc

SEQ ID NO: 200256 - DNA, 176 bp, Homo sapiens
  chr6:5997899-5998075
  hyper
gggctccggcccgcctgaggcgggggcagacggccggccactggcattgtctgcctgtgcgagcaagcccagttcctctaaatctcaaacagaaagaatctctgctttgtaattaatttaaaaacaactttcattttctcttttttaaggaagcacggtttcggggaagtggccaa

SEQ ID NO: 200257 - DNA, 271 bp, Homo sapiens
  chr6:5999609-5999880
  hyper
cgggacctccgcctaccccagaagcggctgtctaaagcgggggtgggggggcgccccctcctgtctggttttcccttccagttgccgggagaggactaggcagccgggagccgggccgtgcacccgctgtggcgcgctggcacctcggcctccgcaaacagattgctcgccctcctcggggaaagctaggaaaacagtgctaagcctcgcaagctgccgcccattaatgcctcttagcttgcaagatgggttactagctctgagcacggcc

SEQ ID NO: 200258 - DNA, 111 bp, Homo sapiens
  chr6:7389807-7389918
  hyper
gtgggctagctggcgcctcctgccgcagtaaacacaaagtggggtacagaaacgaaaactccgggaagaaacggccagcacgggcctcgccgtgccggctactcaacacgc

SEQ ID NO: 200259 - DNA, 1835 bp, Homo sapiens
  chr6:7541428-7543263
  hyper
gcgtggtaggtagcgtttccagtgatcaacaaaagtaaatatttgaccagtaagtctccaatcgagaggcccctccattccagctatttccgcccggggaccgaggaaatcctcaaaagccgggccacgcattcccagcccgagaggccccagcgcagagcgcagcagcccccgcgagcgcaggtcctccccgcggtggcttcgcccagggcgcttgggtctcggggaccccgcccccgccccgcccggtgttactcaggcctcggtggcgcagggcggagtcgcgggcggcgggcgcaggtggggaggggcggccggagcgcgtcggtgacacccgcgggggggcggggaaggcgcggcggccgcaccccaccctgggaagaaaccggccaggtgtggcctaggcgcccagtgccagcggggaggagactcgctccgccgccgaccaacaccaacacccagctccgacgcagctcctctgcgcccttgccgccctccgagccacagctttcctcccgctcctgcccccggcccgtcgccgtctccgcgctcgcagcggcctcgggagggcccaggtagcgagcagcgacctcgcgagccttccgcactcccgcccggttccccggccgtccgcctatccttggccccctccgctttctccgcgccggcccgcctcgcttatgcctcggcgctgagccgctctcccgattgcccgccgacatgagctgcaacggaggctcccacccgcggatcaacactctgggccgcatgatccgcgccgagtctggcccggacctgcgctacgaggtgaccagcggcggcgggggcaccagcaggatgtactattctcggcgcggcgtgatcaccgaccagaactcggacggctactggtgggtacctgcccggagagcgcgggctgcggggctcgcgggacagggagggaccgtcctcctctggacgactgggagactcgggtcccgaaggtggaaaggtttttttgccccaggtcccgaaagaacttcccggccgcgctgggagcaggaccgggtgtcctgacgcgtgcggggacaggttggcccctgtcctgcgaacagggactcggtcgtacctttctcccctcccgcgagcccgggcgggtggtcagagggggcgtcgggcccgcgcggggctgtcccctgcctgctggacacggctgcagccgcctttgtcccagcccgcgaatgggaggtcaggcgaggtggggctgcgaccacaaaacccaacctctccaaccgtaatcaaagtaaaagaggaaaggagcggggccccggtcctgtctggtggccgagtggtgctcggggctccgcagtctctaccggctcacccccaatccccagtaaccccgagaccacgactgcaacgactcctggactcctcggccacccaaggacgtttgtatcaaggctgcgcgtcccggcggcgcggggtcctgtcccgaggaggcgcttcggcttcccctgtccgggaaacgaaacttccccgccggggcggctgccgggcccgggtctcgaagttcggccgggacgtgcctgttaccttcggtcgtccgcgccgcagcccccgcgggcgagcgcacctggggccctgcctctgagccttttgtttcctcctttttaaaaacaccggatgaaagaccccagtgtgccttggatcgcagagcgccggccgcatgtctgctttgatccagaatgtgtgggcaggggagtgggggggtgggagaggacgacgctgggggcccgccctggcctaggcgccccgggaagaccccccggtgagagggtcagcttctccggatc

SEQ ID NO: 200260 - DNA, 209 bp, Homo sapiens
  chr6:7726046-7726255
  hyper
taaaagagaaagcttcagatcggggtattggtcagatcattcttactagcgatgacctcttcgcctttggcacctcgcggctcttcgcatgcctccaagaattcccgggtcttgaaacctacgcgcggcggaggcgacgcctctcgggagagggagggtgaaagaaggggcggggctatttaaatagcccgcgagcttcgcgtccccat

SEQ ID NO: 200261 - DNA, 57 bp, Homo sapiens
  chr6:10383111-10383168
  hyper
aagggggcgccgggggtgccctggcggataacaggcggtcacgcctgatccccgcat

SEQ ID NO: 200262 - DNA, 157 bp, Homo sapiens
  chr6:10383570-10383727
  hyper
gtacaggcctcccccgcccgacggagcgtcccctcgcacctccccagagttgcctaactcctaggccctgaaagtgccagaacaaaggccgactcccccggcgcctccctcggggactgagcaccctgggccctgctgacgaagcaaaccccagact

SEQ ID NO: 200263 - DNA, 106 bp, Homo sapiens
  chr6:10384074-10384180
  hyper
gcccaaatataccacactgtggcgttcctcgtgccgaccgtgggtctctaacctagccaccttctcccgttgaaatatgcacatcgctattcaataatttagacaa

SEQ ID NO: 200264 - DNA, 192 bp, Homo sapiens
  chr6:10391456-10391648
  hyper
ctaccatccccccacccccacgcccaacgccagacagtccaaatcaagtagcgaatagctcctaatacaaaggggtgcatggcaggatattttcggggaattcaaatagggcagcgccctgccagcgggtggggtcctgggtggggcaggtgggacccagtgagggggtgcgcaccgcgctgcctcctccca

SEQ ID NO: 200265 - DNA, 199 bp, Homo sapiens
  chr6:10409934-10410133
  hyper
cattgttctggggtagaactcgcaactactttgtgtggttcctcaaaacgtccctcactctccgcctccgaataaaatgtttttataaggaaatactagggagaacccgggcccaccgactgtatgttccaggtatcctttctggggtaggtaagtagggggctgtgttccctcccgcgctggttgcgcggcctcttac

SEQ ID NO: 200266 - DNA, 202 bp, Homo sapiens
  chr6:10410242-10410444
  hyper
cgaggatccaggcccgacagctggtgaggcagcccccggtgcgtgtgcaggagcccagactcctggctctgcctctggccgggccagcctgggtgctgcggctgcggctgggcgtgcagggggttcaggctgtaggggtcgttgacgtgggagtaaggatcttgcgactgggggtagataggctggtagggtggggggaagt

SEQ ID NO: 200267 - DNA, 305 bp, Homo sapiens
  chr6:10410948-10411253
  hyper
tgccactgcgttattgtttattctcttccatttatttggagagaaaaaaatcataaacgttcaaagactgttaccgtttcatgactacttaaatagaaacatatttcgcagaggggctgtaacaaaaacacacgtttaaattaccagcttaaagaaggttttaactgcaggatcggggtctgtctttttcgcttcctctgttaggagcctttttctcgacagagtcgatttatggtttggatagggaaagggggacgtcaagtcaaggtttaaaatagaaagattcagccttattgggtttaaaa

SEQ ID NO: 200268 - DNA, 626 bp, Homo sapiens
  chr6:10412036-10412662
  hyper
cttcagctggtcgaacccacggtctctatcctgccgcgactggttatgattcaaagttctttaaaaatgaaaaaccccaaaaaaggaaaaaggaaaaagtatgtgtgagtgtgtgggtgcgtgcgtgttccttaatccgtgtctccccctcttttcttagcggcggcttcgcttgagcttctaataaccgcgctgggcagcgttcctggagcctcctaatagcagatattcatgactattaatattacacgaatacttaataagggaagaatgcctggaaatcgagcgtgaagcggagaggcaactcgcgccggagccggctctcaatgcagtccattgacgggagtctcagtgtagcaaatcggagtggggagagggagcgcgagagacaaaaagcgagcgagagagggagcgggcgagcgcgcggggggccgcggcgcggcgtctggcgaatcacagggaaggggcaacattttaaaaggttgcagggcatgcaaaagtgaaagagaaagaggcagagagggagaccgaaggagagagcgcagagagggagaatgtgtctgcgtgcgtgtgtgagaaagaaagtgtgggcgagggagaggagccccgggtggggagaggggagg

SEQ ID NO: 200269 - DNA, 188 bp, Homo sapiens
  chr6:10413314-10413502
  hyper
gcgtgctgcctttgccagtctacccgccaggttgtcagaacaagcggcacctcgcctcctgcgtgtccctacagagccccggcacaatcagactgccccaagccagctccgaaacccgaaatccccgctccggcgcttgcccaccacggccaaagttgtggaaacagctttgactttattctcctctc

SEQ ID NO: 200270 - DNA, 31 bp, Homo sapiens
  chr6:10414549-10414580
  hyper
atctggagcgagccccgcagctgggatcagt

SEQ ID NO: 200271 - DNA, 60 bp, Homo sapiens
  chr6:10415329-10415389
  hyper
ggaggagggagaggaggtggaggaggagaaggaggagggagaggaggagggcaaggagga

SEQ ID NO: 200272 - DNA, 38 bp, Homo sapiens; identical to SEQ ID NO: 112856
  chr6:10416507-10416545
  hyper

SEQ ID NO: 200273 - DNA, 224 bp, Homo sapiens
  chr6:10417842-10418066
  hyper
gggaagagggagtatttgtgtgagagacagagtcacaaagagaaagagacagtgaggggccagaacgactctcttttctccgattgtcaatgcccagtgggagccgggagcccaacaggcccagcccatcagattcggcccctccgggccccaaatccgctcgccccacccgagatccaggcctccagccacttgcctaactgtgagcccgcaagagccaggcc

SEQ ID NO: 200274 - DNA, 32 bp, Homo sapiens
  chr6:10419045-10419077
  hyper
agttgctagctaaacttcgggcaaactttgta

SEQ ID NO: 200275 - DNA, 115 bp, Homo sapiens
  chr6:10420268-10420383
  hyper
gggcacggctggccttagcggatctgactctgccaaccccggggccacttcagcgttagattccacatgaaactgttgctcaataggtgaagacgttcatgattctgtgtcactt

SEQ ID NO: 200276 - DNA, 36 bp, Homo sapiens
  chr6:10420682-10420718
  hyper
gaagtgatttcaccgctgcttctaattagaggggag

SEQ ID NO: 200277 - DNA, 162 bp, Homo sapiens
  chr6:10423451-10423613
  hyper
ctgtggctttccagaatgcacgctttcaactgacagcagtgggtacaggcccgaggtgtgcagcaagctgggaagcccagaggccgagaagctaaagatgccctggagactggaggagcgcatcaccggtcagtgcgccccctccaggagcggcctcccggc

SEQ ID NO: 200278 - DNA, 214 bp, Homo sapiens
  chr6:10423704-10423918
  hyper
aacgagtttgcacttctgtttacaaagcaatcctgccatcaaaagaggaacaaaatcaccacttatcacaccctgtcataaagtaatctgccctggagggaaacccttgtggagaactgctgtgtgtgtgtgtgtgtgtgtgtgtgtgtgtgtgtgtgtgtgttgggggaggggggatggaggaaagggggattctcccaactcttctgcagag

SEQ ID NO: 200279 - DNA, 332 bp, Homo sapiens
  chr6:10424087-10424419
  hyper
tttcctagcgccttcgaagatactcccaagggcccccaaaatagatcagcaaaaagtgttgggggtggggggagtgaaaaagccagttcttgaagactgtaaggtcccctttcgcatctcagcatctggagtgtgcagggaattcctgaccagtggttttgctccctccaatcccttgcctcccccctcccatgttatgcacttgttcttggagagatggacgttaaagaagcgtcaagcagttctcactgcaaataaatggtgcagaaataagagagagaggatgaaagcctaggaagttataagtgatcctgacccgacccagccaccag

SEQ ID NO: 200280 - DNA, 211 bp, Homo sapiens
  chr6:10694859-10695070
  hyper
cctcctgatgtcacggaaatgaagggcttcgcagaggatgtcccgcccgctcccttcagacgggcgtagctggcaccttcctgagatatgcctgcttgcccccgatttttttctccttgcagtgagaacctcctcatgtggcatctttacttattctcttcttggaaaatccatgtgacctccccgcgcttaaagtgtttccacgttacag

SEQ ID NO: 200281 - DNA, 110 bp, Homo sapiens
  chr6:10723051-10723161
  hyper
cgagctcacgtggtccggcttgtgcaagtcccaggtccaactccgggtctcctgcttttggccactcaggattggacctgggactgatactggtcggccctgcaggcgct

SEQ ID NO: 200282 - DNA, 85 bp, Homo sapiens
  chr6:11043616-11043701
  hyper
cagttcatcggacacgggtgaacacacacacacacacacacacacacacagcttactgtcaggcagttcatcggacacgggtgaa

SEQ ID NO: 200283 - DNA, 116 bp, Homo sapiens
  chr6:11537480-11537596
  hyper
cagtatccacctcaccgagttcagcagccccaccttgggtcagggctgcccctgcagcgcgggcccccgaaatgcccgcaccgcccacgccgcccgcaccgcgcgcacccagccgg

SEQ ID NO: 200284 - DNA, 224 bp, Homo sapiens
  chr6:11537920-11538144
  hyper
gaggcgcgcgcgtgcgcgtgcacgagtggcccgccggcggctgcgggtggagggggcggttcctcgagtgtcggcgacccgagggcgggcaggcgggcggcaggtgccgccgcagcctctggctggtcccgcgtctccgtcctccggcggcgatgagctgggccctgtcgggggctgcacctgccggctgcccatcagcaccggcctcctggcgtgacctcggc

SEQ ID NO: 200285 - DNA, 146 bp, Homo sapiens
  chr6:13574018-13574164
  hyper
gtgctggtggcaagccggaatccaagaaaaggaaagactccgattttaagggaacggggacatgcggagccacgtgagtcactgggtcccagagccacggaaggctctcagctcagcagtcagagtgcactcgtcattgcgttcga

SEQ ID NO: 200286 - DNA, 66 bp, Homo sapiens
  chr6:13615519-13615585
  hyper
gaaagtaggcttgcgctccgcttgtagctgcttccgggtcagaggtcagacggtctagcgctgcgt

SEQ ID NO: 200287 - DNA, 266 bp, Homo sapiens
  chr6:14117386-14117652
  hyper
ataatttaaacaggacggtactgactgataacctcccggggaaggcagggagccaagtactacagacttgtatgtttccatggaaatctaacgcgcctttgattatcacagattctggagaagagtgaggacttgggttcaccagtgcgttcccaaggacaggctgggcttctgaggaagttgcccaccctctcggaatctggtttggcctccgtaaaatgggcagatcccgctcggatggcccggttcccggcttccttttgcgg

SEQ ID NO: 200288 - DNA, 128 bp, Homo sapiens
  chr6:14211103-14211231
  hyper
gcctgcttcctacccgcgccgccgcccactgccccgtacaggggtcgcagccgtggagcgtgggaatgggacagtcccattttacagctctcgttcatcccgcctgcggcaggcggctcctgacaggg

SEQ ID NO: 200289 - DNA, 203 bp, Homo sapiens
  chr6:16129914-16130117
  hyper
ccccccaacccagcactttcccggaagaaggcggctccgcacacctgccgcaggtatgtgcgtgatgccgcctgtcgggtccccgcggcgcctggcagtgccacccgcgtgccaggatgggatggagtggctcgaagcagtctcgggccccaggggttcttggcagacaagccgggcccttgtctcacgctgcttctcaggct

SEQ ID NO: 200290 - DNA, 216 bp, Homo sapiens
  chr6:16761690-16761906
  hyper
tgatgtctgcggtatactctgctctctcctcctcctcctcctcctcctcctccccctcctcccgctcccctcccctccctcctccctccgcccgcccgccctccctccctccctcgcgctctctcgcgctcgctcgctcgctcgctccagtatgtaaatgtgtaatagaagccaaatatggagcagttggctgccgccgccgcagctcaaggatcc

SEQ ID NO: 200291 - DNA, 152 bp, Homo sapiens
  chr6:16763513-16763665
  hyper
aggtgaaggttagtacgtaagagcataaccgggtaaaatgtcccctcacccctatcctcacccccgcccccaacaccctgcttggcaaagacgacttcagaaaggagcagaagcttgttggctttatatagaaaagacgtatgctttgtgct

SEQ ID NO: 200292 - DNA, 444 bp, Homo sapiens
  chr6:17101829-17102273
  hyper
tgttggtttctgttcgtgcgaccgtctttctgaggtcgcttttgtgccactgccttctggtgctgtcggggccgcctccacaccgtcctccggccctcaacagccgtctctgcgactggacacctgcctcgcatgccacacgatcaccttcactacagacagtgtctaaaaacaaggatgtggtccaggcaccaggggtaggggcgtgtcacacacaccgtgtcttacaaagaggaaaaataagaggttcccgcaagatgcttgcgactctggtacttttcaaagtaacgcagccaggcagcgggctttcccccggcccctcgctctggatagggctgccatttgcatcctagctgtgatttagacacctccaaccttctagttttcagttacaagagtcccatctccgcccaggtcccaggtctgcatgacgtaatttattgt

SEQ ID NO: 200293 - DNA, 65 bp, Homo sapiens
  chr6:17281262-17281327
  hyper
acggcgggagggacagaccagagccgaagctgcgcggagttcctcgcccctggccccgccgccgc

SEQ ID NO: 200294 - DNA, 89 bp, Homo sapiens
  chr6:17281328-17281417
  hyper
ccccccgcccgcttcggcgctcggacgctcttcccgcggaccctccccacaccccacccaaggcacctgattcctaaggaagaaaaatc

SEQ ID NO: 200295 - DNA, 564 bp, Homo sapiens
  chr6:17281534-17282098
  hyper
cgatccggagaatttgtacggtgaccggcagggggggcgggaggagagagcgaagtcaagtctccagggccgctggcgacttcggaagccgcgcgcccggcgctctcggccgcccccggccgctcgcccccgccgcgccgccgccctcgcccccgggctcgcccttggcccccggcggccgcgaaagggtgcgggagacgcggagccggaggaggaggcgcagccgctgcccgagccgcagccgcagccggagcccgagccgcggggcgggtgcgaagatgcacacgacccagaaggacacgacgtacaccaagatcttcgtcggggggctgccctaccacaccaccgacgccagcctgcgcaagtacttcgaggtcttcggcgagatcgaggaggcggtggtcatcaccgaccggcagacgggcaagtcccggggctatggatttgtaagttgcacggactgggggtgacggggagggacggagtggcggctgaccccggggatcgggagcttggagtgaggggctcggcgtgacccgtgaggagccccgcgggtagagcggc

SEQ ID NO: 200296 - DNA, 195 bp, Homo sapiens
  chr6:17282217-17282412
  hyper
aggggtgaaaggagagacctgtaatgacggcgggatttggggtgcggagggttgcgagggaggggccgcaaccctgaacaattgcattcccgggctggatgccggttgttaagcgcgctgttgctttgtaaaaatgcgtgtgttctggtgttttggctggggcagggaggggacaccccacgaggtctggggctg

SEQ ID NO: 200297 - DNA, 48 bp, Homo sapiens
  chr6:17393745-17393793
  hyper
ttccactccccacccgcgtggctttgctctccctctcccccctcagct

SEQ ID NO: 200298 - DNA, 759 bp, Homo sapiens; identical to SEQ ID NO: 112932
  chr6:17393824-17394583
  hyper

SEQ ID NO: 200299 - DNA, 201 bp, Homo sapiens
  chr6:17987165-17987366
  hyper
cgacaaacttgaagccgtcctcctaacaataggaaagagcactcccattttcctggctcaaacttgcgggaccccgcgaggctggatcctcccagccgccctctcggaacccgctttacctttctccctgtttggtgttagaaggaggagggtgcaggaccgtttgattcccttccatctccaccacgcacttggtgttca

SEQ ID NO: 200300 - DNA, 1474 bp, Homo sapiens
  chr6:18263766-18265240
  hyper
tccaagacctacaaacttcccgtcaaatgatgaaatgttaacgaacgtttagagcggacgagaagtcggctgcactccaatacatctctaccacgctaacaaatactttaaaaaccggaatacacaaagtcaattctacgccatcgctcaaaacaaaagcagataaattgtgcacacattctcgctgaaaatcactccgacttcacgcctctaaacaccaaaagagcaagaaaactgtttcctgggtgaaaaatacaaaaaaacttcggtctgaaaaattcatcagttgggatgcgactccccccacctttttcctcctcctcctcctcctcgtcgtcctcgtcctcttcctcctcgctctcctctctgggaccgggcatttcgggttctttctcggacgcgggctgggtgggggttccctccccctccgcagcaggggccgaggcggacatgctgtgaacctgcatgcgggaagaaagccggacgtctcggtcctcctactcccgcaggcaggaccgggcggccaccctgaatgatgctacccttcccgcgggacacctgccctgaaagttgcctcctcccatagccgggaccgcagcgctcagtccccaggggcggcttccctcccgctccgccgccgccgtccagggattcccgaggcgggaaaccgcgcccgctgccccgcgtgcgcgcgcgcccgcccggcctgcgctgttcccggcccggcccgagctgccggccctccacgtcccctcccccgccccaggccgccgtccaaatggccgcgtccctcccccgtcggccgcggcaggggcgaccgggcctccggcgtcccgaagcagcccttaccgcggatttcggccgccgcgggcctggcacgcgagggcacgaggaggttctgggaggcggcggcggccgacgccgaggagaaggcgcgcgggccgctgtctggcgtgacgctcgcgccgcgcgctcggctccccagaatcaacaagattttcaaaatggcggttcgggaaggagagcgggaatgcggcgaccaatcagggccgcgagctgggagttggcgggcgcggggcgggggaggcggggcggccgggtgcctccgcgggaagctcgggcgggcgggaccgcgaggggtcgcctcggccgcgggcggagggatgcgcgcgcggggctctccccggctgcgcctggagtgtggtcggcgctcgggccccggagtgcgggcgggctgtgtcccgcggggcgggcgggagcgggaggcgaggcggcctggcagcgcggaacggaaggacgctagggggcctgcgtgtttattgtttccacggtcgcttcctggaaaagatgatgagcagtcccgggccgcggaggggcgcggcgggcgcggtaaagaagtttagagatctccgaagtcgctatcgacagtgttactctgaggcggaggagaattaatcagcggtctcatcaatgc

SEQ ID NO: 200301 - DNA, 55 bp, Homo sapiens
  chr6:18277378-18277433
  hyper
ggttttctgaagttgcccagcgcctagaatttcaaggaccgcattcgctgcctcc

SEQ ID NO: 200302 - DNA, 39 bp, Homo sapiens
  chr6:18278043-18278082
  hyper
ctggaaacccgcacccccggctctgaggtcagggctggc

SEQ ID NO: 200303 - DNA, 62 bp, Homo sapiens
  chr6:19691576-19691638
  hyper
cactcttccagcagcggtcatttaagaaaaaaaaaaattgataataatgtggaactccctcc

SEQ ID NO: 200304 - DNA, 76 bp, Homo sapiens
  chr6:19692318-19692394
  hyper
atccatcttttataagtgctgtggcccacttttaactggatctcgtggagtactcagatacagccggtatagtgaa

SEQ ID NO: 200305 - DNA, 521 bp, Homo sapiens
  chr6:19804681-19805202
  hyper
gggccgaacccaaccgccagaatgtctgccgagcctagcatgggatgctgcccagcaaaacagcacccagggagagggcgactgaggaagacagcctgcaagcgcgcttcagaaaggactgggaccagagccctagaaaactacagcgagtggattccctggcaggggaaacccgcgagagcctgggaaaaaaaaaaaaacgagagggagagaaaaaaactcacccgggcgccctgaagcccagcgcaagcaagcgagtgagcgcgcaggctggctgggctgctccagctggaagtcattgtgcgggctggcgtctgcgttgtcagggcgaccgcccggccggcgccagcggagcgggggaggcgggctccgtgaatgggtgacgtcacgcagccggcgccaggcagtctgggcggccgagccaatgaatcagctgtccgggggaggcagcgcagcgcggcgcgcgggagctgggtgcaggaatgcgcctggagccgcgcggcccgggagggcgcgagacg

SEQ ID NO: 200306 - DNA, 876 bp, Homo sapiens
  chr6:20212230-20213106
  hyper
acacaaaaaccaactgtctagtgtgtggctgtaaaatacgccatggaggcggagggacggtggctaacactttcgcccgccccgtgcacgcgatcgctggggagctggggtcgctgcgctcccggcctgcagttacctggtccagcgggatgcccaggagctcgctgagcgggtgcaggtaggtggagcccgtggtgcggtaggaaaggctggacggctgcggctctgctgccatcctgcatcttcgggaggtggctgcccctgtcccagcccgcaacaccccctgctcggcgtcctcccgcccgggtgctcttgggtggttgccccgagaggcgcacggccgcctggttcgcgggggagcgaacgggaggccggggaatgcgaaccggcgcaaactctcgaggcgcaaactctcgaggcgcaaacttggctttggcgctggcgctgcagccacgggcgccgtaggagggccgggcccaaggcgccccgcttcccgctcccttcctctccgcgcccattggcccggccgctcgggacggccccgagaggagggaaggagggaggaaaagtggggactccgagcccggcccccaagcgccgcccggcccgcccagcctggcctgcaccgaggccgaccgggagagggaaagcgacgccagcgggcgccgccgcctggccctgcagctggaggcgggacgcgcctttcctcctcccgggctgaccgtcctagccccccgccagacaaaacgacctcacccagcgggcgccttccactagagagcaccacccaccccgccccaccctgttttggtttcgccgccgcagtcgaagcggctgagtggctgcgtttccctttcaagccgtagagggttcctc

SEQ ID NO: 200307 - DNA, 324 bp, Homo sapiens
  chr6:20401055-20401379
  hyper
gggataggtttgagtcgttgtgtttgcttccagtcagagaacttcctacaaaactgaagatataaagtgctgatgcctgggcgtgcctgcgttcgttgggggcacgacgtcatcgtgggaagcgtgtactttttcggattactgcttggcggattagaaacccgtagatcagttctaggttagccctgattaactgccctgggtgtttctgggccagagggaatgtctgctggattcaaaccaatatccgttgtaagacaaaagagttaatttgtactttacccctatccaggctaataatgaaggtaccgggaatgatctgga

SEQ ID NO: 200308 - DNA, 1131 bp, Homo sapiens
  chr6:21594475-21595606
  hyper
acagcaaactgcagcgcggtgagagagcgagagagagggagagagagactctccagcctgggaactataactcctctgcgagaggcggagaactccttccccaaatcttttggggacttttctctctttacccacctccgcccctgcgaggagttgaggggccagttcggccgccgcgcgcgtcttcccgttcggcgtgtgcttggcccggggaaccgggagggcccggcgatcgcgcggcggccgccgcgagggtgtgagcgcgcgtgggcgcccgccgagccgaggccatggtgcagcaaaccaacaatgccgagaacacggaagcgctgctggccggcgagagctcggactcgggcgccggcctcgagctgggaatcgcctcctcccccacgcccggctccaccgcctccacgggcggcaaggccgacgacccgagctggtgcaagaccccgagtgggcacatcaagcgacccatgaacgccttcatggtgtggtcgcagatcgagcggcgcaagatcatggagcagtcgcccgacatgcacaacgccgagatctccaagcggctgggcaaacgctggaagctgctcaaagacagcgacaagatccctttcattcgagaggcggagcggctgcgcctcaagcacatggctgactaccccgactacaagtaccggcccaggaagaaggtgaagtccggcaacgccaactccagctcctcggccgccgcctcctccaagccgggggagaagggagacaaggtcggtggcagtggcgggggcggccatgggggcggcggcggcggcgggagcagcaacgcggggggaggaggcggcggtgcgagtggcggcggcgccaactccaaaccggcgcagaaaaagagctgcggctccaaagtggcgggcggcgcgggcggtggggttagcaaaccgcacgccaagctcatcctggcaggcggcggcggcggcgggaaagcagcggctgccgccgccgcctccttcgccgccgaacaggcgggggccgccgccctgctgcccctgggcgccgccgccgaccaccactcgctgtacaaggcgcggactcccagcgcctcggcctccgcctcctcggcagcctcggcctccgcagcgc

SEQ ID NO: 200309 - DNA, 93 bp, Homo sapiens
  chr6:21664626-21664719
  hyper
gaacgggacgcgcaggaacccggcccgacgggcgcggctcacacccgtgctcttcctgcgctctcggcctcactttgcggccagagccgcggc

SEQ ID NO: 200310 - DNA, 174 bp, Homo sapiens
  chr6:21664749-21664923
  hyper
ctccgaccccactgcccagtactgtacgcgtccagactaaagaaacatcattcgcttaaggggctgggaaaagcgcgtgctccgctcgccctggcaccgcgggtcgcccagctcgcagactgggacgggcggtgcaagaggtggtgctccctgtccaggaggggacgcggaaga

SEQ ID NO: 200311 - DNA, 431 bp, Homo sapiens
  chr6:21665191-21665622
  hyper
taatgcccctccccccgcaagccaacccaggacatagcccccaggtccccaaggttccgtctacctcatccttctacccccaaacttcaccaacccgaaaggattccaagtctgggatggggagaaaggaaagagggtggaggcaaaggtgcgcgacgggctggataccaactggagggtgggtgttcgcattgaaatgtttttttcttttgccctagaaattgcttccccatgcgggcccctactctctcccatttcccccacctccctgctttctttttcttcaattctagtggatctagaaggaaaacgagtgctgctctgagtcactcagcgagctaatgctatggcccgaagttgggatcagggtcgaggggtgggggaccatgtggatggggtcccaattctggaggttgagaatgactggaagg

SEQ ID NO: 200312 - DNA, 268 bp, Homo sapiens
  chr6:21666189-21666457
  hyper
gggtgaatccgagaggaggaaggaggatgaagagcctagcctgcgccccacctctgattgtgtaagcgcctttatctagggttgaccccctaccctttgcattttgtctcttgggatgacgaaaaatggacagaaactcgacgcccaagtgaatgtttcacattgattggcagggaaagtgcaaacaaagaggtgcatctccgggaaacaatgattttggagatcccctgcccaccaccccagacttgtgcgcggtgcggagggggcc

SEQ ID NO: 200313 - DNA, 351 bp, Homo sapiens
  chr6:21666588-21666939
  hyper
gggagagggagggggcggggagggaggggagggagagaggaagaaggggtgagagggagaaacctgccgccgctcgccgcctctttgtctgctccgggacttggaacaaaagggggaactctgatgaactctctttcctcccctctcccccggacgccggggtatctccctctcgcaactttgccgccccgactttctctgctgtcaggccgggaaaaagtgtccgaacgcctcgtggactgcagcgggggaaatgtcccttaaaagtgcgacgaagtggggaagaaggtgagtggggactgttgtcttgtttacctctctcccctcaactcgccccgctccccgcccttc

SEQ ID NO: 200314 - DNA, 263 bp, Homo sapiens
  chr6:22146853-22147116
  hyper
tcctcacagctccacggctgcatctccgtgggcacgcaagcttcccctggttacctgagctgctcctgccgtctcccgcctgggcttcgccgtggtgcacccgatcccggaatcgtgcgtctgcgccctgcgaaagaaggacctgctggcggagctccggccggggtctcctgcctcgcagctgggcgaggggacttggaggacagggtgaagctgcagaagacctggggtgggatggctagagaggacgccaaggactgggg

SEQ ID NO: 200315 - DNA, 201 bp, Homo sapiens
  chr6:24360170-24360371
  hyper
ccctccgccgtagtacctaccgacactcgcgtgctggagaggggaggggagctcgggcgccggccgcgcgggggcggggcggtgcggctcgggtggcacagtggtgaactctgcggcggctgcgcgccgctcacgctgttcctccagctgctgttacctctgcgggcctctctcacccaaggggaacggagttgttatttc

SEQ ID NO: 200316 - DNA, 805 bp, Homo sapiens
  chr6:24911019-24911824
  hyper
aaggagaaatgaaaaggtgaacctacctaacgacgacggctccttgtcatgtcaggggcacactcagggttctctggcatataaaagcctccgcaccaatgcaatgcccggagctgcccgcacctccggctttgcagacagcctgagctggctcacttgggtgaaggggaccccgggaggaagtcgggtggacgcgagctgtccccagcgccggctgccctgccgcgtccgctcgcagcagctgcggcgcgcggggtgaagttgcggggctggcgggcgcgagggtggcggagcgcggagctagagcggcggagcgggcggaggggcgggagccgtgaggagggggaggcgcggcgcgggggccggcggcgtcacttgtgctgggaggggagggcgggtggagacagctgcttgacagctacttcagcccaactccaggaggctgcgcttcggtgcctgcttccagctgatcgccggcacgccaggctcctttgcaagagctggcgcggcagctttggagtgacccgtggaatcgcgccggggagcgagcccggtggatccagcgcgctggagggagagggcagaggaaaggagccgaggcaaggaaaggccctttcagctaaccttttgggatctttcatacaagctgggctgtgcattgaaaaaaatgaggcggtggtgtatggggtgggggcggtgtgagggtgaggttggctgcccacggcaagggttgtgctggaaagccccgctgaagagggctgctttgtagggcactctctctaccggggctgctttggacacagct

SEQ ID NO: 200317 - DNA, 505 bp, Homo sapiens
  chr6:26027158-26027663
  hyper
gacgaaaagattaaccgccgaagccgtacagagtgcgtccttgacgcttgagcgcgtaaaccacatccatggcagtgacagtcttgcgcttggcgtgctccgtgtaggtcacggcgtcccggatcacgttctccagaaacaccttgagaacgccacgagtctcctcataaatcaaaccggaaattcgcttaaccccaccacgcctagcaaggcgccgaatggccggtttggtgatgccttggatgttatcccgcagcacttttcggtgacgcttggcacctcccttacccaaacctttaccgcctttgccgcgaccagacatgtctaaccagctgacaacaaaaaccaggtacgcgaaaagaaagcaagccacgagcatttatacacgaacatcggaccttattgagaactgaaagcgggagcgaggataaggaggcgttgctgcctcactttttgctccgcccctcgaggggcagtgacctaaggactgcgagggagaacacaa

SEQ ID NO: 200318 - DNA, 936 bp, Homo sapiens
  chr6:26031787-26032723
  hyper
aaaattatcacagctactttcgttggaataagtgggtggctctgaaaagagcctttgggttttaagactgatgaaaaagtgactttacatttacgctctttctccgcgaatgcggcgagcgagctggatgtctttgggcataatagtcactcgcttagcatggatggcgcaaaggtttgtgtcctcaaagagccctaccaagtaggcctcacaagcctcctgcagcgccatcaccgcagagctctggaagcgaagatcggtcttgaagtcttgggcgatttctcgcaccaggcgctggaacggcagcttccgaatcagcaactcggtcgacttttggtagcggcggatctcgcgcagagccacagtgcccgggcggtaacggtgaggctttttcacgccgccggtagccggcgcgctcttgcgagcagccttggtagccagctgcttgcgtggcgctttaccgccggtggatttccgagctgtctgtttagtacgagccatggcaaaaccacagaaaagcttgcctgcagagacgtctgtggaggaaaggaaagagctactcttcttttatagagtcagaccaccaactattggacccaagaaaattcaaaaatccccgcgcccttcttggattggtccatctctgtgcctggttgcagattaagagaggctcctgcccattaccgtagctactctgacgtcattttgttaaccccttagctgctatatccactgtggacaagtcttgtactggaaaagtttcctgaagtcttaaaatttacaaccacacaaagcaacgcggaaacctccaattgtttctagttaaaatataaaaaagaaatcagagaatattggagacgattagggaaatttgcatatgcgctttatttaaaattgtatttttctgggtgtcgcataagaagtgtgggcaattag

SEQ ID NO: 200319 - DNA, 35 bp, Homo sapiens
  chr6:26032843-26032878
  hyper
actgcagcttgggcgagagggagactccaccccaa

SEQ ID NO: 200320 - DNA, 310 bp, Homo sapiens
  chr6:26033434-26033744
  hyper
gttttcttaggcagcagcaccgcctgaatattaggcaaaacgccaccctgcgcgatggtcacacgccccaagagtttattaagctcctcgtcattgcggatggccaattgcaggtggcgcgggatgatgcgggtcttcttgttgtcgcgggccgcattgcccgccagctccaggatctcggcggtcaggtactcaagcaccgccgcgagatacaccggcgcgccagccccgacgcgctcggagtagttgcctttgcggagcaggcggtgcactcggcccacaggaaactgcaaacctgcacgagaagacc

SEQ ID NO: 200321 - DNA, 201 bp, Homo sapiens
  chr6:26087985-26088186
  hyper
acttttggaaccgcccactcccttcccccaactagaatgcttttaaataaatctcgtagttcctcacttgagctgagctaagcctggggctccttgaacctggaactcgggtttatttccaatgtcagctgtgcagttttttccccagtcatctccaaacaggaagttcttccctgagtgcttgccgagaaggctgagcaa

SEQ ID NO: 200322 - DNA, 180 bp, Homo sapiens
  chr6:26125817-26125997
  hyper
gacacggtcccccaaaaaaacctttgcttctagggatctggtaacagctgccccacccacaagaaatggagatctgggaccatggacaaatttctagagacctattttcctggattctgtgaatctcgccgaggttttcttccggatctcggtttctgcatttttttgtttgtttgcttg

SEQ ID NO: 200323 - DNA, 328 bp, Homo sapiens
  chr6:26126237-26126565
  hyper
attacaggcgtgagccaccgcgcccggccggtttctgctttgatcggaattaagtgggcagaaaagtctaggcgggctaagtcttgcctatgcatctgcgcccagctgctcagactggccaaacagacccagtcgtttagtctaacgcttctggaactccactgaagcgttttgcattgtttcgtttggagccttcaaatccgagtgtgtggcaggagataataatcctagcagaagctgtttactgctgacgcgcctcccacttcccagatactgacaccggctcagggcggatccagccttttccgctcttccctccctccacccc

SEQ ID NO: 200324 - DNA, 154 bp, Homo sapiens
  chr6:26156348-26156502
  hyper
aagcctgagggttcggggatcattatctgagaaaaaccgggcagttcggtgtagacaatttttatatttttggctttttttgaggtgtaacaaacacaactcgggatccgagaggacactctgcggctgccagcgaggcgggctggacagcgca

SEQ ID NO: 200325 - DNA, 132 bp, Homo sapiens
  chr6:26171886-26172018
  hyper
tgatgctgctggtccggagaccactttggagagttttactttaaaggaaatgaaactgccctaaaatgctaatactaaatagccacacaaagccggaaaaaagcaaagaatttcaaaccgaagatgagaggt

SEQ ID NO: 200326 - DNA, 36 bp, Homo sapiens
  chr6:26172371-26172407
  hyper
gggatatcggagacttcgaacaatccgctggagtcc

SEQ ID NO: 200327 - DNA, 341 bp, Homo sapiens
  chr6:26172767-26173108
  hyper
cttcccttgacctttttgctcctctcacaagggtttttcagacggctgaaaccaacgaaaagagtgaggaagcaggcagaaaatttcagctttagtctctcagcatcctcctgctttcttctcggggagctggcacttcccccttctctagtagctgtaaatacgcctcccaactccaaggagacctttcttgcatctcccttactgttctcacgcctgtagggctcttcgtgtgaggattcagtgtatgtatgtatgtatatgaatgtgtgcgaataattatttcctaattgagtttttttttaaaaaaatcatcttccggtacacgcagtgccgtactc

SEQ ID NO: 200328 - DNA, 211 bp, Homo sapiens
  chr6:26197657-26197868
  hyper
tcctccgtccatctttaactgctggtgttttcaaccctttcccctctgtgccatgtttctagcttttatttaaaacgtactttggttttccttggcaaaattgtgtctagctactaggatgacgtgtcttaatttttttttaaatgttggcgctgaaactggctttgatcaacgttttaaaaagacgcgcgctagttgtgattggccaagt

SEQ ID NO: 200329 - DNA, 106 bp, Homo sapiens
  chr6:26198468-26198574
  hyper
taacagctttgcaatcctaacgagccgctgcattgatcgatttaaattacatgtgacataaagtctctttgcattttaattagtttgcttttttgggtttttgttt

SEQ ID NO: 200330 - DNA, 213 bp, Homo sapiens
  chr6:26198924-26199137
  hyper
aacacccacttataaatggaaaaattattaaagaaaactgcaaaatagctatttacacagaaaatgtgagcccttttaaggaatacatgggtggctctgaaaagagcctttgttaagactgcttccttaaaaagccaatataagagttctcgttttacttgcccttggccttgtggtgactctcagtcttcttggggagcagtacagcctgga

SEQ ID NO: 200331 - DNA, 322 bp, Homo sapiens
  chr6:26204363-26204685
  hyper
ttggcttggtggtggagagggtgagatcttgcagttttcaaacacttcctaagggggttccgtccccaagagagcaagcagcagaaatgccagaggaaccgtgcctatggggacaaagctgaactcctcatggaaggagattactgcagttccggtcttgtgagccaaagctcctgttcaatcgtcctagagcatcccaagcagcaaatgattttaaacatgttaatgtatttaatctcatttagttgttaaaatatgcctaaatttcctctttgggaacgcaagacttgcagagatgactccatggagagcggactctgcc

SEQ ID NO: 200332 - DNA, 204 bp, Homo sapiens
  chr6:26205298-26205502
  hyper
tttataagttaattgttcctgtcaacaggtacgtatatttttcagccgttttttttttttcgttccaaattacatttggggtttcggcatacgattttttaggctacgatccttttatgtttattgtagtagggccttagattgcactgaaaaggctagggtaatagtgtctgtttaccttaccacttttattttgagtaccta

SEQ ID NO: 200333 - DNA, 76 bp, Homo sapiens
  chr6:26205712-26205788
  hyper
agaagttcctggggtagataagctcacgcaaggagaggttgcaagcattcatttcggaattctattaagccaaccc

SEQ ID NO: 200334 - DNA, 70 bp, Homo sapiens
  chr6:26205992-26206062
  hyper
atccatcatgattgcgtccttatccctccctgatttcctgttttctcgcccttctcgctacataagcccc

SEQ ID NO: 200335 - DNA, 223 bp, Homo sapiens
  chr6:26216853-26217076
  hyper
cttagctggttcaggcatgctgtcagaaaacaataacagcagtgagaatgaacgcacttaaataaaagctcgtgtctagagtctctccttttataggcctttcatgcaaataaagaattcaaaatatccagctctgattgggcaatgtgttagtgacgcatacatgtaaaatagccttcaccttatttcctttctaattggttggctcgtcaaagaacaattt

SEQ ID NO: 200336 - DNA, 209 bp, Homo sapiens
  chr6:26217156-26217365
  hyper
tctttattcagtggattgttagttcttctgctgttaggaagccactatgtctggacgtggaaagcaaggcggcaaagctcgggcaaaagctaaaacgcgttcttccagggccggtcttcagtttccagttggccgtgtgcaccgcctcctccgcaaaggcaactactccgaacgagtcggggccggcgctccagtgtacctggcagcgg

SEQ ID NO: 200337 - DNA, 327 bp, Homo sapiens
  chr6:26217578-26217905
  hyper
aggccaagggcaagtgaaatgattactagtcaaatccgtcagtgatcccgagtcccagaaaccaaaggctcttttcagagccacccaccttttctgtaaagtgctggaatacacatacgatgcctgaaatctcaatgttcactgtcctaatttttaacgaacgcttctgacgttactggtcagttctttattgaaatccttgctcacatttcatgcactaatttatcttactggtgtttctttgcagtaaaaatgcgtttataaaggtatacaagaatagaaaccgaggttgtgacaccaaggtttcactgcgttattttgtgtata

SEQ ID NO: 200338 - DNA, 123 bp, Homo sapiens
  chr6:26233855-26233978
  hyper
gagccacctcgtcacgcagtgcagcccccacactatttacaaatacagtacctgagggccgatatcccaaagctaaggcttatcaaaggcctgcgaaaagacagacaccgggcaccaccagca

SEQ ID NO: 200339 - DNA, 33 bp, Homo sapiens
  chr6:26249927-26249960
  hyper
gttgttttgagacagggtttcgctgtcacccat

SEQ ID NO: 200340 - DNA, 137 bp, Homo sapiens
  chr6:26250001-26250138
  hyper
gcctcccaggtccaagcgattctccttcctcagcccccgatatagctgggactgcaggagggcgccaccacacccgtatttttgttttttggttttgtacttttagtgaagacgggttttcactatgttaggcagac

SEQ ID NO: 200341 - DNA, 39 bp, Homo sapiens
  chr6:26251501-26251540
  hyper
gataattttaaatccggaagctgcaatttggtaggaaac

SEQ ID NO: 200342 - DNA, 134 bp, Homo sapiens
  chr6:26271212-26271346
  hyper
ccccacgaatgcggcgagcgagctgaatgtccttgggcatgatagtcactcgcttagcatggatggcacacaggttggtatcctcaaagagccccaccaagtaggcctcgcaggcctcctgcagggccatcacc

SEQ ID NO: 200343 - DNA, 88 bp, Homo sapiens
  chr6:26272105-26272193
  hyper
agcaacaaatgttaactgaattctattttgtcccaaatggtgttttgcttcggttgagaatttttaaggcacaggctaattttaggtt

SEQ ID NO: 200344 - DNA, 178 bp, Homo sapiens
  chr6:26272253-26272431
  hyper
acccccactagcctcttctgcaggataacttgaacactgcagtggccctgtccatctaaactttacaaggttttgtaaacgttactgaacttgcttcttcccgactacattaaagcacttacttgagatattaaacattttctcattagtcctgtttgcctagtcagtcacttgtata

SEQ ID NO: 200345 - DNA, 227 bp, Homo sapiens
  chr6:26272853-26273080
  hyper
cttataatctatattcggcaaagtagactgtgctatctcctgaacacagatttcagccaatcgaaaagcaggtgtttaaaaaaatttaaaaaaaaaaaaaaaaaaaaaaccacttctgacttacatacttatagttgaaaggtcaaattatgcaaggttgagcttctgggagagccgatgagatttaggagttcagaaatggcctatcatatattcagacactaaaa

SEQ ID NO: 200346 - DNA, 205 bp, Homo sapiens
  chr6:26322363-26322568
  hyper
gtgccacagtaccaggcctgtaacgatgaggtttcttcacccctccagtagtgggagcactcttgcgagaggcttttgtagccagttgcttcccgggtgctttgccaccggtcgatttgccggtcgatttgcgggcagtcggctttctacgagccgtggtatagagacctccttacttaccccgcttctcctttggctggagctc

SEQ ID NO: 200347 - DNA, 78 bp, Homo sapiens
  chr6:26322843-26322921
  hyper
aggcgtgagccaccgcgcccggccattagatttttttttaccattagattaaacttcgtctttccccaaccaggctgt

SEQ ID NO: 200348 - DNA, 90 bp, Homo sapiens
  chr6:26331613-26331703
  hyper
gtaatatgtaatgtactccccgccatacagttatctgagccagcgagctaaaaactgttgaccccgacgtgatttgaacacgcaaccttc

SEQ ID NO: 200349 - DNA, 323 bp, Homo sapiens
  chr6:26331811-26332134
  hyper
ccaggcagctattaacagatacaaaatagtgcctagctgcttccctctcggtaaaattgctgtccgcccaatcactgattttctctgcctctgaattgcttcattttcacctgttcttgtttatatttcattccgtttcttacctagttttccctgtatattccaaatatagacgtcttgggagtttcgttgtttttatctttatagaaatacattctgttgaaggtcagtcgctttggaatggggttgtagagaggaggtagcgaagagggaataatgaggatccttcctctcccaactcctcattaaggaactctgatcaa

SEQ ID NO: 200350 - DNA, 264 bp, Homo sapiens
  chr6:26332283-26332547
  hyper
agagagttgatttcacaccccgataattcttcaaaatcagatcgctggacctgaaactgaccctaaaaagaacaagaaatcctgtcatcaggagtaagtgggttattctggcactgtgctttgtttggctggttaaagaacctgccttgggtaaccagagatcggagttttctaaagtcagcggggtttgtctggggaccccgaatttacatacagacgatctccgcaaatagtgcaggggccgctttgaactcttaggaaaag

SEQ ID NO: 200351 - DNA, 118 bp, Homo sapiens
  chr6:26383468-26383586
  hyper
atgggtgagttgtatcggaaaatcgtcatgtgaggatcagaggggaaaagaaaacagaggttagttctagaaggtaggaaagggagaggaggcgctacagctccggggtgggggcggt

SEQ ID NO: 200352 - DNA, 141 bp, Homo sapiens
  chr6:26458199-26458340
  hyper
tctccaaacatggcgacctaggagaaggggaagaacaattttttctcctcttttgggaaggtttgtgtctagtagtgcctgtgcccctgggcagattggagagaagagggacgactggagaatcgtcgagaaccagcggag

SEQ ID NO: 200353 - DNA, 31 bp, Homo sapiens
  chr6:26502209-26502240
  hyper
atacactttcgtatggatcagttactttgga

SEQ ID NO: 200354 - DNA, 80 bp, Homo sapiens
  chr6:26521682-26521762
  hyper
gtactctgtactccgaaaataatttcagaacctaccggtgttttgaaatctcacctcctttttccgtttctcctctgtct

SEQ ID NO: 200355 - DNA, 247 bp, Homo sapiens
  chr6:26577475-26577722
  hyper
ataaggatccaggcaaaaaaaatgtattagatagctctttatgctcaaacatgcacaagtaaaccatttttggttacatgagtaaaaaattttaggaataaactagaaatgtggtagcttcaccgaagggcacctgcgtagatgaaaagcagcgtttccaggaagtctgaggcttcactttttccttgtgaaatttgtacctcgcaacactcttcacctccactccctccctgagtctcctgctggc

SEQ ID NO: 200356 - DNA, 143 bp, Homo sapiens
  chr6:26987824-26987967
  hyper
cacttgaaggtcctccagggaacacctgaggcagtgggagcgtctgccctttcctaagtctccttggaaagaagtattcgctttcgtttccgcaaacaaagcatgctccgcgctttcaggaccggtggctcccgtggagaccg

SEQ ID NO: 200357 - DNA, 153 bp, Homo sapiens
  chr6:27059533-27059686
  hyper
aggggtatgattctcgcttcgggtgtgagaggtcccgggttcaaatcccggacgagcccacttcattttcgcccaataaggtttaaggatatttaaagtatttccccaaatagtcatacccaaaaatatgtactttcaccacatcaacagtag

SEQ ID NO: 200358 - DNA, 57 bp, Homo sapiens
  chr6:27059899-27059956
  hyper
tataggaaggaggattttaatttacacttttaactccagcttcggtgattactctct

SEQ ID NO: 200359 - DNA, 41 bp, Homo sapiens
  chr6:27064587-27064628
  hyper
tttagcctgtgattgatttgcgtgggcttctgaagagaaac

SEQ ID NO: 200360 - DNA, 239 bp, Homo sapiens
  chr6:27099525-27099764
  hyper
ccttctcaaaaaaaaaaaaactgattatgttgccataaagggtccctttaaaaaaaaaaacgctctatccaacgaaaactaattagaaataaatctccttcccgaaagcgataaaatactaaagaatgagaaactgacagtttactgagtttgtaaggaaggccaaataaaggcggggtttggattcctttggcgcacccaagccgaccgtggacttcctggatacaacaaccaatcag

SEQ ID NO: 200361 - DNA, 47 bp, Homo sapiens
  chr6:27099874-27099921
  hyper
gtttctaacgtattttaattggtttcgaacttataatagaaaatttc

SEQ ID NO: 200362 - DNA, 43 bp, Homo sapiens
  chr6:27100142-27100185
  hyper
cactgtttacttagcgctggtgtacttggtgacggccttagta

SEQ ID NO: 200363 - DNA, 60 bp, Homo sapiens
  chr6:27100389-27100449
  hyper
ttcagaaccttgtacacatagatggaatagctctccttgcggctgcgcttgcgcttcttg

SEQ ID NO: 200364 - DNA, 60 bp, Homo sapiens
  chr6:27101049-27101109
  hyper
cgggcaacgcggcccgcgacaacaagaagacccgcatcatcccgcgtcatctccaactgg

SEQ ID NO: 200365 - DNA, 101 bp, Homo sapiens
  chr6:27101206-27101307
  hyper
aaagactgagagccaccacaaggcgaagggcaagtaactatctgtactagtttgtggcagctcaagtaaaatcgagtccaaaccaacggctcttttcaggg

SEQ ID NO: 200366 - DNA, 146 bp, Homo sapiens
  chr6:27125326-27125472
  hyper
tgaggtgcgagcgccgccggacatttcctgacggctcaggtgggcaggctgagtgcgcgagcgcctcactggcttctcataggtacctgggtcaggacgaagccacatagttcctcgtgatgagaaactcacttctggcacctgtc

SEQ ID NO: 200367 - DNA, 98 bp, Homo sapiens
  chr6:27125473-27125571
  hyper
agatgccagattccatgccaagcccccgaagattctgactagtttggcaaaaaatgggatctggcaggtccacttcaaagcagcgccctcttcctttt

SEQ ID NO: 200368 - DNA, 245 bp, Homo sapiens
  chr6:27125798-27126043
  hyper
tgtgtaaataaggacgaaagactgcaccattctttagatgacaaaaacagacgtttctgggaaataagcaaaggaagagccccacaagcagcggcctctggtggcgtgccgtgatcgtatagtggttagtactctgcgttgtggccgcagcaacctcggttcgaatccgagtcacggcagtaccttgatgtcgcctcaatttctcaacgtactgagcagtaccttgacgtcgcctcaatttttca

SEQ ID NO: 200369 - DNA, 51 bp, Homo sapiens
  chr6:27173864-27173915
  hyper
aatgtttccgcctggtttcaaaccggggacctttcgcgtgtgaggcgaacg

SEQ ID NO: 200370 - DNA, 365 bp, Homo sapiens
  chr6:27218586-27218951
  hyper
tcctgcgactcctccgggtgggctggggggagggaactcggactccagggccccagtctcagataataggaataccctcccaccacgcccctaccttcctcccgcgcccaaagaattttgcacaagctgtcctcacaagagcccgagattacacagcgagtaagtgacacagaggcagaaagatatgcgattccaacccctcagcccgcaggctgacggcgtctcctcccttagttcccccatctcattttcgcgtcggtcgcctcctccgccccggtgcgggccgtgctggatttctccgagtataatgacgtaaggatggcgggcagcaggtgcgggacggggaggggtcccagcgggcggag

SEQ ID NO: 200371 - DNA, 615 bp, Homo sapiens
  chr6:27218980-27219595
  hyper
gcggtccgcccacaggtggtatcccgaagcctaatgagcaccgcgatcggcgggtccctggaggtaggaggtggggcctagtccgagggggactgggagggaaaagaggcctcggatgccagggaagaggaggccagagaagggcgaaacctgcaacgtggcggggtctaaggaaggtcggagctcgggggaatacgcaggttttggaagaaggcgggagctgacgaagaggaggggcaccaggaaaagaggcgctccccagagagggcggggtttgggcagggacaatcctatccggaggtgaggctcaaggtggggcggggccacaatggaggacggggcctgcagggaagacccgagaaggagggctgcgaggcaggggattgggggcgggggcctgggggcgggggcctgggccaagagctaggtctgcaccctctgagtcccgctaggggaaagtggggaacccaaggaggacgcaggtcctgggtagggaaagccgaggcccagcctaagtcttggcggacatcgcctcttgcttcccacagtgccgggcggcggtgtccgtcgccttcgctgaagtggagcggcggctgcgctcgggtggggcggctc

SEQ ID NO: 200372 - DNA, 171 bp, Homo sapiens
  chr6:27219656-27219827
  hyper
ggagctgttgggggcgctgcaggcactggtgggaggtgtagtgcagtatgatgggcagacgggagcgccgctaagcgtgcgacagctctgcggacttctcctcgggggcgggggcaaccgcagccactccacgccctactgcgggcttcgtcgggcggtgcaggtgagcac

SEQ ID NO: 200373 - DNA, 164 bp, Homo sapiens
  chr6:27343032-27343196
  hyper
agactacatttcccagggttgtctgcggctggagagatttagggtttggggcgtggctagcacaggcctgaggtcctaattgggaggtgtaggcatggcggctggagagtctgatctatgtgacacctccactgtgactagggtataacgtgaataatttgtat

SEQ ID NO: 200374 - DNA, 207 bp, Homo sapiens
  chr6:27440466-27440673
  hyper
tgactcacacccctgcgagctcggataacacgaagacacacctgttgcagagcgttaaagctggaaggtggacaaacagggcggggcccggcacccgacttccccttaggccagaacaaaagaacaaagccctccaagggatcagggcgggaccgccccgcacagaaggaggcgaggtgcgcccccttcgaggactccccagctttc

SEQ ID NO: 200375 - DNA, 216 bp, Homo sapiens
  chr6:27447357-27447573
  hyper
ttggtaggggaaacgtgtgactacagagcaaagaaagatggacaatagcgagtaacttcacagggatttcctaagagctccattttcacgtcaattcctcgttagtatagtggtgagtatccccgcctgtcacgcgggagaccggggttcgattccccgacggggaggaggcttaaacttttttttagaaaagcacacttccggtaaacacagtct

SEQ ID NO: 200376 - DNA, 33 bp, Homo sapiens
  chr6:27598639-27598672
  hyper
gggagagttttggggaatcccgaaagacagccc

SEQ ID NO: 200377 - DNA, 38 bp, Homo sapiens
  chr6:27636297-27636335
  hyper
tagaaaaacaaaaatatcaacgaatttatatatggttt

SEQ ID NO: 200378 - DNA, 90 bp, Homo sapiens
  chr6:27636531-27636621
  hyper
ctgaatccgaaattaagacgccctcttattcgtcaagcgagaaggctatttacgttcgtttccctttattgtgaaaaatgaaaagaacag

SEQ ID NO: 200379 - DNA, 108 bp, Homo sapiens
  chr6:27640312-27640420
  hyper
cgaggacactttttgtttcagaggaagtcgtgttaggctctttgactctctcgctttttaatgttcccacggcaggttaatgcttccgtgtttgtatttgtcactttt

SEQ ID NO: 200380 - DNA, 584 bp, Homo sapiens
  chr6:27655156-27655740
  hyper
tcctctgagttgtcgaatccgggcctcgcctcctcctcccttttcagatcataggatttctctcccccgcaaataatggcccttacttcgtaaacacgctggctccgtaatccctattattgttttgggggtttggttctgtccagggaggaggtgagggcagatgctcaagagaggctgtccccaccgtccttttgtctcagcgaaccgcagtccgcgcccgagcgccactagctgtcctgggacgggaactgcagcggcaagtgtgtgactttcttgagcccggagccacaggcctgggaagcgccgctgagacttcagggtcgtagtgacagaggaaccacccgaggctaggcggggagagggtgcagtttccggatcccgaaggcttcgagaagagccgacctgtctggaagggtctccaagaacagagaggactctgcaaccatcactcgggagccgcgtcctttcatccttgagacagctccgtggtccaacggttccccgatccgctggccgagatctcaagcttggatgcaacttcggattcgccccaggcaggaggaaggaagccccgattggaa

SEQ ID NO: 200381 - DNA, 103 bp, Homo sapiens
  chr6:27661581-27661684
  hyper
taattcttgaaggtgtgtcaggtacattggatgcactgtactattctgtctacctttgtatatatactttaaaggtttttccccacaatttctctgggaaacc

SEQ ID NO: 200382 - DNA, 157 bp, Homo sapiens
  chr6:27662125-27662282
  hyper
tcggcgcttcgcctcgggactccagtgcaacctatggggcttttggaaatgaggaagtcgatgactctgcagggactcctctgacccaggagcagatggcgctcgtctgggcactccccaggagaaaaggtgcatcgggaagcagcctggcttgtgg

SEQ ID NO: 200383 - DNA, 106 bp, Homo sapiens
  chr6:27775598-27775704
  hyper
ttcttgccatccttcttctgggccttggtcaccgccttcttggagcccttcttcggggcgggagcagacttggccagctcgggcataatgaaacaatagtggcaaa

SEQ ID NO: 200384 - DNA, 33 bp, Homo sapiens
  chr6:27776011-27776044
  hyper
ggcaaagctcgcgccaaggccaagacccgctct

SEQ ID NO: 200385 - DNA, 58 bp, Homo sapiens
  chr6:27777657-27777715
  hyper
aaaataaaatatggagaccatgaactgctaagtctgtcagaggaataggtgaacaaca

SEQ ID NO: 200386 - DNA, 161 bp, Homo sapiens
  chr6:27778156-27778317
  hyper
ggggctctttgaggacaccaacctgtgcgccatccacgccaagcgggtgactatcatgcccaaggacatccagctcgcacgtcgtatccgcggcgagagggcttgagtctcaaggactcactgattacatacccaaaggctcttttcagagccacccacat

SEQ ID NO: 200387 - DNA, 124 bp, Homo sapiens
  chr6:27782099-27782223
  hyper
cctttgtttttatgcgcttttcaactcggtctttacttagtcttgtggtggctctcagttttctttggcagcagcacggcctggatgttgggcaggacgccaccctgtgcgatggtgactttgc

SEQ ID NO: 200388 - DNA, 85 bp, Homo sapiens
  chr6:27782642-27782727
  hyper
tagaccaataggactcgagtatgcaggatacctattttgattgggcaaaactggcatctgacgtcatccacggataatcaccaat

SEQ ID NO: 200389 - DNA, 360 bp, Homo sapiens
  chr6:27792208-27792568
  hyper
ggttgagcgtccctttctatcaataaaaggcccttttcagggccaccctactttctcagctgaagagtggtaacactgaggagtggttttggtaggtacggaattttgcttggttctgagtcagttctggggggaacagttttttgaacacagcggcacacgtgtggccattcacccggggtcactgtaggcaggactaattacgagatgtaatgtctaaacttgctcaaaattcgtaagcttgtttacgtaatggagaaaatactcgtacacagaatgtgcagtaccagaaacgtttatgtaacccccgtagtgagcttgacagtggtaatcggaaatcgtttttgaaaagcctccaaa

SEQ ID NO: 200390 - DNA, 354 bp, Homo sapiens; identical to SEQ ID NO: 42814
  chr6:27798705-27799059
  hyper

SEQ ID NO: 200391 - DNA, 267 bp, Homo sapiens
  chr6:27804768-27805035
  hyper
ggctctagcggtccttccgcctcggcttcccaaagcggttctgtttaccggatggtgccaaacagttccaggctcttggtgcccggtagaaattggacgacacacacacagatagcaaagcaaagcagcaaaagtttagtaaacagagtattacactctcgggggtgggagagagcggactgacctctgcgaggtgagatcagcgtcagcttgctgtagtttgagtcattttatgtgtgtgcgtgcgtgtgtgtatgttttctgttc

SEQ ID NO: 200392 - DNA, 153 bp, Homo sapiens
  chr6:27805754-27805907
  hyper
agttttcttaggcagcagcacggcctggatattgggcaggacaccaccctgggcgatggtcactttaccaagcagcttgttgagctcctcgtcgttgcggatggccagctgcaagtggcgcgggatgatgcgggtcttcttgttgtcgcgggc

SEQ ID NO: 200393 - DNA, 575 bp, Homo sapiens; identical to SEQ ID NO: 42819
  chr6:27805936-27806511
  hyper

SEQ ID NO: 200394 - DNA, 240 bp, Homo sapiens
  chr6:27806811-27807051
  hyper
tccaagtgagcccgcccaccgcggaacgttcggtcagtctcggcccacaccccaaaggctcttttcagagccactcagtcttcccaaagagaactggcactcactgttcttacagcaggtatttcttacttgctacaaagacgatttccaagattcctttagccttgttagaaactaattttggctcaagcctctaatcccggttcgggaaaccgaagcgggtggctcacctgaggttag

SEQ ID NO: 200395 - DNA, 487 bp, Homo sapiens
  chr6:27840617-27841104
  hyper
ttgggcgttgcggaccacagtgtcatagttacacagccctcgcattggtagcggtaaagtaatcgatacaagataaatgagaccggctgtttcattatgacttttgcaaaaaccagagaggcgttatagatttggccgtgtatcagagaagccggcacttttaaccactaagtaatgctgaaaggggcaccgaacctcaaacttcagcgactgcttatgtggaatcgctaatttgccaaaactgccatacgtttaagtgttcttaagaaattaactatctttagtctacagctctttcacagacttcatgggtggccctgagaagggcctttgaggaaccgtgtaagtaagtaaaacactcagccgccaaagccatacagggtgcggccctggcgcttgagcgcgtaaaccacgtccatggctgtgactgtcttgcgtttggcgtgctccgtgtaggtaactgcatcgcggattacattctccaaaa

SEQ ID NO: 200396 - DNA, 149 bp, Homo sapiens
  chr6:27841257-27841406
  hyper
gacccttcccgcctttgccgcgcccagacatgtcttgtactaaacaaaatgcaacacggcaagcctcgcagcagtactttatatagtaataaatcggacctgattgggaactctccacaccagctgcatccggtcggccgattcacaga

SEQ ID NO: 200397 - DNA, 48 bp, Homo sapiens
  chr6:27858740-27858788
  hyper
ttttacctgacggcttctaattctgtcgcctaggctggagtgtggtgg

SEQ ID NO: 200398 - DNA, 65 bp, Homo sapiens
  chr6:28109924-28109989
  hyper
ggaccgattctgacgccttagttgctgttgcaggcagagtacgtccccacgaattgcccttgaac

SEQ ID NO: 200399 - DNA, 93 bp, Homo sapiens
  chr6:28219718-28219811
  hyper
gggcgtccagggctgcgttttttctcggttctctagccattctgacccaaggcagtactcgggtctcactctagttgcgacctgtatatcttc

SEQ ID NO: 200400 - DNA, 191 bp, Homo sapiens
  chr6:28220077-28220268
  hyper
gccacttcctgggcgctctaggaagcttctctcggtggttgtctccgaattaacccattagctaccctgtccttacctccacgcaagggaaggcagttaagggatagagaaggaaaggatgacagaccttggatcataagaaataggactgagcctttaaatcctggaaggatgccgctgcggctcatatt

SEQ ID NO: 200401 - DNA, 324 bp, Homo sapiens
  chr6:28249085-28249409
  hyper
ctaccagccagtgatgaccccgaagacagacatttaccactgtgttggttttcaatcgaaatgatgtacataaatttggggcgtgcttgcaccgtccgaatgggcctggggtccggcggcggagagtgacctgggcggggcaggaggtggcagcgggggtcctcccggctcaccagagagacgagcggccgtgctcctagagaggcagggaacccgccagactccgccactccgctgcgggcgcggcgcagggagaagcttttgtacccgcccagctgctggaggcgccggcagcgcccgccagacccgccagcccagcggccc

SEQ ID NO: 200402 - DNA, 146 bp, Homo sapiens
  chr6:28249579-28249725
  hyper
tgggtgtaatctcagaaaaatacattcaggggcgcgcctgagggtgctggctgctggcatctcaggtgctttacgtgcattcgtgaagaagcccatcagtatttcttgaataccaggtacgtgccgggcatgtagagtctatgcag

SEQ ID NO: 200403 - DNA, 204 bp, Homo sapiens
  chr6:28303247-28303451
  hyper
gttctggtaggttccggcaggcgctctactttcctttattaggactataagcccagcttctgtgaatcatcacctcagcccctgattggtccggggccaaactttcacttcggcttctgataggtcctgggccaagctaagcagcagctatgaatcatcatttcagctcctgattggtcccggaccaagctgagtcaagcgttc

SEQ ID NO: 200404 - DNA, 73 bp, Homo sapiens
  chr6:28303489-28303562
  hyper
ttccagtccataaaaaccccagaacgggccccataatgggtactcccggtcgggaccccttctctgctggcag

SEQ ID NO: 200405 - DNA, 208 bp, Homo sapiens
  chr6:28303607-28303815
  hyper
tttgtgtctgcgctcctttatcgtcttggaggcaggacaaagaactccgggcgttatctcagacaaagaaaggctgtttaatcttcaggataaggggcgggacctccacctactccacgggggcttcaggccagtgaatgtgtaggggcgggggtcacgcctgcgcagacgttccctccccgcctactccaaggcacagacctgaaat

SEQ ID NO: 200406 - DNA, 165 bp, Homo sapiens
  chr6:28304301-28304466
  hyper
gcttttataataaagtttctgttggggaggggttggggaagtgctggctagttggaactgtttggacactttccaactggggacagatgtggttagggccgttaggctctgttgcggttagagctgttatgctctgttgaagctatggacggggttgacatttgc

SEQ ID NO: 200407 - DNA, 188 bp, Homo sapiens
  chr6:28414754-28414942
  hyper
agggctctggcatccgggatggaggcgcgtcgctttctgtggctggcgctggatccaccctgggtctccagccacggctgcagagagggtagcgcggtttcttaggccagagtggagtgggacaggaggtgcccagagacgactgtggtggcttgagacatggaagcgctgcagcctttgagcccagt

SEQ ID NO: 200408 - DNA, 76 bp, Homo sapiens
  chr6:28457477-28457553
  hyper
tttttgggggggggggttctttcttttttcttttcttttttttttttttttcccgcagtaagttctgaaaatcgcc

SEQ ID NO: 200409 - DNA, 150 bp, Homo sapiens
  chr6:28458192-28458342
  hyper
gccaggtcgtccatgggggttttcaagcgttttctcgatgactgatttttctagaagcgaatggattttattctcccaggtgtaaaggctacctcctgcttcacacccgggtaacataaaagacagcgctgggaccgaaactcgggtctc

SEQ ID NO: 200410 - DNA, 43 bp, Homo sapiens
  chr6:34113557-34113600
  hyper
ccaagctcacggcgcttctgccggccttttaaagagagagcac

SEQ ID NO: 200411 - DNA, 202 bp, Homo sapiens
  chr6:34192133-34192335
  hyper
gggtcgggcctgcgcgtccctgtggggttgggcgagcggggtatcgagggtccagcagcctggacccggcccctccacagggcagtcccttttccagcttccaaaagctagcgttgctcacctactgccagaccccagacccacttctcccacgaggtgtaaagaaggacccctgagggtcttccacgtcaccttgtggagc

SEQ ID NO: 200412 - DNA, 249 bp, Homo sapiens
  chr6:34359487-34359736
  hyper
ggcttatgcacaacgccctaaatcttccgaagacaccccacccccacccctcagctttgggctcacagacatataatccctcggcaaaccccaaacctgccaatgaagtgcactatttctctgccacaaaggccggcccgcgcctcgtgcacgccggcctccgcacacatgtgcctggctgacaactgcggagcggcccttccaggatcaaagccgttggcctggaccgaaagccgcactcttcccagc

SEQ ID NO: 200413 - DNA, 76 bp, Homo sapiens
  chr6:34405060-34405136
  hyper
gctccgagtgcgaggcccgcagaacctgtgcccacccgcccacccagaattcgcgctggcccgcgagccccgagcg

SEQ ID NO: 200414 - DNA, 39 bp, Homo sapiens
  chr6:34405256-34405295
  hyper
ctcagttgcagccagagtggacgccgaggcctaggaggc

SEQ ID NO: 200415 - DNA, 59 bp, Homo sapiens
  chr6:34856883-34856942
  hyper
ggggcccacaaggcgctgtccccatgccccgagaggcgtgtctcggcacagcaaagtcc

SEQ ID NO: 200416 - DNA, 274 bp, Homo sapiens
  chr6:35464273-35464547
  hyper
aagggcggcggggcccgggactgggcgccccggatatgagctccagggtggcaggcaggccctccacactgtgcggcccccggatccccgccccgaccccccaagcacggacggcgggacaggcgacggcacaggggacacggtctccccggcttccccaccttcccggaccaactcgtccccgtcgcgggggggtggggagggcggggggcggggcttcccggagagattttcccccttccctctaaacttcccggcaccccgatccggggct

SEQ ID NO: 200417 - DNA, 90 bp, Homo sapiens
  chr6:35995284-35995374
  hyper
caggtatttgccccgccggccacggtgaggcgcgcgaggcgtgtgctgccagcttctctcttccttccccggtccgccttcgcgccctta

SEQ ID NO: 200418 - DNA, 546 bp, Homo sapiens
  chr6:36354781-36355327
  hyper
cctgggtttcagcatggaggccagggaagggtctgataatgggtatgggtcctggcgagaggggagtggagaaaggccttggagtgggacggggcgccagctctgggggcagtctcgaggcacctagaaaaccggcgagtggggagaggctgctaaagaggggctccctgcgagaatgcgttcaccagctgtgaggacctggctggcgcacgaacttccaaagacctcacatctggttggtgtaggggcgaccagtggtaagggggctgcggaaagggcccgcaggggctgtgcgtgatgccttcagagctgtgtatgacaccgagagagtcaggggcggtgacccgcgtctggaggtggaaggggaagtgagtgagggatggatgtgaggtttaggaatgtgttggaaagagagattcccgccaggtaaaaggtctgataaaataggtttggaaatctaggtggtgaggaaaggatgcgggagcaggtggctctgcgtgcgcgctgcgtgttcagccgccaggctcttacctgcattacaggtgg

SEQ ID NO: 200419 - DNA, 428 bp, Homo sapiens
  chr6:36355357-36355785
  hyper
agcgctcccctggctgtggctgctggggccctaggcccgcgccccgcagtcctcctccgccaaacccctaacctggctccgagaactggaaggtcgcgtgggaggaaatctctttcgagaagcgccaaggcgtgtgcgcccgggtcctccgcaggcgggcaggcgcgcgaggcgctccggtaatcgctatccttccgggaaacgaaaacgaaagagcgggatgcggttccacttgcgccgctgcgggctaggagcagggcagggcagggcaggggccggccccgtgggagcgcagcaccggggcgctgcccgctcgctagcctgggaggcgtgggtcctgcacacagcctccagccggcggacagtccctctggcgacctggccttggctcccactggggcagagccgggattctgcaggatctgagg

SEQ ID NO: 200420 - DNA, 97 bp, Homo sapiens
  chr6:36410471-36410568
  hyper
ggttccacattttcgggtaagcattagccgtcctggcgctgcacgagcgtattctacaattccgaaaactactaacttttccgtctgcaacctttaa

SEQ ID NO: 200421 - DNA, 202 bp, Homo sapiens
  chr6:36646212-36646414
  hyper
ttgtggctcacttcgtggggaaatgtgtccagcgcaccaacgcaggcgagggactgggggaggagggaagtgccctcctgcagcacgcgaggttccgggaccggctggcctgctggaactcggccaggctcagctggctcggcgctgggcagccaggagcctgggccccggggagggcggtcccgggcggcgcggtgggccg

SEQ ID NO: 200422 - DNA, 58 bp, Homo sapiens
  chr6:36808001-36808059
  hyper
cgccccctctcaccacccctatctcccatcaggggtctccatcctgggggagggggag

SEQ ID NO: 200423 - DNA, 223 bp, Homo sapiens
  chr6:37139334-37139557
  hyper
gccagtctcccgcgccagccttttgtaaaggtcattgggccgcctggctcgatgctagccggggtgggacgcaggagagcctcccagcgtagtaaagccggggattttcagccagctgaacctgtaatgtttctggcatgattttattcttcaagtggaattcagttagttccaggctttcccgatgaataagaggttgtgggcaaccggcggtagcccagat

SEQ ID NO: 200424 - DNA, 447 bp, Homo sapiens
  chr6:37665260-37665707
  hyper
ccgggggaagaatagcagcccggcgccccgcgggaatctggagagcaattccaggcaagaagggccccagaaaacggggaaaggaggaaagtttgagtcttttgaaaaatattcgcgctctcgcccaggccggggctgcggcgcgggcgccgctcgccgcctccgctcgccgcgctcctctcccgccgtctggccgcggccgtagccctcccgggctccgagctctcgggagagcggggctacgccgcgccccaagttggtcgtccccgcccccgcccggcggccttggcctgcgggggcccagagcgggcggggccgggccgggctccggggcgcggcggccgctcggctccgggccgcgggagcgctccgctcgctcagcaacttgggctttgctgtgctgctttttcgcccctccgagcttttcattccgcgctcctcccgcct

SEQ ID NO: 200425 - DNA, 202 bp, Homo sapiens
  chr6:39082820-39083022
  hyper
cgcccgtttccgcgccgcccgaaactcagctaaccgctgttccatggcgcgcgcctcgcgtccgttggccgataagggagcgcgcgcccgcaggccgcacagcagttgcctccgctcggcccgcgccggccgccgtgcgcctgcgtggcagaagcccctgctgagcatgcgcactggtgtgacccgcgtctcctccgtttgt

SEQ ID NO: 200426 - DNA, 46 bp, Homo sapiens
  chr6:39271082-39271128
  hyper
gaggctgagctggggcgcagccactccgccacggcacagaatgtcc

SEQ ID NO: 200427 - DNA, 37 bp, Homo sapiens
  chr6:39281999-39282036
  hyper
ggtaagccaggtaggcgagcagcaggagcacggtgct

SEQ ID NO: 200428 - DNA, 50 bp, Homo sapiens
  chr6:39902362-39902412
  hyper
gggcagaagggtaaactcaggtaaggaacggggttcttttccttccagtt

SEQ ID NO: 200429 - DNA, 170 bp, Homo sapiens
  chr6:40554350-40554520
  hyper
cctgctgttttcaacggttccatccacccgtggctccccgtctctccatccggctctccagtctcacatggacccggctctccccgctccccgccagagtttcacccccactgtaggaaataaagactaaagaaaggaaaggaaatctctcgcgataaggatgggcgaaa

SEQ ID NO: 200430 - DNA, 183 bp, Homo sapiens
  chr6:40554860-40555043
  hyper
gagccgcttattcagttatatccatggcatttagcaagaagaaggggggaaaagcacaacttgttctcttctcttccagattaaagaaaaataataataataatccctccctaggaggatgccggtaggattttccggatcgaagaaccccaggcattcccaggaacctcgggcatcttggaa

SEQ ID NO: 200431 - DNA, 170 bp, Homo sapiens
  chr6:41040504-41040674
  hyper
cgcgtctggaaagcgcctgcgtattcctttcactgggggtggtgtcaaagcgggaaggtgggcgtggcttcagggaacgcctgcgcgttgctcctccgaaggggtggggcgatccctgaactggagttagtgggcgtggcctcagaggcgcctgcgcggaggcggttgga

SEQ ID NO: 200432 - DNA, 151 bp, Homo sapiens
  chr6:41339070-41339221
  hyper
ggacagcctcctctatgcactgcttcctcttccccagccctgctccctgcatccttccctctggtcctagtgtcctggtgtcttgaagatgctgggtagttagaccgacatccctctccctctctcaccctgggctctgggacgctggccc

SEQ ID NO: 200433 - DNA, 360 bp, Homo sapiens
  chr6:41340090-41340450
  hyper
tcacaccagccccgccactattatgggcactgccggggctgtggacgctcaaagaatagatcctcattagcatcttgctttgaatatcatttgcattttattcatttcatgtcaaaacgctcagaactctccccagcccgcaccttccccagagcttgggagtcatgggtttccagctcaagccccttctctgtgggccccacgcttgctggctacccccaccccacctaccctgcgccacagcccccacaaaatgaattgacgtctcctaagcacttggcaagttccatctcctgcgctagggtgcattgtctcatctaatcctgacagcaactcaaggagcaaagcactatactatac

SEQ ID NO: 200434 - DNA, 114 bp, Homo sapiens
  chr6:41472018-41472132
  hyper
agaggccccagggcgcataggaaaggagggtgctgccgaggtggctgcctgggggcgggccctacaggggtcatttggggcatcccctgcctctaggcaaatccccacggagcc

SEQ ID NO: 200435 - DNA, 35 bp, Homo sapiens
  chr6:41747771-41747806
  hyper
agcagtgagcatgcgcagacgccagagggcgctcc

SEQ ID NO: 200436 - DNA, 218 bp, Homo sapiens
  chr6:41755385-41755603
  hyper
ggcgacgccgatacggttcctccaccgaggcccatgcgaagctttccactatggcttccagcactgtcccggtgagcgctgctggctcggctaatgaaactcccgaaataccggacaacgtgggagattggcttcggggcgtctaccgctttgccactgataggaatgacttccggaggtaaccgagcccgaggaacttggtccttttctggccctta

SEQ ID NO: 200437 - DNA, 156 bp, Homo sapiens
  chr6:41888908-41889064
  hyper
ccaaggaatggggcgtgtctcggcacccctcggtgacgcctccactgacatcatctgcggattcccgccccgaggtttctaaatccagacattcccgtttggctgagcactctaggcctacatccatgaagctaggagagcgacactcaaagactg

SEQ ID NO: 200438 - DNA, 176 bp, Homo sapiens
  chr6:42418934-42419110
  hyper
gtgcatgggcaatccgacgagaagaccagtatccgcttggggggtgagatggggggcgagcagagctgatggagtaatttcaatattaatttatgtcagccgccttctctcagcgctactcacttactgtactgccctcagcctgtaaacaaatatcgctccgccaggaaacatac

SEQ ID NO: 200439 - DNA, 45 bp, Homo sapiens
  chr6:42928276-42928321
  hyper
cgtgggattgcacagagggctgggtccgcaggctggctaaaagga

SEQ ID NO: 200440 - DNA, 78 bp, Homo sapiens
  chr6:42928454-42928532
  hyper
cttatgctttaagtgcggagcgggtggctgcggagccaggcgcggcgcaggatggtggacagcgtgtaccggacccgc

SEQ ID NO: 200441 - DNA, 172 bp, Homo sapiens
  chr6:42947095-42947267
  hyper
atcgctgcggttgcgtagcgtttacccatgcgccatttgaacttgtgcttaagggatttatctttgccttctacggaagtaatgttctcttaactatttttccccgtggcatgaacgtaacagtttattgactgataaatgaacagtcagcatgctcgggatgactgggccc

SEQ ID NO: 200442 - DNA, 168 bp, Homo sapiens
  chr6:43138368-43138536
  hyper
atgaatgaagatcctcgagccagcccggtgggaaagtttcgtcgcctacaaaagcgagggaaagggaagggaagttgggggtaggggaaaagttagagctgagaggctggggcgcgacgagtctggacaccgggcggggacccaagctctctccgctcagccaataac

SEQ ID NO: 200443 - DNA, 35 bp, Homo sapiens
  chr6:43237210-43237245
  hyper
gcaggaccttggggcgggtggtttgcaccctcctc

SEQ ID NO: 200444 - DNA, 51 bp, Homo sapiens
  chr6:43242933-43242984
  hyper
caggggtcccgtccatccgcccgcccccgcggccagcgccacgaatgtacg

SEQ ID NO: 200445 - DNA, 154 bp, Homo sapiens
  chr6:43243279-43243433
  hyper
ccctgtcgccccacccctgactcccgttacctcactgcccgtcgggctgccccccaccccgccccaataattggccttgcaattggatgccaaagagcccagagttgagggggagcagagctttgagcccaggtctctcagagcaacccaacag

SEQ ID NO: 200446 - DNA, 164 bp, Homo sapiens
  chr6:43243475-43243639
  hyper
cccaccactgagggccctgggggtcaccaaacatgcccccccatttccagctcttcccacacccccacccccgaaaataaaactcagggaccaacatctgcttcctttgcacttgctccgtcgaccccgctccccgctcggaggggcttccgtgggggaggggg

SEQ ID NO: 200447 - DNA, 56 bp, Homo sapiens
  chr6:43423048-43423104
  hyper
tcccctttctatctccgccgcgctgggttcggcggcggcgcggggcctggaatccc

SEQ ID NO: 200448 - DNA, 38 bp, Homo sapiens
  chr6:43478199-43478237
  hyper
gcaaggagctgggagcgataggccgctcttcccttggg

SEQ ID NO: 200449 - DNA, 98 bp, Homo sapiens
  chr6:43596713-43596811
  hyper
ctcggggggcaaatacggggggttgttggctttgccccctctgttccttccgttcttcttctttccctttggccccccgcagccgctgctgctgccgg

SEQ ID NO: 200450 - DNA, 66 bp, Homo sapiens
  chr6:44094340-44094406
  hyper
ttataaattcagtcccgtccgtctcttacggtggcaaagttcatttatcgtcggctgtggaaagca

SEQ ID NO: 200451 - DNA, 270 bp, Homo sapiens
  chr6:44095871-44096141
  hyper
tttttctgctgctcccgggggcgagtacacccgaagccggtccggggtaagggctcgggctcgggcaagggcagggttcgcaggtgctggcacgaggccggccgctgcccccggctctggggactgactggtcggcgggctggagaggcggccggccccgggagcgtgtcctctccttgcgccccacacagtgcagttcattcatgagccgcccgggcctgcgttggagggtgcggtggggaaaagattcagacgcgaaaccgagagtgg

SEQ ID NO: 200452 - DNA, 58 bp, Homo sapiens
  chr6:44187017-44187075
  hyper
acccccagccctgcggggctttctgcctgccacacgccgtccctgctcactaccccat

SEQ ID NO: 200453 - DNA, 154 bp, Homo sapiens
  chr6:44187131-44187285
  hyper
cgacccagggggaggggcagagagaagggggtccgagcccttgggcccctaaccccgtccctttccggagcctcgggtgcccaaaggcgccggccgccagtcccaggcccgaagggcccctcccactgagtcggctctggtctccccgcccctg

SEQ ID NO: 200454 - DNA, 261 bp, Homo sapiens
  chr6:44265267-44265528
  hyper
ggccgcccgtgggcttcgggccggtgtgggcagaggacgctagaggggctcccgggcccagccggccagagggggccccgataagggagaccggggctgggtgtccccactcccggaggtcgcctcacccgctccgggagccccggcgctcgcctcacgcagagtcccgcgcgccggcgcaggtctttgtcgttggggacgccccgcgttgctaggagcgggccgggccgggaggacgagcgcgccgctgcttcctccgct

SEQ ID NO: 200455 - DNA, 273 bp, Homo sapiens
  chr6:45387305-45387578
  hyper
tctctctctcttttttgaggcgaaagcctggcttcccttcccggatcggccgcctgtgggactcgagagacctgtgcacgcaggggacgcggcggtgcccggggttagagctctcccctgtgaccgaaaagataattaaaaatcgcacgcgcaggagccagctcagctcctggctgcgcttccagttggtccggtctggctaaatgggttctcgcaccctggcggcgcccgggctgggaggccagtaggccgggcgcgaagagtaggttgggg

SEQ ID NO: 200456 - DNA, 261 bp, Homo sapiens
  chr6:45388098-45388359
  hyper
tgggagcaaagctctaaaaccagacagggagggtcgtggcaggtcgctacgagggtgagggaggcgtttgcactgagcaataaaaacacccagtaatgggtatgtgaattgctttaaataagatgggagggcgtgagagatgacccaaccatctttcttccttgatgcttcgagggggaggcattctaattcttcatttattttataaaatcacttgttactgtgtcagctactccactaggaatctttgaaactttggca

SEQ ID NO: 200457 - DNA, 319 bp, Homo sapiens
  chr6:45388397-45388716
  hyper
gaaggctttaaagagtttggtaataagcaagaaacgtagtagtacacaacgccgagggtaaaacggccctgtgcccccttcttggggtgtaatagcctcaagcggatttcccggcttctgcgggcgcagcacattgttttatttgttttgaaggctcagagtttgaggctggtcgtagacacccacgtgctctgactctcatcagcgtaatgatcgacttagccagagtcgtgtctatataaaccacaaaaacctaatcattagaaatcccagcctccaaaaaccacattttaggtaaaaagtgccgctttttttccgc

SEQ ID NO: 200458 - DNA, 224 bp, Homo sapiens
  chr6:45982991-45983215
  hyper
tgcggatcaactctccgagaagacggccacctgccggaacctgccttcctccattccgcccaggagcctcgcagcggggcgctggcctgcggaaaggccacgggggagcacagggctccgcgccgccctcctgggagggtccggagtccagcgcaccccgagccctggtgggtgagcccggcgggaggcgcggcaggtgcggcgggagactggaccccgaccta

SEQ ID NO: 200459 - DNA, 373 bp, Homo sapiens
  chr6:46097249-46097622
  hyper
ccggtaaaggtgctcgcttatccagtaagacggacagacgtctatggtagatccacgtttcatttatcccaactcactggaactggctgaagcttctccagacttgtgccggaccttggtgcagccaaagttgctttctccgcggccacctaagctgccaggtgcacattaactaagtggcagaaggccatcggcttggcaattgcctgaggcctttccgggactcgctggtttttaggttccatgaagggcatccagatctaggatgatacgaaaagtgcgtggtgggagagtggaatcaacctctactcttaggtccgatacaacccctccaagcacctgtctaaccaatcggaaagaaagttacattcaa

SEQ ID NO: 200460 - DNA, 535 bp, Homo sapiens; identical to SEQ ID NO: 113429
  chr6:46097694-46098229
  hyper

SEQ ID NO: 200461 - DNA, 331 bp, Homo sapiens
  chr6:46138267-46138598
  hyper
gggcaccgattaaacggaagagggaaagtgcagaaggagtaggtttgtgtagctcgggtagacgtcaagggcgggggtgtccatcttctccaccaggattccatcctagccacccagaatggtcgcggcgtaggttatgttcccaattcccagtcatcccgcccaccgaggcctgggcttcttagatgtgcagtggcaaggaggggacgttgctttagggacccagaggagcagtgtgggttcccgggagggaagccacccacgcccctggactcaccctcgcagcgatccgttcagtccgtattagtttggagcaacgggagggagggtc

SEQ ID NO: 200462 - DNA, 171 bp, Homo sapiens
  chr6:46138801-46138972
  hyper
caggagtagctgcacggcctgtcaatcagcgggggcaggggcgggcgctgcctgggtttggagggtggagggggaggggactcccgggggcagggacccatctggtagggcgaaggcgtgggatggccaattgcttggtcacacacaaaaccttccggcaacgtgcctttt

SEQ ID NO: 200463 - DNA, 87 bp, Homo sapiens
  chr6:46816765-46816852
  hyper
agaccgttgggcgcgtcatccgcgggactgactgcctcccgccggcttcctgaggccggaccgcagcggggacgcctcctctcaggc

SEQ ID NO: 200464 - DNA, 678 bp, Homo sapiens
  chr6:47276365-47277043
  hyper
ctagccacaggtaaacgagggatcggaaagactgtagaaaattcatcttccttcacacacatctccttccccctccccccattccagtgccggcgcgctggctggctggaagccggcgctttggaggcgccggagagtgggtctaagggtgatatttcggcatacagaacctgagaccccacccgagccaagagggaagagagagggtaaagggattgaggagggggcggcttgcgccctgctcgggaatgcaccgcgcgacagcacccggaggtctccggtgtccggcgcgcaccggtaccactgtcttccactgcggtagcatcccgacatgacattgcagctgcaacaaagcgccggcctcggccggccgtgggagccccacaccgcggcgaggccccacaccacgcagaggggcagtggccgatgggtggggggctgtggctgcgggcgtggggagcgcgaggtaggccgagtagggggaaaagccctcaaatgcgcagaagctgggcggctacctctagcgtctcctccagcaaagccagactgcaaggaaaacaattcgtcttcattccccagccccggctgagccctgagattcccccaaataacctagtcgaggccctctggtgtgttgccttcccttggaaacccctcagtgcccgtaacccagtcggc

SEQ ID NO: 200465 - DNA, 228 bp, Homo sapiens
  chr6:49518348-49518576
  hyper
ggttccgcacgcggttagcctggggctgatctagtcttcagctttcaccggctgggagtccggagctgcagcagaggccacacccagggcttggtggtcccgcgctttccggagctcagcaggcgcttgctgcttgaaccggtcaaagaaggaacgaatgaatgacccttttgccaggatggagacccgggggcctcagggagctgcgaatcccatggactcctcccg

SEQ ID NO: 200466 - DNA, 276 bp, Homo sapiens
  chr6:49519000-49519276
  hyper
caggtaacacaagaagtgttgcagacctcctgggccaagggtcgcatgaccacgaggactgaggagcacttcgtgaccgcgctcacttttcgcagcagtagagagggacagcctggggaacgctggggccctgctgaatcccgggctctccaggcacgaacaggggcatcccgcgtccacgccgcggggaggagggtttcaccgtctccagggacttggctcgaggaaattaaactctaatgagtagctcgagaaatgttccgggatggtggatga

SEQ ID NO: 200467 - DNA, 62 bp, Homo sapiens
  chr6:50674750-50674812
  hyper
ttttaggcgtttggagagggatggagatggtgggtgggggcgagggggaggggtaaaaagag

SEQ ID NO: 200468 - DNA, 33 bp, Homo sapiens
  chr6:50803771-50803804
  hyper
agttccagttcctcccaaatcggtgacttctct

SEQ ID NO: 200469 - DNA, 63 bp, Homo sapiens
  chr6:50805675-50805738
  hyper
ttgcaatttcagagccaaatcgaaaaatggggggagatctttgcgagaaaggctagaaaaaat

SEQ ID NO: 200470 - DNA, 198 bp, Homo sapiens
  chr6:50808433-50808631
  hyper
tactccgtttccaacgttgctgtttgtcatcttccacagacttgtaaaatttactacaactccagaggggaaaatagtaaatctctggctaaatttaggtctagagctcatttgaacttttacagtgggttttctatttatttgatttactcctgtctttggcttcggtgtcatattgttggtgttttatggccggct

SEQ ID NO: 200471 - DNA, 42 bp, Homo sapiens
  chr6:50810509-50810551
  hyper
cgaatgtcccaaagcgagtccaggcggtcctggaatggaggg

SEQ ID NO: 200472 - DNA, 211 bp, Homo sapiens
  chr6:50811605-50811816
  hyper
cttttccatgttaccctcccttcctcacattgttacgggaatcttctgggatgaaaatgagtgtggttggcccttttgcgttgtttcagtcctctcggtacctccccgcccagccctgcgatcttaactcaccgggcccggctccccggccgcttgcataattagggagggcgagggcggggcgggaggcctgtggagaccaggcggaggc

SEQ ID NO: 200473 - DNA, 63 bp, Homo sapiens
  chr6:50813939-50814002
  hyper
ctaccccttctccctccctcacttctcctttcatgtaggacccccgcccccttgctttcctta

SEQ ID NO: 200474 - DNA, 954 bp, Homo sapiens
  chr6:52226797-52227751
  hyper
tcctcgcagcggcggcagcggcgcgggctgcagcggagcgcgcgggtctgcgcatcccgcccccgggtcgggaaggggcggagctgggcgtcacccgcccccggcggtctcctcctcccggccgctcccccgagccgagcccgccgcggtcacagccacccgcgggaagctcgtggccgggaccccgaggcgggagcgcgggctgggccgggctgggctacgcgcacgggctcggccgccgcccctgccggtgagtcccgccgcgggaggcgcggaacgggtcgagttgggtattgggaccgcgaggtcggggagccccggggcccgagctcgggaggcggggacgtcaggatcgcggcgttggggagtcctcgcaccccgagctcagaggggaggtccagagtcgcagcgttgggaacctgaggccaggggccggagtttagggccccgatgttgagtctccgaatccaagcccggaaggggggacgacgggttaggatgctggggagccctggagctctgaacggctgtagtggggtggccaggactgcgatgctggggagtcatggagcctgagcctggagagctggcgggggtgtggggaccgcgatgttgggaaggctgagcccggagggcgggagattcaggaccaagacgtgggggagtccgacagggcagaacgaggggcgtcctgtccgcatttgtggggcgccctccgcagggcggaggggaacggaacctgggaggggagtgcggaggagaggaagcccggggcggtagggagagcccgaggaagggcagcccgaggtaggggaaccccggaaagagtagggtgggtctaggcatgtgctttcgccggggaaagatggagggggcttctctgagagggtgggcgcgaggagcggagttgtgatgggaaccgccggcagctggctaatgggcggatgctggggc

SEQ ID NO: 200475 - DNA, 132 bp, Homo sapiens
  chr6:52227876-52228008
  hyper
agggaatctagtctagggagcaagaccgggcatccccagacggaggcgggtggggacctcgcactcagcgcgcttggggaatattcggagcctgggtttgggggctgctgcaccttgccgacccggtgcggg

SEQ ID NO: 200476 - DNA, 203 bp, Homo sapiens
  chr6:52284759-52284962
  hyper
gcgcagtgaggtccgccaggactaggtggaaggagagaaggaacgtccctctctgcaactcatctaagggcctgctcggaccccggatctcacagcgagaactaccgcctcgctacacccgcctttccccgcgccacccaacagctcccacgtctcatcctccgggagcggggcggggcgaagcggaagaggaggggccgaca

SEQ ID NO: 200477 - DNA, 261 bp, Homo sapiens
  chr6:52535661-52535922
  hyper
ctgctccgtcaggcgggaggcagcaaaccccagccctggctccaggacagggccgaaggcaggatagacggagcaacgggtccggctgccgccgggatgttgcagcacagggcctcctggctgcctggcctacaggccgcccggattcagccggagggcatggaccgggtggagtcctgcaaggcgagaagggacacagcgcatgcgcgcggcagggagggcgtttccaggagggagcggcctttgctcagcgcgagacgg

SEQ ID NO: 200478 - DNA, 133 bp, Homo sapiens
  chr6:53212358-53212491
  hyper
aacatcagctcttccgtacaattctatgaagcacttcctgccacgggtcccgctatttaaaacaaattaggctgctcgctccccacaaatcccatctagcacctctcggttcctcagtctagctaataaacca

SEQ ID NO: 200479 - DNA, 215 bp, Homo sapiens
  chr6:53213970-53214185
  hyper
tttttttcccctttcttcctaataagcctgcgtggaacgcagagcctgcgcaatagccccggtgaagttgtcgatgccctgaactctggtttttttactgccaggcgtggcaggagtctgtggccgcatttgggtggcagaagcccaccctcgttacggtctcctctatgagttatgtcatgctgaaggggatccacttcatcgttaaagctgaa

SEQ ID NO: 200480 - DNA, 596 bp, Homo sapiens
  chr6:53408924-53409520
  hyper
gcgaattttgagcctgtaaggtggatcatggtagttgccggtctgcagatacactaggttgaagactcgcagcacctaatgtcactttttcatgctcacgccctcccagcgcccaatccgtgtttatggaatgaaggggaaaacccaaaagaatgaatgaacaagaaaggagtctagtcaggaggatggccctggacgcggactaggcgaaagcagggacgatgctcccggggccgggaggcgctcgaggacccccgggcgcagtggagaacgcggaccgcgatagggccgggggcgtagggcaagacaaaggcagcgcgggcggccagacacgggtgcccggcggggacggggaccgcgggcgctcacctcatcgccccacttgagaacgtccttgtgccggtccttgacggcgtggtagatgtgcaggaactggaggatcccgtgccgccgcacgtggtcggcatggcgcttggtttcctcccagctcagcggcgagccctgggacagcagccccatggccgccccctcctcctcctcctcctcctccgggctgacggcggtcgcccgctccgggcgcgagacggacactcagc

SEQ ID NO: 200481 - DNA, 539 bp, Homo sapiens; identical to SEQ ID NO: 43077
  chr6:53409552-53410091
  hyper

SEQ ID NO: 200482 - DNA, 291 bp, Homo sapiens
  chr6:53659861-53660152
  hyper
cggggcaggggctcccgctccaggttccttgaagcacttccgaccgcgaagcccggcgcgagaagcgagctaacccaagagccaacaacgagcgcggagagggcagcggactgagcggagccgccggccagagcgggctcggagcccgggtctccgccgctcgggacccggctaggcggcggcgggggcggcgatgttccactgcatccccctgtggcggtgcaaccgtcatgtggagagcatcgacaagcgccactgctcgctggtctacgtccccgaggagatctaccg

SEQ ID NO: 200483 - DNA, 204 bp, Homo sapiens
  chr6:56716695-56716899
  hyper
aaatgactggcccaacaatgaagccagaatcaacagccttcctgttacaaacctatagtatttggctcccccaccaggacagtagaaatattttccattactagcctgctgcttaattcatcaatgcaactaactcgaagtttcgaaaacaaagcacaaatgcaggatgttgagtcccaactcctttccgcttcaagtcacctc

SEQ ID NO: 200484 - DNA, 179 bp, Homo sapiens
  chr6:56818477-56818656
  hyper
tcgtcattcagtgtcctactggtttcttaacacgcatataattaatattggtactcaggaaagagaacttcttctgaccttgagcgtgcgcgctaaataaattacctcagaacgaaagtggtgcgatctcaaaacagcatctggggagaaaagagataaatgagacttcatttaactcc

SEQ ID NO: 200485 - DNA, 85 bp, Homo sapiens
  chr6:56820671-56820756
  hyper
tttgtcccctccccacgtttcttcataaccagcaaaaagtatatggcagttggtggccaggggatttaacactgatgcaatgcca

SEQ ID NO: 200486 - DNA, 571 bp, Homo sapiens
  chr6:57036934-57037505
  hyper
gggtgctgggagaaactaaacgaagccgtcactgagcaatacacccacagcccgtcgaccgataggaaccttcgcgtggggggagttggttacttttaggttgcatgaagaggcggggcctcgcggggcggagctgggggtggtctgtgggtccgcgcgggcttcgggtagttcctgggtccggggagcagacgatccgctagccacattaggcgctcggtctctgcgtccgcccctcccgtgcctcagagacttgcgctccccaggcccgagcccctgtcggcccatcctcgagcccgtgtggctcgcgaacctctaactccagccgctgcagccccctcccaggcccggcgtccccgagccccgcgggcgccgcgcctgcccttctttggctacgctgcagccgcggtgtcggcgagtcctcccgggttgcccccgcgggcgtcagagggagggcgggcgcccgcgtggtgacggcgacgcctgcagcccaaggagcgctccactcgctgccgccggaggggccggtgacctcttggctaccccgcgtcggaggcttagatggctcagg

SEQ ID NO: 200487 - DNA, 168 bp, Homo sapiens
  chr6:57086140-57086308
  hyper
tcctgggaactgccgatggctcctcggatctccgagtaaagttaattctgtagcaaccagtgtcaatggaacagcacaatttggctcattcatattccagcactctatgaacaagaaactagggaagggtggggtcgcgggtaaagagtggtcgcactgcagggagga

SEQ ID NO: 200488 - DNA, 207 bp, Homo sapiens
  chr6:57087024-57087231
  hyper
tcagcagcagctccgccgggggtggtggggcgcgggagtctcgactcccctcatctgtggacccgccgcgctgcggagcatgcgccgtgcttcgtctgcgcatgctctgtgcggacccgcggccctgccccgcccctgttctggcgggtggctggcggcggctcagctttccaggcgcctccaagggagcccgggagggcagtgggg

SEQ ID NO: 200489 - DNA, 52 bp, Homo sapiens
  chr6:64283088-64283140
  hyper
gctgcactgggagcgggagacgtggcccggggtggggcgagggctgcgcgtg

SEQ ID NO: 200490 - DNA, 294 bp, Homo sapiens
  chr6:69344649-69344943
  hyper
ttcacttcccacccttcagagtcgccttcccatcctccgcacccccctgcctcgcctcccagtgagtttctcttacagttggtcgccgccagccccagcggtgggaactgaggatgcaaaaacctcccagacgcagaaaataccgctttcgggacgtgcttgggtttgagtagccgtgacgtgcaggcgaaccgcggccctggctggagctccgtggagcccccctcccgccagcctctcccccgccctcccgccgggactccctcctctcccaccccgcggctcccttcgcct

SEQ ID NO: 200491 - DNA, 87 bp, Homo sapiens
  chr6:69346042-69346129
  hyper
acttaaacgccgcagttgaaaagttagagaagtctggttttcaagagatgtgctgggtcagaaggaataagcggagagacctagaaa

SEQ ID NO: 200492 - DNA, 135 bp, Homo sapiens
  chr6:69942708-69942843
  hyper
tcaggcttttcaaagaaatccgcattttaaaagccagcatttatggtccaaaatatgggacgggaatcagagctggtagaaaaatatgaaaagcctctttacaccctgagtatttgaaacaatccgatgagcata

SEQ ID NO: 200493 - DNA, 586 bp, Homo sapiens
  chr6:70576373-70576959
  hyper
gtcctctgtcctcgcggagtgggagggtcacactgggagagactaataagggcagagatgcgtcccccttccccactcgcagggagctcactcctcggcggtgccgcagccctgtccggactccactgcgcctctgaggggctcaaatacgaattcaaggtaagctgcgcggctttgcgaccggctctgcacttgccctctcacacatgcccgggctatgtcatctgctcgtgttcctagttatctgtgtgcatctgcttttcaagaaaatgtaaaaactgtgctacacatggaaatatgtttaggtggataaataatgcacacctgcatacgtttccataggggccttaaggatgggaccaaaaacgtttggcaggagacggccactctcatgtggtacataccatgtagttcgtgttcctatgttcacatgatgcaggcttcatgcgttacacctaagttctaggtggtttttctggctatgtgtgtctgtgaagcggaactatggagcactgctgatgcgggtagggacagacatcaaatacattacaaaaaaaatggggggttaaaggagtaaaacaaactc

SEQ ID NO: 200494 - DNA, 298 bp, Homo sapiens
  chr6:70576997-70577295
  hyper
tttttgacggtgttagccctggaagcgaggcagccagttaagcggcgtaagctaagagacgcggggttccggtgcggtgccctccggcccggggttacctactccacatgtgggtgtttttcccaagtgcggcttctggggggcggcgcgggcgcgggcggggattcccggactccagccccaccacgttccggagcgtccggccctgttccttaattaccctgcagcatgcgcagcgcggtcggccacagcgccgccgccgtccccgcagtcctccctgcagccaccgccgccgccg

SEQ ID NO: 200495 - DNA, 276 bp, Homo sapiens
  chr6:71123138-71123414
  hyper
cggggacctgttgatcgcaggtatagccggctggcccgggctccctcgggactggggcgactgcgcatgctcgctggccgcgctgggccagtagccgagccgcggtgacgaaccggctccgcggttgcggtgtttgcggttgctgtgatggcgatgtgagggggcccggggcgggatggtgctgacccgggtcgggccgtcttcttgcagctggacaacgagctcctccgttcgacaggcgggggaagaggccgagccgggcgagaggtaaccccc

SEQ ID NO: 200496 - DNA, 230 bp, Homo sapiens
  chr6:71123474-71123704
  hyper
tgcccaggggccaggaaggaagcggcctcctcttcgtccgccgttcgcccgccgcggcccctcacccgactgctggcggtcggagcctggccccggccccgttgaaggtcggtggggacggcggtgcggagcgctctgagggaggcgaggggccgcggcgcgctgctctcccggtgcccgcggccgcccctgcccctgcgcgcgtccctcgacccgttcttcctgaacct

SEQ ID NO: 200497 - DNA, 304 bp, Homo sapiens; identical to SEQ ID NO: 43113
  chr6:71123746-71124050
  hyper

SEQ ID NO: 200498 - DNA, 54 bp, Homo sapiens
  chr6:71665452-71665506
  hyper
cggagtgcaaggggcgtgtgactgcagcccggccggcccggaggcccactcccg

SEQ ID NO: 200499 - DNA, 222 bp, Homo sapiens
  chr6:71665723-71665945
  hyper
tgggcagcccggcccgcgccaggaagcggctcaccagctcgctgcgcgccgccgcgtcctccaccaggatccagtgcagctgcgccacctggcggaacgtgttggccaggcgggtcagctccgctttctgcaccgggcggctgtaggtgggcgtgatggcatagatggtgggcagctgcggctccggctgtggctgcggccgagactggttgcgcttttggg

SEQ ID NO: 200500 - DNA, 164 bp, Homo sapiens
  chr6:72129568-72129732
  hyper
gcccttggtcgcgccggcacccgaagagttcccacggatacggttcccaagtcagtggcatgtcagtgcccttcaagctaccgcaattttatttgttctccccgccagctccataaagtattaaaggctctctccacgacttcttcccaagcccaggtgcccta

SEQ ID NO: 200501 - DNA, 75 bp, Homo sapiens; identical to SEQ ID NO: 113556
  chr6:72130646-72130721
  hyper

SEQ ID NO: 200502 - DNA, 226 bp, Homo sapiens
  chr6:72596315-72596541
  hyper
cccagccccagccccagccccgcccccgccccgcgccccgccggagacgcccggatcggcggagcctggcgcgagccctcgccccctcgcctctcccgccgcgcctccgcctgcccgcccccgccggccgaggctgggctgcgggaggcggccgggcggccccgagcttcgctagggcgaccaaaacaaaggcagcatccggggctgggtggatgcaaacaaccat

SEQ ID NO: 200503 - DNA, 183 bp, Homo sapiens
  chr6:73329601-73329784
  hyper
ctggctgtcttccagggaaacgtgtccctgtgtcctgccttcctgagacttcttgcctgcacgcggggcccagccgcgccagagagatggaagtgactttacctacccagcgaaagtagcagtctgcaacaaggaaaacagctaagttaagaggaagtggttttcattttactgcttgcagaa

SEQ ID NO: 200504 - DNA, 103 bp, Homo sapiens
  chr6:73330126-73330229
  hyper
gctcccagctagcttctgctgcccagaggcttggggggaaggagggagggaagcaggctcctgctggtgaccaggagcaggcgagagggcttcacacaaataa

SEQ ID NO: 200505 - DNA, 55 bp, Homo sapiens
  chr6:74019358-74019413
  hyper
tgaagatcaggactccgtattctgagactgtttcaatcacaaataagactcggaa

SEQ ID NO: 200506 - DNA, 116 bp, Homo sapiens
  chr6:74020094-74020210
  hyper
gaacactccccagggctgccaggccagcgctttccaggggctccagcctacagcgccgccacctggggctggagccagaaacgcaggggccgggggctcaccggctgccaagtaga

SEQ ID NO: 200507 - DNA, 178 bp, Homo sapiens
  chr6:74161321-74161499
  hyper
gcagcaggtggtccacaacccctttcaccatccccgccgccgtggagatatcatcgcggctgagcttcaacttctccaaaaccgcccggagcttcgaggccccaggcgccgcatccctccgtacgagaatgggggccgagaccggcaggccggggctgggcacgtcccagggcccggg

SEQ ID NO: 200508 - DNA, 106 bp, Homo sapiens
  chr6:75914599-75914705
  hyper
ctgccctatccttccccagcattcactagaagactacagagtccggatcgagagtctccctggcccagagtcccagggagccctgaactggtcactgaagggctcc

SEQ ID NO: 200509 - DNA, 143 bp, Homo sapiens
  chr6:75914738-75914881
  hyper
cgctgaacgagtccggcgacccacgctttctgatccccacaagtctaggatctgagtgggaaaccgccgcggagatctcacagaccccgaatagggcctccaccaatgcaccgggagggagtcggagaggggactttctcccg

SEQ ID NO: 200510 - DNA, 164 bp, Homo sapiens
  chr6:75915989-75916153
  hyper
agaagggagggagcgtagagggggacagccgcagccgggttccctgccaagggaagccgcgtactccgccacttggggcggactgggatttctttaatgaagctcgggtttccctatccctgagatttctttaatgaatttttctacattaagaacaatgggga

SEQ ID NO: 200511 - DNA, 206 bp, Homo sapiens
  chr6:75916810-75917016
  hyper
ccagattgtacaaggcgcacgggaggaagcttcgagcgctcacaccaagaaatcagaaaaatgctactggagagattctgattataacgtctgacctcagtataggccctgcaccgttttggcctcttgaagcccaaaggttactcctgtaacgctgggggagcgttgaacaacaaaggaccggggtggggcgcaagggaacagag

SEQ ID NO: 200512 - DNA, 269 bp, Homo sapiens
  chr6:75994579-75994848
  hyper
gagggaggagggagaagaaggagggacatggggaggggaaaggggaggaggatagaagcgggaacgaaaaggcggacgcaccctgatcatctgtcctgtgacgggctcagccattggatcgcgaatctgcgttcgcgcatgcgtggtcctagagctacggtgacacttcgcgtgcggtgtaggcgcatcttcgctctgttggccgtggctttagtaagcacacacctgcctgctactctggttatcgtggcgacggcaggtctggattg

SEQ ID NO: 200513 - DNA, 86 bp, Homo sapiens
  chr6:76458864-76458950
  hyper
cggccccggcgcccccgccccttcgggcgctccgtagccgtgacgtgcacgccgcagtgccggggactcggcggggcgccggccgg

SEQ ID NO: 200514 - DNA, 432 bp, Homo sapiens
  chr6:78173264-78173696
  hyper
ctgaaactagaggtcatgggtgcggcagccaaggcaggcgggcgcctcccctgcacttccagagcgcctagctaagccgccgcgtctgtggttgttcctctccacaccgggtcttagacctgggttgctaagagctggcccaccgagccctgctccgctccagctccctggaggcgtctagtgcaggagggtgaagtactgcttgaggagaaggctttgaccaaatgggatctcttaccccagttgcttgaggctgagcgtctcctaacctggacgcttttggatctgcagactttgcccacaggagtttcctaggtgtagagaccaaagcttgcaggccagcgagaggtcccgagatcttgcattcccacccctcgccccaagctggggcacttttggggggctgcagcggccgccagagctgggtggggt

SEQ ID NO: 200515 - DNA, 132 bp, Homo sapiens
  chr6:78174056-78174188
  hyper
gtgcaactcgtgcggcgcggcgggtgcggacgcccgctccccatcaccttccctttttctctctccctccctcttttccccccgccctgttcctttcctggccaaggaagctcccgccgggtcctaccgccc

SEQ ID NO: 200516 - DNA, 124 bp, Homo sapiens
  chr6:78175791-78175915
  hyper
attatttttgtcaactgcagcgctcacttagaaaccatagaagagggaagcaaagccggcgagtttaaaccgctaggtgggggcattggccaggacggatcaaaagtgtgtgcgattgcgggtg

SEQ ID NO: 200517 - DNA, 296 bp, Homo sapiens
  chr6:78176149-78176445
  hyper
tggctttctccagccatgcctccactgcttcgcagagtcccagactcccagaggaatccgccccttgtaggcagtttgattttaccctctttggtaaagagctgcttaaacacacaccgccatcatattgaccggatgttggcagagttcagtgaagaaccccatttccttaacctgacttccgcatttcaagtattcctttctcactttaaaacacataaaacataggtgtttgcacagaggcgcatgtgtgtgaaacacccaagagagaaagagaccctgtaaagtcgcctgtg

SEQ ID NO: 200518 - DNA, 70 bp, Homo sapiens
  chr6:79620218-79620288
  hyper
aaacaatagttactgtttgacgaattatacaacgtagacctaggtcgtgcgatagctacaaaatacctaa

SEQ ID NO: 200519 - DNA, 432 bp, Homo sapiens
  chr6:80246889-80247321
  hyper
cgcaggctcttcagcagagccgatgcggcgtcccgcctccttgccttccctcttaggaccaaactcccagctggggcctcggcgtctgaccgccaaagagcgggtgcctggttcctgcggaggctgccgggcgggtgccgaggttgccgagatgcgggaggtttgaacacaaggatgggacagaggcgaggatcggggctcctgggtggcagcggcggtaacctgggctccagggtaacggaggcggaggcctagactgcactacgaagagaccgcagccaatcatgatgactctacccgagctcccattggcttctgtctccagacggccctttttattggcttcagtggaactggaaggcgggacggcgagtgcgggagaaggtctccattggccgaccgctctagctgtagcggagacccccaagtagg

SEQ ID NO: 200520 - DNA, 389 bp, Homo sapiens
  chr6:80340635-80341024
  hyper
gcccggtacgccagcggccctgagacgatgtgtgcccgcagcacgatcgtgtctgttggcatttctgggtgtggatgctccaaaccaataaaccacaatacagaacccaagcttggactttgaaccgagcccttttgcctagtttgctttttcctcatcaagccaggatccttgccaacccacctcacagcttctgcccgggctgtggctcccctccagccacctgcgcgtgttcgggatagaagcgcggtcaggaggggagctcagtccaccagccactccagggagagacggaaactacaaatcccatcaagccccgcagccggctccctcctcctccctctccttccccttcagcctgcggccgggcggcgctgggcttttatctg

SEQ ID NO: 200521 - DNA, 220 bp, Homo sapiens
  chr6:80341054-80341274
  hyper
cgatcttccccgacggcagcgctttacccagaggctgccggcggctcgtagctgggttcagctctgcgtccacgccagcccggagcccggggggcaaggggtctgtcccgggcgcagcgagaggatggtcatccgcgtgttcatcgcctcttcctcgggcttcgtggcggtgagcgcggtgggggcgggcagtaggttggggtcgcggggcgcgggtcct

SEQ ID NO: 200522 - DNA, 231 bp, Homo sapiens
  chr6:80341326-80341557
  hyper
cccgcgggagcccgcgcccggcaggtgatccatcacactccgacaacaatgaagagggcggggaggaaaggtgggtgggggaccccggcctcacccaaatgcccaccctgcgtggcctgaaaggcagacaacgcggcctgaaaatggagtccgagggaagcccccagctcctgttgtgtggcatggaaatttggggaacgggttgttcaagagcttcggggatcccccttc

SEQ ID NO: 200523 - DNA, 104 bp, Homo sapiens
  chr6:80657600-80657704
  hyper
aaacaggacacgggaagaatgggtgttctgtgggcaaagatgaggtaggcgtggtgctttggtccttacctgacactcacctcgatttcacttgtgttcctgtt

SEQ ID NO: 200524 - DNA, 944 bp, Homo sapiens
  chr6:82461855-82462799
  hyper
catgtagtgcccgccgagcgccacttggccctggtcagtcctaaaaagaaagggaaaggagcgcggtgaggacgcgcggcggcggagagcacgcgcggcggcggagagcagaggcccgccaggaaaagagcgccccctcccccgatagttccctgaccccgggcctcctcggagactccctcccccggcccttacagtccccagccgcgcaccgcgccccgcagagcagccccgcaccaaaagtatctctgatgcatctggaaagcgcaagcgagagtcccgtctgtgtcacctggaggcggccgccccttctaggagcgcagcgagcgagagcgaaaccgagaggcggcaacacttccaggagctgcgagcgcgctcagacagcaaatagcgacttcgtctttcccagacccctgccgcctgcgctcaccactccctccccgcgacccctcctgcgccgctgccaccccagctgcggtggtcccgaactggcggctcttgctgccacacacgctcgtgtctctggagctttagcagttgtgcggggaaaatgtcttcagtactttttttataccgggcttctctgcgcttccggggcccagagcggcacgttcgccacaccctcctcatctgcatagggcgccgccccctctgccctcccccgcccgcagggcacgcagctgactagcccagcagttagtgcgggacgactgccggtgagcgtgaggtcctgggctgtatgtgcggatactgtgtgcgcccgtagatgcgtgtatttatacatacatttaatttatgtacgccccctcccacaaatctcttttcattttccccaggaggagacactttaaatgccccaggaatcataagtggtcatcaaaaccagatcacgactaaaatcctgcaactgcagaaacttcccaaaattctcgcggactcagccc

SEQ ID NO: 200525 - DNA, 441 bp, Homo sapiens
  chr6:82462829-82463270
  hyper
ggttcctcacgaccgctcttttaaacctcggtttttaggtagaccatttactccattgataaacccgatccaagtgtggactcatgagtccactcttgcacgcaaatcagtcacggcgcgtgagtgggaagggcttgttgataactgggtttcgattctcgaaacctcgggaagcgcgccggggagctctgggcgagcccgagaaggcgcgggggcggcaccacgggcctcgggcgtgcgcggctcctgcgcacgagtggctccaaggggccagtacttcgcgggggtcagggcgcgtcacggagcagacgcgggcgagcagccaatggccgaggactgggcgggccgagtgggcgcagagagcgcgcccggggagtgcgtgctgccccggagtccagggaaagggccgctaggtgtccggtgcctttgctgcgagttctc

SEQ ID NO: 200526 - DNA, 501 bp, Homo sapiens
  chr6:82463310-82463811
  hyper
cctaaagtttggccattttaagtgcatcatagtgtcagtggaatacgatttggttttccacgagacgtaaaagtaggagtttcaagaataaaatgaattctctcctccagcttcggtgacttcggcagagctaattctacgcacgctcactcgcgccaccaccactctttgctagaaagctgtggccgtctcttcggcagctcgctgcctccatcaactaacccggagcagctttcccagcgcctagacgctgccgggggctgaggtggggcagaggggagaatgccagggtcacagaatactccccaaaccctgctcagccctgcccgcccagactgggaggaaaaacagcccgcacctcctaactgggggagccccggcctagtcactcaagctgcgcggctcgggggtgaggggtagggtgcgggggtgtcacccgtggagcatccagctgcgtgacaacgccgccccctcccggtgccctgccgagctgcgtcccaa

SEQ ID NO: 200527 - DNA, 143 bp, Homo sapiens
  chr6:83073065-83073208
  hyper
tggggagagcttctgaagcttccatacaacctgccgtgcctttgctgctgccgcagtagattttcagctcatttctttctgctgctgcttcgcgctgctctgtcatgcctaaatctatctcgtcactgccaaaggtgcctgaa

SEQ ID NO: 200528 - DNA, 174 bp, Homo sapiens
  chr6:83073251-83073425
  hyper
ccaaggtaaatacagtatgcaaaatgaggaaccacccaaggatgtcggggaggggggagagaaagggattccctcaccttttccggcacattcctcgttaatttccaccaggaggaggcgcgcagcccagctcccctagtctctcttcttaaatccccctacctacggctgccg

SEQ ID NO: 200529 - DNA, 138 bp, Homo sapiens
  chr6:83073665-83073803
  hyper
gcgtcgttggggcccctccccatcctcgggtggagagtagggttggttcgggttgccactgtaccccgagtcccactgctgctttgttcccagactctcccctcctctttggagatgacttgaacccctttgagatcc

SEQ ID NO: 200530 - DNA, 682 bp, Homo sapiens
  chr6:83073835-83074517
  hyper
cagttgtagctccacttcctgctaatgcgagaaggtacaaaaagagatcaaaaagtcctgtaacctgaaacttccctcgcatcctaaccgggacctggtggagaggtctgggcgggggcggagacacccggaggccgaccttccgccgaggcggtgcaggaaggaacgggagagggagaagtttggtagggaaggaattggggattaagcggtaagttagacgcgggagacgagtctcctcgggaaaggcggagggcgggaggccggtcgggtttatttagtgtgggccagggaagaaggaagactttgcggtctgggtgtcggatgcgcgtccccctccggagtaaaagtgaccggaggggttggggaggcgaggccggggcgggcttttggaaggaggtctctgggacagactggagacgactagactcgaaaaggccggtttttgcactccggaagccgcggcagccaccgctgttcacgcctctctcctgcttgtcccaggtccctcagaggatccagcgaggggcgccaacaagaggcgaagaggtggcaccagggcggcggcaggaagaggagcgggagcaggagcgcggagcggagcgtcccgacccgccgtgcgtactttctggagggaaggggcgggggaatcggcccctgagggaagcgcccggtggcgagg

SEQ ID NO: 200531 - DNA, 70 bp, Homo sapiens
  chr6:83074829-83074899
  hyper
ccgtgtccgcccagcccccgctgccggaccagtgccccgcgctgtgcgagtgctccgaggcagcgcgcac

SEQ ID NO: 200532 - DNA, 215 bp, Homo sapiens
  chr6:83775565-83775780
  hyper
atcgcagggctggcgccgcctaccagctcacagcgccacctgccggccggagagtgcaccaccgagaaggcgcgtgaccccggaggccggggcggggcgcgcattttcaaaaccaggctttggcccagagtgctgagaaaggtgggcggcgagaggctagctatcgccccactctgcttcttatgagcgtgacttggcgcgttagcatccctgga

SEQ ID NO: 200533 - DNA, 71 bp, Homo sapiens
  chr6:84419415-84419486
  hyper
caactgggagcccgggtgggcaggtaattctagccactttagtcttaaacggatactgaggtctgctgaag

SEQ ID NO: 200534 - DNA, 70 bp, Homo sapiens
  chr6:84569263-84569333
  hyper
cggtgctgaagttcgggatgcggaactagctgagcatgcgtacttcctccctgccggccctccctccgtc

SEQ ID NO: 200535 - DNA, 157 bp, Homo sapiens
  chr6:84743222-84743379
  hyper
cccaaagttgacccgagggacccactgcagagcccgggatggcaaagaattctctgactcaggctctgacccggactcggaggggcaaagtgagcaggaaagggatctgcaaagctcacctcctcttggccaaggcggcctcgcgctggggaggcgg

SEQ ID NO: 200536 - DNA, 31 bp, Homo sapiens
  chr6:85472293-85472324
  hyper
tatctcatgaaagcgcttccagagctcggct

SEQ ID NO: 200537 - DNA, 164 bp, Homo sapiens
  chr6:85475698-85475862
  hyper
gtatatatatatatatatatatgacaaaggaattttttcctctccctcgtccctcgtttaattcaatctccgcaaccgttggctgcccttttatctctgacttctctgtaaactttcagtagagtagcatttgggggtagatccgccactgagactgatccttt

SEQ ID NO: 200538 - DNA, 39 bp, Homo sapiens
  chr6:85476132-85476171
  hyper
ggggtaccctaggccggtattacatcattaaaaagaagc

SEQ ID NO: 200539 - DNA, 191 bp, Homo sapiens
  chr6:85476714-85476905
  hyper
cggggactggtgtccgcattgccgaaaggctggaaagcagagcctcgtctacatccacgatgtttctagaacgtggcccttagaaataattcaagtgtgagtagggcgccgaggacaggacaaggcgtttgccccctagtcctgctactggctaaggagaatcatagcagtagagccgcaccactgctgcc

SEQ ID NO: 200540 - DNA, 76 bp, Homo sapiens
  chr6:85476922-85476998
  hyper
ttaagttcggctcaggctactggattgggcaggaccagctaacccaggtcccgaggggcagtgtgtcacagactgc

SEQ ID NO: 200541 - DNA, 206 bp, Homo sapiens
  chr6:86159242-86159448
  hyper
gtgagcttcggctctcacagcccgaaactgcaaggagctcctctgcccggcctctctttactcctcctctctgcccctcagctcgctcatctttcttcccgccccctctcttttccttctttggttctttgaagtgatgagctagcgcaaccacaaaccatacattccttttgtagaaaaacccgtgcctcgaatgaggcgagact

SEQ ID NO: 200542 - DNA, 269 bp, Homo sapiens
  chr6:86159509-86159778
  hyper
ggcgcaccagcagccgaactgccggcgcccaggctccctggtccggccgggatgcggccggtacccgctccccgccgggaacaacctctccactcttcctgcagggagctggtgccagccgacagccgcgccagggccgctccgggtaccagggtcggatcgggtgacgtcgcgaacttgcgcctggccgccaagccggcctccaggctgaagaaggacccgccccggccttgacccgggccccgcccctccagccggggcaccgagcc

SEQ ID NO: 200543 - DNA, 243 bp, Homo sapiens
  chr6:86159903-86160146
  hyper
tgggcgcggtgctgtggcctgcggctggcgcctgggagcttacgattttgcacaccaacgacgtgcacagccggctggagcagaccagcgaggactccagcaagtgcgtcaacgccagccgctgcatgggtggcgtggctcggctcttcaccaaggttcagcagatccgccgcgccgaacccaacgtgctgctgctggacgccggcgaccagtaccagggcactatctggttcaccgtgtaca

SEQ ID NO: 200544 - DNA, 1418 bp, Homo sapiens
  chr6:86302912-86304330
  hyper
aaaattgcggctacgaactggaccttgaacactcctccgtcagctgacttgactgcctgtgtacagtctcaatttgagccgacacacggatttcacttttgaaaagcaacgaagatgaagaactcgttttgagaaatggatgagaaaaaggtagctcaggagacgaagcctcgggaaaggaggcaatcaaccccaccccaccggcctgtgcttccggcctcgacgctccgccgtgctccccgaggccgctcctctgcggagctcgctctccccactggtccccagtcccgcagctacgcggcctccgcacggttaagcagcacgggccgggcgtctgcaccttcggagaaaagccgccgcccaggctccgcgctgcggcgttacctgttaagaagcagggaggcggcgctgagacagagcagcaggaagcagaacagcgggtactggcggcagatctcgcgtcccacgtccagtcgcagccgctgcttcagcttctgccccatcgtccgcacccagggcaccatctccgtaacggcgaggccgagactgcgctactggctgaggcagaggtcaaggcgaccccccatccacacctcgcgtccccgccccaccgacttggcggcgcacacagacgcctaccggcagttagccgccgcaggctgaggtcgcgtccggctgggcccagccccacgccccccgccgcgcgtgcgcggccgcggtccccagccgaccagaggaacggccgtagaacgtgcccgaagtcgtcacccagcgcaaagcctctagcgtctcgccgctccgccctcctggccggagtagcgcgcagtcttccgtggaaactctgacaacactggcgaccggccatttccggaaatcaaaggacagccccagcacccagtaactgcctgtattgcggaggagagggaagaaggttgtagggagcccggaagaaactacagcacccccgtagccgccgggcgctgcctgaggggcaaccggagctcgtggagcccgctgggaactgtagtcttcgtgacacgaacccgcagagggatggagcgggtggtagcgcttccccgaccccgcaacgctccgcgcctcaccgtacactcggctccgggtgggagcaggtccgagctttgcgtgacgcctaagggagagggggataggaggacgcctttgagtcggtattttaaaaggggtgtgttgggggctgggggggtggcgagtaaaacagccctagaataaagactacaactcatcaggccgccaccccaccaacaaaatctcttttgcgcgctcacgggcaagggtagagctcaattcacgccggctccgggagcccaaccaaaatccgagtgcttggaagaggcaggttggcagattaggtaaaatccctcttatagagtctcatgggg

SEQ ID NO: 200545 - DNA, 101 bp, Homo sapiens
  chr6:87646759-87646860
  hyper
ccgtcaactgctcccgccgttcctctccctcctcaacccaggctcgctacagaagaagggagtagggtctgcccccttgttgtatctattttccccttctc

SEQ ID NO: 200546 - DNA, 170 bp, Homo sapiens
  chr6:87646944-87647114
  hyper
acagccctgccctctagtgtctgcaaccgggagccctaaggcgccatcagctccagaatttctcttttataacctaagcaagacctggagtacctcggagctgcgacctccagttcacaataccacctgcctcacacccgggctcatcttttcatcccacacccaccacc

SEQ ID NO: 200547 - DNA, 74 bp, Homo sapiens
  chr6:87647143-87647217
  hyper
ctgcgacctgcgtagatgatttagcagactgcccctgcccatgctcctgctcctgctcctcctcctcctcttcc

SEQ ID NO: 200548 - DNA, 62 bp, Homo sapiens
  chr6:87861486-87861548
  hyper
gtaggttgatggagcctcttcgaaatcaggcagcagtgcccgcgccacggcctctgcaggac

SEQ ID NO: 200549 - DNA, 40 bp, Homo sapiens
  chr6:88032035-88032075
  hyper
tacaaacatacacaccgaactggaacgtaatttgaagttg

SEQ ID NO: 200550 - DNA, 142 bp, Homo sapiens
  chr6:89827793-89827935
  hyper
cgcacgggccgggggcgggggcggcgccggcgcggcccaggggccgcgggaattccgaagacaggagcgcggccgttcccaggccctatgggatccgggtatggggggtcctggagtgcgacgggatttggggagggggcgg

SEQ ID NO: 200551 - DNA, 165 bp, Homo sapiens
  chr6:89855491-89855656
  hyper
attaactaataaccgttctcattctgctgctgtgggaaataagcaacaacggaaaagtaatcgataatcttagagcataactcaaaggccagagcagccaaggaggtggaagagtcccgagccctgccttctccacagcacccccaaaaccccacggcggggcag

SEQ ID NO: 200552 - DNA, 304 bp, Homo sapiens
  chr6:90121293-90121597
  hyper
cagaagcgcgcgctcctccagcccagacgcttactccctccttccccttttccaccgatcctggttgcccctccgccaccagcaccgcgctccctcatttggcagctcgaggtcgggcttttggcgtccctccccaccccaaaccctcaactggacccgctcccctggaccccctccaagtcggtggctcgcgcacggccgggctgggggcgggaaggcgccaaggggaggaaaggggcgcgagccgaggacgcgggggccgggcgctcacctccctcctctgtgccgctgtccggatcggcgt

SEQ ID NO: 200553 - DNA, 250 bp, Homo sapiens
  chr6:90121684-90121934
  hyper
gctgcggcttccccagcacctggctcatcgtgcccaccggccggccggcccggggacggcgggggtcccggggtgggggccaagcctcctagccggccgcccgcagcctatttctgaagcggaggtttgtctagagctcagcggggcccggcggaagcgggggccgcgcgtcccccggcgggcggcgcccaggtccgggtcccgcggttcccagcgcgcccgaagccccctcccccgccccgcccgccgg

SEQ ID NO: 200554 - DNA, 399 bp, Homo sapiens
  chr6:90121994-90122393
  hyper
gtgacccgagtcacctgacacacactgtcacatactcacatacacaccccgcacgggcgcgcgcgcgctcgcccggccgcgggcaccactcggcggggcgctgggccgaggacacacatgcacacgcacacgcacacgcacgaggagaccggggaggcgcggggcccctgcaccctcccagactcacaccgacacacgccccgtacacggggcccccgggacgccggccgtcacccaccgcggctgcgcgccaggggcccccacgcgcctctccttcacgtggtccccgcacaggcaggggagggggcgccgcacaccctcaatgtcccccccgccgtcccactcccacacgcccgcagagcgtctaccgtgggcggatgcctcctgcttacagtcctg

SEQ ID NO: 200555 - DNA, 89 bp, Homo sapiens
  chr6:90122423-90122512
  hyper
cactgtggcgcccagatcccccaccccagagcagcgtgcccaggacaccctgtggacgctcaagagccccaggcggagaactcagataa

SEQ ID NO: 200556 - DNA, 267 bp, Homo sapiens
  chr6:90142635-90142902
  hyper
tggcaacccccacgcggaaaacctcaccctactataggcccccttcctcccactcttcagaaggcggtggccccacccaggagagggctgcagatcggggccagccccagggcctccgcggtgccacctctctctcgcgagggtccctgccgtgccccggctcgccgctgggaggcgctgcggcaccggcgtaggagccgccggcaggggtggggcggggccggcgggacggggcagagggccctgcggcggcggacgcggcgggct

SEQ ID NO: 200557 - DNA, 898 bp, Homo sapiens
  chr6:91005702-91006600
  hyper
gagggttaaggaggaggccgcccggcctggagctgggatcgcaggctgggggccgggacacccgggcctcgccgggccgggggcagggccgcgggtctgacagctgctgcggctcgcgcggacgcgcgcctcctgcagcccgccctccccatgcctgacttattactctctgctcctcctccctctgctgttccaaaacacccttcgacgccagcaaaatacaatgcgcctcggccgccgtaaacagccgggagggagagcacacattcggcgcggcgcggccgccggctcggctcccacccccttcccgttcctagaaaatgccataaaagcgggcagggcgcggggagggcggctgcgcgcccggcggccggggctcccttcccgcgccgtttccccacgcctccccgcccgccccgcgcgcccgctccccccgcaaacttgccccgccaccccgcccagcggcggggcccggggcccggggcccgggactcacctcgccggagaactttgcgtccttttccgcctcctcttccccgcgtcttcccggctcgcagccccctcccggcagccggcgaggtgggcagttcgtgggtcaccgaaagctcgcggaggggacgcgcatcacatggcagctcgttcccagccccccgagtgcgccgggaagggggaggggaaggggcgaggggaggccggggggaaagcgagagcggggcggcggcgggagtgggcaggcggggtggcgagggcggcggccgctcacgttagcgctgtgcgaccgcagcccgggcgtgcacggccgctgctgccgctgctgctgctgctgctgctgctgaggcggcggcggctcggcgctgtttgctccgcgccgcgcggcttgcgctctccccggaacgcc

SEQ ID NO: 200558 - DNA, 286 bp, Homo sapiens
  chr6:94127131-94127417
  hyper
accaccctccctcccatcacccccgcgccttttatacatcacacttctgcatctaaagaattcaggctcttagaatcagaatcctcttcacgtagcttgcacccagaagagcaaagagaactagacattctggctgcaggaacctctccccctagtgatgcagttatttatagcccaaactccagcccgagtctgcgtgtgttcgcgcgcggggtttcgccgcggcggtgcaaacttttcctctggtccgctattccagaggaatcacagtatgccagggctgaag

SEQ ID NO: 200559 - DNA, 368 bp, Homo sapiens
  chr6:94127997-94128365
  hyper
cttctgtcaaaggttcaaagaaggaaaacataaccatatacaggcgtatctgtaacagcttgccaaataaaacctgccttctcctaccagaaccaaccctcagggttcaggtctttggcaaggattgggcactcggattcctcaattgctgcactatggggcaaataattggggactttgagtcgcccaggcggcatccttacaaattgcacagctccagcccgccccctgcctccacggcccgaccaagcccgctgggctgccgctgcccccatgaccgctgggcccgacgcgcagcgcgcgctgaatggagacatccccggccctcgggtcgcgcgccgcacgccgcgcttcacctccgcggcgtt

SEQ ID NO: 200560 - DNA, 31 bp, Homo sapiens
  chr6:94128399-94128430
  hyper
ggaccgcgccgccgcctccgacgcagtgagc

SEQ ID NO: 200561 - DNA, 260 bp, Homo sapiens
  chr6:94128907-94129167
  hyper
aggtagacatctaaataaataagtcagaacaaactttgctttcccatcaccttaccttccttcgcagcctgcgcctcccctgtgtgtgcaaagcggagcagccagatgtagcataaaataatccatgaagggtaccgagtttgaaaaaccatggtgcatgagcaggttttattttaggtttcagttatcttgagtcgtggatttttaaatgctgtttgttccgaagtagcttttgttttattgtgctccttgcatcgatt

SEQ ID NO: 200562 - DNA, 31 bp, Homo sapiens
  chr6:94130101-94130132
  hyper
gtatcgtttttttacgcgtttatcattttct

SEQ ID NO: 200563 - DNA, 79 bp, Homo sapiens
  chr6:96463090-96463169
  hyper
ttcctagatcattgagaacacggtccgaggcaattgggttaaaacgatatatgtataaatttctttttttacctcgtta

SEQ ID NO: 200564 - DNA, 222 bp, Homo sapiens
  chr6:96463860-96464082
  hyper
cagcttcagcgaagccggagatgggcagagagcgcgcgcggcgcagcagctccagattcactgctctcccctgcagctccccgcgcccccgccgctgtcgctgcctcggtgtcccccagccccagtcgcgctcttaggacagcgccgccaccgccgcctggccctgcctgcctcctgcgccgcgcagccctcgcgagcgccccggatggcgctttaccccta

SEQ ID NO: 200565 - DNA, 102 bp, Homo sapiens
  chr6:96464204-96464306
  hyper
gggtccagggagggtgttgctctgtggtccccaaggggatgtttgatttcaactccacctgctggcaacctgaacccctctccgtcttggggacagctgcct

SEQ ID NO: 200566 - DNA, 118 bp, Homo sapiens
  chr6:96969409-96969527
  hyper
aactattactctacggaaatattaggggtagcgcaaacaaagttctgacactaaactttactgagccctgcatcctgcccacgacccccccagaaacacctacgcaccactctcctag

SEQ ID NO: 200567 - DNA, 113 bp, Homo sapiens
  chr6:97284791-97284904
  hyper
cagcaggaaaggagccggcatggggtgcccctctgcagccgaccgttttcctagaaggcctaaccgctcagacgggcaggggaggggggcgggcggcccgggagaaaccgagt

SEQ ID NO: 200568 - DNA, 151 bp, Homo sapiens
  chr6:97731282-97731433
  hyper
actgctgctgaggcggaggagaggacttaaggactatgggtttatcctctggccggaccaaagagaagatatttactccagtgagtgcgaagtgagtgcctcgttcacacccacagtcgcgccgtcccctcttcccgctctggggccagca

SEQ ID NO: 200569 - DNA, 100 bp, Homo sapiens
  chr6:99272984-99273084
  hyper
tacgaccgcgtcgactcgcgctcacgcacgcctgcccttttctccagaagcctgaaagtggctgaattcaaacactgacacgtgaaaactctattctgag

SEQ ID NO: 200570 - DNA, 208 bp, Homo sapiens
  chr6:99273114-99273322
  hyper
atcttgatccgccggtcctgcccaaagttcagagcagctgtccgaaaggtccccgcatttgctgtccctaggaaaggtgaggctaggaggaagggggaggcaacgcagggaatgtgagaggactggggccacactgtgtatctaggaggaaactctgaatcctaatctcaagaatgtaagtctttgcgcagtttccaaatcgagtcca

SEQ ID NO: 200571 - DNA, 246 bp, Homo sapiens
  chr6:99273602-99273848
  hyper
ccagcgtattgtgagatttctaaatgtcagggcactgttaaggaaatgtctgacaaacctgtagtaaacctcttcacgaaggaaaggagggctgttgtcttggcttttggttgtgtgtccctcatggcccccaagaaaacaatttttctgttccaaacactctttggatcaagtttcgtccttgcatttctagtttaggcgtttctactagaaacgaatgtgtggtgcgttttggttgggcattac

SEQ ID NO: 200572 - DNA, 126 bp, Homo sapiens
  chr6:99273901-99274027
  hyper
taggcttgtttggggcagctgtaaaaggtccctgtaacgctccaggtctacctggggaccgcccaccaactccctggtctccaattatcattgttagtgcaaggtggagaacgagcttaattcttt

SEQ ID NO: 200573 - DNA, 211 bp, Homo sapiens
  chr6:99275630-99275841
  hyper
gggaaagggtgccaggccccaggcggcacttttattttggttaagaggagggagggctgctcccaggcccgagggaggcgaactgagcctttctgtttggatttccctcctcgctatagcaaccagcagcatccggacaaaaatgcgccctccctggacaatggcccggcctcctgcttctcgccctcgtcttcctcccccggatcccagc

SEQ ID NO: 200574 - DNA, 50 bp, Homo sapiens
  chr6:99276008-99276058
  hyper
ggacctcactaccgagttcgggggctcccgcaggggagttccctgcaggg

SEQ ID NO: 200575 - DNA, 121 bp, Homo sapiens
  chr6:99276259-99276380
  hyper
gttaattaagttcccttccacgaactgagctccgtgcctattcattattctctccctctgacctagggcgttaatatgatcaggcctatgactcggccgtgttctgttttcctattttgca

SEQ ID NO: 200576 - DNA, 274 bp, Homo sapiens
  chr6:99276430-99276704
  hyper
aagacaagaggagccaggaggtctccctgctccaatctgcctaaggcttcctcttcctgcctcctcttccggccaacgtctgcccctatgttcccaggacccaaattctggaaacctgtctttaaaaatacaatcatctctaactttatgatgtccaaaagctgtctagaatgacagattcgaaactctgagacctagcagaagattttggcccacagttattacgactgtggttaactgctctccagaaaagcatctctcccgcccgtgcacc

SEQ ID NO: 200577 - DNA, 399 bp, Homo sapiens
  chr6:99276781-99277180
  hyper
gtgcacttgtacacttcagaaggatttgcattcgtgctgtgtgcaggcagaataagagaactgaagtccaacttcaaccaaatacgcctgtttatcccagggctggagcaacagccctagcccttgaaaatggcttcagtgaaatagctgagtacaccctcctcccacttccccagtccgcctctgtgcgcaggtgtatgttagtgcactcgtccctagcttgccttcctcttcgaaaattgctccagaggatgagagaagccaggagctctagcaagagcttcatcccagtacatttccaaatgctttagagctaaggaggtttctgttgaaatcactttaatttatcaaagagttgtcatcccctactggtggccagccatccacctgctttaaggc

SEQ ID NO: 200578 - DNA, 252 bp, Homo sapiens
  chr6:99279098-99279350
  hyper
aggcccgcacgaatcgcctgctcagccattgtcctagcgagtgatctcgaggagctgtgctggatggagtgagggagatatcaagacaccttgtcagttcaaagcattttagcgttgtttgaaatcctctccacgtcaacgtaagcagcctgtgtatttgaacagctgctttgaacagtgaaagggaataaactgattcaaaacctggaggtgtctgcccgagacaccttcaacgtgcttttatgcgggcgg

SEQ ID NO: 200579 - DNA, 140 bp, Homo sapiens
  chr6:99282638-99282778
  hyper
ggagagagaggagacagaaagagcgagcgaggagagggagcccgaggcgaaaaagtaactgtcaaatgcgcggctcctttaaccggagcgctcagtccggctccgagagtcatggcgaccgcagcgtctaaccactacag

SEQ ID NO: 200580 - DNA, 38 bp, Homo sapiens
  chr6:99283080-99283118
  hyper
agggcggccgcggagacgagctgcacgggccaggcgcc

SEQ ID NO: 200581 - DNA, 161 bp, Homo sapiens
  chr6:99283178-99283339
  hyper
cagcagcagcagcaacagcggccgccgcatctggtgcaccacgccgctaaccaccacccgggacccggggcatggcggagcgcggcggctgcagcgcacctcccaccctccatgggagcgtccaacggcggcttgctctactcgcagcccagcttcacggt

SEQ ID NO: 200582 - DNA, 82 bp, Homo sapiens; identical to SEQ ID NO: 5009
  chr6:99290709-99290791
  hyper

SEQ ID NO: 200583 - DNA, 80 bp, Homo sapiens
  chr6:99292123-99292203
  hyper
tatttgcccctggaatataacgctgacccaaatgcagtgaactgcacggcccttgtggggccccaactttgatgtgggcc

SEQ ID NO: 200584 - DNA, 137 bp, Homo sapiens
  chr6:99292521-99292658
  hyper
attaaaaccttaatcctgtttgagactttcttctctctctaaattcctttttcttatgaaaggggtgcaaagttcactacaaaaagtactataacagggagattaattcgttatctaaataacaatctttgctattg

SEQ ID NO: 200585 - DNA, 569 bp, Homo sapiens
  chr6:99292688-99293257
  hyper
tggtccgggaggcccttaaaaaagagaatatacaaagcagaagatctggaccaagccccaccgactccgatagacttgggagagcgaggggatccgcggtccgccccccttaaccacagtctgaggaagcttcagaagtgggtcctggccgtcccaggcgatgccactggggaagcgcagcgctagagccgcgggcctgggagccgggctcctccacagtcctctcccctcgcaaagggagatctgatctgctcagtctctaggtaaatattcgaccgattctgcttttacttttaatatttaaacttggattatcccgtctccaaatgcgcgttcctaacctttgccagtggctgggatgtaataaatcctggcggggccggggcgctcagcctccccaggtcgcggccgctgcctccctcccccgtcccgccccgccccgcgggccccggcctgtccgcccctcgccgcccgcagcgaaagccgcgccggaatgaaatcagcgcctccccgcagctgacggctgagcatcctgggcgctggcaggcgggggaggccgccctttatcc

SEQ ID NO: 200586 - DNA, 345 bp, Homo sapiens
  chr6:99293287-99293632
  hyper
gagccgcggctacccggaggagaaagagcccggcttcgtggaggcagcagcccccaggcataggagggggtagcaagtggggccaggggccgggaggttgggcggggtctatggtttgtatgtgttgggtggcgggtcggggaaggtaccctttccaaacctatctcccctcctcgctagcccttttaaaaaggtggtggccccagtttgagaataagccccagcgtctctgaagccacgaggaccgtttgtgctcccaagtcaactcagtattccgagattttcttcttttctaagagcttcaccccctccccacaccctccttctttccgtctaacaaagtct

SEQ ID NO: 200587 - DNA, 183 bp, Homo sapiens
  chr6:99872772-99872955
  hyper
ggggttcccactgcgcacgcgcagtgtttaacggccggtcaggaacccaacaattagtcccttctcgtccgagaggaaactctgtgagaagatgggaccgtgagcactctctttaacaaggacatttccttttcagcgaaagcagcgctctgatttaccaagtctggcggaccgcagcgcttt

SEQ ID NO: 200588 - DNA, 66 bp, Homo sapiens
  chr6:99962859-99962925
  hyper
ggagctcctaatacacgacgcttccagaaaagtcattagacaggcttcctccggtcaccaacacac

SEQ ID NO: 200589 - DNA, 180 bp, Homo sapiens
  chr6:99963487-99963667
  hyper
tgataatctaagactcatagccaccgactagcaatttgttaggatcctgggccagcgtgcgcacctcggatgttgcaggagtccggcttaagtcccacttgttgctgggcaccttctgaaacagcctccgatttccctccgttaccctcctctgaactcttttttttttttttttttttt

SEQ ID NO: 200590 - DNA, 213 bp, Homo sapiens
  chr6:100016559-100016772
  hyper
ctagtctccttcacgccggccgacaacactcaactgtgcaaacccgttcctatcgacaaaagttccggcccgcggtagcggagggagccggaggggaggtgctgacccttggaggtgctgagattgaagagaactagtgttcacgagagctcgcggcggttggaaggctctcgcgagagcgtcttgagaattctggccgggggcccaagccgc

SEQ ID NO: 200591 - DNA, 320 bp, Homo sapiens
  chr6:100676760-100677080
  hyper
gaaaatctgcctgcgcccctagtgcccaaaacacttaaccctgaagtaccaggtgtccccaaccgcgggcaaacccaatcttggttcactttggcgtctcggaactgacagggctccgtcagatcttccgtttccctcctgcgcgtccgtgatattgattgacagcctctcccctcccaccctccctggcggcccagccaggcaggctgttttgtcagctgctccgcccaggccggacgaggccgcagcctgccagccggctccggcctccacaccgcgggagcacgccccgcctcggcctcgccgccgctcgggctgac

SEQ ID NO: 200592 - DNA, 41 bp, Homo sapiens; identical to SEQ ID NO: 113780
  chr6:100913285-100913326
  hyper

SEQ ID NO: 200593 - DNA, 125 bp, Homo sapiens
  chr6:101329394-101329519
  hyper
ggcgggagcgggacgctccactttaccctggctgcccgcaacgggccaggcctgccgtctctacctctctacctgtgagttttttccctgcatttacttcagtctgccgcgtcttctccccgccc

SEQ ID NO: 200594 - DNA, 211 bp, Homo sapiens
  chr6:101840315-101840526
  hyper
cttgagcccagtgcgcctggcctgttcccgcttagcctcacttaaatctcctcgcgaatctgagctggccaacttcctctgggggaaactgctaaactcagctccagttaatattgtagggctgaggataaaatagcaacggttttgaatagatgttgacttttccgacccagaggagcggaactcagggattgtttgcaaaagctaatcg

SEQ ID NO: 200595 - DNA, 188 bp, Homo sapiens
  chr6:101849750-101849938
  hyper
ccgccgcctctgctggggaggcagcatccagtgtcccttccatcccccacccttggcgtggctaggcgccggcagccgccaggcgcctccgccgcggcgctatggcaacggcggagcccgcccaggcggccaccccagccccccttccccgctagttaaggctctgtgttatccttccccttgctccc

SEQ ID NO: 200596 - DNA, 52 bp, Homo sapiens
  chr6:105389710-105389762
  hyper
gatttgtactccaaaaactttttttaaaaattgcacgttggtaaatattgag

SEQ ID NO: 200597 - DNA, 140 bp, Homo sapiens
  chr6:105627228-105627368
  hyper
gggaaggaaactcccggcgctggcatgacttccccaggactgacaagggcccctaggaacggcttttctcccttgcaaaactggcctgtttatttcggctccagggtgcctggggccagagtaggacctgcaggaaaaga

SEQ ID NO: 200598 - DNA, 155 bp, Homo sapiens
  chr6:105628083-105628238
  hyper
cctagtattcacagtcacactaggcaggagcgatgggctggctgctgaaccaaggcaactgcacgcctgctctctcacccccgctccacacacaccgtaaacaaaatgaagaggtaaatcaccatagtggggacgggaatattagggtgtattgg

SEQ ID NO: 200599 - DNA, 82 bp, Homo sapiens
  chr6:106443120-106443202
  hyper
caatgatctttcataactaggctgggcatgttcgtgcagccctctgggcactctgggggacgttctcataaggctttttttc

SEQ ID NO: 200600 - DNA, 196 bp, Homo sapiens
  chr6:106533849-106534045
  hyper
tgtacctggggatttgagctgagaaatcagaaactgtgtaggtaaattttaagtttccttaatttaaggaacgtgcgccccctaattctgccgcgccaggaaggagggcgatctggagtgtttagaatacaatagagcccaagtaagcgttgaggttaagtgccttcaaagggaagtaagaagattccaagtcaat

SEQ ID NO: 200601 - DNA, 409 bp, Homo sapiens
  chr6:106534075-106534484
  hyper
ctcggcggctgtgctagcaatctgggggaaagccctgggctcggccaggtggtgttggccacgttggccacgcccccacttcgcgcagccgagtggctaaggaaatcttaagcagggaggggaagccagacggttaacacagacaaagtgctgccgtgacactcggccctccagtgttgcggagaggcaagagcagcgaccgcggcacctgtccgcccggagctgggacgcgggcgcccgggcggccggacgaagcgaggagggaccgccgaggtgcgcgtctgtgcggctcagcctggcgggggacgcggggagaatgtggactgggtagagatgaacgagacttttctcagatgttggatatttgcttggaaaaacgtgtgggtacgaccttggtaaggaacttgaa

SEQ ID NO: 200602 - DNA, 134 bp, Homo sapiens
  chr6:106809184-106809318
  hyper
cccacgcatgtggcctttagtatgactgcaaagttttcatgcaggagcctcccgcatcagcctgctaaccagagcggcggggagtgagggttgttaccgtcctaaatgatggcgggaactctgctttggggtta

SEQ ID NO: 200603 - DNA, 115 bp, Homo sapiens
  chr6:106958125-106958240
  hyper
caggctgggctcgccgcccctgctcccccgctttcccaggctcgcctcctcctcttcctgcccacctctatgccccgcacctacccagtccccactctggcaaaccccggagcgc

SEQ ID NO: 200604 - DNA, 425 bp, Homo sapiens
  chr6:106958337-106958762
  hyper
gatataagaagcccaggttttcccccttcctgggagcgctgcggatcattcgcaggcggcccggcaccctcgcataggtgggccggcccctggggctccagccgtgcgaccccggaaccacacgtgtggcgaggaacgggtcccggggcggagtaggcagagtcccaagcgcatccttcagccacacctcctcggctctagggggcggtgagcaaaggcggtcacccctgcaacctcgcccgctacccccacgcactcctccgtgttcacatggtaggaactcccacaggcaaaagcctttccgatgcgctctgcagccgcgggatcactcgggtgtttgaacgctcgcgcgctcctcccattggagctccggctaaggcggggcccaggtgcttgcttcctccgagcttgcttaaggttttcat

SEQ ID NO: 200605 - DNA, 333 bp, Homo sapiens
  chr6:106959606-106959939
  hyper
cccccctgacgccgagctgtcacctcgctggagcagcagtgcagcggctgtggctgtgcagcagtgccatgaaaatgattcaccccaattagaacctctggaggcagagggagagcctttcccagatgccaccaccactgccaagcagctgcattcctcgccgggaaattcctccaggcaagagaacgcagagacgcccgcccgcagtccgggggaggacgcttcaccaggtgctggccacgaacaggaggctttcctgggtgtgaggggtgcgccagggtcgcccacccaggagcggcccgcgggaggactaggcgaggcccctaacggagc

SEQ ID NO: 200606 - DNA, 262 bp, Homo sapiens
  chr6:106960046-106960308
  hyper
cgcacacggccagctccgcgcaggcagactgcacagcccgccccaagggtcacgcccaccctgctaaggtgctaactttggacatctacttgagtaagactgagggggcacaagtggacgagccggtcgtgattactcccagagcggaagattgcggtgactgggacgacatggagaagaggtccagcggccgtaggtcggggaggcggagggggtcgcagaaatccaccgactcccccggcgcggacgccgagctccctga

SEQ ID NO: 200607 - DNA, 156 bp, Homo sapiens
  chr6:106961023-106961179
  hyper
ctttcccctccatgctgaacttaagatagtgaagggccagtttacacagtcaagatttaagatgacacctgtggcagcctcctcagttaattccctttttaacacaagatttaagtttaacgaatgtaaaaataggatatccgttgaagctcaacg

SEQ ID NO: 200608 - DNA, 74 bp, Homo sapiens
  chr6:107780253-107780327
  hyper
ttgctgagctcgtcgctcagcaggcagcgaaggctcatgaaggacgtggggtaccccacgatcttctccgcctc

SEQ ID NO: 200609 - DNA, 314 bp, Homo sapiens
  chr6:107810308-107810622
  hyper
cgggaggagaaagtgcaaccaggcggggaggggaggatcccaccggggcgtggcgagggcgttcggggtccgggtgagcgggaccctacgcgggaccgtgcgctcccagaagctcccactcagcccaaccttttgggcgaaacccaggacacccagataagggtgcaggcggggtcacgcgtaaagctgttactttgaagcagggcataagtgagagagagataaagagagaaggaccaaggggaaaaagaaatgaaggggctgaaggccgagatgtcctacttctaagtagttctttgagaggcaaaagcttc

SEQ ID NO: 200610 - DNA, 40 bp, Homo sapiens
  chr6:108435994-108436034
  hyper
tgttgctaagaacagaaattttacatgattttcatacatt

SEQ ID NO: 200611 - DNA, 125 bp, Homo sapiens
  chr6:108436829-108436954
  hyper
ggccgggtaatgcactgatcgagggtgaggagggatgtttcatagccttttccgacatacctcacgacaaaacacctttcactctctatgagcaaaggaaagaagaaatgtcccacaccctctat

SEQ ID NO: 200612 - DNA, 64 bp, Homo sapiens
  chr6:108484808-108484872
  hyper
atggtagccccaagtttctacgccttaaatccgaggtcccccgtggcctgcagcagctttgcct

SEQ ID NO: 200613 - DNA, 39 bp, Homo sapiens
  chr6:108487482-108487521
  hyper
tctttccttgggagaccagcggtcggcagagattgccca

SEQ ID NO: 200614 - DNA, 159 bp, Homo sapiens
  chr6:108496966-108497125
  hyper
gagagagagccccttcctctgcggcgcaggaagccggagggagcgtccaacctgttgaacttgtgtattgacaagttgtcaagctcggcaggccgaagattgccctgaattaatttgtttgtttaaactgttggtggtaattgtcacatctcccctgcc

SEQ ID NO: 200615 - DNA, 106 bp, Homo sapiens
  chr6:108582547-108582653
  hyper
tcctgtctctctgcgccagcctcggcctgcggcggggtagagcgccggaaacggctttagcggctttgggaattgcgggcgaaagttaaacggagagatcttagag

SEQ ID NO: 200616 - DNA, 183 bp, Homo sapiens
  chr6:108882164-108882347
  hyper
cctgttcctgggaggcgggcgcggcaggactgggaggtggcggcagcgggcgaggactcgccgaggacggggctccggcccgggataaccaactctccttctctcttctttggtgcttccccaggcggcggcggcggcgcccgggagccggagccttcgcggcgtccacgtccctcccccgct

SEQ ID NO: 200617 - DNA, 210 bp, Homo sapiens
  chr6:109703826-109704036
  hyper
aaagcgactgtgccacagccaagaaaactgggagcttctgcaaatcgttcttcttgccctcagattaccagacacgacgcagctggacttgtctcatgcctgcgatagggacggcccccaccctgacttgcatggaacagtcgacataatgtggcctactgcttccacctgagcgccccgccaggctgtaattccgcgggcccacgtgac

SEQ ID NO: 200618 - DNA, 53 bp, Homo sapiens
  chr6:109776898-109776951
  hyper
gccggctccgctggacgacttaccggcggctccgaagccgggaggggccgctt

SEQ ID NO: 200619 - DNA, 429 bp, Homo sapiens
  chr6:109777177-109777606
  hyper
ggacagtcttgggcccgcccatgcctgcagggtggcgcccgagggcgtggcgctgcggacaccccgttccgctctggggcctctgggtgggtctggcctgttgggggctgaggagctcgagggtcagggcgcccagtgctggaccgcgcaccctcggcctgggctccttgccggtgcttgcgcgtgcaaggctagctctttccccgccgcaaggcgaggaccacccgcccccgccgcggtcccaggtccgctggcagcctcccagcgccgggccgagagggcgctcaggctcctcaagaggtttggaaaagccggcgggtccgagggtggcgccggaacgtctgcgctctcctccggtctcccacctggagatccacggcccgggcgccccaggatggatccaagcgcagagtgcgcctcctgtgacag

SEQ ID NO: 200620 - DNA, 220 bp, Homo sapiens
  chr6:110012081-110012301
  hyper
ttgggccacacagcgtaggtacaacatggattagaggtgaggggaaaactgacactcagtgaaggaccgtcagagggccggcttccaggaaaatgggccgcagcaggcagggaaaacacaaggatctatcctgcaactcggagaacccttttcaaaagaagctacccaatcccaaaccttccgcttttttccaaagagagggaggagataaatagactca

SEQ ID NO: 200621 - DNA, 60 bp, Homo sapiens
  chr6:110500677-110500737
  hyper
catgcttcggcagcggtcgccggtccccctcggctcgcgggactccgcctagagccccca

SEQ ID NO: 200622 - DNA, 494 bp, Homo sapiens
  chr6:111408822-111409316
  hyper
ccgcccgccaggggctccgccgccctcgcctcggcctcgttagcccgccaggagccccgcagctcctccgggagcccgctggtaactcgcgtccctcgcgcttctccggcgcctgaggggcccgcctcgggccatggtgctctcccaggaggagccggactccgcgcggggcacgagcgaggcgcagccgctcggccccgcgcccacgggggccgctccgccgcccggcccgggaccctcggacagccccgaggcggctgtcgagaaggtggaggtggagctggcggggccggcgaccgcggagccccatgagccccccgaaccccccgagggcggctggggctggctggtgatgctggcggccatgtggtgcaacgggtcggtgttcggcatccagaacgcttgcggggtgctcttcgtgtccatgctggaaaccttcggctccaaagacgatgacaagatggtctttaagacaggtgaggcgcggcgcccgc

SEQ ID NO: 200623 - DNA, 273 bp, Homo sapiens
  chr6:111409368-111409641
  hyper
ggctgtgtctgcctccgagtgtgcatgtcggtgggtccctgtgccagagggtgcgagcaggggggtctttcgagttgcagacagagcctgccgcttctggggcctcggggtgcccgtctttatatggaatccagctgcagagctgtgtgtttgcaagcaggtcgcagaacttacttgccgagatcgtcctcctttcccctcagcagagcagacgctaacagtccacaggagcccttccttttattgtttgaaaacaaacagaaccccagaacc

SEQ ID NO: 200624 - DNA, 89 bp, Homo sapiens
  chr6:111804030-111804119
  hyper
ccagcccctgcagcgggctggccatgtagtagtctgcagtcactatccttactgaaaacatgttcgccgccgccgccactgcctccctt

SEQ ID NO: 200625 - DNA, 600 bp, Homo sapiens
  chr6:114176620-114177220
  hyper
cgagctagcagtcaccccaatttaaaataggagggggatgcggaggaaggggcatgattcacgttgggggtggggggaaatcaagagccttaaatgggcttttgggaatcgcctggatggtggtgtcggatcagcccagttggcttttcaagttggaactgctaatacaagggatttgcgtccatcctggcggctggggtcgtgggccaggccagcgggctctcttaagggtaataacacgtttgctggcaagatgcatttctacggaaacgtctttacatcagctctggggaatatgaccatggtcgaataatgcatctgaaggaactggacagtgagaagacgaagcttcacgtaacaatgttcagcttggtgatttttaaagcaacgcttgaacaaagagttactggcttgaaccaaccgtctttttcactcagagtgtgacctatttccctacaatgagcagaaaataaaactgtttgagaattcagagccagcaccaggagaaatgaaccattccctcgactgcttctcaccttcataagcgaaagattattccttgcaagatcaccaaatgtaaacgagaaaaggtggtctgat

SEQ ID NO: 200626 - DNA, 52 bp, Homo sapiens
  chr6:114194490-114194542
  hyper
tcagacttctcactcggcagctggcttcccccaggtccgaagttcaagagac

SEQ ID NO: 200627 - DNA, 199 bp, Homo sapiens
  chr6:114662113-114662312
  hyper
ccacccacccactttcgcccccacccaacccgaccctgcatgctatttatcagaccaagtttacataaatcagagaagagttacagtgctattaaatgtatccacgaagtaatatgacataaagcactttgcaaatattaaatctctccccagtgttttctaagaagaaactggtattcgtattcggagacagagagga

SEQ ID NO: 200628 - DNA, 44 bp, Homo sapiens; identical to SEQ ID NO: 113942
  chr6:117086902-117086946
  hyper

SEQ ID NO: 200629 - DNA, 195 bp, Homo sapiens
  chr6:117197942-117198137
  hyper
tgtcccaggcgtgcagagtccacgccgcgcggccaggtgccccaatagtgtacctgaaagtagggatggggccagttacagctgcactttccctgcagaagacagtgagccttcccgggatctttctgggagctctgagtgtgaaaacggtcctccggccagcgcaggttgagagaacgggaaggagggggaagc

SEQ ID NO: 200630 - DNA, 184 bp, Homo sapiens
  chr6:117198574-117198758
  hyper
acctggcggccgaagggcagcccgggggcgagcagggcggcggggagaaaggcgaagacccggagctgccgggggcagtgaaatcaggtgagtgctctgccgcatccggagctgggaaggggacggggacgtattctaagaagggcacccaataataataatgcatcccgaacaaacataaggc

SEQ ID NO: 200631 - DNA, 796 bp, Homo sapiens
  chr6:117803613-117804409
  hyper
aaggcaaggaaggagcgcagcagggcgcgccagatacgtggaggggagcgcgggcggcgcctcgctcgcctccggcttcgccgtcggtcactgcctgggaacgcgacttcctcctctaggggccgacgtgcggggcggggcggggccgggcgggagacgcccccgcagggctgggctgaaagccgccccaatgggattcggtgcggggcagcgactgcgccccgtcccggcgccgcgctcgtccgcagaggaggcggcccggcccgggcagctgcggctcgggatccgtcgaggggaggccgagcttgccaagctggcgcccagcggggtcatggtgcccggcgcccgcggcggcggcgcactggcgcgggctgccgggcggggcctcctggctttgctgctcgcggtctccgccccgctccggctgcaggcggaggagctgggtgagtggagcgcgtccggctggcggcgggacccgaggcgccaggggcgggctgagggctgcggggcgggccgggccgggccgagggctacggggcgggccgggcctggggggacggagcgcgggaggaagtcgggctcgccgcctgccatccgcggagtccggctctacccgcggggctgggggtgaagtaggttactgcattccttgtcgctcccccaccaaactccttccttcccccaaaaccagagaattaacctggcgtctctgcactttctctccgccgccccccagcccatttcacttagtttccagacttcctgactctgctggccccgtgagaagtgacctgac

SEQ ID NO: 200632 - DNA, 298 bp, Homo sapiens; identical to SEQ ID NO: 43413
  chr6:117804487-117804785
  hyper

SEQ ID NO: 200633 - DNA, 148 bp, Homo sapiens
  chr6:118241526-118241674
  hyper
ttgcgaaattaaccgtttttcctccacaactgccagctcggcgaatggccttcaagcccatccaacaggagataatctgtccttggaactagtgcaagtcagtttttaactacttgcggagaaagtctgaaacgtcacaaccaaccaa

SEQ ID NO: 200634 - DNA, 213 bp, Homo sapiens
  chr6:119670901-119671114
  hyper
actccgccgcggccccgcgagcactaatctcactgccggtcttggggcggtggaaagcgagggaggcgacgcggccggagagtgacggcgcggccgggccaatcacgcgccgcccagggtcccgcgggggcggggccgaggcgaggagggggatgcgcggggcggggagtttacgggaagcgcagcctcggcggggcccggccggcggcgggg

SEQ ID NO: 200635 - DNA, 198 bp, Homo sapiens
  chr6:119671587-119671785
  hyper
gcttaggacttttttcgtatgcgccctttcttcccccaaaaaacaaaaaaccgaaaaaacttgtatgtctctcccgcccacccgtactttcactattcatttacctcatagaagttggtcaaattttccattcgaagacgagttttatgctgcggtagcttcaagcaataagtcgaacactgtgttgaaattaagtct

SEQ ID NO: 200636 - DNA, 151 bp, Homo sapiens
  chr6:121758994-121759145
  hyper
tgaatatcgccctccgaaaatcgggcgcatttgaactcggtgaaaagtgtccctgtgaggaagcctaatgtttacttttgtgcaaggataactggaaattaaagcgtctagtaatgcagagatttcattaagcgagcgctcccctcccccc

SEQ ID NO: 200637 - DNA, 218 bp, Homo sapiens
  chr6:122931206-122931424
  hyper
gaattgaaattcccgcagtcacgtcacagaaatcttagcagaacctcatcatcgcccaagggaactgggagtggcgggcggggaggacgcgggttgtgtgacgatcaccgataattagttggtggttaacgcacaagtaggataaaagagctcgccccaggctgccagcagaaaaaagctaccgtggcacgtgccccggggagtgatgcggtggcccg

SEQ ID NO: 200638 - DNA, 35 bp, Homo sapiens
  chr6:122932470-122932505
  hyper
tccccggggaacgcagccaacggaactcgggtcct

SEQ ID NO: 200639 - DNA, 367 bp, Homo sapiens
  chr6:123110491-123110858
  hyper
atggcgctggtgcgcgcactcgtctgctgcctgctgactgcctggcactgccgctccggcctcgggctgcccgtggcgcccgcaggcggcaggaatcctcctccggcgataggtgagttgtccgcgacccttctcttcccagccggcaaagagcgcggagcggcggcgcctgcgcacagcaggagaaagtgcgtgggggcagctgcccccggcagaggctcgggctagcggggcccctgacgcgtccggcgttgaccacggctggtgggcgcggggagggcgaccaagggactacagcgttagggcgtccagccgggaggccggggctgggcgggggaaatgccctcgccggtgggggcgctccaag

SEQ ID NO: 200640 - DNA, 275 bp, Homo sapiens
  chr6:124124018-124124293
  hyper
agtaactgagtattaaactagtctccgactctttagtattttaagtgaaaacaaacaacagtttgaagcagcaacagcaactcattgcatccctattccctccggttgctaatttttcccaactccagcagcaactcggtccccttccccaagcagggtcggctccgtagctctccgcgctccgacccttcagatcctcgggagcccaggggagccaggtgctgggcggtgcgtccggtgccgccgcgccccttctcgccacctctggcctctcc

SEQ ID NO: 200641 - DNA, 233 bp, Homo sapiens
  chr6:124125086-124125319
  hyper
cactgcccgcggcgcggcgtgtgcaccgagcgagtgaaggtatgtgtggcgggcgcggctggagctgccgccgccgccgccgccgcgccagcaggtcctaatgcctgtcacttcccaggacgctggcagcagcagcagcccggagcccccgagccctcggcaggtttgcgtgtccttccccgcgatctgattggataaagtgggggctcgacggtggccgacgtgggacagtc

SEQ ID NO: 200642 - DNA, 54 bp, Homo sapiens
  chr6:125284305-125284359
  hyper
agcccccgactgtccctcccaacggattccctctcccccgacggcggcagcatc

SEQ ID NO: 200643 - DNA, 155 bp, Homo sapiens
  chr6:126067852-126068007
  hyper
ccctttagatcggccgtcctggcctttctttcctaacggcatctcctttctaataaagtccctcgtatcttttggtgtaattaactcatggtacaaatccttcaaaaagaaaggaaagaactgcggtttgctctacgcgcggacatcttttcttc

SEQ ID NO: 200644 - DNA, 177 bp, Homo sapiens
  chr6:126068252-126068429
  hyper
caggcaaatggaataaacagctgaggagaataaacgacctaatggggaaatctcgtgctgcctaattgctattgtgttttgcagataaataagcatattattttgatagcgttcaaaaccctgagctctcttgccctatgcattcttaacagacttctatggcgcttactatatacc

SEQ ID NO: 200645 - DNA, 723 bp, Homo sapiens
  chr6:127664172-127664895
  hyper
tgctttttaaagtgtaatctcgcgacctcgcggcgcgctctgggaagaccgattcatctcttcccctcgccctctttccccggccggcgcacagccggcccgtggcgctcggcaccgcgtctccacgtccagcgcggggcaggcctgcgcggcgcttgcaagggacaagccgcggagccggggaggctcgccgtctgggacacgtttggagaagcgagcggtacagtccattccacggcgacattttaggattctcccactgacaacactaaactgaagcgctaagaccaacccttacgaccacttaccgtcgcaggccacggtggtgacttccttttccgctcccctacacacgcttttccgttttgcgtgcctttgtttccgctccccccgggaccatcgtgcgcccctgtcctccgttcttgtaggtcctctcctcttctccgcgtcttctcttttactatcccacgctctcctttcctttctccgggaactttatcccgttcccctgccggttcccgtgaccccggaaatcccgctcctgccgcgaggcgccctccgcttcgcgctccctcgtgtcacgagggagccagggtgggcggtctcctattgtacttggcttttgaattttcgcttttgcagcacaaaggtagggctgggaaaggaggctgccgaaccgtgcttgttttcgctcagataaacgtgagaaaaagtggaggtgag

SEQ ID NO: 200646 - DNA, 139 bp, Homo sapiens
  chr6:127836526-127836665
  hyper
ctcctttcttgttctcctccctcttcaaggctccctaacaggttagcagcctctgatccctgccggtacacgccctaatcctcccaggcccactcttcccatcccccagccgggtccccccaccctcctcaccttgaga

SEQ ID NO: 200647 - DNA, 52 bp, Homo sapiens
  chr6:127837749-127837801
  hyper
gctgactcatggctatgaacctaccagatgcgatttggaagagcccattact

SEQ ID NO: 200648 - DNA, 77 bp, Homo sapiens
  chr6:127840693-127840770
  hyper
ctttacagaacggtttgccttcagtacgttttcctgttttctactgagtgccggtttctaccgtgaaaatgagtaat

SEQ ID NO: 200649 - DNA, 217 bp, Homo sapiens
  chr6:128840108-128840325
  hyper
gggcctccacaacaacgtgagaaactgtcaggtacaaagtaagttatttgcgtcctgcggcttcagccaggagcgtggctgtcgcttttcccgtcttctccatcaccctctggccaccactgcgtctccatctgcaccgcgaaccccagcagcagatgcgctcgccagccaagcgaagctgggtaggttggccagaaaagttgtcaggactggcggg

SEQ ID NO: 200650 - DNA, 664 bp, Homo sapiens
  chr6:128840373-128841037
  hyper
acttcagagcccccagaggagagaacgaaagaagcaaccaacctacacgaaggataacaaaactggaggggaacagagggcgggaccgggagagccagggttcacggacttctctgagcggcttgaccgagaacccccagggctacagcgagacgctccacttgtctccttttgggttctccggcagaaggcagacatttacagtccgcttccagccccaggccggatccggggagcgcggggccagagccccaggccggatccggggagcgcggggccagcctggcggtggttttgcccgaggagcgggctcccacgcgcgagtcaggcttcctccaccaggcgcccagacctcgatgcccatgaacgctcagagtgggtccttagaaccgcatttcaacacatcttacagggctccgccaacacacacacagaacatgctccaagcagtgcccgagcgcacagggcaagcccgggagcaacccagagctgggggaggagaaaaggggactccgggagggacggggaagtagttagacaatagtcaggggaggttattcccgggacaaaaagcacctggcaaagcgcgccgaggtcagtcccttcgaatctccacatttctgacaatggcttcccagggaatttgtttaaacacccaagtggc

SEQ ID NO: 200651 - DNA, 476 bp, Homo sapiens
  chr6:128841101-128841577
  hyper
tttctctcttccccactagcccggcgcaggccacgcgagacgccgaagccagcaggtccccacactctccggctagaccgtgccagcctgagccccgagcaagcttcggagaggaacaatgggtgccccgcgtcccacctggcacgaactctggggacagccctccctctaccctgtgttccccacccccggacagagagagctccccacgatccttgtccccagccctagcggggacctggctcacccctcgtgagcccaggactccaggcgttcgtcggggacgccccccggccactcacctgcggagaactggccttgggccgatcccaggagaggccaaggagagaggagcaagagcgccacaaaagcaggcagcgccgccgccgcagtcgtatccatgccgagtttgggagaagtttcaagcagctttgcaaagagctgccggggggatcgccgcgaaatccacgacggag

SEQ ID NO: 200652 - DNA, 360 bp, Homo sapiens
  chr6:128841804-128842164
  hyper
gctccgggcgcttctgaggaatgcgggctcgggcgcggcgccgccaccgcctcctgccggagagacgcgcgccagccccggccgcgcgccccgcgccgcctttgttcgcagcctgggccccgccgccagccgctgctcggagggagcgagcgagaaaggggagccggcgcagctcgctgccctgttccagaactcagaatttgagaggcgagagttcggtaagccgtgcgaccagacgaccgaggacgcgcgcagagaaacccccgccgtccgaggagaggcgtcctggggttccgtcccaaggtggaggtccccccgagcggttgctgattgaaaggggagtgtggaagcgccctgagg

SEQ ID NO: 200653 - DNA, 223 bp, Homo sapiens
  chr6:130088466-130088689
  hyper
ctgtcatttcggcttattcatccagcagctgccggaaggaccgggctgaagcgtggccacgaggagggggatacccgtgcgagcgctgagccggcagagcggctgcagcccacgggctcctcggacccccgctgctgcgccgctgcagctgaccgtgcgaaagccgcatgttattgggtagagatcagctttccaggaacaggcatcagctgtgcacgagccc

SEQ ID NO: 200654 - DNA, 280 bp, Homo sapiens
  chr6:131383361-131383641
  hyper
tcaggggaggtgagcgatctagagaagcataactgatgtcccaccacagacctcaggctgctgggggcagcgtctgcgcctggggatggcgtccccagacgccgacttcaaccctgtcgcgctcctttaggttctcctcgcccttccccgctgctcacctaaaaatgctcccaaccctcggcccccaggcgcaggaggagaaaaaacaagccatctgtggtgagatggcctgggtgtgggaattgtaaggatcggagcacgaaacacgcgtccctctccg

SEQ ID NO: 200655 - DNA, 209 bp, Homo sapiens
  chr6:132271777-132271986
  hyper
ctgggctgcagggggcgggctggcagcagctggagaaagaaactcagtccgagcggtttctttttccagcgggcgggtgggcgtgagggaggaggcggccggacacctagcggtgggggctgcgggtcttaccggtgcacacgccgatcttgcggttggccggggagccgaagtgacagaataggcccttgtgcgggtcgcatgggtcg

SEQ ID NO: 200656 - DNA, 93 bp, Homo sapiens
  chr6:132272531-132272624
  hyper
cgaggcttttatacgctccgggcggccgcggctcgccaatgagctgaatggagtcctacacaaacagggacattcctcgcattcctccccacc

SEQ ID NO: 200657 - DNA, 142 bp, Homo sapiens
  chr6:134216762-134216904
  hyper
agccagacttctgttggctccgttgcgacctctaagggagagagaaatctgggctccctggaatcacgtcccctgcaagagagtcccttggtccattctcgggccagaaaaaaatctccccatcactccagtgcgagtggtt

SEQ ID NO: 200658 - DNA, 369 bp, Homo sapiens
  chr6:134217001-134217370
  hyper
tggagagctcgcggccagcggggagctgagcgcaaaggcggaggagggaagcagcctctgaggcttccccgcctgggagaagagtttttggaagtaggcgagacggggaaggagttctgagcctcagtccgcacagcctcctttccgtccctttccgggtgcaatctccgggccagcgggtgcgtgtcccgctgcagatccgctggctcagggatgaggcgcagggcaggttctgggttacgtccccacaccgcggggaacccaggtgcgagcggggcgcagctggcctgccaacatcctttcttagctttgcatccttcgctccaaatgctggctctgcccttggaaactcgctggttgccagcagca

SEQ ID NO: 200659 - DNA, 77 bp, Homo sapiens
  chr6:134217461-134217538
  hyper
tccagttcaccgaaagattaaccacctccaaggactatttaagagcccctctcagggccgaacggggagaaagggtg

SEQ ID NO: 200660 - DNA, 104 bp, Homo sapiens
  chr6:134499449-134499553
  hyper
cttccaaccggatacgtgatgggtggagcaggcgccccctgttctgtcccagcaacctactaagacttccgaacaggaaggtgacacacggcggaggggtgctt

SEQ ID NO: 200661 - DNA, 174 bp, Homo sapiens
  chr6:134639003-134639177
  hyper
gatgcgctcctggaggcggcttgagagaggagagttgtttttgattgtgcaagttccagtgggagctgtagttaagcagctgagagaaggagtaagaaagagcagaagccagagggagggagggagaacagcgccagaaaggcagagggagcgagaaggcgaggctggaagaag

SEQ ID NO: 200662 - DNA, 44 bp, Homo sapiens
  chr6:135503608-135503652
  hyper
ggcagcacccaaggccgctgccgcgcaaccgggacgcgatcccc

SEQ ID NO: 200663 - DNA, 214 bp, Homo sapiens
  chr6:135503875-135504089
  hyper
gttgttgagcctgcgggcgctggtccccgcgcggcgctgggaagttgcaaagagcgtgggtggagaccctgcagcagcacccgcgggctgggctgggcggggagcagcgccggggcttggttgggctctggggacgagagggcgacttgggggagctccgggctccctatgcctactccggagcctggccgcgcaggacggtgtgctgcccctc

SEQ ID NO: 200664 - DNA, 563 bp, Homo sapiens
  chr6:136870742-136871305
  hyper
ctgaccaccaaatcccgggctgcagagccaacaatcctcctttgggctcctgcacagactaaaaacaaaaaactctgagaactccgacaagtcaacgaaagtctgatcccgtcaagcccgcactcgcaaacccccaccgtgctgcactgggccccggccctcccgagctcggtcccctcggacgacggtcgtcgccactgcgggcaccagattggggggcgggccgctcaccccgcggtcctgccccacaccgaccccgctgaggagcccccggcacccggggcgaccagggaaggcgggaggaggtgcccagaaactgctcgtcctgccagtcgcacctggccgacgactctctggccactggtttggtctgggggatacgatttcccattcaactgaattagacccgaggccgcggcggggagggcagcggccggggtctctccgtttcctcccccggctcgcctccacctgttgcgggaaagtcgcggtggagcgcccgagggcggccgcaaccccggccggggccgagccgggctggccgagccgcggcggcgaagggc

SEQ ID NO: 200665 - DNA, 551 bp, Homo sapiens
  chr6:136871695-136872246
  hyper
ggcctgggcctggcgcgccccctcgcgggcaggtgcggcgtggcagccgctccgaccgccgctgccgagtctcggctggaagagcggcgggcggaaccagtacctcagtccggagcttccggtcgccgcggccgaccagctgagggctcccggagatatggagcggggtcagcgaggcctggtggcgcctcctggagtctgggacgagcggcggtccgaggagcagcccaggtggggcgagggtacggagacgctatttccctccgaactctgaagtagccaggtcagtgtcggctccgcgagggctggagttcacggtgacagccggcagagcatctgatgccacgtggagaggcgaagtacatgggtcggattccacgctgggagccggcctggatctgcgctttaggaagccactgcgggcgaccctatcttgtcgccaggacttcgcatctgatgagcctcagggcacacaagttagagaggcttgtgccggctgatgtggcttttctttttcttagtttccgtttagtaaacgaccttgtgacttc

SEQ ID NO: 200666 - DNA, 337 bp, Homo sapiens
  chr6:137112602-137112939
  hyper
gctccagcgctgggcggtgggtggatccataggtctatcgcacaagtacacacagactcttgcacaagcacacacgctctctccggagcggcgagcgacaggagcagtcacgcagcggcgctcgctgcccccaaagtggggcaagaagtaaatgcttcccgcccagaaaaatgaaatgccccgaagaccgccagattaaacgcgggtcccgaccgcgcgggatgggaaaggggtcacacacgcacctgcattgtaaaagcggtccagcacggtggtttctccaaagtcgagtttcccaaaatgcagggtttccagggtggcgcccactgtctcgcac

SEQ ID NO: 200667 - DNA, 70 bp, Homo sapiens
  chr6:137112940-137113010
  hyper
cctcccgcaagctctgcagggcctcgctctcggccaccaccagttgcccttggctcgcttcgttgatcac

SEQ ID NO: 200668 - DNA, 48 bp, Homo sapiens
  chr6:137243410-137243458
  hyper
gcctggccggagctgccctctgcagccgagccggcgccccctgccctt

SEQ ID NO: 200669 - DNA, 164 bp, Homo sapiens
  chr6:137310994-137311158
  hyper
gccaatgtaaggctccctgttaggaacgggtcctagccctcagcggagggtcacaaagaaatgagactttcctggcaagactgtggaatcagatcgagccatttttaactgtaaatgtctggctttgcctgcagcatttcaaggaagacttgactgctgtgcgt

SEQ ID NO: 200670 - DNA, 161 bp, Homo sapiens
  chr6:138132643-138132804
  hyper
tttccttttcttaaaaagtacgttcagtctactctggactttcccatctgtcgtcaggtgacttcctgctctgttagctgaccgtgagtcacgtcgttgctgcacagcacgttcagtgaggctgcctctgcgtgtgaggcgaccaggagaggaaaggacag

SEQ ID NO: 200671 - DNA, 203 bp, Homo sapiens
  chr6:138428387-138428590
  hyper
cagcgcgatgatgtcgaaggcgatggcgctgagtaggagcaggggcaggatccagcggcagcgctcgcaggccaggccgcagcggatcatgttgacgggcggcgcggggccgagcggagcggagcggagcgggtcggaggagcgcgcgggacgggcgacagcagagagtggcctgcgagcgcgggcgccgccacaaaagcgaa

SEQ ID NO: 200672 - DNA, 360 bp, Homo sapiens
  chr6:138428822-138429182
  hyper
gtcttcctggcgcaccaacatatacacttgtttatctgcacagcgccagcctaatatctgacccctgatgtcgcatcgtggggcggtggtcagcagtgccatatctgagttttcagcagtgtgagatgggtgttctaattgcacctgtggataaaggctgcactcctttggacgcgtgcacccaaacccagaagcccgtccctgacccctgctgacacaggtgatcccttcctcctaggctccgcctttgcaccttggaccgtggctccccgggtactcttatctctttgcatgctgttctttcctgctgggttgccagattttggaaagcggaggcgatgctgaatttatctgtgtatc

SEQ ID NO: 200673 - DNA, 444 bp, Homo sapiens
  chr6:138482425-138482869
  hyper
gctttggattcaggacgtgtttggagtctaactcttgttggtctgggaagtaacccagcctctctgggcctggtttccttgggcatatcaagctctaccccagccccaccgcagcccaccgcccgccgcgtgttgaaagcttgactggagtttccctgcaggcaggggcacagtgtgtgcaacgctgcatcgcccgagcctggcacagggagtggcccaaaaaagctgttagtgactgaacgcaagaattttccggttagcagacgacgggatgcagcgggcgcggcgcctgcaccacgctgggggtcccggtgtccgggctgggccgctccgactccgcccgcggccaccgtcggctcagggggtgcgaagaccgcggcgaggcccctccccgcctgcctcccgccgcccgccgcggaccaggcgctccctcccggcggctgg

SEQ ID NO: 200674 - DNA, 822 bp, Homo sapiens; identical to SEQ ID NO: 114116
  chr6:138482902-138483724
  hyper

SEQ ID NO: 200675 - DNA, 266 bp, Homo sapiens
  chr6:138724516-138724782
  hyper
cattgccaatggtcccggctgcctcttctgttcacaggggcctactccccttcacccttgggggatgtcaccattgcttttcacgtggccaccctcctgtccgttggctttcgcgtggggagtgcctgctgcctctgcggcggtcacgtcgccccggagagcctcggagctctggctgcccacgatgggagtcctctggggggcgccggagccgtgccgggtccccgccgcaggggacagtaacgcggagtcggcctggccggcgg

SEQ ID NO: 200676 - DNA, 452 bp, Homo sapiens
  chr6:139013361-139013813
  hyper
caattcccaccctccgcgcccactctctcgaggtagccaagaccctccaggagtccgaaagtcacagagcgctctgcgcccctgccacctgcccagcctcccgctggggtccggcagtccccactggagaccccgacatcgcggggctccgcggcccccgcgccgacccagggccgccagggggcgggcgggagcagctctccgggtgcctcccccgccggttcccctcccccggcccgccggccactcacggattttcactcggcggtggtccaggcgcgcagcggcggcttgcagggcgtcgaggcggcggtgcagcgcggcggtgcggtggcccagcgcggccgcctggccctcgagctcgccgaagatgtccccggcgcagcgcgacaggtcggccagctgcgccagcaggcagcccagggcatgcgagctgacctgctccagcgagc

SEQ ID NO: 200677 - DNA, 384 bp, Homo sapiens
  chr6:139694964-139695348
  hyper
gtggtgatgggggctcgggaactgccccatgcccatgcggtgggcagggtgatggtgcagcccattggtgccgtcggggaagcgcccgtggttcatggccatcatatggtctgccatttccagtcctggaagtgaaaagggcagataatgagacccgcgccacacgtgtcgcccaccacagcgcaccccacttttgctcgcctctgccccccaggattcccgggcgcacgtcggctgcgaaccaccacccccaagatcccactaacagcctgtgcacccgggctagccaccacggaagagctaccactcataacacagccggacgctgcacaaacagccccttcccctgcgatcgggcggggggacccgagcccacaccccctt

SEQ ID NO: 200678 - DNA, 210 bp, Homo sapiens
  chr6:142623238-142623448
  hyper
cctgcttcctcgtccgcaggccctgcgctgaacgctgccgcgcccagggttcaccttgcgccgtcgggaaagcccatgaactctccagaaacggcgtaaaggagggtcccgccgcggcgcagggctggggcgcctgggttccccctgggtggagcagcggcagcagagcgggaaagtggtggaggatgatcttgcggccaaaggggacct

SEQ ID NO: 200679 - DNA, 368 bp, Homo sapiens
  chr6:143247975-143248343
  hyper
cgccgggcgcggcgagccccactttctcccggcaggaaggggggaggccgagagcatttcctgttgtgcagctgagccctgcggagacgtcattgcattcatgctccctcgggtgtcagcggacggggggccaaagttcaagccgcgtccagggcaggcagcgcgcggcggcgcggcggcgcggggcgggcggccagggctcccctctcccgctggcgctcccggcgcctccgtccccggccggcccagcgctgctaccggaggccagccctggggctccgcggggaagagctgctcttcctcccggaggaaaccgagctcgcaagcccagcgctcccagccgcagactgcaggctgccctcctccac

SEQ ID NO: 200680 - DNA, 184 bp, Homo sapiens
  chr6:143248451-143248635
  hyper
gatgactcttttttccactaggattatttccaagtcatcaaaagtgaaaaatcacgtaagtgttgttgcagttgttttcccctcgttttctatctcctttccaattgtgaattccgtaaataactgtcagacataaaacaggaaaaggaacatttcttcactgcagagctccagtaaggtgaaa

SEQ ID NO: 200681 - DNA, 198 bp, Homo sapiens
  chr6:143266117-143266315
  hyper
aatgcccagagccagcgccttcgctgcgctcgctcggccgcaggccggcggcccgggcctcgcgccgccagcccgcccggccgcctgcgccgcgcgccgcggccccctcccccgctacctgacaacgggccgccgccggccgccgcagccgcagcggtggccgggccgtgcgcgccggtgcacgtcgctcattagtaa

SEQ ID NO: 200682 - DNA, 360 bp, Homo sapiens
  chr6:143771617-143771977
  hyper
gaacgtttgctcaaatgccggggtcgggttgagggctggagaaaggtcccaccccgcagcatctacctcccgggctcctcaccatgtgcatcgcctcctccatccacttttcggtctcctctgccgacaccgagcacgcgccgcttgcagctggcttgggtgccgccttcgcctccatacccagccaccactcagctacagagcccgcggcagaggaggagcgcgggcagcggaacgcggcgggcccgggaccccgtttccgggggtagtctaatgaaaaggcactcgggagctatttctgaacggacctgggcttgtcggaccagtgagcggcggcggctgcgcggcggcagcggcaga

SEQ ID NO: 200683 - DNA, 420 bp, Homo sapiens
  chr6:143999090-143999510
  hyper
gaatgacaggcatccgctgggcaggatccgccgcgccggctgcggccggccgggctgggagacccgcgcggggtagaaggtgaggggacccggcgggccgctcggcacaggccgggacatgaacgcctggaagtctggctgggagcggacccatgatcgaaggaccaaaggagccgcttgatcgctggacctggccctgcgaccccagtcatgggccagacctcggtgtccacgctgtccccgcagcccggcagcggtgagtccggggcgcacgcgatgcgctcccgccgcgcgggcgcagggctggcggcggggccccggggcaggcagggttagtcgtctggtcgggttccgctcggacccgccaagtccctcggagaaaccccagaggtagcgctcgccaaactctttgtcgtgaaa

SEQ ID NO: 200684 - DNA, 277 bp, Homo sapiens
  chr6:144164243-144164520
  hyper
gtccacaagcagaaacccctctgtggcgcctcaacgttaaggacccccacgattccctttgcccggcgggagactaaaggccggaaaagtacagcccgcccaggggtgggagccgagctagccccacctcccggtggcttctcgcgatcgtggagacgcagcgagcctatgtaacttccggtcgcgacccatcagctcctcggcgattggtccgtttccacggccggctgggtgacgttatcgccgggtcctggggctgcacgtgtggtgaggccta

SEQ ID NO: 200685 - DNA, 358 bp, Homo sapiens
  chr6:144384552-144384910
  hyper
gctttatcccctcacgtgattcaggacatctggggtgggcccaataggtgtgttctgaaaagctctcctggtgcttctgggaggcgcctcgggttaggcagcgacgcacaaaacataaaccctgtcatatcattatttattccgtgaatacatcggagttctgttctttcggtggccacacagatgctcaatgccacgacccttgaataactgccatagttgtcacttcacttggctttttcaataaaatgaacaggtcccgcgctcctagacccatgaacactcgggaagccccaggggtatctctgtcctcgacacagcaggggccctacaaacccaacacggctgtgcacccgcc

SEQ ID NO: 200686 - DNA, 46 bp, Homo sapiens
  chr6:144537939-144537985
  hyper
tcacttccccagctgcggggcgggaggcggccgggagggggagggc

SEQ ID NO: 200687 - DNA, 487 bp, Homo sapiens
  chr6:144606893-144607380
  hyper
agcccttggccagctcggggtgcggcggtggcgaccggcaggcgaggaggcccgcgggcagcaggtaagcccatgcattattgaagcctcgggctggtaatgtgactacagcccccgagggaatggggcgggggccgggaggaggatggctctttctgtggttcttccgcctgggatcggcgtcccgagctgcttcccaagtcccagagtcgaagatgggagtaacttttgcgtgccctttcctcggggcctcagtttagctccccgcggtgcgagagagaatgccggaggcgtggagagctcgggcgtggaggtccttgggatccgtactagttgtgaacgatccaaacttatctgaccagctctgtgctgcctccctgctcccctaatcttcctccccgccggggtgacagagtcgccctccgtgcatcgcgcggtgcagggcgctgggccagtgatttgcaagaggggacgtggcctcttagga

SEQ ID NO: 200688 - DNA, 535 bp, Homo sapiens
  chr6:146136028-146136563
  hyper
ctgaccccgcagcgtcgtggctagagtagggtctggagagagctcccactgtggcgagtcctgtcgttggattcccgcggcgccccgtaaggctccgccccggcggtgctaccaaaccctgttcgattttagaatcgtacattcccagagggaatcctagacccctcattttacagttgaggaaacaggcccaagtagcatgacttgttcgcgccgctagtcgaaggagcagcagccccgatcccttgactctggggcactgctttccctttagctcatttttggaggaaatgggtgcgcccttgctcgacctttggtgattgccgccacaggccttcccgccggctaactcagcgtgcccaagtcccgtgacttagtgccaggacggtgctgtgacccgttatcccctgtcgggttttacctccccccgggagagctcagccctggatcccggcgggcggcggagcctctctggagcccggacgggacagcccaccagggtctgcttctgtgaggggccgaggcgtcattccgc

SEQ ID NO: 200689 - DNA, 246 bp, Homo sapiens
  chr6:146136564-146136810
  hyper
aaggtaattagctggggaggggacttgaagccgcttttgcagtgtaccttacatatgactggggagtaaagaaatcccacagggctgtatcaaagaatggatggatgtccacgcccccgctaccaccaccaagccttggtctacggccgagggacagtgattccgagctctgggtgttgggagccgctcacccgcccccacccctctgtcggggactcctgcccaccccgtcgcaagagaattaca

SEQ ID NO: 200690 - DNA, 272 bp, Homo sapiens
  chr6:146285357-146285629
  hyper
cagatcacgggcacgcattcgccacccaccgaacatgggcttgaggtgggcacgagcgctttttgccggaacgtgtaggggtcccccgggagacccagaaaccacagcgcctagctgccgggcgcgcgctgtagcgtggggtcaaggcgaacgcgctcgtcagagcaccccgccccctttctcctgcgctggcttcatgagtctcttctgcgcaagttcacactgttaaaaacttgctgaggatacagtggagtctcgcgatagctctgccc

SEQ ID NO: 200691 - DNA, 254 bp, Homo sapiens
  chr6:146864508-146864762
  hyper
ggggggctcagcgacctcggcgcctcctcaggcccccagtgaacctccggggcccataaaggctccaggccggctccccggaggcccaccagcgggcgtctgggcctccctccgcgccgcgaccgccaggaggcgccgcccgggagaggaagtccagctgggcccggccgggcttcggaggcgccgcccgggagaggaagtccagttgggcccggccgggcttcagaggcgcagggcgggagccgcctcgcgca

SEQ ID NO: 200692 - DNA, 241 bp, Homo sapiens
  chr6:146864878-146865119
  hyper
agcgggcgcggcggagggctggccggcctcgggggagtttccgcggccgccgggggcgcggcggcagagcgcgaggccgggcagggggccagactcggagtcgaggcgcgcccgacagccgcagcgctcatggcgggcggaggagccggggaccccggcctgggggcggccgccgccccagcgcccgagacccgcgagcacctcttcaaggtgctggtgatcggcgagcttggcgtgggca

SEQ ID NO: 200693 - DNA, 316 bp, Homo sapiens
  chr6:147828685-147829001
  hyper
atgatggggaaactcgattgattttgttacctcctagagggaaaatgccgtgggcggagatgtctgagcgtcccttccaacacgagctgggtggtgctctattgattttcacgcgatccccgggcgggagcgagaggataggctcggattcccgggctccaggaccgaacgcctggcagtgtccccgggggcaaagccaccccgggagcccgtgcagtatactaggtggggggcccggagagaaagcatagcgccgacgagggggaggggccgggcagaaaggagggtggggtaccgggtgggacacactgaccta

SEQ ID NO: 200694 - DNA, 268 bp, Homo sapiens
  chr6:147830113-147830381
  hyper
agtacgcggagtccttcgtggataacggctacgatgacctggaggtgtgcaagcagatcggggacccggacctggatgccatcggggtgctggcgcccgcgcaccgccgccgtatcctggaggccgtgcgccggctgcgggagcaggacgccaacgccgccggcctctacttcacgcttgagccgcagccggcgccccccgggccgcccgccgacgccgtccccaccggccgccggggggagccgtgcggcggcccggcccagggcac

SEQ ID NO: 200695 - DNA, 213 bp, Homo sapiens
  chr6:148663794-148664007
  hyper
ggtcctgccaagacttgctagaaggaacgagtcgcgtgccttagttagttggttcccgtcacaggaagaaacgcctttgcagtgggtttaattgcttctgggccgagcgaattccccgccgtacaactcagtggtgcggactttgcctcctgctaccctgttgctgcgccgagcggggtgggaaagtttctggagttgtcagtcgcgcagccc

SEQ ID NO: 200696 - DNA, 195 bp, Homo sapiens
  chr6:148664163-148664358
  hyper
gcggggactgggacgcacggcccgcgcgcgggacacggccatggaggacgcgggagcagctggcccggggccggagcctgagcccgagcccgagccggagcccgagcccgcgccggagccggaaccggagcccaagccgggtgctggcacatccgaggcgttctcccgactctggaccgacgtgatgggtatcct

SEQ ID NO: 200697 - DNA, 258 bp, Homo sapiens
  chr6:149068930-149069188
  hyper
ctccaggtgctaagcccgtgagcatctgtgccgcggtcgggagcgccttcttcctcccgcgcgtccgactgtcctcaccgaggcgggggcgccgctgggttgcgctgccggcaggtaccccggggcgaggcaccgctcaccttccccccgccccacctccgccacccggatccggactggggcggagtggatgggtgtgtggggtgtgccggagtgtgtgtatcttcaggcctggcggcgcggggagtggcgaaggga

SEQ ID NO: 200698 - DNA, 176 bp, Homo sapiens
  chr6:149069508-149069684
  hyper
tgtgcgtctcaagctcaagtcaaaacttgtgtgtgtgtgtgtgtgtgtgtgtgtgtgtgtgtgtgtgtgtgtgtgtgtgtggtttattaggagagaggccgcctgtctttagcagaagtaaggaaggggtttgacgggagggaaagagccgctccagcgagaaggcgtgaccccgc

SEQ ID NO: 200699 - DNA, 320 bp, Homo sapiens
  chr6:150039436-150039756
  hyper
cccgtgggttaaggctgtctcccgcccagcctacttggttgattcaatccttttccccattgatctatttctctggaccgagtagggatgtgcatttcacggagctacgttctcagaagggaacaactgagttgctctgggaaacctccctgtggacctcagaattccagatttttggcgctttgaaataaaattttattcttgcttagcgttctttccccgaacaagccggtgagcttccagcatctgtattttctgaatccggcagataagaaatgcttgagccaggaccgattgattagcagcggtttagagatctt

SEQ ID NO: 200700 - DNA, 31 bp, Homo sapiens
  chr6:150071940-150071971
  hyper
taaatcgaaatatagcgtccccgttttgttg

SEQ ID NO: 200701 - DNA, 135 bp, Homo sapiens
  chr6:150072001-150072136
  hyper
actcactggtcagaatttatagcattattcgctactatgcagtaatcatatcttgtcacatggtatttttaattgtcctgtgttacttagcttttcatgtgtttgtcttatttctcaactcgatttgtaatttcc

SEQ ID NO: 200702 - DNA, 263 bp, Homo sapiens
  chr6:150185378-150185641
  hyper
tccttgccctcgccggagactgcccagcgccctgcgcctctccgccccggcctgcggcgcgctgggtggcgacgagtcggcctcggcgttgatcagcaccaggtgtgtgcgaacagtggccgcggcggggtggagccttggtgagccccgcccccccgcgcggccccgcccccgcgcgtctcgcgccggctcctccagggctgggagagcaggccccggggagggcagcctcagaacaactttgctcccgcgccgctgcccag

SEQ ID NO: 200703 - DNA, 86 bp, Homo sapiens
  chr6:150284581-150284667
  hyper
gctttctttcttttctttttttttttttccagaagtcataaagggatatagaatatactcaaagaccacctcatgcttttagtgga

SEQ ID NO: 200704 - DNA, 208 bp, Homo sapiens
  chr6:150326403-150326611
  hyper
agccccgttccgccccgccgcaggctgggatccaaggggcgtgatccgacggctgccttgtttgggcatgctccaccccgccctgctccggggctcgtcacgtgacagcggccccggcgggcgaaccctccccctccacctcggccccgcggcttggtggcggcgtcaccgggctccgcgcggggcaggacacggtgccttccatgac

SEQ ID NO: 200705 - DNA, 332 bp, Homo sapiens
  chr6:150920422-150920754
  hyper
ctttactgcagagccggtgcctttaaacatctctctggctgtcaccggttattctttacctccgtttccacttttactttctctaggcaaaggtcgtttggtgctttaaccgaggtgattagggtaatgacgcctgaagaacaccgggcttccccctcttttcacttgattaccggcaaagcttctatgtaaaactagaatgttcactaaaaccatgattttgggtattattttaaaggactcacataggaaattattacgtccaaaggaaagctaaacctgaagagctaggaaaatgaaaaaaagtgatgtgtctgcgaaaacagtagcag

SEQ ID NO: 200706 - DNA, 82 bp, Homo sapiens
  chr6:150920982-150921064
  hyper
cagtggggccgagcccgaggaagaggaagtcggagcccgagcctgagcccgagcccgagcccgacggcggctgcagggcgct

SEQ ID NO: 200707 - DNA, 766 bp, Homo sapiens
  chr6:150921277-150922043
  hyper
cgccggccccctgcgcgcccctccgcagtggggacggagggccttggggggcgccgagcggtggggacagagggcgccgggggcaccgcgcggtggggacggagggcgctggggggcgccgcgtctcgggggtcggagtcgggtcggggatgctgcccgccgccgccccgcttggggttccgcgcccccaagttcccggtgctcccgcccctcgccccagcggctgcaacatcagcgcgcagaggagtttctgcgagcacccgggagttgtagccaccgcttccccacccccgactcagcaggacagccccagaacgggaccccacagccagtcagctgggtcagctccccagcagcgaagccgggagcccgaggacccggggacgcgcggtgggggcggcggccgagctgctgcggcgctcagggcttgggggcgcccccgttctgcagatgcgcttttcagggggtggggagtcaagagcctgtggctcttccgtcacggggtaaacggtaacacctgggcggccgcgactctgcgagcgttctggcctcggcgggcggcggggaaccgcagtgatgcccgagctcgccccttttgtgtcctcgcggtgagccccgttccgaagccggaagcttgggaacgctctaactgggagaacggcgctcggctggtcaattcattccgctcctcggaaacaatgagctggatccttgacttgaatgtgctggcggagcggggtttgtaagccggcgtttcatccagctc

SEQ ID NO: 200708 - DNA, 70 bp, Homo sapiens
  chr6:151562596-151562666
  hyper
aagttctcaaaggatggggtcagtgtaacgagcattccgggtactcttccctggacgcagtgctgaaacg

SEQ ID NO: 200709 - DNA, 234 bp, Homo sapiens
  chr6:151815611-151815845
  hyper
cgccacccctgggagcaaagaattccttcatttaactttccctgcttagctactgaagtgtgcttcggagcaatttctggaaaatctgatgtggcaggaggagggccagcccggagtagagtcaccggccctttcgttgcgaagtaatccagaaacgttggtaattcagttgttcctgaatgcatctactcatttactcccaggagttacttaggtactggggactttcaggta

SEQ ID NO: 200710 - DNA, 78 bp, Homo sapiens
  chr6:151815879-151815957
  hyper
gaacatgcgcgcatacacagacgctcgtgcacacacgcgaacaggcacatacgcgaacaaacacgggcgcgcacacac

SEQ ID NO: 200711 - DNA, 195 bp, Homo sapiens
  chr6:152622719-152622914
  hyper
tctcagtattattgcgaaattataaacaaatacagggtagacctctgacatgttaagtaattcagctgtctcgagcacatagtttcattttaactgtcattgtttacagtgtcaaagattggcccggcccaacggtagtcaaagagacttaaggaatctgttcctccctctgaatctgcaagatcgaaggctggt

SEQ ID NO: 200712 - DNA, 37 bp, Homo sapiens
  chr6:152623493-152623530
  hyper
ggaatcatgaacttccgcaacattaggaactgacaac

SEQ ID NO: 200713 - DNA, 79 bp, Homo sapiens
  chr6:153304958-153305037
  hyper
ttccttgcaagcgcgtttatttgtattttcaaccacacttcagacgctactggtttataggaacgttaagtttactgag

SEQ ID NO: 200714 - DNA, 264 bp, Homo sapiens
  chr6:153323865-153324129
  hyper
acacagcagccctcgcgacaacacccagaatttggagataagggtgagagcgcaccaagccccgcccagcgcaagcgttgctttttaaaggattttccggaagccttggcgggaacttcctgccaagcgtgagaacgctgcgaacttcccggaggccaaaagttgagggggctgagcggagcgtgattggggaggggcgggcctgggagaccttgggcgcctcctctgaaagcctcttggtaggtatccggttgatgggtgacg

SEQ ID NO: 200715 - DNA, 63 bp, Homo sapiens
  chr6:153452827-153452890
  hyper
agcagcctgcctgctccgggtcccggaggaagcattccctgcgtgggggttcaaggaagtgtg

SEQ ID NO: 200716 - DNA, 244 bp, Homo sapiens
  chr6:154360330-154360574
  hyper
ctactccttggatcgctttgcgcaaaatccaccccttttccctcctccctcccttccagcctccgaatcccgcatggcccacgctcccctcctgcagcggtgcggggcaggtgatgagcctctgtgaactactaaggtgggagggggctatacgcagaggagaatgtcagatgctcagctcggtcccctccgcctgacgctcctctctgtctcagccaggactggtttctgtaagaaacagcag

SEQ ID NO: 200717 - DNA, 1375 bp, Homo sapiens
  chr6:154830765-154832140
  hyper
ctgggcaggcggcatggacgaggtcccgcgggagtcacccacacaaaggcaccttgtgcctctgcactcgggcccccgggtcgccgggcaccgcaccggggccaggcagggagagcgccccccggcccgagtgccgagtcccgagatcggcatccccagccctcaaccgccacagaaaggccacccctactccctggtttaaagatagggctcccctcggcttgccacaatccgcaccctggaaaggaagagctcggagcaggtacgagagataggagcgcacaggccactcggcagaagtttgcattgtcaccgggctgtgccctcaccgcttctcgccgggaggaagggccaagtaccctcttccccagctcctcgtccgccccatccccgaggctggaggactccggacccccccaaggcccgcgcacctctagtccagtccaccacttgtttggggctccacttggtcacgggttccatggtaaaccgcttcgcctctcgctgggctggagagtcgcagataaagtgctgctgcctgcgctccggtgccccttcccgggagggcgcgcccgcggctgctcccctgcgcccgagcgactccgtcaagactgcatggccgcggtcagccagtcgtcccagcgcggctccgccaggggagcccggccctctccctccagctgccacagtccagctgcagctcctccttcccccgccgccgccgggatcccgggcacagctgctgctcccgagcgacggcagctgcaggcacgccgggctgcgaccccagacccctggcctcggctcggcacgggagcctcccggcccgcgaccacttcctcggatctctcgaggcgcgatcggctctccctcggccggtcttctcgcctgctggctctccggggtccccgctccgcgtgcgctggcgtcccggagccttcccggcgcaggtcccacctcctgcgccgccctcccgtgccgccctggcagggccgagcgcagagcgtgcgcgctcgggttgcaaagtttcagctccggttgctgcaaaccgaataaaagagagggcggggccgagggtctagggaaactcgtgggagggggcgggtccgcccgaagcggcggactcgggttactttccctctctaagccggtccggctcacacccgcagcgtcccgggccccgctttccttttcaaggggcgggttgtagatcgcgcgcgcaccctggagagcccgctggtttgtgtgaggccctggccctgtgggtagcagaacactctgtctcgctgtgagcaacaatacactaaaaaaaaaagaaaagaaaaaaaaaagtaagatctgcatgttctgttcattttaaatgctttatatcgta

SEQ ID NO: 200718 - DNA, 59 bp, Homo sapiens
  chr6:157802884-157802943
  hyper
taacctgggtgtcctcggcaaagttgtcgccgagccgggagcccgtgtaggggccgcgg

SEQ ID NO: 200719 - DNA, 212 bp, Homo sapiens
  chr6:158244130-158244342
  hyper
aggaggcgaggaggccgggccgcggccgagggcccagggcgcgcttccggcgggcgtcgcgcgcgccgcggtaaatgggaggctcggccgacaggggcgggggccgcgcagccggggactttcaggaactgcaggagcgtgcggcgcgggagtagccgagcgcccagcggctgggcctgagcgtcgagactcggggccgaggcggaggagcg

SEQ ID NO: 200720 - DNA, 519 bp, Homo sapiens
  chr6:158402115-158402634
  hyper
tacacgcgcggacacgtgccggtgtccagagccggtgggagaggcgctgtcaccatctgacaggagaggaaggtggagcgcagagaagtcagggtcacgtggtaagtgggggtcgtggtctggggatcacggctccaggtctcttcgcgacaacgcaccgttgacccccaacacctctccctggcggggtcggtgaccgcaacagcctccgggatagaacgctagtgaaaggtaacctttctccagcccgctccacgcgctccgcacccgctaagcgcctccgcgaattaactcaggcctccgcgccgaagtaggcgcagttatgaccccgcttccccgcagggagaccgaggcacgcagggtcgaaaggactcgtccagggtcgcaggagccgaccacacagggaggcgcagcgcccccggcgggaacagtcagcgggtccagcctggcggactcccgggccgggctgcccatataaggctgcgggcggccggcatcgcagccaggctcccggggtcg

SEQ ID NO: 200721 - DNA, 155 bp, Homo sapiens
  chr6:158402898-158403053
  hyper
ctctggcaagttgcgggcgcgcggggagctgtcgcgggcagcgcgccctcgggaggacgtggccccggcccccgcccgcagtgggcccgaccctcatggccctgagcaaagggctgcggctgctggggcgcctgggggccgagggggactgtagc

SEQ ID NO: 200722 - DNA, 325 bp, Homo sapiens; identical to SEQ ID NO: 114279
  chr6:158589138-158589463
  hyper

SEQ ID NO: 200723 - DNA, 75 bp, Homo sapiens
  chr6:158957207-158957282
  hyper
agaagccagaagtcgcccgcgggagctgtccgcggtgctgaacgcggtagccggcttcagcctttgacctcccca

SEQ ID NO: 200724 - DNA, 430 bp, Homo sapiens
  chr6:158957317-158957747
  hyper
ttttccttcgtgctcccacctccagtgtcttcccttcccagcgctgccaatggcgagggcggcactgagatttttgtcctgggcggcagacgaccttgtgttgcacttcctcccccgccttctgcctctcccggggcggcggcggatgggcgcggaggcggatgggcgcggctccctcccccactcaggcctcttcacggggcggggggccgggtcccccagcccccacccgcgccgtgtccagctcctcgcgtgctcgcggcggagccctgagcgcactgggtccgagtcctgcgcgccccctcaccacctcccccgcacctgctcctcctcctcggtcccgcccagcgcgccagcagcccgatccccagtgctgggagaagagagggggcgcaggcggcgacacaaagggtggagcggcgggaccggg

SEQ ID NO: 200725 - DNA, 144 bp, Homo sapiens
  chr6:158957988-158958132
  hyper
cccgccgacggccgcctccgccggccgggcgcggagcctacggatggggacggggtcggggcggggatctgggagggaccaggaaggggacggggagcagggatactggcagcggcgggcaggttcctggattcagggcagccc

SEQ ID NO: 200726 - DNA, 207 bp, Homo sapiens
  chr6:159589703-159589910
  hyper
ggcgtccaggacccggccttcctagagcttaggtcactgtagcctccaggggcgctccgagtccatctggagggccgcgaggcttccaggctggaaggaggaatagggagaaggaggaatagggagacctggggcagtgttacaattacagaaaagggagaggcgaggtccgctgagtccttggcctgggcaacaaggcacactgaa

SEQ ID NO: 200727 - DNA, 62 bp, Homo sapiens
  chr6:159591277-159591339
  hyper
tcggctccaggcggcaggaggcccgcgcgcccggggggaacgttcaagctgggagaaaatgt

SEQ ID NO: 200728 - DNA, 250 bp, Homo sapiens
  chr6:159654647-159654897
  hyper
tgacccaggccgggcggccccgccccacgtcgcagggccgctcccactcctcctcggacccttacacggcgagctccagagggatgctccccacggccctccagaaccaggacgaggatgcccagggcagctacgacgacgacagcacagaagtcgaggcccaggatgtgcgggcccccgcgcacgccgcgcgcgccaaggaggcagctgcgtcccttcccaagcaccagcaggtggagtctcccacagg

SEQ ID NO: 200729 - DNA, 62 bp, Homo sapiens
  chr6:159655003-159655065
  hyper
gcagcgccggggaagtcggagcctccttccaagcggcccctgtcctccaagtcccagcagtc

SEQ ID NO: 200730 - DNA, 254 bp, Homo sapiens; identical to SEQ ID NO: 114298
  chr6:159655082-159655336
  hyper

SEQ ID NO: 200731 - DNA, 360 bp, Homo sapiens
  chr6:160389672-160390032
  hyper
tgactccacgggcagttaaagtgtgttcccaccccccacggatccgctgccactaggctgtgcgaaggcatttacctccctggcactttgatccaagttccctattttcccctactggtcgatcgaggttgggaacagttgctctaacctgggaagcacccgccacgatccagcagggcgcggtgggaggggaaactgaggcccggctaggcacccccgccgcgcccagcccgccgagaggctcaggccccgggaggcacctggagcctgcgccccgcccgcgccgcttcctgtcccgcgcgctgcgctcacgtgacccgggcctgggaggagccggggcgggcgggggtcacctgaaca

SEQ ID NO: 200732 - DNA, 90 bp, Homo sapiens
  chr6:160769211-160769301
  hyper
cggccgggtgcgtccggctcgcggccgtccctcccgcgacctgtggcccggggctgctgcgggcgcccggggaagagaggcgggggccgc

SEQ ID NO: 200733 - DNA, 304 bp, Homo sapiens
  chr6:160769935-160770239
  hyper
ggcggacaagccgcgtgtgagacgctggccgccaggggaggtcggtggagacggggaccggtcggctacctctggggacagacaggattcagcgcacccttggaagtgccgcgtcgtaaatgctgggaaaagcctttcgttatctgcctgagcccgtgagttaatgcacagatactttggtttcgggtgtgaacaaaaactttcttcgaagccgagttgtaaacgcctggcgcacgcctgctcaggagtcaaagacccagcaccgcgttccttatctttgaggtgtgcgggcgccgtcattgga

SEQ ID NO: 200734 - DNA, 67 bp, Homo sapiens
  chr6:160770300-160770367
  hyper
cggattcgcttatggtctccagggtcaaaggaaagggcgaaccaacgtttgaaggcagcagcagctt

SEQ ID NO: 200735 - DNA, 80 bp, Homo sapiens
  chr6:161413419-161413499
  hyper
ctgcctcccctgccgctagcttcggaagagtggcctcactgaagtgcctctcatcattactgaacgaaagtggtccctcc

SEQ ID NO: 200736 - DNA, 104 bp, Homo sapiens
  chr6:163834161-163834265
  hyper
gatttagggactgccgacttctatagatcaaggacttcattggtgcagctgaggaaattcttccaaacaagtctaaatgttggaaatccaccaaactgcagaga

SEQ ID NO: 200737 - DNA, 96 bp, Homo sapiens
  chr6:163834987-163835083
  hyper
cggggccctcccctcccccaccgcgcgctcgcggggcccgacgggggcggagcgaccctcggaaggggcgtggcgaccgggctcgacgcgcgcacg

SEQ ID NO: 200738 - DNA, 314 bp, Homo sapiens
  chr6:163835131-163835445
  hyper
gaaagtcccccgtgaagcaacaggacgttaaaaaaaaatttctcttctgcggggtggataagaggttctgaaaaaactatagtaacgggaggcgaggcggaggcagcgctggcgcgtcccgctggaattcctctcgcctgccgcgccagccccgaccgcgcccgcagccccacccgccccgtgccgtggaaagccccgcgccccccccgcggccgtcggccccgcagcccacacccacccgccccgggcgccccgcacggcggcgacccagtccttgcgcccaggcccgccgagcgccgcagtccgtcacactc

SEQ ID NO: 200739 - DNA, 112 bp, Homo sapiens
  chr6:163835685-163835797
  hyper
gaactccgccgccaagtgagtgaggaggaggaggaggagaaggaggaggaggaagaggaggagcgcagtcggagcgcggcggcagcggcagaggcgccgcggcggggaccag

SEQ ID NO: 200740 - DNA, 291 bp, Homo sapiens
  chr6:163835906-163836197
  hyper
gcgccccgcgcccgcactcggccagccgagacccgcctcccgcccgcccgccggcctcgtgagggacgcgccgagccgggcggccgagagcggcggcggctgggagcgcgtcgggcccgggcggaaagtgcctgcggggggcgggcgagcgcgcggtgccggccgccccggggctcggcgcgggagccagagcgggagccggcgcggagcgggacgccgggtcccgagcggcccgcggccggggctcgcccccgcccctccctcctctccggcggcggcggcggcggcggc

SEQ ID NO: 200741 - DNA, 238 bp, Homo sapiens
  chr6:163837231-163837469
  hyper
aaataaaattgagccaaagtttccaaaaagctgtatggagcgctgtggggagtgaagaatgacaagaagattaatgttgaccaactttggaatttccttaagaagttctcatagcagtacctgaagtattaatttctagtagctgtgggtttctgtggacgcctagagaaaaaaaagaccacaaaaaaagtctgtttcgaaaatcgactggccaggagtttgtttgtttttttttcct

SEQ ID NO: 200742 - DNA, 205 bp, Homo sapiens
  chr6:165722844-165723049
  hyper
cctctgtgctttgcgcgctggtttcagattctctgaggaggcagcacaaccccaatccagtcctcagccctagtgaccctggagccggcgtgcagccaccagaaaaagattttcacatttcaaatcagtcttcagaagcccatccctccacaattgaacatcaagcaaatctcacaagccagcaagagccgctccaggccactta

SEQ ID NO: 200743 - DNA, 97 bp, Homo sapiens
  chr6:166077238-166077335
  hyper
agaacggaaagggcaaactgtggccaaaaatgagcaagactgtgcgatcattgccccaaaccctgagaccgccttgccatatgcggctctcttggac

SEQ ID NO: 200744 - DNA, 62 bp, Homo sapiens; identical to SEQ ID NO: 114344
  chr6:166268182-166268244
  hyper

SEQ ID NO: 200745 - DNA, 32 bp, Homo sapiens
  chr6:166401902-166401934
  hyper
ctctctcccagtcttgcacgcccccgcagtcc

SEQ ID NO: 200746 - DNA, 151 bp, Homo sapiens; identical to SEQ ID NO: 5249
  chr6:166402752-166402903
  hyper

SEQ ID NO: 200747 - DNA, 227 bp, Homo sapiens
  chr6:166419579-166419806
  hyper
gcgcaggagctgccggccctcgcgcgcccctcgcgggccccccgggccccccgcccgcccgcggctgctgccgtcagagctgcctgcgtcaatgctgcttggtgacacacacagctttttttcttctgctcctttttctcaatgagaggagcctaatgggattcttattatcagactcataaatcaaaccgttaggccgtcacgtctggcacgtggacaacaccccc

SEQ ID NO: 200748 - DNA, 65 bp, Homo sapiens
  chr6:166422281-166422346
  hyper
gtgcgttctccaagagggaagctcagtatgagcactcccttcgtccccttaaggaggaccgcaca

SEQ ID NO: 200749 - DNA, 223 bp, Homo sapiens
  chr6:166797209-166797432
  hyper
tgtaagtcccaccgcgggtgcatattgaaaagaaagggatcattagcacgcgaccctcgcctaggagtatataaaccgcagcacgactttcggatcacaaaggcagagaaaagaacacattgaaggcttttgctcacttttccaagttgtttcgtttcgttttgtttctaatgtggacgatcatttaaaatgcctctggtggccgggcgcggtgactgacgcc

SEQ ID NO: 200750 - DNA, 207 bp, Homo sapiens
  chr6:167040543-167040750
  hyper
gggacgcgcatccccggcatcccaggcgcggggctcaggtccgcgggcgggcacgcgtggccagggagcccggcacggcggccatgggcgcggggcgtggggcgcgagctgcggtcacaaagggcaggccgcgccggccaccgcggccggggccacaatcgctccctccgcctccttctccgcctcccctgcgagtaccagcgccgg

SEQ ID NO: 200751 - DNA, 585 bp, Homo sapiens
  chr6:168226883-168227468
  hyper
gacccgccagtccggaccgaacccagcaccgcccatcggatccggcgccgcccatttagacctagcaccacccatccgaaccgaacctagcaccgcccatcggacccaccgcccgtctggacccagcaccgcccgtctggaaccagcaccgcccgtccacagatccatcaccacccatttggacccagcaccgcccgtccccgcccgtccggaccgaacgcagcaccgcccatcggacccagcagcgcccatttagacctagcaccgcccgtccgaaccgaacatagcaccgcccatcggacccatcaccgcccgtccagatccagcaccgcccatttggatccagcaccgcccgtccggactctgcaccgcgcgtccggacccaacacagcaccacccatcggacccagcactgcccatttagatccagcagcgcgcgtccgaaccgaacctagcaccgctggtcgggaaggaacccggtaccgccggttgggacccaccaccgccagtccagacggaaccctagcaccgcgcggggcccgccctccgacacctccctccctggcggccgcggcagcagcacct

SEQ ID NO: 200752 - DNA, 33 bp, Homo sapiens
  chr6:168227910-168227943
  hyper
gaccgaggtgagcaccgccgggcgcggggcctg

SEQ ID NO: 200753 - DNA, 84 bp, Homo sapiens
  chr6:168228222-168228306
  hyper
cccgcgagcgcggcgcggccccggcctcatccccggcggcgcggggggcgcggcggcgcgcggggccggcgccctccacctgca

SEQ ID NO: 200754 - DNA, 33 bp, Homo sapiens
  chr6:168228539-168228572
  hyper
ctgcccggagggaggcgccggccccaggctggc

SEQ ID NO: 200755 - DNA, 222 bp, Homo sapiens
  chr6:168720472-168720694
  hyper
gggcggggtctgcacgcgccccgaggtcaccgcggcctcccccggacccgccccgccgaccccccagggcccctcgccggctgcgggcagggcgggcgcacccagaccccggggccagctgagcgcctccgtgacttcagcggggagggccagccgggaggaggagcccgggggagaggggcaaagaggcgcaagtggaacaaaggcggagaaaggcttgtt

SEQ ID NO: 200756 - DNA, 224 bp, Homo sapiens
  chr6:169613106-169613330
  hyper
tttgtttgcagaatcggccttttgaaggttccgggttaccctgcagtgaagctgtcattcaagcacagtcagggcccaggagagggcgcagggagggcgcaggcgcgcagggagggctgggcatgcgctcggcggggcctccggctctcggggacgcgcgcgggcggggctcgccggggctgaaccggctgagcttcccagggacgccccgacccaagccctgc

SEQ ID NO: 200757 - DNA, 156 bp, Homo sapiens
  chr6:169653482-169653638
  hyper
ctgaaaacataaagcgtttacccgggttcccaggcaggtatatacattgaaatagcagcagccacaaccctcagagaggaaggggtgcccggctggtgaaagcacagccacggaggaaaagctgaggagcggccacgtgccttgctcttcaagcgg

SEQ ID NO: 200758 - DNA, 523 bp, Homo sapiens
  chr6:170124883-170125406
  hyper
cgccgctcctctcccgcctttgttctcgggtcgcccctctcgctggtggcgctccgagagagcagcggagccacctgcccaggccacgcttccccgagcatccgcagctgcacccgggggctgtcggcgcccgccccggagcgtgcgggaggcacagcgggaagaagtcgctgagattcggccctcgtggctttgcgtgcccgcgtggttgatgcctccgccgagaacgcggtcggccgggagccggggaggagcgtggacgccggcctggcaggtacccccgcgagaacgtgggagccggtgtatttcagctgcatttattactgatctcgggctgcaccagggcacttgtaggaccgcactaaaaacagcggaaagtgaggagccaagcctgggtccggggcggcccgccgtacagctggcctcacggattccactgcctgcgcctgcagatgacttgttctggagagtagagaatgttctcggatttaaagtacaatccggtttcctttccattcattat

SEQ ID NO: 200759 - DNA, 360 bp, Homo sapiens
  chr6:170599681-170600041
  hyper
gtctggaaatcccacgggcaaggcgataatccggggccagcggcgcgcgctgaggggacggtcggcggcggcgggtgtgcgcggcggcccctgcggatcgcggcccggtgtcactcggcggcggcggtcgttccgggagcactccgggctccgatctccggtgtcacagcaaagatccgcgtctttccgatgaatccagccaatgccatccagtacacacgcgcaggaccggaggggccgggccgtgggaggaggctctgcgccgcggctgcccgggttcccctgcgctctgccctcggccgggtcgggtctccgcgggtgcgcgcagaggatctggctctcgccggcgcctgccgccct

SEQ ID NO: 200760 - DNA, 43 bp, Homo sapiens
  chr6:170862217-170862260
  hyper
cctccgttgaaaacgtagggcgaaaatcgcagctgcaaagggc

SEQ ID NO: 200761 - DNA, 222 bp, Homo sapiens
  chr6:170863273-170863495
  hyper
gatggctgtggcacggcggccccgccccggaactcctcaagagcttcgcccctccttacctatggaaacacaggaagtgacctatgctcacacttctcatggcctcggccctagtgggagcaactcgctgaagccgagggcagaactggcggaagtgacattatcaacgcgcgccaggggttcagtgaggtcgggcaggttcgctgtggcgggcgcctgggc

SEQ ID NO: 200762 - DNA, 334 bp, Homo sapiens
  chr7:193278-193612
  hyper
tggacctgctgcccaggctggagcgacgcggcgcgcggccctcgggggagcccggctgttcgtgcgcgcagcccgccgccgaggtggccgcgcccggctgggcccaggttcggggccgccccggggagcccccggccgcctcctccgccgccggcgacgcgggctggcccaacaagcacacgctccgcatcctgcaggacttcagctccgacccctcctccaacctctcgtcccactcgctggagaaactgccgcccgcggccgagccggccgagcgcgccttgcgggggcgggatcccggcgccctaagaccccacgaccccgcgcaccggcc

SEQ ID NO: 200763 - DNA, 50 bp, Homo sapiens
  chr7:193708-193758
  hyper
ccgggtggcggttccgccgctcacggaggaggacgtcctgttcaatgtga

SEQ ID NO: 200764 - DNA, 129 bp, Homo sapiens
  chr7:556557-556686
  hyper
attacagagggggccgggccctgacccgggggccgcctccgcccgcccgcccgtcggaccgggagccgcgcctgcccttggggcctcgctccgcgggctgcccgcccggcgcacgggccagggctctgc

SEQ ID NO: 200765 - DNA, 212 bp, Homo sapiens
  chr7:556716-556928
  hyper
ccccggcccgagggcaggcgcggggcccgcacacctggcggaggccgcggctgaactttgtgtgacacacgcggcgttttccttaaaggcgaaaacaatcccggggcgagcgagcagccctcggccgccgctgggagagaaagtggagactggaagagaaactcctgactcatccgcccgggcgcttatggctggggattggattctgacct

SEQ ID NO: 200766 - DNA, 110 bp, Homo sapiens
  chr7:556983-557093
  hyper
gcccgcccgcgccctccccgcgcgcggagggaaggggcgcgatttacctacggagtctatctccaggagtcgctggaggtcccggatgctgtggatctgactgcgggcca

SEQ ID NO: 200767 - DNA, 91 bp, Homo sapiens
  chr7:557220-557311
  hyper
gagaccccgcgagcgccggccgcagtccccgccccagcccccgcggagccctcgccccggccctggaaccagaagccgggggtggggctgg

SEQ ID NO: 200768 - DNA, 34 bp, Homo sapiens
  chr7:557626-557660
  hyper
cacaaacacacgcacgcgcgcgcagacacacaca

SEQ ID NO: 200769 - DNA, 294 bp, Homo sapiens
  chr7:557697-557991
  hyper
cgggctccggcccagccgcggccctagcgccgactaagacgcccaaatccagccggcggccgggagaagaagcctccagggaaagcgagggttaaacttccacctcgcgcagctctccgtgccctgcggagaccaccctcacctctggcctcccccactcccctccccgatttttaaggagagtcgggggtcgctggggagcctgaagcactaagttcccacgacgggggctgtggaaagtcattcatcacagcaaagctcccggggatggggatggggatggggatggggggg

SEQ ID NO: 200770 - DNA, 222 bp, Homo sapiens
  chr7:559269-559491
  hyper
cctccgctcgccggggccgggcagcgcccgcggccgagccgcctggcagccaccacccgccgcccggggcctcgctgcgccgcccgcgcgggcctgagggcgggcgcaaggccgagtcggcgcctccgccgcagccgccgccgggagaggaggaggaggagtaggcgcaggcccggctcgccggagttgggcgggctccgcagggcgcgcgtgtggagccgg

SEQ ID NO: 200771 - DNA, 35 bp, Homo sapiens
  chr7:560650-560685
  hyper
tcacccccaaccctgtcgattaaacccctgccccc

SEQ ID NO: 200772 - DNA, 51 bp, Homo sapiens
  chr7:560731-560782
  hyper
cgcgggcggtctttcatccccagctaggccagctctagcatttcaaaggcc

SEQ ID NO: 200773 - DNA, 42 bp, Homo sapiens
  chr7:852797-852839
  hyper
gaaagggatttacgggaggtggaggttgcagtgagccaagat

SEQ ID NO: 200774 - DNA, 42 bp, Homo sapiens
  chr7:852899-852941
  hyper
aaaaagagagagagatacggatttcctgagcctccaggaggt

SEQ ID NO: 200775 - DNA, 198 bp, Homo sapiens; identical to SEQ ID NO: 114434
  chr7:853018-853216
  hyper

SEQ ID NO: 200776 - DNA, 266 bp, Homo sapiens
  chr7:1001818-1002084
  hyper
cctgcgatgtgggccgcgaccgtcccggcccgtgcaggaccactgtgggcgaggggctgtgaccgtcccggcccgtgaaggatcaatgtgggcgaggggccgtgaccgtcacggcccgtgcaggatcaatgtgggcgaggggccgtgaccgtcccggcccatgcaggatcaatgtgggcaaggggccgtgaccgtcccggcccgttcaggacagtggcctataacctctgacatggggtcacaggagaatgcggcttctgccttgc

SEQ ID NO: 200777 - DNA, 802 bp, Homo sapiens
  chr7:1007358-1008160
  hyper
gctcggaggggctcgcggccggctatgcccatcagttccagctcctccttctggatttctcgtttgtagtttcctgtgtccctgcctgtctccacttcacagtaagctcacgccatatagccgcactgcgttggcgagctcatggcacgtggccacaccgcgtcagcgccgactccacggtggctgcgtcacggctcacgtgcactgtgaggacactggggttgctatagacagtgctggggcaaccctgtgcctacacaaaatattctaataagaaacaagactttccatcaactagcggtgatatgttaatacgtctgcagcactcagaggcctgacagagagcagacacgggacagtgacagctgcagccgaatcaggtggtagaacccatgggtgcagggacacagggttgggcgggcccagccgcaataggtactcagttctgtgaggaggggagggacatgtttaaccacgaaagggccaccactgcaggacagaaacagagggcctttgctgcagagaactggagatgggctgagaagcctcagccacccacaggcagagggacgagggcagcctgtttcccagagcctgaggtcggccagattggtggccccacctgccagggcttggagacagccactgccagggtcgccagagaggacgtgacctggacctccccaccccgtctcctgccaccatcctccactgaccagacaggagccagcccctttccgacagtgcctgggaaggagacaggtctggctgaggccccagatgtgcaggcacctgcgttcca

SEQ ID NO: 200778 - DNA, 256 bp, Homo sapiens
  chr7:1069637-1069893
  hyper
tctgccactggtgtccgcaccccgctttcagagaaggaagtgtgtgctcagtcaccggtttcatgggagggactcaattctgggccttctgagccccagtggccttgtgtgctgactccccagtgtgtccccagcatgaatgcgccagcccacacagtcacctgcctccatgaacgcgccaactccgcgcatccacctgtcttcccgaacgcaacgacccacgcatccacccacctccataaacgcgccaatcctg

SEQ ID NO: 200779 - DNA, 292 bp, Homo sapiens
  chr7:1269808-1270100
  hyper
atgcagttgtttggaggaacagggcccgcgagggagggggcgggggcgggggaggggcgggggagggcgcgggggagggcgtgggggaggggcgcggggaagggcgcgggggagggggagggggcggggggaccctttaaagcgaccgctccagcggcagcaactgacaaggaggcgattatgaaattttgatgttgaaaatggggggcggggtgggggggtgggggccgagagcagaagccgagcgactccccgcggcgccgccgcagccgagggcctctgaagagctctc

SEQ ID NO: 200780 - DNA, 146 bp, Homo sapiens
  chr7:1272152-1272298
  hyper
gggcggggaggcggcggctggcgggaggcgcgggctcggggccggccccgagtgaagtggggggctagctgggggcccctgccccgggcccaggcaccagcccgcgcctgcccggccctgggcggcccctccctccctccctccct

SEQ ID NO: 200781 - DNA, 127 bp, Homo sapiens
  chr7:1280222-1280349
  hyper
tttgctagtcaatcggttagatgcagactggtttaattttgttgataaatcggttcgttgggggtggggacggggcgggggctgtggggagtggggagtgaggagagaagggtgttgtttctttgct

SEQ ID NO: 200782 - DNA, 54 bp, Homo sapiens
  chr7:1282150-1282204
  hyper
attgctgctaattttgttccattaactttatttactcttgaaccccttaattgt

SEQ ID NO: 200783 - DNA, 119 bp, Homo sapiens
  chr7:1283941-1284060
  hyper
ttccagatgtgtgagttgggaggggcgggcctcccggcccgtgagcacccagccgctgccttcagagcgaagcatccagcacccaggttccagcgatcgggggcctgaattggaaacag

SEQ ID NO: 200784 - DNA, 39 bp, Homo sapiens
  chr7:1408440-1408479
  hyper
ctctccccaggacacccagccgggctctcagccaaccag

SEQ ID NO: 200785 - DNA, 808 bp, Homo sapiens
  chr7:1498585-1499393
  hyper
cacgtctgactcagccggcgggcgggggatgccatggctctggcccagctgcattcggtgtccgggcacactgaggccactgaggacagcctcggggggctgcacggtgggctgtgcctgcccagtcccacgcctcggctccccatcccccagccgcccgggcctcagtttccccgcccgtgtcagcgcgcagccgaacagcagaagaatcaaagggcgccaggcaggacttacatgaggtcgggccggtggcggtgcaggatggcgcagaaagccaggccgtcgcggaacgacgtggtcatgttgcagatattcacgtcgcggtagccctcgcactgctgccggcaccactgttgcagcgccctgatggccgccatgtgggcggcgcgcccgccgcgcggcggaaccgccctccgacaccttcccgcggctgtgccgcgaccgcccggccggcgggacagacgctgggaccgctacggaaccgccagacccacggcgcccagccccagctgagccggactgagggcgacgagtgccgggtccctaagagaagccgagcccggccccgcccccgccggccccgcctccttgtaggccccgcccccagccgccaagtcctgcctccggataggccccgtcctcacacctcccagccccggcataggctcccgcccaggcaggccccacctcccgacaggccccgcccccagccgccgggtcctgcctcctgataggccccgttcccacgcctcctggccccggcacaggctcccgctccaggcaggccccgactccggacaggccccgc

SEQ ID NO: 200786 - DNA, 458 bp, Homo sapiens
  chr7:1571091-1571549
  hyper
gtctccccacaggcgggatcctgggactggtgtcgctctcagccgcccacctgccagggttgctggaaggaaggccgtggggaggcgggaggggggcaggtgacagtggccccaaggctcgtccctttgctcacgtgtggggcaggggctccggcctcttcccgctcccactgcgtgagttcttctgtgcctctgtcaagttcaggaaactgtgtatgtgcccgtgactgtgtgtgtctgcgtctgcacagcctctagatcctggggggtgggaccaggcgccaccgagaaacccagaaagccaggaccccgcctggccttggcccttgacctgggtccgcctgggacacagcagtggccctgcactgcattctcgcgctcacaccgtgtgtgtccgtgttcgcggggcctcccgtgtccctctcctggtgtcctgcgtccctgagcatgctgttttc

SEQ ID NO: 200787 - DNA, 320 bp, Homo sapiens
  chr7:1572209-1572529
  hyper
aacccgggagccagcgtttaccgagggtcagggttgtcggggcgccagcctttgtgtgcacccgggaggctgctgttaagggagaccgtcttccgggccacttcgctgtctacaaggcgtgtgctttcacccacggggctcagcgatggctgcgtttgtttacagtctctggcaaagctgtttgccacccagacggagaagaagttgtgcctgttcttgtcccagctgtttctgagtctaaaggtttctggagtggactttctgggtttcgggtccagtccacacgggaaatggaaatctggccagctgagagagggctc

SEQ ID NO: 200788 - DNA, 64 bp, Homo sapiens
  chr7:1705153-1705217
  hyper
agcggggcgggccaggaggagggggcgaggccgccactcggcttcccacgccgcccccgcggct

SEQ ID NO: 200789 - DNA, 258 bp, Homo sapiens
  chr7:1705937-1706195
  hyper
gcagcgcagggtccccagcggctctcgcagcccgggccaccccatccctggtgccctgacctcggcgtccgcgccagggccgagtctccccgcccgcggggctctggatgcggcgctcggggcccgcggctcccgggcgtccccatccacccacccaggttcggaggcgggcgcacccgaagttagcggccgccgagcctgggccggacaaacttccctccccgacgccgcggctggaagggccaggactccggaccc

SEQ ID NO: 200790 - DNA, 154 bp, Homo sapiens
  chr7:1708906-1709060
  hyper
ctgctggcggcgagcggagagcgtgccgggggtactgaggccgggaaccagaggcgggcgggggacaggaagcggggagggggcgccggcggggacgcgcgggctgcgcggggactggagagggtccccaggcgccggccgttctgcgaacgcg

SEQ ID NO: 200791 - DNA, 202 bp, Homo sapiens
  chr7:2195725-2195927
  hyper
gcgcatggtttcacggcgcgtgtggcgagggcagcgggcgcacggtttcacggcgggtgtggcgaggggagcgggcgcacggtttcacggcgcgtgtggcgaggggagcgggcgcacggtttcacggcgcgtgtggcgaggggagcgggcgcatggtttcacggcgcgtgtggcgaggggagcgggcgcatggtttcacggc

SEQ ID NO: 200792 - DNA, 167 bp, Homo sapiens
  chr7:2559952-2560119
  hyper
cgggcgagcggggcggggacccaccatctggtccagctggtggcagtgtcccatgggagtcaggctgcatccccatccagccactagggccatctgtgggcgacgccagtgcaccccggtgcacccagtttgcctgctggggccactctcccgttacagttgtgtta

SEQ ID NO: 200793 - DNA, 395 bp, Homo sapiens
  chr7:3018094-3018489
  hyper
gtgagtgggagaagaggggacggcgggacagaggccttgtgacagaaaagggaacaagaactcagggttttacgttgtacccacaggtgcagagctgagaaaaggaaagagaaatgaagaacggcaactcggagggaggagacggtgggggtggcgcgggcaccgggtgcaggctgagaaagcgagagggcggtccggccagggggtgggggtgctgcaaccagctctggtcacgccccttctcctgagagctcccaggactgcaggcaacttgctgaagaacttgggtaatttcccggaggccggctcacctgtttccagcccatcagtgatcttgaaacttacaaatactcagactcacactttccgcctatccgtgcaaggtaagaggagcc

SEQ ID NO: 200794 - DNA, 98 bp, Homo sapiens
  chr7:3083602-3083700
  hyper
agataaggaagagagggagggggcggagtcggtgcttcgggaggagggcggcaaggaggtgggggtgggagtggggacagggccgggggtgggggtgc

SEQ ID NO: 200795 - DNA, 50 bp, Homo sapiens
  chr7:4770079-4770129
  hyper
ttcctggaggagggacgcaggcccagtggagagggcgtggtttgcaggca

SEQ ID NO: 200796 - DNA, 71 bp, Homo sapiens
  chr7:4770153-4770224
  hyper
gggaggggatggacgtttgtgttgctgtcagggaccttgccgacccagcccccgccccgccttcaagtttg

SEQ ID NO: 200797 - DNA, 146 bp, Homo sapiens
  chr7:4922403-4922549
  hyper
tgccccccagcaaaagggactttcaagactggttcctgtctggaatgcacaagaggtggcctatattaaccgcgggacacgagcaatcagattcttctgtgcaattcagattagccaaacacttgacaggcgacagggcagggcag

SEQ ID NO: 200798 - DNA, 203 bp, Homo sapiens
  chr7:5085238-5085441
  hyper
gtaaagacaaatgcgaagttcaatcaggggttcagagctcccaaagctcatagcctggagcttcttaacctttaggcagggtagagacatttaaaacggcccctaaacttggggggcgcgtaggctcatgggaaatagagtagggtgcttgtcctgggaccagctgtgggccccggaggctgacttccggtgcactcctgcgc

SEQ ID NO: 200799 - DNA, 880 bp, Homo sapiens
  chr7:5459600-5460480
  hyper
aacaggaggtggatttttttttttttttaagtcgagacttgggacgccaagcacaaaagccagggacagcccgggaaggagggaccaggtgtcctggggcggccgccgggcaggtctggaggtccccgagtctccttcccacccctctggctgcagcggccgcggactgactggagggagagtctcccgccccggcgcagcgcccgcccgggtaccgtccccaccgcgcctgggcagcccgtctcgggaaatggtggaggccgcgggaccttctcggccacctcctccagcagctcgatgtgagacccagggttttcccctccgccgcctgggccctgcccgacccgctctcttctttccccctaggttcgggaccgcgatggtccggtttcggtgtccctgccgcacctccgcaccctctttcgcgctggaaaacaaggggtccccgagggccggggtcgccgccctcctaccggggtgcaggttcccagggccgccgttctcccggggaagaaaggggcatcccgcccgccccgaggccagggtcccaaggctggggtcaccgtactcccgcatcccccggcgtactcccgcatcccccggcgctcggtaactgccagggacccggctcggcgcgagtggtggagctgggaacagaacccaggagggcccacgagcgccaaaagtagcgtttgccaagaaaaagattcgagctcggggagcgggtgtctcgcggggtgcgggggccggtttgttcttttctcgcccagattttgaaaactccagcccaggctcgtgccgccggggccccggggattggaatcgcccccggtggctcgggctaccacaccggctttcggctcacgagggccaagcacgc

SEQ ID NO: 200800 - DNA, 468 bp, Homo sapiens
  chr7:5460573-5461041
  hyper
ccccgtggccgaccgaaggagagtcgccgagccccggccgcgagtgcacaggaggacccggccgagtggatctccctgggaagacaggaggggacgggcacggcgcggggcacttacccgggtgcggatggagattcaggccggccatgtacttcccgggcggcagcgggccgggcaagcccgaggcgggcaagcgtccggcagtggccgcgcccacgcggtggctgtccatggccaggccggacagcagcggcggcgggggaccgtgcacggaccgctggggcccgaagtctcggccatccatcctccgcgggagtgccgcgatcagccccccacccggcccgcaggcctagctcagtgggacctaaaagttcggcctcggcgtagtcccagagtcctcgggcggcgggggctccgcggcgtgcatggcggcggccagcggggcttgcgctcggcggcgggcccgcg

SEQ ID NO: 200801 - DNA, 221 bp, Homo sapiens
  chr7:5462090-5462311
  hyper
atttgtcctttgccgattctcgtgaggatgggagggggtcttggagcccacccttccctcgatctctgtctgcagcagctcacattcctgattccgggaggcctgggctctcttaagagaagccgatcacgccaaagccaccggctcccgggtgcccgcccggcgccctgcactccgcgcccagccccccgagcaggagaccccctcggctgcaaaacccc

SEQ ID NO: 200802 - DNA, 419 bp, Homo sapiens
  chr7:5464580-5464999
  hyper
tgggggcctctctcgccttccatccgccgcgccccctccagggagggcgagaccgggaaaaaaataaaatctgttgagctcagaggaagtagccgccaagcccaaaaagtgcttggctggccacggcggccgtagggggaagggagccccaatcccccagactttgtacttttattttgcgctttcagcaaaatcctttctgggttgagtagccgtgagctgcccgcggccgacctacctgaccgggggcgcagggagtgcggaccacgccagcaggactgtcctgggggcccccgcaccctctctctgcagccccccgagcccggctaggcattacgtaccctggaaaggaagcttggaggggcagaaatccttccaatgctgcctcgaagagcaactgcagtgataagattttaatt

SEQ ID NO: 200803 - DNA, 52 bp, Homo sapiens
  chr7:5465049-5465101
  hyper
cgcattgcccgttctgttttttttaaatcaatttttaaggcaactttttggg

SEQ ID NO: 200804 - DNA, 1316 bp, Homo sapiens
  chr7:5465161-5466477
  hyper
aaaaaagtggggggaggcttcgagaacgaacgggggggtgtctaatttaattccaggataaatttgaggaaaaaagttcagcctcttgagggcagtttcaagttgcccttcctggagcttcctgcgttagtttctaggctgccctcttttggaagctgtagctccgctggggaggagggaggagtgagaaggaaagaaaggaacaaaaatagccggagccgaggggaacaagccacggtgtccgcgtttggagctgggcgtgcgggtctcagtggcggcctcggcattcggggcggcgggaggcgcccggtgcatccccgggacggccaggagcaaagacggagaggagaggggggttagagaaaggaggtattgtgtctgtgtgccttaggggaggaggggactgcaggaatcgaataaacgcagtcgagctgcgcggggctgctggaagcccaggcgggggaagggggccgtgtgtgggggcgcagagcgcccttgagccttacgcagaggtcttgtgtgttcctagttaagccctcccacgcccgaggccccatcgcttcctctccaccctctttacccaccaatattccaagcccagatcctaattccccaccgcattaccccgccctggatttggggaatgtttttctttattttaatatagctcaaggaaaaaatacgtatatcttgagagatttggggtggggaaaacaaaagccttgcggagtagaaaaaacaaaggcttatttttataaatgtttaatgttttcaccccctggatgctccgagacgccgtaattgtgacggcggggtacgtgtgccataaatcatttagttgctaataaaaattctgcctgtttgccctggatttgccaatggcgtttgcatttttcaagtgtgcgcctcggcggtgtgacgaacccagccggtatttcattagggccgcggttcggggcagaggaggtcccctccccgcctgggctttgtgcgcccagcccccttgcaccggcccttccatacctgcccccggcacccactccatatttgcgcggccctgcagccaccggagtccggccggggagcagggcctggggacgcggtggtggtggtggctcccagttcctggccaccaggcggggcggccaggacgcatcctgcccacgcggttttccagggctgccgcgtgcttgggggcgcgggcgggccacgcggagaggccacctgcccgggccaatctgtacgctccgtgatcttcgcccgctccccggccccgcgccctggtgtccctgcagtcgctgagtaaacagcgactg

SEQ ID NO: 200805 - DNA, 682 bp, Homo sapiens
  chr7:5466507-5467189
  hyper
aagcgaagtagtagtggctgcagcccgggtgcccccattcgtaaaggggagcctctaggacatccctaactaggcttcagggtccagggaaacgccctccccagtatggcgggccacattgaaatgtaaaaaccaggcctgggcgctgtggccatagggcacaggccataggccaccaggtccagccgccatcttccgcgccccacccccattccatcccctccccctccccaccccctcatacttttgtttacccagcgggataggtggccaaaaactgtggacgcaattgagtgaaagtgcgtgtgtgtgtgtgtgtgtgtgtgtgtgcgcgcgcgcgcgcgcgtgtctgtgtgtgtgtgtgtttgactgggtagaaaatcggctgggggctgggggggtcttccttgtagccctaagccgcagctgcgggagaagctgccctggctagccgaggcccggcccagcgtgcttctccgcggccagcctgggccaccggagccgaggccttccctgtgttcctaggccgctggctccggcctccgctccctggacgcctcccgactgacaaaattctccgtctttgttttaaaaccaaaggacaggccaaccttgagcccggccgtcacccctgtcgcgcttttgttggcgcaggctcggccccctacaccgggctggtgca

SEQ ID NO: 200806 - DNA, 116 bp, Homo sapiens
  chr7:5467905-5468021
  hyper
gctgctcacgccggggtgctccgggccggtctcgtgtcccgggccacgccgcgcaccctgctcaccccatcacggcctggggacccggagactgcgcagggaaccacgccaggagc

SEQ ID NO: 200807 - DNA, 413 bp, Homo sapiens
  chr7:5594638-5595051
  hyper
tctcagcttggggtgcgggggccgactctgcccgggctgggtggatagttgttatcgggagctcccaggcccgcgcggctcacgtgggccgcagctcgcggcgcctcccgcgtcccagggccgcgaggcgctccgggagataagccaggccccgtgcgagtccagcgcggacccggccggcccccagcccgcccctcaccggcccccaccccgcccctcggccggcccggcccacttggcccgagttcctctccataaaaggcgaggtttgggagcgcccggggagggggcgttgggtccacgggccgcccccgcccaccgtgttcccctccctcactgcgagccctcgccggcccgggggtgcagcccagcccccctgccgcgacccccacgccgggcccgtagaccacgac

SEQ ID NO: 200808 - DNA, 637 bp, Homo sapiens
  chr7:5632266-5632903
  hyper
tgcggcgaggacaccggtggggtgagagcaccggcggggcagcagcgggggccgcagcgccgggtccctcggcccggggcccctcccgcgcggagccaggggcgggacaggggggcgtggcctggtggcgctgacgtcacctcgcctataaaatgtccggggcgccgctagctgggctttgtggagcgctgcggagggtgcgtgcgggccgcggcagccgaacaaaggagcaggggcgccgccgcagggacccgccacccacctcccggggccgcgcagcggcctctcgtctactgccaccatgaccgccaacggcacagccgaggcggtgcagatccagttcggcctcatcaactgcggcaacaagtacctgacggccgaggcgttcgggttcaaggtgaacgcgtccgccagcagcctgaagaagaagcagatctggacgctggagcagccccctgacgaggcgggcagcgcggccgtgtgcctgcgcagccacctgggccgctacctggcggcggacaaggacggcaacgtgacctgcgagcgcgaggtgcccggtcccgactgccgtttcctcatcgtggcgcacgacgacggtcgctggtcgctgcagtccgaggcgcaccggcgctacttc

SEQ ID NO: 200809 - DNA, 138 bp, Homo sapiens
  chr7:5633472-5633610
  hyper
ccgccctttctcgctcgcggcgccgctgcggtccggagcactgcccattgcgcccccgctaggcacgcgggctaccccgcctggagggggcgaggagtggggctttgcccatcctcgggtgccgctgcccacctccca

SEQ ID NO: 200810 - DNA, 60 bp, Homo sapiens
  chr7:6523872-6523932
  hyper
cccttaaagggggcgcgccccagcgcaggctcagcaggtcagctcgcagggactcccttg

SEQ ID NO: 200811 - DNA, 47 bp, Homo sapiens
  chr7:6543240-6543287
  hyper
ccaggcgccggggctccatgctcatcagcacctggcgcagctccgcg

SEQ ID NO: 200812 - DNA, 618 bp, Homo sapiens
  chr7:8009322-8009940
  hyper
cgcagccccggccgagcaggcgccgcgggccaagggccgcccgagacggtccccagagagccaccggaggagcagctcacctgagagacggagccccggctcgcccgtgtgcagaggtagcgagcccaaccctcccgtcctcccgggctgcgtctccccgacggtgccctccgtggaaacttcagcctcttcgggcttctctttgctagtgcattatcgaaggtgtgaaagtggctttgggaatctcacccccctgcggtcgctgtggggcttggaggagcgaactgaaaagcgacttttatttgaccctcatgccgcccctcagagtctctcttccatcactcgcctgcttcgagaggtttttcagtttaagagctggctagctcattcgtgtgtttgccgtttgtagccggggaaggagaagctgggcgaaacacttaacacgcacacaaactcttcagcagcggataaggtggcggttgtaatctctaccgtctctttgtgcttttctgcaaagttcctaacgtgcctgtaactaccgggatagtattttattttttagagggttggtggcattagtttcgatgtaaggatatcggctggatgtaatgatatctg

SEQ ID NO: 200813 - DNA, 329 bp, Homo sapiens
  chr7:8476750-8477079
  hyper
ttggggtaaacaggtgaaagccagggcagccaatccaaaagaacagcctttctgactctgtcaccgaagtctgtgcctttacccgctggaacgcaggcggaatgcaaaaagtgtccttcccatttcccatcttcaatcattttcacccccacctgtgttcagtaagcccactgacattgagagaccatggatggagggcagaaagtttggccagaagaaatatagaatttttttattgagagatggggggagggaatgcaaagtgaaagcgacgggggcgggggggaggtaattttaaggattcccttgaccatcgtaacccgcttgcc

SEQ ID NO: 200814 - DNA, 204 bp, Homo sapiens
  chr7:8480130-8480334
  hyper
ttaatgaaagtgttgtctgggtgaaaaatatatcaggtggctgggaaattggttgatttttttttgagataggtgcccagtgtcctatttttctatctgaggaaagattttctgcagactacagaaattgacagcattgtccgggtaataaccgtcgtcgacaatattttcgaaagggcatttgagtgccgaaagcatttggat

SEQ ID NO: 200815 - DNA, 68 bp, Homo sapiens
  chr7:8480572-8480640
  hyper
aacactcttcttgcgctcctgtaaagcaagtgatggaagctctgaaagtttgcctgctctcaagtggg

SEQ ID NO: 200816 - DNA, 151 bp, Homo sapiens
  chr7:8481159-8481310
  hyper
actcaatttattgtgaaagtcgaatgaattacgtttaatgaaagtgctccccagatgaatattaccagcaatttcctgagttggctctgtcagctcgagatgaggaaatgccaacccagatcagaaaagagcgcccgtctcaattactatg

SEQ ID NO: 200817 - DNA, 108 bp, Homo sapiens
  chr7:11871284-11871392
  hyper
agccatccaaaagcaccggggtccctacagaagcccaccagctccttaatgtggccccagatgtgaagatggggaaagggtaactccgtcccacttaccagtcttcca

SEQ ID NO: 200818 - DNA, 72 bp, Homo sapiens
  chr7:11871857-11871929
  hyper
tcagggggccccagctgactgagcaggtctgctaggtctgggaggcagcgcagcccccgccagctggagggg

SEQ ID NO: 200819 - DNA, 206 bp, Homo sapiens
  chr7:12250530-12250736
  hyper
ccattcctaaggaccagactgtcagcgacaactcgcattgcgtgagcgaggaggctgctcagctgaaagctgaggcagatggtgcacatttataccctttgcaaaaggaaatggtctgatatgggaaataggaggagcgactgttcctaggtaattcgtggctacagtggacactttgaagtctgggggacgcgaaggtaatgaaa

SEQ ID NO: 200820 - DNA, 66 bp, Homo sapiens
  chr7:12443718-12443784
  hyper
acagaggctgtatgaaaacttggtaatcctagaaactgctcagatggacctcgcataaaagaagcc

SEQ ID NO: 200821 - DNA, 149 bp, Homo sapiens
  chr7:12610063-12610212
  hyper
ccgttaatgttcttcgtctattgctagagaaaatgtctttccttggaggaggcattggcacgagttactataaactccctctgaatctcaagacttctgggacgccgattccgctcctggcctggggcaaggcgtgggagcttggaagc

SEQ ID NO: 200822 - DNA, 97 bp, Homo sapiens
  chr7:12610242-12610339
  hyper
tctcctctgtcaactcgcgcctgggcacttagcccctcccgtttcagggcgccgcctccccggatggcaaacactataaagtggcggcgaataaggt

SEQ ID NO: 200823 - DNA, 160 bp, Homo sapiens
  chr7:12610476-12610636
  hyper
ggaggattgagaagctggagctggtgcccgtgccccagagcgctcacggcgacttctacgtcggggatgcctacctggtgctgcacacggccaagacgagccgaggcttcacctaccacctgcacttctggctcggtaagggacggcgggcggcgggacc

SEQ ID NO: 200824 - DNA, 1160 bp, Homo sapiens
  chr7:12726287-12727447
  hyper
ctgtgccaggctggcgggccgccgcagacagagctacccggagcaaccgttcaggggtgaggccggaagtcccatccgacctcgcgggcagccagcgctaggccgattcgaactcgaccttgttttggcgttgctaggagacgcggctcctgcgcgccccctacaggccggcgcccgggcggcgcgcgggcagggggcggggactgtcgcgtggagctgccgggcgagcaccgttagggcagcctggcgcgcggcgcccgccaggcgcccagtcctctgccatcgcccacgcctccctggtgccagggaacaggtatcagcgcgcctccccagcggctgggagagacgctgaatgaagaagagggaaggacggttagtcaggtgagccgcggcggggtgggcggccggggcggccacgccctgccgagggagaagagccggtcgtgtgcggagggacagggtgaagggatcccacttcggggaggatgggcttatcccggcgggcgcgccaggtgggatctctagcgcctcaggggcccgcgcggcaacagccggcaccctcgggcccgcggacaaagggttaacgcgttggcagtgactgcgggccccggatgtgagagccttggcttgacgccctggctgcgctgcaggtgcgccgggccgaacggagccggcagcctggcggcgacctgaccgcccgaggctccccttcacctgcagcggctgctcggctccctctgggaacgccgccttttctaacttaagggcaacaggtggtgccggtggaccgagagagagctcagctccgccgcgctgggagcggcagttaccctcaccaattagggagcgggggcgggagttgcatggcttccctgatgcgggtgaccaatgggatttgggatcatgagtggaccgggaggagtgggcgtggtcggagtctgagtccaaggtttctcgtgcggcaactgccagagctgcttggagagctaagctggaagggtgcttatccctgcgtagaaacgcctgccaatgctttctcatttggacccagactccagatcgggaggtgagaacgttgttattttgcaaggggtaggaggtaatagtgatcttgggtatgctgttaagcatgtggaattagattccgaagataggactat

SEQ ID NO: 200825 - DNA, 211 bp, Homo sapiens
  chr7:14028676-14028887
  hyper
tgctgctgctcttcgcaaatctcagctcagtattttatattttgagcatttagctggagatttcctcaggatctggacttctatcaacctagaggggaacaagatggcttttaggcttaaaaaaaaatcatgaatgaagctcttgaatttgcatagctaattaccctccgacagtcccattcacaaaaataaccctccctacaccgcctcc

SEQ ID NO: 200826 - DNA, 306 bp, Homo sapiens
  chr7:14029187-14029493
  hyper
ctgaaggccacgctaggcgaaaggctgcaaaaacttccctccaaatttaataaaaacattaattatagcccagcacttcccccttggaagccgaaagcgcctctgacagagctcaattcggtggtttttcctctacttctcctccaggggcctccaatccaaactgatggatcgctgcctcccattggctccgcgtctctttcacaagatcagatttcgggctgtcaatcaggcggcttgctgccccttcccgcgggtctccctcgcccctctgccctagggggtgctcggccggtaggcgctggg

SEQ ID NO: 200827 - DNA, 330 bp, Homo sapiens
  chr7:14029555-14029885
  hyper
aggcgcctggggatactgaaaccgtgtgtttcgagtcgccagttcccattattggggtgttaggtccactattgggctggtttccttaaagtactgttgtgcggttctggtatacccttagagccgcgatccacaaagcccgtaccgccttattcagctgccctcccctcaggatctccaacctctctactcttgccctgactaggagctcacctcgctctctatcctcattcccactcagcttttggcccaatttattttcccgtttttcaaaacccaccatcaccattatggtttatcgaaacattttttaaacagtcatcctcaact

SEQ ID NO: 200828 - DNA, 391 bp, Homo sapiens
  chr7:14030807-14031198
  hyper
gcctgggccccgaggctgaacagtgaagctcatgggtactatctgagggtgcaaccaagcagggggtcaataacaagggtcctccaccaccctgcactcctggaataacccagcgcctgtaatctgagcaacagtttccaaagaccttctctgcagcccgagcctgacgggtatccagggtaaccgcgagggggcggagcttcgggttaggtcccggcgaggttcttcccgcagccaataacgagccgtaaatccccagcccattgttgtttattgctgacccctcagcgctccgctaggagattggccgctttagggaagggggcggagtcccgcccgccccaacagccacctttcgtctccattcacaaaattccggcccttcttggtc

SEQ ID NO: 200829 - DNA, 151 bp, Homo sapiens
  chr7:15725485-15725636
  hyper
tcgagggtgcctggcgcgcccttacctgagctgtcgcttttcctcttgccgccgcttcgcttctccgcctccgcaggtgacagtgcctggcggccgtagtcccccggcgcgcacgcggccccagtcggggtgctggagcccaagctggaag

SEQ ID NO: 200830 - DNA, 50 bp, Homo sapiens
  chr7:15726407-15726457
  hyper
tcccgctcagcctgcgccacgcgctcccagttccacttcctatctcctgc

SEQ ID NO: 200831 - DNA, 76 bp, Homo sapiens
  chr7:15727077-15727153
  hyper
ccacttgtccaccaagaagaacttttcctgggtcaagaatatttccaagcgattgtgtcccggtcatatgagatgt

SEQ ID NO: 200832 - DNA, 360 bp, Homo sapiens
  chr7:16685499-16685859
  hyper
acctgggaggacaaaaccaaatgcagaaagctggaggggggaattaaattcctcctacacgttccgctcccctatcctgtccggttcaaatatttcgccacatgtaatattgaaaattctacagctggcagttatgtgctcagcgacggctttctggggcatgcagaggccccaggttgtcgccgtacccccaccattcccccgggagtggcgcagtctgggcgggggcggtctaggagacgggggcggtacgggaggcggggctgcgccgggttccgtgtgtctatgtcaatgtgtctgtccttcactcctccattgtctgccgccactgctgctgctgctgctgctgccgctgctgct

SEQ ID NO: 200833 - DNA, 283 bp, Homo sapiens
  chr7:16793057-16793340
  hyper
tcaaaatggtgccacgtcatctgccagggccaagaatccagaggtgctgtcatatttctccttgccagcgtggatctcctccgagccccgccctccctcctcacctgctcctggggaaactacaccaaggccgccgctctggcctggggctccctcccacacggccttggccctctccccctcgccccgggaccgctccgcccctcccggatcccggtcggcggagcgcatttatttgcatatttctacctttgttccctgccagcggccaatcagcgcgcgg

SEQ ID NO: 200834 - DNA, 1038 bp, Homo sapiens
  chr7:17338062-17339100
  hyper
acgaagatggctaccggcgggggggggcgtccttacgtcctacgtcatcacgtgccgggatgagggtggggccctcaaggaagacggaatggaatccagatgggcgggggcaagcaggacggggcggggctacgcgggatctgggcggggcggggccggtgaggggtcgggggtgctcctgctattcagccggtgcgcgcggcggcgggaggcagtggctggggagtcccgtcgacgctctgttccgagagcgtgccccggaccgccagctcagaacaggggcagccgtgtagccgaacggaagctgggagcagccgggactggtggcccgcgcccgagctccgcaggcgggaagcaccctggatttaggaagtcccgggagcagcgcggcggcacctccctcacccaaggggccgcggcgacggtcacggggcgcggcgccaccgtgagcgacccaggccaggattctaaatagacggcccaggctcctcctccgcccgggccgcctcacctgcgggcattgccgcgccgcctccgccggtgtagacggcacctgcgccgccttgctcgcgggtctccgcccctcgcccaccctcactgcgccaggcccaggcagctcacctgtactggcgcgggctgcggaagcctgcgtgagccgaggcgttgaggcgcggcgcccacgccactgtcccgagaggacgcaggtggagcgggcgcggcttcgcggaacccggcgccggccgccgcagtggtcccagcctacaccgggttccggggacccggccgccagtgcccggggagtagccgccgccgtcggctgggcaccatgaacagcagcagcgccaacatcacctacgccagtcgcaagcggcggaagccggtgcagaaaacgtgagtgtcccgagcgcgtcctcatcgcgggggctgggcgctcaggcacgcgggtgcgggaggcagccccaccccgcccccaaatccctgcgatcctgggattaggtccattcccggcactgcccgtggaatcgaggtttggaggcc

SEQ ID NO: 200835 - DNA, 142 bp, Homo sapiens
  chr7:17339419-17339561
  hyper
tacgaaggggctgagtgcctctaaaggtactttttggtccccaccaactggctttgtgttgcgctcatatttacttatttggcagcaattttgtagcgctcatcgtgaccatatcggtaaagtggatagaagtggtagcagg

SEQ ID NO: 200836 - DNA, 188 bp, Homo sapiens
  chr7:17339591-17339779
  hyper
ggaggatttgtattcttcagacatctttttcggaagcttgcttatcacttttggggtggctttagggtctgtaaaataaaagatttagaactgcatttgagagaggttttcattcttaacatctacctctaattcttttccccttcaaagttttcttctagttgagtgagtacaaacttgcttttgtc

SEQ ID NO: 200837 - DNA, 105 bp, Homo sapiens
  chr7:18125867-18125972
  hyper
acgttccaggtaccgccccacaatgctacctcctctttaaaagaagtcgttcagctggggcgggctggcgctgcgtggcgcgcacctgagcggccggggctcccc

SEQ ID NO: 200838 - DNA, 218 bp, Homo sapiens
  chr7:18126225-18126443
  hyper
gcgtcggccgcgcgcccaggtgttcccgcgtccgtaatcccctccggcccgcgcctcccggcccgccctgcgggtctccagcgcctgggcccgcgctctcgccgcgggtccttcctcctatccccacccagccccgcccagcctccgcggcgctggggctcccggccgagcctctcctcccacctccgtcccctacttccctccccaagaagtgctat

SEQ ID NO: 200839 - DNA, 96 bp, Homo sapiens
  chr7:19146829-19146925
  hyper
aaggggtaaggggcacttttcgctgtaaatttcctatacaaatctcaaaatttttcttagcattgtcaactaccttcttggagacaggctacagcg

SEQ ID NO: 200840 - DNA, 59 bp, Homo sapiens
  chr7:19156644-19156703
  hyper
cggactcccgccgccgctgctgctgccgccgccgccgcccgcgccgccgccgccgccac

SEQ ID NO: 200841 - DNA, 272 bp, Homo sapiens
  chr7:20370484-20370756
  hyper
cggcctcgcctctctcgcatcctagccgtgtgcaccccagagcgcgccagcaactcgggctctggactgcgggacgcctgagccgcgcactgaggcgaaaaggacaagggcacgcagcccccgccccgcgaagccgggctccggcacctcgcggaacctcccctcctgcgctcgcagccgcaggccccactccccgccagggagggagcggcgatgcctcgctctgtgcctgcgggtgtcggcgggtgcttctagggcgctcccagagccgc

SEQ ID NO: 200842 - DNA, 33 bp, Homo sapiens
  chr7:20816219-20816252
  hyper
ggcacaatagggtgagagaacgcggcattccag

SEQ ID NO: 200843 - DNA, 55 bp, Homo sapiens
  chr7:20817325-20817380
  hyper
ggcgggtgcgagtgaacacaaagcagtttggccaagaaaagagcacaggaggtga

SEQ ID NO: 200844 - DNA, 127 bp, Homo sapiens
  chr7:20817410-20817537
  hyper
agagaaagctgaacaagttcaggaagaagaatctgagtctgtccacgccgcagcagcctccggtggcacgggcagaaagatcaagcgcggcaccccgtgacaggatgggacagattccccgggctcc

SEQ ID NO: 200845 - DNA, 119 bp, Homo sapiens
  chr7:20825260-20825379
  hyper
aagaagaggacgaggagcgtttccaggggtggaagcctttgccgaaggaagaagagctgtccgagagggaggagggagacgggctggggctgcctatcttattacaggtagcggcaagc

SEQ ID NO: 200846 - DNA, 169 bp, Homo sapiens
  chr7:20825944-20826113
  hyper
tctttctttctttttttaaaagcatatctacagtagtaaaaacgagacgagttcaacgtacctgcgagacaaggcgggctgcagaatttttttttaagggttaggggaagaatctgcactttgcccagaaggaaaaacttgctctctttacccccgaaatcggtgcctg

SEQ ID NO: 200847 - DNA, 297 bp, Homo sapiens
  chr7:20826202-20826499
  hyper
gctgaaaaaaagtgactctgcccccttctccccctttttcttttctccaaactcacttgtatttaaagaaaaaaaaaaaaagctctcaatagagagactgatagcccgtggcctggccggggcgactttaaccccctccaatcggcaataaaaggaaactaattaaaccagcaagagaaaatcctgagactcacccctagaagtgaagttgccatcacacaaaagtgccctcctcctctcagaggatcttttttatattgataaatcagaggcagtgttttttttagaggtgtgcaa

SEQ ID NO: 200848 - DNA, 61 bp, Homo sapiens
  chr7:20830547-20830608
  hyper
aaaatgcacacaaactgtagcgcgtacctctgcagggtacgtttaaacccggctcttagca

SEQ ID NO: 200849 - DNA, 50 bp, Homo sapiens
  chr7:20833039-20833089
  hyper
ggccataatggccacgttatttcggcccagtgaacacgaacaaaatcgcg

SEQ ID NO: 200850 - DNA, 102 bp, Homo sapiens
  chr7:20833543-20833645
  hyper
tccgtttacgtatgcggggtgaaagtcggcttccaggcgttcgatctccagccttccagctcacagtaattaacacatagcgacttcaatgggaaaacctgt

SEQ ID NO: 200851 - DNA, 70 bp, Homo sapiens
  chr7:20837557-20837627
  hyper
cgagagacagcctgccgtcccaggtccagcccgcgcctctgcgcacctcccggcacccggcgcaggtcgc

SEQ ID NO: 200852 - DNA, 182 bp, Homo sapiens; identical to SEQ ID NO: 43954
  chr7:20837650-20837832
  hyper

SEQ ID NO: 200853 - DNA, 115 bp, Homo sapiens
  chr7:20838169-20838284
  hyper
ggccgcgggagggcccgcctcgccccgggccgccgacctgacacctgctgggcagcctgcgcggcctggggcgaaggccagcgggcggcggggtgggaagcgccagcgcaggggc

SEQ ID NO: 200854 - DNA, 45 bp, Homo sapiens
  chr7:21582475-21582520
  hyper
ctgggggctcagacccaccccggacacgcggcttctcggccgtgt

SEQ ID NO: 200855 - DNA, 174 bp, Homo sapiens
  chr7:21583452-21583626
  hyper
gagcctgttcgaccaggataacccaagaacaccagcgctttctttagctgcttgggtgttaggcgccaggtgggctttctgtgccaaaaaacttgcgtttcagttgctcttgggtcactctggagtcacatcctttaaaaaatggggtgtttggcagagcgcatgtaactcgtc

SEQ ID NO: 200856 - DNA, 360 bp, Homo sapiens
  chr7:21985096-21985456
  hyper
gcgctgcgccccgctagctccccgcctgcacccccggcggccacccgagactgagcagagcgccaggctgagcgcggttgtgtgctggggcgaccggcctctgtggtccgcgtagcacaaacgtgacccactgcgcacacctgcagggcgcgcccactccggcactcaaccggctgggcgcgccagatccccagtgccgcagccaagggccacgtttccagcccaaggccagcaggaccgggtggcaaagggaagtcaaactgtgggtgcgtccggacggcggcgggcggccggaccctcacctggtagcgagtcgccaactccattcttcctaaccgggctccagtctcctcccagcac

SEQ ID NO: 200857 - DNA, 41 bp, Homo sapiens
  chr7:22589952-22589993
  hyper
ccgcagccccagggaaatggcagtgacacaggtggcagcca

SEQ ID NO: 200858 - DNA, 154 bp, Homo sapiens
  chr7:22893423-22893577
  hyper
ttcacatcctttaacgggagccagtcttctgctacgtaattagacgagtcttgaaagaagcacccaggggcgtggctgaagactttaagaaacaccaggcaagggaggggagtgggtaccagagacacctaacattatttgagtggcaggagct

SEQ ID NO: 200859 - DNA, 1093 bp, Homo sapiens
  chr7:22893607-22894700
  hyper
tcacagccagcgagagtttggggcagactccccagactcggaggccggggcaaagtgggagccggggccaagtgggagccggggccgtgtggggtgggggggggggcccaaggcggggaaggcccgggccgccgacagggggcgcgcgagggcctccgggccccgcgggcggggcgggtgctggacccggaggggccttccggcaactttttggttggtgccgccccgcccaggccccttttaaacttgatctccgcagtgccctcccttttcggccgcggcgcgtgactgggtaagtgggctcggaccttctggacgcaggagccgaccacgtggctccggggctaccccgtgcgcttcctaggcgcgcctctcgctgcccccacgccgaggcctcggctcggcgccgcggggaagcctccgttagggcccctcgggggtgggggcgtcctcgtggcgcttgggcccttcgtcccgggttaggacggcccgtgtccttgtgcgcttgaaggggccgccccctttcctcgaggatcccacccccactcagcagaagccgccaggcgcccgtcacctcccgtgcctgagtccctgccgtccacgcattcggcctacaggcagcttttagtcctttttcaattaaatgattgcattttgaggatcaaattccaaccgcaggcggaggcgccgagccccggacggtctctgggttcttggtgcactcggggctcctgcctgcccaggggctgtgaccgcgcggacggaagcctatttgggaagcgagtgagatctgatgtctgaagcgctttaagtttctaagcggggcagtataatagcggggttagcaaacacacggaggtcatttcactcgcgcagccatcccccaccgccaccagtgccgttcatttgctactggcccgcagtcagataatttaaaggcttggagggacgagtcttgctggagccgacgcctacagtaagttgagcggagtgctgtgagccctaataagggagcctgctttcctcccgaagattcgcttttttgggagtggccagagcgttattacagcacagggcccgcttccaacgttta

SEQ ID NO: 200860 - DNA, 51 bp, Homo sapiens
  chr7:23053742-23053793
  hyper
cctctctgacaggcacgaccagggacccgtcctcaagcagccaaccaccac

SEQ ID NO: 200861 - DNA, 260 bp, Homo sapiens; identical to SEQ ID NO: 114713
  chr7:23053819-23054079
  hyper

SEQ ID NO: 200862 - DNA, 121 bp, Homo sapiens
  chr7:23287654-23287775
  hyper
ctgcccgggtttggggttggacaggctcgggctccccgccagcctaggggctgggtctccagtggctttgctccatttcctcatttccttcaaaacgaggagttttcgtttcctcatttgc

SEQ ID NO: 200863 - DNA, 526 bp, Homo sapiens
  chr7:23507576-23508102
  hyper
ccagcgtttacgcacgcgttccaatacccctggcgagctcacagggcagaggcaaattcctctccactcggccgcgcccacggcctcccaaccccggacagagaaggaaaggagggacccccgcgtgtccgcagctgctttcgcctctcctgctcctggaggggtgggggaatcatccgctgcttcccaagccctgcaaaccccccaaactgcttgttgggacccatttcccgtaggagcaatttgacccgctcggaccgaggacattcagctgtgagctttcgagagattttgtaaccaataaccataatcccgcggcagaggccacagaaaagctttcaattcctgcccagcatcatcaacacacacacccccgccataaacttaaaagcaaggattaaagaccggaacaccacgccacacggcagggggtaagcaccagaggacaagaagttctcagctgagtctctccacccaataacggagtgagaacagaatcggggcaaacagaagcagcagctcacct

SEQ ID NO: 200864 - DNA, 568 bp, Homo sapiens
  chr7:23510068-23510636
  hyper
acccctttggcttcggccagcggactgtgaaaatatcacactacgtgaggcaggcgccgcctccccataaaaaacccagaagggtgactggcaggagggaggggagaggaggaggaggaggagggaggaaggcgcaggaggcggaaaaaatccgctccgagtgtccggctttttgaatgagccacgtgttcaaactacaaatcaacgtctcacgtgaggaatcccagagcctcaattagagtgggtttcggagaaaaaagcgagcgagaggaagagggggaggggaaacgagattgggagagggactctgagaagggggaggaggaagaaggaaaatgctaaaggaaccgcagccggcaccaagcggggcgctgacggtcacaactcgagtttgtaaagggttatctggtctgggcggatcctgggagggagggctggaatattgatttttttttttttaatgaggaaatgggcagaggtactaacaggcagttcctcagcgctagttaccgtagttttaatcattcgatttttcaaaataggttattaacaacaaaaccagagtcac

SEQ ID NO: 200865 - DNA, 85 bp, Homo sapiens
  chr7:23510756-23510841
  hyper
aggggggcagggggtgggggcaagacaggcgggcgacgcgccccaccccgtgcgcccttctcgggccctgggcaccgcgcgagtg

SEQ ID NO: 200866 - DNA, 248 bp, Homo sapiens
  chr7:23513226-23513474
  hyper
ggggctgccacccctcctcacgcccggcttgggaccagcctggagtctcaagccgaaacccctcacgcgggtgggcacacaatgcccggcgtgtcgcctgggcctcctcggaggtgctttaacaggctcttgcgcttttgaacggccctcctggactctgatctgtttaaactagaggcgttaataagtgataacctggatctgccctccttggaagctgcctgcctatattttattgtttaaaataa

SEQ ID NO: 200867 - DNA, 106 bp, Homo sapiens
  chr7:23514425-23514531
  hyper
ctggagtcacatcttcgtttccctgcccatttccaacatcttagagttgatgcgtccttttttacttaaaacaactacaaccaaccatgttctcaggtaccagaac

SEQ ID NO: 200868 - DNA, 299 bp, Homo sapiens
  chr7:23570648-23570947
  hyper
ttagaaaaataaggcgtgacagcatttccacattcatttcgaagtgaaaggaaagtcgaagggacattaagggaaaagggctccttgcgtagtttcccctcacagctctcgtcttaagaacgcttaagggtcggtgcggtcgttgactaaccacttcattaggctcgtcccaccttcaacctcaaggctttcgcctttttagacgcaacgccgccggttccaacagagacgcggccgctcactgaaatagagagccaaggagacacaggccccagctagtcccacgccagcttctcccc

SEQ ID NO: 200869 - DNA, 39 bp, Homo sapiens
  chr7:23719658-23719697
  hyper
ggcgccggcagccagtaggggcgcgcgtcctgcgcagtt

SEQ ID NO: 200870 - DNA, 146 bp, Homo sapiens
  chr7:24323183-24323329
  hyper
cctgaaaccacgggcgggggtggggtggggagcgcagctttgggaccctctagccggagacttccggcagctgcctccgacttgttctaagtacaggaaaaatctgtgcgcccagttgcctcactccaacagcgcgcagttgtgcc

SEQ ID NO: 200871 - DNA, 155 bp, Homo sapiens
  chr7:24323343-24323498
  hyper
cgctagtcgtggagatgccccaccacaaagaggattcaggtgcttcctactccggcacccagtgggttggtagtcctgttggcaggagacaagaatcgtctgggctgctcctatctctggcaggactagacggggcgtgaaggaaagaaggaaag

SEQ ID NO: 200872 - DNA, 235 bp, Homo sapiens
  chr7:24323528-24323763
  hyper
ggcagatacttgggctttggtgttgtccagcgcgctcggagtgcgctgcctcgctcacgcggtcccaggccccgcttcttcaggcagtgcctggggcgggagggttggggtgtgggtggctccctaagtcgacactcgtgcggctgcggttccagccccctccccccgccactcaggggcgggaagtggcgggtgggagtcacccaagcgtgactgcccgaggcccctcctgccg

SEQ ID NO: 200873 - DNA, 89 bp, Homo sapiens
  chr7:24323939-24324028
  hyper
gcccgcgaacttgctagagacgcagcctcccgctctgtggagccctggggccctgggatgatcgcgctccactccccagcggactatgc

SEQ ID NO: 200874 - DNA, 34 bp, Homo sapiens
  chr7:24324151-24324185
  hyper
accttttagcagatatggagggagaacccgggac

SEQ ID NO: 200875 - DNA, 1200 bp, Homo sapiens
  chr7:25019060-25020260
  hyper
ttgtctcagtctctccggcgcgccccatcccgcggatgtggtaaagcttcgcgctcgccccaatttaccaggcttcctgagcctctagccccggcgtagcgcctccccgctgcccaggacagctccgcgcgccgcgtcctcccgcacctgcgccgcggcccctgcgctcggctcctcctggcggtcaatcctctgagccgtccctcgagggaaggtgtcctggggtgggtgagacccgggtcctccttccccgggagctgcagccggcacccaagctcccaggcttgggtctgccccagggccggagcctccccgggcgactcggacagaccccggtccggcagagaaccgcggcgccccgcaaacagcagcccttccgagcccgcgccgccgccaggccccccgacacccaggccccatttaggcgggcgccccgccactcacctgagcgctgtgcagccggagacgctccctagttccccggggccgggctccggggttagcgcacagaaccgggagaaggcaaccccggcttctccggtacccccgcaacgtgcagctgacagctcccgcaccggccgcaggagtcgggggcggggatggccacttgcagacagactgcggggccggagccgcgctgcgcaccggccgcgaagcgctcaagtcccctctcccgggccggctggcgggcgccaccagcacgcggccagttctgagtactttgcccagaacttctcggcgcgcgccgcccggcgattagcccgaggagccgcgcaagggcgggagcgcaggggaggggcctgagaggcccaggggcggggccccgagggggcgggagggcggcagagtgatgcacaatctcaccaatcagaagtcgcctttcgggaaggaggtggggcgatgtcctcggaagaagccagcggattccatgacgcggcgggggaactagggaccccggattccggatgggttgggagggcggagggaggcgagtcctgcggcgaggcactgggtggggctcccggtggcccagctcggtgcctgcgcgcggtaggcgttcggtaaatgttcctctagtggcttttccgggccagggaaggaggaaaaagtgagggcagcgcgggaggggcaggtttacggagaaggctccaggggacccttgcggtcgcacaggctaggagaactcgacctcccgagaaa

SEQ ID NO: 200876 - DNA, 571 bp, Homo sapiens
  chr7:25219529-25220100
  hyper
aggccgagcctcacgggctgtcactgccctgcaagcggtgcctcgggggtctggacatacctgggacatgagcctgggggcgctgcgggaccgcgcctcccctcccctccccgcagctggcggccttcgcgggccgaggaattttgaggtcgtccgcacctacggcccggtggagctggcaggcaggggcgggggcgggagaaggacggcgggcaggccggggtggggtggggctgggggcgcttgtgacggtggccgtgaccgcggcattaggtgatgcgtccttgaggggctgggggcttccgggcggcgagcggggcgcagtaggaggctcttagagacctcggaggaaaccagcccagcgctacgggactggcaagaatgcgaagaggaaccgagagtgaacggagtgcgaggcgccgggtcggaggcgagaggggctcttccgccttgcgacccctggccccgcctcccggtcccttgccccgcccctctcggctcaccgccctgcctccagtcggaccccgccttgccccacccgcgccccgcccccaggcgccctctagcggcg

SEQ ID NO: 200877 - DNA, 47 bp, Homo sapiens
  chr7:25891899-25891946
  hyper
gttccaggccccagtgaacccgttacagggtgggactgggtggagca

SEQ ID NO: 200878 - DNA, 188 bp, Homo sapiens
  chr7:25892243-25892431
  hyper
ccgggagtggagaaaggctgatttacagccggccggccgcactcttgcaaaatcactgcggccggggaaacccactcccaggactcagcccggaagaggccctgaaggggagcggagactgggcgctggggtgggggcgggggcgccgagcctcaacttcccgcgtctgctggaagcttgctctgagc

SEQ ID NO: 200879 - DNA, 379 bp, Homo sapiens
  chr7:25894658-25895037
  hyper
ttgagttgaacattatgtagcgtttatatagaccttgcagacgtctgtgcaatatccaccactgaacacgtgaggtcgtactcaagtctctctggcccctggtaatgtgactcccttcctttatttgcatgaatcgcctggattgggtgtcaggtttttaaaacgtcaaggtttacgcctattgttgtcaaccaatcagcatcctactttgacgtgattggcttctactgtaggtgtcaatcatccaaaatttgcatactactcctcaggccgccgggagcctgtcagtcggctgtggcagctggaagagaaggaatcggacggagaagaatgaaaaatcactttgctttcgcaaagcgaaagaaaagtattcttttcc

SEQ ID NO: 200880 - DNA, 171 bp, Homo sapiens
  chr7:25896938-25897109
  hyper
ttgtaacactttgggaagttattaaaaggaagatctactgcttcctccttttgggttaaactggatggcaatgtttgtcactggcccttattagagaagagtgtggcgaggtggagggccgttggacgctgggtttgtttgtgtgggtcttgttttttattacaagacaca

SEQ ID NO: 200881 - DNA, 315 bp, Homo sapiens
  chr7:25901791-25902106
  hyper
aaacaccagccaatcagaagcgtttccggaagacactctacacctctccgcctcttcataaatatttaaaccgcttctttctagatttgtcatttaaatctactagggaatgtgcctcaagggctcatctttcactgggtcgctcacacagaggtggggcgagagggaggaggcgcattagccctgcgctctcatttgcttaaacggccttcttacgtcatcgtaagcctaagccaatccgtgaagtgcactttgacaagctacccgcccctaatttgtcctttcaccgccagcctaagccaatagtgtggctgc

SEQ ID NO: 200882 - DNA, 207 bp, Homo sapiens
  chr7:25902138-25902345
  hyper
gcccccggctccgcccaatttcccacctcttcccggagcgcacagacgccagctgagtgggaggggcctagctgcgggcggagcacggaggaggaagggcacgaggaagaggcggagcgggccgaggcgcgcggagctgggtttgctgagtgcttccttcctcggccccacctcccgccgggcaggatgccgtttgatcattggctg

SEQ ID NO: 200883 - DNA, 95 bp, Homo sapiens
  chr7:25989915-25990010
  hyper
accctcacctccctcggtagttatttaaacttttgccagcagctaactcactctaacttgtggcaactttttaccttcccatctggaaagctggg

SEQ ID NO: 200884 - DNA, 201 bp, Homo sapiens
  chr7:26192446-26192647
  hyper
catggctggtgcacagcgtggctgccgggagcgcggacgaggcccacgggctgctcggcgccgccgccgcctcgtccaccggaggagccggcgccagcgtggacggcggcagccaggctgtgcaggggggcggcggggacccccgagcggctcggagtggccccttggacgccggggaagaggagaaggcacccgcggaac

SEQ ID NO: 200885 - DNA, 111 bp, Homo sapiens
  chr7:26192748-26192859
  hyper
cttgtgtcggatctgagcaggggccactctcgctgtgtcctggcacccttagcccctggtctttgcaggttcgcagatgctgctgctctgattccgaatgaagggctacta

SEQ ID NO: 200886 - DNA, 216 bp, Homo sapiens
  chr7:26240925-26241141
  hyper
gtacaggagagttcgctgctgaaagtggtcccaaaggggtactagtttttaagctcccaactccccctcccccagcgtctggaggattccacaccctcgcaccgcaggggcgaggaagtgggcggagtccggttttggcgccagccgctgaggctgccaagcagaaaagccaccgctgaggagactccggtcactgtcctcgccccgcctccccct

SEQ ID NO: 200887 - DNA, 48 bp, Homo sapiens
  chr7:26415726-26415774
  hyper
tttgccccccaccccactggcggtggcgctcccgcggctgcaccctcg

SEQ ID NO: 200888 - DNA, 104 bp, Homo sapiens
  chr7:27135162-27135266
  hyper
gtacccaccacttacgtctgcttcctgatttaacgcgtaggggctgtaaggcgcactgaagttctgtgagccatagcttggaccacaacttgagtgggagtagg

SEQ ID NO: 200889 - DNA, 145 bp, Homo sapiens
  chr7:27136790-27136935
  hyper
ggaggggaatgttagaagagagagagagcttccttttataaccttcctcattctgctgcacgtctagagtgggtgtgggggctggcaggtgggaggggcggtggacaaatggctgatggtggacgggacactttaccccaacgac

SEQ ID NO: 200890 - DNA, 130 bp, Homo sapiens
  chr7:27191584-27191714
  hyper
gagagacgacccaagggatgctgccctgtgccttggcgctgtgccacggagggccgaaggaaggcgggcacttactgccaaggcgagccagggaggggagagaaagggagtggtgtgtgtgtgtgtgtgc

SEQ ID NO: 200891 - DNA, 69 bp, Homo sapiens
  chr7:27203935-27204004
  hyper
gggcgccctaaggccgctgatcacgtctgtggcttatttgaataatctgtcatggggacccttgtggcc

SEQ ID NO: 200892 - DNA, 243 bp, Homo sapiens
  chr7:27204141-27204384
  hyper
tacaaaaggctctctgggctgcactgctttcgaagaacggcccaaagtatctcggtcctgggcctgggcagccaaggagaggggcggccagtcttggctcgtcccgaagtgcccgccccgccccctctcgctgcagcagccgcctcctctcccgtagccctgcgggccgctcttcactgctctccagacttggggccctatctgaggcgtcccaaacaccaacttctggctcctggccccaac

SEQ ID NO: 200893 - DNA, 84 bp, Homo sapiens
  chr7:27223030-27223114
  hyper
tccagcacctgggctgccccttcccaaggcagtaaaggcggctccagtcccagtctttcccggctgcggccaagactgggcagt

SEQ ID NO: 200894 - DNA, 268 bp, Homo sapiens
  chr7:27223306-27223574
  hyper
tagggtgaagggaaagggggcttcccgaagctgcgggcaggctctacttgctccccctttaaaaaaaaaaaaaaaaaaaaaaaaaagacccacaagacaaaaaaaaaatcgcttttgacagattgaataacaattgtgaataacatgcagttgggcagaaggaggcacgtaattgccaccacgccagaggaaaatggcttcctttggacaaaaaggccaactttgggttaatttgttcttttaatatattgctagagctaagcgggct

SEQ ID NO: 200895 - DNA, 61 bp, Homo sapiens
  chr7:27225249-27225310
  hyper
gggtgggtgagggatgccctggactggggatagccaggtgggagtccgtcgctgtgtggcc

SEQ ID NO: 200896 - DNA, 281 bp, Homo sapiens
  chr7:27227348-27227629
  hyper
tgcggggctcgccccgcccctgggtgaaggcaaacaaattcttgcacttgtattagggcttttaagaccataattgaacccgggggcgtctaggaaaaccgaaaacagttctagacagacctgcggttttatagcagttttggcagtcaacttcagcttgtgcctgagcagacggggttgtggtggcccgccagcgggggatgccaggccacctcccccagcggcacgcagcccctctcttaattagatcggttttcccctggtgtccgggagagcggtcc

SEQ ID NO: 200897 - DNA, 54 bp, Homo sapiens
  chr7:27228044-27228098
  hyper
gttcggaatatgctggcggtgtgaatgtgaaggtttctccaggcaggcggctgg

SEQ ID NO: 200898 - DNA, 228 bp, Homo sapiens
  chr7:27237763-27237991
  hyper
aacgagttctgaagcgtttcttcaagttgccttcttgctctatttttaatccattaactagtggttttcagtttgttgatgacttttttctctttaaccctcctgttctggaaccagattgtgacctgccgctcagagagattcgtcgtggctgatatccgcctccgtttgtccttagtaatgaatttattcgtggcgtattcccgttcaagttcttttaattgcacc

SEQ ID NO: 200899 - DNA, 199 bp, Homo sapiens
  chr7:27238170-27238369
  hyper
acccgctgtacaatcctgtcttctgctaaagcctagagggtcagtggggaaggtagttagttctgaactgaaatgaaatcacccagggctccagtgacttccccaacccggccatcctgcaggagcagcgcgtaggcagcctcgagtgatagcctggtccaacggcccacaccttagcgccaggctcaaggtacaacac

SEQ ID NO: 200900 - DNA, 224 bp, Homo sapiens
  chr7:27238917-27239141
  hyper
cccccgaggcccggcaccactggcatatccaggtagccaggcatgggctgatggtggtggtaaggcccggctgcgtagccctggtggtagaaggcgaactccttagcgcgggagctgaactcctcggcagctgggccggcggtatccatgtacttgtccgcgaaggcggcggcggcggcggccgaggcgggctgcgcgcacgacttgatggcgttggggtgcgg

SEQ ID NO: 200901 - DNA, 45 bp, Homo sapiens
  chr7:27241173-27241218
  hyper
gagagtgctggattcttttccaccccaggcggactggtgagaagc

SEQ ID NO: 200902 - DNA, 85 bp, Homo sapiens
  chr7:27245310-27245395
  hyper
caggaccccttcaagtacacactgaggtgtgatcagagttttatgggcactttatatgctgtaatcataacgatgtgtgtgcctt

SEQ ID NO: 200903 - DNA, 265 bp, Homo sapiens
  chr7:27250231-27250496
  hyper
agcattcctctgtgaaagctggcttttccctttttttcctatactccccttcccgccctgcgctctaaatcctggctctggaaatccaccagaatcaaatgctggctccctgcgggcccgcgtcggagcggctcacgccattggaatctttttatgacctttgatgtgtttaaataacatggcaagtctgagcacacacctcggattaaactttaatcggctgcagtcaaggtcgcccaggtggtaaaagcgtttcctccgacgt

SEQ ID NO: 200904 - DNA, 47 bp, Homo sapiens
  chr7:27275466-27275513
  hyper
cgccaggcttctgggctgggatcgcgcagtccctccacgtcgcggcg

SEQ ID NO: 200905 - DNA, 103 bp, Homo sapiens
  chr7:27275543-27275646
  hyper
ccttcgtgccttgctccccggataccaacctcacctggctcccgcgcgtcgctcaccgcccgcggggacagcggccgcatccgcccaacccacttgggaaggg

SEQ ID NO: 200906 - DNA, 35 bp, Homo sapiens
  chr7:27278959-27278994
  hyper
acaagccagctcctggcccccggctcaggactcct

SEQ ID NO: 200907 - DNA, 498 bp, Homo sapiens
  chr7:27279659-27280157
  hyper
aacagtgttcttatccagtcctctctttttttgtcttctttcctttaaaaacccaaccgctcttaatgtgaggttgatgaaaggatgcttttggaagaagtgacatttggttaaaacgttttccccctaatgcgccggtggaaaggggcgggggtgggtgtggttccctaggctcctaagactggccagtcagctttgaaagagcggggcagaagtcgggagagggctggggaaggctttgggctgaggggatgtgtccctgaagcttcagatctggagcccaagggaggcaacctccctctgaaaagccggtcctcagctccatccagccctctccgcgggatgtaagccctgctccgtagggcccgacccaggaagcagactaagtggcactccttgatctctcactcctactcggctttcatctcacccagaagaaaagcggatcaaacagaggattcccattgaatgcagagctgggggcggggtggggagcca

SEQ ID NO: 200908 - DNA, 59 bp, Homo sapiens
  chr7:27285386-27285445
  hyper
ggtgtctgctttggctgttcctgccctgcgaacactgtccccggagcgggaccagacta

SEQ ID NO: 200909 - DNA, 32 bp, Homo sapiens
  chr7:27288913-27288945
  hyper
ttgcaggagggaaaacggaggctccaggtcta

SEQ ID NO: 200910 - DNA, 59 bp, Homo sapiens
  chr7:28725632-28725691
  hyper
agccagagctaggcgcaaaagaagggccagcacattacatcatcgcttggcctggaatc

SEQ ID NO: 200911 - DNA, 188 bp, Homo sapiens
  chr7:28995379-28995567
  hyper
tcccgagaagtcggcggacacgccggtgcccatggagcgcaggggccgtcgggtggagtacatgtgccgaacgtggaccggggccccgcccttccgcctagcccgcagtttcctacgcagccagcgagacgcccaggccgccaaggccaggagcaccagcagcgcgttgaccgtcagcagggccaagg

SEQ ID NO: 200912 - DNA, 332 bp, Homo sapiens
  chr7:28995992-28996324
  hyper
gtgcccagacgatgcttcgtcgcgcgctgccaggggtcgccggcgggcgatggcgcagagccaggagaggccgttggggtgggctccgcgagggcgggatctgcccgagtcggacggccccgctggggcttcttgtgcaggtctagggactgtggagccgggcccgcggcggcagcgacggaggggctgggctgctggaggcccgggccccgccgactcagccttagggcgctgcggttgcctaccagctccctggcggccccatcccaggccaccccagctagaaatcgcccctgctgctggagctgcggctgcggcggcagctcctccgc

SEQ ID NO: 200913 - DNA, 54 bp, Homo sapiens
  chr7:28998209-28998263
  hyper
tctgcgagcggagagcaaacggggcggaaattcgttcttcccacactctgcccg

SEQ ID NO: 200914 - DNA, 175 bp, Homo sapiens
  chr7:29185640-29185815
  hyper
acatccccaaaacacgcgttgagggagtaagggaaagtgtcctgcacccgccaccctcccgcgctaagagcggcagaggaccccacagcttcgtacttccccggaggagctcctggagtaggagacggcttctagcctggaagaaccccgggtgcgacagttgtgccaggaaact

SEQ ID NO: 200915 - DNA, 37 bp, Homo sapiens
  chr7:29186197-29186234
  hyper
acatgacccagacccacagggcaaaaagtgcgtcgtc

SEQ ID NO: 200916 - DNA, 496 bp, Homo sapiens
  chr7:29234008-29234504
  hyper
cgagcgaccgcgtctcctcttcttcctttgtgtgtgcgcgagcggagttggggcggagggagaagggggaggtcgctctgtctgtccgtctcccgccgcctctgcccggtctactcgaagtgcggcgggagaggcgggagcccaggagagggtgcgggagctggcggggcggctcggagctgccaggacgccctggtcccagccgcgcacaggggagcgtggacggcagaggggctcggcgggagccgagatccgcccgtcccggctgcccctcggcctccctctgctcccacctaccccctgacacccatagaaaagcgtgcaaaggcgcggagcgggacggaaaccacaaataaatagcggcggcggcagcgcgtcatctggtggagcaggaagtgcaggcagagtccggaggctggtgctttctgcgcgtccccaggactttgccatgggctgggggccgcggaggctgcgagcggccgggcgagggcagcgg

SEQ ID NO: 200917 - DNA, 180 bp, Homo sapiens
  chr7:29234886-29235066
  hyper
aggagcgggcaggctcgcactttctggcgcagctggagcgggggctggcggggcggagaaggttggggtgaagcagagcgccccgacctgtttgccgtgccgcgcccgctaccctggacacccaaatccggagcagaggggagcaaaccctcgctcctcgcagacttgattttctttgtt

SEQ ID NO: 200918 - DNA, 333 bp, Homo sapiens
  chr7:29602676-29603009
  hyper
aaaaaaaaaaagtactcttatgtgaccaggagtgcaatccccggttcacttcctgcagtggctcagggctggatttacactgccctcgttgggtggctgtccatggacttccaggcctgaaagaaggaaattcacatcctcactgagtcgtgttaagagtctcagactggcaggttgtggtggttaagaccgtagaagctagagtcaggccccctgggttccaaccctgctctgccacgtaccagacaggcaaacctgagcaaccattttcccgtgctagggtttcctcgcctgtcgagtgagaataataataataacaatacctacctccta

SEQ ID NO: 200919 - DNA, 87 bp, Homo sapiens
  chr7:29604726-29604813
  hyper
gcacagaaagtgggctgggagtctcgcttgctgtacccgcacctaagtgctcagaagcggcctttcgctctgcagagggggggtctt

SEQ ID NO: 200920 - DNA, 369 bp, Homo sapiens
  chr7:29724332-29724701
  hyper
ggcccacgtgcagccgcgggaggaccgagcgcgggcgcgtggagaggggtccgtacctccaaacatgcgcggtgagaggtgagctggtaaggagccgatcaccaggagcggcccgccggggctccagcccaccggccggtgccggccgccgccgccatcctcagggctgctgtgcaccgagtcctgcgagtcctacgggccgctgctgctgttcgggatgctgaaagaggactgcgccgcgaaggcccccgacgccacgcccccccgaggaaacagctgcggggccgccgcggcgccgccgggctggtgagcgctgggcacctgggccgggaacctccccgcggcggcggcctccggcccccggctctg

SEQ ID NO: 200921 - DNA, 54 bp, Homo sapiens
  chr7:29725077-29725131
  hyper
tccagcaggaaggggcgactcaggtggcggtgcgactgccgctggtttcggttc

SEQ ID NO: 200922 - DNA, 205 bp, Homo sapiens
  chr7:29845997-29846202
  hyper
cgcctccagggtcccagagcgaccccgcccgccggggccgtgtccctgccgcggggcggcggcggctcccaggcaggagcctgcgagcaggtgggggcggcggccccgcctccgcgtcccggcagcaccagagccggtggccggggagcgagccgggcgcaccgagcgcagctcggcggtagcggcgccgcttggagcacgggcg

SEQ ID NO: 200923 - DNA, 47 bp, Homo sapiens
  chr7:29846749-29846796
  hyper
cggagtaaaagagagctaggaaattgcagagccggaggtggcttggg

SEQ ID NO: 200924 - DNA, 369 bp, Homo sapiens
  chr7:30028879-30029248
  hyper
cccagggtggcgaggccaggggcccacaggcacatcccagtgggcagcaggttggctgccaggaaaaggaaacccaggaagagcagcgcggggaacccggctgcggtgcgggagcccggggccggcatccctccactgcacccccgcagtccccgagccgagtcaccccggcttcaggccgaggccacctctcctctgaccgcccccaggctcccagcccgcccgggccagcaccgggaatcggcctggggtaacgctacccgcgggttcggagggacagcgggaggagatgaaacgcaggaggtggcgatggcgggtggggtgaaaccgccgggaaagcagcgctgcaaacgccctgcgctcccagac

SEQ ID NO: 200925 - DNA, 252 bp, Homo sapiens
  chr7:30029302-30029554
  hyper
aggctgcggccgccgagggtgcgggtgctgccgggtccggattactgcggcgacctcgggggctgcagctgcagtggcggaggcggccgccgggcgcttccccctacccagactcccggcgctggggcccgccgccccccgcagcagctggcccgactcacgtgaccgcgggcccaccctccgcctcccccaccccggcccccggggccccgccgcaccccgcgcgtctggctgcacgggccgcggcgctgc

SEQ ID NO: 200926 - DNA, 212 bp, Homo sapiens
  chr7:30066334-30066546
  hyper
ctggctcttataacgcggccgcctgggaatagcagcctcccattggctattggtgctgtccttcaggcagctctcaagccaatgacgctgcaacgatggaatttacagcccggtagagccgggcagctgccaagcggcggatcatcccttgtggtcctagagcccggtggatttcagcattcaaccagcgtggattttgggagaggggcggg

SEQ ID NO: 200927 - DNA, 246 bp, Homo sapiens
  chr7:30067778-30068024
  hyper
gaccctcaaacggcgggcaccatttacagtcagaactgcgctccacacttgtctcaggggcctccctcctcccgtcgcctagtccgcagtccgcgtctcgggactcaatttccctgcgggccgttcccgcaaactccgccccgccgccgctgccgcgaaatcccggagtggattttgggaaggggcgcgcgagcggcgccctgggcatgcgcgagcgcgtcccgggcccggcgagtcgagggttca

SEQ ID NO: 200928 - DNA, 256 bp, Homo sapiens
  chr7:30517956-30518212
  hyper
tctaagctgctggcacgattgagaacccctgcgttcgaccacagtgggataaacgattccgctgactgtgaagttcatccctctcaactttcgctacatgcttcaaactcgcgggtttctccgcttggttccacccagagctcctccagagccgcgctgcgttccgcccgcacgcaaatcccgcctccctgcgcctcctcactcgcagcgcccaggacctcagaaagggcctgccccgcgcgaatccccagtcgct

SEQ ID NO: 200929 - DNA, 121 bp, Homo sapiens
  chr7:31091704-31091825
  hyper
ggctccacctcagcgcccccgacccccgccgctgggatttcccgccgcagctcctgctccagtctgtgctgcgggtggggtcgggttgagcagcccggcgccccccaccgcgccccccacc

SEQ ID NO: 200930 - DNA, 69 bp, Homo sapiens
  chr7:31091826-31091895
  hyper
caccgccctcgatctaaccccgcccccgggcgctcattggcctgcagcaccccctccccagcctgtgaa

SEQ ID NO: 200931 - DNA, 33 bp, Homo sapiens
  chr7:31232645-31232678
  hyper
agctggaagccttcggtgtctccttttgtgtgc

SEQ ID NO: 200932 - DNA, 191 bp, Homo sapiens
  chr7:31232718-31232909
  hyper
tcagtctgatccagggattgtctcgaatccgcgcagctctggacccgaaaggagaggctcagggagaggataatgcggttgccaagtgccaggcttggcctgggtgagaacccggggctgcgcgagcacggtggcctcggtgcgtcccccggctgtccccgccgcgctgggcggccctgccgcaagttctc

SEQ ID NO: 200933 - DNA, 48 bp, Homo sapiens
  chr7:31232939-31232987
  hyper
cagaaaaggttgggatttttcttcaacgtgatatgactggggttagct

SEQ ID NO: 200934 - DNA, 263 bp, Homo sapiens
  chr7:31375702-31375965
  hyper
gtagaggggacagacggctgtctagtttgggcaaatttccctctacctggggcgtgggggcgcagttcctcctctctttcgggccttttcccccgccctctggggtttgaatgaacaggtgctaacacaccagcttagaagggcgcgttcagcacccgcgccagcagctgctcggcacctttgcccctcggtggcggctgccttgcgcaccaaaggcccaggggcgtaaaactggaggcgtagagggagagggagacgctgtc

SEQ ID NO: 200935 - DNA, 109 bp, Homo sapiens
  chr7:31376218-31376327
  hyper
ccagcccctttcttgggcaggccaggtcagtgtgggcgccgcggcccgggttcgcagggcgcagtcccccggcccccagggcgcccactgcgggcgggacacgggcagt

SEQ ID NO: 200936 - DNA, 51 bp, Homo sapiens
  chr7:31528306-31528357
  hyper
tgtttctaactgagatgtaccgaaccgtgaaaggatgtgggctggacatac

SEQ ID NO: 200937 - DNA, 266 bp, Homo sapiens
  chr7:32767520-32767786
  hyper
ctgtgaaattaatctcgcagggggagcgaagccacggttgcgggggagcgaagccacggttgccgggaagcgcgggccacccctccctccctctcattcttcgtcctcccctcgcgcgccacccgtttttcctctttctccgttaataacggctgggtggctgggggaggagggaaggtggctccggcggagtctgggcgggcgcctcccactcagccgccagtcgccgtgggagccggaggatggcggcggtaacagcggccgcc

SEQ ID NO: 200938 - DNA, 338 bp, Homo sapiens
  chr7:32768220-32768558
  hyper
gcacgcgcgcgtactcggctcggatctaccttccagtagcagcggagtggccaatgggaccgggaccagggctgggggccggggggccgccgccgcggggaggttcccggctcaggtgcccagcgctcaccagcccagcgcctcgggcggcgccgcggtggccccggcagccccgcgcagctgtttcctggggggcgtggcgtcgggggcccgcgcggcgcagtcctccttcagcatcccgaacagcagcagcggtccgcaggactcgcaggactcggtgcacagcagccctgaggatggcggcggcggcggccagcaccggccggtgggcgggagcc

SEQ ID NO: 200939 - DNA, 701 bp, Homo sapiens
  chr7:32982270-32982971
  hyper
ggcccctccgtggccgggcgggcctcgctccccacccagtgaggactagaagtcccgtcgcaggcactaggttcctcacaggcccgcacccctgcctgggtcctgggggcttggaggacccagcccagcgcccaacacggcgccgggcgcccctgttcccagaaaacgggcggcgcgcggactgcggcccagacggctgctcgagactcacaaggactccaggcgcttgagctgctgcagctgctgggcgtcgtgccgccgccgcttctgctcccgggcccgctgcagttcctgatccagcggctcccgcggccaccacgcgcccccagccctcgcatcctcgcgccccggccaggacgacatcgcggcacctgcggcgcggctctggctgcggccaagagggcacttcctccgtgcggcgccccttcccgccgccgccccgcgactcgcccgggaggggccccgaagtcccggcctcggccgccagatgcccgcctgcccgcggccggccccaagtcagtgcgcagagccccagagcccagccgccggtgggcggggagcgcccgctggcggcggctggagccgaggcggggcggggccctggttgggagcctggggaagcttccaggagcttcagggttcccgccaggccacactcatctccctgcccctttgaggttcccgaccgaggcaaggggtct

SEQ ID NO: 200940 - DNA, 227 bp, Homo sapiens
  chr7:32996717-32996944
  hyper
ggaaaattggatccacggccacgtaggagcccctcacggcaccaaacccggtgtctccagggacgggcggagaccagcgggtgggcttgggcagtacgcgcttttctcttccgactttgggccaaagccttgtccggagatcacagtgtctcgctcggggacacgccctctctaggcccagacttggtccccactggagttcccagcccccctccccgctgcggcac

SEQ ID NO: 200941 - DNA, 157 bp, Homo sapiens
  chr7:32997454-32997611
  hyper
ctctccggacaggcctttccctcctgccggacctcccctagctccgccccgtgcagccgcgctcctcccttcttccgctgcccagatcctcccggaccccagaccctccgccgcgggtgagcctcccggccctcacgtgccctaggctgccagccgg

SEQ ID NO: 200942 - DNA, 1040 bp, Homo sapiens
  chr7:36192233-36193273
  hyper
agcagatctcgcctcgggcaatcctaaacagcctctaccaggcacaaccagtcctaggccccgggcggcaaccatggtccgggggcagctgacttaggacagcctccctgtgacccgccctcgccggcacggcgccggctccgccccttaagccccctaagtcccgcctctgcgctcccggggcctacccccgcgctcatggccccgcccccgcttttcctaccccatcgcgccctggccccgctcccacactctatgaccccgcctctcgcactccaggcccgccccacgcgctccagggttctgctctccacccatttgtgccaggccacgcccccacacccatggctcctcctctcgcacgccagggcctcccctcgcgctctctggttcgttctccaccctcttgagccttgatgccgccccctcttccatggccccgcctctcccactccaggcccgcccttgcgctctcgggttcctctctccacccactggtgccaggcctcgccccgcgccagggcccctcccccacgtgccctcgggagtcccggggaggagttgccgcgcggaggaggcgtggccgcggtgcctgcggaggcgcgagcggcgcggcgcggcgcggccgggactttggctttgacaccgactgcgagcgggagccgtgcggctggtgctgggtctggactggctctggcggatccccgcccgagttgggcgcaggactttttgccggggtaaacgcaactgcggcggcgccgccgcaagccccggtgcagcctcggcggcgggtttcgccgccgctgccgccgcctccgagcagccctgcggcttctattcactctgggagagcgatgctaagtttctcccatagaaagagccgggacacgcagaccgaagcggcgtagtcggcttccagggcctgaccagtgacccacacccgcgcggacgcctaggctggaggcagggggcccgtgctgtcccgggctgggctcaggcttccgagccgcaggtggaagaggaaccggcgccccgcagag

SEQ ID NO: 200943 - DNA, 212 bp, Homo sapiens
  chr7:36429709-36429921
  hyper
ccttcctctgtcaacctctgggcgaacccccaccgggcggagggcgcgtgtgtgcgcgcgtgcgcagtgtgtgcgggccggggtcgccgcggctgcggcctgctgtggttggtgggttcctctgagattttgttgtttcggtcctacagataaaactcagggaggaaggctttgagtctgtcctaaaaggctgttgcgagaggtctttcagc

SEQ ID NO: 200944 - DNA, 60 bp, Homo sapiens
  chr7:37955577-37955637
  hyper
cacctcctacaagcctcagacgcccctggcagccttaggtgtggccgcccagttctcgat

SEQ ID NO: 200945 - DNA, 204 bp, Homo sapiens
  chr7:37956056-37956260
  hyper
cgcaccgcctcgcagggcgcgccgcgcacgcccagcgccaggtgcagccacaggcacagcgccactaggatggagaggaacatggcactgccctctcgcgctgcgaccccggcagacagaaagcgcccttctcttcctgccaccctcatctttcgctgtcccttcgccgaggaagaaatcctctggggcgcaggagagtttctt

SEQ ID NO: 200946 - DNA, 134 bp, Homo sapiens
  chr7:37956568-37956702
  hyper
ctctgggccgcagcccagggctggaagcctgctttccccctaaagtccctcctttttagtctggccagtcttttttcttcggaccaagaaaaagaacctctggcagttgttttcgacaccggatacaagagggt

SEQ ID NO: 200947 - DNA, 189 bp, Homo sapiens
  chr7:37960958-37961147
  hyper
ggggatagcatggtccgggactgggaggggcgctgcgcccaccgagggcggcctgctggcgggggactcagtaacacccagcgaggcggtggcaggtaaagaagggacccatccagggcgggatcaagctgcagagtgccccatgcccaggttcgcccctgttctcacgctgctgagtcaggctctggg

SEQ ID NO: 200948 - DNA, 629 bp, Homo sapiens
  chr7:38217578-38218207
  hyper
aagcgggcgcttgttaaaccgtgcgatgcacaatgcgggaaagtccaaccagctccgtgtttcaaagctggatgcccagatttcccacccattcctacaggcagaccggctcgccctctccctccttcccgcgtcgtttactggtcagtagaagattgacatgtcatctggccaataggttggctcctctatggaggcactcaggaaccagtcgggtctttggtccctcgagcgagatgcgagctgtgtgcgtcgacgtcagcgtgctgacgtcacgggccggaggtcccggggctgctgggtgcgggcggtgggctgcgcgttgtccgctggactgggtcccggtcacgccccgccaagccccgcccctcaggccggggcgcgaccgcggatccgcagttcccgggccagcctggggcggccggccaggaaccacccgttaaggtaggctgggtttctcgttcccctatttgacaggttggaaaactgagtctcctgggtcagatgacttacatgggggcgtacaggggacccgcggacggaggccatatcctggtcctgttctgtttcctgagtcctgcgcgagcctccaggggaggaggaggggcgaggcaggctgtgctcataat

SEQ ID NO: 200949 - DNA, 35 bp, Homo sapiens
  chr7:39453506-39453541
  hyper
ctaaatgtgcgcttcgggaaaataacgagcccctc

SEQ ID NO: 200950 - DNA, 67 bp, Homo sapiens
  chr7:39454304-39454371
  hyper
taccccgcccccccaccacatttctgaaatgaaagagttatcaatcgctttagggttaacttaaaga

SEQ ID NO: 200951 - DNA, 330 bp, Homo sapiens
  chr7:39605669-39605999
  hyper
tagtttaccaaagcgcgcgaatgtaaaacccagaccatggtaagactacggtggaaatggaaggtgtctcactgagggtcccggttgccttctgcaaaggtgaaggtcgtgccggccacgcgaggaaatctgcctcgctcacaactcacaggcacacatcaacactgccaaccgagggagcccaaaatcaccgcaagcgaaaggctccggcggcggccacgggccacagcccgcctccgcgcacacgcagcccctcccgagcctccactcgccgtcttcgccccgccttcggaccggaaggagttgttggcgcttccggtggcctgcgac

SEQ ID NO: 200952 - DNA, 63 bp, Homo sapiens
  chr7:42267545-42267608
  hyper
tcgctctttctctgcgctttcctgtcgagttcccttcaggttctggtttcctccgacggtggc

SEQ ID NO: 200953 - DNA, 153 bp, Homo sapiens
  chr7:42267822-42267975
  hyper
gccagcaaacagaacatgctggattgctcagagacggctctgggtgtctgggggcagaaggggtgctcccaggcccggctttgatccgcatttctgaagctggctttgggagacaatgcatctccgccagccaggccgcgggaaaagtgaaaa

SEQ ID NO: 200954 - DNA, 408 bp, Homo sapiens
  chr7:42276904-42277312
  hyper
cacaagccctgagtgacagttctgatttggttcaaccgcgggagggaggggaaagagaaagaaagaaacccccagccgtacgcctctcctggcatccaatcgactttctggaaaaaggtcccatcccggcctggtgccccgtgctgggtggagaagccccccgccccgacctggcaccgcctgcactactcacggggtggaaaagttgtccctcggctccgcgctcccctcccgcgcgctccctccttcccttctctcctcctcttcctcctcctccccgcgctcctcctcccccaagttttaacagatgttgccggactctcctcgctccctcgcactctctcttcctccgccccggcccccgcccagtcccttttctttcagccactctcgggctcggaggggacg

SEQ ID NO: 200955 - DNA, 60 bp, Homo sapiens
  chr7:42277588-42277648
  hyper
cgccgccgccgccgcctcctcctcctcctcctccttctcctcctcctcctcctcctccgc

SEQ ID NO: 200956 - DNA, 410 bp, Homo sapiens
  chr7:42928175-42928585
  hyper
agtggtaggaggatgtgttccctttgcagaatcagaccccctcctgggactgtggggaccctctgtcgccggcctccattggaggatgcgttgtccctggagctgggtgcgctgttgcgtgacctggggcctgggtggtgggcgggcctgtccatggcaaagggcacggctgcgcgctacttcccgagaacccgccagcaggctcttgggaagcagcgatttctccttagtcacagtcagagagggtgatgcgacacactgggcttcactgtgctcgtgaagcggagccagggtgaaaggatcatatggcctaaccctaaccctaatgggagtaacttcacctgcgtcccacaggccccgcaagagtgacgctgccaggcaggcgccgccctgttcggttcctgctgctg

SEQ ID NO: 200957 - DNA, 109 bp, Homo sapiens
  chr7:43153584-43153693
  hyper
ccgggcacagcgcgcctcagtctgcattgggctgacaccagagagcatgtggggattttcctagttgccgaagaagatattatttgacgttgctgtagttttgtgctta

SEQ ID NO: 200958 - DNA, 108 bp, Homo sapiens
  chr7:43622286-43622394
  hyper
cccctcctcaccacgtgaagtcccgcttacagctcaaatgccttttattaaccgaaggtcagcttttgtgactctcagacgctcaacaggtgcgcaactctgctaacg

SEQ ID NO: 200959 - DNA, 34 bp, Homo sapiens
  chr7:44122205-44122239
  hyper
tacttgggccagtcggagcgctggggagggtccg

SEQ ID NO: 200960 - DNA, 154 bp, Homo sapiens
  chr7:44924099-44924253
  hyper
tggatttctttcatctcatccgcataccggcaaaaggcgcctccgaacttgccccaggctttgaagggtacggtgatggcattgcggtaggacggcttcacctcgctcactcgcagaaacaccccgtatttgttgcagcccacatcgaagaaga

SEQ ID NO: 200961 - DNA, 309 bp, Homo sapiens
  chr7:44924469-44924778
  hyper
ccgcgccgaagccgccaccgccgcggttgaccgtttggcggatgcgcaggaagcggccgcgctggttctccttgaggtccaggtagtacttgcggttctcacgcaccaagaattcgctcttgagcgcgcgccgcggcccgccgccctcctcggcgccagccgccagctgctcggggctgctagggcccagctgcgcgtagtgttctatgaagtcgcccagcgagtcgcggaactcggcggccaccgccatggacagcgtgaggcggctcttggaaccgcccgcgcccacctcggcgatcttgaggaagc

SEQ ID NO: 200962 - DNA, 104 bp, Homo sapiens; identical to SEQ ID NO: 115000
  chr7:45615102-45615206
  hyper

SEQ ID NO: 200963 - DNA, 182 bp, Homo sapiens
  chr7:45927932-45928114
  hyper
ccaccagcggtttgcgtagggccttgggtgcactagcaaaacaaacttattttgaacactcagctcctagcgtgcggcgctgccaatcattaacctcctggtgcaagtggcgcggcctgtgccctttataaggtgcgcgctgtgtccagcgagcatcggccaccgccatcccatccagcgag

SEQ ID NO: 200964 - DNA, 202 bp, Homo sapiens
  chr7:45928147-45928349
  hyper
gagcactggccaccgctccaccatcacttgcccagagtttgggccaccgcccgccgccaccagcccagagagcatcggcccctgtctgctgctcgcgcctggagatgtcagaggtccccgttgctcgcgtctggctggtactgctcctgctgactgtccaggtcggcgtgacagccggcgctccgtggcagtgcgcgccctg

SEQ ID NO: 200965 - DNA, 173 bp, Homo sapiens
  chr7:47294081-47294254
  hyper
ccaggctcaggtcgcggagtagcggcgctccggaccggcggaacacggcgtcctcggctcagcttcggaagcgcccccgccccgcccggcgagcccgggaatggcgcgcgcgccccctgccggccacaccgggaccagcggcacccacagagggcgcgcgggcagggcgcgag

SEQ ID NO: 200966 - DNA, 335 bp, Homo sapiens
  chr7:47621011-47621346
  hyper
aaagggaaagagacgcactggagagcttgcctagaaaaagtaggagaagggtcttgagcctgcccattgaagcccctagctgcgctctccacctggagtctcgagacggagtcctagggagcaaagtccgctcggtcccgacagcgactgcgacatagctgctccggtctctgccctcagtccagggcgcccgggcgccacgggtcccactcgagtggtcctgcgccccagccagtccccaaacccagccagtcagcgcccccgtccccggactccggcgaagctggcccgcgccccagcccctgtcctgggactcctgccgagcccccgccccc

SEQ ID NO: 200967 - DNA, 221 bp, Homo sapiens
  chr7:47621699-47621920
  hyper
ggctccgagtagcgcgcgggcgggcccgtcctcctggctggctgccggcgcccgcggcagggccccctcgaggcggcgcgggcaatcgccacggccggcccccgcgcccgcgccccgagcctggcgggtcacctggcctcatcaccctaacaatgcagcgcgcctccaggcgcccttcaccggggtcccccgccctgccgaggtgcgccctgggacctccc

SEQ ID NO: 200968 - DNA, 55 bp, Homo sapiens
  chr7:48075904-48075959
  hyper
catgaggaacacaagcaaggaacttcagggcgccacgcaccgctacgctccctgc

SEQ ID NO: 200969 - DNA, 262 bp, Homo sapiens
  chr7:48127995-48128257
  hyper
ccgggcctctaggtcgtcttctttcccaggctctgtgctctcaccagagtgcgcgttcgggaagcagggagaggaccaggaaagacgcctgagacggagagtgggcaccggccgggggcaggcaggtccggcccctgggggtcagagtgcagcgccggtttgaggcagttcggccacttagctgcgactcgaagtgaatgagtcacttcccctcctcgggcgagctcctggctttgccccagcaagcgggaactcccaggat

SEQ ID NO: 200970 - DNA, 116 bp, Homo sapiens
  chr7:50344738-50344854
  hyper
ctgagcagccccgctgtcaccaggagaggagttctagctcccaaccatatttaaatttatgtagacctacatatacccacggaagtcagcctttataaagtcgtgtgtaaagagtt

SEQ ID NO: 200971 - DNA, 55 bp, Homo sapiens
  chr7:50860138-50860193
  hyper
cctaatttccataacgcacatgctccaaggcagtcgtcaggcaggcgtttggaga

SEQ ID NO: 200972 - DNA, 208 bp, Homo sapiens
  chr7:50861127-50861335
  hyper
cgcttccctctctgcctcctcccgacctccccaccccctcgatgggctttaaactcgcccggccccgcccgccctccccgcctctgccgccgccgccgcctccgcctccgcctcctcccccggctacttttcctgctcctcctcccgccgccgccgcccggaccgctcggcggccgccagcgcgggaggagccggggcctgggcgcag

SEQ ID NO: 200973 - DNA, 110 bp, Homo sapiens
  chr7:50861531-50861641
  hyper
aagcgaactgtttgaaacgcacaaagtattaactgcgcagtccagatcctttatcctgggcgcagcaggacgggacggaagagctggggctgccccgtactctgtcgtgg

SEQ ID NO: 200974 - DNA, 362 bp, Homo sapiens
  chr7:51383392-51383754
  hyper
cagcctgcaccgctggccgggatgagcacggcgcacctggctcggggtctgaataatgagcagggctgctcgtcctgtttgagggaaattactctttctgagagtcaaatcctgaatgtgacgtgtaatccctgcacgcaaggtgtggggatagcaaacagaaaccgggagaggtttgggcaaaagcggaatcgcgaagacagggatgggccgccagactcgcgggtccgctacggatgtctgcgcctcaggcctggccccactaggacgccccttccactgccaggggagaccctggaataaaggcagggagggagagctgctgccatgaaaccctccgggcaatccgaacaccttccgag

SEQ ID NO: 200975 - DNA, 461 bp, Homo sapiens
  chr7:51383790-51384251
  hyper
ctcccctccacgctgccgggagagccgatcctggggctgccgccgaggccgggagagggaagacttgatgggaaccggccaggggcaagcccgcagggaagaggccggagtcaaaggccgggcgtcccctcgctccccgctccacccctacggcaaacacttggggggcctgaggaaagctcggagctgagtgggggctgtgctggcggggacccccataaggacgcctgcatacaaaccaccccgcgcgaaaagtgcgctccggccccggcccgacacggttacctgggcaacgacccgggtgcccaaagtacacagcacgcaccaccacccaacaccagcacccaacaccagcaccgcaccacctgctccaccactaccaccagcacccgctggggcggcagagagggcgccctgcccgggagcgcgcggtgcggacgcgggcgtccgagcccagggaa

SEQ ID NO: 200976 - DNA, 140 bp, Homo sapiens
  chr7:51384951-51385091
  hyper
atccgtgcagcaaatgtctagtgcgtagggtcgcaaagtgggagtcccgaccgggagcgtcaggaacacctgggaacttgttagaaatgcagatttctggggcccaccaggtcccacggaatcagaaacagtgcgggctg

SEQ ID NO: 200977 - DNA, 67 bp, Homo sapiens
  chr7:54610336-54610403
  hyper
gactgagcctgccatccactcgcacgcctttctttcagggcttttcggctgttggctacactgatgt

SEQ ID NO: 200978 - DNA, 206 bp, Homo sapiens
  chr7:54614533-54614739
  hyper
aggtcaccctgacggccctgcccggagccgcgaaggctatgctcgcgtgggagcgggtggtcgggcgggcctggcgcgggactgagcgttcgctccttgcccgcaggtggagctcttgcccgacagagacccggacagcgacgggaccaagatcagcgtgagtgcggggcgcgccaagggccgcgggcccaggctcgggacgcaca

SEQ ID NO: 200979 - DNA, 34 bp, Homo sapiens
  chr7:54614777-54614811
  hyper
gcaggacagccggacagccgggtgccccttgctt

SEQ ID NO: 200980 - DNA, 294 bp, Homo sapiens
  chr7:55086689-55086983
  hyper
cgcctcggcccgcgcgagctagacgtccgggcagcccccggcgcagcgcggccgcagcagcctccgccccccgcacggtgtgagcgcccgacgcggccgaggcggccggagtcccgagctagccccggcggccgccgccgcccagaccggacgacaggccacctcgtcggcgtccgcccgagtccccgcctcgccgccaacgccacaaccaccgcgcacggccccctgactccgtccagtattgatcgggagagccggagcgagctcttcggggagcagcgatgcgaccctccg

SEQ ID NO: 200981 - DNA, 144 bp, Homo sapiens
  chr7:55087803-55087947
  hyper
tcgttggcaaaaggcaggtggggtccgacccgccccttgggcgcagaccccggccgctcgcctcgcccggtgcgccctcgtcttgcctatccaagagtgccccccacctcccggggaccccagctccctcctgggcgcccgcgc

SEQ ID NO: 200982 - DNA, 82 bp, Homo sapiens; identical to SEQ ID NO: 44222
  chr7:55087982-55088064
  hyper

SEQ ID NO: 200983 - DNA, 115 bp, Homo sapiens
  chr7:55593336-55593451
  hyper
ccaaggttcatcttacgtggtactcgatcatctaggcagaagcaatgctaccaaacctctcgagaacaaaggttctaaatatgtaatccttacatgtgtacggtatttagttttc

SEQ ID NO: 200984 - DNA, 189 bp, Homo sapiens
  chr7:55639104-55639293
  hyper
ttcattaatttaacgcaaatttccttcagaataatgaaactaaggagaaagttgaacaagccctgattcagactggacaccccagaattcctctagttcgcattttaaggaacctgctttagtgagaagtatgtggccccatccgaggatgcaatttcacagccaggagcagccgcggtccccgccagg

SEQ ID NO: 200985 - DNA, 261 bp, Homo sapiens
  chr7:55640523-55640784
  hyper
ccgctcctggctctccccgctgttcctgcgcgcagcgggggcagtgcccccacacccacgcgtgatgggaaggccggcctgggggtgggaaggcccaccgaaatagatggtccccacacctcactgcttccttggatgtggctattttttatgccagtgttctcctgctctgaccctacttgaacttgaccgcaaccggccccgccttgcaggccaccctcccgcagcagaaaactgtgcggagctcgcgctgtcctcgcc

SEQ ID NO: 200986 - DNA, 78 bp, Homo sapiens
  chr7:63767196-63767274
  hyper
ggcgaccagagagccgggagccgttaagagactacaacgtccccgcacgcccggcgaggtgcgcagcgccctgcctct

SEQ ID NO: 200987 - DNA, 213 bp, Homo sapiens
  chr7:64348755-64348968
  hyper
gagggagagagagcgagctgtaagggaagcaggtgacacggggctggacagggaagggcctggctctcaaggaagggagcttctccaggtggcttcctcctctgtcaaatgggcccacgaataccctattgatggtgagaattaagagatacgaaacccattcgttctttattatgatgatttttattttcacagtagcacttagcacctgcc

SEQ ID NO: 200988 - DNA, 192 bp, Homo sapiens
  chr7:64349139-64349331
  hyper
aaacgctgccactgccgactccatgctgccgggaagtgcactgtggaggccactttctggaaagaagaaaccgtctgaacacaaagttgctcaagccatgttcatctatctgccagggaaacggaggccctgagtgccagagtccaagtcaccctgcaagagaaaactctggtggagcccagggtgtccagc

SEQ ID NO: 200989 - DNA, 412 bp, Homo sapiens
  chr7:64349470-64349882
  hyper
acagtccgggctccgggagccaagcagggatccgggcctcgttgcggaggggacgcccgggctgagctgagctcacttgctggcggcggcagcccctgcagtcatggggtcaccggcttgtggagaggggctggcgctgttccttggccccgctccccgcccgcaaagggccgggaggtcgggctcccggcagtgtccaggctctcgcccgccggtgcctgagccgtacccaccgcgtcccctccgccccaacagctggtgctgagggtccggcccggggtcatctggcagggccgtgcggctcctgcgggtgaccaggagcgcggagccccttcccactcgggctcgggtggcctcacctttcctggggctgcgtccccgcgggacgccaggttcccggtttcttctaggt

SEQ ID NO: 200990 - DNA, 70 bp, Homo sapiens
  chr7:64734126-64734196
  hyper
ccctgtccataaagcgcactaatgctggggacggtgggtgtgggggagggtcctggagccttattcaatc

SEQ ID NO: 200991 - DNA, 120 bp, Homo sapiens
  chr7:64974034-64974154
  hyper
gagtctgccgctcccgccctcagagccgcggcggcgggagcagaaagccgcggcggcaaaaagcggcggcgggggcaaaaagccgcggcggcagggggcaaaatgccgcgggagcaaaaa

SEQ ID NO: 200992 - DNA, 60 bp, Homo sapiens
  chr7:64974448-64974508
  hyper
cggcgggggaaaaagccgcggcggagtggggcgaaaagcagtgggagctggggcaaaaaa

SEQ ID NO: 200993 - DNA, 50 bp, Homo sapiens
  chr7:65037711-65037761
  hyper
caaaaaggcgcggcggcgggggcaaaaagccgcggcggcggggaccaaaa

SEQ ID NO: 200994 - DNA, 469 bp, Homo sapiens
  chr7:65509043-65509512
  hyper
gagagaaggagggggcacattgaaaggcagccggacacggaggtgctcggccccgcaccccagacacaggttgtggaggttcggaggggcttgagtcccgttcgtccctgtccctatcccggggccctcccggacagggccagccagccccctgccctcacttccgtacgagggtcgcccagtccccacggctctcggctctcagaggtccaactgttaggctcctcgcgtaccaaaagggacgcgtccagactagagtctggacttccatgaggtccagactcgtcgcctctggctgccagcagacaaggaacttcacactctacagctctccccaccgtcgccaacagcgccaaagtgccagctccgcacgccaaggtgcaagccaggagcgccgcgcttcatgccgggagcttggcggactcggaacctcgcgccgcaggttctcctttctcgggggtgggggtgt

SEQ ID NO: 200995 - DNA, 65 bp, Homo sapiens
  chr7:65509542-65509607
  hyper
ttcgcccaggccgacttcagactgctgagcgtttgcggacaggattatctcgtgttttctattgt

SEQ ID NO: 200996 - DNA, 38 bp, Homo sapiens
  chr7:65541037-65541075
  hyper
gaagcttccggacgacgaggaaccgcccaacatggcct

SEQ ID NO: 200997 - DNA, 37 bp, Homo sapiens
  chr7:65579919-65579956
  hyper
tggcagctaggggcgacgaggcgggacgtcatggaag

SEQ ID NO: 200998 - DNA, 137 bp, Homo sapiens
  chr7:66094049-66094186
  hyper
ggatggtggtagtcacggggcgggagccagacagccgtcgtcaggacggtgccatgtccagctctgacgccgaagacgactttctggagccggccacgccgacggccacgcaggcggggcacgcgctgcccctgctg

SEQ ID NO: 200999 - DNA, 170 bp, Homo sapiens
  chr7:69062189-69062359
  hyper
agtgccctgaaaaacgcacagctattttacccagagaggctggtcgcttttgttgatcgattctcggctgcagtcagctctttaatacaactttttatgagcatcagccacattgcggcgggaggaggggctgtggtggaaaaagcagggaaaccgccccccactcccaa

SEQ ID NO: 201000 - DNA, 421 bp, Homo sapiens
  chr7:69063038-69063459
  hyper
cacgcccccgcccccgcccccctcacagctccccaccgcccccagtgcgcaggcccggccgccccagcgcgcatgccctgggctcgcgagcgcggccagcccccagccttttgctttctacacactctacaactggggagggggcgggggaggagggagcccagccgtccacgtgatcccgccggccggggccgcgggggcgggagcgcgcgccgagagaggcgcggggagggcgggtgcgcgggagcgcgcgcactcgagcgagcgagcgaaagcacgaacgagcgagcgagcgagcgagcgagcgggcgggcgcggggttgggctgaggcgggcggcggcggcggcggcggcggtgggctggccgcggagggggaggagcgggagctgcgcgaggcaggcgggcgggcggaggatgggg

SEQ ID NO: 201001 - DNA, 318 bp, Homo sapiens
  chr7:69063552-69063870
  hyper
cgttagcggcggcggcgagagcagcgttcccggctgcgcttctccctcaggcggggcggcgagagaagcggcggcggcggcggcggcacaccggtgtctctcccgctggagatttctttctgctttcctcatcgactgactgactcaccccctcccttttttgaggaagggtgacctcttctctgggactggaaaaaatatttttgtgaggaggggggcgggtggcagcgacagggtttgcttcttctcttctttcatctccctctcctcccccctcgaagaccgaaaagcaaaccccacaactgctccagcagcatc

SEQ ID NO: 201002 - DNA, 282 bp, Homo sapiens
  chr7:69063900-69064182
  hyper
ccgccgctcgcagtttcgccctctcttccgctaatgattgcattattatgctcccctctctggggggtctcgcccctcttgggtcgctccggagccccggcctcccctggctgcatttcttaaaaatttgggagcctgggagtgagttttctccgaggcgtgtgtgagaggcggcgggggtgttttcctgcgcgaggggcgggtgaagttcattgcccccacttttcccgcgacctttttcggacccgattttggatcgagttgaggggggcgcgggcgttt

SEQ ID NO: 201003 - DNA, 177 bp, Homo sapiens
  chr7:69065161-69065338
  hyper
ttcctcgctcgcctttcccctgcgccccctccctgcaccccctccacagcagatgggcagaaagaaaggggttcgggcatcacaacaatgcgccccctctccacagagagctctgcccccactccttcctcctctccctccccaatcatggcttcttggctggtggaagtctctttg

SEQ ID NO: 201004 - DNA, 120 bp, Homo sapiens
  chr7:70060895-70061015
  hyper
cccgccccgtgccttgccgggatggcagagcggatcagaagctgcgcgcgctctgcctgcgcgctttgcctgcgcgctttgccgccgcaacccgcgcagcagccaatccgctggtgcact

SEQ ID NO: 201005 - DNA, 106 bp, Homo sapiens
  chr7:70061149-70061255
  hyper
cgcgggccggggcggggctggggcgggcggcgcgcagctcctgggccgaggcatccgcgagccgcgggtagatcgctcgcgtctgatcgccgcccgggagctcccg

SEQ ID NO: 201006 - DNA, 177 bp, Homo sapiens
  chr7:70597658-70597835
  hyper
tgggacgagcaggggcttggatccctgccggccgtctggtgtgtgaggcttgcacggcccctggctgccccgcgcctcgccggagcccgagggggcgcaggtccggggcgagggccggccgggctgtttgatggcttcactgagaagagtcaaagtgctgttggtgttgaacttgat

SEQ ID NO: 201007 - DNA, 37 bp, Homo sapiens
  chr7:71217332-71217369
  hyper
ttgcacccagctctccgctgcctcctgccctgtctgc

SEQ ID NO: 201008 - DNA, 463 bp, Homo sapiens
  chr7:75931592-75932055
  hyper
attctatctcacacgcgtgtggttccaatcctgcctctgccacttctcagttgtatgccccaacccaacctgtctggctctgtcctccttaacagaaggacggccctggccacgggccacagccagcaacgcttaagcaccagggccggcgagtgccctgccgtggcacggctccagcgtcgcgctctcgaattcatttgctttccttaacgagagaaggttccagatgagggctgaaccctcttcgccccgcccacggcccctgaacgctgggggaggagtgcatggggaggggcggccctcaaacgggtcattgccattaatagagacctcaaacaccgcctgctaaaaatacccgactggaggagcataaaagcgcagccgagcccagcgccccgcacttttctgagcagacgtccagagcagagtcagccagcatgaccgagcgccgcgtccccttctc

SEQ ID NO: 201009 - DNA, 300 bp, Homo sapiens
  chr7:75932295-75932595
  hyper
gcacactgcggaccgctggcgcgtgtccctggatgtcaaccacttcgccccggacgagctgacggtcaagaccaaggatggcgtggtggagatcaccggtgagcccccctgctcctgcaggggagaggaggaggctagcagggcgggcagggccgggggcgtgcggttgaaacgggggtcccgggggcctggggagttaaacgttggcccagcaccgggaaaaacaggactcctgattcccttgctcaggaattgggagtgcgggtcgcttctaagggcgctttctgctctgtaatccca

SEQ ID NO: 201010 - DNA, 240 bp, Homo sapiens
  chr7:75932655-75932895
  hyper
gcaacatagcgagacgcgcccccccgccccgaccccgcgccattacaaaaaaaaagcaaacaaaaatttttttaaagatcatcgatgaagagagaaaatgcgcttttctacagagtccccttcccacccacagccccatccccagataagcggggagttccctggcgcggtgccagtttctagccgctgagtgggcgtgtgcgcggctccaagtgcgcctgcgtactgctcactccccag

SEQ ID NO: 201011 - DNA, 148 bp, Homo sapiens
  chr7:77428716-77428864
  hyper
agatgtcagctagcggccggaggagcgggctcgggagggggcggcggctcgcgcgctggaggaggtggaaggagggtcgctgccctgccccctctgagcaggcggcagtcgagttttctgatcccaacacggcggagtgggtgcttaa

SEQ ID NO: 201012 - DNA, 36 bp, Homo sapiens
  chr7:77649269-77649305
  hyper
gagaactccagggggcgggttcgtctgtggacggga

SEQ ID NO: 201013 - DNA, 235 bp, Homo sapiens
  chr7:79081510-79081745
  hyper
gagtaaagtccatgcggacaaccattcatctcctccgacaaccattcatctcctccgacccccgcccagcactagactgcgctcctagcaccgcgccttcttccggagcctcctcccccgggctggctaggggtgagcgcaggggttagtcagtacgcacgtgacgcgcgatgcccacatgacacgaccgtgagcgggggagggggacacggagtgaagaaggggaaaagttaca

SEQ ID NO: 201014 - DNA, 64 bp, Homo sapiens
  chr7:79081892-79081956
  hyper
cttctcttcccagacccgctggtgatgccgctgcaccctgaagttgctccttccttctttccct

SEQ ID NO: 201015 - DNA, 258 bp, Homo sapiens
  chr7:79764213-79764471
  hyper
gagattcaaaaccccaaacccgggacttgggggcgctgagccgggccgggaagcagagcctggtcgtgaggaacagccgcccgttgctgtctgcccctttgcggacagcgtctccctcgactccgcttaggaagtggtgggggcggcgtggcccccgtcgggaggcgttcgaacgcccgctaggagagagaaaggattcccctgtgcttggagcccgcactcgggcgcggagggagcggcggcaggctctcgctttcg

SEQ ID NO: 201016 - DNA, 216 bp, Homo sapiens
  chr7:79764712-79764928
  hyper
gcgggagctgggtccggcggtgcggaggcaaggcgggtccccctctcccggtgtctggtctctctccgccccggcgggcgaggactccccgcggcggggcgggcgcgtcacttcactcggatgctttcgtgcgacccagcaaagagcccaggcgcgagtccgaggcggcgggtcgcgtggaaaccctttgctttgaagtttagctcagccttgtaa

SEQ ID NO: 201017 - DNA, 351 bp, Homo sapiens
  chr7:82072703-82073054
  hyper
ctccgacgaggggccgatgagcaaagattggaaaagtgtcagagtcaaggccagcaggcagccagcagccatcttcgcgatcgaagatcaatgccccctccctgcccaagcgggggaaggagcggcgctggaaaccgcgggcggaggaagagcagcacacgccgccgggaccgcgggcgtctggagggctggctgcgcccggggcccgaggcgcggagccgcgcgggggacggcaagggcgggagcggacgccgaggaaggggcggtggcgggcggacccactagcgtgcgtcggctgctccgcgccgcggccgccttgcctccgccgccatcaagggcgactttggaaac

SEQ ID NO: 201018 - DNA, 176 bp, Homo sapiens
  chr7:82073319-82073495
  hyper
cagtcgggcggagacgggccgggagcagccctccatacaaggcagccaggaactcccaaagtcggcgccggctcgctcccgccgcccggcgtgcgcaggcggagcggaccagccccgcggggctcccgggggacggccagccgcccagcgggcatccacaggctgcagaggctcca

SEQ ID NO: 201019 - DNA, 55 bp, Homo sapiens
  chr7:82073533-82073588
  hyper
cacatgcaggcagcgttcccccccagccctactcccaggcgcagaatccagtgcc

SEQ ID NO: 201020 - DNA, 281 bp, Homo sapiens
  chr7:82791563-82791844
  hyper
catatatgtaccgccgtgctggcacatacaggctggcacatatgtgcacgggaagctgtacatatatgcccggacatatacatcatgctgtgcatgcctgtgcatggaaggcgactccgcagcggccggggggacgcttcccttgggcagcccctgcgcccttgacatgacagcggcgatctgtctcctctcctcttcgctcagctggctcaaatccgcctccatgccggccgggatcgcggtgtgagaggggctccccgccccgctagctcctcctccag

SEQ ID NO: 201021 - DNA, 93 bp, Homo sapiens
  chr7:83277832-83277925
  hyper
gtgataatgtgccccgcggatgccatgctgccgtgttcaccgtccaagccctcgctcctcactttaaggagggtctgagttttacttaggact

SEQ ID NO: 201022 - DNA, 258 bp, Homo sapiens
  chr7:83277959-83278217
  hyper
gaaatcgaacgcgttgtcatcagaaagcacagttccgaagtgccatttgtcaggctgtatttggctatgtaaaacctttctttcctcgggacagttgtttataagccgggagcaagaggacattccaaagagtgagtcttcagagccatgtcctgtctagagcgctcttcagcaactacgccggtagattcaggaagaagctgtatttttcagtcacttgggcaaagctgttcattcagaaaaaaaaaaaaaaaagag

SEQ ID NO: 201023 - DNA, 254 bp, Homo sapiens
  chr7:84815451-84815705
  hyper
ttccttgcccctttcccttctcccagaccaacaaggaaaggagcgagcgagggcgcagatgccctttggtcaagtactccccggatgttcccgactaaagcgtctccaaatgaacctgcagcctgcggaagccggggacacattcatagacgctctctgctgcccagaccaggaggggtggtgggggaaccaggaagccagggagagagcaaagttcctggacgcgtctcaggaggaaaactttgtgcagtgct

SEQ ID NO: 201024 - DNA, 41 bp, Homo sapiens
  chr7:84816488-84816529
  hyper
ccctgctgcgcggaggctgccagcagcgtggatttagaggt

SEQ ID NO: 201025 - DNA, 164 bp, Homo sapiens
  chr7:86273044-86273208
  hyper
atttgggagaatgcgaaaaagcagcagcccagcattcccggatgggcgtggcttttctccaggggctgtccaattgaattccttcagagggagaagattgataagggttgctaggaaacaggagcgtctgcctcccgcctgacccagagattgttctgcacaaa

SEQ ID NO: 201026 - DNA, 148 bp, Homo sapiens
  chr7:86848939-86849087
  hyper
tcggggaagcgctggcgccagggatgggtgggggctcacacgcggggaacgcgactgctccgccccggccccgcgcacctcctcatcttgagcagctgccgcaggaagtgaaaggaaacaaacactgcgtggcagactctcagcggga

SEQ ID NO: 201027 - DNA, 109 bp, Homo sapiens
  chr7:86849527-86849636
  hyper
tctaccccagggccggcgtgctcgccgcagctcccgccgctgctctccccgcgctctctgccggaactgcagcaggagtacggtctaggcacagcgagagggagaatcc

SEQ ID NO: 201028 - DNA, 31 bp, Homo sapiens
  chr7:87104710-87104741
  hyper
cccagttcaaagtcgccctccgcgctcgtgg

SEQ ID NO: 201029 - DNA, 60 bp, Homo sapiens
  chr7:87258398-87258458
  hyper
tgagcgcgcagctccttggacaggggcccgggtctggacaccgtcgcagccctggacttt

SEQ ID NO: 201030 - DNA, 481 bp, Homo sapiens
  chr7:87849420-87849901
  hyper
ggggccgccccagagcgcaccacgcgggcgtgggggacgcgctccgcagtcgtctccagctcttgcctgtgcgcgcggccgtggctcccctgcctgcgcgcttcttcgtatctttgccattacggcgctaatgcagtgcacgactgaaggtccagtggcggcctacgacctgcgaggcaattcacaccagggactttcctccctccaaaactaatggcacattccaacaccaatacaccaccccaggaattctttttttttttttttccttcggacttggctattatctggcacatttcttattttaaacaactttattggacaggacggagctattataagcggagcgcaccatcgcgaggcaggggctggatgcgttagggcaagccttaggtgccagtgggtgaaggagtctttgaaagatggaaatacgaaagcgcccttggaaaataagaattaacttgacgaactgtgtgcaagg

SEQ ID NO: 201031 - DNA, 120 bp, Homo sapiens
  chr7:87936000-87936120
  hyper
cctgttcttcagtgcgatgggctggggagtggggtcctagcagcagggactggaggtgagctgaagcagataagggacgggagccttgtggcgaaaagtgacccacctgagggagaggcg

SEQ ID NO: 201032 - DNA, 209 bp, Homo sapiens
  chr7:87936226-87936435
  hyper
ctgctataagaagccagagaagggcgggacggtctgctggatttcgcaagagaagcggaaaagaacttgtttcctggaagagttcaagctgagaatcccagcagctggaaggaccggaacttctatactgcggtgctgctgatggtgccgctgacccccgggaagcggggattttaagggttacacccgagcccttggcatctgtgcat

SEQ ID NO: 201033 - DNA, 195 bp, Homo sapiens
  chr7:88387787-88387982
  hyper
ctgagaggaggtgaacctttaccttctcccaggcacagacaaggcgaggtgaggcagagatggattgcagaaccgcattaagcaaccgcggggtggaggagagtgcagggtgtctccaaaccctgggagggctatcttctcctttcagagcacatttctgcccaggtctttttattctcagtgcagctcgctccc

SEQ ID NO: 201034 - DNA, 36 bp, Homo sapiens
  chr7:88388246-88388282
  hyper
cgcatctaatctgtctgccctatttgtggctgcaca

SEQ ID NO: 201035 - DNA, 126 bp, Homo sapiens
  chr7:89783802-89783928
  hyper
acctctgggcagcagcggcagccgagactcacggtcaagctaaggcgaagagtgggtgagtcccttgaatcgttctcactggccgtttgctcctcgagtccgcccgcgtgtccctgcaaggctggg

SEQ ID NO: 201036 - DNA, 196 bp, Homo sapiens
  chr7:89840694-89840890
  hyper
ggggtgggaatcgcgtaagaaaagcaatttctagagcggaaaggtgaccccacattacaaaaagaaatggagtagaaaaataggcttgactattctaaagctgcttcagaaagaatctccggaagaccacggaggaaccccgcaggggagccaggcggatactcagccgctcgcggtagaagggcgcgcaaagctg

SEQ ID NO: 201037 - DNA, 91 bp, Homo sapiens
  chr7:89841066-89841157
  hyper
cgggccctcggcgccacgagctgtccgggcacgcagcccctagcggcgcgtcgctgccaagccggcctccgcgcgcctccctccttccttc

SEQ ID NO: 201038 - DNA, 54 bp, Homo sapiens
  chr7:89841396-89841450
  hyper
gcggcggagttgagggtcaagatgcagtctgcgccacgcgctgcatccatcctc

SEQ ID NO: 201039 - DNA, 753 bp, Homo sapiens
  chr7:89874391-89875144
  hyper
gcaagcctgcaaactcgccctgccgggcgcggagtgcaattaggctttggggtggtttggctctccggctttccgtagcctctggccccgccccctagcaacgcgctggcttgtgttaacaaccggcccgggatcagaggtctgggtcaactggggggcggcagcggcgctaagcggactgtatggcggtggcctaggcccctggcggaattttgggacctttcgcgactctagcgactctcaggctgccttcccttctcggtggcggggcctctttgggcccagcggctgcgggcgcactgtaggacaggaagatccccccactctccaccccgccgccaccggccatgtggacagaggaagccggggcgaccgccgaggcccaggaatccggcatcaggaacaagtctagcagttccagtcaaatcccggtggttggggtggtgacggaggacgatgaggcgcaggtatgagcaggtgtctgtgctttcagaggtggagggggtgggagtgaagtctcgagacggggtccagacctgggggtggcaagggtggaactggggacaggagtgaagatgggggaagccgcgggatggagattccaagcgcagagctaatcctgatcccccaccccctgcgaactgcaccggttgcgaggggctggctgttgtcaaccatcctgtctggggaccagcgctgtgtggtcctcctggagggtcctagcaaactgagtaggcggggttttgccgcgct

SEQ ID NO: 201040 - DNA, 211 bp, Homo sapiens
  chr7:90226057-90226268
  hyper
ccccagcgcccgctcccctcggcctgcgcccccgccgcgttcctggcaccagccatgcagctgccagcggggctggcgtggggtgcgttgtaggcggggatcgagggcacagtgctagggacccgggggagggcaaggacgtaaaggaaagagacccctcttcctcaggatctgggggttcatttgtagattctctcaagcctacaatatg

SEQ ID NO: 201041 - DNA, 194 bp, Homo sapiens
  chr7:90893324-90893518
  hyper
gctgttggtaaccagcgttaagagcaggatttttaaacatgataatggataaaataaaagaaaagcgaagtcccgcggtcctctgactcctattcattatctccagcagcatatgggaccattctcctacgtatcctcgcctttttcttctgaaaaagcaaaagcaaccaagcctgtcccgcttcagagcaatc

SEQ ID NO: 201042 - DNA, 104 bp, Homo sapiens
  chr7:90894834-90894938
  hyper
aagtgtgagaagttcccggtgcacggcgccggcgagctgtgcgtgggccagaacacgtccgacaagggcaccccgacgccctcgctgcttccagagttctggac

SEQ ID NO: 201043 - DNA, 143 bp, Homo sapiens
  chr7:92219764-92219907
  hyper
ctgtggaggacaggccggctccagagatcgctgcagttggcggagcgcctgcaggagtccggtcgttcattaggcacccaagagcaggcgacgctgcgcttctgcaccggagccccaccaaggcagctcgcttcagtttggcc

SEQ ID NO: 201044 - DNA, 1229 bp, Homo sapiens; identical to SEQ ID NO: 44386
  chr7:92462187-92463416
  hyper

SEQ ID NO: 201045 - DNA, 247 bp, Homo sapiens
  chr7:92463701-92463948
  hyper
cggaattctctctccggctgggaggacctccctggtggaaaccttgggaagaccagccatctggtcggggagggttggggcttatcgggggtgggcgagcgagcggtcctgggggaggggagacaccgtcccccacgggatcccaagggtgggagaaaggggtgttcgccacaatttcgcttgtcgtctccttaaagaataacttcaggaaggggatagcataatcgcgcctcgtccttaagtttta

SEQ ID NO: 201046 - DNA, 47 bp, Homo sapiens
  chr7:92466481-92466528
  hyper
caaaacaaccaacaataattatgagcggccaatgggggtggtaaata

SEQ ID NO: 201047 - DNA, 270 bp, Homo sapiens
  chr7:92861423-92861693
  hyper
tgtgacttaggtttccgtctcgccgaagagtagctactgcctagtgcaagcacctttgtaagaccggcgatcgcagtggtcgctctgagcagtaatatttaccggcttaactgaagcacccgctcttttgcttgctgggagatgtagtccctgggttggccactttagttcatcgttgctaccgccggcgtccagaagactacagttcccagcaggcccagggaaagacaggataccctgggtcggctcctccacgtgaccacccactat

SEQ ID NO: 201048 - DNA, 57 bp, Homo sapiens
  chr7:93204160-93204217
  hyper
cccttcccggaccccgccaccccagtcagccccctcctgtcccaggagagggagggg

SEQ ID NO: 201049 - DNA, 133 bp, Homo sapiens
  chr7:93633682-93633815
  hyper
cgccggatgatggcgtcaccacggcgctcattggagccctgggaagaaggttgaaaggcattctgggaaatgtagttcaccaacgcataacgtgttgctgagggcgtgatgtgaacccggttccaggagcgga

SEQ ID NO: 201050 - DNA, 39 bp, Homo sapiens
  chr7:94536808-94536847
  hyper
ccggagccaacacccgaacaggaaggggccttgccccag

SEQ ID NO: 201051 - DNA, 279 bp, Homo sapiens
  chr7:94537598-94537877
  hyper
tgggatctattgtttcctggcacattgggaggaaaaacaaagggatttattttcattaccctgtaattttttttcttttctatttttttaaatgtggccagggagctcgtctctctccgtgtcacagtgggatccgcctggcagccgccgggagctgcagccaatgtgttaggacttcaggtgcttcttggcacaaagctagactgcgacctcctaccatagcgcttggcgtcacctgctctcccggtcctgccccagggccgagggattgcgtcccga

SEQ ID NO: 201052 - DNA, 437 bp, Homo sapiens
  chr7:95064141-95064578
  hyper
cccgagcctggggaccgccgaggaggggcgcgcgggagtcccacctacctgagtgccagaagcctctcgcccaggagcgccagcgcgatccccagcaagcccacagccaccagccgccccatggcgcgggagccgggcgcgctgcctcgctccggcctggccagcagctccgtgggcggtgccatcttcccggctcgatggtgccggccgcgctccgccccgtcctccgcctaggccgagtccctgcgtcggggccgcggaggctccgccctgggcctggccctggtctttgtcctcacaaacctatttccccagataccttcgggacggcccggacacgccttacattaggctcatgatgtgaaactttgaattccttcacttcctttttcaaacaacccacccgaaaccctctagcagcccgcatacctttctcg

SEQ ID NO: 201053 - DNA, 767 bp, Homo sapiens
  chr7:95704890-95705657
  hyper
gcagctgttgcagctacagacgaggaccacgaggtggcaggggttgccttcaatgaaagggttcggggcggtcgggaccgccggggcttcagaacatccccgcgggtctgagccgggccgaccacggttgggtttaggctccgagcatctcgcaaagcgttgccgggcgagaattccgaactaatggaaagtccggtccacctgtctggaatgtctcatacaactctgttgtctgaaaccgcctccccacccccggtcccagccaccagccccttgagaggccccctctccccccggtatttatttatgccactggacagttctagtcacattaaagctccggttcaccttctcgaggactttcatctcgggaagttttatgacactttgtgaatgtgcaaagtttttaattaggctctctagacagcccgaggcagcagcagcgccacaaagtcttcacggtctctctgctttacagcacaacaagccgctctactcctttgaagacaatgcagactatgtgtacgatgtcatgtggtcccccgtgcatcctgcgctttttgcctgcgtggacgggatggggcgcttggacctctggaacctcaacaatgacaccgaggtgagcggcggctcaggcgcccgggccggagggctgggaggggggcgcagtcggccactcgcagtctctccctctttctccaaaacggccttttttggacagaccttccaactgcagcagggctgccggcccccattcttgactaccc

SEQ ID NO: 201054 - DNA, 219 bp, Homo sapiens
  chr7:96634426-96634645
  hyper
ccacggtgacaaggagctcccacaagagtgtagtaggaccagagtggcagggacgtcaagaaaggggggcctggatttaatgcgggggtggggtcactgcttctaagcacaggcaacctacaagggtgcaaagggattgaaagagagcagcccccagttggctgtttcaaggctgagatattggcaactggggctccgggatttggggcacgagctgcg

SEQ ID NO: 201055 - DNA, 34 bp, Homo sapiens
  chr7:96653148-96653182
  hyper
gactgagtttttgaggcagccttctattcccact

SEQ ID NO: 201056 - DNA, 31 bp, Homo sapiens
  chr7:96654166-96654197
  hyper
gttaaatccttaattgcgcgcttacgcacag

SEQ ID NO: 201057 - DNA, 188 bp, Homo sapiens
  chr7:97361999-97362187
  hyper
gatgatctgaattactggtccgactggtacgacagcgaccagatcaaggtgaggccccttcccaggacggcccgcacccttcttcctgggctcgggagctgtcaccttcccacgcaacagcaccctagttaacgtggcacgcaccgccaccacggaaagaggcagcggttgcgtgcgagaggatggaa

SEQ ID NO: 201058 - DNA, 217 bp, Homo sapiens
  chr7:97501706-97501923
  hyper
gatgtggacagcttgacgggcggcgaggccgctggcgcttataccgacctggctcctgtaacgcgtgcgggaagtttcatcatgcctgcgaggaccaaccagcgcgcacaggggcggggccgcggggtgtccggggcggagcaggactaagtggggcggcggaagggcgcaaggaggagctcttttgtttccagcgccttgcgtctcagtgcgcctg

SEQ ID NO: 201059 - DNA, 236 bp, Homo sapiens
  chr7:98030420-98030656
  hyper
cggccccacctgaggcgggcggggcagacgggggcggggccgcagggccggaggggcgtggcgtacccacctgaggcggcctggtgagcggggcccggccggggtgggcggggaggaggcggggccaggcagctggaatgggcgtggccagagggaagcgggccccccgagtgggcggggtcaccccacctgtggcggacagggcagcgaggccacggtgcgccccctcgcggctc

SEQ ID NO: 201060 - DNA, 77 bp, Homo sapiens
  chr7:98971600-98971677
  hyper
ggcagagggtcaggatgggaagactccggggaccacctagcccaagacccgcaatcaggcggctctgcaaggctaac

SEQ ID NO: 201061 - DNA, 402 bp, Homo sapiens; identical to SEQ ID NO: 115310
  chr7:98971810-98972212
  hyper

SEQ ID NO: 201062 - DNA, 283 bp, Homo sapiens
  chr7:99149628-99149911
  hyper
cccggagaagtctgggatgctgggatagaaggggttgtgactttggggaccaggagcactagactcacatccaagccccctggccttcagagcccagggaaagcgtcacaaaagccggaagtgcgtcacacccgccttccggagctgcgctccgcttcggggtcctctctaggatcgcgggaggactttgcatccctgtgtagggctctaatctcgggtttggggatcttgctcctcagcttgtccgctccgaggaggtgcacagggcggggaaaaagggatg

SEQ ID NO: 201063 - DNA, 92 bp, Homo sapiens
  chr7:99155659-99155751
  hyper
ttcccaccagggacgcaactgtcagtttcctccgtctctctcggttctattccaatctgctcatctcccctcccgtccccgctttccccaag

SEQ ID NO: 201064 - DNA, 215 bp, Homo sapiens
  chr7:99156600-99156815
  hyper
ccgccgtcaggagccggcgaccgtgccctggtgcgagctggtctgtatgtcctcactggtccttttgggactttgccttggcctaaaagggaagtgggaggagggcagcgccgggcaaggccttctgaggaccgagctgggagccgggcaggggcccagggcgagggtggtgggagggggacggcaccctcatgcgtccttgggcctgaaggacg

SEQ ID NO: 201065 - DNA, 74 bp, Homo sapiens
  chr7:99156982-99157056
  hyper
atttcctagggggcctgctgttttatttatttaaatgagtttatttacgtaaacgcgggcctgtcacggtggtt

SEQ ID NO: 201066 - DNA, 140 bp, Homo sapiens
  chr7:99679773-99679913
  hyper
gcctccgaacaaaccgagttttttttgtttcttgtaaaaatgccccctttaaattacccacatctgaagaaaacattccagtccatcacagagttgacatgaggaaaaaacccgtgtacaggtgatgagagcagagaaga

SEQ ID NO: 201067 - DNA, 199 bp, Homo sapiens
  chr7:99680213-99680412
  hyper
aaaaaaggaagctacaggtggaagcgaggcggggatagtcaaggaagtgaccgtgtcctggagacgcggcaaccgtggtgaccgcagtcaacacagtaagccccagcattcgcattgtaattgagctcattcaagctgagcgctctccagtagggactttcccctgtagggagcatgcgcattttgatttcacctgtcc

SEQ ID NO: 201068 - DNA, 122 bp, Homo sapiens
  chr7:100027394-100027516
  hyper
aggagaaaggggtcggcgcacgcgcggttgagtcctcgagtagttcgggtctcgcgggcctcttgttttggtctcgcgggctagtagggcgcacttggcggggaggcgcttgggcgcgagac

SEQ ID NO: 201069 - DNA, 263 bp, Homo sapiens
  chr7:100167116-100167379
  hyper
caggaaggacacctacaggccgagcggggcgtggcaggagccagcagggtgcatggaggccccgttccaaagccctctaatcgccagcgccaccaccgctgccacaagtccgatcactggcctcacaccgaggctttctcggttgccccgacgacgtgtccggaccgcagtcagctgatcggtagagacgcccccacgctctctgcccctataaaggctcagtcttggggtcgaggccgcctctcttggacttccctactcaa

SEQ ID NO: 201070 - DNA, 66 bp, Homo sapiens
  chr7:100167621-100167687
  hyper
acccctgctggcctctccccgtgctcaagacacgagacccagccgtctctgcctcttctgcagcca

SEQ ID NO: 201071 - DNA, 143 bp, Homo sapiens
  chr7:100168054-100168197
  hyper
tgccggtgaggcccgagccccgggcttccgggggcctcgggggcttctggctgtggtttctccgtggctcgcccctcccccaggtcgccgaaagttcaaacattaaaggggcaggtttagagttctccgggcacaggcccggc

SEQ ID NO: 201072 - DNA, 317 bp, Homo sapiens
  chr7:100202528-100202845
  hyper
cgagccgcgctcctcccggccgctctctgttaacctgcccccatcttacctccccttcttctcgtcccctcatcctgagccccagacatccgagctgcctgccggggctcccagcctagagttctcctgaagctgaccgagggtctccaccgccccccacccccgctcctctctcccctccccagagcaccaattttgcggggggcggctggagaaggcccagggaaccctgaccacgcccaactggcccgagtccgattaccccccgggcatcagctgttcctggcacatcatcgcgcccccggaccaggtaccga

SEQ ID NO: 201073 - DNA, 413 bp, Homo sapiens
  chr7:100224177-100224590
  hyper
gtccatttcatcactttgatcgctcgggtcctccagcctgaccgatctatgagcactgcgtgtccaggactgggaagagagcatccagaggaccgggactgtgtaggcggggagagagaggagcgcgcagacggggccaggtccaggaggtggagccccaggggaggggcgggacactgggggcggggcgaggagggcggggcctcacccgcattatgcgcacgttgtacatgcgtgtcagtcgctcgtctctctcctccgagctgtagatctcctgccgcagcttttccgccgcccggatgtagtccccccgcgccgagtacacccactgcagggtcagcccgcgggcctggggtggggaggcgcgggctggggctggcggcaggggccaggacccccgcctagcatgggga

SEQ ID NO: 201074 - DNA, 141 bp, Homo sapiens
  chr7:100303156-100303297
  hyper
ttagggctcacagcgtgggtccccagcacagacaggaggcggacagcttcccgtgaactgcaggggagtcccgggacgctgtcctccagcgaggtggggaccggctatgtccctcagttccccctcggtcctcgggccaca

SEQ ID NO: 201075 - DNA, 1351 bp, Homo sapiens
  chr7:100424341-100425692
  hyper
agttcggggagcccgggcaggggaatgtcccgggtcgtagccagactccatctctttcccaaacaaaagaaaactccactacccgtcgggcgcctcttccccgcccccctcccgttccagcactatcggtccgaagtgtttgggactgcagtgcccgggtaggggtagtcagaggccggcccctccactccgaggcccagatgttgggggggaggtcccaggagtgacggggtgcgcccccccccgcaaggaaactcaccttccaaagctgcggccaacgaagcccagcagagcagcacccggagctccatggcgccgcctcactcgggtaggatccgaactgagtttggggggccctcgcccccccaggtctgactctccctgggcgggtggacgccgatactccgcgcgggactcctcgtcggggccctcagcgcgggcccatgcgagcgtgcggggcaccgggcggcggcgccaagtgtggccccgcgtctgtgccgcgcgcgcgggcggcgggcccggagcgtgctggcagtggccgcgccgggcgggcgcgcagcaagacgtggctggagttggggtccctccggggcctcggggtcccgccccgggtggcgggggctgagccggccgctcgcggtctccccccctccctggagtggctctgctcgcgccgccgggccgagtgctctcctcgcgggcggggatggtgggagcccgagcggggacggagcgggagggagggagactgcggcgcggagccgggcgggccgggccgggcaggggctgagctgcgctggaactgggccgggcggcgccgggcccgggagggaggggcgcgcggggggcgggggcagctctcccaacgcgggggctccgcgagtgagccccgggcgcgctgattggagctcacgctactgaataattcatgagggaagcggagaggggcaccgagtggagcaggtcgggaagttgagagaaagtttggagaagggggaggggcggcgggtgaggaaccccgggaccgcccagatgtgcgccgtggcggtgcgcgctgtccaggaccgagcatgtcggggctggggcccagggacccccgggacaggcccgaacccggctggcaccagggagcagagaaaacacacacccagcagcaacacggagggccgcccaggcgtgcacgtaaatgttcaccgcgcacacaaagcccgctctgaccttgctgcggactctagatgccgctcttggatgcgcccaccaccctctagtgggcgcagggactgcgttttgggggaaaaggaaggaaaagggagtagaagctttggagaattgacggccgcccagggggcct

SEQ ID NO: 201076 - DNA, 152 bp, Homo sapiens
  chr7:100608956-100609108
  hyper
ctcacgcgccgccccggctctgcccccaggccctacagtggagcctcgtccccagagtcccgctccaagcccatccccgttgccctacagtggagccctgccctggagctctgctccgtcgccctaaagtgtagccccgcctccttgatggg

SEQ ID NO: 201077 - DNA, 207 bp, Homo sapiens
  chr7:100728513-100728720
  hyper
tactcagagaacccgccctcaggtagttccctgtttgtgacatacacacacttagccctgaggctggactgacaggccgacctggctggtggactccagcccaagcctgccagctgcctgccggggtgggggccttggcgggagaggacggggccgggtggggaggaaggcggggcctgaggctgtgcgaggcgagtcggtgtgtcc

SEQ ID NO: 201078 - DNA, 191 bp, Homo sapiens
  chr7:100770300-100770491
  hyper
agtgagtgggtggggctggaacatgagttcatctatttcctgcccacatctggtataaaaggaggcagtggcccacagaggagcacagctgtgtttggctgcagggccaagagcgctgtcaagaagacccacacgcccccctccagcagctgaattcctgcagctcagcagccgccgccagagcaggacga

SEQ ID NO: 201079 - DNA, 1329 bp, Homo sapiens
  chr7:100806065-100807394
  hyper
gcccccggtcacccgcgggtgagctctgggagttcgggctcaggacccgggaggggggtctggcaggtcccgacgcagcccggggacaggggcagggccaaggggcagggccggggcgcatgcaaacaccgagggggagcgggcaacacggaggggggcgccggcgcgcgcgcgcggcgggggcgcgcgggggcgggaccgggaagggcagtcacgggcgccggagcagcacgtgctcgatgtaattctccagctcctcctgctcctgcagccggcgctcctccgcctccgcctcctcctgcgcgcgccgcgcctgggcctcccggccgggatagtggcgcgaaggcggcaaggcgtggtggtagtggcggcggcgcaaggccgagggcggctgcagtgtccgcggccggatgtagttggggaaagggtggtacggccctggcgggtacacctcgtcctcctcccgatcccagggcgggagcacctcgttccagtccggcagctcgtctcgtgcgggagcgggggcggggggcgggggctgcggggagcggacgtgggtgggggcgggggcggcacgggggggcggcacgggctcgggaggggcgttcttcttccgcttccgcttctcctccacctcctcgatgatgctgaccacgtcgtccgctggcaggtggagtttggtggacagctcaatgaggctgtcgatcgtctgcggatccatctcctcgtcgtcctcctcctccccgccctcctctgtcccctcggcctccttccgccggtggcccggcgtctcctcctgggagcgcttgtcctcggcgccggcttccccgtcctcctcctccgcgaacaggagcgcgttctgccgcgccctctccgcctcctccgcctctgcctccgcctcggccgcctcctcatcctcttcccccaccctctcctccccgccgcgtctctcctgctccgcctcctcctcctcccttgcactctctcgctcctccgccgcctcctgcagcccccgacccccgaggccgcgctgccgggccccgccctgcagcaaatactggagcagcaggtccgaggcgaggtcggccagccgctcttcctgcgccgcggcctgccgcgtggcctccgcctgccgccgcccggcctccacctgcgccagcccttgctggagaaggcgctcgcccgcctcggagccgcccaggagtgcgctctccggccggcgcgccttggggaacggggcggccacgccttggtacgccttggacaggggtgccaatgcctcgcctaggtgtgttttgggggaggacactccttccccgaacttgtggg

SEQ ID NO: 201080 - DNA, 101 bp, Homo sapiens
  chr7:100808059-100808160
  hyper
gcccctaacccgttgatcagcagaaggcagaagagggcggaagccgacaatctgagggctttcatgaccaagaggctgccggagactgaaaaatagaaggg

SEQ ID NO: 201081 - DNA, 190 bp, Homo sapiens
  chr7:100816655-100816845
  hyper
cccgggtgctgtctcttgaccagctgcgagcagaagcgctgcagcagcccggccacgcccttcccgcgctcccagggcgccacgcgcagcccctccaccagcaccgtctccccggcgtcgatcacgttcaccgactccagcgcgatctgcggaccgaggccgttagcgcggggccctccccgcctgcgcc

SEQ ID NO: 201082 - DNA, 177 bp, Homo sapiens
  chr7:100845024-100845201
  hyper
tcacttccccacctgcagtcacccagcggacaggcgaggccaggcggtggggcgcgcctccgtgaggaccaggtgtctgtcggcggggacaccatagcgcgcctggtgctcctcgaagagctgcgtgagtcgccccacgtagcgcgcttgcagcgtgtccacctgggccggactggg

SEQ ID NO: 201083 - DNA, 45 bp, Homo sapiens
  chr7:100845248-100845293
  hyper
cgggaggcgatctgggctgggatccccggttctcctcctcttttc

SEQ ID NO: 201084 - DNA, 178 bp, Homo sapiens
  chr7:101006949-101007127
  hyper
ggtggtctctggccgcgcccaccctgtcccttcctttcttcgcttccccaaccttcgccccctcgttccgggctccgagtagaggtggttccgaccgccgtggctggggctggggctctgcccggggcgttcggccgctcacgtggctctgccgctcacctgcgcggctgcggctttg

SEQ ID NO: 201085 - DNA, 198 bp, Homo sapiens
  chr7:101447357-101447555
  hyper
tttgttccagggagcgcgagggaggcagtttttaagagactcagtaacaggaaatttggtctattgtttgaaacaagaggtgcaaacaagtgcccgctttgaagtgctgaataacaaactctgccgggagtggaaaggcaagaggctacaagattcttgagttggtgtcaaatgcgcaagacacggggcagaggggaa

SEQ ID NO: 201086 - DNA, 336 bp, Homo sapiens
  chr7:101457433-101457769
  hyper
caggaatgtccctcggtggcaatgccgcttcccgccagaagcctgactccgggacagggcgtggcaggcgcgggggcctgggcgcgccggtgggcacgtgcgcggggacccgaggacccgaggacccgagtgtcggggcgccgctgccctctaccgggcggcgcggtcggagctacagcgcggcggccggccgactgagcgcgcgggccggggcgccccacacggaggcagcccttggccacccgagatccacagtgccctgctgtgcgcggcgtcaccgcatctagggtggaggctcgcaacgtgccccccgacgccagcgcgctcccacccacc

SEQ ID NO: 201087 - DNA, 467 bp, Homo sapiens
  chr7:101458246-101458713
  hyper
gtaaacttgggaccacgctttccgttttcagtgagtgcacccacactttccaactttctgcgcccaaagttgcaacaaaccaaggtgtctgaaccacaggaagtttcttgggctgttccgctgaagcggcgcggggggacacagaactgggctcccagacttttcctgtcgtggcctaaactggaacggcttgggcgaatgggggctgccgggacccccagcgctaccgccgttggggtgcgttcgggtgcgacgctggcaccgccgctgtccgggtgtggggcatccacgcgcgcggccccctgagagggtcagggctgtttccccctcaactccactcctccaaacatgccacgctgttcctggtcgtgtcggtgtcccggtcctcgctgggcgcagagggatcagagtgttgccgtccaccgtcggggcgcctcccacgcacgctgctgcggggggcctgggcc

SEQ ID NO: 201088 - DNA, 190 bp, Homo sapiens
  chr7:101459183-101459373
  hyper
ctcggtggcggcggcggcggccggctccaggccgggttttggcgccgcccgcctgctgcctcctggcggctcctgaactccagccccctctctatcagccgctcactccgtctcaatatgtctcaagatggcggccaatgtgggatcgatgtttcaatattggaagcgctttgatttacagcagctgcag

SEQ ID NO: 201089 - DNA, 338 bp, Homo sapiens
  chr7:101460703-101461041
  hyper
ggcatgccgggcggtggtccgcgcgcggagtccccggcgccgcggggggaccgtgccggggctccccggcccgcgcccgagtcgccgccgtgcccaaggggcgagtgcctgcctgccaccccccgcccggaggagcggcgcacccttagggtccgccccgcacgtgccagctcggcgcccgcggcgccgggacagccccgggactctgccaggtggatgttgtgcgtagccggagccaggttgaaggtgagcggcgtgtgggccagaagtcccgaggttgcaggcgcggagggaaccggggatgtcggggggtgcccgggtcccgcggcttagaatgc

SEQ ID NO: 201090 - DNA, 166 bp, Homo sapiens
  chr7:101499970-101500136
  hyper
actgagctgctgaacgctgtttttttctacgcagaaaccctcccgactttcacgaggagttgacaggttttcctcttcactcgggctcccttgtcatcgttaaactgaaactgctttcttgtagccaaattctgtggtcccttttcggcctcggcctccttgacct

SEQ ID NO: 201091 - DNA, 111 bp, Homo sapiens
  chr7:101559394-101559505
  hyper
agagaactcgatgccaccgcaacggtattggcgaaccggcaggatgaaagtgagcagtccagaaagcggcttatcgaacagagccgggagttcaagaagaacactccagag

SEQ ID NO: 201092 - DNA, 48 bp, Homo sapiens
  chr7:101671377-101671425
  hyper
gatttgcgcaagcaggtagcgccgctgctgaagagtttccaaggagag

SEQ ID NO: 201093 - DNA, 79 bp, Homo sapiens
  chr7:101713618-101713697
  hyper
attgatgcactgagtaaaagaagcaaggaagctgaagcagctttcttgaatgtctacaaaagattgattgacgtcccag

SEQ ID NO: 201094 - DNA, 138 bp, Homo sapiens
  chr7:101740643-101740781
  hyper
atcccgtaccagctttggatctcggacagcaactccagctcaaagtgcagcgcctgcacgatattgaaacagagaaccagaaacttagggaaactctggaagaatacaacaaggaatttgctgaagtgaaaaatcaag

SEQ ID NO: 201095 - DNA, 124 bp, Homo sapiens
  chr7:101747615-101747739
  hyper
aggttacgataaaagcacttaaagagaaaatccgagaatatgaacagacactgaagaaccaagccgaaaccatagctcttgagaaggaacagaagttacagaatgactttgcagaaaaggagag

SEQ ID NO: 201096 - DNA, 77 bp, Homo sapiens
  chr7:101754977-101755054
  hyper
aaagctgcaggagacacagatgtccaccacctcaaagctggaggaagctgagcataaggttcagagcctacaaacag

SEQ ID NO: 201097 - DNA, 67 bp, Homo sapiens
  chr7:101758486-101758553
  hyper
ccctggaaaaaactcgaacagaattatttgacctgaaaaccaaatacgatgaagaaactactgcaaa

SEQ ID NO: 201098 - DNA, 49 bp, Homo sapiens
  chr7:101801839-101801888
  hyper
ggccgacgagattgaaatgatcatgacggaccttgaaagggcaaaccag

SEQ ID NO: 201099 - DNA, 105 bp, Homo sapiens
  chr7:101813725-101813830
  hyper
agggcagaggtggctcagagagaggcggagaccttaagggaacagctctcatcggccaatcactccctccagctggcctcacagatccagaaggcaccagacgtg

SEQ ID NO: 201100 - DNA, 189 bp, Homo sapiens
  chr7:101821748-101821937
  hyper
gagcaggccatagaggtgctgacccgctccagcctagaagttgagttggccgccaaggagcgggagatcgcacagctggtggaggacgtgcagagactccaggccagcctcaccaagctgcgggagaattcggccagccagatctcacagcttgagcagcagctgagcgccaaaaacagcacactcaaa

SEQ ID NO: 201101 - DNA, 59 bp, Homo sapiens
  chr7:101833092-101833151
  hyper
caactggaagaaaaactcaaaggccaggctgactatgaagaggtgaagaaagagctgaa

SEQ ID NO: 201102 - DNA, 49 bp, Homo sapiens
  chr7:101837121-101837170
  hyper
cattctgaagtccatggagtttgcaccgtccgagggcgctgggacacag

SEQ ID NO: 201103 - DNA, 97 bp, Homo sapiens
  chr7:101838786-101838883
  hyper
gatgcggccaagcccctggaggtgctgttgctggagaagaaccgctcgctgcagtccgagaacgccgcgctgcgcatctccaacagcgacctgagcg

SEQ ID NO: 201104 - DNA, 672 bp, Homo sapiens
  chr7:101839913-101840585
  hyper
ggtcagccaggaggaaagggaaagaccagcctgaaagtcggcgcccgggatctttgccggccccccctccttctcagttgccccgcaacccgggggagcaggcttccaatactaatggtacacaccagttctcaccagcggggttaagtcaagactttttcagctcatccctggcaagccccagcctacccctggcttctacaggaaaatttgcactaaactctcttctccagcggcagctaatgcagtccttctactccaaggctatgcaggaagccggaagcacaagcatgattttttcaacaggtccatacagcacaaactccatatcttcccaaagtccattacaacaaagcccagatgtcaatggcatggccccatcccccagccagtcagaaagtgctgggagcgtctccgagggcgaggagatggacactgcagaaatcgcccggcaggtcaaagagcagctgattaagcacaatatcggacaacgtattttcggacattatgtgttgggactgtctcaagggtccgtgagcgagattctggcccggcccaagccatggaataaactgactgttcgtggcaaggagccatttcacaagatgaaacagttcctctccgatgagcagaacatcctggccctccgtagcatccaaggcagacaaagag

SEQ ID NO: 201105 - DNA, 66 bp, Homo sapiens
  chr7:101842081-101842147
  hyper
agaatccaggccagagcctgaacagactatttcaggaagtaccgaaacgaagaaatgggtctgaag

SEQ ID NO: 201106 - DNA, 102 bp, Homo sapiens
  chr7:101843350-101843452
  hyper
gtaacatcaccacccggatccgagcctcggagactggctctgatgaagccatcaagtccatcctagagcaagccaagagggagctccaagtgcagaaaactg

SEQ ID NO: 201107 - DNA, 845 bp, Homo sapiens
  chr7:101844639-101845484
  hyper
cagagccggcccagccttcctccgcatccggcagcgggaactctgatgacgccatccgctccatcctgcagcaagcccgccgggagatggaggcccagcaggctgccctcgaccctgccttaaagcaggcaccactgtcccagagtgacatcaccatcctcacccccaagcttctgtccacctcgcccatgcccaccgtgtccagctacccacctctcgccatctccctgaagaagccctccgcagctcctgaggccggtgcctctgctctgccgaaccccccggccctcaaaaaggaggcccaggacgcccccgggctggacccccagggagcagccgattgtgcacaaggggtcctgagacaggtgaaaaatgaggtgggccgcagcggtgcctggaaggaccactggtggagcgcggtgcagccggagagaagaaatgccgcctcctccgaggaggccaaggccgaagaaacgggcggcgggaaagagaagggcagcggtggcagcggaggtggcagccagcctcgggccgagcgcagtcagctccagggaccctcgtcgtcagagtactggaaggagtggcccagcgctgagtccccatactcccagagctcagagctgagtctgaccggggccagccgcagcgagacaccacagaacagccccctgccatcctccccgatcgtgcccatgtccaagcccaccaagccctcggtccccccgctgacccccgagcagtacgaggtctacatgtaccaggaggtggacaccatcgagctcacccggcaggttaaggaaaagctggccaagaacggcatctgccagagaatcttcggggagaag

SEQ ID NO: 201108 - DNA, 166 bp, Homo sapiens
  chr7:101847670-101847836
  hyper
gtgctgggcctgtcccagggcagcgtcagcgacatgctgtcccgaccgaagccatggagcaagctgacgcagaaaggccgagaacccttcatccggatgcagctctggctgaacggcgagctaggccagggtgttctacccgtccagggccagcagcaagggccag

SEQ ID NO: 201109 - DNA, 57 bp, Homo sapiens
  chr7:101848393-101848450
  hyper
tcctccactccgtgacatcgctccaggacccgctgcagcagggctgtgtgagctcag

SEQ ID NO: 201110 - DNA, 303 bp, Homo sapiens
  chr7:101870646-101870949
  hyper
aaagcactccaaagacctccgccagctgcagccctgcccctgagtccccgatgagttccagtgagtcggtgaagagcctgaccgagctggtccagcagccctgtccccccatcgaggcgagcaaggacagcaagccaccagagcccagtgacccgccagcatccgactcccagcccacaaccccgctgcctctctccggacactcggccctcagcatccaagaattagtagccatgtccccggagctggacacctacggcataaccaagcgggtgaaggaggtgctgacggacaacaacctcg

SEQ ID NO: 201111 - DNA, 189 bp, Homo sapiens
  chr7:101877331-101877520
  hyper
gccagcgcttatttggggagaccatcttagggctcacccaaggctctgtctctgacctccttgcccgccccaaaccctggcataagctcagtctgaaaggacgagagcccttcgtccggatgcagctgtggctgaacgaccccaacaatgtggagaagctgatggacatgaaacggatggagaagaaag

SEQ ID NO: 201112 - DNA, 265 bp, Homo sapiens
  chr7:101882599-101882864
  hyper
cctacatgaagcggcggcacagctcagtcagtgacagccagccctgcgaaccgccctctgtcggcaccgagtacagccagggcgccagcccccagccccagcaccagctgaagaaaccccgggtggtgctggctccggaggagaaggaggcgctgaaacgagcgtatcagcaaaagccatacccgtcaccaaaaaccatcgaagacctcgccacccagctcaacctgaaaaccagcaccgtcatcaactggttccacaactacag

SEQ ID NO: 201113 - DNA, 9822 bp, Homo sapiens
  chr7:101891691-101901513
  hyper
gtctcggatccgcagagaactgttcattgaggaaattcaggccgggagtcagggccaggcgggcgccagcgactcaccctcggcccgcagcggccgggcggcgcccagctcggagggcgacagctgcgacggcgtggaggccactgagggcccaggcagcgccgacaccgaggagcccaagtctcagggagaggccgagcgggaggaggtgccgcggccggcggagcagacggagccgccgccctcggggaccccgggcccggacgacgcccgcgacgacgaccacgagggaggccccgtggaaggcccggggcccctgcccagccccgcctccgcgaccgccaccgccgcgcccgcggcccccgaggacgccgctacctcagccgccgccgcgccgggggagggccccgcggccccgagctccgcgccgccgcccagcaacagcagcagcagcagcgccccccgcaggcccagctcgctgcagagccttttcggcctccccgaggccgcgggcgcccgggactcgcgcgacaaccccctgcgcaagaagaaggccgcgaacttgaacagcatcatccaccgcctggagaaggccgccagccgggaggaacctatcgaatgggagttctgaggggccgcggccctggggcgggcagccaggctgggccgcaagggcctggacggggtcggacggggcaggcgctgcggacaccgtggcctgggcttggcccgcggcctgcaccgaccccgggccggacctgagcccgcagcccagaccccctccacggtccgcggcctgcaccgacccgaggcccagatccaaggccgcggcccagacccactctgcggcccgggccgaccctgcggcctccaccaaccccgcggcccagacccagcccgcggcctggacccctggaccgctttgcgcacttaccgccctgcgggccacagggcaaaatcgccataggccaaggtgcatatagaaaacaaaggagcattaagcccaatctatgtcgtgttttcaaggaagaaaacggaaatgtgtggtcgagcttttttgtaccctgaagtgttttttttattgccctaagtgatttccacaggttctggaataactcttacagctttgccttgtgtcctcctgttccgtgtgggctttaaaagaaaaaaaatcaaacccacatattaaaagggggctttttatctgccatctaatggcttcagagcgataatacactattatcttcttaaaccaggaaaaaataaaagggggggtgggatttttcagaaaaattaaaaaagaaagtttttgtagctgttcagttgccactaagagattgcacagtcaaaacgactctaaacacactagtttggattcctaaatattttcaagaaaagaatcttctcgtttgaaactttgaattaaaataaaacacatttactccacatattttttaacaaaaagaaaacgtcacatcaggaaactctgattttgtggtagctgacatagtgttttcttgtacgtgaatagaatcctgacatgtagtgcacattgatgtatagctttaactgaccctgggttttgcagaccagggtttgtttaatacactccattctaggccaaatcaggacaaaaaaaagaaaaaaaaagaaaaaaaaaaaagaaaagatccgaatctaggtattttataatctgctttttaacctctaaccgcagagcacgctgatcagacctcatatcttggaggtttaggagacaagttagaactgtagcatgtacctgttaattttgtttaatttatggtgtctcaatctgtctgtgcgtctgcacgtgtgcaagcattgaaagaaaggagagagtagtccgggcgagcacagcaggcagttccagggccagacgggcccatccccaagtagatagcagtctacggatctctctctggcacagaaggcacctcacctcacaccactctcctggatacctgatgaactgagccctcccaggggaagacactccccaggcctgggcagggcttacacgcgcactctctctcttctttccctttttcttcccaccgcaagcactgatgaccctgttgaactcgtgggaaacttcctttctctgcaggagagagaacgtggcattctgggctccccactcccatccctgtagaaatggcccaaactcacaccaaaacgtggatgctcttcaacttccaaacctaccatttgcccttctttcatttcgcctcttagttctttttatgcacagttttagggcagtctaagtacaaactgaaagtctaacttgtctctgattcctcccttgtctatgtgtatatgcgtgagaatagaggcgggtgagagtgtgcgtgcgtgtgcgtgtgtgcaattttatacgtctgtgtattttcttaagtacctgtgcacacgtagagtgcattactgccacctttttcaataagctgttttatcagttacggcttctacaagtttgctaatttagacttctttattgccatatctttaaactaacaatagatgatttcggtatatatatatatttttttttgcttatttataggtgctgtattttattatctgattgttaggaagggatgaaaggggcaaatattctttagagggatagactgccggcagtattgggtataatttacaagatgtagttgtcatactgtatattactgattgaaaactttttgaccgtattgtgtatcattgaaacctttgtcttaggtcaacatctttggatgacattttaatggtgcattcattatttcttaagtttaattaatattacttttttttttatttggggggtgggagggagttataattttaaaggtatgctctggctgttccacctccgtgtgcttgttaattaacttgtaggactttgactgtaagatgtgaaaccacgtttcttgcatgatgttttagagattatttcatttacagtcttttaacctgcagctgcagcacttagttcacgttttcacaaatttcaagagtcactacactaaagacaatgccttttcatgaataagaagttttcagaaggctctagggggctgggaggcaggctgttcgtttgtcttttgttgggggtatcatttctgaacttgaaatccagttcagggagaagagaattcaaaattagaggagcttaaggggacacgggtcaacatctagctcgattcaggtgcattgagaagagtgagttcacatcggtgacccttaggacagtgagtggcagagccctgacgactgtggtgtcctctccacaaaaccctcaagggacttttgtcatcatgtgtgatgaatctttaaatatcgtctaattttcataagaatgaaaagaagttaacaggaaatagtaggctagggtttagttttaaaggcatgactgttatttacaaaggtgttaaatctgaggaaattgacaaatacagatttgtccattctagtggccaaacagtaacagtctaaaatgcagtcattttgaccctcccaagcaatttagtcatatgtgttgttttctcttttctgtttttacttcttagatttttaactaggttactgttggttcccattctgtcttttttgccagacttacatctggtgccagatacaatcagttggttaaattttgcttgcagttctgtgtattttttttcctctattatttatttttttaaaaaaaatagagatcctaaccttagatctttgatgtgaagctagcactgtctgtaatacttctaagagctgccactaaaataatacagcaatccgtggccaggggagcaccccctcctggttgggcccctcagttggagtctaagggttaatctctcatcttgctaagcagtattcaagtgccttgaacagtgtcccctcggcatggctccccttcagcaggctggcattccaagcagtggcccccgcaggcagccgacccccttcctcttcacgctctatgagtttaaaaagctgatttgtacctctcccctgggggaaacggttccatataaaacactaacacttaattacaagctccattatgccattttaaatggcttctttttgttaattggaggcattgttcataacttaaggcttttgccattaacttagctggctaagcagaggctcggggtaaaatcagtgtttgcatttagcctcttgacccggagttccggcccaagctcccttgtgatagccgagatggcaggtgtgtgagttctgtcctagacctgtgcccaactcacttccaccccagaggagtcttctgtcctcctccccaacccccgagctccctggtaacctcctcttgaacttctgtatcagtgaagacatctgtggtttctgctcaccagacctctctttagaaagggttatcagagccatggagcttagctcaattggattcttctagacgatcttaggaggcatcttggcatgaggcagcttctaagcgtctcctgggacaggattggggtgacagcccagggatgcatgcatgggagaactctctgagaaatgccaggatcgtggctcacagggacccaccatcaaaacctgctactttgtgcaagtaattgaggcaaaagataccagtcgacagcctccctggggtagatcccttgtacctccaaagtacaaatacctccctgctcagtttccttcctgtcgccatctttgttttcttcccattgaaaaaccatcctgtctgatgtggacgttcaggtctgctggttggcggtccgggcccagagtgcagcagagctctgggttaaatattcctttctggccaccgcccaagcccaggtggccagctctcataccccatctccctccttggccagggccagcatcaggcgtgcagctcatgaccagtttacacaggctgcaaagagatcgctgtgggcctcggctgactactttaagattatgccacagccaggccctaaaaagagaggggaacaggagtccccaggtgagctctctgacgggcaggtgccttcccgactaaggttggactggatgactttgttcctcctgcatgcatgtcctttgatgcaagggtgatcaatgaactctgttgacattctatgcaatgtttttcattcctctgattttagcaaagcaaatcttactgaaaaatagcagagccaggggaacagacgcatgtccttctgggagtcacacaaaagcagagagattttgaactgaggggcgacagcctttgccttaaatgcagtatgacaggcgcttcttggcagaccagtaaaaacaaaagcccatagaccttactcatcccaaggccgacaagccagctgtacagggcgagatgtagcaacacggggcatgagcggtgggcgtgctgggctatttgctgtggtactttaggctggaggtttggctcctgtgctgccggtggggggccctgtccctccccagatgtcctccctcttcttcacactcctcattgtcccttctacctcactaacctgtcttctccatctgatgtcacccagaaccacaccccacagaactgtgaggcacgtgggctggagagagcagaaaagctgccagcgcagcagacacgaacatccctctgcctggtgggccggctttgtgtgtctctccttttgtgagcgcaacacggacaaacagctgtgctctgcaaggcacacggatgtttcccttccacctgttcccaaagctccagcagctgtttcttttgcaggcagggcgtggtctcggggctccgagggtcttgtctttggtccgccttcctttctgtccagtcctgctcagctgttaagatccatcatggccattatccttgtcccggactgccccaaagttcccagctggctttggggaacactgtagctcttgggtgtctcttgtctctggcatggttttagcgtcactgcgaacactcctttgcaaacatcaaacatctcaaagacggaaaaggatagatggcttcctccagcctacacgccccgtccacagtggcatcaccctcttatcccaaaagaatatgccagttcccatccagcaccgaagaaaatcagctcctggggctggtggttggaggtgggtctgtccactgtgggggccaaagtgttcccctgctggagacagtttgcaagtaagaacctaaggatggggacagcatcctgtgcttgggcattgaccagccaaagctcacatttagaaagccctcagtgcttctgtggtttcacctgggcatcgacgacattagggaagcctttgtgaccacaagggcagggcttgtgccctgagtggcgaggtggtgacctgaggccagtgtgatgtggttggatctcagcgtgtactgaatgccagtctggccggcacactcgaacgctaagagaatggtccaatttgatgatcttatttctatttcgatcaggttttgactttttgtagatgaaaactaccagggaaaaggggaagcaggtacccaataaagtttagaaagatccagtctgtgaaacccttagagatgggctgaaagttaagtccaccaacccttgggcttaatcaggacggaagaggagggggtgtggggggcagagcgtaaaacaagccccagccctactcccggccccccagcccagtcttcccaatcccagaggccccggcggcctgtgctcctcaccaccctggtcaggggaatagaaggaaatgcaatttccgcctgtctgcccgacttccaaaaactgcctcctcctgcccaggcctctcccaccaccaccttccctccaaagataaccgtgtccatgccatccgtggcatcatctcgagttttcatttttggatgaagtgacatttagctttaacaagacatttccaaagcgcctagtctcctccaaaatgctaactttaaaagttgggcattgtaggcgaaaaatcccaaaaaaaaaaaaagacaaaaaaaaaaggctggcgagagaaagacatttggctatgcataaatgtgcacttcccccatgcccccgttcttaaactcttaagatgcctttgagttgcttttcatgaatccttttagtttacccgataatgttaagaaagcattagtctacgttactgtaatttctgtagtgtttacgctttaatttctaccacaaaatatgctatatgctatgtatcaagctttctgtaatcagaaagaaaaggtgccttatatcccaatgtcacggctacatccctatggaaattaatcagaagcacagtgtgtacggaagcattgggacttctgctggtgaaacaagagaccattcagcaagacacattgaagtggcacggagctgcttttgttttataattcttttttccccccttttccttcttcttttttattattttattattttttttgtactttgctttaaacggaaagcacttaaatagatgactatgtgtaaaagctctgtgcaattgaaatcatttttcttcattttaaaaaaataacgtattgcacaccaaatgaactcaaagtaagctttagaccaggacgattcaggttatgaatgagtttgttcactgtagttccgtttgttcatgaaccgaagggaaaacaggcctccccgactccctccagtctcccagcctgcctcttggtgaccactgtgctgggcgtgcagggcccgcgggctctggccggagccgctggcctgacgaggcaggatagggagtatccgtgattcagaagctgagacccttccccagtgtctgaggccacagccatcccttccagcacttaatcttgtcttgttgaaatggactgactgctactgacctgccggcgtgcgtgagggtgattataaaaggatgtttccttgagaaaaaaaaaattatttctatcctcttctatttattattaggttaatcatttaagtacttatcaggagtgtattgttattttgtgttttgttgtcataaatgctttttgctgtcactctagtggttactatcctctgccttcctctcctcccctactcccccagagaaccaaggcgtctgggggattgactggggggcagagggggtttccccagcaaaatcaaacacctgtctccagagtagccactcaaaaactggtggtctctatgtgtctaactttttaaatgagagtgtttatgaacaaaaaaatttaccaacgtgtgagggagttgctgagttgaagaatgctcgcttgaggagcttcagaggaatcttagcaaagccaagttcagttccccaaagcctcctagagcctctggtaagacttctgggttcatgaagtttcggcgagccgtggtcagagagggcgcggtggcctggccaagactttacctccaagcgagagagtgatttcttgcaaggcccgcatgggttgatacgttttggttggttttttgttgttgtttttcttgcgtacaaagttggtcaaaaccatctttcaaagcaacagtgttttgtagtaccaggctgtggcttgagggctcacctaggagatcataggcagagggcccctttcccctataggtggttcaacgtggaggaaggttgggtgtggagattgcttgctgtggccccaagctcagccagcaggacacccagttgttgccaatcaggtgtgaaggtgaggcgccctgccttgatcccatgggcccagcagaaggaaacttaccccaggccaaggcaagggccctgctcaccccaaggtaggctgggaagagcatctctttccatatcatcacctccccttctccaagattgccgggggccctgattttgttctctctttgaaagaaaccctccaccgaaacaatggtccccatctccccagaagcctttttttttttcatttttctctaattagtctatgcatttctctctctcaaaccatcttctgcctcttcccttgagaaaacgggcatctcacgtacccccatctgagacctcttggaaaaaaaaaatcccgtgtattctggagatgtgagaattcacccaaaattcttaaaacattggagaatagcttgttataaaataaaagtgggggtaaaaagaaggtggttttccccacatccctttgcattgaataagagacctagttctttgcgtttgtgcaataactctttgctgcttgccttgagagcgggtagcaccacgctcctgtccagactactaacagcacaagacgcactcacagggtggcggaatcttccggaaaactctctataagctcagctccccccaccccacccccactctagcgttttgtcacgtcttacattttagcagtattttatattttctgtaacgcaccaagtcttagatctttctagagcttgtttgttcatcctcacaatcacagatttttttctccaatcctcacagagacccaattgaccaaaaaagaaaaaaggaaaaaaaaaaagtcgtcttttttttttttttttgtacaaatcgctttgagatgcctctggtgtgttgctgtgtgacatctctctggtaacattttatttcttgctatttgtttttctacattaagagtcaaagttgacctggctggcgtgggggtgggggaggcacccgtcggccccttggtgttgtccctctgtctttggttagccatacgatgtttgttctcagcactgtacaacggtccctatataatacggagaagcaatatcactgtatgagactcacaccatgtattattattcactagcaccctaggtgtgataattgaagtaaatatcttttatacaaacacaa

SEQ ID NO: 201114 - DNA, 128 bp, Homo sapiens
  chr7:101916636-101916764
  hyper
gacgctgtgcagagctgcaagtccgtatcactgaggctgtggccacagccactgagcagagagagctgatcgcccgcctggagcaggacctgagcatcattcagtccatccagcggcccgatgccgag

SEQ ID NO: 201115 - DNA, 67 bp, Homo sapiens
  chr7:101917514-101917581
  hyper
ggtgccgctgagcaccgcctggagaagatcccagagcccatcaaagaggccactgccctattctacg

SEQ ID NO: 201116 - DNA, 113 bp, Homo sapiens
  chr7:101918517-101918630
  hyper
gacctgcagcaccagccagcggtgccctcccagagggccaggtggattcactgctttccatcatctccagccagagggagcgcttccgtgcccggaaccaggagcttgaggcc

SEQ ID NO: 201117 - DNA, 117 bp, Homo sapiens
  chr7:101921219-101921336
  hyper
gagaaccgcctggcccagcacaccctccaggccctgcagagtgagctggacagcctgcgcgccgacaacatcaagctctttgagaagatcaagttcctgcagagctaccctggccgg

SEQ ID NO: 201118 - DNA, 84 bp, Homo sapiens
  chr7:101923328-101923412
  hyper
ggcagcggcagtgatgacacggagctgcggtactcgtcccagtacgaggagcgcctggaccccttctcctccttcagcaagcgg

SEQ ID NO: 201119 - DNA, 57 bp, Homo sapiens
  chr7:101924095-101924152
  hyper
gagcggcagaggaagtacctgagcttgagtccctgggacaaggccaccctcagcatg

SEQ ID NO: 201120 - DNA, 81 bp, Homo sapiens
  chr7:101925131-101925212
  hyper
gggcgtctggttctctccaacaagatggcgcgcaccatcggcttcttctacacactgttcctgcactgcctggtcttcctg

SEQ ID NO: 201121 - DNA, 65 bp, Homo sapiens
  chr7:101926003-101926068
  hyper
gtgctctacaagctggcatggagcgagagcatggagagggactgtgccaccttctgcgccaagaa

SEQ ID NO: 201122 - DNA, 938 bp, Homo sapiens
  chr7:101926312-101927250
  hyper
gttcgctgaccacctgcacaagttccacgagaatgacaacggggctgcggctggtgacttgtggcagtgataccccggggcctcccccgtgacagtgacggctgcgcctccaccccgactgctcagtgcatctaatcacttagactcccctgaagaatcccccatggaaactgcccttatccgctgtccagcagctgccagaggccccaggtcacctcgggtccccttgaaagaatgtctcggtcacatcaggcccgctaggtccagagagcgagcccccaatgcccggccaggctaagccgcagagaccctctcagcccccacctcaggttagggctctgcccgcagcctgacctctagccctggtggcagaggtccctcagctgcgaggctaattgggtgaccaccgattccagctgcggttaatccagcttgggcctgtctgcactgcgatcctcttgggctctcctaggatccccccatgccccgtaagaggtggaagacgcttccttccaggacagcaggctttgagtccagcacccccagcctgcctttgccaccagccccaccctgcagagtatatgaggcttgacagagtctgccccctcccccactgcaccccaagagagagagccccagccagcggaacagtttctattaccccctccctgcccccagacccatgtgatttctgctttcttctttagcaagatattctggtttctagataaggaagagtctctaatgagcccccgagccccagtctcttcagactcatggattggtctgaggggtctgaacgtctcctagccaatcagaactggctgtggaccaccctagcacggccacctctcagggccactggcaggccttcctgagttagatttgtagttgcatatttagctttgcacatttgaaataaaccacggttgcagcca

SEQ ID NO: 201123 - DNA, 205 bp, Homo sapiens
  chr7:102389202-102389407
  hyper
tccgtgcttcccattggccagtggactcccatgtaccgcccctccaatagccaatggtcttgagacaaagggcgcccgcctttccagcgattctaacacctaccctcttacccgtgctcccctgcgcattgcctcctgggaaatgtggtttctaagaggcagagctctgcgacttagaactacctatcccgtcggccttagcgaa

SEQ ID NO: 201124 - DNA, 139 bp, Homo sapiens
  chr7:102921243-102921382
  hyper
cttttcttcgcgtttagtcttagctctgacattttaaccaaaaggttacacgttaattaacgaggtattgaaggggaagatctcagctgaaagaaatgactgtaggaagtgtgtcagggaagccaacggaaccgccggc

SEQ ID NO: 201125 - DNA, 101 bp, Homo sapiens
  chr7:103631018-103631119
  hyper
ctggcagcggtgattgaagcgggtggtaatgagcggctgcacatgaactgcagggaagtgaaataatccataagcacgtttttaaccgaggacggctggca

SEQ ID NO: 201126 - DNA, 165 bp, Homo sapiens
  chr7:105162864-105163029
  hyper
tgagtcgcaccagcggcagagagcgatttcaccaagcatctaagagttctttagatctttaggaagtctaaggcagcgattgcctcctttggtgttatattctaagtgtttccttcacatagttgtggccctttcacgttgcaccgaccacgcagttgacaataa

SEQ ID NO: 201127 - DNA, 137 bp, Homo sapiens
  chr7:105331662-105331799
  hyper
ccaatcactgcatccaccctcgaggagcgccccagaggaaatggcatcattactttcattttactccgtttgtgaacgactaaaggaaaacaacacgtcctaggactctcgggaacgttattaagtgacccctaaga

SEQ ID NO: 201128 - DNA, 189 bp, Homo sapiens
  chr7:105516545-105516734
  hyper
aagtagccttttaaacggacaacaccgtggggctgcgagcccaccccgcgggctgccacggggagccgggcacagacagacagacagccctggcagccgggcctctccctgtgcattgatgatctgtctctgtgtgtatttatttagagagagagggagaagcatggaggacaccgggggccactctct

SEQ ID NO: 201129 - DNA, 411 bp, Homo sapiens
  chr7:106508245-106508656
  hyper
gaccagcgtggcggcggacttctaccaccggctgggaccgcatcacttcctcctgctctatcagaagaaggggcagtggtacgagatctacgacaagtaccaggtggtgcagactctggactgcctgcgctactggaaggccacgcaccggagcccgggccagatccacctggtgcagcggcacccgccctccgaggagtcccaagccttccagcggcagctcacggcgctgattggctatgacgtcactgacgtcagcaacgtgcacgacgatgagctggagttcacgcgccgtggcttggtgaccccgcgcatggcggaggtggccagccgcgaccccaagctctacgccatgcacccgtgggtgacgtccaagcccctcccggagtacctgtggaagaagattgccaa

SEQ ID NO: 201130 - DNA, 32 bp, Homo sapiens
  chr7:106684800-106684832
  hyper
ggcaccacctctgcgggggttcaccatggcga

SEQ ID NO: 201131 - DNA, 251 bp, Homo sapiens
  chr7:106684920-106685171
  hyper
cgcctctcccggcccgggcgcgcagccctgcggtggtctgacaggcgggtgcgcggcgccagccagcggaggttgccatggtttccgggggtcacgtgggcgcgctctcctgcgccccctcccgcgcaccgcggcggggcgggggcggggcgcccgggcgggggagaggcgcggccgcggctggagcgggaggagcaggagatgctgccagccctcccggggccgcgctcgctcagccgccgccaccacac

SEQ ID NO: 201132 - DNA, 242 bp, Homo sapiens
  chr7:106685920-106686162
  hyper
ctttgccccctctgcctgggccggttggggtgggcatctgctagaaagacaactttcgctgtggttggaggtatttcgcttagaggataccattgtgcataaagaaactggcccgcttggcgtcttctttcagcccttgtatttattaatggaatgtcgaaagagaaaaggagaaccgtgtttaatatgattggctttactgttgttaggacggtagattcgctaaaagaagcatgaaattg

SEQ ID NO: 201133 - DNA, 197 bp, Homo sapiens
  chr7:106808942-106809139
  hyper
gttagcagaggcccggaggaaaagaagaggcccaagctttaaaacactcccttcctccgccccctcccttttgtcccagacaccaaaacaaacgagctgatacacgtgtccctatgactcttgtttactatcaagactgcgctgtgcgagcgcctctgggatacgtagtccagctcttccccggccagcagtctccc

SEQ ID NO: 201134 - DNA, 186 bp, Homo sapiens
  chr7:107302345-107302531
  hyper
ggcggcggagcccctgggcgccagctgcttctcccagaggcccgactttcggtctccggtcctccacgccgcccttctggtgggagggtggctccatcagtctcgggcccgaaatgaacttacctgggaaactcgcctttggggagagtgggttctaggagccccgtctctctttttcctctctga

SEQ ID NO: 201135 - DNA, 322 bp, Homo sapiens
  chr7:107531675-107531997
  hyper
aaggaaaatacagcggaaaaatgcagagctggagtcgtgtgtactgctccttggccaaggtgagggccgagtaggtgaggtcgtgttgagccagaggcacggaaggtcccgctcagtgggtccggtacgcggcttaaccgtgttgggctggcggaggcgggcgcctgggccgcaccacccctggccccgcctctgcactggctcagcccggccctgggctccgaggtggccgctcatcctgcagcaggcgagggacggggctgggcccaggctgtggcgagtcctttcgggttgtgtgacggccggcggtcacacatgccac

SEQ ID NO: 201136 - DNA, 348 bp, Homo sapiens
  chr7:107642291-107642639
  hyper
aagaaagcaaaatgcacagaaaagacaatggagagatgagcgcaggagaggctgggaaggcagggactccgaaaggagaaggacacggaaagaaacccacacacgtcatcaggtctgtccagcagcgagagcctccctcccgggaaacccaccgacgctcgcgcccaccctgatcagccccggggagcagctcccccaacaaagggtggatgtgtagaccctccacttcgacgtgtccggagcccggcgcagggaggctgacccccaaagggccacacacccacgcacgtgaacccgcgtgcacgcggcagcccgcgcatcctcggtgtgagtgtgcgcgtggagatc

SEQ ID NO: 201137 - DNA, 411 bp, Homo sapiens
  chr7:107643311-107643722
  hyper
gcaactggagaagccccatgccggctccctgcagccacggggacgcggcagaggagtggagaagacgcccgccgagccgcctgccctttcttcccgtcttcctttctggagaggtggaaaggaggggaaaaaaggcaaatgttcaaagagagaagaggcgcccttccatttcctgtcgctcccacggaagcggggggtgggctggaaagtggggaaaatcgtgcagccactttgttctcctcacccggcgacgcgagctctcgccctgctccgggagcccccgagcccaaagaagggaattagaaagtttagccttgggaggaacagagggaggcgcctctgctcatgcgcatacggagagccggggctgaaggggcgggcggccgcaactctgcgaggaccgggtgaggt

SEQ ID NO: 201138 - DNA, 76 bp, Homo sapiens
  chr7:107643995-107644071
  hyper
aactctcgtgcggtgcgctcggggaaggcgggttaaccctttagaaacagggtcgacctgtcgtgtttgttcttta

SEQ ID NO: 201139 - DNA, 43 bp, Homo sapiens
  chr7:108095229-108095272
  hyper
cctcctgcaaaagcctggggcgaggaagagcccagtctcttag

SEQ ID NO: 201140 - DNA, 182 bp, Homo sapiens
  chr7:112430003-112430185
  hyper
cgcccagttgagggggaacccttgcgaaatacggagaggcgctcccacaccctccaatctccaaccaccactgtcaactcctccagaggcaggtatcctaccccggccctgggaggccgactgggcggagcttggggtccggaccacgcggagccctggcagtgtctatgcctagatctcgc

SEQ ID NO: 201141 - DNA, 142 bp, Homo sapiens
  chr7:112430224-112430366
  hyper
cgtcgccaccaacgcgctctcccaaccctcggagtcagttccaaaaccaaaccaaaaaggaggagagcagacaaggcttcagcctgcgactgagaacagggaggcggcacgccttggggaacgagggcccgaggccatacgc

SEQ ID NO: 201142 - DNA, 45 bp, Homo sapiens; identical to SEQ ID NO: 44610
  chr7:112430590-112430635
  hyper

SEQ ID NO: 201143 - DNA, 239 bp, Homo sapiens
  chr7:112726614-112726853
  hyper
cgcaggggccgcggcggcggcggctgcggtggcgagggcggcggcggggctgcttcagcctctgtggaaccagcaggaacccctacctgactccagagctggctgggtttattgactgccctgtccaatccaactggcagcattaagcttttgtcccttcgtggctgcttctgaacttttccctccccgcatttgtagtggggggctggaaaggccctttcaggacctcaggcccatcc

SEQ ID NO: 201144 - DNA, 154 bp, Homo sapiens
  chr7:113724592-113724746
  hyper
gacggtgtgtttaccgacgtgggtgccagggctgcttcctccctgggagagccgcgggttctgaaggaaagggttggtgccaagtgtgtgtgtgagctcgcgactgccctttagagaaagggcgcgctgctctttcaggaaaggaaagattcaa

SEQ ID NO: 201145 - DNA, 229 bp, Homo sapiens
  chr7:113725472-113725701
  hyper
actccttggcccaagtgagacaggaaccagggcaacaatgaagagaaagacactcggcctctctccaccccaggccgcagaggcgcacaccgtgaaaagaaaggccaatcagcgctttaacgcacgctcgggtctccctttccgactaccatgtacttttaactccctgccaccgagggctttggatcccttcgaggctttctgcacttcaagtggaatcccctgtttc

SEQ ID NO: 201146 - DNA, 229 bp, Homo sapiens
  chr7:113725858-113726087
  hyper
ggagcaggaggtggggagaagggtgggggtgggggaaggtctggcgtagcacaaacaagttctccagcgggttgtttacatagcaggtggacctgacgtcagccaggaggctccgctgcaaatccgaacaatattcttccccgcgtttccccctccttaaagaagttagggaacggggggagataggtggacgggggagaaaggcatcctaaccagctggttccaaacc

SEQ ID NO: 201147 - DNA, 187 bp, Homo sapiens
  chr7:113726887-113727074
  hyper
cacttgttgttctctttcattttgctttgtgatgggggaaaaaggggtggagaggggagatttgctgttggctcacggatgatttttagtttggataatgcaaaatgttgcttcgtccggagagacctcggctggaggagaatgtgtgtcgaaacaccagatgtgtgtttgtttactctcttctttt

SEQ ID NO: 201148 - DNA, 235 bp, Homo sapiens
  chr7:113727134-113727369
  hyper
aaacaacagtaaaaacatctggcggttagaagcacacactttattgatccaactgctgacctttatttactcagttgggcaagtgcacgcttctcgcgtctaagttgggcacttcagcgttcatctcagaagtacttctccaggaaggagagagatggaaaggggacactcctgtttctggagtcaagaaactcctgggccctactgacgcttcgggataaccgtgcacagggat

SEQ ID NO: 201149 - DNA, 116 bp, Homo sapiens
  chr7:115117319-115117435
  hyper
agcgagccgccagacgtgagctaaagaaggtgctggggggcagaacgggtactggggcgcctggaggagagttgaggggcctgaaagactctgggggcccagctcggtcggtgggt

SEQ ID NO: 201150 - DNA, 41 bp, Homo sapiens
  chr7:115850424-115850465
  hyper
ttgcccagcagggcgccgcctcggacgccgccccgcctctc

SEQ ID NO: 201151 - DNA, 61 bp, Homo sapiens
  chr7:116140191-116140252
  hyper
taagagaagaggcggacgccctggcacgtccttccctcctgcttcccccgcccaaagcgct

SEQ ID NO: 201152 - DNA, 163 bp, Homo sapiens
  chr7:116164619-116164782
  hyper
aggtgggaagggacggcttaggacagggcaggattgtggattgtttctgccgccttggttgcccatactgggcatctctgcaggcgcgtcggctccctccacccctgctgagatgatgcactgcgaaaacattcgctctccccgggacgcctctcggtggttc

SEQ ID NO: 201153 - DNA, 175 bp, Homo sapiens
  chr7:116166537-116166712
  hyper
cgccctccccgtcctggccgtccgccctccgccctctgcagggacatctctacaccgttcccatccgggaacagggcaacatctacaagcccaacaacaaggccatggcagacgagctgagcgagaagcaagtgtacgacgcgcacaccaaggagatcgacctggtcaaccgcga

SEQ ID NO: 201154 - DNA, 302 bp, Homo sapiens
  chr7:116592940-116593242
  hyper
ttcaggcctactagccggcgacaggagcgcacctcctcccttctcctagctgtcccgggtttattcattccctgagcctgaatcctgataagggagcagagtagggtttaagacctcggaccccagaatacaccactgcaattgaattttggttccaccttaaggtaaactacgcagctgctgtgagcctcagtttccctacctatagaaagaggatcgtagtggggaattgttgcaggggttaaatgagattgtacggatcgtggagcagcgcctggcgtgtggtaaacgctcaacttatg

SEQ ID NO: 201155 - DNA, 569 bp, Homo sapiens
  chr7:119912399-119912968
  hyper
cttctcgccatccacgccatctagtggcttgtatgtgttacgtttggttttaaggatgattcctaatgactcgggggcggggtacgcgaaaaacaaaaaggttggtagcgacaattttcctgtgtctctctacctcagtaacccctcatacgaacacctttaactcttttaactattttaaatatgcgcagtgatgcgcagagaggatgaaggggacgcaaactttcagagacgcacgccccttgacgatgacatttagaaaagggctccacatccctgttattcgtaaaggacgggaaaaggagttgtgtcaagacctcgatcgaggagagtctctgattttttggcaagttggacagatggcatatcaatccctgcaacgttaacaatctggttttgaaaataaataaaaacagaaagaggaaatgcacttaaaaattccgcgtcggagctttgcgggtcttgccttccagtcgcccccagaagacaaccaattcctgcgcattccgctccgctcaccctccttcccagcttctctcgctctctttccccccattttcccacgctcg

SEQ ID NO: 201156 - DNA, 118 bp, Homo sapiens
  chr7:119913785-119913903
  hyper
tatgcaactaagccccggcgcgcacttggccaggtatgtaccgcgggagcggcgcgttctgcgcggaagcagatgctgctgccgccacggcggcggcggctgccagctcctgagctct

SEQ ID NO: 201157 - DNA, 681 bp, Homo sapiens
  chr7:120496812-120497493
  hyper
gccattgtgagccccgtaagggagaagccccatcctttcaccacatcctactcccaagggcaaaacggcagcgatctgcagggggcgggggagagagaacacgggacatctcaccatcacgcttcccacagcctgcccgtccctcctccacccgccctcagcagggtccagagggtcccgaggcccagtgcattcgagacatcgcctcatcaaaaatcatttgttaaaatcataatggtaactaaactcccaaaagttccaaaccggcttcagataacacctgctgggaaaagaaaagagcaactatccggatgaatgaagtcgcacagtaaactcgcgttctcaggggacacgcggcggagccctgtgcattctgatgagacgctcttgaaaacctccctcactccacgcccctcctcgaggacagctgtgctcggcactgtcctgaaggtgagaaaccacactgccccctaccccggacacgtcagaggcgccaccggcaagcccgagagaatgagcgcccttctagttaggacagttcctgggcactccaactccgcacccctctaccccgtcccgcagctcgggtgtgaatgcaagggactggggcggcggggcgggggcgggggcgggggcgagggggcagcgcggagttgagattccgcccggctactagggttt

SEQ ID NO: 201158 - DNA, 548 bp, Homo sapiens
  chr7:120497836-120498384
  hyper
agcgggcaggaaaggcgacagacgcgtggccacttaccgtcggcgctgggcccggtgccccacgcccgcctggggatagtcggggacgcacggcgggggctcatcggggcagggaacttcttcgcggagagccggagggctgcattggcttcagctggagacgcttctttctcttcctctccccccgccgccgccgtcgccgcctcctgggaaaaagaaaaaaaaaaaaaaaagtcctgggcagcagttgctggaaagtctctgctaagccacctcccagcgccgctgtccctcccaagtcctctccgagtccggacgaggcagcggcggcagccagggccagctgcacaaactctcagcgcatgctcgagccgctggctgccggggttgggtcctagtgggtgtttcttgtccctctcacccagcgagagtccccaaagggacgcttcacctctgcaggatagggtccagaagataatgcctaggaacttgggagaagtccgtgcagtaaatccctttaaaatggtggcgtcgaaggaatggaggct

SEQ ID NO: 201159 - DNA, 532 bp, Homo sapiens
  chr7:120628558-120629090
  hyper
cagacatcagatacgtttctaaattctgcagctctgggtgggcagcctcatttggggaaatgctagctgctgtttccaaagtggggaagcccacggtttcggacacagggctgacagcgctgctccagcagcccccagggccagaggaacccggccttagctccgccccgctctgcccggccccgggtggctgcgatgccgaggtcctctgctcccgccgggcgtgcagcgggcgcgcgcgcgtgtgtttatgtgtctgtgtgcgtgtgtgtgtgtgtctctctctgtgtgtgtgtgagatgaattggagtcatacgactgggtgtttccttccgagtggttttcatcagcaatccattaggaaatcatggaaactttttttttcctggctaaaaggatgaaaactgagtaagtacatagaactttgaacttgagacggaatgaaacaaattcaagcaaaaaccctgacagtaaccatgtccattcaaattgcgtatgccctttttatgttaaaagccgtgaatacttacag

SEQ ID NO: 201160 - DNA, 48 bp, Homo sapiens; identical to SEQ ID NO: 5836
  chr7:120970733-120970781
  hyper

SEQ ID NO: 201161 - DNA, 428 bp, Homo sapiens
  chr7:121512905-121513333
  hyper
ttcccttccgaagtgatgaaggagttccaatgttctgcgaacactggaaaccccagcggatccctctaactccagggcagcgaaaccactggcagcggacagagggaggattgtcggtgtgtgaattgctaccctgggatccggacccagagcggcagccgcgcccctccgccccccgcgcgaccccgggtccgaggcacgctcccagcggagcggtcctgcgcccccgccccctccaggagccgcggcgcgcacagccgggctggagcgcgcacccggcactgaggcttcgctgctctcggagcgctcagaccgcggccgccgcagccggcgaaagaggcaaagtcccgcacgccggaggacatgcgcctcggctagcggccccgggccccaccaccgtgcggctttctccagattattcctctctc

SEQ ID NO: 201162 - DNA, 130 bp, Homo sapiens
  chr7:121513393-121513523
  hyper
acacacacacaaacacacatacgcacgcacgatctcacttcgatctatacactggaggattaaaacaaacaaacaaaaaaaacatttccttcgctccccctccctctccactctgagaagcagaggagcc

SEQ ID NO: 201163 - DNA, 130 bp, Homo sapiens
  chr7:121863466-121863596
  hyper
actgaaagacagttccgactaacttaaaaaaataactcggaagttcaagggatgaccatacaggtacagctgaattcaggggctccagtgatggcatcagcctacgtctctcctaccatctctcacctct

SEQ ID NO: 201164 - DNA, 218 bp, Homo sapiens
  chr7:121944392-121944610
  hyper
aatggagaaagccaagggtttggacgtgctcatcatgttgccccgagctggagcagtcgctaacattttggtagtcgcgttgtggcagctactgtccatgtctgagtcgccagcgtccgtcagccggggctgggttgcgccgtccgttgccttgttccctgcttgtcacagacctgcggagagggggacgggcaccatcaccaccagtagcctcctcc

SEQ ID NO: 201165 - DNA, 165 bp, Homo sapiens
  chr7:121945134-121945299
  hyper
ctaaataaggaaacggagtctaattcaggggcaaacgccaggctatatttatcaaacgccaagctccagaaagcctcggctaggaagcctcggcagtgaaatccgaggtttcgctgcttggttccactgggcctgggtgggccgggctgggccgggctgggccgg

SEQ ID NO: 201166 - DNA, 226 bp, Homo sapiens
  chr7:121946146-121946372
  hyper
gaaccccgcagctaggcgcgcaggaagggctgcacagagtttgaagacacggcagctgtaagctggcgtgaggaggccaaaggagcgcgcagagctgcaagcaaagggcggtggggcctggaccctgaagtgagtggccgaccgcagcagctcaaggtgccatctgcctggtgagttaaccccacgtggctgtgagacaggtggtggcgggtgtcaggtattgggc

SEQ ID NO: 201167 - DNA, 1043 bp, Homo sapiens
  chr7:122525790-122526833
  hyper
gcgctgtcggtctctgtctcacggatggtgagctgacagctcctgccagcccaggcggggaggaggagaagaggtgtccgctgcagccgcatacccggcgggtgaaagcaccgtcttgtccccaaagattcctctgccctcagagactaacaaaaatacggtgtcctgcgtttcgcagaaggacgggaggcgtcccagagctctcccgggagaaaaacccagggagaagtggtggtaggaggcgcccggtcccgcaactcaccttctgctgcctccgggccatgtcggtgggctgcttggcgttgaaggggtacgcgatgcacctcacgacgaagacgtagagctgcaggcggatcctccgctcctgctcatcgtccagctgccgctggggctcgtctcgcccctcgctgagcacagaggggctcgggctcacagatctggccgcgccgccgccgcccgcgcgccccggcgcgtcccgccgcccttcccgagtcggggctggaggagctcgctgcgagctgccggctgccaccagcacatcgcggctttcctcttccagcccctcgtccgactcctcttcgctggaagacgggtccagcatggtgctcggggatccccgccgctcggcccgcggtccccaagcgcctcacccccggcggctgcgcccgcgggtctgagggagccgcggggctggctgcagcggccgcagaacgaaaggaaaactggccagggctttccggacacgtcgagttagattcaggagtgtttcctaccaccagggcgaaaggggcgggcaggagccgggaggaggattgggaggggggagagggggagccgccgggactgaataggcggagttagcgttgggggtgagcttgggcgcctcaggaattgctccgccagccccgggcgcgccgacccagcggttccccagagcccgccggcagaggcggagccgcccgagcgcccggacgcaggtggggaacctgtggcgcctacaacaagcaacacgtggaattgaatgttgaagagccgcgcggggc

SEQ ID NO: 201168 - DNA, 280 bp, Homo sapiens
  chr7:122526873-122527153
  hyper
ccgcctggagccctagcacacagtttgcaaaggcggggagcggccgagcgcgatggcccgtgtaagcgtccaccggggctgctccgactaccctcaccctaccacctgtgatcttttctccagcaggtggaggtggaatggggagcggggagggactgttccctagcaagaggttagggggagcggccgagacatctccccaacccgaatcggctgcctaggattgaaccccagcgcggaaaagcgggactggagcccttcaccacgaagtatctttgcg

SEQ ID NO: 201169 - DNA, 116 bp, Homo sapiens
  chr7:122527423-122527539
  hyper
ttgagcgccctcccggtgtccagcactgttagccttttgcggagcccgcggtgactaaggcacatgacactcagtcgctggtggttctggcctcaagtcggcgtcttgtagctgcg

SEQ ID NO: 201170 - DNA, 157 bp, Homo sapiens
  chr7:123174506-123174663
  hyper
gtcggaccaggaggccgcagtcaaaatctgttctcctacctgtgtacgaaaccaaactattctcgtcgaagtgctttcccaggctcctaagacgcagcttccatactcgccgcgttctcagctgttggtcgtatcctagcaacggccctggcaccac

SEQ ID NO: 201171 - DNA, 203 bp, Homo sapiens
  chr7:123673023-123673226
  hyper
cggggccctcgctgtccacgtcgctccccgccatgggctcggaggctgtccgaacgcccgaggctgcaccgccgccgctgccgggtgcgcggagctgcagggccgagcggccgagccccgcgccgcctcctggccgctgccggcccccggggggcgcgcagggagctccgtcccggccgcggtcccgcggcagcgggggctga

SEQ ID NO: 201172 - DNA, 299 bp, Homo sapiens
  chr7:123673383-123673682
  hyper
aggcggcgccggggctgtgaggggaaatgcagaagcttgtggaagccccatcccctccgctgcttagccccgcgcctccgctgcaggctctgggaacgtaacgcgagcagcggcggccctgcccccgccctgccaatgcccctctccgcctgcctcgacctctcccgccttctcaggccgcccccacgcgcccgcccgccgcaccgagtcccacagggtctgctcgggaaggcccggccctgcttcttcctcccggtgcgcccactcaacacaggggctccggtcgtgcggggggcgct

SEQ ID NO: 201173 - DNA, 46 bp, Homo sapiens
  chr7:124405510-124405556
  hyper
acaagtccccctcccccagacgactcgcagtcacaaccccgctccc

SEQ ID NO: 201174 - DNA, 201 bp, Homo sapiens
  chr7:124406227-124406428
  hyper
aggtccccgagcccgggctaggggcgggtgcggggcgggagtggggggtgggggtgggaacgggaatatgagagcggtcgggggagggaagagaggagggtagcaggggagtgagcagcagggtcccctccaatctgttgcggctgatgcgcatgcccaggtctcagctctggggggcgaggggcggggcgggggaggggc

SEQ ID NO: 201175 - DNA, 71 bp, Homo sapiens
  chr7:126891135-126891206
  hyper
gcaaataaggcactccctcccggggtgggacttgcttaggggacttaagggtttctgcaaccggcgagggg

SEQ ID NO: 201176 - DNA, 204 bp, Homo sapiens
  chr7:126893238-126893442
  hyper
gccctggcgcgggcagggagggggaccctcggcccgcggatccccctccgctcttcagcctgaagcgacgaggagaccagaaatgtcaatagttctgatttttaaaaatcatccccccttccccgcccccaagaaaaaggggaggacccaactacagagtgagagggtgggaagaagcgggagcggtagaagaaggaatatggt

SEQ ID NO: 201177 - DNA, 266 bp, Homo sapiens
  chr7:127291485-127291751
  hyper
aagagaccgaagaacgagggtcactctcccctgtatacgtggcatgtccttcctctgagacatttattcctcccaccaacaaacattaatggaacgcctcacaagtgctagaccccagcgacacaaacaagggcgaggcacactctctgactacaaaaagggcgcgcggccgcgtggcaggtcaaagcccacatcggtaggaggttccacaaagctctgattttccaagttctctccatacttttagccaaggtaaaatgtcggaa

SEQ ID NO: 201178 - DNA, 315 bp, Homo sapiens
  chr7:127807163-127807478
  hyper
ctcctcccagtcgggcccgcaggtgtgggtggggaggggccgtgtccgcctccgtgctaggtagagggtgggaggagggaccttgtctgtccccctcagctgggtaggaaaccccgactcggacctgtccttgagcgcgggggatctgggcaccccctcccccagcaggttcccgagagtccgcccgagggtagacagacctaggcgtggtgtgcacgcgcgcgtgtgtctgtgggtgtgcgtgcgagcgaggcaagagggtcttggcgtcccccgcaccctctctgccgggttctatattttgcctttctttgt

SEQ ID NO: 201179 - DNA, 36 bp, Homo sapiens
  chr7:127841850-127841886
  hyper
ccctgcctcccagacgacctgtgccttaccccttcc

SEQ ID NO: 201180 - DNA, 120 bp, Homo sapiens
  chr7:128049871-128049991
  hyper
tcccgggtgttgccgggctccgggctccggaacagcggcggctccgcctccctgcagcggtggtggagtgagtggcccctccatgcggaggccgcagctcagggcgggcgggagcctgga

SEQ ID NO: 201181 - DNA, 55 bp, Homo sapiens
  chr7:128579008-128579063
  hyper
gagaggtccagaggccgactctggaggtgggggtggctccgcgggctggcccagg

SEQ ID NO: 201182 - DNA, 52 bp, Homo sapiens
  chr7:128784405-128784457
  hyper
ccagagctttcggcgcattgctcaacacacggtgtgcgtacttgttgatttt

SEQ ID NO: 201183 - DNA, 399 bp, Homo sapiens; identical to SEQ ID NO: 44729
  chr7:129418755-129419154
  hyper

SEQ ID NO: 201184 - DNA, 101 bp, Homo sapiens
  chr7:129421183-129421284
  hyper
taacccttgcacttgaagaccgttaacaccttgtcttgggctcgagcaaaagaagggggtgaggcagtggaagcggggcccgggaaatctatagtttcccc

SEQ ID NO: 201185 - DNA, 281 bp, Homo sapiens
  chr7:129421349-129421630
  hyper
gcccgactcccgggcagggcctgctgaagccgtagatgtcgcagccagatggatcgggaagcaagattcccaccccaggtggataactggacgagtctcagggcctcggggcccctctccccatgcagccagggatgggcacggtgagcgagaacccggacagcggagataatgagcacgtcacagagcccaacgggccaaaagggggtgatagctccacattaacccctccccgtcctactagcattcccccgcccatctaggtcgcctcgagcctccct

SEQ ID NO: 201186 - DNA, 152 bp, Homo sapiens
  chr7:129913090-129913242
  hyper
cagcttgtgctacagagaggctcctttttattactttttttttcttttcctcctaaccggtccttgctggttttgagtatccactcccccacccccgcccccttctttttctttctctctgttcctgagcaagctgacgcaggtctgcagga

SEQ ID NO: 201187 - DNA, 178 bp, Homo sapiens
  chr7:129913272-129913450
  hyper
gctcctggggaaccggggcaaatgcgccaataggagccgaggaagggggaggtgcgggccgggggaggttgggggctgggggctgtaattcaagctgggagttctctgcctcccctccccttctcttttttttctttcctctttaaacacacacacacacacacacatacacgcgcac

SEQ ID NO: 201188 - DNA, 120 bp, Homo sapiens
  chr7:131240426-131240546
  hyper
gaaggtccacttacgactctgtacctgccccagcacgggctcaaggagttgagcctgcacacattacttagaaaaaacctctgcaaacgggtaagtacatcgcccgcgtgggccgtggct

SEQ ID NO: 201189 - DNA, 142 bp, Homo sapiens
  chr7:131242580-131242722
  hyper
gagtgggtgttggagaattccgtaaactgagtttatccggtgaaagaacaaagaagttcctttcccctcccccgctcccctccttttttccacccccaaagctgcctgggagacgcagaccccaggcccgcctgaagaggag

SEQ ID NO: 201190 - DNA, 49 bp, Homo sapiens
  chr7:132260161-132260210
  hyper
cggtgggcagtgccgccacggtcgtgagggaggggagcctcctcttttg

SEQ ID NO: 201191 - DNA, 59 bp, Homo sapiens
  chr7:132340334-132340393
  hyper
atcaacttggcagatgctattgcctcttccggctcacaagcttccgtgctgggctcctc

SEQ ID NO: 201192 - DNA, 96 bp, Homo sapiens
  chr7:134001929-134002025
  hyper
gcgctgaaagtaactcggccgccagggtcacaacaaacttgctggcagcggcggcactagaactacagagctgtgactgctcgttggaggtgttct

SEQ ID NO: 201193 - DNA, 177 bp, Homo sapiens
  chr7:134331362-134331539
  hyper
gcctgcccgctggcgtcgaagccaactccttactggttcaggtatgtgctcgtctctagagtaaaccaatcagagccccacttcttactcctgggatttggtaaacggaagagacctctcctgttccgggagtaggccgggaccgtggatgagtgacagttcgactttccaataggc

SEQ ID NO: 201194 - DNA, 86 bp, Homo sapiens
  chr7:134832830-134832916
  hyper
tgtttactaggcacgactgcgaaggcaagggggcaccagctcaggactgcatctgcctgccatttcccttccactcctcctttctg

SEQ ID NO: 201195 - DNA, 294 bp, Homo sapiens
  chr7:134855495-134855789
  hyper
tcccgcgggctcccggcctcgggacacttccggtcttggggaactcccggccccctcgcagtcccggcgcccgggacacttccggctcccggcagctgcctcagtcggaggtccgcgggcgccccatgctggcagtggtaatgccgccggctggcatccggttggctgcgcgctgggaacgccagcgaggcagcgccaccggcttgaggagggtgaaagttcaattcttggcccctgaagttagcggaagggaacgggcatgttttggaaaggcccgccgggaattccctcaga

SEQ ID NO: 201196 - DNA, 330 bp, Homo sapiens
  chr7:137028151-137028481
  hyper
ccctccgagaaatcgtacgttcctctcacttactttgagttggaaacgtcctctctggcgctcagtctgcctttgttgcaaggggcgaggttgctaccgctgagtccaggtacccggctcgctgcagctcctgcttgggccgctgctgctctccccgccttctggacggatgactcactggtctctttcttcccctctctccactttggattttcctctgctctggggctctcttggcgggatttttggactggaaggcggggaacctgatcctgcctttgactcaattacgccctgacagggagggaacggaagggaaatggagaatgg

SEQ ID NO: 201197 - DNA, 111 bp, Homo sapiens
  chr7:137531047-137531158
  hyper
ggggagaagacagacatccccgggaggagagggggaaagggggaaggagaggcgtggaaacagagaggtgcccaactccgcggaagcgccccttgctgggtagaagagtgg

SEQ ID NO: 201198 - DNA, 177 bp, Homo sapiens
  chr7:137686993-137687170
  hyper
ggagtgtctgtgacgtcaccgaggaactcctcctgcttgagcgcggcccgctgtctgctgtcgcctacagctgaccaatagagggcttgggtccggaagtgatggactggaggcttgactaatgtgaaaggggcgtctgaaaggtacagccaatgaaatagcgacaagaatacattt

SEQ ID NO: 201199 - DNA, 100 bp, Homo sapiens
  chr7:138665269-138665369
  hyper
ccctggaaagatccgtggccagggcgctttccaagaggttttctttgaatgttctttgtgtcctgctgtacggggggacacggccggcctgcccgcatct

SEQ ID NO: 201200 - DNA, 169 bp, Homo sapiens
  chr7:138720616-138720785
  hyper
gaaacgctcgggcccggcgcgctgcagcacgtcccggagcctggcctccgacagctccacgtggccgcgcaggtccttcaggaacatgcggccgccgtgggcgcacagcaccttggtgaggaaggagcacactgtgggctccgccatggtcgctggcgcgggccctgtg

SEQ ID NO: 201201 - DNA, 43 bp, Homo sapiens
  chr7:138720909-138720952
  hyper
ggccccggcgcgtggaagcagggtacggcgcctgcggatcccc

SEQ ID NO: 201202 - DNA, 283 bp, Homo sapiens
  chr7:139168725-139169008
  hyper
tcttctttgtctctgacctcacccattttcccctccagccctatgccggggtgttggttttgagagttacagtttgggcggggaaggattggccaagcctgtctggatcctgggacctcagagaaatcagaatccaaaggaattggggcgacctgtggaaaagtagcccagttggttgtcctgacaatccagcagggtttcgaaaggactctccatcatacttgggaggactcccccactgagtaacgctaagagaaaagaaacagggcgtggataagcaatt

SEQ ID NO: 201203 - DNA, 199 bp, Homo sapiens
  chr7:139929852-139930051
  hyper
cacggctgttttgactcctgggcttccgccctttagtttacacatttgatgattccgtttgaaaatcgcaacctgaaatactcctcttctaggctggaggcggggttgggggcgggggcggtgggtggcggaaggagggccctcaaacaaagatccgctttctcctgaacaggtgtcaggagaccaagctttgacctcc

SEQ ID NO: 201204 - DNA, 104 bp, Homo sapiens
  chr7:140098150-140098254
  hyper
cccctcggattggacccgcccccgccccagcaggtcttcggccccacgcatcaccgcttgcgcacccgagatccgcagtggtcgccgctctccagccccggctc

SEQ ID NO: 201205 - DNA, 179 bp, Homo sapiens; identical to SEQ ID NO: 115791
  chr7:140098296-140098475
  hyper

SEQ ID NO: 201206 - DNA, 236 bp, Homo sapiens
  chr7:140103657-140103893
  hyper
gcaggggcagtgtcgtatgggccagcactggtttaattcactggctgttccttcctgtgagggctttccgctaggccggcgaaggctggtgagaaagccggctctgcgccctgccctgtgctggccgccctcacctggcgctttgtaccctgaggcagctccggactcagggcaggtgggagggattgcactttcctttcactttctcaggacgccaaacccgacacctggggcca

SEQ ID NO: 201207 - DNA, 204 bp, Homo sapiens
  chr7:140714398-140714602
  hyper
aaagctacagtgccgaaggccgtgtgatgagcagagaaactgagccttctactgttaaccaatatggaagagagtaattgcgcctgagaggaaattacggcagcggaaacgcgggtattctacgtttaagaaatcccccaactgaggcagaaaaaggccaagttatttgtgtgatgcacgtgaaccgcccgagctggtcactaa

SEQ ID NO: 201208 - DNA, 140 bp, Homo sapiens
  chr7:140774419-140774559
  hyper
accaacatgggcctctggaggaagtgccaccggcagggcttcgaccccgagatcgccgccctcattcggaaaggtaagcgccgggcgcaaggcgtggcgctgcggagagcccggcgcctttaggccccgcagcccctcgc

SEQ ID NO: 201209 - DNA, 38 bp, Homo sapiens
  chr7:141211325-141211363
  hyper
tctctccagtggtgcgacctgttctgctcatgatctgt

SEQ ID NO: 201210 - DNA, 357 bp, Homo sapiens
  chr7:141211599-141211956
  hyper
gatcctcctgcagagcagtagaaagtccgggaggggcccgtgcccatggctccaggaaaggagcggccaggtacctgccaggggagaccaggcacttccaggtgcgaccaggtacctcccaggtgcggccaggcgccgcctcatctctcggtgggcgagtgtatttattccaaacccagactgagaggtgacagcttcaagtctgctcgggaaggaaacacctcgcaggccaagcacaaaggggcttactcgtttcttttctgcagcggcagctttccccctccctcctgtttctccgctttccctcctttccctccaccattcctcgcccactcctgcccttcccgggtgggacac

SEQ ID NO: 201211 - DNA, 1015 bp, Homo sapiens
  chr7:142985429-142986444
  hyper
gcgcaggcgcaggcgcagtgtgcgtccgcgtctgaggggagggatgtgggggaagcgacggcccccggtttgtttgggctgtgggcggtgcgcagcggagagcccgggaaaagcgggaaatggcggcgccgagcgcggggtcttggtccaccttccagcacaaggagctgatggccgctgacaggggacgcaggtaagtagggaacggtcttagggctccttaggggagcccagggaaggggagcgtggcccccaggcgtgcggccctgcagccccctcccctcggagccccggaaagcagccgtgtccgcgcttcctgccaagggtgggacgcccgcccgagccgctccgagcctgactccgcgcaagggcccgcgggcggacctcttggccttgtctctcgtgggaaaagactgccccagcctccctttgttcaacccacgagggttctaaaggggaggtctttgcagtcctgcccgctcttgggttctcttgaagattcttcatcctttcctctggctcccttatgagggaaactataaaaagaccatactctgtctccttaaaaatcgacgagaccttctgcagacctcggtgctctgcctgatgtgcatttgatttgtatcgattgtatcatgatctgcatggctttgcatagaatgaccagattttcaaagaagtcaatacagggtttggaaattgagtacttttggcagaacaagggggttcctgtggctccgagtgtccatgcctctgccccggtcattccatttcatggcagtcatcacccaggagaacattgtaatgcctcctgctcgagactgaagattaaggtcttcgcaaagggaacctgcagaaggacacagaattaagacgtaggaactccgtggtgcccttcgcccctcctccccttccagttgtgtcctgaaattctaaatgattggaaacttttataatgttcacgtttaagactctcatactacagagtagaggaaggagcgggtgtgcagagggg

SEQ ID NO: 201212 - DNA, 107 bp, Homo sapiens
  chr7:143105720-143105827
  hyper
gcccctaggaatgccggcttctgcaggggggtgctggccgggccccgggaaggggcggggcgcgggggttgggggcgcgggggcgggggtcggtaccttccttggcg

SEQ ID NO: 201213 - DNA, 469 bp, Homo sapiens; identical to SEQ ID NO: 5935
  chr7:143105844-143106313
  hyper

SEQ ID NO: 201214 - DNA, 122 bp, Homo sapiens
  chr7:145814199-145814321
  hyper
gcagccactgcagtagacaaactcgaaacccagcgtttctgttttggaagagacagggttgtgacgctggtgatgtttctggaaagttgttcctggtcttggtgatcggttggcaagagctt

SEQ ID NO: 201215 - DNA, 152 bp, Homo sapiens
  chr7:145981901-145982053
  hyper
gtgataacaccactcgtctctgatcagggactcatttgtgccatctggattagcaaagatttcccttccatttctctgctccctgcctcccacaggctatgactatgcttcttgtggtttcatcgcttgctgctgagcggtgttaataacta

SEQ ID NO: 201216 - DNA, 704 bp, Homo sapiens; identical to SEQ ID NO: 44845
  chr7:148036378-148037082
  hyper

SEQ ID NO: 201217 - DNA, 79 bp, Homo sapiens
  chr7:148506412-148506491
  hyper
cagtttggatttaccgaatgatttgcaaaacgaattttgttacccttgcgggttgcatccaccacaaaatctaaaaaga

SEQ ID NO: 201218 - DNA, 89 bp, Homo sapiens
  chr7:148507424-148507513
  hyper
cattgttcaagttgaacagaaagctgcacatgtatttatcatacactttccctcttctgtcagcttcatcttgagaaataatctaaaaa

SEQ ID NO: 201219 - DNA, 71 bp, Homo sapiens
  chr7:148508741-148508812
  hyper
tcatttttctgcacaggatctttgataaaaatcccccagcctgccacgtcagatggtgccagcaatagatg

SEQ ID NO: 201220 - DNA, 184 bp, Homo sapiens
  chr7:148511050-148511234
  hyper
ctttttggagccccgctgaatactgcagttcttgcaggacacatttttactgtcccaatggtcagcggctccacaagtaagacagaggtcagggtcacactctcggacagccaggtagcacgggcactgcttggtgttgcactgtgctttgcagcggcatcccggaaagcggttttgaccttca

SEQ ID NO: 201221 - DNA, 107 bp, Homo sapiens
  chr7:148512014-148512121
  hyper
tacattgacaaaacttttcacaaaaattttgtgctatcacacaagggcacgaactgtcacaaggctgccgtggatgatcacagggttgatagttgtaaacatggtta

SEQ ID NO: 201222 - DNA, 34 bp, Homo sapiens
  chr7:148513818-148513852
  hyper
cagcgggagctggagctatgatgctagattcttt

SEQ ID NO: 201223 - DNA, 121 bp, Homo sapiens
  chr7:148514301-148514422
  hyper
cggatatcttacctgtctacatgttttggtcccaattaacctagcaatggcacagaaattgtcatagtaagtgccaatgaggactctaaacattgaggcttcagcaccactccactccaca

SEQ ID NO: 201224 - DNA, 76 bp, Homo sapiens
  chr7:148515086-148515162
  hyper
ggtgggggtgctgggcctgctactgttattgggaagccgtcctcttctgcggcctcctggacgttttggtggggtc

SEQ ID NO: 201225 - DNA, 200 bp, Homo sapiens
  chr7:148523536-148523736
  hyper
aaaacgtacaataattgcacttacgatgtaggaagcagtcatatttaaaacatcgcctacagaaaagcgtatgaaaggagtgtaagctttgctctctctgaacagatttagcatttggtccatctatgttgggggtacattcaggaggaagtgcgcctgggagctgctgttcggtgagttctttatatctgacattaacc

SEQ ID NO: 201226 - DNA, 119 bp, Homo sapiens
  chr7:148526816-148526935
  hyper
cacctctatccccgtgtactttcccatcataattttttattagttcttcaatgaaagtaccatcctgatctaaaacttcatctcccatataaggaatgttatgtaaaacagtttcatct

SEQ ID NO: 201227 - DNA, 151 bp, Homo sapiens
  chr7:148892417-148892568
  hyper
ccctgggcgaggccgccgcctctcagttttggggcggtggcgaccccagtccgggagtggccccggtaggtccccgcaggcgggcaggagctccgaggccattggctggcgcgcgggctgccaaggggcggggagcgccgccgaaggggac

SEQ ID NO: 201228 - DNA, 158 bp, Homo sapiens
  chr7:148936558-148936716
  hyper
gctttgcctgaaacgcggaacctggtcttgacttttgagtgactgagccctcctggtgcccgcactctggccgggagtgccaagcagcgttctccctcccgccgcacgggggcacaatgggaagcctgcacagtgaggaagagcggctggagccggtc

SEQ ID NO: 201229 - DNA, 358 bp, Homo sapiens
  chr7:148982135-148982493
  hyper
gcggtggcagctggcgacacctgcgggctgttgggcaccagcccggggcgggcgctcgcacctgtcgggcgtgcacaaaggcccggcgcacgctgtgggggcggggcctcccgggttggccaatgaaaagctggcactgggtcggaggcgccagccaagtggggggcggagcttccaccaccggccaatggggatctggcttcgggatgtgggcggggtccacccggtcgcaacccgttgagtctctgcacagctgccgcgctgacgcgttttccgcgtgtcccgagccccggcggccccgcgagctcggtccgtgcggggaaagcagggctgacgccgtctgcggagaggactgcgc

SEQ ID NO: 201230 - DNA, 46 bp, Homo sapiens
  chr7:149112425-149112471
  hyper
ttaccgtcacactccaacgcactttcttccccgagtttgggaagaa

SEQ ID NO: 201231 - DNA, 162 bp, Homo sapiens
  chr7:149570406-149570568
  hyper
tcccgccgggtccctgaacgccggcccggccggtccaacctcattccgcttcccgccatcgaaacgcgaagcccccgccttcccccaaacgtctcagcgccgctggggcctttctggctgcgccgcctccgaccccaggccccggtccgcgcccgccgctcg

SEQ ID NO: 201232 - DNA, 480 bp, Homo sapiens
  chr7:149570628-149571108
  hyper
gccctcccgctgcgtctctgaaagcgaggccgttcctcccgcgtccgacccccgcggggccgtcaggttcggggcggcccaggctgcgggtccgcagggcgcttcgggccgagccggcgcggcgcgtgaagggcaggggacgccccgaaagaccgctggggtgggaccccaagctccaggggtctttggaaataagaatgcggcgtgacgttggctgtgcgggcgcggggctgacgcggaccctataacccatcgccgaaaccgggcggccgcgcccctattcctcggcatttctctctgtccgcggccctgctcagccaatcagcgagtgggctcctaggcaggtcctgagtgacagcgcggcgggctggatcaggagatgcgcgtgcgcggcccggcccggctgatcgcttcgggtgctcgactcctgttgcgcatgctcagcgcgctgcccggctggggacccgcgcacctgcagcg

SEQ ID NO: 201233 - DNA, 215 bp, Homo sapiens
  chr7:149571228-149571443
  hyper
ctggttcgtgccgaagggacccaaccgcgggtaaggaaagcgcgcaggccctgcagacctctccaccccggccccctggcccggctcgcccctccgccccggggcggcggcttcctgctctgcagcgagcgtccgcaggagggacgccaggaccccggacgccacctctgaggtctctctgcacctgggtctctgacagccgggaacaggcagga

SEQ ID NO: 201234 - DNA, 552 bp, Homo sapiens
  chr7:150497095-150497647
  hyper
aggagccaccccaccgtagggctccagccagggtccaggcgtgcaggcggcagaaggtggacgggacgcgccagccccaggcctctcctcccgctctccagccgtttttctggggagaaacacctgcacccagctgtccctccctcctacgtgagtcctcctggaaaccaggttggaggaagaaagacgtcctgtggacaggacggggtgggggcatggccctggggactcctcgtgacagagggtcctgcggcaagagggtctcccgggccgcggaggccctgcctcacctgcagtcctccgggagcccgcggccgagcagagcggacactagctgaccccgagcaggggagcgacgggagggcggagacggcagatgcacgggtgggggctgcggccccgcccaggctgcgcggtttcccgaaaccagctgcggcccgggggcccggcaaagggggttccgcccggaggagcggaccgggcgggagaagaccgagcccccgcgcgccccctgcgctcccactcgcgcacacttgcacgccggccctggcc

SEQ ID NO: 201235 - DNA, 34 bp, Homo sapiens
  chr7:150497885-150497919
  hyper
gccgcccgctcgcaggtcccgaggagcgcaggtg

SEQ ID NO: 201236 - DNA, 874 bp, Homo sapiens
  chr7:150671457-150672331
  hyper
ctgccatcccagctcggtctaactctagtccaacttgctctacgtgcccacacctgcccagggaaaaaaaggaccagaggagccagacccacagcctagcaactcctttgccctcctgaaaaccatctcagcagagtgaggcgcaggccccggaaccgcgcctcccacaggcacaccgcagggcccccgcccgcgtcacacccccacagaaccctgcccgggctcggggcgttctccagccgcccccacacccccacacccccacgcaccctgcccctcgccgtggtcccgcccctcttgaccccgcccctggtcgtggccccgccccggcccgctcctaccatctttccggtagaaggcgatttccactttgcgctcctcggcgcccagcagtgcctgcgcgatctgcgcggcagcgcggcgctgcgtgcgcggcccgtgcaggaagtcgcaggtgcagggtcgctgcatcacctcggcccgcgagtagccgcacagctcgcagaagccgtcgttgcagtagatgacggcgcagttctccacccgagcgttggcgatgatgaacttacggcctaggggggcggggaggagagtgcgcgtgagcggggaccccagcctccgggactcccagcccttccccacattctccactcacacagccgcccggggactccccgccacaggaagcatggctgggactggggtcccagcagggggcgaacgcagctgtgcgtgtgccccgatacaggtgcctggccggccgggccgcgcggcgcgccccctcctccgcctggcccgcgggcgggctgcgtggcttcccccgggcaggccgccagcagcccgccgcctcctccatgcccgaggctgaggccag

SEQ ID NO: 201237 - DNA, 93 bp, Homo sapiens
  chr7:150715525-150715618
  hyper
atgaaagacctgaaaggcgggatccgtggggggaaggggcctgcgattaggaggacgcgcggtgggatgtagggctagagggccccagtggtg

SEQ ID NO: 201238 - DNA, 165 bp, Homo sapiens
  chr7:150725069-150725234
  hyper
ccagcagttctgacgcacctaggagagcggggtgggtggcagggcatatgtacgtgttttgaaaaaactcccagtcgatttttgttcattcctcccccaaaacccgcgttctacacgcccttgagacgacgggacatctagagatcctggagccttgggaaaatg

SEQ ID NO: 201239 - DNA, 115 bp, Homo sapiens
  chr7:150778108-150778223
  hyper
ctctcccaaggggcgaggactccccgcccgccagcccgcacacactcagacacactgcaagagtgaaaacttcacagttactttaatctgcacgggttccggggaactcctctgc

SEQ ID NO: 201240 - DNA, 261 bp, Homo sapiens
  chr7:150784073-150784334
  hyper
tatctacgccatctacgacctgatcgagcgcatcgaggatttggcgctgcagaaccagatccgggagcacgtcatctccatcgagggtgagcggagccgggggctgcgggagccggggcgcagtggcctctccggcgccggccgagggctccacaggccgtgcctggccatgctctccctgtcgggggtccttgcgcgcttgaggaccaggccacgaggtttgccgatctgtgttgcagaaccggcgggcagcttcgccat

SEQ ID NO: 201241 - DNA, 529 bp, Homo sapiens
  chr7:150784514-150785043
  hyper
gctgcccgggccctgctccgcagtggggcgggggatcggagcctcgcgttagtggatggcagccttcccgggcccagcgcccgcaggcccggagggtggcgctcgccgcggcgccctctcccgacgcacaccccctacgccgcggcggccaagcgggagcgggccgggcctggcgctgggctgaggctcagcgaccgcgtgggaggcgccggcaggtccatccgcgctttggccgggtcatgagcctgacggggatccgcggctcctcggtctggaggcagctgctgggcagccgggtgctgaccgaccgccagggacaccgcacccggagtcggggaccggaaacccccggccactgcgctgcctagcgcttttttctctgggcccttaggccctggactttcgaccgctgagggcacaggaagtggtggcacgctgctggcagatgcctcgcaagccctggtgtggtgggtgctggaggcacccgcaggcaccccggtggcatggtgaccttcgagcgggcacggac

SEQ ID NO: 201242 - DNA, 33 bp, Homo sapiens
  chr7:150869804-150869837
  hyper
gcacaactgcgggcacggcgaaggaggtgcggg

SEQ ID NO: 201243 - DNA, 389 bp, Homo sapiens
  chr7:151038574-151038963
  hyper
ctggcaaactgagcccgggcgggaagtcctggaagactgagcctggggtggcgttggacaccaactcccaggtcctcgccccacacggccacatcctcgcccagccccgcctccgcttagctccgccccgtcgcggctccgccccgcggtaaccacgcccacacaaccgtatccccgcccacagctggcttcgccttggccccgcccacaaccctctttccaagcggcggcggcggcggcggcgcgaaggcgacagcggcggcgggggcggggctggcctcacccggaatgaaaacaaacggcggccgctgccgcatccgggcactctgctggtcgcggcgggagtggcgtggcgcaggtgaggacacggcggccgagtgtcctcgacc

SEQ ID NO: 201244 - DNA, 107 bp, Homo sapiens
  chr7:151136925-151137032
  hyper
acagggggcgaaggcggagccccactcggtttccttggggttgagggacgcactcaccttccccgagcgctgcgccatggtgcgccccgccccttccgcgggtcccc

SEQ ID NO: 201245 - DNA, 124 bp, Homo sapiens
  chr7:151137113-151137237
  hyper
gtcgggcgtgctaagcccgaggggccaccaggcggttgggacccgccgcggccaccctgtgccaccgcgagtgcagcccgccctgcccggggtctccctgtgctctccgcgtttagctcccgag

SEQ ID NO: 201246 - DNA, 480 bp, Homo sapiens
  chr7:151572849-151573329
  hyper
cccctctggctggacaaagtgaagccgcaggcagatccgagtcgccaatgtcctcccgggcggctggcgcggacggggctgaagttcaatgcagcctgcacggattagggagctccgagcccccaaataccacagagacccaaagtacactcccggggcgggggaagggaacggcggcagaggagacccccgctccaggcccagaaacgcccggagagaaactggagcggagggggtgcattggaagacgcagctacacagctccccccaacccccgccccgctgctttccccacccaccgcccctcccctctcctccctcccctcccctctctccgtctccagcagccgagcgcgggctccacctccccggagcgcagtccacaccgtcccttttcagcaaaacaacacaacgcaccgccccccgcacccgcacccggctggataccgggctacgcccagccgcccacccgccgcgccc

SEQ ID NO: 201247 - DNA, 693 bp, Homo sapiens
  chr7:151722451-151723144
  hyper
acacagatgcgtgtcgccgcgcaatgggcacagcgcatacagcgcagagctcccgggctcaagcgctgctcccgcctcagcctccggagtagccggggccacaggcagggcatttgtcattaatggggtcttttgagaccgcgggtgacagacaacaggagccaggccacgcgcggcgcctctgcgcgaacgctagggaggactcagcgcgcggcggccggtgacgtcagggcagcgagaggtttcgtcaccgcggcgcgggggcggggccgcctgtcacgcggcgccggcggacgcgcggcgctgggcggaggcagcggctcggggactgggcgagggccctgggcctgaggaggcgcggccgccactgcgcccagcgcctgcgcgacgcctggctgctgggccccggggcagttcagcccgcgccgctcctgcgggtcggactggggctgtggcgggagagaagatgccgcagcccgagtcccagaaggcggcgatcctgggctgcgggcaaggcggtgagtaccctctaggcggcggcctcccggcgtccctcagcacctcgagagctgcggcggcggcggcgcgcggggcctgggcaggctgggggcggcggcggggcagcgcctggctccccgcgggtcctgggctcccgcacgccccctgggcgaggctcgtgtctccgggagacgc

SEQ ID NO: 201248 - DNA, 38 bp, Homo sapiens
  chr7:151723206-151723244
  hyper
cagggcgctggcctcgttttcgcgtatttaggacggag

SEQ ID NO: 201249 - DNA, 65 bp, Homo sapiens
  chr7:154705761-154705826
  hyper
ccgagagggactgcggacccactcttggcttcctctttagaggagagatggagcggggtccgaag

SEQ ID NO: 201250 - DNA, 208 bp, Homo sapiens
  chr7:155168321-155168529
  hyper
agagattttaaattgtgttgcctgcggattttgtggttgaaagaattacctggtgacttgccaaatctctgagtttgttgaaaggagatgacctgcccttagaaacccctccattcctgcctacctccgagaccagaggctgtgcctctctttctcttttctttcctagtccccacaggagggaggaggaaggttacagcgtttgtgg

SEQ ID NO: 201251 - DNA, 35 bp, Homo sapiens
  chr7:155170943-155170978
  hyper
ggggatgggaggccgcctttgctgactgaagggcc

SEQ ID NO: 201252 - DNA, 66 bp, Homo sapiens
  chr7:155244370-155244436
  hyper
gcctgtgttaatgctccaaatggtgtcgagttgctcaactttgccgtcatcacagaggctgttgtg

SEQ ID NO: 201253 - DNA, 70 bp, Homo sapiens
  chr7:155246305-155246375
  hyper
caagtcaggacagaagggcggtccccagtcggctcctggcccactctgcttccccaacacctagggagct

SEQ ID NO: 201254 - DNA, 102 bp, Homo sapiens
  chr7:155257754-155257856
  hyper
ggaggaagtgttcaaaactacggtgctattccagtgactacatttttttaaattttgcgaagttcaacaggtctccctccggctgggtgctcactggccctg

SEQ ID NO: 201255 - DNA, 183 bp, Homo sapiens
  chr7:155261377-155261560
  hyper
tgcctaggacgtccctgacccgcgcgctcagtttcattcagtggccgtgggatgttgcatctgagtttttcctttaggccaaaactttgtcccgaggtttttctgagagggttttattctccaacagcaacaacaacatgcgaattcttaaaactagtatttatttcgattcaggcagtcagg

SEQ ID NO: 201256 - DNA, 62 bp, Homo sapiens
  chr7:155264017-155264079
  hyper
gcatactgcctcagagtaggcgattccaccagtgactcatcactcgcagagagaaaaacatc

SEQ ID NO: 201257 - DNA, 290 bp, Homo sapiens
  chr7:155264356-155264646
  hyper
atgaagatttgcagccccccccagccaacccaccccatcccttccccccacaagggtatttcatccacactgttttttaaatgcttcctagtcaaacttgaatatgcaatgagacgcgggagctttgtggcggaaatataattaaactggggaaagatgtaaaagctgaagaatgggatgacatcaggctgatttcacactcggcagtcggatcgctgggcccaagccgcgctcttgccacgcaaggcagatcaaagtgccctgccaccgctaaaaaggcaaaaggggac

SEQ ID NO: 201258 - DNA, 187 bp, Homo sapiens
  chr7:155326541-155326728
  hyper
acccaccaagaggattaaaaataatctctttcccttttaattttgtgtcccccacatcccctcctcctccccacatcccctggggacagcataaatttttaatccctgaggtttgggagggggagggggtgttaaccccttgttgaggtggcggccggaggactggaagcccggggggaaaggtccc

SEQ ID NO: 201259 - DNA, 297 bp, Homo sapiens
  chr7:155600723-155601020
  hyper
cctgtgtatctggcagcaataaaacccagtaatatggttgtagagttcaacatgcaacaactgggggtggggtagggctgggggccgccctggtaacaggtcagtgcctgcatgtttgtgggcctgccagcagttaaaaaaaaaagtcggaagggcagagtttgagtgaggtcatcttgaggattgaacgcgttttacatgaaaatcaatcagtaaaccagggtcagtgtagagctatgatgtgaggcccgttgcgcgcaggcgcacaccaccaacacgcacagggacccccatgca

SEQ ID NO: 201260 - DNA, 584 bp, Homo sapiens
  chr7:155602167-155602751
  hyper
tcccccacccttaactcctggaatcgggagaaggaaggtaggggagggatcaaccggggatacctcacagactgccagcccctacccccctcggttttaggggacctttgtggggtctgcctgataatcccggcctggctctcctcacccaacccccacttgggccgtccttccccctccttttgtgttgggaacgggaatagccactgcccaaggaaaaaagtatttgttttcgtttcgttcgtctgagggaagttgacagaaggtcagaagttcaaatgctgcctgtgcgcgcggcggcgagagtggccgggcgcggggccgctgggccctgcgtcccccggcagggcggacgggggtcggggggaggcccccgggctgggggctccggctgggacgcggaggcctagaggccaggcaggcggcggactggggatgggggcgcgtcccagggcaggccggcggagcccgcgatgcgccccggcccctgcgcgggcgcccccatctccgcgcccccgccgccggggacactacagcgagcccggcgctgctgttagctcctgcggtgcctgcgctcccgcgcg

SEQ ID NO: 201261 - DNA, 345 bp, Homo sapiens
  chr7:156433175-156433520
  hyper
cccgccaggcgatccccaaaaacgcccgctgcgcgagcctcgacgggaacgcacctgcgtctagacgctgacgccgtgcgcggggcgggggccggcgagcatgcgcagtgtggtgtggacagggcgtggttggcaagcatgcgcaatgtgggccgggcggggctggcgagcatgcgcagtatggggcggggcggggcagggctggtgagcaagcccgcggggagcgagcgcggaggcgggcgttgctacggcaacggtgggcggccagggagttgcctgagggaaaaggggcagacgtccctgggttccggtgttcgcggaggagtcgaggcacggagaggcttc

SEQ ID NO: 201262 - DNA, 459 bp, Homo sapiens
  chr7:156433521-156433980
  hyper
ggggagggacggaaagaagggtggcccgccaggcgggcggggtccatggattcggggtgagggccgtccgcggcctcgctttcgcctcctccgagccgggccggcgatggccgcagctgtgaggcgaggtcgggtcccgtagcggcgcgcagcctccttgggggactcggggtcctggttagtttccacagctccttctatctgaggggtacgaatttacggctgcctaaagccttagaacagtgatcccacgtcggtaattttagaacccggtaggaccggctgccatcaggggccccaggtgcagggtggtgtcagctttgagaggaattggagcctcgtcaccgcgcgcttcctgcatgagtggaacctcagaaaacggtcagcggggttcagaaggcaggagataacaccaagaccctacgtaggattgcatctttacgtcgtaggcttggtctc

SEQ ID NO: 201263 - DNA, 338 bp, Homo sapiens
  chr7:156792492-156792830
  hyper
gccccggcccgcgggcgataaggccgcgcctttgttcctgcccccagctgggtaaaccgcgccccgcctcgctcgccgtctcgggggcacctttgtccggcccggggcgcgcattgtccgcacggtgtgtactcggggaggggcgccaggtgcgcgggcggaatgtagggtcggcgcggggccggggggcgggcccggggccggggggtcctcaggaagcctcggccgggcccgcctcctccccgagggtcccctgcagccgcggatgggggagcccgggggcggagcggggcgcggggggcggagcgggggaggcgcgaacccggggacccccgcgc

SEQ ID NO: 201264 - DNA, 42 bp, Homo sapiens
  chr7:156794956-156794998
  hyper
tatcaaagaaggaaagtcaccggatgagggaagggacaggtc

SEQ ID NO: 201265 - DNA, 62 bp, Homo sapiens
  chr7:156796104-156796166
  hyper
ccctggctgcccagtgttggtgagggcgctgaggctgggccggctgagcccaaggggaaaat

SEQ ID NO: 201266 - DNA, 62 bp, Homo sapiens
  chr7:156796432-156796494
  hyper
gcccagcagctgcttctgcccggactcccagcagccgcgccccggccttggatgaggttgat

SEQ ID NO: 201267 - DNA, 76 bp, Homo sapiens
  chr7:156799510-156799586
  hyper
caagtggaaatggatagtttggagttaatgagaccaatttttttttttttttttgtctaggagacgtctgagtgtc

SEQ ID NO: 201268 - DNA, 249 bp, Homo sapiens
  chr7:156802164-156802413
  hyper
ataattcgctgcccgtctcatgcctgggggtccgggcgagtcctcgcaggccccgggcagagccgaggcggcttcgcagctcttcccccgctcgctgggagccaagcgcagagaggggcaggcggtgccggtggaggatgcgcgaggccctcccgccacgcgcatccacgggggccgcagggtactcacagttgaagtcgggcatcttaggcaggatcatgcccgcggtggacgcgcgcagccactggt

SEQ ID NO: 201269 - DNA, 780 bp, Homo sapiens
  chr7:156802736-156803516
  hyper
ccgccgccgcccgcgcccaggaagcccggcttgggcagcagcgcgcagtgcgcggccagcaggcgcggcggcgacgggctctcggcgcgcaggcggtcggcgggcgcagccggcggctccgaggacgcggggctgcagctgccgctagtcccgccgctcgccccgccgccgccgccgccacctccggtgccagatgcggcggcggcgagcgacgtgaccaaggccagcggcgcgctctgcgcagaggcggctcgtggggggtccaccgccagcagggcgtcgatgcggaaatttttggatttttccatcggctcgtttggggctggcgctcagggcccggtggcgggcgacgcggccgtgtgcgggctcgcggagtcagtgcgtgcggtgcaagcccgggggctcggtattgttatggtggttatttgccaataatcaaagtcgccgccggaaactcagccgagggtgaccatggtcccggcgcctcctccgtgcgggccccgccccgggccgcgctcgcacaaactcccacgcgagtgcttccccgcgtccgggcccgggagcccggttctttgcgctgcagccctcaggcgaccgcgcggaggccgctgccgccgtggtggggacccgcgcccctccgcgcacttgaagctcagcgcggcttccgattggcgcgcgcagcgggggcccggggagggccgcgggctccgccattggccgaggggcgcacctgtcaccgtcccggccgcccgccgccccgcccccgcgccgcgaggtcct

SEQ ID NO: 201270 - DNA, 333 bp, Homo sapiens
  chr7:157130634-157130967
  hyper
ggggcaggaaacagcgcaagtagaacgatcgtgccaccaccgaaggggtgccgcctgcgagctcggaggcttcagcctgtttgggaagagtaggctgagcggcgctctttgtagttttcaacgtttttattgagttgcgaattttagtaaggatttgtcgctacaatttaagccaaattattgatttagtagaaaagttagagtgaagaccgaagaaaggaaacagacgttaaccattaaagcttgattgctgctgcttcgtgtttaaccgcacttttccaaatagtgttgcgtatcagaacgattcatgatttctgaaaggaattatatgca

SEQ ID NO: 201271 - DNA, 219 bp, Homo sapiens
  chr7:157361386-157361605
  hyper
ctgcaggctcggcacgcagaggcaggtaacaaacgaccagcctcagaagcagatgtgcttgctgcaaaccaccttcctacggcccagcagaggcacaacaagcagcgaattttttccagggcctcccgtgaacacggcaccctacgttgccatagcgacgccatcccagctctgagccgcaacaaagcggcagtgtctgtgtctcacctttggccatct

SEQ ID NO: 201272 - DNA, 74 bp, Homo sapiens; identical to SEQ ID NO: 45025
  chr7:157361751-157361825
  hyper

SEQ ID NO: 201273 - DNA, 106 bp, Homo sapiens
  chr7:157476765-157476871
  hyper
tacacagtgcctcttatgtcaggccgggcccgtttttatcttgtaatcataaaggccaccaaagcaattatcgccggtcttgactggaaaagctggtcattaatta

SEQ ID NO: 201274 - DNA, 169 bp, Homo sapiens
  chr7:157731890-157732059
  hyper
agttaagtaaagcacgcaggtccccacctcaatagcgaggtttccagtatccaaattctgaattacaataagataaaataaagcacgcaggtctcctgtctcactagcaaggtttccatcactgagcggccacaggggctggtggctgtcctgcaggacagcacacatg

SEQ ID NO: 201275 - DNA, 51 bp, Homo sapiens
  chr7:158937995-158938046
  hyper
gggggagagcggccggcgcggggccgggagaggaggaccgggccaggtgtg

SEQ ID NO: 201276 - DNA, 64 bp, Homo sapiens
  chr7:158938146-158938210
  hyper
cgccgtctttgtagccagtggggctaggttggggcatctgaaaatggagaaaatcagagtgctt

SEQ ID NO: 201277 - DNA, 46 bp, Homo sapiens
  chr8:494135-494181
  hyper
gcccacttaacattgagctacggtcgtccaaagctgcttagtgtcc

SEQ ID NO: 201278 - DNA, 68 bp, Homo sapiens
  chr8:495635-495703
  hyper
cggggcctgggcgccgggcatccgggactcatcccctccggcgcccgaggtcgcgggatagtgggggc

SEQ ID NO: 201279 - DNA, 168 bp, Homo sapiens
  chr8:4849835-4850003
  hyper
aagcagccgagctagggccgccgcggtctccacgcagcaacctctgctaattgcgggggaaggcagccggagcgtgcggaactcgagggaaccgagagtgagctcagaggctgagttgcctgcctggaaaggaggaagccccgggcccagttaggcttggagtgcagg

SEQ ID NO: 201280 - DNA, 197 bp, Homo sapiens
  chr8:4851145-4851342
  hyper
ccacagtgaatgtatctgacttggaagccggtccagaactcctagcctgtttcacgcaccttgccaacaccttacaacttgcaaggagcgaagtccgggggagaggaaagcgggggcgaccttctagaggcagctactcctcgccggctgaggacgttggagagggaaggaggagaggaggaatggggtgtatgggt

SEQ ID NO: 201281 - DNA, 117 bp, Homo sapiens
  chr8:4851375-4851492
  hyper
attggtaccaaaacccccgtagagagcccgaactttccaggccggcttcacccgggacgctttcccaggcgcgtcgggtccggggagaaagtcctgggaactgcccctcagccaccc

SEQ ID NO: 201282 - DNA, 73 bp, Homo sapiens
  chr8:4851508-4851581
  hyper
cgtctcggaggaggcaacaccgccccggcggagcacagttccagcccaactcgtattgggttcctttctcctt

SEQ ID NO: 201283 - DNA, 125 bp, Homo sapiens
  chr8:4851611-4851736
  hyper
tctcctgtgagcccaagagagggggaaggaatggcggggtggggcgggggcccaggagggctggggagagcgcgatggaagctccctcccgtgcatcgcgttccccgagcttcggcgatggagca

SEQ ID NO: 201284 - DNA, 34 bp, Homo sapiens
  chr8:4851780-4851814
  hyper
cgcacactcgcgtccgcacacggggcctccgagg

SEQ ID NO: 201285 - DNA, 87 bp, Homo sapiens
  chr8:4852588-4852675
  hyper
ggagacttgttgggcgctcgggtgggggaagctcacgccgcacaccggggaggaacaatgtaatccggcaactccagcaaactggag

SEQ ID NO: 201286 - DNA, 149 bp, Homo sapiens
  chr8:6673901-6674050
  hyper
tccttaaaataattgctttgcggccaccaggtggcagccggagacgggagctcgcaggctgacaaaggagcctggccccgtggctgcagctggtcaaaatggcagatggtccagaaggctctttgtacgcccatctgggtcagcttatt

SEQ ID NO: 201287 - DNA, 207 bp, Homo sapiens
  chr8:6691844-6692051
  hyper
tagaccgcggggtccgggctcaggcagcccttagcgcccaggctgggtccggctgtcaccaccccgagcgtcctgcggcagcctcccttgcacgaaaagccttcggtgctgcagggctggggaatgctgacacccagtccgtgcccagctggagggcaagggaggacacctggggtgggtgccgacccccgcaggtcctgtctcagc

SEQ ID NO: 201288 - DNA, 224 bp, Homo sapiens
  chr8:6692462-6692686
  hyper
ctccccccgccaccccttctgcgagcggcctccaagtcgcagggtccccctggacggccgggggtcgggggagagcccgggcgcccccagacttgcgctcagcacatcttggcatcgcagcactttgcaaagcttgtgatggaaggaagggcggatacatctcccctgcttctgcgaggggatcttgcatgcgtggggcggggggatcgtgcatgggcgggagg

SEQ ID NO: 201289 - DNA, 211 bp, Homo sapiens
  chr8:6693170-6693381
  hyper
gggagggagggaggatgcttggggtttctggcttccagggtgggtggggacgaggtggtggagtccagctcaggtccgggctcctgataagggcagaagcgggttctgcgctgcccccaaccctgtaaccgccaggaaagcgcttggtgagcgtcgggactgcgcaggttcctcgggaggtggctaaactggccaccgcctctggggccgc

SEQ ID NO: 201290 - DNA, 120 bp, Homo sapiens
  chr8:8639980-8640100
  hyper
tcaactagtaagggaagaacacctcaagtgagcatgcgcacaactccagtaatacactgcgcatgcgccccctcccaagcgctggcaggcctctgcgtatgtggacggccaaccccaagg

SEQ ID NO: 201291 - DNA, 218 bp, Homo sapiens
  chr8:8750284-8750502
  hyper
cgcaggaccaggacgcgcaggctgcccagcgccgaccccagcccctcgggtacctcctccaggccgttgttccccaggttcagtgcctcaatgtccccgaggttggccggcagcacgagctggggggaggcgggggactcgagcgcgtcggccccggccccggggcaggccccggcggcggtaagcgtgagctggcgcaggttgctccgcagcttcct

SEQ ID NO: 201292 - DNA, 201 bp, Homo sapiens
  chr8:8820810-8821011
  hyper
tggaaaggaaccaggcgggctgaggaactggcgcgccctcgtccgcccacaagtccttggaaagcgcaggcctcgtgcgctctccagcgcccttccagggcgcaagggcaggacaggtacatcccgcgtgctgcggtggcgatcagcgcggacacggagcctggctccacccgtccgcccagccttggggttctgccagag

SEQ ID NO: 201293 - DNA, 221 bp, Homo sapiens
  chr8:9761155-9761376
  hyper
cagcatcctccccgccgcagctcccccaatcacacagacaatgagataacagcgacgtcttccaaaggctctttgttctcccccatcctttcgcatccaggctttttcctgcaaagcggagggggtggagggatgggggtgtgggtggaagtgggagacggaggggtgcctcccccgtgttaattaccccggctcccctcgcccctttccccgcgcctcgc

SEQ ID NO: 201294 - DNA, 210 bp, Homo sapiens
  chr8:10587212-10587422
  hyper
tcttcgggaatattcgttaattataatttcatctgtgacagccttcctctgagatggcccaattgtaaggtccagggaatgctggcttttcccgcttcggtattcctagtaaacgcctgttccacccagcctcaaacgtttccgtccctgccctgtccatgcacgccggtccctgtcgccaggcgtcctggcctggccgctgccccgtct

SEQ ID NO: 201295 - DNA, 305 bp, Homo sapiens
  chr8:10873136-10873441
  hyper
agcggggctggctgcgttcgggacccagcgccccccaggccctccaaagactggttgagctcagaaccagaaggagcgagggagcagagaaagccgggggcgggctcggggtaagacaggaagggagtgagattaaggtgagaagtgggaggggaaggagggaaaccgagaggaattgagggtgggctcggcgtatctagagcagtccgcggaggacgctgaggctcgccggggaagtgctgtgcccgaggcgccccaaaggtgggcggcggtgccagctcagacccacgcctctgtccaagtcc

SEQ ID NO: 201296 - DNA, 240 bp, Homo sapiens
  chr8:10873649-10873889
  hyper
gggtgcagctcccctggcacagcccgacggtgggagagggcggccagctggactaaaagccccgtccccgggcgggaccttcctccccgcaccctgacgcggaggttggccgggggcctctgcgtccctctgccccgcgccctggatggggagggtctgggctccgcgccgcgaggcagcgcgacggctgcgggcgacttggcgtgcggtgctgaggaccctgggggagtgtgcgccgcg

SEQ ID NO: 201297 - DNA, 154 bp, Homo sapiens
  chr8:10874042-10874196
  hyper
catccctgcctggctgccacccggaagtccccgtccgcgccccgacagcgccgccctccggctggctgcagcgcgggccctcggtagggggcgttccaaggccccgcctcctcgtcactgccacggatgacgacgccccaggcccccggccccg

SEQ ID NO: 201298 - DNA, 191 bp, Homo sapiens
  chr8:10950049-10950240
  hyper
ggacagggggtatcccgggtgataaaggttagaaagagaaactgctgatctcacgttcgtagggagctggccatggtcctgccctgcaaacaagagccgggagactgcaagaaaggctgagtaaagcccaaagagaaactcttccccctggatgatgatcaagaacctcattctgccggcttctggaggaa

SEQ ID NO: 201299 - DNA, 74 bp, Homo sapiens
  chr8:11058799-11058873
  hyper
gctgagcgaagcccacccccacgccaccgccatcggatttcgccgccatcttgactctcttcccagctccggag

SEQ ID NO: 201300 - DNA, 174 bp, Homo sapiens
  chr8:11536631-11536805
  hyper
ccaattgtctaaacactacacgaagtggagattcgaggcaattatccgaataattgcgggggggggcactttcgcctgaattatctagataaaagagcgacacaggagaatgtcagtggccctgaaggccctgcctcggatctccacggtcgcgcgaattcgggcaatttttct

SEQ ID NO: 201301 - DNA, 212 bp, Homo sapiens
  chr8:11537283-11537495
  hyper
gagggagatggagacccccgaataatggaaacgcagaagcctcagagacaccagcaacagatagagaagtgtccctaagaggggaaaatgaggaagagggtaacagtattgttaactggccatgaattttaatccctgttgtgtgtcgccgaatagtttacaaactctttttgcactggggttttgtttctcccactccccgcatgatgaga

SEQ ID NO: 201302 - DNA, 170 bp, Homo sapiens
  chr8:11540256-11540426
  hyper
ttactatcctactggtcagacgtagtagtccccgtttgtgcaaaaacacctcttggccgtggcgatgtggggagggagtgtggtccaatagtccttctcacttctcagaggttgacacagaatctaacagttaccctcttagaactactccggagaattcggtaggtagt

SEQ ID NO: 201303 - DNA, 274 bp, Homo sapiens
  chr8:11540456-11540730
  hyper
ttaaatgctatgggtgtggggacaagatactgggttcagagaaagttctgggaagagtcttgaggtggaaacagcctcggtgcgcgggggtttctcgacagctctctggtgtctcttaccccctaggttttcccagccttctcgccggattgccttggaaagctcttggtgtggtggccactggggtttgctccagcagagataatggaggggctcgctatctaatctggacagcagcaggaacaatccattagacctcagcatttatccggag

SEQ ID NO: 201304 - DNA, 142 bp, Homo sapiens
  chr8:11540851-11540993
  hyper
cgtattatgcttgctgatgccggtaaatagtaattctacccattgtgactgttaggaagtagcagaatccttttgggttggaggtatcgttttttttcttttaagaagttcaatgagctttacattgtctcattcaaactca

SEQ ID NO: 201305 - DNA, 174 bp, Homo sapiens
  chr8:11554711-11554885
  hyper
accagaagtcccactctaaccggagagcccctgtccttctgtcaaacacacgcacaggactaacgagggggatgagtggaaaccagccgcaaagaaatggagtgggaggttcttctttaaaatccattccgttcagaacacagtgaacaccctttgacagaacaaggactatct

SEQ ID NO: 201306 - DNA, 54 bp, Homo sapiens
  chr8:11554915-11554969
  hyper
ttgagactgttgttacaagaaaccgatgatttctaacaataggaacctcccagc

SEQ ID NO: 201307 - DNA, 162 bp, Homo sapiens
  chr8:11555521-11555683
  hyper
aggagccctggactctgggttgacctcgtcccggtcgggttctctctcctcccacccaggcccggccgctttctggcgtccgtcctctcccaggaggtcctggcctctctctgcgtcgccaagtctcttgactcccagctcgccttaacttcccagggtctg

SEQ ID NO: 201308 - DNA, 123 bp, Homo sapiens
  chr8:11561268-11561391
  hyper
aactagcatccagccgggcaccccgggtgacccagtgccccacacaagatcgagagttgagcccaagaggtcaccttcttctctactggccccgcccctcgcccgccgctgcgggatgaggac

SEQ ID NO: 201309 - DNA, 95 bp, Homo sapiens
  chr8:11665928-11666023
  hyper
tattcgagtagagggcgagcccgtcccgcccctcgtcgggcgcttcccagatctgcttgagtctatggaggaaaaactccgcggggtccgcgatt

SEQ ID NO: 201310 - DNA, 155 bp, Homo sapiens
  chr8:11726004-11726159
  hyper
tgcctgccgagttggcgggggtggggtggtggagagggcgccgtcgcttatttcattcattcagaagccgctgcagaggctgggggtggcgaggctgtggaccccacagaacagcctttagaagggccactttgttgttcagagaacgtacccac

SEQ ID NO: 201311 - DNA, 238 bp, Homo sapiens
  chr8:12990148-12990386
  hyper
agtgaaccagggcttcccttcacgggttgcgaccgatccggagcccgcctggtgcgctggcccgcggtccccaggcaaaaggtaatcaagagtcactcctccaaaattcaaactccctccccaaactgcgagtcctgctatccccacaccacctccaagaaaatccggagactctgcagaaagcgtttaaagagcacagaacaggcaccgacttgacaaggcggggtgacactttctc

SEQ ID NO: 201312 - DNA, 68 bp, Homo sapiens
  chr8:12990431-12990499
  hyper
caagacgcaagtctagcttacgtgttaggatcatggtgtccggcttctttctgcacatcaagcacggc

SEQ ID NO: 201313 - DNA, 302 bp, Homo sapiens
  chr8:15094771-15095073
  hyper
ggagacgagccggcaagaggcgcagggtctgcaccccaaatgctgccgtcacggaccaggaggaggacggggtggccgctggcgggaggagcaggcggggagggcgcccagcccgggagtgcagcctggctcgggagaaccaccctccgtgtcctcggccccagcaggggcgcctgcgcccgggtgcgcgtccccccaacgccccctcgtcgtcccgcgggaccaccaactactccgcgccgctggaggagccgcgggaaggagaggggagagcagggagcgccgagaagcggccgcgaagc

SEQ ID NO: 201314 - DNA, 220 bp, Homo sapiens
  chr8:15095136-15095356
  hyper
cgcaactaaacgaagtggagaggaaccgggcgagtggcacccaaaaacaatctagtcttttagtttccagcttaaactcagctttatcctcctccaagccccggcagctcctctcagtctcattctccgtggtcacgccgcctccaccgggttaaaaataaggaaaataaataaataataatgataattcactttattttacttcctcaaagatttagtg

SEQ ID NO: 201315 - DNA, 125 bp, Homo sapiens
  chr8:15398092-15398217
  hyper
ttggccttcccctgtgggcgggggcgggccagggtgggccgcgttgccaggcagccctgccgtgttgctaggcagcctggtcgccggcgtgggcgatgccggcgctggggcgggagccgcgaggg

SEQ ID NO: 201316 - DNA, 84 bp, Homo sapiens
  chr8:16884239-16884323
  hyper
caaatgcttatacctcatttgtgtcgtatatgtgaagatacaattgcaaatcgttcacgaccttgagtcaagaccttgagtttc

SEQ ID NO: 201317 - DNA, 128 bp, Homo sapiens
  chr8:17013473-17013601
  hyper
cttcccccgaaagcccgagtagtaaagggaggctccttgcggcccccgcgggctcccagggacccgcaagttgaagcgcgagggttccacgcgggctgcggggacgcgggcctcggtgctgcagactt

SEQ ID NO: 201318 - DNA, 200 bp, Homo sapiens
  chr8:17434527-17434727
  hyper
ggaagaagtgctgcgcaccgcggctccgccagggggcaggagaagtcacattacacagagaactaaaaaaaaaaaaaattccccaactttttcccccaaaccttgttcctcctgaagaaaccgaatcctcccgcttcggcgtcccaggagcccgcccctcgcccgccgcctcccctgcgtccccgccccgcgcagccgcc

SEQ ID NO: 201319 - DNA, 1268 bp, Homo sapiens
  chr8:17658014-17659282
  hyper
gtagaaaggagtacgtcttcaaaaaagaacaaaaacgttcctcagtgaacacctaagtccactaagcactatagagtagtcaataaggtcaccttaattaagatgagatttttctagagcgtgaaaaagtgcaaacaagctgcagaaagtagcgaggcgccacgaggggtctttgggacctgcagcaaccctattccacccgctttctcggccccgcttgcttctgctgagaaggggccctgcgagaaggctgggaccgccgggcccgggtgggcggcgtaaggagtccacagtcaagcccctcggtcactttcaaggtgacagcgacgagatccgcatccgtcccttccgcaggctctgcgctggcccacgtgagacccgcctccgctccgccggcgctgccgccccctttagccctcagcttcggcccccaggcccctggaacgccccctcccctccccgaggaccggtcccgtcaccctgggcggcgcgctcgcctgtcccctccccaccccggccgccgggcagcgggaacagattccagcgcgcacttacccgcagctccttcaagcgctccgggagcaaagacgcagaggcggggagggctggcgccctttgcaccactggcggggtcgccgagaacccgccccggaggtctcgggggcggcgtctgcacctgggggcgcgcggcgcggcaccaccccacgcctgcggcggctaccaggcgggacccggagccccggcctccccgcctccccgcctccggggccgccagggggtggagcagggcggggagttcgggaaacttgtaaatagccgaactcgggcctcccgccccaacccggggcggctccttccgaaggctccactccagcggctcgctgcgggagaccaaggccagccgccgtcccaggggacggccctcggggaacctgaatgacgtgcgaggccgtacctcggggcgctggactccgctcgggcgctcccgctctccgctcccgctctcgggtcccaatcccgacgctccgcgcgctcccggactaagtgcggacgcgccccacgccccccggcgccagcccgggacagcgctgcacctgttgccacgtgcgacgcggcgctcagcggctgccactgccgccggcgcacctggctgcaccgcgcgtcccgggaccacgctcgtccccgcaggagcccggggctccgccgcacccagcgctagggcccaggccgggccgcggtaggtgggggatctgactcctgcttgcctc

SEQ ID NO: 201320 - DNA, 90 bp, Homo sapiens
  chr8:17659329-17659419
  hyper
gtgggaaggttgcagaattatcagggcggaagcttgcaaggaaggagtcgtgattgtctcttagaagggctgattcgcagtctgtattat

SEQ ID NO: 201321 - DNA, 180 bp, Homo sapiens
  chr8:18870741-18870921
  hyper
tgaccgggcaaagaaagatcggcatacgaggtcctctttcatgttgccttcttttgatagcttttctccaaagtctgaggttttcaaagccgaggtatgaactaaaacccctaaaccttaacaccacaaagttgaccctgctgggctcctaaaaaacacaaagcaagcaagcgcgaagag

SEQ ID NO: 201322 - DNA, 480 bp, Homo sapiens
  chr8:19171139-19171619
  hyper
atgtgggcgcggcggggcggcgcgggcgggacggctacaagagctgttttgcgtccgggccggagtatttgctcagcccgcctgcgccgcttgggacgcctctgcctttccctccctcccttccccgacggcttctggcggccaagtggatgtggcgggtgatcgagccaccctgcccaggggcgcccagcactggtaggtgctgggggtggggcgaggctttggggagagtgtgcgtggggtgggagtagggggaagggaatttcctcggaggttgcatgggtgcatgggaggcgcaggggccagagcgggcgggcggaagcctcacccccgcctccaccccttcgcggcgcccggggcgggctcaggtgcggggttgggcggcgagagcggccgcggcgggtgtccggtgtccggtgtccggtgtccggtgtctggagccgctggctaggtgagcggcggtccccggggcctgggggc

SEQ ID NO: 201323 - DNA, 610 bp, Homo sapiens
  chr8:19796823-19797433
  hyper
ctgccatcccctttaaagggcgacttgctcagcgccaaaccgcggctccagccctctccagcctccggctcagccggctcatcagtcggtccgcgccttgcagctcctccagagggacgcgccccgagatggagagcaaagccctgctcgtgctgactctggccgtgtggctccagagtctgaccgcctcccgcggaggggtggccgccgccgaccgtaagttttgcgcgcaaactcccctccacctgcagacccggcgggtggccactgccacccgaactgaggatgagaagaaggaagttggaaggggcggtggatgcgcccagggactctcccagcctgggctctagccccgaaacggtccccggagtgggatccaggaggggccgggagggaatctcctcccgatcgtgaagcggcggcgcccagttcccgctttttctctctgccgggttcccgcgctatcccttccactctggctgggaccgcgttcccgggctcgcaggctccgccggggaggttccggggtgtgggggccgggacggcggaggcggggagtaagggcccggctggcggtgacctgcagtcacctctctgccggaggggccct

SEQ ID NO: 201324 - DNA, 70 bp, Homo sapiens
  chr8:19798019-19798089
  hyper
atgtctcagacctgtccgcaatggaggcagcctgcttaattcgaacctcgattcagtaaacatgcaacag

SEQ ID NO: 201325 - DNA, 210 bp, Homo sapiens
  chr8:21776868-21777078
  hyper
atccaggagccctcaccacgcaaacgagcagaaggcagcgccaactcccactccagcgcccgcctgccggagcgagcgcggcccctttaaaaaccatgtaaacaaagctttgttcccccagctgcccctccttcgcgctcccccggcccgctccttcctcccacccggcgtctccgggccgctgacgttgcccgcgcctttacgccgtcc

SEQ ID NO: 201326 - DNA, 124 bp, Homo sapiens
  chr8:21906319-21906443
  hyper
atgggttatctgaagcggggcgggggatccgaccaccgaacacccctggaaacgagcctgcccgtccccggccgggcgtggccacggcaggtgcaggcgcggcccgcagcgctggggcccccag

SEQ ID NO: 201327 - DNA, 100 bp, Homo sapiens
  chr8:21987761-21987861
  hyper
ttttctggagccaccgctccgccgtggtctggccgcgtcgggcttcctaactttcaggtgtcagaatgtgtggcccagcccacaggggcacggggaacac

SEQ ID NO: 201328 - DNA, 337 bp, Homo sapiens
  chr8:21988075-21988412
  hyper
gcgcgctcgcgctctccttcccccggggcggcgggggcgctctagggccgcaggttggaggggtcggactccgggatctgcaggatgcggcacacggcgcggatcggccgcaccagcttctgggccgaggccgtaggttgcgccatgggacgccgagactccgtgctgcgccgcggggagggccgggccggggctagggagcgggtgcccccggagggagagaaggcgccgggccggggggaacacgcgccccgggtcggagatggccgagttgggggaaaggccgaggggccggggaagggggtcgtgcctggatggtgggggccgatcctgggac

SEQ ID NO: 201329 - DNA, 206 bp, Homo sapiens
  chr8:21988468-21988674
  hyper
gagcgcggcggagagcgcagcaggacctctgatcgccatcgccagaagcgcaactgagagtggggaagctgctccgccggtttcctcctccagcaccctgcgggaaacaggagcccgtgattcggcggccgcgcctgggcctgccccctcccgggccccgggggcttccgccaacgccccggcgatgccaccggctgcgcacgggg

SEQ ID NO: 201330 - DNA, 196 bp, Homo sapiens
  chr8:22224959-22225155
  hyper
ggcggaggagccccgcaccccaggctggggcagtgggtgggggcggggacagccctgcgccgaggaccgggcgccgctcccgggcaccggcacacgcccggacggctgggtggaggctgcacctggccgtggtgccgcgctggcgaggggagaggtcaaggcgcggcctgtccgcctggagggtgcgggatgctag

SEQ ID NO: 201331 - DNA, 70 bp, Homo sapiens
  chr8:22419405-22419475
  hyper
acctgcccacaggcccggcccggcaacatcttccagtgggtgagcacagtggggcggggccgagggctgc

SEQ ID NO: 201332 - DNA, 360 bp, Homo sapiens
  chr8:22437003-22437363
  hyper
ggcgcccgcagcgcggagtccactgaccggctcaaaggtctgggaatctcggggcggccgcgagccggcctcggggactggggtgggggcggtgctgggaacagaggctaggcctgggcccaaggggaaggcagccggggatggagcggacagaccgctggtgctcttgatagattctcgcagcacttgcgtccccagggcagccccaggatgggtgctgggcagggtggtgcccagcctggcaccgcggcttcctgcctggattggctcctggctccagagctagaggctcaggaaatcccacaggggtctgtctgcaagggcacttccttgcccagcggaggggctgtggatgggagg

SEQ ID NO: 201333 - DNA, 236 bp, Homo sapiens
  chr8:22723056-22723292
  hyper
tgccggtgccggtgccgcagccgccggggaaggaattccctccgcccgggcgcacgcggccccccgcccccgccccatcctgctcagaaaagcctcggatgctgcccgggaggaggaggcaaaggaagactccgttccagccacctcccgccgcccggatcccagaggaaaggggagaggaatctccccaccggatctggtgggcggaagatgggccacgcgggaaggagatcggc

SEQ ID NO: 201334 - DNA, 274 bp, Homo sapiens
  chr8:22925507-22925781
  hyper
ttatcacggatacttgccaagaggtggcaagaaaggctcttcccaggccaaaatgcagctgctattatcaagcaggtcaggccccaagtgccacaactcccttctcctaaatctcgttttcccaaggaaccccaaacaatggcattggcgatgagcggccccgcacgcgtaggggcgcagccgctaaggaggggaaggggcctctccagctgcgcccgcgacgactcccgcgcacggaacggaaccactgggccgcagcgaccacaggggagtt

SEQ ID NO: 201335 - DNA, 135 bp, Homo sapiens
  chr8:23021590-23021725
  hyper
gtcagttgtactcccttcccgcagtcacttccaggcactcaggctgggtctcccccagcacctccaggagggcccaggttgtgtgggtgggtgcatggacggacaggaactggctctttccggcagcggtgaccc

SEQ ID NO: 201336 - DNA, 102 bp, Homo sapiens
  chr8:23082555-23082657
  hyper
tagctggtggtggcgccatcctgccaggtcaatccaagaagcagcgtgcttggctatgacaagacagaacttcgcattcggagttcagggcacccctgaccc

SEQ ID NO: 201337 - DNA, 172 bp, Homo sapiens; identical to SEQ ID NO: 116316
  chr8:23082729-23082901
  hyper

SEQ ID NO: 201338 - DNA, 194 bp, Homo sapiens
  chr8:23386092-23386286
  hyper
ggggacggattttccccgagacactgtcacccatgcctccagctctgggcataccccactgcggcccctccccaatgacctcccctgcccctcgcggaccagcccatcctcaagatagtacaactttccgggccaccccacgtctcctctcgcccccgtccggttgcttggaaatgtgcacgggacggtgacgt

SEQ ID NO: 201339 - DNA, 44 bp, Homo sapiens
  chr8:23539860-23539904
  hyper
ggtggagggcggtggcgctgcagtcgcgccggcttctgagcccc

SEQ ID NO: 201340 - DNA, 92 bp, Homo sapiens
  chr8:23563699-23563791
  hyper
ttttttggactcctcgagagaaaatggagagagtctcgaacccaggagataggaggcgtattttccccatgcacccatggatcacgcccccg

SEQ ID NO: 201341 - DNA, 182 bp, Homo sapiens
  chr8:23564470-23564652
  hyper
gcttggatctccgtcaatacggtactagcgggagcttccgaggtcaacctagggtccacggggaccctcctagtggacatgcggggattggaggtggagtccttgctgtgcaacccgatccggtccatccagcctggtcttagctcaactctgcattcttatggcggaggaaagctaagata

SEQ ID NO: 201342 - DNA, 60 bp, Homo sapiens
  chr8:23572273-23572333
  hyper
cgtgcgtgtgtgcatgtgtgtgtgtgtgcgcgcgcgtgtgtgtgtctgtagagccgacag

SEQ ID NO: 201343 - DNA, 253 bp, Homo sapiens
  chr8:24772351-24772604
  hyper
aggagcgccacaaccacgacctcagcagctaccaggtaggaaccgcggctgcgcggccagcctgcgccagcgccagcgccgcgcgcccccgacacttgggctcgtgcccaggcgccctctccgccgcgctccctggtggccgctcgctagagcacgcgcgccgcagacctagggtatttgcggatcagcgtcctcgcccatctcatcctccacactccgcccccacccacctgccccagctgctaagggtctt

SEQ ID NO: 201344 - DNA, 327 bp, Homo sapiens
  chr8:24772891-24773218
  hyper
ccaggaagtgtcctattgtcttactgatcttgtatgttcatttgagaatcgcttagatttaaaagaaaaagggggtgggacggggggctgggagtcaggtgtcagcgaggtttgcagaagtggagggagacgggaggaggccagggggaaggggtagcaagtggtttgcgaaggaagttgctgtttgcaaggatgagtctggggagattctctgtgtctgtttcaggacaccatccagcagctggaaaatgagcttcggggcacaaagtgggaaatggctcgtcatttgcgcgaataccaggacctcctcaacgtcaagatggctct

SEQ ID NO: 201345 - DNA, 304 bp, Homo sapiens
  chr8:24812836-24813140
  hyper
ccacccctcccacacagtggccaaggagccaagccctatccctaagagctgcgtgcagccgcaccacccctggtctccactttctgggcgcaccaactcccccccttgctcgagtcccccgcccccctgtgtttctggccgtgccgcacctgcatagcgctgatgtcggcgttctgcttgtcctccagctcctgcagctgcttctccagcgcttcattcatgccccggcatgcttcgatttccagggtcttggccttgagcagacgacggctctcggacacctcgtccttggcggcgcgcacgg

SEQ ID NO: 201346 - DNA, 302 bp, Homo sapiens
  chr8:25041946-25042248
  hyper
cgggacccagcctccggggtatcagccgggtggggagggcgggagaaaggcaaagtgccgccagcgtcaaagtcccgccggcccaggaagccgctccagggaagcgcgcgaggcggagccgcagtcggcccccgcccggcagagcgcagagagcggcgcgggcgggagaggccgggcgcccgcggctcggaggcggccccggcgggcggagggtgcggccggcgggagggactggggcggcgccaggaggggcgcgcactgctgcgctgcagcccggcccagcaggtgaccgcgggcggcgc

SEQ ID NO: 201347 - DNA, 250 bp, Homo sapiens
  chr8:25042284-25042534
  hyper
gcggcccgcggagtccagcgaagtttggcggaacatggcggaagcgtctggggcacgcaggagcgcggggcggcggcggccggagcccgaggagctgtagcagccttagtcgccgccgccgcggggcgaggtcgccgccatggcccgctggatcccgaccaagaggcagaagtacggggttggtgagtgcgcgccccaccttgtcccggcccgacccacgcggccaagttcgcggacagcggccctgcca

SEQ ID NO: 201348 - DNA, 63 bp, Homo sapiens
  chr8:25042567-25042630
  hyper
gggggctcggcccggctgcgcagctctgggagccggggacggtaggagtcctctccagggagc

SEQ ID NO: 201349 - DNA, 106 bp, Homo sapiens
  chr8:25042631-25042737
  hyper
ccgatggggaagtcgcccagggtttggggactccgagtgcttccaagtgcagctgagcttcgggaccgtaatcccgctcttgcatcccaatctccggcacttcaca

SEQ ID NO: 201350 - DNA, 292 bp, Homo sapiens
  chr8:25042833-25043125
  hyper
ggagtaggtgaccagcccgggtcggcacatggactggtgctcattgtcccagtgctttctgccccccgctttcgtaggttcttctcagacgccccttaagtgaggagttgagggtggaaagccgccctgccccctttcctccagagactgggatcttgatgacagttgtgagctggatggaaactagagtcgtggcgtggaagtgatggaagggacaggaagttgtggcacgggaagggggtggctggcccctggggctgtttgtgcgcactcatcccctaacggagcctgt

SEQ ID NO: 201351 - DNA, 257 bp, Homo sapiens
  chr8:25903211-25903468
  hyper
gaagcctccctggatcctgcctctagatgtaggcttttgtagcctgccgggaggcacgttcgttcccggggttcggatctgtgtgcatgcttgtgagcgtggccacatgtgcttatgttttgcgcaaacgtcccccagagcacccagctccctgaatggctccccaggtctcctggagttccatggtgatatcagatgttgtgtgcggcttgcacgttgctgagagtggagaacatatgaaagaaggcgggggatgg

SEQ ID NO: 201352 - DNA, 44 bp, Homo sapiens
  chr8:25904367-25904411
  hyper
ggtccgaactgcggagattcgcttgaaaacggatagggggttag

SEQ ID NO: 201353 - DNA, 210 bp, Homo sapiens
  chr8:25907061-25907271
  hyper
cggaaatagaggcccgggaggtgtgtgtgctgcggaacaggctgtctgtatagggaagtgattgatagcttccacgcgaacctggggacccgatttcccaggtgggaggggtgactttcacgtgaagcccctgctgggggccttgctggggtaaatcggctggccgattacagcccctttcagggaactgtgcacgaaggcggtggcatc

SEQ ID NO: 201354 - DNA, 82 bp, Homo sapiens
  chr8:25910858-25910940
  hyper
atgttgagtttcaatctcaccgttactgcctcctagtggcggatacggcggcaatagtggcgcacattcaaggcaggaagca

SEQ ID NO: 201355 - DNA, 66 bp, Homo sapiens
  chr8:26150336-26150402
  hyper
cctcagtacttgcacgtgaaatagaaacattccgagatgagaccagttttccgtgctgtattcatt

SEQ ID NO: 201356 - DNA, 50 bp, Homo sapiens
  chr8:26370013-26370063
  hyper
ctgtgggggtggttggtaaccgcatttaatcctgggctgacaatgggact

SEQ ID NO: 201357 - DNA, 166 bp, Homo sapiens
  chr8:26370101-26370267
  hyper
gtaaacggcctctcagcccaaacccaccctggttactgagcatgcccagaactccctcccgggccaccaaaggaggggcaccatttctgcaggattttgccactgtggaaagagaggcggagctgtcatcgcgcagaggcagggactgatacgcggaaaggacgtg

SEQ ID NO: 201358 - DNA, 68 bp, Homo sapiens
  chr8:26370481-26370549
  hyper
ttactccccaaacacgtggcatctggtaacccgggaaacgctgcgactgtggcgcagtgcgcaacagg

SEQ ID NO: 201359 - DNA, 205 bp, Homo sapiens
  chr8:26371212-26371417
  hyper
cccacctccgccatgcggcggggcagaggcgcctgggccaggcaggtggaggagaggggcactggggctgggggctgcgtcctccggtcctcactccgcgtgccctgcccgatacttacccaggcgcggagagcggtcagcgggccctccgctccgcatccattagctggtggtctggccgcttcacttccggagcgcggggcta

SEQ ID NO: 201360 - DNA, 270 bp, Homo sapiens
  chr8:26372150-26372420
  hyper
cggagggcctcgggcaaagaagccctgcagaacatcaacgaccaggtcggtgtgggggttgggggtggagacggaggacggggcgcggggatcgcccctccctcgcccctgagcccggcgcgcccgccttcatgccccgccctggacctcgcctcccgcatctgcacgcgcaccccgccctacccgccccttctccgcgcagggtgcggcgaggctcgggctgggcggtgggcggccgtgcgcccacaaaggctgcccgcgtctccttga

SEQ ID NO: 201361 - DNA, 200 bp, Homo sapiens
  chr8:26435404-26435604
  hyper
aaagggagtggctggcggcgcatgcgccacggtggccgacttgaaccgaggcttttattgctgtagtttatttccacccccttccctcctgtttctctctctccttctctctctctctctctctctctcttttttttccgccctagctggggctgtgttggaggagaggaagaaagagagacagaggattgcattcatcc

SEQ ID NO: 201362 - DNA, 272 bp, Homo sapiens
  chr8:26436526-26436798
  hyper
cgggctctttttcacgtctcttttccgccccttctgccgctcaggaggcgtccgtgttggtgcatacaaagcggactgcagggtgggcgcggggaccgcggcgagcggccgggcgctaatggcgctgcgcgacgcgggagcagatggcccggccccggccagacaatgatcgcggcggccggagggctcggcgcagtgctggggcctggacttgttggtttgcaaaccacggggaaaacgtctgtgccgtgaattagcgatgcctcagagat

SEQ ID NO: 201363 - DNA, 312 bp, Homo sapiens
  chr8:26724653-26724965
  hyper
tgcattttttaaaaagagtcaaaataagaaaagaaaaaaaaatgcagataaccggtaactccacaatcacccttttaatattcagctccccgacaccagaaaagaatagcaaggaactttgcagctctcgctgacgtaactcaggcagtagcccagctagtaccgtaatctcctgctgctaccgtattactctacggcaacaggcacaagtgcgtatacagctgtaatgttttcctctggcctagagggggttgggttctagcgtttctttaaaaaggtttgtgtgtgtgtgtgtgtgtgtgtgcgcgcgcg

SEQ ID NO: 201364 - DNA, 78 bp, Homo sapiens
  chr8:27168528-27168606
  hyper
agggtgtggttggtgcgcaggtcggcgggtgacgcgcggtctttgcacactgggcaggtgggcgacacctgcacctcc

SEQ ID NO: 201365 - DNA, 204 bp, Homo sapiens
  chr8:27348568-27348772
  hyper
cagagggcggagtcccgttaagggggtgtggggaggaggcggggccagggcaggggcggggcagagccgggccaagctgggcgggtcatgcgccctggccttcgcgcatctcccaggttagctgcgtgtccgggtgctaggctgcagacccgccgccatgacgctgcgcgcggccgtcttcgaccttgacggggtgctggcgct

SEQ ID NO: 201366 - DNA, 127 bp, Homo sapiens
  chr8:27491564-27491691
  hyper
cgcgccggagcatgagtcccggccggagccccacggccgcgggcggcgcctaggacggcgatccgcgccctggaggatccgccggccgcccggctccactacagctccagccgcctgcagcggggcc

SEQ ID NO: 201367 - DNA, 203 bp, Homo sapiens
  chr8:28242682-28242885
  hyper
tagcctggcatcatgggaacgcctgcccggtggaagtcctccaaggccacagggagctggccagggctgcccaaaaccgggaggcggcggcggccccccttcccgctggccaggtgggcttctttaggtctctgagtcagttccaaagtgaaggcgctgagccctgcactcccaggcagggaagaaaacgctgccttggaaat

SEQ ID NO: 201368 - DNA, 78 bp, Homo sapiens
  chr8:28258795-28258873
  hyper
ccaagcagcgttgcccggacgcgccgctcggggcccagagcgctgcgtgcacgcagcctctagcaaccacttaccgcg

SEQ ID NO: 201369 - DNA, 126 bp, Homo sapiens
  chr8:28560085-28560211
  hyper
gcaccaccccacccccgcccttccccgcaacctggatttttcttccctttttaaaaactctaaaagcttcatcaagtcctcttggttcgactcctttggtggaggaggaagcgcagaacaccacaa

SEQ ID NO: 201370 - DNA, 333 bp, Homo sapiens
  chr8:28748909-28749242
  hyper
tgtttcttaatattttattccggaaccgtgttttggttacactattggggctactttgaaaggcgtcctccacccaccttcaccccgaaacagtaggtagaggtatcttgtcttcgtgtgaattagatgaataattgctgaagattcggggggcctggggtgggggtcgggagtgctggattgtgtacgcgtctgtgtgtgtctactaaggagacggaatgtctgttatgtatctggagatagggcgacttattttcgtagcaggaggaactgttggaaattatttgcgggagagggggtgcgccgaaaggcgctgcttgtatttttcttcta

SEQ ID NO: 201371 - DNA, 62 bp, Homo sapiens
  chr8:29120734-29120796
  hyper
tcgtgggcggggccgcagcgaaggcgggggcgggaatgctcgggcgcgagtcgtttgctaca

SEQ ID NO: 201372 - DNA, 2254 bp, Homo sapiens
  chr8:29206007-29208261
  hyper
agcaaaatcgccttagcagttcaaccaaaggtcaacagcagcgtttccccagcagctgacaggtcaaatgggcaggaaacaactgcggggaacaaagccccccgctgtccggcaggggcgaacccggctcctccgcactgaacagttttgttgtgctttttggaggggagaggtttccgccccctttccagctcccttcctcccgggtggacaggtcggaagaggagcggaaaggaaaggaagggagggaggcggcgaaggcgcctgcgggggggaggagcggctctttgatgggtgtgggggggtctgaactgcctaccgggctcggaagcgcagaccctacccgcgcggaagaatgcgcggaatgcggcggcgggaggcggaggcgcagcgcggcggggggcgcccggaccccacgcgccctgcccgctccctagcccgagggccgcggacccaccctgccctgcaggtgtggcgggcgccaggtccctccagggactcggacagcacgcgatttttccaggatttccgactaccaaatgtgacaagacagtctcgccgccgagagtttcgccagggctcgctaaaatccggcacgcgccgccatcagatagtcgaaaatccgggctgaacaaaaggtgatcattctccgctgcccggatttgcaggcgctagaggaccggttccgcccggcgtcccccagatacccagtccttcagcctcccgctcccagagcctggatctagcccgggacggggattggccaccttccaagctgagcttggagttgggcagcgggaacgcagatacagatcgctctacacagtgtgtgcaacccaatctccctttctgcatttgccagggtcttgttttcagtgaaactggcaaggccaattgtacctcggcgcccacccctcttcaccttttctccacctctgggattctcccggtccggctcagtgtagggccccagcacgccaaaccaacaggcctatcttgtccccacgcgccccgtggtacttggaaactgttcccgggactcaagatggaccgcgcagaggagtcgcttcatcctcgaggctaggaccgttaatgtcaataaacggggcctcgctaggacggtgcggaattgcaggtgaccggagaaacccgtccgcactttccctgaggacttgaacctcgcacttgcacagaaaccttgcaaacccctacacaccaacacacacaaaggggcgcgcggggatccccgcaaccacgaatcacgccggggactccttcccgtgccaataaggcgcaggccgccaagaccccctccatctccccgactccagctagcgcccggagccctcgtttacctttgagcaggcagatgtcggtgcgctcggcgttgcggcgcagcgcctgcaccaccagcgacacggtgctgtcctcgcggaggctctcggcgcgcgggctgcgctcgtcgtagacgatgaccgccgagtagaggccggagcgcaagcgggcgcgtacctcctcctcggcgggcaggatctgctccaggctcacggagcccttagcccgccgccgcacgatggtgttacagcgcacgttgaccgaacctaggatgtagcccgcgctgtgcgccaggaacggtctgcagtccagcagcaggcacttgccgccgctcggcagccccagggtgccgtggctgccgctgccgcccgcgccgccgccattctcgtcccggttcatcagccttttgagcacactgcagtccatctcccgcagctcctccatcgtcaccatggtcgccgggaaccgaggcggctgggcgcgcgaggaagagaagagaacccgggccgcctaggctgcagaaaggggcgggcgagagctaagaagggacgcctgcagaagtggccgcaaacttggtcctcaagggctcccgcgggagagcctcttcttccctgtccccttcctcccgcagcctcgcggtcacatagcagtcggagcggcctcgggcgcccagccgggcggcgcgcagagcggagggggaggcgccggtggaggagagtgtgtttacgagagaggaccgcggactcttttcggcgacggcctcccgtgtatttttgccggtcgcgcggctcctgtcgccactggcgccagcgctgccctgcctacgctcctccggcgctcagcgcactgccccagccagagttttctcctcggcttagaggtttattaatgctcctccgcgctcccgggggagggggcg

SEQ ID NO: 201373 - DNA, 146 bp, Homo sapiens
  chr8:29387186-29387332
  hyper
agggcctggcacctactgggttgggcttggcgctgcgtgcttgcatttccgcggatagaccgagatggcatctgggctgtgacactggctgcccagcttttcttttctttttttccaacagcatctggaagaggctctgggagggt

SEQ ID NO: 201374 - DNA, 269 bp, Homo sapiens
  chr8:29387367-29387636
  hyper
gtgctgggacgagtgggcggaaacagccgcaggtctctctcttctcttcagcctgaaactcactgcacaaataccagaggttttttttagagattagataaatttgcatccttctccccccaaccccgcccctaagccagaggaagtgcttgaggaagtaatgtgtttaaagaatgtgggggaggggagcttacattaggaagcaggactcttagcgtgtagccagaaaccccaataacctttaagctgttaacccttgaggatacggc

SEQ ID NO: 201375 - DNA, 84 bp, Homo sapiens
  chr8:30241417-30241501
  hyper
ggggggccgcgggacgctcaggaagcgaagcggggaaggctccgggcgcgtcgcaggacccgcgctggagatgggtttgaagcc

SEQ ID NO: 201376 - DNA, 1018 bp, Homo sapiens
  chr8:30241612-30242630
  hyper
tagggccaggggtgcaaatccctcggtaaaagccggcaaactaaaagtcgcacacatcccaggtcccggtccaggccccggcggggcagggtccccgaagtcccggggcgcgcagacgccggggcccccgggggccaagggaacggcgggacccgacctccctgccctcggcctcccgggccctcgccctccgaccagccgctgagtcgggggctggggtcgccgcttccgcccgcggcccgctgcccctccccggcgcgcgccatccggccgccggcccctcctcccgcggggggctccgtcccgcgccccgtccctccgggctgcagccggcagcccacgtccagggagggcggagggaggaggagaggcgcggagaggagggaggggagaggggagggaggaaggcgagagaaagggagctgcttccatcccggacttcccagagcctgcctggagcgcgtactcagcggctctcgggtcccagcgtcccagccgcggcccgcgctcctccgccccgctcctcctcctcctcttcctcctcctcctcctctctaggcacccccgtcccctccttccagcggctgcagcccccagccccaactctccgcgcttactcctgggacgcgcgtcctcgccccatcctttgcttccttccttccttccttcttccttcctcccctggctcccgccctccctctccaggtcgccctcccggggcccgattgtctcggtgccccgctcccggcccgcgccctgccccgtctctcccttgcacttcctgagtcgcccgccgccgccgtcgcagactcgccgcgggagccccagcccaacccgagcccgacagccactgccccggctccagctccagccccacagcccgcggcgcccgcccgagggagccccggcgcccggggaaggctccagtgggctagcgcgccctcgcccagccccgcgccccagccctgcccggcccggcgaggaaggaccgggaagatgaacaacggcggcaaagccg

SEQ ID NO: 201377 - DNA, 361 bp, Homo sapiens
  chr8:30242697-30243058
  hyper
gcgggggcgacgcgggacccagtgcgggcggccggcggggcgcgggcccggggcgcggcggtggaagaaggttcaggcatggcccgtgccccggacgcagccccacagtgtggcccggggagggtggatctcgggagcgtgtgtttttgtgtccacgcgcgtctgcgggccccaaattgcgtaactccaaggacttttcggagacttttgtaagtataatgctcagctttgtttgcccgggatttataagtggaaccgagagctgactcctgggtgacctcagataatcgggactcggagggtcaggacttagggccggggctggaaattgtgtatggattcagggtcggggggggagcag

SEQ ID NO: 201378 - DNA, 213 bp, Homo sapiens
  chr8:30243175-30243388
  hyper
taatagataactcatcagccacattcttctctgctgagtcaaagaccccgagcctgggcggtgaacgcttgtgattttaggggccgtgcagctgaggggagcagagtaagagggttaaaaacgcagcaattcaccaaatgctcatcgagggtattttcataggactttgacttctgagcatgcattttaggtggtgcgtccgtaatcatgatg

SEQ ID NO: 201379 - DNA, 128 bp, Homo sapiens
  chr8:30243547-30243675
  hyper
aagaaattatttctggcgtacttcttaacatcccacacagttgagttcttaaacattctagaggaacttgagagtgtgtgtagatgcaggaaagtgcacgtctaaatatgacccgaaaagattcacac

SEQ ID NO: 201380 - DNA, 239 bp, Homo sapiens
  chr8:30890888-30891127
  hyper
gggcggtggaccccgcctcccccggcacagcctgctgaggggaagagggggtctccgctcttcctcagtgcactctctgactgaagcccggcgcgtggggtgcagcgggagtgcgaggggactggacaggtgggaagatgggaatgaggaccgggcggcgggaatgttctcacttctccggattccaccgggatgcaggactctagctgcccagccgcacctgcgaagagactacactt

SEQ ID NO: 201381 - DNA, 274 bp, Homo sapiens
  chr8:31497152-31497426
  hyper
acagcagccccgacagcagggctcgggcgcggcggcggcgcggggggtggggggacctgtcactccctgtaactgaggcggcggcagcggtttttttgccttttctattttgccttttttttttttgcccttatacctcttcgcctttctgtggttccatccacttcttccccctcctcctcccataaacaactctcctacccctgcacccccaataaataaataaaaggaggagggcaaggggggaggaggaggagtggtgctgcgaggggaa

SEQ ID NO: 201382 - DNA, 222 bp, Homo sapiens
  chr8:32405231-32405453
  hyper
tcttaaactcccttccacctagagtttattttcgcctgcgtgcgacagggcttttgtacttaagtgagttaaggaatgaaccccgaactcttctgggaaagccaccaacgttccccccgcacccctcccagggttcctgaccacggagactctgcttggggcacaggtgtgggagtcgcaaacttttctctgcgccgtccttttccgcgtggaatgggacgg

SEQ ID NO: 201383 - DNA, 102 bp, Homo sapiens
  chr8:33370085-33370187
  hyper
tagagtcttcctgcgatggggcttccagagcgctgtcaagctccattcctgactgcagcaccagaaggctggtctctcccacagaacgaggatggaggcggg

SEQ ID NO: 201384 - DNA, 215 bp, Homo sapiens
  chr8:33372206-33372421
  hyper
tcccgaggagctgcttccatttaggaccttgtgactctcatagcttccacggtttcgcaggagcccgaggaggcaaacttcatttgtgccactgcacaggcgggagcttcggaccctgggaggggtggcgcgagagagacgtgtcgccagctgctcggagagggactcttattcagcctctaaggcgtcaattgcgcctccagggttccaggagt

SEQ ID NO: 201385 - DNA, 995 bp, Homo sapiens
  chr8:37553189-37554184
  hyper
tctccccgccccggggtcccggcgagagctgcgattgggcgggcgcggcgatccctttgaagtgtggctgccgatcgcggctatttgacgtgcggctcgaggaaggcgaaggtttttgtgttgctagccggggccagcggcggtggcggcggcggcggaggcgtcggtggaggaggggaggcggcgaggaggcgcagctcccgctgcaccgcgatcgacgctgcggagcgagcccacccgccccgggagctcgcctccccggtgctcccccgccctccccgcccccccagcggcgctgcctcctccaaatgagcgattcgcccgctggatctaacccaaggacacccgaaagcagcggcagcggcagcggcggcggcgggaagaggccggcggtgccggcagcggtgtccctcttgccaccggcggaccccctgcgccaggcgaaccggctcccgatcagggtcctgaagatgctgagcgctcacaccggtcacctcctgcacccggagtacctgcagccgctgtcctccactcccgtcagccccattgaggtcagtccccggccgctgcccccgggcgccggccccattcctcccaccgcgaccgggaccctgacccagctcccagcgccccggggctcggtgcgacacccaagtctggtcacgctggcgggctgagtgaggaggggaagaaaaccgagggatcagagcccaccagggcttccccaggcttccccgtggaagggtctccttccacgctcgcccttcggagctccgtgttttctctcggattggatttgctcctggagtcccctctgggtcctttacttttcctctgatccccagtttccagccaggagttggtctctgctgggtcttccccgccccccacgccgggctgttttctttgaagccctggctgcccgggtcccacttcgcctctgtcccatccggtgagggcgcacggcgccctggcgctcccgatcccggatcttt

SEQ ID NO: 201386 - DNA, 148 bp, Homo sapiens
  chr8:37595169-37595317
  hyper
tctcccttgagcaacggctgtatccggagccagtgcttcctcagtgcggtgggggctctaattttacagttaaagaaaggggaacgttgactgagaacgaggaggaagcgagttgtagatctagccttgtgttcacacgacaccaggc

SEQ ID NO: 201387 - DNA, 31 bp, Homo sapiens
  chr8:37595347-37595378
  hyper
ttggtgaggtcctctcgctgttgtggccttt

SEQ ID NO: 201388 - DNA, 59 bp, Homo sapiens
  chr8:37655254-37655313
  hyper
ctgcgggggacaggcgcaccccagagaaaggcaccgcaggcgcccactcacctgcacag

SEQ ID NO: 201389 - DNA, 355 bp, Homo sapiens
  chr8:37756610-37756965
  hyper
cgcggtgcagatcccgcaggtccacctcggcgcggcccaggaacttgtcgaggccgagcagcgcgcggtgcagcacggtgagctgcagggtggcggcggccgcgggtccggaggacagcagcgatggcagctcgaaggtggcctcctcgcgccacacgggcgcgcccaggctgcgctccgacacggaggtggcgtacttctccttgcccacctggatcaccgcgtacgcgtcgctcgtgcccccggggcccttggcccgcaggccccgcgcctgcagcaccgtcacctgcacgtgggttggggaccacacggcccccaggccccggccagccgagaccattagggacatggtgac

SEQ ID NO: 201390 - DNA, 387 bp, Homo sapiens
  chr8:37756966-37757353
  hyper
ataacactccagaagcgaggagaagatcgccgcgactggcggcctccacggcccgccccggcgaccaggccactttaaggcttccggccacacccccgccaggccacgcccctcatggccaaggccacgcccctgcccgagccgcctgctccacctgctgcgccgcgccccgccccgccccgccccgccccgccggcctcagcagcgcgggcagctccgggcacccgggcgccggaggcggggctggcgcggccaggcaggcaggggatcacgtgcgcaggggcgggcgcatcgagaatctaatctgagaggtggtaggtgacggatggggtccccagctgccaaaggtcgcacggcgggaaggagctggccgaagcactgacttgg

SEQ ID NO: 201391 - DNA, 109 bp, Homo sapiens
  chr8:37887621-37887730
  hyper
aaacagggagtgccgaagggtacaccaggcctgatgtcctaatgcagaaaccgggccttcctgcagtgggccgggtcagctcggatctccgcgcggtcctgagtcgccg

SEQ ID NO: 201392 - DNA, 197 bp, Homo sapiens
  chr8:37888768-37888965
  hyper
acctgtggcacgttccccatttacgcgagtgggatctccgcgggggggaccctggcgccacggccagggctgtgcagaaaaacacgttcttctgtccggggagaggaggaggcaccgtgtgacctccctgggagaggatgaggaagaggaagctgagctggcacgggtgggggggccagcctcgggctgccctcagg

SEQ ID NO: 201393 - DNA, 43 bp, Homo sapiens
  chr8:38089777-38089820
  hyper
ttctggtgcctgcggcgctgatcgttgccgagtggaaggagtg

SEQ ID NO: 201394 - DNA, 217 bp, Homo sapiens
  chr8:38240692-38240909
  hyper
gcccaagataagaacgagaggaagaaccgggaggcaactctccgtcatcctctagccccccgcatcctaggaaacgtatggaaaacaatggaaggttaagtgtgtgcacagtgatctggccctgcaggagtgtgccgaccaggtgatatttcctggggcctggtgataaggatttggaaggttacagcacagagacgtgaacgtaaaaaggaaacag

SEQ ID NO: 201395 - DNA, 153 bp, Homo sapiens
  chr8:38324508-38324661
  hyper
cgcaaacatgggtcgtagcctcacttttctcccaaccccaaacataacggtaggggaagcgaggtgcagaggggtctgggccagagaagcatacgcatcgctgccgagtgaaccacaccggacaaaaaccctcatcccttcccccacctctag

SEQ ID NO: 201396 - DNA, 226 bp, Homo sapiens
  chr8:38326050-38326276
  hyper
cctccgcgcgctgcggctgcaccggcgtcccggctcccgctagctgccgcccgccgccgaggacgccgcgcctgtggccgcaagagcgctccgagcgctatgcgccggcggggcgcgagggctcgctctctcactcccacccgcgctggtccctcctccgcctccgccccctgcagctgcctgctgggccttgtagttccccagccgcggccccaaaggacgggga

SEQ ID NO: 201397 - DNA, 264 bp, Homo sapiens
  chr8:41168154-41168418
  hyper
agggtccccactagggcagacgccaagaggacggtatcagcacaacagctcggcccccaggaacagaagtctctctgccaccttctacctcgaattcctgagaattcttcgtaggtttcaaacattcccctgagagggagggttaagctctggagagctgggagtgagacccggactatcccgggacagaagaccacagcaaatagttcatgaagttcctggagtctccatatcttctgtccctaagtgcgggtggagagaggc

SEQ ID NO: 201398 - DNA, 265 bp, Homo sapiens
  chr8:41686043-41686308
  hyper
gtggagcgagtctcctcctcggcgctccaaccacgtgctgtttattactctgtggggattcccataccgaggcctcttcagttcctggaacagtagcactaaaaggctcctgagtgcctctgttaatttgattgttctggttcgcactacaatgaccgggctggagagggggcgctcgtaatgaaacaggaactgctcctcgcgcccgctccagagtcctttacatctttggggagagggcatacggggagctacatttcatttt

SEQ ID NO: 201399 - DNA, 34 bp, Homo sapiens
  chr8:42040329-42040363
  hyper
aggcaggaggcacccgactcggtgaggctgtgcg

SEQ ID NO: 201400 - DNA, 76 bp, Homo sapiens
  chr8:48604790-48604866
  hyper
tattttactcacaaagttgtgcaaccagcaccctaattctggcacattttcatcacctcagaaagaaaccttgtac

SEQ ID NO: 201401 - DNA, 442 bp, Homo sapiens
  chr8:48649725-48650167
  hyper
gctgtagcttctttgcgctcctatgtcccaagaaactgcagcgggcacccggcggctctggctgcgccagggcagggcgcgctccgctccgggccgtcgggtctgaggtatgggtcgttgctgagtctctcccgccccggccgcgcgttaccggcagtctgctgtcccggcggccggcaggaagggcgggctgggcagctgcttgaagaactgccggaggccggccaggtcccgcgtgagctgctccacgcgctggtgcagcttctcgttctcagccgacagctccaccaacttctgctgcatctcctggttgcgccgcttggccttgtcgcggctcttgcgcacggcgatgttgttgcgctcgcgccgctgccggtactcggggctgccgcggtccgggcccctcttgccggcgctcttctcccgggcggggccgggcgcg

SEQ ID NO: 201402 - DNA, 1221 bp, Homo sapiens
  chr8:48650227-48651448
  hyper
gcggccgccaagctcaccacggtctgtgcgcacgcggccacctgcgcgggcaacagcgagccgggcgcgtcgccgtcgccccagtcgggctcgcgcttgagcaggcggggagcggcagggcccgggcccaaggggcgcgcggggccgccgggaagaagctccaggggccccgcgccgcccgccttgtgattgctgttgaagaggtcggcgaagagctcgtcgtggcacagctccagggtgggcacggcggccatggagtcgatgtaggcgctgaagtcgatggcgctctcgtcgtcgtacatggcgggggcggcggcgcctggctcgcctagggcccctggctcggccccgcggcccggcttgcccgcccggcccggttcgtagaagggcgcaggctccgcaggccagggcgcgccgcgcgccgggccgtccaggctgaagagcgcggcgctcatggcggcgtcgggccgggctctgcgtccaagcgaggctgtcacctcgctgggcccagccccgccgccttttctagccccggctgacgtgcacgccccgccccgactccggcaccgcgggggcgccccggggccgcgggggaaggggcgggggcgccctgggagccccccggagccgccccgagccttcccggggcgcgccccctctcagttcctccccggggccccctccccggccctggggacccccagcccacgttgcaggagggtgcccgcgctgctgctccctccccggcccgggccggcctgcgctgcgctgctgggaatgacactccctctgccagcactccagggccttctcttcttcctgtttgtgggcttggaacctcctcgctcctcggggttgggagtgaaatcaaaaccaggacttggccgcagcgcgcgcgtcccaggccggctcctgtcgccggagggcggggggtggagacccgtgggagaggacccgcgcgtccaaggacgccccccgaccgtgggcacgcgcgtgaggccctcgccccgcgcctccaccgtgggaccagatgcgggaagaggcgtgggggaccagacgtggggacagcggcggcctggcaggcggggagggctgcccgcaccgcactcgggcgcctcggggaatccgggccggttctcgctgctctcctcggaggtcccgggtccggccggccctgggggtcgaggcccagagacgcggctgctgcgtcctggccgaaag

SEQ ID NO: 201403 - DNA, 50 bp, Homo sapiens
  chr8:48872787-48872837
  hyper
ccggggacccctgcgggaaggcctggccagtaagcgcgcctctttggccc

SEQ ID NO: 201404 - DNA, 111 bp, Homo sapiens
  chr8:49309646-49309757
  hyper
tttgattatttgtgttagcagttaatttagcaccgtggccacgtgtgccaaagctgcctccacttcctccgggctcccaacaaacggcacttttatgagatcctttcaaag

SEQ ID NO: 201405 - DNA, 178 bp, Homo sapiens; identical to SEQ ID NO: 6266
  chr8:49309797-49309975
  hyper

SEQ ID NO: 201406 - DNA, 189 bp, Homo sapiens
  chr8:50823945-50824134
  hyper
cctgtgcgtgcgttttctttcatttctggcattaggaaactcgtgcagggccactgaaaagtcaggggaggctcagatgttatttcccagggattcctgtttttccagaaacgttgtcaccaaataagtatgagactgttaatttggagaaacaattagcccctacaaaaaaaaaaaagaaagaaaaaa

SEQ ID NO: 201407 - DNA, 35 bp, Homo sapiens
  chr8:50824409-50824444
  hyper
ccccctcgcctcccggcccccttccttaatggatg

SEQ ID NO: 201408 - DNA, 103 bp, Homo sapiens
  chr8:53853411-53853514
  hyper
caggaacctccgccagctgataacttgccgcgcggcagcctgactcccccagcgtccggctccgcaactgcccgccactcctggccagcgagggaggagccgg

SEQ ID NO: 201409 - DNA, 33 bp, Homo sapiens
  chr8:54163283-54163316
  hyper
ctgaccctcactccctgccccgcccagccccca

SEQ ID NO: 201410 - DNA, 75 bp, Homo sapiens
  chr8:54754915-54754990
  hyper
acaagaacctacaataatgaaattctatgtaattctcactcctaaacttccagatacaaacgactgattttaaca

SEQ ID NO: 201411 - DNA, 191 bp, Homo sapiens
  chr8:54795170-54795361
  hyper
tccggcctgggcgacagagcaagactccgtctcaaaaaaaaaaaaaaaaaatggcaaaagcctatcgctctttgtcgaactccccacgttccccagtcacctggctggggttcgttggtgtcaaaaccccagccttggtgccctcggtgccagcaggaccctcgcccactggctagcggaattaggcacct

SEQ ID NO: 201412 - DNA, 147 bp, Homo sapiens
  chr8:55379017-55379164
  hyper
agaggtcaccggagcgcgctcccctcgccagggacctacactcttcccgctgctacattaggccgcattaacaaggatctggattcactttaatttaaaaggtaaaagatcttaggtctgatgggggagtgcggcgaggagagctcg

SEQ ID NO: 201413 - DNA, 116 bp, Homo sapiens
  chr8:56014011-56014127
  hyper
cggacccgcccgccctcagctgccggcgcggcaccaggctccgcgctccgagccccgtacgcctttctctcccctgcactctctggcaaggccgggcacgcccactgccgctgctg

SEQ ID NO: 201414 - DNA, 214 bp, Homo sapiens
  chr8:56686147-56686361
  hyper
gtacgtcagagctgcctccgaagtggtaaaatgtgctgcgagaagtggagccgcgtggcggaaatgtttctcttcattgaggagcgggaggattgtaagatactgtgcctttgctccagggcatttgtggagtaagtagaaaagagaatctcttcatgttctagcacagtcattacccagaaatgtaggtattgcaaacgtggttgtaattgat

SEQ ID NO: 201415 - DNA, 1174 bp, Homo sapiens
  chr8:56792065-56793239
  hyper
ccccttcctaataataccttggggatgggtcggaaggaaaggaaaggagacgcgagaggtgtagtcgatgtgcctgcgaagcccaggctcctctggagatccttccgtccgtccctacaggagaaggctggcccgggctgctccactccccggagctgcagactgagtcgccaggtttctgtgccttcaaagccctgcgcgacggccacaccaaacacccaaaccttgggcagggaccaaacggtcacttccccgccctccgggctcaatatgcaaatccgagcaccaggaagtagctgggacctctcggccgagcccagagacagccagttcctctcccgccgcgccgggccgcgctgccgctcgctccccggccgtggcgcctccgggccagacgcgctgcagcctccagcccgcggcaagcggggcggccgcgccacccccggccccgcgccagcagcccctcgccgcgcgtccagcgttcccggccagcagcctccccatacgcaggtcctgctgggccgccccgtcgcgccccccactctgaactcaagtcaccgtggagctccgccgccccgaaactttcaccgcgagcgggtgagtcctctgcgcgagcccaggggtgggcgcgggcacgcgggcagtgggtgcaggggccgcggctgtgccaccagccggagtcccgggcgcagggtagactcggggccgggggcatcggcgcggcccgcggcggcttcctggccgcaccgcctctgggctccggcggcgaaggctcttagatgtcttcagccgacgggtgaccgggcccgggggagccagggcgcggggactgaggctccgcaggtgtccgccgcggagccgcgcaggggagcggtgggaggtgcgggcgcgggggcgggctcaccgcgtgtccttcccggtgagggcccgagggccggctgctgtccctgctccggccgcttctcgcacacagtggggaagccgctgcccttgcggagcgggcgcgcggcggggatactggagaggactcctcggattgtgcaatctgatctcccctctggaccctgggtctcctggcagtgggagatggggctcggccggcgccctctcgaggcccgcggacagttgccctccctggtggccccgggcaggagcgtgacgtcgaggggctgca

SEQ ID NO: 201416 - DNA, 108 bp, Homo sapiens
  chr8:57232425-57232533
  hyper
ctcagccgtgcgctacccggtgcagctgctttctcaccagctcgcgggtgggtcctgccgcggctcggcgacccgcgcccccttgcgagcgacccagcgtgaaaccag

SEQ ID NO: 201417 - DNA, 91 bp, Homo sapiens
  chr8:57906841-57906932
  hyper
tcttcccggcaggacggggaactgggcggtgaggggaagaattgtacttggctcttcattctgttgacatctttgtcgtgccctaaatgct

SEQ ID NO: 201418 - DNA, 62 bp, Homo sapiens
  chr8:58906890-58906952
  hyper
gatgggcatcagtagcggggtggagatgttgagagagaggcagggcttggagtggaggtgcg

SEQ ID NO: 201419 - DNA, 129 bp, Homo sapiens
  chr8:58907941-58908070
  hyper
ggttaccccctccagctcctcccgtggcctcaattgtctctattttctttgaaagcatacagatttgaaatagaattaaattctccttggctcactcgtgtctccatcacccagcggagctcataactt

SEQ ID NO: 201420 - DNA, 82 bp, Homo sapiens
  chr8:60030087-60030169
  hyper
aagtgtgtgtgtgagagcctgcctgtgtgtcaacactgtccaagactcggagctgcgactcggtcgcgtggtgcggagtcca

SEQ ID NO: 201421 - DNA, 238 bp, Homo sapiens
  chr8:60030908-60031146
  hyper
aaagagttgtggggcagttttccctgtggggggcaggggcgcctcccaggtccctgcaccccgactcccggctgctcccctggcaactaatccggagaagggaagtggtgccacgagcccccactgcccggggagggagggagagagaagggggaactgggaaataaactgaattctcttactctgcctccgttcctggaccccagacacacccccaaagtattccacggttttctct

SEQ ID NO: 201422 - DNA, 349 bp, Homo sapiens
  chr8:60031791-60032140
  hyper
ctccaccgccgcctcttggtcccgccgccgccgctgccgccgccgccgggcaggtaacttcatgcgctcattgtcccccccgcccgcccccccatccccgcctcccgcgcccctcgcagcccggcacacgcgctcgggctctaggtactgggcgttttattggagattctgagttgttctgcttgtagtttattttctccaccttggaggcccgggatgtggggggtgggggggtggggcggggatccagaagggacagggcgggaggggggcgagcgtcccgggccgggcggggtagggagcgcggccggacgcgggctcgtcaaggcccaatggctgctgttcggaa

SEQ ID NO: 201423 - DNA, 199 bp, Homo sapiens
  chr8:60032288-60032487
  hyper
tgccgagccagagccaccagcggcctcagggcaccgtggggagcgcgcagctagggggcgctgtggcgcaccccgccccgcagccccgcccccggccctccccggccccaccccactcccaccgccctctccgcggccgtccccacccctatctccgcgacccccactcctcctcggctgttccccaaccctgtcactg

SEQ ID NO: 201424 - DNA, 292 bp, Homo sapiens
  chr8:61193765-61194057
  hyper
cggggctggagccggagcggagcgcgcgtgggggagtgtgagcacgcgtgagcggcagtgtgagtgcgagagcgcctccgggtgtgaaccgcagtgtgagtgcaagcaggcgtgcgttcggaccgagtgttccagagacccgcgtgggaagcgcgtccggaggccccagcagagcgagggagcggctgtggcctggggagcgagcgcctggcgaattttatacccgaccggggcgtgtctggtacgcgaggatccgcccccttctctctctggccgttggggccaggggagc

SEQ ID NO: 201425 - DNA, 139 bp, Homo sapiens
  chr8:61822239-61822378
  hyper
ggggacaagagttgcagtttcgaaacagagtggaggctcctttaatcttgacagcccgaatgctacaggggtcacagcacatctgctccggaggaaagacaaagggcaaggtggggccacggtagcccgcgcggggctc

SEQ ID NO: 201426 - DNA, 144 bp, Homo sapiens
  chr8:61822883-61823027
  hyper
ccacctggcggggcgctgcggccgggccgggcggggacatctgaggcccgacagacccgcgctcatggacaagtgtcgcccgcgccgggcagggccgtggagacagaccacgcagtgacaggccggaggcggctcgagggatcc

SEQ ID NO: 201427 - DNA, 53 bp, Homo sapiens
  chr8:62200449-62200502
  hyper
gagggttgtggtacggaggcatttaggacccaggggaaagctaggctccgtat

SEQ ID NO: 201428 - DNA, 624 bp, Homo sapiens
  chr8:62626290-62626914
  hyper
ctacatacaagcaaaaatatttaaaataatttctgagagcattcaaatcactcccaacttcttccctccccctgccccccggcgcccccattttcacctcctttgagttgctctgaaacgctgctggttaggcaggaactcactttccctgactttggctcattttcaactccccaaaacacgcaaggcaaacgataaattgttctcttactcccatgttcaattccacggaaagccaagaaacagtcgttcagcaacctctgtctcggctgcgccctgcaggtgaaggaaccgctgggaaggggctccccgagactagcatcccgagggctcggaccccggtccgcctggcccctcgcccgcccgccaggcccgccgaatgcggcctccgccccgcgcgcctaaaggaggagcgtcgcgggggatggaggcggcgcgcggtgggacctggggagatgcacccgcagcgtccgccgcgccagccggctccctaccccgaggcgaggccccagatccccgccccgcagggcctctgacctctccgggccccggggctgctgctgcccgcactcgtgctaccgctgccggagccgctgctgctgctgttgccgctgctcttggcat

SEQ ID NO: 201429 - DNA, 399 bp, Homo sapiens
  chr8:62627034-62627433
  hyper
ttcgggccgctgctcctgcagcagaccctgtgcctcagcaccgcctgcagcacctgggaagacttcacccgcctgccggctgcgcgcgcccggcctcgcgtgtacgaacctgtgactccctcccggggcgagagcgcgcggctcgccgcccgacggccacgccccttcccggcctcgccccgcccccggaaggctgagtgacggcgcctgggacccaatcgcaagggcccttacgaggcggcggtaccctgccgcgctccccgcccctgctcacttagggctgttcgggcgctacgcagctgcctgtgagcgcgagcctctttcggctttccagtttgtctcggtcctttggaacgtggcaaacgtggaagccgagagggctctcgcgagcgttggcag

SEQ ID NO: 201430 - DNA, 185 bp, Homo sapiens
  chr8:63998150-63998335
  hyper
tttctagctttgtcgtttccatgacccagagaaactggaggaccagctctggattctcggaacatctacagcctcagcgcccacgccgggtggttaggggcgcgttacccgccagggtcctgcctgcaccctgggcttcggcaggggtcagatatccggggtcgtggggcgggggacggggcggg

SEQ ID NO: 201431 - DNA, 216 bp, Homo sapiens
  chr8:63998666-63998882
  hyper
cgctgcccgtcgcacaaccactctccagcctggcagggcggtctccggcctcgcacgccggacccgcggcgagcagagctgcctcttaaaggaaaccgcacagtgtccccacgggtgctagccacctgtttagcagctttagttagggaccccagctttttcccagcgagggaagccactgatgttcaaacaccgaggaaacgatgtcaaagttag

SEQ ID NO: 201432 - DNA, 219 bp, Homo sapiens
  chr8:65489646-65489865
  hyper
cggcctcgataagccaaccagcccagaaccaggggcgctgggctgggtgttcctcggggacggcgcccactgcccgcttggtccctggagtgtcccgagctgcctcccatacccctgctgcggacagagtgggggcagtcctctgcctctgtttcccaactgctttggtaactcagtgactctctgtgaaactgcagagtcagaggacttcccttccgt

SEQ ID NO: 201433 - DNA, 281 bp, Homo sapiens
  chr8:65490182-65490463
  hyper
gcgacgattaaaccaagtaacgagacaccgggcagatgtgttttcattgccctgtaagataaatgcagtgttaagtgcctgacaacttcccagaagcaatcagcaaaagtttacgagtgcataaacctcaaagaccattccctatcggttgttataaggccggtatttagagcttccataaattcttcggccttttcccaaagcaaagttttcagcgactattaagcagccacctcctccgggaagactagggggattttcttgaattacaaaaggaagag

SEQ ID NO: 201434 - DNA, 37 bp, Homo sapiens
  chr8:65492340-65492377
  hyper
acaccaccttctctcggaaagtcccatccccaaatcc

SEQ ID NO: 201435 - DNA, 260 bp, Homo sapiens
  chr8:65492407-65492667
  hyper
tataattctcgcccggaagggtaatttagcacaagctgagacagcagtggcgagggaagggcagtggggggtggggtgcggtgggtgggggcgtctgctttccacaggactcccaggcttcgccgccgatctacaatttgctgaaggagcaaagaacatcctcggctctaagtagggcttttagtgtgctcattgatgagtgaaagtcgccacacatgtcaagctaaaggcagttgttgggttactaacaggacccagcg

SEQ ID NO: 201436 - DNA, 288 bp, Homo sapiens
  chr8:65494311-65494599
  hyper
ccagctcggcggctgcagcggcagcagctgctgccctgcacccggcgctcggcgcctacgagcaggcagccggctacccgttcagcgccggactgcccccggctgcctcctgcccggagaagtgcgccctgtttaacagcgtctcctccagcctctgcaaacagtgcacggagaagccttaaacacacccccgaaaaacacaagaccgacccaaaatctagaggaaagcgaaaagctgctccccaccccctttattttggtcctctcgtagttgtgaaacacttgcag

SEQ ID NO: 201437 - DNA, 280 bp, Homo sapiens
  chr8:67025640-67025920
  hyper
acttcctcagcaggagacatccttaggtcgctggttcgattccggctcgaaggagacaagtgcggtttttttctccagctcccgatgacttatggcactttccttgggtgccttcagtgacacattgcattccaacgagcagtttgaaagtctagcgctttctccccattttgggcctcccagcctgcacggtaattctttttagccattcgccctgcgggaacgtgtccgggcaggttcccagcgcagctgtgggtctgcgcttggccgagcgactgcc

SEQ ID NO: 201438 - DNA, 234 bp, Homo sapiens
  chr8:67026578-67026812
  hyper
agtagggcgagctccagcttaccactctaaaacttcccagacaatgagtggtgggcgctagcagtttatccttctagctttaaatttttagacccatttaattggggggaaattcacgaaactggttatttttgcttcaaaaatggcgacagattgccgtcacatgtattatcactcagaatcctttatgatttgtgataagatgtctgcatttccagggactcatctgaggct

SEQ ID NO: 201439 - DNA, 193 bp, Homo sapiens
  chr8:67344870-67345063
  hyper
gtgacccgctcagatcctgcgcagtcttctccgcttactttcaagaattcggagaatttggataccgccctgggctcccaccgcgcgccaggcggaacagcgaggtcacagagtgcgcgatgcagcctctcagggcgcagtgaggcagcctttactctgcttgtctaccgttaaagaaactgaggcccagaga

SEQ ID NO: 201440 - DNA, 449 bp, Homo sapiens
  chr8:67417575-67418024
  hyper
ggagtgggctaaccgcgtttcccccgcccggcaggtggtgatcgagtcggacctgtacacgcaccagcccctggagctgctgccccaccgcggagaccgcagggaccctggcgaccgccgcaggtttgggcggctccagaccgcgcggccgcccacagcccacccggccaaagcctctgccagacccggtacgtgagtcccggccccagctccccgcacctccctgggcgcagagacccactcagagccaccacaagcccaggtcagggcagcgttggcggtggctgcggcctcagtcgcgccaggtgaccaagcacctgtgctttcccaagtaaatgctgtttccaccacaaaagcacctgctctcaggcctcaccttagcctcacacagcatcttctacctataaaacagtcactcctaggtttgcgtaatgagcaaagatgctctt

SEQ ID NO: 201441 - DNA, 51 bp, Homo sapiens
  chr8:67524786-67524837
  hyper
gtcagaaatctggacgcgcattacggggagagtcaccgagaaacctgggca

SEQ ID NO: 201442 - DNA, 43 bp, Homo sapiens
  chr8:67837266-67837309
  hyper
ctaagagcctgaaaccgccaaggccgcacgcacaactttgctg

SEQ ID NO: 201443 - DNA, 45 bp, Homo sapiens
  chr8:68863998-68864043
  hyper
ttcaggatttgtacgaaacacattaaagttaaacaatagcggagg

SEQ ID NO: 201444 - DNA, 60 bp, Homo sapiens
  chr8:68864119-68864179
  hyper
gtgctgctgtgtgtgtgtgtgtgtgtgtgtgtgcgtgtgtgtgtgtgtgtgcgcgcgcgc

SEQ ID NO: 201445 - DNA, 276 bp, Homo sapiens
  chr8:68864195-68864471
  hyper
ccagtacgcagtacttccccagggttgtgtttcctttttcctgagatttggcgaagggtaaagggtcggagtcacatggatacaaagcttttgattaatgtccaagtcactgctgtggctgccgaagccgcttcccctccagccccggccgtgtgaggccagagcagcggggccgggcgcgcagggcctggccggagcccccactcccaggagtttcctctgcagagccccgcgccccccgcgccgggatttcagcccgatcccctcctctccctg

SEQ ID NO: 201446 - DNA, 227 bp, Homo sapiens
  chr8:68864942-68865169
  hyper
cgcggggatttgttggtgccccgagactcactgagttgcgggggccttggagacctccaggtctgaaaagttagctctagagaagagagctccagtccagggaatcccggctgccctatcttccctcacttttcttttacccgcctccccagtctgctcaagtgcactgtgtaattgattttccttcttgttctttcctggagactttgttttaaagctttggtttt

SEQ ID NO: 201447 - DNA, 56 bp, Homo sapiens
  chr8:69242747-69242803
  hyper
cttctcaacccctgcgctagagtaggcagggcagaaggtgctgaggagaggctcag

SEQ ID NO: 201448 - DNA, 56 bp, Homo sapiens
  chr8:69243011-69243067
  hyper
acagtcgcgcgcgcacggacacacacacacacgcacgcacgcacacacaccggtgg

SEQ ID NO: 201449 - DNA, 37 bp, Homo sapiens
  chr8:69243994-69244031
  hyper
tttttcttttcttttctttccttcttttttttttttt

SEQ ID NO: 201450 - DNA, 232 bp, Homo sapiens
  chr8:69244779-69245011
  hyper
agactgaagagaagcaagtgagaactgtggagaacaaaaaaataatgcgagttaatgaccctgcaaaaaaagggcgcggaggacaaaggtgtggtccaataggtcttttgggaggacgggtttcacataacaagatttgcaagatctcctaagtttttttgcccaactttaacgttgatctgtcttagacgataagaccattgtttcaattgaagctcgcattgtggggtgc

SEQ ID NO: 201451 - DNA, 360 bp, Homo sapiens
  chr8:70745557-70745917
  hyper
ccggctgcagtctccagtcccggaacaataagcagcaggcggtcggcggagactctccctcattgtctgccgcggacctgcccccgtcccgccccttctgccttaaacattgcgtttgcttttatatgttaataattatcaacctggcagctctgactcagaggcagtgtcttttaatcgagtgaactaactgcagcctttccgtactcctactccattactcaaaatagaaaatgcccaaaagaacaaaggaaactttttcacagacacacaatgtattccctgtcccaatttttctaaaaggaaaaaagaaggtgggggtaaactacgtgtgtagaaatgtgtgtgcacactggtgtg

SEQ ID NO: 201452 - DNA, 210 bp, Homo sapiens
  chr8:70747057-70747267
  hyper
ctgcccgggcgctcaagccgccgctactcactagcgagtctgtcagtctgtctgcctggctgagtagagcggcgggaggggggcactgagctacgggaatagttgggagccgcgtgaggaggcagcctccgtccagccgaagagaaatcagtgaatgagactgtgactcaggctgaactcttccccccacccctcgcctgtcacccaagc

SEQ ID NO: 201453 - DNA, 34 bp, Homo sapiens
  chr8:70945253-70945287
  hyper
tctagcccaaagccccattcgcagcgcctgggct

SEQ ID NO: 201454 - DNA, 44 bp, Homo sapiens
  chr8:71315999-71316043
  hyper
gtagccgaggctgcggccgccatgttcccgtgttaataactgct

SEQ ID NO: 201455 - DNA, 77 bp, Homo sapiens
  chr8:72470259-72470336
  hyper
cggtctccagccctaatcccaacccctcctccgttttcatccctaagctctagactgttttgtggtcagtaccattt

SEQ ID NO: 201456 - DNA, 114 bp, Homo sapiens
  chr8:72470835-72470949
  hyper
tcctggagaaacacctttgctaatgcatttagggaggttgctaattgttagccatgtgccacctaaagccctgttggagaaagtcagagggcggatggctgtagttttctggag

SEQ ID NO: 201457 - DNA, 70 bp, Homo sapiens
  chr8:72756949-72757019
  hyper
caggtaatcttagcagtggcaaagattaccagacacttagaaacgacgggattccgacctctgcttgcct

SEQ ID NO: 201458 - DNA, 209 bp, Homo sapiens
  chr8:72917126-72917335
  hyper
aaagatttttgcttggttttcggttttctttttcttattttgagcagcagaccagcgtgactccacagtttcaaagagcaagcgtctatatttgtgtgacccggggccgagctggggaaggggaagcagagcagcgctgacgcagtcaggtccctggtgcaggtgccagctccccacagcgcgccgaactccccagtatgagcgaacct

SEQ ID NO: 201459 - DNA, 164 bp, Homo sapiens
  chr8:72917515-72917679
  hyper
cgagggggccccggcaggtggcgagcagcaccgaagcgcgggccaggacgctcgtttctcggcgccctctcctgggtcagtggcgcatccacctccccagccaccagtgaccagcgggggcgtgcgcagcttcagaggtgcagtttggaactgccctccccctt

SEQ ID NO: 201460 - DNA, 96 bp, Homo sapiens
  chr8:72917709-72917805
  hyper
cctgcaggtagcaatctccagggacctccctcaaccctgtggagggcagttttttcagtggctcaaagaaaacacgtctttcgtgtccctggtcag

SEQ ID NO: 201461 - DNA, 82 bp, Homo sapiens
  chr8:72987460-72987542
  hyper
cccccaaggaaacctccagccgacccccgcccgcacgtcggaacccctccagacccgcgagcccccagagtaccttaagcga

SEQ ID NO: 201462 - DNA, 199 bp, Homo sapiens
  chr8:73449440-73449639
  hyper
gcgggaggctggggtggccgcagccctgtgtgcgcgccgggccggctagctgcggggcgggggagcggcgccccagagcgccccgcctagcctcccgcgcgcagcctctaccctgctccgccacagacacacacccaccaagcacccaccgccctccgccctccgccctccgcccccgcggccgccgccgccgctgcgc

SEQ ID NO: 201463 - DNA, 40 bp, Homo sapiens
  chr8:73450162-73450202
  hyper
tttaagaatgaatcatcgcggcagcctagccagacttgag

SEQ ID NO: 201464 - DNA, 113 bp, Homo sapiens
  chr8:74005396-74005509
  hyper
cggcgaggcacagccgggccctgccctgcgcccggcccccgccctccgcgccgcccctccccagccctggcggcgcgcccgtcgaggcccgggcgggtggcggggctgccctg

SEQ ID NO: 201465 - DNA, 122 bp, Homo sapiens
  chr8:74005539-74005661
  hyper
gacgggcccgcaatcgacggtccgggcgccacccactccccgctgccagctcgcgccccagctccagcccggggacctccggggcgcgggagcggaaaagcaggtgctggcggggcgggggt

SEQ ID NO: 201466 - DNA, 61 bp, Homo sapiens; identical to SEQ ID NO: 116796
  chr8:74005798-74005859
  hyper

SEQ ID NO: 201467 - DNA, 165 bp, Homo sapiens
  chr8:74791235-74791400
  hyper
cggggcgagggcgcggtaaatggcgctctgagtactttctgtctcagtccggctggccgctcacgcgtcgggcccccatttactctcgttactgaggagacacggctccagttttgacccgactacggttgttttcttcgtgtgtaccgcgaaatgctgatgacg

SEQ ID NO: 201468 - DNA, 92 bp, Homo sapiens
  chr8:75232542-75232634
  hyper
cccataactaggacgtttccaaatgcacccccaaataaggtacaattccccaacatcctagttacggggttctggcttctatctttaggcta

SEQ ID NO: 201469 - DNA, 267 bp, Homo sapiens
  chr8:75232671-75232938
  hyper
ccaatcccgggagcggtcagcacggaccgccaacctcacccgctcagggtgttcgctctaactccacgggagtggcgatttcaaacccggccgggagagggagggatcaggaacgtaatgtgacgggctcaagtgacagcgtcctctctccagcccaaccctcccgggcggcgctccctcccggtggcagcgcagcgctggcgccggccaggtacattcacgcctagctcccctgagtgtggatacacggcccgctccaagaacggg

SEQ ID NO: 201470 - DNA, 628 bp, Homo sapiens
  chr8:75233098-75233726
  hyper
cgcaccagctcgcggagcagccgagccgcccgttacgccgctcacctccgtccccgtaggtctccacgccgtacccgtcttgcagcccgttactccaggtaccctcgtagcgagcgggggtgcacaggctctgccggaccccgtagcgccccttgaaaccatgtgaccactccccccggtacatccacttgcccttcgtctccacccccagcccgtgccgcttgccctgcgcccagtagccctggtaggtgttgccgctgggccaggtgtagcctccgaccacctcgaagccgtgcgaccaggagcccgagtactcgccctggcccttgggccccgtgcagatgccatgcccgtgcgccttgccctcctcccagccgccgcagtaggtgccgccatcgtcgaagtcgaaccttccgcccgtcattcggggggcagccccggcgcgctccccgcaggggcacggacgcgggcagtgctgggcacggcagggtgtagctcgggggtgggggcccggcgggcgagctcacgacagcgccctgggcagctcgcgctgccgctcggctccagtccgacgccgcccccgtcctccctcctcttttgccgccgccaccgccgccttcctcctcct

SEQ ID NO: 201471 - DNA, 46 bp, Homo sapiens
  chr8:75896508-75896554
  hyper
ccaccaggggccagaccttccgggcttgggtctcgggagcccaaag

SEQ ID NO: 201472 - DNA, 98 bp, Homo sapiens
  chr8:75897394-75897492
  hyper
ttcagagaaagaacagtgtgtgccttcacacttgagaggaaaagctctcaagttgccggggagctgctggcttcttcgggtgcaggccacagattagt

SEQ ID NO: 201473 - DNA, 94 bp, Homo sapiens
  chr8:76316995-76317089
  hyper
attgagcccgcgcggggaggtaaggactccggcgtgggtgccaccgcggttgcgaaaaatcgggttctgaacccggtcagcaggagtggcagcg

SEQ ID NO: 201474 - DNA, 200 bp, Homo sapiens
  chr8:76319030-76319230
  hyper
tctgagacccacttctgcaagtcgaaagctaaagggtatgggagggagaaagggaagttttccatcaaatacatatctaaagaggtacttaaagactaaaaccacaggtagctggcacggatgggaacggaaaaccattccccctcctcttcccagaactcttgctgagctaggtggtcaggagcgtcatggtagaatat

SEQ ID NO: 201475 - DNA, 419 bp, Homo sapiens
  chr8:76319437-76319856
  hyper
ccagggttgacatcgcccaagacgaggcgtgacccggggcgggggaggggacttcgcccgcgtcgcgtgaaggatgccctggccttgggctgcaggcgcggacccccgggggctccccagggtgtaggaggcggagactgatccgctctagccccgagcggtccagcgcggggcgactcgcccgcatagtggagattccggcatgaggcggcggcagtcaccgcctggctgccccgcggaggcccgggagagccgctgcggtctcgggaggccgggctttgggacttgctggcccgaccgccagtcgccctggggccttgggaacagggaaatgcgcgcgccgaggcggtggcggcctcgctgctttcagttttcattgagtctgctggttactgtttaacgtccccacccacgtttca

SEQ ID NO: 201476 - DNA, 316 bp, Homo sapiens
  chr8:76319920-76320236
  hyper
ctaatattctcccagcatatggtctaaaatctttgctagagatcgggaaaaagaaacaaacaaacaaacaaacaacaacaaaatccttaagcttcctctcccaagtccccccatccccacccccacttcccacctcctcgctttcagcaaacttcccagcctgggaaaagtgcggcgcgggacagcgcgacggggtgggtgggggacctgctgccgggagatgcggcggcggccgcgcggctgactgcgactcgggagctccgggagcggcccgcgcaggtaagtttctccgccgccgcccggggcccgggctggc

SEQ ID NO: 201477 - DNA, 65 bp, Homo sapiens
  chr8:76320292-76320357
  hyper
ggctgaaggaggggctgagcctcaggacccctaggccaggccgtgttgaaagcagataccccgag

SEQ ID NO: 201478 - DNA, 204 bp, Homo sapiens
  chr8:77589894-77590098
  hyper
aaataaaatacgccgaagaaaaagtctagaagtggaaattaccttttgtctcaatgttaattactccttgcctccaacactcaacacctaaccacctggtagtcctttttggttctcccctaactcggtgctcaatgtcagggtccgagtgctctgcagtggatgtggctgggctggggttgccctgtaaagtgttgaagagga

SEQ ID NO: 201479 - DNA, 112 bp, Homo sapiens
  chr8:80695946-80696058
  hyper
tgtcgccgctctttggcgcccccgcaacagctccctctcagcaggacgcggaaaggtcagggtccctctctctcgtatataccacaaagaaagcgcgttccccgcggcgccc

SEQ ID NO: 201480 - DNA, 132 bp, Homo sapiens
  chr8:80696101-80696233
  hyper
cggtgggcccgcgggctcctgatctgtccaggcccctaaactatcacaaggaggatatttgatgaccgtctttcttccctcgctctctcccaacaaagggtaactgacctctcgcgtgacctggccagcgct

SEQ ID NO: 201481 - DNA, 56 bp, Homo sapiens
  chr8:80696263-80696319
  hyper
gtgtgcagacccccacagggcggaggcgagcggcgcgacccactggacggacgcgg

SEQ ID NO: 201482 - DNA, 208 bp, Homo sapiens
  chr8:80803900-80804108
  hyper
actgggcgcccgcgcctcccaactcagcccgccgccgagcagacggcgcgccgcggtaattgggcacaggggcctttttcagagtcgctcagtcgataaatgaaacgtcagctcccctgtgatcccgcgtgtgtggggcggcggtggctgcgagccggggcgcagggccggccggcagccgctgctctttcacagccccagaccctgc

SEQ ID NO: 201483 - DNA, 200 bp, Homo sapiens
  chr8:81397818-81398018
  hyper
cagcaataagacactcggggcggtgcattttctgtgaaatgactactgtccggggcccgaggtgctgcctcgcacaatgcatcaaaggaggttgtgtccgtggtcgtaacctcttcgcgtgaaaggcaccgcctggtccagtctttgtgaaggaacaaaataagttcacttccttgggcaccgccacccaccctcagcaa

SEQ ID NO: 201484 - DNA, 273 bp, Homo sapiens
  chr8:81398155-81398428
  hyper
actcgccagctgtttgtcctccgcgtagcccggccccggccgcacacgcccgccccctccctgagacccccagcccgccgcccggccttttgtccccaacccctcggccgacttccttccccgcggccgcacccccgcccccaggccggaggcgcagcccagcccctttcccggtcccctggcgcccccaccccaccccagcccagccccaagcccagcccccctcccccagcccggcccccaccctttccccctccagcggttactgctacc

SEQ ID NO: 201485 - DNA, 332 bp, Homo sapiens
  chr8:81490259-81490591
  hyper
tcggaattccctccgcggccggcgcctcccctccgggggcctggctcgcagcccgtggggacgagggcctgcacgtccccgggggactgagggctgctctgggtgaggatgggaaggcgggtgccgcttccgagggctcctctcgccaagggagagagccctagacccgttcccggggcgctgctcttcccgggctggggtgggctgcagcggcggcaggacctcgccccctcccggccgcccgcacccccgcgcctcctcctagggcccggtgtcccacgggcctgccgcggtccccgccctctccggctcccgcgactccctcccccagg

SEQ ID NO: 201486 - DNA, 300 bp, Homo sapiens
  chr8:81785141-81785441
  hyper
gtcgagtggaaacacgggagggcgagggtcaatgccaaaaactgctagcaaaatgcatgtggaaaccaagggcttggattttgctgtactgggtttaccggttctctcacaagcgcctgtgatggaaactcatcgacaattgttcttggttggaagaaggggctgagagattgacaagaaacaccgctttctggtttcaataagcttgaatagccctcaaaataaggagaaggggacactccttccttgggggagaataaaatctcactctcccctgcctcacccgtccccaccgggcac

SEQ ID NO: 201487 - DNA, 660 bp, Homo sapiens
  chr8:81785467-81786127
  hyper
cccaagttccccacctcactggggagaagcgccctttcccggcacccacaccaaacaacaaacccgacacggcctttgaggaaagcgggagccgccgcctgggagagacgcaggggcccaaggcgcaggcaaatcaacagttcctcgcgctgccccgcgcggccgcccgcgccgcctgacacacccctcctggccgggtctctccccggcgccgctgaccgtcctcggccaggcgccttgccccggggcccgggcccgtccccctccccgggctggcgggtcccacgcgcgccaccgcgcccaacacgcaccttcaacgcgccccgggccgggcccctggggactgcgtggccgggtccgaggggcacgaaacgctcctcgccgtcctcgtcgtcttcgtcgccgtccaccacctcgacgaccacctcctcgtcctcctcttcctcgtcgtcatcctcctcctccgcgccccctcggggcttctcctccacacgcccgagccccctccgccgcctgctcccgccctcctcgtcctcgtcttcctcccctagaagcagcagcaccggcgacgaggcggcggcggcggccccggtggcccgaggggggccggtcccggcgctgcgcggcggcggcggcagcggcggcctccagctctccggg

SEQ ID NO: 201488 - DNA, 360 bp, Homo sapiens
  chr8:81786427-81786787
  hyper
tggctgcagaggcgcgggcgccgccttcgctggaccggccggcggggacgccggcggccggcggctacggcggggcggcgcggcggccgcgggcgggggtgggtgtgagcgagcggcgcgctgccgcctccgccgccgccgccgccgcccgggagccgcgggccgcgctgcgctccatgcggccggcggccgagcccgcgcgcgcctctcccggccggctgcgcccgcgcgctccgggcctaccgctgccgtgcctcggcgcgagctgtttgtgttgtatgttttccaccaccgcccccctcttcgcgagccattcctcacaaccctccggtccccccgctcagacaaaacccggactgg

SEQ ID NO: 201489 - DNA, 110 bp, Homo sapiens
  chr8:82192514-82192624
  hyper
gaggcgccgaaacgtgcaggcgccggcgtccatgaggcgtggggcgcgccgggcgagtccctgcttgcaggaggcgcccgagaggccgtcgcgtaccctggcaagaggag

SEQ ID NO: 201490 - DNA, 113 bp, Homo sapiens
  chr8:82193698-82193811
  hyper
aggagcgcaatgaggcctgggggtggccgtgtgttgccatcctggcctctgccacttgagggtgaggaggaaggaggcagtgggctttgctggaaaaccgtaacagaaactgc

SEQ ID NO: 201491 - DNA, 33 bp, Homo sapiens
  chr8:82633554-82633587
  hyper
gcggggcaatgagcgcgcgcggcgcctgacggg

SEQ ID NO: 201492 - DNA, 132 bp, Homo sapiens
  chr8:85094384-85094516
  hyper
tagaagcccaatgcacccagcgattggctgatggcatctttgttcaggcgatcgatgagcgccctaacccacacgctgggtggagaaatccctctgccaccctcaccttcagaatccactgctcagccacct

SEQ ID NO: 201493 - DNA, 118 bp, Homo sapiens; identical to SEQ ID NO: 45583
  chr8:85094922-85095040
  hyper

SEQ ID NO: 201494 - DNA, 236 bp, Homo sapiens
  chr8:85095711-85095947
  hyper
ggcagagactgcgagaaaaaaacgcgcttcattccttcttccaccgccatactgtattttatactaaatctcatttttattccaacattttactcccgctcggtgagtaccttctcagtggcattcttgtcctattcttttttttgtccttttttttggttttttgttttttttgtttttgttttttttctttttttccacttctttgattattgtttatatttgggaaagctgga

SEQ ID NO: 201495 - DNA, 196 bp, Homo sapiens
  chr8:86089319-86089515
  hyper
ttctaggcaacggcgggcggcggcgtcacttcctgccatttaaactcaggtccccacccctcgcagccccttctcctcgtttccacccctcccccctcggtcgtgggcctcattcacgcttccccgggcttggggagggggcggaggcccggcgtgacaagcggcccagactcccgtgggcgccgcacacctgttg

SEQ ID NO: 201496 - DNA, 215 bp, Homo sapiens
  chr8:86132759-86132974
  hyper
ggtgcagtgaaaaagcgaagccccacccatagagcgaggttcggaagtccagtctcattagcatcccttgtcttccgcggtgttgcagacttatcctcagctcaagcgagtttggggcgttatggagccagccaagtctccccttgctggcgtgggtacttgtgcagaaacttcccgaggtgcttctgagactgcacagtgaagaccgccgcacc

SEQ ID NO: 201497 - DNA, 66 bp, Homo sapiens
  chr8:86157559-86157625
  hyper
tggtgattaccatcgtcattattgttttgtatttgtaatcatcactgccacgaccatcaccgacct

SEQ ID NO: 201498 - DNA, 57 bp, Homo sapiens; identical to SEQ ID NO: 116870
  chr8:86350926-86350983
  hyper

SEQ ID NO: 201499 - DNA, 89 bp, Homo sapiens
  chr8:87527032-87527121
  hyper
ggctcagctccgggccgcaaggccccgcctgggcctggcgctcgcgcacctggggctggggataggctgggatccgccctccttccctg

SEQ ID NO: 201500 - DNA, 165 bp, Homo sapiens
  chr8:90914087-90914252
  hyper
gtgtggtctggggcgggcctgatgagcacctggattttcacccggcgtgctggtaattcctacacttgtgggtgtttgagagacatgaagaggggaggatgacctcttcccggaagcgggacttccataaaagaagcgtggtgggcgggtcccgggcacctgtgg

SEQ ID NO: 201501 - DNA, 80 bp, Homo sapiens
  chr8:91996905-91996985
  hyper
tgtaactgtcctttccgtagctttgactaaaacaccagcaatgaaaaccttgtgccaccgggtggagggggcaaatcgtc

SEQ ID NO: 201502 - DNA, 242 bp, Homo sapiens
  chr8:93115140-93115382
  hyper
acttcccgtcgtctcggccggcccgcggggcgacggggcgaggacgcggcgcggcttccctcgcgaggccagagtgtccgcggccactcgcccacgcgcgctcgccacgagaccgcggagtcgcgccgcggagcgactacggccgcccggcgctgcgcagagagagctgccgtgcaaaaagcccggggtcggggacgccagccaaacgcaacctccacgcagagcccaagacttgcggagct

SEQ ID NO: 201503 - DNA, 315 bp, Homo sapiens
  chr8:93978235-93978550
  hyper
tcagctctgccaaggcaagggccgacaaacttcgtgtcctgtgggaaatgttgctgtccacggttctgtcactcaggggcaggggcgggacaagccagccgcacacccctactcccaaagggtgaggcggaaaagaggcgaggctctgcccccaggggcgggaccaggcctcagcctgctctcggattggtcggcctttctcccgtctgtacgccggtccaggacgcaaaggcgctggccctgaggcctttccctcattttgatgccactccggagttctaatacctgtctcacgaggtgactgtagaaattaaa

SEQ ID NO: 201504 - DNA, 65 bp, Homo sapiens
  chr8:94712353-94712418
  hyper
ttcagcagtgaagcggacgcgtctggtacgagactacaagtcgcacaggcggagagggggccccc

SEQ ID NO: 201505 - DNA, 219 bp, Homo sapiens
  chr8:94712910-94713129
  hyper
cgagcccagctgcccagggccgcccacactggagggctggggtgagggaagtggaagcctctgtccatggggcctctgcgccgaattccgaccctgagtgggaggctgcacggtccccgctgtgacctggggcctaattccttgggctgcagccaccgccggcggcgaagaggagcccggggcccggccggctgccacccacccacgccaccgggtctc

SEQ ID NO: 201506 - DNA, 209 bp, Homo sapiens
  chr8:94929137-94929346
  hyper
ggcggggcagggtggcggccccgcacggtaggggagcagagtgggcaggccgggggtgagggctcgcgctccgggagctgcacggggctgcgtggaaagagcgccgagcggtggcgtcgttgtcgccccctcctcgtcgggaagaatcgtttggtctcctgccgtgcccggttcgtattccctactccctgccacgagccgccccgtcc

SEQ ID NO: 201507 - DNA, 184 bp, Homo sapiens
  chr8:95246499-95246683
  hyper
acagctcccccatccgccctctggcgcttcagagtctggaggaatcccgagctgcgcctccctctccctgcatccctggcagagaatttcccctcccagcgcgggggagcccatccctgaggactcgggcaggtcagatgagaattggtagaaagtgaagcgccttttcctcgcgctgagggca

SEQ ID NO: 201508 - DNA, 71 bp, Homo sapiens
  chr8:95651655-95651726
  hyper
ggccttcgcccgctctcaggggacgagagctgccacctgtatcacgggaggccccgcctccgcctgcacct

SEQ ID NO: 201509 - DNA, 190 bp, Homo sapiens
  chr8:95651845-95652035
  hyper
ccggatttgtacccggagtgggttctgcagggataggtgcatggttgcccgtttcacatcatgaatatgaacggggctggacacctagagccgaattattaatacttcagacagaattctgttcccaagaacaaatcgctttgagatataaaacccgagaaaacttcacctctggcgcttttctctctaa

SEQ ID NO: 201510 - DNA, 223 bp, Homo sapiens
  chr8:95652591-95652814
  hyper
cggcccggagaagggggggctcgcaggatttctcctgctgtttgcactgaaagttgtgttggctcaggagctgcttttccggggatctgcagttgcccccgccacctcctggctgcggttggcaggtccctccctcagcagttcgtcctccgcctgcgccgcgccctgggcagctccgcgccccgggcctcacctctggcctcctttcgcctccctgcacctg

SEQ ID NO: 201511 - DNA, 377 bp, Homo sapiens
  chr8:95652863-95653240
  hyper
gtattctccgagcccccctgcacctctcagttacctccagtgggaacccctccccccagcgactccgagccctttacctctctgagccctttccccgtctggcctcgtctaccctctgggtgtcaaccgcctcttccctgcccctcacgtctccccctcctcctcccctgccctcgcctctccattcatccagccattgtctcccgccccttcctccccctcccgaagcggcctcctcccccaccgctgccacgtcgtggtttgaaggagccaatgggccggcgccgccaggtgtctcttacctgcaccacgtgggggagggggaaggggcgggcaggtaaagccacatcccaaaacagaaaagctttcagccattg

SEQ ID NO: 201512 - DNA, 52 bp, Homo sapiens
  chr8:95653290-95653342
  hyper
cgggcaactgaatacaaaaagggcaggcctcctgcgccctccttcccacccc

SEQ ID NO: 201513 - DNA, 163 bp, Homo sapiens
  chr8:95653853-95654016
  hyper
ttggagccatttcagtcctccgcaacttagctcaggtggagaggccggcgctaccgagccgggttctttgcccgtcgggggacgctccgccgagacgaggtggggtctcggaggccccggggtccacttccagggcttttccgacctatcgggtggggggtgg

SEQ ID NO: 201514 - DNA, 326 bp, Homo sapiens
  chr8:95654337-95654663
  hyper
accccagcctgggcccaaccccaccgcaccctacgccctctcagggcggcccacgcgtgttcccggagcagggtggcgagacgcctgcccggccgcgtgggtgggagcccagcctgagggccggggcgcaccgtttgggcgggggtcgctgcttctcttcatctcccagcccccagggtttgggaccgacattcactagttttcgagttgcttcctgagtagttactggagccggagagtcagctccattttgccaattgattgacgtgcggagtttgaatcctagcgcccccatctccaggtccagaccccagacgcgccgctcc

SEQ ID NO: 201515 - DNA, 482 bp, Homo sapiens
  chr8:96145988-96146470
  hyper
ggcgcgcccgtgcgcgcgcaggggagaggccagcccaggcagccgttgtcgggttcgactggaggggcgggggagtcacctgcgagcggctgcgctggcggccagcccgcccaccgcgtctggatcgcgccggctgcgcggggctgcggacagcacacaccctggaaggccccggcggggaacgggcagagtccgcgccctgcgtccgcgaccaggaggatcggaccttcgccttcgctgtcgccgccgccgccgcccgcggccgtcggggtaggtgaagcccgggtgggtggtccgccggctcctgacgggccgggaggggagacgcgaaactttccgggcgcttcctcccgcggtcccggagccgtcgcagcgccgggaggtgtcgtcgtcgcgggcggtggcggccgacgccatgttggggtctgtgagaaacggggcgctcccggccgctcccctcgcgccggggccggcccgcgggc

SEQ ID NO: 201516 - DNA, 420 bp, Homo sapiens
  chr8:96146530-96146950
  hyper
cgccgccgcggggggacgggggccgccgggtagggtccggtccacgggtctgcggggcgggggccggcggacgcgggaaggagccccgaggccgggcgagaagttgtggggcctgaggacgggggtcctggacacggccgggggcgtctcagggtcgcgacaaatttctggccgaaaagtttgcagggtctgcgtgtcggggaccttatgacctgaactacatatttgtatgtcacttgggagacgaaaatggccccgcagaacttgctctgatagaagcgatggtttatttatttggagccttttcaagttttatgatcctttgacgaatttatttttctttttaaaaatgtgattgaaggccgagagcgcgctgccggtgttgcttgaatagccttgtgtgctctccgtacattccag

SEQ ID NO: 201517 - DNA, 76 bp, Homo sapiens
  chr8:97166797-97166873
  hyper
ggcattccacacctcgagggctcggctcgattcagtcccctggtccaaagagtgtcgtttgacccgggttattcaa

SEQ ID NO: 201518 - DNA, 275 bp, Homo sapiens
  chr8:97166903-97167178
  hyper
ccttttacttaaaagcccccagggattactgttgatttgctctaagacctttggtgcacgcagtagtcctagcaggaaacaaaagttctcgttctgccctgtttctatcataccatcttcctccccacagtctccacctcattcccttcttccttctccgccaccgccccagaaagacgtcaccactttcgaggaggtgtgtaagaacctcaaggactccagctaagaaaaacatgtggtgttagggcctccgatgcagtgccctgcgttccccg

SEQ ID NO: 201519 - DNA, 219 bp, Homo sapiens
  chr8:97167223-97167442
  hyper
tcaagtcctgattcaattggggggtggggagggtggagaagagggattcgccaggcctgtcgtgatctgtggtctgagtgacttttttcttttaatgcgcagaaaccacaaggatgtttgagcacgtttttagatcccctcccccatcggcaactccaccgcgcgaactcccagaggcccgagagcctcccgcgttgaggaaaacgctatgtccgtctc

SEQ ID NO: 201520 - DNA, 223 bp, Homo sapiens
  chr8:97167855-97168078
  hyper
ttccaaggctgttccctctttccggggaaataaagcctagattggaaccttctgcccagcttcctcatttggccgtctggtctgcattagtgtttttataagggactcaaacaaatcgaatacaaggtcaccaaataattaacagttgtgaattccctccgtccccattaaaatacttccctgcttatatttcattttcggtttgccaacgacaacagggtac

SEQ ID NO: 201521 - DNA, 101 bp, Homo sapiens
  chr8:97507728-97507829
  hyper
tgccctctggggtctcagggagtgcggctgtttctggcccttctggttccccacgtcctctccctttgccatttaataacgtgtcaatttctaattaattg

SEQ ID NO: 201522 - DNA, 185 bp, Homo sapiens
  chr8:98787803-98787988
  hyper
taaaagaatctcgacccttgaatggagttacacgaacggccagatgaaagaaggaaggcccggacctccactcagggccgactaggggactggcggagggtgcacgctgatggatttactcaccgggtgcttggagctccagcagctggctggagcccgcgatgacgtcacggactcgggtcaca

SEQ ID NO: 201523 - DNA, 355 bp, Homo sapiens
  chr8:98788437-98788792
  hyper
ctaaagttgtattattagaaacttaattctccgggtgccgcgtccgcacttcccccggctgggccagcgccgactgggggaggccaggagtttggggcgatgggggaggccaggggcgcggggcggagggccgcactcgacccttggcgcccaggtggtgtgggtcgccgatctccagcctccgcgcagccccgcggcctcgcgtagggcgcaccggggcagacaaactgagcttatctgccgagcacgtgtttcctttcttcttaaagcccgtgggctttgtgtttcgacggctgcggacggagcggtcgcggaggtgacggcgcatattttgcagctctgtggttagggttgc

SEQ ID NO: 201524 - DNA, 507 bp, Homo sapiens
  chr8:98881052-98881559
  hyper
ggacccctggagtctgatgcccgcctgggctcaggcacggacggagtggagccaggtggcagcaggcagggcgcgccgccagagtgcccagctcccggggctgcccacagggtggggccgccctcgccgccgctccctctccgcgccttccccatccccaaagaggacacccctccttccgcccggcccgctccccacccccgccgcggcaccgcctccccagccgcccgcccttgcccagcgcctcccaggcagccagcgagcgaagggagcgctctgggatgggacttggagcaagcggcggcggcggagacagaggcagaggcagaagctggggctccgtcctcgcctcccacgagcgatccccgaggagagccgcggccctcggcgaggcgaagaggccgacgaggaagacccgggtggctgcgcccctgcctcgcttcccaggcgccggcggctgcaggtgagcgcggcgcgctttcccccggctctgcgcggccgggcggc

SEQ ID NO: 201525 - DNA, 49 bp, Homo sapiens
  chr8:99077294-99077343
  hyper
cacaggagaaatgtcctatcaaggccttctaccaaggctgggggcggtg

SEQ ID NO: 201526 - DNA, 39 bp, Homo sapiens
  chr8:99438774-99438813
  hyper
cttcccggccccctcttttcccctccagctcctgttccc

SEQ ID NO: 201527 - DNA, 369 bp, Homo sapiens
  chr8:99953787-99954156
  hyper
gagtgggagaggcgcgcggtccgagtgggagaggctgagagtcaactccagggaagtctgtgtctgacacctgctcgctgcttagctggcagagcctcctgggtgggccggggggcaggggcctgcgctgcgcgccccctcctcctccacctcctcctccgcgtttcctgtccctggccttcatcccggcctcccggggcgtaaacttgcagcggttggggttcaggcagccgctgctcgcgcgcccctcgtcagttagccatttccctgagagcgtccttggtgtcgcaagtccagagccgcgaggacagcagatgaccgggtcagcggaaatttcagagccagccagcagctcaggtccccggggcc

SEQ ID NO: 201528 - DNA, 418 bp, Homo sapiens
  chr8:99954762-99955180
  hyper
tctgcctacccctcgggaaaaccaaacggttctgcacccaacgtacacatacttaagggcgggaaaggtgtgaagcccgctgctggggagttgcctcccctttgatgaaaaggaagtgcgaagcgtaggaacgctcttcaggtcaccaccccgtgagtgggaggcttggggagtctgaaggaagagaaagctccctccaaatctcccaaactgagaaaagctgcaggaggaatgaggcagttggagagagaggaccgcaggcatcccgcagctgaggctcaggactgagctctaaaatgaaagcacccctatgggacccaccaggcaaaacgttaaaaaaaaaaaaaatctgaatgcttaggcattctgctgcttccattctgtgtgtcaaatctactttgaagcagttaagtactgc

SEQ ID NO: 201529 - DNA, 140 bp, Homo sapiens
  chr8:99955428-99955568
  hyper
tctacttccccgcacgattgagattttttgaattgtcctttggggcgtctcattcaaaaccatctttcgacggaacacttttgaattgtacagcctcttggttgaagatctacgtcctcaaagtgcgggcttgccgtgga

SEQ ID NO: 201530 - DNA, 746 bp, Homo sapiens
  chr8:99956540-99957286
  hyper
gagtggaccattagcagacgccgggcgcggaggcggagccagggcgctgagggccccgcgcggcggcgggacgcccgcccgaaggggaggcggggccgctactaaagcccaagactcccggcctggggcagcctggggagggacgcgggcggggacggagctcggcgtgcttgctgctggagggtgatggccctgcaaggctgtgggctccgacctcaccgggagtcgacagcgagaggttcgccgaagagcgaggttctgggcgagcgctgaacgccggccccaagcaccccgggtctttacacagtccgcgtccacagactctgacgaagacgtggatctgctctcgctttagctgctcgcggtcctccagatcatgtccgcgactcctgcgactccgcgcggaaaaaaaagtttgccaggcgtggactcaatgacctttccaagctgtgcgcctcgctgcctggaccgggtctgagcgcggctgcccaggttgacctttctgcgggaggtgagtgttcgctctgggaaggggctgtagctgccctttggaaggaagggtttgggggtgtaagaggcgttcagattctcggtctggtgtgccccaaattcagatgtgaaaatagatcatggggatgcaatcccagggcactgtatttctcacttccttgggtccctggcacgcgactcccagctaacacccaaccacacacatttctacatactgtttcttaattttgttttgg

SEQ ID NO: 201531 - DNA, 57 bp, Homo sapiens
  chr8:99957709-99957766
  hyper
acctgttagccgagaacaaaagggggctggcgtttcccgaagcgaaagggcgcagac

SEQ ID NO: 201532 - DNA, 100 bp, Homo sapiens
  chr8:99963488-99963588
  hyper
ctggaaatcacaaagcccaccgaggtggctgcgggtctgcctccgaagttatcagtgtaatcgggcctctgtgtatgcctgcacgtgtattttcatgatt

SEQ ID NO: 201533 - DNA, 100 bp, Homo sapiens
  chr8:99963900-99964000
  hyper
tgactcacaccccgcggcaggacttctagagaagcccaggatctgtcccgtgccgccgctgctcccctccccagacacctctccacgtctcctacccagg

SEQ ID NO: 201534 - DNA, 216 bp, Homo sapiens
  chr8:101170388-101170604
  hyper
gtcgcatctcagcccttccctcccggagcgggggcgagaggtcgaggcggggaggcgaaggggcggtgggccgcgagggagaaggagcgatggggtggacgtccttcaaggccggggaacacgcggggctttccaggccgcgggggacggtggcgggtgtcggggcgcggtggcaacgctggagttcccgggtccaccggcgcggtcagccctggt

SEQ ID NO: 201535 - DNA, 264 bp, Homo sapiens
  chr8:101661576-101661840
  hyper
ctgcaaacacacagacaccccgtccctggtgagccgagggataagtgagcattgccaccggccccctccctgcccaccctgaccccagccctgggcgcaccacgtagcggccccccagcgcgtcggaccgctgctgggacaccgggatacagaaatgcatcttcatggctgagcggtgtcttgggagtagcgctgggaacccgacctgcggcggcgggcggtgcgcggctctgaactcggcagcggtggacgcagcgcggcctg

SEQ ID NO: 201536 - DNA, 83 bp, Homo sapiens
  chr8:101661991-101662074
  hyper
gcatccacggccacccccaccccggacatcggccactgttggcattttctccaagaaggcccgtgaggggcttgaaaacagtt

SEQ ID NO: 201537 - DNA, 183 bp, Homo sapiens
  chr8:101920199-101920382
  hyper
ggggagaggagacccggagtgagaagctcttatccgcaggcaggtcatcctgacatctctctgcgagtctagctgagtctgggacttctacgggttttgaagggaggaagtgtgtgctgattggtccatgggtggccatcggcggggctggaaaaaacaccaaaagttctcactcccgcggtg

SEQ ID NO: 201538 - DNA, 91 bp, Homo sapiens
  chr8:101920468-101920559
  hyper
gggaacctatctgcctcctgctgccattgacaggtttgtccaccgcaatgccctggctatccgtgccatgggggacctgcaggcccctttc

SEQ ID NO: 201539 - DNA, 43 bp, Homo sapiens
  chr8:101920619-101920662
  hyper
ctggcatggcagggctgccccgagtgtacgcacacccggccgg

SEQ ID NO: 201540 - DNA, 85 bp, Homo sapiens
  chr8:101962307-101962392
  hyper
aatgagagaacaggtcgccacattttaaacaaataattaaccactttggatgcaaggtactggctcaatacgtaaactatttaac

SEQ ID NO: 201541 - DNA, 202 bp, Homo sapiens
  chr8:101965472-101965674
  hyper
catactgcacatgacgatcattacctttttatctcctagaagcaaggtttgagggacgtcgtagtccccagggttccagctggcggtgggagtgggccacaggccgggtgatgagccgggacgggagcccggaagaaggggaaggagaaaggcggaaattgcaggtgcctgaaccggtagggcctccgcccagttgacttca

SEQ ID NO: 201542 - DNA, 32 bp, Homo sapiens
  chr8:102504696-102504728
  hyper
ccactttctgctctgtgtctgcccattgccac

SEQ ID NO: 201543 - DNA, 164 bp, Homo sapiens
  chr8:102504760-102504924
  hyper
tccgagctcgggccccatgtgaggggcccccccttatcccacctttccggctaggtgagggcgcgagcgggcgagcgagcgagagtggtgaggggggacggaaaagcagaattacctgtagctcttgttctgccatctcgggcgctctcacacaccttcacctg

SEQ ID NO: 201544 - DNA, 40 bp, Homo sapiens
  chr8:102506365-102506405
  hyper
ggagagggccggtgccccaaggccgcgggccgctgggcct

SEQ ID NO: 201545 - DNA, 258 bp, Homo sapiens
  chr8:103667904-103668162
  hyper
ggagacactcgacgccgctcccgccgccgccgcgctcagcgccgtctgccccctccccattcaggtagccgctcagcctgccccgcgccgcgggcgggggtgggggcggagcctgaggccggccaatcaacggcaaaggtgtgtgaggcgccggccaatgggctcgcggggccacgcgtgatcggcgactgcccggcagcgtgaagctggtgtcagtggagcgtgtacacaatccccggcagcgtgttccctctgccc

SEQ ID NO: 201546 - DNA, 202 bp, Homo sapiens
  chr8:103822601-103822803
  hyper
tggcaacctactgcgcaccagaggggaacccgcccgccgtcccaggccgggctctccctgctgcggagcggcccgggcgcggcgggacagggaacggaaggaacgggcttggcgcgcactcgccgaggcccaggcaggattcgagcgccagggaggcgcccatttcccttcccccgcgcctgggaacgcggtgctgggggcg

SEQ ID NO: 201547 - DNA, 31 bp, Homo sapiens
  chr8:103876453-103876484
  hyper
ctggccgggcagccgcgcgagcggggcggaa

SEQ ID NO: 201548 - DNA, 429 bp, Homo sapiens
  chr8:104511554-104511983
  hyper
tgggcctccagctctctgcccctttcctggcccccatccctgacaccccagggacccttcctccctcctcacgttctccctccttccaggatcccgccccgacacttcggggccctcccgctacgcgcactctttctcctcaggtcctgacacctgggcgccccctccctgtcacccaccttcagctccagccctgactctcgggcgccttgccacccttacgctccccgccccgccccggtccctcgggcgcccccactcgccgcctctacctccctacctgctacacctggcacccctgcccccacccctgctcatactcttcccccgcccccgacacctcgggcgccccctcacacgctcctattctccacacttccgtccccgaaaactcgggcgccctctcccttcacgctcagtctctcctcc

SEQ ID NO: 201549 - DNA, 69 bp, Homo sapiens
  chr8:105236123-105236192
  hyper
gcccctctgctctccgggactgtgccgggggcgacagccctagagcacgtcagctgagcagagaagttg

SEQ ID NO: 201550 - DNA, 329 bp, Homo sapiens
  chr8:105600681-105601010
  hyper
tctcacagtcaagcatctttgtgtgtggattgtgccaggctacgggtcctggagcaactggccgcgggggccctcgaacccaggtcgggaagtccgcccgccaccccctcgctccgccggggccctcccggccgggccccccagcccctctccaccacccgagggtctggaggtggacgagtggagaaaagcatctccgtgtggggacacccgttccgccacatccaccccctcaccggtctttgtcccgccggtagccagggtctccgcgggagtctccaggggaacccccgtcctggaggcctcggggcccgggtcgcctcagcttt

SEQ ID NO: 201551 - DNA, 244 bp, Homo sapiens
  chr8:105601687-105601931
  hyper
agcacggtcgctgtccgagggctgggctctggcccagcgggtggggggagggggggtgggataccagctgggaggctgaaggtggttccgtgttgggggaggcgtggatggtctgaagctgacaacttgggagttccttcctctatccggtacccccaagtctccacttgctgtcggcgcggagcttcgagtgggggtgggctcaagttagtgcggccaacctggcagctggtcggtcaagggg

SEQ ID NO: 201552 - DNA, 110 bp, Homo sapiens
  chr8:105602083-105602193
  hyper
cgactttcagggtagatatattgaaaggaggattcgcccatcacgctgcagtttccctaaagctcttttctcactcccagcaaatgggagtcctcctttacttagatccc

SEQ ID NO: 201553 - DNA, 400 bp, Homo sapiens
  chr8:106331443-106331843
  hyper
cgctcagccctcgcgctcccgggctgcttttttaattccgacccgcgcacgctgcgagtccccggcgctgtcgtccagccggaggggcagtcccgctcctttagacgcttattattgttgttgtcattgctttgtgcgattgacgtgggactactcttgggaaccacttttagtaaccagggtagaaacttctcagaaaagctgggcggtcgagacctcggggcgagggaggtaacttccccacgcggtggaaaatcagagcgtcagggtcccgatcctgggcggtgccagagccacaccaaacccgaagcgaaacaaaaagtaggtgtaaaagttcgcgcctctgcggcgggcggccgtgcgtctctgccctgcgggcgcgggctggtggctggcaggt

SEQ ID NO: 201554 - DNA, 58 bp, Homo sapiens
  chr8:107281851-107281909
  hyper
ctgtcagacttcgccttcctttcctccttgtttttcccagcaaccaaagcatctgaag

SEQ ID NO: 201555 - DNA, 217 bp, Homo sapiens
  chr8:107282895-107283112
  hyper
ggcggggaggctgggtttggggcgcgggagcccggccagggacagccgcagaaggaaagtgggggtgtcgccgggggatagagtgggagcagcgtgagagcagtgttgggggcgcagagtggagggcaagcgtgtcttgaacagaacggcaggaggatgggtggaaagtggggcgcgtggaaagcggatttggacgagagcaaaggacgccggtgga

SEQ ID NO: 201556 - DNA, 637 bp, Homo sapiens
  chr8:107669366-107670003
  hyper
cctgaaaggtagatccgcaaactaaatccctcaataacgttgcctaaacaggactgggatcatagaatgtccaacactaacatgagttcataatggcacaacgaacttaaaatgttactattcatgttttaattatgattgcagtcttacgttgaaggtatctccgccgtccttaaacataaaaaaaaaaaaaggaaatacaagctgcaaaagttttatgtaatgcactccaccctcttttttccccaagccaacacacacccttcaaactttttgacagttattttcagacccctcctaggctcccgaactccatgcaactccagcagtctcccctgggccatttttagcctctgctctgacctggcgggaggctgggtgtccaccctttcccctgcagtcctgaaagtccggtccgagcgcggacggggcggggaggggctgggcgggccaggccagctccattggcgccaggcgggtgggggaatgcgctgagaggacccgtccagcttgcttaaaagccatcagttttctgaccccgcatcggttccaggaagaatacacctatgtgacaagctaagttctgcctcattttgcatttagaagccacaagaaaaacttttcgaaaacttttgtc

SEQ ID NO: 201557 - DNA, 633 bp, Homo sapiens
  chr8:107670289-107670922
  hyper
gggggcggcggcgaagcccggcaggtgcgcttcgaagattacctgagggagccagcccagggggacctcgggtgcgggtccccgccccaccggcccccggcgccgtccagcccggagggacctggtgagcccacctttctttcgcctcccgcgcggccgacctgggctgagggctgtggggaggcggcggtcgtggcgccgggcgggggtcgctgcccggctctggcaggtgtgcctgggccggggcgggcaacgtggccggggtggcggccgccgggggcgaggaaggaaggactcgttcggctctggggagggaagactttcagctgcgtgccagctcttcctgctctgctcttcctgctttcctcacctagacttgattttctttccccgccaagtatttcaaggggacgatccattctctctttccctcccactgggaggtgaagactgaaccagttatgacgtccgtgttttcagtcttggattcttgaagagcgctgtgcctgctttggttttggtttgggtcagtctttccttaatatttctcagttgttaggattcacttcctaaccgaaaaataaaaagccagatacttctttgtaaaataaaacacttcattaacattggaag

SEQ ID NO: 201558 - DNA, 119 bp, Homo sapiens
  chr8:107670978-107671097
  hyper
gcagaacctagaaactttctcagttcctgtttattttgtgttgtgttggccgatttttttcaccacagtggctttgtaccattctttaaaacagtcatttgtagcgacatgatattgat

SEQ ID NO: 201559 - DNA, 80 bp, Homo sapiens
  chr8:108509697-108509777
  hyper
ccactgttttctggacttcggcgctgattgctgcaccctatgtgagtcagaatggcagcgaggaaagcaaaggaaaggaa

SEQ ID NO: 201560 - DNA, 239 bp, Homo sapiens
  chr8:109799175-109799414
  hyper
gctagcagcacagtcgatttcctttgcagctccctaatccggggtttccattctcagtggagaatggataatcccaggggaccagctaaagactcttttcttccgtcctctccctctttttcctctgatctgcttaaaagcccagttaacgacattgcaccttaaagcgaggggacacgcactttccctcgtccatctgtcatcaattaaaagcattaatatttgctttaaactgacac

SEQ ID NO: 201561 - DNA, 63 bp, Homo sapiens
  chr8:109799903-109799966
  hyper
aggggcggtccctgcatccctcctgtctctgtctcctcccacgccttctgggttttacccttc

SEQ ID NO: 201562 - DNA, 87 bp, Homo sapiens
  chr8:110346426-110346513
  hyper
tcctggtacttaacgcgcgcgcgacggcaaggtctgaactctgttacccagaggccctagcaaccaggaggcggcccgcgctggtta

SEQ ID NO: 201563 - DNA, 68 bp, Homo sapiens
  chr8:110703933-110704001
  hyper
ccctgggctcgctgcctgaaggaccggttcctgttgccagggccctggcagattatgctgcaggatct

SEQ ID NO: 201564 - DNA, 45 bp, Homo sapiens
  chr8:110704144-110704189
  hyper
gaccccagtctccctcgaggtcttcactcacccctctgctaagga

SEQ ID NO: 201565 - DNA, 119 bp, Homo sapiens
  chr8:110986093-110986212
  hyper
gccttcctctctttctctgccgcgcccgcctccccgcccagccgccgcgtgcctccggggtacctgtccctgcagcaggaatcgatgctgagctcatcgatgccccagtactggatctc

SEQ ID NO: 201566 - DNA, 78 bp, Homo sapiens
  chr8:110987603-110987681
  hyper
gttctgagcacagcggagctctcattttagaaggaaaggcaaaaagacaaggaatagaacaagcgtgggctggggcag

SEQ ID NO: 201567 - DNA, 39 bp, Homo sapiens
  chr8:114444541-114444580
  hyper
tccccaaagacaagaccgcattcagggagaagagaacca

SEQ ID NO: 201568 - DNA, 100 bp, Homo sapiens
  chr8:114447448-114447548
  hyper
ctgaggccccagagagaaaagaaaaatcaagcttcaaggagcaggttgggattacaaggcagttgctgccacagagaccggggcgactgacttcctggca

SEQ ID NO: 201569 - DNA, 808 bp, Homo sapiens
  chr8:114449602-114450410
  hyper
tgtgttactactgtagttgcagtatatttcaggcaggcttctcccatttattatcctgtgatttaattgaaaaaggaaatcacagagaattttctcaataaattctgccttcacacggaaaagaatgtatttgaacacatgtatttacatactcaaataactacgtgtaaacccttcaccgggtttttatgattcgggaaacggatttcatccgtggcctgggcgggggtggggtggggagggaagtcaatgtcgtttcctcaaatagttctccctttcatcctcccaacccccttttcagtttgtgtgtgccgcagttaaactactttatctgtggtagttatctagaacaaacccatttgtcttaattctgaatcggtaccaaatatgtaaataggaggtttctttcaaaacgaaaaatgtatgtatctatacatctggatctgcttcccccatgcaccacgcaagggttaagattgcacaagggaagagttcttgcgccatctactggccgtctccgagccgcccgttcttccttcgcatgtataagggaccctgtttttgccatcccttggtgtcaggggagctgtgtccccgggaccagtatgtcgtgctccttgatttttttcgaccacggtcctggcccaaatctttcaatgaacaagttccttagattaggcaactgattggtgatctgaccttttcgggaatctggtcccctctcagcagtggggagtgccacagcgctagttctgaaacaggatattgctgttgcgtgtggctccatttaactgcctcaggctatcat

SEQ ID NO: 201570 - DNA, 151 bp, Homo sapiens
  chr8:116681608-116681759
  hyper
gccgccaaaccgacgttccccagacactcagagatgctaacagaaacaatttaaagaactctcaaagtccttttaccttttctgttgttactttcccttctctctcccaattaaacgacgcaggatgtgtgtgtgcgtgtgcgccccctcc

SEQ ID NO: 201571 - DNA, 1758 bp, Homo sapiens
  chr8:117858172-117859930
  hyper
tacagcttataacacaacttttattagaaaagttatacataacatagcatcaactattttcaagaacaatattaaacccgataagcaacaaaaaccagactaacaaaatgtgtaacaagaaactaatgacctttctaaaatcaaacattcaattatctacaatgtctttttacaaacggggaaaactccttggtttacaggcacatcatattgaatgtaaagctgcaatagcaattttatacaattaccactctgaagaaactgaatcattaaaacagtaattacgagttcacaaatttaaaacatttcacataattttaaattattgggtatacactgaagtctgagtttcaaaagtgatttttttttcccacaaaagtttcaacacttaagctagaactttcagtgttaactttgccctaaaaagttaagacattctgataatcataacagtcacatgatttctgatgctatctggtctgttaataataaagtctttatttggatgtatttttcttcaattaaattacaggaaactggatataggatttcgttgcaacgctattaaagttccaaaccaggagtgtgcagcactggaaaaggagatcagtactaaaacttacaataaatatcagagaagccgttagtttttacagcatcgtctgcttaaaagctaagttgaccaggtgcataatttcccatcagtctgtccttgtagtaggcagggcaatttctgttttcatgatcggaatactcaaatatatccaaacatctttttaaaactttgatttatagctcctagaaagttatgttttttaatagtcactctactctaatcaggcctagctttgctcattttggagcctcactaaaataacagatttcagtatagccaagttcatcagaaagactcaaatggaatgatttacaaaatagaacactttaaaccaggtcagtcctatctttttgtagctgaaggctatcagtcataacacaatttcgcgtacacctctgctcattatggaattacacttaaaacgaatctcaagagggtgaccattgttgtttcagataccatccctaaggagagtggttaacaggaagattgccagtgttactgatggaaagaagtgtttgtttgtttttttttcttgtcaaagacttacaccatagttttaaattaaactgtcaggcattttctcagacaggttttccttttcaatgcagtaatgaagaactaagataaaaatcatgacttttgactgccactcaacattattacatgcaccaatattgcacacatctgttctgaactgttaaaatcatcttctgagtccttggggtgctgttttctccatcagaacacaaacacaacccatctaatcagtttccctcaaagatgaaattgacaaatttaatgtactggaaaaaaatgaagaaggaaaaaggcaaagactttgtacagacaaaaatctaagttttctcaaagggttctgtgtcccctacacatgggggcaatttgtaagcactagtgaatcaaacactagctataatgcttctagctccttatataatatggaaccttggtccaggtgttgcgatgatgtcactgtacggttcttcctgtgtcagctcaatagcttgctgctttttaagaaccaagaagctgtagaactttgcggcagcttgttttctgttcgtatttcgacataactcaagcaaactgatagattcagctccagttttagcaagagcacg

SEQ ID NO: 201572 - DNA, 84 bp, Homo sapiens
  chr8:117861184-117861268
  hyper
ctgaagaccatgaagcatctgctgagtccttttgttccatcttctttcttcctgatcttgatcgccccctgatgcatcttcatc

SEQ ID NO: 201573 - DNA, 161 bp, Homo sapiens
  chr8:117862856-117863017
  hyper
ctcttcctcttcatcatcttctttttccttctctttctccttctctttttctggcagaagttctaactctggtattagctgacagatatttggaggttcttctgggggaagctctacaggtggtatttccatctgctctacctgctgaggcttaaagcaat

SEQ ID NO: 201574 - DNA, 149 bp, Homo sapiens
  chr8:117864186-117864335
  hyper
aggcatcacaggctctgggtcaatttgtccagcttttcgcttaactccctgaggtggtggtggaggcatagctgactcatctatgtttgttctgctggcctccatcactgactcctggaggcggcttggctcttcaataatgggctcat

SEQ ID NO: 201575 - DNA, 174 bp, Homo sapiens
  chr8:117864773-117864947
  hyper
ccaacagaacaaaccgataacatcacgctgctgatgctgctgttgctggtcctctctaggaacctctggattttcaaattctttgaggaattcatccaaattatctgcctctcctcctttcctcctttttctaaggtcttctggtacaagcggtgtaagacagcgtgtaaagag

SEQ ID NO: 201576 - DNA, 224 bp, Homo sapiens
  chr8:117866483-117866707
  hyper
cttcagtagtctgttattccacaaaggctgagcaggtaaagaaaacagtttttctactcctcctgtctctttccacatcatcaatttcttggtgggcggtgccagatccaaagtagtaacaatatctgaataatcactaagttgggctctaattgtcttgctatccaactctttgacactgtcaacaattagcttcctcttcctcttggcttttgtttctttaa

SEQ ID NO: 201577 - DNA, 123 bp, Homo sapiens
  chr8:117868404-117868527
  hyper
cagttatatcaataggctccaatgcaaatgcttcttcctcatttggaacaagtgttgtttgatcagtcatggttggcattggttcaacgggatccactgaatcaggactatcaggcccaccca

SEQ ID NO: 201578 - DNA, 133 bp, Homo sapiens
  chr8:117868877-117869010
  hyper
tgcttacttgatacattatcatcctcatccatatcgtcatgtgcaggctgctctggcaacatcacccctgcctcagagagggcagggggatcatcaaagataccgccatcattattactaataagtttgtcat

SEQ ID NO: 201579 - DNA, 221 bp, Homo sapiens
  chr8:117869491-117869712
  hyper
tcattcccacatacctaatattccaccatcatttccttctccaaaattatcatccttatattgatcttcatattctaaatggttaattttctcattcagattgctggtgctctgttcagactctaataggaggttagaagtagtagtgcttactaacatgtcgtcatcctcaaaagcactgccttctctcattatctcacgatcatccattccaaaatcac

SEQ ID NO: 201580 - DNA, 107 bp, Homo sapiens
  chr8:117870590-117870697
  hyper
caaaatcattttcttgtaaaatactgatgttcccaacttcttctctcatggttatctcttccactctactctgattcaagctgaactgctgggccacatcgatgtca

SEQ ID NO: 201581 - DNA, 112 bp, Homo sapiens
  chr8:117874067-117874179
  hyper
gaagacacatactctaagtcaggcagtggctgatcaaagtcatgaaattcttcaggtaaagtaatggcattataagctgcttcccgattttcctcaggcaggtcaaccacac

SEQ ID NO: 201582 - DNA, 130 bp, Homo sapiens
  chr8:117875368-117875498
  hyper
ctggccgaaaagccatctttatcttaatgaatgcttcattacagtctgcaagaaggtatttggctttcctgtgatagattcgaactactcccagtaagagatgtcctgatgtccgtaatgccattttcac

SEQ ID NO: 201583 - DNA, 176 bp, Homo sapiens
  chr8:117878824-117879000
  hyper
ctttggtgagatgatactctccacgctgctctctaaattacactcgaacacatgggctttggttagcttcttatcccaatgggccgctagccaaattttggccagaggccctcttttactgagaacaaaatgtgcgtagaacattgttctggctggctatgaaaacagaagaaaac

SEQ ID NO: 201584 - DNA, 114 bp, Homo sapiens
  chr8:117886849-117886963
  hyper
cttgctctccgctgggagttgggcgggctgggtggcccggggaggggaaaagggtcgggggagggggtggggaaaggggggagcccttgcgaggtgtagcttccgagcagctcc

SEQ ID NO: 201585 - DNA, 220 bp, Homo sapiens
  chr8:117887066-117887286
  hyper
cggcaggatgtttacggtcaaaatggtacctgtgcgcctgcgcagccagcccaagcccccccctccccccagaaggagcggcgcaggcgcaatgactatttccttttctttggaacccgccctctgtttgtggagtccacaactgagcaagcgcaaaggtgattctcttgcgagggtctttgagagttgcggtgttagccaatagcgtaagatagcgcac

SEQ ID NO: 201586 - DNA, 207 bp, Homo sapiens
  chr8:119123498-119123705
  hyper
gggttgcacaatgcacgggagagagcggggctgaatatctcgcacccagggcgggcgagcagcggactgtaattttcttgcatgcaacaagacggaggaaaagaaagagagaggggagaaaaaaaaagctcccgatacccaatcaatggcaagacgaagtgattgccttgcctctcggattcctctcggcagcgtggaaaatgagcc

SEQ ID NO: 201587 - DNA, 75 bp, Homo sapiens
  chr8:120220353-120220428
  hyper
agaaggtaaaaatagcgatcaggggtatgggggtgcgcatggagacgcccgcggagcgctggcgctggccagcgg

SEQ ID NO: 201588 - DNA, 340 bp, Homo sapiens; identical to SEQ ID NO: 45800
  chr8:120220895-120221235
  hyper

SEQ ID NO: 201589 - DNA, 138 bp, Homo sapiens
  chr8:121136688-121136826
  hyper
aaccagaatctctgcgggtggggaatcagcaggttatgaggtacaaccacacgaaattgcctacattcgtctttttgtaacctacagaaatgtccatttcgatacctccagctgattcccctgcaccttaaagtttga

SEQ ID NO: 201590 - DNA, 210 bp, Homo sapiens
  chr8:121137782-121137992
  hyper
agggagattagaggcattgggtgatgagagcgcagggatagtggaaataccatgtgctgctccgggaagcttttcccagtgtttgagtgacgtgagcgtgtggcgggaagaagctgcgtttggctgcgggacagtggcggctccagcatttccatatagaaggggcttaacaaaggcggtaatttgggtgggatccgtcttgaagggctg

SEQ ID NO: 201591 - DNA, 220 bp, Homo sapiens
  chr8:121823346-121823566
  hyper
tgctgccaccccctgcgccacccttcccccccccccaacacacacacacccggccccctggggtgtgtccgcatgtggccgagtgagtgtgagtgtgagcgtgcgggtgggaagccgagcaggtgtgtgcgcgcccggcgcggcccgcgcgctgttaaccccttaccttccagcagcacttccttgcccgcgcgcttcaacgcctgcaccgcctcgtcgt

SEQ ID NO: 201592 - DNA, 220 bp, Homo sapiens
  chr8:121824481-121824701
  hyper
tccagccgccgcagcctcggcggtcacacgccacccgcccgcccagacctcccctcctctgtccccagagcgcacgacgccgcggggacagcttcccgagcgccttccccgtcccgcttctctccagcccaccgcagccccctttcttcccagctcccccactccgtgggcgcccacactgcaccttcgccgggtgcgtgcgtcccgcctcggtgccctc

SEQ ID NO: 201593 - DNA, 261 bp, Homo sapiens
  chr8:122651465-122651726
  hyper
ggaagcccttggtggccaatcggggcttccctatctattgcgtcacacctcccccgtgtgtgacgtcaaaggcaatcccagcccagacacgtgggttggagcagcgtcgcgtttctgggcaattgctcctgagacccaacaggcagcaacggtcccaagggtgagggagtgggcagggagaggctgatggggcttctacacgttccctcccgtagctgggctgctgcagctcgttcgccccagaggcgcgcggtgtccttg

SEQ ID NO: 201594 - DNA, 199 bp, Homo sapiens
  chr8:124408729-124408928
  hyper
agaatccctccgccgtctgtcccgcccacgccaccaccgtagaacagcaggctcgaaactctcctcccatttgtagagcgaaggaggccgggccaacgtggagaggaacacaggccgacagtatagaggacctgagcggagagtcctggggaaaacgctgacttctttttcttcacatagttccggctcgctgagctcg

SEQ ID NO: 201595 - DNA, 75 bp, Homo sapiens
  chr8:126010222-126010297
  hyper
gtctgattcctctttcggactccggggactgacatatcataagcgctcaataaatgctagcggaatgaatggaaa

SEQ ID NO: 201596 - DNA, 420 bp, Homo sapiens
  chr8:126010888-126011308
  hyper
gtaccctggaaaccaccttttatcggtggggaagtgcagtcgcggtgggcggctctgggggccagcgaaacgggaggcctctaaatctttaggttggggctgcattgccctggagccgcactcttgagtccgaggccatcttttgttggagaaggcgtcggcgttggcgttttcccgaggttgggctgtacagtgtctccgtccgcggaaaaagaagcctctgaacccgcgccggcccgcagcccccgtgccttccggccgctgctcgccgtcgccagaggctaggccacgtttcccccagtgccgaggtgtttctgtgaccctccctccactcccattcccttctgaaagggcacctgctcttggtgagaaaagaaattatagcacgaagagccagtatcagaagagtatccatcaccc

SEQ ID NO: 201597 - DNA, 194 bp, Homo sapiens
  chr8:127569427-127569621
  hyper
gggcggcggcggcccgtccccaccgtcgggcaagccgccgccatctggcccctgaggcggcggctgcggctccacgtcctcatcgtcattggagaaaatgtaggagaccccaatgcggggcccgtcgtcccggtccacgccagtcgggtcggccgtgggaacttccttgtaacttaggtgggtcaatttctcca

SEQ ID NO: 201598 - DNA, 971 bp, Homo sapiens
  chr8:127569952-127570923
  hyper
aaagcccattgcatcagcagcttctactgcttccgcctgcgccctacctgccaagcttgggcaggaagagggaaggaaagagaaactttacgccaatcccccccctcctctgctaacttcccctcccaccctcgggccctaactagccccggggacgcctcctccccaccaacgcatccatccccagaggaacaagcgaggatctcagagcgcgacctggacaggtgagtcaccctacctggctcacctgcagcgctacctcctcccggctcgcccgcccttcccccgcgcccgccctcaggctcgggttacctgcacaaactcacccgcggagaggtgaaggccgtggggcctggggaagggctccctgccgcgccccgagacttctagggcgagtttgaaggtgtaggctcggcagtccctcctctcccggcgcgggcggcagcgaggctgggcagagggcagcgcagcgggcagactaggggcatgtctttcccccgcggctgcgtagcgccccgatacttgaaggcggggggcaatccctgttcacaccgcgcttcctcccgccagctggggctgctgcccctcctcagccagctctcgggggaggtggggcgcgaggaggagaggacggcagcctcgcagcctggcggcaacagctcccgcttgggccgggcgagcaacaagcaccggagctggagggacgggattgtagatccggctccgggctcccgggcgggagcgcagcccgtggcatttaaagagacaggcgctcactccccgagctcgggtctttttcacattgcgccgagcggccgggagccccgcccccgccccgcccactcgggcctcgggactccgcccggccacgcccccgcgccggagcgggtttaaatccccctgtaaataatccacccgccgcctggggctggtgctgtgagctctgcttgccttccgagacaagttagaag

SEQ ID NO: 201599 - DNA, 65 bp, Homo sapiens
  chr8:131455119-131455184
  hyper
agaaaacacaagccacttcacggtccgcccaggagccaaccccaagctccaagtaggactccccc

SEQ ID NO: 201600 - DNA, 121 bp, Homo sapiens
  chr8:132917187-132917308
  hyper
ctggagcttgggccccggagtctgcatgtctaataagcgtccctggggttaccaaggcaccccaaagtttaaaagtcactcggtgttggaggatttttagacagacgcgatactacaagta

SEQ ID NO: 201601 - DNA, 161 bp, Homo sapiens
  chr8:133491950-133492111
  hyper
cagtggcgatcccaacagaagggatccacccgaaacagaaacacagagctcacgggaggacccgctttatcctcttcaaccctcacattaattggaaaaacccacataattattttaagcttccaaaccaacacccctagaagatgtcataaatgtgcacc

SEQ ID NO: 201602 - DNA, 63 bp, Homo sapiens
  chr8:133492127-133492190
  hyper
cgcccaaatcagcaggggaaccacgcttcgttttttaagcccctagtgtggaacacccggaga

SEQ ID NO: 201603 - DNA, 145 bp, Homo sapiens
  chr8:133493185-133493330
  hyper
agcccggtgccagccgccctcccgcccgccagccacacgcgccgccgccgccgcctcctccctcctccgcgctcccacccgcgcccctccccgcccgttccagcctcagcctgtcagcagcagcagcagcgagcgcgccgcgggc

SEQ ID NO: 201604 - DNA, 273 bp, Homo sapiens
  chr8:133687388-133687661
  hyper
ccacttggccggaacgtggtgtgtctggcgccaaaacccctgcacgttccccgacccctttcctggagtccagtgcctttctgcctcttcctccccttcccacggccccgcccattttacagattaggaacctgagctggaaaaggccaggctgtccggccagtctgcagaggacctggtgcagccggggctgcggtgcggagggccgggtggggttagggtccgcccaggcgcgggggaaccgacagcgcagggcgggagcgggcggcgagg

SEQ ID NO: 201605 - DNA, 364 bp, Homo sapiens
  chr8:134232709-134233073
  hyper
gctgggagccatccccgggattggggcatggtccacatggagcccctataaaggcagctgggccagccaggggcaccaaggccactgggcctgaccggccacctgtgtttgcagaggtggtcggtgtgggctgcgtcctggatggggtgcgctacaacaacggccagtccttccagcctaactgcaagtacaactgcacgtgcatcgacggcgcggtgggctgcacaccactgtgcctccgagtgcgccccccgcgtctctggtgcccccacccgcggcgcgtgagcatacctggccactgctgtgagcagtgggtatgtgaggacgacgccaagaggccacgcaagaccgcaccccgtgacac

SEQ ID NO: 201606 - DNA, 584 bp, Homo sapiens
  chr8:134308718-134309302
  hyper
ctccccccacacacacgcttacactcacacatgcacaccgccctgtgtgtgctacgggactgaagcgccaccagcctctcggatccacacccgttcccgacccagtctgcaagccagacacacccacgcccccctctccagcctccttgccagcgccactcacctctaccaacccctcatctacacactcgcgcgcaatctctccgttcccagacacagacacacacacacacacacacacacacacacacacacactcacctagtcccttctgcacccacgtccagcgcgcacccctgccagcggcgccagctgggattcggagacgacgccaggaaacgctatcctggtattttttcggaccgtctcatcgcccccttcccgacctccagaaccccaatccccagctaggggggagatgaatgggaccctgtctttttttcctccctttccgtaattgaaccccccacttcagcggtgtctgcacccaaagccccctcgcgcccgcgccccggggtgaccgcgcacttgcagctccggggcgcttactcctggagtacgcggggctacaaagggcggtcctg

SEQ ID NO: 201607 - DNA, 144 bp, Homo sapiens
  chr8:134465706-134465850
  hyper
tggcctggaaaagcgggcggcggggccgactgcagcatagcaccacctcgtggccgctggtccacattgcagctgtgatgtgaggccaaccaggagcgaatttgggggaggctgtgtctcctatagaacggatggctgggtggg

SEQ ID NO: 201608 - DNA, 56 bp, Homo sapiens
  chr8:134581293-134581349
  hyper
acactccctaagaaaccctcctctgccatcacttctagcaacgcttcctgtttttc

SEQ ID NO: 201609 - DNA, 360 bp, Homo sapiens
  chr8:136469597-136469957
  hyper
gcgcggcgcggcagggcggggcggcgggcgcggggcggggcggggcggagccgggcggggcggggccggcggcaggcgctgggcgctcggcgcggtggctcagagtgcgcggggcggcgcgcggcgtgcaggtcgcagctgtggctcgggtgctggcaggtgctggcgggactggcggggatcgccgtggactgcctcaggggcgccgcagcccgctcggcccgagggcccgcctaaccgcgccgcccgcgcccgctcctcctcggcccgcgcccggagcgcgggggccgccggcgctgggtactcggcggccaccggggatcggggctgagcggtcggttcccgcccccgtgccgccgc

SEQ ID NO: 201610 - DNA, 203 bp, Homo sapiens
  chr8:140716452-140716655
  hyper
ccgggcctccctccctccctccctcccgcagcctccagggcgcgccacctcccgcctggtccccagccagctggcgaggctgctgtggcagctcccgctgcagacccagcgcggcgcagggcgcacgcggagggagcccgggaggggcggcctgagccgccagggagggggcgggggcggagccgccggcgggttttggcggg

SEQ ID NO: 201611 - DNA, 81 bp, Homo sapiens
  chr8:141644414-141644495
  hyper
cccacaatttggggccggtctgcagcaacgagggcagcatcgggaatgcgagcctcctcgcccggccgggtaaacataagc

SEQ ID NO: 201612 - DNA, 761 bp, Homo sapiens
  chr8:142010302-142011063
  hyper
caccgcggcagagtcgggggctgggggcggggaagaggagaaaacttgggaagcacaatgactccagtgaggacttcagtgagggctccagggctcccgccaagaagcccacggggctctaccaaacttgagggtttgcgttcggggacacggcgggcttggggctcgggcaccggcaggccgctcggagcccacccttggctgcccgcgaggccgcgcccgggggacggaggtcgggccgtcgcgagcctccctctcgcgtccgggcgaaccctgccgacgtccctgcgatttccctcttcctcctcctgcctctccccttttgtttttcaggcattgggtccgctccggcggaggccggcccgtcctccccgcgcctctgtccgccctgcgcgcccccagagccccggcctcctcgtcttcctcaggcccctcggcctctccgcgcgcccggccttttcgaaagccgccccccccttcctcctcacgtctcccggactccccacgtcccccagcctttctgtcttccccgaaccccttggcctccccgcgcgcccccaaaacccccgacctcctcgagctcccggcctccccacgtccctcagcctcccagtcttccccaagcctcccgaccacccagcgccccgaacccccgcctcccagcgcgccccctgacctccttaagcctctcggcctccgcgagggcccccaacctcctcacggccaccggcctcccctcctcccagaacccgggccggggg

SEQ ID NO: 201613 - DNA, 1210 bp, Homo sapiens; identical to SEQ ID NO: 45893
  chr8:142011091-142012301
  hyper

SEQ ID NO: 201614 - DNA, 980 bp, Homo sapiens
  chr8:142138200-142139180
  hyper
cctggaggcggcagcgggcggcgcgtccggcctttgtccccccacgctctccagggtaggtccagggactgccagatcaggggaccctttgcgtcctggagccttgggggctggatgacgtcgccgggcacctgaggaccccgcccattcctccctcggttccccagggagcgggcggccggcggggctgggcggggccgaaggaaggggccgcttgctccgacgccgcgcacgcgccagggcccgcaggcgggttaggaaatgacgaccgcgcgcgggtctccagcagcacccgccctaggaccggccccgcccccaagtcccggtccctagggccgggcacgccactccaggccccgcccagaacctccccgcccagtcaagccccgcccccaaactctgtctccccgcggtatcctctggggctctccaggccccgcctcggctcgggccccgcccctccaggccccgcctccagccccgccccgcagacggcgctcgcagcgcccccggcccccaggcggcgcggctggtccccaggggtctgcgggcgactgcgcggctgaggcgcccgagtgcggtactggcggcgggcggcgggcagccatggcggaggccgcgtcgccgcacttgtcgctgccctcggggctgctggagctctgcgcgctgctgggcgccccccgggacagtctccgaagtctcgagcaggtgaggggcggggaaactgaggcggacgtgggccacgagtcggcagccgggacagcagtcggagagcgggcgcccgggtgccctgtgggttggcgcggactttccgagggctgagtcccggtcccccggcggtgaccccgcgcgcctgtggccggggatcgcgcccgagctcaggcaggtgccctggagcagcgccctgctcccctcccctcttctctcctctccccgcccggggcccttggtgtgagacatgtcttttgagagctgcgaac

SEQ ID NO: 201615 - DNA, 380 bp, Homo sapiens
  chr8:142139480-142139860
  hyper
tgaagcctatagctatttttctcccttgcggtaccacccccacccccaacccttcctccatctctgcaccctcgcagccaaagtgacaacttcatctcccttctgctgggaaagcggcagttttggaaattctcgttttcctttttcttccccagcttttcttaattctgtaacgctggctttccctggaatccatctgtgtctctggtttcctcctggtccgcctgtctgtgacaccgtgactgggtcatgttacctagagatcccggcgtcactggccagccgtctgcacaggtccgttcatctctttgcagacaacagcatagaaaggcagagaggcttctgagtatttaaatgacgctgggctatccagggaaaat

SEQ ID NO: 201616 - DNA, 448 bp, Homo sapiens
  chr8:142317707-142318155
  hyper
gcgagtggtgtatcgctggttgaattctcataagttagagatagcaggcaggggttagaaggacaagacagggtcaggaccaggagttagaggcgccaggctcctctctgggtagagaaaccgaggaactgggggcggggaggactgatgggtgcgaaagcgggccgggtccaaatgaaggcgcgcgccccggggtgggggccggggtggggggaatgagggaggctgcagggctggggaccagggcaggtgcaatccggaaagaggaggcgggaaggaattggggggccctgaggagccagcgcaagccgggtgggggcacgtcccctcccccggagaaggtgcggggctggggctgcggcgcggacccgacctggaggccgaggctgtgcgggaggtgggggtggggaggctgcaggtgcccggcgcccaggtgcgaggtgcaggg

SEQ ID NO: 201617 - DNA, 413 bp, Homo sapiens
  chr8:142318184-142318597
  hyper
ggccactcacctgtctcctccggccggggccgcgggggcggcggggcggccgggccgggccgggcaggggctacgggggcgcggagccccgggcgcaccggggtcgggaggcggctgcgggtccgggcgggggctgctccctcggccggccggccgggcggtcagtcagcgacgcgggcgcggagagagcgctgcgaggctgcggccggcgcgcggagacaacgccgctttatcgggtcggaaacagccgctccgcgccgcttccgctgacgcagcgccggcccctgcgcctcatgactatgcagcacccgccgccgcgggacggggattcggggggcggggtctgcgccgcgcgcgctcattggcctccgctgccgcccaccccgcccccgaacggccgccccgcccccgcc

SEQ ID NO: 201618 - DNA, 206 bp, Homo sapiens
  chr8:142425594-142425800
  hyper
gaccctgcggccccggtccctattcgaggccccagccggagcgttccgggatccttcgggggagtgcccagccccgcgcccccgcctcccacatgactccgggtgggcccttttgacgtgcgcggagggcggggggcagggggcggggcgggggggcagggggcaggggtggtgaagggtagggggcgtggcggggagaggggatg

SEQ ID NO: 201619 - DNA, 88 bp, Homo sapiens
  chr8:142427939-142428027
  hyper
gtcgcccgccggtcacgccccccacgtgacgcccgggcgctataaatagccgcaggcggcggtggcggcagcgcctggagccggctcc

SEQ ID NO: 201620 - DNA, 41 bp, Homo sapiens
  chr8:143429133-143429174
  hyper
aagtccagaaggacacgccatcacctcgccacactgcatcc

SEQ ID NO: 201621 - DNA, 207 bp, Homo sapiens
  chr8:143531771-143531978
  hyper
cacacaccacagcctggcacccctcttcatcacatgcacagggcaggctggggagggcgttcccgctgtacccccagcacacacagacgctggcgggggtctaagggagccccccatggcccccaacagccacacatagacgcagcaggctccggagagcccccgagcgtgtccccctcctgctaatcacgtccagggccccctaca

SEQ ID NO: 201622 - DNA, 295 bp, Homo sapiens
  chr8:143556723-143557018
  hyper
ggcccctccccacccgggccggcctcggcgggcttagcacccccatgacttacccgtccaggccacgagcccctgccctgccctgatccccgccctctggtttccccccaggcggctggaagctgtggtccctgtggggcgaatgcacgcgggactgcgggggaggcctccagacgcggacgcgcacctgcctgcccgcgccgggcgtggagggcggcggctgcgagggggtgctggaggagggtcgccagtgcaaccgcgaggcctgcggccgtgagtgcgggcggggcggggc

SEQ ID NO: 201623 - DNA, 90 bp, Homo sapiens
  chr8:143695816-143695906
  hyper
gaggacgccgcgcccgagctctgcgctgagtcctggccgccggctctttatgcagccagcgaggcccgtgggcggccggctcgccgagcc

SEQ ID NO: 201624 - DNA, 360 bp, Homo sapiens
  chr8:144099706-144100066
  hyper
gccgggcctggccgtggctcaggcgccacctcactggggaaactgggaggtggtctcagcccccttctgggcctcagcttccccatctatcccaaggagccggggtaggcctgggcggcgcggggacccccaccgcgggctcgccgactccgcccgccggaggcccctcccgcgtcccgcccctgcccccgccccggggccgcgcggctgcctgggaggctccgggccagccgcggtccagagcgcgcgaggttcggggagctcggccaggctgctggtacctgcgtccgcccggcggtgagtccgcgggcccccggccgggacgcccccgccacctgcgcgcacgcgctcagacccggc

SEQ ID NO: 201625 - DNA, 196 bp, Homo sapiens
  chr8:144373175-144373371
  hyper
gcgtgctgccacagccccgggggcctggagggtcccgtgagccgagcgggacccgggacaagcgcgggacgccgcggggaacggacgggaacgcgcgtggccgccccacagcgggccttcgacacctcctgacacgtcctgcgggtgcccggtcctcagttggctcgagccggatcccggcgcgccaacggctcga

SEQ ID NO: 201626 - DNA, 132 bp, Homo sapiens
  chr8:144417146-144417278
  hyper
tcccaaggctgggcggtctaagcctgcacggggctgcggcagcaggaccactgactgtcctgccggcctccccctggtttccctgccttcgtggtccagcgccccttcacgctgggcggggacccagatcca

SEQ ID NO: 201627 - DNA, 268 bp, Homo sapiens
  chr8:144508751-144509019
  hyper
gaaaggggagagaaaacagaaaacaggaaagtgaactgactccagcagcagcagctgctaaggtcccacagctcgggcccggccatgctgcggagaaagctggatccggtggcagccccggcacgtgccgcagtggggttcctctgagtcccaaacccagcaagcctccagcagcgcccgcaggccccgtgcaccaggaagcccagttctggcccctgagtgcagggctcccagacgcctggggtgggggtagggagcagggagggtg

SEQ ID NO: 201628 - DNA, 65 bp, Homo sapiens
  chr8:144594949-144595014
  hyper
agggacgaggcaacgtctcctcccacagagcagagttcccacgattaatcgcctaattagagctg

SEQ ID NO: 201629 - DNA, 170 bp, Homo sapiens
  chr8:144614411-144614581
  hyper
gggtggacggaggcgataggaggggcaagcatgccctctgctggccactgggccgcacggcaaggctgaagtgcggcgggggagggaggcggcagcagggctgcctggcagctttcagaagcccctgtccctggtgcataagtccacagggcagtcgtccccagctggac

SEQ ID NO: 201630 - DNA, 260 bp, Homo sapiens
  chr8:144635868-144636128
  hyper
tgattgaagaactgagtgtggacagagcacctgtcctcgccagcgcccagctggaagctgaggtaacttcgtcactgcccgttgacctgcgggcacggtgggccacaccttgctcagccgtccgggccctcacctgcccctcctgcccgcagacggcgcctgcttggcctcagaccaagtcccacaggggctgccgtgcctgccgcctccaccccattcccccaacaaggcagcgaggccttcccggaaaataagcctgg

SEQ ID NO: 201631 - DNA, 449 bp, Homo sapiens
  chr8:144640321-144640770
  hyper
cagagttttaagaaaaaccacaaagtgctatgaagtttgaggctaccaggatggggcgccaagccaaggttcctccggacgcgcgaggctggtgctccaggcgggctggcgggaagagggggcaggaagggggccggggcgggctctccgggacggttccgggagggcgtcctgggcgggccctgcgtcaggttgcagtttcacttttagctctgggcacctccagctcctgctcgccggacggctcccagggagagcagacgcgccagacgcgccaccctcggggcgccgacggtcacggtgagctgcgccccgccccctcccccggcctggctggagctcccgagtggggccggccgctggctcccgggtgggggatgctggccctgctgccccagcgttcgcccagaaggccccgcgccgcacacgggggcggaagctccaggctt

SEQ ID NO: 201632 - DNA, 120 bp, Homo sapiens
  chr8:144641059-144641179
  hyper
gaaggccctggaggacgcagctggggtggggcgacactctggctgggttttgcagtgggtccctggtgacactctggctgggttttgcagtgggtccctgcaccacgctcaggaggtgac

SEQ ID NO: 201633 - DNA, 53 bp, Homo sapiens
  chr8:144691796-144691849
  hyper
ccctccaataggactcgcctccccgtccccaccctcgccgattggttactggg

SEQ ID NO: 201634 - DNA, 61 bp, Homo sapiens
  chr8:145687374-145687435
  hyper
gaagggagaggtaagcggaagacaagcgattcagatcgggaagtaccgtggatcagaaaac

SEQ ID NO: 201635 - DNA, 116 bp, Homo sapiens
  chr8:145692490-145692606
  hyper
caggtgagcgcggcggagggggctgctggcaggtaccacctgccccggccttcctggctttcacagccctgctcggattcttgtctccttcgcagtctggcgaggtcccctcactg

SEQ ID NO: 201636 - DNA, 78 bp, Homo sapiens
  chr8:145698674-145698752
  hyper
cctgcacccctacgccgtcccctggcagtcctccatgccccagtcccgacaacggctcgggctcggctctcgcgcccg

SEQ ID NO: 201637 - DNA, 433 bp, Homo sapiens
  chr8:145733644-145734077
  hyper
cggacaccgaagggcgtcacgggcagtggctggcggtgtccttctgagctaagctgggtcctgacctttcacacttccctcctaacttccatggctctgtcaccgccttacggaggagctgaagccacagacacagcaaggttggggtccgcaccggaagtatccagtggtagacggcggaacccttaagaaacggacgccttcatgcgggcggctggagaagcgggggctgggcactgcagcaaccacgcttcggctgacaccaggaaggaagcacgcctggagcggatccgaaactactgagaggggccagggctggccgtgggcgcaggccgatccttacattcgaggccggcccagctctgtagcttccccctctgggcctctcacccgcgcaggacctcggtgggagcgcgcacgtggcggggcgggg

SEQ ID NO: 201638 - DNA, 345 bp, Homo sapiens
  chr8:145909647-145909992
  hyper
tcgatttacagccacacctcctatcaaatcgcctttccctcccccggcgcgagaatcgcaccttgctccttgtggatcgggcgccgccgacggaaccacctgctgtctatagagggcacctaggacgcagcgtccaattcccctcactggcttcaaaagacaaatctccgtattgttgtaccaggaggcacgagaagcctcaccactgtaggtttttcagcagaggtcactggaggtctggttaaacccgtacagcactgagggggagggggcccggctgcgtttccgaagctgcgcagcgcccacagcagctgctggtgggaagcggctcggaacacacccaca

SEQ ID NO: 201639 - DNA, 95 bp, Homo sapiens
  chr8:145910220-145910315
  hyper
gccgcagagcccacccgcaggcggccatgaccccacctggagacgcccatgtccgctccctgcgccccggggacaaagcccgaggctgcaccgca

SEQ ID NO: 201640 - DNA, 391 bp, Homo sapiens
  chr8:145911145-145911536
  hyper
tccccggcctctctgctgctccgccgctgctgccgcggcagcccgtgctgtcggcgtcctccgccgccgccgccggcccagtgcgcggcggccgcgcgtcctcccgtcaccaagcgcaaccccccgcctccggctccgcccccgcggcggtcactacccgccgccagggggcactgcctcgcgaggccgcatcacgcatgcgctggcgcgcggcatgccgggagccggagtcccgcggagggcgcgcgcggcatgctgggagccgcctggccccgccccgtcgccgcgccagaggcctcccgcgcggacctaccctgtgagttagcggtgtcttcccgtctctttcggtgcagagcagttaccatctgacacgtctcggtgtggtttggtg

SEQ ID NO: 201641 - DNA, 36 bp, Homo sapiens
  chr8:146078071-146078107
  hyper
cgcggcttggaaggccgggttcgcaccctgactccg

SEQ ID NO: 201642 - DNA, 177 bp, Homo sapiens
  chr9:215348-215525
  hyper
tgataggcgcctgggtaaccgtgttgggcgcgccacggagtgtctcataaacggctccttcctttgaggcaagtctgagcgcggggggaagaagtgaagtggctgaaattagagttgcgtttgaggcaggctgcaagccttctgtcgtcctgagcaaggctccgtcctcgcctgctt

SEQ ID NO: 201643 - DNA, 212 bp, Homo sapiens
  chr9:470095-470307
  hyper
ggcctagagagagcgagcactgccgggggcggcggcgaagggcagcagtggtgggacgggcggggtagggggagttactgagcatgcgcccgggtaggggcgtgggggagttactgagcatgcgcccaggtaggggcgtgggggagttactgagcatgcgcccgggtaggggcgtgggggagttactgagcatgcgcccgagggtgtttcgg

SEQ ID NO: 201644 - DNA, 1303 bp, Homo sapiens
  chr9:503916-505219
  hyper
gacctgcaaccttctgaacacgcatcctcccctttccgccgaggactctgtcctgcagccgagccagggcgaatgcacggaggtcacaagggaggtgcccttggaggcgggaggtttctggccgccggggcgaccgtgctgacgaggcacctgcaggaaacagagctctgcacgctccggtccccctcacccggggagggagaggaggtacagaggcgctgggggaggacgtcgagcaggccagcctcgttgccagaacccccgccccagccggagatgggagcaccgcaccgtctcacgggggctggatttcttctccccttgcgggtgtgtgtgcgaggatggacgtggtaaatacgggttggcagaaggagcgaaccgcggtggaggaagttcttctgcttagttctcgccgcggcgaggcccgcgggccaggcgcggcgacgaaggtgcacgaaggtgccccgcgggcctggtggagttgcagcggcgcgcaggcgcactgagggccgcccgcggccggctccgcggtacaaagagcgcccccgcggggagccgggcgtcctctgggcggagggagcagccggggcttcgccggcccgcgccgttcttctcacgcgccgctccggggcgcagccacagctgtcgcccaccgcgggtgagaggcttgctggtccgccccggcttccccgccccggcggcggccgtgcggttcgggctttaattctggcgcttgccagccggggccgactccgccccctgcgccccgcccttccccgagctccgggtccgcggcggagcgagcgagcggccggcaggttgggaggagcggccgaaggtgagtgacgcggcggggccgtgccgcgccccgtgccgcggcgaggttgtcccggagcgcgaggcccctacccctgcctcgggctggccccgcgcggagccgacttggcgcgcgccggggttgcgcggcggccgtggcggtggcggagggcagcccccgcgggctcccgctcgtgcgggtgaacccggcggcctcggggcggtcctgggggggggtccgagaggtggcgtcggccccgcggccgtcggagtttggcgcgctctgcagcggcggcgctcggccggtctggaggagggagaggcgcgccgggcacggagcagcgagaaagttcgggccgggccggccggcgggagggtgcgggcgcctggctaccccggcccggcgctctgtccctcggatgcctctgggcccttccctagcccggggcggaacgggggaccctctctgaagcggctctccgtggag

SEQ ID NO: 201645 - DNA, 41 bp, Homo sapiens
  chr9:841326-841367
  hyper
aagcatgcaagcacggctctggtcttgacctggggagccca

SEQ ID NO: 201646 - DNA, 210 bp, Homo sapiens
  chr9:976961-977171
  hyper
tcccgcagccaggctgccaactcattcgggagcccggggcatgaacggctacggctccccctacctgtacatgggcggcccggtgtcgcagccgccacgggcgcccctgcagcgcacgcccaagtgcgcgcgctgccgcaaccatggcgtcctgtcctggctcaagggccacaagcgttactgccgcttcaaggactgcacctgcgagaa

SEQ ID NO: 201647 - DNA, 121 bp, Homo sapiens
  chr9:1050052-1050173
  hyper
aatgtatctctgcttgtttcccagtccgcgagataaatggtgacttctctcttgcaggcaccgtcatacctcgggtttagattctggacaggcgagccggctgcaccgaaggcccggtagg

SEQ ID NO: 201648 - DNA, 283 bp, Homo sapiens; identical to SEQ ID NO: 46004
  chr9:1050390-1050673
  hyper

SEQ ID NO: 201649 - DNA, 598 bp, Homo sapiens
  chr9:2622344-2622942
  hyper
tccgtttgcccacccgcctcctaggaggcgcctctcggttctcctcgccttccctccctcccctccgtggtggcgcctctgagctgtcagcgccgaggctaaagggagccgggcttggggaacagcggggttcggggtgccccgacgcctcgcctgaactagtcttctgcccctcactccgcctcccccagagccgctgcttcgcctcgtttctcgccctcttgacgggcgccgaggtgcgtgggcttctgagcattgaacaatggttctgcctcctctgccaggcgcagtgttgggaaggaggcagagggccaagacgtgtgcggcagcctcgggcgcaccctcgaaccccggggagtgcgggagcggacggggggagaaggtgagcgcctccggggacgcggagcgccaggggccggccgggcttcagagtcttccggcggccgcgagctggcgcacgttcggtgggcggcggccgggaggctccgcggagccgagggcacccggactgcgactcccccggcgcggggccgcctctccggcgtgcggggtaggggagcggcggggctttacgcaggactctgctctgggcgcttct

SEQ ID NO: 201650 - DNA, 438 bp, Homo sapiens
  chr9:2623022-2623460
  hyper
ggggagacttaatcaggttagtttgctgaccctccttcccggtgacgtttcctcgagaggaattgagtcctaggctagtgactgtaattagccttcattctacacaatagctcaaaggagcagcgcgagagcgagcgtgtggccctgtcttgttgggaagggcggcggtgactactgtcgggtccccagactctgccgcgggggcctgggggccccgcctggtcgtcagccacgttcccacttggggcctcgtaactttcctggacaggcgacaggaagcctttctgagaggactcagtcggaatcctagcgcgtccccgaagtgatcttcagatgtgacgccgaggggcttgcttgccagctgcagggaattgggactgaaagccgcccaggcccttaacacccgttccagagtccctggctcccgtcgccgggtgg

SEQ ID NO: 201651 - DNA, 100 bp, Homo sapiens
  chr9:3181024-3181124
  hyper
cttctacacgcgcgcgccgggcaacatagcgcaccgcgggtacacgcacgccgaccggacacacgcagtctcgtacacgcccaacgagcgcacacacccg

SEQ ID NO: 201652 - DNA, 64 bp, Homo sapiens
  chr9:3181880-3181944
  hyper
ctctgcttggtgagtgggcactcgctcttggtgtgattctggcgcaactggcacccaagtgtga

SEQ ID NO: 201653 - DNA, 382 bp, Homo sapiens
  chr9:4297351-4297733
  hyper
ggcaaaacctctaacgtctctggggctcggtttcctcatcaggtgaagccagggtccactctagctttaatagtctctcctcgagattcccggccccatactaaagggacctggtccactggggggagctgcagaacttccctcttctcacaaactccagggccctggggccccaactctcgggagatgctgaagtcttggaggaagttggttctgccggctcggggagagggtgcaagagcaaccctctttgtgaaacggggccgcgactccacgagtcctgtctctacggaccctactccctgtgattccggaagcacctccctaccccttccccaggtttacatgctccagagatgagggccaagcggataccggggca

SEQ ID NO: 201654 - DNA, 115 bp, Homo sapiens
  chr9:4298894-4299009
  hyper
cgtgaaactccacaaacacgtggaacttgaaaagacaactacagccccgcgtgtgcgcgagagacctcacgtcaccccatcagttcccacttcgccaaagtttcccttcagtggg

SEQ ID NO: 201655 - DNA, 99 bp, Homo sapiens
  chr9:5022028-5022127
  hyper
atccacctcttctatatatcagaatggtgatatttctggaaatgccaattctatgaagcaaatagatccagttcttcaggtgtatctttaccattccct

SEQ ID NO: 201656 - DNA, 248 bp, Homo sapiens
  chr9:5054640-5054888
  hyper
cagatttcgcagatttattcagcaattcagccaatgcaaagccactgccagaaacttgaaacttaagtatcttataaatctggaaactctgcagtctgccttctacacagagaaatttgaagtaaaagaacctggaagtggtccttcaggtgaggagatttttgcaaccattataataactggaaacggtggaattcagtggtcaagagggaaacataaagaaagtgagacactgacagaacaggtaa

SEQ ID NO: 201657 - DNA, 82 bp, Homo sapiens
  chr9:5069924-5070006
  hyper
ataaatcaaaccttctagtcttcagaacgaatggtgtttctgatgtaccaacctcaccaacattacagaggcctactcatat

SEQ ID NO: 201658 - DNA, 152 bp, Homo sapiens
  chr9:5080228-5080380
  hyper
ttcttcaggagagaataccatgggtaccacctgaatgcattgaaaatcctaaaaatttaaatttggcaacagacaaatggagttttggtaccactttgtgggaaatctgcagtggaggagataaacctctaagtgctctggattctcaaaga

SEQ ID NO: 201659 - DNA, 99 bp, Homo sapiens
  chr9:5081712-5081811
  hyper
ttatttctccagattatgaactattaacagaaaatgacatgttaccaaatatgaggataggtgccctggggttttctggtgcctttgaagaccgggatc

SEQ ID NO: 201660 - DNA, 58 bp, Homo sapiens
  chr9:6412900-6412958
  hyper
ggcacccgccccctcagctctgaaacgaggcctcaaaacggcaaccgatgtggtagcc

SEQ ID NO: 201661 - DNA, 214 bp, Homo sapiens
  chr9:6414116-6414330
  hyper
tcgggcattgagctctcaagaataagaaccctaactctgcttcctgactgtggtaggattcgcgcaaactgaagattcgaagggtttccagaacttctggtccctctccctcgccgcctttcctaggtttggaatgtctcgagggaggttagagacctgggcatgaagaaactgtcggtttaaccgggggccgggtttacgaatgccctatata

SEQ ID NO: 201662 - DNA, 241 bp, Homo sapiens
  chr9:6644554-6644795
  hyper
cacaaaagacaaataggccagaataatctaagtccaagggagccctcccggccacttacaaacagggtcttccattttcaagggtcttttcaaacggatgttggcagggaccgtcttctcgatcaattcatcaatgctctaaaattaaaacgcaaggcagaggaaagtgcctctgagttaaaagagtcacctctgtgttttgcgactacaaagccttgtgggaacctcattgaaatcgcct

SEQ ID NO: 201663 - DNA, 352 bp, Homo sapiens
  chr9:8856995-8857347
  hyper
actcttcattataaaagatgcgttcccttccctacggaatgaatgtgtgtgttaagtacaccagattcccgcagctgaactacgagctttgattctgccacgggaaggtctcccaaacaatccccctcctctatggcagctgcgtagactttgattcctgctatttctccttctccccactagttcagaggaaagaaagaaaaagaaatcgccccctcaccgtagtcagccctccttaaaacagtaatccctgcctttaaaaaaggcggtggcaggatccctgggtaagggtggattgccccaccgctccaccatttgcccccaatactacgcccaccctaggaggagagag

SEQ ID NO: 201664 - DNA, 37 bp, Homo sapiens
  chr9:8857406-8857443
  hyper
cgggtctgaggtttcaggcgagaagtgaacccagcag

SEQ ID NO: 201665 - DNA, 49 bp, Homo sapiens
  chr9:10612635-10612684
  hyper
cgcgctcggaaagccggcttgggtcctgctaattattctgaaggcaaag

SEQ ID NO: 201666 - DNA, 157 bp, Homo sapiens
  chr9:10613299-10613456
  hyper
gattccagggatccagggtaaagcggttcgcgcgggaacaggaggatatgtcaggcacaggctattccccatcactatagccacagaggactggtccagatgcggatcccgatctgtgcttcttcaggtgttcgcgtgctttcggttattattatta

SEQ ID NO: 201667 - DNA, 152 bp, Homo sapiens
  chr9:12776433-12776585
  hyper
caatgcacttactgcaaaaatacttcctggtttgccgggaggtggcgtggcagggtccttgcagcctttcctcctagctcacccttccaccagtaccgctccgccctcctgccctcccttcttggtgcagcagccgcagctgttccaaggcc

SEQ ID NO: 201668 - DNA, 335 bp, Homo sapiens
  chr9:13034172-13034507
  hyper
gagagcaaacattccagatgcgttactaattgagatgtcagaaatccttcaacttttcgatgaaaaaacaaccgtagggtaatatgcttctcaaggtttctcaggcccgatgaacgattttggtttatttttccattcctcaaatgcagtggcggggaaaaacgcgtttcttccgctgaagttacagagatgagcacatgatggcgctcgcgctgcaccgtaaacccagaagcagctgagcagtgtggatccctgggctcctccacgtccctccctctcctcttctgcccccattcttctgctgtttcccctccgatcctccctcctacccatcc

SEQ ID NO: 201669 - DNA, 165 bp, Homo sapiens
  chr9:13279138-13279303
  hyper
ctagaccccatccttttaaaaaagccacagcagcggcttccgcgaagcgccgggccgcgcggggtggggcaagcgcaccgccccaccgccccacggcccgccgccacccctacccccacccccacccccacccccatccccgcccccacccccacccccaagcgc

SEQ ID NO: 201670 - DNA, 227 bp, Homo sapiens
  chr9:13279406-13279633
  hyper
cggcgcccgcccagggccgcgacgcgagggggcggaggactggggagcaggggtcgccggggcctctggatgcctcgcctcgcccacgctcactgtcttctcttctgaagtaacgacccggcgaggagcttcggatcaaaacgcacagacactcacgcgtgactgagaaacttaatcccgcggtggcccgacgccagcctagcgctccgccgcgccccctcccccag

SEQ ID NO: 201671 - DNA, 223 bp, Homo sapiens
  chr9:14313096-14313319
  hyper
agcccgagtccacctcaacgcgcgagctgctgagaggggctacgggcaccccgggcggggatgccgcaccacaacgggcacttgaggggccgcacggggcctcgcacttacaggtcccggccctgcccaccccccggcggccttgcccggcccagcgcccgcgctccgtgcccagggcgcggggctgggcgctcgcagtggccgtggcgaggggccgctcccg

SEQ ID NO: 201672 - DNA, 739 bp, Homo sapiens
  chr9:14313785-14314524
  hyper
cgccgccgccgccggtgttggctgcttttcgcctgggtttggggatttgttttctattttgcagttgttgttgttgttggggtgtagggggtgcgcgaaggttcggtgtgggttggattggggtggtggttggtggtaaaatgctttttcaaaaaaggcggggaggggggcgcgggagggcgcaggagggcgagcgggcgggcgggagggagagcggggagaatgtgtcaccgcgctgggaaagttcaaggttacagccccaagcactgcggcaggatcccggagtggtgatcgcaggcgaaactttgccgcgagccgaccatgtgtgtgcgcgaggggcagcgtgagcgagtgcgcgcgggtggcggggcgcgcgcgggagagggccggggtgggggcggggtgggatgggggagaagggagaggccggggtgagggagggggcgcgagcgctgatctctggggcggaagaggctcgcggcgcgtggtccccggcagcagcagccgccgccgcccgcgccgggtcttcggcgcccggccgcccgcccgcccgcctcgccccgcgtctgacccggccgagcgtggaggctgctgttgccgccgctgcccagagcccaggggtatcaaaacgatctcctgaaaaattccaaacgataaatcccgctctcccgctcggctccaaactcctctcttttctgctctaggctcttttttttccctccctctcttgctttctttc

SEQ ID NO: 201673 - DNA, 707 bp, Homo sapiens
  chr9:14315103-14315810
  hyper
gagcgaacttgggctcaagtagttggggcgcgccggcgtggaccaggggggtgcggcgcccagcccccgacggccccgcccggagcccgggttcgcggatagggagggggtgcgggttcgtcccgggtctgcccaccaggggcccgcacccgaggcagtcgcggcgcgcggcgcttcgccgcggtttgccgccctccccgggggtgccccgtgcacgtggcctcgctctgagcgggaggaccgggccgagccgccgccgccgcctcttgctccctccacctcctccccgcgcccggcttcgctctcctcctcctcctcctgcagccccgctggctggctcccaatccccaccccccggggcccggggcgccggcggaaagcgtctccctacccgcccgggtgcaggcggggcggggccgcggcgcgcccggggctgcggggcgggccggcgggcgcgcgcgcgccgctgcagccctccagaggctgcgggccctgagccgctcggcgcccgcgccggctccccaccgcggcgctgccccgcccccaccccgtcgcccgtgcaggctccgagtgaatgaacttgattccagggattttgaagaaggcggttcgccttgcaccctttctgcaccccccgcccacatacacacaccgccccccaaatccagttttctgcttggggtggatggggacgagggggaagcaaa

SEQ ID NO: 201674 - DNA, 845 bp, Homo sapiens
  chr9:14322293-14323138
  hyper
tggtgtgtgtgtgtgcgcccgcgtgtgcgtgtgtgcatgtatgtgtgtgtgtggtgggttttattgttgttttagcggggctgctccaggagtggggctgcgccggtcagatgcagccggcacggccccggggtcgcgcgatcgccccttccccgccctcggattggcctggcccgcggcggggctgccccggaaccgccacccagcagcgcacccttccgcgcccggcccgcgctcctcctgcagtcgcctccctggctttctctttctccggctcgcggcccgccccgccccaccctaccacggccggcctgggcgcgcgggaagcgcggctcttcgcttccgcctggcggcgggaaggaaaccgaaaggaggagccgggggcgggcgcgccgcgatgcatattcatcagggcgcccgggacccgggaggcgggagcgggcccgagtgggtgtggcggcctgcgccgcgcggcgcccctctcgagcgtgggtgggtgcgtgggtagcggtggggctctggtctttgtgcggccgcatggggccggagagcggcgagggcgtgaccgtctcgggggctgctgcccaggctccgcgcgcctttgtgcttcccgaccgtgtgtctgcggcgcgccgcgggcaaggggcccctcgccggccttctggagcaggaacccggccgaaaacgccgcggaaagactctaaaacaacaataatgataaagaataaggaattgctgttacttcctcacttcccgccacgttgctggcttcaacttcgccaggccacgtttgtttccgtgtaggaggactcccgaaatgttcctggctgcgcagcgttatcatt

SEQ ID NO: 201675 - DNA, 525 bp, Homo sapiens
  chr9:14348452-14348977
  hyper
ggtggagagaaaacaaggttatttaaagtgactcccagaacgcagctttcgttcctagactctttaggtgtcagtgcttcggctccagtttagcacggcacaggcggcccagcctttgatatttaagccaggccagcgcccgggtgaaactacctgttgggggattctgccgcctggaacccttcttcttctgcgcaatactggcagcagtgggatggctctgggggtgccacgcgaagagagagggcggaagagccgggagcagcggacagtcagctgcatgtggcagtgcctagcgagctgctcccgcgcctctgctcgctctttgaaaactggaaacagccccctgtgctctgtgctgggcccctggctgcggagatgggcccaaactcggcacgattctctaagttcggaaaccacgaagcttgcgccttcatgcgtgtctaacattaaaaacaaaaaaacctcctggcggcttcctgggctcccgcccccaccttgcgctccaacacccggcacttttcc

SEQ ID NO: 201676 - DNA, 419 bp, Homo sapiens
  chr9:15306527-15306946
  hyper
cccctggcagccctgccctgctgtcgcggcaggtacccctctactcattgttcctcaggctgccccctcttttcatcaatcgtaagcctttcggttctgccaccaggaaacttccatagaaggtgagattcccaggtcgagggatgattccacgaacacccagagagccagtgccaggacttcagggtcagacttcgtaaagcccaggcgtcgctgggccggcccggaacagctcagagctgcgggtcctatggtcccgcgccctcacgcccatccaagtgctggcaggacgtgggtcctccatccccacgactcgcggggccggcgctccgaacctcggcactgcgtccgctccgcgcgccgcagggaccctcctagctccagcggggacagacctaccaaggccgggcgcccccacc

SEQ ID NO: 201677 - DNA, 291 bp, Homo sapiens
  chr9:15306998-15307289
  hyper
cgtcctagccgggctcactcttctctcccggactcctgtccagggcttcaggggccgggcccgcaatccccatcggatcgtacctcgtccgcttccagctccgctcggctgcctaagagcgccatattcctcctctggctgctgccacccaaaaaccaagcagggaactcagagccgactcctgctctcggctctgggctcagcccagcgcaaaggagggcaaaaggggacggcccggcgctccctccgggtctcgggcggggcctgagtgcagctactcgatttccccgc

SEQ ID NO: 201678 - DNA, 76 bp, Homo sapiens
  chr9:16154771-16154847
  hyper
gtgcggctccgacgccacgctggtgctgcagcagcaagcgccgcgagccagccacgagacaggagagcccattaat

SEQ ID NO: 201679 - DNA, 111 bp, Homo sapiens
  chr9:16871199-16871310
  hyper
ggcttgtttgttgtttgggttgttcttgctctctctttctggggatggaaaaaacaactttgtggggatggaaaaacaaccctggcgcccccccccccccccggggagctg

SEQ ID NO: 201680 - DNA, 355 bp, Homo sapiens
  chr9:20620358-20620713
  hyper
ttccccacagaacccgcggctaaccccagaggactggtgagggctggcttgggatgaataaacactcgacacctgacggtcctttctctgcggtgactttcaccaagccgaagtggcgcgcgcgcgggcaggcgggagccgggacctggcccgcgcggcgccgcgcacccggatcccgaggctacgccggcgagcgcggcgcggggggcggggagcgggacagcgggaccgcccgggccaagcgattgtttcaaagacattttttatcaagacccttttgtattcgagccctacctctttttggcctaggaaagctttcgtgcaagtggaagacgactttctccacaaagtgctg

SEQ ID NO: 201681 - DNA, 1618 bp, Homo sapiens
  chr9:20620754-20622372
  hyper
cgtgggtgaagccctccacggtgggttttttcctcacctgggcgcggtgccccagctccagcttcacctgcacggcacactgcgggcagggggaggagagacagccgtgaataacaggaaggcgaggtttcggcagtgaacgttgcgcctgacatttttttcctccttcttgaaacgcacataaaaggaaacggcggtgccctctgcatccacgtttcacgcgcgtgggcgcgcacactccacacccccaaatatacccgcccgcccggcccggcttggccccaggcgccccgggccccgcatctacatcggacaggattgtaacggaatgttatccccagtcgggaagggggtcggggaaaagagggagaacacactcagccacgacaagcacgacaacaaatgcatcggaaacaaatcagaaggcgatgccggggcggtttcccggcgtgggaggggaggtggctgggacccagggggaccgaagggctcctggcgagccccctccccgaaagtaccgcggcgacaggcacacgccgaggaagtctttgtgtacgtgtgtgtgcgtgcgtgtggagcgctgtgccaggcgaaatggaaactacaggcagcctctgctgatgggcacaaactcccgtgctcttgccacggggttcgtgcacaacaaaaatgagacgtcgtcatacacactgaaacacacacacacgcccgcaggaaaacacgccgaggcatccataacttagagcaccccgcaccccccagcgaaaagccccacgcgatcggcgaggccagtcgaaccgagcccccgcaacacactttcaagagcccaagtggctccaaagtatctcccacctccccccaaaaaatgaaattcagaaaggcagggcggcgggcggacagccgccgagcctcggctcgcgctcagcacctcccggcgctggggcaaagttgcgtgcggccccgccgctgtcagccccgcacacttcggctcacacacgcgcgccgcggagaacgcaccatcgtagcggccgcggcgctttgcggaggtgcggccgccgaggctgctcgccgcgtccccggactgtgcccgcagctcccggcggcggcggctgaaatatggctgagttattattcgcctccttccaccgtgtgtgtgtgtgtgtgtgagtgcgcgcgtgtgagcgagagggagtgtgtgagtgcgcttcttgtgactgcaaagaggcgaggagggagggaggcgcggggggtggaggggcgagtgtgagcgtgtgtgagtgtgtgtgtgtctgtgtgtctgtgtgcgcgccgggggggggtgggggaggaggggagcggaggctgagggagaggcggcagctccctgcaagccgtaccaacctttctctaattggaaccgcggagcgctggcgctgtctgggctgcggcggcgcagggcgaggaaggaaagtgggggagggcttttattattatttttgcgcgtacttaccgagctagccatgcctgggggcccggaggtttgctggggtgttgtgtggtacccccccctcctccgccccccctcagctgtaattcatgaagaggctgctatgaatgagagcgcgcccaggagcggagg

SEQ ID NO: 201682 - DNA, 91 bp, Homo sapiens
  chr9:21395908-21395999
  hyper
tggacagcactttgtaagctcgcttcctgattgttcatgattttcccctttctccgaattcgggtctttctccgcagaaatggccctgaat

SEQ ID NO: 201683 - DNA, 57 bp, Homo sapiens
  chr9:21396327-21396384
  hyper
gcaaaggcagctttgtgcgctgttagcagtggtcgcgtgctcagtgtcactgctgtg

SEQ ID NO: 201684 - DNA, 134 bp, Homo sapiens
  chr9:21559113-21559247
  hyper
aatgagctcaactcaaacatcgctgtatgaaagcgctctccgccaacacgctcatggacacacacaactccttcctcgaggtttagggacagagagcgaacctgtgacttcgggccaggatgacgacctgagat

SEQ ID NO: 201685 - DNA, 284 bp, Homo sapiens
  chr9:21559381-21559665
  hyper
gtgtgcccactgccgtgtgcccaggccccgaagcctcctcaactccttgaggggcgcctccctagccagctcagcgcgcagcgggaccaaggctctcccagcttacctgcgggtccgagtaggaggacagaagcgccgcccggcctcgcccaagcgcacacgaaggggccgcttcccgccccccgcaccccagaccaggcggctcacggaacaccgcctcccagctctggcccgggaccaggcggtcccccagccggcttcggcgccgcggccggggacgcgcg

SEQ ID NO: 201686 - DNA, 73 bp, Homo sapiens
  chr9:21559702-21559775
  hyper
cccctggcggcgccccaagttatgcacaggtcgcagctgctcaccaagctcctcctgggaggccgccctggtc

SEQ ID NO: 201687 - DNA, 36 bp, Homo sapiens
  chr9:21965786-21965822
  hyper
cccccagcagaagtcggggaaatgggggtggaaggg

SEQ ID NO: 201688 - DNA, 210 bp, Homo sapiens
  chr9:21994240-21994450
  hyper
gagccgcgggatgtgaaccacgaaaaccctcactcgcggcgggccgcacgcgcgccgaatccggagggtcaccaagaacctgcgcaccatgttctcgccgcctccagggccgagctcggcagccgctgcgccgccctttggcaccagaggtgagcagcgccactcctgcccccttaactgcagactgggacccacgcaccgccccctgcc

SEQ ID NO: 201689 - DNA, 246 bp, Homo sapiens
  chr9:22446679-22446925
  hyper
gacggattccccgccgccctcctcccagaaggtccccactccccgccccgggccctcccccggcttccgcgctgggccgggagcctgggtgggcggggtagcctctctagccttgccttcttggctggaggcacaaaggcattaacttagcgcccggggtctctgccaggctcacgggacagctgcacctctcagcgtctccagctccaggacgcggtcgtcccaactccttccgagtggaaagag

SEQ ID NO: 201690 - DNA, 212 bp, Homo sapiens
  chr9:22447276-22447488
  hyper
cggaggctgcccgccggctcccgggctggagagcggggtaggcgcggtgggctgcggctacccgcggacgcccaagtgcgcccgctgtcgtaaccatggtgtggtgtcagcgctcaagggccacaagcgcttctgccgctggcgggactgcgcgtgtgccaagtgcaccctgatcgccgagcgccagcgcgtcatggccgcccaggtggcgc

SEQ ID NO: 201691 - DNA, 567 bp, Homo sapiens
  chr9:27528537-27529104
  hyper
ggcctcgctggggtcgggctcctccactttcccagctgggatcccctgccggagctggcgtgggggccggggagggggaccagaggggcttccttctctccccaagccccgccagatgttggaaaggcaaacaataggggaaacgcggagaaacaaaaggccattcgccacgatctcagtcggctgcgtagagagatctctgtggggagggttaggggagagggtcaggaaagagcgcgaggggggggatcccgagagatttagagtctctggtacttgccaggcaccaggggtcggcgctttaccctcccagcaggggtctgaaggtgggaaggggcaatcaaagaaaacttgaagggttttcaccttcttccccagttcagggaaagggaggggctgggattccagatgtttgacagttgttggccccaaagttaagcgcgatttgtacggcctttacacgctccccacctccgtgaggcatcgtcagccccgggggcgacctggctgacggtgcggacttcccctacgctgccccaagccgagactcctccctcaggatcagga

SEQ ID NO: 201692 - DNA, 182 bp, Homo sapiens
  chr9:27529157-27529339
  hyper
cgccacccacagcccaacacgcaccctgcaggcgtccgcggctggggatgggctcggagtcttgcaccccgaaagaaggacgatcttattgatttatatcttttcaaatcaaggacaaatcaagatcccggggtggaaagtgggcgacccttgttcctgccgggaagtgcacacgaggagcc

SEQ ID NO: 201693 - DNA, 581 bp, Homo sapiens
  chr9:27529340-27529921
  hyper
gccagaaacccaggcgccggcaggggtctgaagaggactccagccccggaagcccgtggccggcgggcagaagaccggtccgccgcctcccgcaccttcttgcacccgcgcccaggtgcgccccaaacctcgccgcccgcccgggcgagatcgggagcgagcagccaccgggctgcgccgcctcccctagcttggagcgggttcttactcaccgtggggttttacctccagcccagggcccggtcggctcccttcgccgggtcagctgcagccagcgcgaaagaaaatggtgagctcggggcaggtggggcgtcgcttgccaatccacgcaagggactctgccgccggtgcgcgaggtcccggcgagccaaccggcggacgggcgagcgcctggctccagctgcagccgccgtcgctccggagcagccccctcatgcacccagcgcgccgcgcagccggccggggctcgactgtctcgcggggacgccgagcggggacccctggcggccgcctgcggtatggcagcaccgtggagagaaaagtcgtctttgggatcatcttccctccggaaagagatggga

SEQ ID NO: 201694 - DNA, 138 bp, Homo sapiens
  chr9:29212989-29213127
  hyper
ggggcttttcctggacttccccctcctcagctctgaaggctcctcctttccaagggatcaggaggggatggcggttcaaaagccctcaccatagaggcgcctccaagccttcgtaccagtggaaatggagaccgggac

SEQ ID NO: 201695 - DNA, 51 bp, Homo sapiens
  chr9:34377388-34377439
  hyper
tcagctttccatacggaaaagtggtggcggaattccgcgagtatctcagct

SEQ ID NO: 201696 - DNA, 205 bp, Homo sapiens
  chr9:34379700-34379905
  hyper
ccgggccggtgctcgtagggaggtacacatctggagaaggaggaagccgcgagcatggaggggttgggccttttgactctcatcccccgatttagaccaagcccctgggcggcgcttcaggtgtccgtcccaaggctcggaaatcctcctctccttcttcctcacccttcaaaacccccactgcagcaccgattcgggaaccccc

SEQ ID NO: 201697 - DNA, 77 bp, Homo sapiens
  chr9:34646925-34647002
  hyper
gcaggccaattggcgctgggaaagtccaatcctgggcctctagctcctgagcgggacagggccgagagggcgctccc

SEQ ID NO: 201698 - DNA, 82 bp, Homo sapiens
  chr9:34647225-34647307
  hyper
tgtcctggggccatccgagccaacggagaggtaagcctgtagagccctgcatctgcaggctgggccacggggagtagttccc

SEQ ID NO: 201699 - DNA, 33 bp, Homo sapiens
  chr9:35072284-35072317
  hyper
ggtcccggtgcgcgccgccgcagcaagcgaacg

SEQ ID NO: 201700 - DNA, 179 bp, Homo sapiens
  chr9:35116361-35116540
  hyper
cccaccccggccacgtgcggcttctgtgatgacaagtctagaggggcggggcctcggccggcaggctgctagcctgagcggagcggatcagggcagaggtggggagatggagccagggccaaagccaccagcctgagggctctgagccgggttggggctatctcgctgctttcgcaccg

SEQ ID NO: 201701 - DNA, 296 bp, Homo sapiens
  chr9:35161757-35162053
  hyper
agggcttccattctcgcgtcacacaactgagggtcaaccccttgctccctgcagtaagcctgattagtgggcggagcttccttcaggatcgcaagaaagaaaggaggaaggggaccccgcctcctacgtgctcgcgggggggggcggggtcggtggactgggcgtgagttaattggctggggggcggggcaccacgggttggctccgcccaggcgctcgcgcggatcccgggtggaatgacgggagggagtcccggcagctcctacctcccagcgatggcgtcgctgtgccgcgcc

SEQ ID NO: 201702 - DNA, 156 bp, Homo sapiens
  chr9:35162422-35162578
  hyper
tattattttggcaatcacttaacaatcacttgagttctttccactttcttgttttcccccaagctcctgcaagggacgattagctctccattctggtagccatgtgacaatgttgttggactgcaggctcagatcctattaaacagtgactggggt

SEQ ID NO: 201703 - DNA, 131 bp, Homo sapiens
  chr9:35489689-35489820
  hyper
ctactgggaagccagcgttgagaaccgccgcctcaggcgaagctgggactcacacccaccggccctggaggcccgcggaaggtttccctgggttccagcacccgggagccgcgcgtcgccaggcaccaccc

SEQ ID NO: 201704 - DNA, 922 bp, Homo sapiens
  chr9:35756561-35757483
  hyper
ggagcaggtggattcgaaggcctgtctagcacgagggcccaaaggtcttgtcagtggccagtagctctgccgcctttcccagagagggggtccaggggacatcctggaaggctgggccctgggccaccttctgctcttgcaagctagagccagcccaatagggggcggatgtgagtggggagctggggcgcatgaaggtgggggtgatgccgaaggggaagggatcgccagtggggattggtgcgtgtgcggaaacggggacagaagtgaaggttcatcgcctataacgaagatgaggtaggcatataggggcttctggaaagctagaggctgggctgagccaggagtcctctcccagaagttggggggcggtgcagaggtgtgggtcgagcccgcatgcgtgcctgctggggagggggtgagtggtgaggaccaggcccgctgggtcctgggggcgcggtggctggcgcgcaggtcccggagggggcggctggcgcgcactacacgcttgggaacaaggaaaacatccgccggaggcccggccgggcggcgctccagcctcggggcaggtgcgcggagaggaagtgagagcattccggcccccccaccccaaccccggccgctggccctctggtgagtcacagccgacccccgccgccggagggagaggggagctgcgggccagagccccggagggtctggaggagccaggagggtttctgggagcagagggtcacttagtgggcttctgtcgtggtgtcgctacgggcgcgaaacggacactgaacacagtctgactgtatggaggcaggtggggagggatcccctgggagaacttggcgggccgagagcagaccccagggcaaggaggggcccccgagggggaaaccgggagtcgggcaggtggcgtaacccagaaagg

SEQ ID NO: 201705 - DNA, 145 bp, Homo sapiens
  chr9:35814690-35814835
  hyper
ggcctgcgcagggcgggaatcagcaccagctcgttctccggagccaccagttcgacctcaccacacagccccggagcttgtgcctcggaggggcagaggccacaggcaggagctctgcgcggctctgcgcgccttcgggaccccc

SEQ ID NO: 201706 - DNA, 35 bp, Homo sapiens
  chr9:36036748-36036783
  hyper
ctcctggcagaagccgacacacagttgggccataa

SEQ ID NO: 201707 - DNA, 859 bp, Homo sapiens
  chr9:36136405-36137264
  hyper
ccgcgcgcccctctgtcctcgccgcgcgtcggcgcagagcagccacccggggcccagcaggcgcgggcttccccacgcgccccgggaagggacagctcggtgtggggtccgggaggcttgagccccgcggccgcatccggggagccctcggcagtcgcggagctgcttcccaggggtgagctctccgggaggcccacggggtggccccgggcgcctccgccctcagctgtcgctccttataaggcgggggccgggcggcgccggaggaggggccgcggcatcagcccggtcctgggctctggggcggcgctgggccgggcgagcgcagtgcagcgcagccgcggggagcgaggagcgcgcggagccggccatgggcaagtcaggtgagcccgcgggctcgcccgctgcggaatggttcggaaccccgcgctcccggacctcgccgtctccctcgtccgccgcaagccaggtcctggggagtgcgggagcccggggtgcgggtggagggcgcgcgggcggagcgccccggcgcggtttccggggaacccggggggaaggcgagcccgagggaggcccccgccggagagccggggatcgcgccaagttgggcttcccgaccctgaggggctgcgcgccgcggcccgccaaggcgtggcttctgctttgtttcaggaggccagacttagagttggaaaagtcaccaaagtgtgacaacagctctcgctgcgaagcagtttgccccgctcggctgtcccgaggacagccctgagcatccccctcatccatttgttgttccttctctcctgagcgcccgcgccgtgccgggctccccctgtgctaggctcggtctggctccctt

SEQ ID NO: 201708 - DNA, 70 bp, Homo sapiens
  chr9:36257445-36257515
  hyper
cccctcctaccagagtagtaaaaaatacgttcttgtgttctaacaattttacaagcgtaaaactgggggg

SEQ ID NO: 201709 - DNA, 50 bp, Homo sapiens
  chr9:37030790-37030840
  hyper
tgggggctgctacagtgttctagtagcctgacatcgactctctcaaccca

SEQ ID NO: 201710 - DNA, 82 bp, Homo sapiens
  chr9:37034115-37034197
  hyper
ttttttttggtgccaggggccgctcacaggtcggaataattcaagccttccgctcccccgccgagctggggtagctgatcac

SEQ ID NO: 201711 - DNA, 201 bp, Homo sapiens
  chr9:37035886-37036087
  hyper
accccgggctgggggcggggggtgttggtgttttgttgttgttgttgtttccatttagagggcttgttttgtttttgtttgttttctgtgagttttcatttttccatgggatattcttttgtttcgggtgttttgcgtgttgttttttcgtgggattgattttagcgggttttgctctgtaagtcctggtctttggggtga

SEQ ID NO: 201712 - DNA, 95 bp, Homo sapiens
  chr9:38067583-38067678
  hyper
agtcaaagctcttcgaagtcctagacagctctgactctgactttactccttggcagccagaaggactgactgggtccgtcttcctggggcaaggc

SEQ ID NO: 201713 - DNA, 413 bp, Homo sapiens
  chr9:38067708-38068121
  hyper
ttctggaagcagcggcgaaagaggtggggtcaggaggccgccggtcccaggaaaagggcgcgggaggaggcagaagcgggaagcagcacgccagccccgacccagggtcctaggccgaagctgaagtagagactcaacaccagagcggcgggtgcctcggtttccccgtgcgcaccgtggctctggaacctcgggaagaggccaaggggcaccttaccttgtccttcttgccggccccgctctcctccgcggctgaggcggcgcacttgttgagcagtttcttgcctccgcaggccgtcgggctccaggtgcggccgcccgcgcaggcgccccccagggggtccccggccccaccgcccgcggcgctctccactttgatgaggcggtgcttgggggagatgtagcgcacctcg

SEQ ID NO: 201714 - DNA, 749 bp, Homo sapiens
  chr9:38068158-38068907
  hyper
agagatgcggagagccggaggacgaggacgaggacgcggcggcccccgcgcccgaggaggcgcagcaacagcccgcggcgcccgacgcggacgaggccgagaaggcgcgctggaccccgcctggctccccgctgccgccgcagtagtccaggcggcacatggcgcgcagtttgcgcagcgacgagccaggcccgttgtaggggtcctcgaagtctcgctccttctgcgcgcggtaggcgcggatgaggtcgctggtgctgccgctgtcgtcgggcagcgagcccgaagaggctgagaagcaggaggcggtggccggaccgcaggacgccgaggcggcggaggaggcctgcggcacggcctgggggggctgcgaaggccgctcgcctcggcgccgctgctcgcggtagtctggccgcggcggctgcggggggctcttggtcttgctgttgcccaagctgaagtacttgtttagccacttggccatggcgagaggccgcctagggccgcggcgcgggagcccggtccgccgccgcggccattcggggggcagcgctgcggcgcaggtccctcggcgccccggccccggcggggggcgtccggggcgcccgctcccgacgccaagttcaagttcttgccgccgccgcctcctgccggcagctctctggctccggcggctgcaacacctccctccgcctagcgccgcccaagctaggaatctcgcgcccctcgtgggcgcgtctcatggggtc

SEQ ID NO: 201715 - DNA, 188 bp, Homo sapiens
  chr9:38069786-38069974
  hyper
gttcagccccgtgcgccaggtcttcggaggaatctttatgctaatgagtgtattagcagtccagatgacggatgtggtcgggataggcggtgggagccgggcccagcaccaatccgagagcaaggctaggggaggtcggaatgtttgcttaccttttcacctctgaggaagtcgaggctttagccctg

SEQ ID NO: 201716 - DNA, 133 bp, Homo sapiens
  chr9:38619920-38620053
  hyper
ggaattgccagcgacggaaagcagctgaggctccatttggctccgctgctccgagggtgcccggcgccctccaaggtccccgccccaggggctgccgggctgcagggaagccgggcctgcggccccctcccac

SEQ ID NO: 201717 - DNA, 127 bp, Homo sapiens
  chr9:38620403-38620530
  hyper
cccgcgatccacccccaaatccaagatccacccccaaacccgcaatgtagctcagaatccgcgatccagcccggtccaccacagccttcagcagcgacactcgcagactccgacctctcagaccgag

SEQ ID NO: 201718 - DNA, 60 bp, Homo sapiens
  chr9:38620821-38620881
  hyper
cgaagagagatcggggccgctgacaggggccctccgcagccaccggggatgggactgggg

SEQ ID NO: 201719 - DNA, 35 bp, Homo sapiens
  chr9:71320186-71320221
  hyper
accaagcgggaacccgcgcccgagcccggcgggcg

SEQ ID NO: 201720 - DNA, 400 bp, Homo sapiens
  chr9:71788550-71788950
  hyper
agaaatgtggggtacaaggccgtgtatgtgttggttagccgggcaggcctctagacaggacctaaaactttgaggttttcccagttcgactcttcgtaggagaactgaagctgcctgtgtgaggccctgcgaacctcgccaaaaagtcttcctacaggatgcccccgcgacctcaccggggaaacaccgcggacagtcgggccagcagcgcccggagctcactccaggtctccaaacttgcagcacttcccagagcgcgcgcgctcggagcgggacctgcttgctccagtgcacgccgcggagcgaaccatcgggctggcgggggtggaggggtgcaggcgtgggggctgcgggccgctcgggccttgggcttctcctgccgccgccgccgcctcccgcc

SEQ ID NO: 201721 - DNA, 59 bp, Homo sapiens
  chr9:71789757-71789816
  hyper
aaactcatcacagagcagaatcccttttccctttcaatcagctgcgtctgtaatagaag

SEQ ID NO: 201722 - DNA, 79 bp, Homo sapiens
  chr9:71939654-71939733
  hyper
ggcatccccctccttgggcaaaagtttaagggcgggcccccttctcactaaagcgcgccagggcctctctcgtggctgg

SEQ ID NO: 201723 - DNA, 142 bp, Homo sapiens
  chr9:71940074-71940216
  hyper
agtggttgggccgtgcgcatttccttccctccccctcggcctcggagcccgtctgcagtgcccagtgtgctgcgccttcggctcggctccgctccgcgtcctctgcccgccgcagccggccgcacccggccgcacccttccc

SEQ ID NO: 201724 - DNA, 291 bp, Homo sapiens
  chr9:71940263-71940554
  hyper
cgtggctgggctttcgggtgggccgcaggccgggggcccgggcgccgctgccgccgccgctcaggagccgccgctgcccccgctgcggccgcgctggccccggggcgcgctgcagcccccgtcgcggcctcgctgcgcggccaccgctgctgccggggtgctggccgcgccgccggcgctctcctcccgccgggcagtcgccgccgctgccgccgcggccccgggctccgcgctgctgcccgcccgcccgctgctgtcacttgggctgcttcagctgatcttgggctgctg

SEQ ID NO: 201725 - DNA, 385 bp, Homo sapiens
  chr9:73027584-73027969
  hyper
ccggggacaattaaggagagagtgagctttccgccaatgcacatttaaattatttaaagagttaaaccgcatcttatccaacatgtttgcaccctttcggccgagtgcagtgtcccgaacgcccaggaacgctgcctggccaaaggttaactaaccccagagctccgggggagagggcgacgccgctaacctgtatgcactctgtaatgggctttgagatgggaggattttccatagactttcccacagccactgtaggggcacttgtgcctcttttcggaggcgtgtttccccttcgcagccactccaggatggaggagggagagcgggctgggcgcgctgccaggatcctgtctctcctccgggctgtgggaaggactcgacc

SEQ ID NO: 201726 - DNA, 733 bp, Homo sapiens
  chr9:73028305-73029038
  hyper
cgcggacaaacttggcggtggctgcggaggttcggctcgccctgccctggcctcggacgacgagcgcggcgcggcgcggcacggcgcggcggccaagggggcgggggcgcggggcgcttccgactcgcaggagcgccgaggcgacctcagcccctcatctttacgtaaccggcagcgcctccgcacgcagcatccacggccccgggctccgccgcgccgccgcctctagccgccgcccctgccccgcgccggccgcgatcccccgacgggcgcgccggcccctctgagccggctcccttggaaagatgccacacgtggcggtcgcaagtttattcgactgaaaacgcccccgaggcgctgggagaggaaactgcaagagaggtgcacgccctcggccgcctcgccgtcgagccaaagccccaggacattcacccgatcaccccgacgcgggtggcgagggtcccgccgagcgccaggtctaagagacactttttcccgagtccactgacggcttctgaacccctgctccggccggtccgcaccgttccggcattctcttgctcagtaacaatttcgcagaatcccatcacgtcacaaaccaaaccccctccaattggccagtggggagggtgattcaactctgtttactttctccccctgccagtcagaacggccttcggtggagaggtgcgtctagaactgaggcgtgcggccaatccgactgttccgtttc

SEQ ID NO: 201727 - DNA, 169 bp, Homo sapiens
  chr9:74061493-74061662
  hyper
accatggaaagggctcaagtcgcgtgcgaagggagaaaagaaagcaaagactggggctctcccccggccactcaccggcgtctgctgcgacgggagtcccgagcgtttggtggacccctgcttggaacttaaccttttccacgactcggcaaacctgccccggctggcg

SEQ ID NO: 201728 - DNA, 49 bp, Homo sapiens
  chr9:74764248-74764297
  hyper
gcggagccaactcgcgggagaaaaatcctattggcattgaggaggtagg

SEQ ID NO: 201729 - DNA, 63 bp, Homo sapiens
  chr9:74764879-74764942
  hyper
caccccccgctcccccgccccccgttccaatcctaagataccggcaataatcttcaatcttgc

SEQ ID NO: 201730 - DNA, 49 bp, Homo sapiens
  chr9:74979547-74979596
  hyper
tcactcccgcccccggcccggcaacaaggagcccggctcccacccgcag

SEQ ID NO: 201731 - DNA, 111 bp, Homo sapiens
  chr9:77111652-77111763
  hyper
gagcatctgacggacgtttttaaaggaaggggacagctacttccatgggactgcattttagttgtgctaaaagtgatgaaagtgggtttgcattattctaccaccaacacc

SEQ ID NO: 201732 - DNA, 107 bp, Homo sapiens
  chr9:77501917-77502024
  hyper
tccagacaaaataggcgagaccaagaaattaccaggatctccactactctcccaagcgtctccagtgctctcccaacagccaggagcaccctccctctccaagcccc

SEQ ID NO: 201733 - DNA, 380 bp, Homo sapiens
  chr9:77502233-77502613
  hyper
ctgggcacttctccagccgcctcggaaagccgcgacccccggctagtcagcgtccgggtctgagatctgtgcccgtggcagctcaaaacgcgccttctctcctccggattctcagctcaagccacctccgaactcctctccctccggcccggagcggaatcagagctgcctcctctcccggggtgtttcccaccgccccgagctgaacccccgacccccgctaggtttccgctctgacaccacctccgctatggccgcatcccagctcttgaaacgggggctgcgggacctgccctgtagtagcgtacactaccttagataggataatcatctttgggtggagaccagagaacttgaaagccggtatttcataaatccta

SEQ ID NO: 201734 - DNA, 625 bp, Homo sapiens
  chr9:78504963-78505588
  hyper
ctcacttccaaggccggaattgtactctcccgtggcgttgcctagtatcgcagatttcgaaagtgagcaggcaacagacttggctttcgagccaattctaggagtcgatgcgacttactgtcctgtgtggtagcttctcccgggagcagaaagtgtaaaataaacagctgctgaaaagcatgaagaattaacgaagtgaaaatctcgagttatttgttcggcaattgacacgtaagtgacctccttaaatgcctagttatttaaggacgtttagaacgaggatgaatgaatcttcagggcggttaattcgcaccggcgtgtaaatttctttagtctttcgggaagtggcggtaaattcatacaaatccagcagggagggaagagaagggagtaaaaccacgatctcggagcgctcttctcagtcctttggaaagacttgcctttactgcccggaaccctggaggttacagctgggcgaacccggaggcgctaggacctcgtcagcgcctggctgcggccgctttcaagagggcggaggagggagaggaggagggcgatgtgggaaaggaggggtgttaaggggggcgggggaagtcatttatgcagagcaggagctgctgccatt

SEQ ID NO: 201735 - DNA, 332 bp, Homo sapiens
  chr9:78505622-78505954
  hyper
gagggagcgctgggagcgagcaagcgagcgtttggagcccgggccagcagagggggcgcccggtcgctgcctgtaccgctcccgctggtcatctccgccgcgctcgggggccccgggaggagcgagaccgagtcggagagtccgggagccaagccgggcgaaacccaactgcggaggacgcccgccccactcagcctcctcctgcgtccgagccggggagcatcgccgagcgccccacgggccggagagctgggagcacaggtcccggcagccccagggatggtctaggagccggcgtaaggctcgctgctctgctccctgccggggctagc

SEQ ID NO: 201736 - DNA, 198 bp, Homo sapiens
  chr9:78507154-78507352
  hyper
gcccataaactaaggtgatgctatgaggatgattggaagcgtaacagatttggaagtactccgggttcagtggtcttggctttctggttctcttcccccgacacccctgcgagaaatgggggtagagagggctatgaaagtgggtcccagaaagtacccccctccacatacacaccgcaagcatctttggggttggcc

SEQ ID NO: 201737 - DNA, 231 bp, Homo sapiens
  chr9:78507353-78507584
  hyper
gaggggcgggccctggctgggctcaggcgagaatccgctggaatgggaggtgaggatgatggatggcgcctttccagcaggcgcgctttggggactgcccggggtgcacgcaccctgcgtgctctgccagggggaagggagagggaggtgctggctggtgccggcggagtgggagagtacggacagtttctgaggccattgcgttccacgcccaggaacccggggacaccc

SEQ ID NO: 201738 - DNA, 429 bp, Homo sapiens
  chr9:79520874-79521303
  hyper
tccatgtcgtggctaggggtttggaacccgggtactcggaggggcgcagtggaaaatctcggcccaaggaagacgagcggggtcccgggaaagtggcccgccggggcgcagcgaccgactgctccctcctgccgctctgaggcggctgcggcggaggctgtgcttgcgccctcgaccgtctcgcccagggctccccgccccacccctcgcccggccgccggctctgggcacccgactctgccctaataaggaaagtgggtgtgccgcccaggagccccggggcgcgccgggcacgctctctggcacgcgcctcgggcgccgtggcgcgtgggcggaggtgcaggggtatggcgaggggctcctccgccaatcgcagggccgtgctgcggcctcctgacgtggcgcgccgaaagctgctgcaaccatgga

SEQ ID NO: 201739 - DNA, 231 bp, Homo sapiens
  chr9:79521333-79521564
  hyper
gggctgctgcagagggaggctctgccgcaggcaccgccgcggtcagcgggggaaggtgggaagagggagacgggtcccaggagagcccccgcctcgcccagcgcctcactggctggctggcgcgttacggagcactccggcggtcacttaatgatctggtcggctggcctggccgggggaggcactcagctagattggcgtgggagggacgaggagagaaagaggggagtt

SEQ ID NO: 201740 - DNA, 179 bp, Homo sapiens
  chr9:79629671-79629850
  hyper
cagccagtaggtggcgaagctggagctcgagtatcgtctcctaaattcaaggccagtgctttttttctccaagaaataaatgcccctgacctcaggcttttcccttctgccctccaccctcgggcattccgaaaagtcaaatcgagcttatgcactcaaatccaagtagggcggagcca

SEQ ID NO: 201741 - DNA, 54 bp, Homo sapiens
  chr9:79630437-79630491
  hyper
catggaaattgagatgtgcgcctaaacctttgccttttttctagcgctgtacgt

SEQ ID NO: 201742 - DNA, 472 bp, Homo sapiens
  chr9:79630544-79631016
  hyper
cgcagaagccgtgggaaggcctggcctagatccagcccaaggagcgcgtgagaccctccaggggctgggggcatggaggagaaagaatgaataaataaccgctcctaaagttccacatctttttttactcccctccatagagccaattaaacgcaataaaagcttgcatggaacccctcttcctagcatagcgtcgccaacaattgcctaaggggtaaaccaaatacgcctgagataattacactaagcccggggcaatgatttgcctgccagcgtcctgagcgccagccaatatttggatagtgcagtagttgtttaaaaacaacaaaaaaaaattactcgcggaaacttgaaaccgactggttggtgccagggtggttacacgatctgtttttcttgagagggggtctgcaggcagctggagcgcgcgcgttccggcccccgccggtgccactgagcgcctgcaaaactt

SEQ ID NO: 201743 - DNA, 173 bp, Homo sapiens
  chr9:79632239-79632412
  hyper
aagccagaagctgaaaacacccgatctggtgtcaccaaggttgctagttagggggcagccccccaagcagctgggccgatggctttcttccaggttaggcgtgggaaaaccgagggagccatagtgtccaaatgctcctttctcctcaaatcgcctaacgggaaaggacccgt

SEQ ID NO: 201744 - DNA, 61 bp, Homo sapiens
  chr9:79633151-79633212
  hyper
aggacacgatactctgaacttgacccagagtgtctagcccaggaaaaagggtttgtaagga

SEQ ID NO: 201745 - DNA, 60 bp, Homo sapiens
  chr9:80263234-80263294
  hyper
gtggaaaggttcccgctagcgtttgtggctctaagtggcaggaggaggcggagcatcttg

SEQ ID NO: 201746 - DNA, 234 bp, Homo sapiens
  chr9:80645633-80645867
  hyper
tggaagttcaacccctctgcccacctttccacccccgcgcctctggtcggagtgatctgccatttagcagatgcacagcagataaggtacagccctcagggacacgaaaaggaacaagccaaggcaccgggcagggcagccccgacccctgtgctgcgtgtgtgtgtcgctgtgtgtgtgtgtgtgtgtgtgtgtgtgtgtgtctgtgtgtaacgcgcccgcgcgcccgcgcgg

SEQ ID NO: 201747 - DNA, 421 bp, Homo sapiens
  chr9:80645902-80646323
  hyper
aggggcgaaccgcgggcgccggggggcgggggcgccgaaggcagctgccccgcagggccaaggatggtgggctgggggcgcagaggcccggcggggccccggacggtactcaccgagcagcagcagcttgagctcccggcgggcgtcccgcttgtccctgcggagctgccgctcgatctcgtcgttgatccgccgggcttccttggcctcctcgctcaggcagcacgccatgatggactccagagtcattcttccaaagtgcctccgctgcagccccgccggcaccccctgctcacagcgcgcacacacaccctcccgccctcgctcccccgaggcagcggtggccgccgagcccccgccgcccgggcgcgcgtccgggacgagctccgggaaccgccgcgggggcggcggccagggccgg

SEQ ID NO: 201748 - DNA, 662 bp, Homo sapiens
  chr9:80646509-80647171
  hyper
cgccgccgccgccgcctgcgaggctcccctacgccgtgcgcctggcggcgagagctcattcaccggggtgtccccgcagcgagcggccgccgacggctccccgcgcccggcgcgcccgctcctcgccgccgcctgacacggctcccgggcgccctcggccctgtccgcgcccaccgcccggctcgcgcgcagacccggttcccgtcccgcccggcaaccgcgcgctcctccgcctccgcctccgcccccgcccccgccagacgcccaccccctgccccgattgccaggcgcggagcggctgctcagtgcgagccctccccctcgccacacacacacattttcttctttctctgaactggagcacagatccgggagggaggaggcggcggcgaaaggaggaggaggaagaggcggaggggatgggcgcgggaggagggagccgggaggcggtgccgcccggcccctcctggaaggctttcctgggctcgcggccgccgcggcgcgcctcccagtgcggctctcgcctcgcccgcgcggctcccgggctgggccggcccccgcgggctctgcggacgcctactgctcccgcaccctcggcagagtccgcgggcgcagcagtcacggccgcccccggccgaagtcggggccagacccggccgccg

SEQ ID NO: 201749 - DNA, 397 bp, Homo sapiens
  chr9:80647247-80647644
  hyper
ggtgagacaggaatatggcggcctctgcctgcctcagcccaccggcccgggagcgcggccgcggcccctgctgaagtcgcgggaggcggccccgcggagccccgcacgcgctccctgcggcgccggcgctggcgtccgccgctcccgggctgtgcctgtctgctccacggggtcgctcctcagccgtttctgtgtttcccgttcctatttctaaaacgccattcggttagaaactctcacgtcacctctgacaccggtgcagtcttagaaaataagctcctctatactgtgtggggctactggggaagggaagggaaggaattggcaccggtgcccagaggtgtagggggagattcacaggcgaagctgttcgcaaagtaacgtgagatagaaatct

SEQ ID NO: 201750 - DNA, 187 bp, Homo sapiens
  chr9:80911704-80911891
  hyper
tggggttggaggactggaaccggccagattgcgggctcaaggggcgaaggcaggttggcaggggcagcctcttcccgccgcccacaatcctcgggcgggcgcgcagccgagccggctcggctggctggcgcaatctcgcgcgctccttgcattgatcaaaaatgggggttgaaacagtaaacgcgag

SEQ ID NO: 201751 - DNA, 728 bp, Homo sapiens
  chr9:80912036-80912764
  hyper
ggctgcagactctcaccgcagcggccaggaacgccagccgttcacgcgttcggtcctccttggctgactcaccgccctggccgccgcaccatggacgcccccaggcaggtggtcaactttgggcctggtcccgccaagctgccgcactcagtaagtccccgcgagcgggcgccgggagtgaggttcaggcgggagcacgcacgcgggtgggtttgcatccctgcgtgtggcagtcggattcccgctccctgccttgagtcccctaggcgctttgcatcagcgtgcacagcgggatcagcagctccggcaagcgggcttcgggaagaatgcagttggtgaggaagctcggcgaggcgtgcccgtgcagctgcccctggccctgactgctggtgcgaggcagtgcacgactcagctggccggggcctgctgtcccgccggtgccacgcacctgcagacgcccgggctgtgccatctcctgggccggtccgggggctggggcggggcgaaaaagaaaaagctctgatctctgccttcgcctcgcgcagctgtgcggcgagcccgggcagtgtggagcggatgcatgaatggacatagtgtgaatgagtgatgaacgggaatgaaccgatgacaggttttgcatatgcagtggatcacgttagctgaaagggattgcaaacttaaaggtccgcgtgtgcgtgcccccctacgccttacaccagtgtttgctt

SEQ ID NO: 201752 - DNA, 255 bp, Homo sapiens
  chr9:82185388-82185643
  hyper
caggcccctccctaggggtgcccctcctcagccatggctgcccctttctctcctcctccagcatctgcccctggggccacccccacctttccgccatctctcgggcccgcgtggcaccctgctctgtttttaacggggataaacttgacttgcttctccaaagagcgggaaaaagaggcgcagtcttggtactgatctgggggagggaacgtcccagggcgcgcaggggcgttttctacccgtgccccgtcggcc

SEQ ID NO: 201753 - DNA, 165 bp, Homo sapiens
  chr9:82185703-82185868
  hyper
ggaggtccagcgtctctgattcccggatcttcagccccacccggagcccccacggttactgccccccgcgacccccgatggagcgtcgggatgcgctttctctccgagtgcctccgggggtggagggagggaggcctgtttcggaactaaatggcaatcacagcc

SEQ ID NO: 201754 - DNA, 812 bp, Homo sapiens
  chr9:84302354-84303166
  hyper
ggcgaccagcgagggggaccgagggacgggaatgcgggcggatgaataaagcagtaagtcagagaaggcaagaacgggtgggacataaacataaagttagaagtggctgaaaacgaggccccaaactcgagtttgcccttcactatggggagggggaaagcggaccctccccgggccccggcttctaaagaggctcggaagctcttcccagtctccagggcggattgcgctaagtgcgcccgggtcaccaggccaaagggaagggggctccccggcggccagggaagaccaggccagattgtcggtgtcgccgccccttcccccacggcggcgataatgaccccggggaccagaggagaaaaacaactcctttacgctccccattcccagagtcgccggggccacctccagacgcaccggaaccggggccgcattgacatgtaaataggcgagaggagaaacaaaggggggggcgccctgcccccactcggggaaggtagaggggatatggctgcaggagagaaaccccagccttccccagcgcccctgtccgctcggtatagacgtcaagtaggaaggagcccaaagggagggagaaaattaagagtttcggcccactccccaccccaggaagagagggccccagacctccccagccttacaccgctgagggcgagaaggtccgccgggcctcagaagccaccagtctccctaccgcccgggagaagcgcctccccaacgatcctggccccccaccaccacccagccgcgcctcaccgggtgccggctctgcgggaacatcgctctggcgg

SEQ ID NO: 201755 - DNA, 673 bp, Homo sapiens
  chr9:84303267-84303940
  hyper
cgcgctggccacgcacgcgcgctccgccgggcgcaccggccactcggcgcccgcagctgctccggctcccgctcccgtcggtgcgggctccggccctcagggccacattagtgggcgccccaggcccagctgcttcaagaacctgcgcggagacgtcgggcgctcggggactgtgcgcgggggcagcgctccaacccccggcctcagctgcccgggcggggaggcgggggcgcggtgactccgaccgcactcccctcggcgatccgcgtgcgcggcgccagtcctgggcaaacaaatccagacggactgcttttctttgctcttctcctggtccgcctcctcttcgggctttccccgaggcggcggcgggcgaggtgcaggtggcgcggcggcccccgctaaccccacacaaacccgacgctttcggggcgactcccgcaagattcggctgcgccttcggccgggtgctcgcaggctcccgggacgcaaaggggagcgaggttgaagacgcagcggaggctcctggccggggagcgacggatgacgaggcggggaaagtgcggagggcgcgccgggaggcggctcggcacgccccgtgcgaccagcactcggtgttctccgcggttgcacaaaccctccgggcccgacggggctactccaccgagagcagtcc

SEQ ID NO: 201756 - DNA, 164 bp, Homo sapiens
  chr9:86152964-86153128
  hyper
gtgtgccccgcgccctcgcccggttccacgcgcacctggatgtggcaggagatctccgagtcgtccagcagccggatggtgcatctcatctcctggctgagcgatttgacgctggagctccgaaagtggatcattttcatggtcctcctgcctctcggcacaca

SEQ ID NO: 201757 - DNA, 339 bp, Homo sapiens
  chr9:86238306-86238645
  hyper
agcctgctcgcggggcgcccatcctgggaccgcatccgagctccgggttcccgctctaagacggggaggctgcggcgaccgcaggctcagggaggaagccgctcctgaacaggcggctgcggggccgcgcaggtggaggcctagcgagcggcgcggggctaggtttcggggcgccttgtcggggccaggcgggagggcgcacggcctctagcgagaggacgcaaaccacggcccaggctctcacagacctttggccatctggacacacagcggcctcctcctatgaggccctggacttctccgattcaattttggaaagtgaatcgttttccccttcct

SEQ ID NO: 201758 - DNA, 219 bp, Homo sapiens
  chr9:87282780-87282999
  hyper
cgtctcttccttggcgcgtcctcacctagtagagaatagaggcgcagctcaggagtaaacttcagcctggccgttcaccactcgatgtgtgttacagccgagtgacagtggtgagatagacctgctggccttgctttcgggacctgcagcaagatttttgggtgctgtccaagaattcccgcggttacactcagcgcccaggatctgtacaaaaaagcc

SEQ ID NO: 201759 - DNA, 243 bp, Homo sapiens
  chr9:87283766-87284009
  hyper
cgatctgggaatggctacatcccgtcaggttaaaggatgagagaaaatgacgcggcgccacacatcggacaggccagggtggccaccgagcatttagaatacgcatcaggcgcgctcccttcccctcacatgtctctatttcccgggcgtgtgatggcagaaaacggcaggaaaaagacccacttagagagctagaattgtgtttggagactcccttccctctgcaaaagcaccaacaggaag

SEQ ID NO: 201760 - DNA, 116 bp, Homo sapiens
  chr9:87284439-87284555
  hyper
tcccacatgctgctgctgtctgcttctggccagtggcaccgatgcctccctcctccctgctcgcccccagattcccctcccctccctggtgcttttgtctggagggtgttatgggt

SEQ ID NO: 201761 - DNA, 202 bp, Homo sapiens
  chr9:87284994-87285196
  hyper
tcccctttaaagggtccttcgcccggcctgtaccatggaatcctgtcttggggaccctttccctacctcccctcccttggcctcaggctcgaagagagagtgggcacactggtggctccagcggcgtcagtgccatcgcggggcaagttgattcctgggccggagctgggcactcatccatccacagtctccgggctggggt

SEQ ID NO: 201762 - DNA, 219 bp, Homo sapiens
  chr9:89560475-89560694
  hyper
gaagtgcccagagtcgtggccggggaaccggctacaccaagttgacttggaaaaagttttgggaagtatccccaaccatcccttctatctgtcccaagccacaggtgcccggcgcggggtcgaggcgagcacgggagtgggacgcgggctctcccgcagccaacggcggggggcgcgagggctaaaagagcggcccaagcagcagcagcaagatggagg

SEQ ID NO: 201763 - DNA, 431 bp, Homo sapiens
  chr9:89561318-89561749
  hyper
ccagggcgggcccgcggcgcgtgtggttgagctgaatgagggccgagatgcagtgactcgggcagcgccagcgcgacgagaaagaggcggccgaggccgggaaagcggcggcggcggccccgggcgcgtcgcccccgccgtgctgcgccagcaccggcgcgcacgcctcggcgtactggttgtaggcgtagctgcactccggctccccctggcactgcagcagcgcctgccagcagatgaggcggcggccgtgcgccagccccgatccccgcggcgccgagcccagcagctgcagcagcgccatcaggcacagccaggcgcccggcactgtccccccgcgggcctcgccgccgccgcccagcagcgcggccaccatcgcgggcagcggcggccgccgggagaggaggggaaaggagacgaggcgcggggag

SEQ ID NO: 201764 - DNA, 162 bp, Homo sapiens
  chr9:89561779-89561941
  hyper
tccaagtcctgcccacttcttgcatgagtgtcttcataaatccatgcgcgccgctggctgatgccccgctggtggcagaaggtcccctttcgctctggctgcggtggcttcctggaaatgaacagctgtcgagatctggtcccgctctcccacccgagagcc

SEQ ID NO: 201765 - DNA, 38 bp, Homo sapiens
  chr9:90112392-90112430
  hyper
tttcccataccaagcaccgtgcccggcacaagctggga

SEQ ID NO: 201766 - DNA, 296 bp, Homo sapiens
  chr9:90112494-90112790
  hyper
gcaatgtgtcacaggtggggcgcccgcgttccgggcggacgcactggctccccggccggcgtgggtgtggggcgagtgggtgtgtgcggggtgtgcgcggtagagcgcgccagcgagcccggagcgcggagctgggaggagcagcgagcgccgcgcagaacccgcagcgccggcctggcagggcagctcggaggtgggtgggccgcgccgccagcccgcttgcagggtccccattggccgcctgccggccgccctccgcccaaaaggcggcaaggagccgagaggctgcttcggag

SEQ ID NO: 201767 - DNA, 270 bp, Homo sapiens
  chr9:90112856-90113126
  hyper
aactcgcagcggcagggtctggggccggcgcctgggagggatctgcgccccccactcactccctagctgtgttcccgccgccgccccggctagtctccggcgctggcgcctatggtcggcctccgacagcgctccggagggaccgggggagctcccaggcgcccgggtgagtagccaggcgcggctccccggtccccccgacccccggcgccagcttttgctttcccagccagggcgcggtggggtttgtccgggcagtgcctcgagcaa

SEQ ID NO: 201768 - DNA, 509 bp, Homo sapiens
  chr9:90113156-90113665
  hyper
cttcggggagaagtgcgatcgcagccgggaggcttccccagccccgcgggccgggtgagaacaggtggcgccggcccgaccaggcgctttgtgtcggggcgcgaggatctggagcgaactgctgcgcctcggtgggccgctcccttccctcccttgctcccccgggcggccgcacgccgggtcggccgggtaacggagagggagtcgccaggaatgtggctctggggactgcctcgctcggggaaggggagagggtggccacggtgttaggagaggcgcgggagccgagaggtggcgcgggggtgccaccgttgccgcaggctggagagagattgctcccagtgaggcgcgtaccgtctgggcgagggcttcattcttccgcggcgtccctggaggtgggaaagctgggtgggcatgtgtgcagagaaaggggaggcggggaggccagtcacttccggagccggttctgatcccaacagaccgcccagcgtttggggacgccgacctcg

SEQ ID NO: 201769 - DNA, 199 bp, Homo sapiens
  chr9:90340646-90340845
  hyper
ctctgcggaccaaaaattccaggactaaggaatagcaaggttaggctgaaacagtccacacagggcttgcggtaaacgtcttttcaggagccactcgcccagtgcagtaagtcgtgtacttagttgactcgagcgctccagggagacgcccgaccctactctgcgccgccccggggcaccagctctgcttcctccaggt

SEQ ID NO: 201770 - DNA, 321 bp, Homo sapiens
  chr9:90340943-90341264
  hyper
acagccaatcgcagcgcagccaggcggcggggcggtgccggccgaacccagacccgaggttttagaagcagagtcaggcgaagctgggccagaaccgcgacctccgcaaccttgagcggcatccgtggagtgcgcctgcgcagctacgaccgcagcaggaaagcgccgccggccaggcccagctgtggccggacagggactggaagagaggacgcggtcgagtaggtgtgcaccagccctggcaacgagagcgtctaccccgaactctgctggccttgaggtggggaagccggggagggcagttgaggaccccgcggaggc

SEQ ID NO: 201771 - DNA, 219 bp, Homo sapiens
  chr9:90341343-90341562
  hyper
cagggcctggcccggccagacagggaagctcagtccccgcacgccagacagcggtactcctgctggcgtcaccgcaaacatcctctgaccgctacagccagtgtgtggcgcaggcgtcatgtccccggccctgccacgcctggagccctggaagctggctgcagggcgctggcttcccgcgtgcggccatatgaccccgtccctgatttaggggagcag

SEQ ID NO: 201772 - DNA, 218 bp, Homo sapiens
  chr9:90589374-90589592
  hyper
tgggcctgtgcccctgtgcccctgaacttccaaactccacttctcctccaccccacgctgatctgagctcgcacgctgttgcctagcaacagcgcggcagctgaccactggggcggttcctgtaggcgacgtcaccaggagaacggaagctgcgtcgagtcaggggtgacagctccgggccccactgcgccttttcctagccctccgctgtcacgcag

SEQ ID NO: 201773 - DNA, 265 bp, Homo sapiens
  chr9:90691187-90691452
  hyper
tctgcactgacgcgtggagtcgccgagaagctgcctggcggctccagcagcctccacgcctagagggctgcgcgtccgggatcgcagcgccttagcgtctccttcccgcctccctccgccctcccgccagcgagcgcgtggcgccccggaggtgcagggttgaccagggtgcacccctctactcctaagccaacctaggcagggcccttccagtttctgccgcagcatttccagcccctcgagcccctgcagctcctgagggtag

SEQ ID NO: 201774 - DNA, 274 bp, Homo sapiens
  chr9:91002684-91002958
  hyper
ttgtaggtgaggctccggggctccagctaacctgagctacctgggctgggctttgtgcggggaggcagcaagcggggtgagccggcgacgacgccggcctctacgcagtgcggtggtgaagacgtctcttccagggagtcacaggaagcaaatccatccttttaaagggctcgcgtcccgcggccctgaaccggcgcgctggagcagtaatgcgacgttctccgaggttcaaggctcacggcccagccctgtgatccagtttcctcagtcttcg

SEQ ID NO: 201775 - DNA, 119 bp, Homo sapiens
  chr9:91149014-91149133
  hyper
atgccctggggagacggctgcgggacacctgcggcggggcccggcagggagcgcgagactggaagagaggccaggagggaaggagagcgacgcggggttttgggggaggggctgcgtgg

SEQ ID NO: 201776 - DNA, 236 bp, Homo sapiens
  chr9:91150385-91150621
  hyper
tgtaagggcgcgacggtggaggccgaggcggcgctgcagaacaaggtggtggcactgtacttcgcggcggcccggtgcgcgccgagccgcgacttcacgccgctgctctgcgacttctatacggcgctggtggccgaggcgcggcggcccgcgcccttcgaagtggtcttcgtgtcagccgacggcagctcccaggagatgctggacttcatgcgcgagctgcatggcgcctggct

SEQ ID NO: 201777 - DNA, 137 bp, Homo sapiens
  chr9:91793599-91793736
  hyper
tggggttgcacgtttgctttgcaaaagtcatagttgcctctgatggagcgcccagctgcttggggctgctcacagcaaaagcatgactcactctgagaggagacccttctcaacaaaggctcggtgagcactgcaaa

SEQ ID NO: 201778 - DNA, 257 bp, Homo sapiens
  chr9:93564153-93564410
  hyper
gccctcgcctcacctggcgcaggtaggtgtggccgcgtcccctacccggccgggactttctggtaaggagaggaggttacggggaacgacgcgctgctttcatgccctttcttgttctaccttcatcggccgaggtaaaagtgctgaaaccatgtgaataaaatacaggtgggttccgccagcttcgctcctgaacctacccgcgctcgggatccagaagctgcgccgggagagaggggctcaggcctgggcggagg

SEQ ID NO: 201779 - DNA, 519 bp, Homo sapiens
  chr9:93955410-93955929
  hyper
atctgacatatgagtaacccggccgagaggcacctcttggaaatgacactgggccttggctagaattacgcacaggccctgggagggctgcggctcgtaggcccgtagggggcagggtgagggcggaggtcctggcgcccccaggcctgacccgcccgcaccgctgggctatttttagcgtccactaaacttagccgactccaccctcttgaataacccacatcttaaaatgctatttttctccaacaggtcaaaagaattctgcgagttagagcgcagattaagttgctagcgacgggcattgaaggttttagaaccgagaaaatgagccggtggcggggagcgcgtcctcagcggccaggcccggcacggggctcgggcactcggggacacacggtggtcgtcgctgtgtctcagcaggaccctgtgcgctggagagcttggggccgcgagtcgcgcagcaaggaggcttctggcttctctatttttagcctctgaacgttttccaaaataattacc

SEQ ID NO: 201780 - DNA, 267 bp, Homo sapiens
  chr9:93956177-93956444
  hyper
gacccgcaggaatgcgaggggcaagacagatcgccggaggagcaggggtcagaagtcagtgtttaaccactcactggctttcggtgaagccagaatgttagcagcgagtcgcggtcgggggccttggggttgcacacgcttgctccaagcaccgaggctcagctgagcacatgcacaaccctctcgatgcagcggaaagtcgtgtggcttagggccgcaccccgaatttcgccgcacccgccgctgtgccatttacaaccccccacc

SEQ ID NO: 201781 - DNA, 35 bp, Homo sapiens
  chr9:94183954-94183989
  hyper
acaggcctgggactcccacccgagctcgcaaagta

SEQ ID NO: 201782 - DNA, 60 bp, Homo sapiens
  chr9:95570721-95570781
  hyper
atgcctatgccagcggccccgatctccctccggtggaggagtggggggagacacggcctg

SEQ ID NO: 201783 - DNA, 369 bp, Homo sapiens
  chr9:95570986-95571355
  hyper
cggctgcacaggggcaggaaccggccctcagacccaaccccggtggctgcagagggccactggctagaggtccccagctccagcagaggaggagctgggcgggggcagggcctggcgggctctcaggccaggtgcactcgcgatctagaggcagcccaggccattctccaccacctgggcgcccaagctgcaggcgccctctacctgctggcaacagctgcctggccactcccaagctggctggcgctcccaagcctcgcagaaccggggctagatgtcgccgtggctgcggccaagcccggcggtctgcccggcggcggctgcaccgtggctggaaccgaccccccagtcccatcccccatggctacg

SEQ ID NO: 201784 - DNA, 211 bp, Homo sapiens
  chr9:95820724-95820935
  hyper
gtgttgggcagaggtagccacgcgtgcaacgccccggagtagcaacactttccgctcagccggctgccttggcccgctgggtatttggtctccccaagggcccccgcccacagcccccggccggacctcggccccagtccaacgtgtgggcgtggtctgtaagttgcatggaaccgcccctgggcgggcgtggagggcggggcctccccgc

SEQ ID NO: 201785 - DNA, 267 bp, Homo sapiens
  chr9:95946562-95946829
  hyper
cgcggacctcgcccggaactcggaccccgtcctcgaagcgtgatctctcccgcctcgcacgccctggccgccgggccgcgggcatggacggcgtccgctcgccctgtgagtgccgagcctcccctcaacgccgctcgccgcctttgtgtgcgcgccgcggcgctgcagccccctccccgcgcgcccctcccgcgccccgggcccgcgtcctttgtggagccgccgccgggccactgccttcctcccacccccgggcttccctatccc

SEQ ID NO: 201786 - DNA, 271 bp, Homo sapiens
  chr9:95946859-95947130
  hyper
gaaccctcctgggccagggctgggcagggcgcgagatccctctgccggcctccggggccctcagggacaccctagcaggtcctctctcccagggttccagggacaccacaggcccgtccctctccgcagcctggggctgagcagggcacggacccctcctccccaacccaagcctctggtcccgtctgcagcccccctttcccagggcccccagagacggcccccgcaggctctctccgcggccggggctgggcaggttgcgggcttaggg

SEQ ID NO: 201787 - DNA, 176 bp, Homo sapiens
  chr9:95947296-95947472
  hyper
ctcgggcgaaggcggcgcggccggggccccagcgctttctgcggcgcagcgtggtagagtcggaccaggaggagccgccgggcttggaggcagccgaggcgccgggcccgcagcccccgcagcccctgcagcgccgggtgcttctgctctgcaagacgcgccgcctcatcgcggag

SEQ ID NO: 201788 - DNA, 89 bp, Homo sapiens; identical to SEQ ID NO: 117831
  chr9:95947484-95947573
  hyper

SEQ ID NO: 201789 - DNA, 278 bp, Homo sapiens
  chr9:96711697-96711975
  hyper
gagcgggcctggagcttccgttgggtctcaagggttccaccaagcaaggaagccctgagctgcccaaacacaatggcgtgcagccctctcctcttccccagtctcggggactcggtctgcctctgcgttccctgtcccggcaaggagcacagaggtgaaggcagtgacaacaactccacccctcccgcactgcagggcctggaatctggtctccctcatttgaggcccaacttccccactgacccacaggtgacccccggaccggagttcccgcatca

SEQ ID NO: 201790 - DNA, 34 bp, Homo sapiens
  chr9:96712753-96712787
  hyper
ccttccgccttgaggtaccggcaggggaagtgca

SEQ ID NO: 201791 - DNA, 383 bp, Homo sapiens
  chr9:96714479-96714862
  hyper
ggcacctccgccggtttctctgcatccttggcgcgctcctgctcagtaagctgctcgctcgttggaattgagttcttcttgggccgccccttgggcttggtgggagactccaggccgccgccctgcagcacctgcacgggggaccgccagcacctgggtgagccagcacgtggactggggacccccgaggagacttgaacccaggtaggactaaggagtgcagggtccatatgaggaaatggtggggaaatgtcccgggaaatggcggccatttgtccaaatgccgcctggggagcggcccggcctggggagcataagactgccaggaggcctgaaggtgccgcgggaaaggacgaaatgttggcttacccaaggggcagaaa

SEQ ID NO: 201792 - DNA, 121 bp, Homo sapiens
  chr9:96714974-96715095
  hyper
gaagctgaggggtgggaagccaccaggcacactcactattttcttccacttcatcctccgattctggtaccacgtcttcacctgcaactggctcaggcccagggactcagcaagatctatt

SEQ ID NO: 201793 - DNA, 174 bp, Homo sapiens
  chr9:96717633-96717807
  hyper
ctgcgccccctccccacgccgccgcgcctcttgcccggccagccccgcgtcaccgccccgccccgccccgccccgcgccgccgcccccaacccctaggctgagccggagggagggacccagaagggagggaggcggaagggaggccaaaaaggagggggccacgtgaaagaggc

SEQ ID NO: 201794 - DNA, 166 bp, Homo sapiens
  chr9:96720637-96720803
  hyper
ttacacaaaaacggcggcggcggcggggcctcctctgctcaggcactgccgcgttggcggccgaaaaaagagggtcccagagaaggggaaccccctccctgtcgaggacaccgaggcccagagaggggaagcctcctccccagtggggtgcagtctgggattgcag

SEQ ID NO: 201795 - DNA, 218 bp, Homo sapiens
  chr9:96929092-96929310
  hyper
tggttgtaggcgccgccaggtgcctctgacgtcacttccgctatcaagtttgtgggccggggagaccttggccttgggggttgggatgaaggagggaaggtaggaagtgcgaggggcggggggacagggcgggaaggcgcgggcggggagggcgggagagtcgtggctggctgcatgcccctgctccccgcggccaagtgcagcctcccttcctgaag

SEQ ID NO: 201796 - DNA, 443 bp, Homo sapiens
  chr9:97767419-97767862
  hyper
tgtgtcctcttcccccgcagccgctgcagagggagcgtcgcgccggggcggagtgcgggcttgcgcggcaagtgcgcgccgaggtgagtgcgggcggcgcggtccctgcgccccggtggcgccggcgcgagaccgcggctggcgagaggccctggctctgcgctgcggcgcgcgggtgcggggactacccgccaggctccggctcgggcgcggggagcggccgtgacgaaggtcgcggcccctgcggtgaggcgcccggcgagttccgcgggcgggcgcgggtggcctcccgaggtgcggggaagaccaggtcgcgaggccgggggtctctgctttctcgcgctgggggatggccgtcaggaccctgtcgccttctttgaaatgctgtggtttttgaacctcaggtcacgaaatggattggagtgaaccggagaccccgaaaa

SEQ ID NO: 201797 - DNA, 205 bp, Homo sapiens
  chr9:97811198-97811403
  hyper
ttgcgggctcaggcttgggatttctgcagccacgcgcgcgttcacccgacgggacctcgcctgcactgccgccgggagaagcctgctctagactccggctccaggggagagggctgggctccacagagaggagcagcctgtgagttttcaaacatttctctgtcagagttagctcttacttgttaaattccgagatgagaatcta

SEQ ID NO: 201798 - DNA, 46 bp, Homo sapiens
  chr9:98268140-98268186
  hyper
cgcctccgcagccccgcgctgcgcccgcccccggccctccccagcg

SEQ ID NO: 201799 - DNA, 960 bp, Homo sapiens
  chr9:98272920-98273880
  hyper
ttgaactgcagagggactggcagtagcgagaagtctagtgaagtcgtgaaatggggcggtgtggctttaagatgcgcacggtgtatgttcattgaaaaaaaaagaagaaagaaaggaaaggaaagaaagaaacccagatggagggaaagggggaggagcagggagaaggcggagctccggtggccacgtgaccccgcgccaggaggcccggtgcgcgcgcgcgcccggctcccggactccccgcgcccgcgcggccggggcagagtaggtagggaggcggatgcgccgggccggctccgggcctccagcgcggtctcccgagagcccaggcgaggcgcgcgcccagccggcgcggacggacgtgccggacgcgccgtagtacattcctgaaggcggaccggcccccttacgctgcccaatgcccgcgccgcctccccgcgaccggccaatggtcgcgctcacgagtccctgcccattcagcggccccgcgctggctgcccgggcgcgctgggggctgcggcggggcgcgccggccaccggggcggtccacgcggctcccgcagggggcccgtccgccggctctccccgcccccttccttcctccccggcggtttcccctccccgcttccttccttcggcctgcgccttctccttcctccctcgccccgctccctccctcaatctcccctcccccaccagcctggccaccttccctccagcctctcctcctccccggcttcagggggaggcccttcccccgaccccctaacccgcaaaccgtatgcggtgccggggtcagggcgggatgtcccgaggaagagagggagacggggtggaggtgtttgggggcgttcgcgggatccggagggggacctgagcaccgggccagcgcggaaattcaaaactcagaccgcttaaggagcacgtgattttgtgagtgcctcagggaagggctgcgga

SEQ ID NO: 201800 - DNA, 169 bp, Homo sapiens
  chr9:98784377-98784546
  hyper
accaagtcctagagagaatttctccaaaatatttcctggatccccctgccaagggccctgtcccgcccttccagctcccaactggatgcctgcagacctctccccgggttccgaggctctggcctcctccctccctaatccattttccacaccgcttccccgggagccc

SEQ ID NO: 201801 - DNA, 289 bp, Homo sapiens
  chr9:99381214-99381503
  hyper
gcccgcaacttagaaaggtgaccctcggtccatcttgctggtggaggagggtgcacaagctaaagttaaagctcgcagcccacgcagctagaaactcggggcggggggcgctcctcaggagccaggctcctaaagggggtgtggcggccggggcgtttaagggggtgggggcgaaggcatttcggcccggccccggaggccccgggcagcccggtgggaggtgggccagggccccgcgccgggtgcggccgtccggggccctccgcgcgcccactggccggctcaccgg

SEQ ID NO: 201802 - DNA, 629 bp, Homo sapiens
  chr9:99381680-99382309
  hyper
agggggccacgaccatggccccgcgcgcccgcgcgcccgccgaggctcccgccagccccgcgcgggcgctcggggcggcgggcgcagagcggcgctgcggggacggcgggcgccggcagagcccggcgggaggcggtcgcgcaggagccggaggaggagcccggcccacagcgcctgccccgctgcctcccgcggccgccgcaggaccggcgccgcagccctcgctacagcgcctcctgccgcggccggcgcccccagcccgcccccaggtgcccgcagccggctggcgcggccgaggcgacggggctgcagctggcggccggagctgcccggggtaaccgtgcgtgcccaccgcggccgcggccgctgctgcgtaggcgccggggcacagcaggacgcggctcgtggggaccccaggagggctgttccgtggcgcttcattcacaaaaaagggcccacaaccctcctcggggcccgcagactgaggcctttcattggccaatgcggcgtgacgtcacggagacggggcctttctacaggcaggtactcggtgacgccataaagaaaactctgagggcttccgccaatcagagataaagtgtgctagcgaccttcgccagccccccaac

SEQ ID NO: 201803 - DNA, 240 bp, Homo sapiens
  chr9:99416950-99417190
  hyper
aagcgggcactgggccgcccacgctgggaaactcacttgtaagaaactcctggggattttggccagatcctctacgtattccttgcagatgtaacacaggaaatgctgaaagccaaaacggcagaaagggcaagttagtaaagcagcaccctcgggccccgaaggatccctgtacttcgccgtgcgtgacgcgagcaaaggcgacgcccgcggggccgggaccggcggctcgggcgcccg

SEQ ID NO: 201804 - DNA, 409 bp, Homo sapiens
  chr9:99417397-99417806
  hyper
gctcccggaacagcgcgccgaacggtacccgctgcccgcgggcgtccagcaccggcagctcggccacggcggccgccaggggctgcccgctgtcggggccgctcggggccgggaccagggcggcggcgccgctaacctgccgcgtgaccggggccggcgcggccatgacgcggggcggccgagggcctgggtccgctctgtcagcgcggaccggggcggggcgcgcagaggttgggcgcggggggcggggcggggcgtgcagaggtggggcctggcaagtcacggtttccgcggcgcggcgcgggcctgggagctgtcggagtgaaccccacgggcggttctgactcagctctcagggtaggggacagagagagaaagtaaggtccgtccacggcgagcaagcattatt

SEQ ID NO: 201805 - DNA, 121 bp, Homo sapiens
  chr9:99539844-99539965
  hyper
tttacaggggatggcttacctctgaacgacacaaagcagtttttactaatatcctcattttcaaacgctcaagtgacagagccaaaattcacgaggtccttctagctcctaggctcggcct

SEQ ID NO: 201806 - DNA, 627 bp, Homo sapiens
  chr9:99540006-99540633
  hyper
tcatggtcaatacaataaacgcgcattcccctcctgaagccagcaccgcgttttccgacgcctggctgcattctggcgcccatacctcggcccgcaccgagcatcttccaactaggactcagccccacctaacgcccccggagcccgcccccaccggcccttctcaggctgaggtcccgggccggccgaggcacagggagcgacggcctgctttgggggagttcccgggacgtcgcgttcccgccccctggacactagcacatccctccctgcaggtccgcaatccgcgtggaggcccggcgctctcacctgagctgcgaaccctctgcaccagcaaacactaacagggagaagccggaaagtggggttgactgcacatgcgcagacgaaaacgcgcatatccgttcccagcatgctgcgcggtaacccataacatgcaagactacgtttcacatgcagtacggcgccagctgtcagtgtttttttgtttgtttttcccccaagatttatggcgtaataacatggaccgtcctgataactggagcccgggttctgtcagagccccagaggttgtgggttagacttgatgacataacagcaaatgcagcgtgtggttacagaaagcaa

SEQ ID NO: 201807 - DNA, 450 bp, Homo sapiens
  chr9:99801107-99801557
  hyper
gcccggtccggtccggcttcagcccacaggatgactgacctgccccgcccgggccctcccagtggtgccggcgcctccctggggtctccaaccgccctcccccgttccccacctcgaggctggcagagctccgggcagaagctctcactcccagaagcgcccgcctcctctcagtgtccctaaaggggggttccctcctccagtcccccttcgccctgtccctcggtctggtcgggggcgctcaccagcagccgtcgcagctgcgcaggcaccctcagcaaacaagcctctgagattacagacgtccgcggtctggtgcaggttcgcccgcctcgggatttaagtttccaggcggccttccccgcccccaccgccttcccgcgctgcgattggctgtgccggccactgggcggggccccgggcgcttagagcccgcgcgtgacgcagccc

SEQ ID NO: 201808 - DNA, 45 bp, Homo sapiens; identical to SEQ ID NO: 6930
  chr9:99984107-99984152
  hyper

SEQ ID NO: 201809 - DNA, 113 bp, Homo sapiens
  chr9:100263429-100263542
  hyper
aatgtattcgattgcgtgttggaactacgtgtagacaaaacgatcgcggttaaagcttgcggctcagagcccacctggccgcgctgctgggaaacggacggagcggcgcttca

SEQ ID NO: 201810 - DNA, 113 bp, Homo sapiens
  chr9:100503320-100503433
  hyper
agggggatgataagtaagggcgtttccggttctgatgcgctggatcttgaagctcttctccaccactagcgccctgcttgtaaccttagcacacgcaactctgaacaggaata

SEQ ID NO: 201811 - DNA, 303 bp, Homo sapiens
  chr9:100565762-100566065
  hyper
cttcctccccaggcccggcccagcgcgggggcggggcaaccgcggggcgtggctgcgcgtgacgtcaccgcccccgccgccccgccccgtccccgctcccgggccttgtgaaatcgcgcgcgctggcggccgtcgtagaccgtgcagctctccttgggtggctgcgagtgccttggccgtgggccctgtgcgcggccagccccggcggcgggagggcgataattgcccagagacgcagcacttacctgggccggttgtgcaaggcgcgcggggggaggccccgggcggcggctctcacgcctc

SEQ ID NO: 201812 - DNA, 201 bp, Homo sapiens
  chr9:100610480-100610681
  hyper
acagagactggcctgggtaaggggaaaaaatcactgcctcttcctgtgcctctagtggttgaactagaatcctggctagctcatctcgcttttgaagggggaaggggagtaatcatcggctcttttgagattgtcttgcaaaccatggactctctccccagaaatgaacacccacaatctagtgtgtaaatttcaggtttc

SEQ ID NO: 201813 - DNA, 52 bp, Homo sapiens
  chr9:101558601-101558653
  hyper
cgggcccggccacctcggcccccgccggctccgcgcccgcctccggctccgc

SEQ ID NO: 201814 - DNA, 64 bp, Homo sapiens
  chr9:101558886-101558950
  hyper
ctgtgtgccgggagcgcgccggggctagggccgcgcgcctgctgtgtgccgggagcgcgctagg

SEQ ID NO: 201815 - DNA, 213 bp, Homo sapiens
  chr9:101569829-101570042
  hyper
gcgcttgggctggcgcggggctggacggaaagggggcggcgcgcaggtggggcgggccgggggcggggcggcacggcggttccgggatccgggtcctggcctccaccgccgccttggggcgcgcagatcgctggctgcagttggcgggcgcatgtgggggcgcacggcgcggcggcgctgcccgcgggaactgcggcgcggccgggaggcgct

SEQ ID NO: 201816 - DNA, 33 bp, Homo sapiens
  chr9:101706896-101706929
  hyper
ctggtaagggcaggtctggtgcctctccgcaca

SEQ ID NO: 201817 - DNA, 96 bp, Homo sapiens
  chr9:101866822-101866918
  hyper
ctgaggagggatcttcgggggaatgctgaagttgatgcgtggacttggagaggggaagttgaagtggatgcaggggcctggcgctgcagcggatct

SEQ ID NO: 201818 - DNA, 232 bp, Homo sapiens
  chr9:102586985-102587217
  hyper
ctcttcgagctgcgcccaccccgggcaaagggggcgctataggccggagtttgggcacccagttccttccctgaggcctgctgagctgcgctttcagctacaaagtttcgctgaggctgtgggctgagacgctggtcccggagctgcgctcggcgccctcaggaatgtgcccccgctaggccgctgggtggccaggagcctccaagccgcccaccctcgaagacaccgccct

SEQ ID NO: 201819 - DNA, 74 bp, Homo sapiens
  chr9:103190036-103190110
  hyper
atcactgtgctcggcgcttttccatacttgtctcctttaagacctccagtgccccgcccgtccagagtgtaacg

SEQ ID NO: 201820 - DNA, 93 bp, Homo sapiens
  chr9:103790869-103790962
  hyper
cgcaatctggctggcttgcctctaccccgagctcactctctctgctctgtctgggctctggagccagagctgagtctctcttgagcatgcgca

SEQ ID NO: 201821 - DNA, 203 bp, Homo sapiens
  chr9:103791017-103791220
  hyper
ctctttcctttcattaaacaaacaggagatcctgaaacctggaccctgtgcaagctgcagcgccaggaggaggcagcggaggaagcagagcgcgggatgggcgcccagcggcatctgtgatcccgcgcacctccgccccacgggcgcgcgcacaaacacggacacacacatacacacactcgcgcacacactcgcacaaacac

SEQ ID NO: 201822 - DNA, 36 bp, Homo sapiens
  chr9:103791704-103791740
  hyper
actgcattccgggctgcaacgcgagcctgcacgcgt

SEQ ID NO: 201823 - DNA, 148 bp, Homo sapiens
  chr9:104248697-104248845
  hyper
cgcccgcagaaacccaacactgctgccgcgctctcggcgcgcccggcgaacctaaggtgtggacgcgccgcgagggtcccctgcttgcgggcggccattaggcgccaggccccttggcgcttcggccctgctaggctcggcgagggtc

SEQ ID NO: 201824 - DNA, 499 bp, Homo sapiens
  chr9:104248975-104249474
  hyper
ctggggacccctgcggggtcctcgcaatcctccggcaggaagcggtcggagctgcgggcagggccgctaggcaacccgcctgcccgaggcgcactgcccggggcacaggccctctgcgatgactctccccaacccccagctgccctgcttgtgccagctgtggccacccctaatccttgtcccctcgctctagtgtccagggctccgaccaccgcgccagaagggctgggcagatcgtgcgcaacagaaacctacccggttggggcgaccagctcggtcccctgcgcgcgccgagggccgcctctggtattgcccaggctggctagctcatcccggtggaggcgccatctccggggcccggaaggagcgggcgcagcgcggtttgggtgtgcgccggagcctcacctcctcccgcctcgcagctcaggcgcagggctccccttgctcaggcgggccatgtgacccgcgagctgcggagagaccgcggcccccaaagcgg

SEQ ID NO: 201825 - DNA, 296 bp, Homo sapiens
  chr9:109622313-109622609
  hyper
ttgtcccttctagacgtggaggcttggagaggaggtttggtttccaaggattggagcgctgtgaagggcggggccattccaagtccatctcccctttttgtcctcttctcccgggacgggagggtggagccaagtccccccgcggccggttcgggagctttctctatctcggtcgctcgaggtgagtgtgaaagggcggcagcccgtttaattgcagcgcaggttaatttcttgagttcaccgcagtcggtccgccagccgcttccccggtctttgccaagtgggtttacgaggtc

SEQ ID NO: 201826 - DNA, 140 bp, Homo sapiens
  chr9:109623658-109623798
  hyper
ggggagggaggagaaagggcgagtatttaaagaggacagacttgcccaggatccttaacaccgcgccttcaccggatgcgcgctcctcaatgcaaaggaatccagcaacatccccaattcagacgcggacaaaagaaact

SEQ ID NO: 201827 - DNA, 71 bp, Homo sapiens
  chr9:109624391-109624462
  hyper
acaatgagcctttatttcaggagagaagacttcaaaatacgtgccagtaatggacaatttgagcttttcac

SEQ ID NO: 201828 - DNA, 164 bp, Homo sapiens
  chr9:109624564-109624728
  hyper
aaggttggcctctagatggatgcaagtaagggaccctctggggctcgggctcggcgcctcgggcagggctgacgttgggagcgctatgagctgccgggcagggtcctcaccgggggcttcctctgcgggccagggctgccgggcgccaccgggacgcgagcgcg

SEQ ID NO: 201829 - DNA, 122 bp, Homo sapiens
  chr9:110250497-110250619
  hyper
gggaagcactgggggaagtcgcttcatgtgggagagctcctcccgccagcgctgcggggacagggcgggagagacctgtcagtggtggtcccctgttgccacccgacatactgacgtgctgg

SEQ ID NO: 201830 - DNA, 469 bp, Homo sapiens
  chr9:110250630-110251099
  hyper
cgactgcaccgcccagacatggggactggtcaggcaggaagcacccgggaacccagggcgccagcgctgcaatctcggcccactcccgggtcgaagaagaggtgatgcgtctgtattgcgggtgttatgtcctgtctgcccaattgcgtgtgagcgagcgccgcggctggtccctccccctccaggtcccgtggacgtccccggaattggcacaccgaggctctctcggtgcgctctcgccacggggccgcctacgcgctaaactcactctggcccagccagtgtctggggacgcggccacctcccgcccggtggcccgagagcgcccgccctaccgacagcgcgcccggggactggtgaagacccggcttgcgccccaggcggctccgcagtgctcgcaccacgggcatacacagctgagccaaggacacggaagctatcccgggaaggttgcggagtccgcgcggtg

SEQ ID NO: 201831 - DNA, 259 bp, Homo sapiens
  chr9:110251129-110251388
  hyper
ggtgaccccaaggctccgcccgcccccaccacacccacgaaaacccaccgggcgttcccggcggcccggagcgatactcacgttattcggggcacctgcttgacgcagtgtcttctcccttcccgccgggccagacgcgaacgtggagaaagatgggagcagcgcgtcgctgacagccatgtcagactcgccaggtggctgcctgcgagcaaggcagggagcggagacaggagagtcaggggcggctttcggccgtcgt

SEQ ID NO: 201832 - DNA, 44 bp, Homo sapiens
  chr9:110251418-110251462
  hyper
cctgctcccagcgccgcgcgcctcacctacctcattaatgtggg

SEQ ID NO: 201833 - DNA, 220 bp, Homo sapiens
  chr9:110252078-110252298
  hyper
acttccttcgctacagccttttcctccgccttctcccatgccccgcccctccctttcttctctccgccccccccgaggctcccttccatcgttgctatggcagctaaatcaacaaactcggcgcacgtgggggcgggggaggggaaggaggggcgcgggcggggctgggccgggccgtgacgccagccaggcagctggcgggctggagccgagctgacgc

SEQ ID NO: 201834 - DNA, 118 bp, Homo sapiens
  chr9:110252515-110252633
  hyper
ggagaagagcgcgattatccgcgtgactcatccagccctccatctccccctccctctctgcgctcgcaggagtccgctctcgtcgctcagcgccagtgccggtggcggtgccggcgct

SEQ ID NO: 201835 - DNA, 80 bp, Homo sapiens
  chr9:112081254-112081334
  hyper
gtccaaacatttctcccacccgggaaggcctatatacttccttggaagtccgggtatgttatttcttcccttgacatcct

SEQ ID NO: 201836 - DNA, 130 bp, Homo sapiens
  chr9:112081563-112081693
  hyper
gggggtgcaaccacctgtgggcgggtgcccgggacgcaggcccaggcgccgccgccctgaggtgccccgccgaccccacgcacggtgcccaagggagaaagtcaggcgcgcctggccccccgggcacccc

SEQ ID NO: 201837 - DNA, 485 bp, Homo sapiens
  chr9:112081773-112082258
  hyper
ctcccaagtcaccctacccgctgcgaggaggctgcggggcagatggggctcagggaatgggaatggggtgtatccagaagggatcagcagagagcagaaatggtctaacccccgcctcccaaacttggggcgcctgccgagcagcaagcgaggggatctcctctctgctgtctcatcaaggcctgatggcgagtttgaggggggacaagctggacaccccaggacggcctcacattgatttgagattttctacccaataacccagtatcaggaagacccctgctggaagctagggacggaaggggagcgccggccacccacaccagggggggcggggtctcgggacttggggaccgtgtgtactggggagggggcgaggccccaaggactaggtgggcgccagagaaatcgcaaccccgcggcgcaatgtgccaaggagggggcacgggccaaaggtggggccccggaagagaccgggacggggt

SEQ ID NO: 201838 - DNA, 1018 bp, Homo sapiens
  chr9:112082484-112083502
  hyper
gcggcgccggcggcggagatgtgcacggccgcgccgccggtgagcaggggcccgccgcccgccgggaacacgctgcccccgggcgcggcgggcagcgccgaggaggaggcggcggcggccgggcccccccgtggccccccatcgcgctcgtcccccagcccggcggccccgcgccccgccgcgccccgcgcgtagcgctgcatggagcggcggccaaaggtccggcgcaggaaccgcagcatcctggctgggggcgccccctgcctccgccccctgcgctgccgctgccgctgccgctgccgctgcgccgccgcccgggagcgtcccgcgacgccgtcagtgccctcggccgcccgcgccgcctctcgcgggctacggcccggggcaagcccgcgccgaggccgaggccgcgctctagccgcctgcggggcgcgccggcccggccagcgccggctgcgagtggccgcaggcgggagggcgcgctcggggccgtcccgccgccgccgccgccgcgcgctctcccgggccggcggcctgcgcgggctgccgaggggctgctccggacgggcggctgcgggctgccagggggctgccgggggcgcgggaggcgggctgcgggctgctcccgcgccgcgcgccggccgagggccagccggagcagggcgcctgcgtggtcctggcgcgctcgctcccactcgccgcgccgcgcccggggcccgaggaggccccgccgagcgcccgctcccaaggcgccttttcctgcgcccgcagcccccgcctcccacctgggaggctgcacctccagccgccgccgccgccgccgccgccgctgccgccgggactgcagcacgccctcctccctcggggctgcgccgggtaattgcaagccgggtctgtgctgccccctgccggcccgagcgccccctgctgctgtaggtgtgctcacgtgtgtacacgtaggtgagcacacacgtgtttccggcgcccagagccctggaggcgccgagtgcccctttgc

SEQ ID NO: 201839 - DNA, 216 bp, Homo sapiens
  chr9:112260252-112260468
  hyper
gccgagccccacccggcgccccgcccgcgccctcccgccccggccccgccaggtgagcgcagcggggcgccccctccccgccccgacgtggtgcggggatcccggtgcagccgcacccgccagcccgcccgcgcgtccgccgcgcgccccagggacgggtgggggcggggtggcgccgagcgcgaccccggcccccggcagccccgcaccctgccc

SEQ ID NO: 201840 - DNA, 160 bp, Homo sapiens
  chr9:112260523-112260683
  hyper
cccaggtaggtcgcgcgtgcgggcggcgcggaagctcgctcgcggcgcgacctggccgccgtctgagcatgcccagtgccgcccgcgggcggttcccgccggccgggctggccgcgacgggcccgcgcgccgggcggggggcgggcgtccgggctggcct

SEQ ID NO: 201841 - DNA, 73 bp, Homo sapiens
  chr9:112402426-112402499
  hyper
gtcttcctggcaggcgggaacacgcagaatttggagtgaaacggaaaggggcatggggtcgccaaggtggtga

SEQ ID NO: 201842 - DNA, 108 bp, Homo sapiens
  chr9:112542127-112542235
  hyper
cccacgtaacagcacgtgctcgggtcccacattcggtcagacgcccctctccactggcatctgcccggtggaggcgccactgcgctctgcctccgccccagcaagcgc

SEQ ID NO: 201843 - DNA, 220 bp, Homo sapiens
  chr9:113799864-113800084
  hyper
gcacgtttgttaggcggctggacagaaacttagttaaaagtcctcagcccggtggtgggggacaaccgagtcgtcagtgggaagcgagaggtgcggagccccaggggcgcagggacccctcggaggtgcaagtccagcgggacgaggttttgggagaatttcgagggcccctcgcaagccctcccgcgcacccaccccgacccaggtaaccggaggccac

SEQ ID NO: 201844 - DNA, 89 bp, Homo sapiens
  chr9:113800679-113800768
  hyper
cccgcgctccgcagcggggctggagacggagtcgccactcagggagcgtcagccgccagtcggcccctactgcccggctttggcgcgct

SEQ ID NO: 201845 - DNA, 282 bp, Homo sapiens
  chr9:113800798-113801080
  hyper
agaggagcagcgccgacgccagcctcctctcttcctccgccttccttcttttctgcttgttccacgtagcacaagtcagcaacacccgaacccccagagtccgccctccccgctcccaagctggaccccttacctggtgtggcgcccccagcgcccctgacctctgcgccccctcctccattcattggctcgacagcccacggtggtggcagggccggggctggggggtggccttagcctcccattcattatctcagcagcctcccccgccccgcccccgag

SEQ ID NO: 201846 - DNA, 80 bp, Homo sapiens
  chr9:113801414-113801494
  hyper
tttttcacttcactggatctgtaaacgaaagcaagtgtgtctgctcccctagttctccatatccacgattataaatttct

SEQ ID NO: 201847 - DNA, 269 bp, Homo sapiens
  chr9:114360505-114360774
  hyper
tgatgaaggctgccccgagctgggggttcaggatgttctgcttggactgaactctgccgaatcacttgggacctgcgccttcccgcgggtgcatccgctacaaacaatccagttacgaaaccatttggagctgccagtgatctccccagctcccctaccggtgccgcgggaggggacacggtgacctggagggagcactcccgcattgcgagggagccaggggggcggtctgatctgcagcccggggttgttccttcttttcttttttt

SEQ ID NO: 201848 - DNA, 341 bp, Homo sapiens
  chr9:114361444-114361785
  hyper
gcgcggcgcccggcctttgcccgctcgccctttgctcccaccctcgcctcccgccgcccgccgcccgcttgcccattcccgaatccccaccccgatctttcttcttctaccctcccccagttgtgcagtccagcaagttccctggccagccccctcccgggtgcaggaagctaccgggtgtcccgggttgtaaccaagctttcctattccctccggcgcgcggctccaagctctccaaggaactgcgggggcgggaggcgtcgggacgtcggctcccaagatcctccgagtgcaagacccagcggtcatttcgacgtaaggggaggaggtctaagagcaaa

SEQ ID NO: 201849 - DNA, 99 bp, Homo sapiens
  chr9:114361815-114361914
  hyper
caggaagaaagcaagggggttagaggagggagaaaagggaaggaaagaaagcaggaggtctacttacaggagcccgaaggttccactgcctggggaagg

SEQ ID NO: 201850 - DNA, 232 bp, Homo sapiens
  chr9:115774339-115774571
  hyper
tctcccgacccgcccgaatggttgtgtttgaaggggacctctctccccacctcccacacgagtgcaagggtcgggaaagaaaaagctcacctgctccaccgaaaaataaagagcacggtcgggcgatgtggttcccaagccaggaagtacgcctgcgcacgcggccgccaggaactacatttcccagcatcttctgcaaagcgccctcttgagctgcgtctttcaccggtgt

SEQ ID NO: 201851 - DNA, 201 bp, Homo sapiens
  chr9:116111661-116111862
  hyper
tacgcatacaatcgcgatttcattcaacaaggaatttaaagagacctgctgccccgggcgggatgggagcgcgggttgggtgggaggaggcgcagctgcggggcgcgctggcgcaccgggagggccgggggcggggtcagccaggccccgcccgccgccacctgcgacaggtggagcgcacggggcgggcgcacggccatg

SEQ ID NO: 201852 - DNA, 211 bp, Homo sapiens
  chr9:116638746-116638957
  hyper
gcccggggcgctgcgccacttcattgcaagatttgcaaaatgcaaagtgcctgggcacgtttgcgggctttttgtgggcgcaatcgggagggtcggggtccggagagcacccccccgggcgctgcggggtgcgaggagggtgggggtgacgagggggtcttttggggcccccacccagcgccccctccggccccgggctcggaccggagcc

SEQ ID NO: 201853 - DNA, 94 bp, Homo sapiens
  chr9:116860421-116860515
  hyper
ggtcttcccagagcccgtctggccaaaggtgaaaacagtgcaggagaaactgcgggcggcaagggcgtggctggactccggcggctacccgggg

SEQ ID NO: 201854 - DNA, 299 bp, Homo sapiens
  chr9:116918463-116918762
  hyper
gggcgagagttggcgaacgctgcccgccctgccgcgcctggcccggctgcccgatcccgttggggcgggggcagagccagcccgggggtcgggggtgggggtgggtggtggcgcctggagcggccggcggggtgcggaggggggctttttggatgcttgggggaggaggggggtctccgtttggggccgtctcggtgtgttccggtgtctcagtgtctgcaggtcccaagcctgtacgtctccgtttctatctgttcttgtgaaattgtccgcaagtttctaggtcaccaggtctcggg

SEQ ID NO: 201855 - DNA, 157 bp, Homo sapiens
  chr9:117268030-117268187
  hyper
ccgacaccaggatcgctttggagtaattagccggctagctaattcacaattcggggggaaatcgtcaagttttttgtttgtttgatttttgcttccaaaatactgggcacttcagtctcggttttcttccttacaatgtggcgctcccctcctgcac

SEQ ID NO: 201856 - DNA, 109 bp, Homo sapiens
  chr9:118917079-118917188
  hyper
cctgggaggaacctggggagccctcctggcggccccgcggaccctcggccagtgagggctggttcccggagcctagggcacgtaacccgtgctccgaatggtcagatgc

SEQ ID NO: 201857 - DNA, 336 bp, Homo sapiens
  chr9:120176358-120176694
  hyper
ggggcggtgacggcgggtggccagtgacggtacccggagaagtgggaggctcgacctgaaactggcttaggatctgggatgctccggcccctagccagagcaccttcagtgaatggggtctccggcttccgggatggatcaagcagagctccaggtcgggactgagaggcagaggggcaggttcccactgcgggagggttggcacgcccccaggctcccgccgcgcgctctccaggacctcctcccacatgctcgtttccaaccacctgtgcgacctctgggcccctcctctaccctctgccaaccccactcggggcagccccgggcagggatccc

SEQ ID NO: 201858 - DNA, 996 bp, Homo sapiens
  chr9:124131788-124132784
  hyper
cgaggaacaaaagccgggaaggagagttctccaaaacgcagaggaaagcggagggggaaaaatggggcagaaagtggagctagaaagagaggtaagaagaaagccagagagacttcttccttctgcaaatcggtctaagtttcgggaggtgggattgggggaggagggggttcaccctggggccaggccagggctgggtggaggaggcggccttcgagagagtgagtcgggaaagaaggggagtgggcaaagggtgagatgtggggtcccggtccccgcctcgctggctgccagttccctctgcgtttcctagtccgcgtgcgtgacacgagatagtgcagccctggcatggggcttggcatctggcggccgcgagataaccagggcccgtgcgatgggaaacgtgccgttggcagcccgccacccctccatcgtgacctcagtctgccaaacagggttcgtgatgctcagtttactagggaggagccgcggctttgagatctcgcccagcccgaagcagcggagactggccaggagcccggctgtcagacctcggagcgcacgctgcgggcgggggctcggtccacgggggagggtcaggggacgcgggactcacccttgaaggagtcggggagccgctgggcttcggagtcccgtgtgtgccgcttctcggccatgctgcccgagacgcagtcgcactcccccgtcctcgttgccaaacccggagccgccgggaatgccctgaggagccagaggcacaagacccagattgccgccccgcccccaatcgaggtcccgccctcgtgagagttggccaatcaacgcccaggatcgaggaggacccacctcccaatccccgccctcctgtccctccacggcgcgactgcttcgcagtcacttcccgctagttctgtgggctgaggggcgtggcctgaggggcgtggcctgaggggcgagagcccccaaggctgtgggtatgaggccggggccctgcac

SEQ ID NO: 201859 - DNA, 45 bp, Homo sapiens
  chr9:124262330-124262375
  hyper
caggaaccccgggcgttggaggatggggtggggtctgtgctgtgc

SEQ ID NO: 201860 - DNA, 253 bp, Homo sapiens
  chr9:124361930-124362183
  hyper
cctgcagccgcccggcgacaccgcgactccgccgcttcgcaaccctggccctgggccgctcaggctccggagcctttgggatggcagcgcccagcggcccggcccgcgcgtagaggtaaaagctgggggccgcggctcaggtggaggggggctcggtggtttgccgggatccgagcggcatcccgggttcgagaggatccgggggctccgatgcgaggtgttggggtaggggactgaggaatgggcggcgact

SEQ ID NO: 201861 - DNA, 35 bp, Homo sapiens
  chr9:124362324-124362359
  hyper
agagtacaatacaggggatcgcgaggaaggcgccc

SEQ ID NO: 201862 - DNA, 102 bp, Homo sapiens
  chr9:124990418-124990520
  hyper
ttgaagcagctatattgacacggattcaggcgcctttcgagggccagtcggagggaaacccggagcaaaaagagagcgagatcggggcgaaacgggaccaaa

SEQ ID NO: 201863 - DNA, 150 bp, Homo sapiens
  chr9:124991012-124991162
  hyper
agtacatgggccggggaacctcgggctcagcgggcgcgcagcgcggagagctgcgccgagggggaccacagccgcagtgggagcagaggctgctgcaggagcaggaggagagccgaggcgccggccccgccgccccgggcccggcctcag

SEQ ID NO: 201864 - DNA, 246 bp, Homo sapiens
  chr9:126759127-126759373
  hyper
gtcagccctggaaagtttcccgtgtgaagtttaaaagcgcctgtgctgaagaggccgactttgaagcagcttgccggggccccttggcaggctcctgcgagtcagagggccggcctcgcctcagatccgctgcgcctgcctccgcagggctgggaaatgggaattgtttttaagttgaaaaattactcatggagctcactcctttgccactgctcttcttttgttctcagtcgtcgccttcctctg

SEQ ID NO: 201865 - DNA, 268 bp, Homo sapiens
  chr9:126771808-126772076
  hyper
cctcccgagagtggagttgcaccaaggacaaacactctagcgtcattacaaattttttctgccccttgggcgacctccagatgaaccctggtgactctcagattggattttcattccttactttctttgaaagaaagtgccccagatgcgtcaataaaacatgcctatgtattcgtgtaggcgtccgcatgcctgcgcgccggccgtgtgcaggcgccgaagcacacgtctgtgtgaacacacgggcacgcgcgtctttgggtttagt

SEQ ID NO: 201866 - DNA, 60 bp, Homo sapiens
  chr9:126773978-126774038
  hyper
tcctcctcttttttctcctcctccacctcctcctccgcctcctcctcctcctcttcctcc

SEQ ID NO: 201867 - DNA, 249 bp, Homo sapiens
  chr9:126780315-126780564
  hyper
ccagctttttgtgtgtgtgtgcctggcggcgtaattactgatttgattccaatccattatttagacaattgaacctacaatctcgtctttagtaaaatgaggcgaagtcagatttgattacaggttcagtcccagcgacaagagctcgaaacccgatgggttaataacagatcacgagtaaattattcatgattttacgagctctttagctccattgaatcggcctaattgagaggaaaaaaaaaaaaa

SEQ ID NO: 201868 - DNA, 53 bp, Homo sapiens
  chr9:126783540-126783593
  hyper
gcagctcgcgcaaaagacgggcctcaccaagcgggtcctccaggtcagccagg

SEQ ID NO: 201869 - DNA, 217 bp, Homo sapiens
  chr9:126784840-126785057
  hyper
gaggtggtgggattcgagtccaggccagtctgacccaccctccagccccaggtctctgggattgagggctgggaggtgacacagagggatgacggagacggagggctgcgcagctgccctgagaaagttcttgtgagtttgtcagaaacaaaaaacaaacaaaaaaatgccctctgtggggcgggtggaggctgtgacgcggcgcaactgcagctgc

SEQ ID NO: 201870 - DNA, 42 bp, Homo sapiens
  chr9:126785351-126785393
  hyper
tggggttaggtcaaggaccctctttggcgtcccctcccttca

SEQ ID NO: 201871 - DNA, 39 bp, Homo sapiens
  chr9:126872740-126872779
  hyper
gagattgtaatcctttatcagcaccgcggacagcatcca

SEQ ID NO: 201872 - DNA, 171 bp, Homo sapiens
  chr9:127005138-127005309
  hyper
gcccccagaggaaccgctgccttcatactcctccagatggtctaagccctcctgcctcccacccctcccacacacgaatgcaggaagtcctctgagagcctgctggatcagtttcctttccgcttcctttctcttcctctccggtgagggctgggacgcagctggcggagt

SEQ ID NO: 201873 - DNA, 360 bp, Homo sapiens
  chr9:127532012-127532372
  hyper
aggtggaaaacagggcaaataaataaatcgggtttgccgccggagcgtttgccggccggtgcgagcaccctttgtaatgcaggcctcccggggcgatcgcctgcgctaattgctccagggcgctttccaagttcaaaagttcaccttttacgacctcacaaaagctcctaacacgttaccaataaaaacattccgcggcaaacaccgaggaggaaaatatcaaacagatacaaataaaacaccccgcagggggagggagcgaaggggaggagggcgaggaagccccgaggaacctgaggacccggcccgggcgagggggcgagggacgagcggtaggaagggccgggccaggtgagggat

SEQ ID NO: 201874 - DNA, 127 bp, Homo sapiens
  chr9:127534416-127534543
  hyper
ccggaagcaaaatcccgaattttgcagcggctcccggccgaatccacccgctgcggccaccaggtggcgcgcggccaccggtcactaggcccgccggggtgtccgtcttcggcgaccccatcgggaa

SEQ ID NO: 201875 - DNA, 214 bp, Homo sapiens
  chr9:127962982-127963196
  hyper
ggccttccctggctccgtcccggccactttgaccgaatcagcctgttctttcccgaccccgtctcctatcccctagaactgccacgtggggatgagatttgctgggctggtagcggcggctgctgcgggaggtcccgcccacgtgaagccagcctaactgagctctggactttggggacagctgtcagtggcctaggccgcaggtgagatttat

SEQ ID NO: 201876 - DNA, 320 bp, Homo sapiens
  chr9:129372402-129372722
  hyper
tctggtccccccaatctggccgcctgtcaaggatctgaggcttggcagggctgatggcgccgggacagcgtgggacggcccaggctctctgcagccctggttctccgggcagagtggaatagagacactcgcagctcctggtccttgccttcccactcctccgaacccggccaggactgcaccctgcgctgccccagatccgtgcctccagctggaatggtaaactgggagggggcagtgtggctctggctctggtcagaagcacaaaacaatccagacagcccggagcgggatggacagggctgggtggggtgggggag

SEQ ID NO: 201877 - DNA, 225 bp, Homo sapiens
  chr9:129373385-129373610
  hyper
gtgtgtgtgtgtgtagggggaatgaatggacagcggggaaggcatgcagaggggcccaaggggtgtggactcagcagccccaccccagaccagagaaggcagccaggctctggcgtccaccgagccagcgcccctatctgggcgcgggccgcatggcggcagaccaccctatatccgccttggtggcgtgggatatgactggcaggagcgcggaagaggcgctga

SEQ ID NO: 201878 - DNA, 67 bp, Homo sapiens
  chr9:129373640-129373707
  hyper
cggcacggagggggtacttcccacaagtcctcctgccttgagaccaggccttcgagtggtccgggga

SEQ ID NO: 201879 - DNA, 62 bp, Homo sapiens
  chr9:129375663-129375725
  hyper
ggaccaagcggccccgagcaggcgccgccgcccgggggactccgactcagcccccgcgacct

SEQ ID NO: 201880 - DNA, 81 bp, Homo sapiens
  chr9:129386782-129386863
  hyper
gacccttttcccgcctgagaaacgtgcgaagtccctcagctcctggaggcaaccaggcggcccgaaagccgagttcccggc

SEQ ID NO: 201881 - DNA, 31 bp, Homo sapiens
  chr9:129387403-129387434
  hyper
agaaaagaagccgagcaccttacaaccgtgt

SEQ ID NO: 201882 - DNA, 51 bp, Homo sapiens
  chr9:129387464-129387515
  hyper
gagggggctccggccctgtagccccctgacgcttttcgtttccgagcgcgc

SEQ ID NO: 201883 - DNA, 155 bp, Homo sapiens
  chr9:129400693-129400848
  hyper
ctgccactggctgccctgcccgcagccctgccaccctggggagctgaccccgaccccacccggccccccacgtcccagctcgggggctcacaaagggagaggagggaagagcaaaatcgcagagatttgtcttgtctggggctgacagcggagcg

SEQ ID NO: 201884 - DNA, 389 bp, Homo sapiens
  chr9:130159087-130159476
  hyper
agaggaggtgccagaaaaaaaactcctccctccaacctcattggccagctcagttctgaggcagctctctggccccgtctatgggctcgcactacactccaattgggtggttgttctcccagacggaaactccgccccacctgtaccttggaccgctccgccctaggggcggttccagcgcgcttcgctaatcggttctatgctcccattggtctgctttaatgtgaagggcgggtcctagctgattcgctagccccgccttgcgttcctattggctgctcctgctctgcggttccgatcccgcccagcaccgtcccccaccccccgccgcccattggctgcgagaggccggtgcgggccgcactcgcagggcccgtggcggttcaggc

SEQ ID NO: 201885 - DNA, 473 bp, Homo sapiens
  chr9:130330786-130331259
  hyper
acccctgccccagctcggccaggggtcgtgggctgggggtccgccaagcccgggctccgaaggggttccgggagagaaggagttccgagtccccttgagccgggaaaggtggcgctcagaagagcgcgggaaggggcgcccaggctcagagggaacgagctcggacgcggggcacgctccctggcagctcccaccggcccggcctgactcccccgagcccccggccccggcgccaactgctggccggggcgggggcgtggtccgggggttccggcaggcccctgggcgcgcgtggcgcggcgcgaccctcacctgcgatgtgctggcgccgggcgtcgtccaggtgcgtggacagcacgtcccccatggccaggaggtgtcgcggcccgatccggccgacgccgccgctgttgcccgcgctgctcaggcggacgccgctggcgccatggagcccggcccgccctgcttccccc

SEQ ID NO: 201886 - DNA, 210 bp, Homo sapiens
  chr9:130639768-130639978
  hyper
acggatcacaaccacggatacacagccgcacagcccccagggagccccgcaccagcacgcccccgccctcccccggtgccgctgcccctccccgcagaggcgcccccccagacacgcgcgggcacgcactgacctggggaggggtgcgggtgggcgccggggccagtgcgtgccctgcccgtcctcgcggcggccggcaaaggcgactat

SEQ ID NO: 201887 - DNA, 124 bp, Homo sapiens
  chr9:130640012-130640136
  hyper
cggcgttcccgaaggcagggagggcgggaaggagggagggagagcggaccagggaccgggaagcggggcgggaccgagcccgagcccgggtgcgcggcgacaccgcacccggcaccgtgtgccc

SEQ ID NO: 201888 - DNA, 139 bp, Homo sapiens
  chr9:130661051-130661190
  hyper
ctggaggatccctctcggctggaacgggtcagaggccatggagtgtgtgcccaggacgtggctcggcacaggcaccagggcgggggtctaggggtgccggcctgttggggagcggcttgctcacgctggggaggcggca

SEQ ID NO: 201889 - DNA, 497 bp, Homo sapiens
  chr9:130674526-130675023
  hyper
caggcaggccccaggctcaccggttcttgcccgtctcgtcctggaagatctggtcgcagtaggccatcatgcgctccgtgaaggtgtacacctgcaggccggggtacatcctggtgagctgcagcagcgtgcggtaggtgcggccgccgagcacccggtccatgtgcctgccctggccccacaccatgtagagcgtgtctcgggccttctggaagtagtgtgaatagttgcgcagcagcagcggcacgcttgtgtgtgagacgacacgcagggtgctgcgctggcccacatccgcctcaaagcccacggtgggcgcctggttcatgcggaacacgcactcggcactgtcgatctcagcacccaggcctgagcccagcatttggccggagctggacaccacggcacagctgcggcagggctcgcggaccagcggctgcagggcaggcagggagaaagagacagagaggcatgaacacgcagcttacaccccctgcagc

SEQ ID NO: 201890 - DNA, 376 bp, Homo sapiens
  chr9:130679368-130679744
  hyper
gggggcggggcctgcgcgccgcaggcggatcctacgagcgcggcctgcgcgacctggggagggctctgcgcggccgggacggggcgggacgtgaatggctggcggcgaggcctccagctaggggcggggcctcagggccgggggcggggcttcagagccggggcggagtctgagtaccagcatctcccttttcggtcctgccgaatttccagcaggctcctgcctgggcgaggctgtcgggccgcaggggaaagagacctagagggtgtcgggggccaccaggcagtggcggcctggctgtccggacttgagtgtctccatttctgaaatggtggttggggagggaaattaagcagggcttcgggtcaggcagccc

SEQ ID NO: 201891 - DNA, 146 bp, Homo sapiens
  chr9:131127341-131127487
  hyper
ctgatctcagcttgacacccaattagcacaagaatgggaggaggaagcctgcgagaggcgcctcccagcctcccggggcgcgcgaggggagcaggcgggaagacaaaggacagcaggcaggggggcacccgcgccctcgcctcccc

SEQ ID NO: 201892 - DNA, 200 bp, Homo sapiens
  chr9:131183034-131183234
  hyper
gagggtgcactgccccgccctctccgggtctgcctcggccccgcccgggccccaggccccgccccctcccctcggccggcccgagagctccgggggccgctgcagccgcccaagcgcccgccatgcgcgctgcccgcgccgcgccgctgctccagctgctgctcctgctggggccgtggctggaggctgcgggcgttgcg

SEQ ID NO: 201893 - DNA, 89 bp, Homo sapiens
  chr9:131219288-131219377
  hyper
agcggttctcacccgccctctccgcacgtccgccggcgcctcaggtttcccccggtagccaccggcagtcctccgcgtgggacccgggc

SEQ ID NO: 201894 - DNA, 360 bp, Homo sapiens
  chr9:131709430-131709790
  hyper
actgcgagggccacggcgcaccacgagtatcggtcccatacggttgcgtggatgctcagcaccactgcaaacactactgccgcctctgccagcaccgatccactcagcggagccccaggccccggggccggagatgggcactctcgggtcatatctctagacctggggcttcacggaggccggggcgactacggacgccctagacttcgggcccctcagccccgtcaagcagagggaggcactttcacccggccagcaaccttctccctccgttctccagcagcgaggagggaactccaccgcaggtcacttctgcggcctgggagctggcgcccggccaccccccacagcctccaacct

SEQ ID NO: 201895 - DNA, 600 bp, Homo sapiens
  chr9:131843032-131843632
  hyper
tcccaccaaagttcaacacgcccccaaagccagcgcctgattggcccgccctgcccacaagctgaggcagcctcaccttctgattggctgttatgctccctgttcggtgctggaaccctccccttctctgattggccagatgcctacctgcgctcgccccagattgggcgccagctggggcggctcgttggctcccaggggccccgctctctgattcgccgctcgggccagcccccacggcctgcacgctgaatggctgcgccgctacctatattggcctccgattgggtgcacggcgcctccccggcgtgataggtcaggaccaccgcccccctggctccccattggctgctcgaagaagcccggtctccgggtaagatggcagcggacggacagtgctcgctccccgcttcatggcggccggtgaccctcacccacgtcgaatatcctgcaggtaaaaggcggtcccggctccaaggacgccttcccagggacggcctctcagtcccgggcgctccggcctgctcgagcccgcggagggggcgccgggggaccggggtgggaactgtcaaatagtgaaccacggaggggctcggccgg

SEQ ID NO: 201896 - DNA, 266 bp, Homo sapiens
  chr9:132145495-132145761
  hyper
aggactgtcacttggaagttccttctccaagagatggctattgccaaagtcatctgtgcagtgaccactgcagggcctgggcgctcccgggagccgcagcgcagggacagtccgtgcagacgggtggcgggggaggcgggggagggcaaaggcctccactctgcaggtagcccgggcctggtgggcgaaaggactcaaacgccagagctctctgaccctcggccgccagggttcaaggctgggcccagccgcgctttgccggggtc

SEQ ID NO: 201897 - DNA, 180 bp, Homo sapiens
  chr9:132176628-132176808
  hyper
gtccttttgttcacgtatccccctccccggattgaaccagcaaagagcacaaagcagaaaatacatccttgccgcccgcaggctccctcatcccgcagaaaactctgaaacagtccacacccgtcccaaagttgagagaaacctggacgtttcataaacaaaacccgccctccagcagcg

SEQ ID NO: 201898 - DNA, 200 bp, Homo sapiens
  chr9:132244499-132244699
  hyper
cctcaggttcccccgcgctcctcccggaccccaccccgaggcagctttctcacaacgggatcctccccgggcggcgtggggacgcctcccgaccccgaggcccggcaggagagccgccaccgcggccgggtggtctccgcgtcgcatggcccctgccggcccccccgcccatggcagctacataattaattcgcccataa

SEQ ID NO: 201899 - DNA, 554 bp, Homo sapiens
  chr9:132244741-132245295
  hyper
tgggatccccgttagggttaggggcgtggggggtcgggggccgcggggctgtgcgtgccggggcgcacggttttgctccgcgggcctctctcgctccctcgcgccggctttttccctttttctctttcctttttttctttcctggagcggagcccggcgccaggagtctggaaccagcttgacaggcttttgagttatggaggggggagggggagaggcgggcggcggggagggggaagggagggcgccgccgcggcgtgggggcggggccggctccccggtttggagactcgccccgactttggggtccgccagcggcggccgggcggagggcgggggaccgcaatcgtggggggagtcaccccgcggggcccggcgggcgaaacgggccgggcttcagagccgcagtaaatgaggcccggggcgggcgggggtggacacggcctcggggccacggcctcccccgccgagcaaggcattcctttccgctgaactgggcgcccgggcccgcgccgcgccctgcacgcctcgcgcccggcgatcgggcccagggc

SEQ ID NO: 201900 - DNA, 272 bp, Homo sapiens
  chr9:132245345-132245617
  hyper
cttcccaggagctcggctccccgggatggaagggactgatacccagttaatgggcgtggagcctgagcccctgagggtcgtcgctaacgggggtcgctcagcagggccggcctccgctgcctgcccggggtgtctaatcacctctccgatcctttgcccggatctgagcttcgtcattcacgcccctcctccctggcgactttgggcctggtgacagtcccccgaccctcgcagagccaggggcacagtaggcgccttagccactggcagaa

SEQ ID NO: 201901 - DNA, 707 bp, Homo sapiens
  chr9:132258223-132258930
  hyper
cagcgcctgaaagccgcttgggggccgcggaggcaggtggcatggccagggcagagtccgcggggcggaaagggttaacgggctccgccgcattgggctgtccttcaaggggggagccagccaatgagcgcgcgccgcgatgaggtaatgccgggaccacgcggagtgggcggggctgacggggaccccgcagagctcagcgcttcttctctccccacctacccctcacctttgaccttgatgtacaccctcccctcccccaaccttacccctgcagaggcgcccgaactgaaagtcggctgcagggccgcgggcctcccttagtctgggacaggaactgagagacgtcccggcctcagtcacaccctctgggcctcagtttccctttctgcaagaagcagagtgggtgatcgctaaagaccctaccagctgtggacgtccttggatcccaggacagttttcagcccttccctgcccttggcccgaactttaacggtcccagccccggcttcccctcaggcggtgcccagtgccaggacctaggagtccctcgggccacggggagagagcctcaccggcccagccacgccctccatgtgaccccgacccatcccttgggtgtcgcacctggcgcgcccaccgaggccactaagctctgctagctgcaccagcagcaggacctgccggcgtggcggtcagaagtcaac

SEQ ID NO: 201902 - DNA, 371 bp, Homo sapiens
  chr9:132330860-132331231
  hyper
gaaactgaggctcagggagatctggaaaccttcccgggcagctgggctccgaacccagggctgcgagcacaagggctggctcccgcccccggccctggtccctccttccccggggcatggcccggccgtgccaggcgctcggtgacagcccccgcgggggaggccgggctgggaaaggagagggcagcgggcgggggcgcctggccgcgcggggtcggccgcgggtcgatacggcggcaggatgaatgggagaggggagcgcgggcgggaggaggagggaggaggagggggaggagggagaggccggagcagggggagggcccgcccccgccgccccccaggcccccgccccgcccagcgggcttggccgg

SEQ ID NO: 201903 - DNA, 174 bp, Homo sapiens
  chr9:132373579-132373753
  hyper
cttcagggaaagaggcggcggctcaaactttctccagggggctggaacgcaggtgtggcaggggcaaacctggtgggcagggtctgccaccttgtctttcgccacctcctgatgcagatttgaacatccaccccctcatccccagactaggagagaaaccgtgggccccagccc

SEQ ID NO: 201904 - DNA, 121 bp, Homo sapiens
  chr9:132804284-132804405
  hyper
gctccttcccgggccgccgcactgcccatcccctgcccagtgatttccccaggaatccggggacggcaggaaaagagctccatccacagccagcccctcgcctttccggggacggccctca

SEQ ID NO: 201905 - DNA, 207 bp, Homo sapiens
  chr9:132804455-132804662
  hyper
gcaaggcgcccctcaccgccaactttccccactggaaactattctccgagcaaccgttaaagatcattgaccccgcgaacgcctcttcctgaggtagatcacgtaagatctctccctaactcccactttcccctccagaccagacgtcgcagtgcccacatcccactcaggattgagctaccccgaaagaacaagtgcgcccggagc

SEQ ID NO: 201906 - DNA, 103 bp, Homo sapiens
  chr9:132804693-132804796
  hyper
cgaagaccgcactctcgccccagcaccccaaaacccgacccccggcgctcgccccggccgccccgctcccggggaagtgcccgatccgccagcgcctccgcgg

SEQ ID NO: 201907 - DNA, 290 bp, Homo sapiens
  chr9:132805028-132805318
  hyper
cgaaggacaagccggcccgcacctcctgctcgggccaaggcggacgaggggcattggaaccccgcctcctccccaggccgcgaggaccccgaccagcgcgccctcgcctccgcccagcagcgcggcccgcgccccctccccaggccgcggggaaacgcagcgcgcgccccgcatctgcccgcgggcccagcccctcactcacccagagctcggtgccccagctcatggtgcaggggacgcgaaggggcgctccgcgcggcgggcgcggctctctggtccccctccccggc

SEQ ID NO: 201908 - DNA, 292 bp, Homo sapiens
  chr9:132805445-132805737
  hyper
tggcccgaggaagcagcagccgcggccgccgcagcgcccgcccgccctacacccggagagcgggggaggggcgggaggggaggggcggggccggtctgacagctcgcgcacgcgcgcccgccccaccccggcccggccccctcccccgggctcccccggccgggtccgcgtcgccctggggtccggaaggacgcggagggaggtgtgagggacggcgggacccggatccctaggactccccctgccaatctggtaatgacttcttagtgaccactgtctgctcgcagtacta

SEQ ID NO: 201909 - DNA, 55 bp, Homo sapiens
  chr9:132805893-132805948
  hyper
ccaccgcccgagggaagcccgagagtcccgcaggctggcgcggtgggagtggggc

SEQ ID NO: 201910 - DNA, 197 bp, Homo sapiens
  chr9:133569054-133569251
  hyper
gttctcattggcagctgctctgagtccccgcccttccccgcccctccgaacgcggcctggagttgtggagtcggatatcgcagctcccgactgagctgcgcctgcgcaactcattggcgccaagatggcgatggagatgaggcttccagtggctcgcaagcctcttagcgagagactgggccgcgacactaagaaac

SEQ ID NO: 201911 - DNA, 1392 bp, Homo sapiens
  chr9:133710035-133711427
  hyper
tctcactctgaactcacacccgtctgttcgcagcctgacctcatatcctggtctggatgtgcggcctcaccggggtgtcgtgcgcacgtgtggttgtcctgtgggtgccagctctgacttcctccccagacacccactgcctcagccttaatcacaggacgcgcgttgagtagaaatgagaccagttagtattggtaactgcagaggaatatgcattttcaccagcgttctcgggtcagagggtttgcctggcaccgcgtactgggaaactcgccaaaagcggtgcaggttggagacgccccaggccgcggtggagttgcgcgcggcttctaaagtggagtggagcaggcctgcaccctccccgccggggctgggacggcgcttccaggcggagaaagacctccgcgggccgcgcgcggccttccccctgcgaggatcgccattggcccgggttggctttggaaagcggcggtggctttgggccgggctcggcctcgggaacgccaggggcccctgggtgcggacgggcgcggccaggagggggttaaggcgcaggcggcggcggggcgggggcgggcctggcgggcgccctctccgggccctttgttaacaggcgcgtcccggccaggcggagacgcggccgcggccatgggcgggcgcgggcgcgcggggcggcggtgagggcggctggcggggccgggggcgccgggggggcgcgcgggccgagccgggcctgagccgggcccgcggaccgagctgggagaggggttccggcccccgacgtgctggcgcgggaaaatgttggagatctgcctgaagctggtgggctgcaaatccaagaaggggctgtcctcgtcctccagctgttatctggaaggtaagcccgggccgcacgggttgggctgagtagccgcgcgccctcccgctgctgctgggcccttcctaggcctcgccgcccgcgcgctcccgcctgcgccctccccgggtcttgtcttttttttctttcttccctcttctcttctcttctcttcagttctcttatattctgtctctctttctttctctctgtgtctgtctcttttctcttctcttgtctctctctttttctctctctctgtctctttctctttctcgcgatggcccctaggcgccgccggcggagcgtggcccccagccccggcaccagccccggtagagccacgccggatggtgacggcggcgtccggggccccacagtgcgggctcccccgaaaaagtttgagaaagccaactcgccaggccttaacatccctgggatcccacgttgtggaatttccaccgttaattgggactgtgtgttaaaaagatcgacccgtgtttgtgaaaacatgcgatttccattaagcatcatgt

SEQ ID NO: 201912 - DNA, 180 bp, Homo sapiens
  chr9:133972454-133972634
  hyper
gggttgcaagttgttactcttgcaactggggactggggaggtggggccgggtcaggagctcggatgccagccggctcgtggctccccgcaagcccgcttgggagcagcccaaggatttggcgcgggaagggccctaggccagtgatctctccagctcagaacacaggctccgggtcattt

SEQ ID NO: 201913 - DNA, 173 bp, Homo sapiens
  chr9:134158023-134158196
  hyper
tccctcgctgcccaccgagggtcccaggtagggctcctggcctcgcactccgccccccgaacccccgcaacaccctccactccccctctggccgggcttccccatcctcctggaggtttctaggagcctccagccaccgccctgagcgcctaaggtcttccccgcccggggcg

SEQ ID NO: 201914 - DNA, 338 bp, Homo sapiens
  chr9:134421967-134422305
  hyper
tgcaagcagctccgggagatgctggagcgctggcccctccccgccgccccgccctccaggactcccccccagaccctcaagcacttgcccagcggggagcccggaccccccttcccagctggaatgcctggcggaggctccggtgtcaagagcctgagaacctgagaacccacccgaggcccccgccaggcagcgccgccagcagatttatttactctggggccctatctccgcgccatcgggccagatatttgccctggcgggatccagggaaactgcggtttttgttatgatagctggggcagggacaccatcccggagagacctgtttagagtgg

SEQ ID NO: 201915 - DNA, 120 bp, Homo sapiens
  chr9:135037440-135037560
  hyper
ccccgatctgacggcggcggcggcggcggccacagcggcgggagcggcgcggggaaggagcagcggctcgcagccctcggcccgcgcccccacccagcgccagcccgaggggggaggcgc

SEQ ID NO: 201916 - DNA, 221 bp, Homo sapiens
  chr9:135117799-135118020
  hyper
gtgagccagagggtcgggagaaacgctgctcgccccacaccccgtcctgcctcccaccacacttacacacacgggactgtggccgacaccccctggcctgtgccaggctcacgggcggcggcggaccccgacctccagttgcctacaattccagtcgctgacttggtcctgttttctattctttatttttcctgcaacccaccagaccccaggcctcaccg

SEQ ID NO: 201917 - DNA, 55 bp, Homo sapiens
  chr9:135118060-135118115
  hyper
gagagaaggaaggggtggggggcctggaaacttcgttctgtagagaactattttt

SEQ ID NO: 201918 - DNA, 644 bp, Homo sapiens
  chr9:135286324-135286968
  hyper
agcatcacgtcgaatgttcatttccgttcgatcatactaatttcttacccaaattacaaccctaagagaaaaaaagcataatctttggcctaggaggctccgcagacaagaatgagggagctgcggtttcgggctggatcactttcccttccattacacttccctcctccccacctttagcctcgcttcccgctgatgggaaaccaacactgctgtggcggccacaccttcccgggggccactggagaagtcaggctgaggcttgggggtcagggagcaagcctcgaggcgaatttatcttgcgccgctggagggcagtgcgcctttaaaaatgcgccccgcgtcccaggtgcgggagtggaaggcgcaggtggtaaccgtggattcaacaacaattatttgtgtgaccgccaggcgctgagtagagcccagaggtggtggtggcggtttgtttttgttttggggaaaagggaacccgtgctagaattaactgagttaattggctcctggcaaaacattgactccctcctcttgccttccctaaactcggtcctgagaggaggaaggatactgcctaggcgcaggctgcacctgggggaggctggcttcccacactcgtgcctttccatcgaataggctccttt

SEQ ID NO: 201919 - DNA, 227 bp, Homo sapiens
  chr9:135644985-135645212
  hyper
tctaaaatggcttttcaaggcggtcatgagcttgcctctaacccagcaaagcgtgtggaagaaacatcggcagtgagggctcccatctctcatttctcaaagagccgagactttcagcgaggccacttgccattcctggtaggtaatcagatcgctgttaattaataaagctgtcaggtggctcgtcctctctggtcattagtatcctttcagaaagagaatcctgc

SEQ ID NO: 201920 - DNA, 473 bp, Homo sapiens
  chr9:135645250-135645723
  hyper
aacttaatgctatgcaaatgagaggctcttctcatcattagcttatagccacgaatgttaatcgcataattgggtcttcaacagggtaattagacacgatttcctccattagtcttacaaggctaattattgttgagcggagagggggactgctcccagggctccaggcgaagaggggcatctggttaaagcgaattcgggcgcatcgtccgccaggtaaaaacagcagtcgcgatccattgtcacagcccactgtccccacccatcgtggggaccgggctagggagggaaacggaaccaggggaaggcctgggggggtcacactcgtgccccttgcctgggtcctgggatgcagacaacgtggcatttaaaagtgaaagcggaaacaaacagcagccccgccagcccgggcccggaggcccagccccgcgccaagggccacccctcggcgcgctcagcttccctgggcctct

SEQ ID NO: 201921 - DNA, 180 bp, Homo sapiens
  chr9:135906376-135906556
  hyper
gggccctgccagacgcacagggatggcggcggaggcggccgatttggggctgggggccgccgtccccgtggagctgaggcgggagcgacgcatggtgtgcgtggagtacccgggagtggtgcgtgatgtggctaagatgctgccgactctgggcggcgaggaaggcgtctcccgggtaag

SEQ ID NO: 201922 - DNA, 469 bp, Homo sapiens
  chr9:136399643-136400112
  hyper
gccgccgccggcagcagccaacaggcagctgggccggcctggccgggctccagaggcgcagagcgggttaaagtgtgcgccaggccggccggcgcgggcgggggagcggcctggtgggaagtgtgagtgttcctccccgtctgcctgacagctataaaggcggccgccggcgcagagccgccactgggctgcgcccctcccgggaaccccctctcttggatgctctttgaagtgggagagggaggcggcgcgggggaggaggggaaggggagagggaggccgggccgcagcctctgcactcacgccgcccccgcacgcacagcgcacctggcgccgtctgccctccgcagcgctcgcccctttctctgggaggacaacctgctgacccgaagccaggtaggccacctcgtccccgtccccctcacgttgcagcgtccaccaggccagcccactgctcagagtggggctg

SEQ ID NO: 201923 - DNA, 115 bp, Homo sapiens
  chr9:136856335-136856450
  hyper
cccggtaaggattccgcgacccccggagaacaggacggaagcctcgattctctcaagtcttagccaagttccctcttaagaggccaagaaaagcagcttcgttcggctgggcagg

SEQ ID NO: 201924 - DNA, 300 bp, Homo sapiens
  chr9:137533160-137533460
  hyper
ggaagtttagtctccacccagaagaggagctctgaactcctccacgttaaagaaaaagttaggcggggtaaactgcaactttctttttaacccgaagtgatcaaacctcggggcccctctgcactggttcttggagcatggccaggtgcgggcacctggggtgggaacagtggggggaccagggtgggcccctgggctccgaggccgccccaggcccgcccgcctaccggctctcagagaaagaacagggggccgcgcccgccccacgtccgctccgccccgggccagccccttcctcgc

SEQ ID NO: 201925 - DNA, 62 bp, Homo sapiens
  chr9:137967132-137967194
  hyper
cgggagagagcgaggcgcgcgggtccctctgcgccacccccgcccccgccccttccgagcaa

SEQ ID NO: 201926 - DNA, 113 bp, Homo sapiens
  chr9:138986159-138986272
  hyper
cccacaggtttaagcggctccacgacgagagtccaagaccaaacttcccccagagcctggcagaggggctgggaggtgacctctgacctccgaccccacacgatcccagcaag

SEQ ID NO: 201927 - DNA, 824 bp, Homo sapiens
  chr9:138986333-138987157
  hyper
gccccgggctccgctgagtttcttagagaaggagctggggccccccgacctcagctccgcagaggcacagaagctggcaagaggcagagccccctccccctgcggccggaccccagtttctccccaggctggggcccgagtgggggaggcgcgggaggcggtgacgacccacgaacgggcccacctggaccgggagggcgaggcgcgggcccggctgggccaggcagctgcgcagatgcgccgggaggggtgggtacctccgccctggccccgggccagtcctgccccggcttccccacccggagggctggatcggccagtcgggtccctggggaggccgcgcgggtccccagaaatccagggaaacccagcaggcggcggggagcgccccgggacgcccggagccggggtctccccgaacgcgcggcgcggcgtcccggcccggggtcgcgggcgcctccgccgggaccccccggccccgcccggcccccctccgcgggctcccgaggccggttcccgcgcgcacgcccgggccggcgcggaactcggccgcacccgccccgcgcggccggcactgcggcagggggctcgcgccaagttgggcggccgcggagtttgcgggaagtgcgggcccggcccgtgggacgaccccgcccggcggcgtaacccgggggcggccgcgcgcgccaagttggcggtacctgcgggcgcccggcccggtccggcctgggcagctgcggcgcgccgcccgcggcaggaagtgcttggcgtcccggcgctccggctcccatggactttctccgacctcgcccagcaccggcggc

SEQ ID NO: 201928 - DNA, 166 bp, Homo sapiens
  chr9:138987167-138987333
  hyper
cgggggcggggcggcggcgggggaggtgcccgcgggccgttaaagggacagcgcgccggccgcgcgcgcgcgcgcactggcagccaggtgggctcccggggtcggggctggggtccgggggccgggagggtccccagtgggggccggcggggcgtggggaaccccg

SEQ ID NO: 201929 - DNA, 40 bp, Homo sapiens
  chr9:139001729-139001769
  hyper
tgaatcagctgcacccggacggccccgcctgggcaaggat

SEQ ID NO: 201930 - DNA, 56 bp, Homo sapiens
  chr9:139294771-139294827
  hyper
ggggccgcctccgcgcgctctggaggggcgcgggtggacgcgggacctcaaggcag

SEQ ID NO: 201931 - DNA, 214 bp, Homo sapiens
  chr9:139334259-139334473
  hyper
cggagtcagcccggccgggacccagcaaccgccgccgcggggccgcgcccggtccccgccccgcgccccggccccgcccacagcggcccctggcggccggaggactgcgccgcaccggacccggacgggtctcccacgcccctcccaacccggcagccccgcagtccggcaggtcccagcgaggcaggtgcaggtccccggagaggacctgggt

SEQ ID NO: 201932 - DNA, 119 bp, Homo sapiens
  chr9:139377007-139377126
  hyper
tcttcaccagcatcgctaaggaagccttctagccggtgaggacaagacacgctcatttgaaaagttaagagtcttacgaggggtgcctgggggtccagcctcccgccccgggaaccggc

SEQ ID NO: 201933 - DNA, 197 bp, Homo sapiens
  chr9:139440708-139440905
  hyper
gggactacttctcgtttgaaagttttcagaggccaaaagtttgagccggggctgcggaaggatccggctctggcggttgccgcgctcggcgacaactggcgactgaaatttgcatgtgaataagcggaggagcccggggcggaatggggagggcgaggccgcggacagccgtgtgcaccgtgcgctgggccgggcgg

SEQ ID NO: 201934 - DNA, 104 bp, Homo sapiens
  chr9:139519836-139519940
  hyper
ggtgctggccaagaacgctctgatccaaagaggaagcaaagttcagctgcagcaacttgacccaggacagctggggaaaaatgggcggccggggcaggggcaga

SEQ ID NO: 201935 - DNA, 109 bp, Homo sapiens
  chr9:139580674-139580783
  hyper
ctgcccctggaaccacggggaagggggcctctggggccacaatgcccccaccccaggccattgcaaaagccactggctgggcagtccaaacagggcagggagaaatgta

SEQ ID NO: 201936 - DNA, 277 bp, Homo sapiens
  chr9:139580993-139581270
  hyper
ccttcccttcgcttggaagctgggcccccggagctgtaggccaggggcgcgctccccagcacggaagcaggtcccctccgggtcccccacctccctgcgaagaggaaagggagagaaaggggaacccgccccacaggtgcgcccatcaccgggcggacagtcaggagggggtcggagggaggccgaggggtgcccccacgccgtcgtgcgccctgatcaatagccctggggcaagtccccgccgccccggcctcggtttccccgctcaggaagcagg

SEQ ID NO: 201937 - DNA, 155 bp, Homo sapiens
  chr9:139838241-139838396
  hyper
cgcggggccgcggggcgggcccccagccaggctgacccccaagcgcaggggcccggggccctggctgcagaacgtgggtaggggccccacacgccactgacctgggtgtcggggcacgtcgcgggccacctggtagtagcggtagaactgctccc

SEQ ID NO: 201938 - DNA, 194 bp, Homo sapiens
  chr9:139923388-139923582
  hyper
gcacctgctggggcgccccgggaggtggggcagttcctccgcgtggcctgtagagagcgacagaggacaggctgaccccatgggtggctctgacggcgcttcccagactcagtttcccccctgtgaatggggtggagtagcgctgtgtggtgtccagtgtcagggcgcacatagaaggcgcatcctcaagtgaa

SEQ ID NO: 201939 - DNA, 266 bp, Homo sapiens
  chr9:139948373-139948639
  hyper
acagcagtaggaggccggcgaggcccgcggcggccagcagcagcggcggcagcagtgaccgcaccttcccggccatgggcgggcgggcgcgcgggaggacgatgcgtggacccggagagtgcggggagccggaggcggaggcgggcggggccgcgggaccgcggggtaggggccccggggcgggacgaggggcgggaggccgggcgggcccgcccatcaccggccacgcccacgggcggacaggtttcgcctccgctcccaagctt

SEQ ID NO: 201940 - DNA, 284 bp, Homo sapiens
  chr9:139964731-139965015
  hyper
cgtcggtgccctgccagcgggactcgatctcgcgcaggtgcacgcagccgcgccgccggtcgtccaggatgtcgaacagggtgcgcaggctctgcaggaaggcgcgcggcagcccctccgtgctgggcgcgggtgcggggggaggcacgcggccccgctcggccatggcggccccggccatgggcgcccgggatcggtcccctcgtccacccgcgtgcgtcccagcgcggccccacggaggggccggcccggcgagctcagcccacggcgacaatagcgactac

SEQ ID NO: 201941 - DNA, 183 bp, Homo sapiens
  chr9:140023901-140024084
  hyper
cgcaggctgggagggcggcgggcgcagcgaccccgggcctcggtccgcccggcgcggtcctcaccctgcagcacaagagccgccggcagttcttgctgttgccgtagctctcgccaaagctctgcgtcaccgaaatgaagtcctgatgaagcagcggcggcggatgcgtggaagggggcctcg

SEQ ID NO: 201942 - DNA, 98 bp, Homo sapiens
  chr9:140195121-140195219
  hyper
aactgcaaaacaagccggtttgggggatggtggcctcatccaggaggggcgggggagagaggccctggggcttccaaaactcacggatttgagggaga

SEQ ID NO: 201943 - DNA, 614 bp, Homo sapiens
  chr9:140195552-140196166
  hyper
ctcggggctgctcctcggctgcagccggcatcggcgcgtcccgggcctgcgggcgggtcctgaaggcggcggcggagcgctccgagtccgccttcggctcccgccgcccgcctttcaccttcgggagaaaacattttgcgcagaggatccggtatctcgggattccgaacttgctggttgcgagactcaaatttcaaaaggggctggagcccgcgccccgcccccacccgcgaggcggcgggcaggcgagcgggtgggggccgtgggaagctgctccggcccggccgggcccggctaggccgcagggaggcgctcggccggcggggctgccggaccctggggccgggacgcacgcgccgtattcgccgtggccacgggccttctggcggggcctgcgagccgggcgcgcaccgaggtagttggcgggaaggtacagcagagacgacgcgggcgcagggccggggtccggggtcccggcgggcatcaccggccgctggccgcgtacttcgccttggtgatgagatagagcacgatgtcctggtggccaccgaacgcggcgatgtgcagcgcgctccagccgtcgcggttggccaggcggatgtcggcgccgaact

SEQ ID NO: 201944 - DNA, 349 bp, Homo sapiens
  chr9:140196196-140196545
  hyper
cgtcgatgaccgactggtgcagcgccgtctggccctcgggcccgaacgagttcacgttgaactcgcagttggtcatgttctgcagcagcgactgcagctcctgcgtgttgcccttgcgcacagcctcctggaagatgcgctgcgtctgcggcgcggagcaggtggacagctcggcctggctcatgctgccgccgggcgcgggccgcgggccgggccggggctcagcgcgggcggcggctgcggcgcgggcccccggctgtctcggggcgcgcctcggcgcatggagggcgcggcgtccccgggccccgcacgccgcctctgggcgctccgggcgctcggggccgggggt

SEQ ID NO: 201945 - DNA, 157 bp, Homo sapiens
  chr9:140196965-140197122
  hyper
tccgtcgccgccgccgtccgcgcgccccccgggcgctccgcgtctctttgcggtcgtcccgccccttctccctccggccacccggggaattccaagctccctcagcagccagacccaggccttgcccggtacccgagcgcgaccgccaggtggcccc

SEQ ID NO: 201946 - DNA, 154 bp, Homo sapiens
  chr9:140197263-140197417
  hyper
ggccctgacgtggggccttcagccacgcgggtccttcccgcgcgcgggcagcctcatggccgccggctcagcctatgtgtgccccaaccgtactgatgcgaggggcctccggccggccaccgcggcttctatcgcctggcggtgaagggggttc

SEQ ID NO: 201947 - DNA, 702 bp, Homo sapiens
  chr9:140445773-140446475
  hyper
tccccccacaccactgcccggcctgcgggggagcacagacagcccgggccctcccggctgcaggtcccgggctttccccgcgcggttgccggctccgcccagaggagccgcgcccggcggaggggtaagaaaggcagggtcgcggcgtcaacgcggcggccgtctcgagtccagggcccgcgtcctccccgacctcccgacgccacctcacggcctcagggggactgggctcccgggaaaccgccggccacctggcggacgaacacaggcagtggcgggcagtggagacgccagggaccaccgcgctgagagcgatcactcatccgccagccccgccccgcgagccccgccccgcgagccccgccccgcgagccccgccccgcgagccccgccccgcgagccccgccccgcgagccccgcaccgccggccccgcaccgccagccccgcgagccccgccccgccccgcgcgctcctcgcattggccgagtccccgcggccacaccccctaccagattggggccgctattggacgcggcggccgcggccaatcggagccgctcttgctgcgacgcagcggtcggaagcggagcaaggtcgaggccgggttggcgccggagccggggccgcttggagctcgtgtggggtctccggtccaggtgagtctgtcggattggggcgggcgccgcgcgcggccaggggcg

SEQ ID NO: 201948 - DNA, 122 bp, Homo sapiens
  chr9:140473437-140473559
  hyper
gaagccaggctcccacgccccctgtcggccggctgaccgcggcgggcttcaggcgtcagacgcgctgctccctgcggggccgtagagaccgaaggcttcgggaaatccgctcctccacaaag

SEQ ID NO: 201949 - DNA, 208 bp, Homo sapiens
  chr9:140703838-140704046
  hyper
agccagtccctgggatgtggcggcggccctgcgccctcggagggaggcggggcagagctcaaatggaagcagagcctgcggggtggagaccgcacccctgcaggggtctgccttgggccccgagcctcctcagccgccgcagcaaagcggtcagtcaggcggggcttggtttatggcatctgggaagatcgctgaccattcccgaggg

SEQ ID NO: 201950 - DNA, 328 bp, Homo sapiens
  chr9:140704131-140704459
  hyper
gcaatcctgcctctgaggatgcatccttgagaaataatgtagaaaatgaaaagcactaaaatatttgctggcattgtattccagaaatataccaacagacataaaccaagtgttcagtaaaggaaaggtccggaagctgagtgactgtgggggaagggtccggaggcggttccgatgccgccctgtgtggaccgtcggtgatgggtccggaggcggttccgatgccgccctgtgtggaccgtcggtgatgggtccggaggtggttccgatgccgccctgtgtggaccgtcggtgatgggtccggaggcggttccgatgctgcccctcg

SEQ ID NO: 201951 - DNA, 110 bp, Homo sapiens
  chr10:1780056-1780166
  hyper
aacagtttttaactagtcaattcattaccatgctccttgtgtcaagggggggaaatacctctttcagaaatgcagagaccgcacttcctcagaaacggactgaggtttgc

SEQ ID NO: 201952 - DNA, 75 bp, Homo sapiens
  chr10:3109285-3109360
  hyper
cggcgttctatcccgccccgccctggcgcgccccgcaaacgatgtgaccccggccccctgcggtctcccctcctc

SEQ ID NO: 201953 - DNA, 726 bp, Homo sapiens
  chr10:3109459-3110185
  hyper
ggccccactagcagggacccgcccacctgtggcgctacccctgcctctgccgcctcccgcaccgctagcgcggcccccacctacgacgacccccgcgtagatgctcctgcccacacccgccccagccccggcccctgcccctagccgcgcccgcgccccctcccccgcagcccctcccatacgctcgggccccgcccgtcaccgcccattggcgctggggccgggcgggggcgcgggcggggcggcggttccgagtcaggcgcgcgcgggcagggtccccattgcctgctgcgcacccggacgtgcggctcccctcggcctcctcgccatggacgcggacgactcccgggcccccaagggctccttgcggaagttcctggagcacctctccggggccggcaaggccatcggcgtgctgaccagcggcggggatgctcaaggtgcgcgcccccctcccggcggcgagggagggacggacggacggagctggggagaaccgggcgaaggcgatggggtgaccggagagaagaggggggaagcgatgggggggacccggggaaaggtggcgaagcgatggggagaaccggggagaagagcggggaagcgatggggagaaccgggaagaagcccgcgcccggaagcggcaggggtacctgcggggcggcatgagccggcgaggcagccccggggtccttgcccggtggggcgggggaggaagggacatgg

SEQ ID NO: 201954 - DNA, 660 bp, Homo sapiens
  chr10:3110245-3110905
  hyper
gaacctggcagagggagtcgcctgaagcgccctcgggggtcgttctgcctctgagctgtaggacggggccgggcgtcccctccgaagcgtgggtacagcgcgatcacttcctaagtgcccccccgccccccaactccgccgcacgccaccccctagaatgtcgaggaagaaacggctgggtccccgcgcgcctcctgtcgcctcgtgccctgcgcggcgtgggcggggtcctggctgctgcaatgcgggacgcggcgggggtgcgcggggttcccgcctggcgtctccagggcggtccggcagcccctcgcgtttccgctgggagatttttaaaaagggtttcctgcgctcgcatgtgctgtcgccttccggctcgtgacaaaaacgaaaaccaaaatgggtcccaggccctccccgccagcctccgcagacgggaaggatcaggaagcggggactccgggatgtcagcggcgccgcggcgcgggctccgggcttccctgccctgcaatgtggaagctgctctctaggaggggcccgaggctgggcccacggacgcgggcgcgccgggaggatatttaacattgaagagcggaaggtggcggagactcggcgcgccccaggccccgggtgcacgtgggggcgccggtgcccggatgatgg

SEQ ID NO: 201955 - DNA, 335 bp, Homo sapiens
  chr10:3111025-3111360
  hyper
tttgttttcccggttcctcctgccgcagatgcgtggaaaggcccggatggcggatttcctcccgtttcggggccgcgcactgcacagggttggagcggggatgcaccccctgcccactgcgcgggtgaccttcccttcgcccttgagcgcgcggggcgggcgcgggtgccgcaggttgaggcgctgtgggcgccgccccgcccgccacgagcgcctacgtgatgcccggcccgtcgtctccacgagccccggccccgacacccgtgcgccgcgcgctccccaggcccgcagcgcagcctccccaggcccagcgccccccgcgggagacccgggtg

SEQ ID NO: 201956 - DNA, 115 bp, Homo sapiens; identical to SEQ ID NO: 7163
  chr10:3214966-3215081
  hyper

SEQ ID NO: 201957 - DNA, 43 bp, Homo sapiens
  chr10:3239422-3239465
  hyper
aacaggcaatgaggccgaggccaggggcgtcccctcgcttcct

SEQ ID NO: 201958 - DNA, 99 bp, Homo sapiens
  chr10:3239495-3239594
  hyper
tggaggctgctttttcttttggttcatttcatctggattttaccaaggagaaaaatgcactgggggaagcaaggagttacaggccgagggctgagtggt

SEQ ID NO: 201959 - DNA, 78 bp, Homo sapiens
  chr10:3827581-3827659
  hyper
caatcgcaggcggcgacacacagcggccccgcctggcgtgaccgagactctccatcacggcccgcaccattggctcaa

SEQ ID NO: 201960 - DNA, 58 bp, Homo sapiens
  chr10:3862675-3862733
  hyper
cagatggtgacggccgggcatcagaggccacaccttcaactggagctccaaccccaca

SEQ ID NO: 201961 - DNA, 238 bp, Homo sapiens
  chr10:5454341-5454579
  hyper
atgaaggaggtaccgggccttagggactcagggatgcgctcaggagttaagggcaaattttcctaggttctttcctaggcaagtagatcccgggagcggtggaggggcgggactccacgtctcctaggaaccgctgcgcgctcactgattggctgatcgctgctcagccgccattttcaaatccccggatgacggcggtggcggctgcagtccgctgacaggcgctttctgcctggca

SEQ ID NO: 201962 - DNA, 218 bp, Homo sapiens
  chr10:5707985-5708203
  hyper
tcggggtcacgcggacgcctctgcaggatgctcggacactgcgccacggcctcacccgcgccagtggaggggggtttagctcttaccgtgggctcgcgcctggcttccccgagagggagcaccgtgggcgtttcccaggctctcccccgccactgggcaacggccccgcacgcgtcccgcaccttccccagggcgcgcggcgctcggtgggtttgcgg

SEQ ID NO: 201963 - DNA, 40 bp, Homo sapiens
  chr10:6018596-6018636
  hyper
ttcctctggctgccgggacaaaacccctaggaatcgctca

SEQ ID NO: 201964 - DNA, 147 bp, Homo sapiens
  chr10:6018666-6018813
  hyper
gcgacccgctttcttctcgaatacaccaagcgatcacagatctcttccccctttttctgcgagtgtagactccaggctggcccccactccccacccccatccggtcccgaccgcctctgctggtttcctgatcgcttaagaattgga

SEQ ID NO: 201965 - DNA, 261 bp, Homo sapiens
  chr10:6245278-6245539
  hyper
acaggccctcgttgcccagatgtgagtgcagctgcgcggagccgggttgcagggcgggctgcgccgggccgggccattgtgtggggcggctttgtgccgacgcccctctgcggggggcgcgcccgtgcgggtcgcgccggcggggcggggcggaggcgcgggctgcgcgtccttggccgggcggcgggggcgctgtggcccttgtcccggtggctgccccgccggcccggaaacggcgagtgcgcccggccgggctgcgta

SEQ ID NO: 201966 - DNA, 56 bp, Homo sapiens
  chr10:7449898-7449954
  hyper
gtggtcggccgggctcctgcccagtctcggctcctccctcctccccaccagaagga

SEQ ID NO: 201967 - DNA, 60 bp, Homo sapiens
  chr10:7453036-7453096
  hyper
tttttttttttttttttttaagattttgtgtgtgtgtgtatgtgtgtgcgtgcgcgtgca

SEQ ID NO: 201968 - DNA, 106 bp, Homo sapiens
  chr10:7708304-7708410
  hyper
tcgtgttctcccggttttcaggtgggaaaagctgaggctcccaggagtctagaactcctctcatattgcctttctccctggatcaactgggaatgatgataacagc

SEQ ID NO: 201969 - DNA, 71 bp, Homo sapiens
  chr10:7729413-7729484
  hyper
tcagctggaaacaggcgagcacctcacgccatctagcggagacacactttgaagaccgcttcaagggattt

SEQ ID NO: 201970 - DNA, 66 bp, Homo sapiens
  chr10:8079655-8079721
  hyper
agtgacaatccggccggggccggggccgcggggaaggggcaatggggggaacctcttctggttttg

SEQ ID NO: 201971 - DNA, 145 bp, Homo sapiens
  chr10:8086048-8086193
  hyper
tccacctctgtccacaccccagttctcccgactccagggaccaagtgcctcggcctccccgccacgaaatggccacccccaagccctttgccccatgaaaatagcaacttcttcctacccaaccggttggagcacaagaaacttc

SEQ ID NO: 201972 - DNA, 223 bp, Homo sapiens
  chr10:8091136-8091359
  hyper
tccccaaaacgatagctcatttcacggggaaggtagactcctggcccggggcgcgtgggcgtgggagccgcgaggagagttgccccttggacgcacccgcctccatcatcttcccattgccagtgagttttagggtccctctttctctgctttcccccaagttccctgctctctgggttttgtttgaagagagccagccttgctgggccgggatcctcaacca

SEQ ID NO: 201973 - DNA, 168 bp, Homo sapiens
  chr10:8092278-8092446
  hyper
ggctgccggcaaagctctggcccccggcctgcgacgtgcagaccgcggggccgcggacccggctggtgcggggtactggcgccggcctcgacacctttggcctccacttcctccccagactcacagcgacagcggccgcttcacaccgtttttattgaccgatcgcag

SEQ ID NO: 201974 - DNA, 581 bp, Homo sapiens
  chr10:8092535-8093116
  hyper
ggcctttggtgtcgctccccgccccccagccccgcagattcccggcttcttttctgtctgcgcggccgggaccgcccaggcaggcgccggggctccggggctccggggggagggactcggcggctcggctcggctccgcttctttcttctgcctgcaaatatttgctgcctcgctggaaatccgacgatttcgcgcgcgctctgcttgcaaagtctttaagtaaacacgctcaaatgaccgccccgggcggcccgaggcacgctctctccccctccgcgggattagtaactttaggacttcgaccccggggctccgctttgcctgttacccaggtcgggcagcgcgcgggcgcccggggccgcttctcccggcacctcggccccgcggagctcgcctggaagcgccggttgcctggctctggtgggtggcccggccgcgagcatctccgcgccctgggtctgtagccctagggctgagccccagaaagccgcgcctccgctctgcgccatggcctctgctttctgtacccgactgggtttccccacttccactgggacagggtctcttcgcccctgggagg

SEQ ID NO: 201975 - DNA, 102 bp, Homo sapiens
  chr10:8094141-8094243
  hyper
cgggacatccagccccaggccccccacccctctctgccagcctcaaaccacccagaccaagaagggccttcgagatcttttatttttctaaaggtgggggtt

SEQ ID NO: 201976 - DNA, 91 bp, Homo sapiens
  chr10:8095107-8095198
  hyper
gttgttccttcaccgcatgaaaggaatccttcagaacttactttcagggacggcttcttctatctcgaatttttgcatttgtagggaattt

SEQ ID NO: 201977 - DNA, 99 bp, Homo sapiens
  chr10:8095845-8095944
  hyper
agccagtctcttcctcccctccccccttctcatccctcactgttgccactcaagtcaaaagcacacattgattacaaatattaggtctggaaagggcag

SEQ ID NO: 201978 - DNA, 63 bp, Homo sapiens
  chr10:11060746-11060809
  hyper
tctggtggccggggggaaagagctcttcttaccaaattacccgctcatctgatttaatatttg

SEQ ID NO: 201979 - DNA, 100 bp, Homo sapiens
  chr10:11207330-11207430
  hyper
tttgccactgctcttcttcctcctccttccgcctccccgctcccccacccccactattttttcttcctgtccctcatcgtgccgccctaactctggctcc

SEQ ID NO: 201980 - DNA, 131 bp, Homo sapiens
  chr10:11207724-11207855
  hyper
caggaggaagggcgggtaggcaggagggctggaagcagccggtgctggcggcccctgtgctccaggggctgctcccgactcctccccgcacccccgcccgcctgcccgccgggacaggttggaggcgggag

SEQ ID NO: 201981 - DNA, 105 bp, Homo sapiens
  chr10:11652860-11652965
  hyper
acacctgcgaggaaccgttttcacgcattacaaatgccgcaccagcctagggttgtgagcgccaaactattttgcaaactttgcaaaggcgcacggatttccaag

SEQ ID NO: 201982 - DNA, 103 bp, Homo sapiens
  chr10:12390722-12390825
  hyper
gatcacttctttccactgagtctctgggaggagacagggagatgccagaaggggccaagcgtgagccagggcaaccaggccggccaggcccgccggccgctcc

SEQ ID NO: 201983 - DNA, 875 bp, Homo sapiens
  chr10:12390995-12391870
  hyper
cgaatgagctcccgcccgcctccgcctccatcccagccgccgccgccgcccgtcgccataacaaccggcccccaccccccccaccccacgccttgcccctcgggtcccccgggccacaggccacagcgcgggaaggcgccccgccctcggcgccccgcatccggccgccgcgcacccccgcccgcccggcgcttccgagccacgcagaggcgccccctcccgccggagacgggaaagccccggcgcccccagactgggctccgtttccagctcccggaggggctggggctctcccgcgtgcgccccgcacctgccgggggcccgtacccgccctcgccggggctccagggggcacgacggccgtggcccggcgctcttgggaggggagcgggacatccccgaaggcggcgcgctggaggcggggagcggccggggcgcacggagagggcggggagcccgcgggagggggaggagggggaggagggggaggaggcgcgaggtgggggggagcgcggcgggcggcagggagggagcgggagggaggcaagaaagtagcagaaagtgaggctggcaggcggcggcaaaggagccggcgcgcggcggcggcaggaagtctgtgcccgagaacagcagaaataagagccagggagggaccgcggccgcggcggcggcggcgagagcgaaagaggaaactgcagaggaggaagctgcgccgcagcccgagccgcccggcatccccgccgcctctgcgcccgcgccgcgcccccggcgccccctccccagcgcgcccccggccgctcctccgcgccgcgctcgtcggccatggcccgggagaacggcgagagcagctcctcctggaaaaagcaagctgaaga

SEQ ID NO: 201984 - DNA, 338 bp, Homo sapiens
  chr10:12392327-12392665
  hyper
ccagtcgttcccatttctgtccttacatcatgtatttctatggaattggcatctgcacgtacgaggtgtaggcaagactttgggtggccacgcgaggatggaagggaagggcttcgcagtgctcagggtcacacgtgggcagagcctcaccggagggtctgtgcatttcacgcgggctcggccgcacgcgccggggagcgcgtctccaagggagggtctgtgcgcgtcgctgcgcgggcggtgctctctccgggctgcatcgagtcccatgctgatggctgtgtctcaagaaagcagaaataatccgaagtcgatggcaggaacgctccaagcatgtg

SEQ ID NO: 201985 - DNA, 241 bp, Homo sapiens
  chr10:13341387-13341628
  hyper
ggcaaggcgtgtgccgccgcgccagtcctcacccgctgtccttccccaaatagtgtctttatataactcagtggcaatgccgtagtccagcagggaggccgccctgggcagcgcctgcctggccagctcctgcccgggagggcaccgtcctctcccctccggagaggtcccggtcactgcctgcctgggccggttccaggcagccctgcgcgcctgtgcaccgtgcgcctgtgattggaca

SEQ ID NO: 201986 - DNA, 33 bp, Homo sapiens
  chr10:13629001-13629034
  hyper
ctcagtgggttcgcggccgccggcccagtgagg

SEQ ID NO: 201987 - DNA, 190 bp, Homo sapiens
  chr10:13933246-13933436
  hyper
cgccctgtcctgcacccaaaggaaagggctcccctggcactctcagaaaatggttttaaaaaaagcctacacagctctgcctaaagccatgtcctttcctatctccccgggtagattcagacagcgtgggactgaggtgcccaaggaaagtaggtgtgtgtgtgccgaggggagggttgcagaagaaagc

SEQ ID NO: 201988 - DNA, 773 bp, Homo sapiens
  chr10:14995671-14996444
  hyper
aagccggcccggggcgcaactggcaggcgccgttacgccgcgttgaccacatccgaaaatagatgaagcctttgagaggctgaagagcccgactgggacaaggcgtgtgctggccgccccctcgctggcttcccacaggctgcagctccttgctccagggccggccccctcctgtcctctctccagcccccagcgccccgggagcgggcgacgcgcagccctcactcacctttgtggcagtgggacaggaagtaggcgcgggccctcaggttctccctatcgaagcggtctatggagatagttggatactcggccatctgcccctcgaaagaactcatagcgccgccgatcccagagtccgggaccccaaaaccgcagctgaagccaaggccagccctgaccgcgccgccacttccgggaagccgcgcgctgcctcgccattgggcggccgaacgcagccacgtccaatcagaggagtccggagaccgggggcaaagtcaaggagcatccggtcgggttctaggcgcccgctgcttgggtttaaatcacccgcgcttcgctgcacgcgatgggccctgagccctgcccagtgcaaggctcattcccgcccaacaaacacaggtgttgctctggtaaggcgttgcccatgtctgtggaggtgcagtcgcgggaagggaaatcgaaactcccagagcaggtggccccagccgacgaggtgagtgggctgcggaactgcgcttagaaatcattcttcgttccgcttcctgcttgtc

SEQ ID NO: 201989 - DNA, 201 bp, Homo sapiens
  chr10:15481461-15481662
  hyper
cccttcccttcaccacgggaaatgcaggcaaagcccacaccggtttgttttttttctcactgatggcagaggaattcctatcccttggggtttacactcattttgtgtgctctccaaatctccccacttatctttagacagactcccaacaaccctctggacacaactccaaaggaaagagttcgcgggcccacgtcgtgc

SEQ ID NO: 201990 - DNA, 141 bp, Homo sapiens
  chr10:15762154-15762295
  hyper
aagctatttattgctttagaagcaatgccccaggtggagcgagagcttgctccagttgtgtcaaaggcgcagcttggatggagaatgtgaaaaccaaccccaccaccaggaggggcaaagcaattatctcttcatcacctc

SEQ ID NO: 201991 - DNA, 148 bp, Homo sapiens
  chr10:16870093-16870241
  hyper
tacagttctatttatgcagaaataaacatgggtattcaaccctaggcagtgcactgacgtcacagagggagcttttttttaaaaaaacagcgtgctgtgactcctccctgggaaatcccgattcagtgggtttcggtgggaactggaa

SEQ ID NO: 201992 - DNA, 52 bp, Homo sapiens
  chr10:17243812-17243864
  hyper
ggggaacaaaggacggaaaacaataaggcttcccgaatgaatggcagccact

SEQ ID NO: 201993 - DNA, 208 bp, Homo sapiens
  chr10:17270445-17270653
  hyper
ctgagacttgaatcaatctggtctaacggtttcccctaaaccgctaggagccctcaatcggcgggacagcagggcgcggtgagtcaccgccggtgactaagcgaccccacccctctccctcgggctttcctctgccaccgccgtctcgcaactcccgccgtccgaagctggactgagcccgttaggtccctcgacagaacctcccctc

SEQ ID NO: 201994 - DNA, 199 bp, Homo sapiens
  chr10:17272233-17272432
  hyper
atttcttaaaactaccactttgtgtgcagttgaaggcccttgggcacaatgagagccagtcctccaaactttcagaaagtttcctgccccttctggcaggctgccaatcaccgggcgggagaaggaaggaggggaaggcggtggagggagcgagacaaagggatggtccctcgggggcggggatggcggggctgtcctg

SEQ ID NO: 201995 - DNA, 272 bp, Homo sapiens
  chr10:17495120-17495392
  hyper
atcattcctagcacgcaaaacaaacctgaatcttaacaccggtgccctttaaagcatagaaaagaaaaagcaaaccaaccaaatccctccataaagacaggctgagctgcttctctccaaaggtggcggggtcgggggcgggggtgctttcaacacaccattgtcgagaggaaaactcagcacccgtttttcaaatgcagctgctggaggatcccccttgattcaaagaccattcacatccaggcttagagggttgagggagtgtgaagggt

SEQ ID NO: 201996 - DNA, 322 bp, Homo sapiens
  chr10:17495680-17496002
  hyper
agttgctacaccccgccgggagctgttggctgaaaggctgggagtcgcgctccttgcctggcagggagatctcgcactccccggctcccaggccaggtccccagccccagagttggaagagccttagggcgggaaggaagagacagcaaggaccagaatggggagcatgagatcctgatgcggaacccgacggcaggtcccgctccacagctgcctcgcccacagcgatgcgcgctagagcccccgcagccctgaccggtccctctgctccccagccgccgtccaccggtcggagggtcgcctccctgcgaccccctccccc

SEQ ID NO: 201997 - DNA, 126 bp, Homo sapiens
  chr10:18429023-18429149
  hyper
acccagcctccgtcgtccttcccctccaaagttaagagatctgctctaagggttcctgaggggtggtctggggccatgggaacaggatcaaggccccctgagcgccgggcctggcttctgtggctt

SEQ ID NO: 201998 - DNA, 63 bp, Homo sapiens
  chr10:18430247-18430310
  hyper
gatggggtgcaggtgggcaggaggggagcgaatatgggggtgccctgccggatccccccagag

SEQ ID NO: 201999 - DNA, 343 bp, Homo sapiens
  chr10:20104362-20104705
  hyper
gagctgaaaaaacaaaaacaaactggggagccagagcccctgaaagctccggtaggaaattcaatgggcctcctgttcctttaaactctcgctttcgcccccgctgacactttgcaaagccgcggcggcagcggcggggaccacgctgcggtgcaccaccttccgccaccctcccgcgctgggctggggtcgagggggcttcgcagagtcggtaaccgaaccggctctggtttgctttctccactccctagccactaccagaaccagcctccgcgaaggggcgagctgtggttaaccctttcgtgcccagggagaccccgccagggtcggggcggggcgcgat

SEQ ID NO: 202000 - DNA, 694 bp, Homo sapiens
  chr10:20104724-20105418
  hyper
cgaaggcggcccgggagccaggtgggtgtggggcgcagttggcggagctgcccagggcgtgcgagcaggctgcgaggatggcgccccggcggcgcggaggtaccgccccgcgctcccccgatagctccccggcctgtcccctctccccgcgctctggggcagccggctgcctggggcgcacggggctggagtggccctctccctccccttcgctaggctcccccggcttaatctgttggccgcgactcctcagccagccccgaggaaagtgcagccattggacaggtctgtgcgggctgccggtttcagggaggaaggtgggagaagcctggaggagcgaaggggagggcggagggaggagggaggagggtgcggcggcagatctggcaaattgcgagctgccttccctcctcaaagtgtggagaaggagcgcgggggagcgtggcgacggcagcgcctcctccgccaccaaactcctggggctccgcgggggcttggggccacctcctcctgagcccggaggaaccctctcccgataggttccagcgtgactccctcccactccacccttttcctttcttcttcctcttttttttttttttttttaaacacatttttttcctggcttcggacctcagactgctgcagccctaaccttcccagggctcagctctttggagctgcccattcctcc

SEQ ID NO: 202001 - DNA, 170 bp, Homo sapiens
  chr10:20105655-20105825
  hyper
gtcaccgtccgcgggcaccgggttggcgctgcccgagtggaaccgacagtttgcgagcctcggctgcaagtggcctctcctccccgcggttgttgttcagtgtcgggtgagggctgcgagtgtggcaagttgcaaagagagcctcagaggtccgaagagcgctgcgctcc

SEQ ID NO: 202002 - DNA, 227 bp, Homo sapiens
  chr10:20106694-20106921
  hyper
caggtgggaaaggtggaggcgggctcgcctctggagacctacccctgctcccattgtcctccgcctgccagcttcacagacaggcctgaacgcgcagagagttccttggagtgccctgattttgtccccgagagggcccccaacctccgcatcctcttagtggctgtcctggcaggtgcgcgtcctgcggggagttgcgccccgggggctatcgccgagcgggagct

SEQ ID NO: 202003 - DNA, 234 bp, Homo sapiens
  chr10:21462299-21462533
  hyper
gcgggcggatctgtggggcggggggcgggggtattgtggaacacgagtggaggtggagggggcgcggctcgccgaagtgcccccctgggtgcccagcctggtccctccggggtccggggctgcgcaccgccgtgcgccctccgcagaggctctgccgatgtcgcaccgccccgcaccgcgacaaaagcccttcccggttccaacatcacaatcgccaagcgtggtctctgacac

SEQ ID NO: 202004 - DNA, 137 bp, Homo sapiens
  chr10:21462833-21462970
  hyper
agccccgcaccgcctcctggcaggcgggagggctgcgggcggcgggcgccgggtagggagtcggcgccgggccacgggtgagtgcacggggagggcgacggggcctggcgcctggggccggccgcgctctcgggctc

SEQ ID NO: 202005 - DNA, 170 bp, Homo sapiens
  chr10:21463023-21463193
  hyper
gctcgcactccaggtacgggtgactcacacagtcactcgcgcccgcccctcgcgctcactcgctcccccgcctcgccgccgccgccgcgcaggccaaacccaccggcgcgcccggaccgaagtggcagggaacgtgcacgtcgggcaccctgggagggagggcgcagcgg

SEQ ID NO: 202006 - DNA, 320 bp, Homo sapiens
  chr10:21463253-21463573
  hyper
cctggggagtgagcctcgcgccaccgccgctgcaggccggggagcccaggtgggcggcggctggggagggagggatccaggcgggggaggtgacaaacaccggtggggagagtgctcaaacccgcgtactcccttccctccctcttctcttccccagccgggggcaccctcatcccaggctgactgacgtccctggcacccaaatgtcgcggggagtgcggggccagggtgcgccctccctcctcctccagccagtgaaacccgggacagcggcacccagccccagggcggaggccgtctctgctgcgcgcagcgacgca

SEQ ID NO: 202007 - DNA, 203 bp, Homo sapiens
  chr10:21785547-21785750
  hyper
gcaaggcaaggtgcggcctctcagcgccaggacccgagacccccagctggagagaaggggacaccgtggtccgcgccctggggaggctaattgcacacgaacgcccccctcttccccgccccccaccgtaccctctgcagcgccacccgcgtcgcctctccgccgtgcgccaccctgagggctcccgcgattgcatcttcttg

SEQ ID NO: 202008 - DNA, 43 bp, Homo sapiens
  chr10:21785786-21785829
  hyper
tcggatggagacatcgcggagggaagcgaggggacagggatgc

SEQ ID NO: 202009 - DNA, 110 bp, Homo sapiens
  chr10:22517901-22518011
  hyper
gtttaagtcgcaaacggagatgtttacgctgacagggaacagacaaaagggcggccatgcttcaacaaaatgtaggagttttcagtttgcagcttgaacttgacactgtt

SEQ ID NO: 202010 - DNA, 58 bp, Homo sapiens
  chr10:22518450-22518508
  hyper
gctcgaaccaccaacctttcggttaacagccgaacgcgctaaccgattgcgccacaga

SEQ ID NO: 202011 - DNA, 33 bp, Homo sapiens
  chr10:22518859-22518892
  hyper
tttgcccagtgcttcgttcgctcatctctcgtg

SEQ ID NO: 202012 - DNA, 77 bp, Homo sapiens
  chr10:22540630-22540707
  hyper
acctgtttaaaatcacgccacagcaacgaatcactgcaaaagcaaggttctaacttaaaacaaaaagagaaagtatt

SEQ ID NO: 202013 - DNA, 573 bp, Homo sapiens
  chr10:22614079-22614652
  hyper
gcctttccaaaactttgtatcgctcatttaatctacaggagagcgtcacattagagaaggaagttttaaagaggttcggttcaataaacatctctgcaatttgagccctgacggtttcgggctaagtgcacagttggcaattctcaaaaaatcccttcgtgaaatttctgaccgagtgattgcagacaggacagaccgagagagtcgagatctgaaaccagctctgcgcaccaagtcgacgtgaaaagaggcccccggagtgtccgaaatggccgggagtgcggtttgcattttcctttcgcgggcgctgccgcaggctccggggtccccgccgcccaggactgggtccctggtccccgatccccgctccccgctccccagcgctgtggcctcgtggggctgccccgcccccccggcgtcgccgcacccaccccgcccccgcgccggccccgcccccgcggcgcgccgcccctcccccgcccgcccgcccgcccgccgccccgcacgcccgccgaggctcggggctcgggccgggctccgcgcggagttgcagcggtggccggatgccaagtg

SEQ ID NO: 202014 - DNA, 130 bp, Homo sapiens
  chr10:23002068-23002198
  hyper
ccgatcatgtttcctgatcctatcgaagtggattaaaactgcaggagtttctcgctgtcagatcagcaggaggctatttcagaccctcgaaccgcagtccgcatagcccgcagcggcgcatcctccaatc

SEQ ID NO: 202015 - DNA, 260 bp, Homo sapiens
  chr10:23002228-23002488
  hyper
gcgttctccagcctttcccacaccccccacagcgggtgcggccaactcgggaccccctccgcccgcgcccgccgggacccccgcctgctgtccccgccccggccgcccttccgcagtcggtgacttctgcctgactccccaaagtggggggaggcgacgaagggaggaagactccccgccaagggctctccagcccgcacagcggcagggcgatgcgggagaagcgcagggatgccgcccgacgccagagccatatttac

SEQ ID NO: 202016 - DNA, 164 bp, Homo sapiens
  chr10:25012546-25012710
  hyper
ccccgcccgcccgcccggcgtgagccggaccccgcagccggacgatcccgcgctgcccgccgccgccgccgccgccgccgccgcgctccgaggccgccgcccccggccggccgctcccaggcaccgccgcgacctgccccggccggccccgggctctcggccgc

SEQ ID NO: 202017 - DNA, 402 bp, Homo sapiens
  chr10:25241260-25241662
  hyper
gggactcagagtttcgtcagattgggggcggggagaggaggcccgggtccgaggatggaagcgatccccgccgggagggagaacaaagcggtggccctctctctcccccgacgcacggcaagcatttaatctacaagcagggtgccagggagggaggggagcgggccgagccccaaaatagggagtttgcatttaccacgacgcctcgcccgtagtctggcgcctcctcgctgctcccggccatgtttctcccggggaacgcgggaagggaagacggcgcgggaaggagcagggagggcgaaggctgcgtgggggatgggacgtggggatggggacggggacggggacggggacggggacggggacgggtccgccccgccccgggcccgccggcgggaagca

SEQ ID NO: 202018 - DNA, 627 bp, Homo sapiens
  chr10:25463893-25464520
  hyper
gccgggaggcgggaacgacctgcggcgggtgagactatggagcagcgtcttcggcggccgcggcggcagcagcagcagcagcttctgaacgcgcctcaatgagagcggcggtggcggcagccgggccgagagacggactcgggctgactccagccgctgggagcgcgaggccatgtaacccgctcggctccaggctgcgaggtgcgtaatccccagccggcccctcgcgcagcgggcacggccagcgctgccacaggtgacttgatttctgcgacggtagcttagccacccggggccaatctcgaaacattcttattttcaagtcctttggactgggtgccatctggagaagggggaagactcctcgaaaaagtctgactgttgagaaactgacgatccaaatttaaaaagtgattcccccccctcccgttccctcctcttctctctgggaggcagatgggagccatggcttaccccttactcctctgcctcctgcttgctcagctgggattgggagctgttggcgccagccgcgacccccaaggacggccggattcccctcgagagaggaccccgaaggggaagccgcacgcccagcagccgggtcgagcctctgcctcggactcc

SEQ ID NO: 202019 - DNA, 186 bp, Homo sapiens
  chr10:25464915-25465101
  hyper
ggtcttcctccaggccacgcgcgaggagagccgcatcctgctccaagacctgtcctcctccgcaccccacctggccaacgccactctggagaccgagtggttccacggcctccggcgcaagtggaggccccacttacaccgccgcggccccaatcaggggccccggggcctgggccacagctggcg

SEQ ID NO: 202020 - DNA, 85 bp, Homo sapiens
  chr10:25465600-25465685
  hyper
ggcgatgcgacaacttggcgagcgccgggtgtgtccgcggagtggcaagcctcagatgagaggcgaaaagggagcaggaggaaca

SEQ ID NO: 202021 - DNA, 77 bp, Homo sapiens
  chr10:26503616-26503693
  hyper
agtctttaggtttccggagttgttattgtggtgacctagagtgtcagagccaggagagcaagaaagaggagccaaac

SEQ ID NO: 202022 - DNA, 92 bp, Homo sapiens
  chr10:26726984-26727076
  hyper
gccggccaactgagcgtggttaaacgtggggagggaggagggtgaggttaccaacctgatggttgagaaagggcctccgcccagcgcgccct

SEQ ID NO: 202023 - DNA, 79 bp, Homo sapiens
  chr10:26728108-26728187
  hyper
aacccttgcacgtccagcaggtcagcaggtcagcaggtcagcaggtccgggagccccagtctcccggaacctggaggga

SEQ ID NO: 202024 - DNA, 209 bp, Homo sapiens
  chr10:26986396-26986605
  hyper
ccaggtctccgcacgcccctgccccgtcgcctcccgggagcggctgcagtccccgttggctgcagacgggcagacacccgaagtgtccgcgccggcagccggaccgcaagcgaggaagagcgaaccgcgctcccgggcctggccgaagcgcttcctgtgccaggtttccggctccgggtcccgggaggaggatcgcgggccagaggcgg

SEQ ID NO: 202025 - DNA, 85 bp, Homo sapiens
  chr10:28031229-28031314
  hyper
gcggccgccagcgagcccagccgctccccgaggcttgcgcgcctgcgccggagcctcctgggtttctgcctctttaaacactttg

SEQ ID NO: 202026 - DNA, 225 bp, Homo sapiens
  chr10:28031638-28031863
  hyper
gccgcgctcacgcccgggactccctggcgggaggcgaccttcccgactccttgggccaggcgagccgcggggctctggcgaggggctcgagtgaccgaagagaagtccgcggagcctgagcctggactccccgactgctcggcttcgcctgtttctctgcaccgagctcagtcctttttcctcgccctcagccgcgcaccggcacccacagtccggagaggggca

SEQ ID NO: 202027 - DNA, 208 bp, Homo sapiens
  chr10:28032744-28032952
  hyper
cagtttgaatctgggagaggcatactccggactgcggagcgcgaccggcgtgaggccgcgcgtggttcttcaatcacagcagaagactaaagcctctaggaaccccaactcggggcgtcaggaggggttggatggaagggaagatttggggtaatgtgccaaccgtatccacaagaccccccagctcatgagtcccaggccataccgg

SEQ ID NO: 202028 - DNA, 258 bp, Homo sapiens
  chr10:28966043-28966301
  hyper
accccctgcgtgtttcggggggcacccaaaagaagccccgcgctggggaacgctgaccacccgaggctgagccgtcagggtctcggaggcgggttcccgagccggtcccggggctgggctcccccggcgcctcgcgaaggtcactgacgcgcaggcctccgcaagggggagcgcgggagacggcagcgcaccagccgggcgccccagccgggcgccccagacgccggcgccgctcggagccgccgggcaggtccccca

SEQ ID NO: 202029 - DNA, 239 bp, Homo sapiens
  chr10:28966598-28966837
  hyper
aagggagccagtggccgccgacgggggaccgggaaacttttctgggctcctgggcgcgccctgtagccgcgctccatgctccggcagcggcccgaaacccagccccgccgctgacggcgcccgccgctccgggcagggcccatgccctgcgcgctccgggggtcgtaggctgccgccgagccggggctccggaagccggcgggggcgccgcggccgtgcggggcgtcaatggatcgcca

SEQ ID NO: 202030 - DNA, 308 bp, Homo sapiens
  chr10:28968985-28969293
  hyper
acaccttactggggcgttcagagagagggggaagaataaaggtaagggtgggaagaggtttgtaaaacagcagatcccggtgtttaatttcagagtggaggtttcggatcttcagacgggaaactggaagaggcgtgtgcattagtttagtttactcgctgtggcatgtgacagcgaccagggtccactaggtggatattgtattagtgagaacttgaagacccagattatttcaacgagaaactgatattaaagcctccaatcttgccctgcgacaaaatgtgaacggagccatgcaactcacaaaa

SEQ ID NO: 202031 - DNA, 78 bp, Homo sapiens
  chr10:29738055-29738133
  hyper
ctaggactgtgaagccggaggcggcgctggagttggagccttggcttctgctgtgagcaacagcgccacctgctggcc

SEQ ID NO: 202032 - DNA, 734 bp, Homo sapiens
  chr10:30024793-30025527
  hyper
cgcggggagcgggtccccgctcgggatgattcacttcgctccttacctggaggctcgcgcgtccccaccccttgcgacccgcgcggcggccgggagctggcgccctctgctgggccaccaggcgggagcaccctcggactgggcaaggatcgggcggagagggtggggacacagaggggggccaagcacaagcacccctgcctctctcaacgcgggcaccccttcccaaaacaggggccagtgcgcggggaccacgctgggacgactctcgggggaagcaccagagctgtccccacgccccaggacacgaactcgcgcccggagccgaccccctccacggccagcgggtccagccgcgtcctcggaggtggcccaaggaaaccgcgatgaatcggcataagcacgtcctatcttaaaacaccggaaaggcagattttactttgtttggaaactaagtttgtgtcctgtgtctcagtagctctcagggtggtggcagtcacgcccccccggtcccagggctgggaagatgcttgggctagcccccgctgcagccccggagatgcggggctttaggatcccaggggctggaggccagggccgccctatcgctctcccggccgggggtgtggctgtccaactcgctctgtcgcccgagtgaactcttccagcaggttggcctctcaggctgtcccctgaggacctgagcgaaactctggaggggaccaggaagaagg

SEQ ID NO: 202033 - DNA, 224 bp, Homo sapiens
  chr10:31073881-31074105
  hyper
gcgggtccccgagctcgcccgggcgcccccgccaccgtccccagagcgcgcagggagcggggcgcgcgatcacaccctccgcgctgcgcccgaccactcgggctttcaattaggagccaagctgagaaaagtaggcttttctttatgcacgcctcgccgaggtcaggttacgacctctcaaccgtcttcaatcggcggtggcatccatattcatgaaggctaat

SEQ ID NO: 202034 - DNA, 183 bp, Homo sapiens
  chr10:31422648-31422831
  hyper
ggggagaagggcctcgtgggccagcgcagcttgctcctctgcagacccagaagcatttgtgcgtcccgggcgtggcaggcccggcgcccactccgccctcccgcccctcccccgcgccacgtcacccgggtcacgtgagtgaccaggctcctcaccccaacccccctccctactcccgccaga

SEQ ID NO: 202035 - DNA, 185 bp, Homo sapiens
  chr10:31607136-31607321
  hyper
ttaaggtcctgcacggcgatgaccgctcatttaggaaggaattcatggcctgtggataccttagctctgagtcctgccacctaggatcccacggttctacgcgaggaagagggcggggagcgcggaccgggtgtgggaggccgaggtgacagcaggtgagggccgggtgcggatggggaagtgag

SEQ ID NO: 202036 - DNA, 526 bp, Homo sapiens
  chr10:31608218-31608744
  hyper
acggtgagtggcggaggggaccggggagcggcggagtcagggggagctgggcagccggggcgcccccgggggtgaggggggcgagccgggctgggggcagccggggcagggacggcaaagtggagtgggaaagtagaaagtagtgctctctgcccccctccgctgccgccgctgccggagccgcgccgcggccgctcgctctccctgaaccgttatgtctcttacctggtctctctccgcctagcggctcccgccgcccctgccgcctccctggaccgttagccggcgccgacgccgccgcatccccggcgcagggcgggcggccgggacgcactggccacttttctggtcccgggtggagcggctgttgcttctttccgcacttttccccactcttgtgcccttcggcgcctccctctccccctcctcctggccccctcagcgcgattctccctcagcgcccaggcccccgggagccgcggaacaaacttgtgcccggcgctgaccgtgcaaagtggcttccgcg

SEQ ID NO: 202037 - DNA, 252 bp, Homo sapiens
  chr10:31609416-31609668
  hyper
tgggggagggggcggacggaccgacggacgcgcggggctgctacttgcaccgcagctgcagtgtttattgatttgtgctgctgtgccaagggaaacacacacccctctgcctggcgtgagagttaaaaaaaaagagagacagcccgagggatcgagacctgaacatgtggtggtggttgcacagtcgccttttccagtttggagagacgttgtaagttgattgtatttctggttatctcggggcgatgctat

SEQ ID NO: 202038 - DNA, 69 bp, Homo sapiens
  chr10:32217899-32217968
  hyper
cccggcggggatccgaatagggggcagccagcgtacggtgtgggaactcgggccggcgcgggagcctgc

SEQ ID NO: 202039 - DNA, 833 bp, Homo sapiens
  chr10:33623220-33624053
  hyper
ctctgcctgtcacttaccgttgcgaaaagcgccggccggggcgaggacgagggcgagcacggcgcagaggagcggcagccccctctccattctcccttctccgggtccgcaggcagacgcgggagaacgaggacgtggggggaaatgcagcaaagaggagaatctaagcgatccgaagagccccaactccgcctagagctgtacaatcctcagcccgtcttggagaaaagaaagcagcgaggcaatgcctggatccgagaggaacgcttctctttttgtgtctcaagtcgcctgcatcctgtcatttagctccggcttcctctcccttttcccacacttgttcctcttccaggagccactgcccgggccatgtctcaaaaaaaaaaaaaaaaaaaaaaaaggccgggggggggctgtgggtgggagggggaggagggaggtagggcaacacacaccaaagccaatttccaggaagaaaaaaaaaaaatccggcttgtttctggacccgttggagccgcggagctggcgcccaggggaggtccgggtgtctgcgggaaggaggggaacgagcaatgaaaagatgagcgggagacagaggagtttcaccaactgcacccccgcctcccctcctgcggcctccccccactccggagcccttccctcgcttcctcccgcccctctccccgcttgggctcgcctgtaattgcctgacaggagactgggaggaacaactttccctccgagtgctctccccgtccgtctgtctgtctttcccagagaccctgcagggatctccgcgggaaggaaggcgctgggagtctgcgccccggtcg

SEQ ID NO: 202040 - DNA, 45 bp, Homo sapiens
  chr10:33624447-33624492
  hyper
cgaagacagaccgcctgggcgggcgaggccgggctgcagccccac

SEQ ID NO: 202041 - DNA, 138 bp, Homo sapiens
  chr10:33624560-33624698
  hyper
ttcccgagatttggtgcccgttcctctggggcagagggaacaccggagggtgggaggtgctgcgccttccaagcaggggggcaatcgccgcccgaccccgcccaaccttgtctgggagcccaggtgctagggaggggt

SEQ ID NO: 202042 - DNA, 447 bp, Homo sapiens
  chr10:33624841-33625288
  hyper
tgccacccccacttcccacagcggctcgtgcccccagcccgctggatgccccccaggcccgtccccgagggttttccgagaagtgctgcaggaagcgtttgtagatgcgaaaagcaaggacatttctgggaagaaacaggttgcggtcaccgatcaggccccggagaagggtcagtgcccacggggcacctcccagggagtttgtgggtaaggtgaaaaggtcacacgcctcctggggattggcgtctacacacacagccaaagtacagcctgattcctacctggcacaaatagctggccaaagggaggtaggaatgctggcaaggagactctggtcaaaggttttggcggaagaaaaaggggcgggcagggagaaagcccaaggcgcgcgggccccaggccaggactgcgcgctcgcgactcgggctgggagcagtgacgtgcgcc

SEQ ID NO: 202043 - DNA, 256 bp, Homo sapiens
  chr10:33625870-33626126
  hyper
gccggggcggcctggagtctcggaggcccgcctgcgtcctggggggacccgacctccgcgctcgctccggagcgcccgtttggatagctctgagcctcggcggggtgagcgagggggcacacgagggagacttgagctgtgttgtttttagaaaactgccgccaatctctcttcccctttccctgctgagtgtgcattttccagcctagacccgccaggccagcaaataaagccaccggatcgtgcactccggagc

SEQ ID NO: 202044 - DNA, 77 bp, Homo sapiens
  chr10:35102970-35103047
  hyper
ctcccaagtcaggcccggccccgcagcccagccacatggaaccagcccgggataggtaggagctgaggtcctcgcag

SEQ ID NO: 202045 - DNA, 403 bp, Homo sapiens
  chr10:35103079-35103482
  hyper
tgtgctttccagagcccagcaagtgggatcagctcagtaaatgctcgcaagcgagtgccaagtgccagcggtggccctcccgggaacgcctccccgaccccaagccggcgactccccaaaccctgcagcccccggacgcgacgggccgcccctgccggcccctaccagcaggggacatggaggaaaagccccccgccgctgttccgcccccgcccgagtaagggagaggaggcagaaggctcgcaacccgcctctgtcggaagggcagtcacgaaactctcctcacaccaaaagttcccagtccccggcctgtgcccccggggcctgggagccgggaaaggcctggggctggatttcccggcctgcgccccccgcgcgctggctcggggcttggctgggtctg

SEQ ID NO: 202046 - DNA, 544 bp, Homo sapiens
  chr10:35103534-35104078
  hyper
cccgcgctaccgaggccggagctcccgggcggagggtgagggcgggggccgcgggacccggctgggtgtcccagaggctgcgccccggcccgcgcagagaactttggcgcccgcagtccggggcggggggcgcccgcgaggcccgaccggccgcactttccctttccccgcctccctgcgcctctcctcccccttccaggaagcgccatattgatcccggcgccgtccccgccgccgccccctccccgcccgcgcccccggcccctcaccttggcgatggccttccggtagcgggtcaccgcctgctggatgaggctgaaaactttcatgtggccgtccccgcacggcacgaccacccgggtccgtccgaagcacacggtcactttcatgccgccgccgccgcgggcgggcccgcgcccctcgccgagcgcagccggagcagccgaggccgggaccgaggacgctgggcgcggaggagccgctggggactcgggcgcgcgggcggctaggggcgcgggcaggcggcggcgacgccggggggccg

SEQ ID NO: 202047 - DNA, 743 bp, Homo sapiens
  chr10:35104117-35104860
  hyper
tcgcttcgcccggggcttgcctcgcctctccccgccgcggcgcccgcagcctccggccacctgttcggcgtcgcggcgcgctcgccggcggctgcccggggctgtgtggcgctggcgctcgctcggggccgctgggggaggggacggcgggaggggaggggaggggaggggaggggagggggaggagcagggcagggcacacaacaccgcgcacatgcggcagggggaggcgcggccggctacccgcgcggggcggagcgcaggaccgcagctcgcgcccccgccaccgccctcgggggccgacctccttccctccttccctccctccctccctccctccgggggcgcgggacccctcgccccagtgccagcacgggcaggcggccgtctgcccccaccagccctggcccaggcgccccccagcccccttcaccccgcccgcccagcaccctgcagggctgcgtcgcccctcctcggggacgccccttccacgcctccagaagtctccacggagccccccttcccctttctttgtcacttttaatcccattcctcgaactggagggttttgggtgcaggcgctcccggggaaagcagtttgtgctcagtgcggtgagtcccctcctcaccgccccggaggctccagcccgagcctctccgcccgcggggactcgagcctgcagcttgctcggctgggtttctgccctgcccgctccctagctctgctgcagggccggcagcgg

SEQ ID NO: 202048 - DNA, 257 bp, Homo sapiens
  chr10:35415501-35415758
  hyper
ttggggttggcggcgttaggaagaaaccgacctcgagaccctgaagacctgacaacagccgttactctggctgacaagtcattggatttctggcgcacgcgcggcgcggcacgggcagcttccggtttccagccttgcccccgcccctaccttccgccccacctccaggctagttcctcctcttggccccgccccctgaccttccttctccctatccctaggccccgccccctgacccgcaccttcccgccgcccct

SEQ ID NO: 202049 - DNA, 144 bp, Homo sapiens
  chr10:35930558-35930702
  hyper
gcccttccgcactcctttccgccgctccgggggtttgaaggcggctgcaggcgcgcgccacagtccgtaggtccgctctgctggccccgggtcgcgctcagccctcgcggcgcagagcggccgggcctcggctcatcgtcccgc

SEQ ID NO: 202050 - DNA, 214 bp, Homo sapiens
  chr10:35932020-35932234
  hyper
aaaatcattcaatttctttctaaaattcaaaacaaacctcgaaacttataaataggacaggctggaaactctggggctggattccctgtcttcccttcgttctttcaggacgtctattcatccatcccaagttcacaggcttttgccagagcctccttttctctggtgggaggcggcgctgcgctctggcgtggactccgcgacacgtatctgc

SEQ ID NO: 202051 - DNA, 101 bp, Homo sapiens
  chr10:38146491-38146592
  hyper
aattcatttgtcgcggacctggcgcagtcgctctcccccgcagccccgcctcctccccgcgggctcagggcacaaaaagcgcacacgcacacatcaaacgc

SEQ ID NO: 202052 - DNA, 258 bp, Homo sapiens
  chr10:43428636-43428894
  hyper
cgtttgcatatgggcctttccattaagaatcacgcgctccgggcagggccagcgcgctgcgggcagctccctaagaccccgacgggcgtaagcctctctgcctctctgtccagtctggcctgggacagacacctgtggacacctgaggcaaagggaagtcggggcccagggacatctcaggggaatagggtctcgggaaaaagggagaggctgggctacgaaggggagctggggtaggcaggggagcacagccctgca

SEQ ID NO: 202053 - DNA, 36 bp, Homo sapiens
  chr10:43429438-43429474
  hyper
cccccggccttttcagcggccgtccagagctcagca

SEQ ID NO: 202054 - DNA, 150 bp, Homo sapiens
  chr10:43697737-43697887
  hyper
ttagaggagagctcccgtctgccccctgtggttgaaagggcgacagcgctgaaaggggtgtgaccccgaggggaggcgacgcgctcccgcgccctagtccacaggcatgcacgaccccacccagcacagggcctagggcatggggactgg

SEQ ID NO: 202055 - DNA, 124 bp, Homo sapiens
  chr10:43698155-43698279
  hyper
aaaccagcggattccgcccacgttgccagcctaggccccccaccacccgctcccaccacgcccctaacccggacccaacccacagctccagcccagacctcaccccagcctggtgtggcgtcac

SEQ ID NO: 202056 - DNA, 69 bp, Homo sapiens
  chr10:43818308-43818377
  hyper
tactcagaccaagccggtttaccgtcaccatggcaacagcgcgtcctgggctggggcggggccagactg

SEQ ID NO: 202057 - DNA, 129 bp, Homo sapiens
  chr10:43818407-43818536
  hyper
gccagtgattggccatctgggcgcggggcgggctgagtcagttggagggggcggggctgaggctccggtgaacgccgtaggcccgggctgggccgagggagatgatggatgccgcttcttgccactccc

SEQ ID NO: 202058 - DNA, 720 bp, Homo sapiens
  chr10:43892054-43892774
  hyper
agtggtggtggggtcccttccgcaaggtgggaggcccgggcgcgcggtaaacgtgttttggcgggaagcagcgccgaggccccgagacaaggtgacggcgacgttcccgcggcctgctcacggcactccagcagcctcggaccgcccggcccggcaggaaggtcggccccagggcctgcgcgggctcgggcgggagcttccgggcggggggcggagcgagcggcgcagcggggagagtgggggcagggacgggagggttcccggagggaagggcgcctcgcgggagggggaggggaggggaggggaggggagggggcccctggcgggcttccggggccctgagggcgagagcgagggcgacggcaaggtggggtgggggctgctccccggcccgccaagctagcgctgcctaggcgggagctcggggacccgcgggccgagcgcggctgaagggagggaagggaagaggcgctcgtaggtctgcgtccgtctccgagcgaccggggcggcggaaagggacctggggggggcggccgggactggagtggcggggccggggcgcccgcgcggcggctcaccacgccagggactggcccgtcggccccgaggaggcgcggggtccggagtccgggaagcggaggcctcgtgatccaagaccggcagccggacgtgggtcacggggtgcagaggaggaagtgccattgccgggcccgccaagat

SEQ ID NO: 202059 - DNA, 192 bp, Homo sapiens
  chr10:43892970-43893162
  hyper
ggaagagaagccagcaagttagacacagcccctctctgggaggccgcctctaaaatggaactagcggacgtaccttggtttgtacatttgaccatggacacacgtaaagattttgaaaaaaaatctttgaaaaaaaatttttttaacgcaattcctaaacttttaactaacgcaattttgtggacctctgaa

SEQ ID NO: 202060 - DNA, 208 bp, Homo sapiens
  chr10:44185132-44185340
  hyper
tccactgggccagaccctggcccgaggtggccccggagctgtgagcgggaggaagagggaagggcggagtctggagccctcacgccttccgccttgtgcgcggtgcaggctgccgagagcccggccgggcaagcctttccgccgtggtcagtgactcgtttgcacaaggactttttagggaagagagaagccaggccttcgctgtggg

SEQ ID NO: 202061 - DNA, 77 bp, Homo sapiens
  chr10:44186043-44186120
  hyper
accggtgaggaccctgcacccagagtcgggggtccaggctgttgctggaacaggaggcagctcggtgtccacggttc

SEQ ID NO: 202062 - DNA, 128 bp, Homo sapiens
  chr10:44806674-44806802
  hyper
tccaccacaggagggggagcacgcgccctgctgaccgcacgcccacgtgatatcgccttctgccatcgcagaaagcagcggttcagcctctctgcctgcacacttgcgtgatggggagctcacaagca

SEQ ID NO: 202063 - DNA, 427 bp, Homo sapiens
  chr10:44879396-44879823
  hyper
ggttttgttttgtgtgttcagaggcaacagtttattttggtttgcatcggtgtcctgtgacagcgcagcgagtttctcttcagcgaaagaaaagaaaaaagccctctcccagtgaaacgggacaccacggttcccagtggcccagggccttggagattgaactttgctgcagctctcattctggggcaaagcgcttggccagctggtgacaaaagagcctgtctgcaggtgtgtttggggagctggggagggggcgtgtgaggctcggagggtccctgggcctctctcaggtgaacccgagaagagacaggaagacagcggctggacgcgcgcccaggtccgcgtcgctgcggaccgcggagctgtgcagaagcgcggcctggcgggtggcacaagcccgacagctgcgccgcgcagcccgcccgcg

SEQ ID NO: 202064 - DNA, 112 bp, Homo sapiens
  chr10:44882185-44882297
  hyper
ggtggcggcgcctccctccccgctcccagagctctggccagctccattcctgcgcagctgatgaaacccgggagggcgaaggggtccgcgggaaatctacacccgggtggag

SEQ ID NO: 202065 - DNA, 35 bp, Homo sapiens
  chr10:44882362-44882397
  hyper
ctggccaaagcaaacgccatcgcctctcgcttctt

SEQ ID NO: 202066 - DNA, 50 bp, Homo sapiens
  chr10:49514479-49514529
  hyper
tcccgctccaggccacgcccctcacccacagccctcggaggctctctccg

SEQ ID NO: 202067 - DNA, 178 bp, Homo sapiens
  chr10:49731801-49731979
  hyper
cctggagggcggaccctcccctccgctctacccactcccgcccaggggccggaccccacccccactcccacatggggaccgaggagccccaggatgcgcccccgcgccccgagtgaaggggagcctccccttccaaagttaggagactcagaggagcagcagccgcacctgagccctt

SEQ ID NO: 202068 - DNA, 73 bp, Homo sapiens
  chr10:50323149-50323222
  hyper
accaacttgggctgcgctcctgctgcatctcccctcggggcctgccgctgggaagatctcggctgctgcgaga

SEQ ID NO: 202069 - DNA, 115 bp, Homo sapiens
  chr10:50606762-50606877
  hyper
taaaaaagggcgttagtaacgaaaaggttatttttccttaatttttgtgcggtaaaatgtattttccaattaaccaaattcgccgatctgtctcgcttggacactctgataattt

SEQ ID NO: 202070 - DNA, 68 bp, Homo sapiens
  chr10:50814999-50815067
  hyper
agagaaaaatgcttccgttttctcctacaggattggacaggaagttctctgttgcctgcaagttatgc

SEQ ID NO: 202071 - DNA, 35 bp, Homo sapiens
  chr10:50821017-50821052
  hyper
agcccggggatgccgcccgggggagcctgaggacc

SEQ ID NO: 202072 - DNA, 87 bp, Homo sapiens
  chr10:50969809-50969896
  hyper
caggcctcagttttctcatctgtaatcggagaccgcggttaaaaccgtctattaggctccttggtagtccgaagctgcctatgggtc

SEQ ID NO: 202073 - DNA, 194 bp, Homo sapiens
  chr10:50970412-50970606
  hyper
gcccctgagactccgcgcgtcgtgacgtctccatggatgccccgccccgctcctggcgctgtccacggtgctggcggcccaggcccgaggtcgcccacggccgaaggggggactcctctctgagaccgcagaacggggctgaggccctgaaccccgtgtgctcgtcctaaaactaggacgaatgtaccagacga

SEQ ID NO: 202074 - DNA, 31 bp, Homo sapiens
  chr10:52177704-52177735
  hyper
ataaagatttccctttacttcgccgtagtag

SEQ ID NO: 202075 - DNA, 167 bp, Homo sapiens
  chr10:52750721-52750888
  hyper
ctctgctagcaactcggctgtcggtggggtggcgcgcgcgtattctcacggagtgactaggagagggggacgagggagggggtctcaggggaggaagggcagctctaattggtttctcaatgaaagataatcacctactccccagagaggctggagattagcactct

SEQ ID NO: 202076 - DNA, 281 bp, Homo sapiens
  chr10:52751102-52751383
  hyper
ccgagaaaaagtttcgcggaggggctcagtgaaaaaatgagcgagctagaggaagactttgccaagattctcatgctcaaggaggagaggatcaaagagctggagaagcggctgtcagagaaggaggaagaaattcaggagctgaagaggaaactccacaaatgccagtcggtgctcccagtgccctcgacccacatcggcccccggaccacccgggcgcagggcatctcggccgagccgcagacgtacaggtccttccacgacctccgacaggcattccg

SEQ ID NO: 202077 - DNA, 233 bp, Homo sapiens
  chr10:52751562-52751795
  hyper
tttatttttatttctgcccatcacgtgctgtgcttgtctccgccgggctgggaaaggcgagctgcacggggagacgcgcccctgtggcgtgggggtggggaggaggaccgcggaaagtttactcgcgcgggctaacttgtgccctccacacatggctgcagtcgcgcggctgtccttcgtgcgccccgctgggagcgtccacgcagggacccaaccctgcccatccaggggcc

SEQ ID NO: 202078 - DNA, 111 bp, Homo sapiens
  chr10:52833457-52833568
  hyper
gcctcgggtgctaaaatcggaaaccccaccccctaccccacaaccctttcccaaaggtagtaggctgaaagggggaattcctcgcgggcgccgactcgctcgcatctcctg

SEQ ID NO: 202079 - DNA, 280 bp, Homo sapiens
  chr10:52834081-52834361
  hyper
aggtttaatcccgggttggacctgctggtttgctctccccgctctgagcctcacagccagcccagagaagtggaatctgcactgaaactctgggtggctggagccggcggactgggcatgctcagaagccagggctggctttggtctcaagtaggaagctttggcactcgggaggcagcggcgactttggggaaagttgatcggagaggggaggaagcctcaagacgcggagcagcggcaggaaggagcccccggcagcccggaggagcatgggcacctt

SEQ ID NO: 202080 - DNA, 109 bp, Homo sapiens
  chr10:52834756-52834865
  hyper
ccatgtctgtcctcatcctcagaaatgtttcattttaacgggcacttcttgcggggctgtgcacgtttctcagagccagactcactgcacatacgttgccttcgtgtct

SEQ ID NO: 202081 - DNA, 165 bp, Homo sapiens
  chr10:53459323-53459488
  hyper
agacagccgatagcggattcttcgaggcgtctgtcctcttgcgaccgacacttccgctgagcaacggaagcggctttcaagatccgggcagaaactttactaattcgcttgaatcgttccgcttgcctgtggaacctgcatcccactaacaacttatctaatgct

SEQ ID NO: 202082 - DNA, 457 bp, Homo sapiens
  chr10:57390676-57391133
  hyper
gtctggatctacactgacccgttgacgcgctttcccaaaggaggaacgacaccaacaaaagcagaatcgctcgtgggagattttctaccaagaactgttacctccctccccgtgtaatcggtttccactcaaaaggatgcggaaaggacctcatcctctgctgtccctttcgattggcccgggactgggcgaagccgggagctgcagggaggggagccccggcaccccagcctctgcccaacctcccccagcacggcggccctcggccctcgtcaccaattcctaggcagaaaagcgcgcggccggagcgcgcaagtcttggcgtccggaaacaagtgttttccgctcagtcatggcggcttcgccagtcgaacagagcgaaagggctctgggcgaccctgcgacttccaccagaccgcgagcccggagcaccggcggagggtggccaaacgcgggc

SEQ ID NO: 202083 - DNA, 312 bp, Homo sapiens
  chr10:60028787-60029099
  hyper
tcctcccacctcccgtagctgtcaaaatccggagtccagacttccttatggccaggacagctccacgcatgctcagcacctaccagggtcgagctcacacacgtgcctacgacccgccgcggcgcctgcgcggtagcatcgcggagtcggtgctttagtacgccgctggcacctttactctcgccggccgcgcgaacccgtttgagctcggtatcctagtgcacacgccttgcaagcgacggcgccatgagtctgacttccagttccagcgtacgaggtgaagtggggcctgggagcgggtgaggctggtga

SEQ ID NO: 202084 - DNA, 190 bp, Homo sapiens
  chr10:60272365-60272555
  hyper
ggatactccatgtgcgttcaggagtgtgtgtgtttgaggagctatgaaagtgcatgtatggaaaggatttatacgtgtaagtgcagaaagtggcagtgtgtacgtggtgtgtgtgtgcgcgcgcgagtgtgtgagcgccaggggccgcccgcccgccgcggctccccgtgggctggccgggccaatgagc

SEQ ID NO: 202085 - DNA, 211 bp, Homo sapiens
  chr10:60273346-60273557
  hyper
cgagtttgtactggcgcgcccaagttgcgttctggactttggagatgccaactttagcccggacacctgggctgtgccatccggaccactcgggccgcacagagtatgcgtgaccctccccattccctggcagcctcgagttctgtctctctccgtctgtttcactctctccccttgtcagtatccacttcctccagctgaggggccttgt

SEQ ID NO: 202086 - DNA, 36 bp, Homo sapiens
  chr10:60273587-60273623
  hyper
aaggcttaagacaggagctcccgcccccacccctgt

SEQ ID NO: 202087 - DNA, 259 bp, Homo sapiens
  chr10:60935996-60936255
  hyper
ccaattcttggtaaacaacaaacatgctcgccctcgcctccccgtgcagacgcctcagggccaactcgggcttcgccaggcaccgagagcagacagaagacgccaaatggctatcaccaggagagagggcgaggcagccgcgcggcgtatagcgctcgcccttcccgcgcgctcggtcgcccgacgcctcacgcgcgaggttgccttggcagtggctggagggcaggtgggggcgcgtgcgcgcagaagggcgggggag

SEQ ID NO: 202088 - DNA, 337 bp, Homo sapiens
  chr10:61122153-61122490
  hyper
cttactctgttacagtggtgctgctgaaggaattatcctgaaggctgaaacagaaacaagaaaacatcagccaagtctggccggggagccgtctccctgattgctctccgggagtgagcacatacacaaacatggcattgcaaggcaagtctccgggctcgcccggcacgctcgctctaccttgggctgctgtctgcacatgctcgtaacgacacccccagcaggggcccagcggcacgggcgaaccacaaagcccggcagcccgcgaggctgcggggacagagctgggcggggcgcggcggcggggctgggaccccgggatccagcgaggagcacc

SEQ ID NO: 202089 - DNA, 85 bp, Homo sapiens
  chr10:62538165-62538250
  hyper
ctttgaaagtctacgggctacccgattggtgaatccggggccctttagcgcggtgagtttgaaactgctcgcacttggcttcaaa

SEQ ID NO: 202090 - DNA, 180 bp, Homo sapiens
  chr10:62703652-62703832
  hyper
gccggggcggtgggggctccgcagcggctgctcggagaagtttcatagcatagagcactcacgacacagaacctaccctgaagccgagcgagacgcgagctctctccgccttcaagggccggggggagcgggggggcccccgccactcagcagcagccacggctgcgcgcggtcgcgggt

SEQ ID NO: 202091 - DNA, 32 bp, Homo sapiens
  chr10:63211995-63212027
  hyper
ggtcccttcaccagcgttacaacccgttcctt

SEQ ID NO: 202092 - DNA, 86 bp, Homo sapiens
  chr10:64133781-64133867
  hyper
gcagaaagcgccgcgactgcgaggctgacacgcgtctttccttccctcccccggggaatgatcccagcatctctcgcagtgatgtc

SEQ ID NO: 202093 - DNA, 78 bp, Homo sapiens
  chr10:64578688-64578766
  hyper
cagggcgcggagggcaggaccggggctgggggcggggcggggtgcctgagcgagggaaaaccgcgaggtcttcggctg

SEQ ID NO: 202094 - DNA, 199 bp, Homo sapiens
  chr10:69523830-69524029
  hyper
agtgttctgaaggcgacgcccccagtcttggcgggaaacgccgcggaagacgcttctctcgcagaaatgccaaattttcgggagcgcgggctcgcagcacgtaacagaacagatctttttgtttcacggccctctcgtagacctaataagcgcgagggcgaaaaccaggtcagcgaccagaagccaggcaaggttgcga

SEQ ID NO: 202095 - DNA, 167 bp, Homo sapiens
  chr10:69834339-69834506
  hyper
gtctttccctgaacgtgcacccagatcagctcatggggactgggaaagagaaatcatctgcacacacccaacctcgcagccaagcagacgactaccgcaaccggccgctcgcaacagcttcagaggccggcggccgaggcttggcagtgcgcggcctcaacctgaga

SEQ ID NO: 202096 - DNA, 80 bp, Homo sapiens
  chr10:69834887-69834967
  hyper
tgggaaactttaccgggttccttagagaaaagcggacgccactgctgtccagtccagagacagccgtcagcgacccggat

SEQ ID NO: 202097 - DNA, 128 bp, Homo sapiens
  chr10:70091480-70091608
  hyper
cggagaacttctccagagcgctacggcacggttccttctacacactggcagaactgccattgccatcgccccgaggcggcagaatggtacgctctgaaaactggatggttctaacgtaagcaagaaaa

SEQ ID NO: 202098 - DNA, 360 bp, Homo sapiens
  chr10:70092840-70093200
  hyper
atttggaacttcgaaaagagtacgtactgattttccaaagggttttttttttttcatgtttaaacgttaataaggacttcggggatgattttgtgagcagaaaagtgggtgatttatcaaataggaatgtgaaatgggcatgtttcaagtaggtcgtctgggcccagtgaactataattgttgctttttgaactttcggggtgggggtgggtgatgtagcaattgttttgcgtagtttggcgtatatatgttagaatttgtttttaagttttacttttgggaaacagttaaaacaacccagtgatggtagatgtgtgtgtattgaaattgagctttcgatgttaaatcttccaagagttg

SEQ ID NO: 202099 - DNA, 217 bp, Homo sapiens
  chr10:70660994-70661211
  hyper
tatttttccccgccgtgcggtgcgtgtcccggaagtgacgcatggccaaggccgggcggccgccttgcccccgcttcctttcacgctgtcgctgcccgtaggtggttgtggccactgtgcccggagggaggcggcggtggccagtaatgcctgggaaactcctctggggggacattatggagctggaagcacccttggaggagtccgagagccagaa

SEQ ID NO: 202100 - DNA, 282 bp, Homo sapiens
  chr10:70748888-70749170
  hyper
ctcggggtgaaccacatcgacacggaggagctgtcggcgggggaggagcacctggtgaaatgcctgcggctgctgcgcaggtaccggctctcgcacgactgcatctctctctgcatccaggcgcaggtgagagcgagcccggccaggccggcccctgttggcaaatggcgagggatggggaggagcccctgccaaggccaagggcagacgttgtaaggcgcaattcgtccccacgtttttgtagctctggactgagtcccaaagagcgtctgtggtcttcaa

SEQ ID NO: 202101 - DNA, 57 bp, Homo sapiens
  chr10:70883516-70883573
  hyper
acatctcttcttgcgaggcctaaggaagtagggctcccactcgcctcggcaacccaa

SEQ ID NO: 202102 - DNA, 1257 bp, Homo sapiens
  chr10:71078140-71079397
  hyper
cgagccctcatttccgaggaatgggaccgccttcgtgcccccggggctgccagtccctagactagccctaggggcttctcgtcccggcggagccgggcggtgcctcctgcctgcgcctcgcacctccccgcctggcacggcccacccgggcacggcgccgccacgcgtgaaggcccgcatcggctccctacgtgggggacgtgcaggatgatgcggggtcgggggggatttcgctgcgtcgcccgccccctttccggcgcaggagggagcggccgccgcgtccccgctccccggccgggacgccaccgccgggcgttgcagaggcgcgccgcaaccaatgggcgtggaggaggtgggtcggctggcggctgtcaccctccaggggacgggagcgcggagaccgggagcgcgcgagctgtcgccgcgccccgggccgagggggaggagccgggggaggaggaggaggaggagccgccgagcagccgccggaggaccacggctcgccagggctgcggaggaccgaccgtccccacgcctgccgccccgcgaccccgaccgccagcatgatcgccgcgcagctcctggcctattacttcacggagctgaaggatgaccaggtcaaaaaggtgagcccccgcccgcgccgccgctggtcctggccgcagccttgcgttccggcatccgctcgccgcctccgctgcctccatcctccggcgcccggccttctccgggccagcatcgagttggactgcagggcgcaaggaaagccttcgccttcgattctaccggcattgtcagtgtctctgtgtgtgtgcgtttttgggaggggggcaatcgggcggaagacccccgagaccgggctgcctgctgcagtgtccttgaaacgggccctggatgtcagataggcccccgggctgtgcggggaggtggccggtgggcccttccgcagggcctgttcgggagggtccgagcgccgtgggaggaggtgtgatcatggagatgctggggaggtgatcgagcagcaggcgggggtgctggctggaggccaggcctcccatatttggggttcctggcggagggtgtcgggtgccccggagaagctgtcgccgggctctcccagttgtttgagctgctcgttaatctgaggacgaggtgacccgcccggcttcccggaacggggaggggcggcgaggccaccggaaactttgctcataggcctcgtgtctggagcggcacgtctgaatggaattttttatt

SEQ ID NO: 202103 - DNA, 112 bp, Homo sapiens
  chr10:71211454-71211566
  hyper
ccccagtagggcccggggatgggggtggggacccacaatccggccgccccctcactggcccggggttgggtccacacttagccgctccagggagtgcgcgggtgagcgcgcg

SEQ ID NO: 202104 - DNA, 85 bp, Homo sapiens
  chr10:71267678-71267763
  hyper
ggggtgggggaccagggaagcggagttgcccacaggtccacctaccgcgctccctgcagccctcagtgtgcctaatggctgccgc

SEQ ID NO: 202105 - DNA, 59 bp, Homo sapiens
  chr10:71267805-71267864
  hyper
atgccgggacttgcgtgcgtcagtccactcaaaccttcgggccagaagacatgggatct

SEQ ID NO: 202106 - DNA, 198 bp, Homo sapiens
  chr10:71336786-71336984
  hyper
gggccgagactggccacttcaaacagcccttcaaacaaaaggagacgacgaaaagaaagccccacctgtctccagtgtttgctaaaataataataaatagatttcgtttaataaataattacaagagattgtaaagtggagtgctttggaaaacatctaccgcgggagtccgtgcagccagccgtcacctgctcctaa

SEQ ID NO: 202107 - DNA, 198 bp, Homo sapiens
  chr10:71389862-71390060
  hyper
cgccccatctccccgacccccagcaccccgcgccgcccccaaccctgggccgggcaggtgcaattcctcaggcggcctacagagggcgatgtgcgccgccactgggccgcgcccctccggcgcgcgcttcctgtgaggtcaggtgggaggaaaccgcctggagccgccgggagtggacgccgccgaggcccggagtcg

SEQ ID NO: 202108 - DNA, 154 bp, Homo sapiens
  chr10:71390109-71390263
  hyper
agcccgggccgggacttggagccggtgtcgggctccagaggctggggctggcggccggggcagcgtccctcccgcccccggcccggaatgtcaggtgcgccgcgggccgggcgcgcgggtggcccaccgggcgggggcgcgatgacaaagcaca

SEQ ID NO: 202109 - DNA, 348 bp, Homo sapiens
  chr10:71561445-71561793
  hyper
acttcaaagaggacggggagcgcggcagaggggctcccgggccggcgggctggggccgccggacctgctcaccacgccccccaccctgggcgagtttgcataaataaacaaatccaagccgtcggccccgcgggaggtggaggaggagtgacgaggaggaggaggaggagggaggggggagggagagattagtttgggaagtagcacggattgctcatccgatccgtgccgccgcagggagtgtgtcaagttacagaggcgccggaatcggcccctgcgctcctcgccagccgccacgacccacctctgcccatggggccctccgtgtgcgccccttcgcccggggac

SEQ ID NO: 202110 - DNA, 191 bp, Homo sapiens
  chr10:71561837-71562028
  hyper
acagcgcggcaccaactgctctgcagacacttgaagggaaagactgggcggagagaaggagagccggtcagattcccctaactttcctggacttggaacgttcttcgaaataacttttttctcacctaggtgtaccccaattaccgctggttgtgctttttcggcacttcctctcctactgctaatttttc

SEQ ID NO: 202111 - DNA, 794 bp, Homo sapiens
  chr10:71812306-71813100
  hyper
aggagactggatcgcgaccatagcgcgtttgtgcccagttctggggaaagcctcatgttagcgagtggccctcggctcgtctcgcagatcggccaagtacgcggaggccgcgcggtttcaccattaatactcctgaaggacaatagctcatcaagccccaccgaaagccccggacccgtcgcggagcctgggctggcgggggatgaggctgagcaactcctcctagaggtggttatgtggagaaggagcaatcccttctccctcctcctcctccccccgctactatccgcggcccagagaactgccgcttgccgccattgacacgcacagatagaacccaaagaaaggcaaagagtcctgcccggcaccggcgccgcgtgggccaaacctgcgcccgtggaggggcgcgcagagggcaccgggcgccgggagcaggcggcgcagcaccaggtgagcccgccatggcgatggcattattgtttagggtgctccggggtctggaaacaaaacgcgccgccggggcagtgcaggggccggagagaaccacctctgcctctcccccgagcccctgcgggcgcaccctcgatagccgacccaccctctgcaaaaacaaattcttaaatccagctgcccaacttgcttccttgggcgataaagggggggctgctaaagaagtggtcaaattcctgcggccagcgaggggccgggggcgtcgagggtactgagaggggaaggaggagggatgcgaggttcagcagcgggccccaggcgaggctggacccggaggaagcgga

SEQ ID NO: 202112 - DNA, 301 bp, Homo sapiens
  chr10:72238283-72238584
  hyper
gaactggcttcccgggcagtctcccccgccccaaacttttcctcctcgcggagggtgggcgggcggagggaggaagcgcagccggggaacgtggcgcccgcgttcctcccgcccgggggctgcggctgggctgagtgtgtctttaaatctgagccccccgcccctcgcggtggggccgggactcgcggtccgggcgggggcgggcgcggtgattggcggccgggtcgggtccgcccctcggcgttgggtagcggggcgctggggagcagcgcggcgcgcacgggccggggcgcgcaggtcc

SEQ ID NO: 202113 - DNA, 158 bp, Homo sapiens
  chr10:72972972-72973130
  hyper
gtgggcaatggcgcatccacatcgcgggagcggggagcagggaaggggcttcacagtaagctgaaaggtccctgctcgctcctgaaagggatcccttcttctccctggaaggggtgtaggagtcagggtctgagtctccgggaggatccgcctcctgg

SEQ ID NO: 202114 - DNA, 43 bp, Homo sapiens
  chr10:72973180-72973223
  hyper
gctacataagcaaggtgtgcgctcgctgccgtacgccggtaac

SEQ ID NO: 202115 - DNA, 37 bp, Homo sapiens
  chr10:73113223-73113260
  hyper
atttacattggcaagcggtcctcgggttaatctgtcc

SEQ ID NO: 202116 - DNA, 172 bp, Homo sapiens
  chr10:73723762-73723934
  hyper
aagggggttctccaagcagcctccacccaccagcctcgccaggagagcgtggatacccgagcggccccaagcgagtccccggggactggagggccgaggggcagcgcccggaacaaaggcccgcagaggggtcctggagacagcggctccccgggggcggctcccctctctc

SEQ ID NO: 202117 - DNA, 194 bp, Homo sapiens
  chr10:73724616-73724810
  hyper
gcaggcacccacaacccgctgcaaccggatcacacctgccaggtacacacagctcatcgccactcataccccgcacacggcgcaggctgatctgcgcacacccacaccggccaggcacatgccacacaccgaaatgcacattcctgggagcgcgggggatttggcctctacagcaggcacgtcctcacacccct

SEQ ID NO: 202118 - DNA, 69 bp, Homo sapiens
  chr10:73846913-73846982
  hyper
ccgccctgcctcacccctgcttccccagcccccaacccggcccggccgagaggaaggagccagccccgc

SEQ ID NO: 202119 - DNA, 261 bp, Homo sapiens
  chr10:73847427-73847688
  hyper
gatgccaccctcactgccggccccacccagacctgccggtgctgcagtgccccgtatgtgcagcctgcagcatcccagcggctggggcaggcccgggggcggctcgcacaacgcagctggggaccgggtcggggtccagcggcagccggggtccgggtccccccggccccgcaccccttcccactcccggcccgcaggggagaccccggagcgcgcgaccccggagcgtcgggcaggtgtggagctgggggtcccggggct

SEQ ID NO: 202120 - DNA, 131 bp, Homo sapiens
  chr10:73848222-73848353
  hyper
agtgggtcgcggctgaaatgtgacctggttaggagatgcacttgtctgaaaaagcccagcactggacgcggagagggagagagaatcagagaggctgcgccagcaggggctgtaactgtagcatcagcatc

SEQ ID NO: 202121 - DNA, 321 bp, Homo sapiens
  chr10:74020597-74020918
  hyper
tgcccccacccagccgccggggccccaaatgctgagctcagcatctctgtggcctggctgccctcctcccgggcagtgggaggagcctccttcctcccgagggtgggcggggccagggccagccccgccctcctccccgttccccctctccctccatccccctcccgttcctcagtcgcacgttctccaagtcacgtcccccgcttcccctagtagggggtcgacggagattggacccttcccccagtcagctgctctgcatctgtcacctcggcggcagcgctcccttgaggtcgcacctccgctgtggagggaggcgag

SEQ ID NO: 202122 - DNA, 443 bp, Homo sapiens
  chr10:74032458-74032901
  hyper
gcccgcctatctggttaggttccttgcccgcccccggggccctgggcatctgatgtaagtttggctccctcttccatcagggtcctcctgtcccagactgataaacctttagagcaataaaggtcgagtccgtctcaacctccacccaccctcagcaaccactgttagcctctgagcactgctgccaggccagatttcctgtggccccgcctgaatgatgaaacacgggatggccattgcactccctggcttttccagagatctcggtcctcggtcctgatgcaaccgtctggatcttttacacaaagcgctaggcgagcgctgggtgctaggacccggggggcgcccgggcagggaggtccggctgcgctgcctgcagtccgcggggagggcggatgggtctgtgagtccgactgctgtgaatcctcgcttccatccctgca

SEQ ID NO: 202123 - DNA, 260 bp, Homo sapiens
  chr10:74057402-74057662
  hyper
aagtagatgttcgccgctcccctccctccttcccgctcccccgggcaggaaggctcgcgtgcgcgaggccacagcgcaagcgggtgcagagcaggattcgaacagggttccatgcaactccgtgcccagggtcctaccaccgcctgagctcagcggtcttcagccagcggggcccttccacccccttccttaatagttttcctcctccgcctcctgcacggcctccgcctccgcctgaccgtcctcggaaacctcccagc

SEQ ID NO: 202124 - DNA, 296 bp, Homo sapiens; identical to SEQ ID NO: 7423
  chr10:74057707-74058003
  hyper

SEQ ID NO: 202125 - DNA, 418 bp, Homo sapiens
  chr10:74079275-74079693
  hyper
ttccctcgtttgtccgctcagaccagacggggcaaagggcagccatcaaaggtgtctgggacgagcccggcggggtaatgggccgctagggactcagtctggcccgggtctcagccggggcagaaggcagccgggcgagggccgcgggtggggggcagggggccggggacaagcagccccgcccaggccggcgcgctgtgtgcacaacgtgcagggctgcgaaagcggatgcggcctgatggggcaatcgctggcaacgcgccgcgggttgtcagcgggcgctggggggtgggagcccggcgccggcgggccctgcctccagcattggccccgcccccagttccgcagtcgtggctgggtttcggggagggcgcccggtgcggggggcgcccagggcctgcgcacacgggtaggcccg

SEQ ID NO: 202126 - DNA, 193 bp, Homo sapiens; identical to SEQ ID NO: 7426
  chr10:74079752-74079945
  hyper

SEQ ID NO: 202127 - DNA, 199 bp, Homo sapiens
  chr10:74114846-74115045
  hyper
caataatggtgcacgcccagattccatgttccggaggtcttagagttgagtatgcgccaaccctctaatcttccggaggaggaaacccaagctcaggaaggtcacgtggtagccgtcgggatgagactggggccttcggagtgcctgttattcccagacggtttactaagtggtgatctatatacgtaatgtaactaca

SEQ ID NO: 202128 - DNA, 116 bp, Homo sapiens
  chr10:74451757-74451873
  hyper
ttctcccgcctgtcgattggaccttgcaggaagccccgcctcatcaactcagtcaagggctttagttggcccggcgtcggtgagtggcgggtcttagctccgccctggccgtccgc

SEQ ID NO: 202129 - DNA, 179 bp, Homo sapiens
  chr10:75385748-75385927
  hyper
aggcaaccagctctcgcgacactttccttggccatggcgagagcacacgagaagagactctcgcaagaaagtaaatgagtcaggctggaaacagcgaagtatatctcgcgatagcactgtttaaaatggcggcttcaaggcgtttcacgggtgtcccggacaggcgtggaggtggggcg

SEQ ID NO: 202130 - DNA, 40 bp, Homo sapiens
  chr10:75407358-75407398
  hyper
caggcttcagccccgaggctcagagcatcttcttcaggac

SEQ ID NO: 202131 - DNA, 39 bp, Homo sapiens
  chr10:75639673-75639712
  hyper
gacaaaactcaccagcgtagctaacgtctagagaaagct

SEQ ID NO: 202132 - DNA, 86 bp, Homo sapiens
  chr10:75670639-75670725
  hyper
tggggcaggcccccggccaggtgcatgggaggaagcacggagaatttacaagcctctcgattcctcagtccagacgctgttgggtc

SEQ ID NO: 202133 - DNA, 53 bp, Homo sapiens
  chr10:75670755-75670808
  hyper
tctttgtgagcgttgcggaagcacgcggggtccgggtcgctgagcgctgcaag

SEQ ID NO: 202134 - DNA, 113 bp, Homo sapiens
  chr10:75671364-75671477
  hyper
tccaaagtgagtgcgctcttgctttgactgatgctgcccaaggacctctgatcagcaccaggggagaggaggggctgctcagggagctggggtcctccggattccatccacag

SEQ ID NO: 202135 - DNA, 206 bp, Homo sapiens
  chr10:76970482-76970688
  hyper
tggcagcgggctgcgctgcagggacaggcgcggcggacagccccgggggcagcggcggggtcctgtctgggagaggacagggttgcggcgggcggaacggtgtctccttcacttcgccctccagctgctggagctgcagcccgaccgcgagcgtgccaagcggcttcagcagctagcggagcggtggcggcggcccccctcaggac

SEQ ID NO: 202136 - DNA, 359 bp, Homo sapiens
  chr10:77159568-77159927
  hyper
atccacattaatcccgccgccgcagctaatccggccgtgtgccagccccgtgggtcccccttcggccgaggcgcccccggtgcccttgccaccgccgcccacgtcggtgtctttcttgtcgtccttgccctccggggcacccccggccgaggacagcatacctcccggcgagcaggccgaggcgctggagctcgggctgcctgtcctgggcgtgaatggctggcaggtggcgctcggtacccggaatcccgacttctccgacgaaacacccccgccgccgcccccgccaccgccaccgcctccaccgccgcctcccggctccttcttatccgagccgggtttggagtacggcttgaaac

SEQ ID NO: 202137 - DNA, 284 bp, Homo sapiens
  chr10:77160017-77160301
  hyper
cgccgcccccgttggaggcaaccgaggagagtttggaggagggcgaggggtcgggcttcccgatctgcgaacatgtttgcgccaacagcgccagcgggctcttcttggcatcgagctgcggggtcagacgatggggggggagcgtcacacagagaaagaagtggaaaccctttagaatcctggcttctggggttcaaatgcctctccgcaacagcccacgaagatcctcccagccccaaggcgcaattctaggcggcaccccctcttcaacacccactcacaaa

SEQ ID NO: 202138 - DNA, 311 bp, Homo sapiens
  chr10:77160721-77161032
  hyper
acggaagcagtagcctcttcccccattcgggagctgaatcactccgacccccccacctccgcccagatcccgagaaaaagaaagccctagggtggcagccagggtagtggtcccagtgcgatccagagagagggtccttacctcgatggggctgaccggcgtggaaggcaggggctgcaggtactcggggtgcaaaatgtggccagttcgtgccgtcagcatcttcagcaccttgattggcaggcggttggcctggcgcagggggtcagaggggggcacggcgtgcacaaaaggcttggtgctgccggccg

SEQ ID NO: 202139 - DNA, 217 bp, Homo sapiens
  chr10:77161406-77161623
  hyper
agtgccgggcggctcgcggtgtccgcctcgggctgctcccctgcgctgcgttctcgcggccccgcgccggcgctgcgctctgcgatgcgagccgctgcgtgtccagccggggctctggcgaggaaactcacttcaaaagcagctgcaccaagggggagattaaagcctttgccgccttccaatcaaatgggagcccgaggtgattggagggtcaagg

SEQ ID NO: 202140 - DNA, 1015 bp, Homo sapiens
  chr10:77161691-77162706
  hyper
gctccctcttcgccgcccccctgtgtgtcccctccctcgatttcgctgggaggacgagatggacatttattctacgtttgccatccgccgcctccctcttttttcctcctcgtcgttcttcctttccccagctcgaaaataaactgaaaccttcttttgaaggggggtgcgcgtgaggaacagactgcggggggtgtccagaaggagcaccggtgggagtgtggacaccggccggactgtcaactccaggggcgaagggaacctgcacacccagtgttttttccttcgcagtaatcgagatcccgcgcggcgcagcgcagccaccagggtaagaaggcaaggtggggagccggagctggaagaagcccgcccgcccgctctaatttcctcagattccgcggcggagaaaccagaagctagatgggcagtcgcagcggcggcggctcaacaccgcgaggagcgctgggctctccgcccttcccggccacgtgacgcccggggacgcgtagattggggcagcagcgggggtcacatgtttcctctgtttcaccctcagtctgtcccccaaccccccattcttactctcccaccctgttttcctccctcccccccttctttgggcatctccacccctccatcaattgtcaatgttcctcgaccgcaatcaatcagttatttgtcagctcttgtcaatcctcccgtgatttatgtcagcttttgttgctgattacaaggcgggtgcgacttgaagggaaaaagagagagggagagagagacggagaggaaggaggagattgagagggaactggaggaggggaaaagaggagcggcctcctgggatgggggtggggtgggggctctaagaaaaagaatgaaagaggcgcacggtgtcaggaaaatgaatagcgagagtaaagtgcgcaggtgcgcccagggcgccgagaggggcgcgcaggcctggagtgtgcgcctgccctctcggtgtcggagagacgcccttccacctctgggagcc

SEQ ID NO: 202141 - DNA, 324 bp, Homo sapiens
  chr10:77163338-77163662
  hyper
ggatgcccagtgtgtatgcatgcctgtggcgctgcgtgagttatcggggctctgatagcgtccggagcgggttcgagggtctcctccaggaactcgcagaaattagagggggtggggaggaggacacacccccttcctcggaacgacttagaagactttgaatctcccctcctccgcttttccgccccggctcttcttttgttgtcaagtccttttgataaatggtggggctgggagctctgggagtcgggagccagtctgtgcccgcgtggggggcgggggccgagcctggagacccggtttcgaccggcgcgcacctggggc

SEQ ID NO: 202142 - DNA, 89 bp, Homo sapiens
  chr10:77163726-77163815
  hyper
gcccatctcactcccctcccccacctgactcccctccccggcttctttctctgtctcccactccgcacgggtaccgagaactttccggg

SEQ ID NO: 202143 - DNA, 160 bp, Homo sapiens
  chr10:77168935-77169095
  hyper
aggaaccggcccccaatctccggggcttcagtcccgcccctctctccccccagtgccctgcagcgctcccagggtccgtgtctgccctccccaagcccccactgtcaatacaatccctgttaaaaaaaaaaaatctttttagagccaggcacgtgccgtc

SEQ ID NO: 202144 - DNA, 317 bp, Homo sapiens
  chr10:77169218-77169535
  hyper
agggctggggagtgagaaggacagagagcaccgcccgacacaaccagacgcgcggacccggggcctcctctctggaccggtgctggggccctggtagaaccagctccgggagccgaaattgagccatgaagagtgggccgagggaggggcgaggggaacgggcctcaggagggaggggcgggcccggcggcacttccgttgggggtggggctgcgggctgccgcgccggtcccgcccctccgccgcgcgggcccgcccgctccaggccaggctccgcccccaccgactcggagctggatctcaggccacggcgcccc

SEQ ID NO: 202145 - DNA, 220 bp, Homo sapiens
  chr10:77190965-77191185
  hyper
ccagctttgatgaggaggggcgttcagccaagaggcccctcctcgctgcagttgaggtccattatgtaacccagcttgcgaaatgcaggaaaggcccggctggctacagcccggctaacggctcagaaagggcgcccctgataggaatacccccacctcaggcgtggcccagacaaacgcgataaagctgtgggcatggagttttgggcattgggacatc

SEQ ID NO: 202146 - DNA, 104 bp, Homo sapiens
  chr10:79396527-79396631
  hyper
ttcccttctttctgaccccacgaactcatctccccaacaggttcctaaagtatgggcggatgtgctccctctcgcccaccgccaggagccgagccccggcaggt

SEQ ID NO: 202147 - DNA, 100 bp, Homo sapiens
  chr10:79471071-79471171
  hyper
gggcgcgggcacccctgggctctgaggggcgcgctctgaagggcggcggacttcagggccatgctggctgtccccagaaagcaggagcccgaaaccgcgg

SEQ ID NO: 202148 - DNA, 73 bp, Homo sapiens
  chr10:79606676-79606749
  hyper
aaatgacacaaagcccggttctgggtggtagcccgcagagcccacctccacaagtgctcggcagaatcaggag

SEQ ID NO: 202149 - DNA, 220 bp, Homo sapiens
  chr10:79685704-79685924
  hyper
ggacctggtggcccccggggaccctgtcgtcgaggcacctgagagtgaaggccttcagcggggggcattgttcacagcgaacggcgggactgggggaggcggcgggacttcgggatccgcgcaccgccgcctccccaactgggccagaggagcgagtccaccgaggccatcgccaggtggagcggcggccccggcgaggtaccctcggccagcaggaggg

SEQ ID NO: 202150 - DNA, 229 bp, Homo sapiens
  chr10:79686815-79687044
  hyper
cgcggccgccacccgctcccccgtggccacagccccgccgccgccggcccgtccctcctctctcccctccccaggccgtccctccgggaggcggcagcaggggaggaggggacgggcggaggggaggggtccccggcccgcccgctaggcggggacgcggcgccggctggttcccggtcccccgaggcccaggcgcagccgggggtgggggacacggagtcaggcctgg

SEQ ID NO: 202151 - DNA, 115 bp, Homo sapiens
  chr10:80733746-80733861
  hyper
cccgccgccacctcccggcgaccgggcagtagcagccgtaattggatcctcgctgcctcctcccagctccccgcccccaatcggggagcgggtaaatgccgggtaccttggcaaa

SEQ ID NO: 202152 - DNA, 115 bp, Homo sapiens
  chr10:80827233-80827348
  hyper
atccgaagcgggctccgccggctcccggccgaagccgcccccgcctgccggggaggggagcgcgtgcgtgggcggcgcgtgtgtgtccaaagagggctgcgcgggcgccaattat

SEQ ID NO: 202153 - DNA, 264 bp, Homo sapiens
  chr10:80828532-80828796
  hyper
aaaggggaaagagagcgcagagcgcgagccaagccgagcgccggcagcggcggcggcgcggcgcggcgctccactccggcctgactccgcaccggcttttgcgggcggccggcggcgcggggccctttggaaatagaatagccaatgtaatctgacacttcaacttgctcggctccgggcgagttgattcacttactcaccccctaacgccgagttccttttcactgtctgtggacattaaaaaagcgagcggcggcggcgggc

SEQ ID NO: 202154 - DNA, 349 bp, Homo sapiens
  chr10:81741931-81742280
  hyper
agcagaggagccgcacgcgcacgtactggggctcggatctaccttccagtagcaacggaggagccaatgggaccgcgggcggcggcgggggcgctcgggccaccgcggggcggttcccggctcaggtgcccagtgggcaccagcccagcgcctcgggcggcgctgctgcgaaggccctggcagccccgcgcagccgctcccgcggcggggccgtggggagcgtggctttgggggcccgcgcagcgcagtcctccttcagcatgccgaacagtagcagcggcctatagggcttacaggactcggtgcacagcagcgctgaggaaggtggcgcggccggtccaggccggtg

SEQ ID NO: 202155 - DNA, 221 bp, Homo sapiens
  chr10:81838827-81839048
  hyper
ggtttttcaagaggatggtgaagtcggaggccagcaatgcggctaccgcctatttccgtccagcaagacccttgccctctctggtcacagtcctggggctgggctacttcgcggtgaggcgtggggtggggcggggcgggcctctgttttggcccgccgggccctcgtagggcgaggggagctctgggaacggggcctgtgcgcacgcgcatctgacggtt

SEQ ID NO: 202156 - DNA, 146 bp, Homo sapiens
  chr10:82213597-82213743
  hyper
cgcctcccacagctcgtgcttctcccaggttcggctccgacaaggccagagcggcgtctgcgcagcgcaacggctcagagcgctcccggcggctacaagtgcccggccccgggccaggcccggcctgcgccgcgcacccactggga

SEQ ID NO: 202157 - DNA, 136 bp, Homo sapiens
  chr10:83636097-83636233
  hyper
ggttctgggggggtgggggcgtgtaggaacgggagggagattgtcaggctccactggccccactttagcgggtcccaagtgagaacagatctcccaactcccttcaaagggttaacgcgagtgcgatccctcctca

SEQ ID NO: 202158 - DNA, 69 bp, Homo sapiens
  chr10:83636388-83636457
  hyper
ggaagttatgtccttgtgtggggtgacgagttgatggagataatggtagaatgttgctgaggacgcttc

SEQ ID NO: 202159 - DNA, 130 bp, Homo sapiens
  chr10:85899676-85899806
  hyper
agggaagtttgctgccgggttctcatctgaatctagcgggctgggtgaactttctcggggaccaggcacccaaactcatcaatgctcacggaggcataagcccttggattagggtcggtagtattttccc

SEQ ID NO: 202160 - DNA, 110 bp, Homo sapiens
  chr10:85954179-85954289
  hyper
tcctgtccaggactgggggccgccggcaaagggggcgtggcgggcggggagtcctcttgtcacgccctcctgcccccgcccgcggctgggagcctgtcgctccgctctgc

SEQ ID NO: 202161 - DNA, 42 bp, Homo sapiens
  chr10:86088147-86088189
  hyper
ggtcagtggagggggcggggcccgaagcggaggcggagcttg

SEQ ID NO: 202162 - DNA, 58 bp, Homo sapiens
  chr10:88124922-88124980
  hyper
gcaggtttggtcacgggcccctgaggaggaatcgtagctctccgagcccaggcctagt

SEQ ID NO: 202163 - DNA, 41 bp, Homo sapiens
  chr10:88149246-88149287
  hyper
gaatgagggtgacttgcacacgccgcatagtaaagcggcag

SEQ ID NO: 202164 - DNA, 383 bp, Homo sapiens
  chr10:88515316-88515699
  hyper
ctctttcctcacatacgggtcatcgaatacttttaaaagcattttccaccatgaatgaggggaaatggaagaaaagaggtggtgacaattatttgcattttccaaatggacggaatgagcctccggagggtacacgaggtcaccagcgtgagcccgcggtggagctggaggcgtatttatagctggctgacctcagtcctgttgggccctcgccgctccttatcttatgccgctggaattcgcgggctcgcaggtcacaggagcccgggcgcgccgggcctggcgctcccgaatcgatgagggaagccgctctccccggcagatcctcccggccggggagcctccatcaccctgcctgcgcctcggcacgctggcaaggagcc

SEQ ID NO: 202165 - DNA, 360 bp, Homo sapiens
  chr10:89577747-89578107
  hyper
ttaatcctctagatactaagggctgcggggcgcttgggggcggcactgaggtagggcgtgggagaagaccggggtgacctttcctccgggggttcccaggtccgagacggtccttaaaggacctcagaaggatacgacaaccatcccatgaggccccacgggaaccagctactcacccaggggcagaaacagcaagagcaagtgccctcagccggcctcacacaggaaggaaacgcaacctgggagagaacgcttccggcgggaggcgcggcgcactccctcccacggagcatgcgcgacccgcggtcgccggcgcggagggggcgtgctcccaggcttagaaacagtgagggagagcaa

SEQ ID NO: 202166 - DNA, 269 bp, Homo sapiens
  chr10:89621490-89621759
  hyper
gctcaggggtagtgactggacgtttgttgcaacatcggagaatgcacgctctgggctgcagcaggagataccctcaagcacagaaccaaaagggttcaccctaagcggcagggcatcagcgatggagaggcccgagagccctagcgcccagctccttttcccacgtttgggaaggcgcagaataggtcgatgtagagcaaggagtgagtctcaggtctcagtcctttggcttgctcttagggtagcaggcgaggagtggcaccagtttg

SEQ ID NO: 202167 - DNA, 148 bp, Homo sapiens
  chr10:89621836-89621984
  hyper
gtgcttgtgtaaccagttccccaagcgccagccccgacagcgctccttcgggaggctggtccgagcccctgtttccgccgcggcgcaggaagggttggggttccgctgcctgcaccaggcaagagcaccccgagcaaaggaagaagac

SEQ ID NO: 202168 - DNA, 867 bp, Homo sapiens
  chr10:89621985-89622852
  hyper
acttgcctccggagctatcactggggagtgggaatttggaaagttccccaactagggacacacgtgacctccttcggaaagtagttccgactgtggcccgtgtatccttccacctccttttgaaccctcctaggtctcctcgccccgcccactcgctgggctgcagcttcctaccgttccgtactttccactcaacccggtaaccccaaacgtgcacggtccggccggggcgcgcggagcctggccccgggcgatccatcctgccgggttttcacggcggccaagggggggcggggctaggtggtctctgagaaccgagcttgactccgacgccgcgaaccgacctggagcccgaggggaaagatgctcgactctcttgggggcaccggagcgggcgcaggagaggcctgcggggtgcgtcccactcacagggatcctctttcagttcatttagataggtgccctttgggcccttgaaattcaacggctatgtgttcacgttcagcacgctcggctgagagctttcatttttagggcaaacgagccgagttaccggggaagcgagaggtggggcgctgcaagggagccggatgaggtgatacacgctggcgacacaatagcaggttgctctttgtgctaagactgacaccatgaggacacagatttgggggaagggggaatctctaggcaaaggctgttacagtcaaatctctgcgaacgattgtgatccgacagcggtgcaaaaggaaagagcgaatgcagtccacgccgcggaaatctaggggtagaggcaaggggggagggtattccccttgcagggaccgtccctgcatttccctctacactgagcagcgtggtcacctggtc

SEQ ID NO: 202169 - DNA, 57 bp, Homo sapiens
  chr10:90342573-90342630
  hyper
agagcgcggggtactcctgccgggcccccaccctcgcccccaccctcgccccttctt

SEQ ID NO: 202170 - DNA, 215 bp, Homo sapiens
  chr10:91403666-91403881
  hyper
caattacaaaccctcaactcaacctcccccttcgttgaaaaaaaaaatccacctccaatcctcattggtccacatagttccggcccacatggtatcagtgggtgtgtccctcccaaaaaaccctctcattggccgtgaagaaacagcttctaataggctgtgattttggggggtagttaaactccacgcctccagacttgcgctctccaatagac

SEQ ID NO: 202171 - DNA, 196 bp, Homo sapiens
  chr10:91461170-91461366
  hyper
aaaccagaccgtcagcaccagggcggcccacgcctgcttccgcccattggctgcccgcgtttcaagacccgcccccatattggagagcttcttccggtagccactggaaagcccgcagcgcgagccggctacgctccctggcggagctctggacgccccacctactcccagcgttcagtgcggtgccctggccgcc

SEQ ID NO: 202172 - DNA, 61 bp, Homo sapiens
  chr10:92617539-92617600
  hyper
gcccgcgccgaccgctggggggcgcctggctctgtctcggagccccgcactccccggaccc

SEQ ID NO: 202173 - DNA, 328 bp, Homo sapiens
  chr10:92980949-92981277
  hyper
ccttgcccccgccccgtcattgcaagttcttgcttcccttaactgtcttggtcacagggctctgtgccttaggatcttagtaccaccccaggtcgggaccgtgcatttcctcttccagaggactttctcttactttggagtttcatggcaaacctgtgggaaaggcaaggcagttaatcccaacttatagaggaggaagccgagacccaggctcagatatgaaacggtttgctgaaggtcatacaggggtaagggccagaaccctgattccctgtcttttaattatgcttgctttctgttacacgcacgaatacggtttcccaagagg

SEQ ID NO: 202174 - DNA, 49 bp, Homo sapiens
  chr10:93393014-93393063
  hyper
ggttctgggactccgcggccagctggaaccagccgcgtaacgggaaccc

SEQ ID NO: 202175 - DNA, 33 bp, Homo sapiens
  chr10:93557957-93557990
  hyper
caatatgcaggatcgttcggcttcagcagaacc

SEQ ID NO: 202176 - DNA, 78 bp, Homo sapiens
  chr10:93647662-93647740
  hyper
tctctttcacttttcttcccttcgctaagacttttttatatttgtaagtggaggcgcgatccagttagcttttctcca

SEQ ID NO: 202177 - DNA, 188 bp, Homo sapiens
  chr10:94000529-94000717
  hyper
ataaatactgctgcgtccttcagcaaggttaaaaagacaccgcacacacgaccctttcttctcccttccccagctcgaacactttttaaaaaaacaaaacaaaaaaaccagtattagccctcttgattagcaaactgccttcttgcgttggtaattgtttcatttagctgcagcgaaccacgagggag

SEQ ID NO: 202178 - DNA, 280 bp, Homo sapiens
  chr10:94333923-94334203
  hyper
gatggggccaggacgcaggcgaggacggtgaagaccgcggacagccgaggcctgagcaggcggactggagggacaggggtttggccggggcgctttaggagccagcacccagactttcccaggcggggagggtcccagctagatcccaccggccgcacttgtgagggtggcgacgtgtgtctgactgtgagggggcgaggggccgctcataaatccagtgagggcacacggggctatgttttctgaggcacccccactgactagcgtgccggaccctgca

SEQ ID NO: 202179 - DNA, 129 bp, Homo sapiens
  chr10:94450726-94450855
  hyper
gttcatttcctctgtgtgggatgtgactttatggcagctaaaataaccagttgcttcctattttttttcgaggctgttttgcaccagtctgaagcctgacgcaagcaaaatctcgaaaaaacaatgcta

SEQ ID NO: 202180 - DNA, 94 bp, Homo sapiens
  chr10:94451275-94451369
  hyper
tagttcatctttttatgtttttgagttgttatcctgtctgtctgattccagcctcgagggtttgatgatgcggcccgagcctggctgtggtcgc

SEQ ID NO: 202181 - DNA, 264 bp, Homo sapiens
  chr10:94607752-94608016
  hyper
actgggatctttattcgttcctaaaataaatcttactatcacatgcaattttgcttttcgtgagtgcatgttttcctttctctgactccccacgacccagagtacatcaggcccttgttaaatgtccccgtggctcttattacagattcagggtgatgatctgagtgtccaccttgctgattactacggtacccccgcgtgtggcacagggtgtggcacacacagaagacaaggagatatgttaaagcccaaaggccaggcaca

SEQ ID NO: 202182 - DNA, 233 bp, Homo sapiens
  chr10:94831377-94831610
  hyper
ccacgaaagcttggcgagattcctagatcaaagttcctattggcctggtaatttattgaccccccaccccccgccctgcccccctacaagatgttctttaatgatcgttcactctcacatttaatcctttcctgccggacgcccccgccggcctcgatgtacagatagattaaaacgtttttttccctgcggcaatttccagcgtgcaggccccgctcatcttgtgacccggc

SEQ ID NO: 202183 - DNA, 356 bp, Homo sapiens
  chr10:94833677-94834033
  hyper
ggtcgcggcgcgccatggggctcccggcgctgctggccagtgcgctctgcaccttcgtgctgccgctgctgctcttcctggctgcgatcaagctctgggacctgtactgcgtgagcggccgcgaccgcagttgtgccctcccattgccccccgggactatgggcttccccttctttggggaaaccttgcagatggtactgcaggtaagggagggtggggcgggacaggctgcttccccggagcccggcgcggctctgggcttctgctgaagtcggggtaggcgcccccgggaggcatgctattgcggctaggagcagggctggcgggagcgcggcgctccccggcgccccctcatg

SEQ ID NO: 202184 - DNA, 360 bp, Homo sapiens
  chr10:95326243-95326603
  hyper
tggccgccacctccccggccagctgcggtgttcgcggccagtgttgccgggcacttcctggttcccgcgcgccccgggtgcagctccctgcacccagtgctggcgctcctcagaagggagggggccagaggcgagatgtcgcaaccgcctccctccctctttccccgccttggcactcagtcgcctcccagatgagcactctctcagaccgctgcgggccgccaggcgccgggaatgtcccctgaatgcgcgcgggcagcgggcgacgcgcccttgcgcagcctggagcaagccaaccgcacccgctttcccttcttctccgacgtcaagggcgaccaccggctggtgctggccgcggtg

SEQ ID NO: 202185 - DNA, 200 bp, Homo sapiens
  chr10:95326783-95326983
  hyper
gcctggctgctgggccccgttgcctgccacctgctcttctacgtgatgaccctgagcggcagcgtcaccatcctcacgctggccgcggtcagcctggagcgcatggtgtgcatcgtgcacctgcagcgcggcgtgcggggtcctgggcggcgggcgcgggcagtgctgctggcgctcatctggggctattcggcggtcgc

SEQ ID NO: 202186 - DNA, 141 bp, Homo sapiens
  chr10:95361018-95361159
  hyper
ttatagcgccggggggagggggtcgcgctttcgtaaccgcgcggggtgaaagaccgaaggggaggcgccgggggcacttgcataacgcgccctgactcaccggagcccgggcacgggcagggtccctgtgggccggcctca

SEQ ID NO: 202187 - DNA, 137 bp, Homo sapiens
  chr10:95753995-95754132
  hyper
gactcgccaggagccaagaggtgaggaagcgactctgtagctcggttcctgaggactggagaaagggaaggatgggctggttctctcccaaggcagtcgacccgcctaagggagcagcccgactccgcgtacctggc

SEQ ID NO: 202188 - DNA, 57 bp, Homo sapiens
  chr10:95754214-95754271
  hyper
acaccctgccagtgccttcactccagacgcctgcctcaggtcgccccttcgtgttgt

SEQ ID NO: 202189 - DNA, 151 bp, Homo sapiens
  chr10:96122665-96122816
  hyper
atgacacacgtgccgaagtccctacactaccagagccggaaacggccttcagtccctcccaatcctccgccgccggaagtgagggcgggacttccgtagacaggttcgggctcgcgccctctcgcggtgactgtctcgcggccctggaccg

SEQ ID NO: 202190 - DNA, 600 bp, Homo sapiens
  chr10:96161957-96162557
  hyper
acacctcccaaatatgggagtattttactaccataaatgaaatacatcaagtgaatttttgctaagcgagcaatacccgcgcttcggtaagaactgtcacgcttagagcgggccaaccagcttccaccatccagatggcggatcctagattggcagcctgcgtctctctagctaccgtctctatggttcggggaatctccaggtcggggcttgaccggtccgacttttgcgcgtgcgcgagtcctggcgcgtgcccgccctcaagcaactgtccgacccagcgggtgggaggggtgggtctgggaacgttgcggcggctgtcgccgcggccccagcacccagagctgttctctggccaagcctgcgcctgtagtccttctttgcctcctggggcggccgccacccacccccagatggtgggtccggaggatgccggagcctgctcgggaagaaaccccaagttgctcccggtgcctgcgccggaccccgtgggccaggacaggaaggtaatccgggccacgggcggctttggcggaggcgtcggcgctgtggagccgccggaggaggctgacgaggaggaggaggctgacgaggaggagg

SEQ ID NO: 202191 - DNA, 798 bp, Homo sapiens
  chr10:96162659-96163457
  hyper
ccccgccgccctcggcagccccacgatcggacgcctgcctgctgggctcgggctccaaacaccgcggcgcggaggtggctgatggccgcgcgccgcggcacgaaggcatgaccaacggcgactcgggttttctgccgggccgggactgtcgcgatctggaagaggctcgcgggctggcgcgcgccggcggccgggagtcgcgccgccgccgcccctacggccgccttcgcctggaggggcctggcgacgaggacgcggacggcgcgggaagcccgtccgattgggcctctccgcttgaggacccgctgcggagctgctgcctggtggccgcggacgcccaggagcccgagggcgcgggcagcgactcgggggacagccccgccagcagctgcagcagtagcgaggactcagagcagcggggagtcggcgccgggggtcccgaggagggcgcgccccctgccacctcggccgagaggactaatgggggtgcggagccgcgcctgggcttttctgacattcacttcaactctcgcaacacgttccaggtgagccgcggtcagagcgcccgcgatcacctgcccccggcggggccgccggtgcccttgcccgccgcggagcagggtcctgcgggggcttcggcccgggctcgacggagtggcggcttcgcggacttcttcaccaggtacagcgcaggctgcatgggactcggggcgggtccggggccggggccggagccggggtcttggtgggagtcggagccggagccggagccggagcggagagcttggtcggccgctt

SEQ ID NO: 202192 - DNA, 267 bp, Homo sapiens
  chr10:97055029-97055296
  hyper
ggcttctagctgggaccaagcgaaagcgtgtgactcctgactgggaggtccgctctggtatctaagtgaggccaggctctgcgcagccaagcaaagaaccgccggaagctctggtttcaccgcggccgagcgcagatcgcgcaccggttctcacgtctgcaaacgtgcaactgcctgccgcgggcgccctgatcaaacaagcaacttgcttccctttgctgtgaaaagaaccgaaactcaggctcagagcctcgcaaaacaaagaca

SEQ ID NO: 202193 - DNA, 191 bp, Homo sapiens
  chr10:97321201-97321392
  hyper
gggctgcggtgcccgccccctcattagcatgcctctggaaccgtccactctggcagcgcccggccagcgggcggtgccgggggcggggccgggcccagccgtgacaggaaggggcgtgtgcgcggatgggaggcgaagaagtgtccggcgcccggctcctggcattgtgagcccgccggcctccgccggta

SEQ ID NO: 202194 - DNA, 237 bp, Homo sapiens
  chr10:98272408-98272645
  hyper
ctgggagcgtgagcgtgagcacccctctgtccgtgctggaactgccccacactcatcagcttgctggaacatgcgcttggcccttcggaggctaacgcttcaacgactccagctcggaagccgctcccctcaggactcacgagccgatcagtggccccgaggaagcgggagctgcagcgcccgggcggcgattgcgcccgaaaggcccgtacgtcctggggcgccgcttcctggagg

SEQ ID NO: 202195 - DNA, 212 bp, Homo sapiens
  chr10:98272768-98272980
  hyper
tgcccgctgtgacgcttttctttttaaaatctcccaagagtaaccacagatcttgggaaactttgcgcgaaacttaaaaatgctgtgaaatcggagccaggaactccatctgagcctcggagcgccgcgcccagtccagctcttctgctccggcccggagcgtctggcggtggccagtgctgcccactcgctgtcaggcggccctggcaccc

SEQ ID NO: 202196 - DNA, 37 bp, Homo sapiens
  chr10:98273889-98273926
  hyper
acccagcctaaggcgcctgcccggggcgccacctcgg

SEQ ID NO: 202197 - DNA, 480 bp, Homo sapiens
  chr10:98479809-98480289
  hyper
cgcctctcgcttcagagtcggagggacaggggaagcgacgctcagacactcctagggccagaggtggagggagcgaaggagaccctgaagaagtgggagggggtcgggccaggcaggggctgaagagaatcgcgccacaggctgggacgggaaacgtgggaaagttggagtgggaagtttgcgacagggaacatagaaaagagcagaaagagggcaagatccccgcacagaggacgcaaacagaagcaagcgggggagcgcgcctcaagggatgcggggtacgagagaggggccgggagcccggggacccgcggcgcctgcctacccacctgaggctgccatgccgcggggcgccgctcacatccctggctcgctgcgtgcccggggccgggaccggggccggcggcgtcctggctcgggctggaggggcgccgggctccgcgcgggaccggccgccgctctggcgcttcctccctcagg

SEQ ID NO: 202198 - DNA, 37 bp, Homo sapiens
  chr10:98945010-98945047
  hyper
gaagctgacaaccccgccgagggccctttgaatccca

SEQ ID NO: 202199 - DNA, 220 bp, Homo sapiens
  chr10:98945252-98945472
  hyper
ggtatattcttgggaatggcctgcagccccgtgccgtggcagtccaccgtggttccggtgcaggtgcagagggcggggcacgccgaggcacccaggcgccacgcggctgcccacagcagcagccagagctccggccggaccggccccgccgaggacccccacccgggagtcagcgccatggtgccctcacagcgtcccgctcgcgagccagacggcagca

SEQ ID NO: 202200 - DNA, 60 bp, Homo sapiens
  chr10:98945746-98945806
  hyper
ccctgcgcacacaccacacacacacacacgatcacacacacacccgcgcgctcgctccca

SEQ ID NO: 202201 - DNA, 123 bp, Homo sapiens
  chr10:99080677-99080800
  hyper
gggggaaggctgtacgacacgggtggggaaaggaggtgggggcggggagtattgaatggtggtggaagggtagagaggcgcggagtgaaccccacgccctgtctaaagtgtattttcagagcc

SEQ ID NO: 202202 - DNA, 204 bp, Homo sapiens
  chr10:99258453-99258657
  hyper
acgggggaagccaatgagaaaatcaggcccagccctagggggcggtgctgtcggtcacatgcgcacctggggcgggtggtggcggcggcgcgggcaccgcgagccggcggaagggagaggggccggcctggggcggggttaggcaggtgagtgacaggctccagggggccggcccctgcctggtgccccgagcgagccgggagt

SEQ ID NO: 202203 - DNA, 71 bp, Homo sapiens
  chr10:99496833-99496904
  hyper
gcggagctaaacccggagcgggatgacgtcatgaggacgcagccgcagagcgattcgcgtcccggaagcgg

SEQ ID NO: 202204 - DNA, 43 bp, Homo sapiens
  chr10:100206321-100206364
  hyper
ccgccgcggggctcccgtttgcctagcacgccagtttctgtcc

SEQ ID NO: 202205 - DNA, 35 bp, Homo sapiens
  chr10:100992007-100992042
  hyper
acacacgaacacacagacacacgaacacacagata

SEQ ID NO: 202206 - DNA, 39 bp, Homo sapiens
  chr10:100993448-100993487
  hyper
gagagttttttgagaagagacgtggctaccccagggtct

SEQ ID NO: 202207 - DNA, 145 bp, Homo sapiens
  chr10:100994695-100994840
  hyper
aaaaaattttaactccgatccaacttgcccaccactcaagcctctgcttaaattcgttttctgagagtgggagagaactgacgaaacgatctttccgtggaaaattccagtttcgtgcaatcccgcttgaacactcacacacaca

SEQ ID NO: 202208 - DNA, 56 bp, Homo sapiens
  chr10:101089476-101089532
  hyper
gcccccgggcggtggcggcgtggcccccagcgcggtccccactcgccccccgggac

SEQ ID NO: 202209 - DNA, 236 bp, Homo sapiens
  chr10:101089565-101089801
  hyper
cggacgtggaagtcctggggcccttgcgtcccgggggcgtggcaggctcggccctggtccaggtgcgagtgcgggagctgcgcaagggcgaagcggagcggggcggcgcgggcggtggcgggaagctcttttcactctgcgcctgggatgggcgcgcgtggcaccaccacggcgccgccggcggcttcctgctgcgcgttcgcccgcggttgtacggcccaggcggggacctgctg

SEQ ID NO: 202210 - DNA, 93 bp, Homo sapiens
  chr10:101190597-101190690
  hyper
gctgaggcgtgggcgaagactacggttgattggtagagcgtgctcctatcgcagaggctgttattccttgggtctcccggctgaggggaggag

SEQ ID NO: 202211 - DNA, 332 bp, Homo sapiens
  chr10:101279840-101280172
  hyper
tgggatttcttagaaggttgcggggccaatcagcagccataaatcttagagaaccttcaccgttttacaagggagttcgcaggggctgcccttctccctcacgcggtctatttacaacgccgaaatctccgtgttaatggacctaggataatggtgtttactttaccgcgataaagcgctgggcttcctgggggagcggctgtaaaatgtcctggaggtagggatggaacgggcgccgtaaaagcgggcgctggaagggcgggggcaccaggttctccttcaggccggcgcccccgccctccaccctctaggccaggctgagcagcccaggc

SEQ ID NO: 202212 - DNA, 111 bp, Homo sapiens
  chr10:101381346-101381457
  hyper
aaggccagcgattcccggccttaggacctcctgctctagggagcacgggcgtcttcttccatttgccttccccgagcgtgttggcacaagctgcccgcggtttccagctct

SEQ ID NO: 202213 - DNA, 224 bp, Homo sapiens
  chr10:102046293-102046517
  hyper
acctcgcccacccgagacggagccccaggccccccaccggacgcttcctccccatccattccgggtacctcgggcgggctcatcactccgggtcgccagtacgccctcggctgccgccgccatagcggaccccgcgctgtttccgggccggggtgctgcgcatgcgcactgggtgtgccccgcccacccggccggccctgcagtcctgcgcctagcggtccagt

SEQ ID NO: 202214 - DNA, 332 bp, Homo sapiens
  chr10:102133000-102133332
  hyper
ttcagcccagcttaagatctccgaagacacccatcgcctcgtcctgcccagtcccctccgctaaagggccggcctgcccgggcctggctggcagctgacatgaatggagaggaagcgcctccctctccacccactctcgccggggttactgccggtcacagacccgggccttcaagagctatttacacctacaacagcccaccagcgcctgaccacgccggagccaatcagcggcccccaagcttgtctgattctgtctgctccaatcaggaggcgcggtccttccagcctcttgctcctgtgaatcacaggtcggcgggagccttttttcc

SEQ ID NO: 202215 - DNA, 360 bp, Homo sapiens
  chr10:102416011-102416371
  hyper
tgcctctgcggcctcccctgcctcccggccccatcccgtctccctgtcctccgccctcacccacccggacagagggagactggcgcgggcagtgcgtgggttgggggcacagcccgacccctaagtttattcgttggcgtgggtgcagggtggcggcgggtccgctccgcccgcctcgggtcccagcccccaccccccggagcttccctcccccaccccaccccgccccgccctcgccccgcacaatctcggcgctgacagccgagcaggtgataaatgccggcgacgcggggaaggaattgcgcaaaataaagaagcatgttccaacaagtcctgtcaggattgtattgatttaatcat

SEQ ID NO: 202216 - DNA, 98 bp, Homo sapiens
  chr10:102441134-102441232
  hyper
ggggagcgggtggcggtgtttggatggagacagcagcctcctccggaagccggcccagggcacaattagcagggagcggagacgcccgcgaaggctga

SEQ ID NO: 202217 - DNA, 247 bp, Homo sapiens
  chr10:102469792-102470039
  hyper
ggagacagtgacaccgggagaaacccgcgccccgcgcccccatcccccaggagcccctccctccgcggcgctccgggcagaagagggaagcagtgacccggccaggtggtgatgatgcggccggccgcgctggtcactcttggccgctccccgcgcgcagcccgacccccctcgtatgggtcacggcgcctgcaaaactccctgacacagaaacgccgcggggcctgcgcgtgtcgggaacaatcct

SEQ ID NO: 202218 - DNA, 92 bp, Homo sapiens
  chr10:102475169-102475261
  hyper
agatccacaacagagaaaggcgtggagaagggcagagacagagaccaacgaagtggggtcgggtagaaagaggcggatataaaggcaggcca

SEQ ID NO: 202219 - DNA, 385 bp, Homo sapiens
  chr10:102489864-102490249
  hyper
ggcctgcggcctcagcgcgagagccctggcccccttcccgccgcgggtcgcggtcgggaaagcgcgccctgcaagggggttttgtagataaacaaaagcgtttgctcttctggttttcttttattttctttattcgcctgtcccttccttcttaatctccctcttcgctcttgtttctttaacttatttcccttcctcattttccctttcttttcgttcgcttttccttgtcactctccttcttgttctcttctgtctctttctgtatctccctcttccattttggccccttctctgcctctgggtttccctttcccgggcccctcactcttcctgggctaggattgcgccgtctccctgcatcatttttcctggctccgctgcc

SEQ ID NO: 202220 - DNA, 330 bp, Homo sapiens
  chr10:102490316-102490646
  hyper
cgcagtgatttattcgcttcacccggcggaatcaggtgctgaaccgagccccggaacgagagaacagatttctcccaggaaaggttttgtgaactaaacgatgctaattacggggtgggggatgcgtcgcccgggaaggggaggcgcgcggggccgagcgcggcctgggaggggagagaccggggctggccgaggccctcccggggcgcctcccctgcacctctcgccctggctttcgcctttccctgggaactttcccgtctgagttaactattaaccaccggcgagaggcaattttcttcggaatttcagcgatttccttttcgcagt

SEQ ID NO: 202221 - DNA, 429 bp, Homo sapiens
  chr10:102490715-102491144
  hyper
cgcctcaaacagtgtccttcgcgacggcggaaaactacagcccgcccccgctcccgtgcctgctcaggaagccgtgaccaagccagtgcccgccggtgcccggagtgaaggtggaaaaagccgagtgctcctgctcgggggcggggttgagagggggagattaatccgggcaagccaaggggaccttagacttgcagccagggccgccacccgaggagcccgcatgcagggacgcgcctgaaggcttagtcaaacccggggaaatgccctcccccgcctgcagaatccccacgccgtctcttacttcctccctctttgccactggcgagcttacacgtgcacacacacacacccctctctgtctgtgaccgcaacaaactttgtgaaacttgaaccgctgggtgcaaagttcacgcccttttctccttt

SEQ ID NO: 202222 - DNA, 135 bp, Homo sapiens
  chr10:102501591-102501726
  hyper
ttaatgcatttaatttggtccgcgctgtggggagcatttcctggggagatgcatttaatttcggaatttctaatcccctccctcagaccccggtcctagctcccctagccgctccccgggaagtggaaggaggaa

SEQ ID NO: 202223 - DNA, 257 bp, Homo sapiens
  chr10:102585797-102586054
  hyper
taaacagaatctagtgctgatgaggaaattacacttgtttcattagcgatggggaaggagatagctcagttcctcttggtcacagttgagctcagaagctcattatcctgctgcacgcatgctttccctcctcgtcaataaacaggctttccagtggctgcatcccccacccccaccccagctccctctcagagaggggccccttctcctctacttaacccgcggttagggatcactgtaaacagtctggggtcatc

SEQ ID NO: 202224 - DNA, 109 bp, Homo sapiens
  chr10:102587493-102587602
  hyper
ccccagcctcaccccatcccacgacccccgcaacccttcacatcacccccctcgaaggtcggacaggacgggtggagccgtgggcgggaccctcaggcccgggcccgcc

SEQ ID NO: 202225 - DNA, 163 bp, Homo sapiens
  chr10:102587906-102588069
  hyper
ctgccgaatccctgggaaaaattcttttcccccagtgccagccggactgccctcgccttccgggtgtgccctgtcccagaagatggaatgggggtgtgggggtccggctctaggaacgggctttgggggcgtcaggtctttccaaggttgggacccaaggatc

SEQ ID NO: 202226 - DNA, 77 bp, Homo sapiens
  chr10:102588175-102588252
  hyper
gctctcagccctgccttgcccctacctcagcgtctcttccacctgctggcctcccagtttcccctcctgccagtcct

SEQ ID NO: 202227 - DNA, 160 bp, Homo sapiens
  chr10:102588941-102589101
  hyper
ctgtaattccgtgttttcgctttttcctccctgcccctctctccctctgcccctctctcctctccgcttctctccccctctgtctctgtctctctccgtctctgtcgctcttgtctgtctgtctctgctctttcctcggcctctctccccagacctggcc

SEQ ID NO: 202228 - DNA, 222 bp, Homo sapiens
  chr10:102671979-102672201
  hyper
tctatgctgcccacgcttaacatggaaaactgaaagctgaccttgtgttcctttaaaaaatctccaaggaagtcggctgcagagacttcatggtaactcatgagaaacaaaatgcttttgtggattaacaactgtctttattccaatggagttttttgggggttttttcttcttcttaaagacaaaaaaataatctaccgctgacactcaacaagaaccgtc

SEQ ID NO: 202229 - DNA, 150 bp, Homo sapiens
  chr10:102791893-102792043
  hyper
gccaggggactgtaaaccaagggagcagcgcccgcggctccagcccctcctccctttggctggggagggggccagaactgatccccgaggtgggattggctctgggaagcagcttagggcctggtccaggtggcccaggctgggggcatc

SEQ ID NO: 202230 - DNA, 126 bp, Homo sapiens
  chr10:102792044-102792170
  hyper
cctcgaatgacacccaccgccctcaggttctgccaatccccgtgcccaccgggtgggcgcggccgggaagctcctgcccctccctgctggtcggcgtcacgcgtgacgtcccgcgtgatggctggg

SEQ ID NO: 202231 - DNA, 220 bp, Homo sapiens
  chr10:102802781-102803001
  hyper
cccctccctcctttccaatatcgaaacccacgaattccctagcgccagccctttgacttcctgcccaaaaatccgcgaggttttcgaggaatcacgcgaggactctcctcctggatcccaagcccaggtttttttttcagctgcctctgaggctgttggctctttcttcggcgccgtcctcctcctttccctctctccacccttgcgcctaacagtccag

SEQ ID NO: 202232 - DNA, 509 bp, Homo sapiens
  chr10:102822385-102822894
  hyper
ctgcctgtgctcctgctactgctggtggtgctgacgccgcccccgaccggcgcaaggccatccccaggcccagattacctgcggcgcggctggatgcggctgctagcggagggcgagggctgcgctccctgccggccagaagagtgcgccgcgccgcggggctgcctggcgggcagggtgcgcgacgcgtgcggctgctgctgggaatgcgccaacctcgagggccagctctgcgacctggaccccagtgctcacttctacgggcactgcggcgagcagcttgagtgccggctggacacaggcggcgacctgagccgcggagaggtgccggaacctctgtgtgcctgtcgttcgcagagtccgctctgcgggtccgacggtcacacctactcccagatctgccgcctgcaggaggcggcccgcgctcggcccgatgccaacctcactgtggcacacccggggccctgcgaatcgggtacgcatggcccggggcccccaccccagcactt

SEQ ID NO: 202233 - DNA, 120 bp, Homo sapiens
  chr10:102973524-102973644
  hyper
ctgcctccagccccgcagcccgccgcagtgccaaataacagacggcagagggcgctcctacctaacctttcccatgccgcggagggtgcgaggaccggaactttgcgagccgagaaagtt

SEQ ID NO: 202234 - DNA, 288 bp, Homo sapiens
  chr10:102976706-102976994
  hyper
gcccggcccgcgtgcgctggctgcatatttctatgcataatccaattttctccgtgactatctagttaaactctttaacaacagctacataattagaatttggattcccattaattttccttgggcctcgaaccatttgcagctcacactggtaattaatgcgatacatcactaactttacccagcgcaggccggcccggctcaggtcgctcggccagcgcctggcgccctcgagcgggaccctgactcctgaccctgcttcccaggtgggagccgttttcctccttc

SEQ ID NO: 202235 - DNA, 46 bp, Homo sapiens
  chr10:102995973-102996019
  hyper
tctgaccaaaaaccgttaatggtagtcagctccctccctttcacag

SEQ ID NO: 202236 - DNA, 339 bp, Homo sapiens
  chr10:103347819-103348158
  hyper
atcccagctcggggctagaagaaagctggagtgcccgaccccggccccaagagtctctccaacccccagagtcggtccccgggtggggtcgactactggccaagctagtcacccgggggtgggcaggaatagaccacttaccagcagagccaatgagagcggacgaaggggggaaggagggcaaatggccagaatagcttccgagtcagccggaagtgaccctctggaacggttgccatggcagcggctgggcgtgctgcttagcaggggaaagatggcggtgacgggctggttggagagtctgcggacagcccagaagactgcgctgctgcaggacgg

SEQ ID NO: 202237 - DNA, 202 bp, Homo sapiens
  chr10:103348788-103348990
  hyper
caccctaggattggccgatgccggcccctttgtgcacttgggtcctttctggacccactgggtagccaggatgaattgcgtctgaagttcctgaggctttcaagataacaactggtgactcatgttcacaggcaggggccaatcagggaagcctggagtttgtggaaattaaaatcatttactcgttcgtgcaacatttagg

SEQ ID NO: 202238 - DNA, 47 bp, Homo sapiens
  chr10:103454953-103455000
  hyper
acatggggcggcgcgggccgagccctgggcacgcccctcacacctgc

SEQ ID NO: 202239 - DNA, 211 bp, Homo sapiens
  chr10:103535916-103536127
  hyper
ggtggggaggtgggagggcggggaggggtgggggcggggggcgccgcaccgggcgcgaggggggagcgcggggcgggcggcgggagcccgcagcccccggctgggaactggggcctggatgcagcccggggcgggggcggggcggccggggaggggcggccgacgggttcgggattgagggtctgggctaggggaggggtctggggacccg

SEQ ID NO: 202240 - DNA, 140 bp, Homo sapiens
  chr10:103543156-103543296
  hyper
gccttcttcaaactccgcccccgacacgcacaaagccggggaccctcggccagttccggccccgcccattaaaggagacgcacagtcctggaaaagaaaaggcgccgagaccccgcagccctacccggagcccgcagctt

SEQ ID NO: 202241 - DNA, 31 bp, Homo sapiens
  chr10:103576004-103576035
  hyper
gcgagactccgtctcccaaaacaaaaacaac

SEQ ID NO: 202242 - DNA, 199 bp, Homo sapiens
  chr10:103912112-103912311
  hyper
tgggttcctgagtcgtgctgcgtcgacaacggtagtgacgcgtattgcctggaggatggcggacgccggcattcgccgcgtggttcccagcgacctgtatcccctcgtgctcggcttcctgcgcgataaccaactctcagaggtggccaataagttcgccaaagcgacaggagctgtgagttccgggcttggggcgggg

SEQ ID NO: 202243 - DNA, 217 bp, Homo sapiens
  chr10:104178852-104179069
  hyper
tccagaccccacgcgtgtccctaggaggctgccacatgacctgttacatgccacacgcgctcccgcccccacgagcacgcggccgcgccaagcacacggtatgggtgtagactggacccgccccctaaatccaggagaccatcaactatggaaaggagatctagggaacaccgtcttgaacccgccaggggttttgagtctcggacccaggagatcc

SEQ ID NO: 202244 - DNA, 46 bp, Homo sapiens
  chr10:104220986-104221032
  hyper
ttttaattttggtcgctaagggcaagcgcccgtgacaaacatggcg

SEQ ID NO: 202245 - DNA, 38 bp, Homo sapiens
  chr10:105038066-105038104
  hyper
cctgccctcttccgcgcgtaccctcttcctctggtaaa

SEQ ID NO: 202246 - DNA, 154 bp, Homo sapiens
  chr10:105615508-105615662
  hyper
agggcctggcaggcagggaagggaagggagggaggggagagaggggaagcgcgcggggaggggctccgggccgggggaggggctcggggcgacggggagggggctgcagcccggccccagtggcaggggcgggccgacgagcccccacccgagc

SEQ ID NO: 202247 - DNA, 64 bp, Homo sapiens
  chr10:105615718-105615782
  hyper
ctcagggtggcttcggggggagagggagcggggaaagtgagccccgcgcgcccccatcctggct

SEQ ID NO: 202248 - DNA, 338 bp, Homo sapiens
  chr10:105991923-105992261
  hyper
gccgtgaacaccgcacctcacggacaaggacgcgccgccggcggagtgggggccttcgtcgcgctcccggccttgcgccatgggcagtgttttcctcaggcgggagcaggcagcgcacgcagcaccccagggcgggtcggttacctttccgccgccgcggggctgcgggccgcgacgccgctgctgtgtacacccgtatcccggagaccgtaagccccgcgcccattggctctgcgctttggcccgctcccttctgagccgagcagattggtggaaggtctgccgctctcggccaatgggtgagcggcaagccaagcgaggggcgggccccttgctgt

SEQ ID NO: 202249 - DNA, 35 bp, Homo sapiens
  chr10:106398982-106399017
  hyper
ttttggcaccgggtggaaaggcaagttcaagaggg

SEQ ID NO: 202250 - DNA, 212 bp, Homo sapiens
  chr10:106399077-106399289
  hyper
ctcttctgcctcctccatccctcttggctcttacctggcgccctttcgcctcctcttctatctccctcttccttttgcaccattctctcgccccttttctccttcatcttgtctttcctctctccccttttccctctattttctccttcattccttcctctcacctttctttcctctccgcgcattcccctccctctcgctccactttaacc

SEQ ID NO: 202251 - DNA, 61 bp, Homo sapiens
  chr10:108924881-108924942
  hyper
ttctagttgaggagatagggatgggtgggcttctgctccttccctctcttatgcttcctga

SEQ ID NO: 202252 - DNA, 173 bp, Homo sapiens
  chr10:109674972-109675145
  hyper
ctgctgtttactgcgttttcactggagactccagcaaatgtcctggagaggagagggattcctgctctgtccattttagtctctacattggcaccttggtgtaaacccacagcagaggctgcgtgtcctggctgagaaacacagaagggcagcggggacggaggtggggccgt

SEQ ID NO: 202253 - DNA, 52 bp, Homo sapiens
  chr10:110671595-110671647
  hyper
cctgcagatggtccgcttcagctactccgttaggaggcgggcagttttgtct

SEQ ID NO: 202254 - DNA, 766 bp, Homo sapiens
  chr10:111767116-111767882
  hyper
aagtccaggccccacggggggcgtgcggaggttgaacctttgcagtggcctcctacagccccagcagccagcgtgggcggccgaggctgactcaaagcggcggctcagcctcgggagtaggagtagggggctcgctcatttagggcgggagacatttccgaggcgcccctcctccccttcgcggtcgggtttctatcggggtcgtttccccctctggccctccggggacgccgcggattcgagctgcacagtcagaagaggacgttgaaaaggcgccaggcagccgccccgaaccaggccctcccggctgccgggcctgcaggcccccaccgctgcggcttcacggacttagagcttgagggcgcggagggggctgcgggggcgggaccaggactcccgaggggcgctcggggcggggccagagagagctcggggctgccagaggcgaggtcttgaggaggcggggccgggaggcttcggagcccaagaggcggggccagaggcgtagggggctgcgaggggcggaccttgggggcgtgaccggggggggcgcttggggacctaggggcggggcgttagggggcgggaccaagggacgctcgaggggcgctcggctagtcccgccagagcgcgagccgccagcccgtaacggtcgccagtgtgaggggcgggagggaaagaagaggggtttaaattagattttttaaaacacagagcaagcgccagaggcgtcggcatcccaggtgtcgccgcttcctgctgcaca

SEQ ID NO: 202255 - DNA, 98 bp, Homo sapiens
  chr10:111768340-111768438
  hyper
ccgacgcttcgcgcgtctgctggttttccctaggaaggcggggagtaccaaaatcagttactggctgaagcttaggtgaccccggggaccttaagccc

SEQ ID NO: 202256 - DNA, 48 bp, Homo sapiens
  chr10:111968983-111969031
  hyper
actaggcagacagaccgacagatagggggaaaccgggatgtttaatgt

SEQ ID NO: 202257 - DNA, 46 bp, Homo sapiens
  chr10:111969325-111969371
  hyper
tctcgcctgttttcccggagtgcctgggttgcgagaaaggcgcatc

SEQ ID NO: 202258 - DNA, 447 bp, Homo sapiens
  chr10:112257362-112257809
  hyper
tccgcaccgcgagggtcaccgcggccccggagcgcctgggacactcgaccggcagccgcgggtgatgcgcgagtgagtccctcagcgaagcgcggaagagagaacgaagaggcgccttccacttcctctcgctctaacgccggcacccgccccgcgcgtccctcgcccccgctgccccgccccctgcagggcgtggccacggcccgaggggcggggaaacacccatatttggccttatatgggcagccgcgtcacggacggcactcattcacataaaacgctgcgcggccggcggaatccccggcttctagggcggcgagcggccgggctggctatcgagcgagcggggcgggaacgcggagttgcgccgccgctcgggcgccgggctccgtcgcggccgcagccccgcgggtcgccctcccgtgcctcgcccgcggacaccctggc

SEQ ID NO: 202259 - DNA, 353 bp, Homo sapiens
  chr10:112257978-112258331
  hyper
ttcgctgcctcgaacgtgcgcggctcgctcaacgtcaacctcaactcggtggtgctgcggcgggcccggggcggcgcggtgtcggcgcgctacgtgctgcccgacgaggcggcgcgcgcgcggctcctgcaggagggcggcggcggcgtcgcggccgtggtggtgctggaccagggcagccgccactggcagaagctgcgagaggagagcgccgcgcgtgtcgtcctcacctcgctactcgcttgcctacccgccggcccgcgggtctacttcctcaaaggtgagcgctcggggtccctgccacgctcgcccctccggcgcccccgggtcccctccctgcgccggggcgccct

SEQ ID NO: 202260 - DNA, 186 bp, Homo sapiens
  chr10:112258408-112258594
  hyper
tgcaaatgtcagcactcagagctccccctcttccccacccgcgttcctcgaaagcgcccggcagcgggtctgcccggtggtctgggtggagttggttatgctgcgggggctgctgctgtttagcagtttgggggccgtcggctcgtgccgggcacgagccccctttccagacgcgagcttcgccgc

SEQ ID NO: 202261 - DNA, 343 bp, Homo sapiens
  chr10:112327397-112327740
  hyper
tgcaaggtggttccgtccgaggcgcggactccgcccccacgagcgccgccattttgtttggctgaggggagcgagcggcgctttgggggaggggtcgcgtaggcgcctcacctgaccctgcggccgtgcggttgctgctccggggcaggtctccttccaggccaggggcccggaatcatgtacataaagcaggtaaggccttcgcgtccctccaccccgtcatgggccggtaagggccgctccttgaggcgggagtgttgcggcgccacccgcagcctctcccctgtctccacaggctggaccagggctgggcggggactgtgggggaggagggagacccggg

SEQ ID NO: 202262 - DNA, 76 bp, Homo sapiens
  chr10:112328695-112328771
  hyper
gtgattatccagggttttcgaagttacagagatcaaacaattgtagatcccttcagttcaaaacataatgtgattg

SEQ ID NO: 202263 - DNA, 39 bp, Homo sapiens
  chr10:112333464-112333503
  hyper
tgggcagaaatggatctggaaaaagtaactttttttatg

SEQ ID NO: 202264 - DNA, 68 bp, Homo sapiens
  chr10:112335093-112335161
  hyper
caattcagtttgttctcagtgatgagtttagtcatcttcgtccagaacagcggttggctttattgcat

SEQ ID NO: 202265 - DNA, 72 bp, Homo sapiens
  chr10:112337178-112337250
  hyper
gaaggtactggtcctcgtgttatttctgcttttgtggagattatttttgataattcagacaaccggttacca

SEQ ID NO: 202266 - DNA, 80 bp, Homo sapiens
  chr10:112337592-112337672
  hyper
atcgataaagaggaagtttcacttcgaagagttattggtgccaaaaaggatcagtatttcttagacaagaagatggtcac

SEQ ID NO: 202267 - DNA, 79 bp, Homo sapiens
  chr10:112338385-112338464
  hyper
gaaaaatgatgtgatgaacctccttgaaagcgctggtttttctcgaagcaatccttattatattgttaaacaaggaaag

SEQ ID NO: 202268 - DNA, 118 bp, Homo sapiens
  chr10:112340661-112340779
  hyper
atcaaccagatggcaacagcaccagattctcagagattaaagctattaagagaagtagctggtactagagtgtatgacgaacgaaaggaagaaagcatctccttaatgaaagaaacag

SEQ ID NO: 202269 - DNA, 176 bp, Homo sapiens
  chr10:112341680-112341856
  hyper
agggcaaacgggaaaaaatcaatgagttgttaaaatacattgaagagagattacatactctagaggaagaaaaggaagaactagctcagtatcagaagtgggataaaatgagacgagccctggaatataccatttacaatcaggaacttaacgagactcgtgccaaacttgatgag

SEQ ID NO: 202270 - DNA, 81 bp, Homo sapiens
  chr10:112342319-112342400
  hyper
ctttctgctaagcgagagactagtggagaaaaatccagacaattaagagatgctcagcaggatgcaagagataaaatggag

SEQ ID NO: 202271 - DNA, 165 bp, Homo sapiens
  chr10:112343141-112343306
  hyper
gatatcgaacgccaagttagagaattgaaaacaaaaatttcagctatgaaagaagaaaaagaacagcttagtgctgaaagacaagagcagattaagcagaggactaagttggagcttaaagccaaggatttacaagatgaactagcaggcaatagtgaacaaagg

SEQ ID NO: 202272 - DNA, 122 bp, Homo sapiens
  chr10:112343598-112343720
  hyper
aaacgtttattaaaagagaggcagaagctgcttgaaaaaatagaagaaaagcagaaagaactggcagaaacagaacccaaattcaacagtgtgaaagagaaagaagaacgaggaattgctag

SEQ ID NO: 202273 - DNA, 214 bp, Homo sapiens
  chr10:112343940-112344154
  hyper
attggctcaagctacccaggaaagaacggatctttatgcaaagcagggtcgaggaagccagtttacatcaaaagaagaaagggataagtggattaaaaaggaactcaagtctttagatcaggctattaatgacaagaaaagacagattgctgctatacataaggatttggaagacactgaagcaaataaagagaaaaatctggagcagtataat

SEQ ID NO: 202274 - DNA, 387 bp, Homo sapiens
  chr10:112349362-112349749
  hyper
aaactggaccaggatcttaatgaagtcaaagctcgagtagaagaactggacagaaaatattacgaagtaaaaaataagaaagatgaactacaaagtgaaagaaagttagtatagactaaaatgtgcattaatgttttcagtaatgttcgttactagctgttatgtggtctttaagttacaagttaaccggtcaggcttgttttctgtattttgattctaaactgtatactgttaatgcatcctcatatgtgtttaaaattaaagacagtctactttttatttattagctacttgtggagagaagagaatgcagaacagcaagcacttgctgctaaaagagaagatcttgaaaagaagcaacaacttcttagagcagcaacaggaaag

SEQ ID NO: 202275 - DNA, 161 bp, Homo sapiens
  chr10:112350169-112350330
  hyper
gccattttaaatggaatagacagcataaacaaagtgctagaccacttccgtcgaaaaggaataaaccagcatgttcaaaatggctatcatggtattgtaatgaataactttgaatgtgaaccagctttctacacatgcgtggaagtcactgctggaaacag

SEQ ID NO: 202276 - DNA, 142 bp, Homo sapiens
  chr10:112350748-112350890
  hyper
gttattttatcacattgttgattcagatgaagtcagcacgaagattttaatggagtttaataaaatgaatcttcctggagaggttacttttctgcctcttaacaagttagatgtcagggatacagcctatcctgaaaccaat

SEQ ID NO: 202277 - DNA, 151 bp, Homo sapiens
  chr10:112352830-112352981
  hyper
gatgctattcctatgatcagcaaactgaggtacaatcccagatttgacaaagctttcaaacatgtgtttggaaagactcttatttgtcgtagcatggaagtttcaacccagctggcccgtgctttcactatggactgtattactttggaag

SEQ ID NO: 202278 - DNA, 153 bp, Homo sapiens
  chr10:112356155-112356308
  hyper
gtgaccaagtcagccatcggggtgctctaactgggggttattatgacacaaggaagtctcgacttgaattgcaaaaagatgttagaaaagcagaagaagaactaggtgaacttgaagcaaagctcaatgaaaacctgcgcagaaatattgaaa

SEQ ID NO: 202279 - DNA, 152 bp, Homo sapiens
  chr10:112357896-112358048
  hyper
ggattaataatgaaattgatcagttgatgaaccaaatgcaacagatcgagacccagcaaaggaaatttaaagcatctagagatagcatattatcagaaatgaagatgctaaaagagaagaggcagcagtcagagaaaaccttcatgcctaag

SEQ ID NO: 202280 - DNA, 159 bp, Homo sapiens
  chr10:112359411-112359570
  hyper
caacgtagcttacagagtttggaggcaagcttgcatgctatggagtctaccagagagtcattgaaagcagaactgggaactgatttgctttctcaactgagtttggaagatcagaagagagtagatgcactgaatgatgagattcgtcaacttcagcag

SEQ ID NO: 202281 - DNA, 108 bp, Homo sapiens
  chr10:112360196-112360304
  hyper
gaaaacagacagttgctaaatgaaagaattaaattagaaggtattattactcgagtagagacttatctcaatgagaatctgagaaaacgcttggaccaagtagaacag

SEQ ID NO: 202282 - DNA, 109 bp, Homo sapiens
  chr10:112360779-112360888
  hyper
gaacttaatgagctgagagagacagaagggggtactgttctcacagccacaacatcagaacttgaagccatcaataaaagagtaaaagacactatggcacgatcagaag

SEQ ID NO: 202283 - DNA, 542 bp, Homo sapiens
  chr10:112361394-112361936
  hyper
atttggacaattccattgataaaacagaagctggaattaaggagcttcagaagagtatggagcgctggaaaaatatggaaaaagaacatatggatgctataaatcatgatactaaagaactggaaaagatgacaaatcggcaaggcatgctattgaagaagaaagaagagtgtatgaagaaaattcgagaacttggatcacttccccaggaagcatttgaaaagtaccagacactgagcctcaaacaggttggttttaaatttgaagtcttgttacaaattgctcagtatataaatttatttatatgaatacatattttctctttatagttgtttcgaaaacttgagcagtgcaacacagaattaaagaagtacagccatgttaacaaaaaggctttggatcagtttgtaaatttctccgagcagaaagaaaagttaataaagcgtcaagaagagttagataggggttacaaatcaatcatggaactgatgaatgtacttgaacttcggaaatatgaagctattcagttaactttcaaacag

SEQ ID NO: 202284 - DNA, 817 bp, Homo sapiens
  chr10:112362231-112363048
  hyper
gtatctaagaacttcagtgaagtattccagaagttagtacctggtggcaaagctactttggtgatgaagaaaggagatgtggagggcagtcagtctcaagatgaaggagaagggagtggtgagagtgagaggggttctggctcacaaagcagtgtcccatcagttgaccagtttactggagttggaattagggtaaaatacctttatattccattttcctcagagcattaccataatagaatttatagtatcttttgcaaatctgattggtgcattatatgcaagttacttttgaaagatggtggtgattctgccctttaggatattaactcataatatgtttatttttaggtgtcatttacaggaaaacaaggtgaaatgagagaaatgcaacagctttcaggtggacagaaatccttggtagcccttgctctgatttttgccattcagaaatgtgacccggctccattttacttgtttgatgaaattgaccaggctctggatgctcagcacagaaaggctgtgtcaggtacagtttcagtacagttttggttttgtatttaacaataagctggtaatatttgctgatgtatatatgaaaaaatcaaactcaggcagttttgaattttagtaagagtaaagatagttgctttttaaattttcagatctgctgaaaagaaatttgttaaagcacaattttctttttacagatatgattatggaacttgctgtacatgctcagtttattacaactacttttaggcctgaactgcttgagtcagctgacaaattctatggtgtaaagttcagaaataag

SEQ ID NO: 202285 - DNA, 404 bp, Homo sapiens
  chr10:112363988-112364392
  hyper
gttagtcatattgatgtgatcacagcagagatggccaaagactttgtagaagatgataccacacatggttaattggaaaatactacctactggtttgggagatgtatatagtaatatgattctcatacccaggaactgtaaatttaaacctaaatatttggccaatagttttcagacttaaagcatcatagtccttttatatttgtctttgtattttataagatactctgtaatgtcatgtttgtactgatagtttaagaatttaatttcctgtacaactttttgtaaaatgttctgctcctattttaaatgttttgaaacatgctaaatattctttcctaattattttatcacttatactaccttttttatagcttcaattaaataatcggttttatgactaa

SEQ ID NO: 202286 - DNA, 62 bp, Homo sapiens
  chr10:112403994-112404056
  hyper
ggcccccgcccccgcgtggccggccgggacgagctggagcagcgggaggaggcggcgccgcc

SEQ ID NO: 202287 - DNA, 57 bp, Homo sapiens
  chr10:112431815-112431872
  hyper
actcttcttcctatcttgtccgatgacggctctcggaggctcctggttttgatgtct

SEQ ID NO: 202288 - DNA, 235 bp, Homo sapiens
  chr10:112432125-112432360
  hyper
gaagcctgagaggtctcagcgagacagtcaaaggggaggctcccctcgccgagtgtcacccgggaccctgcgtccccgctctgcagagaccttctctccgggctgctgccgtcctccctcgcccggcggagcttccgtgatcgtcagccaaagcccccggggcggtgcgccgcaggcggtcttcccgggtgttcgcggaagctgcgcgctcgcgcccccacggttctccagcgac

SEQ ID NO: 202289 - DNA, 106 bp, Homo sapiens
  chr10:112631244-112631350
  hyper
cacttggagtgttcgcctaagcagtttctagaaatggaggcagggaccatcaggaagctcaaaacctttgcttcagccgagtttgcagaacgccctgtgaggagaa

SEQ ID NO: 202290 - DNA, 148 bp, Homo sapiens
  chr10:112632548-112632696
  hyper
cctttctgtgaaacgcatgccatcttctccatttgtcagtttgatgctgtaacgtacatggggttttgcaagagcttcaaaactgtctgcagacgtcaatttcgcccccctcccccttgtgagaactcgctacgtagccagcaactgt

SEQ ID NO: 202291 - DNA, 75 bp, Homo sapiens
  chr10:112837063-112837138
  hyper
cgccgtcccggagctccgcacagtgtgccccagccccagcagggcgcacaactttggaagtctcgcggcgctccg

SEQ ID NO: 202292 - DNA, 253 bp, Homo sapiens
  chr10:112837170-112837423
  hyper
ccgggccgggccagaaccgcagcgtctgggggaagccagagagtcggtaatcgcttcggggatgtaaggcgacagacataggacccccgagctcgcatcagcacccttcggctgcctcccggggtgggggcgggccccgcacacggtaagacctcttgctttcgctcaggctcaagattcaagatacagatattgatatgtatatatatatttaatttcctgtcatccttccaagttatcaggccaccgatga

SEQ ID NO: 202293 - DNA, 420 bp, Homo sapiens
  chr10:114135858-114136278
  hyper
gctgaggtgaaaggctttgacacggagccagggtagctttggcagcttctcccctcctggtcagaacacttccactttcagttgtgaaaaaaaaaattaaaaccaggaagtgaagtccccgagcacgttagaaagcctgacatggcctgactcgggacagctcagagcagggcagaactggggacactctgggccggccttctgcctgcatggacgctctgaagccaccctgtctctggaggaaccacgagcgagggaagaaggacagggactcgtgtggcaggaagaactcagagccgggaagcccccattcactagaagcactgagagatgcggccccctcgcagggtaaggggaccatcgagggggtgttattcagcaagggggtcttgtgagggtgtgacagaggccaagggggca

SEQ ID NO: 202294 - DNA, 146 bp, Homo sapiens
  chr10:114206578-114206724
  hyper
gacaagcagagagcaaaccctggcagcgagaggctggagtgcgggacctgctacaagccgagcacctctcggccagcgccctcgccaggactctcccgctcaggccccctgcgcagtctctgttactgtcacttccggaggttcgc

SEQ ID NO: 202295 - DNA, 33 bp, Homo sapiens
  chr10:114709864-114709897
  hyper
ccctcctccctctcccggcgcccgaaaggatca

SEQ ID NO: 202296 - DNA, 241 bp, Homo sapiens
  chr10:115803386-115803627
  hyper
aacccgcgggcgcacgggaggcactagctacgcgatcagctcgggactctcaggagccgctcaattgccaacgggaggggggtgcggggagttggaggtgggggtgcagaccagacgggggcgtgcctttgcccggattggctgcaggagcctgacgcgaggccccgggggttggcttggggagtgggagcggggtggggtgggtgctgggtgccggagctgcgggcccggcgcgctcaga

SEQ ID NO: 202297 - DNA, 32 bp, Homo sapiens
  chr10:115803681-115803713
  hyper
cggcggcggcggcggcggcggcagcggcagcg

SEQ ID NO: 202298 - DNA, 201 bp, Homo sapiens
  chr10:115805287-115805488
  hyper
cgtgccgccccggcttcgcctcggaatccaaggtgtagggcccggcgcggggcgcggactccgggcacggcttcccaggggaacgaggagatctgtgtttacttaagaccgatagcaggtgaactcgaagcccacaatcctcgtctgaatcatccgaggcaaagagaaaagccacggaccgttgcacaaaaaggaaagttt

SEQ ID NO: 202299 - DNA, 268 bp, Homo sapiens
  chr10:116163621-116163889
  hyper
ttggtgtgggggagcaaagaagggcttggagagaaacgatgacccgaacggcaggacgtttggggaggccccacctagcccggggagggtctgcgcgcccactccactgcccaagcgctttgccgggagcaggaagcccctagcccggcgggcgcccgggagaaaggactcaacagcccgaccctttgcccccagcagctcagcacggttcccaccttcttcggggcttcctcggccccaggcatctttcctgtgcggcgggactgag

SEQ ID NO: 202300 - DNA, 207 bp, Homo sapiens
  chr10:116163919-116164126
  hyper
tcctgcaacaggtgagaagccccgccacgccccccactgacgaccccctccttccgcgcccgggaggatcaaagggctcgggccgcagcagccacctaggagcccacccgcccagtccgcggcgccgctgtcgccccctcttaggcccaggtccgggctgggtgggggcagtgggctctgcttatcccgagtcctggcaagacgagt

SEQ ID NO: 202301 - DNA, 210 bp, Homo sapiens
  chr10:116164364-116164574
  hyper
gacctggcccccgccagggctcgcccccagcgcccctgtcccagcgcccctgtcccagcgccggagaactccggcccgccgaggctgacagtcggctcttgagtcggtgcgcgcccgcggccccgctcgccgcccccggccgccttggcactcccttcacgtcttgactccgggggcgtcgagagggaacgagactgggacgttcccaaa

SEQ ID NO: 202302 - DNA, 85 bp, Homo sapiens
  chr10:116164654-116164739
  hyper
gcctggaggaggagaccgaggtccaagctaggaggttgagactggcttagagctcctcgcgcttggctcccgagccagcgcgctt

SEQ ID NO: 202303 - DNA, 933 bp, Homo sapiens
  chr10:116527400-116528333
  hyper
actgcagctttaaatcgtgctgcctcaagccctggatttcttccatagccgagctgcaaaatggtaactagaaaggaggaaaaaatacctcttcctccctcctggccagcccttccacagctcccggcagggcagccagcgcgagcccatcccccacgcctcccagcccagacgcgcggcgggcacaggtgagcggggcgccgactttggcccttaggctcgcccacatccggggatcaaggtcaagggcgagggcttccttcccctgcccccggcccccggcagccccgagcccggggatccgctgccaaagtttcaggccgggctggggccggcgcggctgtcgcagcccccccgccctcccgcacctgttcggcccgccggggtcagtggacggtgcccacctggtccccactcacctctggcggacatggtgcaggcagcgggagccggagctggaaggcgttggacagccccgcagggcgcggggaagaaggcagccccggagcgcccgcccggccccggccccctccggctcccggtgcggggacgccgcccgcaggacacctggccgcccgctccgcgcagcaaggccgacgggcggggacgcagcggccgcagggacccgccgggcgcggcagcgctgacacccgcggccgcgctgggcggggcgcgcctcccccgccccgagccgccggggcccacccgggtccagcagccgctctgccgcggcgccgggcggggctctgtccccgaggaacgagggtctgcgtcctcccctctccccgcccgtcttcttaataagaagaaaaataacgtgggtgctccgaatggctctccagctctctggtcccagagagagaaagcaagaaagggccgttcgttccttcccctaagtgatgcccttgacaggagagcgaagaccacggtcgc

SEQ ID NO: 202304 - DNA, 187 bp, Homo sapiens
  chr10:116852441-116852628
  hyper
tcgctgaccccacaacgtggtcggactgcggtgcctttaaggcttttgcctgctgcacatgctcagctctttgtgtgttgttggagtttttctctcttaagagaaaaagaagaaataggcaggaggatggggcggaggaagggggaagcgctagggaaaaagcgttgcacttttgcagctgcagacg

SEQ ID NO: 202305 - DNA, 97 bp, Homo sapiens
  chr10:118031205-118031302
  hyper
gagactctctgggggtgcagggccctgggctggagggcttcttagtcccccgccaagttgggtcattaaaaaccacaggaaatcaaaaccaagcccg

SEQ ID NO: 202306 - DNA, 82 bp, Homo sapiens
  chr10:118034168-118034250
  hyper
ggatccgcacttctcttgtgctgtacgcgtgttcctccagggtaagtatgaggagacggacgccctcatcagacacccctcc

SEQ ID NO: 202307 - DNA, 360 bp, Homo sapiens
  chr10:118764203-118764563
  hyper
caaggaaggtggcactgtgcaacctcgtccgcactgaatcctcgtcccttcccccagcccccgatcgccagcaaacgcaaccagcgggcagcgggtctcgagctgcggggcctgactagccccgacactccgcgttatcctcggtccagagctttcccaggcgcgccggccacggaggacgcttctctgcgggtgacggagctactgcggtgaccacggcggccgccacgtctcccgcccggcttccaactgccctggccccagcgccctggggccgtccccgcccacgggccgcggctgcccacacctggcgcccgcgtgctgcctaccttgctccttcagactggtaatgagctgcag

SEQ ID NO: 202308 - DNA, 239 bp, Homo sapiens
  chr10:118891774-118892013
  hyper
gctggctctttcttccttttcttcttttgtttttttatccttcaaatataagacaaaaatacacctcatttatcatcatagatatatatatttcactctcaccacataaatacaaaacatccaaatatccaaaacattcagaacaaagttagtagcctggattcagtgacacctacccgcgtttgaatcgttcattattttcttcactatttgcctagaaaaaaaaaaaagatgaaaaa

SEQ ID NO: 202309 - DNA, 88 bp, Homo sapiens
  chr10:118922943-118923031
  hyper
cgcagccccctagtcgcgatgctctcaggtccccggcgtggaccagcacgtgggcccgggagtcgagtggggacgaaggcatgttggc

SEQ ID NO: 202310 - DNA, 72 bp, Homo sapiens
  chr10:119001564-119001636
  hyper
cttatgtttccccctgataatttcccgcatcctcttgcctgctttcactgcgatgaaaaagatttctgttcc

SEQ ID NO: 202311 - DNA, 308 bp, Homo sapiens
  chr10:119256046-119256354
  hyper
agaaaatcaggtatacgggtctctgttttgttcactaaatcattccaagtgcctaggactctggctgacacatatttcctgctccagaaatatctcttggctgagtgaatgaacctcttcccccagcgagcgagcctgtcggccgaggagaccacgccataccaggattttccagcaggtggcagccgacgcacgccagagacagctgggcgcctacactttgaactcaaggttcttccaattaagtgcaagataaggagcttggagactcatcgcgtttggcttactcctgacgcagacttgcactg

SEQ ID NO: 202312 - DNA, 521 bp, Homo sapiens
  chr10:119293044-119293565
  hyper
atctgctccttgtcgccgagcaccagctcagtacaaggcgctggaggggaaggagggaagcacatcagcgtctcctcatagtgatgcagccaccccagccctcaccctatcccagttccccacgcgcccacgtgcctttggggtggatgaaaagatctcaaacgaccagctcctcattggggtaaaggagtgaagagattatctctgatagaggtcaaactccaattgggaggagggcaccaattctgtaaatgacacccgagggcacactcaccaggttcactgcaagccctgagcgttttgcgtttggtgccccgagtgtaagcctaagtattctgtctccgacacgtaaaacaacttaaagtgccattttccaacggaggcatttagaggcaatttgaaaattgaaacgaatctttatatgcaagactggaacgttccagaggccctttaaagctgcggttagaaaggcagttagggaactcaatgatgggctggaaggagacgattgaacgcacagc

SEQ ID NO: 202313 - DNA, 495 bp, Homo sapiens
  chr10:119293786-119294281
  hyper
tctccagagctaccgagaaggggaacctcaacatcaagtgtctggcagatgggagtgtgtgttaagcgagggctgttttcgttgggaacgcacagcacagctcccttcctcagagccacctccagacccctcggccctcccacgacccccagttcccgggtccgaggttctgggcgccagcggcggccaccgcgccgcgcgagcagcttttattcgcactctctttaactcgccctttctggttctcttcccttcgagcgccctgcagcggagtgttagacaagccctgttgtctgtgggctctcacctcagagtcaatattatctcagatgggcacaatagactggaatgaaaagctaatattgaatcaatgctgtccctgtccgcgccgctgcgatgccaccctttgttgcgcacgccgcccccggcaagctgctggcggccggggctaagcggagggcggccgcggtcgggcctctccgggtccacgccagg

SEQ ID NO: 202314 - DNA, 87 bp, Homo sapiens
  chr10:119295683-119295770
  hyper
aagccccagcccagcccccacgtccagaaaatggggaagtattaaaggaagagacgattaagcccctgagagtgtggctcctgggac

SEQ ID NO: 202315 - DNA, 31 bp, Homo sapiens
  chr10:119295809-119295840
  hyper
ctgacaaacccaagtagcgccttacattgtc

SEQ ID NO: 202316 - DNA, 37 bp, Homo sapiens
  chr10:119295872-119295909
  hyper
gccgggctatcagtggcagagagcagagcctcaaaca

SEQ ID NO: 202317 - DNA, 41 bp, Homo sapiens
  chr10:119295951-119295992
  hyper
cgcttcgctccccatgctggtcctctgggaactcaggagcc

SEQ ID NO: 202318 - DNA, 39 bp, Homo sapiens
  chr10:119296131-119296170
  hyper
aactagagagtgtacttcttccctagctcctgcaccacc

SEQ ID NO: 202319 - DNA, 116 bp, Homo sapiens
  chr10:119296211-119296327
  hyper
gtcctaggctttcatttgaaggcagctgagggagaaagaaactgcaaacccctttggttctgtttccttgctttcaataatgaatcgagacagcgtgtgtgtggtgagggagtgac

SEQ ID NO: 202320 - DNA, 52 bp, Homo sapiens
  chr10:119296362-119296414
  hyper
gtggggtcctgccagtggctccatgcgtcactgaaacattgggtctcaaaac

SEQ ID NO: 202321 - DNA, 62 bp, Homo sapiens
  chr10:119296567-119296629
  hyper
ccttgctatgacacgggtttccagtgaagcccaagcggattccacggccccacatcaccgga

SEQ ID NO: 202322 - DNA, 39 bp, Homo sapiens
  chr10:119300884-119300923
  hyper
caccaataaacagagagcagcgccagcagcctggggatg

SEQ ID NO: 202323 - DNA, 60 bp, Homo sapiens
  chr10:119301840-119301900
  hyper
ggagtaggtggggaaagaggaggaggaagaagaggaggaggaggaagaagaggaggagga

SEQ ID NO: 202324 - DNA, 95 bp, Homo sapiens
  chr10:119302046-119302141
  hyper
cggcggcgccgactccgttccactctcggcccggatccaggcctccgggttcccaggcgctcacctccctctgacgcactttaaagagtctcccc

SEQ ID NO: 202325 - DNA, 147 bp, Homo sapiens
  chr10:119302266-119302413
  hyper
tgaagaagcgaacacttccatggattgtccttggacttagggcgccctgcccgccttttgcagaggagaaaaaacttttttttttttttgcctcccccgagaactttccccccttctcctccctgcctctaactccgatccccccac

SEQ ID NO: 202326 - DNA, 220 bp, Homo sapiens
  chr10:119302473-119302693
  hyper
aaaattaccccaatccacgcctgcaaattcttctggaaggattttcccccctctcttcaggttgggcgcgtttggtgcaagattctcgggatcctcggctttgcctctccctctccctcccccctcctttcctttttcctttcctttcctttctttcttcctttccttccccccacccccacccccaccccaaacaaacgagtccccaattctcgtccgt

SEQ ID NO: 202327 - DNA, 229 bp, Homo sapiens
  chr10:119303721-119303950
  hyper
ggatttgttttttctttcctgcttttcggaggcctggggaggggcgggaacccgtgcgggaggaaagctccagggcttggcgctctcgccgcgacctgcttaattggggcgccgagcagccacagcgggaaggcaggttcggtctggtttttgtttttctttctttctttaaaaaaaaaaaaaaagaacctggtcaggaaactgtcttagagggaaatatctgttcgtg

SEQ ID NO: 202328 - DNA, 141 bp, Homo sapiens
  chr10:119305975-119306116
  hyper
actgtacacggagccgcagggcggggtcaaagttcccagcaaacagtaacgtttttttgggcagactaagttgtaacacttttcctgggcagctcagaaaggtcgaggcttttgttttaaaacatgttccccaccccaaaa

SEQ ID NO: 202329 - DNA, 220 bp, Homo sapiens
  chr10:119306645-119306865
  hyper
gtgggatggcagccgactcccacctcattgctcctgagacctctcacagccgctctggtgaggccgggcctccagccccaccctggtgggaagtgatgggactggggtccgaggttgtgtgaccagcagcctgttccggggctgtttagaaggagggaagagggggcttgctgtcacctccccttctcttagtttctcttactttccgtgtaacccacgg

SEQ ID NO: 202330 - DNA, 112 bp, Homo sapiens
  chr10:119310263-119310375
  hyper
ggatacaccgccgccgggagttgccgggggaggagggagacggggtggcctcaggagacccgggcttgcgtctcacagggacaggtgcgcctcggggtatcctggaaaccct

SEQ ID NO: 202331 - DNA, 50 bp, Homo sapiens
  chr10:119494324-119494374
  hyper
ccaccccagccaagagggaacctgccaatcaggctgcgccaccaccaggc

SEQ ID NO: 202332 - DNA, 105 bp, Homo sapiens
  chr10:121301389-121301494
  hyper
agctattgtgatgagcaaaagggtggaaggaccggaatcaagggcacggctccaccttcaccgtggggtctttggcctatcaagttgcccgagatcgtggctcag

SEQ ID NO: 202333 - DNA, 198 bp, Homo sapiens
  chr10:121301911-121302109
  hyper
agctctgcgctcccgtcgcggctgggaccgcgaaggtgcggtacccagcggggagaggtggtgcggtcggccggggctccagtctgggaggtaccaccgagccgcgcccgagcacaagagggagggcaggaggccgggcgggcgaaacggcgccccgaccccgagcccgcgggcccccgaagccgcttacctgacggc

SEQ ID NO: 202334 - DNA, 43 bp, Homo sapiens
  chr10:121356079-121356122
  hyper
cagaggaaaaggcaccgaaccctgctctcgggctctctccccc

SEQ ID NO: 202335 - DNA, 106 bp, Homo sapiens
  chr10:121632626-121632732
  hyper
taagagggcaaagcgagtctgcacaacagctgaaaagcattaagctcagagacctcagagtcatctctgggcaaaattagtgggcgaaaccgccttgggaatccgc

SEQ ID NO: 202336 - DNA, 159 bp, Homo sapiens
  chr10:122708760-122708919
  hyper
aggttaatcaatcagcagccgctcagtcacccatcccttccgcatcagttgcgtggggctggggatcatgcctagggcgggaggcgtgggagcgcagggcgccccgggtccggatccggctacaggggcgaacagagcgggttctccatcccctggggt

SEQ ID NO: 202337 - DNA, 89 bp, Homo sapiens
  chr10:122739316-122739405
  hyper
cgcgcgcttaactctgcctgcccgcccgccccgccccgcccggccgttcctgcgcagccctgggtcggcctcgcgcttctgtgtttaaa

SEQ ID NO: 202338 - DNA, 216 bp, Homo sapiens
  chr10:123356990-123357206
  hyper
atgtcaccggccccaccccagcggccccctcccgaaaaaggggtctccgcagggcctggatggtacggaagttcccaggacacacggatggggcacctcggagatgaccccgggaaccggcctgcggggctgtgccacgggcaggcgaaccttccgcccgtctgctctggggtcggagaaacgcgcccagtcagcgggaatgcgcccgccagggtt

SEQ ID NO: 202339 - DNA, 372 bp, Homo sapiens
  chr10:123357242-123357614
  hyper
tcagcatctggatgggggtagcagaggcagaacttccagaacgccggccgtcagcacgcacccacctcccccatcacctatgcagccacagagggaggacacggagcgtcctccacaatgctagtccttccgcgccccccgcccggaggacggtgcacccggcgtcccgggctcccgtggcgcccacgtccccggctggcgaagctccccgaggcgtcttgcgcggcgattaccttgaatggcaacgctcctccgcgacctgtgttgtccccgcgccccgcgtgggtcgggatggagaaagcgacgagcccggggttgcggggagcaactccaaacgcagaagagtggtccttgggtcttcgccggcgccaa

SEQ ID NO: 202340 - DNA, 106 bp, Homo sapiens
  chr10:123357660-123357766
  hyper
atgacgcccgcgggctgccctcggatttggggaacgagaggaagaaaggactcaggcttggcgttgcctccaccaaactttgctcgcgagttgcgaaggctcagag

SEQ ID NO: 202341 - DNA, 375 bp, Homo sapiens
  chr10:123357893-123358268
  hyper
ccgcgcgcgctccctcgcccgctccgcacccgccgcccgcccgctcggctctccaccgcgctctcctccagccgccgcccgcgccgccgccgccgcccccgcctcctcgcggcgggtcacgcccccactgaaacccgagccgtttcctggacggcggcgccctctctgccaatcagcgccgcgcgcccgggccgccccgagtcccgcgcggctcccgacgcctccgagcagccggagacaccggcccgggaggcgagggctcggccgcgatgcggccgtagggatgcagcgacagcctccgaataaggcctggtcccgcgccccgcgccacctcctccctcctccccgggcgagcgaggctggccaacggctcgc

SEQ ID NO: 202342 - DNA, 819 bp, Homo sapiens
  chr10:123872187-123873006
  hyper
cgccacagccttcccggcgttgccatgcgtagtgggaaggccgtggacaaactaagaacagtaacaagttgtcatgactcagagactcctggaagtctgcagcgcctccaggagcagcggccgggctgtgcgtccatcggtccgtgcgtctctcgcctgccgctctgcggccgcgggcccctcggtgcgtctgggcgcgcccggccccgcgcattcctggccggggaggagagcgcggcgggcgccctgcgcgagcagctggccgagcgctgccccgggtcggagagcccagagctgggggaggagcctggcccggcagccgccgctcgcccagtcattggccttttgtgctgcaacttttcccgagcctttcggggagccacgccggccctgcgccgttgtcccgggaaactttgcgtcccagggccgcaccggaccgtggtgaccccacgcgccgcgccgccaccgggctcggaaaacccagcgcccccgggctctttggcagttgcgactccgaacgaaggcggctccgtgcgggccatcccctatctccccgggcgggtaagtgccggggccacgggcgggcggccggggtcagaagatgggcgcccgaaggaccttggcccccagacaaaggcgtactggaagtggccaaagctcatttcggctttccccggcagggactggccgagggtggaaaagtggctaactgcacattcggtcccctgctggcagaggagtgtggctgcggggaaaccgcgggccccagagtgtctgcccaggagcctggttcccttgagtgggagcgcgggggtcaaa

SEQ ID NO: 202343 - DNA, 65 bp, Homo sapiens
  chr10:123873040-123873105
  hyper
ttcccgctcgcggttggggtccccgcgcgtggttgtggttggcgcccgtgaccaggctccctgcc

SEQ ID NO: 202344 - DNA, 271 bp, Homo sapiens
  chr10:124133665-124133936
  hyper
tgctgaaagaatttcgactaacccttctttaagtctctcttaccctcctgtactattaacaccattgtaagtaggcagtggagctacatttgcagggagagagaagagcgaaaaattggcgcgcagagctgtaaagcgtttttctccaggtcacaccgcagcctgtaaatttgtgacacttggaccgattatgggacagcttgcaaacaaattatctgcaaactaacgaagcctatttttaaagatccctgttcctcgcagctctaggcga

SEQ ID NO: 202345 - DNA, 723 bp, Homo sapiens
  chr10:124134313-124135036
  hyper
gaggccgcggtaaagtttagcttgaagaacgcggccgcgctggagcaggggtggtggacggggccaggcgcgaggtggcggcggctgcggggctgccgggctgctggagcgcggttcccgctgtggcgagcggggaggcgtccgcagaggggcggtgggtgctggtgagtgcggagccggcgccccctctgcgcacgtccgcgccacgcgccacagcacctggaggccgccgggccggctcacctgccctggcttggggcagcgggagggggcggcgtcttcttcccgtgggtccccgattgttttcccgacgtcagccctcagcggcgcccggcgggggagggcgggaggcccgcggcggtcgcggggccgacgagctcctcggcgtctccgccccccgagaaatcccgctcggggcgcggtgcgcgcagctgcccggggattcccggtggcgccggtcggagcgcctccctccagggctgtgcccgcggggcgcgcgtccccgggcatcctttcctggtgtttaatgcattttggcttcaggacttgccgaggccgaagccggctccgccctgggccctgaagtcgggcggtgtccgcgatttacctccgcaccttcggggcaggtggccagaggcagcgttgaaagcgacttgcccaaggtcacgcaggtggcaccggggaggcgaccagacccaggtctttcgacgccgaggccagctg

SEQ ID NO: 202346 - DNA, 67 bp, Homo sapiens
  chr10:124220489-124220556
  hyper
actgtgggtctgggcgcgggctttctgccagctccgcggacgctgccttcgtccggccgcagaggcc

SEQ ID NO: 202347 - DNA, 245 bp, Homo sapiens
  chr10:124220656-124220901
  hyper
agtccctgcccggcccagtccgagcttcccgggcgggcccccagtccggcgatttgcaggaactttccccggcgctcccacgcgaagccgccgcagggcccccttgcaaagttccattagtttgaaggacgcgaatctcagcgagagaacctgcggaaagcgaatatgtggggcgcgcagacggggaaactgagtcccgcgagagggccggcctgtgcgctgccccgcccgcgccccgccagcac

SEQ ID NO: 202348 - DNA, 629 bp, Homo sapiens
  chr10:124221086-124221715
  hyper
cgaggccctcctgcactctccccggcgccgctctccggccctcgccctgtccgccgccaccgccgccgccgccagagtcgccatgcagatcccgcgcgccgctcttctcccgctgctgctgctgctgctggcggcgcccgcctcggcgcagctgtcccgggccggccgctcggcgcctttggccgccgggtgcccagaccgctgcgagccggcgcgctgcccgccgcagccggagcactgcgagggcggccgggcccgggacgcgtgcggctgctgcgaggtgtgcggcgcgcccgagggcgccgcgtgcggcctgcaggagggcccgtgcggcgaggggctgcagtgcgtggtgcccttcggggtgccagcctcggccacggtgcggcggcgcgcgcaggccggcctctgtgtgtgcgccagcagcgagccggtgtgcggcagcgacgccaacacctacgccaacctgtgccagctgcgcgccgccagccgccgctccgagaggctgcaccggccgccggtcatcgtcctgcagcgcggagcctgcggccaaggtactccgccgcgctcctgggcagctccccactctctccatcccagctcggacctgcttctgcgggactggtggg

SEQ ID NO: 202349 - DNA, 69 bp, Homo sapiens
  chr10:124639063-124639132
  hyper
gcgtcgaaaaaccgccgtggtgcccgcgcacagtgcaccgcgcctgcgcatggtctccaaaggctgagc

SEQ ID NO: 202350 - DNA, 42 bp, Homo sapiens
  chr10:124898993-124899035
  hyper
aaactcttttctgtcttgctcgctgactgcctctgcgctctc

SEQ ID NO: 202351 - DNA, 367 bp, Homo sapiens
  chr10:124899187-124899554
  hyper
cttaggcttatctagtttgcgaaattgagcaaagcgacagcgcgcgaggcgagataccagagacagctggtatttccgaacactggtctgcagcctcccgttctgttcttaaacctgggttccttcgggagccgagagcttttgggcagggcatccctgggcattcgtcagctggttaacttcggtgggctctggttggagggaagaagggagtgagttcagagtttagctgcagccgtaggccgattgccaagtcaggctaggaaaggctgggccacaagaggacaaccccagggacagccagctcttgggacagcggctcccactaccaggagaggggaacttcctcaggtcttgcagagctgag

SEQ ID NO: 202352 - DNA, 192 bp, Homo sapiens
  chr10:124908373-124908565
  hyper
ttcctggggaaggttgagttgttgagagagtggaccacagcgagagggacacgcggccggccttacacccggctgtcctcaatcactgcacatctggtactttctttccggacacgaggtggagatctgcaagtcgggtctgggcagtctgtctccaccgtaatctctttctgagtcttcttcctcactcgc

SEQ ID NO: 202353 - DNA, 203 bp, Homo sapiens
  chr10:125851929-125852132
  hyper
cacgccgcctcccgagacgcggcggggcgcagggaggggacagcagtgggggcggggcggggaggaggaaggaggagggggcggggagcaaaagttcacaccgctcggggctcagccgctcccctatctcttcccaggcccgcccccgccatcccccttccctgaaccgggtcccacgggcttaggcgcgggagagctctggc

SEQ ID NO: 202354 - DNA, 36 bp, Homo sapiens
  chr10:125853277-125853313
  hyper
tgtgtgttgcggtgattccaaataaaagcacatcga

SEQ ID NO: 202355 - DNA, 97 bp, Homo sapiens
  chr10:126077712-126077809
  hyper
tgcaagttctgaattgtctccaaggagcatattccaacgtcagaataataaacttttacagaactgtattgctctgcagcgcgcggggggactcggc

SEQ ID NO: 202356 - DNA, 518 bp, Homo sapiens
  chr10:126107353-126107871
  hyper
ccgcgcccgcccgcctcccccgccgctgtcagggaaccccggccagggcccgaaccagagccccaggacagcggcgcccagacggtacctgacagcgcctgaggacaaccgggtacacgcggcgtctatgaagcgcaacagtgacgccggagagtcactgcaacttaaaggctgattctgccccgcccccaagacaccctcgccgctcattggctggggcggagggcaggataccaatcgcgtgggtcccgtcctccgccccgccctccggccgcgcatcaaggatctttgctcctcccgcggattcgatccgcgctcgcgcctcctgagcccgccggcctgtacctgagctcaggcccctcggtcgcctcctctggcgggacgagaagagtccttgtccgcccttgctgacgagaagactgaggcccgaaaaggaaaagtctgttgggccccccactgcgcgggccgggtgtggctggaggccgagagacgtgaggctggaccgcccgccctgtgct

SEQ ID NO: 202357 - DNA, 64 bp, Homo sapiens
  chr10:126136723-126136787
  hyper
agaaggggtcggtgaacagaagcctctccaggtccccaaacctcgtcctcgtcctccctagagc

SEQ ID NO: 202358 - DNA, 280 bp, Homo sapiens
  chr10:126847584-126847864
  hyper
gccgctgggcctcccgcgggagaaaggcccaggcacgccccggctcccgcgcgcctctgcccaactcgcccggggcgctgggggcagcgcgagggagagaaagaaaggcgcttcccctcggccgcgcggggccgtccggcgccgcggagggctgggaggaggaggaaccgcggcggcccggctgtccctgcgccgcaccgggtccctgccgcccggggcgcgccctagccagcccctcctgctaaactttttctttttgattcgccccacccgaaaagtg

SEQ ID NO: 202359 - DNA, 335 bp, Homo sapiens
  chr10:126848388-126848723
  hyper
ggcctgggtcgccggcggcccccgggcgcgcacccaccgggctcagggagcaggagccgggggcgcccagggaaccgtcgccgagacgccgccgccgccgccgccgctgccctccggacgccgccgcgctcggggtttctttttttttttttttcaaccctgatgggaaggaaggtgaccgcctacttcgcattcatcaactctcatcacaacaacaaaaatcctggcgcaaacggcggccagcgggcgcaatcggtggcgggggcgggcggggacccccgagccagcgtccacccccgggcgccgaggggggacacgaggccgggggcacggac

SEQ ID NO: 202360 - DNA, 623 bp, Homo sapiens
  chr10:126849522-126850145
  hyper
aaggaaaggaaagaagcggcgctggccgcagctcccggtacccgctggctgcgcaggagctaggcgggaggcgaggtgagggtcgccgctcgctcactcctcgctcctgtttttggggggggggggcaaaggcggggtctctttttgcaaaccaatgacacaaccccacatgggccggcctcgcccccttcagatactcctcactacaaatcggctctctcgggggattagtggctccgcgaaagtgcacacaagcgcggcgggcgggagggccaggggccgggcgcggcgggcactccctagcccggccccgcccgggaggccctcgggaggcgcgggggcctcggtggcaggggccgaggtcctgtcgcggtggctcggggtccgctgctcccctggcccttcatcctcctccgccccttccacgtggggtaccgggcagccggccacgtgggggaacgcgagccccgggtggccccggtcccatggggccccgcccagccagcggcgccaaccagcccccttcccggcccccgggctccaacttcctcctggtgccccgcaccggccgcttctgccttctcaggcccgcggggtcaggcgcgggccggccacagggggca

SEQ ID NO: 202361 - DNA, 111 bp, Homo sapiens
  chr10:128075575-128075686
  hyper
gggggcggagggcagcagtggcaatcgcaaaataaaacgtatcataaagtggtaacggttcgtgatttaggccagttgttgaaaaataaatgcctgttatatagaatcaca

SEQ ID NO: 202362 - DNA, 220 bp, Homo sapiens
  chr10:128076024-128076244
  hyper
gagtgacctggaagccaggaagaggggcagagaggaaactaaagaagtaggtaagagagtcagtttatgaaaatagagcctgctgtggagagcagcaggcacacctgcggaggagggggctgcctcacctgcggggccgctgcgcgcccccctaagtgtgttagcgggggaggcggggctggaaaggaaacctggtgaagggctggcccggagcctgggg

SEQ ID NO: 202363 - DNA, 153 bp, Homo sapiens
  chr10:128593608-128593761
  hyper
ccgagctggggacctcgcaccaccaggctccggcctaagcccgcgccttgcaagccgcccgtttcctacctcccgtagaaaccccccgtccgtcccgcccccctaagggcgcacccctctcacggcgtgagcgccagccccgggagctccagg

SEQ ID NO: 202364 - DNA, 360 bp, Homo sapiens
  chr10:128594226-128594586
  hyper
cgccgggccggggagaggcgcttccgcccgcgcccgcgccgccgccccgctcgcaatgcccggcgaccccggccgccccgcgcccccggcggcgtcagctccagccccggggatgcgggtcgggaacacgagggggtggggtgggaatgggggcgggcgcgtccctccctagggtgtcccctccgacgcccgctcctctggacctctgccgtggagccccccgggctacccccaactccccggccccggccgctgctatctgcgcggctgggcccgtcagggaagcccaggggtcactgtctcgcggcggcttctgcttcttggatgaacttgcgtcccgcgtccgggctctgggtgggc

SEQ ID NO: 202365 - DNA, 36 bp, Homo sapiens
  chr10:128993454-128993490
  hyper
accagcaagatgcagactctcgctcttgactttggg

SEQ ID NO: 202366 - DNA, 92 bp, Homo sapiens
  chr10:129534422-129534514
  hyper
acaggtgcccgactcggagtccgggaggcgggccctctttccaggtacccagcccagcgtcagcctgggtccatcctccgccaccccacagc

SEQ ID NO: 202367 - DNA, 45 bp, Homo sapiens
  chr10:129534541-129534586
  hyper
ggcagcttggggggccgggataacccgggctgcagcaaccccggg

SEQ ID NO: 202368 - DNA, 181 bp, Homo sapiens
  chr10:129706031-129706212
  hyper
ctgggaggggccggcgctctgccaggatgctgccccgcagccgggcgggcgcccgcgccttcccagggaggcaggtggagcgggatgcagcagccgccgggggtcggagatgcggcagggagaccctggcaggtggtccaggctggactgccgcgatttgcagggtcgacgacctcacagg

SEQ ID NO: 202369 - DNA, 107 bp, Homo sapiens
  chr10:129923799-129923906
  hyper
tttctcagctaaaacgtccgcgcgcgcccgcggggctcaccttccaaacaagcaggtgctgaggctcaggggaaagtggggaccgtcgaccccgctccttttgatag

SEQ ID NO: 202370 - DNA, 212 bp, Homo sapiens
  chr10:130339116-130339328
  hyper
ggaacttgtcctcacagcggcgaggcagatggaacaataaatcacaggcgccgttgactgcctgcagtgcgctctccacagctgtcacttttttgtctctttggttttagctgacatggtttgaggtccactgtgaaccaatctggacttttttttacagtcatatccatcaaaacgaccagtggccatcagcccgctgcggccatcgatcg

SEQ ID NO: 202371 - DNA, 236 bp, Homo sapiens
  chr10:130339417-130339653
  hyper
ttttttttttcttttgcctccagctacagctgtgattttctgagcagtcttggctaacgttattaaagttgcatcaggatagatacagagcaaagcagataacaggctccgcgcgcgggagctggaaagaccggcagcctctggttcctgttgttgttttttaagtgcgcggaggcgcaggcgaaactcggagtttccaactcgttgcttattttgcaaagtaaacaagcaaatgt

SEQ ID NO: 202372 - DNA, 112 bp, Homo sapiens; identical to SEQ ID NO: 7815
  chr10:134045912-134046024
  hyper

SEQ ID NO: 202373 - DNA, 37 bp, Homo sapiens
  chr10:134120669-134120706
  hyper
cactcgcactcgggcggcacaggtgagcgcctctcta

SEQ ID NO: 202374 - DNA, 387 bp, Homo sapiens
  chr10:134121014-134121401
  hyper
cagccgcgcccgcccctgcaatagcgcgcggcccccacgtcgtccccgtgcccgcactcaccgtcctccttgtcgtcaaacaccggcctccgcgcggtggccgccgacatggacgagcccatcctcttcttccacttgctccactgaaacagggggcgcggctgcgagcggacatcgcccgagtcccgggcccggggctggccagcagcgggcggcggcagggccgagggcgcgtcggagccggcggggcgcgcgcggccggggggcggcgagcccggggacgccgcggcgctgctgcccctgcgctcggcgccactcctcatcgccgggtctgggtgcgcgcggcagccggaactcggggcatggccggccggcagggccgggagc

SEQ ID NO: 202375 - DNA, 129 bp, Homo sapiens
  chr10:134209484-134209613
  hyper
gcgaggtcgacaggcgccagcgacccgacggtccccagtggcaccaggggcggtggtcctcaattcccaggctgggaggagccctgcccggcggcgctgggtcgccaggacaactacgcggtcccccgc

SEQ ID NO: 202376 - DNA, 128 bp, Homo sapiens
  chr10:134209650-134209778
  hyper
tcagaagcccggcccggggccaaggtcaccgcagcaggccgggcccctgcgttctgagccgggtgcggacgtgctggtgctcggggaagtcgggggctttgacgcctgaaggcgcgggagccgggcgc

SEQ ID NO: 202377 - DNA, 445 bp, Homo sapiens
  chr10:134210400-134210845
  hyper
cccgagccaggggacactcccggccagcgtgggccgcgagcccgggcgcagccccctctccagcccgggggtccgcaccgcgcgtccggccgacctctgcgggcgggcgcggcttctcccgggacgcggcggcggcgggcggggtccccgggagcggagcccgcggccgcgcgcccccggcccggctcggctcggctgtggcggccgccccagcggagctttgtgacgtcaggcggccgcggggcggcgtcacgcgcggggctgacccggcggcggcggcggcggcggcggcggcggcggggcgggggcggcctgggacgcggcgggagcatggagccgcgcgccggctgccggctgccggtgcgggtggagcaggtcgtcaacggcgcgctggtggtcacggtgagctgcggcgagcggagcttcgcggggatcctgctggact

SEQ ID NO: 202378 - DNA, 420 bp, Homo sapiens
  chr10:134351274-134351694
  hyper
ggctccgcggggcgggacttgccctcagcctgagtcggcggcggctgcgggaactttcccagcggatctaatggctgcgcgcgggccgctgtgaggcgcggcggcgagcgacgggcgcggggccgcggagcagcgagcgagcgagcgagcgcgaggccggagccccggccaggcccggccgacccgccgagcccgcgatgcgccccggggccgccccccggcgcagctgacgccccgcggccccgcgaagaccccggccggccggtcccggaggaagcggccgccgccgccgccgcccagcccagcgcccgcgccgcccgggcaccatggcggggaaggcggccgccccgggcaccgcggtgctgctggtcacggccaacgtgggctcgctcttcgacgacgtaagtcccccgtgccggc

SEQ ID NO: 202379 - DNA, 206 bp, Homo sapiens
  chr10:134600998-134601204
  hyper
gcttcccccgtcgactccgcactcgattcgactgggattgggattcgattgggcgcggccgccccaccggtgatcggcccccgcggagcctggcccgggaacccccagcgcccgtccggccccgagacccgccccggcctgtcctgcgccccgctccctcggaggagacacgaggaagggccctcccgggtcgggttcgggcccct

SEQ ID NO: 202380 - DNA, 131 bp, Homo sapiens
  chr10:134602414-134602545
  hyper
gggggctgaggggcgacgggggaactccacagagggaaggagcctgcgttcgccttcggccgcccaggccatagagttcacaaactctgatttatcactgaggtgacttgtcccgcgcagccctaggcgag

SEQ ID NO: 202381 - DNA, 58 bp, Homo sapiens
  chr10:134902307-134902365
  hyper
ccttccagaggccatggaggctggcggggagcagggcgccacctgatcgcctccccct

SEQ ID NO: 202382 - DNA, 119 bp, Homo sapiens
  chr10:135050910-135051029
  hyper
caccggcctgactctcccaccccgaagcctgctcccaacctaagtccgccctgactctcccagcctgaagcctgctcgccctcgggtgtccgggctgggcacaggcgccagcgtccccc

SEQ ID NO: 202383 - DNA, 135 bp, Homo sapiens
  chr10:135074988-135075123
  hyper
cctcagaggccagcgcgccagcctggcaccacggggacgctcccagggggtgcccagagggaacgtgcgcatcgggcggggtactgcggcgcgtgtgggccgtgagccccgccctgtagtcggacactggagtcc

SEQ ID NO: 202384 - DNA, 138 bp, Homo sapiens
  chr10:135150187-135150325
  hyper
cgcactcacaccctcatccgcacgcgcgccacgcacaagcgcactcgcgagcacacgcacctcgcacacacacccgcacacgcgcctcgcacccccgcaccccttcgggccccccgcccacattctgcaagaaatgtg

SEQ ID NO: 202385 - DNA, 60 bp, Homo sapiens
  chr11:308266-308326
  hyper
gcaggaagtggctatgctgggggtgccccacaaccctgctcccccgatgtccaccgtgat

SEQ ID NO: 202386 - DNA, 66 bp, Homo sapiens
  chr11:308362-308428
  hyper
ggtctggtccctgttcaacaccctcttcatgaacacctgctgcctgggcttcatagcattcgcgta

SEQ ID NO: 202387 - DNA, 412 bp, Homo sapiens
  chr11:314083-314495
  hyper
tccggacaccacagcggcccttcgctccacgcagaaaaccacacttctcaaaccttcactcaacacttccttccccaaagccagaagatgcacaaggaggaacatgaggtggctgtgctggggccaccccccagcaccatccttccaaggtccaccgtgatcaacatccacagcgagacctccgtgcccgaccatgtcgtctggtccctgttcaacaccctcttcttgaactggtgctgtctgggcttcatagcattcgcctactccgtgaaggtgcgtatggccctggcggaaatccagggggtgccggtgagcctggggctccacctgcccacatgctgcctggggtggggacttgtgtgtccctgtgactgtgagtttgtgtgcacctctgccccgtgtgtgctcacgt

SEQ ID NO: 202388 - DNA, 269 bp, Homo sapiens
  chr11:417281-417550
  hyper
acctccactcaccttcgcgggtctgatggcgaccgccactcacctgctgccaggacctggggctcgcgccgggcgggggcggggcagctcacctgagccaggtgcgcagcggcaacagccccggcggcggcgtagccccggcagcggcagcaggtgcggccccgccccgcagtcagggcgggggcggaccccagcgtcccgctctgcgcccaaggctggcgctggaggctgcgctgctgcccgggagccgctgccgcacgggcctgggg

SEQ ID NO: 202389 - DNA, 146 bp, Homo sapiens
  chr11:441946-442092
  hyper
cagctggggtttggcggccaggagagtggctgccagcggcgggtgctcctacctgacttccgcgtggggctcgcccctccctcctcctcctccagcgtcctgcagctgccgcgcctgggtgtagtcggggcggagccagcatccag

SEQ ID NO: 202390 - DNA, 268 bp, Homo sapiens
  chr11:450011-450279
  hyper
ctgggctccgggatccgtcggcgaggaaggggcgaaggggtggagggactcgggccaggccgccggggatgtctgtggttacctccaagctctggaggccttggcgagacccgcgccatccgcagcttggttcctgcgacctcagccgcagggcggtccggctccggtttcccagcaaccaggcgtcatccttcccagcaagcactgcgtccaacccgcgacgtcggaccacaaggcccagcatgccccgcgcggactacaagcccca

SEQ ID NO: 202391 - DNA, 182 bp, Homo sapiens
  chr11:518712-518894
  hyper
gaaacgcagccagcgcggaaccggacgcccaggagccggccccgggctgcccacgacggggccgccggagaggactcgcggcgccccctcctggatgtggccggcggcgcgcgaggaaggagccgccccgaacgcgcgagcgaggccgggactcgggcgccctctgccggccgctctgaggg

SEQ ID NO: 202392 - DNA, 399 bp, Homo sapiens
  chr11:537174-537573
  hyper
gaccgcctttacccgccccgcgtgggaagcgccaggatcgcgaggaaacgcgacacgtgcatcgcgacggcccaggcacggagccgcaggaagctggcacctgacgcgcctgcgcccacccaactcgagttggtggcgcgtcaccttcccctgggatcgcccgcagcaggggcgcccacgcacgtgccagtccacgtggccccgccctagcgaccgttgctaaggggcgtggctcagccgcacggaacccgagcccccggcgacttataaatatttgcgtattcaaatgaggcctggctcccgttgctatggcgcccaggccgcaaccccgcggcggccggaagaacagcctggagtaggagacagcgcctggaggtggagggcgcccagggccgagct

SEQ ID NO: 202393 - DNA, 184 bp, Homo sapiens
  chr11:575194-575378
  hyper
aaacacagacacccacgatgagacgtgaacacgctcctcagtgagcattcttgggcagtgcacaacctccccagccatgccagcccgcgctcaggcctcccccgtcttccccgtctctccggcgtcggttctcaagctcgtccttccccgcctcatttctccaaaagtccgcagcaaatcctgg

SEQ ID NO: 202394 - DNA, 221 bp, Homo sapiens
  chr11:575604-575825
  hyper
gtcccgaggcccacacggcttctgcgcggcatcctcaggacgacctggagccaaatccacacgggacggcacagcagcgtcctgccgagcccgcctcgtccgccagcgcgcacgattcaccgcgcctgctgcgggacgggcggacgcggggctgggctggaatagccggctcacggagggctccggcagtgtttgttcagaggagcgcggcgctggtagca

SEQ ID NO: 202395 - DNA, 67 bp, Homo sapiens
  chr11:809683-809750
  hyper
gtccctttggactcgcttcgtccaacgcccccacgagtttcggtggcccttcgccccacgctataag

SEQ ID NO: 202396 - DNA, 34 bp, Homo sapiens
  chr11:832781-832815
  hyper
cccagggctgcagctcgcccggcctccgcagtgc

SEQ ID NO: 202397 - DNA, 47 bp, Homo sapiens
  chr11:842931-842978
  hyper
ttgtgggggcgtgcggccagggtcccgtggccggaggtgtccgaccg

SEQ ID NO: 202398 - DNA, 103 bp, Homo sapiens
  chr11:1357360-1357463
  hyper
cttcaggaacaaaactcctgcataacgaagcccaggtttctgtgttttcgtgggtgttcccgggcaccttcgggcaggtggccccaggcgatgttgtgtgtct

SEQ ID NO: 202399 - DNA, 395 bp, Homo sapiens
  chr11:1411047-1411442
  hyper
ctgctgggctcggctgttcggctcagctgcgcggctcggctcgtctcggctctgttcggctcggctcggctgctgggctcggctgttcggctcagctgcacggctcggctcggctcggctcggctcggctgcgcggccgctgacgggcgtgcgctgggggcgcggggcgcggggcgcgggcctcggcggcggcggcggcggcggcggcggaagccaggtgcccccgcccgccctgtcctctcgacgaggcggaggcgtcgccgcgggccaggcctcggactgccgcgtcggagtggacgcggggggcggcggcgcgggcggacgcgggcggcgcgaagcagcggggcccgcgggggcgccccggccgggtcggcgcggacggcactcggcggacg

SEQ ID NO: 202400 - DNA, 459 bp, Homo sapiens
  chr11:1592786-1593245
  hyper
cagatccgcgctggatctcaggcggccctggtgggtcctggatttttgtcccccccccattccacacccaaagaaggagctgcggggagaagggcggcaacgcggcgggcgggcgtgggctgggcccgggtccgccgggcgttgcggggggcggggaaggggcctccctgtccctggcgtcctggacggccgtggccgctcattccggggccgcctcctcctcccgggcgcccaccgggtgccgctgccccagcgcccccgacgcggcgccctccgccccccggcccgggccggtgaaccccatccccggcgcccgcccccgccccgccggcgcctccgctcacctcgctcgcgctcgcctcgggggcgctccggggacccgcgccgcgctcagggcgcccgctcggccgcgccgtccatgggcccggcgggggcccgcgcagccggggcaggggccgg

SEQ ID NO: 202401 - DNA, 95 bp, Homo sapiens
  chr11:1593577-1593672
  hyper
tgcagccaatcagcgcgcgcggctcgggggcaggtgacgtcagcggagcccgggctcggggtgaagctgaggcggctgccgcggggggggggcgg

SEQ ID NO: 202402 - DNA, 117 bp, Homo sapiens
  chr11:1594039-1594156
  hyper
ggatccccctgcactcgggcggacctgggaccctcagaggcgagccggctgcctcgggtcacacatccgcgaactccgggggcgggctccccaggacgccgccgaccccccacgacc

SEQ ID NO: 202403 - DNA, 65 bp, Homo sapiens
  chr11:1674134-1674199
  hyper
tccgcgctggagaaccgggccgggctgcgcggaagccctggagggccagccgggtggagggagct

SEQ ID NO: 202404 - DNA, 123 bp, Homo sapiens
  chr11:1769741-1769864
  hyper
cgccaaccggcagagctagcagagcggccaaagcacctgcccacggcgcccgcggacacccgataccgccacgggcaccgccacgggctccaccgcgggctgcaccgcgggctctccagaccc

SEQ ID NO: 202405 - DNA, 98 bp, Homo sapiens
  chr11:1970024-1970122
  hyper
gggcccacaagggttcgagaacaaaagagaggccttagagccctgtcctggggccctgggtgtcgacagtgcagattgttccagatctgcaggctcca

SEQ ID NO: 202406 - DNA, 90 bp, Homo sapiens
  chr11:2290847-2290937
  hyper
tcgggcctggcgctcggctccgcgggctcctgggggcgcgacccgccgggcctgcccaccccgtccctccaccccggcccccggccctcc

SEQ ID NO: 202407 - DNA, 176 bp, Homo sapiens
  chr11:2421277-2421453
  hyper
gtgtgagggtggccgggcagtggccccgaggacggcgccccacaagtttgcggccagggcccagcaaacccctaggggtgggaaagcgtcggcccagctagcgggtccagcagggctgcccccttcaccgtggcccagcggtcacgaccccacgtcctcatcgcgggctgggactg

SEQ ID NO: 202408 - DNA, 109 bp, Homo sapiens
  chr11:2554316-2554425
  hyper
gattccgagagcacgatgtttaaatgttgggggaaaaaatggatcaaagcgatgtgttcccagggagcccctgttttctcgtttcttttcgtacgcccagctttgcagt

SEQ ID NO: 202409 - DNA, 64 bp, Homo sapiens
  chr11:2554454-2554518
  hyper
aggaaaccccagcgcggcctcggagggattaggcattctgctgaaccagggatatgcggtgggc

SEQ ID NO: 202410 - DNA, 33 bp, Homo sapiens
  chr11:2884036-2884069
  hyper
ccgggcccgggaagcgcgcttctctcttttcat

SEQ ID NO: 202411 - DNA, 63 bp, Homo sapiens
  chr11:2905796-2905859
  hyper
gggaggaggcgggaacccagcgaggcccccgagggctggggggaccggccggccggacaaagc

SEQ ID NO: 202412 - DNA, 269 bp, Homo sapiens
  chr11:2906036-2906305
  hyper
gcgccctgctcggcgctctcttgaggcgccgcgtccggggccggggccggggcgggggccggggccggggccggggccggggctggggccggggccgcgactggagccggggccggagccggagccggagccggggccggggccggggccaggaccgcgaccgcgaccggagccgcgaccggagccgcgaccggagccggagccggggccggggctggagccaggaccgggactgggggcggggtggacgccggggccgggaccgggac

SEQ ID NO: 202413 - DNA, 201 bp, Homo sapiens
  chr11:2906580-2906781
  hyper
gcagctcgcggctcagctcctcgtggtccaccggcccgaagaggctgcggcaggcgctggtgcgcactagtactgggaaggtcccacgggcgacaagacgctccatcgtggatgtgctgcggagggacgcgtcggacatggcccggggctgcgcaaacgcgggcagcgagagaggagaggacagcgagaagaaggggaaag

SEQ ID NO: 202414 - DNA, 170 bp, Homo sapiens
  chr11:2906971-2907141
  hyper
ggcacccctcgagcacagcgcacttggcctgtggaacgcccagcccgcctgcgccccctttatacgcgcgggccccacccccgtgcgcgcgggcccggccgcgattagcataatgtagtattttcagtttcaacaacaccacggcgattggcggccgccccgctgccccg

SEQ ID NO: 202415 - DNA, 140 bp, Homo sapiens
  chr11:3014088-3014228
  hyper
taagcctaacccccgctcatcccccaggtcccaggttggagaacacttcctctgcgaagaggtcggggctgggtcacctccgcggacaggacgggactagccactgcctgcatctcttcccccacgccctgagccccgca

SEQ ID NO: 202416 - DNA, 220 bp, Homo sapiens
  chr11:3186008-3186228
  hyper
cttggagcccgcgtcggccgagctggggggacagaccccctgattggccagggtttgtggtggtcagacccagccaccttccctggcggtcccggctcctttaagccccaccaagtggggagccgagctgggcgcgccgcttcccactcgcgggccccacccgccccaacccgccaggcgccgacccgtcctggcccggggcgcccccaggctcccgcgc

SEQ ID NO: 202417 - DNA, 290 bp, Homo sapiens
  chr11:3186311-3186601
  hyper
agctcctggatcccttcggccggccccccgcggccctcggttcgctccggccctgcccggcggggccctccggatccttcccagcccgccatccccccgccgccctgccgccccccgggccgccgcgctcctacctcctaccgtgccgcgagctcggtgctccgggccggccgggcgcgcgggggctccactggcggcgcgggcctggctgcaggaaatgccagcagatggtccccccgcgcgaggcggagcgagggcgcggcggagggaggaggcccagggagcccgga

SEQ ID NO: 202418 - DNA, 242 bp, Homo sapiens
  chr11:3444553-3444795
  hyper
aggaggggattggagcgtggctcaagttcgggaggcgttacctgcggagagtttgaggcaggcccaggagcgagcccacggtctgccgacgcggagccagggacgggccccaggatccggagcttcaggcggggccgagtccgggtttggggcccgggagtcggggccggttagggcgagggtccccgggatcgtccggtcaggccttgggccaacgtaggcactctcgcagttcctccgcc

SEQ ID NO: 202419 - DNA, 206 bp, Homo sapiens
  chr11:6341563-6341769
  hyper
cgagccaggcctccctgccgctcccgcagagtctccagcatggaggccagcttctccagcagggtcaccaccgtcacggcgtgcacgggaccccccgccggcgcctcgggcacaggcccccgctccaacgcactctccctcatgatccctgaccgctctgctccgtctgcctgcaactgctggccgcactacggtcaggggcctcc

SEQ ID NO: 202420 - DNA, 41 bp, Homo sapiens
  chr11:6440456-6440497
  hyper
ggccctcggacctcggtgagccccgcggtccagccctccca

SEQ ID NO: 202421 - DNA, 105 bp, Homo sapiens
  chr11:6502787-6502892
  hyper
aagtgagaactaagtcgtttcgaggccagacgttcagctcgcattcctgcacacatcgcgggaaccccacagggccagggatttgagggctggaaacttcgggct

SEQ ID NO: 202422 - DNA, 66 bp, Homo sapiens
  chr11:6947537-6947603
  hyper
cgccggaagtatgacgctcatttctttaagccactagaagctcaccgtgagtccattcacagggcc

SEQ ID NO: 202423 - DNA, 357 bp, Homo sapiens
  chr11:7041508-7041865
  hyper
accgggatggccaaaacactcagtccacacaaacaatggccgcagcccggctggaccgaaacggaagtcccaggtcttggagtagacactcgcagtgtttccatggatacgggaggggcggggcgggaagagagagcgcgggaaaacgtgactcctgattggccagaagtatcccgcgcctcccgacctttggccgctggcattcctgcgcgggcgggagctgcgggcgctcgggggataaggcgaggacgcaccagcattaatggaataggagaactcccgaagcttttagggccctgggaaagggggcgtggctggaaacggagctactggcttcggagaattctgtgaccctca

SEQ ID NO: 202424 - DNA, 107 bp, Homo sapiens
  chr11:7272753-7272860
  hyper
caggcggctctttccaagttcgaagcagggactcggttctgcgcatctggcgggtgtgcccagattgtaaccttcgcactaggcatccaagaacgtgctttggacac

SEQ ID NO: 202425 - DNA, 40 bp, Homo sapiens
  chr11:8103155-8103195
  hyper
gatacgcggccggggcgcagggcaccgctgccctccccac

SEQ ID NO: 202426 - DNA, 60 bp, Homo sapiens
  chr11:8284165-8284225
  hyper
ccactctcgcaggccgctcccgcacaagtgctaccggccggcggcgggacactttcttcc

SEQ ID NO: 202427 - DNA, 190 bp, Homo sapiens
  chr11:8284345-8284535
  hyper
gccttcccctcgcctgccgggcaccctggcgctcgcgccgtcctcccgcgctcccgcttgccccgagctctggagcccgattctccccgaagccgctgatttgctcggcgctcagcgcctctcgggttacgcggcggctggcgcgagggtgatggctgcggtgagagcagcagcctcagacacgaaatgc

SEQ ID NO: 202428 - DNA, 91 bp, Homo sapiens
  chr11:8284961-8285052
  hyper
gactcggggcgcgctttggaggggcggccggtcttcgggcagctagcgggctctaattacccgcttgtccggctcttaacctagattgcac

SEQ ID NO: 202429 - DNA, 144 bp, Homo sapiens
  chr11:8615887-8616031
  hyper
cgccttagagaaggacctaaaaccccgtctggggcacagaggagcagccacgtgttacgtaaaataaagctttgtagcaggaatatcacagtactgaggtgattgatgctcaggccactcttctcactcggagtcaagcccatc

SEQ ID NO: 202430 - DNA, 140 bp, Homo sapiens
  chr11:8710629-8710769
  hyper
gccggccagtggtgcgcgagcgcagataactcccctggagaggcgggatgttcaactccacccctggtccttgggcggccgtgggtccccttcgaagcggaggaatggccaacctcgccgcacttcgagcccctttaggg

SEQ ID NO: 202431 - DNA, 519 bp, Homo sapiens
  chr11:8892112-8892631
  hyper
ctgcaacagctccaggtaggagctcgaatgccgccaccgagaggcaaggcggtgcgcagagccagctcccaggacgtcccgagatcgggtctccgctcggcaccaggcagctcttcaccgccggactctggccgcgaggttccccacccccaaccgcgcggcccccgccgggccggaaagcagagccggcggctactgaccgcccgggagggcggaccccaccagccccgctcctctgcgcctgcggcggcccccacgcgcgtactcacggagctggacaccgctgccggggccgggagtcgggagcagagggaaaagggctgggagggcaggggcgggaccgggcgcgcacgcgggaaccggggccacccggcccggaggcgcttacctctgcgttccccagccgggccgggcgcggcgcctggatggggtctcgccgggagccgcgcggcccggaggaggagccgctcctgcagagagggcgggcggcgggcaggcatccgcgccccgggctgcggc

SEQ ID NO: 202432 - DNA, 202 bp, Homo sapiens
  chr11:9286886-9287088
  hyper
gcctggagaagggcggagagcgcgtggacagcccccaccgtgaccctcctcctaccgcgcctgcgcaggcgccgtctgggagggggcgggctcctgggggaaaggatgacgtgatgctcttcggaccccgccggccgcagcttcccgggaggtcgccgcagcgcagccggtgactgcttggtcgcccgcaactgccactccc

SEQ ID NO: 202433 - DNA, 164 bp, Homo sapiens
  chr11:9482445-9482609
  hyper
aacgtgggccaatggaaaaccggaagcgtcctgtgagtgatgtaatgacagcccaatggaagctgggggcgggcctcagacacactatgcgggttgcggggcctgggggccggacggctgtttcctgtcctggtgcatggtggtcggacgaaggaattgttgga

SEQ ID NO: 202434 - DNA, 489 bp, Homo sapiens
  chr11:9596367-9596856
  hyper
taacgcggttcgcgaggatgctggagggtgccggcccggccacctgacactcccgagccataggatgccttttaaacgcggcgatcgggcctgtaatttgggcggcgcgggcagaaggagtttaaagaaaaataattgtcccgccctgatcgtgtcgtgtcgtgtggcgtggatgggggaaaggtctggggcatgcagggagactacgcttggacttgggagtaaaggctggccttccaagcatttacagtcctacagactcatcctaagtccaggcagtactgaggcctgtttctggacaaggtcttggcccagcatttgtttttatcgtgggtttgcggtgcccagagtttggccggcctccgtgtgattaggaacatcctaccgtagataaggtatcttaaagaaggaggtgttcagcacctgtgttttgaaaggccttcgagtactgcgcagatgaccacttttaaaactgcagattttaaagct

SEQ ID NO: 202435 - DNA, 625 bp, Homo sapiens
  chr11:9685416-9686041
  hyper
ttgtactcgagcacccaaaatggcccgaactggtctgggaaacattagggagatgtgtttaccgtcctggctgacactgaaggccaagcattcttgccaccaggcgtggcttgactcgcagaacccacactctggcggctgtgggcgcggcactggaccggcgccggcagcagggcggggcctggcgggggcggggcctggcgggtcaggtgactgcgcggcgggctgtggctgcggaggttgaggggcgtccgaggcgcggaggggctggctgggcaggaggggttggcggggcagcagggccgcggccatggggagcttgaaggaggagctgctcaaagccatctggcacgccttcaccgcactcgaccaggaccacagcggcaaggtctccaagtcccagctcaaggtgggcgcctcctgacccggccccccacccgaccctccccggcgcgctctgtacttcccttgggtggaagcgggacctggcgggccgtgaccgcagggcggggcgggtcggaatgcgcccggtaggcccgcttggggcggagtgggtctgagaccgggatttggtgtttactgcctcccccttgccttcgggccatgccctcggttggatgtgtta

SEQ ID NO: 202436 - DNA, 123 bp, Homo sapiens
  chr11:10316353-10316476
  hyper
ccaccgaggaacgcggcatccccgggatcctcccgaactgggctggcctctccctggggagccccgcacgcctcggcttgcttccctcgcagcggtcccagggctctcgcagcccgagcaggt

SEQ ID NO: 202437 - DNA, 135 bp, Homo sapiens
  chr11:11642467-11642602
  hyper
ggcatctcgcctgacgcctacagtggccaaaaaagctcgtttgcccgcgcgttccctcttgtacacacacagacattcacatgcacacacactctgagccggacttgtgtgcgatcccgagagcccgcgagcaac

SEQ ID NO: 202438 - DNA, 348 bp, Homo sapiens
  chr11:11642668-11643016
  hyper
cacatccgctcgtgcagccctgcgcacacacgtgtgccccggggaagagcgcacggccgcagacagaaggtcccgaacgcaggcaggagctcacacgcaggccccacgactaccacgcatctgcggccccagagccccgccgtggctgagttgatgcgcaccagccccagcgcaccccgcgccgcgcggggcactcccgggcctcatgggcgacccaagtttccggggcgcccgtaccttgaatgtgctgcttgatgacattctccaggtggtccagccgctcaataatcttcagagtgtcccctttgtcttcctccagcttcttgtcgggcgccggctcctgccccc

SEQ ID NO: 202439 - DNA, 452 bp, Homo sapiens
  chr11:11643304-11643756
  hyper
gcccaagtttgcagctcctgccgctggccacccggagagaccttgacaaaggaaaccaggtggatttttttccaaattaaaaatccctgaacccttcctagaggggtcacgggtagccggcagccgcgcgtccagatgtgtacgtctgggaaactttgccactgcctgtgtcggcggccacgccgcttcccatcgccagcgccggctgccttggcggtccgaccggcccgcgctgctaggagaacagcggcagcggcagcggcggcggggagagccgcgaagcagagcggcccggccccctccgagcgacaagcgctgccaccaatcgcgctccggctcgggagaggggccggtgctgagcggcagcggaccaacggggagggagcggggggcggagtccagctcccaggccccacctgctggccgcccctggctcccgcccccagggacgc

SEQ ID NO: 202440 - DNA, 262 bp, Homo sapiens
  chr11:12030561-12030823
  hyper
cctcaagcctctctcagcccctacctggggtggaccaagcacaggtcagccccctccccttggcgtcgggtcctactcgagcgccccgccccacatccaccaagagaggctgagctcagcagagtcgtcccctcccccgccgccgcccctcacccaccccgactggaccgagttgcgctgcgggccggactggatctgctcgctcccgccgggaggccgccgggctgcgggtgcagatgcgggagcggcgcggtgggcgggc

SEQ ID NO: 202441 - DNA, 54 bp, Homo sapiens
  chr11:12031006-12031060
  hyper
ctcacgccccacgccccacgccctcctcttctgcctcagcgaccagctctaccg

SEQ ID NO: 202442 - DNA, 128 bp, Homo sapiens
  chr11:12131734-12131862
  hyper
aggacgtacacagtcggtactagaagtgccatgctgctcccccatgtccaaaaggggatgccgtgtcttgctttccagccgcctagaccaagaagcgtgaggcccaggccctcgccgctcccttgata

SEQ ID NO: 202443 - DNA, 287 bp, Homo sapiens
  chr11:12132212-12132499
  hyper
gcgcccgcggccagggccgaggcaggcctgacccggggccgggcagcccgcgcgactttcggtaaggcgggggcggcgctggcctcagggtggggagggcgggcgggcgcgggtggggaccgtgccagcctcggctggactctgcgccgtgtccaacgcccgggagggtcaggtgcggccgcagcatcccccgcctcaaacccacccggcggggcgcacagtgagcaggtggcgctgcgacgaagcccggggcggccctggccggcctctgaaccaattagaacgca

SEQ ID NO: 202444 - DNA, 55 bp, Homo sapiens
  chr11:12399222-12399277
  hyper
ctgtccccaagtctcccactcccaagtcgcccccgtcccgcaagaaagatgattc

SEQ ID NO: 202445 - DNA, 344 bp, Homo sapiens
  chr11:12399383-12399727
  hyper
ggccgaggggccggggcactgggaccgggcgggagcgcgccgcgggtgcccggcgcggtggggcgcgcggcgatgcgtgcgcgcgcttcccgggtacgtcgggcaggagcgacgcgcaccccacactgagcccggggctcgcgggccatcgaggccaccccgcccgctcgcggtcgcccgggcgctgccctcctgggccggggaccaggccaacgcccccgccgggccgtgggcgggcgccgcttggcggccggaggcggcgggaccggagcccaggcggggccccagcccgcagacagtgcgatccagtaggccctgccccgccctctgcgcccgaaggctgg

SEQ ID NO: 202446 - DNA, 85 bp, Homo sapiens
  chr11:12399791-12399876
  hyper
tccttaaaatcaggtcgtttcctggacctgctgacgtcctctggcagcggcgtcgtggctttggcctcttcgggatcttttgtcc

SEQ ID NO: 202447 - DNA, 249 bp, Homo sapiens
  chr11:12696746-12696995
  hyper
agccagaagttcggagcgagcgcgggcgggcagagccgccgcctcggagcccggagccggcctgcacccccctgctttcgccgccgccccccggcgccgggtacccccgaggccggcccgggtctgcgcagacttgtgccgctggcggggggttcgctccttcttctcaaagatgaaaaagggcacggtcgtctttgccgcttctccaggactgttgctgccgctgccgccgccgcttcattgcacatt

SEQ ID NO: 202448 - DNA, 332 bp, Homo sapiens
  chr11:13031624-13031956
  hyper
atgacccaggagaaacagcggcgagtggtgcgcaaggcctttcgcaaactggccaagctcaaccggcggcgccagcagcagacaccgtcgtcctgttcgtccacttcgtcgtccactgcctcgtcctgctcttcgtcgccgcggacccacgagagcgcgtcggtggagcgcatggagacgctggtgcatctggtgctttcccaggaccacacaattcgccagcaggtgcagcggctccacgagctggaccgcgagatcgatcactacgaggccaaggtgcacctggaccgcatgcggcgtcacggggtcaactacgtgcaggacacttactt

SEQ ID NO: 202449 - DNA, 282 bp, Homo sapiens
  chr11:13032312-13032594
  hyper
gcctttacattgggctgcggctcaacacggacctagaggccgtcaagtcggacttggattacagccagcagcaatgggacagcaagaagcgcgagctacagggccttctgcaaactttgcacactttggagctgacggtggcaccggatggggctcctggctctggcagtccctcgcgggaacctgggcctcaagcctgcgccgacatgtgggtggaccaggcccgtggactggccaagagcggtcctggcaacgacgaagactcggatacgggactgagct

SEQ ID NO: 202450 - DNA, 212 bp, Homo sapiens
  chr11:13298611-13298823
  hyper
caaagaacgtgagaacacttgcagtcctcggggtggaaatgccttctagaaatactaagtatccgttctctcgttgagactttggcaaaccagggattttaggaagggtctggcactcaacgttcctaaaattggtttcctagatggagccggagggagagagggagtcaggaactgctgcttttcgtcggaatgcccggaggggagaagaa

SEQ ID NO: 202451 - DNA, 637 bp, Homo sapiens
  chr11:13689484-13690121
  hyper
taaacgttattctaactcctatcactaccggtaagttttgtagggaattattttggaggaagtggaaggtggaatgaatgggcccacagtcccctgggactgggcgagacccgtggaggctccaggggtccgtagagctcttcgctctcaccgacccgggccacacccgccaagctggtagttctccgaacggatccctcacgcccagcaatggccggagggcccccgggccccaccataatagcgctaagcacgccacaatggcagccccgctgtctcccgcgcgggcctcgctgcgtgctcccaaccttgggagttggcgcccctcccgcgcgacggacagccgggcgtggccctgggcgcgacccgacaggacgccagcagccggcgggggcgctccaggactcgagatgtggggcgcgggcccattggctgagcattcccccgcgagcctcccggccgcagggcccacctcccggccctctctccgcgcccccattggccgttcgcgttccgcgggcgtccgctcccgccccactcccgcccggagggaaaccgggttgggggtgagaggctaaagcagggaggaggatgactggtcctgcggataagggtgtgcgcgagagccaatcaaaag

SEQ ID NO: 202452 - DNA, 560 bp, Homo sapiens
  chr11:13690157-13690717
  hyper
gtcgcgaggtgcggtcggggccggctgacgcgactgcgggcctcagccaatgggcgtgccactgcccgtccgctcttcagcagccggtcgcgggcggtggaaaagcgagtgaagagagcgcgacggcggcggcggcggcggcgcagctattgctggacggccagtgggagagcgaggcctgagcctctgcgtctaggtgagaagggggtgcgccagcgggagcggccgggctgcgggctcctcctcgcctggctcgggaagtggttgcgggagctcgggctgcaggcctggccgaggcgggggcgccgaccagccgtcccgcccccgcccccgcccgggtacgcccagaagtgagggcgcccgcctcaccccgggtggtctctgcccctctttgccccgccgccgcccttcacagggccgggaccgcgtgggggacgtacggtggggcctggtttgcagccgcggagcccggggagccgcctggggtgggaggccgctagaggtggcgaaggtggggcggggtggttagccgagcagcgggctccgcgtgctcgcgggag

SEQ ID NO: 202453 - DNA, 346 bp, Homo sapiens
  chr11:14665271-14665617
  hyper
cgcgcgcccaacggaccaggctggggccgtgaggtaactgttgcagccagcggaggtgggaggcgacactgagtctccagtcccgagaggtgcccgagggaaaaggaggcggcagctaaactggtcctggagagaagccccttccgcccctctcctcagccagcatgtcccggactccgccgctcctcagtccgcgcggtggggaccccgggccgtggcggccggcgcagccctgacgggttgcgaaccagggggcgccccgaacgcgggggttggggtctgggagcgcgagcggccgctacggtacgagcggggtgtgctgagtcccgtggccacccccggcccc

SEQ ID NO: 202454 - DNA, 298 bp, Homo sapiens
  chr11:14665651-14665949
  hyper
atgcggtccctgcagccgccggatggggccggctcgccccccgagagtctgaggaacggctacgtgaagagctgcgtgagccccttgcggcaggaccctccgcgcggcttcttcttccacctctgccgcttctgcaacgtggagctgcggccgccgccggcctctccccagcagccgcggcgctgctcccccttctgccgggcgcgcctctcgctgggcgccctggctgcctttgtcctcgccctgctgctgggcgcggaacccgagagctgggctgccggggccgcctggctgcgga

SEQ ID NO: 202455 - DNA, 31 bp, Homo sapiens
  chr11:14665995-14666026
  hyper
cgcctgtgccttcttcttcctcacctgcttc

SEQ ID NO: 202456 - DNA, 219 bp, Homo sapiens
  chr11:14666056-14666275
  hyper
ggccggagctgcggctcctggtggctgctggcgctgcccgcctgctgttacctgggggacttcttggtgtggcagtggtggtcttggccttggggggatggcgacgcagggtccgcggccccgcacacgcccccggaggcggcagcgggcaggttgctgctggtgctgagctgcgtagggctgctgctgacgctcgcgcacccgctgcggctccggcac

SEQ ID NO: 202457 - DNA, 251 bp, Homo sapiens
  chr11:15671676-15671927
  hyper
cccagaggcctgccgcgctcggcctgcagttctccgctgcggacggtaggtggcagcgggtcgtgagaaatggccctcgcctggccctggctgcggagacccagcctggagaaaaacgtggctgggcttcggccgccgagcgagggagaaccgcgcccccggggtggggcttgggggccgccctgggactcggtggcttctgcccgagcggaggtcagcgaggacccgggaggcagcgcctggatggagct

SEQ ID NO: 202458 - DNA, 261 bp, Homo sapiens
  chr11:16626178-16626439
  hyper
tctagccctaaacttcaagcgcggccctcacagggtctcacacacaaaagcagcccaggacagcccatctcgctaacagcccagccccgccagttcagtcgaagacttatttttagtccccaaataggggctgcattcaatatctgacaattcacacaaaacaacattttcaaacttggtccgcctaagagaccgtaaataaaactcaaaacaagctggcgactgccaccttttatctgctccgaacacaccaattctttt

SEQ ID NO: 202459 - DNA, 458 bp, Homo sapiens
  chr11:16626496-16626954
  hyper
tcagcagccccgggccgctcctcccggcatcggagcacaaccccagcagcctttgcacaagccctttcccttctctgcccggccctttaagggagaaggaagaaagcagctcccgcgggagcggccgggctcgggctgggtcccggggcgggtggcagcaccgccccctgccctgggccgagcccgggagcagcggaccgcggccccggctgcagaggaacggcgggtggcggggccccggcagggcgccgagaaggacggagggcgccggctgggctcagggacgcggggcggggaagaaacgtgccggcgaccgtgcgctcggccgggtgactccctggcgaagtccgcgcccggcggggctgaactacccctcgcccccgctcccgccaggtcaggcaccactgccctcgcggccagggtaaagaggaccacagatcagtcagccttggatttcg

SEQ ID NO: 202460 - DNA, 84 bp, Homo sapiens
  chr11:16628221-16628305
  hyper
gacagatttccggacgaatacttaggatggcgataacagctttctgttgtcaaaggttgcgttgtgtccctgtccctgcccttt

SEQ ID NO: 202461 - DNA, 440 bp, Homo sapiens
  chr11:16628933-16629373
  hyper
tgcgctgcgccgcaggagtaaatggcattaaagaaaaagggaaagatacaaataaaaaaaattaaaaggaaggggagtcggtgctaggtcaattgtcacagtccggggagcaagggaacagaaccccccagcgccgcggccggcgtagcccgttaactcaagtctgcgggggtgtcccgccccgggtgggggcagcgcagagcggcagaagtttgccgccggggttccaggaggtgcgcgcggagcggggtgactaggggcttcaccctggaacaagtgaaggcgatggttagtgctgtcaatcttggcaatcagtgtgagcggccatgtcgtaagtattcaaagcatttcccgtcgtgcaacatcagaaagtgagtggccagggcattgatctgagcgagggagaggaggctgggctcccctcccagacaacacaggca

SEQ ID NO: 202462 - DNA, 112 bp, Homo sapiens
  chr11:16759951-16760063
  hyper
agctctcggccaacgctcaccgccatacacatccgcgggaacgcttcctccaccagccgaaggcggggcctctgagggcactcccgccacacagcgcgaattgagcctcggg

SEQ ID NO: 202463 - DNA, 365 bp, Homo sapiens
  chr11:17035667-17036032
  hyper
ccacctgagcggatcatgtggcccgagttgacgggctccccggtgcgcggatgcagccaggtcgtgcagcggagctggtcactgcgggcagagaggtgcacctgttagcgccgccacagcccgccgggtgcccgcccggcccccgcccccgcgcccccacccgcgtccccgcgtccccgggtcctcgcgccgcacttgatgaagaagacgcggccatcccggcacaccccgtaggaccaatgctcaggtaaagtgtcccgcccgaccgtcgccgccgccatgttcgccgagcgcggagccgccgcggggtgggggggagggggcgggggcgcgggcaggggcggaggcgggggcggtggcggggg

SEQ ID NO: 202464 - DNA, 127 bp, Homo sapiens
  chr11:17372999-17373126
  hyper
ttaaagtaatgtaagtttatcgcgccaacggtaagatgtcgctctggacgcgtgcacctgctctcgcaatcaccgactgcggtcagcatcttccttagagcagcgccccgggccacttggatcccgg

SEQ ID NO: 202465 - DNA, 166 bp, Homo sapiens
  chr11:17373405-17373571
  hyper
gctgtgtctccgtcaactctttacgcaacagaggtctccccctgcccttggtttctaccgggccgcctgctcccactcggcgaaaaaaattacacaacagcagccgcggcgatgacgtggagggctgccgcctccacgtgcgcggcgctcctgattctgctgtggg

SEQ ID NO: 202466 - DNA, 116 bp, Homo sapiens; identical to SEQ ID NO: 7948
  chr11:17373642-17373758
  hyper

SEQ ID NO: 202467 - DNA, 219 bp, Homo sapiens
  chr11:17373998-17374217
  hyper
ggcgtgagcccccgcgcccggcctgggggctctattttcaagcgtccctcctttgtgagaagcggagtccccgatgcaacaggtttacattgaaggcctgccctgtgcagggtcgacacctgtgagagcggaaacggtgcttccttggatgtcgcgcgtttggtgcctcggtatttggcgcctctctcgcatcatccgaggggccggaggagagaagaa

SEQ ID NO: 202468 - DNA, 204 bp, Homo sapiens
  chr11:17411081-17411285
  hyper
agtggggggctgggagggatctgtgacccgccctcccagtctggggccgccgccctgtcgccctggctcccctcccccaatatccccatccgtatttgggtcagtaatccgcctctcggccgcgccaggtttgcaggttccccgggaaaggaggcgctgagaggcggcgccaccaatcccagggctggcggaaattaggcggtc

SEQ ID NO: 202469 - DNA, 125 bp, Homo sapiens
  chr11:17497697-17497822
  hyper
aaagcataggggttagctgggcctccatcccagactccaaagcacaggcttccctcttccctaggcccagctgcggctgacagggaggctgccttgcgggaggggtgacccggctccctaagctg

SEQ ID NO: 202470 - DNA, 147 bp, Homo sapiens
  chr11:17498265-17498412
  hyper
cctggtccacccggtaggcggccgagtggttctcgctgccgcagaaggccaggggcatggcggcgcgggcgcgggctgggctcgggctcagctggctccgctggctccgcgcgcctgccgcgcctctgtcccttgcagctccgccgc

SEQ ID NO: 202471 - DNA, 89 bp, Homo sapiens
  chr11:17740292-17740381
  hyper
ggacacccctgctgtggaaacgtgcagatttagatggaggggattcctaacctgggcaggatccgagtttggagagattggcgcgaagc

SEQ ID NO: 202472 - DNA, 78 bp, Homo sapiens
  chr11:17741187-17741265
  hyper
ggggtgggggacagtgggtgggcattcagactgccagcactttgctatctacagccggggctcccgagcggcagaaag

SEQ ID NO: 202473 - DNA, 70 bp, Homo sapiens
  chr11:17756816-17756886
  hyper
gggagaaggaacgaggagggcgggcgggcaggcgggcccgccgccggggggagcaggcagccaagcaagg

SEQ ID NO: 202474 - DNA, 1080 bp, Homo sapiens
  chr11:18415964-18417044
  hyper
gccacccgggcctctccagtgccccgcctggctcggcatccacccccagcccgactcacacgtgggttcccgcacgtccgccggccccccccgctgacgtcagcatagctgttccacttaaggcccctcccgcgcccagctcagagtgctgcagccgctgccgccgattccggatctcattgccacgcgcccccgacgaccgcccgacgtgcattcccggtacggtagggccctgcgcgcacggcgccagagggatgggcgggtagagccaactgcctctggttctgctggcctccgctgctcgcgaagggattcctgctcccgggaggtgtaggagccgctttccagaagcacagcccagagacgtctgggcggcggcccacacaacgcatgtgttcggagctcgccgcgctctgcttttgctctaagcgggaaccatggcttctggccacgctggggaaccgaggaggtggccgcacccaagcaggggtcgaaagcccgggtggatgcggaacaaggatatgataggccttaagggtgggggatacctctgggctcgaaatcggcgggcggtgcaaaactcgaggtccagttctcggagcccatagagccaaaaaagcctcagcttgtccggggcgggttcttgaaagacggaaagcggctgagtaccacgcggcttgcatttttctcttgggacgctcgagaggtgggctccgtgagggcagctgctgcctgcagattatagggagccctttgcgcatttattaagaagctactggtgtatctcgggctgcgctaggcacggcgcatgcaaagatgaagcaggcagcatcccagcccttccgcacctcagacggtcagttgagtaggatccgccggtaccaactcctccttttaacaaatagggagaccgaaagctaggagacagtcagggatctctaagttcccagtgagtaggaggcagaggtgaggtgtagaactcgtttttgcatgtctctcgcctctagacgcacccttccctcatcccatgccctcccacctccgcccctacattaaaggtagcattggatcccggggccg

SEQ ID NO: 202475 - DNA, 55 bp, Homo sapiens
  chr11:18610408-18610463
  hyper
agtgggcaagtgacgagggcacggccagaaacgcattggcgtcaaggaaaccacg

SEQ ID NO: 202476 - DNA, 173 bp, Homo sapiens
  chr11:18610571-18610744
  hyper
gtttccagacagatgtattaaattccacagtgtatcaggaaagagcaagaccgaaaattgcagttgaatttaggaaggaggcggtaatggaacttcagaagcaaaatttcagggagtagaaaggaaaaacaaagtcaggaggagccttgccggagaagcggagataggacagc

SEQ ID NO: 202477 - DNA, 36 bp, Homo sapiens
  chr11:18742610-18742646
  hyper
tggttagacctaaggatggtcggtccttggggaggg

SEQ ID NO: 202478 - DNA, 313 bp, Homo sapiens
  chr11:18743161-18743474
  hyper
aggagatgtggggtttggcgttcccctgcacccgggctcggaacacggctttgtcccctgcgatgagcacaggacgcgttttcgcctcttagccaccaggctagagcctctgccaccctctgccggctctctgcctcctcccagacacctgggcctggccccgggcaggggaggaaccctcggccaggctctgccagggtttagcattggaggtcgttggggtaggacggagggtgggggcactcgattagaaagcgaagcactggagcccggtgagccacaggcagcaacacaccctcgggcgcggtgaccg

SEQ ID NO: 202479 - DNA, 115 bp, Homo sapiens
  chr11:18743577-18743692
  hyper
cacgacctcctctgtgggggcaggcgagaggtcagaatgggctccaggtagaagcccagctcgcgatgggaggacagagctttcttgagaggacggtggagcatgggaacaaaga

SEQ ID NO: 202480 - DNA, 43 bp, Homo sapiens
  chr11:18814051-18814094
  hyper
tttctcgtgggcaccaggggcccggacgagcagggagctgccc

SEQ ID NO: 202481 - DNA, 136 bp, Homo sapiens
  chr11:19093003-19093139
  hyper
ggtgtgtgtgcctgcgcgcaagagggaatagggagggagggtgaggacagagggagggaacaggaagatgaatccaagtgagacgaatgccctgtgaagtttgggaaccggtctctactcactgtctacttaccca

SEQ ID NO: 202482 - DNA, 49 bp, Homo sapiens; identical to SEQ ID NO: 7966
  chr11:19264093-19264142
  hyper

SEQ ID NO: 202483 - DNA, 261 bp, Homo sapiens
  chr11:19733695-19733956
  hyper
ggccagagcctgccggggtcatggagcctctcccggcttcttcaggccactctaattacagagtctgtggtaggttgcgtggaggagctgtctcggggcgggaagcttccctgcgtattgtatttgcctataaatacttcaaatagttaagtgaaatgtgcagcctttgaaaactggagaggaagccgttgggaggccccccgcccagccggcctggaagagcaggcagagaaatggctggcgcgctcttaaagcgggaga

SEQ ID NO: 202484 - DNA, 968 bp, Homo sapiens
  chr11:19734005-19734973
  hyper
tgactccggaagactcaaaccgttaaggtgaccggagcaatttgaaaaaggaaacaaacttccctcgagccgtgcccgcgtggctctggggcggacggttgcgttcgaaagggcatttttcaaaagaagggtttcaggaacgcaggggtgtgggccccccgggaggcgcgcggccggggcagtgccgcaaagcggccaccagcccgctttgtactcgcggccaagcgcggccccagagtttcggcggcggccagagtttaggccacaccctctttgcagtgagacccgcggccgctgattggcgcaccgtggaccaatgggcgcgccggggcggccccggctgtcagcgcgcgccgcagcagcgccggcagcagcctgtcctcccctgcgctgagccccgcagccagcgcagccttcccgggaagcgcggcggccgctcccgagcgcagccctgcccggcccgccagccgcgcgtcccggcgcccgcgccccacggccacagccttgcctctatctagctcacggagcatgtgcagacccgcaggcgctaaggtgctctcagtccgggggccttctgggcagcggtgactgtcaccccaagagagacctttcgggggctcttgccgcacctctgctgcgtcgcgggtgacactgcggtgctcgcgagcagggtggcagctgcctctcggtggagacgtcttgggacccttgcgcccttcttctctccttccttcgctgctgtctcctttccttccttggctgctcgctctttctctcgccggctcagacccgtagcctccggaacgggactcgtgggtcgccgccgcctctgtctcttccaaaggggcctcctcacttcggagatgcagtgacaagttaatatgggcgtccaagcctctgtttcccaggaggaaatttgcaagaggcggcagcccctgagcgcccagagctcttgaaaggccacccag

SEQ ID NO: 202485 - DNA, 338 bp, Homo sapiens
  chr11:19735066-19735404
  hyper
gcgctcgcccgattgcttcgagttccccgacctggggattttttttttagccgctggtggtgggcgcctcgtgggctaaggcccggcgcctgctctgctacccgcgctgcctttagcggtcgcccccgccgccgctgccagggacgtgctgggaaagcccaagccccgggagaagatgccggccatcctggtcgcctccaaaatgaagtcgggactgcccaaacccgtgcacagcgccgcgcccatcctgcacgtgcccccggcccgggcgggcccccagccctgctacctgaagttgggaagcaaggtggaggtgagcaagaccacctatcctagcc

SEQ ID NO: 202486 - DNA, 152 bp, Homo sapiens
  chr11:19735484-19735636
  hyper
gtggaaaacgggttcgatacccaggtgagagatgccgtttgccggggtactgttctggaaggatggatgaatagttctttcgggatggtgtgggagaaagggctggatgggagaagggtctaccatgtggccagggaagggaaccattcccc

SEQ ID NO: 202487 - DNA, 918 bp, Homo sapiens
  chr11:19798523-19799441
  hyper
catctttcccccttcgcgcccaccggcggcagtggcgaagggcccactgaagcgccgggtgccacgcggggcggcccgcgggccagctagggggcggggaactcaccagccgccgacccccccccccaccccgccctcggccgccgcggccccagcggcctccgcgctgcgaggagcgggcgcttggacacagggcgagttgtttgatttggcggaggcggggaggccggcggggagcgagcgagggaggcacgagagctgggcagcgcgggcgccggtctccagggtagggtccccgcgcgcagcagcggccccggggcgggggcgaggcgaccgcgggcgccggggatgcctggaggggccgcggccgagaggagacccgggactggacggccagacctgccgggcgcgcgggcaggtgcttcggctttttttttttttcccctcctcctttttcctctgccccttccttcctcgccctgaagtaagatgagcgtgatgctgtggcgctgggaacagaataacaccaccatgaagctggtaagggtggattgcagaccgcaccccctgggcgctgctctactttttaaccccccaccccgccccccatcccctttaggaactggcccgggtggtggaaagcccctgaaatgcattccgcacttggtatttcccttattgttttgaagctagatctcaggggaggtgtgtgtgtttaaaccaggaaagtcgatgtgtgtatgtctctggttgtgagtcattgaaggggggtgggactgggctgcattatctctccgtcccttccacctacgaattcctggagctctcttggattgcacacgctgggattgtctcctacgagcatgtctgcgccctcacagcctgtcccgggacagcgtggtccgcgtcccccgagcc

SEQ ID NO: 202488 - DNA, 32 bp, Homo sapiens
  chr11:22688605-22688637
  hyper
tgaagagccgcggacagttggacaggctcttt

SEQ ID NO: 202489 - DNA, 133 bp, Homo sapiens
  chr11:22850852-22850985
  hyper
actaaagagctcccggagaaagcaatgtcttttcgcgccgaattccatctaccacatcccccggaatgtcccacgcgtaacgccctctgcgtgcgccggcgccctatgaagatccggcgcagctaaagtcagt

SEQ ID NO: 202490 - DNA, 762 bp, Homo sapiens
  chr11:27493756-27494518
  hyper
cgccgcgcagagaggcggcgccgcgccgctgggcccggccgagccgagcagccccagggcgaggaagcagagcagccctagcgggcccggcattgctgcggccgcctcccgcgccggcctctcccgcggcgctgctcgctccgctgccctccgatgtcccccgccgcccccgggcagccggcctgcgggctggagcgggggtctcttcctcggcggtccgcgcgggctcggccccttcagcagtccgccgcagcggcgcagggacgcggcgctccggagtttcgcccttcccgctgctccatggacgcgcagaggcagccccgctcctccggcggctcacgccagccgggccggcccggcgcagcggcgggggccgcgctctgccatcgcaccggtctccctgtccctggcctctcaatgcagcggctcttcaaggttgcagagcgcagccttcagccatgccggccactcgccccagcccccgccgtggctctcgcacaaacacccagactctggctcgctgtctcccagccgcggctcaatctcttcccgtccttttcccttctagggttgcacgctctggttcccaaacccccggccgctggcttatgcaaatcacttaggtacatgcaaaagtatcccttctcccggagcgccattggcccggggaggtctcgagctcattactatgcagagaggagagccgccattggccaagaggaggaccagaggggcgtgtttctcgggcgtgagtgacaaggt

SEQ ID NO: 202491 - DNA, 199 bp, Homo sapiens
  chr11:27740986-27741185
  hyper
cggtccggaaaggaccttctactcccaggcggaggctcccctttccctgagttaccccgactgactcggacctgggctcagtgaggcatccggcccggctggggagcggagcgcggtctcggcagctccccttcccttgagaaagcgggaaccctctaagccagcgcccgaaactcgcggggagggaggacagaaggga

SEQ ID NO: 202492 - DNA, 239 bp, Homo sapiens
  chr11:30606412-30606651
  hyper
tgacatcttttttcacttaaacttttgtttgtcccacccccccgacctgtttgtgtttgtttgcagcatctcaaatcaattatacatttttcatgacccgcatttgcacttaatttggggtgtgtgtgtgagaggggggtggtgatgtactattataaatcaacttcactggggcatccttaatttattttcttgctgacggattccaaccggctcctgagcctctagaaaaatgcccc

SEQ ID NO: 202493 - DNA, 336 bp, Homo sapiens
  chr11:30607762-30608098
  hyper
ggggccagggggcgcggcgctagagggaggcggggggagaaaggacccgagcagcctcgatctggggagagagcgagcgagggggcgaggagagggagcgagggcgcggcgagccggagggagagcgagcggtgcagtgacagggactgccactggggtcaaaggagcacagctccaggaagcagggcggccgaggcgccgctccgtgcgcgctccccggcgggaccccgcgcccctgcacgcccctcccgcagtccctgcccactcggacccccaccggtgccccgaagccccagggtttcgagaggaggagggagccgagggcgaggcccggta

SEQ ID NO: 202494 - DNA, 207 bp, Homo sapiens
  chr11:31391279-31391486
  hyper
ttaccatagagaccgcgtcggggtgggcggagcgtcgcttctgagctgtgccacggccacatcagctcggccagaaacgcgaacacgtcggaacagtgacttccggcggaagaagaagccggtccggagttctggccgacagcaggcgaggagtgggtagcagcgcctatgtgaagttaggtaggtctgatgtcgtataaagcgcgg

SEQ ID NO: 202495 - DNA, 224 bp, Homo sapiens
  chr11:31821778-31822002
  hyper
tgctcaccttttcatgtgcaccctactcatagtcacataatttgtcaattacagcaaaaagcaacaggatacaattatgttaacctcgcagtctgtcagtgcgttatcttgtcacacttctacaagggggctctccctgcattctaatgtcaaatttgaatagtgcaccacgcagctcgttcttatgcacacagtgctgcccacaaacacacacacgcacccac

SEQ ID NO: 202496 - DNA, 42 bp, Homo sapiens
  chr11:31831437-31831479
  hyper
aaggaaaaatacccaccaagcgcagggggccggagaacaggg

SEQ ID NO: 202497 - DNA, 142 bp, Homo sapiens
  chr11:31832139-31832281
  hyper
ggccgcccgccccgagccctgcgccgctcccgctcgccggcagtcgccctccgacgcgggctttcgctggaagtagaaagtttgggctcctgcgtggaaacttctccggcccaactctcccggcgtagcagtgggggagggg

SEQ ID NO: 202498 - DNA, 230 bp, Homo sapiens
  chr11:31833155-31833385
  hyper
ttctgggttgggggtcgcgcccccactccccctaagctggactcgggactcccagtcctcggagggtgcaagtttctgtgctgtcctttcttgccaactccaggacagcgtggcctgccgccccgcccccgcccgcccccaccccatcccagccggggccccaagacacagagcacagcggcggccgcaccccagcccacctggccccttggaagaagaggaaaggggcg

SEQ ID NO: 202499 - DNA, 180 bp, Homo sapiens
  chr11:31833906-31834086
  hyper
tatgtcagcgtgtgtcgtgtgtgccaccggtcatctgtgtgtggtgcgtgtgtctccgcaccacgactccctctcctgggtctgctcagtccacggaggcagctccccttcagctgttgccagaaaaccggggaggaaagtaagtaaatggcttttctcttctgaccacacaccagaagt

SEQ ID NO: 202500 - DNA, 231 bp, Homo sapiens
  chr11:31834242-31834473
  hyper
gaaggaaggcctgggctgctgtacacaccccaggacagggcgagggggaatagggctgaagagctgaggcagggaggctgaaatgaagcagccgaagggtacgctagactcttcttgacttagggaaagtgctgaaagtcagagctcatcaataaaatctgcgcgacctgaactcgctgctgactggccgcgtcgccgcagcccctggcagccgggacagtgaggacgctg

SEQ ID NO: 202501 - DNA, 226 bp, Homo sapiens
  chr11:31834848-31835074
  hyper
ctctccttttactttccaagcgagcattaaagaagcttggactcaagactcaagtccgctgtgcatgagcgagggacttgcgggggggcgggggggggggaagtgattctgtccgaactggaggcgagtatcatttttacaacctctcaattagcgaccgagtggattagcaccttcttaagctttgcctcggaaagaagcagccgtaatcttgttgctatttccc

SEQ ID NO: 202502 - DNA, 63 bp, Homo sapiens
  chr11:31842276-31842339
  hyper
agtaggggaagtagtggagagagagaaagatagagaaatcggctcttggcttgaactgttgtt

SEQ ID NO: 202503 - DNA, 97 bp, Homo sapiens
  chr11:32605170-32605267
  hyper
gaaaactggaggccgcgacaagcgtcgctgagtggaggcccagtaagtcccacccactaggccagcccgagcgcgtctgccacgccctgctgcattc

SEQ ID NO: 202504 - DNA, 412 bp, Homo sapiens
  chr11:32851553-32851965
  hyper
cttcccaggtttgcgcgcgggggccatccagaccctgcggagagcgaggcccggagcgtcgccgaggtttgagggcgccggagaccgagggcctggcggccgaaggaaccgccccaagaagagcctctggcccgggggctgctggaacatgtgcggggggacacaggtacgaggcctggcggcaggacctcggcggggagggggttacctggaaggggccacctcggcggactgggttggattcgaacacatagcgagggttgcccgcggcgacaggtgcccgatcagccctcggcagggtcactgggcacggcgtttgtcccaggcgctctcaggggctgcttcctgggcgcgcgtcgggttccggcgaccgaaaccgcgcgccgggcgctcttgcgcctaggctttgagt

SEQ ID NO: 202505 - DNA, 941 bp, Homo sapiens
  chr11:32915115-32916056
  hyper
ggagtcgtggggctccgtcacctcttgggtcctgggctctcacatggtgaagtttgggctcgtggctgaactcgggatctgtgagacccaggattggcgccgggggtccgaagggggcgccggagagtttggggcagtggcgatccattgtattggaacctgggtggccgacaatgcggtcttggggactccggcgtgtgagggttgcggaggcgggagaggaagagtcgcggaaccgcgtcccggagacactggggggcccgggagggctgggctacgggagaatccccggggcgcagggcagaagagggggcccggcagggcgcgaacgcggctccagggccgggtgacatatgtttgcgctggtggccaagatttaggcgatttttcttccacgcgttcaaagttgctcttaggtttcctccccttttaacaacagcaggaagtaaggaatctttctttgccttctatgcctcggggtgactgagagttgggaagaaatggggcgggggttggggtgggggtagtgaaggccgtaaaggttgaagaaccaaagcatgcttctccatctcggcctttaaggtccgggtgcattatgtagcgtggggttcaagagttcatcttgcatgaccaagggaatctaaaattttgactcctacttgatatttaagctcgcgggaaatgtgtagtagtgccacactgtgaaacggtcccatttgaatgataactggaaggcgtggtctggtttggagaattggtgagcggggtgttttaaagccacctctcccgaacaatacagaatctggtaggtgcagcttctgattacatggaccagggaatcctgggttgctaatgacttcatcctcagctaccaacaggaagcttcgtggctttatgatctcatcagatttcttcattatttttcacgacagaagtgaact

SEQ ID NO: 202506 - DNA, 222 bp, Homo sapiens
  chr11:33183094-33183316
  hyper
gcggggctaatttcgcgactctggttattccgagcgtgcagaaagcagcgagatcccggggcgggcccaattcctgggctgacgtcactaccctggcttggagaggctgttgctgagccggctccaaccggctggaaggcgggaagctgtttcgcctggaggctcgcgcgctttttggaattcagttatcaagctttagagcctggctactcacagttgaag

SEQ ID NO: 202507 - DNA, 360 bp, Homo sapiens
  chr11:33397994-33398354
  hyper
gcccctgcgcgggtgaagccgcggctccctggagcccgccccgggcgcggcaggacgagcgagccagtcgcgccgctcggcgccccctccctccggcgcccgggccgtggccggcgatgcccggtgaggaccggggcgccgagggctgggctccccggcgcggtgcagagcgaggcagcggcctggatgtgtgaagcgtccccatggctccgcaggaggccaagcctcagggctcaagggaagctgggcccgcgacgcgggggcgcgggggccggcccgtggcgcgtgggcttggtcgggctgcctggggagccgcgcgctgcacgggtgtgaggggccccggggccggcgcgtcccacg

SEQ ID NO: 202508 - DNA, 134 bp, Homo sapiens
  chr11:33892127-33892261
  hyper
cagggcagctaatcccagagggagggtggctgggagggaccacgcggggccggggctcctctcagtcggctggtggcggaatcccctccctctgcacctttcagaaagcggactcctgcggttaaactgccccc

SEQ ID NO: 202509 - DNA, 34 bp, Homo sapiens
  chr11:35160296-35160330
  hyper
gatcttgctccagccggattcagagaaatttagc

SEQ ID NO: 202510 - DNA, 227 bp, Homo sapiens
  chr11:35160331-35160558
  hyper
ggaaaggagaggccaaaggctgaacccaatggtgcaaggttttacggttcggtcatcctctgtcctgacgccgcggggccagcgggagaagaaagccagtgcgtctctgggcgcaggggccagtggggctcggaggcacaggcaccccgcgacactccaggttccccgacccacgtccctggcagccccgattatttacagcctcagcagagcacggggcgggggca

SEQ ID NO: 202511 - DNA, 202 bp, Homo sapiens
  chr11:35161158-35161360
  hyper
ccggcgcgcagttttgggcgaggtcgctagagctgcagcacatggcagaaagtaaccgttctcccggatgcgcacagtcgttgtctggactaacaggctcctgtgcccaagggctcgccaagccccaccgggctgtgtctaggcagggcagagctgggcggggcagagactggggctggaacagggcgagtggctgttatca

SEQ ID NO: 202512 - DNA, 34 bp, Homo sapiens
  chr11:35440064-35440098
  hyper
cccagggccctgtcttggctcattccttccgagc

SEQ ID NO: 202513 - DNA, 238 bp, Homo sapiens
  chr11:35440137-35440375
  hyper
cgctccaggcgctgctaccccggtgtctgctcacactatgcccaatcccctattgttttgaaatcccaaaagtaacctcaagaggatttcttcctcacactctcaggcccccagcgcaccttaccctttttatcaaaataaaacaaccctccacctctcgcattttcaaaggattaagcagcaatctccaggaaagaaaatcaatcccctccccaccatcccatccccagccaagcta

SEQ ID NO: 202514 - DNA, 76 bp, Homo sapiens
  chr11:35547021-35547097
  hyper
ggtgtcctcctagggtgtcccggacgctactcacagtacctcttggcaaggacgagatgagaaggagctgaagaaa

SEQ ID NO: 202515 - DNA, 208 bp, Homo sapiens
  chr11:35547127-35547335
  hyper
ctccatccttgccgcggctggtgcccgagcgtctactggggagggagaggagggacccagggaggccgggggcaggcgggttttacagggacctccccgagccccagctgagcgggagctcgggtttcagctcgccaggctctcccatcctcatctgaggggaaccaccttcagccagagcgacgtcagcccaaacctctcctctctg

SEQ ID NO: 202516 - DNA, 39 bp, Homo sapiens
  chr11:35547575-35547614
  hyper
ccctctctgactgcacgcggggagcctgattaaaagcct

SEQ ID NO: 202517 - DNA, 693 bp, Homo sapiens
  chr11:35639806-35640499
  hyper
ctctccctctcggaaggagccatcgccgctttaagtggaagaggagaggaagggggcgggggagcggggggcggggagcggaggcggaggagggggagggggatccccctggctcccacgtggtccgggcgcctgtgaatcgcgcccaccggagggtctcacagcgaaatacaaaagcagctgggaagcggcggggactcgagttcccagcgccgggcggagcgccggacagagccccgcagcgccccgcggccgcgatggggccgaagcgcccgaagccccggagcccacaaactgccgggcccgcctcgccgccgggacccgggtgcctgggctcggcttgaagcggcggcggcgcaccggcacagccgcgggagcatgggcaggaggatgcggggcgccgccgccaccgcggggctctggctgctggcgctgggctcgctgctggcgctgtggggagggctcctgccgccgcggaccgagctgcccgcctcccggccgcccgaagaccgactcccacggcgcccggcccggagcggcggccccgcgcccgcgcctcgcttccctctgcccccgcccctggcgtgggacgcccgcggcggctccctgaaaactttccgggcgctgctcaccctggcggccggcgcggacggcccgccccggcagtcccggagcgagcccaggtggcacgtg

SEQ ID NO: 202518 - DNA, 66 bp, Homo sapiens
  chr11:35641617-35641683
  hyper
aaacttcagcttttcacccacctgcccctttctttcaatcccacgctgtttcctttcaaagttctg

SEQ ID NO: 202519 - DNA, 156 bp, Homo sapiens
  chr11:35966093-35966249
  hyper
acgcctggtcgcgcgcggctgcgttagcctcctctgggcctcttcccgagtctctggcgtgcactccgtgcctcagtttccccacctgcaccgcggagggagtagcaaagctgcttcctttcattcctctctgggactgtttggtttgggtaaagt

SEQ ID NO: 202520 - DNA, 79 bp, Homo sapiens
  chr11:36397978-36398057
  hyper
ctccgcggccgaagcgtttgttgactcgcgctggagaggaaccgaggctggacgggaccccatctgagggcagagctgg

SEQ ID NO: 202521 - DNA, 223 bp, Homo sapiens
  chr11:36398477-36398700
  hyper
tcgagaccaccatggtggggaggtgggcaggccacgctcccggtctgctctttagggtggttgaagtaccgccgtgaggtgggatgcggatgctggtgatcatgggacctaggctgagccgggaggtcgaaaaagaaagtcggcttgtttgactctctcgttctccctctggggggcaaatctaaagagctgaccccgcttaagcacgggagatttcgcgcct

SEQ ID NO: 202522 - DNA, 386 bp, Homo sapiens
  chr11:36616034-36616420
  hyper
tttcccaagaatccgttctctctgggatgtgtagctttggaaatctgtctttgttgctctgggagaggggactcctggaatgtgtctgtgaataaagactagccgaaggtgcgaagtgactagacgggagcaaaggaggaaaactagggaatgggaggtgagagtggctgacaccgacccaacgtccgggttgccggaaggctgcagcgcccggagcggtgtcgggcaaaccgctaccctggtattgctggagcctctcctggggacttttgaacaggtgacccgataggaagcacaactgcttctgttggagtgcggttacctggagaccgcagtctgaagggactcccggcagagatgtcgttacggtgtcctgcctgtctgga

SEQ ID NO: 202523 - DNA, 184 bp, Homo sapiens
  chr11:40314508-40314692
  hyper
cccagcctccccttcgaagaatttggggagcaacttcccccccactctccatccttccggccggccccttcgccaaagatctgattagatttctcatcacaacccagtgcgcaattgaatttttgatttcagccacccggccagccaccttcccctctcccctccaaactccggttatatcctg

SEQ ID NO: 202524 - DNA, 35 bp, Homo sapiens
  chr11:40314923-40314958
  hyper
aggtgttgcagaactccgcggtcggggccgggatc

SEQ ID NO: 202525 - DNA, 197 bp, Homo sapiens
  chr11:43333330-43333527
  hyper
cacccacaccccttccatggagagcctgcagccaagctcaagctttcaaaaaggcgtgagctaattcaatcatccttgccgcttttttgctcctccaggctgtagagggcgacaaaaaccgcggaggcgcattggggtggggggtgtctactgaaggccgctcccgacgtgcgcgtctttacgtagacgtcgggggc

SEQ ID NO: 202526 - DNA, 59 bp, Homo sapiens
  chr11:43597312-43597371
  hyper
gagactcaaggcggctgctccgcgctgccttcatgagtctattttctccagccccctcg

SEQ ID NO: 202527 - DNA, 58 bp, Homo sapiens
  chr11:43599958-43600016
  hyper
agccgtccctctctcggaaggttccctgactgagactgaatattcaactcataatagt

SEQ ID NO: 202528 - DNA, 238 bp, Homo sapiens
  chr11:43600215-43600453
  hyper
aaattctgccacaattgcaaaggaaataggggtggggggagcggtcggggcgggagtggtggtagcgccaataaagcacttgcaacacgtggagcggtggttggggggaggtgtccaagagtcaagaagggggcggagggacaccccatggcctcatttccacctccccattcttccccaccccttctcattgcttggcacaatgcacaagtttaccccccgaactggatcctattaa

SEQ ID NO: 202529 - DNA, 205 bp, Homo sapiens
  chr11:43965299-43965504
  hyper
actgcgtctggaggattgatatttatttttgcattgcgatggctgaaggcatttatttaacgatctttttacctggatatgtctgtgaggctcctgaaaggagacaaataaagtcaatatatttgcacagtgcagttttccaggctcttgactttttgcaccttcggggtccaggctcccaagactcggggaggtgggggaggag

SEQ ID NO: 202530 - DNA, 128 bp, Homo sapiens
  chr11:44087990-44088118
  hyper
ctggaaacctggagccgtctctcgcgagacgtcctccgccctgtagaaggccgtttcggttcttcgtgcgcggtagccgccccacttgcgggattccaaggcctcatcgagtgcgggtatctggctgt

SEQ ID NO: 202531 - DNA, 137 bp, Homo sapiens
  chr11:44748053-44748190
  hyper
ctttcaacaggtacttcccccggcagcgggaagcccaggagcccgatcaggaccgaggatctcaccccaacccctgcgtttgggccccggggtcagctgaaagttcccctggaataaacacttcgggtccagcatgc

SEQ ID NO: 202532 - DNA, 256 bp, Homo sapiens
  chr11:44748419-44748675
  hyper
ggaggggcggaggtttggggagggggagggagggcgggggaggggagggacggacggcggcggaggtggggccggcgggctggcgggcgtgcagctgccgccggcgtcgcggggctccaggctgcggggcggacgtagcgccgagcgatccaccgcggagccgcgcgaggccgcccgagccccagccccggccccggccccagccccggccccggccccggccccggccccggccccggtcccggccccgagcccc

SEQ ID NO: 202533 - DNA, 313 bp, Homo sapiens
  chr11:44748871-44749184
  hyper
ccgccgccgcgcccccggggacctggggacccccccgcgcgccgccccgggggtgctgctggacgcggcggggaattggggtggagtagggatcccaggacggaagcccggcaaccaagttccactcaaactagcacgcgggggctggggggccggggacggtctccaccccgtgcctgcccggagtccgctgagggccgggggctgcgcccaggacaggtgcagagccggtgggctcccagtgctccgggtggaggagtgggggcttctggagaacggcgcggggtggcaggtgtggttacaaggttcgggg

SEQ ID NO: 202534 - DNA, 133 bp, Homo sapiens
  chr11:44749218-44749351
  hyper
cgccacgccacccggtaagacagtgagggaccagggactgggagcggcgatcggggccgggagggctgtggggcccggcagctgcatggagggcgggctgcctttggggtccctggcagcggggcggggcggg

SEQ ID NO: 202535 - DNA, 331 bp, Homo sapiens
  chr11:45307489-45307820
  hyper
gaccgcctcccaccccagttccccctctgcagctgcccggcaaccccgccttgcccgggaagggcctgcgcgccgcccccgctcacctgttgtgcagacccgagcaagctgggcttcgccttctccaggtcggggtcctggtcccgcggcagcagccccttcttggggtgcatgtgccgacacaggcaggtgaccccgcacaacgcgaggatgctggtggctgtgcccagcgtggcgcccagcgcgatcacaggcaccgacagcaccatggtgcccgctcccggcgaggggctgggtcccgcagccgctcaccttccccgggccgggcccg

SEQ ID NO: 202536 - DNA, 155 bp, Homo sapiens
  chr11:45307857-45308012
  hyper
ctctcccgccgccagaggggcggggacggagggagggaggacggctgcgaggacgtcagaggaggctggacccgcagccacgtcaaccggcaaccccctccccgccaacacgtgaccggacccccaccccaacaggagccggagccttccaggtg

SEQ ID NO: 202537 - DNA, 96 bp, Homo sapiens
  chr11:45684299-45684395
  hyper
aggtagccatgagcccgggcacctagccagaaggtccgtgggagaagcagcagcctgccaagagtcacagcagcagctgagcggcatccaatggca

SEQ ID NO: 202538 - DNA, 186 bp, Homo sapiens
  chr11:45825485-45825671
  hyper
gaaccaagagaagtcgatcctcctggtctccccggctgcctggtgagtggcagaccacaggctagacttcccaggccccggccctggaaggggcggggaaccctccccctcactgccagctggaagaatccgagcggtccccgcacgcacttctggaagtgcaagccggtagcgcggcgggccagg

SEQ ID NO: 202539 - DNA, 217 bp, Homo sapiens
  chr11:45907277-45907494
  hyper
cggcggctgccctctcgccgcgcctccgcctccttcgcagccgccgcctcctccgcgccgcgctccgcccggatggccagggctgtgcccgagaatggcggagcgagaaagcggcggcctgggagggggggccgcgtccccgcccgccgcctccccgttcctggggctgcacatcgcttcgcctcccaatttcaggtgagagtccccggccgccgcg

SEQ ID NO: 202540 - DNA, 62 bp, Homo sapiens
  chr11:46264958-46265020
  hyper
agttgagtcctgctgcggggcgccgggaaccgggccgacgcgcatgcgcgggctgcggcccc

SEQ ID NO: 202541 - DNA, 332 bp, Homo sapiens
  chr11:46299415-46299747
  hyper
ctgaatgcccacggtgcgcccggggcccctgagcccatcccgctcctagccgctgccctaaggcccccgcgcgccccgcgccccccacccggggccgcgccgcctccgtccgcccctcccccggggcttcgccccggacctgccccccgcccgtttgccagcgctcaggcaggagctctggactgggcgcgccgccgccctggagtgagggaagcccagtggaagggggtcccgggagccggctgcgatggacgccgtcttggaacccttcccggccgacaggctgttccccggatccagcttcctggacttgggggatctgaacgagtcgg

SEQ ID NO: 202542 - DNA, 240 bp, Homo sapiens
  chr11:46413465-46413705
  hyper
gagaccccggcggtccgcgcccctctcgggggctggccggcagctccctgcttgggcacagagggcgccgcccacggccagcgacgcaggggagcagggggcgctgccctccggggggtgggggtgtccgcgttgtcatggggacgcggcgccccctcgcgggctggggaaggagctggcagctgggtccggccgcgctcccgcctccgccctgaccatactcccgggaccctgagctat

SEQ ID NO: 202543 - DNA, 106 bp, Homo sapiens
  chr11:47208475-47208581
  hyper
cagggctgggactccaaaaccgtgccctaccgttccacagctgccctgctaatctggggcgccttctaaggcctgagacgaacacgcggtgggggtgggacaaaaa

SEQ ID NO: 202544 - DNA, 51 bp, Homo sapiens
  chr11:47237126-47237177
  hyper
tggatttcatagtcacgcttgttagctgcacgtcctcggtggtcagttgtg

SEQ ID NO: 202545 - DNA, 62 bp, Homo sapiens
  chr11:47448209-47448271
  hyper
tgacagatgcttgcggaggggcgcgttcaaactcagaccgtgaccccgctaggaataagggg

SEQ ID NO: 202546 - DNA, 41 bp, Homo sapiens
  chr11:57243625-57243666
  hyper
cccacccaggatgacttgttcgcggacctggccaacctgag

SEQ ID NO: 202547 - DNA, 431 bp, Homo sapiens
  chr11:57243735-57244166
  hyper
ggaccggctgctgctgcacgggaaccggctgcagggcgtgcaccgcgcggccttccgcggcctcagccgcctcaccatcctctacctgttcaacaacagcctggcctcgctgcccggcgaggcgctcgccgacctgccctcgctcgagttcctgcggctcaacgctaacccctgggcgtgcgactgccgcgcgcggccgctctgggcctggttccagcgcgcgcgcgtgtccagctccgacgtgacctgcgccacccccccggagcgccagggccgagacctgcgcgcgctccgcgaggccgacttccaggcgtgtccgcccgcggcacccacgcggccgggcagccgcgcccgcggcaacagctcctccaaccacctgtacggggtggccgaggccggggcgcccccagccgatccctccaccctctacc

SEQ ID NO: 202548 - DNA, 53 bp, Homo sapiens
  chr11:57365687-57365740
  hyper
tgggagctggctccgaggctggctggctccgcaggtccgctgacgtcgccgcc

SEQ ID NO: 202549 - DNA, 39 bp, Homo sapiens
  chr11:57417004-57417043
  hyper
accgagagagaggagcggaggcagcggggagggggaagg

SEQ ID NO: 202550 - DNA, 109 bp, Homo sapiens
  chr11:57425067-57425176
  hyper
ctcccacctttggcgtcacgttcaaaacaatcctttgactacaactcccagaaggccgagcggcttagcgagtgcacccgctctcggctgctccggcaaactacacatc

SEQ ID NO: 202551 - DNA, 51 bp, Homo sapiens
  chr11:57434928-57434979
  hyper
aagcaggaagcggcgatagtcgtcggtaattggctgcgctggaagcctgtc

SEQ ID NO: 202552 - DNA, 39 bp, Homo sapiens
  chr11:58345681-58345720
  hyper
gagcccggatgtacggcacgcgtcgcgacctaacccgga

SEQ ID NO: 202553 - DNA, 203 bp, Homo sapiens
  chr11:58940404-58940607
  hyper
ggtggtggtgggaggcgattcactccgctgaatcctcgcaggatcctccctcccccttaaacatccatgcaaatagtatcagtgttgtggttttgcaaacccagcttcaacctagtcggtaacaatccactccccacccctttcatgcccccgcttttcagcagttggtggccctaagtctttctatgtagaaattctagggc

SEQ ID NO: 202554 - DNA, 200 bp, Homo sapiens
  chr11:58940666-58940866
  hyper
cggccggcaccttggctgacctgaccctgttttgcttcaggcacgctggggcttgccacacgtcccctcacccccgatctcactgcctctgcgtctcctgtgtgggatgcctccccgcagctgggtcctgggtgtgggaactgggggaggaagaagggattccccggaggttctcgctacagtcgggtaagggaagcgcc

SEQ ID NO: 202555 - DNA, 69 bp, Homo sapiens
  chr11:58940867-58940936
  hyper
ggctccctgggaggagagactagggctggggtaccctggacgccgcggcattggcgaatgcctctgcta

SEQ ID NO: 202556 - DNA, 86 bp, Homo sapiens
  chr11:59333673-59333759
  hyper
aaaaggtaagacatatgtccccagtatcctccctcccaggggaaaatgacgataaggtttcccttaactgccccagcccgcgtgag

SEQ ID NO: 202557 - DNA, 210 bp, Homo sapiens
  chr11:59523106-59523316
  hyper
ccgtgagtttcgccgcaggcggggtgctgccaggaggggtgctgcatgggagaggggcttccctttgctccccaagtcgaggctggaggggggcccgagccggaggcttgccctccccaagcccccaccgcttcccgcgccggttccgcaccctcccctcccctcccctgcggggtcatgtgcccggtgattcatcgctaggcaatgatt

SEQ ID NO: 202558 - DNA, 49 bp, Homo sapiens
  chr11:60692121-60692170
  hyper
ccggtcgcacaacagcggcccctcgggggccctacggcccctggctctg

SEQ ID NO: 202559 - DNA, 188 bp, Homo sapiens
  chr11:61062500-61062688
  hyper
ggcccacatgaccggcggcggcgggtcccccgggctgggctcggctcctgcgccgcgcgcgggagagggggctgccggccctcgcccctcctcctggcgccgtggggagcgaaccagcgatccccgaaatggcacgcagagctgagcaggggggcttgggacgccgagaggaggggccgagggccgcg

SEQ ID NO: 202560 - DNA, 128 bp, Homo sapiens
  chr11:61159724-61159852
  hyper
ttgcagagatccgtcgctcacaccttttcttgtcttccgttgaaaaaagagaatcgtgggagtaggacctatttgccaatctcctggtaacactatcacaactggccacttccgcccaacgcccggta

SEQ ID NO: 202561 - DNA, 249 bp, Homo sapiens
  chr11:61275812-61276061
  hyper
ccagcaggtaggccggccgcacgccgctggacgtgaatggctcgcagtgaccgcgcccctcagcccctccttgtgagcctctagtccagagtctttgatccaccgccagcgtttccttcgccttcttggacccgcggctctggggcgcacacaaccgcacaccaaacagcgtcgggcgtcgggtctcagtgccaggcttggccggggcggggaatctctcggcttgtgcttgctccgcggtgggctgga

SEQ ID NO: 202562 - DNA, 315 bp, Homo sapiens
  chr11:61276101-61276416
  hyper
agggtggcgccttggccccgccccgccccgccctccctccgcctcattggcagccgcacgcgcgtcggggttgccagggcgacgggtcgctaagctgcgagtcagcgcgaaccctagccagtcggcctccggcggaggcaacgggggaggcccgagggcgggcggtggagcgcggcgcgcggcggcggtgccccaagtgggtgcctcctcccggccccgcacggcccccctcccggcgcgggggaaggccggggcggggggcccgggggccggcgcggctccggcaccgtcggggcggctggggggcggccgggg

SEQ ID NO: 202563 - DNA, 199 bp, Homo sapiens
  chr11:61355115-61355314
  hyper
gggcgggggacgaggcgtctccgctcttaatagctgagcgcccgcaaacgcccggcctgggctcgaggcctgcccctccagcgacgggcgcccccaacattgaagtctttctctgcaacttggacggacccaccccgagcgccccgagtatccggcccggggcagagatgcgcgtgcgcggagggggtgccgcggagcc

SEQ ID NO: 202564 - DNA, 360 bp, Homo sapiens
  chr11:61519988-61520348
  hyper
gctgggcgcggcgcgggccggcagggggcgctgggcgcggcgggcggggcgcgtggggcgggcaggggccgggccagggacgcgcggggggcaagcgcggcggcggaccgggcgggaccgtagccggagcccagccgggactgtcgcgcgggccgcgccggcgatgccgcgcccccgggccgggctgtagcggggccgcggctggagtgtgcgccgggcaggcgggacatggaggtggtggacgagacggaggcgctgcagcgcttcttcgaaggtgagagaccgcgggctggcggcggcgaccctctggcgctgggaacccccggctgatctccccgggaactggggctcctcgctgtg

SEQ ID NO: 202565 - DNA, 259 bp, Homo sapiens
  chr11:61595492-61595751
  hyper
gcgggaggatgtggaacccgaggcggggggagccggaggggcgggcagaggaggtgtcgaggccctgagctcccggggagtttttactggaggcaaaagtccatagcgggagggctgagggaggggcggaggaaggggaccgcttgggggcactgggaagccagggatcctccgccaggaaggcagggacactcccgagcgcaggcgagaaggctgggggagggggcgcggtgggaggagtaggagaagacaaaagccg

SEQ ID NO: 202566 - DNA, 48 bp, Homo sapiens
  chr11:61596695-61596743
  hyper
ggggaccggcgtccgggattggtggaaggagaacggcctggggtttgc

SEQ ID NO: 202567 - DNA, 190 bp, Homo sapiens
  chr11:61659371-61659561
  hyper
cggaggcggagtcccggtctgtgagcagcggggcctggggggcttccagccgcgcgtcctgcaacgtcaaatccagtgcgcccagaggggggacgctgtctcggggtgcctgtgaacagccttcaaaccatgggccccaatctctgcggggcccccaccgccgctgcagctctctcggagccctctgctg

SEQ ID NO: 202568 - DNA, 468 bp, Homo sapiens
  chr11:62313646-62314114
  hyper
gcgcggaaggacagccgagggggcgcacggtgcggggtcgcggaggcgcggaggcgctgggggccgcggtggcgatctcggaaatttcccctccagtaaacatgggatacgaacggagcagcccccgagccaccgccccatgcagggagaggaggtgggacagaggccaccaggcccggaacggggcgccctgccttgcagtggagccaacagtccgccctccggagaaataaagagtggagcaaagcacttcggagcgattttccaactttaaccaacttgcgccccaactccagaggcagaactccgctcccagagagcgacgcgtcgccgccccgggtggccccgcttgctccaaactgcttgaatcctcacagtgacacccccaacaacgcgccctgccggagcaccgcaacccacctccccgcgacccgcccttggtgccccggaccccgatggcgccacggt

SEQ ID NO: 202569 - DNA, 32 bp, Homo sapiens
  chr11:62359274-62359306
  hyper
cagccacaaaggccggcgccgggtggcatctt

SEQ ID NO: 202570 - DNA, 208 bp, Homo sapiens
  chr11:62369474-62369682
  hyper
gcttaactctgtcctcgctggagccctgcagctcctcctcgcgccccaaagactcgcgcgccttagcgcttcgccaggttatttgcaagcggctttgcctgtcatttgcataaatggtctacgctcccttaccctttccgcacgcctcttttccttcgtccccaccccacagagccccggaggcgcccggcagcgccccacaaaagca

SEQ ID NO: 202571 - DNA, 49 bp, Homo sapiens
  chr11:62369884-62369933
  hyper
cagggaagggcagggcggggcggggccacgccgccgggccagtcggtcc

SEQ ID NO: 202572 - DNA, 215 bp, Homo sapiens
  chr11:62495747-62495962
  hyper
cttgcagctgtgacgcttatgtggacacctcagtgtcgctggtggttcacctcggcttcccagtttatttattgacgtcaacaaataaatgttgaataaggaagaagagttagaattgcttgaagccctctggagttttagcactagtcccgcccactcccttctacttccaggtcgggggggggcgggtccaatagaaaggcggaagccagtgt

SEQ ID NO: 202573 - DNA, 59 bp, Homo sapiens
  chr11:62538981-62539040
  hyper
gtccaaggactccccattcccgacgccgactgcttactcaccagtcttggagcccgcac

SEQ ID NO: 202574 - DNA, 110 bp, Homo sapiens; identical to SEQ ID NO: 120846
  chr11:62539068-62539178
  hyper

SEQ ID NO: 202575 - DNA, 360 bp, Homo sapiens
  chr11:62623459-62623819
  hyper
gaccccggggagttgtgggtagagagttccagggaaggagggcgtagacaaagcgccacctgaacttgcggcgcgaaaaaggcgcgcatgcgtcctacgggagcgtgctggctcaccgaccgcattgcggcttggttttctcacccagtgcatgtggcaggagcggtgagatcactgcctcacggcgatcctggactgacggtcacgactgcctaccctctaaccctgttctgagctgccccttgcccacacaccccaaacctgtgtgcaggatccgcctccatggagctacagcctcctgaagcctcgatcgccgtcgtgtcgattccgcgccagttgcctggctcacattcggaggct

SEQ ID NO: 202576 - DNA, 206 bp, Homo sapiens
  chr11:63258404-63258610
  hyper
gggcccggtactggcggttcgcgaggcgggtttggggaggggtgggggaatcctagggaggcggagcgcgtactccccctcggcgcccgggctcaggcccatcccgcctctgcggcctcgccggcccccaggccttgcaggggactacgcccctggcgagttcccagtcggcgcggcccctggtcggcggagccgcggaagcttgg

SEQ ID NO: 202577 - DNA, 54 bp, Homo sapiens
  chr11:63258770-63258824
  hyper
cttttaggcggagaggggcgaaggaggttattcgttttggggaaggtcatggaa

SEQ ID NO: 202578 - DNA, 106 bp, Homo sapiens
  chr11:63655734-63655840
  hyper
tctttggcagggccgccactctgggtcagcacatctgagtcacacatgttcctccccagccctattggaggctttgttaaagtcatctgcccctacccaggtccca

SEQ ID NO: 202579 - DNA, 87 bp, Homo sapiens
  chr11:63684092-63684179
  hyper
ctggtagccccagcgctctccacgacccccacgagccagggcgtcagaaaagtttgtgcagaagtgggggacgcaagggatgagcgc

SEQ ID NO: 202580 - DNA, 102 bp, Homo sapiens
  chr11:63741877-63741979
  hyper
ttcacaagtataagccttggaggcggaacataactcgaagaagagcccttttgtgctccgcccatagcgtaggaaggtgtcaattggctgtttcgaggaacg

SEQ ID NO: 202581 - DNA, 121 bp, Homo sapiens; identical to SEQ ID NO: 120876
  chr11:63742038-63742159
  hyper

SEQ ID NO: 202582 - DNA, 93 bp, Homo sapiens
  chr11:63803767-63803860
  hyper
gcgggagatgggacgcccagcctttgggatttggggtgggggtccctgagtcaagagccaagcaccagtagcggtggcgctggccccgccgcg

SEQ ID NO: 202583 - DNA, 45 bp, Homo sapiens
  chr11:64038085-64038130
  hyper
cccagaagatgagaccgcaattcgagaatcaaagggccgggagcg

SEQ ID NO: 202584 - DNA, 135 bp, Homo sapiens
  chr11:64410436-64410571
  hyper
caactggatcccgccgggaaatcgggggtccgcggagcggcaacgccaaggtccaggatgcctgggtccatcgcgaggagctaggggtctctctgcatcccggcggggtcggagcggcgcagagggccgtcagaa

SEQ ID NO: 202585 - DNA, 195 bp, Homo sapiens
  chr11:64481256-64481451
  hyper
cgctccccgcgctgagcggggctcccttgcaggctcacagtgccatgggcccggccgcggggcgaggcgcgcagaggcccagatgccggcttccctcaggcggcggcggcggcgcccctcccccgccgcgggctccgacagaagagcagggagggatgcctgcgggagaacagagaggaaagggttaatgagaac

SEQ ID NO: 202586 - DNA, 82 bp, Homo sapiens
  chr11:64509680-64509762
  hyper
tgcacgctcgaccccgcccacctcctgcttgcccaggactccgagagcaggaggcaaattagagaggaaaggtgtggtgggc

SEQ ID NO: 202587 - DNA, 499 bp, Homo sapiens; identical to SEQ ID NO: 48593
  chr11:64509801-64510300
  hyper

SEQ ID NO: 202588 - DNA, 96 bp, Homo sapiens
  chr11:64512084-64512180
  hyper
cagacccgggccgcagactccccacccgctcgccgcccccagcccgcccgcgccgccctgggcggggggggagtcgctgggggccgcgccctcctt

SEQ ID NO: 202589 - DNA, 702 bp, Homo sapiens
  chr11:64512196-64512898
  hyper
cgcgctcgcccactcactcttgggacctgccgcaaggagcccgcaccggcctggccgaccccacctccgtgcgctcccgcccgccggcctcgctgcggctgcggctcccgcccgctctccacgccgcggccccgctccccgccgccccgcccccgcccccgcgccaggctgccccctcccccctccgcccctgcgcggagctccgcaccgccggctgcgccacccccaccgggggctccctctcgccccgcacgcggcggtccctgcggcagcttaacccctcccctgccgcgccgcccgggaggccagggccgcgggcggggggctgcgccactagctgccccgagggcgggcgaccggaggccccgccgcccgggacgcggaggggggaccgaaacgaagagcccctcccccaaccgcggacgccccagtgccccccgccctgcctgggtgtcgggcggaggaagccgggaggggcaggaagcggactgcggtggggaaggggcgccccgcccagcccccagctcgggttcctgttttcgagacaaaccgttcccatggggctaacccggcccgggaccgggcgtcttcctgcaggcagcgggtggcacaggcctagtggaggtcgggggcgtggggacagctggtccttgagatagtctgggggatgggctaggacaagatgggaatattttggggaga

SEQ ID NO: 202590 - DNA, 73 bp, Homo sapiens
  chr11:64513748-64513821
  hyper
ccatcaccgtcccgccgtgggacgcacctgccgagggtggaggataagggggtgactgcgcggctgctgttga

SEQ ID NO: 202591 - DNA, 128 bp, Homo sapiens
  chr11:65185728-65185856
  hyper
agtgagaagccccctcctgagggtcctcccctgcctcgccttcctggtgggcggcctgctttccagcacatgtggtggaccagcccacattaggtcaaagtgttaaaaatagccggagggctcagtat

SEQ ID NO: 202592 - DNA, 98 bp, Homo sapiens
  chr11:65189906-65190004
  hyper
gcccactcaagagggcgcccccgcccgccacgcccccagcccctctcggggaagcgcgtcccccgcccgacctcaacaacatccgggaagaaaagggg

SEQ ID NO: 202593 - DNA, 56 bp, Homo sapiens
  chr11:65197625-65197681
  hyper
gtagatgtttggcagcagctactccttgttgagctctcacagtgaactctcctgcc

SEQ ID NO: 202594 - DNA, 210 bp, Homo sapiens
  chr11:65266965-65267175
  hyper
aaagagattaaaccgaaggtgattaaaagaccttgaaatccatgacgcagggagaattgcgtcatttaaagcctagttaacgcatttactaaacgcagacgaaaatggaaagattaattgggagtggtaggatgaaacaatttggagaagatagaagtttgaagtggaaaactggaagacagaagtacgggaaggcgaagaaaagaatag

SEQ ID NO: 202595 - DNA, 222 bp, Homo sapiens
  chr11:65267949-65268171
  hyper
ggactgaggagcaagcgagcaagcagcagttcgtggtgaagataggaaaagagtccaggagccagtgcgatttggtgaaggaagctaggaagaaggaaggagcgctaacgatttggtggtgaagctaggaaaaaggattccaggaaggagcgagtgcaatttggtgatgaaggtagcaggcggcttggcttggcaaccacacggaggaggcgagcaggcgtt

SEQ ID NO: 202596 - DNA, 389 bp, Homo sapiens
  chr11:65306805-65307194
  hyper
gcgggcgcgggaggcgtcgagctggaagccgccgggacactcgcacacggcgccgcccggccgcggcacgcagcggccactcacgcagcgacactcgtctgaatcctcctctgaactgtcctcatctgcgtggcccggaacaatatggacttcaacactgagccccggccaaaggctaccaaccccgccaccgcccgacccggcagcactcacctcttgggggcttccccaacagcagggggcttgtgtcccagaaggaattgctctcgctctgcgatgtcgggcaatgggaccctgggaggagcagaactggtcagcgacgtccgggtccccgggccctggcccccatcctcgctcccggccaactcctccccgactgccttacccgc

SEQ ID NO: 202597 - DNA, 105 bp, Homo sapiens
  chr11:65339689-65339794
  hyper
gcgtcaggtggcacgttaggcaccaagtgtggacttgccagtctcctgactccactgttagatcattttccttgggtgtgggggcggggcggggcgcggcgggga

SEQ ID NO: 202598 - DNA, 173 bp, Homo sapiens
  chr11:65342125-65342298
  hyper
aggggtggcagaggccgaggggagtgaagtcgcggcacctcgggccttcccggaggccaagcatgagactccgcggcggtgaagtttgattggggttccagggacccgtattccccgctcagtctgtgaagaccgccggctctccccacagcactagcggtctttacagttat

SEQ ID NO: 202599 - DNA, 208 bp, Homo sapiens
  chr11:65343104-65343312
  hyper
gctctggttaagacgtgggtggctgcaccttggagttgagagctggtcctcgtccacattcacagtatgactctgagcaagtcccttcccctttctgggtctcagttttcccagccgttgaaagggggccagtagtacgtacctcccagggctgcgggcaggaaggaaggcggcccgggcagcgctctctagggtggcaccaagttgc

SEQ ID NO: 202600 - DNA, 208 bp, Homo sapiens
  chr11:65343372-65343580
  hyper
accccttccacgcccccctcccccgcccccgctcccgctcccgggtcgcggcgcgaggccccggaagccgggtcgccccgcccccgcgctcctgccccggcccccgccccgcgccggagccccgcccgccttccgacgggggtgcggctccaggaaacggcgcgctcccagctccgcgctcgccacccgacgcgccccaggcgacccc

SEQ ID NO: 202601 - DNA, 281 bp, Homo sapiens
  chr11:65405774-65406055
  hyper
ccctcccaacttccctccgggctccagctcagtcccgagtcaatatgtccagccccctgtctctgaccagccgttcctactctctctgtgtgacggcttagcctggccagccagccggtgagtggaagcggcggctcctgactcctggtggcggcactgtgaccccctccccctcaacactgcaagtgtgtgcggggctcccccttattctgaggctcctcttcttcttaggcggcctccaccccagtccctggcctggcctgggaggaaacatctgtcgc

SEQ ID NO: 202602 - DNA, 144 bp, Homo sapiens
  chr11:65419839-65419983
  hyper
ccaggagaggtcttcgtgggtcacgggaggtcgcgggaccgagaaagccaagaggagggaggcgcagcctgggctgcagggccttggctccctggtttccctctgggcctcgggtcgcggacctccggtcggggtccctgcgca

SEQ ID NO: 202603 - DNA, 100 bp, Homo sapiens
  chr11:65420274-65420374
  hyper
tgttcctaggagactcgctgaattttgggacgcgtcccgctgacgataactccttttcccctgctattgtcctcccgcgacggtgcgaagcccaaacgaa

SEQ ID NO: 202604 - DNA, 32 bp, Homo sapiens
  chr11:65553781-65553813
  hyper
gcagttgaagccacttcctccgtgaagccctc

SEQ ID NO: 202605 - DNA, 227 bp, Homo sapiens
  chr11:65554410-65554637
  hyper
gctccccgggccaccccaagctaattagatcagatcaccgccccccacccccacccccccccgccccagccaccaacacacaccgccgcgagccaataaagcgtgaacccgtccgtccggctcgcactttaagacttcccgagcggcggcggggacgccagtcgagccgggagacgcttacctgccgcttccccgcgccgcccggtgcacctggccgcaagggacct

SEQ ID NO: 202606 - DNA, 409 bp, Homo sapiens
  chr11:65554723-65555132
  hyper
ccttagcgactccttccctgttgtgcccccgttcccggcgttcagcccggccccgcaaaggtgggacggctcccggcttcagttacggaagcggcccgtgtccagcgacgagggttcgaaaatgccccgcgcgttcctggtgaagaagccgtgcgtctccacgtgcaagaggaactggagcgagctccccgacgaggagcgcggcgagatctacgtgccaggtgaggctccaaccgccctccggcctggggcacccgcggcggcgtcgaggctgcgggcgggcgggcgggcgcaggtccgcggagccaggcggcaggcgcggtgtgggcgccggggctgaatgcggccgcggcctgggctgggtgggcccgcggctctcgacccgggactcggggggcgggggcggggc

SEQ ID NO: 202607 - DNA, 371 bp, Homo sapiens
  chr11:65582709-65583080
  hyper
ccaccccaatcccccgctttgggcaggtgcatagggaggactcaggaaagaggtgttctgccatggaccagtccaggtccaaaaagtctcgagaagcgcccgggagccaggagaaaagccgagagatgaaaggagatgcctgaggtgccgcagcccaggtctgagccgggctagaaaccgcgtgacaaaacaaagatgcgttcttagccgtgatggaactcccagattagcttggctttcttccttttgttttgttttgttttattcatctctgtcgcatctattttcctctgggcatgtgacacttccactctttctcttctttagtcctcttccagaagttctgttctgtgctggattaggtcaggagt

SEQ ID NO: 202608 - DNA, 118 bp, Homo sapiens
  chr11:65657719-65657837
  hyper
atccttagtgggccgagacttccgaatttgatcaaaggtaaagagggactggagagcggtccatctgacttctgtgggggatgggcaggagtcaggggcggacgcctgaatcttgttt

SEQ ID NO: 202609 - DNA, 164 bp, Homo sapiens
  chr11:65658812-65658976
  hyper
agcgtgggcagtccggatcagttgcccctggcctgttcccccgatgattgaaggcactgcttcctccacgccgacgcccgcccggattgctccccgagccccgggaccgctgtggacctcgggacctggacgccgtcctggctgcgcaggaggggccgctggca

SEQ ID NO: 202610 - DNA, 241 bp, Homo sapiens
  chr11:65666908-65667149
  hyper
ccttccctcccctgtcgacacgtgctcgcagcccctcgacaggaaatgggcacctgcagcctcccgggtgccccccggcgggcagcgggcgccgttaggggctgagagtggggtcgcgagagtcgcccgcagcctgaccccgcgcacgtcccggaacctcgaggtctctattcgccgcattcggcaaagggatcgagggccggtctccggggacctggcaggttccactgcccggaccccc

SEQ ID NO: 202611 - DNA, 106 bp, Homo sapiens
  chr11:66049841-66049947
  hyper
tctttccatctgtcgtgggctgggggtgggagacgggaagacgggggtggggtggggggcctacggccatgcccccttcctctctgtctccgcccccagcaaacac

SEQ ID NO: 202612 - DNA, 823 bp, Homo sapiens
  chr11:66079389-66080212
  hyper
ccctaccgaggcctcgcggtggctgtaagtccgtggggccgaggccaggtggcgccaaaggcccatcgacgccatctgcccggctgtccgggcccagtctccgggctcgcccagagaacccgaaatctggacaaacggaaaccgtaggtggaggaagaagagggctccagggccaggttcaagggcatcgtggtgagagatgaggggttcggaggactggtggatctgggcatatcgcgaaggtggtaagggacccaggggtggagtgggcggtgcttgcgccaagagggtgagcctgagtgtgggcggggcgtgcgataagaggctcgctcggtagcgctcttcgcagagccgtatttgtgcgctacgccgcagccagggcgctctgggtgggcgggactccagggcccccaggggcgtggcttgcatctttcgtgggcggccccgggggcggggctccgtgtaggtgaaccgctacctccgctcgatgtgtgaggtgtgacagtcctacgagggcgcagttcttccacttttgtgagcttgagagggggcggagcttgtagctggggacggagcctgaagaggaggttgaggggaacttcacacgtttccctggagggcggagtttacatcatcccccaacagagttaagacctctgagggattccctgcagtgtccagggctctgtgaggcgaagcttgcagttgtgttgggcggggcctgtagcgccgcgtgaagagaatgtgtaaactcggggcgaagttcatacctcctagaagccgagactaatagttccgccaatctgcgcgcgccgagcggagg

SEQ ID NO: 202613 - DNA, 321 bp, Homo sapiens
  chr11:66176400-66176721
  hyper
ggcgcgcatctcggcgcgcgccggtcttcgcagtggctcattcatcgccgccgaggcacgccgttgccatggggacgtgatgcaggcgcggggagcgggagggagagggaggccccgggtgacgtccgcgctcttctcgcagctagtctcccgcggcctcccaattcttgcctaatttggaagagagccgcagcccttctgctgatgcgcgcgcgctggcgcctttttaaggcaactggcggagtggcggctccaccagagcctgggagctgcccccgcccccgagccgcgagccccgcgccgggccggggagtccccggc

SEQ ID NO: 202614 - DNA, 43 bp, Homo sapiens
  chr11:66186290-66186333
  hyper
tacgtcgatgtccccggcaaaccgtagcatgacttccatggtg

SEQ ID NO: 202615 - DNA, 329 bp, Homo sapiens
  chr11:66187467-66187796
  hyper
cccgcccgccgcagccgcggcagccgccggaggattcctgtcctaatatggagctgggattcccccggccccgcccccgcccccggcccgcggggagacagaggctggcagcagggcggggggaagcgctcgcttgggggccggcaacggggggaagggatgcctaagtgcagacccaggtcctcgccgtgcccccacgtccctgcctcagtttccccttcagtaaggttaattagctgagagggaaaccacgaatcactgcagactacagcgctgatgttggtttctattcttggctgtgggaaaacaggatcaacgccaaattcagc

SEQ ID NO: 202616 - DNA, 269 bp, Homo sapiens
  chr11:66187826-66188095
  hyper
cccatcctcgggacttagacccccatgaacaccccctgataagccgccaaggcccgatttgggaagcgggggcgggaatttgttctctaaaaatggccaagggaatcccaggttaaatagtccccagagaggaaccccagcagtgacctgtcccacggaggccaaggaaagtcctccttccctgcatgtgaacgtgaccttgtctgtcaagtaacgagggggatttgtagacaaccctgttcttccccattccctcaactcctcagaaa

SEQ ID NO: 202617 - DNA, 174 bp, Homo sapiens
  chr11:66189149-66189323
  hyper
atggagctgcctgagcctaggggaacatagctactgtccgcggtgctgaaagggatctcctgtcgccttcggggcgctgcccatggtgctgacggctgcgccggccgtgtatggctctgtccatggttctgaacccacagtcggcttcggagctctgtccgcggttctgaaatt

SEQ ID NO: 202618 - DNA, 203 bp, Homo sapiens
  chr11:66346551-66346754
  hyper
gattaattcgtccgaaagagcaggggagtgagggaggactggattctgagggtgctggcagaacaactggagtcgggggtccacggcggtcatgactatcgacacacggtggcgctgttgaggctcggtcctgcgcattcccgagtgtcaggagccctggaagaagttgcaggcttctcacctcccacgcagccactgcactc

SEQ ID NO: 202619 - DNA, 206 bp, Homo sapiens
  chr11:66445298-66445504
  hyper
gctcgagcctggacgcgaccgggccctttctcgcgcgccagctcacgcacgcgcgagtgcgcgctgcttccctccccttcccctcgcgggagccgagtgaccaatcccgaggctgcatacaaatgaccacgcagcacgggggcggggcctgttggtggtggcgcggcgccgcggaggtcagcccacccccagccccagccagccag

SEQ ID NO: 202620 - DNA, 212 bp, Homo sapiens
  chr11:66725362-66725574
  hyper
gagccacatccagtacgatggggacaacttgggctcccgatcctgacagacttgggttcgaaccctcagggacctcgcgcgaggcgctttagtcagtttctccatctgcaaaatgggcccgagagcaagaatgaggcagcccgcaggcggacgctgcggaggggcgctcgggggctgcagccgggggcgggtccgggggcgggtccagccgg

SEQ ID NO: 202621 - DNA, 251 bp, Homo sapiens
  chr11:66725694-66725945
  hyper
acccttacataagcgtccctcgcagcggtgccggcgcacgtccacccgctccgacccgccgcgggaagaggaccgtgcggagcgcggcggacactcacctcctcgccgtcgccagtcctcgccgccgcctctaccgctgctgcctccactgacagagaacagctgcggtctccgtgcaaccgaacttgctgcagtcccggccccgccttacggacttcctattggcccagacagcccaacccctcccgtta

SEQ ID NO: 202622 - DNA, 33 bp, Homo sapiens
  chr11:66726353-66726386
  hyper
aggaaaagctaacgttagcgaagggcaggagga

SEQ ID NO: 202623 - DNA, 97 bp, Homo sapiens; identical to SEQ ID NO: 48690
  chr11:66824137-66824234
  hyper

SEQ ID NO: 202624 - DNA, 127 bp, Homo sapiens; identical to SEQ ID NO: 48692
  chr11:66886029-66886156
  hyper

SEQ ID NO: 202625 - DNA, 120 bp, Homo sapiens
  chr11:66897392-66897512
  hyper
aaaaattaaagtttagtctgaattttaagctctcctattctttttttttttttcttttgtgagacagtttcactgtggtcactcaggctggagtgcaatggtgcgatctctgctcactgc

SEQ ID NO: 202626 - DNA, 207 bp, Homo sapiens
  chr11:67141093-67141300
  hyper
tttaataatcccatccgccaggcccactcgcaggtttttttcgctcggtttcggattttttttttttttcggtgtgggacattctgcaaactttttttttttttttctgacgtgtaaagctgtaaccacaaattgtagcggccctccccggggtgggggtaggaggggggaggagggaagggagggcttctggggctccctctccct

SEQ ID NO: 202627 - DNA, 387 bp, Homo sapiens
  chr11:67141420-67141807
  hyper
gcgccggcttcgggtgggcttctccccaggcgttggcctgggacaccgccccctgccccctgtcccctgccgatgcggggtccctgatccaacctacctctgcctgtgcgaggtccctgctcccaccctacctctgcctcctcatctctaaccttccctcctcctcccccttgagtaaatgcaatgacacattctcccaaatgccagcgagctggcctgggagcaagtgatggtgtttttcctgctgccctttgtctgggctgaccgccccccctgcctattgtcccgccgcttgtcccatttccaaaagctagagctaagcgaggcgctggggctggggcaggtgactaaccagctcacaatgccccctgcgggggaggaagaggg

SEQ ID NO: 202628 - DNA, 169 bp, Homo sapiens
  chr11:67183098-67183267
  hyper
tgggcatgccccaggcgtttctatataaagcggcgccgcttgggccgggcgctgtgccactgccaccgccgccgccgctgcatcccgcccggtccgagtccgcccgccacgcccgccgagccgctgccgccgccaggtaccccagctccggccccgccccggggagagc

SEQ ID NO: 202629 - DNA, 234 bp, Homo sapiens
  chr11:67210770-67211004
  hyper
aggctcctgggacccgcgatcccccctcagccccctcagcccggcccctgcagccccgcccagcccccagcccgcgcccctagccccggccctgccgcgctcaccgggggcaccgggggcgcagggggctgcggcaccggcttcgggcggctccggatcccggcctctgggaagcaggaagcaggattcaggaagtgacagagggacccggagcgggggcggggcaggggctcg

SEQ ID NO: 202630 - DNA, 119 bp, Homo sapiens
  chr11:67232283-67232402
  hyper
caacaacaggaagcccggcacgaagaagatggcgctggagacacctgcgggagggaccagagcccggtcagggcgagggggcggaggcttcgaggccttccgggctgccgctgactgcc

SEQ ID NO: 202631 - DNA, 133 bp, Homo sapiens; identical to SEQ ID NO: 121094
  chr11:67232464-67232597
  hyper

SEQ ID NO: 202632 - DNA, 375 bp, Homo sapiens
  chr11:67271842-67272217
  hyper
gccggggccgggagccgcagcgaggctgagcgctgacctcttttccgcgcagcccccgccccccgcccgcccgtcgccatggcaaccgcgcgctgacgcgggccccccggagcgccaggctccggccggcgggcgggagggccacctcacctctcccgctgcgaccgcgtcctaaccccgggaaacggcatccctctgggcgcgcccccgaagccccggggcccctccttccgggcccgccttccgcgaccggcccctcggggacccgccccttgcatccccttcccggagtcggcggggtcccaagtcccccactctcggacgtccacctagagctttgttccccgagtgtctctgcgcggagtggcccagtgc

SEQ ID NO: 202633 - DNA, 44 bp, Homo sapiens
  chr11:67275125-67275169
  hyper
tcctggcactgagcccgacggcgacgggacgcttcctgcagcaa

SEQ ID NO: 202634 - DNA, 95 bp, Homo sapiens
  chr11:67777602-67777697
  hyper
gtggctctagcctggcgccctctgggcgttgacttcttctctgtggtctgggaggagatgtcgaggcccccgagggaggcggtggtgaaatcttg

SEQ ID NO: 202635 - DNA, 210 bp, Homo sapiens
  chr11:67806323-67806533
  hyper
caggcctcctctccgggattaagcgcctcaggacccgtccgccaggccacagcctgggctcaacctctcccagacttcctggactccagtggagccttgggccgggggcggggcgtccctggcccctccccgtcgtcccgcctgcccggaaaggagtgagcggcgcctagtcccgggctggcgggagtgcagttctgagtcccgcccggc

SEQ ID NO: 202636 - DNA, 142 bp, Homo sapiens
  chr11:67895653-67895795
  hyper
actggcagcccgtccgtgtagccttggccgggcccccaagcttcttagaatgccatctaagaaggcagagggggatgagcggcggcggggaggaggggcaggccttgggaagatccactgggtcacagggaagcgaaggcgg

SEQ ID NO: 202637 - DNA, 202 bp, Homo sapiens
  chr11:68080741-68080943
  hyper
gttctgagcccgggcgcggggcggcctggccggtggcgctgctcctgtgagccgcgtggctgtgggtttccaagcggactgacacctgccaggtgcccgggcgacccgaatgccccgtgtggccgccgggtccccagatagtgtccatccccgggtcggctacgcggaggtgacgtggtcccagatcgcggggcagtggggg

SEQ ID NO: 202638 - DNA, 625 bp, Homo sapiens
  chr11:68606633-68607258
  hyper
aacaaaggaaaaaatgcaaacgatcaaagtgcagaagcagcccttggcccgcgcaggctccggtttccgcctcccgccgccgctgccaccgcccctgcgcctttagatttcgggcagcaagtttaattgctcgcttggaaagcgtcctcggaagggcaccgccagcaactgcggcttcgcgccccgccccttcccccaagccccgggcggcgtcacgtgacggctgagaaaagtaggggaaaggtcagcagcagccccgcccccaggctggcgcgtcccaggcgctcggatcctgttccacccgccgtgcccacagagaccttccggagcgagttggcgcgcgtccctgtggccaccccagcgacagcgggagaaatgcaacgcacctctccgtgggaaggtcgagccctgcggtgcccagctgtggggacagctcggtgctcagtgcttctgatgacagatgctgcatccaacgagccagaaacgcaggcaccgcgctcaagagcccagggcgcgtctaaaaggggctcactgtgaagcctcagtgaaaactgacggtgtttttatgaatgagcactcggggccagggttgggtaagggcaggccctcgttccagggctccccg

SEQ ID NO: 202639 - DNA, 210 bp, Homo sapiens
  chr11:68671472-68671682
  hyper
agcttgagagagacgcggaggtggaggagcgcaggtacgggaggccgccggcgccgctccctcgcggtcggtcccgccgtgtcccgggcagagtctccgaggggctcggcctcatagtctggggcgggaatttcgtctccgacccttcgagtcaggggcagggatcgtccgtcccctgcttggccacctcccgagttgtcagtctcatca

SEQ ID NO: 202640 - DNA, 36 bp, Homo sapiens
  chr11:69062306-69062342
  hyper
tggtgccaaagctagaccaccatacagccagaggcc

SEQ ID NO: 202641 - DNA, 198 bp, Homo sapiens
  chr11:69452459-69452657
  hyper
ccttcagcctcgggatcccagatgcgtcgttggagccagggccgcccccctacctgttgggtttgcgttttaactccagcgcacaccttgccggcagccctcggagctaggggaggggtctcgtttccccgcagcccgccggacagacgactggggcacgggaggggcggtggcagggtggtctgtgtgtggctgaaa

SEQ ID NO: 202642 - DNA, 344 bp, Homo sapiens
  chr11:69453701-69454045
  hyper
cagctggcgctccccgccgggccccaaattccagcgccgggccccaaattccagcgcctcccccgcgggttcctggacggctctttacgctcgctaaccgggcttgcaattttgcgctcgtccctgagccgggaaatcaacgaagttcctagtcgagatctgcccggtccgcctagtaacagcgccgcgcccccattggctcatgctaattccagtttcctctgtcttgcgcccgggatgggggggtgaagctccctcctggacccagagccggttgtgccggagtgggcgagcctctttatgccctgctgcccctagccgacttcggcccgcttcgcgcctcg

SEQ ID NO: 202643 - DNA, 31 bp, Homo sapiens
  chr11:69477505-69477536
  hyper
gggagagacttctccgcggtgttgtgaggcc

SEQ ID NO: 202644 - DNA, 77 bp, Homo sapiens
  chr11:69516891-69516968
  hyper
ttgcaagggtgggtttggagcggctctgggtgggagtcagcgtccagcgtgccgaccaccccctttctctgcagtcc

SEQ ID NO: 202645 - DNA, 68 bp, Homo sapiens
  chr11:69517461-69517529
  hyper
gcgcatctgcgtctaagccacaccgtgctcctggtagattaaaaattaattctaaaaaaaaaatctct

SEQ ID NO: 202646 - DNA, 70 bp, Homo sapiens
  chr11:69517649-69517719
  hyper
gggaaacggaggcgaggaccacacacgcgcaggcagaggctgaaaaggcccgaggtgggttttcctgttt

SEQ ID NO: 202647 - DNA, 110 bp, Homo sapiens
  chr11:69589517-69589627
  hyper
cgggtgtccgcgtgcgcgccgccgatgcggccgtcggggagcgcctggaggtggaagccgatgcccacgttgcagtagagccgccgcagccgcttgatgcccagcaggta

SEQ ID NO: 202648 - DNA, 103 bp, Homo sapiens
  chr11:70117685-70117788
  hyper
aaacacttctaccagcgtttaacgaatccggttccttttagtgctcaccaaatccagcccaagaattcagggagccgtcagttcttcccgggagctgactgca

SEQ ID NO: 202649 - DNA, 199 bp, Homo sapiens
  chr11:71163705-71163904
  hyper
aaaaggcaaacagtgcgctacctgagctacttacacacgtggtacaggagtgaaaggggcaggagagggttcccaagaattcagcgccatccgcccagggtggcgggattcccagcacggagaatcgattgctatcgtctgctgtcccgcgggcacgatggagcgctcctaccgtactctccacttttggtgtatttgg

SEQ ID NO: 202650 - DNA, 197 bp, Homo sapiens
  chr11:71814206-71814403
  hyper
gccccgcctgccgcggccgcacctggtccgagtcctcgttctcgctgctgtagcagcaccccatggccggggtcgggccgggcgctcaggccgcgccgaggagggacggcgtccgtgaggagcccttccggtcacatgacccgcggcggcctcccgcaggcaaccacccgcccccaccccccgtaccccctgtcccg

SEQ ID NO: 202651 - DNA, 177 bp, Homo sapiens
  chr11:71951738-71951915
  hyper
cacaaactcagcctcccgggctccgggttttcaaagctgcagcgccggggtagggaaccccaggggtgctgactggcctgccccctctcctcctcagctcggccctgaggtcccctgggtctccccctctagcccctcggcctccctcctggcttctcaagcatcactcggaacttt

SEQ ID NO: 202652 - DNA, 106 bp, Homo sapiens
  chr11:72492447-72492553
  hyper
aagggcggacgggcgctggacagcctcggggtccccctcccgaggagcgccccagaccccctggggccggcgtggggactgcgtatgggacgcggtggccggcggg

SEQ ID NO: 202653 - DNA, 114 bp, Homo sapiens
  chr11:72929153-72929267
  hyper
ccggcagtgagagcgtcgccgcccgaccctcccgttgcagcaccggtacagacacgctgaccccgcggccttgtcgctgggcggcgtcccggagcgggtggcgcggtgtctacc

SEQ ID NO: 202654 - DNA, 1001 bp, Homo sapiens
  chr11:73018832-73019833
  hyper
gacggacccttcagttagcccgcggctccccgggctctccctggcgccgagtcccacccctttcccggcccagagagtgtgcgtctgcgtgcacctgagtgtcagtgtgtacgagagtttgtgagtccgaggttgccatgttggagcccctgggcaggaggtgtttccgcgcggaggctggtggcccgcggtggacgcggcgccctggctgcgagtctgcggagctgagcacgctcagcggttgtgtgtgtctcagcgactccctgggggcagctcggcctgctgggctcccgagggacctctctggagggccagagggtcgcctcagtctgcaagtcctccagcaggctttttcttcttcggctcctccctgattccctcccaccacgcggttcccaggctcgcgcacgcccggagcccaccccctcttttgggcgcgaggccccgccccccgcccccttgcctctgccgcaaagtttatttgcaacaaaagggtgccaggagcgagcagccaagggcgttgggcaggcggacgcagagtcgaggaaccaagcgctgggatcccgcccaggcggtgccgcggtgcccctggtcgctccagccgcggcgggggctgggcctgggggtcggcgctgaggcgggaggggccgcccgggatggagacgttgcggccggtggccacagaaacttgagccgcggcagagaaacctctgctccggtctctgcgtcctcttcccacactcccgtgcgctgctttcggcgtgggccgctgcgctcctagggagtgggggcgcagggggggttggccgcggctgcccgaggccagcccccccggagtgagttacgccactatggcggacggggcaccccggccccagctttaccgcagcgtctcgttcaagctgctggagcgctggagcggcggccccgggctgagggaggaggacacggacacccccggcttgaggcgacgcgcctcgtgccggccgaccacggctgcc

SEQ ID NO: 202655 - DNA, 154 bp, Homo sapiens
  chr11:73020099-73020253
  hyper
gaggcccagcgccgactctgaatccccaggaacgcccagccccgacggtgccgcgtgggagcctccggctcgggagtcgcggcagccaccgacgccaccccctcggacatgcttccccctggcgggtctgcgttcggcgcggcccctgaccggg

SEQ ID NO: 202656 - DNA, 217 bp, Homo sapiens
  chr11:73087925-73088142
  hyper
ggctggacggcggcgcctcggcgcggctgcggcgcggggcggccaagggggggtctggatggtgtcagcccgtgactgtgggtgacacggcgcgtgaggcggcctggccgggcgaacgtgtggctgggacactgggcggtgacgccgggccgagcgggcgacacagaggggctctgtgtgtgggagacaggcagcgtgtgtgcgtgtgttgtgtgag

SEQ ID NO: 202657 - DNA, 101 bp, Homo sapiens
  chr11:73490690-73490791
  hyper
tgacttgaactggcgggtcttgttgtgccggggctgccacgttatttccagcttttgaggtggattttgcccgctggtgtgccaccgtcagcgcttccggg

SEQ ID NO: 202658 - DNA, 853 bp, Homo sapiens
  chr11:73693756-73694609
  hyper
caggctcaccgagccgcagggagaacacggcagtgcgtgcggctgtgtctgtcggctggcggagggcgcgtcggacgagccgggcgagcgtggacagtcaatcccaaggcgcgcgcagctgggcttcgcagtggggctccgcgcaggcggcggcgcggcttaagcctcgggggcggggcccggggtggggcctgcggggcggggccgggcctgccagctcctacttgggtgcggagaccctggagcagccgcctttccgcggggaccgccccgcctagggttctctccatgactttctccactcccgtttccgtgcgtcccatcaccgcgtttactccttcgttccccgagatggtcactcccttgccactccccgcctctgcctcacactctctcgggccgccaacctctgtgaggatggcaagactgaccgccagaaacaagtcttgtccagtcacacacctcttgccttcccagccaggacggtttctaacagcgtccagcggggccgtgtcttaagtgcacttcctcttttatgggcccagcccccctacgctgggcaaactacccaccctcctgcgagcgagcgcgcggctggctcctgcagggcgggactggggcctcgcgaccggcctcgctgtcgattggttacagccgccgcgttgtcgggggaaggaaccaatcagaactgcagcaacaggtggcccggcaaccgacaacagccgttgggctcggctggggttcgcgccttctcccccggtggagcggcctggcgtttagggaccaggacactaaaggccccggcggggcgggagcacccagcgtgacctcacgctcctacacacagacaagc

SEQ ID NO: 202659 - DNA, 200 bp, Homo sapiens
  chr11:74022479-74022679
  hyper
ctcctccccgcgcaggtaccgcctcagcagccccagcagccggcgctcgggcgccagggcgcgcgccacgctggtcagcgccgagaacgtgtcgccccgagccgcagccctttctgggtctcctgtcccgagcgccagcaccgccagcagcgccgccagccgcgccccaggacccatagccagcgctcgcgaacttcccc

SEQ ID NO: 202660 - DNA, 123 bp, Homo sapiens
  chr11:74022716-74022839
  hyper
ccctcgcctgccccgcccctgtctccgccccctcccggctcaggccccgccctctggccccggcccggcccgtcccgtccaccgcccagtctcgctccacgccccctgactccttccttgttt

SEQ ID NO: 202661 - DNA, 31 bp, Homo sapiens
  chr11:74204886-74204917
  hyper
ccaggaccaaaagcgcggggccagactcatc

SEQ ID NO: 202662 - DNA, 212 bp, Homo sapiens
  chr11:74660068-74660280
  hyper
ccgctccactgcggtgcctgccgctatcttccccacgccttagtaactgcgacgcgacggcagacagtgtaggcggcaaccgacggccgggacgtctaacctcaagtcccagcaagccccgcggccacgtcctctgactacctcgcgccagcaagacccaaactacggatcccgattgactccgcgcggcgcgtcacgctgtcagctccagc

SEQ ID NO: 202663 - DNA, 324 bp, Homo sapiens
  chr11:74951799-74952123
  hyper
ggggaggcaaaccctgcccactcggctcggagcccggagcggccgcggaagccggaggccggcgcgcagggcgagggcaccgggggcggggggctccgctccccgtctgacccctcttgcccccggccagtcagccagtaagtgcggctcctcagactttcgagacagcgaacggaccgaccgggactgccagccgctccgggtcaaggactcgccccacccgtgccccccaccaggcgctcccaactcactggtgagcgcggcggcccgggcgctggatgcgggggcggccgcgatggccccgcgcgcgggacagccggggct

SEQ ID NO: 202664 - DNA, 714 bp, Homo sapiens
  chr11:75062273-75062987
  hyper
ggttgccagtgtgtgcgccagcatgcctgtgccacgggttagtgtgcccgtgcgtgtattgtgtgtcaacctgcccccgtgcgtctctgcggctgccggccaatgctgggtgtcagcgagctgtgtgtccgggccaggagctgcggcccacatggggcggcccggccctcgccctttgggtccccccgcccacggccctgccggggagaccacacaggagacctcgggtggaggagagctggtactagatcccgcggtggccgcgaacgcagaaccaggacgcaatcggagcccccgcccgtgtcctcgccgaggtcgcccccacgcgccccccgccgggcggccgccctgcactcaccgggtccctttgtcgcccatggtccgcgacggtcgcagggaggtccgcggcgtcagcgcccaggctggaaaatccccagccagcaggaggagcgcgggccagcccgctcccggctccctgctccgcctcctccgctctcccggccgccgccgccgcccccgcccccggtccccgcccgccgcccgccgcgtcgagcagcgcagcgcccgggccgcggccaggggcgtggaaccgcgcggggtgtgtgcgtgtgtgtatgtgtgtgtgtgtgcgcgtctgcgtgtgcgcgcgccgcccagcgaggcagggcagcgcggcgggacgcgtcagggccccaaggtcggcgtttgtggtgg

SEQ ID NO: 202665 - DNA, 220 bp, Homo sapiens
  chr11:75140982-75141202
  hyper
cgggccggcgcgtcgtggcgcacccagcgcatggccgcttcaaacacggcctcctcgcgcgccacgcccagcgcggggtccgccagcagcgccaccacctcgtcaggcgccagctccaggaagtcggcgtggcgcgccacctcggcgaaggcctgacgcaggacgcggccgcagcgctcggccagcggggccagcgagaaggcggcggccacgcggcgca

SEQ ID NO: 202666 - DNA, 107 bp, Homo sapiens
  chr11:75380110-75380217
  hyper
atgctgctcagcagtgagaaaaaaatccaggaacgatgctgactgaaagagtgctgcagaaaaaaacaaaacaaaacaaaaacacctgctgtcgtcagcttgcgctg

SEQ ID NO: 202667 - DNA, 513 bp, Homo sapiens
  chr11:76381508-76382021
  hyper
gccccggctccacgcgcgcagtggggatggcgggaggggagtgtttggggggcgtcccttgggaccagcccccgccttgcgctcgctagaggcgcgcgacagtgcgccccccgagggccggccagcctcgcctgcccggcggctcctacctggctcagcgcggccgcagctcctctcccgggcagtctcggcacattttgcgcaaacccgcccccgggtcccaccccgcgccagaccccggggtcacggcccgaggaggagcaggccgctcagctgccccaccggagcccccgcgctccggctgcaatttaaatacctctcccgccggcccgccccgccacgcccccctctggcgaggccgtggggtcctagcgcctggccccgtgcctcggtttatccggagccggcgggggcggagtggggtggggcggcgaagcatcttcaccaccctgggacctcggccgggaaggggcgggggcccagtgtggggggatgagagggcgggagggagag

SEQ ID NO: 202668 - DNA, 51 bp, Homo sapiens
  chr11:76382264-76382315
  hyper
ggccgcggagggggttccccgcaccaagccgtccactctggtgggtcctgg

SEQ ID NO: 202669 - DNA, 374 bp, Homo sapiens
  chr11:76494603-76494977
  hyper
acgcctagggctgggcgggagtggggaacgccgacccaggggagaggtcttgcgggagacaaaggctacgcccaggggccgtgtgggtctttgtgcggacacgtgcatctcacgtttgtgggtctttgtggatttgcggtcggggacgcgccgctgtcggtgcctttgtgtgtccgtggctttgcgcggctgctttgcgcccgtgtccacgtttgcgggcctgcgcttggctgtgggcgtcggtgggcgcatcgcgtgtctccgcgtacgtggtcggtgcctgccgacgtgtctgggctgggtgtccgcagagggtgtgcgcaccgagagcccaacgccgccccacccccccgctcccccgccgtcccctcggg

SEQ ID NO: 202670 - DNA, 151 bp, Homo sapiens
  chr11:76510330-76510481
  hyper
acctgccctgcaccccgcagccctggcctcctgccagccataaggagagcggaagccccggcgggcctcgccgacccgggagtccgcgcggcccctccctgcccgtgcggaggctcccggcccgcagcgccacctcgtgctcacgcatggc

SEQ ID NO: 202671 - DNA, 480 bp, Homo sapiens
  chr11:77184356-77184836
  hyper
ggcgtctgagacccgcgaccccgccggtacgcgcacagggggcctttgttggcccgacgggagcgggcctcgcggggcgccgcccgcctcaccttacctggcgcctcctcccgcccaggcgcccggccccgcaacgcgaaataaatgggcccagacccccactccacccgtccccacccccgcgccccagccctggcagcccgggacgcgaggggtactgggcggtaggcccgctctcaccttccgcgctcgctcagctcctctcggctcctcctcctcctcccggcggtgggtgccgcctagccgggagtgagggcgcgagtgtgcgcgagctaccgcttcactttctccctcctgccgccgccgccgcgctgcccgtggcggggctcccctcaggacaggggaactgcgagggaagggatgatgggggggcgggagggagcgaggcgacgcgggcggggggggaaggggggactgagg

SEQ ID NO: 202672 - DNA, 660 bp, Homo sapiens
  chr11:77184896-77185556
  hyper
ccaggttcctcgagggggctcacgaaagcgcggggctccgtggaaaagggaatgagagtccaagggggaaggcgtctgtgggggaggactgcagagcctgtgagggaagcgcgatgggcgagcgagggggcgggagcgtgtgggggaagccgtgagggggcgtctactgtgcagccaccaccttcggctccggctgcagccgcgggagggcagcctcccccgcccacagccgcgctattgtacgccgcccggcaggcctgaccgcctagttcactggctcccctactcctcctcctcccgcctcctcctcccctctgccctttccccttctccccctccccctcccccactccccctccccggcgcggcggcggcggctgcggctccggtggagccgtgcccgccccgcctcccgcaggtgagagggggcggggagggcctgaccgacccgtgggagcgaggccaaaccctggcccgcatgagggcgaacgcctgggattacgtcatcggcgcgtgacgccagaggctggggaatcacccgcttgctgcgtgacgtcatcgcgtcgcgtcactgttctcggtccgctgtccgtggcgggttgtttccgtgcagcctttctatcagacaattttgggacgatttctgggagggctactgta

SEQ ID NO: 202673 - DNA, 217 bp, Homo sapiens
  chr11:77899708-77899925
  hyper
tggcggtccggggtctgtgcgctgccttccgggactggtagttctctctgggctcctcgcagctcggcgcgtcgagagcgaactccatctcccaggaggcattgcagcgagttgctctgcgccccgcctcgtccccgccggtgtccggccggctggccttaaaggggacgcggtcagagtggcagctcgcggggtggcccccgctccggctccgccc

SEQ ID NO: 202674 - DNA, 521 bp, Homo sapiens
  chr11:84148448-84148969
  hyper
cctggcattgtgcacgaacctgcgacccagcttcttagcataccagatagaggcaaacatagcgatgccaatggaaggaattcacaatgaagctgccgcacaatcaacttcccacctcggctcagagacgaacagaatcaggctggagctgtcacttgcaggctgttgctttctcagttcctctcatgctggttagctgagggagagggtgggaggagggaggggttgggggagaaaaggcagtcctgtttggccagtctgcaggtatatttacatcctgccagcaggaggtccgggtgaggcaggcgctgcctttgtagccagctcacacacatccagttggctaagtatttgtctgcagttcttcggcaccggcaccgtcgccaccaaactccatgtgtgtcaggaggaagggaagctgcagtcaagtccggaggcagctcacctccctctctaggcttgggcagttacaatcctcgctttggcttccctctatcttgacagtacgtgctggcggcagt

SEQ ID NO: 202675 - DNA, 57 bp, Homo sapiens
  chr11:84432270-84432327
  hyper
agcaaagaaatctggggtagaaaacaggctcaaaatgatttcgctggtgccctacga

SEQ ID NO: 202676 - DNA, 160 bp, Homo sapiens
  chr11:85780826-85780986
  hyper
ctactccgaaaacccgacacgttgctgccattctaaatttagatactagctggccggtattcattctctagggtgtggaataggacaggaaacacatagcttcactggaatttgaaaagggaagtagtaggatgatgtcaacagcgattagcttgaccct

SEQ ID NO: 202677 - DNA, 221 bp, Homo sapiens
  chr11:85955560-85955781
  hyper
gcgcatcccctgacgggtactttccattcgccagatgggggaagccagggggaagcaggttactgtttttgcatttctatcttcaaggaagaattaggttatgaatagttccgtgaatagtcaggaagcgctgtcctccaagttcaagattaaggaaacgtggcatgcacagctaaagcaagaggtgacgtcttgtatcttcccccgtttcctgggacatt

SEQ ID NO: 202678 - DNA, 241 bp, Homo sapiens
  chr11:86382605-86382846
  hyper
gtcgcctctctccacgcataaaagggagaggagggacaagaaagccaaaccaagtcacaacaagcccctgcaaggcaaaaacagaaaaaccgctggaagggcgcccgggaggatcctttctgggtccagggggcggggcgcaattttccggcagccacgggatcgcaacgcgggccgtcctgccctctggcccattaccttgttgagatgagggttcctggtgacatcgtatccgcgcttc

SEQ ID NO: 202679 - DNA, 62 bp, Homo sapiens
  chr11:86383105-86383167
  hyper
ggcaggtgctcccaaagggttaaatgttccagcccccgccactcctcggctgccacctgctc

SEQ ID NO: 202680 - DNA, 930 bp, Homo sapiens
  chr11:86511111-86512041
  hyper
aggtgtggcccgcgtccctagttctaggctgttgggggaggggtcgccttttgtaggggacctggtctttttgcgagctggcagcgtgctcccagcagcgaaggccgtagtctcgctcaggaggccgcgcgccagacccggggatgcgcggtgttcaaagggtgacggcgcgcgggtcccgggcaggagagcccgccagagccggtgctgcctggcgccgagaggcccggactggcgactgctgccgcgccaccggggcccacctgcgcagggacgctcggcctcaggccctctgggctgctccaccctgctccggccgcaggcgagcggcgaggggaggggggcacggtttatgtgcagtggggcgggcggcgtccgcgcggcttccccgaggccggaggcggggcgggcgggcctcgggtggcgcggggggcggacccgccagctgcctgcgctgctcgccagcttgctcgcactcggctgtgcggcggggcaggcatgggagccgcgcgctctctcccggcgcccacacctgtctgagcggcgcagcgagccgcggcccgggcgggctgctcggcgcgggtgagtgcgggcaccgactggggcatccgcccgggcgcgggagaggcgaggcgccgggaggagcgggacaaagggccgggtatgcgcggggtagggtaactgcgggctgccggaggcaccgcaggacttcgccagggcagtcctcggggttccaggacacgggctgggggcctgaaggagctctggggagacggcgggggctgcaggtcatttggattcatgcagtgtcacccatgaaacggatggggaaagaagatcctgctgtcttgggtgcaggatgttggttgggaagcagagagagccggctctcggcaagctgtccttcggcgggggcgatggctacacccc

SEQ ID NO: 202681 - DNA, 262 bp, Homo sapiens
  chr11:86513414-86513676
  hyper
ctgtaattcttaaacgattatgtgattaggtctgttttgccttaatagggtctgtgattcaggaaaacgagaacaagcccgactgcagagtattcacagagcttggttcattcttaagcatttgctttaggatttagcatgatttcaccgttccatatcactgaccactgattccatggaagaccctttgtcatctctccaaatggtgtccaaaacctgtatctttgcaaactttcctgccgtttctttctgtcattactgt

SEQ ID NO: 202682 - DNA, 444 bp, Homo sapiens
  chr11:86666091-86666535
  hyper
ccccgggacgctcggccctgcgccccgccaggccatggccagcatcgggggtagcagcggcagcggctggggctgctctggcagacacccccagtttgcacgggggcgccggctgcccgcgctgctcccagctcccgggacgggagtgtgatgcggcgacgagggggcagcggccggctctccagcagctgcgcgcgactgtgtgggattttagacgtcccgggccgaggccgagggacaggctgcgagggtcatggctgcaggcggcgagcccacaagccggcgccggccgcgtccgttcggcgtctccgcgaggccagccagcagccagcgctgcgcagctctcaccgccggagccctgcgcggcgctggaggctcgcggcgcggcggcggggcgggacggacagcgggcctctccaatggccgggcgcggtgggcagctag

SEQ ID NO: 202683 - DNA, 44 bp, Homo sapiens
  chr11:87908223-87908267
  hyper
cccaccaggaaaaactgcctcgcgacctagtgattttaatctca

SEQ ID NO: 202684 - DNA, 220 bp, Homo sapiens
  chr11:87908484-87908704
  hyper
gtcttccccacgcccaggtcgccaatcaccagcaacttgtacaggtgctccttgtgcggggcctgcatcctggcggccggccagacgtgccgtgcctgaccagggaagcgcagcctgggctctgcgcacgagagagacttggggagcgcaagtgtaggtgcagagagaggcgtgggcggcggggcgggggctggggggcggaactcctcccctaggggtt

SEQ ID NO: 202685 - DNA, 31 bp, Homo sapiens
  chr11:88071023-88071054
  hyper
ggggacttgggagcgcgcgctgcccctcact

SEQ ID NO: 202686 - DNA, 89 bp, Homo sapiens
  chr11:89224224-89224313
  hyper
ttttgtaagttgagaatgttcgaattaagacaaaacttccacttccagcttcccacccgtgcacgctcagagaatgaatcaaaatcact

SEQ ID NO: 202687 - DNA, 32 bp, Homo sapiens
  chr11:89224788-89224820
  hyper
aggcgtcccccgcagcctctacccaggcctgc

SEQ ID NO: 202688 - DNA, 243 bp, Homo sapiens
  chr11:91959629-91959872
  hyper
agctaagagagccgcttgggttgctcgggatgagaggaacaggggtgctcccggggtgtgggtgtgctggcggtgacatcctgaggctgcagctcgctggaataatgggctcaaaccaggcggtggagaggggtccccggaatggacgtcgggggcggggaggctgcggagaccctgcgaggtctccgtgaaggactaggaggggctcccgggagggagtggcgcctgcggcccggagcgtgg

SEQ ID NO: 202689 - DNA, 255 bp, Homo sapiens
  chr11:91960114-91960369
  hyper
ttggatcccacttccatttacaagtgtcagacaaacccgcgagaacctcccccaacccgccccggccccagccagactagggagggcgcccagggggagggggcgagctgtctgggcagtgcctggggaggtgcgacgcgcccacccggggcttgagcggctggggttcctgtgcgtgggtccttaatgtttaaaagatacacatgaacagcaacaaaacccaaaccactcgtggccacttgttttctgccgctt

SEQ ID NO: 202690 - DNA, 65 bp, Homo sapiens
  chr11:92675309-92675374
  hyper
tattttcccttctctaccactgggagtcgcaagtgcccacaataatgctccgtttctttttaata

SEQ ID NO: 202691 - DNA, 101 bp, Homo sapiens
  chr11:93861765-93861866
  hyper
gttgggggtggggcgtaaagggggccatcccatccacagaaagagtcgcttgcagaaatgattttaaaactcccgggtgccaggacgtgaggagaatccgg

SEQ ID NO: 202692 - DNA, 202 bp, Homo sapiens
  chr11:94245849-94246051
  hyper
ctccagccgcggacgctactgggaggaggggcgtggagaacgagtgacagggcaattgggggaaaccgcagtgggactggctgagaaggtttggggcaggggaggtggagctgctgcttttggcagaaccagagatgatggcactgtggcagaaagcataggtccatctttccaagccctccttcccgatagcctgcctgaa

SEQ ID NO: 202693 - DNA, 190 bp, Homo sapiens
  chr11:94277135-94277325
  hyper
cgcggcagctgctttagaaggtctcgagcctcctgtaccttcccagggatgaaccgggccttccctctggaaggcgagggttcgggccacagtgagcgagggccagggcggtgggcgcgcgcagagggaaaccggatcagttgagagagaatcaagagtagcggatgaggcgcttgtggggcgcggcccg

SEQ ID NO: 202694 - DNA, 217 bp, Homo sapiens
  chr11:94474139-94474356
  hyper
gcccagacgagttaggtaagtctgctcattttgtcttttatttcttggtcgcaattctgcccgagaactgcgagtttggggggcgtccataggaactcagctagggatggggctggggttggagggcggagggaaagggtcaggggacacctgctgccttcgcggccggaaccggcctttcctcggcgctgtgctttcgggggtggcagggcaagtg

SEQ ID NO: 202695 - DNA, 104 bp, Homo sapiens
  chr11:94474385-94474489
  hyper
gcgtgcgtgtgcgtgtgtgtgtgtgtgagtgcgtgtgtgtgcgtgttcgtctggggcagtggtgctgctccgaggagcctggcacagcaaacttccagagctgg

SEQ ID NO: 202696 - DNA, 143 bp, Homo sapiens
  chr11:94474547-94474690
  hyper
tgccaagtacctggcacgagaaggacgtcgtgtgggtcgtccttaccctgaatttaatgaagtcaggggctgaaaacggcggtgtaatcattaaactgtaagacctaggagctgcttccctccctgatttctattcctcagtt

SEQ ID NO: 202697 - DNA, 191 bp, Homo sapiens
  chr11:94501254-94501445
  hyper
gtctgaaattaatcaaaacccggcaggggacaaaggaagggatgctgtcgccctcctaagtctcagggagacacgtcagcttgagctctgggcaatttcagcctggcagtctcgcggcccggggaggggcggcgggtgtctgcagacgggctctagggcccagcggccgggcgccacggcgggggtggagt

SEQ ID NO: 202698 - DNA, 234 bp, Homo sapiens
  chr11:94502100-94502334
  hyper
cggaagggggtgtccggtgcagctttccccggcgcgagacaaaggcgcgcgcaccggcccgcccgacgggctctggcgctgtggactggaccctttctgcccgccggccagacccggctctggcgggtgggggcgacgaaagggtcgcaccccagccccagacgctcggatcgcgttagctgctgctccttctttgttctctccccagacaagtttctttgacaaactggagag

SEQ ID NO: 202699 - DNA, 166 bp, Homo sapiens
  chr11:94883964-94884130
  hyper
cggcggctccaatctggggtcccgccggcgccgacccctcagctctctcccgatacctgctggcctctctcatctttggtggcactcgccgccacggggacggtgagatcaaagaggtagacctaggccaggagggactgccagggctccttcccgcgggccagcc

SEQ ID NO: 202700 - DNA, 1330 bp, Homo sapiens
  chr11:96122355-96123685
  hyper
aacagtccacaatttcgcaaagtggatcctgccagcatggtatccgggataactatattattcattaaaatccgttaacaatgaaggttaatgcagcaggaatgagtggtagacagtggaatagatcctctcaggaattaacacccggaagggtgactttcatgattacaaacctctttggcgggacgcaggaacccagcgcccgctagcccactagtccgtcactctgcctccaggagggaggggcacagtagctaggaaaccggaccctcaggccaagcttcgcgatgacgcgcgcaggacgacggaaacccccagaccccaaaagagctctgcaccgagaaaacaattacaagggtctggaaaggccagaaacccgagaaatcaccaaccgagctccctacatcagttccaagcacctccccaaggcggaaataacgggcaccgcgcccactgcagctcagctgaggagggttagaggcgcaaagggctgaggggcgttctccggcccacccaaagagcgcccgcgggaatttttctcttagtccgcgaggaggcacggcttcccccgcccctctcataaaccattagcaccgggagcgcgagcgagtcccagccgggagacagccccgcaccgccctcgcgctctcacctttcaaagcgcctccacctctgcctccgcctccgcccctgccccggcaaccagctcaggacaagcgatgctcctcccccccttccggggaccaagggaagtcccgcctctgggtggggcgaggggtggggccaggcggcgggagggatcatcttccgggagcgtggctaggggcggagcgactgccgcgcgatagtcagggagctgtgcgggtcctggttgcaagagaggtggggagaggggcctggcgggttttgagggactgggaggactgtcccggctaaagctggcgcgggaaactggggctgcgcggcgggagggccctgctgctggggaaggaatctaatatatccgttcccctgaggaagggtgccagtccttgactcctaggctcttcggctctctgtcgtaactttggggtgtggcaggggttagtgacgcgcggttacccgggatctggacgtgcaggaggttcgtggccacaatgggggtatagtctttctcacggctgctggggtaataaaacacatgcttttaatccggattatccgcggtgacatggggcctccgctactgcccgtataagttaaagaaaggcctgttctctcaaacttcctcctctttcaccttcttctgcagtctatttgccagccaaccccagcccgggaggggatcagg

SEQ ID NO: 202701 - DNA, 117 bp, Homo sapiens
  chr11:98891916-98892033
  hyper
tctgaactgtgctgatgggcaggaggatgggagacaggaattgagagtcacagaggaaggacagtggagtctggcatcttattggtaagtggctgacattcctttgccagtgactgc

SEQ ID NO: 202702 - DNA, 161 bp, Homo sapiens
  chr11:100999159-100999320
  hyper
cggagacggcttcactggggccccggaccagtgagggctctcagaggccgggagcagcagctgccgggctggtgacaggccccggggcagcactttatgggcagctgccgtcccggagctgtctccaaccttgcacccggaccggctcatgagcggggaca

SEQ ID NO: 202703 - DNA, 241 bp, Homo sapiens
  chr11:100999360-100999601
  hyper
aagttcggggccaaacaggcaccaagagctggtgacctcgcaggcgggagggctgggttggctctgcccgggacctgagggcgccaacagagtgtccaagacactgtccagcagtccgctgtccttttctgggggactagaactgctgcctccagcaccccttgtagcttcagctctggaatatgcgccctccacgtccgacagcgactgctggtcctgcgtcttttcgtcggaggggtcc

SEQ ID NO: 202704 - DNA, 399 bp, Homo sapiens
  chr11:100999749-101000148
  hyper
ggccgcccgccacgtggggagcccggggaccctttgccttcagctcagtcatgacgactggactccccttttctcctcccccgtctccaggaggagggaaaagggaaggaggagggggtttcgggaatataggggcagagggaggagaaagtgggtgttgaatgtggctggaccggagggatctccacctcctgggtcgggggcgggggagggcggcgctggtcagctcctgcccttggcctccatcctgtcgtcaggggaactgtggctgtcgtttgtcccagcgagcggcaagtggggagcgcaagaaaaagtagtaattgttaggagatctcgtctcctaactcggggagttctccaagagagttctccaacttctgtccgaggactggagacgca

SEQ ID NO: 202705 - DNA, 127 bp, Homo sapiens
  chr11:101000222-101000349
  hyper
ccgactttttctctggcatcaaactcgtgcatgctgtgaagctctcagtccctcgctgagttccactgccccctcactaaaaccctggggctagtcggacctctcggtacagcccattcccaggaag

SEQ ID NO: 202706 - DNA, 33 bp, Homo sapiens
  chr11:101918143-101918176
  hyper
acgacggccgccgcgtctccatggaaacggccc

SEQ ID NO: 202707 - DNA, 211 bp, Homo sapiens
  chr11:101981964-101982175
  hyper
gagccgcggccgccagctctggtcaggggaggggggttgcgggaactctagctggggtgggggtcccgaggcgaagtggaactggagtcgtccactccgccgcggtgaccagctccccactcctcccagagtccggggctgagatttgtttttcccttctgagtttctctctgcggttgcagccccggggggcgtgctttccctccttctt

SEQ ID NO: 202708 - DNA, 31 bp, Homo sapiens
  chr11:102323923-102323954
  hyper
ggagctttcccctcgcgtgacccagcctaag

SEQ ID NO: 202709 - DNA, 660 bp, Homo sapiens
  chr11:102962246-102962906
  hyper
atgcatctgttccccaccctgcagggcacgtagactcttaacgtgggcggctcttctagtctctccataaacgccagcgtgcacacactcgaacacgaggtcgggtcgggcgcggagactcgcggtgttcggcacctacagcctagctcgatcaaaggggcctcacctgtctccagccccagcccggcaggccgggcccgactccttttcctccagttgtccagcaaaggagggaggagggaagcttgaagggtggggggagatggtacctggagattttacactttttgaggcctccgtcttccgctactgctgctgccaccccaggggattttctcttcttcttcaccggcatcttccgccctccccggcagggtgggcaggggagccggggaagggggtccctgtccgctggaagcccctcagcgctggcacccagttcccagagacagcagcaagcggaggagcagagtcgccagcccgcaccggcgcggcccagcccggccgccgcccgctcccaggtatcctcgtcgtctttctctgaccgggacagggctggctcctcgccggtggacactgcggttcgttctcaccgggaggagataacgcggacagcgcggcagctccaccagtcacagcaagcaagaggctcagcctaac

SEQ ID NO: 202710 - DNA, 35 bp, Homo sapiens
  chr11:102980488-102980523
  hyper
ttccaacacggtacggttccttgcactcctgcctg

SEQ ID NO: 202711 - DNA, 126 bp, Homo sapiens
  chr11:105481877-105482003
  hyper
tgagttgctgataagcaattcagggaaaccttcagcagttcccttcccctctgtttccctcctcttcctttctctcctttgcaaaaagacttcctctttagtgcaggttccgttggaatacaccca

SEQ ID NO: 202712 - DNA, 155 bp, Homo sapiens
  chr11:106889162-106889317
  hyper
tgcggcccaagcagaaggggaggcagaggcagaggcttctgccgcctgcgcgcctatctcgccccctttccctctctgctcccgcctctctccacttgctgccctgcctccctccttctccctttatccccccgcccccccccatgctctccctc

SEQ ID NO: 202713 - DNA, 139 bp, Homo sapiens
  chr11:107462735-107462874
  hyper
ggacagccgagtggggagtgacagctgacagctgacggggctgttaaaagcagagcagtggagtgtggtggtggggtgagctgttgtgggtgcttttttttgttttccaagtgtgggtacgggctgttctgactcagtg

SEQ ID NO: 202714 - DNA, 133 bp, Homo sapiens
  chr11:108093204-108093337
  hyper
tccatcccgcgtccgcgcttacccaatacaagccgggctacgtccgagggtaacaacatgatcaaaaccacagcaggaaccacaataaggaacaagactcaggttaaagcaaacacagcgacagctcctgcgc

SEQ ID NO: 202715 - DNA, 1001 bp, Homo sapiens
  chr11:108463471-108464472
  hyper
ccccacagcaccacgcacaagaagacccacccattccagccaaccccgtgtgtccaagtcccattcgcccacataagcctctatttgacaaattcctcgagctcctacccttggggtggggacctttcgcctcccgtgaggtgccggctctcccgtgcttcgctgactgcccgcattgggtggggagattcgcctctggtgccgagggaaaactgcgttaggcgagggtggaagctctgtcggacccgtgcgagcacgtgggtgcgcgcgggccgcggagtgagcagcagccaggattcctctccagatcgcgcccccgccgcatttcattgcctgaaacggcccacgccccgcgatggcccagcagacacccggcacagcacagcgtcactgcgcggcccccgcagcgcacggacccccccaccctgcccgaccccagacccgcagccgagcccgtctggtatgtggtgggtggagagggtaccaactaagcatcccaaagtccttcagggagcaactccgcgcagttttctcttcccgacccgcagcctccgcagcagccgctcggagcacccccgggcaggtgccccgcgcgagctcagcgccttccccgcggatccccggcccctgcgggacccaggcccaggacaaaagaaatgaatttgctctgtacctgatcctgtccttctcggccctctgtaactcctcattcctttccagcacctgaaggatcttcctggcctcttcgtcatttaagaaactgaaatcaaacgccggaggaactttcgtcattttctttactgtgtgtgagttacacttaagctccttggcgcctcctgttaggaaggcatttttcaacctgtacaagaccagtttcacgaacttgatcccacagccaataataagtccgcccctttgaaagtctaaaaccacaaacctagggaacgcccacacctgaagggctcatattgacaataccttaatgacatgtttctctcaac

SEQ ID NO: 202716 - DNA, 214 bp, Homo sapiens
  chr11:109293899-109294113
  hyper
gtcgagtggcatgagcaggctgctggtggctctggtgcacggccacgggccggcaggctggggtccgctgaccgaaaatacaggcagcgcccagctcaggcagtgtgcccagagggccgctttgcggtggtggttgatctttcccgacagcactcccctgggcagcggccgagattctaactaagctttgtgtctttgcagcctggtgcctctg

SEQ ID NO: 202717 - DNA, 79 bp, Homo sapiens
  chr11:109294189-109294268
  hyper
cgccttgcttgccagcagttgctcccttagtccttggctcgctcgcacaccccctcccgctacagggagcagttttggg

SEQ ID NO: 202718 - DNA, 682 bp, Homo sapiens
  chr11:110166935-110167617
  hyper
caggcacgttcgggccgcggctcagccacgactcgggcagggcctcgcggcccctaccagccccgggaggagcctggccggccgggccgttaccacagtggcgcctcggccagctgggcgcgagcggaggcgcgccaagccctggcggcggcgccacggccgggcagcacgggccccgcaacttcgcgccgccaccttagcgtctccggaggaaccgggagcggggagtgggggaagggagggcgccgcgccttacccggagagcgggcggcttctgcccgccggcgtgtggctggggcgctgcgcggcggcgcggctgcgacagggagggagaagcggtggtgcgagcgctggcccgcgggagacgagaggcgccgccgccaccgcagacagctccgcaatatggccgctcggcgcctccgcgggaaaaggcggggctgcccggcgcccccccgcctccccctgccggccggccgtcctcgcgccgcggactgagcgccaacgccgccgctgggggccgcccccgccccgcccctcccgcaggctcgcagccgcaggcctggctccgggcgtggccgggggtcgcggtctggggccggccaacgcgaggtgggtggctgcgggctcgggagcgcccagggaaatagggcgaatgcgccggagggtcgagcccttccagaga

SEQ ID NO: 202719 - DNA, 206 bp, Homo sapiens
  chr11:110300441-110300647
  hyper
agtggtctagctaaccgatttccgctagacgtccagctatctttcaaaatattttgtttctgcacggcaacttcagccgctaaaaaagcatccagcttacaacggaacctggagggttggtaaaggccccctgcgctggccccgccccatgggaccgggcggcgtgggcgtgagaggcggggcggggccgcgctctgcttgccaat

SEQ ID NO: 202720 - DNA, 452 bp, Homo sapiens
  chr11:111169520-111169972
  hyper
ttggccgctccggacgtccgcgtaccccaggcccccgcccgccctcccacgtatccactgttgtgtcctgagacacgcggtgcggaccctgcgcgcccagaagctgctacggggggagctagaggctcacagtgagcctgggacgggggcagagcgcaccgactgcactgagccgagctgtggcggtccctgcgcggaccccgaggggcgcccgctgcccgcggagtccggagccgatcggggaacggggtggtggggctgcggtaggctggagcgcggagagggcgcggcgcctgggccctgcgggcggggcacgggattccctgggtccgggctaggaagagcgcaatctcctttcctggggagaccctaactcctggaacccggcttgagggggatccctgctgtccagctgcggtccccgcagtgaccaggcgaggcgctggcatcct

SEQ ID NO: 202721 - DNA, 52 bp, Homo sapiens
  chr11:111170351-111170403
  hyper
tcgggagccccggacggctttccccagctcgcgctgcgcggactcgccccgg

SEQ ID NO: 202722 - DNA, 66 bp, Homo sapiens
  chr11:111412304-111412370
  hyper
gaggaggtaaagtgctctggcttctggcttctttcagttgttctgcatgtcggggggagaacatcc

SEQ ID NO: 202723 - DNA, 391 bp, Homo sapiens
  chr11:112096873-112097264
  hyper
cctaactacgtggcgtgacctcaggcggggcaaacagatcaaggacacagggtccccacccaccctgaccactccagggtatgcttaggtatcccaaatcttgctctccgaagagattcagatagcgagagacacccttaactgtctcccgaggccgggattggccagagcggaagcggagacgcacttcctaggggcgcgtctggcacgcactgcgcagccgcggtgggaggaggcaccggccgcgcggcgggaggaggtgccggccgagcaccgcagacagcgccgggaagatgagcacggaaggtggtggccgtcgctgccaggcacaagtgtcccgccgcatctccttcagcgcgagccaccgattgtacaggtagggtgtgcacac

SEQ ID NO: 202724 - DNA, 352 bp, Homo sapiens
  chr11:113345738-113346090
  hyper
tccctcctcctctccccgtgacactgagtcgcccgccgctccatccggccggtgcttaccttcaagccatagggcgcccgggggcagagacggcgccggctgcttgaggcttccagctcccgccgcatccacgcgcggccgcccctccggcagccgtccggggccgccactctcctcggccggtccctggctcccggccccgccgcgccgttcagagccccggcgggcagcagctcggccggctctggcccgcggggagcagtggacgggccgcggcggggcggggcggggcggggccgggcgcggggcgggcgggcaggagggagcgcggggacggggcggaggcggcgcg

SEQ ID NO: 202725 - DNA, 108 bp, Homo sapiens
  chr11:113746574-113746682
  hyper
cctgagtcttctccgctctctgccctcaaaacctcatttgtaggactgacctccggctccaccctccccacgggcgagttaaaactgttcccccgccgtgggaaactg

SEQ ID NO: 202726 - DNA, 41 bp, Homo sapiens
  chr11:113930326-113930367
  hyper
cagcactaaagatggagaggcgccggggccttgcaggggag

SEQ ID NO: 202727 - DNA, 130 bp, Homo sapiens
  chr11:113932120-113932250
  hyper
agcacgcggtggctcggctcggctgaatgctcatcccaaccttgacggcctccgtccccaccccggggcgggcagcaaaaatgtcttgaccagccgtcctgtgaatcctttctgcgtgagcttggtggct

SEQ ID NO: 202728 - DNA, 238 bp, Homo sapiens
  chr11:115374753-115374991
  hyper
tgggtgcagccatccctggggactctcattcacacttagccgggcaggggagaaggggctcacagatgccctcagccccttccctctcagccctgagtttcctctccacactccctccgcttcggatgtaggaagtggggggaggttgtcatggaaacgtttcccccctctgtggccaaggctactggggtgccttcggagatttaggggccaaccggtcggtgcccacacctacctg

SEQ ID NO: 202729 - DNA, 398 bp, Homo sapiens
  chr11:115375434-115375832
  hyper
gctccagggggcgggtctagcttcttgtacacctttattaggaatgtttatagcaatcgctgtatcagaccgacgactggagaatctcccttaagagggtcctctgtcccgcacaccgagtgcatctggcctagcgaaccagacgttgcaaatttccgtcactcaccttgcaccgaaggaatagatctttgggaacgggggctgtgcgggagtggagagtaagaaggcaggtccccggattgacaaaacaatctgggagaagtgcatgcgtgctttgcacgtccggcggagcgggagagcccgctcaacagcctagcggtagactcggggatagttggagaaggcagccgtagagtcgggttctgagattttccagtcggtctttttgcggcagaatc

SEQ ID NO: 202730 - DNA, 303 bp, Homo sapiens
  chr11:115375894-115376197
  hyper
tggttttaatatataggtgtgtgttgaatatatgtgtgaaatatttgtaatattagatatttaagattacacaacaacggaaaaaattagtcaaggcttcaggtgaagagcgggggtggtgggagttggggagagggagtgtggtgaaggcagggtctgccgtgttcctccttcggggctcaaaccctctcactcctcctctgcgcccccagcccttcctaaggaagctggggaccaacaggtgctccgagcttcccctgtctctgggagagcctctcctgctaaagcgacttgcatctccgg

SEQ ID NO: 202731 - DNA, 64 bp, Homo sapiens
  chr11:115529918-115529982
  hyper
caccgagcacagaccgtgggaggggaccctgcgggaggaggctgcttcagtctccagagaccat

SEQ ID NO: 202732 - DNA, 639 bp, Homo sapiens
  chr11:117186498-117187137
  hyper
gggcttgggccatggtgggccccggccttcgggccctctgggctcgcactggcccacgtccgtccctggcgcctgcccccaagtctgggtggtgctggtggcttctcaggagagggagcttgggggcatcaggacgccagggcctgcagggccctgggccagcccccgggtccgggctgtggagagcggtcaggggagatccgcagagcacgggagcaggggagaggctgggatccggagcccgctacatcggcacggcggcggccagcctgggcagcgggcgcgggctcccggcggggctgggaggggcgggcatggcgggccggtggcggcttccctggtccccccggcgggcggcggcgcgggcaggggcaagggctccgggctcctgcggctgcgttggctgctcaggccaccataatccagctcgcggctcgcagctcccgggcgggctggggaggcggaaagacttgtggcggcggctgtcaaagccaaaaggttttcgcttttccctgggatcgctgggaagtgtagtcttcccatggcaggcaatccggcttccggggctggagaggggtctgggatgccctctgccgaggtggagtccgccctgcaaggccctggcgggaagggccagac

SEQ ID NO: 202733 - DNA, 88 bp, Homo sapiens
  chr11:118023499-118023587
  hyper
ccgccggtcggggctcgggaaagttagcgggcagagagcgagaggagggggagggagggagcggagggggaggcgcgctcgcccgctg

SEQ ID NO: 202734 - DNA, 398 bp, Homo sapiens
  chr11:118992030-118992428
  hyper
gaggccgagcctgcgcagttaggggaactcaggcccataggctccccgcctttgcgttgccctgagcagcgaggcgcggtcacgtgctaccttttgcacgtatcctgtcgcccctctgtccgcccgggacgcctagccccacccactgttcccgccccttccgtgttttggtgcgcacgggttccgccagacacagctaccattggctgtcagtcggatccgagaacgacgattggctttccttgaccgtccctcaagcgcctctccggagatggtctgaggtgggagaagagctgaagagacctggagccgacagacggtaagctggggtatgtgctctgcaggggctgcaggaggccaagctcttcccgagccacctcggcgagtattcttgccgc

SEQ ID NO: 202735 - DNA, 64 bp, Homo sapiens
  chr11:119039732-119039796
  hyper
cggaactgggcagccgcgggtaaaggcctagcgggcttgataacccctgcgccctggctgggag

SEQ ID NO: 202736 - DNA, 236 bp, Homo sapiens
  chr11:119103176-119103412
  hyper
acccaaagctggcgctaaagaatagcccaccttatatcttagacctgctaccagatacctaccagcatctccgtactatcttgtcaagatatgaggggaagatggagacacttggagaaaatgagtattttagggtgtttatggagaatttgatgaagaaaactaagcaaaccataagcctcttcaaggagggaaaagaaagaatgtatgaggagaattctcagcctaggtaatgg

SEQ ID NO: 202737 - DNA, 83 bp, Homo sapiens
  chr11:119142431-119142514
  hyper
tgatcatttgtaggcgaaacctaaccaaactgtccctcatcttcagccacatgctggcagaactaaaaggaatctttccaagt

SEQ ID NO: 202738 - DNA, 106 bp, Homo sapiens
  chr11:119144575-119144681
  hyper
aggacaatagtcccttggaagagctttcgacaggctctacatgaagtgcatcccatcagttctgggctggaggccatggctctgaaatccactattgatctgacct

SEQ ID NO: 202739 - DNA, 130 bp, Homo sapiens
  chr11:119145547-119145677
  hyper
tcctctttgctcaggaattggaacagccttgctgtaactcatcctggctacatggcttttttgacgtatgacgaagtgaaagctcggctccagaaattcattcacaaacctggcaggtcagttcaatgac

SEQ ID NO: 202740 - DNA, 142 bp, Homo sapiens
  chr11:119146702-119146844
  hyper
atagttatatcttccggctgagctgtactcgtctgggtcagtgggctattgggtatgttactgctgatgggaacattctccagacaatccctcacaataaacctctcttccaagcactgattgatggcttcagggaaggctt

SEQ ID NO: 202741 - DNA, 102 bp, Homo sapiens
  chr11:119148462-119148564
  hyper
acagctatttgtttcctgatggacgaaatcagaatcctgatctgactggcttatgtgaaccaactccccaagaccatatcaaagtgacccaggtgagttttg

SEQ ID NO: 202742 - DNA, 291 bp, Homo sapiens
  chr11:119148945-119149236
  hyper
aggatgtaaagattgagccctgtggacacctcatgtgcacatcctgtcttacatcctggcaggtacggatctaaacagcgacttttttcagctatgtaataaccttggaaaattcggtattatatagcctttactgatacaaggggtggcctggcttttggggttaggtttaaacttttacttttttttgatctctaggaaatgtattttctagtagattaatattttaagtattttcagatgcatctgttactatcttttgcttcttctgcaggaatcagaaggtcaggg

SEQ ID NO: 202743 - DNA, 158 bp, Homo sapiens
  chr11:119149265-119149423
  hyper
gtactgaacccatcgtggtagatccgtttgatcctagagggagtggcagcctgttgaggcaaggagcagagggagctccctccccaaattatgatgatgatgatgatgaacgagctgatgatactctcttcatgatgaaggaattggctggtgccaag

SEQ ID NO: 202744 - DNA, 492 bp, Homo sapiens
  chr11:119155748-119156240
  hyper
accttctgccgcagcgagtatgtgttccctcaagtgcttctgctcttggaactgcttctaaggtaaagcattttccattactgcagtttttggattctttgctgtgtactagtgggtttttactgatttgctttcaccctgcttccacaggctgcttctggctcccttcataaagacaaaccattgccagtacctcccacacttcgagatcttccaccaccaccgcctccagaccggccatattctgttggagcagaatcccgacctcaaagacgccccttgccttgtacaccaggcgactgtccctccagagacaaactgccccctgtcccctctagccgccttggagactcatggctgccccggccaatccccaaagtaccagtatctgccccaagttccagtgatccctggacaggaagagaattaaccaaccggcactcacttccattttcattgccctcacaaatggagcccagaccagatgtgcct

SEQ ID NO: 202745 - DNA, 126 bp, Homo sapiens
  chr11:119167631-119167757
  hyper
cttcctgtgccaaaactgccacctggggagcaatgtgagggtgaagaggacacagagtacatgactccctcttccaggcctctacggcctttggatacatcccagagttcacggtaggttcacaac

SEQ ID NO: 202746 - DNA, 86 bp, Homo sapiens
  chr11:119168098-119168184
  hyper
gtgattgcgaccagcagattgatagctgtacgtatgaagcaatgtataatattcagtcccaggcgccatctatcaccgagagcagc

SEQ ID NO: 202747 - DNA, 175 bp, Homo sapiens
  chr11:119169061-119169236
  hyper
ctccaggtgaagggaatttggccgcagcccatgccaacactggtcccgaggagtcagaaaatgaggatgatgggtatgatgtcccaaagccacctgtgccggccgtgctggcccgccgaactctctcagatatctctaatgccagctcctcctttggctggttgtctctggatgg

SEQ ID NO: 202748 - DNA, 100 bp, Homo sapiens
  chr11:119170361-119170461
  hyper
catgagtcaggggtactcctaccaggacatccagaaagctttggtcattgcccagaacaacatcgagatggccaaaaacatcctccgggaatttgtttcc

SEQ ID NO: 202749 - DNA, 101 bp, Homo sapiens
  chr11:119293204-119293305
  hyper
ccctctcaagcccccggcgggcctcatccttaatccatttccgtattccaatcctctcctttcccaaatgagtcccccttccccctctctcatccttttcc

SEQ ID NO: 202750 - DNA, 62 bp, Homo sapiens
  chr11:119294072-119294134
  hyper
accctgtggctggcaggcctggccagggacgggagggttcgggaccccggggatcagggtgc

SEQ ID NO: 202751 - DNA, 746 bp, Homo sapiens
  chr11:119455180-119455926
  hyper
gcggagctcaggggcgcaggctcttagagctgcggtggggcgggggccgcgggacgtccgtttgttctccgcggaggaggcgacgcgccgccaacgaccgcagctccacgtcctggcgcttctgggagccgccccagcgggagccagggagaaaatgaatcgccttgagtgacacaggacatggcagattggatgtttaatttgggtatctctttagaacgccccccacgcccacctcctctgctcccacttagcatccagccggcgagaaagccctgctcctcacaaattgccttgtcggctcggagaaaaatgccagcgtgactgattgctaggtgggtccctccaagtgcgcgggaaggaaccggcacgaccgcacaatgctccttcctacagagacgcggcgtcgtgccagagccggagatttgagtcagacaccgggaaggactgcccgtggaggagggcggctcgtggggctgggggtttgtttaggggtctctcgggtccagagggagggccaggcgaccctggctggggtctggtggctgtggggggcctgcggggcccagaggaaaaggccggcacccggtccgcgagagggggcacgtacggggcgcagaggcagaacgcagcccgcagcagacggacagccttccccagactgcctggagctcggagcccggcgccgaaacctgcagatcacaacctgtcagtcgcgctttcccggcagcctcacctgcctccag

SEQ ID NO: 202752 - DNA, 312 bp, Homo sapiens
  chr11:119587838-119588150
  hyper
gcactgagaggtgggcgccgaggactgatgctctctccctcttccatcatcaccgccccttcaggactggccacgaggcccatcatctgacccctgggagggtggggaacggtgctgtggtcagggcagaggcaggccgggagcagggggctgtcgcacacgttcccccaaaggcctatccatcacgccagtggagaccatcagagtgctctgccggcccaggacactgatgactctccaggcaccataaagacagggaataaatctgggaagttgctgggtaggagggtgcctcaacggcagggctggcca

SEQ ID NO: 202753 - DNA, 269 bp, Homo sapiens
  chr11:119598243-119598512
  hyper
ggttaaatccaggcgaggggactcggtcggatttgcctcctaaacgcattttccagttcattccccagcacaatatgcctgggctggtcccagcctccgtccccaccccacccgtcagaatgggccaccagggccaccccggggtcgggcgcgaggttaacccctcggctgccggcagcccgcacctcgaggaaggacacgcggggcaccctcgggaaagtgggtcatgcagctacttggatggcaggaagcccgcggtgtctcctcca

SEQ ID NO: 202754 - DNA, 314 bp, Homo sapiens; identical to SEQ ID NO: 8414
  chr11:119599011-119599325
  hyper

SEQ ID NO: 202755 - DNA, 57 bp, Homo sapiens
  chr11:119600032-119600089
  hyper
gcgcacgcgccttcccgaccgaagcagaggcggatcgcgagcgcgggctgcggggtc

SEQ ID NO: 202756 - DNA, 103 bp, Homo sapiens
  chr11:119612432-119612535
  hyper
agtccctccgccacaaagagaccattgattgggaagagcggccgggttgtggtaggaaggctggtggggacacgcacgcacacacacgcgcgcacacagaggc

SEQ ID NO: 202757 - DNA, 344 bp, Homo sapiens
  chr11:120196176-120196520
  hyper
aggggagcgggcctcctcctgcctcggacgcccgaggccttcctgcgccaggctgcggcgccagcgggatgcggggataacggtgcctggctccggctcttggtccgggcgtggccgagcgtcgcaggcaccgccgcgcggagatgcgatcgccgtccctgcgaggccccggggcccgcgctcgccgccagccacgcctgctccaaggctcctcctcgccagtctggccctggaacgggagaaaccaggagaggagccttggacctctgagccgcgatggccttccaaatgcccttccgttctttggcaaaaaccaagagcaaaaagccgaaacccacacaggg

SEQ ID NO: 202758 - DNA, 142 bp, Homo sapiens
  chr11:120206447-120206589
  hyper
ccagctgctctcccgcagccctgcgcctccggctcatgcagcgctctccccccggagccggcaggtgcccaggtgagcggggcctgcggaggcagcgaggggcgccggccgggaaccggcagaacgcgtgcagccagaagac

SEQ ID NO: 202759 - DNA, 274 bp, Homo sapiens
  chr11:120207766-120208040
  hyper
ttttgctccaagccgcatccgttgaccccttacagtcggatggtctagatgactgaatggagttttgagttggacttttgtgtccctgacggagttgggcctgatcccagagcactgggggtggggaggaggtgttactgtaaaatgcaagttggataaaaggaggacctctcgccaagggccccaatgagtggcacacagtctactatcaccgacaggttggtatgaattcctccttcgttcggcctcccggaatcgggcccgacctagcagg

SEQ ID NO: 202760 - DNA, 179 bp, Homo sapiens
  chr11:120435029-120435208
  hyper
tttgtaaacttattagtgtgcgctcgcggggagggggctcgggaatccgggcccgggcaaccggcgccgcatgctaatcagggggcgcccgcccccgctttgcccgtggccctcctttcccgattccccgacgtttcgggaggagtggggtcggagcgcagggctgggaagggtcttag

SEQ ID NO: 202761 - DNA, 181 bp, Homo sapiens
  chr11:120894619-120894800
  hyper
ctcaatgggtgggcacgagaaagagcagatgaggtgtttgtggtaaagcctaagccagtgcagccatccccgtcgccatggcaaccccagcgcggttggggaggacccgctcctccggcgccccctcccattcacgcagcggacgtgacacgtgcggcggggtcacgtgttgttgttgggc

SEQ ID NO: 202762 - DNA, 99 bp, Homo sapiens
  chr11:120895026-120895125
  hyper
tgccgggctctcgaggcccgaggcgttcccctctggagccgaggcgcggagggtcgctcctgcagggtgctgggataggacactcggggaagggtgaaa

SEQ ID NO: 202763 - DNA, 600 bp, Homo sapiens
  chr11:121526277-121526877
  hyper
cacctgttgatctcccccttcccggggcgagtggcaacctgcattgtgctggggacgcacgcgtttccacagcaggctcagcagatggtgctggtgagcaaagccattcccgtccctctcgcgcccctccccaccgccagagcctcgctggtctaaagcaaaaacagatgttttcatcatttctggatctggcatgtgactcgcagttcagcaatgcgccgacataacccagagttgtacgtccccatcatcccccgcaaaataaaaatcctgaacttaaacgagccttcctcctaggcgagccactgacacatgatctgtgtaatccacccggcacgtgtttaatcggactccaactgcaactgcctttgtagccagccccggctctataattgggaagttgtctttttttcagcgaagacacgggacagccagactagctatctttacaccaagggctgggaagaggcgctagccttttaaaatagccctggtctggctggctggcgaacctgtctgcgtgggagccggtgagcggggccagagcaaaacaggaaggccgcggcggcgcaccctgttcccggcgccctcggcaggtgg

SEQ ID NO: 202764 - DNA, 216 bp, Homo sapiens
  chr11:121593657-121593873
  hyper
gggggagggggcccggcactgtatacagctgtcaaaacgtctccgacaggagacgaaggcacatctgcacaagcctgtctcaggctgcggggcacacagggagcgcctcaaacctatcagtgtaatgccgagcggtaattgcattaggattagttatctcctgtgctctgctcattagcccggaggatggctcgcatccagcgagagggtggcaca

SEQ ID NO: 202765 - DNA, 42 bp, Homo sapiens
  chr11:122854873-122854915
  hyper
ctcagcgtcctgctttcccccaaagctaaggcaatctcccca

SEQ ID NO: 202766 - DNA, 238 bp, Homo sapiens
  chr11:122855057-122855295
  hyper
aatctaagaaaagagagatggagggaggaaatggcatcgcttcaggaaggggcaggacctccaggaccgaaggcgttttctttctctttcctttcagcgacactgggaaacaaagctccgcggctgaaaagaacaccacgcgcggccaggacccgagcagggccctggggcgctaagggcggggaaaatagggcatccggagtgcaggagattcctcagggccgcccccttctccggg

SEQ ID NO: 202767 - DNA, 41 bp, Homo sapiens
  chr11:122855432-122855473
  hyper
agctgtgtcccaaagcctaggggagacagcgaggctgggga

SEQ ID NO: 202768 - DNA, 68 bp, Homo sapiens
  chr11:123066197-123066265
  hyper
ttgcaggaggcattggtgacacctcggctgagagcccatggacgaggccttgtccgttcctagagctc

SEQ ID NO: 202769 - DNA, 41 bp, Homo sapiens
  chr11:123172413-123172454
  hyper
gcccaagaacctgcatctaacgacttcccggtgtgctgtgg

SEQ ID NO: 202770 - DNA, 35 bp, Homo sapiens
  chr11:123173029-123173064
  hyper
ggctcctcccctgagccaggcggagagcgctgccc

SEQ ID NO: 202771 - DNA, 117 bp, Homo sapiens
  chr11:123524977-123525094
  hyper
cagccccgcggctcctgcttcgtccgccctaactgcttctccagctgggcgtgaccccactcccgaagccgccggggccgcccgtctgggctacagaatgcgttccacgtcggtccc

SEQ ID NO: 202772 - DNA, 219 bp, Homo sapiens
  chr11:124616911-124617130
  hyper
ttgtttatgcaaacgccgagcgcctgggaggctcggtaggaggagtcttccacggccccgccccgcccctgtcggtcccgccctcccccccgccgggctcctggggctgtggccgaaaggtttctgatctccgtgtgtgcatgtgactgtgctgggttggaatgtgaacaataaagaggaatgtccaagtgttcagagggtgccgggggagggagtttg

SEQ ID NO: 202773 - DNA, 259 bp, Homo sapiens
  chr11:124630113-124630372
  hyper
ctcctgggtgtctgctggctcggaagtcaccaactggtccgtttttttcggtcccagggtccacggagccactgggagagaaaaggagtctggttgggtctgatcgaaggacactgggacagcccaagaaagggacccttccggcccacagccctctccgaggccagagtgagggagccggcaggggccgaaggagagcgaaatgggcccgctccccggggctatttttagtctccctctttctctgagaaactccccc

SEQ ID NO: 202774 - DNA, 83 bp, Homo sapiens
  chr11:124630410-124630493
  hyper
cgccgaggagcctactgagccggagagcctcctccagagcccagaagagcggagccgggcgcctgcacgttgcaccggggtca

SEQ ID NO: 202775 - DNA, 249 bp, Homo sapiens
  chr11:124709233-124709482
  hyper
cggcctctccacggcctctttaccaactgcagccccagctgagacccctcccgcggggagggagggaacacgaagcgcggccggggctgggggcggggagcaggtgtgaagcggggtggcagcggcgcgcggtcaccctccaccgcgccgcggagacccggcgtcacccccacgcgcacacaatggcgcgggggccaggccgaggacggcccattagcggctgatggaggaggcgggagcccggcgggc

SEQ ID NO: 202776 - DNA, 210 bp, Homo sapiens
  chr11:124709856-124710066
  hyper
gtagttcactgcgtggggcggggggacatgcaataagacaagagaccgcacggaaatagctccgtgcccgtctgctgcactgtccttctcacgtgccttcggacaaggggactttcactctctcccctcctctgccccaatcgctctgtctccctgagactgaccaccctcttctctaacccgaactccgcaggggagccttcagccttt

SEQ ID NO: 202777 - DNA, 37 bp, Homo sapiens
  chr11:124736457-124736494
  hyper
tagtgacgagcactgtgctggggactcgaaggtggag

SEQ ID NO: 202778 - DNA, 371 bp, Homo sapiens
  chr11:125133244-125133615
  hyper
ggcgtgggagcaaatggaggggatctgctggcgggcctagtttaggcaaacagcagggactgctggcgacggctccagcccccactcccgcggtaacagctgcagtccagctgctggcatccctgctgggggagcgtgctaaacctctccggggtcagcactgtggtatgtcggtttccatagcaaccagccaacgggccactttctcagaacaattcccctactcagccgggttctggacttagctcagcccaagggcatgtggctgaggagcagcgcgggagggggagagctgccgagggccagactgggccccacagaacgtggctatctcagtccggtcttcgcacggagggcgtggagccgaggat

SEQ ID NO: 202779 - DNA, 56 bp, Homo sapiens
  chr11:125932494-125932550
  hyper
cctccagacctcctgcgctgcagccggctcggaaagccacccccaggtcatccccc

SEQ ID NO: 202780 - DNA, 436 bp, Homo sapiens; identical to SEQ ID NO: 8456
  chr11:125932556-125932992
  hyper

SEQ ID NO: 202781 - DNA, 127 bp, Homo sapiens
  chr11:125933201-125933328
  hyper
gtctccaaatggtcgactctgtcccccgaggccccgccctagcctcgttcgggccccgccctagcctcgttcgggccccgccctagcctcgttcaggccccgcccctcgccccgccccgcccctcgc

SEQ ID NO: 202782 - DNA, 249 bp, Homo sapiens
  chr11:126225803-126226052
  hyper
cggccgcctgaccccagccggcgccgcgcctcccggagggggtcgggccctgcacgtgggcgcagcgcgggtcggggtggggctgccacagccctgcggagctgctttccggggtccctttccctggaccagattttcgcgggaagccggatcctctccgttcccttggagtgagcaagcgggacagttctgcggaaagtttccgcccccaatcccccagccctgcgcccggactgaagcggcggcccc

SEQ ID NO: 202783 - DNA, 119 bp, Homo sapiens
  chr11:128391774-128391893
  hyper
gcttgggtgggggcctcggccgtcgccactcacccggggaggggaaaagctccagatcgactttttccgtcttgatgatggtgagagtcggcttgagatcgacggccgccttcatggtg

SEQ ID NO: 202784 - DNA, 637 bp, Homo sapiens
  chr11:128392116-128392753
  hyper
gcctcgcccgcgccgcgcccgctcctcctgcccggccctcgcccgctccctcctctccgccggcggctgcctcgttcgctctcgatctcccggccgctctccctccctctcgccctcccgcgctctcccctcctctttagggcgtttctcgcggcgccgcgtctcggccgctgggtccgcgcgccctgggccgggcgatgtccgcttgggggagcgaggggcggggcgtcggggcagggcggggagccgggggcggggccgagcaccgcggccaatctccgcccgcggcccaaagcgaaaggaagggctggcgagcgcggggccgggccgcgaccgcggaggagcagtgcgtggagccccgggcctcggagcccaggcaggggcgggaagggccgggagcgggtgtgcaggctgggtgcacaggccgcctccaccgtttcgggaaagtccgtctgattctccacgcattcttgagggcttggtcacccgctctcgccccctcccagtagcagcatagttttccaagtgcgtgtacatcattcattcacaaagactgacacacaggacgtgaggcatgtggatgaaggcgagcgtgcaggcaggcgcaggggattcgtgagcccgtgtcctcaaaggg

SEQ ID NO: 202785 - DNA, 148 bp, Homo sapiens
  chr11:128562615-128562763
  hyper
ttttttttccctctttcccccgtcggactcttaaataaaagtgagcaagtccaaagcgtggtccggagagcgtggacaaggtaacctgttttggatgtccgggagaagggagtccggccgaaagggcccagcccctcgaggctgctcc

SEQ ID NO: 202786 - DNA, 541 bp, Homo sapiens
  chr11:129148499-129149040
  hyper
tcgtccaacatgcagcggcaacttcagtcaatcggaaagacgaggggggaactccacgggagcctaagggagcagagacctctggccccgcggggcccacgcacacctgggggcgggacccgcgatgtcgcccgcgggcagcggagggaaacgctcccgcggctcctccgggagcgccggtgtccctggagcccccactcggccgctcccaggagtcgcggctgccgcccgccttgggcccggggcggagagcgctgcggcaggccagaacgccgtccgaacgcccggctcgcggaggccgcggggagcgcggggcgcgggcgcgggaggcggtgggcccgcagcgccgtccgccccgggaggccggggagatggggccgggggcggggggacaaccgagaggctcctccgggagcatgcgatccggaaccctcactctaaaaagaatattttaagaaggaaagagaggccccccgcagccttccccgcggggcctgcccacgtcaccggcgcccccggccctcccgcgcgcccgccttac

SEQ ID NO: 202787 - DNA, 809 bp, Homo sapiens
  chr11:129149096-129149905
  hyper
cgtgtctgccctccgcgggccgggcccgacgccctccgcccgccgccgccgccgccgagcgccgcccgcgccgccgagcctagcgcctggccgccgagggcagccgcgggggctcggccgggcgtcccccgcgccagcgcctcatcccgcctcgcgccccgtcaggctcgggggcgggggcgccgggccgcggcctccaagtccccacctccggcacgcaccgcgctcgccctcccgcggcggagtcggcccccggggacgcgggtcctcgggctccagagcctctcaccctgacgccttcgggccgcccccgcagcgcccccgcccagctggccggcgcgtgcccccgccggagcccgccgcccgcccagcctccgcctcctccgctccgcctcctcctgcacccgcgacgcccgcagcggggagaagaggcgcgccgccgcggccgcgggcacgagcacgcgcgaggagggcgggcggcgggcggagcgcgcgcgcggccgagggggcgggggcgcgccgaagcctcgcctgctgttgtcccgggagcgcacgtgcgctgcggtggggcgccgaggggcgttcggcgggtgcccctaggggactgggggacagggaacgcgaagtgggtagagacgctgcctgagaggtcccgacgtaggctgttgcctcggccccggcattgtgctgcggtgcaaaaataaaaaaccggccgccgccgcagcagcagcagtagcaccgggaagaggcatcctccgagactacggcagtggctcctctctactcccagctgacccccagaacactgt

SEQ ID NO: 202788 - DNA, 161 bp, Homo sapiens
  chr11:129234231-129234392
  hyper
gcagtagcggccacgctgcaaccctgagaagtggcgggtaccttaggatcctttctgattgcagacgtggtccagagccaaagcggcttggctgggaaggctccgtgagacgccggggcttgattgctaggaggtgaaaaactttcgagaactcagagcaa

SEQ ID NO: 202789 - DNA, 216 bp, Homo sapiens
  chr11:129765560-129765776
  hyper
gggcgggtcctggagcggctcgggagagcggagggtcggcgagggtgcctgcgcgcggctgggcctggggatgcaggttccagcctgcttgcgcgtctcacctgatttaggagcttccagaggccccagacagtgcctgtctttgcctgaccgcgaatcaaagttccatagcccgtgagcgaaggcacgtctattagctgacgtttgcagagagca

SEQ ID NO: 202790 - DNA, 171 bp, Homo sapiens
  chr11:130029947-130030118
  hyper
ggcacgaggtgagcgcgggccggggacccggggcgctgggaagctcctgcccgcccgaccctgcagcgcggcgctgggctcggccggctcccctggcgtgtccgtcggtggccgagctctgggcgcacaggtggaatttcctgttcagcgggtgccgggccgcgggcgggc

SEQ ID NO: 202791 - DNA, 187 bp, Homo sapiens
  chr11:130298420-130298607
  hyper
ggcccgcgtgcgcccgtcctccgcccctgcccgcgccagccccgcgcagccgcctcctgcctcctccccaccccgggaagcaccgagtgggctgccgagcccttcttatttatacttccttcccggcttgacataagaggtttatttttgatctctcactattcccgtttcccctcccctgggatca

SEQ ID NO: 202792 - DNA, 165 bp, Homo sapiens
  chr11:130319352-130319517
  hyper
ttccgggcgggccttccggagaccccacctctcgctgcggggtggcctcgggctggaaccccgccatcctacgggccctggacccttacaagccgcggcgggcgggcttcggggagagtcgtagccggcgcaggtctgggcgcgccaagcgtttcgtgtctatcc

SEQ ID NO: 202793 - DNA, 124 bp, Homo sapiens
  chr11:130319633-130319757
  hyper
cccagcatcctcaaccccatcaacatcgttgtggtcaaggtgctgcttcttagagatcgtgactccgggcccaaggtcaccggcaatgcggccctgacgctgcgcaacttctgtgcctggcaga

SEQ ID NO: 202794 - DNA, 461 bp, Homo sapiens
  chr11:130786193-130786654
  hyper
cggcgaagactgggtcacacgccgccgggaaccgcgcgcccacactcagccccgacctgaagtggactcatcgcggtcctctccgggagcctcggccctctgccgccgtaaacctgggcgactgcgctccgcagccgggcctgtgtgaaggctgaccgccggccggccgccggcgacagcttccgggtcgacgtcgacgggagcgaggcatgctgggagagcgtccgcgcgcgccccgaggagcggcgctgcccggcgccctctgctggcgaggagccgccctgacggccctgcgcgaggtagtctctgagcctgagcgtgagcctgagcgcgcacggggcgcgtgctcgccaagagctggcgcagatttccgaagtgccacgaaacagccgccgcagcaatcaccgctaagacccagacttccaggcgctttaaaacgcgtcctagttctggttattaaa

SEQ ID NO: 202795 - DNA, 200 bp, Homo sapiens
  chr11:131056756-131056956
  hyper
tcttggagccgccccgaaagcctgcctgccacaagagttcctgtccttgcgagaggcggagcagctttgtggctgatctcccatctggttgacaggaatgacagctcagagttgtgctcctggaggggaaagtgctgagggcagagaagaggaaagaaactgcagctaggggttgcccacgcggtcgtggcaggctctaa

SEQ ID NO: 202796 - DNA, 173 bp, Homo sapiens
  chr11:131564788-131564961
  hyper
tgcccttgggactcgctcagcgccctcgcagccggaatggggcctgggaagggaggagccccagcagaggggcagtcggagagccatgaaattgcgacctgctgccaccagagggcagtgttggacgggctgggaggagcgccgccgccgccgggagggtgcaggagagagct

SEQ ID NO: 202797 - DNA, 104 bp, Homo sapiens
  chr11:131781335-131781439
  hyper
gtgcggctgccggagttcggggaagttgtggctgtcgagaatgggggtctgtgggtacctgttcctgccctggaagtgcctcgtggtcgtgtctctcaggctgc

SEQ ID NO: 202798 - DNA, 90 bp, Homo sapiens
  chr11:133402290-133402380
  hyper
ctgtgctgaattctgagcaggtttaaatccaatgtttgcaaagggagggagagagcagaagagagagagagcgcgcgagagatgggagca

SEQ ID NO: 202799 - DNA, 31 bp, Homo sapiens
  chr11:133827440-133827471
  hyper
aaacgtgatgcagaccgggggatgactaaaa

SEQ ID NO: 202800 - DNA, 279 bp, Homo sapiens
  chr11:133920426-133920705
  hyper
aaaaatactgggatgctatacacaaaattgccttgaaaacttgagcacggaacaccaaacagctaagcgtgccggtttggggagggcgggggaggaataaggagctgcaacggtaagaggccgccacacggtggcgcagtgaggctgggaaacggtgcaccccgcgcaggagggggcactccccgtcgcggccacccggggtgggcaggaggcggcgcgggctggctggtctctcccgagaaggttctctcccgagaagggtgcgtctcagggcttgtc

SEQ ID NO: 202801 - DNA, 36 bp, Homo sapiens
  chr11:133938736-133938772
  hyper
atacttctttactctcctcccgccaagttcattgaa

SEQ ID NO: 202802 - DNA, 175 bp, Homo sapiens
  chr11:133939437-133939612
  hyper
ggcggtgggctcatcccccgggtgggctcctcccaggcggggtcctgtgctgggcggtgggctcgtccccggggtggacccctcccgggcggtgggcacggccctctggagggagcgcggcagctgcggcgtgggcgctggaacttgctggaagaccctgcgcagcagtgctgtg

SEQ ID NO: 202803 - DNA, 60 bp, Homo sapiens
  chr11:134094606-134094666
  hyper
gggcagctcgcagcgctgctcggcgctggaccccacccggcaggcgcaggccacccacac

SEQ ID NO: 202804 - DNA, 241 bp, Homo sapiens
  chr11:134201549-134201790
  hyper
agcagaaagacggcggactctgcaccgctccacgacactggggacccgccccggccagacccgtcccctaccgagaccttgtccccgccccgcccccggccggggccccgccccgccagccccgcccccgccagccccctctcctaccgagacctcgtccccgcccaccagccccgccccgccccccccccgacagaggccccgccccggccccggccagccccgcccccgcttgcgcgag

SEQ ID NO: 202805 - DNA, 244 bp, Homo sapiens
  chr11:134202154-134202398
  hyper
cagctgcttctttctgggagctccccaatacccccgagttcccctgcggctgcaggcactctactcctgccgcgcgatccaggcctctgggcgacacccggcgtgccctcgggagccggcgtctgtgccccgagccgcccaccccgccgcgcctgtgacgccgggctctgccccccgtggacgcccgcagccctccagccgtcagagccctctcagacgcaccccatcgcggccccgtccccac

SEQ ID NO: 202806 - DNA, 72 bp, Homo sapiens
  chr12:568903-568975
  hyper
cggtcacccagagtccgcatcatcactcgccccctcctcatcccacccgttcccagtcgggggaggcaccag

SEQ ID NO: 202807 - DNA, 209 bp, Homo sapiens
  chr12:694940-695149
  hyper
aaggaatagctcagacggagtttgtgattaattacgggaatgggtgccaagtgagagatacaaagggtggaagagcaggagcgcctccatccaggggcgtggaggaggctctgtggatctcagggccatctcagctggctccagacagacaagaagactccttcagtgttcttctggtaatcacagaagctctgcgctgggaaccagta

SEQ ID NO: 202808 - DNA, 127 bp, Homo sapiens
  chr12:1059361-1059488
  hyper
gtcgtcaccggatggcgccttcggttagcgacgaccgcagggaaatggagaagtgcggcttggggggcgaagtcccctctagaatgtcccctggggccgggcgtggtggctcaggcctgtaatccca

SEQ ID NO: 202809 - DNA, 228 bp, Homo sapiens
  chr12:1639666-1639894
  hyper
gatcggccgcaggctgcgcgcccccgaccgtccccgcccgctgagttcgggggtccccggcgcggagcagggagccctccgggcggcaggagggcgcgcagactccgagcgccggggctgcctggccgggctccggtggacacctcggaggctgccccagcatcggggggggggcccgagacgcctcggcgggaccccgggagccgagcacgcccgcccgcgccgcca

SEQ ID NO: 202810 - DNA, 49 bp, Homo sapiens
  chr12:1639977-1640026
  hyper
ccgggccccgccggccgccccctgcgcccccgcgggccgcgcctcgccc

SEQ ID NO: 202811 - DNA, 115 bp, Homo sapiens
  chr12:1640206-1640321
  hyper
gccccgcggccgcgctgggtgtccgccgggtgggtctgcgcgccgcgggcgtcgggtcggggcgggccggggtcaggtcgggggaagggagtcgccccgggccggggcggcgaac

SEQ ID NO: 202812 - DNA, 287 bp, Homo sapiens
  chr12:1640476-1640763
  hyper
ccccatctgggttactttacccgccggacgcgggtgggagcctgcgtttctgcccggaccgcgcaggtagagcccgagcgccgctcggctttgtgcttctccggtcgctccggcgctccacgtccccgccgtgggagaggcgggacgagacctcctccttcactttcttggagcctcggtggacgcgtagcccgcgctccagtcggagccgaacccccgggtatttgctgcagaccgctgggagaggcagttcggtttgcggggagcctgcccggccctgttttaca

SEQ ID NO: 202813 - DNA, 265 bp, Homo sapiens
  chr12:1799861-1800126
  hyper
tccatagagactgcgaaaagcatccgcgagccggggcggccccctcctcctcagctccaaattgcttcctttttcggtgggagaaaaaactccgaggagttgtgtgagcgcctaaggagcgcacgctcctccggccctcaacacccagtatagttttcgctaagttcctggccgaaccacagctcccacgatgcacccaggttttagagcggtcagaggggcggcttccggtttaggacagcgcggctgcgcacggcgtgtggtc

SEQ ID NO: 202814 - DNA, 149 bp, Homo sapiens
  chr12:1905621-1905770
  hyper
cccacggtcataagcgggggagcgcagagccagttttcaattcaggagtgtctactctgaagccctcgcttcactccggagcccgctggctctatcctcgcaccgagcctttgcgacaagtgcacagggaacgctaaccccagccctca

SEQ ID NO: 202815 - DNA, 204 bp, Homo sapiens
  chr12:1905826-1906030
  hyper
agaagggagccccgatgccagcgccgcaggtgccgcactgttaaatggtgtgccacgggcccgggggtctagggaccgcctggcgagcggcacgtctggctgaggcgaccctcgaggaggccgccgcattcccagcgtgggggtcctcccgggcttgggtgcggggggtcagcaggagagacccttccgcgcggcctccctgcc

SEQ ID NO: 202816 - DNA, 114 bp, Homo sapiens
  chr12:1906322-1906436
  hyper
ggcctcgggaccacctctccccatcccggctgtcccggtccccagccgtcctgcccgcctcagaccgtccgcctcctgcgtgtctcctccactgaggacggcgggggaagaccc

SEQ ID NO: 202817 - DNA, 96 bp, Homo sapiens; identical to SEQ ID NO: 121773
  chr12:1906476-1906572
  hyper

SEQ ID NO: 202818 - DNA, 246 bp, Homo sapiens
  chr12:2144046-2144292
  hyper
tacaggatgctatgggacaccgaatccaactttgcgggacaggggaagaagccttaggagctggcgaggcgagggggtgaagaggagaaggaggtctgggcactggaagcggcacacgtggaaacggtaaaggccgacgccggttcagagccgcaaccgcgacagccccgtcgtccacctcaggtgccggcgccccctgctggtgcgcggagatgcgcggagaccgcaaggcccgggggcgtggcc

SEQ ID NO: 202819 - DNA, 64 bp, Homo sapiens
  chr12:2144442-2144506
  hyper
tgttttaaggaaacgagaaaaccattctttcctcttaccggatgatgtgcgatgtcatttggaa

SEQ ID NO: 202820 - DNA, 73 bp, Homo sapiens
  chr12:2163510-2163583
  hyper
gctagcacctgaggatggaagcggcgaggagccgggcggtgtgtgggctttgctgtttcgtgtttgaaggaga

SEQ ID NO: 202821 - DNA, 286 bp, Homo sapiens
  chr12:2692228-2692514
  hyper
gaaccccatggcggcggaggtgggtctgggtggaaacctgcagctttggcatgggtgaggttcaccttcctgaaccctccgggcccgcagcggcgccgcgctccgggcgggctgtcgccgtaatctgggtgagcggcgccccctggcgttgcggcgtgtgcggccactcacaccgcctgcgatagggacgcgcgggagcgggccggctgccctggggccgcggcgtctgctcagaggcgggacgctccgggagggaggatgagccgttgtccttcaagtgaccttc

SEQ ID NO: 202822 - DNA, 278 bp, Homo sapiens
  chr12:2800167-2800445
  hyper
atggagagcgcggccgacaacatcctcagcgggggcgccccacagagccccaatggcgccctcttaccctttgtgaactgcagggacgcggggcaggaccgagccgggggcgaagaggacgcgggctgtgtgcgcgcgcggggtcgaccgagtgaggaggagctccaggacagcagggtctacgtcagcagcctgtagtgggcgctgccagatgcgggcttttttttatttgtttcaatgttcctaatgggttcgtttcagaagtgcctcactgttct

SEQ ID NO: 202823 - DNA, 238 bp, Homo sapiens
  chr12:2800603-2800841
  hyper
gcctgccctctcccagctcgcaggccccgggcccggccgcgcctccgcggggagagcaccccggcttcccgcgcgccctcaccaaaaggaccctacagcaaacgggtgtctttcgactctgcttgtagaaaccatttgcacatattctgtacgagcctcgctgtctccctagagccagggccctgcggatttggagaagggagcggggcaggacttccaggaggaccccaacccggcc

SEQ ID NO: 202824 - DNA, 259 bp, Homo sapiens; identical to SEQ ID NO: 49213
  chr12:2801019-2801278
  hyper

SEQ ID NO: 202825 - DNA, 257 bp, Homo sapiens
  chr12:3067872-3068129
  hyper
acatggacttcaaaccgagtgccctttctcccatgtggtttactcgtagtggcggttttacagatgcccaaggggcaggagagaaaaacggaaagagctaaagccggggagggcaagcgagggggcactggcagcggatctgggaatggagcccgcgagttcctgcttcctggttccccggagcaagtgtcctttggtgggagccgcaggaagggagcagcccttcctgcgcgccgggagcccgccccttccccggc

SEQ ID NO: 202826 - DNA, 678 bp, Homo sapiens
  chr12:3068770-3069448
  hyper
cgccttggacctctgcgctccgacgcgctccgtcccgacctctggcttccctccgcgctccggcgctgctcgctgcccctctcccgcttccctcctgtccgccccgcgctcccctcctcgctcccggttgactcactcctccaggaatagggatccccgtgttttcccgtcagtcccattctgggaaaactcctccctccgcgcgctccgctccgctccgctgggcgcaccggggccggtcggcgcggggtgggcttggccccgcggccccgccttcactgcgccgcccgtcggccccggccggagcccggctctgcgcgctgacgccctgtcgtccccgcagaacgatcgccgcggccggaagagttggcgctcggggcggactccttggaactggcttagcgcacccatcccaccttcccgcaccctgggaccggtaaggctggggcgcggggacttggtaggactttgccggagggcaggagtctgcgcggtgcgtgcggagctccctcccgggacgagactgggaagagcgaggcacgtggaggcggcgcgactgaggctgctggaggcgaagcggctccaggggcgggtaaggggggtggacactcgggactttgggggaaagggaggccggtgtggaaaggaccggagaggcagaaccgagagcatcggcaa

SEQ ID NO: 202827 - DNA, 142 bp, Homo sapiens
  chr12:3129463-3129605
  hyper
gagggcaggaacttaacagtgcctgttctggaagcctctcggtcctgcagggccccagctgccctccagaatccagtcttgctcggcggttccatgcagagtgctgagtggcccgagttgtaccaggcgagcccctccccac

SEQ ID NO: 202828 - DNA, 739 bp, Homo sapiens
  chr12:3186331-3187070
  hyper
gcctcgcgggccccgtgccccgtccccgggctccccttcctctaacgcaggggacccagcccggggcagtgccgggcactggcgctggcgccccgctcagccctgcgatccttctccgccccgcccctccccgctccgccccgcccctccccgctccgcccccgggccgccccgccccgcaggctcgccattcccgggcaggccccgccccctgtttccgctggcggcggcggcggcggcggtgccggagcgcgagcagagcggagacccccaggtcctgcgggcgcggtgagtgcggcccgggcggcgggcggcgaggcgggtctcgagagcgtgcggagtcgcgcggccttgagccggcgccgggcgggctgggcacccccaggccgagacccgagaagggggagcggccgggggcgcccacgggaggcagtgtgggcagggcggcggtgggacgagaggacgaggaacagagtaggcgccgtgcgggaagcgggccgggaaggggagggtgggtgcggggcccgggcaccgagcgaagtggggtcctccaggggatggctccgaggaagaccgtttcagaaagggagtaacccggggccggcaagggtttccgactgtgtgaccccgtgcaccgcttgggacagtccatacaaggaccccagagagggccagggggccttcgggcagggctgggatatggcctgcagccccccggcacccgcgaccgctccctggg

SEQ ID NO: 202829 - DNA, 234 bp, Homo sapiens
  chr12:3600534-3600768
  hyper
ggggagggggtcgggggcacgagaagaacttgaaaccgtgtgaaggaatccggagcagatgagaagggaggaaaataaaagaaagtggagactgcagaacagactccgctgtggctgactgtgccggccgacgctccagctgaggggctgggttggatttttttttttctcccatcctctcgctctctcttttaaagcgacaccagctctctctcctcctctactatctcggta

SEQ ID NO: 202830 - DNA, 86 bp, Homo sapiens
  chr12:3601256-3601342
  hyper
ctggggtgggtaatcctggggccaggtctgccccctgcagtgccttgaccgtctcctgccgctgcctcagctttacccttcaagct

SEQ ID NO: 202831 - DNA, 101 bp, Homo sapiens
  chr12:3601377-3601478
  hyper
cgcggagagcccccggccgcgggggccgagccggcaggaggactcgggcacctcctacagaccctccggcccagatctgggccagagagaagtctgcaatc

SEQ ID NO: 202832 - DNA, 298 bp, Homo sapiens
  chr12:3601723-3602021
  hyper
tactctccagctggccctgagccgcagagagccctgctgggctttgcgtcccgagactcgaggctgtgatccctcgcctccctctgaccccgctgtcattacaacaaccggactattccgtaggctctgggcacctgtagtcacgaaggggatcagcgtgggcagcccccttaccttcctggagaaacggtgcgccgagatgggggcggagtggggcatgtgtgtgaagatcatcccttactcagtggcaggaaaaagacacagagagcaaactcccaggctctattaatagctgggt

SEQ ID NO: 202833 - DNA, 42 bp, Homo sapiens
  chr12:3602961-3603003
  hyper
caaacaaacaaaaaaccacgtcgcgtgcggggcaccaaggcg

SEQ ID NO: 202834 - DNA, 156 bp, Homo sapiens
  chr12:4140249-4140405
  hyper
gatgcgcagcaatgcgcctccaagccgggcccaggccgagcgcctctcgccgccgcgcacattccggagggggaccgcggggctcaaagggcctgcggcgtaggtggctcagccctttccttggctttccctccagggccatacttgccgaaaccc

SEQ ID NO: 202835 - DNA, 145 bp, Homo sapiens
  chr12:4273726-4273871
  hyper
gcagggaatgggcctggagccgtgagccgtccccttcgctaacccccaaccccgccttctcctgctcctcctctcttcactcttcctgcctctcggctccggggtctcctcgcttccccgcagtccccgccccccagttcccaaa

SEQ ID NO: 202836 - DNA, 105 bp, Homo sapiens
  chr12:4377789-4377894
  hyper
atttaggggaaatgaaggtgcgtgggctcactctgcagctgcagttttcagcccttgcagtttagaagattctgcatgagcacggatgccacgagggtatccagc

SEQ ID NO: 202837 - DNA, 244 bp, Homo sapiens
  chr12:4378558-4378802
  hyper
tcccagccccttcccccacgtgtggatgacgtcaaaattccgcgaaaaagccgcgtggtggctccccgagcggaggcgcgattccgccgcccagcggccccctcccgggggcgcctggagggggagaagggcggaggcggccggttccttctcctcccgggaggcaggaccccccgacgccgaccgccggacgccccccgccccaaagcttattggaaaattcacttttgtaaagcaaatgtat

SEQ ID NO: 202838 - DNA, 246 bp, Homo sapiens
  chr12:4379920-4380166
  hyper
aagaaagtgtgcacttttgcctagaaggcaacatgcgttttcccgcgtgctaggtggagtgcattttaacaagacattagggttttaacacatggctggagtggcgaccaaaagggaaaactcagtttccagtccaagcctcctagagacattcctgccaacctccgcaccctctcacgccccaccccacgtgtgagagtctgcaaaaccaccggggattggattcgatggcgagcttcacgctcg

SEQ ID NO: 202839 - DNA, 284 bp, Homo sapiens
  chr12:4380196-4380480
  hyper
acaggggaacttcaagaggcgagcctgccacgcgggaagcgcccgaacttgcgggtctccatgaatgcagagggcgccgggaagggggggcatccggccgcgaccctctctgcccctcccattcgctgcccccctccccgctggaatttctctgtaaagcaagacggagtagggggagggggagagggaaggggcgagagggccctcggctcactcccgagacgtgaggactcgccacccaggcattctcctcggggtgggctgggccccgggacgaccacccg

SEQ ID NO: 202840 - DNA, 148 bp, Homo sapiens
  chr12:4381285-4381433
  hyper
tagagggaggggagacggcgccccaaactcttcctcacccttttaaagcgatatcccctcctttcccccccaccaccccttccgccccaccctcgtttaaagaggctggctccggggcctgagttaatcgcttgcacctctagtttat

SEQ ID NO: 202841 - DNA, 106 bp, Homo sapiens
  chr12:4382439-4382545
  hyper
ctaaaatcaccccctcccttatttttcacttaagggacctatttctaaattgtctgaggtcaccccatcttcagataatctaccctacattcctggatcttaaata

SEQ ID NO: 202842 - DNA, 65 bp, Homo sapiens
  chr12:4382900-4382965
  hyper
tgcccagccagcttgcgtcaccgcttcagagcggagaagagcgagcaggggagagcgagaccagt

SEQ ID NO: 202843 - DNA, 209 bp, Homo sapiens
  chr12:4382999-4383208
  hyper
cgaggctctgctcgcccaccacccaatcctcgcctcccttctgctccaccttctctctctgccctcacctctcccccgaaaaccccctatttagccaaaggaaggaggtcaggggaacgctctcccctccccttccaaaaaacaaaaacagaaaaacctttttccaggccggggaaagcaggagggagaggggccgccgggctggccat

SEQ ID NO: 202844 - DNA, 254 bp, Homo sapiens
  chr12:4384059-4384313
  hyper
ttgctttgcaaactccctttggaaaggctgggaaacgtcgcccgcttaccctcgcaccccattatcccggccaccccacttctaatcgtgccctctcccccaccccccacctcacgaagattacttacagtttggttttccagcttcctcggtgcggagatttgggtggggtaggaagggggggagggggtgtgtgtaggggggataccgggtcacccctgaaggagaggtgggagccccccgtgcctctttcc

SEQ ID NO: 202845 - DNA, 100 bp, Homo sapiens
  chr12:4384533-4384633
  hyper
tctaggatatttcctcgatttttaattattttttgaaaccatccccccctgctccgactccagctgccgaggctgcggcgctcttcctcctctcctccct

SEQ ID NO: 202846 - DNA, 112 bp, Homo sapiens
  chr12:4647831-4647943
  hyper
gacagggcaaatccgccgttgtgacgaaagtgcagggacaaagcacaaactcggctctggtggaccggatacggaaaagcggtgccttggggagggcgggagcaaattcgct

SEQ ID NO: 202847 - DNA, 125 bp, Homo sapiens
  chr12:4918558-4918683
  hyper
gaggtgggtccccgcgctcgggcgccggggcagccccgggccctctgcgaggcctgcggcgcggctcctagggaggaggtggcggctgtggcggccggaaccgcgaccttggccggacccagccc

SEQ ID NO: 202848 - DNA, 176 bp, Homo sapiens
  chr12:4918713-4918889
  hyper
cgccaggagtctttgccgagccggagggaggcgcatctggcgcttcggtaccagcggcagccgggggtccggagcggctggaggagcgcagtgggaactgggaagagctagcccggctggagggcggacctctgcgtccgggagccgggtctcaggcaccgctgggggcgaagcca

SEQ ID NO: 202849 - DNA, 583 bp, Homo sapiens
  chr12:4920225-4920808
  hyper
tcctccgagtcatccgcctggtccgggtgttccgcatcttcaagctctcccgccactccaaggggctgcagatcctgggcaagaccttgcaggcctccatgagggagctggggctgctcatcttcttcctcttcatcggggtcatcctcttctccagtgccgtctacttcgcagaggctgacgatgacgattcgctttttcccagcatcccggatgccttctggtgggcagtggttacaatgaccacggtaggttacggggacatgtaccccatgactgtggggggaaagatcgtgggctcgctgtgtgccatcgctggggtcctcaccattgccctgcctgtgcccgtcatcgtctccaacttcaactacttctaccaccgggagacggagcaggaggagcaaggccagtatacccacgtcacttgtgggcagcctgcgccggacctgagggcaactgacaacggacttggcaagcctgacttccccgaggctaaccgggaacggagacccagctaccttcctacaccacatcgggcctatgcagagaaaagaatgctcacggaggtctgacccatgcaggc

SEQ ID NO: 202850 - DNA, 54 bp, Homo sapiens
  chr12:5131854-5131908
  hyper
tgacaggtaagatcccggacccatgggctcctgtatatccgtcagccaaatctg

SEQ ID NO: 202851 - DNA, 60 bp, Homo sapiens
  chr12:5152855-5152915
  hyper
tccccactccttccctccctccgctgggctgcacccttctcagcccctcctttcccttgc

SEQ ID NO: 202852 - DNA, 322 bp, Homo sapiens
  chr12:5541693-5542015
  hyper
ggccgaagcgcaaccgcagccaccccgctacacacacacacacacacacacacacacacacacacacacacacacacacagacacggacacccttctccacctcctcccctcttgtccctcggctgcccaagaagcttccctcaatctgggaaagtgatcaggtttaagggacctggattggaaagggtgggggcagaagaggggaaatggggacgacgaaagagcaggaaagagattcaacagaatcaaccacccaccactcccaaccgacccgcctgctcctccgagaaagctcctagcgcatcctataacaaaaggggg

SEQ ID NO: 202853 - DNA, 57 bp, Homo sapiens
  chr12:5542974-5543031
  hyper
ctgtggacttgtttatgtgtgtgaagaggcgggggcgagggcctgctgagaggggag

SEQ ID NO: 202854 - DNA, 823 bp, Homo sapiens
  chr12:6309398-6310221
  hyper
ggcgggggcggggggcggggggggtgcggcccgggcggggccggtggggcgggaggcgtggccggcggggggagtgggggcggcttttcccggcacatgcgcaccgcagcgggtcgcgcgccctaaggagtggcactttttaaaagtgcagccggagaccagcctacagccgcctgcatctgtatccagcgccaggtcccgccagtcccagctgcgcgcgccccccagtcccgcacccgttcggcccaggctaagttagccctcaccatgccggtcaaaggaggcaccaagtgcatcaaatacctgctgttcggatttaacttcatcttctgggtgagtgagcgcgactgccgcgcgctcctctcagggcccacctgttcgcgggccccggacactggccgcggccgcgagtgccggcagctggcactgcccgcaccgggcaggcaccgggcgggaagagagagcgccctgcggctgccagctggctccaaggccgggtccagagccgggcgggacggccgcgacgggcgcattcgggtgggggctcatcaccgcccagccggcgtggggagccgggccctcttgagatgaggcgtgcgggagggtcctgagcactttagctcgcctaggatttgagctggggtgtgtgtctgctcccagctcaagtccctccgagtgccagagaggaaggcagggagaagcggagcacccctctttgggccaaggccaaggaggactgtggtgagcagtatggcttgtgaccgggtggggtctcccaggtagtagggggcgccaggaagggagggtgcgggcacggcgagag

SEQ ID NO: 202855 - DNA, 184 bp, Homo sapiens
  chr12:6387950-6388134
  hyper
ggggcggagggggcgcggtaagcccacggagggctgactcatcctggcgccgccctgactcacccgcggccgccctggcagccccgtcctgccgcgccccctcgcggccacgcgcggaagcgcagccggggtgccccgccccgccccgtccgcgccctcctcggagcgccgagctggctttgag

SEQ ID NO: 202856 - DNA, 315 bp, Homo sapiens
  chr12:6419603-6419918
  hyper
cgcctcgcgggggtctggcccggagtggagggcgcgcggtcccagccctcccgctcggccggcgggtgtcgagttcaggtgcgaccgaaaaggggaaaggagggcaccgccacgtgagctgtcctctccggggaaggcggtggctgcgtgagggcgggggctgctcggtccccagggccccgcccctctgcccctctgccccgagcggtgctggcggtagggaggggccagcccggtccccgccctcctcgcccggacccgcgctgcccggctcccgcgggccgctcgatcccagtcccaggctgggcatcgggg

SEQ ID NO: 202857 - DNA, 354 bp, Homo sapiens
  chr12:6449620-6449974
  hyper
gctggtggggagaccgtgggggaaggacagtgggaagaagggaagagcgggtgggactaaggaggcaggaggaggcagaagaagaagagtgagaccctgaccagagacgtgctgcctggggacctggggccgggaccagagcggagcagagaggaggggaaggaggattagcgagaaaagatttcaaaaaaagaggctctgagaagtctgaggagagtctggggagattgctggaagaaaggaatggtaggagaggaagagtataaggcactaaagagaggggaggtaggcgcagccttcagaggccgggcagggcagggaaaatctgcctgactagatgggcccaggacatct

SEQ ID NO: 202858 - DNA, 217 bp, Homo sapiens
  chr12:6450928-6451145
  hyper
tccctggtctcaccagtggcagcagcaggtcaggcacggtggagaggcccatgccagacagctatggcctctcactcccccatttgggctcagggcagtgtggcagcggcagtgctggggcttcccgggactcggtctgtccaggacgtcccaagtgccttggggtgacagttgagggttgagactcgggcatagagatcacggcctggtcccagtg

SEQ ID NO: 202859 - DNA, 241 bp, Homo sapiens
  chr12:6472613-6472854
  hyper
ggaagccgatcttccagtccttccagtccacctgggggttgttgtcccgcaagctggaggccacgctacgggctcgacgggccccgtgaggcgggggcgggaccctcaggcgctgcaaggggtgcggcagagtcccccgcaggtcgcgacggctgcgggagccggccacgagagtggtgaaggagctgtatttgtacaggtcaaagagcgtctgctctgtgatgcggtccagctcctccag

SEQ ID NO: 202860 - DNA, 94 bp, Homo sapiens
  chr12:6472900-6472994
  hyper
caggccaggggccctggagcgagtgtctggcccctccggggtcagggtcctcatctgtgccccgggaggccggtccatcccggagaagcctggg

SEQ ID NO: 202861 - DNA, 247 bp, Homo sapiens
  chr12:6493106-6493353
  hyper
cctcggctgggccagggctgtccgcagtccgctctcccgatcgggcttccgaagaagggaggaggccggttccggccccgcggccctcacgtgctttcccggccgcccctcccgccccgcatcgaggcagacaagcctgttcctcttccctgggctgcgattgcgacaggccggcctggctcccagcgctccctgtccccgccccgcggccagctcgctccactcccacttcctgagctccgccatg

SEQ ID NO: 202862 - DNA, 33 bp, Homo sapiens
  chr12:6493416-6493449
  hyper
tcccaggctctgggctcgggcagccgccgccac

SEQ ID NO: 202863 - DNA, 216 bp, Homo sapiens
  chr12:6560780-6560996
  hyper
cgctgcaggagggcgggggctctggttgtaaaacacacttcctgctgcgaaagacccacatgctacaagacgggcaaaataaagtgacagatgaccaccctgcagctctccagcttcctctctgaaatcccagtcccaaaatccagtttcctggccgcctcctggctcaggtcaggatctggcagaggaggtttctcagccggttatgttggggcc

SEQ ID NO: 202864 - DNA, 207 bp, Homo sapiens
  chr12:6579634-6579841
  hyper
cgggagcttggggcgagagttgtcaaggaggtgccgagcccccacaccagagtcaactcacatttttctgacagagagagtgagggtctgttcctctccggaggctgcggcgagacacccggtgagggacgctgcggctgaagtggacggaactgccaagctccgcctcgcgccgactaccccgcggtctagctgcgctggaactta

SEQ ID NO: 202865 - DNA, 394 bp, Homo sapiens
  chr12:7260934-7261328
  hyper
atgtccgtgctgctctcttggcctttgccatacggctctgggtacccgggggatgtcagctgctggggtagctcttgggccaagaggacggagccccgggttgggcaagcctggaggactccccagagaagcagccaccacctgtgagttggggggagggcaaggtggggccgcgcagctatggccggaagcctgtgggtgtgggaggagcgggggagccgcgctaggactcagaggcctcgcgaggcagggctagaagctgtggcctcacccttgaggcccgggcacttcccgtctcctcccttgctccccttcctcaccccaatccctacagcctcccgcgcagcctgagctctaggattgtgggttttccatcctccgaagacatcacctt

SEQ ID NO: 202866 - DNA, 389 bp, Homo sapiens
  chr12:8850112-8850501
  hyper
agggaatgtgagggcggggagggcgtacaacggaagggactaatctcgcggtttcgagttgggagcaaacctcgccccccaccccccccatccgtttccctttctcagtgaagacggtttgggggcgggtggggaggcgcgtcctcggagcgccctcgcgctcccttttcgctccccgcgcgcgatccatcgcctctcttcccccgaggccagcgatggctcgggtgcgggcgaggagctgggagggcggctctcgacgcaggtgtcagatccgctcggcagtgctcggcgcgctggcccggcccccagctcctccggccgccgccccccgcccgccgcgccgcggcgccaggagggcggggccggggcgcgcgccgctcctcagcaag

SEQ ID NO: 202867 - DNA, 310 bp, Homo sapiens
  chr12:8850744-8851054
  hyper
gcggaggagaaaggaggcggctcccggtatcccgaccccctccccctcctctccttcccccacttccagccgcccggcggcccgcgcttcctcgaaggccccagcccggctcagtcggccgagagcgagggaggagccccccgacccaggtgagcggtacgaccgctgttgccctcgggtgtagagcagtgaggcgaaggcgcgccctcccgagtgggcgagttcagcggaatggatcccccgattagcgggggctgggccggggaggggaccggcccgagcgcgcccggggtccggggctagttgaggc

SEQ ID NO: 202868 - DNA, 119 bp, Homo sapiens
  chr12:8851275-8851394
  hyper
tcctcgggattgcggcgacactccccctccccccccttcccacaaattctatggagcgaccgcgggaggaggatcacgtggtgcggtcccgcagctactgtattcgattccacgttttc

SEQ ID NO: 202869 - DNA, 752 bp, Homo sapiens
  chr12:10875354-10876106
  hyper
ggtgggagatgtagcgcgagctgcccacacgtgctccgcggccggctgggcccgccccactacggcagcccctgccctccctggcctgactcaccgagaacttttttctccgcgtcttcgctgccggcggcggtggctaaagaggcggcggccgcggtgcccgtggctgcgggggccgcgtccccaccggggtttcctgcgacgtgggcggcgggcgccggggccgcggcctggggcgcaccgctgcccaccgggctcttgggcgcggggtcctggggagccgcggcggccgcctccgtcggagcctgcgggagggtggtggtggtggtggtggtggcctcgcccgcctcactcatgcctcctcctcctctgctctcgctcaggcgcctcggtggcggttggtcggcggttagcgcggctggtggtcgcggcggccggggctcgctctcggggaggccggggcggatctcgcggcgcaggcggcggcggccgaggtggggtcgcgcggcggaggcggctcgagcttcgtgctgcgcgctctctcttgggctcctcgctcgatcttactgccccaaaaatggccccgcacaagtttttctaggcggcgcaccggcccgggagggaagggcgggcgaggggagagggtggggaaacttggctcgggagtcgggccctggactctcattagcatttaaaggcgcccggtgcgctttctatggctccaatccgccgggacgcgagcgcgcgggtcg

SEQ ID NO: 202870 - DNA, 44 bp, Homo sapiens
  chr12:11801643-11801687
  hyper
tcaaccggccaatgacggtttcagagaagcggtcctggggaggg

SEQ ID NO: 202871 - DNA, 427 bp, Homo sapiens
  chr12:11802787-11803214
  hyper
gcgtcccgggtccccgcgccgcgccgcgacctgcagaccccgccgccgcgctcgggcccgtctcccacgcccccgccgccccgcgcgcccaactccgccggccgccccgccccgccccgcgcgctccagacccccggggcggctgccgggagagatgctggaagaaacttcttaaatgaccgcgtctggctggccgtggagcctttctgggttggggagaggaaaggaaagtggaaaaaacctgagaacttcctgatctctctcgctgtgagacatgtctgagactcctgctcagtgtagcattaaggtaaaaatcttctcccctccttctacgtggtggaaaccctgagctgcaccggccagggcagtcgtgctgggctcctcagagcaggctgttgcagttgctctgttcgcaggaaattatttg

SEQ ID NO: 202872 - DNA, 198 bp, Homo sapiens
  chr12:11905383-11905581
  hyper
caggaacgaatttcatatacacctccagagagcccagtgccgagttacgcttcctcgacgccacttcatgttccagtgcctcgagcgctcaggatggaggaagactcgatccgcctgcctgcgcacctgcgtgagtgttcgtgacccgagagggacagaggattgatggcgtggggcgggggtggcaggcagtgggct

SEQ ID NO: 202873 - DNA, 165 bp, Homo sapiens
  chr12:11992073-11992238
  hyper
gcttgcagccaatttactggagcagggatgacgtagcccagtggctcaagtgggctgaaaatgagttttctttaaggccaattgacagcaacacgtttgaaatgaatggcaaagctctcctgctgctgaccaaagaggactttcgctatcgatctcctcattcag

SEQ ID NO: 202874 - DNA, 382 bp, Homo sapiens
  chr12:12006113-12006495
  hyper
ctgtctcagaaaaaaagtatacgattttcataatcaaaaaagtttgatttacaacttcacatcgctctgaccttttgagtttcaagtgctgcattctgtgccccatgagcttggtgagggtaggaggtggcaggtgcgctccaattgtatctttggcaccgtgccaggcacttagctgctgctccgtagatcgttgttggaaaaacatctttccatttctcgatttccctttcctttttctttccaggtgatgtgctctatgaactccttcagcatattctgaagcagaggaaacctcggattcttttttcaccattcttccaccctggaaactctatacacacacagccggaggtcatactgcatcagaaccatgaagaag

SEQ ID NO: 202875 - DNA, 546 bp, Homo sapiens
  chr12:12022357-12022903
  hyper
ataactgtgtccagaggacccccaggccatccgtggataatgtgcaccataaccctcccaccattgaactgttgcaccgctccaggtcacctatcacgacaaatcaccggccttctcctgaccccgagcagcggcccctccggtcccccctggacaacatgatccgccgcctctccccggctgagagagctcagggacccaggccgcaccaggagaacaaccaccaggagtcctaccctctgtcagtgtctcccatggagaataatcactgcccagcgtcctccgagtcccacccgaagccatccagcccccggcaggagagcacacgcgtgatccagctgatgcccagccccatcatgcaccctctgatcctgaacccccggcactccgtggatttcaaacagtccaggctctccgaggacgggctgcatagggaagggaagcccatcaacctctctcatcgggaagacctggcttacatgaaccacatcatggtctctgtctccccgcctgaagagcacgccatgcccattgggagaatagcag

SEQ ID NO: 202876 - DNA, 147 bp, Homo sapiens
  chr12:12037378-12037525
  hyper
actgtagactgctttgggattacgtctatcagttgctttctgacagccggtacgaaaacttcatccgatgggaggacaaagaatccaaaatattccggatagtggatcccaacggactggctcgactgtggggaaaccataaggtaa

SEQ ID NO: 202877 - DNA, 101 bp, Homo sapiens
  chr12:12038859-12038960
  hyper
aacagaacaaacatgacctatgagaaaatgtccagagccctgcgccactactacaaactaaacattatcaggaaggagccaggacaaaggcttttgttcag

SEQ ID NO: 202878 - DNA, 2801 bp, Homo sapiens
  chr12:12043874-12046675
  hyper
gtttatgaaaaccccagatgaaatcatgagtggccgaacagaccgtctggagcacctagagtcccaggagctggatgaacaaatataccaagaagatgaatgctgaaggaaccaacagtccacctcagcgggccagcagcccagggaacccctgcccaccaggattgctggaagtgtgacggagcaggcgggctgaggagagtggaaaaggaagcgacccagaaatggcagggacacttctcttgcagaccaagagggaccctggagcaccttagacaaactacccagcacaggcggggctggaattctggcggagggcatgagcctgggactccatgtcacgtttccttctgatttggaatctctccatctgtaattcctcaccctcacccttccaccgttgttagtatcatggtgtttttgtttttgtttttgttttaagaacctgcagtttgactcttcatcgttcatctaggggaagacatctgatgttgttttcctatggaaatatatatctattatatatatattttttgcaaatctcacaaagtgcggcaagcccagctggtcaggaaagagaatacttgcagaggggttcaggttcctctttttcctgccacgtggatcaggtctgttcctgttactgttgggtcttggctgaaaaaaaaaaatgcttttaaaaaagataaaatgaaaaggagagctctctttttctctctcttgctctgttcttcccttggtcccctctgtcctcccgccctgcctgcagttgagattcagatgccttctgacagagttcagcctcttggagagtcttggggattgttggcacctaaacagaatcagtgacccgggtgctttgtggccagcagcacagaatcaaacccgcatcccagcattgggccacccatctgagggaggccaaaatcatcacagatgctgctgtgctgcagacagatacatgctagtccagagagccgcccctgagatggctgtgagaaccatgtgtctaaggcgtaagataaggatggaaggctgtccaagttatttggaaggcctcggcagcttgggattagcttgggagcgcagcgctgcaaagtggaaaatatgaaaagaccacacaggcccagcagtccagaaactgggcaaaaatattctgcagtggggatttatttttccaaagcaggtaacagaggctagtgagaaagaaaagctcctctctgctccattccaaaggccatcttgtggtcagtttcatgccctcacctgatttttttttttttttttttttttcaattcctaaccttttttaaagtttcctggtctccactggacacagagctttggagacggaggatcccagagggcagtctcagttgcaatcagtgtgtgcccagcctgggcagacaggaaattcctcggatacattattttttctttctttcatagctgtgtctcagaaaggacccatttgtggctctttttcacctcaaaataagatcgatggtatcttgtaaaatgagggtagtgccacttcttagtatttttgaaagctgttttagattttttttttttttccttttctagccatctaaattgactcttccaatataggtctcagaaatccaatatttggagtacaatttcttttaatccagattacacctgccttacaaagcaccccctccttgttcccctctgtttcctctactcagttgggggagaaactcacagctcctccgggatacatatgtgccctcagcagcagctcccaggtgaagttaccagacccctgggcttctccccagctttttctgagttgagtcagacatgtagagtttgggtcacacaggcaagaggaattttccctcggccttactgacaaggacaccaacctagggtgcaaacagatggactatggttcaaggacactggaattgaggagctgatcaaggctctcttcagccttgctctgtccctgcctcttatcagagcacaggtagacacacgggcatagccagcccactcctactgtcacaggcgccccaccattcaaccttccgggaggtcagggaccttctatatgaggcgagtgggtctcagtctgcttgaatggtgatgagattctgctggatctcagcacgctgcaggtgtcttttgagagcattcagtaggacatggtgatccctatttcagcctctaagatgactggtattctatctgaaatgcagagattaagccaaatacctgatgtattgtgaaagccactgattttaagaatggagagaaagggattttttactgcatccctctgtatgaatatgaaatcagagaccagggcatgatgttgctaggattagagcctctcagtctggcctcttcacccaagtgcaagaactcagtctcttactgttcaaagaatcttaacagttgaattatggagggaaattcccttttgccccaagcatttctatatttaaagcaatatcccaggagaatatgttagacttaggatgataccttcagccacttgaagaagaaatagaaggcgctcattccaatatagtctttatttcccattcagatacaggttgagcatccctaatctgaacagttaaaacccccaaatgccccaaaatccaaaccttcctgaacgctatgacaccatgagtggaaaattccacacctaacaaacacatttgctttcttatggttcaatgtacacaaactgttttatatagaaaatgatttcaaatatcataaaattaccttcaggctatgtgtataaagtatatatgagc

SEQ ID NO: 202879 - DNA, 1481 bp, Homo sapiens
  chr12:12046855-12048336
  hyper
ccaagcatttcagataagggatatcaatctgtactaccaataaggatttcgtaattcccctaactgcaaatgtcctcttcatttgttctttatgagaaaacccgggtagtgccagcacctggatacagtatttacaccctgcagaccctaaagatttcagattcagttagcaaaccttgatgaagcacctgctggacactgagggacccaaagctcaatcagccataatccctgctttcagagtttatattgtacctgcctaatccacccggcgtgactcatttcaacactaagtactaggggtgttgtcaggagacaaatctgaagtcaggagaggaaaatgcaaaggagccctgccgtgtgatggatgtgcattctcacttgggtcttgaagttctcattcctacatctcaagctagccaggcagtctcctctctatcagaagaaagcactggtaattggctagactggctatgttgaaggtaacatgaactctaagatcttgacccagggcgacttggttttgcttaaggtggcatcaccaatgttccaaatcctttagggagatgagggtatccccacagaaaaagaggaataatagaccaatggattttctcctttcaccagtatgtttggaaccctctgatccaatgtcttttgatactgatctcttgtccaaatgagaatgtcgctttagctgaaattcaaatggctgtgacaatttaccgaaatgatgaagtaaccaccattcccacctttcactgcctaggctccaagtctgaatacatttttgaaataggaactcccttttgcaaaaaagaaacctgggtgtcagggaggtgaagtgacttgccctaggagcagacagcatgccaagaatggaattaggctcaggatccagcctgggctcaccctgtgtggctcattcccacccaggaaactgaagataaaagatttgggaaaacacaccaagaaaaaggggcagttttctttgcccaagcatttggtgctagttagaggctgttcactctctcctgctcctcttcggagtagaaataaaggctgtgacacaaggaagccagtggggtgggagggaggcaccataatccctccctaaaacccacagaagactaacctgatactcttttgacccaactgcatcaacactaaacagctgcagaccccctgaatctttcacacatgccaagtgaacattcttgatgatttctctttgtgaccgcaaccacctgcaaaccagaacgactctagaatttccttccccgcccccctttttgtttagtttctaatctcttgtttatgaggtgtggggtttataagggactgaatcaaatgaatgtaacaaaaaagaaaaaaaaaacaaaaaaaaatgccttttctcagggccagtgagttgcaaataatttttaaagaaaagcctataattacatcatctcaataaattttttataaaaaaaaaaaaa

SEQ ID NO: 202880 - DNA, 409 bp, Homo sapiens
  chr12:12419476-12419885
  hyper
ccccctccccacgaccaggcctctccccgctcctctccccttctcccttcctccgtccctcccctccccctagacacatacaacaaggccacctccccccgaaccccaccaactttccagtgcccccactcttcccacctctcaggagcacacagaagctgcaggccaggaggctcctcaggacggcccccatcttcccttctcgcgttctcttctctcaccggcgaggggtggccagaagtgggggaggcgaggagccggggcggccgccgcagcggcagggctgcacgctcatacttcccagcttcccagcgagagaagaaagaaaggggcacgtcaaggttccgcgcgcgccgccgccgccctctctaccgcgccgctcggccccgggctcgcgcgacgccagcgt

SEQ ID NO: 202881 - DNA, 420 bp, Homo sapiens
  chr12:12420005-12420425
  hyper
cgaccgtgtccctgcgcgcaacgagccccttctcccggtactgcctcctgtacggccagggaagggagtcggcaaccgcacgcacagcctctgcctgagaccctgggagaggttctgggctagcagaggcgaactgggagggaaagcctcctcccggtggcgcattccagcgggattctttcccggaccggccgcttcggccctccccgcggagggcgtgaggcggcgttgaacaacattggagccggcgtggtcgggactactttctgcggctcggccgggcagccgtctgccccgctctttgtgcggccgccgccggcagggccaggtggggctccggtctcgcgcccccagccacctgagactgcccagccgcggtgcacgcgcggggagccacggcggatcccgttgcggggtgat

SEQ ID NO: 202882 - DNA, 391 bp, Homo sapiens
  chr12:12871738-12872129
  hyper
aaaatttcccctgcgcttagattcttctactcaaaacaaaagagccaacagaacagaagaaaatgtttcagacggttccccaaatgccggttctgtggagcagacgcccaagaagcctggcctcagaagacgtcaaacgtaaacagctcggtgggttgatcactaaaggagcacgcactggaacccggggccttcagacctcacgatacctgatcttactggttgctggcaaattaaaagcttatggggttttgttttgtttatacttcgtgaggtcaaaaaagtagcaatggggaaggctggggatacggtaattcctcagagtttctatgcccagagatactttctcttcaaactgttgaccagagcagctacttgtaacccaggcccc

SEQ ID NO: 202883 - DNA, 263 bp, Homo sapiens
  chr12:12877458-12877721
  hyper
cgtgggcttcacaggcgaggagcggggcgagaggcctctcaggccggggtgcgcccaccgccccggcctcagggagcgactttcccggaggccgggggacgctgccttcgccatttcatcttcatcatcacagcgcccacacttgctcttctctcaagctctttgcacagaaaaagtgattctaaatctcctctaggatctcctgtctggtgttcagagtatgaatttctttttaaaacttgctgtgtctttcacctgggcca

SEQ ID NO: 202884 - DNA, 205 bp, Homo sapiens
  chr12:12939505-12939710
  hyper
ccttctaataccacgcccctcccagtttaaatcttatttaacacatagctgatgaagcccatcgttaacgttccctgggagagaagcagaagatagcattattcctatttccatatgcagagataaggtcctgagaacttgtgtggctccccccggattccagaacaggtctttgagaactcgtctcatgatccactggaaacag

SEQ ID NO: 202885 - DNA, 447 bp, Homo sapiens
  chr12:13152998-13153445
  hyper
ggccacgtctctacgcttccgaacagcgagttcttgatcatgcccaacatgttgtagccgagacgctcccgacgcacgggaggacgtgaggtggcgggggcgacggagcaccacgggcagcgaccaccggcggcagggcggcagggcggcagggcggcagggcggcagggtggcagggcggcaaggcggcgggacggcgaggcggcgaggcgagaggcggggctagaggcaggggccagagggcgtggctagagggcggggcggcaattcagcccggcggtgaggcaagggggcgggacggcgaggtgaaggggcggagagagagggcggggcggcgaggcgagggggcggagagagggcgggtcagtgatgcgaagggcgggcagcagggcagcagtgcagcagtgcagcagtgcggtgaggcgagggtgcgaggcggctaagcaa

SEQ ID NO: 202886 - DNA, 31 bp, Homo sapiens
  chr12:13197534-13197565
  hyper
tgtgccaccagagggcgagaggggcgcccag

SEQ ID NO: 202887 - DNA, 212 bp, Homo sapiens
  chr12:14720608-14720820
  hyper
cgcccggaccgccgcgggtcatcgctccacggccgcgaccttcctctgcgggatcaggcggccgcggtggcccgcggtggcagaagttgcaagagaggctcctggcctactcaggggcgccgcctctccgaggtggggcgtcctcaactttcctctttcttgagcccggcctgctccgggctctgaggggcgaggacgcttcacgtggtggc

SEQ ID NO: 202888 - DNA, 55 bp, Homo sapiens
  chr12:14923205-14923260
  hyper
acctcccatttcctgcgacttagcaagccctgcacacgcacgaaccgcccttgac

SEQ ID NO: 202889 - DNA, 121 bp, Homo sapiens
  chr12:14928211-14928332
  hyper
ttccctttcacagagccttcgctctcctgccagtttgtgagcactcaggaccaagttctgggaagataccgtcggatcgagctgagctcggggcaggaagtgtctgcggccatatttttca

SEQ ID NO: 202890 - DNA, 90 bp, Homo sapiens
  chr12:15374053-15374143
  hyper
gcgcgctcagggctcggaatgggtctgcaggaagtcgtcccgaaagagctgcctggacacgtgcgtgacactcacctgttcacactctcc

SEQ ID NO: 202891 - DNA, 41 bp, Homo sapiens
  chr12:15475222-15475263
  hyper
gcaagcagcgggccgatcctggtggagggttgggaggctgc

SEQ ID NO: 202892 - DNA, 354 bp, Homo sapiens
  chr12:15475336-15475690
  hyper
gtccccgcctctcgctcaccacacagaccccgcgcctcctctggcagccgcggtggtggcggcggcagagcctcgcccactccaatccccaccctctccatccttagtcattaaagaacagcagcgcctggcacgttcttggaggaccccgggcgcagaggaggaaagggagcaggcgcagggggactggaaaggcagcatgcgctcgccaggagcaacctcggcgcccagggtctgaggctgcagccccagttcgccattgtgagccgccgccgggggagtccgctagcgcagccgtgcccccgagtccccgtccgcgcagcgatggggcacctgcccacggggatacacggc

SEQ ID NO: 202893 - DNA, 60 bp, Homo sapiens
  chr12:15475691-15475751
  hyper
cccgccgcctcctgcctctgctctggctctttgtgctgttcaaggtaggggagctcctcc

SEQ ID NO: 202894 - DNA, 1112 bp, Homo sapiens
  chr12:15941609-15942721
  hyper
attcgagggggtaaacgggggtgggaccctgccctaaagggtcattttgaaaagaacccctccccatttgaggcgggttggcagagcagcgcacaaatcccaagtctaacgtaataagccgagatcgggatactcggtctgcagtcgccccacggaccagatgagcgcaggtgtatctgcggaagctcaggttaccatgaatatcactgggccacggcgaaccctccctgcccagcctcccggagccctgggcgcgggtctgcacgggccccacagcttgcccggacccggcgagcggacgcctccggccgcagcgccctaccgcacctggctgccaacaccagttgaaagcagtcaaagtgaagggaggcggacgcggctcctggcaccgctccgattccagcacacaaaggcggatttttaaaatcgagaaagtcaaagccgccggaccccgggaccggcgcctttcgccaaggggctcttacctcggatccgccctcggggccacggctttccccggagacgccgcgagcccagacgaggtgggaggggaccgggagaaagccccccaatctgattcgcgcccagccagtcgtccgcgagccgcggagccgccttctgcacccagctaaagagcagcgatctccgaggcgagcacagcgccggcctcgcgccgggcgagaccgcctcgctagctgctgcctgtgaagtctggagccgcccgcccgctcgcagccagtgccaaccgcgcgccgcgcatgcccagtgcccgcgcgaggaacgagcgagcgggcgggcgggcgagtgcgcgccccgcagccaggagcgaaatccgctatccgggtcttgccggcagccgagccgcagagttctggtcgactccagcgcttgaggcgaagtggccggtgaggccgggtgggcgggagagggaccggaggaaaggagacggggcgctgcgccaagttatcaaggccgcgatcaaagtcggaccaaggcagcgagtcgacagcaggtttccagaagtgccctaacaggactgactagcagccaggaggcgcaggaaggggcaaagagcgtgtggagagcttcgcccccggcgaggatggacgccc

SEQ ID NO: 202895 - DNA, 101 bp, Homo sapiens
  chr12:16500382-16500483
  hyper
ggaaccagagtttctaagggcgccaaatagaagggctcaaagggaatcagcaggcgatggttactgtgggcgggtaaatcaggtgatttagaggaggggtt

SEQ ID NO: 202896 - DNA, 407 bp, Homo sapiens
  chr12:16500621-16501028
  hyper
gcttcctcctcctcggcctcaccgtgcgtactgggaggggagaaggggaccgcatgcaaagggtggcaggcagggagggccagggtgggtggcagatggaagacttgggggggtctctgccagctggaagtgcttggctccacttagcagctaaacttagcttttcaatcgatcgcttttgaaagggaattgtatttctgtccccgtgcgggtaagttttcccatttctcaaactccaggaatgaaacgagagagtcttttcatgcttgagtgatgatttccaaacttagccttttcaagtcaaagtaacctcctgtttgaaagggtcccttgaactctggggaaggaggaaaaggcacgtgtagtaatggaggaaatgcctgtagtttgaacgactgctgttctcc

SEQ ID NO: 202897 - DNA, 307 bp, Homo sapiens
  chr12:16758091-16758398
  hyper
catgcttccctaactctgcccgtaatcctaaaatcccagcggccccttttagcttcctggtaacaaatggatttgattaaactgtcacatgcagcgttagcatagcatatcatgttcaatatgaaaaagatcataaatctgacttgtatttcataacagcaatctgagtagtccccgtaaaaaatgtgctgcatcagtttgaatctcaatctattaggatataggcaccttggtccagggaccttccctcttctagccacttctgcccctacccgcctgccccccccccccgcccccatgcccaaac

SEQ ID NO: 202898 - DNA, 300 bp, Homo sapiens
  chr12:16758794-16759094
  hyper
tcacatgatttaaacaaaaccgtctcagtagagctgcagcccgagtgaaagttgcagtgcggagctgggttgcagctccagtttatgcctcattagcagaggttggggaagaaaaaaatacccacatccgcacacgcacgcgcgcacccgcagacacacacaccacaaataagccgacgcgtgtgtacacagttgctgcacttaccttctcaattaagcgatacagggggaggccgttcagtaagcacagtggctgctttgtagcgcttctccttgggaaaggtcaaaaagaagcattgt

SEQ ID NO: 202899 - DNA, 86 bp, Homo sapiens
  chr12:19282247-19282333
  hyper
aacaaagctcagacgctgtgtttttgttgtttgaaagagagaaatcaggggcttgggcattattaggctccctttgatcgcgccct

SEQ ID NO: 202900 - DNA, 840 bp, Homo sapiens
  chr12:19282363-19283203
  hyper
gggcaggacgcgtttttttttttttttttttttttttttaatcgatcccggaaccttcgcgcggcggagggggcgggcgcgccgcaggggcccgagggaggggtctggggcgcggcgccgcttgcccatcccccgagcgcgcggcggggcggccggccggcggccgccgggatgcggaggggcggcgacgggggccggaccctgccggggcggcggggcgggcaccgcccgagggggtagggcgcgcgcgggggcgcgccgggccggggaggcgcgctcgctccgcgctcccttcgctcgctcgttccctcctccctcggcagccgcggcggcagcaggagaaggcggcggcggcggctagggatcagacatggcggcggatctgaacctggagtggatctccctgccccggtcctggacttacgggatcaccaggggcggccgagtcttcttcatcaagtaaagagccggggacggcacgggggcccgcgggggcgggagggcaggaggcgggcggctggcgacacgggggagagcccgggtctgtgctcctgcagcccctcggctcgcccccgcgtcccctctcacgctccgtgtctgccccttctctcacccctgcagcgaggaggccaagagcaccacctggctgcaccccgtcaccggcgaggcggtggtcaccggacaccggcggcagagcacaggtaacgccgggcccaaacggagttgggctccgcctggaggaggcggcagagcccgggccgcccggctccccgcaacctgccccgcgccgcgggccccgggaggcggcgaggcggggcggaggccgggcgggagcggccg

SEQ ID NO: 202901 - DNA, 249 bp, Homo sapiens
  chr12:19283425-19283674
  hyper
ggtgacccccagctgccgtcttgccccccagcaatcttcaggcagtccttacccactcccctccctgcagccccggaccccgatcgcccgccgggataacgtaaccacatcctccccctcctcccaggagcgctgcctcctgccgtgcagcttcctcctcctaggtgggacttgtgggtaggtggctgatgaaggaggaggaggaggaggagaggagttcgggggtgctgcgatcctctctgtgacagg

SEQ ID NO: 202902 - DNA, 240 bp, Homo sapiens
  chr12:19283783-19284023
  hyper
cgccagccgcacggaggttgcacagactgccaggaggcggtgggcgtgcgagggggtgtcccgtatgggggcacccgggccctgtttggagggagtccgtggggaagcggctctctcgggtggctttgggagcttgtttgaatgctaagtgtgagtggagctggaaaaggctcctcgtagtttctgtactggtctgggtttcttttatcattctttgtttacattcgtgacttgtttgtc

SEQ ID NO: 202903 - DNA, 72 bp, Homo sapiens
  chr12:20521072-20521144
  hyper
tgcggtgggctgcgcggtggatcagcctcagcagcccctgctccagcctgtagggtgaaccggccgctttcc

SEQ ID NO: 202904 - DNA, 267 bp, Homo sapiens
  chr12:20521841-20522108
  hyper
aatttttgaaatcctgaagtaggaagagaccccggaggatataagtcgggggtgggggtggagcagagaatctgtgaaagatattcaaagagagaaaaggggaatcctgatcgtttctgcccgtgcttgttttcaacttgagcgtgctagcctttaacttgaagaagtctcattggagcatctagcattctccaggagttattcgaaagctgaaactttcagtggattgtgggcctggggagaagaaggattccgagggtggaattg

SEQ ID NO: 202905 - DNA, 182 bp, Homo sapiens
  chr12:20522891-20523073
  hyper
ccctcatttccttagagaggttcaaggtcgcctggagaccttacctggcgtacctggccggcgtgctggggatcctcttggccaggtacgtggaacaaatcttgccgcagtccgcggaggcggctccaagggagcatttggggtcccagctgattgctgggaccaaggaagatatcccggtg

SEQ ID NO: 202906 - DNA, 162 bp, Homo sapiens
  chr12:20523117-20523279
  hyper
gtccggctgcagcagcaagtcccatcggaggacctccctgccctgtataccgagggaacaggtaagcactggcaactcctctctcggctcttggaaacttgaaacacttggcaaccggcgcagagtggagagaatccgagcgctgggaactaaagggaagat

SEQ ID NO: 202907 - DNA, 577 bp, Homo sapiens
  chr12:21590454-21591031
  hyper
aagctctgaacaccacgagacaattcgttgcttccgaaacgcagccggcagcaggtactcgagatgagtagtgtgagctcccgagcacccgtaggtcggattatctggtaaggcaccggaagtgaccgcctcgcggctgcttcctctcctggagtccagagtcccgttgctccgccgcgatattcagtaaaccactgggagtccggcagcatggaggcagcgcgccctcccccgacggcagggaagttcgtggtggtcggcggcggcatcgcgggcgtcacttgtgcggagcaggtagggcggtgctcaggcggttccgcctctttccccgaccccaaaggggatagcactggaggccttcctcccaccccctccctttttcttcttccgggttccttttttgctgcgcccttttccgcacttattgctcccagattttagaaactgcttggtggtcctcagatgacctcactagctttctcttaggcgcagggaggagtgggaggcaaattatagccgagaaaccaaagctggctgatccgtgctcagatccttgtaatgtcagagcagacatgag

SEQ ID NO: 202908 - DNA, 131 bp, Homo sapiens
  chr12:21681020-21681151
  hyper
ccctctggctgccagggtgtgcagaggtccccagggagttaggacctgaggtgcagctcagaggggtaaggcgagataggaagaactatgcaaatgcttctagaaatgtatctgcgcgtttgtgcaggaac

SEQ ID NO: 202909 - DNA, 53 bp, Homo sapiens
  chr12:21927952-21928005
  hyper
cagctcctttccagtagccgcgaccccctgccgccagcgtgacacacaagtct

SEQ ID NO: 202910 - DNA, 78 bp, Homo sapiens
  chr12:22095196-22095274
  hyper
cagtcccaggggatttctccgccggcgccccactcttgggaaggtcgctgcgcttccgggtgagtgcctgacctgcgt

SEQ ID NO: 202911 - DNA, 139 bp, Homo sapiens
  chr12:22488705-22488844
  hyper
gtgcaaggacaaagaagaaacctggtcagcttagtcatcacgaaaacaaaatctaaggctataactccatttgttcagccgaccaggctgcggtgtctggtacctttgtctagcatccgtctccactgagaggtggaac

SEQ ID NO: 202912 - DNA, 252 bp, Homo sapiens
  chr12:24715505-24715757
  hyper
gacgaggtgaaatccctttgctggtcatgaggcggcttcagagacaaacaacacaatgcgagtgcaaataacaaaaggcaaaaagacagtaggaacaatgggggaggcgagggcagcgcaccagccggcggtcaccgcggcccggcgcccgccccggggggtgcggcgggggcggggggggggcgcgggggcggtgccgggggctcccgctccctccaggtcgcccccgagctcccgcaagcccaccctgac

SEQ ID NO: 202913 - DNA, 256 bp, Homo sapiens
  chr12:24716473-24716729
  hyper
cacacacaccccaacccaatgcccaagaaccagggaatgaaatttagtgatatttagggagaaataaggctgggcgctgggctccgactctttctgccgcgacacttgagtgggcgcgtggagccgagagagaccctcagagtcccatccccatcagaagaaactccgtcggtgatgccctgagcagaagctgtggggctgatttaagtgtgtgctctgacagctcccgggctgctccggcgcttatctcttctaa

SEQ ID NO: 202914 - DNA, 44 bp, Homo sapiens
  chr12:25102288-25102332
  hyper
ccgtgtaacatttatatggagacgtcaaggaggaggaaataaac

SEQ ID NO: 202915 - DNA, 33 bp, Homo sapiens
  chr12:25347677-25347710
  hyper
agaaaatttagtgggaacgtctatcactactga

SEQ ID NO: 202916 - DNA, 308 bp, Homo sapiens
  chr12:25347959-25348267
  hyper
cagaatcagtggtcgcccctccacctgtctgcctcatttgccttgctcaccattaagagtcaagctccactgcagtagtccgcagagtcggagcagaaattgtgtggacaaacgctcccgggttgcccggacgacaggccccgcccacttgagctccaggaaaagagcgcagccgcgcggaggctcttccggccggcgccccgccccctttactgacaggttgcccacctcccccaacgccaccccgcttcgcagtagacggacagaggagtcgtagcggtcgaggcttttgcggctccggcgtgccg

SEQ ID NO: 202917 - DNA, 259 bp, Homo sapiens
  chr12:25404339-25404598
  hyper
gcgaagagcaccccgccaccctcagggtcggcctatactggcgcgcatccatttactatcattgactgcatgtaaataaacaagcagtcaccaaaagtgggaggcgacttcggggacttagggagaccgggcggacgatttcccacaccggggctgtctgatcgccgccccgattattatcagcctcagcacttgggctgggaatttagccccaggcccaaacaaacacgacagaccctttcaacgctaatcttctcgg

SEQ ID NO: 202918 - DNA, 201 bp, Homo sapiens
  chr12:26111918-26112119
  hyper
agccggtgcggggcgcgcggcgcggggagcgccggggagtgccggggagtgcggcgcggggacgggcgctgggcggccgcggagctccgggtgccgccgcgtccccagcgccccggccggcccctctgggcggcctgcgggggcggcgcagttgcgaaactgagtaagtattaactttacttagcggcggcgatccgggct

SEQ ID NO: 202919 - DNA, 448 bp, Homo sapiens
  chr12:26379638-26380086
  hyper
gttcggaaacgtgtcgggggcatgtgcctgcggaaacattccagggcacgttccctcctgcccacatccaggaggcccctgggctgcttgcggcagcctcctcccgagcagtgcgctgcagaagggcccttcccgttcaggccaccggggaaggtaattaaattggagcagaaacaccctcctcccgaggtcaccgaacgtgaaagctgcaggccgggtaccaattaaaggcagcgagcgagcggagacgcgcccgggcgctgctgttacataagcgcccggggccaccgcgcctccgcccgctgcgcagcgccgggctgatgggctgacacccgcaagacagatgcctcccgcgccgggcttttatcaagatatatttgctcggattctcaaggtcatcgtaaacactcttccttatagtgtattcgtgccatgtaggtaaaacaag

SEQ ID NO: 202920 - DNA, 88 bp, Homo sapiens
  chr12:26986791-26986879
  hyper
gtccaggtggacgcgagcctccaaggaggtaaacgtcacttggccaagccagtttttgtagccaaccttcagcggtgagggctcagtg

SEQ ID NO: 202921 - DNA, 46 bp, Homo sapiens
  chr12:27038033-27038079
  hyper
gcgcctctttcctcccgcagtgtctctttatcgccctctgctggca

SEQ ID NO: 202922 - DNA, 91 bp, Homo sapiens
  chr12:28129084-28129175
  hyper
ggtttccttttagttccttcctgaacgtgtctttccccactcaggcaacgtttcacatgctttaagaaacgtccatccattttagtagcct

SEQ ID NO: 202923 - DNA, 465 bp, Homo sapiens
  chr12:29301986-29302451
  hyper
aacgaatggaagcgcggggcgggcctgcgcgcgcggccgccctgcccacgatgctgtcgcccccgcgacctgtagggccttcgctggcccctcaccctcctcccgccccgggctgaggctgccgccggtttcgcgcccagtgccgaggcagcggcggagccggggaaggtcggagggagggtggtttcctcccgccccacacccagtctccgagccggatatatagagtgtcacgtttgggagccgaaagactggagccgtttccttgtggctggagcgcttcccgtagcctcggggaaggagcaggatttagaggaccactagttggaccccatcctcgtgctggaggaacaggtattccagggtccccagccctggcgctcgcagagcccacgcgctccaaaagcagagaccggactgggggtggcccaggagggagggctcggctgggttcgcagggcgggg

SEQ ID NO: 202924 - DNA, 121 bp, Homo sapiens
  chr12:29534144-29534265
  hyper
tcacagctgaaaacgtcagaaaagagacaatgtacagatctcgcgatattccctttgcttacgacgtgcttagggaatgaagaggcgtggttaagataaaagaggcgtgcctacagggaaa

SEQ ID NO: 202925 - DNA, 138 bp, Homo sapiens
  chr12:29935701-29935839
  hyper
ggggccccagggtccctggagaagcctaggctctgcgttacctctctctgcaccttctaaagtctagatccagagaagtctggcagattggagagcctctgggagcagccaagggtgcaaggcgggggctggggggct

SEQ ID NO: 202926 - DNA, 307 bp, Homo sapiens
  chr12:30948670-30948977
  hyper
tggcacaggctcctcggcagcattatgggcagctggtagagcggccacttctgagagccggatgggccttccgaggtcgggccgtgccccgctgggcagcgcagagggggtgtgtagggcacgcgacttggagccaggtccagacccatcctggctcctctcagggctccttcccctgcccccattccaccccagccctgctggctgtcccgcaggacccagcgccgcggtagccttctctgaactgcggctcaggcggaggtgtcactcctgcctccagcccaggagggcaggtcaggttatgcaa

SEQ ID NO: 202927 - DNA, 273 bp, Homo sapiens
  chr12:30948988-30949261
  hyper
cgatctccccccacctccaacccccttttctcccgggtccacaccgcagttcccaccgctccgggtgtcctccccagtgcgccgcgatttttgtgtccaagccccagagtccctctgagaccaacccccagccagcacagacttcctgccttcccagctcgggtgagtagccctgaaacgcccgcccccgccgccccgcggccgcagcatcctctcgatggccgcgcctccgggacgacgtggtcccctcgagtagtacaggagctgcaagag

SEQ ID NO: 202928 - DNA, 35 bp, Homo sapiens
  chr12:31079223-31079258
  hyper
ggccaacctctcccaggggccgacaaacgtaaagg

SEQ ID NO: 202929 - DNA, 215 bp, Homo sapiens
  chr12:31479118-31479333
  hyper
ccgctttccctctgcgcacgcgcggctcccggcacaaaattctcttgaatcgaacttatttgcatacgggcgcgcgcacgttgcgggctgggagggggagaagtcccggcgaccgcgcgcgctcccgaggcctctattgtccttttaaggggagaagctccgcggcgcgggaaacgcggcggccagagggaaacgggggcggggactgcttacta

SEQ ID NO: 202930 - DNA, 80 bp, Homo sapiens
  chr12:32908757-32908837
  hyper
ggtaccagaccaccggccccaggaaaaggaccgcaagatgggcgccgccatcttggtagcggcacgaagggaatgctggg

SEQ ID NO: 202931 - DNA, 33 bp, Homo sapiens
  chr12:33048899-33048932
  hyper
acacagggtggagcgccccgaagtacttgcata

SEQ ID NO: 202932 - DNA, 159 bp, Homo sapiens
  chr12:33049167-33049326
  hyper
gaaaaagaaaggggtgaaatcttgaagtgagttagttaacattgatagatatgtacaatatttaatatacataggtacctatatgacaaagctgagtaataggttatggaaaagagtgctttccacaagcaagtcggtcataccgaagacggcgagcaa

SEQ ID NO: 202933 - DNA, 234 bp, Homo sapiens
  chr12:33049390-33049624
  hyper
tgaccgggtgtggggcagggggcggcgccggggagcggcgggctccactcaccgttgcccacggagctgcggcccttccgggcgagggtctgctgcacctgctcctggatccgcaggctcttgactgtctggccgccgcggccgctgctccccgccagcttcagcttggcctcggagggcagcgccaggctggagctgtccagttgtcccaggatctgctggcccaggacggtc

SEQ ID NO: 202934 - DNA, 349 bp, Homo sapiens
  chr12:33049652-33050001
  hyper
cgggggctgccatggggccggtgggggcgaccgagctgctcgcctgcctctggactcgcgggcgaagccgccacggagctgggggcgctggcgcgagccccgccccgctcgagtccggccccgcccctggcccgccccccgcgccggtgagaggcccgggccgggggggagctcggcctcgtgggccggacgcccggccttccctgaggagggggcgcggctccggccgggcacgcgcagtcgggcccgggggcgggggcgggggcgggccggacccgctgagcgcgcggacacctggagacttgtacccgcccgcggggaggtggggagaggggcgcggttcgcctgg

SEQ ID NO: 202935 - DNA, 90 bp, Homo sapiens
  chr12:33050245-33050335
  hyper
ctggacctgagggtgagaaagggctatttggtcaggcggaaagggcaatatgagggaaatgtgccaagaagataacgtgtgaaataaaag

SEQ ID NO: 202936 - DNA, 152 bp, Homo sapiens
  chr12:33591596-33591748
  hyper
gtgctagggattttaaacgtctcccctctcttccacttcttcgatatgtgctctgagctttaggtgtcgcctcacaaatgggatcaataatccttgttttaccaactttgtcatgaaaccctagaaaatcatatatattaaaagggctttag

SEQ ID NO: 202937 - DNA, 136 bp, Homo sapiens
  chr12:33592092-33592228
  hyper
gagaagcccggcaggtggacaggaggaaacaaaacccaaacgccccaccctcgaagtcgtcaggagctgagcgaaggaaggagcgaggtaggaaagcgtggcgccccaaatatgccgcgggagcggcgcgggaggc

SEQ ID NO: 202938 - DNA, 59 bp, Homo sapiens
  chr12:33592320-33592379
  hyper
ccctggctgcccctgtcccgagggaagatgcccgagcacttctcccactccacctggcc

SEQ ID NO: 202939 - DNA, 115 bp, Homo sapiens
  chr12:33592401-33592516
  hyper
atgtgcagagccttctggcacagactgttcactccgtcctccttgtggaaactcatcgtttggcttttctttcgttttctctttttttcccagttagccgtcttttcctcttccc

SEQ ID NO: 202940 - DNA, 71 bp, Homo sapiens
  chr12:34260770-34260841
  hyper
cgcctggctaggggcaggggcgccgccctcccgcggctccggagctggccaggggaagcgcccgcggggtc

SEQ ID NO: 202941 - DNA, 157 bp, Homo sapiens; identical to SEQ ID NO: 8678
  chr12:34260905-34261062
  hyper

SEQ ID NO: 202942 - DNA, 40 bp, Homo sapiens
  chr12:39298516-39298556
  hyper
ccttggcctcccaaagtgctgggaatacaggcgtataaac

SEQ ID NO: 202943 - DNA, 221 bp, Homo sapiens
  chr12:39298687-39298908
  hyper
ccgaaatctctacctatcaggcaaaaggcaaaaagcccggaagggtcggggagaagcaagctggaaggctccaggaagtgggtggggaggaagctgccggggttggagccaaccctagcaacagcaggtttgcacacgcctagcagaggaagtcccgggcctaagcgtgcagcggtcacaagagcttttggcagtgctgtccccttcgattccggtcatca

SEQ ID NO: 202944 - DNA, 327 bp, Homo sapiens
  chr12:39837348-39837675
  hyper
cgaccagcctgtgcgcccttccaggctcttctgggagaaggaagcagctagtgcacgcgctgctgccaggtcccttctcaaatcgaagcttgattcagcggcgcgccgggagccaggcagctgctgctgcggttcggctttgtgtcccacgcatagccttattgtcctctctgcagcttggactttgacccccttccctagcccccagctgaacgccctccctcctccctccccggagtcagtcattcatgctaaacggactcccaggtttgtccactgtctctggacagctgggctgttctacagttcatcgcccgtttaccagct

SEQ ID NO: 202945 - DNA, 91 bp, Homo sapiens
  chr12:40618249-40618340
  hyper
aaggggccatctgggcggtgtcctcttttcccagcgccctgatttctattcttagatctggagataggcggctttcatttttcctgctccc

SEQ ID NO: 202946 - DNA, 43 bp, Homo sapiens
  chr12:40619048-40619091
  hyper
tggaggatctgctggtgttcacgtactccgagcgcggtaatca

SEQ ID NO: 202947 - DNA, 67 bp, Homo sapiens
  chr12:41086115-41086182
  hyper
aagtctgcagcctgcgctggtcctgggggtgagagtgatatccctgttgtccaatcagagaagcggg

SEQ ID NO: 202948 - DNA, 160 bp, Homo sapiens
  chr12:41086504-41086664
  hyper
tgtggtccctgcagctctcgccgtgcggcgcgggaaggactggggcggaggtggctggggtgcggggaagcaggggtgcgggatgccggagccctggggtgccgggcaaggcaggacggcagtgccctagaagagggctccgagctcggggtctgtgtct

SEQ ID NO: 202949 - DNA, 86 bp, Homo sapiens
  chr12:41087106-41087192
  hyper
ccaccttcacacctagtttctgaaaggtggatttggcttcagggatttccagggagtcaagtgattgtgcccggatgggctccgag

SEQ ID NO: 202950 - DNA, 60 bp, Homo sapiens
  chr12:41582147-41582207
  hyper
tccactgccgccgccgcgagacggctgccccgggggtggcccggggaaggcaggggggct

SEQ ID NO: 202951 - DNA, 224 bp, Homo sapiens
  chr12:45270154-45270378
  hyper
gccgggggaggcggggtaaggaggagggaggggccgccgagggcgaggccggcgctcagcgtcggtctcccgcacggtctcctggatgccaaacccggtctagggagcccaggagccgttgcagcctcagctcttctccctccctctctcgatgacccgggcaatgccaacctcctttcgggattgaaagctctaaatccaaggtgctaagttgatgggcggtc

SEQ ID NO: 202952 - DNA, 75 bp, Homo sapiens
  chr12:46663347-46663422
  hyper
cctgcagatggcccgggttggcgggaaggggaccgaagtggcaggggcggcggggagctcgggcacctttaaaaa

SEQ ID NO: 202953 - DNA, 348 bp, Homo sapiens
  chr12:46766925-46767273
  hyper
gcagtccttgctttcgggggacacatcaaggcttttgggggacaccaccctcccaccaaacactttcttgattgttatttttgtgatttacagtgaagttttgtctcacaaacttgggccaaggcagcaaggttgtcctgatggtttgttgttctttcttttccacctagacctgctttcactcttcaaaactagccggaggtcggcgagcagctccttttcgggatgtgctttttgtacggccatggaaactggactagcggaaaggctaccttttggccagcaagccaggccccttagaaagaggccccagtggggagcccggcgctcctaaggccgtttgggagt

SEQ ID NO: 202954 - DNA, 202 bp, Homo sapiens
  chr12:48099380-48099582
  hyper
cccgctgtcccggcgaacaccgcacacccacgccgcaagggggcgggccccacctcggtctttgcgggagggcggctctgccttcccgagcactgcaaaatcgcagcagggtggagggtccgcctgcaaagcagagcgcgcaggcccgggttgcgggggcgagcccctccgggaacgcgcgacccgagacgccgctgccctg

SEQ ID NO: 202955 - DNA, 60 bp, Homo sapiens
  chr12:48397086-48397146
  hyper
gacacacacatacacacacacacacgcacacacacacacaccacgcagcctggctcggtg

SEQ ID NO: 202956 - DNA, 156 bp, Homo sapiens
  chr12:48398744-48398900
  hyper
acagggaggagcccacagagattcagagtcctaaatcttggagacaggctagctgagccagatctgaagggttaccccgacctatcttttagcccttccctgcagtacctggtccccagactcccacctggacgttcacagcgactgccctccacc

SEQ ID NO: 202957 - DNA, 223 bp, Homo sapiens
  chr12:48551386-48551609
  hyper
ggcgcgcctgcgcagacttgtgcagcagctttcgccctccagaggcctagttagggggttactttctccttttactcagaggctttgcgcgcaggctcagtgcagcgttctcggccacagccgcagggttcgggtcttggtcctgcagcggggataaaaaagctcaggaaccctgagtgttgggccgattctatatggttgcacctgcgtggaccaggccagc

SEQ ID NO: 202958 - DNA, 493 bp, Homo sapiens
  chr12:48576976-48577469
  hyper
ctctgggatcattagcaacagcctctctaccctctccgctttcctgcgcatcgctggaggacagggaggcaggactcgactttagcgccatcctctgagaaaggaatgcgggctggaaaaatctttccagggcagtctcgctgggtctcataccccggctaggggagggacgatctctcccggacttggaggtttctgcagcagacggctctctcatacttccctattaaacattgcgaccacacgctctttccagccttggccgaagccactgtagcgtcccctctcctccccccaccccgctagtccagactccagagccccactgcagcttccagccatcctccctttttcttcgccacttcctggttaccatggagacacacgtcatttacgtgccgtgcgtcgccttggaaacagaggagcatccgcgacacccccgggagacccaccccagctgctgctgccacactcgcgggcgctgcccggtaat

SEQ ID NO: 202959 - DNA, 868 bp, Homo sapiens
  chr12:48591592-48592460
  hyper
tatgggaggtttcacggagtggatacctggaaaggggaggtaaggcagctcaaaggacactgttgttcaacggagggaagcggattcaacaattatacaattcgctgagtcggggctttcactgcgaaagaacttggcttcggatccgtgatcaaggctgggagctatggaggtggatgtgattggcaaagacctctgctcaggtctgcgtcaaaccttgcttcgctcccatcccattctgcgccaatagggcgcagtatcccaaccattccactcggctaggaggggatcctaagcctcaaggtccgcatctcccgctggagggactgagcagccgcactggtgtcccagaatagatcgtgttccccagaggttgtcaggttcccgcaattcggcgcgggcgaggcggccaaagagagggcgctcattggctgccacagccccggtccgagaggccgaagaaggctgattcgtcacaggccgtcagcgcgggccacgcctatttcctctccaggttctaattaggtcaggggccctacagcctcttgggtagtttgcaagtgcgtcgcggagccggcctcggaaatatggcgacagcttcagctttcagtgtgagggagccgagggcccagccaaaccctgcgggaggcaattcctgggtacccttcccatattttcggtctttgggctgcgccgtggtaacctcagagcctggttgcgtgctcaccagcgacaagtgtctttcattgggacatgaaaggggactgggaagtgccgtgcagtttcagggtggtttctggttaattacattttcatgggttttcgcagagtctgggggcaatttgtgtcctccagagaccagggacca

SEQ ID NO: 202960 - DNA, 335 bp, Homo sapiens
  chr12:49182447-49182782
  hyper
gagggaggcaggcggcgggcgacgggggtggcgagcgccggacctaggagtcctcgatcccactgcctccatgacttccctttgccaaccccaactccctcgggcaacactgccgagacgacccgtccaaggcttcggcgcccccacccacaaactcttgtcgagagccgctcgggtgcgttccaatcctggcgcaccgggagcccgagcggccacttcccctagccctcagcgcgctcacctgccggcccggctccgcgcctgccctgggcccccgccccgccgcccccgcgggctccggccggccggccggccgtcccgcggtcctccgagcc

SEQ ID NO: 202961 - DNA, 295 bp, Homo sapiens
  chr12:49183035-49183330
  hyper
gggacccctccctccgcgcgccccctcctctcctccggccgcttcctcccccagtcctgggaagacaagcagctactgttctgggatcaagaccccgcggggaggggacctcgcagcccggtccccttcccttcaccccggccgcctcctccggcattcctctcccgccctcaccccgggggtccccgagcgcgcccgcaaacccacccctcacggctacatcccccgccccgcccaccgagggtcgccttccttcctgtcagggtcccaggggttgggccggcgccccgcgccc

SEQ ID NO: 202962 - DNA, 101 bp, Homo sapiens
  chr12:49259401-49259502
  hyper
gccggccagcgggcgggcgggcagctcacctctggatagcaatccttcgctaacacttgcaacatcgcggtcttcccacactgcacgtccccgaccagaac

SEQ ID NO: 202963 - DNA, 481 bp, Homo sapiens
  chr12:49351242-49351723
  hyper
gaagccgcgacggcgactggagctgtgcggcgtacccccacccccagcccgggatacttcccacctccccgatcgcgcgatagctgcgcggtagctagcggcagttctcgcgagacccatcaccatggcagcggctgcagcaccggcggccgggcgctggagctggagtcagggcgggggcaggtgtgggggctgtgggcggcggaggcgggagccgtgaatggggatgagacagtgaggactgaggtgacaatcccaagctccagggttgtgcctggaatttaaggactgaggcggcaagttggctgcgtaggagacgggctgggctgcggggcccaggggctccttgggcaaagccagcatcgggatatgggtgaacagtcgttgctgtggcatgccttacccagccagacttcatctttatttcttaatctgggctagctgccatcccctgaaagccctcaccgcaccattgttgttg

SEQ ID NO: 202964 - DNA, 60 bp, Homo sapiens
  chr12:49364178-49364238
  hyper
caactctccccaccccgggtcggtgtttctatggcctgggagacaaggggaactgctcac

SEQ ID NO: 202965 - DNA, 319 bp, Homo sapiens
  chr12:49371614-49371933
  hyper
ggtttctctccaccgctaggctccttttggttagctcacccccacaactcatccccgggatttccctgaccacagccgcactcacgcccccgtctcccctttttccttctctgtccagccatcgggggttcctgggcggttaagcatctccccggagtcgctgcccagaaccacagctttccttccgacactcaggatgggggagagaggggacgtcggaggggcccggggtgacgtcgaggggacaaccccaccgcgggcggcgaggcgggctgggcccctggcgggctctccccgcagcacactctcgccgcgcccc

SEQ ID NO: 202966 - DNA, 41 bp, Homo sapiens
  chr12:49375529-49375570
  hyper
acactccccgcggttcatacgcatcccatctctcccacttc

SEQ ID NO: 202967 - DNA, 60 bp, Homo sapiens
  chr12:49392537-49392597
  hyper
ggcagccatgtgaaggggtgtgtgtgagtgtgtgcgcgtgtgcacgtgcgtatatgttag

SEQ ID NO: 202968 - DNA, 306 bp, Homo sapiens
  chr12:49392636-49392942
  hyper
cacactttaacagcgtctgccccatctcacctcctgccctttctcacacccacttctgttcccccaaacaacgggatgagtcaggccccagccctcgggagcgggcagaggtggaaggcgtgggaaagagaagggggaccagcagtgctcgctggtgcctgcggggaggtccggaccccactccccgccccaccactctcttcccctcacccctgcttcactcacgtgcggttctggaacccgcgagcccagtggctggcctggaagtccatgggctgtcgagaaggggcgcggcgactataatga

SEQ ID NO: 202969 - DNA, 195 bp, Homo sapiens
  chr12:49393228-49393423
  hyper
gcatgtgacaccgcgcggactgctccgcgctgctacctcccccatgtgcacggccgccccctggggcccgggattggacgccccttcccactgctgttgtcccccaagcctgatgggatcgcacgagtgggcgggggagggacttatgattcttgccaagctgacagtgccccctcccccgcccctatttcttca

SEQ ID NO: 202970 - DNA, 48 bp, Homo sapiens
  chr12:49524764-49524812
  hyper
ggactcgagggaccgcacccaggacacagttacgcgacaaaagagagc

SEQ ID NO: 202971 - DNA, 559 bp, Homo sapiens
  chr12:49658689-49659248
  hyper
gaacttttgaatccgccaatcagcgccgcgcgcccccactccgcgggtgcggccgggcgcaggccagggctcgaaggtggggccgcagcggcacggggcggggtctggggcccgccctcccgacacgtggccggggaccgggtatataaggcccttcggggccggccaccctttcactacttctcccccggactccttggtagtctgttagtgggagatccttgttgccgtcccttcgcctccttcaccgccgcagaccccttcaagttctagtcatggtgagtggggttccctcggggctggggaagagtgcgcgtcccaggggacggcgggcccggaaactactgcctgcacctcgggccgcgcccaggacagctccagactaccccgggcccctccggttaacctggcttgtggcggccgggctggaaggtcgagttcacttggcagacaccagttcgggccggaaaacctggcccgggtgcggccatcagtggaaatggaaagccctcttgatcctagtgagggctttccccgcagggcccgctactgccctagg

SEQ ID NO: 202972 - DNA, 311 bp, Homo sapiens
  chr12:49690672-49690983
  hyper
agctgcgagacctgcaggtgagtgtggagagccagcaggtgcagcaggtggaggtggaagccacggtgaagcccgagctgacggcagcgctgagggacatccgcgcgcagtacgagagcatcgccgcgaagaacctgcaggaggcggaggagtggtacaagtccaaggtgcaagagccgggagggcctgcgaggcgggacgctggggtggtgtcgcgcgtcccagccgactaaagcctgggttacccccacttctcagtacgcggacctgtccgacgctgccaaccggaaccacgaggccctgcgccaggc

SEQ ID NO: 202973 - DNA, 144 bp, Homo sapiens
  chr12:49735822-49735966
  hyper
cggagccagagaccgctgcccggtgcttcctcccatcttcttccatcccttccctcttgctccccctccctcctgcactccctccccggcggccgcggcctttattagggattccgcggctgtcggtcccgccatccatcctgt

SEQ ID NO: 202974 - DNA, 703 bp, Homo sapiens
  chr12:49736083-49736786
  hyper
ataatcaccggccgcccgtcactcagccggccgcccagggagctcctgggcccggcccgggagagggcggggtgcggctgcagcctaggcgcccaggacagggcgagggcggacctgcggcaggagcgcctcctgcggggcagtggaggactgtggcctgaggcattggccgaagggtgggggattatggccccgggcactccccgaagggaaactggggctagcggcttggggcctcccagtggggaagagggaacaaaagctgcggagaccggaggcccggggtccagggcgccccctgctgggaagctgggaaccaagccttagaggtccggcaggtacagatggaaccaggcccagggcgacccctcctagggaaaccaagggtttctagcctggcgcgcctcctgccggctttgaatgacactgcgcttctatgcccgctccgttcagtgaaatccaaccaatccgcatccgctcaaaaaaggctccaagtcctggcgaacccgaggggagccgagagggagttcaaggagtccaggttttactgcagattctttggcgctagctcccagctgacaaatcaacatctcaatctgacaattagtggtcaagatgcggggtgaggggctcttacagccccggccgcttagccctcccggcgggaggcagaggggtgggcggtgctggcagtgatgaacga

SEQ ID NO: 202975 - DNA, 301 bp, Homo sapiens
  chr12:49761541-49761842
  hyper
ctggggtctgtggggcgggtgaaacacccgcgtcggagttggggagtttccagacggataggccggggaaacaatggagtgtgggggggactctggcgtgagcgtgtgtggggtattggattttaagaaacaacgagcgagatagaacgaaagaataggatcatttgggatgagaagtacaatgaattaggaatgcagtagggatgcgtaaggtcacctccgtggctgtgcgaggtccttagcattcgggggcaataatgagatttgaaaataagggagagaagggcgttcttggaattga

SEQ ID NO: 202976 - DNA, 512 bp, Homo sapiens
  chr12:49961430-49961942
  hyper
ggaccctccgcccctcgttctcccaagagtgcacacccaaggtaggggatcggtccaggtctgtctcaagaactcggggtaggagcattgatgaagtcacctctgcaactcaaagcagagcaccaagtagccttggtttgagacccacaggctggtggctggggaggtgggggtaaactcgcaagcccattctcaccccacggtctccatgcctttgcgcatgcgtaacacttcgagccagattctaacccggtccggcccacgcatgcgcagcttttcggggcgccactggggcggggccccaaacttggggggtggtcgtccccggcggcactctgcaaaactccatttcatccccaactcctctgagaaccctcagaggcgaaccgcgaggtctcaccattcctagactgccagatccaacaatttctccgcggcgacggtagcagccgcagggccaaagccggcttccgtgaggtacgtctacttccggttaacgaaccagggggctg

SEQ ID NO: 202977 - DNA, 328 bp, Homo sapiens
  chr12:50339293-50339621
  hyper
tgctctcttcacttcgtcccgcttcgccccgactgtggatctacccgctcccttctccctcagtccccaaagcaccagactcacaggcctgctgtgtgacccacttttaccgacctttcggggagagtagagggcatttgtgactcagctcagagcaggaaacacatctcacgtcaactgtcagacagcgctgctccgaatcccatcacagtgctccagcagggggcgtcctcaccggccgcggccacagccacggctcaacccggcctagctcccagacaccctccttccaccgcctgttttccaccgtccccgcctgctctttcaa

SEQ ID NO: 202978 - DNA, 78 bp, Homo sapiens
  chr12:50419370-50419448
  hyper
gggaatgagcatgcgcattctgacaaagcgaagccaaaggtggccattttgactaatgtcaacggtttttcggttttt

SEQ ID NO: 202979 - DNA, 267 bp, Homo sapiens
  chr12:51157702-51157969
  hyper
cacaagtcaggaccgcgtacaagatggcggcgcgtcacgtgggcagcgcggtgacgcaggacggcggcccgcgcggaggcagcgccatagcctaccccaaacgcacactagtgctcagttttgcccccctcccctcccccgcccccgcccccgcccccaggcttgtgtagatcatgccgccagtagcggccctgactgccgaggaaacggtagcttaggacagttggctgttaagtgacactgattctccccgccccgcctgacccc

SEQ ID NO: 202980 - DNA, 239 bp, Homo sapiens
  chr12:51318416-51318655
  hyper
caggctccacccacgaattctgttttcttttagaggtcactggagagcccggtggggtgtaagtacactgcgcttataaaactctagcaggaagctagcagctgtctccaaacccagagaaggggaaacaggaatcgattaggaataaaggattataatccactttccttctgaggaaaagctgggaaccttctcattttgccttatgaaaactaagctgaatcgactgctgccaaaca

SEQ ID NO: 202981 - DNA, 223 bp, Homo sapiens
  chr12:51785149-51785372
  hyper
ctacaggccaccgcgaccagcagagagcgaaggcaggagggaccagcctggcccagccccttcattttactgtcgggggtagtgaggaggaagaggaagaggcgaaggctggcggaggaggaggtgagagcgaggactcggcagaagcgagatccgccgaagggaagtccgagcagtcggggagctcaggggggccctcccggggagagggtcgcgggctcct

SEQ ID NO: 202982 - DNA, 405 bp, Homo sapiens
  chr12:51818412-51818817
  hyper
agcagttggaaggaccttcacgcccagaggcccctgaagggagggaggcggtttccaaggcaaccgggcccgggagcggttggctccccggctcctccccctccccgcggtagcccagggtaccgccggacagcgtcctcccgtgctccgcgccctgattggctgcgcaggcctctcgctgattggttgcggcggatgcctcgcgggccggtggctatggaggcggcggcggttgatggttgaccgttggctccggggtgggggtcgccgttcgagtgatctgctcagacccgaccagagggcgcgggctgctgatgcttggcttggagcccgtgggggagacctagttcggctccgccatgccggccgccgggagtaacgagccggacggcgtcctcagctatc

SEQ ID NO: 202983 - DNA, 230 bp, Homo sapiens
  chr12:52294168-52294398
  hyper
ccaggcgcctcccgcggccaggggcgggcagccgcagagcagcacgctgggccttggctccggtagcagcaagttcgaaccccgctcctgctccgcttcggttctcgctcctcggcccttgggcctccaaacaccatttcctggcagttcgttgcgcattgcgctctccccgccaccaggatgccagtgaccaagaaggatctggcggaggacgcgccgtggaagaagat

SEQ ID NO: 202984 - DNA, 53 bp, Homo sapiens; identical to SEQ ID NO: 122297
  chr12:52401605-52401658
  hyper

SEQ ID NO: 202985 - DNA, 58 bp, Homo sapiens
  chr12:52463634-52463692
  hyper
gcttctgtgactacgcggatgttgtgggcggctacatgcgtgcgggggcccggcgagc

SEQ ID NO: 202986 - DNA, 71 bp, Homo sapiens
  chr12:52627438-52627509
  hyper
gcgctccagaccacaccagccgccctaactagccctgcctgcgcgcgggccaggcgctggggagcactgcc

SEQ ID NO: 202987 - DNA, 33 bp, Homo sapiens
  chr12:53107966-53107999
  hyper
tgccagcagtctgggaaggtggggctccggggc

SEQ ID NO: 202988 - DNA, 313 bp, Homo sapiens
  chr12:53135226-53135539
  hyper
tgcccaaatgcaaatcgtcagagctgaagcagggaatggggagagttgagtttggaggaagtgactacagtgtcagcctcctgaaatagaaaaggccaccggatacctgggccagatttcagcaccaaggacagagcaccgcttcctggacggcgtctaaagactcaaaggcctctcactaaagtaacgctgtgccgttgaagaccagaaacacaccccacacacacacacactgtcttgaagaaacaaaactacacctatgttattaatatagcgtgggagtgacaagcatggactccggggctcaattgcc

SEQ ID NO: 202989 - DNA, 222 bp, Homo sapiens
  chr12:53268070-53268292
  hyper
gcggccgccgattggctgggcccgagcgctcccacggcggccgggggccccagggcggcgccggccgcgcccgctccgcggtgactcatccagcaccccacctctggagctggacgggcgcccggcctcttcccaccccagacccgcccgctaagccgggagagcctgactcagcagggggagcctggcctgccttccgcccccttcgcgtcctcccccggg

SEQ ID NO: 202990 - DNA, 209 bp, Homo sapiens
  chr12:53342670-53342879
  hyper
acaacacctgctgtccgtgtccatgcccggttggccaccccgtttctggggggtgagcggggcttggcagggctgcgcggagggcgcgggggtggggcccggggcggagcggcccggggcggagggcgcgggctccgagccgtccacctgtggctccggcttccgaagcggctccggggcgggggcggggcctcactctgcgatataac

SEQ ID NO: 202991 - DNA, 36 bp, Homo sapiens
  chr12:53342911-53342947
  hyper
tcgtccgcaaagcctgagtcctgtcctttctctctc

SEQ ID NO: 202992 - DNA, 360 bp, Homo sapiens
  chr12:53614116-53614476
  hyper
tcttatctgggtgcttcggcagctagcactggggagaccttttttaaaagcgaagcctggaggggtggggggtggggcttggagagcgaagggggccgggcaccgagatgagcaaagctgagagtggagcgcacacatacacatacgtacactcgctccgcggcgcgcgcgcttgcttagacacacatccgtgcatgcatttatcttatcaggcaccaagaatttgcaaatatgcaagagtgaacatacatgtgagcacgcatataaaatcataggtgcacacacgtttgtgcaaacacaccttgctcgggagaatgcttgcaggcatactctccacagctcataggctttgcatgcatt

SEQ ID NO: 202993 - DNA, 176 bp, Homo sapiens
  chr12:53714987-53715163
  hyper
tctagcctcctgccggggccaagctgtttccactccgccagactctgtgaccctgcccctgtcacactgcctcctttccccagtagtccccgactccgcccccatgcctgtaggtcccctccctcctcgccctggccacctggccccggaagtcggggggcgggctctcatagcta

SEQ ID NO: 202994 - DNA, 156 bp, Homo sapiens
  chr12:53719397-53719553
  hyper
gtaacccgagcccccccaggatcgccggccccctcccacccgtagcagcccctcttgcgacccgtgcggtggacagtccgacgcggggcgcagctgggagtcgggcccaggccggggggagcggcctgtgagccccctcagcccagcggggtaacc

SEQ ID NO: 202995 - DNA, 138 bp, Homo sapiens
  chr12:53765064-53765202
  hyper
agcttcttgggctcgagggagggagggcgcgcaaagccggaaggaggggtttgcggctggggagagccagagggcccacccctacccggaaactgggggtggagaggccccaggccagctcacgccagtcttccagct

SEQ ID NO: 202996 - DNA, 97 bp, Homo sapiens
  chr12:53894678-53894775
  hyper
gaagcttctcgtgcgtgcttgaccctgcctctccagctgcgacacagatggcgcgcgggctcttgggttctgtagttttctcgcgatccaaaaggct

SEQ ID NO: 202997 - DNA, 384 bp, Homo sapiens
  chr12:54090210-54090594
  hyper
taaacctgtcagttcggctcatccttaactgggattggctactcgcagtatgcttatcccaagttttcattggctgacggccacctgtatggaaataagaattacccgggactctcaggcccttctcagccgtaccgacctgtggcttagtgcgctgaaacctgcaaggtcggagccgaaactcctgggcttgcttgttgtcctgccttctcttcctcaaaggagatctcttgaatattgccttttccctctgcgccctgcctaaggcctagtctgaaagaagtccgaccaaataacctgaaataatgcggatttgcatgctttctgtatcttctttgcattctctaggttcaaggtcaagattttgccccttccctccaatgc

SEQ ID NO: 202998 - DNA, 56 bp, Homo sapiens
  chr12:54120862-54120918
  hyper
gagagagggaagacgtgtaggggacacgtcttgcctgggagcgaataagcagattt

SEQ ID NO: 202999 - DNA, 57 bp, Homo sapiens
  chr12:54132526-54132583
  hyper
ggctttctccaggtgggacccatcgcctaggcaggtttccccggccaccctcttcct

SEQ ID NO: 203000 - DNA, 69 bp, Homo sapiens
  chr12:54329187-54329256
  hyper
ttgggctgtgtccacaaggccgtgtgctgaaacggtgcaggcagcctgcacccatccctaaactcacag

SEQ ID NO: 203001 - DNA, 67 bp, Homo sapiens
  chr12:54329947-54330014
  hyper
ggaaccaagcaaaagaagagggaattgttcagagcaagcggacttccccagccgcctttagcgccct

SEQ ID NO: 203002 - DNA, 170 bp, Homo sapiens
  chr12:54338496-54338666
  hyper
ggatgtttttgtattcgttttgcttttttaaacattgcattaaaatatcgtcttgattactgagtttttggcgccccctcccttaaacttcgagcccagtggcctcatcatagttgtggtcttgctaaaataacagaaatgaaaagcattagggagcttcactatgcagt

SEQ ID NO: 203003 - DNA, 77 bp, Homo sapiens
  chr12:54343492-54343569
  hyper
ttttagccttgaccgtgactaggtctttctgaccttgacatcacagggagcacagggaaggggggggaggggtggaa

SEQ ID NO: 203004 - DNA, 336 bp, Homo sapiens
  chr12:54346835-54347171
  hyper
agttccgacaagtgcgcctaacgcggggccggctcctgggggcgggaggggctggaccaggccgggcagctaggcaagcaggggcggggaaggggaaccggccaagcagggcaagggacaggcaccgagctgcgagcttcgaactgctccgggcagggcggcgcccgcggggacacatttctgtcggagtgagcagctacggtttgggatatgaaatcgcccggggagcggtggaattcaaagaatctgcgtttctctctgccgcgtcctgcagaggagagaggggagggagaggaaaaaaagggagaatcttctctgcttcgatctgcttttgca

SEQ ID NO: 203005 - DNA, 115 bp, Homo sapiens
  chr12:54357453-54357568
  hyper
gcctcatcataaagatggagatgataagaagagcaaggaagccccggtggccgcgaggggcggggcttggtgggcccggtgtggggcagtggctgacccgagccgggtgctgccc

SEQ ID NO: 203006 - DNA, 210 bp, Homo sapiens
  chr12:54357603-54357813
  hyper
cgttcatgtggcgagctaggacccggattattctctctgtactcccgttccctagattttcccttttcctcatggaacaccaaatcagattttaaaaaataaaaatacataaacctctgtctgtgagtgcccgtcttgccctctgccacgtttgttccgggaactgccgccttgctcccttgcctgcatttctctgcgtggttcgctttc

SEQ ID NO: 203007 - DNA, 213 bp, Homo sapiens
  chr12:54367630-54367843
  hyper
ggaggagaacacaaatcccagctcgtccggttcagcccactccgtggccaaggagccggccaaaggagccgcccccagtaggtagcagcggccggggaacgggcgggcagcgagggagggagcgagagagggagggcgagagaaggggggaggcaaggggagcggggacggcctcgtgttttgggtcagtccgattttatgtggagttttata

SEQ ID NO: 203008 - DNA, 385 bp, Homo sapiens
  chr12:54378335-54378720
  hyper
tgtttggtattccttaactttttttcccctttctctgctcatcagatccccccaaacccccccccccacaaacctcaccccactcccatccccaaggtaagaagtgggagtcgggtccggggatatggaaaggggagatgaagagtggggagaagtacctgattcgtgtctcgaccttttaatttgaatttgactgttttgagccccgggttgcctcgctctctccctctctcccgcatttcccccctctccgcccccttctccccaggagttacaggctggttactggataaacaaaccccactcttcctagaacccccacccccacccccacccccctccacccctctacctcccctgccgcccggggggcgcttcctttgtt

SEQ ID NO: 203009 - DNA, 37 bp, Homo sapiens
  chr12:54387781-54387818
  hyper
gtatgaatgtttgagacttgcgggaggaagaaaaggc

SEQ ID NO: 203010 - DNA, 60 bp, Homo sapiens
  chr12:54388354-54388414
  hyper
aggccctgcacgcctctgcagctgccgggccgtgtccgggacgtctgaactgaggccgac

SEQ ID NO: 203011 - DNA, 256 bp, Homo sapiens
  chr12:54388855-54389111
  hyper
ctgtatgtgatctcaggctcacactcatgttgtgggtctgtctgcctcaggagatgcggtttgcctttctgtctgagacgccccaaaccctgagctctccttcccaaggctggaaaaaaaatcgggaaaaacggcggaatttgcactttcattcattgggttatctgcaactgagaggggctggttaaggcgtccccaagttggaagggcgctttgcttctgttttctggatgcagagtcctctgactccctctgc

SEQ ID NO: 203012 - DNA, 320 bp, Homo sapiens
  chr12:54389321-54389641
  hyper
acaaaagatcaggtaacaaggcgctcagggccactggggctccgggcagggcagggagcggctctagctctggggcggctccccctccagccactcccaggctggaaaaccagaccgcgttgggggagccggaaatagccccgcttgctgcggagcgtcagggcgggggcgccggcgggaatgcaggcccggcaggccgtggctttgagagagccacgttcacaggccctggggatttcactcctgctgggcctcgggacctgactcctggtgtgtagggatcccagatacccaccttgggtgggggcaggacgcgggtt

SEQ ID NO: 203013 - DNA, 134 bp, Homo sapiens
  chr12:54392869-54393003
  hyper
tcttttgccttgcccgctctcaccctggctctctgcagacagagcccgggagcgactttttggggggagtgggggtggggaagtgtcgcagagatggagttgggggcaaaggagggtgcgcaggaagatgggat

SEQ ID NO: 203014 - DNA, 116 bp, Homo sapiens
  chr12:54393243-54393359
  hyper
agtggcagaagaacgctccccttccctccttccctccctgtatctcagcttccccagtcccctcccaccctccctccctcaccgcccctgctgctcctgaaagaaatacatacata

SEQ ID NO: 203015 - DNA, 230 bp, Homo sapiens
  chr12:54404861-54405091
  hyper
cttctgtccagctccggggaggcgcagtggacggcaaacttacagccggtatcagaccttggaactagaaaaggagtttctctttaatccttatttgacacgaaaacgtcggattgaagtctctcatgccctgggactgaccgagagacaagtgaagatctggttccagaaccgaaggatgaagtggaaaaaggagaacaacaaggataaactgccgggagcccgagatg

SEQ ID NO: 203016 - DNA, 63 bp, Homo sapiens
  chr12:54408253-54408316
  hyper
gatggctgaggtcccgtttcgtttttaaacgtggaattatgattgctattaataaaaatatct

SEQ ID NO: 203017 - DNA, 283 bp, Homo sapiens
  chr12:54410364-54410647
  hyper
cctcagctctttctgcgctcgcctgcagcagcctggcccgtggggagtgggcggtgggtgggggtaggggtggggtgggggtccggggatgctccctctatgagagaattgggtaaacatggcgaccgcggcgcccatttgcacacgctacacaaatgcatcgcattcccggttgtttgcagaaaatttacagctgagtaataaaagtttacgatcgactcacaagttggattggccacaagaagtcatgtggattccatccatgaacgtgaactttttattg

SEQ ID NO: 203018 - DNA, 205 bp, Homo sapiens
  chr12:54422141-54422346
  hyper
ttcctgacatctggcttgcgattggctgggagggggtcagctgactttgtcattttgtctgtcctggattggagccgtccctataaccatctagttccgagtacaaactggagacagaaataaatattaaagaaatcatagaccgaccaggtaaaggcaaagggatgaattcctacttcactaacccttccttatcctgccacct

SEQ ID NO: 203019 - DNA, 55 bp, Homo sapiens
  chr12:54422376-54422431
  hyper
cgccctcaattccaccgcctatgatccagtgaggcatttctcgacctatggagcg

SEQ ID NO: 203020 - DNA, 425 bp, Homo sapiens
  chr12:54422525-54422950
  hyper
ctaattccttttaccaggagaaagacatgctctcaaactgcagacaaaacaccttaggacataacacacagacctcaatcgctcaggattttagttctgagcagggcaggactgcgccccaggaccagaaagccagtatccagatttacccctggatgcagcgaatgaattcgcacagtggtgagttttacagctccgagatataaattaaataaactgaactggctttatgaccggcttccctagaagaacgggcggagagagttttttatggccccataaaaacaatcacgctcgtctcctcaccgagacagggccccctcttctgccccctcagctcgcctctcgctcgcttgcaggggcctggcccccttggcccctgacggattggagggccccaaggcgggctgagggggcaggaacag

SEQ ID NO: 203021 - DNA, 584 bp, Homo sapiens
  chr12:54426523-54427107
  hyper
aggcaccaggtgtcgctgtgggcttgttgtcccggctacccccaattccaagaacctttttttttttttccctcccccttccctctttctctctctcactccctctcccccttggttgggctttgccaacatatcgagatgcttttcgccggcttccatcactaacctcccggaggtcatcaagccaaatttatgagtggccgctcgagtcacgtgactctatttaaggctcccttatttgggaagagcgcataggataaagaaagagatatctccacctataaattgtccactttggagaacaaaaaacccctcaacttcaaagagtcacaaatcacccttaatcaaaaagggtgcagaaatttttttgggccctccccgccatgagctcctacgtagccaattcattctataagcagagccccaatatccctgcctataacatgcaaacttgtgggaactatggatcggcctcagaggtgcaggcatccaggtactgctacggcggattggacttaagcatcactttcccaccgcctgcgccttccaactctctccacggggtagacatggctgccaacccc

SEQ ID NO: 203022 - DNA, 329 bp, Homo sapiens
  chr12:54427307-54427636
  hyper
accggccccgccacagatttacccgtggatgaccaaactgcacatgagccacggtaaactttaggacttcattttgcgctctcgggtccgcctgggttttataggccatgcggggcaaataaagaaaaaaaacctgcggccataaattttacgatccaggcatcaatggctcgtaaaactgtccactaaaaggcttagaggctgtgtgcgcccaaatttacgacgacataattggatcataggaacaaaacgtgtataaaaggcaatattcaatttttgggggagagggagggagttaaaaaaatagagggatctgaagggtgaggagc

SEQ ID NO: 203023 - DNA, 91 bp, Homo sapiens
  chr12:54427974-54428065
  hyper
cgggtgggggcctgggctggggtggggacgggggaacgctgcaagctattcaccccttcctggcttggggtggggtttatgttccagagac

SEQ ID NO: 203024 - DNA, 56 bp, Homo sapiens
  chr12:54428083-54428139
  hyper
aaccagttacacgcgctaccagactctggaactcgagaaagaattccactttaacc

SEQ ID NO: 203025 - DNA, 225 bp, Homo sapiens
  chr12:54446874-54447099
  hyper
cagtgggtagcaggggaaggcgagacttctgaactctgcttttgccaaccacttcctgtctctcttcagcgggggctcaacccccagacctccagaaatgacgtcagaatcatttgcatcccgctgcctctacctgcctggtccagctgggaccctgcctcgccggccgcatggccagagggttgggtgagtgtgtatggggaagaggggctggactctggtatc

SEQ ID NO: 203026 - DNA, 219 bp, Homo sapiens
  chr12:54447599-54447818
  hyper
ggagtcacatggtgaaagtaactttacagggtcgctagctagtaggagggctttatggagcagaaaaacgacaaagcgagaaaaattattttccactccagaaattaatgatcatgagctcgtatttgatggactctaactacatcgatccgaaatttcctccatgcgaagaatattcgcaaaatagctacatccctgaacacagtccggaatattacg

SEQ ID NO: 203027 - DNA, 64 bp, Homo sapiens
  chr12:54448041-54448105
  hyper
agccccgccagcctgcagccagccagcccccgaccatccctccagcgccgccagcaagcaaccc

SEQ ID NO: 203028 - DNA, 142 bp, Homo sapiens
  chr12:54519788-54519930
  hyper
cagcccctggccacgtggtccctcgtaccaatcgatcgaattctagtcgcaattctctgtctgtccctcggctctggggagaaagggggggctgtggcgtgggggctgaggaggggctaaggcgggaggggcgcctcatccc

SEQ ID NO: 203029 - DNA, 55 bp, Homo sapiens
  chr12:54608668-54608723
  hyper
gcgcaataggaggcgggccgcacccgaagatggctatagcgctgtgcccgagcca

SEQ ID NO: 203030 - DNA, 41 bp, Homo sapiens
  chr12:54686414-54686455
  hyper
ccagcttcctcttgcggcagttctgggctgccaccttgttt

SEQ ID NO: 203031 - DNA, 98 bp, Homo sapiens
  chr12:54811884-54811982
  hyper
ccagccccagaagtcccggtctcagcacagctccagccgaccagctacaggaaaccagcttttctcttcctcccaagagccagaggaagagggaaacc

SEQ ID NO: 203032 - DNA, 168 bp, Homo sapiens
  chr12:54812988-54813156
  hyper
cgctcttccctgtcctggggccaccgacccggagccgcttcctaaacctcccagaggcgaatgactcaacgcggggaggagtttgccaaactcccggctgagccctccccccgcctgccgagggggctggcgggggggcattcctgggtccctggaactctgagcccg

SEQ ID NO: 203033 - DNA, 210 bp, Homo sapiens
  chr12:54982005-54982215
  hyper
gatgtggctccgacggtgggggaggggacagaagacccccccccgccccccgcaaactgagcgttcgtcctcaaaagggcgcactgctaagggaggactaggcagggatcctgggtcccaccagtccaggggtccctcgtccttggctgggcgagtgccctgccgccccgccctgctccgcacctgctccgccgcctcggggtcaaggtg

SEQ ID NO: 203034 - DNA, 212 bp, Homo sapiens
  chr12:56101314-56101526
  hyper
aggctgcctggctcgccctccttgcgcaaggcacccatcacgtccagattgaaggcgacagcccgtgagaagagcagttcgacgagcagggagccaaaaaggtagcaaatcccggaggccccccaagggtcgcggctccgagccccggccatgggacgatccctgcgcgagctcccagcgaatgcaagggaaatctcgcacgccccaagccc

SEQ ID NO: 203035 - DNA, 201 bp, Homo sapiens
  chr12:56210950-56211151
  hyper
cacctagaaaaggggagtggaagtattttctgagtgtctggtacctatttagacagaaatacacaaaaatgccaccatttgctaacagggaaatctcagcttcggacgacagactggaaacatcatcccagggaagaaaaacggatcctggctccgacatggggcaaaaaggagggaccaactgacgtaatgcagccctga

SEQ ID NO: 203036 - DNA, 151 bp, Homo sapiens
  chr12:56390556-56390707
  hyper
atcattcctggaatacgagaactaagcgattgactttgctttccctaaaagataaacagggtagttgtagttgcaacagagtagatagaggtaggtctaccctgggtttaaagtggagatcacagccggggaaaaccggactggatcccga

SEQ ID NO: 203037 - DNA, 272 bp, Homo sapiens
  chr12:56472732-56473004
  hyper
aggctcaactgttttcgaagtcttcaggcttgaagttctggagaaaacaactaggctctccgggcgagatcccgaataccagtttaagggatttgaaatgcaaggccgtctgggactccactgccacggatgggcaccaggcggcgccggtcggatccgtcccgggactagcagggctttgggcagcaacccgcagggagcccgaccgcctctggccaggtccgggcagctggtgggggaggttccagaggtccacgccattcgtggacgca

SEQ ID NO: 203038 - DNA, 201 bp, Homo sapiens
  chr12:56497906-56498107
  hyper
cgacccagggatccgaagaagggcgcacccagcctccccgacctaggtgtagacactgcccacccgctgcggctccactctactccacccctgcccgctcgactttaaacctatttccccgccgtagctccgcccctctcccctcagcccgcccctctctgttactggctctcgctcagcgttctcggtggaagtggtttt

SEQ ID NO: 203039 - DNA, 212 bp, Homo sapiens
  chr12:56521403-56521615
  hyper
gtaggggattagggacgggatagacggggttagttttcaaacactttcattccaaatacgatcgtatcctttccttttgtaagggcaggcaggaaaaagttgaaggataaggaatgtgcttagagtatgaaaactagagaaagtcggcaaaagaacatatatatatatcccagaccaaatcctgccaaaccgaatgagtagagggaaatcct

SEQ ID NO: 203040 - DNA, 120 bp, Homo sapiens
  chr12:56552005-56552125
  hyper
gaacagcggaccccgcccaagtcattactaatgtagcaatcgtctgcataaacccaggccacggttcctattggctgagtcctctgagggtgacgtcatcgggacgtactaagactaggg

SEQ ID NO: 203041 - DNA, 196 bp, Homo sapiens
  chr12:56618060-56618256
  hyper
gggcgcgcccgggcggtgctgattggccggaggaggccagccgggggaaacttccgggaatgtccgcactcccgcgttccacggggcagcatccggcggcagcggagcctgtggctccccctgcgggctgctcagcggcgtgcacagtcctgccggctggcttgggtgggtggtgggctgcgggtaggggagggga

SEQ ID NO: 203042 - DNA, 59 bp, Homo sapiens
  chr12:56882380-56882439
  hyper
caagctgaggcgaagccggtgggggcgggaggcgctccccgggaacaccgtggggctgc

SEQ ID NO: 203043 - DNA, 168 bp, Homo sapiens
  chr12:57081172-57081340
  hyper
tggagttaggaggcggactggaagtacccacactcaagaaacccagacactggagagggaagtatgttgcggcgtgggcatggcttccttctagttgcctagcagtacctgcagctcacggcgaggtccgcgtggggctctcccaggagctccgccaggcacctggcg

SEQ ID NO: 203044 - DNA, 311 bp, Homo sapiens
  chr12:57504168-57504479
  hyper
caaactcagaagggaagcgcaaggtctgggatcctcgtccgcccgcttggtggcctaaactcgcttatctcaacccctatctgcccgagtcctctgattgtgggaccacaggatcgaaagttaaaacagcttctctgagttgcccaatgcgtgaatgtggcggtgggggcaggcggggaggtggagccagttcagcacgaggagggttaactcggcgccgccgctgggaaatctcagcgtctacagcagccaagcgtggagcagttttgagggggaaattccccctcgtctgggccaccatgaggtctaca

SEQ ID NO: 203045 - DNA, 224 bp, Homo sapiens
  chr12:57504779-57505003
  hyper
accaacactagctgaaaccatctcttggggaccatccacccagccaggggaggatcccgagagctccccccacgaatccacccccatgcactcatagaggcccccgcacccacctcggaggcaacccctcacctcggcaacccctctgctgtcttctccctttctcagcgggcacttccaggccccataggtctgtagctctgtccagcgagttcaaggctggc

SEQ ID NO: 203046 - DNA, 188 bp, Homo sapiens
  chr12:57619157-57619345
  hyper
gcttcctgggctggggcccccgctggggatggcagcagcagcggcggggcccgggcttgggggctccctcgggggcgcactggcggggccgcttgggggcgcgttgggagtgcctggggccaaagagtcacgcgctttcaattgccacgtggagtatgagaagacaaaccgcgcgcgcaagcaccgac

SEQ ID NO: 203047 - DNA, 115 bp, Homo sapiens
  chr12:57631921-57632036
  hyper
cctccagagcccgccctgtggagggcgcgggcgggagcgagctatgcacccgtctctgggatcgtcggggtacagggagggagagggcgctttctagggtccgcctccctttcct

SEQ ID NO: 203048 - DNA, 157 bp, Homo sapiens
  chr12:57632124-57632281
  hyper
gataatgagataaagtgtcagagacacggcgagaacaaagagacagagactcgctgcgatgtgtgtggggggggcgggggagcggggctgacgggctgttagagcctccagcagcccagccctcccgagagcccgcgcctccagggcccaggaaggg

SEQ ID NO: 203049 - DNA, 245 bp, Homo sapiens
  chr12:57634396-57634641
  hyper
atacacgccgccgcgcggctcacacccaggcacacgcctacgcactgtcactgagacacacatacctgcaggcggagacgcgatggcaacacacactccccgctggctcttcctgattttcacacatacacagacctgcaggcggagacgcacggaaacgcccccacgcggaggcacacccgggcaaaatcacccagatgggagctggggacggggaagtggacaaacccgacagatatagacac

SEQ ID NO: 203050 - DNA, 213 bp, Homo sapiens
  chr12:57635250-57635463
  hyper
tgtgtgcgcgcgcgcgcgcgctgagtagagtgggcagtggaggaggttggggtgccggttgtcttgtaccccagtaccggcccttcctcggatctgttttcaattcagtctgctccttggcccagacttatgacctttgcagcatgcggcagtatcatccatcacccaggcgccgtttagggggatggagggcgctgggagctcacatagggt

SEQ ID NO: 203051 - DNA, 188 bp, Homo sapiens
  chr12:57941136-57941324
  hyper
actggagcttgggcggggagcgacaataacgaaccttggggagctatttcatacagccttttctctcacttttacagcaagtcagtgaaagaacatttataattcctgtttggggctcccaggaataaaatgactagattaaatgatacaggtagtcatactgtgacacagccggggtttcaaaaaca

SEQ ID NO: 203052 - DNA, 131 bp, Homo sapiens
  chr12:57984705-57984836
  hyper
caaagccggaaggcggccactttgcagcaaagaagccctagaccttgggagtcaatcaggccagcccaggccgcaccacggtctcctagttgacagttcgaggggcctcgcgggccgcttgcttcgtcagc

SEQ ID NO: 203053 - DNA, 173 bp, Homo sapiens
  chr12:58158778-58158951
  hyper
cgacctgtgccttaccaaatgcaaacatctggtcccagtctcggcagaggcggccccagggcccaggcacaaggtggcgcagccagtggggcatcgccatggtcaacagcgtggacacaaacaccgagcccacagcgcggatgaaggtctccgtgtcgggtggcacttgagcc

SEQ ID NO: 203054 - DNA, 251 bp, Homo sapiens
  chr12:58159038-58159289
  hyper
gggcgcccccgacgcctgcccagctctgtcctgggactcaccttccagtccgaacttgtaaaattcccccgccacgtcccgaaccagggcgggcggccccgtgccacgtccccgctggcgcctcagacgccgcacaaggtcgcagactacgttgttcagggttccggcgtagcgggcggccgcttgaggccggaggaggagcggggccaggagactgcggagcctttgccattcttcgccttccctgcagg

SEQ ID NO: 203055 - DNA, 147 bp, Homo sapiens
  chr12:58159346-58159493
  hyper
tgaaggagcgcgttcggctgcggtggccaggagagggattgcgtctgcccccttggggtacggaaacctgcaccggcctgcgcctgtcttccagcccccttcctctttactcatttcctgccctcaggggccggggttcccgggtaa

SEQ ID NO: 203056 - DNA, 430 bp, Homo sapiens
  chr12:58166379-58166809
  hyper
aaactcagggaggcggggctcgttccacagggacaccacgacggctcgcggcccccagcctctaccccgctccggatccgggatctgagcgccggccgcggtgcccaggcactcccttggcgggccggatggcggaccccggcccagatcccgaatctgagtcggaatcggtgttcccgcgggaggtcgggctctttgcagactcttactcggagaagagccagttctgtttctgtgggcatgtgctgaccatcacgcagaactttgggtcccgcctcggggtggcggcgcgcgtgtgggacgcggtgaggaatgggctgcgccgggtgagggtccgtgggaggtccagatcccggactccgcctctcccatatggagccatcctcacgactgtctttttctctgtcttttctcccgtaggccctgagcc

SEQ ID NO: 203057 - DNA, 183 bp, Homo sapiens
  chr12:58176244-58176427
  hyper
accacacaagtttgttgtgagtcataaatggataatgaatataaatgcgcattgaaaataaacataaaatgttacccacatttcttgtgttgttgttttgtgacgactttatttcttggtttctgttattttacctggggtgggaggtggggggtaattcccgtatgaaatgtgtcgtctcaa

SEQ ID NO: 203058 - DNA, 217 bp, Homo sapiens
  chr12:58259123-58259340
  hyper
gaagtttgcggccaccgccggccgtgcagtctcccgcgcttcccccgccggagcgccggccccgcattcctccgggttgagcaacagcttttcctccgagggcggctggccgggcaaggcggggccgccagcgctggggccctcgcggggcgcggcccgagtgtccggggcctctggcagcgccccgggtttaagtggagcgcggccgccagaccct

SEQ ID NO: 203059 - DNA, 188 bp, Homo sapiens
  chr12:59313474-59313662
  hyper
ggctagcttagggcgcaggacttcatccccaatctctggcgtcgttactggcccccaaccctggtctacctgcagccagttaggacgcgccaagagcccacctgcgccgcccgcaaagcacgtgggagggaaactgaggcccggacagttctttttccacgcccacggagcgccgatcgcggcctggg

SEQ ID NO: 203060 - DNA, 59 bp, Homo sapiens
  chr12:59314100-59314159
  hyper
acgcccgccctcgcggtcgcgtgcgcgctcctccctcgcgctgcccggtcaattccttc

SEQ ID NO: 203061 - DNA, 271 bp, Homo sapiens
  chr12:59314189-59314460
  hyper
cccccaaacagcaggagggaaaccgaaaagaactgccaactgcaacagagttgcagcttgagcagcgtcggctcgccgaagccccttcttgtctgcaaaagaaactttttcgcctccaccccgcggcactgcgccaagtccccgcgcggcggagtagcaaggcgggcgggtagaggccgacgcgcgcccattggccgactcggctgcgggcgtccccgtggccacgtgacaataacaccgctccagccgggggcctacgcgcgggagaaag

SEQ ID NO: 203062 - DNA, 440 bp, Homo sapiens
  chr12:59989613-59990053
  hyper
ctgccttttggctttcttccttggtcaaaactaaaatccgaagtggagtgccccgagcgatagagaaagtgcctatagctttgacagccgcttggagcatgctcagtcggtctccaggcaccgggaggcggctcccccccaccaccccccgggccggcctccaccgcagcctgtccggcccccacccctggcgcgcgctcctccgcacccacaagggcgttcagcagccgcgcctccccttcccgccaccgcctccttctccgctggctgtggcgggcgaggacacgtcaggggccataaataaataaataattccattcacccgttgacagcgaggcgaatcggctgcggtttgctgggaacggagggctgcagcgcccaccctgcgccagagaccagataaagtaagtacagctggggagggaggggagaggaggagg

SEQ ID NO: 203063 - DNA, 449 bp, Homo sapiens
  chr12:59990544-59990993
  hyper
cagatgatcaggacaggaagaggctgtgaggggaagacgaaataccgggggatgggggggttgtctttcttcatttttggtccccaggaaggatggcaggggtggaagcagatggaaaactatatgcgggcgaggcctgagcccaggcagaaagggacctctgacttggcaagggttcaggagggcctgagccttctggtcttgctgggccactgcaccacattgggggcgccaggcccggtcaggtggcgccacaggctgcgagcccgctcacgtgcgaactgcctgttttctcagcggatgctgcatcgcggcgcccttctccacccccttttctcctctacttccgcgaaaaggattgcagactgccttggaaagggcggtcgtgcccagtgccactttcccggtagggctgaggagggacttctgtagttccaattccagggaaa

SEQ ID NO: 203064 - DNA, 175 bp, Homo sapiens
  chr12:62586338-62586513
  hyper
agcccctgctccactctagaaccctattccacccagcctggctgtccagtgagtacagagtgacttggctcccccgtatagtgcagcgagaatgcaggagaataggtcctgacactccaggttgagttaagcagtaaaatggaatggcagggccgggcggcgttgcctcgcctct

SEQ ID NO: 203065 - DNA, 274 bp, Homo sapiens
  chr12:62860192-62860466
  hyper
tattaacaggaggtagccactgatttggggccactagtccagagattcgaaatgaagcgggaggagacacgttaagattaatctacagggaaacaaattatttacaccgaaatacaatttaacacaaacatacgcaaagagatatgccaaggagtactcgggggctctgttcaggcacttgttaatgaaaacgaagcgaatcttgacgccttaaaccctgtctagcctacttgattccgggggtggggctgtgggaatcgctgcccacccggaa

SEQ ID NO: 203066 - DNA, 182 bp, Homo sapiens
  chr12:63026256-63026438
  hyper
gctgtcccctccgtctaaaaccctaagtaaatacccagtcctcccccagactcttctccacctgtggttcaggtgtctgggaagaaggccctgcacgcccgtccgcgcctcccctgcccgggggagccccgggtaggcagtggccaaagactctgtagaacaactcccgggagggcaggctc

SEQ ID NO: 203067 - DNA, 75 bp, Homo sapiens
  chr12:63327112-63327187
  hyper
gtcgggaaccaagcctgccccggggtatccgggccaccagaacagggtcagcatcaaggcgcccaggcattggaa

SEQ ID NO: 203068 - DNA, 51 bp, Homo sapiens
  chr12:63327326-63327377
  hyper
tccctggttcattaataaccttgaattctattctaaatgtctcctagtttt

SEQ ID NO: 203069 - DNA, 925 bp, Homo sapiens
  chr12:63327797-63328722
  hyper
ccggaatcggacacaagctcccaggcgcagtgacatctcctccaagcctccacccccataaactcttcatcacgcgggggcgtcaactatattttgggagggtgggggtacagatagcagattttccttatgtgtttcaaacttcagagcttttctgcccgttttttttccccaagtgacagagaccccggattcacagacctgtctcaccttagctttcccacgctccagcgctgccacccacccctccaccacccataccggggctggagacgccgcgtccttgggctgggggaagagggagtggggagaagagggaaatggccagtgtaagtaaagagctccccgccgaggcctggacgccggcagctagtgagagccctgaggccgagaagcagggagagaagagggctggaaccgtgcggggaagggccgcgaggagagcaggggcgccgccggtgtcgctgcactcactctgcgtagccagtggcccagggcagccgccgagtctccttgaggatgaggatggggcgggcgatgtggtcggcgctgcactccacctcgtcctgagacagccccaggaactctggccgcccgtaggggaaacgcaggggcaggtccgagcctccgcagctgccgccgccgtgctcggagcctgagctgccagccatgatgccgcccatgaaattggccacggcagatttcactcgagtgagcatattactccggcgcccggctgcagcggtgcgagcaggaggcggcgggggccgggcaaggcgcagcgcggggcatgcaggctgcggtgggcgccgggcgcacggcgagtcgggccactgggacgcgccgcgcgcggctcccagagcctagtgctgcagggggccgagccccggcctctcgtgcttagtgccgcggtggccgccgcctc

SEQ ID NO: 203070 - DNA, 261 bp, Homo sapiens
  chr12:63545006-63545267
  hyper
tattttttcctctccctacgtcggtgtttgtcctctgcatcactgtggagggggtggagctgggagactcgcagattcctcctcacagtaggtgggatcgtggcgctttcccgcttttcccttccaaaaacttggacaactggacgagtcatgccttttctgggctcgtagccgtttccacaagcttccctcactagccttcctcgctagcctccttaaccatgcatttgacttcaacaggcacgctaagcgcggtacctg

SEQ ID NO: 203071 - DNA, 109 bp, Homo sapiens
  chr12:63545586-63545695
  hyper
gtgtctcctggttttctctatggagactagggacttaaggagttttctctagattcctggggttttctgcgggaaaagcctgattcccacagcggggatggcggaaatt

SEQ ID NO: 203072 - DNA, 329 bp, Homo sapiens
  chr12:64237615-64237944
  hyper
gcacaggccggagcgcggtccgctcccgcgagcctggccccgcctggcggagccccgaggagccaccgcccgcagatcgctagccgggcgcccgcgaggcgcgagccgtgtgcgcaccctcaactttgctgccgccgggggcgcggctcccgcgtgcgtgtgcgagtgtgcctgtcactagcggcctcctgggggcagcagcggaaagggggacgcagagaaaggcagcctcggcgcaccgcggccagggaggcagaggcccctcgcggcgccggctctggagacctaaactccgccggggctgtgcccagggcgcgtctgagcgtcgc

SEQ ID NO: 203073 - DNA, 110 bp, Homo sapiens
  chr12:64238195-64238305
  hyper
tctcgaacaatggtgcggagcgccggcgcgagccccgcgcccgcccagcggccgtagaggaagtggccgggctcccggcgaggtgggcagggagacgtcccccgccactc

SEQ ID NO: 203074 - DNA, 98 bp, Homo sapiens
  chr12:64238524-64238622
  hyper
tctccaaggagaacgggttgtgaccactgaacaaaacttgcccattgaaagcaaacccggaacagctggataatgtccaccccgagccgattcaagaa

SEQ ID NO: 203075 - DNA, 111 bp, Homo sapiens
  chr12:64799099-64799210
  hyper
ctgtaaccagaaaaacgagtactttttgaaagtgctaattagttgtggcgggcgggggttgggggagagttacgttttattaaaccgacttgtcagcgtggtgttaaaagg

SEQ ID NO: 203076 - DNA, 396 bp, Homo sapiens
  chr12:64845175-64845571
  hyper
gcctgttgtgctgtccgtgggcagaagggaccccttcagaaagctattccttattgggaatagcggcttgagattttgactgcacgaatattgcaggacctaattttagtatttaagttttagttcttaaattcttaagtttagagttagatactccaatacggccgttttccaaaataccgagagggaattaaatgaacatttttacattaagaatttaatgtatttctgggtgatgggaaaatgaaaaaaacaatgtaaagtctgaattactgcgagacgataatctggctccactgcagccaaagtgggcccttaaaacatagaatccatccctcccagctctgccggccgtctgtgcctgccccccacgtgtcccacgttctgcacacctgt

SEQ ID NO: 203077 - DNA, 58 bp, Homo sapiens
  chr12:65002989-65003047
  hyper
gggtatgtgaccacgttcagatcaacagaacgcaaagcagaacggtccgagtactgcc

SEQ ID NO: 203078 - DNA, 217 bp, Homo sapiens
  chr12:65174361-65174578
  hyper
ggtagctcagtggcgtggcagtctccttctcgcccggtccggagcggaggggagcggctcaggtgccggctcgggggaggcccgggcacctcggggatccagagcccgctggcgccgcgcccgggagggcaccaccggcgaggacgaagccgcgcctcctcccggaactggccggcgccgcgaggcgggaggagcagcgggagccgggcagccgcgc

SEQ ID NO: 203079 - DNA, 35 bp, Homo sapiens
  chr12:65220439-65220474
  hyper
cttaatattccttcggagaaaaaaaaaacttatct

SEQ ID NO: 203080 - DNA, 203 bp, Homo sapiens
  chr12:66122570-66122773
  hyper
aggagctgtcaggctaatctgaggacatttagggaaagccaataaactgtcacgaacttaaaacaagtgaggtttctcgtggtttggtcgaaattttaacacttctcctctcctacccttcacctcttctcctcaaaacacttttttttcttttacaataactgtaaatgccagctctaaatttccctccaatctgggaaagt

SEQ ID NO: 203081 - DNA, 198 bp, Homo sapiens
  chr12:66216666-66216864
  hyper
aaaacctttggttcctgttagacccctccctccccagtcagctgctgggctccatccggagggatggaggctctctctctccattacagctaagcgttcccagacccagcagaaaccctgggttcctgcagagcactcaacgtgcagcaaagtgtcccagctctgcaaagggcagctggaaatggatttaaaatggca

SEQ ID NO: 203082 - DNA, 85 bp, Homo sapiens
  chr12:66216924-66217009
  hyper
cacagcggaacctggcggtgcctaactcctgcttagggctgcaaagtaggcgtttttattccacggtggtctgtatctttgaaaa

SEQ ID NO: 203083 - DNA, 136 bp, Homo sapiens
  chr12:66217366-66217502
  hyper
tggggagggaacttcggttgcctctagtctttcctggagaaaaaagttcaatgaagaagctggggcgctctgtgtgtgcacattgtttgcatgtgtctgcgaatgtgcatgtctatctgcgtgcctgtgtgtatgt

SEQ ID NO: 203084 - DNA, 237 bp, Homo sapiens
  chr12:66217650-66217887
  hyper
gagggcattccgaggcggagtacggctgtcaggggacctctcccactccactgcagtcccttcccactcacagtgaaccggtgcgctgcctgaggtgcagcctagacgcttcctgcaaagtgttggctcggcacggtagaggcgcaggtaaaggccaagccccgaaacgtggctccgggacagtcacgttcccgcgccttcccaggacaactgcccaggggtgacctcgagaggcgg

SEQ ID NO: 203085 - DNA, 570 bp, Homo sapiens
  chr12:66217920-66218490
  hyper
tccccggcctgtccctttaaccccgccgccgggcgggagcacgtgagcggggctccgggtggcacccgggcgccgccgccgccgaggcagttgtatttcgaacgctgcctctggctagcagccaggcgccttggctcggcggtccgcctggcctccctcctcctcatacttttcttcctgcgcaaccccctcccctttatccgcccacgattagaggtgggcactccccccaccaccaccccctccccaagcgcaagcgcgtgcacgcacacacaccacacacactcacactcacacacactcacacacactcatcccacttgaatcttggggcaggaactcagaaaacttccagcccgggcagcgcgcgcttggtgcaagactcaggagctagcagcccgtccccctccgactctccggtgccgccgctgcctgctcccgccaccctaggaggcgcggtgccacccactactctgtcctctgcctgtgctccgtgcccgaccctatcccggcggagtctccccatcctcctttgctttccgactgcccaaggcactttcaatctcaatc

SEQ ID NO: 203086 - DNA, 233 bp, Homo sapiens
  chr12:66218550-66218783
  hyper
cagggtggggggaagaggaggaggaattctttccccgcctaacatttcaagggacacaattcactccaagtctcttccctttccaagccgcttccgaagtgctcccggtgcccgcaactcctgatcccaacccgcgagaggagcctctgcgacctcaaagcctctcttccttctccctcgcttccctcctcctcttgctacctccacctccaccgccacctccacctccggca

SEQ ID NO: 203087 - DNA, 361 bp, Homo sapiens
  chr12:66219327-66219688
  hyper
gccccggggcgccagcaaccctccgggcggggaggtggggagccgcggcgggcggcccggggaaggcgggaggtggggtcgggcgaagcgcgtcctcggactttcgctattgtgcacggccccgagtggcgcggtgtcgcccagtgactggaagcgaccgggatccgacaaacccgggctcgcaggcgctttccgagttgcttttgcaactgcccgggaggaaggaggtgccggggacccgggcgcttcggccgatctgggctgaaggggctagagtcttgggggccggaggctctttctcccgcctcccggggctgctcgcgggtcgggggctggcgcgccgcagccgcccccttggcgc

SEQ ID NO: 203088 - DNA, 140 bp, Homo sapiens
  chr12:66220194-66220334
  hyper
gagaacatttaaactccactttctcgggctttaaaacttgctctctgcttagtcttaaatcgcttccttcatggcaaacacgccgattagaaaataatcctagagtcccaaagttgtccgagagcaaggtggggaaactg

SEQ ID NO: 203089 - DNA, 34 bp, Homo sapiens
  chr12:68617124-68617158
  hyper
aacaaccaaccagagcggcgccacactgtcccac

SEQ ID NO: 203090 - DNA, 297 bp, Homo sapiens
  chr12:68758756-68759053
  hyper
cattcttttaagatttctatcgcctcagtattgtcgatttccacatccacagcctaacaacgtggtgcaatcgccctttgcgacgccgcagaccaacagacggatgctgccctgctgcagtttcacagcacaccgggtctttccgcttcagctggacagaggcccagccaggccgtagggaggattccgaaggtctctctgcagaggaccggcctctcagaccgagaaggctccacccaggcaggaaaggacactgtatgtggggcagtcggcctgggccccatggctcgtgtttgt

SEQ ID NO: 203091 - DNA, 122 bp, Homo sapiens
  chr12:68759131-68759253
  hyper
tgaggagggctgcttctgcctcttggtgaccacgccctttcccaggctgggcccacaggaagtctggccgggaagggaggaggcactgcaagctgtgggaaccacaccggctccttcactgc

SEQ ID NO: 203092 - DNA, 39 bp, Homo sapiens
  chr12:69241507-69241546
  hyper
caggcgtgagccaccgcgcccagccgtatctcctttcaa

SEQ ID NO: 203093 - DNA, 122 bp, Homo sapiens
  chr12:69326531-69326653
  hyper
tccatcccttcctggcggtggtagttgaaatccagcgcagctaccaaaggcagcaacagccctagccagaggcacgggaagtccatgttctagagatgaataaaaataagaagaacctgaga

SEQ ID NO: 203094 - DNA, 199 bp, Homo sapiens
  chr12:70637717-70637916
  hyper
agcccgctttagacggctctgccgccttcccggcagctggtgctgtctgtggcttcttaccttctctcaatacacgtatatcatctgccagttatgtgtatttctgttagtgtgtttgcaagtgtcagatgggagacactggactggctaacgggtgtcaggatcctgcaggccctgggataccgaaggctgtgcatgg

SEQ ID NO: 203095 - DNA, 480 bp, Homo sapiens
  chr12:70760476-70760956
  hyper
ggcggggggagcacgccagccgccgagagtggggggcgatggcgaagctccgggtggcttacgagtacacggaagccgaggacaagagcatccggctcggcttgtttctcatcatctccggcgtcgtgtcgctcttcatcttcggcttctgctggctgagtcccgcgctgcaggatctgcaagccacggaggccaattgcacggtgctgtcggtgcagcagatcggcgaggtgttcgagtgcaccttcacctgtggcgccgactgcaggggcacctcgcagtacccctgcgtccaggtctacgtgaacaactctgagtccaactctagggcgctgctgcacagcgacgagcaccagctcctgaccaaccccaaggtaagaacgccccgcgcacccaggggctccccgcgagggaggtttggaggcagcgtcggtgttagactccgcgcggggagggttcggcgtgtgctcgcattgctag

SEQ ID NO: 203096 - DNA, 52 bp, Homo sapiens
  chr12:70761129-70761181
  hyper
cctgcgcctaccggactgggtttggagaagtgcaaggagccaagaaagttaa

SEQ ID NO: 203097 - DNA, 97 bp, Homo sapiens
  chr12:71004045-71004142
  hyper
tccggctccgcggggctctgcctcctcctcctcccgtactctcccttttccccagtctgtggttctcgacccagtcgccttagccacaattagtgct

SEQ ID NO: 203098 - DNA, 207 bp, Homo sapiens
  chr12:71833003-71833210
  hyper
tttagggcaaaagcgagccagacagtgcggcagacgtaaggatcaaaaaggccacctatcattcgccggggacgcctgcctccttaccctgataacgtaactatttctctgcataggattttagtttttgtgtttttgttttgttttattctgtttaatcacttcaagtatctcatccattatttgaagcgggctcggaggaaacgt

SEQ ID NO: 203099 - DNA, 43 bp, Homo sapiens
  chr12:71833270-71833313
  hyper
tcttagatctgggtctccagcacgcatgaaggggtaagggtgg

SEQ ID NO: 203100 - DNA, 180 bp, Homo sapiens
  chr12:71833930-71834110
  hyper
ctcccaggtctggtgtgttgctgaggggctgccccacacactgtcattgcgagcccgacggcaggatgttgctcagggtggactgctccgacctggggctctcggagctgccttccaacctcagcgtcttcacctcctacctgtaagtacttccccacgtcactccgggagagagactaa

SEQ ID NO: 203101 - DNA, 499 bp, Homo sapiens
  chr12:71834290-71834789
  hyper
cgagtgcaacccgggaaagcgctgctgcgccgcagcttcccagtccagcgctagaaacatcgcagggcgaattcctgcaaatgcaggcatttgcgtgcggagtggacatttgtgacccagagcctggtacccaaaggcaggctgccatctggtccccgccccaaccgcctctctgcgtctagtcgcattccacgaaaagatggtctgtagaaagtttccccaaaggagaaacaacttgcccagctccaaagggtttttagtctgcatcccttgcactgtgacgtgatgtaacctttttggggttttttcctcttttcctcccttccttcctcccttcttccttccttccctccctcctttctttttattttctttcttttttaacggcgtgattaaaatgtggcaaccacaaaccccgattagagctgccagaacgttatctttacctttggctgcccgcgccgccctttgaagtgcccgcggccgctgtgtaatcttt

SEQ ID NO: 203102 - DNA, 116 bp, Homo sapiens
  chr12:72332525-72332641
  hyper
tgactgtggccatcggcaaccagaaatgagtttctttctaatcagtcttgcatcagtctccagtcattcatataaaggagcccggggatgggaggattcgcattgctcttcagcac

SEQ ID NO: 203103 - DNA, 77 bp, Homo sapiens
  chr12:72332696-72332773
  hyper
atctccgccagcgctgctactgcccctctagtaccccctgctgcagagaaagaatattacaccgggatccatgcagc

SEQ ID NO: 203104 - DNA, 60 bp, Homo sapiens
  chr12:72666465-72666525
  hyper
aaaaagaagaagaaaaagaagaggaagaagaagaaggaggaggaggaggaggaggagggg

SEQ ID NO: 203105 - DNA, 175 bp, Homo sapiens
  chr12:72667682-72667857
  hyper
atgaaaagcttgccaagttactgtcgagggaaaatacgtggcgctgaaggccaagacaacagcgcatccaggttagcatgtcagggcaggtcagggacacaccgttctccacccccacccacaacatgcccatcttccctgactattagtctcctgccaggtgcagagcagagga

SEQ ID NO: 203106 - DNA, 84 bp, Homo sapiens
  chr12:76954040-76954124
  hyper
agtggcacattaaccgtggcatttaatttactgctttcctcattagaggtttttttttttttgaggaaacggtgtatttcaatc

SEQ ID NO: 203107 - DNA, 114 bp, Homo sapiens
  chr12:77272744-77272858
  hyper
caggcggagctagcgaggctgggctggagggagggtccagggagtccgagatcccaggcgaagcgcgcgccggtgccttttaaagagcgctcggtgggcgcggcctgtgtccgc

SEQ ID NO: 203108 - DNA, 341 bp, Homo sapiens
  chr12:77718709-77719050
  hyper
cgggctgctaggtggcggcggcgcggggcggggaggcgcggcccggcggaggagggaagaaagagcgagccgggccgggagaggcgccgcgcccggtcccgcgcccggtcccgcacccgctctcagcggcccaagcagtttctttctgggtgacaagaatgtgcctcggttggtttttcttttttttctccatctccttaagacgatttccatagtaacctgatcaagtggctcaaaatcgcaaacctgaggatttccgcggcccgccggcaagacctcggccaggtaacgctgcgatctcctcctcttccattgcaaaccgctgcgctccttgcaaagtt

SEQ ID NO: 203109 - DNA, 165 bp, Homo sapiens
  chr12:79257549-79257714
  hyper
tgctctggcaaggggtcgagagagatgggggagggaggtggcaaaaaataaaaatgaaaaaataaaaaagcatctccaacaatgttgcacttgacccaagtgtacaaacttattggtcgctgcaatggaaactcccagtgcactctccacggcctggcagccgcc

SEQ ID NO: 203110 - DNA, 88 bp, Homo sapiens
  chr12:79258209-79258297
  hyper
cattcctgagtctacctagaggttttatcagacgcccttgattgtgtctccttgggatctgttcccctcttacttcaccccctccccc

SEQ ID NO: 203111 - DNA, 577 bp, Homo sapiens
  chr12:80084512-80085089
  hyper
accgccggtccgaggtccccgtcagctacaaccccactcccaaggcgaggcgcggagctcctagccggttcgcagaggaggcggggacccagctgtcccgccgagcgtggaaaggaccgggtgtgagcgagcgccttaccttggaggagcttgtaggggacgaggcgtagggctgggatccggctcccaggtgtgccgaagctggcgcgcgctcttccgccgcgcggaaagtgccgcggcaaactcgcggtgcggagctccaggcaatcccaggacaggagggagggagaagaaggagggagggagggagggagggagccaggggcgggaagggagccgagcggcgccgaagcacgagcggaaaaggccgaggcggcgcgcgaggggcgcggcgcgcggtgggaagggtcgtggccgctgacgccccgcccccggcgctcaggtgcgcggcgtcgcgtccggcccgccgctgcagcctgccctgcgccagccgtcctctgccccgctcccgccgcagaccacagcgcgcccgccgcgctccgcccgcggcctgcgagttagacggcacattcctggg

SEQ ID NO: 203112 - DNA, 385 bp, Homo sapiens
  chr12:81330352-81330737
  hyper
gggactagagggtgtcctcctctgcagagccgtaggactcgagcgccttcatcactggacgctggagccaggaaggaaacccacacactcagggacaggtataaccccacaggggtgcaccagtgaggccccgatcgcagcggaggactccatccctgagcttgtgagggcgtcctggggaggaagcgaacactttccccgttcaagtcagagagcaggactcactgggtggcaggtcagaagttgaattttaacccgacctgcgctttgtccccgcgccttccgcagcctgggcgccgcggtggcaccgagctgggagaggacacgagaggctggcgcgggagaagccgagagttgctatcgaccgggagctgccggcggcggg

SEQ ID NO: 203113 - DNA, 312 bp, Homo sapiens
  chr12:81331319-81331631
  hyper
cctgcctgagcgcgtcccatgtcccgttgggaattggcaggcggggaagggaggaggggagaggggacgcggtggcctggcgagcgagccgctcccttacctctgtccagggtgagcggctggaccactgtcaatgtcgccatgtctgccgtgggagccgaagtgacgctcggcttcagcatcagcaaccgctcgtagtgagaaaaaaaggaggagattgggggcgggggtggagagggaagacggaaaggagggggaggagggggaaggaaggaaggtggtggtggtggagaagaaagcttgggtgggttg

SEQ ID NO: 203114 - DNA, 158 bp, Homo sapiens
  chr12:81471297-81471455
  hyper
ggtcaggaaatcccggagcagtccttgccctggagctgcttgtgtttttagtaaccagggactgagctgattttgaaaaatcaatcaatcaataaataacaatcaaagagccttgcctcaacgcaccgagttgctggtttcctgcaggtcagaggcga

SEQ ID NO: 203115 - DNA, 59 bp, Homo sapiens
  chr12:81472132-81472191
  hyper
caaagctgccgagcagatcagctggtacaagccctggaccaaaacgctggagaacaaac

SEQ ID NO: 203116 - DNA, 290 bp, Homo sapiens
  chr12:82152215-82152505
  hyper
gatcaatgacaaccgcagtctccggcttgaggagaagggaggctcacacccagcactcctggaccatttccctagcaacgggaggagaaaggcagctcagacacacgcgtgccccggcgccctcccggaacgtgccccggcccggtggcgtggcaggagctcggcatcttcccgtggctccgtcagcagccaaaaggagaagcgtccatcggaaaaatggcatattacaaattttgctttgggaagcaaagctcggttcagaccattgtcaaaggaggagagggggaggc

SEQ ID NO: 203117 - DNA, 85 bp, Homo sapiens
  chr12:82152907-82152992
  hyper
ctggaaaggcaaacatcaccccacgccgtcccccggccccccttccctcccccccgccgcccccccgccgccacagcacacacac

SEQ ID NO: 203118 - DNA, 125 bp, Homo sapiens
  chr12:83080816-83080941
  hyper
ggcggccggagtccgcccgagcgacaccggagcagtgcgcccgggaggcggcgaggggaggcggttcgccttgtccctcccacccgcgcctctttctctctcttcctccagctggtcccagagcc

SEQ ID NO: 203119 - DNA, 390 bp, Homo sapiens
  chr12:83080990-83081380
  hyper
cgagtcccactcctcacctaggacgccccaaactgccatgggttagggtggggatcgcgacccgcgcgaaagaccagccctgcgcttccgccgggggacgcggagcccaaacgccgctcaccgcttgcgggcgccgggcatggggagtgtggtgtgagcccgcacccggggaggacgcaggagctgcggagacgggcgcgaggaggaggagaggagtcgtggattggaaggacccgagggagggagggtggggaagcgagggaaaagtgaagctgggaggagaaggcggcggaaggtggagattgatgcttctgttttttgttgccgctgctgccctcgcgctgggagccgagccggagggaaggcggtggagagatgattgcagagttg

SEQ ID NO: 203120 - DNA, 173 bp, Homo sapiens
  chr12:85305245-85305418
  hyper
tttcccagctagggaggaggatggaaagggaaagcgggacgctggagagcgcgagcctgggggctttgcttcctaaaacgcacatcaaaggctgcttctcagctcaggaaaaataattcccgttcccgcagcctgtgccactgggtgggtcatgcctgttcccgaacgcctcg

SEQ ID NO: 203121 - DNA, 179 bp, Homo sapiens
  chr12:85305478-85305657
  hyper
cctgtactcaataccgtcttcttcccagtcacacacagaccagcctagtgaaagaaaggtagaaacgatctgggtttctaactgcttcccatcttcttacagtcccagcagcaccaccctcaccgccacactctcaaattccaggatgcgcagaaacacaggagccgtgatttctccag

SEQ ID NO: 203122 - DNA, 254 bp, Homo sapiens
  chr12:85305980-85306234
  hyper
ggatgctgtgggcaatttccacgacgggaagaaaggatggcggcacgtttcaacccatgtgcttccccttacatgtgcagcctgtcgccccccaccctgattgtacagagatgcagagttagacggttgcccgcccagcccagcttctccctcccagggcttttgagctgccctccctcctcccaccccaggacgcagcgagtccttcccggcatccatccatcaattcgttcccggtgctggtgcccaggctc

SEQ ID NO: 203123 - DNA, 160 bp, Homo sapiens
  chr12:88973384-88973544
  hyper
atggaaaaaggtgcgtgcattgtggaggtactagagctctttagagcccacacagagctgcaaactaggcagacaccgccgagagccaagtttcccgggcaggcgggcaggttcccgccccgccgagagctgccgcttaggagttccgcgttggcttcgc

SEQ ID NO: 203124 - DNA, 577 bp, Homo sapiens
  chr12:88973582-88974159
  hyper
ccggcgcccacctcggggctacacaaataaatctgagtgagagagctagtgagggtggcgcgtggggtgctgtttcataatctcctggaatccacgggaaaaccgtctcctatgcaaagacatgccttcccgtgataacttaacattccatggcccaaaagccaatctttccaccagacgggaattacggtttccgactgacagctcaaaacttaactgctgaggctccaaacttgacactggctccctctcagcactcccactccttttctccctggctcacccggctcggctcgggatcacacaccacgccggcctcccccgcatcctcttgtctcacccggcaggcacagccctgcacgccccagctgcaagtcccagggagcgccggcttccccggggcaccgggcgcgatttttcctggagagcctgggagctcccgggcgcgccctactcacttgtgtcttcttcataaggaaaggcagcgctgcgatccagcacaaacagtggtgtggcgactccgtttagctgttctggagctccagcatattgcacgaacagcggcggcagatagtcc

SEQ ID NO: 203125 - DNA, 177 bp, Homo sapiens
  chr12:88974253-88974430
  hyper
tgctgagccgccggcgcttttatacagttcccgcccgcctgctccggacacgcctccttcccttccggagcccggggtaggcgagaagcaggcaagggcgcggagggaagaatcgggagggcggccagagcacggtaaatgccccagaagtttggcagattaggccaaccttgtccg

SEQ ID NO: 203126 - DNA, 49 bp, Homo sapiens
  chr12:88974679-88974728
  hyper
accctgcctgccttagagaaataaagtttaattgcgatctgtagttagg

SEQ ID NO: 203127 - DNA, 325 bp, Homo sapiens
  chr12:89744672-89744997
  hyper
gaagagtcagagctgatccgcaggcccccgagccccagcactggcaacggcggcgagctgctgctacacgagccgtctagattggtctcgcaatgcagggagaactcggcttggaacttactgaagccacctgccagaacgagaaaagcaatcatctaacctgagaagccgtagtagttttcacagcttgtaagaaccgcagcccggcgcaagaaacaccacaagcatcctacgaaccccctacatacagaaccatctataagagaaacacactttaaatgtgcaccatcgggaatggaacgaacgggcccgcctcgccagggaa

SEQ ID NO: 203128 - DNA, 449 bp, Homo sapiens
  chr12:89747142-89747591
  hyper
ccccaccaccaccatcgcctgctgggaggtcgcgctggttaatgatttctgggcaaggagctcggcttctgacgggggagccggtctggcggggctgcctgagcgaggtgtgctgggacgcgccgggccgggccagcagtccccgccatgggcgaggcgtgaggaagtcctcccgcaagacctgcaggctgcgggggctcggcaggggggctcgacgattggttacagttggcagggaggcatgtcagagggggcctccccagccctctcctgccgccgcctcctccctttgtccagcgccgggcactccggggagcaccagccgcgcctgcgcgctgcgctccctgccaccgccccgccgtccccgtctccccgcttgggcacggggctgtgcgcgacgcagtggacgggtgcggggctcagcgagggactcccgggtccatagagat

SEQ ID NO: 203129 - DNA, 421 bp, Homo sapiens
  chr12:90101338-90101759
  hyper
gtggctgtctgcagcgctctaacccaaagaaaaggtaaatatcagcctgtcgaggagggtcgagccctccaagtacctgcagacccctttaacccacccggacgccctgccctcccctccgagccaagcagcgcacagggtgcgagcactcccagcgctgcgagtcccgcagaaaactggtgaatgaaatgcgcacagagaccaacctggctggtgaccgcggcgcagaaccaggggtcgctaaccagcttagccacaggattctcccgcaggatgggataaagagagcacagcccccaccccacacccctgccactggaacgcggtcctcctacagactccttcctcaaaaagggaggtgggggcgcaggcttttttctcttaaactaagtgaataaacacgaatcggaaacaactgtga

SEQ ID NO: 203130 - DNA, 271 bp, Homo sapiens
  chr12:93966030-93966301
  hyper
gggccctcgggctgcgccaggtgtgagaccggaatgccaatttggggaatctctcctgttctttcctttttaattttttctacttgtccttgacaagggcctattcccactggatctgcaggtgactatttgctcttcctaggtcgccagtctttgatttcagctagtgaccctgggcgggaagacaccctgttcaccctcctcctgacctccgccccccacctcttcagccaactttatcttggatctctgctctctttatcttttctct

SEQ ID NO: 203131 - DNA, 65 bp, Homo sapiens; identical to SEQ ID NO: 49916
  chr12:93967274-93967339
  hyper

SEQ ID NO: 203132 - DNA, 64 bp, Homo sapiens
  chr12:93985620-93985684
  hyper
ttattttaatcttttcacgtagtcttaagggtctcactagaccgtatatgagaatgtggccagg

SEQ ID NO: 203133 - DNA, 420 bp, Homo sapiens
  chr12:94542668-94543088
  hyper
ccgcccgcgtctccgttgccgcgcgcctgagccgccgtcgccgccgcgcgccctgcccgggggcggcccccccagccccatggaggtctcccggaggaaggcgccgccgcgccccccgcgccccgcagcgccactgcccctgctcgcctatctgctggcactggcggctcccggccggggcgcggacgagcccgtgtggcggtcggagcaagccatcggagccatcgcggcgagccaggaggacggcgtgtttgtggcgagcggcagctgcctggaccagctggactacagcctggagcacagcctctcgcgcctgtaccgggaccaagcgggcaactgcacagagccggtctcgctggcgccccccgcgcggccccggcccgggagcagcttcagcaagctgctgctgccctaccgcga

SEQ ID NO: 203134 - DNA, 100 bp, Homo sapiens
  chr12:94544052-94544152
  hyper
ttagactcaaaactctagtggctgcatcccattgccatccttccctgtccaaacggggacgcttgtttggggctgagtctcctcgcgcagcccctctttc

SEQ ID NO: 203135 - DNA, 34 bp, Homo sapiens
  chr12:94544417-94544451
  hyper
cccctggcgtgagccggtgcgagggggcggtgcc

SEQ ID NO: 203136 - DNA, 153 bp, Homo sapiens
  chr12:95397472-95397625
  hyper
cgcctcccgggtgcgccgagcaaaacccaccggatggaagctgccactcagccgcaggaagcccacgcccagaaggttctcacgcgaacgccagacgtggtggctctgcgcgtgcgcagagctaggtcttgcctacgcggtcatgttctggct

SEQ ID NO: 203137 - DNA, 88 bp, Homo sapiens
  chr12:96183452-96183540
  hyper
ctcaatgcaagcccggggtgatcaccacctatcgtccaagccaggagtcccactgcgttccagtcactgctccggggagagggcgctc

SEQ ID NO: 203138 - DNA, 109 bp, Homo sapiens
  chr12:96183926-96184035
  hyper
cagcgctctgcgctcgcagccctggctcccctgcacccccgagtcccgagatgggttagagaagcagcgagggaaggggtgggggccccgccgcgtcaccacccacctg

SEQ ID NO: 203139 - DNA, 72 bp, Homo sapiens
  chr12:96184965-96185037
  hyper
gcgaaacaggctagcgcctacttcccacatcccccagcgaaacaagccctccctcctcctccagccaccccc

SEQ ID NO: 203140 - DNA, 219 bp, Homo sapiens
  chr12:96185121-96185340
  hyper
ggcgttcgccgcttctctgctgccttttgcgggggtagggggatgtctcggctaaacaatcgctgcctacatgatccgaaggtgtgcccactttggtgtaagaggtattgcctaactcaaactcaaggtgctgaaagaaaagggtcacaggattagctagtcggcagtgtaagaacatcgttgtccagaggcagggcaagggcacgacaaagggaactc

SEQ ID NO: 203141 - DNA, 122 bp, Homo sapiens
  chr12:96252231-96252353
  hyper
cagtgcgtttcgccgcccctagtctagtctggctagcccccaattcctttaaaaggggttaaaacgggtgttgcagaagagagaacactcaggtagaaagggcctgcggcagaggcgccccc

SEQ ID NO: 203142 - DNA, 114 bp, Homo sapiens
  chr12:96336966-96337080
  hyper
caggtttattactcgttgccattcttgcaatgattaccgcccccgttgctgtggttgggggaggcgagcaaagggcagcggctgcgagcgcccgcccccgccccaccctcccag

SEQ ID NO: 203143 - DNA, 646 bp, Homo sapiens
  chr12:99287504-99288150
  hyper
tcttctcaaactcacacctcagttgctcagagaggagaaatgcagcgaggactcgccttcctggccagtctctgaaaacgcgaaaccttcctgagctgtccatttgttttaggggctgtttataaacggctggttttcttggaggaaaaataaacaaataaatacggggcgatggcagcatcctgataaacacaggaccttgtttggcttttggcaagttgtaacctggagtaaaatcacatccaagttacaagcacgcaaattggaatttcgctggaaacactgacccgaccttcaccgaagcagcaaatcgcagtctctgctgctctgctcctgctctccaaggcttaacattggaaagtccatgcccacgtccccctctaattaatcaatgtagaaagaaatacgagggaagagagagggagcacactccacaccaaccttgccagcttctattcttcctgctattccttaaaggcgatgcacagcgcacctggaaattacgtggacttggcatggctttttaatattaaagacaaacgacctttggaaaatatacactgttaaagtcaaaccatttggagagacacccagcaatttacctcctcaaactcctcggaaccccaagaatgaggaaaggaaatgg

SEQ ID NO: 203144 - DNA, 165 bp, Homo sapiens
  chr12:99289349-99289514
  hyper
ggcagtcctcaacttgtgtgcgccggtggccctctcctgtgggacttgcgttccagctgttctcagagcgggtatgatcggcctccagtagacttggagggtcacgggtgagattttgataaggttcaaatactcctcactcctgcctccggtttccaccaaagt

SEQ ID NO: 203145 - DNA, 651 bp, Homo sapiens
  chr12:100967341-100967992
  hyper
gagcgcccacgggtcgcgtgcttcccggcagcccgggggcggggcctcagaccacgcccccgccttatgattggtcccttcgaaacaggcggcggccagcggctactgaccctgaggcccaggcggcggcggcagcggcggcggttggtcaggggcgtgttggccccgcacagattgagccgagttgtcgccccgctgggagaagtgaccctcctgcgcctggtgagtacttccctgtttgtcttctcttttcctggcgaacttttacgcgctgtctcggggcctccgcgcctcagcctgagggctccaggagccccccgctctctgaggccccgaagctgaggtttgttgggtctcccggctgcgggagccagtacgctctgcgtttgcctggctgcggcagtcgcgtgctctgattggctcctggggccgtcaaggtgacgttgcgcctgccttcacctgtccacccaagtgcggagagaggggcgacaggtgtgcggggcggttggggctgctggtgtgggcgagctcagctggggaggagggatccagccgctactcgccctgctttaaatccagagcggtatcagagcccgaaggtactgtgggatcttcaggggcaccctcatccctaagcgcctggcacttaga

SEQ ID NO: 203146 - DNA, 603 bp, Homo sapiens
  chr12:102455400-102456003
  hyper
taagaggtagggctagctatcgcaaccggcgtgtgtcgccggcggcagagagacaagcgagatgggaagcgacagttgggagatgcacaccgtctccttaatcagctcaggagggaccccatttcaaggtggactgtggggctctccctcctgaggccccacaggcctgtcacaagggcccgaggccgtgacagggtggggactcggaaggtgggtgtctccccggaaagctgcgtcttccccatcctcctcccggctcgtcgggagtctagcaccgtcttttacaaaccttggtcaggtctatgcctgaccccatgagaggaagcccgtcctcatccatctcctcagcgggcggtggaccccgagttcacccacaaacccctcccagatggggcccgcccaacccggtaatcacgtctcaactttccccccaagtgcccgcctccggggcccttcccgccggaagaaagcttctccgctcactaatcactcggcggcttccggagagcccgcctcctcgctcggcattctgggattggtagttttagtccagattgtgacgtcaatttcggggtggcgcgcggtggtgcaaggatgcagtta

SEQ ID NO: 203147 - DNA, 121 bp, Homo sapiens
  chr12:103311039-103311160
  hyper
gcgtggtgcatctccgcacagtaacgcccctcgtgggcgttgtcctgacgcaggaggccagggcagcctgccggatgctccaggtcacctgcccaggacgggccggaggggaggggctgag

SEQ ID NO: 203148 - DNA, 204 bp, Homo sapiens
  chr12:103311290-103311494
  hyper
cctgggaagcgagttctctgcaattggactaagcctgcgaccgtctggtataacaattatatgaataatccgccccccttacccccagctgaaacagtcaggattctcatttagatttttgttgttgttgttttcccttctgttaacctctaagcacactgccttgctgtgcgctgacttcagaaaactacagctagagggcac

SEQ ID NO: 203149 - DNA, 116 bp, Homo sapiens
  chr12:103311495-103311611
  hyper
tgaacgctgagcacagcaggtaaagagcaaatgtaagagcgatctgggtttaaatccagcctggtgttctccagctattcgcacaactgctcctgaagctcggaaaagagggtggt

SEQ ID NO: 203150 - DNA, 272 bp, Homo sapiens
  chr12:103351144-103351416
  hyper
cagcccgccccgagcgcgccgcctgtttattcagccgggagtccggcacgcgccaggcgcacgcactgcaacaacaaacccagctgaatggagagtttgcaaggagcgggagaaaggaacgggagggggggagaggagaggaggagggggagtttagggagtgggtgggaggaagaggtaagaggaggggggggagtgggggctgcagccgctcgctgcagcagcggggagtggggggcgaggcggggccagggctgcgcgtggggctgggt

SEQ ID NO: 203151 - DNA, 212 bp, Homo sapiens
  chr12:103355123-103355335
  hyper
ggctcctcgctcgccgcctgcattacttgcagattcagtttgcgtgtctccagccaagcggaaagccgagcgcaaaatgcatcttacaaaacccaacaaagaacgggtagccagcacgtcttccagagttaaaaatctagtctgtgttggtacatctataccatttagtggcacagaataatcattttttaaagccacgatgcgcggagcac

SEQ ID NO: 203152 - DNA, 73 bp, Homo sapiens
  chr12:103890025-103890098
  hyper
tggaggtagtaatccccagaaatcctgaaattcccccttccacctactcatctgcctcgaattgtaaaccatt

SEQ ID NO: 203153 - DNA, 268 bp, Homo sapiens
  chr12:104235216-104235484
  hyper
atttcagggtggcgcgggggtggccgtgtggtgtggtggcgcgcaggccacatgggatggaatgatgaggtacgaccccagcgccgcccgcccagctccgccgcaccttcgtcctgccttctgggactgacccccagctctggccacaaggacagcgcccctcccaccccagctgctctggccccggccctagaaggtgacctctctccgcattaatggcctctggcagtctaattaatggcagtctggacctcccctggatcgtggg

SEQ ID NO: 203154 - DNA, 213 bp, Homo sapiens
  chr12:104359127-104359340
  hyper
atatccaaagtaatgcggagagtggtttatgtagagctttacattttacatagcagctttacattcaccctcatttcacagataaggaaactgaggcccaagatggcacagtggcctcgacgcccaggttttccactttcaaagaccctccctcacatctcattacctgataatgcaacacagtctttaatcggggcgaatttcggggtggaa

SEQ ID NO: 203155 - DNA, 240 bp, Homo sapiens
  chr12:104443911-104444151
  hyper
tcttccacctctgcgcgaagccgctgggaacccaggagttgcgctggcagagaggggcggccccagaaaccacttccagatgtgctcggctggccggctcggatgcgccagacttcctctggctaagtgcaaaacatgcaaaaaacaacgctgttctggaggaaaagacacaaaaccagagaagagcaaatgctttcagggtgaatttctaccacacgttgagtcgaaggcaaactttga

SEQ ID NO: 203156 - DNA, 98 bp, Homo sapiens
  chr12:104459023-104459121
  hyper
gccgcgctctaaagcggcggggacgtggtgaggcggccttgtgtctgcatactcggtgtggacgcccttctggactggccctcggaaagaggactgtc

SEQ ID NO: 203157 - DNA, 727 bp, Homo sapiens
  chr12:104682328-104683055
  hyper
tttgtgaaagttgagataaacgtgtattaagcttcttttttgaagcttttctgaattcgggatttaccgggaaagtaggacgtttaattttagcggagtagtgcaatgatttaaccctgactagaactctgacgtttacagctagccttgaggccatgttttcagccagtgtgcggatttgccggggtcagactccaagcttgattgtgagttctagcctttgtcagaaatgcagcaagtcatgctaacttgcaagggagtcaacagagggcacgcggtgcctgcggggccgggacggaagccccgcccccggcgcagttcccgcctgttagcgggggagaagcaccttacacgctccgctctgcttttgtgccacacagaggacggtcgggccctggaaggaacgctctcggaattggccgcggaaaccgatctgcccgttgtgtttgtgaaacagagaaagataggcggccatggtccaaccttgaaggtaggagagagtaacgtatctttttaaacgggggatgagctcgttgagctcagcgtggtcacagcctgccttttaaagccagcgtggatgtgaccctccaaacgggacgcagcgctgggaaatgacgaaaaacgctcgtgggctagcgcatgtgttaatcgaagttgatgagacgttggacaaatttcacatctcgggaaacttgaaatttctaacgctttttatcttttaaaatag

SEQ ID NO: 203158 - DNA, 77 bp, Homo sapiens
  chr12:104850167-104850244
  hyper
agggtcgtgcagtttccttaaccctgactttaagtcagccctctttaaccccgactcccaagctgggctgtcctttg

SEQ ID NO: 203159 - DNA, 348 bp, Homo sapiens
  chr12:104851545-104851893
  hyper
gaccaggaggggcggtagtttttttttttttttttttcttcttctttttttctttgtgtcccttgtctgtctgtctgcgaggtagcagggaaacggagaggtgtgggaagcaaccgggggtgaggggctggtttgaggagaacgaaactccctccctgctgctgccgaggtcggaggatgaaagagttacccggagccggctgctctgcgcccgggcgagccgcctcttcctggttgccgggccgggggcgaagggtgtacgccccggcgaggttgcgagtccctgcagcaggctgggagcccgggactgggctcccacgtgtcccgggctccgcgcagagctgagca

SEQ ID NO: 203160 - DNA, 100 bp, Homo sapiens
  chr12:105477920-105478020
  hyper
ctcagccccctcccggcagaagacaatggcctgcgtgccagttcccatccgggaccctccccaagccctcctctgaggtctctctgtttttgtttgtttg

SEQ ID NO: 203161 - DNA, 73 bp, Homo sapiens
  chr12:105478419-105478492
  hyper
gccccctagctgtcaagaccccgcccccagctggaaggccccgccccgccagctggctgcgttcggacagcca

SEQ ID NO: 203162 - DNA, 264 bp, Homo sapiens
  chr12:106640992-106641256
  hyper
gtctaggccagggcccgccaaggaggagcggccggctcccgcctccgggcctgggcaggcagcgctaggggccggtcgggaagcacgaaggagcccggccgtgggtccggaggccgcagtcgatggggacagttgcggggccgggggtacccaccttctgctcgacgccctgcaagccctggcccagctcctccctctgccgggagaagtcctggtggctgcgccggacctgctggacctcctccaggacgtggtggacgcacc

SEQ ID NO: 203163 - DNA, 54 bp, Homo sapiens
  chr12:106641515-106641569
  hyper
cggcggcggcttcttcgccacgtcatccgcgccgcccgacgggtgggcaccctt

SEQ ID NO: 203164 - DNA, 218 bp, Homo sapiens
  chr12:106976182-106976400
  hyper
gcttcactccccacgcgtgtctgcggatccgcgtgcaaggggtcaagacataccccctcccgcattctcagggccaccacccgaaatctaacccaggaccaaaatggggggtgggtgggggcgcaagagaaggaagggagtggggccccactcgtggtagcgcaggcgactccccaggctccaggagttccccgcggctccccccccgcccgcgcccc

SEQ ID NO: 203165 - DNA, 223 bp, Homo sapiens
  chr12:107167936-107168159
  hyper
ccagcatgcccttggcgggaattctttccggctggatgactaccaatcccagcatgccattcggcacgccagtaaattagatggaagagcgggatagccccattgcatgcagggaattgcagtccatttagcggctggttcatagatgggcggggaagagccgggttgctctagtcctttgagaatgattcatagaggagggtcaggaaagaagaacggttca

SEQ ID NO: 203166 - DNA, 86 bp, Homo sapiens
  chr12:107486364-107486450
  hyper
ctcactgatgaagaccgagtgtttcaggtcgtcagtactctttggccagagaagtattaagtcaattctatttaatacttagggca

SEQ ID NO: 203167 - DNA, 522 bp, Homo sapiens
  chr12:107486672-107487194
  hyper
ccttcagggcggggttgtcgtggagccggagcccctttcggaaccagtgcacggcgttcacccccatgccggggggcgcggcgggtcctccacggagaaattcaaggaaggaggctccggctcatagccgacaccttcgcttccaagagaattgcctcacccggggcgtgaggaaagggcggcagagggggaacaggaaaaaatgactccgaggaggggaccggagaaggcgggggcgccggaggcgcagtggaaagatgaatggaggttgcctagtcggcggagtccgggtgtgacgccctttaggagcccgcgcccgccgcaaccgcctggaggcgacgcataacttcgagggcctcggacctccggagcctgagcaagttccaggagctcgagccgccacgacggcccgagccggcacggacggccccaggagattcgtcacggaaacctcgccccaccaaggcggcccctaaagacaaaacggcccgcccgaggtgagtcaccgaggagaaccggagg

SEQ ID NO: 203168 - DNA, 34 bp, Homo sapiens
  chr12:107487855-107487889
  hyper
gccagtggtggagtcgggcggagagtgaggggag

SEQ ID NO: 203169 - DNA, 868 bp, Homo sapiens
  chr12:107712337-107713205
  hyper
tctcagtcccacgaacaccgtggccggcgcccggtggctactgcgcccagcggggctcagggaagagcggtctagacactttttattttggaagaaaggggcaagccccggcgggagcttccttcccggcctggctcgctccccattgcgcccagctccggcccggactctggaagatgactccagggtctgctctgtatattccagcggcggcagttccgggaggcagccgaaagtactaacagttggtagcagcggctagtggaaaagtgagccaaggcggcgcggactcggctctccccgcgccccgcggcactcgctgctcctcgccgctccttccctttggctcccaggcggctgcagcatgaagtggcgcagcgatggccaggagaggtaagaagcccgtggtgagaacgctggaggatctgacgctggactcgggttatggtggcgcggcggactcggtgcgctcctccaacttgtctttgtgctgttccgactcgcacccggcgtccccgtatggcgggagctgctggccgcctctagctgactccatgcacagccggcacaacagctttgacactgtcaacactgccctggtggaagactccgaggggctggactgcgccggccagcactgctcgcggctgctgccggacctagacgaggtcccctggactctccaggagctggaggcgctgctgctgcgttcgcgggatccccgggcaggcccggcggtccccggcggcctgcccaaggacgcgctggccaagctgtcgacgctggtgagccgggcgctggtgcgcatagccaaagaggcgcagcgcctgagcctgcgcttcgccaagtgcaccaagtacgagatcca

SEQ ID NO: 203170 - DNA, 648 bp, Homo sapiens
  chr12:107713427-107714075
  hyper
gacagcctgcatggagagcctcttccgggacatctactcgcgggtcgtggcctccggggtgccccggagctgcagtggccctgggtcaggctcgggctccggcccaggcccgagctcgggccctggtgcggcccccgcggcggataaagagcgggaggcgcccgggggaggagcggcgagcggcggcgcctgcagcgcagccagcagcgccagcgggggcagcagctgttgcgccccgccggccgccgcggccgccgcagtcccgccggcagccgccgccaaccaccaccatcaccaccaccatgcgctccacgaggcgcccaagttcaccgtggagaccctggagcacacggtcaacaacgactcggagatctggggtctcctgcagccctaccagcacctgatctgcgggaagaacgccagcggtaagtgtctgcgcgggtgccactccctctcacctaacctggccaactcttggcgcaagtttgcctcgcgtccccctcccgcgtcttcccagccacgcgctgctgtcccaagccgctgaggaggcggccgggctggaggtagccagaacaagaggttgcctgtttgctcctgcactcgggtgcgcgtatttcacgctgctggtgctgtcccaggtccgggagc

SEQ ID NO: 203171 - DNA, 305 bp, Homo sapiens
  chr12:107714115-107714420
  hyper
ctccagcaggcagtgagcaaaacccagcaccattttttggagcagggttgagatcatttgcgcttagtacatatactccacccctgcactgtttgttttgaccttgaagatgccacttccctgggcgcatgaattgggctccctaggacttgggaggaggcgcgttccgctctccgcaatccagtgctcccacttccccactccctcggggggcacgcagtgcacgggggaaggaggggcctggcggccgtaccggctgaatggttgaaagcttgcacggcctagacagtcgtaaaggtgtgtgt

SEQ ID NO: 203172 - DNA, 121 bp, Homo sapiens
  chr12:108956083-108956204
  hyper
cgcattcccgcagcgggatttgtgaaagcgaacttgagccccacactgcagaagccctgaggtcctgtctcaaccagaatccagcacccaggacaagccctccagcgacttcagaccttcc

SEQ ID NO: 203173 - DNA, 174 bp, Homo sapiens
  chr12:109162558-109162732
  hyper
acacgacggggcgtcgcgcctccagggctaggccgggcggatggagggggtccccggagcccgggggaagtggcgcagtgggcgtctgcatcggcccgaaggcacttgcgcagaggtccggcaggcagcagagcaccttgtgggcgtggtcgctggaggcagcgcctggcaccc

SEQ ID NO: 203174 - DNA, 71 bp, Homo sapiens
  chr12:109162762-109162833
  hyper
ccctggggctgcggaggccacctccacgcccatttgccatccctgagccgcttctgcgacctgtgggggtg

SEQ ID NO: 203175 - DNA, 116 bp, Homo sapiens
  chr12:109250887-109251003
  hyper
atgtgggtcacagcgcacacacagtatcctgcagacactcccagaggggtcgcactgcatacacagtccctgcaaagtcgccccccgataggggtcacaccgcacacaaagtcccc

SEQ ID NO: 203176 - DNA, 98 bp, Homo sapiens
  chr12:109535377-109535475
  hyper
agcatgcgcgggccgcttggcgccaattgctgaccgccacagccacagccagggctagcctcgccggttcccgggtggcgcgcgttcgctgcctcctc

SEQ ID NO: 203177 - DNA, 169 bp, Homo sapiens
  chr12:109592371-109592540
  hyper
gggcggggctccgtccggaaggcggggccctcctggggcggggtcggtgtgggggcggggcctgggtggggcctaggcgggcgcgatggcccgggactctggcgcgcagggtgcatttcgggatggagcaagcgcagcgcgaagttgggcgcccgccggctgcagcaga

SEQ ID NO: 203178 - DNA, 360 bp, Homo sapiens
  chr12:109746926-109747286
  hyper
gagccgatcctcgcggggccgccgctgccggcgctccgggggtgggcaggggttccggaggggggctccctcgcgctcgcccctcgcgttccgcaatttggccgccgtcgcagctcgaaccgtttttaaatttccctctctggagctgtccagctcagagcatgcgcagtagccgtgcggggggcttttccccaagggtcagttacagggcagggtcaaggggattgcagcgggcgtttcccagcagccgcgagccttgcacgccccggggttctggggggggggtgtgtgtgaggggggcggggcggaggagtgcaggggtagggacccctcttcaaactttgccaacagtgacaacaa

SEQ ID NO: 203179 - DNA, 164 bp, Homo sapiens
  chr12:110011228-110011392
  hyper
gcgcaggccaagacggctccccaggccaagacggctccccaggccgcacacagccatgagccaggctgcttgacgggacctgaccccgccaggttcccgtccagtccgcggggtgactccacccacagctggccgcgccaccgctcaggtttcaatttttattg

SEQ ID NO: 203180 - DNA, 147 bp, Homo sapiens
  chr12:111021164-111021311
  hyper
ctgcccctagccccgccccgattcaccgctcaggcccaagcccagccccttgggctcgctgccttatgcagtcaccaaggttgaacatgcgcagagggtgcggacgcagtgtctcttgggaattatagtcccggagtcgtagtcact

SEQ ID NO: 203181 - DNA, 65 bp, Homo sapiens
  chr12:111052028-111052093
  hyper
gggctgctgggcctccgtgagcgcccagaccgatgccaccccggcggtgacgacagagggcctca

SEQ ID NO: 203182 - DNA, 33 bp, Homo sapiens
  chr12:111471132-111471165
  hyper
ataatataatggcgcggaaactgtgggcggtgg

SEQ ID NO: 203183 - DNA, 353 bp, Homo sapiens
  chr12:111473017-111473370
  hyper
tctgtttctttcctctcttccctgctctttctctctccttccctagggcgactcttcgaaaccccatcactttctccccatcctccctttgtgggagtctgtgtgcctcccctagatttggaggtgttctctgcggaccccgtaggagccggggctgggaggtggaatctcagagaacgcaccgtggaggcgcggctccggcctctgttctttcccggagtgccccggacgcgcctggcaaggccccccagccttggagtctcgcaaagtctcggcgggtgcggcggggatcaggggcgggaaaatggtgcggataacagggcggttagagcatcctgccttgaccgtgacat

SEQ ID NO: 203184 - DNA, 335 bp, Homo sapiens
  chr12:111844275-111844610
  hyper
acccccacccacacacgtgttagggagagcgttggggtaactgaggccgtgggatgggggagagggcatcgctgacgcccccagcccaccctacggtagcctcgccggttgggggcggccctcccctcaacttgtgcctggggaggagcggtcaggggtcacccattgctaccctgaaagtgaaagtagtcaaactgaggctgtgagcacagatgagcccttgggtgtgggggcagcgggggaggatgcgccggcccctccccactccccattccgggccatgtggctaagagggtagcgccctgattcaggaagcccctctccccagttcctgc

SEQ ID NO: 203185 - DNA, 120 bp, Homo sapiens
  chr12:111844690-111844810
  hyper
tttctggtattgatcctctcacacctcttgcctggggttccctgggaatcccccgaccaaaaaacgtctggagtgggtgttggtcttctagatccgcacggtagggatggtatttcagag

SEQ ID NO: 203186 - DNA, 35 bp, Homo sapiens
  chr12:112884177-112884212
  hyper
ctggagacttcacactttccgttaggtaagttgga

SEQ ID NO: 203187 - DNA, 58 bp, Homo sapiens
  chr12:112915451-112915509
  hyper
tagttgatcataccagggttgtcctacacgatggtgatcccaatgagcctgtttcaga

SEQ ID NO: 203188 - DNA, 116 bp, Homo sapiens
  chr12:112924321-112924437
  hyper
ggccggaccacggcgtgcccagcgaccctgggggcgtgctggacttcctggaggaggtgcaccataagcaggagagcatcatggatgcagggccggtcgtggtgcactgcaggtga

SEQ ID NO: 203189 - DNA, 49 bp, Homo sapiens
  chr12:112926827-112926876
  hyper
gtgttgactgcgatattgacgttcccaaaaccatccagatggtgcggtc

SEQ ID NO: 203190 - DNA, 65 bp, Homo sapiens
  chr12:112926914-112926979
  hyper
gatttatctatatggcggtccagcattatattgaaacactacagcgcaggattgaagaagagcag

SEQ ID NO: 203191 - DNA, 190 bp, Homo sapiens
  chr12:113229230-113229420
  hyper
atgtcgagaagtcccgtcccccacccctccggactccccccttctctgctttaaccatccaattacttaacttctctgcctaggggttcgcttcccacccatcccctcctccaaggcatcttagcgctgtccgtggtgctgaccgccaatcccctggttgccgtttcgaccagctgggatctctggtgcg

SEQ ID NO: 203192 - DNA, 57 bp, Homo sapiens
  chr12:113229494-113229551
  hyper
cttggttcccgcttggttccccctgcactgggaagctgccgccccgcttcccttgct

SEQ ID NO: 203193 - DNA, 97 bp, Homo sapiens
  chr12:113495127-113495224
  hyper
cgtacgccccccttgctgtcccccttcggttccccattgttctcagccgaatgctctcctgggaaggggggagggggtgctgcgctctcctcttaaa

SEQ ID NO: 203194 - DNA, 226 bp, Homo sapiens
  chr12:113592463-113592689
  hyper
gcgctccggaccccaggcttccacagccgggcggggaggaacgccagggctgatgaggaccgatggggcaatgcttaccccagagggtccgctgcactaaggaggggaatctcaggcatcaccgagccgtttcgggcatgaggccccgccccatccgcctgcacaaggctcctgcaccccactcccgagagcacctgactgcctgactggcagaggtggatgggaa

SEQ ID NO: 203195 - DNA, 558 bp, Homo sapiens
  chr12:113796336-113796894
  hyper
gccctcggccccgcccatggcagagcgcagtcacgtgacccgggctgcggggcgcagcattgtgcggtcatggtgggccagatgtactgctaccccggcagccacctggcccgggcgctgacgcgggcgctggcgctggccctggtgctggccctgctggtcgggccgttcctgagcggcctggcgggggcgatcccagcgccggggggccgctgggcgcgcgatgggcaggtccctccagcctcccgcagccgctcggtgctcctggacgtctcggcgggccagctgcttatggtggacggacgccaccctgacgccgtggcctgggccaacctcaccaacgccatccgcgagactgggtaagggttggcttatccccacgcggggccatcgggggagggggatgcgtgggcgccggacctcgcctgttcccgggaccggcctcttgccgggtgggaacgcccgtttctctgggggtcagctactcccgaggctgcagcaccgccctgcgggccaagtaccctgtttgggagctggctactgcggcatccctcacct

SEQ ID NO: 203196 - DNA, 146 bp, Homo sapiens
  chr12:113902353-113902499
  hyper
tgagaaagagaaaactgagctccagcgacttgggagagggggaggaggacacgaagattctctgggtcatggccagagctccgcgggctccttggggtagaagctcggtcctccagccttgccccgggttggttttgccagcaccc

SEQ ID NO: 203197 - DNA, 70 bp, Homo sapiens
  chr12:113904662-113904732
  hyper
cagtgtgactggtgggagtgtgcgcgtctgtggagttgtgtctccgtgagtgtacctgtgtgtgagaggg

SEQ ID NO: 203198 - DNA, 244 bp, Homo sapiens
  chr12:113905078-113905322
  hyper
gggtggaccccaacatctcagactcgtccaagcggccgcccagcggacgcatgcgccgcggactccggaagaaggcgtgcctccgggcgcctagggcgctcagctgtttcatccggcgttctttggaccgtcggttctgaaaccacacctgggacagaggagggggctgtgaacccaggatcaggagtgtcctctccccccctcttctcccttccctgactgggctgcccctgctgggtccttg

SEQ ID NO: 203199 - DNA, 169 bp, Homo sapiens
  chr12:114838902-114839071
  hyper
acactcacactgacatacagagctgcaccactctccttcctcctcccccagaagtctagcatttctagctaaaactctgcgagcttttaaggggaactccggggcgagtgtcttggcgaagctgccgtgtttattggtgtctgtatatagagcccggccgagccccggt

SEQ ID NO: 203200 - DNA, 34 bp, Homo sapiens
  chr12:114841183-114841217
  hyper
tattaagatgctgggggccgattctacacatagt

SEQ ID NO: 203201 - DNA, 147 bp, Homo sapiens
  chr12:114841493-114841640
  hyper
gcaggaaagccagactctgactttgatctctgcaaagggacccgaagcgcgaggtctccttacctgctgggtgaaggcggcctgcggggacgacggggacttgctgggggccccgagcgcgctctcgggtttcgaatcgcagggcag

SEQ ID NO: 203202 - DNA, 141 bp, Homo sapiens
  chr12:114851899-114852040
  hyper
cctgctggaaatgcgcacagcccctgctggaaatgctccttccctttccctactctcccgcgccttcaggtagagcgtttaagggattcccagcagttcccgagtacacgtggaggctgctccccggcgtgctggagcggc

SEQ ID NO: 203203 - DNA, 104 bp, Homo sapiens
  chr12:114852189-114852293
  hyper
ctttgctctgtggctctccctggggccggaggagtcctgccgcctcaaggccccagactccgcacccggagggacttgccgctagcgccgctccttcagcctcc

SEQ ID NO: 203204 - DNA, 537 bp, Homo sapiens
  chr12:114877707-114878244
  hyper
tgctacaaataatcgcgtggaagacggccaagaataaccagaaaataaacacagctcccccggccctctgaacgcaggccgcgggtccctccaggccccacctggctcttctccggcctaggggaggcgaggaggccgcgccacgatctctgtactcattgttcccatggcgctgcccttaaccctcgaaggactgctcccggacctcgattccaagcagggtgaccctctggcctttgtccccgctgtctttcctagcaggaaaactgtcgggaattcaacctctgtcaaaaaataaaaacaaaaaacaagaacaaacacccaaaccccaacaacaaagagagaacgcggactccagacagttttctcctttcaactctagaactttcccggaaacataagacacccagtgctcatcgttacacccttaggtctgcgcctgcgggtgggggccacgggctgtgccggagcgcatagccgcgggtgtgcccttaattttcatatatataatgaagtgtctgcgcgctaacgcgcctg

SEQ ID NO: 203205 - DNA, 94 bp, Homo sapiens
  chr12:114879012-114879106
  hyper
gtcggtaagaccttgcgtcccccacgggcactaaaatggcgaagcacgtcctggctaacgcagtctgtctcttacagcacgctcacgtgcgcct

SEQ ID NO: 203206 - DNA, 65 bp, Homo sapiens
  chr12:114882084-114882149
  hyper
catcaaaggaaatactgtaggtttcagcatcggtctctcccgctgatcgtcgggctccgcggggc

SEQ ID NO: 203207 - DNA, 107 bp, Homo sapiens
  chr12:114882448-114882555
  hyper
ctcccaacaaccatcggggtagataccgttatatcgccattttacagagaagcaaacgggaggtcaaacaggctgacccaggccgcctagttcctgcggggatttga

SEQ ID NO: 203208 - DNA, 162 bp, Homo sapiens
  chr12:114882646-114882808
  hyper
caattcctacacaagtccccccagcaacaaggagggccagccttcgctcctgcttctctcttagttgtatatctggagccaaggagtccaaaacagctcaccagctctaagtgcacacatatcagggctgggagccggaaccgcctgggcatgcgttcctgc

SEQ ID NO: 203209 - DNA, 109 bp, Homo sapiens
  chr12:114883302-114883411
  hyper
tgacagagaagcgcggttgctgcaagatgtctgcagaaatgggtctttaaaagtttccacattgtttagctacacaaacgtgtttgcggttcccgaggccctccccctc

SEQ ID NO: 203210 - DNA, 156 bp, Homo sapiens
  chr12:114886562-114886718
  hyper
agatgcctgcctaggcgtttctggttacaatcacctcacacaccggcctgcattccgcctccccaacccccatccttaccacgaagtctgaagtcacaccttctccctggctgggaagctttgccagggtgggggcgatgagtgccggccgaggtt

SEQ ID NO: 203211 - DNA, 74 bp, Homo sapiens
  chr12:114939043-114939117
  hyper
ttaaactcgtctccggcccctccgatctgcagctcgatcaggggcagacactgttgagggaagccagagagaag

SEQ ID NO: 203212 - DNA, 271 bp, Homo sapiens
  chr12:115106579-115106850
  hyper
cagaaggagcgcgccctggaaatctcccagtcctcgggggagccccagcctcaaaggtccccagggcccgtctcagctcaggccctgccacccccgcagcgcaccccgcccctccccccccccgcgactccgcaccaacatactctggttgtctgtcttccctcccacccccggagacatcgcagaggaggctgtaggggtccccacgtgcctggccagagatggaaggggctttgccccgctctccaaaaggtctcgacctcgatccctt

SEQ ID NO: 203213 - DNA, 824 bp, Homo sapiens
  chr12:115120681-115121505
  hyper
ctccaggtgcaccttggggtcgtcctccacctcttcttcgggctccatggtcttcaaaggcctcagatgcgcctggggccccagggaggagaacgggatgccggtctcggccgcccccaccaattgatccatgatcggcttggccagggcgcccggcagcgagagcgccgccgcgccgttgggaggcagcgtcagcgcggggaagaacggcggctggtgacccagcaccgcgctcatggcgaagtccggcgcccggtgaggtaggaacggatggtaggccatgcttgtcccaggaatgaccggatctctcatggagaggctcatccactccaggcggggcgctgggctccagccggggacaagtccgcagctgctgtgttttgttgtttttttgttgttgtttaacagcagcacataattcaaaaggggggaaaaagcaaaacaaaaaagaaagaaaaaagaaaaggaggcagaaatcacaactaatgcacttcaaagggaggaggggaagtgtcttttggagaatgggaggccgcttttaaagagggcaaggcgaaaaatcagcaaacatagtcgcgcgggtgaccgtccttgtgccttgcgtttttaaaaagccgctcctgaacgtcggtttcagaagcgagaggagcgagcagggtctcgactcgcgcccgagccctgccgctgagctcgaaatagacactccagccctgcgtcccaggaatctctctccagcccctaggtcttttgttgcaaatgtgaaaggttctcctagaagactttttacctttctttttcttcttcccccgccccctatctgtctt

SEQ ID NO: 203214 - DNA, 341 bp, Homo sapiens
  chr12:115121544-115121885
  hyper
tagacccggctttaacagggagcgagagagcggaaaaagtctctctcctttaaaaaaaaaaaaatctgatttaaacccccttctaccagcgctatcaaaacttgaattgcaaactggcttccgttcgccgccctcctcctccttcctctgctccgagcctccggagggtgtctcggtttcaatccaaatcttgctgggctcttctcccgtgcctctctctcttccttgtcctaaaacgtgagcgaattcgcttcctaaatctgtgtccaggcgcgcagggcagggaggatttagagggggaaaaaatggaacagagggaaagagagggaggggagagagag

SEQ ID NO: 203215 - DNA, 221 bp, Homo sapiens
  chr12:115122015-115122236
  hyper
gctgcggggagccggaggcctcttgattggctctttgacgctttcggaccaattgtgttgctgcataggcgtggttttcacaggtcgagtgctgggggatagagctgagttataaaaagaaggtgtcggaaactgtaacgtcgcagcgccgcatcggtactactgcctgtcctgtgaatatgtcaacatgatcagagggcgggcgggagccactggggagc

SEQ ID NO: 203216 - DNA, 441 bp, Homo sapiens
  chr12:115122524-115122965
  hyper
ctctccttcttctccccgccccgggcgagccgggcgggtggccgagcctccccgcgagctgccatccggccactcggttctacaaaagccggcggcagccgagaagcgagcgccgagactccaggcttgcgtgctctccagccccacgtggagccaagctccgcccggccgccgctgaagggctcccgagctcgggtgtctcggtgctggtctcccctgcgtctgggctgggggagcacaaggatgcggccatatctcagcacacgcatgtgtgggcttcctctccactgcgccccacccgcagccatgtgcgggtacccaaacacccccggtgtatctgtactcgaacacgcgccaacacactgggactgaaacacacaccgaaaaacacgtacacacaaacacgtacacagcctgcgcggctggccctgcctgagctcc

SEQ ID NO: 203217 - DNA, 214 bp, Homo sapiens
  chr12:116354935-116355149
  hyper
ccccgactcagcgcggtcctggcctcacctggtgctgctgaccgcccacgcccgccgcccgcctttcatctcccctgcccgtggctccgggcactgctttcccaattgcccggaccacgccagcgcccgggctctcggcttcgcgcggggctgggcgggcggagcgcggcagcctccaggtagggccgccgccaggtgaagccgcgccgcttcg

SEQ ID NO: 203218 - DNA, 79 bp, Homo sapiens
  chr12:116946548-116946627
  hyper
cgttccccctgccctgggacgtgcagggtccccgctgattcccgccccggggctccccgggtccaggctggggcccagg

SEQ ID NO: 203219 - DNA, 182 bp, Homo sapiens
  chr12:116971004-116971186
  hyper
cagtgactttaggaacatctcgaaggcgacagattccagttgttaaggctacgatgaaatagcagaagactctgggaagcagcgtgcaacgagtggcaaaggagcccctaacgctctttcttctgtgctcgccccgccccctccggcgtgggccccgccccgactaagccccagccaggccc

SEQ ID NO: 203220 - DNA, 110 bp, Homo sapiens
  chr12:116971210-116971320
  hyper
cgcctcctcagctcccagccttctgggtccgaggctcccacctgctctaagcgcttggtaccagggagggaatgggaggacgcttgcgggatagggaggcgggggctgga

SEQ ID NO: 203221 - DNA, 219 bp, Homo sapiens
  chr12:117175909-117176128
  hyper
agggctagtcgcgcaagatcttctcaccattggtccctaaggaacggcggcctcctattggttaagtgccgggaaagggggcggacaatcgcgtgagtgctgcgggcgtagctgtgcccgggtcctagcgccggacccggcgacgccaagaaaccacccaataggaggccggaagcatcggaagtcacatgctgcccaggctgcgcgggtgattggctt

SEQ ID NO: 203222 - DNA, 176 bp, Homo sapiens
  chr12:117316504-117316680
  hyper
tcagggcgccagaggctgcagaaccctggagggtgtggctgcaggggacgcccgggcgggacaaggcaggtaggagaagaacccagaggtgtgggaagagggtgtctccgagtcagggcgcagcacggaagtaactctggggtagaaggcgagggcggggcgggggaaataaactc

SEQ ID NO: 203223 - DNA, 97 bp, Homo sapiens
  chr12:117349182-117349279
  hyper
ccgcccatgcctgcgccggcccccgcccccaggacaaacccctgcagtgatttggagagtaactgtgtgccactagttgcccgagaaaatgagtaga

SEQ ID NO: 203224 - DNA, 692 bp, Homo sapiens
  chr12:117536707-117537399
  hyper
cttgcccgcccggcctgaggcacctgccctgcgcttgggaagcctgggccccgctccctccccggtccgcagtcccccggccagggagttcccgggccagtccgaagctgagcggctgcggcactgagcatcgccgcggagctcctcgccgcagcccgcgaggtggccagcggggacccatttgaaagaggaggagactgaggcgcagagagggcccgccactggcccaaggtcacacagcgcggcggcgggccggggtccccaacagtggccgttcggaggtcccgccccggtccccgcgccgccccccgcgggtactcacagccggtcttgccctcgagctcccgcacctcctcagacgcggagtgggcagcgcccatggtgcccgcggcgggggccccggggcgcgcgtccctctcaggccccgcactggcttcggctgcgcagcggcgggactggcctcgggtccggcctcgggtcgggacgccggcgaaggctcggagccgcgggttccgcgtggggccggagcggggcctcatataacggcggagggcggcgcgccgcggtcctagcgcacgccggtttcgcgcactgcgcggctaggggagcgccccgccccgccccggcccggaaaccgccgggaaggggaccccggagcccaccgctctggagtccccgttcgtgcagcagtg

SEQ ID NO: 203225 - DNA, 151 bp, Homo sapiens
  chr12:117628333-117628484
  hyper
ctggtcttgggggcgagtcctgagatcgctccgcccatccgcgggccacacctcccctgcatcggctgggggctgcgcgggtggcagcgccgcaaaagggaggacataattgggctctgtgcttggagccggcagcgcaagccgcctctag

SEQ ID NO: 203226 - DNA, 37 bp, Homo sapiens
  chr12:118313953-118313990
  hyper
gccagcagccccgacgccttcccgccgttgccagggc

SEQ ID NO: 203227 - DNA, 59 bp, Homo sapiens
  chr12:119419899-119419958
  hyper
aggcagccgggccagggcgcctgtcttttcccgtcactactcggcggctcccgctgaaa

SEQ ID NO: 203228 - DNA, 31 bp, Homo sapiens
  chr12:119616602-119616633
  hyper
cagctgttccctccgcggattctccggggct

SEQ ID NO: 203229 - DNA, 177 bp, Homo sapiens
  chr12:119772414-119772591
  hyper
tgaccccgcccccacgaattccagccaatgaggaagccctcctcggcgtcccgttgccaagcaactgggttccccccacccccacccggcccaagggttagcagttgcctactttccccgcagtgcgataaacccctcgttggggccgccttagttctcggccgctctcggaggatg

SEQ ID NO: 203230 - DNA, 56 bp, Homo sapiens
  chr12:120032200-120032256
  hyper
cttttctagagccccagtgcgcgccaccctagcgagcgcagtaagctcataccccg

SEQ ID NO: 203231 - DNA, 225 bp, Homo sapiens
  chr12:120525164-120525389
  hyper
gcggtgtcggcacaggtgactaattgctcggtagacctgaagccaaagaagaagtgctggtcgcagcagtggcctgagcactttgcaagtgggatccacctgttcctttttctggccgcacttcggttagtgcggtcggtgttgtgaagctcgagctaggcggcctctgcaggcggatcctctagctgcccttgagccctgcacattagtcgctggccctgtaca

SEQ ID NO: 203232 - DNA, 55 bp, Homo sapiens
  chr12:120875858-120875913
  hyper
gaggttgtagtaccgcccccagagccaattttccacttccgcttccggcgctgcg

SEQ ID NO: 203233 - DNA, 311 bp, Homo sapiens
  chr12:121124597-121124908
  hyper
ccggaagtgctggcgacatgtcagtgcgccctaccctaaaccttccccccccaggccacctttcccattcagctgtgggattccggggccgcctgggcgctgcacccgccacttccgcatcgaaccgccgcttcaaccgaactcactccctctgcgcgcgctccatctggtgcccgactgctgggccggcgcctgggagaagccacgccctttcccgcgcctgacagccaatgagcgggcgcctcccggcggggtggtgggtaattaatgagggccgggcgctgattggctgcagcgtcgtggccgggggc

SEQ ID NO: 203234 - DNA, 168 bp, Homo sapiens
  chr12:121454119-121454287
  hyper
catagtaccctaccggctcttggcttccctgccacgtgcgggcgttgctccaagccccaagccggcattgccgcctcgcggcaccgctccagctcctccgcatcgctactgctgttactactttccgaatcgctcactgtgccactgggcgccgccatcttgaaccac

SEQ ID NO: 203235 - DNA, 200 bp, Homo sapiens
  chr12:121476535-121476735
  hyper
gggttttgtcttgcgtgggggctggaggagcccagtcttaccttgactaccttcagcacccgcacatcctggtccagcccacgcttcccctggaaatgctcctgcctcagaaactcctccacggtccgcacagcgtctagcacctcttccttccactcccggtggggctgcagccactgagccacgaaggagtccagcct

SEQ ID NO: 203236 - DNA, 196 bp, Homo sapiens
  chr12:122214114-122214310
  hyper
ccaccccgccacgtggtgagggttattttaagttctcagagacccaccgcgtctgcctcgtgctcttcttgcccctggagcgctgggggcatcctgagtcaggctgtgagaagattcgccaccagagggcgccccgggccctgggtcgtccaaggggacaaggacgttcccgtctgtgcttcggggttccctgacc

SEQ ID NO: 203237 - DNA, 322 bp, Homo sapiens
  chr12:122231523-122231845
  hyper
ccccgggggcatccattgcccggagcccgcagcactggcggcggcgcgccgggcactagcggagccaagaggtcgggggcggggcggggccggaaccagccccgcccactcggagcagcgccgcctccgccaggcagcctcccggccgacctcccagcctcagtttcctttctgctaaggtctcagccctgggtgtgggtattcagctctcagtcccagggatactgcagcaccggaaaaacggggctcagctgcgagcaaagctcccacccccaacccaccgccaccctccgcgcgtcacgtcgcgcccctcgccggcgag

SEQ ID NO: 203238 - DNA, 391 bp, Homo sapiens
  chr12:122231905-122232296
  hyper
agggaccctctgattggctggcgcggccagacagggtctcccggattggctggctgtgcctccgcaccgggttcgagaagcccccggcctccagctccgggaagagcccctcaactttgcactgccccagcggtgtggcttggcacatgtccgcctctggcctcagcttccccacaggaggtagcggcggtggcaccagggaagatgctgacgcgagagtcatgtctgcccacctcgcctgggccagggacgccagcgtgcacgcgggttcggggtgagggactgggctccgcttacccgcaccccgaccctgggctgcagggtggacgtctgacgccctctgccgggcaatcgcctcggcgccggccgctccgggcgcaggttggcccga

SEQ ID NO: 203239 - DNA, 75 bp, Homo sapiens
  chr12:122237447-122237522
  hyper
ccagggccctccccccgccgaagaacacacaactgggaaatacttgcaagtggatcctctcgtatgctgctatat

SEQ ID NO: 203240 - DNA, 571 bp, Homo sapiens
  chr12:122460949-122461520
  hyper
tggtggcggccgcgcgtggttttcgggatcacattagcgtccgcccggcgtggcccggtcgacattaaggggatcgaacctttccgcggcctcgtcggggtctgctcggaatcggcccctgggccaggcccgaggcgcaagcagatcgccaggttgggtcagagttgttgaaaactccccgctgcctgatttcaactttattatttttttcccacgccttcactggggtcccggagggagaggagccgccgcaacgctggctctgagtgtcagcgcccgcgggctcgtctcgaccctttatttcgagcctggaagctgggcaggccctgtggcaggggatgtttacgtttgggggtgtcgtttctcgagtagcgcctcggtctctaaaagccactgggggcgagcctccggtgtggcggtgtcacaagttagctgtcctttctgagtcaaacccaacaaaaaaggcaagaggaaaatcaataaagtccacgtgctccccggcctcctatggaaagggctggctgcgatggccggatgcccggccgtgggctgggtttggctccagtgggac

SEQ ID NO: 203241 - DNA, 202 bp, Homo sapiens
  chr12:122907627-122907829
  hyper
acaggctgcaaggcgcttccgaagcaggttaagttggggattgggaaggatcatctctgccctcgcctccctccagggaaagaccctggatgaggcgtccctggagaaaatgctgaaaggaactgtagagcaggttaagcttgggaagaactgtatctgctccccacttccctccgggaacgaccgcgggttaaaaatcctt

SEQ ID NO: 203242 - DNA, 221 bp, Homo sapiens
  chr12:123380319-123380540
  hyper
gcctaagcaccagtcgcggttccctggctcccgcaccccgccccaagcgcccccatttctagcccagtcccctcaacacgaccggaggcgccgcggtcgcctccgcctccggccaccgttcgaggagcgaaccccgctcgaggcctcacagccgccgccttaagcccagctcggctcacctcctccatcttctgcaccatctccgtcagctggccctcgtc

SEQ ID NO: 203243 - DNA, 220 bp, Homo sapiens
  chr12:123380600-123380820
  hyper
gcccgccatccccacgtctcggccgtcgtcgccaccgccgctgcggccaccaggctccgccgaccggaagcgccgccctcaagggccgccccccgcgggggggacacgtgacgccagccctgggtcgtgacgtcatcaccgcgcgggcgggcggacgtgacgtaagtgtcgcggctcgcttggagtggaatgtgtcagggacagtcgggacttctaaagg

SEQ ID NO: 203244 - DNA, 178 bp, Homo sapiens
  chr12:123451028-123451206
  hyper
ctgatggacggggcggggcctcagtgacggagggggcggggatcctggggcagggaccggcggagcctcccgggaggggcggggcctcaggaggagtgggcgggctttcctggacggggcggggcccccgaggagggggctggcgaagcctccgggtggggacgggcctcctgggggc

SEQ ID NO: 203245 - DNA, 265 bp, Homo sapiens
  chr12:123459138-123459403
  hyper
catttgttggctgcggtgagaccacgccccgtcgccctcccacacctgaccccgccctcccgcgtccattgggaacgccaccggaagtaatgcgagacggagcgttttggtggagacactcactggggcaatctgaggtaatccaacagactgtggcggagggaccggaagcgccaggcagggacccggggtagatgctaaatccaaactgaaacgtacagggctggatgattgaagcaccagcgggaactagtcggacctccga

SEQ ID NO: 203246 - DNA, 300 bp, Homo sapiens
  chr12:123754888-123755188
  hyper
cagtgtccaagattttttttaggtatcgtttttatgggtcccacttccgatttggggggttacgaggtcaacgtttgcaaacaaggcccaaaactcgagcaggagagccagcgtggcaccggtgaccaacggggccactcctctccccgtcgagtccttccccccatcccgccccgcaacacaaccgccttttgggaagtctgtttccgaccaagtgtcagagaagaagggccccagtgaggtcacaaagcccggcacctacgaatccctcaatgttgtgcccactccccatggctccct

SEQ ID NO: 203247 - DNA, 391 bp, Homo sapiens
  chr12:124246517-124246908
  hyper
tgcaaaccggtcggcgtggggtggggtcgcaccctcggctgcagcggcccgagggcggctcctggcggcgagggtcccgctccgcatccaggggcgtgcgcgctgccggggccagggagcaaccagcctacctcggcggcccgggggcctggtgcgcgcctccgagatcccggggccggggcgtgggctgcggctcgcgggttcgggatcgaggggccgggcgcggggcactgccgagcttgcagcccccagcgccggcgccgtcggcggggcgagctgcggccgtttccggggcgcccattgctagggccgccgttgccacggacgcccgccctgcgcccggctccctctgcactgcgcggcgccatggacgacctgcgggtgctgtgga

SEQ ID NO: 203248 - DNA, 75 bp, Homo sapiens
  chr12:124246937-124247012
  hyper
atcaccgacccccagcttttcgaggacctgctcaaccgcgacgacggccagggcgaggacctcatcttgcacttc

SEQ ID NO: 203249 - DNA, 420 bp, Homo sapiens
  chr12:124779596-124780016
  hyper
ggaggaggcgcctagaaaaggaggcgcgggccggggaggtgcggagagggccgggcggcaacgtgcgcctcggggctgggccggcctgcgggatcgcagcgcagcgcagaggcgaggctgggcccggcgggcgggagccgcggagggcggagggcggagggcggcggcgctggcaggagcgcggcccacggcggcgagcaggctgcaggcccgcggggatccggggcgcggggggcgccgggcctgatcgccgcctctcgcggtgcccgcaggtccccgggcgcgcagctctcgccccgccgccgcctgccccgggccccggagcgcggtggagaagcccccggaggagcggggggcccgcgccccgcgccccccagacatggtgggccacctgcatctgcagggcatggaggacagcct

SEQ ID NO: 203250 - DNA, 195 bp, Homo sapiens
  chr12:125093638-125093833
  hyper
taactacacgtatacgagactgaactgtgtgtgtacattttaaaataaaacaaaacgtgcttcctgttctgcggcctctgcccctcccctcggcagccctgaggcttggccagggtccaggaggaaggcgcggggaacaggttggcccagtcagctggctgggacttcaaaggaaagcgccgctggggcccacct

SEQ ID NO: 203251 - DNA, 99 bp, Homo sapiens
  chr12:125198344-125198443
  hyper
gtctattcaaaatgaaagtgcggcgggaaggaaggaaattctgactcaggctctaacgtaaatgaactttgaagacacgatgctaagtgaaagtagcca

SEQ ID NO: 203252 - DNA, 83 bp, Homo sapiens
  chr12:125670445-125670528
  hyper
ctctcctctcccctctcccacaggcactccctagctgtgccacatttaacccgggacctcctgtccgcgctcagtcttgcagt

SEQ ID NO: 203253 - DNA, 102 bp, Homo sapiens
  chr12:127865862-127865964
  hyper
tgccaatcaaaacgccatctctactccttgtcaaagtcaagtcatttagcgaaaggcctaatgagctctgcaatcagctacgcaagaaaaaggagtgtttag

SEQ ID NO: 203254 - DNA, 274 bp, Homo sapiens
  chr12:128750844-128751118
  hyper
gggggggggggggggagggcggatcttccttgtctgagtctgcagagaaattgcctattgcaggagcaagtctagagaggggctattctccacccactgaaaagataataaaacacatgctatgggcggcggggagatgattggggagtggaagccccacagacatgcagtgaaaaatgatcctttcttcccctctgcgttctcgtccccttcccagagacaccgctgtgatctcgtgcctcgccccctccgcacacgcacaggtgcacacccg

SEQ ID NO: 203255 - DNA, 151 bp, Homo sapiens
  chr12:128850383-128850534
  hyper
tggaggtggccaggctgccccgttgattgtgtgccgaggagccctccccgggaaggctgtgatttatacgcgcaggcttgtcacggggtgaaaggaagggccactttttcattttgatccaatgttaggtttgaaagccacccactgctgt

SEQ ID NO: 203256 - DNA, 86 bp, Homo sapiens
  chr12:130387117-130387203
  hyper
caagtcagggctccgctgggaaaattcgggtcacaacttgtagctgaaactccacgtgcaccctgcggggccgctgctgctcccag

SEQ ID NO: 203257 - DNA, 278 bp, Homo sapiens
  chr12:130645806-130646084
  hyper
cccgtcacagacccgccccaatccgaggggggatgagctcagaggacctgcccaggacgctccttctccactttccaggaaaaccgagcggcgtgcgcgcctccgtgtcctcgcgggagctgggggtccccgggcaggcgctgacgcgctcctcccacgacccactccatcccaccctactccgggtcctcctgcggggctgcagccaaggagggcgctggccgggcacatcactcgccaaatcacataaataccccacgagcgaatgacttcctata

SEQ ID NO: 203258 - DNA, 211 bp, Homo sapiens
  chr12:130646344-130646555
  hyper
tcaaagaaaatccctcctcggagcccggagcccggggctggtagcacctccccagcctcaggaagatgcgggcaggtttacaagcaagggcctactttatggcccaggctataaaacgcaaatcccacctccctttgaaagcgccctccgcccgggactcaccataaaaggaagagaagatgcaccccgcgcccctcgccgcggaccaccc

SEQ ID NO: 203259 - DNA, 46 bp, Homo sapiens
  chr12:131438509-131438555
  hyper
aggagctcgagagcggccgcaggacaagcccgaggagcaggcgggc

SEQ ID NO: 203260 - DNA, 244 bp, Homo sapiens
  chr12:132313659-132313903
  hyper
ccgaaagccttgagcccccgagtttgctcggttgagggtgttgggggcacagggatgctggcccccagctccccactggacaaggacctggccctcagcctccttcccctccaccccaggtcggccaggctggccctgccttgccctggtacagtgctgagccgggggcgcggggagagccttcctcactccacacccagtagctgtccccagctcagcttagaaaccctgcctgggggcagcg

SEQ ID NO: 203261 - DNA, 37 bp, Homo sapiens
  chr12:132380562-132380599
  hyper
agggggtgtctgggccgcagggcgccccagggcaggg

SEQ ID NO: 203262 - DNA, 37 bp, Homo sapiens
  chr12:132380828-132380865
  hyper
gggccggggcacaggcggctgccgctggctggccaag

SEQ ID NO: 203263 - DNA, 300 bp, Homo sapiens
  chr12:133443618-133443918
  hyper
caaaaaaacagaaaataaagagcactctgctgctgaggagctgggctcatccaaaggagcctctgaagaaggaaggagcggatgcaacaaggcctcaagaacatcaacgaacaggagaggtgtggctgcccgtgtgaagacagagcaacggcatacaacggagtaaaaaccacatcaacagaagtggaaacaggcccagagagcgtgagaggtttctggtttcaagaaggcacactgagtccctgcacccgatgccgctccttccccaaatcccactggaatacacagagagacataaaa

SEQ ID NO: 203264 - DNA, 133 bp, Homo sapiens
  chr12:133463975-133464108
  hyper
agactcggcgcccgccccaccccgcgggccccggcccggccgcccgcgcccacgcagccccgcagcccggcctggacgccggcgggcgccccctcccacggccgcaaccaggtcccccttcgccgcccgccgc

SEQ ID NO: 203265 - DNA, 237 bp, Homo sapiens
  chr12:133464166-133464403
  hyper
cgccgccgctgtcaagagacattgcggctccctcagctgatccgcggggcggggccagaggcctctgcgccccgcgattggctggcggcggcgctcaccaagagcggcagctaaagcggagccgggagtggcccgcgagagtaggcgcgtggagggcgctcggccatctttgatcctgaccaggcgacttcgtcgcctgcggatcacggaagtggctgcggtcggcgccatgttatg

SEQ ID NO: 203266 - DNA, 218 bp, Homo sapiens
  chr12:133464555-133464773
  hyper
acagtggatcacacagatccgaagtctgaggcacagggcgcggtccgcgagtgggagcggctgcttgtgggcagggtggacgcggggccacgtcttggccggcgttttgcggggtcttcctgttctgaacgcgcgtaacttttgcctcagtatctcacttcttggaatccggcggcgttcacgtgtgtgctccagagaagggcgccagagggtattcc

SEQ ID NO: 203267 - DNA, 241 bp, Homo sapiens
  chr12:133706775-133707016
  hyper
tgtcccgggtgaacgagccacaggcccgcatgctcacccgtcctcagtgcctgcctccaggcgtccgcggtcccgcccgagggggacgcgaggccgaactacgtttcccaggagctcctgcgccgccccgcagaggggcctggtctgtgcgtcacggacgcgctctgggccgaaggcccgcagggtccggcacagagtggcggctgcggcgccggcgacgaatcgccggctctagggtccc

SEQ ID NO: 203268 - DNA, 58 bp, Homo sapiens
  chr13:20702726-20702784
  hyper
tctatcgcccacggggctctgcagatgtggccaggctaagggtccagagttagggaga

SEQ ID NO: 203269 - DNA, 217 bp, Homo sapiens
  chr13:20702913-20703130
  hyper
ccaggtggcgccgattccggacgcccagaactctgtgggaatgcagctgtactgtgcggcgtgtaaaccaccgcatctgtgggattttgttaaagcagccacgggaccactccaccccctccagctgtggtcctttacccggcggcggccacctggcagcagcccggttccccatcctgcggggttcctcccgcccgcagaccggctcggccataaa

SEQ ID NO: 203270 - DNA, 127 bp, Homo sapiens
  chr13:20735305-20735432
  hyper
ctaccctgtacgcgcagccacagcactcgcccgcgtccgcattccacaccctaccccgcgcgcacgtccatgcctagcgcctgcatccccatcccgcacctgcgcgggccctggggatgtggacgcg

SEQ ID NO: 203271 - DNA, 720 bp, Homo sapiens
  chr13:20766627-20767347
  hyper
aacctcgcgctggcggctcgcccgcgcctttttcccctcccgcgcgcgcccggccccactcgcaccccgggcggtgccatcgcgtccacttccccggccgccccattccagctccggagctcggccgcagaaacgcccgctccagaaggcggcccccgccccccggcccaaggacgtgtgttggtccagccccccggttccccgagacccacgcggccgggcaaccgctctgggtctcgcggtccctccccgcgccaggttcctggccgggcagtccggggccggcgggctcacctgcgtcgggaggaagcgcggcggggccggggcgggggtctcggcgttggggtctctgcgctggggctcctgcgctcctaggcgggtcctgggccgggcgccgccgaggggctccgagtcggggagaggagcgcgcgggcgctgcggggccgcaacacctgtctcccgccgtggcgccttttaaccgcaccccacaccccgcctcttccctcggagactgggaaagttacggagggggcggcgccgcgggcggagcgcgcccggcctctgggtcctcagagcttcccgggtccgcgaacccccgaccgcccccgaaagccccgaaccccccaagtccccttcgaggtcccgatctcctagttcctttgagcccccatgagttccccaagtgcccccagcgccctgagtctcccccggttaccccga

SEQ ID NO: 203272 - DNA, 174 bp, Homo sapiens
  chr13:20767587-20767761
  hyper
gttcgagtcgcggaggctgcgcgggcccgcgaggctctcgcagggggacctaggctgggtggcggggcagtgccctctggaatgggggttaacggtggccgaggagggggcgccgctggtgccggcgaagtccccgcttctttctcccctcaaaatctcaccaatccgaacgaa

SEQ ID NO: 203273 - DNA, 88 bp, Homo sapiens; identical to SEQ ID NO: 123412
  chr13:20767827-20767915
  hyper

SEQ ID NO: 203274 - DNA, 89 bp, Homo sapiens
  chr13:20805881-20805970
  hyper
gcagcaaatgaaacgggggaaaggggcaccggccctcactctggcctcttagacacacgatatgaaaccttcataaaacctgttgtaca

SEQ ID NO: 203275 - DNA, 271 bp, Homo sapiens
  chr13:21099487-21099758
  hyper
ggatgagaacacagtcgtcgcaggatcgcagccagaattcgtttcattcaacacggtgcctggcacttctatgtggacctgcgggcagacgcggcgacattcaacagagtccaggaaccgcaggccccgcggcctgggcggtcaacctcggaacctcctgcaacgctggctcccgggaagcagacccaactccgcggggcgcctccacctgccaagcccctccagccgcgcctctccccgagcccgccagcgccgtaggggccgcagggcg

SEQ ID NO: 203276 - DNA, 274 bp, Homo sapiens
  chr13:21347861-21348135
  hyper
cagcaaccaggatccactctcaggccggcgccagctccttccctcaggaatccgccagccactgctaattaaactcttccaccactaccaccctggaaaaaaggtgagaaacaaacacacaaaaggcacctaacccagtccaaaacgcctcggcggcgcgcagccaaccctacagctgcgcccgaacccgccactcaccagccgcgcgtgcgcagtcgcccagactcgccgtgtgcagtgggagtggctagccagtctcgctagcgcaggcgca

SEQ ID NO: 203277 - DNA, 788 bp, Homo sapiens
  chr13:21634968-21635756
  hyper
tccgtgggaccgctgcgccgccggaccgggggtcccgaggctgtcaggggcgcccggccgggcgtctagtgaaaagccgatcccccggagacagcggaagcagaggcgcgcccggcgctacggcctttcgggtctaggacaccgcccccggcccgcgccgcccctgccccgccgggatcccggccgccccggtcgccgcacaacaaagcggcgcagccccgctgcccccgcccgacgccggcctccaacttccccggctcctctggaaccggctccgcgggctccgtacggcctggactacgagccgccgggcgggggcggctccgggcgggcgcggaccgtgggggcagggcgcagggctccgtccggacaaacttcctcggccgccccgccgggcgcccttcccggagcctcggcaccacagtaggtgcgcggagccgcagggctcgaccgcttcgcggaaactctcgccaccctccgagctgccgccccgaccccagctcccagccccctcacctccaggggcgcggtctacaccctcgggggcgtcctggccggcggctcccgggcctctcgcgccgggagaccgggcactggtggctggagctgctgctggccccgcagggacgggggagccccgggcggcggcggtggcgtggacggcgactgctccatcttcccggggcgctcacgccgcggttccaaagcgcagacccaagtgggacattcgctacattgttggcattccacgggcgtcacgtgaccccgcctcccgcgtcactctcggc

SEQ ID NO: 203278 - DNA, 228 bp, Homo sapiens; identical to SEQ ID NO: 9203
  chr13:21635777-21636005
  hyper

SEQ ID NO: 203279 - DNA, 68 bp, Homo sapiens
  chr13:21872166-21872234
  hyper
tagagacaggaggcgctatgcagcgacggcggcagagaaagcgtgggagcgacgctcttgctctggac

SEQ ID NO: 203280 - DNA, 150 bp, Homo sapiens
  chr13:22243864-22244014
  hyper
gttgcacgccccgcagtgtggagctgcgctcaagtctcggcaactttcaccatcttgacccgagagtcgggccgtttctaagacaatgtgaacaaagaggagcagggggagggaaggggggccccgcgggagggctgtgggcgagtgtgt

SEQ ID NO: 203281 - DNA, 556 bp, Homo sapiens
  chr13:22244074-22244630
  hyper
gccgccactggggatccgggcgcaggcaggctgtcccgggcgcagagcgcgccgcctccagtctctctggcgggcccggcccggcagggcccctggcggcccccggaggcgggtttctttgtccctgactcccgctgggcgcgaaggccgccggcggctaacagaaacccgagcccgcgcaacggagctcaggcttccacgtgcggccccgcagggcagagcaggaaggagcggctgcagccccggggcgccccgcaagcatccagtgcccggccctcccagctccgcggcgggcttcggacggtggagtgagacaccagaactcgcctttcgcttccccgagccgatgcacggcttgggatggcgccgctcgtcctaagcagcgtggtttgagggcgagaagacgcctactggagcgctcccctccacccagactcccgaagacgcgcgcccgagtcgaagtcggggacagagaaggttctctggcgcccccctgccgactgctttgcggccgccgggacccgagcagcggggcgggacctaaacatagccccaa

SEQ ID NO: 203282 - DNA, 380 bp, Homo sapiens
  chr13:22245019-22245399
  hyper
cgcagtgcatctttcatttgcttttctttgtaaagccagggctcctcgactgcctcccaggaagtcctgcgctctggcgcgccgcacctcgcctgccgcagagcggcgcgggcagtaagccgggcgctaggaccgcggggagcccgggctgcggcggcgctaccttaaacccagcccaatgccgctgcctgcgccactctgcgcgccggcgggggctgcgcaggaggagcgctccgcccggctacaacgctccgcgagccggcgcggcaacacctgttcgcggcagcctgggcggcacgcgagctcccggacgcggctctcctcgctcgccgctcgccacccgttctaagccaatggacatctgccgagcctctggagaa

SEQ ID NO: 203283 - DNA, 96 bp, Homo sapiens
  chr13:22247845-22247941
  hyper
gcgagcgagcgtgtccggggccgcggcggccacccgcagggtgtcggggccgcgccgaccgaagcgagcggcgtgggcggccggcctaggtgtgcc

SEQ ID NO: 203284 - DNA, 223 bp, Homo sapiens
  chr13:23949731-23949954
  hyper
ccgcccgcggggacacgcccacccgccgggaccgttagctggggatccgccccgcccctcccgccaggccccgcccccagggaacgcccatccaggccccgcccagtcaagttctgtcttgcccaatccggacagttagcgaaggagccgccccgccccactcgcccaccaggctccgcctgccaggccccgccccgcctgcagaggcgcctctgccagaagg

SEQ ID NO: 203285 - DNA, 132 bp, Homo sapiens
  chr13:24553697-24553829
  hyper
accgtcctacccacgaagaacagcaaacaatagcacagccccggccctggaagccgagctagccgcagagggtgatgcggaactgctcatcgccagggaaacgcggcattcggacagccgtccagagcctgt

SEQ ID NO: 203286 - DNA, 1061 bp, Homo sapiens
  chr13:24734667-24735728
  hyper
ccactgcgcctggccggggaactgtttttgatgggtggggtccccggctgtggttggtagtgtgggggcgtggccgagggtgtggcctgagggagtgagctaaccgggggcgtggcctgatatggggcggggggaagagccgggctgggggcgtggcctggtggggagcggggctggggcgtggcttggctgagtgtgctgccgcggcgcgggaggagagtgtgcgttgcgctttctcccgcgatcgccctgccggtcgctagctccgagggcgcgcactggatcccaggctcctccgagagtgcggcgacctcggggctccgccggcaccggaggtggctctgagggcagggacgtgttggacacgctgactttgtaggctccgccaagaggcgccgcaggaggtaagacggcttcgggcgcgcggctctgccgggcgggcgcgggcatgggctgttaggtagaatatcgggaggatttgagtcccagtggactgcctcggggcttcgggatgtccagctcccagctgcttggcctctgcttcccccgccggtggaggctaccgggtgctcacctgttaggtccgtgcgcccgctccctgcccggcggtggctctgcgccctctgggccacccggcaccatcgcttttgggaggacatgcacgtggtgttctcgcaaaaggccgtttccagccggaagcctgcagggaggtcgccttgtaacttcacccgcgctcccagctcgcggggcctggcctacaggggcggccgtgggggtggcagagtctggggagcctggcgcggcggagccctgtaacgctctgctccatcgggtggcgtggctggtgcctccggggacccggagcgatgcggttggagagcttagtttagaaagcaagtttctcttggtaccagcggagtctcgtcccaggggaaagattttgggacccggtgcccatcgtctgtggactgcagggaatgcattggcggagttggtttggtcccattctgtgcaggaggtgggggaattggtactccagccccaggcaggtagaagcccgc

SEQ ID NO: 203287 - DNA, 190 bp, Homo sapiens
  chr13:25497658-25497848
  hyper
ttttttgttttgtttcgttttaactgccacggccctttaatctaggaagttacagcaccgtgagttaccacagtactacatacctggcttccatgtctgattaaacagcaggccaagtaaaatgtttaaagaaatcaaatgaagtgccatttataaccgttataactgaaacaaacgactgctaaagaca

SEQ ID NO: 203288 - DNA, 81 bp, Homo sapiens
  chr13:25746000-25746081
  hyper
gaaattcgagtcgtaattatggaattcaaattccctcaactctcacccaccttcggattccttctctagactcgctcttca

SEQ ID NO: 203289 - DNA, 48 bp, Homo sapiens
  chr13:25861519-25861567
  hyper
gtggcgtcaacggcgcaggtgcagccggtgagcgccgtctcctagaaa

SEQ ID NO: 203290 - DNA, 93 bp, Homo sapiens
  chr13:25946858-25946951
  hyper
ctcaaaagcagagggggaaaaaggcatccgaagggtccctcgagtgattctcaccacttggagccccgggtcctcgcgcgctcacagcggcga

SEQ ID NO: 203291 - DNA, 281 bp, Homo sapiens
  chr13:26624917-26625198
  hyper
agatggtggcgtcgccgccgtcgaagcgctcgggacactggaagccgatgcgccagacgccctgcgcgtccagccagccgtggcagtactcgccgctggccctcgcccccgccgccagcagcgcagccagcagcagctgcaggagcgaagcggcgttccaggatgaggagacggacgagcggcgagcgccccacatggcaccaccctgggcgcggacagcgcgtctccagagagcgcaggacggtctccgagaagtcgtggccccggcgacccccgggcct

SEQ ID NO: 203292 - DNA, 83 bp, Homo sapiens
  chr13:27131470-27131553
  hyper
attaggatataagcgcaaactcaaaggtactgtaatgggcacctagcaatcagaggtgatacaagggtctcttggcccgaagt

SEQ ID NO: 203293 - DNA, 239 bp, Homo sapiens
  chr13:27334980-27335219
  hyper
cgcgcccggccgcccgcccgcccgcgggatccccgcgaggccgcgcgcccccacgggtcagggctgctctagggtgcgggcaggcgagggcggcccaggggcgcggggcgaggggcgaaggagccaggaggctgagaactgcatggtagccctgcctgcctgccgcgctgcgcgccccaccccagccggcggccccgggcttgcaccgggcggggcaggggagcgctgcctggagccct

SEQ ID NO: 203294 - DNA, 275 bp, Homo sapiens
  chr13:27744759-27745034
  hyper
ccacgttttgcttaattcgggacttccagcgggcattagcacttttcccttacagtctatttaaacgccctaggaaaacaaataccatcgccttggcaggcggtccccgcacagacagacctagctccagccacatacagatgtgtctggtgggctgaagtaaacaaatgacaggaaagctaatgctgcttttcaagattaacgtgcattcccagagacaagactgccacctggacacacggctggaaacgggagagctcgtgcctctcagagga

SEQ ID NO: 203295 - DNA, 114 bp, Homo sapiens
  chr13:27825512-27825626
  hyper
agcttgtgttggccggttgcctttctttcgcaagaggggaaaatatcctcacagactttctgtgttctcagagacgatcttcttccctagaaagaagtcgcttacggttggcgt

SEQ ID NO: 203296 - DNA, 266 bp, Homo sapiens
  chr13:28024612-28024878
  hyper
gcaccgctccgcacgcctcatatttagcattacctgtgctggggcaagcgattgacatactgtagcggacgcaagtacagcggatctgcggcgagtccccttcgctctccgtagtgggcggggcttcaccccgcgtcctttaaaggaaaggtgatgggcggagccacgtttttctactgttgggattcagttccgccgacagaaaatgcggagaacgcggaggaagtccctgaggggaaattgctgctcacctggctcccgctgct

SEQ ID NO: 203297 - DNA, 236 bp, Homo sapiens
  chr13:28371461-28371697
  hyper
aaaaagcaagcctccttgtggcgatcccagttgttgccaaggtggtgacgggagcgcagcgctggggacctggaggcggctgcggcgcaccagagctctcaagcatcccgccgccagcagagactgcgttcaagtcccagcacactttcgctcaaacactcctcaccctgcaacctctgacctgaatgcagaaacagtttgcgtcttgtgctgagctggccgggaggcctccgctc

SEQ ID NO: 203298 - DNA, 80 bp, Homo sapiens
  chr13:28394582-28394662
  hyper
cagtttcttccagcaggaacacctggagaggcaaaaaaaaaagcaaaaaacaaaacaaaacaaaacaaacaaacaaaaaa

SEQ ID NO: 203299 - DNA, 147 bp, Homo sapiens
  chr13:28491468-28491615
  hyper
agagctgctgttaaatggctcgggaaggtgctcgcctaatggctcggtatcgctgccgggcctgttgtgggcgaggcggcttggagggggcgcaggcgtcagcggggattcagagcggaaacgcatttcgcctgtaatggactcggc

SEQ ID NO: 203300 - DNA, 177 bp, Homo sapiens
  chr13:28491616-28491793
  hyper
attttacgataccaggagctagatccacggggaagtacaacacacgaccttactaagcggagggttccgcttgatgcgttttttatacggctgtacgtgataaaattccagataactttgtttcatctaataataataataacaataataaatggttgtttgacctttgctccctgg

SEQ ID NO: 203301 - DNA, 226 bp, Homo sapiens
  chr13:28493981-28494207
  hyper
ttggaacaaaagcaggtgctcgcgggtacctgggcctagcctcttagtgcggccagccaggccaatcacggcccccggctgaaccacgtggggccccgcggagcctatggtgcggcggccggcccgccggtccgcgctggctgtgggttccctctgagatcagtgcggagctgtcaaagcgagcaggggtggcgccgggagtgggaacgccacacagtgccaaatc

SEQ ID NO: 203302 - DNA, 104 bp, Homo sapiens
  chr13:28494265-28494369
  hyper
ggccgcagccatgaacggcgaggagcagtactacgcggccacgcagctttacaaggacccatgcgcgttccagcgaggcccggcgccggagttcagcgccagcc

SEQ ID NO: 203303 - DNA, 51 bp, Homo sapiens
  chr13:28527188-28527239
  hyper
tgctttggaaccagcgcggcttctgtgtggcagctactgagtgcacgctcg

SEQ ID NO: 203304 - DNA, 461 bp, Homo sapiens
  chr13:28527384-28527845
  hyper
gagtggagtgggtggaggtgagaggggaagatgaggtgttggagaagcccggcgcacggggcctctattaatattaacttttattaagagttggcctttccccggggcttcacaaagcaggaagtcaagggcagtggaacagggaagggaactggcaggaagagaagaccttgagtaaattatttagctgtgacacgagattaagagtgaccccaccctcctccctgccccacacaccataaagtgggcccaggttggggagcagcgctccagctgccactaatcatggaagcccagaggcgaaatcagcttcccggggacccagaaaattgctggagtctggcgaggggcaaatcaggaagtgtctttgtcggagatgggacggaacccggcttcggggcgcaaccgggctctgggggagaccgcgtttgtccaggtggcaggccgcgccttctgatggc

SEQ ID NO: 203305 - DNA, 58 bp, Homo sapiens
  chr13:28535573-28535631
  hyper
aaaattttaaaggctgcagcccggtccccagtggatcggccagataacaagaaactgt

SEQ ID NO: 203306 - DNA, 53 bp, Homo sapiens
  chr13:28540420-28540473
  hyper
tttgaatggggctgcggccccgaccccgcgcctgctatgaaagtaaagggaac

SEQ ID NO: 203307 - DNA, 126 bp, Homo sapiens
  chr13:28541283-28541409
  hyper
agacaggggctgtagaaagtgggtctttgggagccaggatctgggagcccctgctaggagaaaggcgcctcctctaggagaagggaccaagccaaagctctgaggctcacccgaggctgatctgtg

SEQ ID NO: 203308 - DNA, 227 bp, Homo sapiens
  chr13:28542128-28542355
  hyper
acttctcttcttagatggctcagatggggaaagagagagcggagataaatggcctagacctagcccaagaaggttcgagcctccctctctcctcggcggccaggagccacgcaaggaatgcatgccgcagcaagtgccggaggacgcgattctgccggcgtccagcagtgctcacgccgacattccccggagcttcccgaaggtgtcccggggttgcgaatgaggag

SEQ ID NO: 203309 - DNA, 258 bp, Homo sapiens
  chr13:28542395-28542653
  hyper
gaatattcactcccaggctcagtaggtcagagaagccccgacgggccagaggcccccgaatttgtctccgggccgtgcccctcctggcgccgagctcccagacagcccgggacgcccctgtgcgcactggacgcgcgacgcgcagcagccactggctcgacccgcgccttcccaagcaccctccgaaggggcgcagcctctgcttaccttggctgccgagggactgctgcgccggcttccgcatccactcgcacaggt

SEQ ID NO: 203310 - DNA, 99 bp, Homo sapiens
  chr13:28543436-28543535
  hyper
gcggccttccgtgattaacgagtgtttacaagactctattagtaatgacacagacaccaatggttggagacgtcgaggcgcagcgcgcactctacgcac

SEQ ID NO: 203311 - DNA, 34 bp, Homo sapiens
  chr13:28592658-28592692
  hyper
tcacatatcttcaccactttcccgtgggtgacaa

SEQ ID NO: 203312 - DNA, 210 bp, Homo sapiens
  chr13:28608023-28608233
  hyper
ctttcagcattttgacggcaacctggattgagactcctgttttgctaattccataagctgttgcgttcatcacttttccaaaagcacctgatcctagtaccttccctgcaaagacaaatggtgagtacgtgcattttaaagattttccaatggaaaagaaatgctgcagaaacatttggcacattccattcttaccaaactctaaatttt

SEQ ID NO: 203313 - DNA, 167 bp, Homo sapiens
  chr13:28608355-28608522
  hyper
agagatgaaatgatgagtcagttaggaataggcagttctgcagatagaggaaagaataatgaatttttacctttgcttttacctttttgtacttgtgacaaattagcagggttaaaacgacaatgaagaggagacaaacaccaattgttgcatagaatgagatgttg

SEQ ID NO: 203314 - DNA, 106 bp, Homo sapiens
  chr13:28636040-28636146
  hyper
agctgtgcttaaagacccagagacaggaaatgttccctggggcgtcgaccagcacttgcagtgtgatggaagcagatacatccacttccacagcggcagcttcgta

SEQ ID NO: 203315 - DNA, 58 bp, Homo sapiens
  chr13:29069851-29069909
  hyper
caaggcactgaacctggagcgcctgaggggaactgacgcttgcttggcacctttggga

SEQ ID NO: 203316 - DNA, 34 bp, Homo sapiens
  chr13:29233057-29233091
  hyper
ctcccctcaggcacgtctcgtcccgacccctccc

SEQ ID NO: 203317 - DNA, 220 bp, Homo sapiens
  chr13:29292471-29292691
  hyper
tatattgccaactgatttttcgtaagttcaacaatgaggttccttttgggaagcgacagttgcacaattgttattgttattttgctgcgtattaaaaacggacagggagggggcgttttaaaaagcagctcccaatcgaaagggccttatttttaactcaccccacgattacagtcttcctgccaggctgggtacaggtcgggccgtgccaggggctgtc

SEQ ID NO: 203318 - DNA, 256 bp, Homo sapiens
  chr13:29293342-29293598
  hyper
tctggagttgcaaagcatttctgaatccgaatatcctttctcatagaaacacataaaacaacagttggaaaagtaacatgtttgggctgtagcccccagcaggatcccggtcggcccgcagaagaggggaatgggcgcaggtggagggcataggaaagagagtgctcaatgcagagttagcggagggttggaatgtggtcgctggcttttcctggggaggggaggggggacttgggcaaatcgttaaattttcatg

SEQ ID NO: 203319 - DNA, 390 bp, Homo sapiens
  chr13:30982478-30982868
  hyper
gcaaaggagaagcgcgtgcagtcccggcgcggcccgctctgctcagttctccagggcgggccttggcctggactgcgtgtcgggaggactcgcgggccccgcattgccgcatgccaccggcaggtgtctctttcctggcttgggaacctattgtgagttcaccaaatggaggcgcgaggaggagggggcgggcaggggaggggcgccgagagccggagcgggcaccgccccctgcctgcccgctccccgagcgcaccgcggcccagccacgaggctgccggtcctcacctttgaaacgccggcagctgcgcgcgctgcggcaggcgcggagaggagccacctcgtcacgtggggaggaaatgccttgccggcctccaaacctactggctc

SEQ ID NO: 203320 - DNA, 120 bp, Homo sapiens
  chr13:32905094-32905214
  hyper
aagaaaaatgatagatttatcgcttctgtgacagacagtgaaaacacaaatcaaagagaagctgcaagtcatggtaagtcctctgtttagttgaactacaggtttttttgttgttgttgt

SEQ ID NO: 203321 - DNA, 65 bp, Homo sapiens
  chr13:33591441-33591506
  hyper
gggcctccacaggggccagggggaagtgtgggaactgagtctcccccagacgaggcttcacttgg

SEQ ID NO: 203322 - DNA, 218 bp, Homo sapiens
  chr13:33924391-33924609
  hyper
gcccccgtgggtcgcggcgtctccggggcactgacctgccagccgcctctcccggacgttcttccacagcagatcccaggctctggccgtggagtcccgcaactgctcactgatggatctcctgagctgcgtttggcaaggtttccgtttgctggtcattttagatccgtcctcataacgaccggcgggctctccaccgccactcccgcgtggcccgc

SEQ ID NO: 203323 - DNA, 130 bp, Homo sapiens
  chr13:33924790-33924920
  hyper
ctactcctttcccactttccttctcctcccctcctcccctccgttgggcgctcctccactcccctccctcccctgccctccccctggctgcctcgcgccccactccttccaggagcgcgcttccccttcc

SEQ ID NO: 203324 - DNA, 43 bp, Homo sapiens
  chr13:35516961-35517004
  hyper
ctagcgagaagccgggcccgggcccggggctcgagcctcagcc

SEQ ID NO: 203325 - DNA, 80 bp, Homo sapiens
  chr13:35517052-35517132
  hyper
cggtggtggcggcaccgggggcagcgggatgggggagctaaggggggcgtccggctccggctcggtgatgctccccgcgg

SEQ ID NO: 203326 - DNA, 200 bp, Homo sapiens
  chr13:35517173-35517373
  hyper
aaattcgcagtgttgattggactcatacaggtcggagaggtcagcaacagggacatcgtggagacggtgctcaacctggtaaggaaaaggcgtgctctcaatctgcttccccagtccccacatacaccgtccccagcgcctttccctcccacccttcacccccagggtcacacgcgccgcgcgtccctgggagcgcagag

SEQ ID NO: 203327 - DNA, 248 bp, Homo sapiens
  chr13:36704552-36704800
  hyper
tccaggagcaattccgcgcaaacctggttttcaaaagcagcctcttttgtggggcattgcggggctgtgcgtgcgctcccactaggaggaaaaaatgccatttcctctccgcaagcttttagcactgcaggtactaatttgaacatgaggcagcctcgctgtccctgaaggaacttgagaccctgcaaacgtacttgcaacacccacgctgcagccaccaccacgcacgaatcgaccccatccacaag

SEQ ID NO: 203328 - DNA, 91 bp, Homo sapiens
  chr13:36705636-36705727
  hyper
ggcgcacccaccacggctgcgccccaggtcctcctccctcccagcgccctcttcccaccgcagcaacctcggtgcatctggcttgactaca

SEQ ID NO: 203329 - DNA, 80 bp, Homo sapiens
  chr13:37004651-37004731
  hyper
gaggtttcggtcatttttgtcaaaggaaatcagatgaaaaggggtgtacaaaggaccaggtctcgtgagcgcagccaatc

SEQ ID NO: 203330 - DNA, 42 bp, Homo sapiens
  chr13:37005431-37005473
  hyper
atttttaaaaaaataaagttcgattatttcacctggcttgtc

SEQ ID NO: 203331 - DNA, 193 bp, Homo sapiens
  chr13:37248319-37248512
  hyper
aggtcagtgagggaaacttgcagggtcccgagctctgggggtgaacttgccctacgcggagagcgccccactccttgcctggggcggcctcgggtcctggaggcgagccgcctcccagactctcccccgagatctgggctcccggagatgtggctcctttctgagaaacacccccaaatctatcccttttgag

SEQ ID NO: 203332 - DNA, 304 bp, Homo sapiens
  chr13:37393232-37393536
  hyper
aaggggccgcggccgcacatgcgcagtcagtcccgttggttgtgcgctcagccccgcccccagaggcgccgcgctccctgacagcccgcgggcgtacacacgctgacgcgcaggctgcggtcgcgcaggcgcagtcggggcgccttcccggtataggcgccttttaccccagcgtgtcctgagtctttggttcgcgaagtgccgttaggccaagcaggtgctaaaagcccggggtcgtggaccccggccaggtcttagcagcatggaggcgcagggtgtagcggagggcgcggggccgggcgcc

SEQ ID NO: 203333 - DNA, 93 bp, Homo sapiens
  chr13:39260914-39261007
  hyper
gctcctctgcaggagtaccagatctattaatagcagcccagagagtagcgcaagcaggggtgggcaactcctggccacttcttccctcacttc

SEQ ID NO: 203334 - DNA, 243 bp, Homo sapiens
  chr13:39261446-39261689
  hyper
tcaggctgacctgtccaagcccgaacaccgggaccatgcactcagccgggactcccgggttatcctcgcgccggacaggcaactccaccagctttcaaccaggaccgccaccgccgccccggctgctgctgctgctgctgcttctcctgtcactggtaagccgcgtcccggcacagcccgctgccttcggcagggcgttgctgtcccctggtctcgcgggggctgcaggggtccctgctgagg

SEQ ID NO: 203335 - DNA, 101 bp, Homo sapiens
  chr13:39610513-39610614
  hyper
gcaacaatttcttccgtttcagtcaagggtcgtaaaggtatgcagctgacgaaagaataattgcccggaaggccgaaggaaagcaccgtgtgttgatgtaa

SEQ ID NO: 203336 - DNA, 345 bp, Homo sapiens
  chr13:39610817-39611162
  hyper
ccaattcctaagaacgtgactttaaacttaatgccacacttaccatcaggacacgaattttgcatggccaacgcaacaaatatactctaccttatgcttagatttgaaaaccccatcataataactaccataaaagaaactttctgcgtattacctctcgttttcagtcactcttgtgttactgaaagatgaggcaataaactcaaaaatattaaaccccttacccaaaaagtacagagctattacggatttgtaaagccggctttggaaccgagggctttacaaatgtaattcccacgacaccgtgctgagtctcaaatttggcgttaacgtaacttaatttct

SEQ ID NO: 203337 - DNA, 33 bp, Homo sapiens
  chr13:39612009-39612042
  hyper
cttccgggagcgggccggcggctggggagcacc

SEQ ID NO: 203338 - DNA, 135 bp, Homo sapiens
  chr13:41345197-41345332
  hyper
ctccgggcttccagaggacaaagggtggcgggaaagggggcgaagaggtaggaacgtcgagactctaggaaacatcgccgagacacgaaatgaaccaagaacacaactgaaatggtgcgtcccgctgccaaacac

SEQ ID NO: 203339 - DNA, 136 bp, Homo sapiens
  chr13:41345361-41345497
  hyper
ggcgccttcctccccctttgcgctccggtgggctacaggggcgggtaactgtgttccggactcgcccgcggccgggcggagccagttgcctccaagcgacccgacccaccccgcgattgtagtcctagaggcggag

SEQ ID NO: 203340 - DNA, 206 bp, Homo sapiens
  chr13:41364043-41364249
  hyper
tggctgcggggctccgcgcctcaggggcgccagtgctgggcagcatggagccgcttgtgaatggagacttgctggctgcccaggagtgggcggctgggcaggggcggtgaacgtttagggtccggccaagaaagttggaagtcgtctccctgacctgttccttgcgaggcccgggaggagacgcgcctggccggtccttggcggcg

SEQ ID NO: 203341 - DNA, 202 bp, Homo sapiens
  chr13:41635673-41635875
  hyper
ggggactgagtaaggtgtctggatcggagggaggttcgggtgggcatcgggcggctggaagagctcgactcgtcccgctgggaaagcgcgagtctgagtggaaccctggacgacttgcagagcggctggcgcagtcatgtgagttgggtctcaggccctgaacaacgaggtgttgtttctctgggccgccctttctcgcccg

SEQ ID NO: 203342 - DNA, 198 bp, Homo sapiens
  chr13:41706793-41706991
  hyper
cgcagaaccgcctcccgttatcgtttagacagtggctgactcaccctctctcactcccgcgtcctttctccgcgtctgctcgccttcacaggacccgctggcttggagccgcagaagccgctactgcagcgtgggcgacaatgctaggcgcccaggagaactaccgctcccaggttgcctttcgcgccccgagggctg

SEQ ID NO: 203343 - DNA, 161 bp, Homo sapiens
  chr13:42615857-42616018
  hyper
tgtgggctgccttttccctggcgtcgaattttgactctccacgccctgcctcgatatttgctactccttcttggttgacattgtgagccagtctgaaaagccccgtccgaaatttctggcctcacccatgttccggtcaacgtgttcggatgctgttttcc

SEQ ID NO: 203344 - DNA, 339 bp, Homo sapiens
  chr13:42621978-42622317
  hyper
tagacacttcttgtgcgttctgtcgtcttgggctgcgtgtagtctcttgtttctgcgctttctccacgcccttcccagtttcctgttagccgaaggggatcgctctttctgaacgaaaagttctcagagcggagctgaacctcccggaaaatgctcttctcttccgtgtgcgccggatgggggtgggggtgggccagaaactgaacgccgccgtcaggagagctgaggggacccgacggccctggcggaggcgggagaggtacggtcctcggagtggggctgggggtggggaaaccgacgaggggcagcccccgactgtcttggtggcagaggggactt

SEQ ID NO: 203345 - DNA, 174 bp, Homo sapiens
  chr13:43148495-43148669
  hyper
cggcggccccggagccccgcacgagggccccctgcacgccccgccgccgcctgcgccgcaccagccccctgccgcctcccgctccatgttcgtggccctcctggggctggggctgggccaggttgtctgcagcgtcgccctgttcttctatttcagagcgcaggtgagtggcca

SEQ ID NO: 203346 - DNA, 473 bp, Homo sapiens
  chr13:43148698-43149171
  hyper
ccatctccttcccccgcacttggaaactgagtctggcggcagggctgggccacccagagcttgcatattccggaagggaaagtgactccagaagggagagaggaagtgttgagtttggggacaacctggcgcagggctgtcgggcgcaccctgctctctctccgcccacgcaccccagcttctcggtgctctgggggcggactcccctggccggacgatgggtttgaatctcaccccgtcccttcgctgggaaacaacactggcctctcaccttttctggtagtgattgcatactttttctccctgtcatttctcacttgaagttaagaatcaacttctgttcacgtaggaaaaaagatgagcgccttcacttgggcatctacctttcccttcccgcccaccacccggcgggtttcggttcctgcgcctggctgctctgcaggtgtgctggggccacggtgctggagggctgc

SEQ ID NO: 203347 - DNA, 43 bp, Homo sapiens
  chr13:43149172-43149215
  hyper
cggagcgggaggtcgcggtgctcgtgcccaggtcgcccaatgg

SEQ ID NO: 203348 - DNA, 318 bp, Homo sapiens
  chr13:44361226-44361544
  hyper
gcggggaaggaggatcgaacgcgtgtctcgcttggagaagctgcccacggggcggcagcagaggaggaggggaagtcagcgaggcgcgctagggctccggatcccagcccggcagagccgagcggagcgcgcagccaccgatgcagcagaggcggcgcccgcagcccacggtcgcgctgccccctctcgggaggggccgaggccgctcgctcccgccaccgccgccgcggtcgggactgctctactgggagcgggggaaccgagagagggaccgcacggttgctacggcgaccttggaggggccgggcccgctgaagg

SEQ ID NO: 203349 - DNA, 74 bp, Homo sapiens
  chr13:44361578-44361652
  hyper
ccaggctggagcgggcgtgttacaggattgtgggcttggggtagacggtggaattgggccgcgtggcctgggca

SEQ ID NO: 203350 - DNA, 205 bp, Homo sapiens
  chr13:44453169-44453374
  hyper
tgaggaaacccagcgtcctgaccacactgctgggtcagcgaggcgtccctcagagaccggaaacgcggacttcagctcgcttgggaaacggcttccattagcagaagggagactgcggtttagtcccgaggtcgctccagcagcccggcctcacgcgacccaccattcccgccgccccctcacggtgcccgccgttcccgccgcc

SEQ ID NO: 203351 - DNA, 208 bp, Homo sapiens
  chr13:45009587-45009795
  hyper
gagaatcccgtgagaagagccacaggcgctgctccaataacaaagaacggccaaggcggaaataaaaaataggagaaatccaggcgcaggctaagaaaacaaaactttttctctgattcttcttcattgtgaaggagcccgcgccaccggggacccgtttgtgcaccgtctagaagacccttatccaggatcccgacttctggggccc

SEQ ID NO: 203352 - DNA, 122 bp, Homo sapiens
  chr13:45149891-45150013
  hyper
ttttcatttgagttccgcctggcgcaagaggctgtgcctgcagctgagcctgcgaaaggaggttcaggctttgtggaggcggaggctgtggtcccgacgtagaagatgctgcagggggcggc

SEQ ID NO: 203353 - DNA, 104 bp, Homo sapiens; identical to SEQ ID NO: 9329
  chr13:45150766-45150870
  hyper

SEQ ID NO: 203354 - DNA, 145 bp, Homo sapiens
  chr13:45991445-45991590
  hyper
gtttctcttatttaattcttggtaagttctttcagttttacttcctgttccctttttagtcttaagtcttaaaactgtaattgcacagcctttaatgtgctctcatacatttattgttccttgctggaccgactgccctttcaat

SEQ ID NO: 203355 - DNA, 213 bp, Homo sapiens
  chr13:46626732-46626945
  hyper
ccaacccgcccgccgcctctccagggtcaagcgaaactgggtcgcaggaagaaaaataacgaagagattgtagattaagaaaaggcaacaaaaacactaccaggccgctaggaggaccgcctcaaaatgccgccggaagtcagaggtttgccctgttcctctgtagacccaggcagcttccggccgtcagattagtcgtcagtgcgcagacac

SEQ ID NO: 203356 - DNA, 36 bp, Homo sapiens
  chr13:46785661-46785697
  hyper
gaaaaccgaatgcccgcttttcgagagcactgcaaa

SEQ ID NO: 203357 - DNA, 224 bp, Homo sapiens
  chr13:46786103-46786327
  hyper
gtctccttggcctcctagagggtggggatccgtggtgcttcttcgggaacagcctcctgcaggaagaccctcgctggacctttacctcgctgcctagattccgaggaaaaggagataggagacgaaaagccagttggtttggaaagcggccgattatcctaaagggtagtgtgggagtccagcacttccatgcccctctttgggtactacggaagggagatttc

SEQ ID NO: 203358 - DNA, 146 bp, Homo sapiens
  chr13:46960938-46961084
  hyper
tagtctctgagaatcgccctgcgtaaaagtgtcctgaggtcccgcttctgcgcccttcccggcccaagccgaacacagggtcaacctcactctacaaagtcaaccggatagaaatccgccaccccgcgaggagccccttcctactg

SEQ ID NO: 203359 - DNA, 149 bp, Homo sapiens
  chr13:46961683-46961832
  hyper
aagacctggcagaaatgacttcccaaccccagatgcccccagcagcagtatttagcagtcatacaattgcctgaaatgaagaatgagtaatctggatgagtcggccctgaaatcgacctgcaacttacccggaacgtgagctgtctctc

SEQ ID NO: 203360 - DNA, 63 bp, Homo sapiens
  chr13:50070357-50070420
  hyper
agacgccggggcggcgctggacgaacttggctcaccactcgcgtgcctgttggtgggggaggg

SEQ ID NO: 203361 - DNA, 63 bp, Homo sapiens
  chr13:50070717-50070780
  hyper
cggccctctacttgagtgggtgggtcttctgatgggttcctgcccttgcgtgtgtgtatagct

SEQ ID NO: 203362 - DNA, 159 bp, Homo sapiens
  chr13:50265731-50265890
  hyper
ccagagcgaggattccgtgcccgcctcgcaccctggccagcctgctgagtccggtggttttgccaggtgccgcccatggaggttccgtagaaggaacgtgctcaccaacttgcgcaaccgcctcgaccaaacctgttcccaaaccgagcccaaaggatt

SEQ ID NO: 203363 - DNA, 216 bp, Homo sapiens
  chr13:50367043-50367259
  hyper
ctcaggcgcggggcggcggtcgtcaactacagttcccatcatgccacgatccgcctggagtaattctccacgcctagtgagaacgaggagaatgccgggacccttccgcgcgcggctctttgcgcgccgcgctcatgttgctgggcacaaagctccgcccccacaaggccgcctctgggcggggaagagcgggggagcgtccctggcaccttgcgc

SEQ ID NO: 203364 - DNA, 209 bp, Homo sapiens
  chr13:50570752-50570961
  hyper
gctgcccagcctctgcgggggggctttgggcgggcgcaggactctggaagggagaaaagcccgcagcccggccctccccgtcccaggcggcccgcgcgggtggacggcgggagcaggcggcggttggagacgccggaaggaacgcggtctcaccacccggctccctccgccaaggcgaggcgcggccggggaggcgggacacaggcgaa

SEQ ID NO: 203365 - DNA, 553 bp, Homo sapiens
  chr13:50571189-50571742
  hyper
gggctgtgcttggcgcgtaccgtgcggtccctgtagttggaggacgggcggtcgcgcggcctttcccactagccggaggtcggagataagtacccgccgcccggctcctctcgggaaagcggggtggtcctcgaaccttcagcgagggtggggagttgcccaggtcagcagggatctgcgtgggttgggggggctggcgaaggccgtctgagctccagtccggcagcgcggcagaaaccagcggggcactgtcatgggcctggggaggagcggcctgcggagggcgccggggcagtgtgtctgtggtccagaaaacctgctccgtccggagccttcctggccccgctaccagcgtctccacatcccctagaaaagaaaagacgggtgtgggccttaggttacagcgcgccgccagcgtttggttgcatggcgccgggggagggcgccctaaccgagaagctgcttaatacaaagagctccaggctcctggcggttcaccaggtctaaacagccgggctttatttgtgggggcgattgaaaaaattgagggtca

SEQ ID NO: 203366 - DNA, 47 bp, Homo sapiens
  chr13:51086772-51086819
  hyper
tgtctcagcagctctcggggggacctgcaggctggggaggcagcttc

SEQ ID NO: 203367 - DNA, 127 bp, Homo sapiens
  chr13:51483755-51483882
  hyper
ggggtgtggcgggcgtcacccgttgtccgggcacacaccccgcagacccaatcctagcccgctggctagaccatggagggccgctgggtgcagccacagagcgcggggccccggcgaccccgccccg

SEQ ID NO: 203368 - DNA, 78 bp, Homo sapiens; identical to SEQ ID NO: 50667
  chr13:52027258-52027336
  hyper

SEQ ID NO: 203369 - DNA, 360 bp, Homo sapiens
  chr13:52702922-52703282
  hyper
ctggaagcggccgcgggtgagtggcaagacgcttacccgtacccgacctccgcgtgtggagcgttgccatagagaccgacgcgccctggacgctacacccacacagcccaggacgctaggccttttctgggccgcccccgccgccccaggccgaaactccatccctttcccccaccctgccgagctcccgaagccctgtggcggctccgggcaagaactaagggcggcccctgcaagcgtacctgctccgccggctccgcggggccaacgaagcgtcccggaaggatccgggttcccggggccgctgcgcctccctgcggccggggcggagccgcgcaaggaaacgcgggcggggcgcgg

SEQ ID NO: 203370 - DNA, 64 bp, Homo sapiens
  chr13:52980451-52980515
  hyper
aggaaacaggcaggaaacgcgcggccagccaaggtcctgcgggagggggtgcggccccggcaga

SEQ ID NO: 203371 - DNA, 218 bp, Homo sapiens
  chr13:53029235-53029453
  hyper
gtcctcgtcagtgaacgcgtcgatgtttaataagaagggcagccaatcaacacttttcttgtctttttctcgtctgccttcctccaaggactgtgagggtctcaagatgtgtcccatctcggttgtttgtcaacctagtcctgctatgtcgtggggactgagcaggccgactcctcccccatcgcacgtccaggatgaagagcgctgtttaggtttga

SEQ ID NO: 203372 - DNA, 122 bp, Homo sapiens
  chr13:53226636-53226758
  hyper
acagacatacaaacgcccctaaccgccacacgttccttagggatgacagtacgttacaaaagtgcttctaaagtactactgaaagctccgtgggagtgcccgctggcgtgggcgcggtggaa

SEQ ID NO: 203373 - DNA, 202 bp, Homo sapiens
  chr13:53422432-53422634
  hyper
cgatgaccgtgccgggggcatcctcctcgaaggtgctgtatcggactgttttgctctgggccactgagagcacccagcagaggctgaagagctgcaaggggaaaaggcaggggctgccccaacgcctcacaggactcatgcctccagcctcaagtgcgatccgaaaggctaaggaagtcttctctggtttccaggtcgggcg

SEQ ID NO: 203374 - DNA, 231 bp, Homo sapiens
  chr13:53422885-53423116
  hyper
atccctttaatgtggaaaggcttagaggggaaaacaagaaaggaaaattagggaatctttcttttgtttaactccttttgctttttcccccttttcttgtcagcaccctgcatgtagaggagttggcacagggctccaggagtaaaaggagcggatggttttgttaattgtcgcctgcctccctccgtgccgcggctagaactaagtgcgaacacgctggggtttcacccc

SEQ ID NO: 203375 - DNA, 79 bp, Homo sapiens
  chr13:53423198-53423277
  hyper
gcagccccctacccacagacttgctctgctgaatgaggctctgctttccttctctcctagctacggtgcctggaatagc

SEQ ID NO: 203376 - DNA, 61 bp, Homo sapiens
  chr13:53424698-53424759
  hyper
cttccatctcccaagtgcgatttagtatgtagccctcccaccgtccccgcccaagagatat

SEQ ID NO: 203377 - DNA, 53 bp, Homo sapiens
  chr13:58204884-58204937
  hyper
atagactgagtcagagaaagcgttaggaagaagccgcaactaatgtctgtgaa

SEQ ID NO: 203378 - DNA, 191 bp, Homo sapiens; identical to SEQ ID NO: 50692
  chr13:58205044-58205235
  hyper

SEQ ID NO: 203379 - DNA, 352 bp, Homo sapiens
  chr13:58205443-58205795
  hyper
tgtttcccttctagcgagagacagggagagtgtgtgtgcaaggactgggagggaggctcccccttcctttttattcggcctcccccctcctcctttaaatgtgcacgtccaaccatgagttgcctgttgatttcccttcgcctgggaagaaaagcaaactggaattaaactgcttggagagaagtccttgctcgcggggagaggatgggatggtagcggaggctactggcttggcgtagagaaatcagagagtgtgttctacgaacagaggcgaagatttatctctctacttcccccctcccaatagactcacacagcaaatgctgatcaggctgtggctttcttgatttcg

SEQ ID NO: 203380 - DNA, 186 bp, Homo sapiens
  chr13:60970305-60970491
  hyper
gggcagcggcaagcggcggagatagggattaagttcctaacagtcttcttcccctgacctggcagatggggacgctgccccttagaagcctttttccccgcaatacgggacgccgcagaggtgaaagaccaagaaggtggagcaaacttttagggagcgcctcttgggcccgcgtacccttccgcc

SEQ ID NO: 203381 - DNA, 142 bp, Homo sapiens
  chr13:61989051-61989193
  hyper
cgtgaagtttagataaaggtagaaggtttgaaaaaccatccgagtgggaattgcttcacaatactgcaacttgtcggggtcgcggggttccttgaccctaacccttaccggcaggttcctgtagctggtgctgctcctggga

SEQ ID NO: 203382 - DNA, 225 bp, Homo sapiens
  chr13:61989329-61989554
  hyper
ggcggcagaagacactccctctcggttcatgcaaatcgctgggggaacttcagccaatagtcactggctcttcaattaaggacgggaactcaaagagtggcagaaaggcaagagggcagaagggcacattcatggtttcctgccccggacgcaggtaactccatactctgccagaggagctggaatgggggacttgctcctgaagactgcgaagaggcagctcgg

SEQ ID NO: 203383 - DNA, 96 bp, Homo sapiens
  chr13:67804132-67804228
  hyper
tctcttacccactgggtctgggttcttctgggcatttagcacacacaacacatagttgcacttcttcagctcagggatattttccacagcagcatg

SEQ ID NO: 203384 - DNA, 217 bp, Homo sapiens
  chr13:67805438-67805655
  hyper
tcactgcgaactttgcttccgaggggctggaaggagtcccaggcagctgtttcccaagctgtggaacacttcctttcccctaggcactttctgctgattccaactttctttcctgtgattttcgtcttttcccgtgcatttcatttctccgactccagctctgtactaaatcctcacaagtttctcgttttcatacgggaactggatggaatgactc

SEQ ID NO: 203385 - DNA, 152 bp, Homo sapiens
  chr13:74707109-74707261
  hyper
agtggctcccaggccggctctgcgggttcccggcccgggtggacgtacaaagttgccccttgtcaactccggccaggtcccccgtaattgaaaataacagccaccggccagcccctggctacttgcatggaccaggcactgtagcaagtgac

SEQ ID NO: 203386 - DNA, 211 bp, Homo sapiens
  chr13:74707414-74707625
  hyper
accccgctcgaggccggggggccaactacttccacgagccccccctcccccccaagttcagccctggggttttatttcacatccttggcaactgtcaggcaaacactgcaaccaacaattccactaggggtagaaaaacacttgcttaattcacgttacttgataacttcttctggaaaaaaaaaattaggggaggtggggaagaaacctc

SEQ ID NO: 203387 - DNA, 926 bp, Homo sapiens
  chr13:74707668-74708594
  hyper
aacagcatcgcccttccccggccccctcccgcttcccagcactttccccctttaagaacacagaccaaccaaaatgatttaacttgagcagatgacagaaggaaaataaaacacgttaagagaatacggtctgatttgggatggcaaaaaaaaaaaaaaaagaggagggggttgtttattttgataagaaacggaatcggcacagacctgaacagaagctgcagagcaggagaaattgttttctttccctcacacagagtccccctctctctctccctttctctctctcacacgcgcgcgcgcacacacacacacacactcgcacacacacggcgtcacccgcgcacacgcacacgcagagcctctcagcggctctctgcagttctcaggaaatgaatggggggcaacccggggaactgttgtacttgcaaatgacttacccggatcacatgatgcgctaaatgtagggtgggccggtgggtggaggctgccgagttgcgagccccggtctagtgtggggagcctcgccaggcccgcatcgaattaccccggggcccagccgagggggttgcaggacgccgcttctcctccctcgcagcccgcagctcaggaaaccggagaggcgcttggggtggggtggggtggggtgctgtgagggggggggccgaaaacaagaaacccccaaacaaaagagctccgggtcctcctccccagaaacaaagccccgccgctgccggcgagccccggggtggggccgagggcgggggcggcggcggggaggggctcgctcagcaggcgctaagtcgctttattgccataaaatggggcccccgagccgctccgcccgaggattaggaggcgggctctgagtgtgatggttgaaatcccctgtgggaaactaacccctccccgctcgcagaggtaga

SEQ ID NO: 203388 - DNA, 200 bp, Homo sapiens
  chr13:74709334-74709534
  hyper
atgcgcgcctggcctcgccaccccagcgaaggggcccctgcctgcgccagttctgtgggaaagcacgcaaacttggaggactggggcagaggaagcgggatctgcagacccccgcggggcccgggggcggcggggaagggagtccagctccactgccccacgcccagagcggagccccaagaagcggacggcccggagcc

SEQ ID NO: 203389 - DNA, 35 bp, Homo sapiens
  chr13:75794021-75794056
  hyper
acggctgagcgggggcggagcgccatctactggtt

SEQ ID NO: 203390 - DNA, 47 bp, Homo sapiens
  chr13:76054892-76054939
  hyper
tgctgcgaagatgacgcgaccagccaaaccggttaaggatttgactg

SEQ ID NO: 203391 - DNA, 1065 bp, Homo sapiens
  chr13:76055056-76056121
  hyper
ctccggtcacaccccagacaccgccgtcctcccgggacgggcgctcctccacgcgtgctccttggacgcgccagctccccctccatcccgggaccgttgtccttttccctccgggtccctgctgtagccggccggccgctcccgccgctcgcccagcccccgaacgccttctctcccactcccaaggtccagggaaggggccagccggcgcttgagcgcgccacgtggagcgcgcgcgcctgcagccaaacctcagtcggtccttaaagtggggtccccgcccctcccgccctgctccccgatcccccaaggccgagcccgcccccgcgcctccgagcccctgtcttgcctggctggggtctgtggcgcggaaaacgtggcaggccatctgcgactcggggtcgtcgggctgcgccttgatcaggtaggcaaagtaggtgaggtcgtggctgttgtggatgaagcgcgagatatgctgcgccttgtgctcgaagatgaataccgccgggttgggctgcgtggccgacggactagtgccccccgaggccccagcgcccggcgcggggacgcaacgcaggaagggcgcgctgagcaccaggatcacctctcgggccgccggcgccccgcagccgcccgcctcgggcttctggctgcgcctgcggatctcggccatgagccagggcagcataggcagcgtggtcctgtggtccaggcacgaccccccaacgtaccacagccggaaccgcttatcgcttggcttcccggggccgggctgagctgagacgcccggctcgggctccagggggtgcgggaacggctcatcctgaatgcagctgggcggctccataactctcgcctcaccagggcaccgcggaggccggccgggcgcaccgcgccccccactcccgcgcagaaggcgccgccgaaactgtgccaactgccgcaccgggctcccgcgcctgcctgggagcggcgcgaccccgaactccgcgcttcagcagccctgccccatgcagcacttccacgggcgcggctcggaggctccggcggcgggcaccgaggcaa

SEQ ID NO: 203392 - DNA, 134 bp, Homo sapiens
  chr13:76450655-76450789
  hyper
ggtttctggtcaataaaatgcgatgttcggacgcatgcctgaagtgggcttgtctcaccactagggggaaggcaaatacaactcttgggtgcttctgtagctcacacgagggtaaataacgaaaagttttaata

SEQ ID NO: 203393 - DNA, 171 bp, Homo sapiens
  chr13:77901202-77901373
  hyper
cgccggggctacccgcaatgggaagctgccggcctcacagagcatgcgccactcctcgcacatgctcagtaactgccgccccttttcctccccaccccctctccgccaccactccctccgcctcggggctttgggtttggggctgttgggttgtgcggaatctgaagtagt

SEQ ID NO: 203394 - DNA, 216 bp, Homo sapiens
  chr13:78272438-78272654
  hyper
cccgcgccctccctgctttgcagcctggcgcagccacccgaggcgcccttcgtctacttcaagccggcagcaggcttcttcggcgcgggcggtggcgggccggagccggggggcgcggggacgccgccaggggcagctgcagcgccgccctcgccgccccccacgctgctggacgaggtggaattgctggatctggagagcgtagccgcctggcgg

SEQ ID NO: 203395 - DNA, 170 bp, Homo sapiens
  chr13:79171244-79171414
  hyper
ggcaataacaccgatggcagaactgtaccagtattaattgtcatcacctttatcatcccgctggccaccaaggccgttcgaatggggtgggaaaggctagttttagccaggatcagaagccccagttccaacttcacggacgaaaaactgcgaaagcctatcaacttgaa

SEQ ID NO: 203396 - DNA, 44 bp, Homo sapiens
  chr13:79980677-79980721
  hyper
actcccgcgtgcgcgacaccaggcggcccgtaggttccaggtgc

SEQ ID NO: 203397 - DNA, 79 bp, Homo sapiens
  chr13:80914000-80914079
  hyper
aatggaaaatgatcgcgaccgcttgatgactttcttcctgcgctgggtcagcccgagcttccaaaaataaaataagtgt

SEQ ID NO: 203398 - DNA, 424 bp, Homo sapiens
  chr13:80914144-80914568
  hyper
ccaggcagggcgacgctcccacccgctccgggctagactgtccacacggagcagaggcgggcactccctccacccggcaccctgcctttttctcaccctggaagtctcctgcccccgaggcgggcaacctgtgtcccccagccccaccagcgccccgcctagggacagcctctccctggactttgccttccaccaagaggaagaacaggttagaaatgcgggcgcctgcaaaggcaacctggaaaatacaaagtgtttttctctccctctcccgctctcagcgccgaattcgcggccagtgcacggctgggagcagacttcaggctagctgtcctccgtcccaaccccctagagcgcgggcgcgcggggtcgcctgtcggggacactgcacggggtgcatacagaagtccccgcagaggcaggc

SEQ ID NO: 203399 - DNA, 480 bp, Homo sapiens
  chr13:80914688-80915168
  hyper
acctactccatgttgcccacaacgcgccggccgcggcgccaggaggggaagagccaaacgtgcctcaccgtgatcgcggctttgcaccaacccctctcccttggattctcttctttctgcgatgtgcaaataaatccagtctcgatgcaaacttttttcctttctttccaacctctgctttagaccaacttccgagcaatcggcgggagaaaaaaagagaattcggagccagattccccgctgatgaacactccggggttcggagctggagacgactccccttctacaagcgcacgcggagtatttcctcttttttctcaatgaacaagaggccgaagcgccaacggcaagtcccttttcctggcagatgagcgaatgggaaaagaaaacggccttacggagaacctaaagccagatcgccaagtggtgcggccggggccgcgtcgtagcggaggcggcgcgggggcgcgggccgggccg

SEQ ID NO: 203400 - DNA, 73 bp, Homo sapiens
  chr13:80915468-80915541
  hyper
acagagcagttgttgtcccagaggatatatcgcatccggtcccagctcattggctccgcggggctacattcac

SEQ ID NO: 203401 - DNA, 93 bp, Homo sapiens
  chr13:80915582-80915675
  hyper
attcaaaagggcaaccgcgccgccccgcgcgtccccaggccggtcctgccgcccgagcgccgtcacgcggggcgcccgcggggccgggctggg

SEQ ID NO: 203402 - DNA, 499 bp, Homo sapiens
  chr13:80916947-80917446
  hyper
aagggaagtggcatgcgttatttccgggcgctggcctacgtcccccgacccctaaggtgagggtggacgaggctacaacggcctgctcccgagcgtcccgggactgcgggcgcaaaacagctgggcctctctggccacagccgctcgccggacgcccgaatccattgagccgacggtgaacgcaggcgccgctgcgctcgcggcccctctggccaccagggggcgcccgcccggcgcggggctaaggctgctttcttctccgggacacgacgcggacaggctgggttaccttccaaaacgtgtgtgcattaggccggctggtttaaaatgaatacaaagatattaatataaacgacacagaagatagcttgccctcctgtctgcttgggagggtcaaagcctgggtgtgcaaggctaggcaggaacgtgctgccggtgtgcggccagcaagtctctcgagcagagcaggtgaaagcaacgccgtcgcttcgcctcttca

SEQ ID NO: 203403 - DNA, 158 bp, Homo sapiens
  chr13:84456480-84456638
  hyper
gggggcggagggcggggggcgagttgtctgagggaggaagagagcgcgagaatgaggggaggggggcggagaagagagttgctaagaagctctgctcgttccagcctggtgcactctgaaagatctgacaccctctgctgatctgcagtagcaaaaat

SEQ ID NO: 203404 - DNA, 196 bp, Homo sapiens
  chr13:88326061-88326257
  hyper
gagcaaggtctccaggcttgaacccgctgtctcggaaacatcttggctttagtttggagttgcaattcgatattagacttcggtagtgaggcaaaggcaaggttgaccagagaaaaggcataggttcctagagtccagcatttctatcaaatgtcctccaccccattaaccaacgcagcatgcgcgcgcgcgcaca

SEQ ID NO: 203405 - DNA, 206 bp, Homo sapiens
  chr13:92001573-92001779
  hyper
ccggcttgcagccacgaggtcttgattgggggaggggtggtgaagaatagtctgtgggctgctttttttttttccttttactggagctgtacagtggagtcggtgattgctgctgatcataatcaagtattttaggagcttatttagacatgtatctgatagctaaggatttttcaactttattctcttacgtatttttcaactgt

SEQ ID NO: 203406 - DNA, 161 bp, Homo sapiens
  chr13:92050814-92050975
  hyper
gcctgtccgcggggcggggagtgcggggcggggcttccgcggagcgcagcgagcgggcacatcccaggttagctgctgcgagccgagccgggcggcggaggcggcggcggcggcggcagtggcggcagtggcggcagtggcggcagcggcagcagttgcag

SEQ ID NO: 203407 - DNA, 253 bp, Homo sapiens
  chr13:93878955-93879208
  hyper
ttcccctttctaccgactaggaagagatccagtccaggttttgcctttgactcggcctgtgaatttcggctgtgcaatgtgtagcacgtttctttctcccccctcctttctccttccctcttgcctccagtgactgtctccaggatttctctcttcctatttcaggaggactctcacaggctcccacagcctgtgttaagctgaggtttcccctagatctcgtatatccccaacacatacctccacgcacaca

SEQ ID NO: 203408 - DNA, 151 bp, Homo sapiens
  chr13:95201109-95201260
  hyper
ggaacgtctagacccgtggcttgtttaaacacccgctgctaggccccactgccagagctgcctatccagggccgagaatgtgcatttctaagtagttctcaggcggtgctgatgctgcggatctggggactgtactttgagaaccaccggt

SEQ ID NO: 203409 - DNA, 287 bp, Homo sapiens
  chr13:95201339-95201626
  hyper
ctggtggcgccaccccagggccagacccagggccggcctcggtgcgcctctagccagaaataaccagcactgggttccgctcaccggcaacgccaggtgggggccatctgaccactcaacagttttgctttttcttcaaattcggatacttagaaggaatgcgatgaaattgggatgaaggtgttttgctggccccgtggacagaccagacctcctcccatcggagcctcgggtctcacaccagccccccaggcggcgcgcggccccgtctcgccaccgcggcccgg

SEQ ID NO: 203410 - DNA, 229 bp, Homo sapiens
  chr13:95201662-95201891
  hyper
gtcccagcaccaggctccgtggcgcgcacgcgcggcagcttcttctagccccgccaggagacggcccagaagggctatgcggcgcggcctcgctcctgggggtggttaggaacgactgtttcatttcctccttcacccttcaaatctcagtttttgcttgggcttgaaggaatgggccagggtatcgtggacggagagtcttacaaaatttgagtttttgaggtcagaa

SEQ ID NO: 203411 - DNA, 301 bp, Homo sapiens
  chr13:95202013-95202314
  hyper
cgctttgcgtccaactggcttgcttgtcttttcctggtgatcatgtacagcatttcttccttgtcctgttaaacggtgtcgtcggaattcttccacctccctccttctacgctgccactgggcgctgcacacgcgccttactttcttagattgctctcggcgcgcgcagcccgcacggtccaggagctgggtccaggcccccgatggcggctcctcgggatgctggttccgtcctcccagggccggtccccgcgagatccgaagcagcggggtcgcctcggggagctcctgcccaggcctg

SEQ ID NO: 203412 - DNA, 243 bp, Homo sapiens
  chr13:95202344-95202587
  hyper
tgtgactatccacattcgtcaccttgctccccgaaaagttccaggccccaggtgaggagccgtgtaggcccaatacgattggatgaaggagtgtacggggcaggaatcgtcagactggcctctggagaggagtttgcagcctctccgtgctccgggcccgggaaatgtccaccttaatcatcacctctttgcatggagcctgactggcaaataaatgctgggtgagctcactaacgatgatta

SEQ ID NO: 203413 - DNA, 218 bp, Homo sapiens
  chr13:95355494-95355712
  hyper
ggggttaaattagcggggggagaggccgcacctaatttcagacacttttctttctaatgtggctccagccccagagggaggggtcaccgggactggaggctggggtgtcctctaagaccctctctcccttccagatctctctgttccgtgcggatcctgccagagcccgcgtgatcatcgcctcccacacccctccctccctgacctggccagtctct

SEQ ID NO: 203414 - DNA, 85 bp, Homo sapiens
  chr13:95365776-95365861
  hyper
gatcagcggagccgcctcccgctcccacacccccaggacctcgaattaacagatcccctccgccccccgccccctcccaatcctc

SEQ ID NO: 203415 - DNA, 112 bp, Homo sapiens
  chr13:96205363-96205475
  hyper
ggccttagggagccagggacgctcctggtgcccgccctctcctgatggctgtctcgcggggcgcctgttcgagcctgggaccccgggaggggggacacgcagacaggcccgg

SEQ ID NO: 203416 - DNA, 583 bp, Homo sapiens
  chr13:96705319-96705902
  hyper
ccagacacccgctgcgagcacgaagaaagcgcggctgagggtggcagcgcgcccacacccgcccggacgagggcccggcccgcacccaccttgcctccagcagcagcggggtctcgggccacttcgcggccaagtgggcagtcaccgacttggacgcggcgaccgtcccggagccgagctgcgaaagccacagcgctgtggagcctagtagcagccgcaccacgttcgtggctttcgctggcgccatggcacggagagaaaagcgcgagtccctcggacccggtacccacagtctgtggccgccacgcttcggccggctcttcccgctgcgcggctgcccacttccggtgggaggagctcgagtccgttactgggtgccgggtccagaccggcgcatgcgtgtcccgctccggcgcggtttagtgggtgcggcctggagagcccacgccagccggacactgggccacgtcggagccgccggggcggcgccgggttgctgagcggcgtcacagatgctcccgcgggtccgctcccgcgggtccattcccaggactttgggttctcggacagaggccttaggaca

SEQ ID NO: 203417 - DNA, 245 bp, Homo sapiens
  chr13:98085205-98085450
  hyper
tccctgtctccatcccgccggcctcggtggcaaggggctcgcgagctctggttggcttggccgaagcttccgtcactcgccagctcacctacgattggttggcagagcgtgcgcgaagagccccgcctggcaaggcactgggaggtgggcttgcggatcctacgactagcgtttttctcgattggttgaaggagtaaaggcacgtggtatgggggcgctctcttattggtcgtgaatggtacctt

SEQ ID NO: 203418 - DNA, 201 bp, Homo sapiens
  chr13:98795570-98795771
  hyper
tgatggctcggacctcagccggccaccgccagccctgctcgcgcgcccgcgccgccgccgcccgcgggtattaatagccggcgccgccgcgccctcggccgccgggggcttgggagccgccgatcccggagcccgagccgggagagggagccgccgcagccgccggcgctgtggaggtaggaggcgcgcggtgaacaatga

SEQ ID NO: 203419 - DNA, 329 bp, Homo sapiens
  chr13:99229764-99230093
  hyper
ccctgagggcaggatcggagtcgggggcacctggggaaggagagcgccccgtggggcctcggccggtggcctgtgccaaaaggccgggcagagctgcttcggtgtctgggtgaagtttccagccaacccaagaaggaaaccgaaagggaagaggccgagagagaggttaattcctagtgctttggttaccgaaaacagcccggctgggactgctgggctgggaacttagctaagcagtgcggaggctgaaccccaccatctctgggatccgcagcaaatcagaagcccccacccacgataaggggaaaatggggcgcagagggcaggga

SEQ ID NO: 203420 - DNA, 124 bp, Homo sapiens
  chr13:99404492-99404616
  hyper
acggtgtttctgccgcccctgccgtcacccgctgggtcccgtcccgctccaagcgcactcccggcccgcagggtgggaatacgaggattacagtgccccacgggcgggcgggccaggatcgcaa

SEQ ID NO: 203421 - DNA, 354 bp, Homo sapiens
  chr13:99739098-99739452
  hyper
gggaaggtggggggtcggggccgcctccgccccgggccgcacgtccgaagaccggaggaggggactgcgcacgccaccaagagggcgcacagccgaggctggacgatgcgcggtttcggagcagggtttcctgcccagggagcccggctgcgctcgaggggaccccgaagtcaccggcagggtcggagctcggtgcaccacgccccccctctgcgcccggggcctctgcggggacagaggtctcaggaaagtagcctttatttatgtggcaccgatcggaacccgcggccggccaggcggacctggacggagcgtccctgctcggaacctggcgcggggcgccgcgcgctcgtg

SEQ ID NO: 203422 - DNA, 38 bp, Homo sapiens
  chr13:99740140-99740178
  hyper
gggagaatacctgccgcgcctcccgcccaaatacccag

SEQ ID NO: 203423 - DNA, 105 bp, Homo sapiens
  chr13:100620380-100620485
  hyper
aatccgttccgggatcccggataacccccaaaagggagagcggcgtggcagggagggaaagaagtccggatgggccctctcagaacacaatgtccaatagctgag

SEQ ID NO: 203424 - DNA, 105 bp, Homo sapiens
  chr13:100620515-100620620
  hyper
cgggttggagtctgaacccgaggcgcctgcgtccctcccgcagggacccccacgctccaccgggtggggcccacgcggccgccgggagggggcaggaaatgcaac

SEQ ID NO: 203425 - DNA, 219 bp, Homo sapiens
  chr13:100620916-100621135
  hyper
cttcacggtccctggatcctgccctgccgagaagtgctgggcacaggagcgagcagccggcttagcgggccagggcgtttttacgagagcctcctgggaagtttcttcctggaaaaatcattaaggcggactgatcccgattagagagaaaaggggctcctgggaaaacgtgctccccaccggccatcaggcggcccgcaggagccaagccaaggctcc

SEQ ID NO: 203426 - DNA, 350 bp, Homo sapiens
  chr13:100621366-100621716
  hyper
ctcaaagggggcacacgacccacaggagccatccaccgcctcgcgccgcagccgccctcctcagcgctgtgggatccccagaggcagggcttgaggtggggtgggagggtccccacgacgccggtggctccccaccaattccacgacagggtaggcctcaccgatggtgggaggctcgggtcctcctacaactagaaccttctctagaaaggcagatgtcaactccagcaccctccagggcgagtgtgatactgcgtgtgagagggcgcgtggggcgtgtaaatgatgtgagtgtgaggacacacaggtgtcgcgggaatggggtgcacgcgcaggaggatatgagtgtg

SEQ ID NO: 203427 - DNA, 67 bp, Homo sapiens
  chr13:100622155-100622222
  hyper
cgcggggcctgtgtgtgctatcgaattacttattcatagaaaaaaaaaagggggggagagaaaaaaa

SEQ ID NO: 203428 - DNA, 79 bp, Homo sapiens
  chr13:100631531-100631610
  hyper
acctgcagagactcgcttaagccgggagaggctgcctgagccggcgcaagagagcccgggttctgccagccatagtgag

SEQ ID NO: 203429 - DNA, 104 bp, Homo sapiens
  chr13:100631642-100631746
  hyper
catttcagaacataattctgaaaaatttattattttctcttcgtttaattttatttcaactcctagagatttataaataaaagcagttctccaggccagccagg

SEQ ID NO: 203430 - DNA, 143 bp, Homo sapiens
  chr13:100632286-100632429
  hyper
gcggtgtctgggtgggcgtccggagggtgggaagaaggggcatgcctggctttctctgtgcccacggtcctgcacctgtggtttcaatgccacagagcaagtttacaaaggcggggtgaaagtagggagcgtgccaagcgggc

SEQ ID NO: 203431 - DNA, 432 bp, Homo sapiens
  chr13:100632514-100632946
  hyper
caggcgacccagctgttagccacctctcgagcggcctggagtgctcgggccaggcgtccccggggttttcggtgtccgctgggagctgctcagatcccggggaagtcggtggcctacgcagaaagactggagcgctgggttgcctcccattcctgacccggctgagggcgccctgaccccgcggcccgggcccgcgtccgagccacgctggacgcccggctcccgggagcgccgcggtcggccaggactagaagccgcggcgccgaggtctcgggagaagcgcggcaggatggcaggccgggcccacgggcacgttcggcggctgcctgagccggcagcagctcagggagcgcgaggactgaggggcgggcccggcagcggggcgggggcgcgggactgactaggccgcggcggccaatcgcggcgccggga

SEQ ID NO: 203432 - DNA, 422 bp, Homo sapiens
  chr13:100633420-100633842
  hyper
caacttaaagaaagggggagcggcgcggctgctgccttcatctggggaaattcgtggccactgcaagtttactacgcgaggcgcagccaatgccaagcgccgaggccgaggagggctaaacactgcggccgcggctccgaacaataaccgccgcgcgcggggcggcgcgagtagggccgcgggggagggagctgtcgccgcagagcgccgcggagaggacgcctggactccgcctgccgccccggcgcccccgccgcggtcaggtggagccgctggtgcgctggccccgggtgccgagcgcggagctcgcctcggtcctctcctcgcccgtctgcctggcgtgcgcacggccgccgcggttgtgactgcattctaccggcgctgctcggtgcggccgggctccgggtccgctgggcgtgcga

SEQ ID NO: 203433 - DNA, 100 bp, Homo sapiens
  chr13:100634177-100634277
  hyper
gctcccagggctgaagtggccgccaccaccgccgcctgcgcctggagcccggtggccgccggacgcaccgcgcggatcgggagcgggagtcgaggcggcg

SEQ ID NO: 203434 - DNA, 128 bp, Homo sapiens
  chr13:100634617-100634745
  hyper
ccacgccgcgcacgttggctcctactctgggccgcccttcaactccacccgggacttcctgttccgcagccgcggcttcggggactcggcgccgggcggcgggcagcacgggctgttcgggccgggcg

SEQ ID NO: 203435 - DNA, 272 bp, Homo sapiens
  chr13:100642614-100642886
  hyper
cgggcaaaaaccctcaggctagtccggctgggtgcccgagcatgaaaaggcctccgtggccgtttgaacagggtgttgcaaatgagaacttttgtaagccataaccagggcatcctgagggtctgagttcacggtcaaggctgtgggctactaggtccagcgagtccaggcctcgccccgcccccgagctgccacagccaagatcttcggcagggaattcgagaccagggtcctcccactcctgccccgccccgacagtccgagaactctcg

SEQ ID NO: 203436 - DNA, 101 bp, Homo sapiens
  chr13:102568309-102568410
  hyper
ccaggatatccacatttgtccaaggtctgggaacccgggaggtttctaggagaccccagagaccaagtgaggccaggcccaccccatggaaacccccacca

SEQ ID NO: 203437 - DNA, 140 bp, Homo sapiens
  chr13:103046525-103046665
  hyper
agaatcaccagcaacgccagctcccttccctttccttcagatgggtctcgggtccagagctggcgcccgctagcgggaggccagaccgggagggccaaggcagccacctgtggctttcccatccctcaggtccagcagtg

SEQ ID NO: 203438 - DNA, 146 bp, Homo sapiens
  chr13:103450867-103451013
  hyper
atagaaatagcgggcgggaaggacgacgtctgcttttagcccgggtccccatatttcgctcttctccgggctcagctgcctttctccgccggtctcggcgagtgctggaactgtcgccagaaagaagcaataaagtagcaaagtgc

SEQ ID NO: 203439 - DNA, 995 bp, Homo sapiens
  chr13:103451043-103452038
  hyper
atccaccgataaatgaagaagtgtaagaggtggacagaagcagccgagccttcggcagggacccgccggccgatcgcagcagccaacgcgactgcaaaggttgccgcccggcgtgcagggcaggcgcgcgggtctccgcgaccccaggacaatcaaagcccgtgccccggcgcgcccaggtgagggtcccctggcgttctgctgtcccggccgagaaccgcgctgctcctctctctcaggacaatgatgaacttgagttgctcctgccactggagcatcatttgggagcgaatccgtctcaggttccagccaaggtgtagggcgaggggattggcccgtgcgtcgggccaggctcagtaacgccttctccaagtggatggcggggtggacacgcgtcccggcgccccgggctccctgggatatgtagttcgcgacaggacgagcggaaatactgccaggattttaccacctctcgcccatttatttacttctcggtcaccgctttcgggggacagataaacaccacagatgcccatcaaaggggcgcacgggtctggaggcgcagctcaggtttttgcgttggtcaccctgccctccgcacgtggagagggcaggcataaagcaccttgaaaggaaggtgctgtcaatgctatccgacgacctgtcgccgggcaccgcagcatcctcgctcgctccgatgggacgagggacgccggccccagggtaacaggaggcgcctcgccggccgcgcgctggatgctgtgatccaggtccggagccgggttccgccgcggccgcagcgacccgaccccacccgacaggccagaggtaccccggggcggggggcaggggccgaggtggcggccggctgtgcgctctgagcgcctggccctccgctgggcacctgggcgccgccagcccggcctgctgccgctctacgcgcagccacctgggcattcaaaatttttacttaattcgataccggcctgggctgc

SEQ ID NO: 203440 - DNA, 406 bp, Homo sapiens; identical to SEQ ID NO: 124058
  chr13:103452670-103453076
  hyper

SEQ ID NO: 203441 - DNA, 124 bp, Homo sapiens
  chr13:107001524-107001648
  hyper
tgcagggatggcccgacactccccgcagagcctgagagcgagtggcgagccaagataccagcggcacaatgtttcacctgcgctgccagatactcagacagagaaaacacacgacagtttgtca

SEQ ID NO: 203442 - DNA, 127 bp, Homo sapiens
  chr13:107001687-107001814
  hyper
cccccggtcctggctgccaatgtacacggccaggtttatctaagggctggagagctcctctcttaaattcccggcgaggtggggatgatgtggcacaggaagggaccgggagcgctccccggggagc

SEQ ID NO: 203443 - DNA, 216 bp, Homo sapiens
  chr13:107186448-107186664
  hyper
gaagtgcattacaatcaggtcggccatcgagaccgcatactccggggctaccggcttatgaacgaagcgggaggccgaggtgcggcgggccctcagggagaagcctaaggcccgtctccccggcgcggaggaaagggctcgacgcccgagttctcctgcgaagcaggcgagctccccgcgcaccctcgggctggcggcgcggtgccaaggcgcccc

SEQ ID NO: 203444 - DNA, 240 bp, Homo sapiens
  chr13:107187426-107187666
  hyper
ggcagctccgaggcgcgctgcgcagctccagcggtcgccgggccaggtgcgctcgctctccggggccctcagggcgcggggcgggagcgcacgcgcggggcgcggcggcgcggcggactcggggttccggggcgccgcgccggacgcagctcggacggccgactcccgtgcggctccagggtgccgggccggccgcggctggcgggtgggcgcggggcgggtgcgggctgggacacaaag

SEQ ID NO: 203445 - DNA, 546 bp, Homo sapiens
  chr13:107187695-107188241
  hyper
gcgggcgctgcgccccgagcggggccgcctgtgactatagatccagtgcagcgggcagcggcccgagcgcgcgggcgccgcgtcggcgcggttccatgtcccggagcacggagcggagtagggcgcctccgggcgcgcaggagccttctcagtccgcgcggctcccggcccccagggcaggaaagagggagctcggtccccgccgcgggctccggacgcgcgcgggcctttgtgtgcggggagggcgccgggacccgctgcgtgcgcagctcctcgctccggccggcgccgcggtccccgccgaggagagtcagcgcggccgccgcgctgtcagagcgctataaacgcggggccccgccccgccgcgcgaagcccattggcccgcggctccgcggccgcgcgctggttggacggccggtccgtccgtccgccatcccctcccgacattgggtgccgcgaggcggggctcgggctgacaggtgagccccgcccctggctcccgcgggcggcgggagcggagcagaagccgggcaggagaagcgctca

SEQ ID NO: 203446 - DNA, 308 bp, Homo sapiens
  chr13:107188430-107188738
  hyper
ctccgcagatgcggcgctgccccgcgtgcaagacttgcactccgcgcgcacccttagagctcccggcttctgcgcgcttctcccgacgcctctcggcgagggcttctcacttgattttggtaccaatcgcctacggctcagtttcagtcagtggggccgggaattgcaagacgattcctgcgacgcggcgccggaatttgcagctctaatcagggcctgagcatcgtcgcctcccgccttctctgcgggcgtctcccttccctcctggccccccgggaaggtggcgcccctggagctttccccgcgtg

SEQ ID NO: 203447 - DNA, 279 bp, Homo sapiens
  chr13:107188808-107189087
  hyper
ccagagatttagagggtgtgagatggaaaagtcaaggcatgtgcttctcactcggcgtctgcaagaccccagagcagagctggcaggaactcctcgctactttcccggtcgagcgccggtgctgacgctcgtccgtgacttccacggagccacagcgcccactagcggccagctttgcttctccgcatctcgagcgctctgcggtccaccgacccggatccagcatactgcagcatctaatcaagtcacagttccaaggaaaatctttttatatgtcca

SEQ ID NO: 203448 - DNA, 220 bp, Homo sapiens
  chr13:108518134-108518354
  hyper
gtcctggtaagcctcgacgcactgcctgcaagtggtcatctcgccgccttccttgagcaccacatccagactgcagttcaaagtgttgggactggacaaccccgagaacaactcccaaagtgtgtaggaattacaaaacgaaaggtaaaaatccgacaagttccagagcggagtgggatgcttgctcctcacctcctgcccgtcccccccggccgccccc

SEQ ID NO: 203449 - DNA, 321 bp, Homo sapiens
  chr13:108518933-108519254
  hyper
cccctggtcatattttgggaacgcacagccctggccgactccaccgtgagggcgcctgtgccggtgtcaccacaatatgcattgacttaaagggtttaatttccttatcccctcctcccgtttcttctctctcctctctctctttctctctcttcccctctccctctctcctctctctctctctccctctccctctcttttatctctctctgtctcttttgcctacataaatattaccaggctttgaaggaaggtctgacttgcttcctaatcatcagccgaccccatcctctgtagagtgggaaacaataatggagagag

SEQ ID NO: 203450 - DNA, 58 bp, Homo sapiens
  chr13:108519564-108519622
  hyper
cgcgctggctctcccagagtccggagcctgggctgcctccggcggggcgctccctccc

SEQ ID NO: 203451 - DNA, 165 bp, Homo sapiens
  chr13:108519932-108520097
  hyper
gagaaggcgcgcgggggcgggcggcggcggggccgcggggcccgggggcccccgcccggctccccgggctcaggcgcctgctctttcctttctgtccccctgtccacgatattttgttttaatcactgaagagaaaaataaaagtcagactgcggacggcatggc

SEQ ID NO: 203452 - DNA, 67 bp, Homo sapiens
  chr13:108520309-108520376
  hyper
cgtctcggatcccggaccgcgagatccatcgctcccagtgcgtgcagttattccgtcctgctgtgtg

SEQ ID NO: 203453 - DNA, 33 bp, Homo sapiens
  chr13:108520946-108520979
  hyper
ctgccggtgcgcaccgagtgcagcgctgccccg

SEQ ID NO: 203454 - DNA, 306 bp, Homo sapiens
  chr13:110960603-110960909
  hyper
caaggttctgagaaagcttgctcttccctcatcatgctttccacctttccttccccttgggttcccagcgtcaatcctgtgttttgcaagcgtcggcctttcacgggaactgggaacttaaaatgtagcctgaggcaccgttttcgttgctttgggcaaagctgcagccgtagaggccaggaaagtgtgtcagtcactaggcagtgagacgccaggcttagggcgaaaaaagttttcctggaactcgggagctggtggggagtctctgtcacggactgagggttttttgtgtttttaaatgggagt

SEQ ID NO: 203455 - DNA, 828 bp, Homo sapiens
  chr13:111213552-111214380
  hyper
acgagtgggaaaccccgagaaggaggcatttgctgtccgaggccgggaccctgtgcgcggccgggtgccctgctggaagccccgcgccccccgtccccggcggagccccagggcggtgtggctcatgcggcgccggcctcacctgcggtgtcccagatggagatgttgtaggagcgccactgcttcaggtagaaggcgccgcccaccgtgctgaccgtgtccgggaagcgccgctccatataccgctgcagcagcgacgtcttccccacgttcatgtcccccaggagcacgatcttgctgtcgggcttcctcatcttcccgtaagaacccccagcgcccccgcgccctctccccgaggctggccggctcgtgcgccctgggcgcagctggaggagcggaccccggactcgccgggacccggattctcgtgaacgctccgggaccttcgcctccggacgcccgggagctcaagagaggaagcgcgtgtgcgcgcccgggaaggagctgggtgcagagcacggagcccacgtcgggggcccggaccgcggcggcctcgcctcgccccgcccccgcccccgcccccgggccctttcaccgccgcggccccgccctatcctcctccgcccaccgcccccgtcccgcccctgctggacctcgccgtttcgcaagcatccgagttctccagccgaggctcgggactgctgcagggtggaaaatgaaagttctgagagcaccttccgcccctccgcttctgcacagccggggctgcggtgcgaggagcttggccgcggggcccgaacgaggcgaaggggccggggcccttgggga

SEQ ID NO: 203456 - DNA, 321 bp, Homo sapiens
  chr13:111267987-111268308
  hyper
agacgaggtaaggtcgattccatttggcccggggatggtcacacgcgcgggggccggaactgccgtcgccggcgcggtcgttgtcgcattgctctcggccgcactcgcgctgtacgggccgccactggacgcaggtacccgaccgctgaccgcctctgctggctcgcgggggggaagcgccgccgaggggcagcccgcgcgcggggccggggcgccgtgtggcctgcggggcggagtagggagaggacggaggcctcctggaacggcgcggcgacggctgggcgcggcttgggtgatgggagcctccgtgcggggtgacag

SEQ ID NO: 203457 - DNA, 150 bp, Homo sapiens
  chr13:111358789-111358939
  hyper
tgtgtccgccgcgcgggaggagcgtttacagtgcaagcttctgttgccgggccctggcctgttagcgaagcacgtgtgcatcccagcacagcccacgtcagcacgctaatacacagtgtccaccccagaacacacgtcagcaccccaata

SEQ ID NO: 203458 - DNA, 116 bp, Homo sapiens
  chr13:112760444-112760560
  hyper
agctgccctggctggtgattggaggtttaacgtccggaattcaggcgcttctgcagctcagatttgccggccaaggggcctcagttgcaacttttcaaaatggtgtttctggaaaa

SEQ ID NO: 203459 - DNA, 175 bp, Homo sapiens
  chr13:112760620-112760795
  hyper
ttggcggtggaactcttaaacttcgaagagtgaaagaatacaatgaaataaaatgccataagatcactggatttttcagaaaaaggaagaccccaaattactcccaaaatgaggctttgtaaattcttgttaaaaatctttaaatctcgaatttccccctacaacatctgatgag

SEQ ID NO: 203460 - DNA, 141 bp, Homo sapiens
  chr13:113547249-113547390
  hyper
agaaattctgcagccaggcttggtccacgcaccgtcctcccggcccacacaccctcctcccggacctcagtctgtctctgtgtatcacatgcctgttcccagtgttctgacctcaggtgggcacggcgcggtggactgcac

SEQ ID NO: 203461 - DNA, 445 bp, Homo sapiens
  chr13:113597560-113598005
  hyper
gcctgtgcccgcggcgcctgtgctgagtcccgacgctgtgcgccccactcccgaggctgtggttggggggtcgcggtcgagctctagggcccccggccgcagagcccaggcgcggggagggcggcggctcccagctcccggtccccggctccgcgccgcaggcgtgaacgcccaacggagggcgccggcgcccgggagaggcgccgccttggttgcaggggccggggcgcggcggcccgggctttgagagacgggccgctcttcccggcgcggtgccttccagggaggctgcgcctgcagcaccgcagccagagccgagactccgcgcctttcaaggaggaggccccgtgcaggcgcccaggcgcagaggaggcgcggggggcgggacctgccggccagtcccttacccggggacagacggggaaggcgggagcgctcgcagttc

SEQ ID NO: 203462 - DNA, 408 bp, Homo sapiens
  chr13:113622876-113623284
  hyper
atccccggccagccacggacccacgcatggacccagcgacccacggacctgcttacctgggcgcggcgcgggtggcatgcggccacacggaaggggcgcgctgggctgctgcggcctctgcagcttctacacctgccacggggcggccggaggtaaagggaggcggcggccaggcgcggccccgcggaggcagctgcactcgctcggtccactcgcggcttcgcggctgcccgcaaaccaggagggcgtggagacccggaaccggggggaagggcgggggcacttgtgcggcacccgcggggctcccaggggacctcggcggtgacacgaatttctaggtgaccttggcggtgacacgaatttctaggtgacctgtgtgatacactaggtgacctagtgacacaggtg

SEQ ID NO: 203463 - DNA, 655 bp, Homo sapiens
  chr13:113623348-113624003
  hyper
gggctccccgacgaccgcggcggtgacacgcggggctcccaggtgaccccggcggtgcactcacaggactcccaggtgacccgcggtggtgacacaccggggcgggcgcgcgccgcttccgcttccgccgagccgccccccgccccccgcggcgcagcgcgcgcccccctcccggtggcgcggaaccaatcctgggcagggaggcggcggctggaggctgaaagcgctgccgtggccccctccccgcctccgccgcgccccctccgcactcgcacggccccacccgcaggcgccccccgtgcggaggaagcggatctgccaggatcatttttgttgtgtcggaggatgaggttttggctgaggactgaagagatggccttggaagaaatggtgcagagattaaatgcggtttccaagcacacgggtaggaggagctgctggccgtcagtgatctgtgcttaagcttgacatcatgggctgaaatgtggggaaatgcgtctgatttttgtaagccgccctcgtgttcctttctagccgtggtagctgtgacatggggggcactggttggcagctggtgtgttttcagaggctgtcggcgatcgtatgctgcccgggatagtcaaaatgactgcacgttggtgacactggctctctc

SEQ ID NO: 203464 - DNA, 217 bp, Homo sapiens
  chr13:113862929-113863146
  hyper
taatggtaatgtgcgccatgggagcgccgccgaacggagagcgccaccccctacgcctcaagcgggccagctggcgtcacttccggccctcggtccgtctgggtcctggcgcccccggccccgccgcgggtgcgcaggttggttccggagggagaacctggggaccggctcggcgacgcgctcgggctgagggggcccggggtctttctgccggggc

SEQ ID NO: 203465 - DNA, 87 bp, Homo sapiens
  chr13:113951225-113951312
  hyper
gccctttctcccctcgcgggcttcctctttcctcactttctcccgccactactcttcctcttccttttccgcgaacccagcccactt

SEQ ID NO: 203466 - DNA, 34 bp, Homo sapiens
  chr13:114017782-114017816
  hyper
gcgctgggattacaggcgtgagccaccgcgcccg

SEQ ID NO: 203467 - DNA, 228 bp, Homo sapiens
  chr13:114017991-114018219
  hyper
cgctccgggagcccggactttgcccggcccgtcccagcccaacccacctgcgccctcgggacccacctgcgcccccgggacccacctgtccggctcctggggacgcccccgccctgcagcagccgggaccatttgatcgccctgcgggtgagcgtgaccaggtagctggagaaaaacttctcgtaggcggcgtcgtcgaagtcctcaggccgctcgaatccgtacggg

SEQ ID NO: 203468 - DNA, 138 bp, Homo sapiens
  chr13:114018330-114018468
  hyper
acacctggggacccgcgagcgctcggcgggctgcatgcggggagggaggcgcgcaccgagcgaggccagcgggtcccaagttcgcctcccggctccggggcgcttaagtccttccggcgggaccgcgggcgcgtgggg

SEQ ID NO: 203469 - DNA, 725 bp, Homo sapiens
  chr13:114285627-114286352
  hyper
ttgggggtcacgctctgccctgtcctgttcttgcttgcttgggtcgtccgaagtttcttgttgcttttgtctaattggagaagatgcctgtgactgacaagaggaagatgagccacattcagaaccggtggggtgatgccgtcaccgtgacaaaagcgtccaccgctggacgtttttcctgctccgtcatggctgctcactgtggttaaggaaattcagcagtggctgcggatagcgaacagatggtgggcatggcaccctcgccgtgtgggaggggactgactgtctgaattgtctttttcgactgtaggtaattggtacgcctcagagaccggcagcgtcaaacaccctggtggtaggaagcccacacacccccagcactcactttgcctctcagaaccagccttccgactcctcaccttggtctgccgggtgagcacttccctctggacccttagagttgtaggactgcttgcggttcgcacctccacgttctcctgggccacgtgtgtcacacagtcgtgcgatggggctcccacgcgcgttgacgccagcctccgaatcacactcacccatcatcgtggcctgcacaggtgtgcagccgaggcgcactgcctcggtcatggagaagtcgggctgggcaccgcccaccccgctttgtgtctggtgtagtgggtgctctctgaagggctggcagctcttggccaagacggggagaagctggc

SEQ ID NO: 203470 - DNA, 301 bp, Homo sapiens
  chr13:114565970-114566271
  hyper
ggggccagcaccgtcgggctcctgaaagcacccgctgcctccaggagagcacctggcagaacggggccgcggagccgccctcccctcccgcatgcggccccgctcgattcctggaatcttatttttggacctgctgccgcaagcagttcccgccctcggccctttcaattcctctttcgggaggggactgctctccacccctctcaggaggacgaggcgcggcccgggggttcctcacctccagcccagcagagggagggccgcggggaagcggtttgggttttaaccattgtgtttctct

SEQ ID NO: 203471 - DNA, 113 bp, Homo sapiens; identical to SEQ ID NO: 124172
  chr13:114566409-114566522
  hyper

SEQ ID NO: 203472 - DNA, 52 bp, Homo sapiens
  chr13:114776448-114776500
  hyper
gttcactttaggaggggagaggtgagcgggacggggacgctcaggtcctggg

SEQ ID NO: 203473 - DNA, 228 bp, Homo sapiens
  chr13:114776782-114777010
  hyper
ccagatcgaggggacgaaatgcaggagtcacctcagagctgctgtggcttgtgcatgagctacggagaaacaggggtagcgacgcagatgggactggagggggtgggcgtcccacagtctcaggagctgctgagaccatcccgcaggcaacatccgacggcaccgcggtgacccactctctcggcccagcgtgcagggtgcatctcaaagtcgaaagcatcaggtggg

SEQ ID NO: 203474 - DNA, 217 bp, Homo sapiens
  chr14:20773921-20774138
  hyper
gtaaccacacagacgcacgcagcttcgcgtgtgtgccgaggaattcacgggcagtacataaactggactccctgcttcattcggagtaacaaaaacacatacagaatttaatctacggccccacctgcaatttctgcaagatcggcttgacttcttcctcttcatcagccatcatctcccggccactccacccccaactttataaccacagagacgc

SEQ ID NO: 203475 - DNA, 329 bp, Homo sapiens
  chr14:20811405-20811734
  hyper
tcgcgcggagccccgttctctgggaactcacctccccgaagctcagggagagccctgttagggccgcctctggccctagtctcagaccttcccaagggacatgggagtggagtgacaggacgcactcagctcgtggccccactgatgagcttccctccgccctatgggaaaaagtggtctcatacagaacttataagattcccaaatccaaagacatttcacgtttatggtgatttcccagaacacatagcgacatgcaaatattgcagggcgccactcccctgtccctcacagccatcttcctgccagggcgcacgcgcgctgggtgt

SEQ ID NO: 203476 - DNA, 86 bp, Homo sapiens
  chr14:21093067-21093153
  hyper
tttcctttgaacgcggtgacaggcttacaggtctgtgaacgaaagggcgcctaataagtgacgtgaacttcgaccccatggcactc

SEQ ID NO: 203477 - DNA, 123 bp, Homo sapiens
  chr14:21098741-21098864
  hyper
catttgggctcagattactgttcaagaagttccagagagccaggtctatagttaactgagtcccgggagcagccttgaggcagtaggaagtgagatctgagtcggaggtagtgagaatggaaa

SEQ ID NO: 203478 - DNA, 210 bp, Homo sapiens
  chr14:21099147-21099357
  hyper
tttcccagtatcgttcataggatcccgacgctgtactttttcgtctcaaatccaggatctggctttcatggaaagatcataaaatgcttcctttcttcactagtttgtttcagcgttgaaaaggctaaaaagctcctgctcttttgcttgggaaaagtattcctacagccgaggccccagcgagatttgaactcgcgacccctggtttac

SEQ ID NO: 203479 - DNA, 627 bp, Homo sapiens
  chr14:21099866-21100493
  hyper
cccagcttcaggcttgacaagtcccaagtgccgagcaacatcagggtcagggtgcgtttcattacagaagagaatgcagtagtgatcagagaggttccccccaacccgcttggattcttagtccaactctcttagtctgagattggggttgtttttaaaagggaggcggctgtcttcaagcacaggacgtacccctcggaccttcagagtttgggggtggacgcagtgagggcgccaaggcttccagatctcccccagcctttcagcggagtccggcttggtcacagattcctctaagttacctgaagcagaggtggctagaaggggtccagcccttttcttggtcctttaacactcctcttcctagcatctcggagtcggaaggcagctccttctctttgggcctccaggcttttctaagcgccaacttgaagtccagaaagaataaaagtggcgtcgtcgcatgggaaggttggggcggaagagtttctcttcttttctctcctttggtgtcagcctgaccaggaggctcagtcattcactggacagctcccactggccgggagccagcttggcgcagggcaagcaatgtgatcaaggcagacactgatgcgccctggagaggtt

SEQ ID NO: 203480 - DNA, 119 bp, Homo sapiens
  chr14:21101056-21101175
  hyper
agtctggagaaaatcactagattctaaaggaatcaaaactgttcaagtgttgtgctacaactaaaaaaataaatgaacactcttaaagaatagaatctctccagttctggctcgttggt

SEQ ID NO: 203481 - DNA, 88 bp, Homo sapiens
  chr14:21101235-21101323
  hyper
cctttactttcctttccgtttcatctttctctctttaaagtcagtagttaacaaatactgcaatcggcgctacggctaggtcacctag

SEQ ID NO: 203482 - DNA, 600 bp, Homo sapiens
  chr14:21151575-21152175
  hyper
atcttgacgtgatcaaatctgtttctgtctctcacccttgtccgaaggaaacagcttagccgcgaggtgggctgcgttaatcgcgtcttgaaaagttggttacctttctgaaagatagtagacccgaatcgtcccaccgttgggggaaggcactgttgtcttaccgaagtgtgttatattttggcttctacgttaagtccaaaggccggcagatatatacgtatcgcgcgtctgtcctggggctcagtaccctacagccttgcaaccgagctcagctctggccctcgatctctatttcagccccctccaggttccctccaggccctagcgggcttaaatcgctccccgggctcagtgagacacaagcatgtgacctaaagtctaaaaagctgccttccttcaccccatcctgcatctggatcgaggagaataagccagagaataagccacacttgaaacttggtgaagatggaaggaataactaaataaggcctaagggaaatgtcacaacagaggaaaagaaacaaaacaaaaaaccttcagaacagcaggcggaaaagagaaattcagagtgataggaagcaccactcagctacagtg

SEQ ID NO: 203483 - DNA, 360 bp, Homo sapiens
  chr14:21152535-21152895
  hyper
tccagctgaggaaggagcgcggatcccaggctcgttctttgcctgggctgcccctgcggcccctggggcgggtgctgctgcggcgccagctccaagggcggatccaggcgggaggggcctcctcggagaagcggggcgcggtcccaactacgcagaggctggcacgccgaccctccacacctcaccacgcccccatctccgtccgtgtacacacactcacacaaggacgccaaccccacctagatgcaaagcaggattcaaaagaacatctttgcgttttctaccggctccccatcatcgtactagggaggaagaagcgggtgagaaacaaaacttctttccattgtcctgcccgtttct

SEQ ID NO: 203484 - DNA, 126 bp, Homo sapiens
  chr14:21439059-21439185
  hyper
acatccagccacctccgcaatggaaagctcgtggcatacagcaggcgctcattatttgaagcctcttcattctcctgcttcctcggtggttaaggaggcttttggaagttcaagtccgtctcagct

SEQ ID NO: 203485 - DNA, 605 bp, Homo sapiens
  chr14:21439317-21439922
  hyper
cacctccaggcagctctttccagagcagtgagggcaagtctggggattatctccataaaggaagcgaggtggctcggtggaggggcttcagatccccttcccaggaccctgtgacccgccatcggaagagagtggacctcattctatttcaatgtctgcatagtacagacatttgctgtgggcaaatcggacccatgagcccagagagcatcatcccgggaaagctttcccgaagcacaggcttccctgcaccaccatacacgcgcacacccgcacgcgctcactcccccagccctcctcccctccctcactcccgccctggaagaagcggggagctgaggggagaggtggaaccagcagagaaacgggccgggcaggagcccgcaccagcccggcttgggacaccgcagccgctcctgccctctgctggctggaaggcgcacttacacattgcggtcatcgcggatcgccgagggccgctggtgccgctctgccgccaaggacgctcagccattggagtagaagtgagagaggccgcgggctgagtagagaggggtgaggattccggaaaggaagcatcgtcaggaagcgctgaagttcctact

SEQ ID NO: 203486 - DNA, 153 bp, Homo sapiens
  chr14:21493030-21493183
  hyper
ggagcctcagcctttgtgcgcagcaaccgagcgcccgctccgtgctggccctttcccccgagcctccagctccaggggacgcggatcaatcacaccgcccgccggcccggctggcgccttccaggccctacggcccctcgcctgcccctcccc

SEQ ID NO: 203487 - DNA, 64 bp, Homo sapiens
  chr14:21539066-21539130
  hyper
cagctgtggctgggccgggtcccggggcatggccaaagagggaaattcccgcagagaaaaagag

SEQ ID NO: 203488 - DNA, 112 bp, Homo sapiens
  chr14:21852940-21853052
  hyper
cctgagcccaagtcgcggcagcatccttccagtcggccagtccccttgctgcagttcatgaaaactggcactattctatggcttcccccaaataaccgttacttcagttaat

SEQ ID NO: 203489 - DNA, 210 bp, Homo sapiens
  chr14:21905357-21905567
  hyper
gtggctgtggggggccggttcgcccctctccctgtctctccagcaccagttccccctcctcctgcgcaacctaacctgatgctcctgcccgccccgcgccatcattggctgaagcgcactgccactcaccaaaggcgaaaagacgcaaaacagcgcaaagggtgggactataaggagctcccttccccctcccccgcaggttaggttgag

SEQ ID NO: 203490 - DNA, 210 bp, Homo sapiens
  chr14:21979480-21979690
  hyper
atgacccctggagctgagcaagacagaaaagtcatttccggtgtcgcgctttcttggaagctataaagagccacgttaggtgttggcagagcggccggtatagtcctcatacccgctctctcatgcttccggacacagtgaggctgtggttgccatgttggtgactggcagagcggccatgttgcttatagacgcgcatgcggccatgtt

SEQ ID NO: 203491 - DNA, 31 bp, Homo sapiens
  chr14:22004962-22004993
  hyper
acccctccccaggcacccaccgttctcagac

SEQ ID NO: 203492 - DNA, 120 bp, Homo sapiens
  chr14:23291965-23292085
  hyper
acgggaagccccttgttgggggggcgggggcgggaggcggggcgaggaatgtgcctcctcggagccggaggaggggtctcccgaaggccgtctcttccaccccgggttcccgactccccg

SEQ ID NO: 203493 - DNA, 179 bp, Homo sapiens
  chr14:23355865-23356044
  hyper
gacgtcggccgcactgcaccacaacacgagggagctcttcgagggcgcggtgcgccagatccggctgcggcggggccgaaaccacgccggaggccagaggcccgatccgggcagccccgagggccctgcgccacctgcacgccgcgagagcctcaccaagaaagccaagaggttcctcg

SEQ ID NO: 203494 - DNA, 106 bp, Homo sapiens
  chr14:23450322-23450428
  hyper
ccgcccccatccatccctcttgcttctttcctagtcccgcgtcttcacctcggaccccggggcaccggcactttgggccgtcggggcagtggagaaccgaataccg

SEQ ID NO: 203495 - DNA, 107 bp, Homo sapiens
  chr14:23450746-23450853
  hyper
cccggctagagctccagggctgcccagggccgggggatacgagtggcggctttcctggcagccgaaccccgcgggccgctgagcgtacaatcggtccagggcggcgt

SEQ ID NO: 203496 - DNA, 699 bp, Homo sapiens
  chr14:23450883-23451582
  hyper
cgggagaatagcctgccggtgctccggccaggggtgggccaaacaggcacggccccgctggcaaggggctcccgtggcgctggtcgtagcccatgctgatgccgctggtgcgattgctgcagggccggctacctccagctccgccagcccccgccccgtccagcagcaggctgccccgggggctggacggcttgctcgcgtcgctggccgagctactggcgaagctagagcgggggctgagggccggggccgtgggctccagccgaaaatcggggggcaacgactgaggtagaggcaaggcccgggtgggcggcggccccgcgggaaaagagccttcgtagcgcggcgcctcaaaggagccgcgctgatttcgctcagcgtccagggaaccttgctcccgggccggctccaacggctcatccccaggtcccccagtagctcctcggggccctgacttcctaggtccccccaacccacttaggcgccccttgcccggcccgggggtcccgtcagacccagaccggctagattcaccctttctgcggccgaacttctccagcaggcgactggctttctctcctaaccgctccatgccctcgggcctggggcctctcgccccctccccgcctggcaccctgcggcgtctcggcggccggttctctttccctgcagccggactctggttccccaggggcacag

SEQ ID NO: 203497 - DNA, 479 bp, Homo sapiens
  chr14:23451829-23452308
  hyper
ttttgtctgcctggccggatctactttcctaggggggcggagcgcggtgtgtgcgagagcgccgggggtgtccgcgcagggatagctggtgtgcgtgcagcggaaggcgctaactgccctggatgtggagacccgcggactggacgtgagaggcgggcaggggcagttggggcagctgcccctacaacactgaagaattggaataggaaagagtgtgggggtaggggacggggactctttgtctgcagttggaatgcgcggaggggcatggtggaatgtgtcgcgtcccgggaccggacgacaggaggcatgttctgcgctagcaccgtgactttgttcccagcgtggggactgtgggagagatggagagagactggtacagaaatggtgagacaaggagagagccataaagaggaagacagagagaaagaagacaaatgcataaagaggttcagagacgtgtacgtaaagatagccct

SEQ ID NO: 203498 - DNA, 101 bp, Homo sapiens
  chr14:23775763-23775864
  hyper
gctaaatttgccccgagatgtcccgaagtccggcatatttctctgggcagcctagaggctcaggagcccagcccagcccagcccaccgtgccctctcagcc

SEQ ID NO: 203499 - DNA, 188 bp, Homo sapiens
  chr14:23776071-23776259
  hyper
aaacggcccggatcccggcagcggcctgacccgtgagatccctaacctggcaggcgggcggggttggagactggctgaggtgggggtaagggaggagctgggcctttgggctgcactagggggaaccgggaatagagatggtgtcggcaggaagcccttggccttgggtttcccgggaggacagtcat

SEQ ID NO: 203500 - DNA, 67 bp, Homo sapiens
  chr14:23821317-23821384
  hyper
cgccgctggcattgggaggctgctcccagccagaggcattaggggggaaggccccgtagtggcaatg

SEQ ID NO: 203501 - DNA, 55 bp, Homo sapiens
  chr14:23835314-23835369
  hyper
cgggtcctgtggactcgcctgggctgggagtggggacactgagagggctgcgaag

SEQ ID NO: 203502 - DNA, 257 bp, Homo sapiens
  chr14:24036812-24037069
  hyper
cccatccctagctcagccattgcttttttttccacgaccctccgctgtttcttccgcgagcttcctcccccgatttccatctcaggcagcggcagcggcagcgacagcctgcctaccccaggactccagcctcacctggcttctgcctcaactccgctcctctgccccccagcgcttcctggtacggggccgagcaggggttggtgctccgtgcggtccttccctctccccgcctccaccacgggaccccgccctcc

SEQ ID NO: 203503 - DNA, 120 bp, Homo sapiens
  chr14:24685267-24685387
  hyper
atggcgactagagcgtcgccactcggggcgtcatcagcctggagatggcgcaagagtgccatctgatgctgggcggggaagaggattgcagcgaggtaccaacacgaccacacatgcaac

SEQ ID NO: 203504 - DNA, 158 bp, Homo sapiens
  chr14:25518669-25518827
  hyper
cgcagcgaccccgagctcccccacactgggagcctcggggcagcattctcggggcccatgccatcgcggggacggtgcggaaaaaaaggctccatcctcaactttctcggaggaaatcgctccgttctgcggcttgcccaatactgcccgcacaacgg

SEQ ID NO: 203505 - DNA, 157 bp, Homo sapiens
  chr14:27066405-27066562
  hyper
cgggagggagggagggaaggagggagggaggacggcgagggagggaggcaggggcgggcggcgggggatggggccagcggggaggtggaagcgatacccaccgcccgtattggtcctcttggtgctgccggcttcagggggggcttccagcggcctt

SEQ ID NO: 203506 - DNA, 60 bp, Homo sapiens
  chr14:27066704-27066764
  hyper
tcttttttcttttttttttttttttttttttgcgtttggggtttcttaaggttttttttt

SEQ ID NO: 203507 - DNA, 90 bp, Homo sapiens
  chr14:27067007-27067097
  hyper
ggagtgggagagcgcgagggctggcggggcgcggggagaagccgaggaggaggggagagtgagggaaagagtgaatgagcaggaggaggg

SEQ ID NO: 203508 - DNA, 218 bp, Homo sapiens
  chr14:27067386-27067604
  hyper
acttcgcgctcgggtccctgcctctcagcagcgccgccgcctcccagcgccgatgcttcagccggcggggcggctgaggggtgagggggaactccgcgggcgggggcgagggagcgtgtgtgcgcgagcgtgtgcgcgcgcgaggggagcgcgtgcgcggtgaggacgcgcgccggcggttggggcgggggcgggggccggggcgctcctgtgggaag

SEQ ID NO: 203509 - DNA, 202 bp, Homo sapiens
  chr14:27067699-27067901
  hyper
tagaaggcgggaaggagagattactgacagccgtgccagccaataaaatagaaatgtgagaaaggttcttcgggccccttcccaatcaggaaacttgggtgatgaggggcagcgaaggggtggggtgggatcttggtccagctggtactggagcggcgacaattttggctagtctaagaagggcattcgagtgaccgttgac

SEQ ID NO: 203510 - DNA, 265 bp, Homo sapiens
  chr14:29225768-29226033
  hyper
acactaaaatcaaaaagactcctggtgcttgcgagtacaaccccaaattctctcgcacactgcccaagtttcttgaaactcggaggctcagctcagtgtaaaaacatgggggttctcctgagtcggtttccctgaccacagggggacccctgcaaacacggcctcctctttaatacctttgtaactcagttcttcaagcaacccacctaggagaataaaaggacccactgagctccaataactgagtagatgattaaataaagcc

SEQ ID NO: 203511 - DNA, 60 bp, Homo sapiens
  chr14:29236194-29236254
  hyper
ggagcgagggagcttcacccccggggcggtggttgtttcttttttctttctttctttttt

SEQ ID NO: 203512 - DNA, 247 bp, Homo sapiens
  chr14:30396133-30396380
  hyper
aggacaaggaggggcgcggcgaggaaagggcaagatacctggaaatgtcatgagaaggatggaaatgggtgaggaggcggcggactggagagaaatcggtgaatagaggaagatggggcgagaggaggatgagcaacagcgagcgcagcgcctcgggttgcaggcgtccagccgcggcggggccagccgcttccagagcgccggcgaggctggcggccagccgagccccgggagccggaaagttggc

SEQ ID NO: 203513 - DNA, 189 bp, Homo sapiens
  chr14:30396508-30396697
  hyper
cccggacgagtcctgcagcagcagcaccggctcacggctcaggccgatctgcagatggaacgagatgcccccgaccggggccgcgacaggagccaagaacggcgcgggcccgggcccggaccctgggaccagtgcggcggccgctgcggcagctgccgccgccacgggcagcagcggactgggcggccg

SEQ ID NO: 203514 - DNA, 183 bp, Homo sapiens
  chr14:31027986-31028169
  hyper
gctgctgtttcctcgaggatgaagggaaagataaaaccctcctgcctccgttcgtgctttcattcgccccattcctcgaaggtgacgaaacttcagcacatctctgtccattttggaaaaaagaggatcccctcaagagcaaataggcggaaacaatgaccccgcgcccggagtttttctgag

SEQ ID NO: 203515 - DNA, 211 bp, Homo sapiens
  chr14:31091325-31091536
  hyper
aactcttagtattcgcctaacattacgggccactgaattaacctgcaccgggtctcccagttctaccgagagtggaggtcttcctggaggaggtggggtccggaactcaggcacaccctttggccccgcccttccgggctttgcttccggggcggtaagggcagccacgtcatccccccgctccgctccccagccgggcagtggctcgtgg

SEQ ID NO: 203516 - DNA, 222 bp, Homo sapiens
  chr14:32670301-32670523
  hyper
ggaggtataaggacgtacaagaatgcttctccagttcaactctaagtgaacgatgtaattcctcaaatccacctctcagcctgtttttcagcgttcctgtgtttggctgccaggggcgaaagtagcggtcgagggaagacacctgtgaaggggcgtggctactcgcccgggttcctccgtccctgaccccagaggcgcctgcgcagaatggacagaggcgct

SEQ ID NO: 203517 - DNA, 128 bp, Homo sapiens
  chr14:33402917-33403045
  hyper
tcaccccttaaagaaacattgatgtaatagtgtggagaagtaactgagagacgcgaggaaataaatgcacgtgttttctctttttgtttccctggtggttggaatttgcagagttcgtctcagtggtg

SEQ ID NO: 203518 - DNA, 259 bp, Homo sapiens
  chr14:34419302-34419561
  hyper
ctcgtcttaaaatcggaccacagccacagcttgtctggcttttgtcacccacaagagccaatatttcaaagtcaacagaaggtcatcatcatggttcacctgagccccttaacgttgactttcgctcagaggagctggggcgaggggtggggggaagcagcgagtagagacaaaccaggctgacttcttggttaaaaaacaaagttcgcttacggccctgggaagtcgacatacaacggactccgagtgcctcccgtcc

SEQ ID NO: 203519 - DNA, 184 bp, Homo sapiens
  chr14:34419820-34420004
  hyper
gcgctccaggacgcagtcgcccaccacctcgcccaggaagttgtccaggtagcagaagcccacctcgtgcagacagggcacgatgtactccagggcaattttctccaggtccagcctcatgatgtgtcccaggggcatctcgcccgcagaatcgaggtccgggatccccagcgtgcaaccagag

SEQ ID NO: 203520 - DNA, 149 bp, Homo sapiens
  chr14:34420371-34420520
  hyper
ccccgccccgctgccagtcacccccgcctgctctgcccctccgcgaaggatcccagagagcccggcgccaaccttagttgtttgtgaccaggggagcggctggaaagcagactgaatttttagaatgcgctggatttgcatattgtttt

SEQ ID NO: 203521 - DNA, 156 bp, Homo sapiens
  chr14:35008736-35008892
  hyper
ggccagggtggggcgggagcccacctgctcaaagccggctcctcgtcgctaggctcttcaaccgcgtaggggtcgtagtcatccggaagccggttcatggtggcctgcagcggcctacaccgtccacaagcaatttgcagcgtctctgtttacact

SEQ ID NO: 203522 - DNA, 203 bp, Homo sapiens
  chr14:35451922-35452125
  hyper
ctgggagtgctccgcctagtcacttttcttaaggtggctcgtcgaggcctgacttcttccccgaaatcacgtccctagacagcctcctattttaccactaactttactcctgcagttattcagcggtaggaaactgaaaccaaaaaccagtgtaagcaagtaaacatctaaactgtttcaggagccgcgtagaaggaacgcgg

SEQ ID NO: 203523 - DNA, 200 bp, Homo sapiens
  chr14:36003242-36003442
  hyper
cggcacgggagaaagccccgcccccggcgcccgctcccactcctgattggccgggccagcccggggaggcccggcgggaccccggcccgcgtctcagctataaagatagccccggcatgacagccgcggcgaagctcttctagttcatctgctggccggctctcagtccccgtggcgccccctttcctcttgtcccagag

SEQ ID NO: 203524 - DNA, 122 bp, Homo sapiens
  chr14:36005014-36005136
  hyper
gagtgcccagcaaattttctcgtgcaagcactgcccgtccactttttttagctctccagggctgacccggcacatcaataagtgccacccctcagaaagccggcaagtgctgctgctgcaga

SEQ ID NO: 203525 - DNA, 233 bp, Homo sapiens; identical to SEQ ID NO: 51101
  chr14:36789412-36789645
  hyper

SEQ ID NO: 203526 - DNA, 62 bp, Homo sapiens
  chr14:36979680-36979742
  hyper
ggaccataactttgcgaggttcgctttacacataggcatatccagttccttagacattgact

SEQ ID NO: 203527 - DNA, 62 bp, Homo sapiens
  chr14:36979809-36979871
  hyper
cattatggtaattcacaggtttacttctgcgcgcgcgcactcagccccgtgtgtgctgctga

SEQ ID NO: 203528 - DNA, 254 bp, Homo sapiens
  chr14:37050246-37050500
  hyper
ccgcggcggttcccacctcgccaccgccgccgccgccgcacggctgcccgtcgcgaacaagcaccggcaccaccacgcgacgcagcaggccgggcgcggcgtgcagctcggcggatgctgccaggtcaggcgactccgccgcccctggagcgcgagcgcgcttcagcttgtagcgatgattctggaaccagatcttgacctgcgtgggcgtgaggcgaagcaggctcgccagctgctcgcgctcgggcgcagac

SEQ ID NO: 203529 - DNA, 213 bp, Homo sapiens
  chr14:37050539-37050752
  hyper
gtctgcgccttggagaatagcacccgccgcttcttccttttctcggcgtccgagcccggagacgcgggcctagcggacggccgctgcgacgagtctggcgggctggtctccaggctgctctcgtccgaggctagggacagcaaaggagacacgggtgggtgagacgccggaccctacgagggcctgctgcccttctggcgcgggcgtggaggc

SEQ ID NO: 203530 - DNA, 194 bp, Homo sapiens
  chr14:37050794-37050988
  hyper
gaggccatttcctgagtccacatctggacatccacctctccgaatgcggtgacctcattcataccacagcggtcatcagcgggcctgagatcgtgccccgaaaaaacccaccccggggccctcttaacatgtccgcaccggtagttgcgctggccgaccagtttatcacaagctgggtcaccagcgccggcctc

SEQ ID NO: 203531 - DNA, 70 bp, Homo sapiens
  chr14:37116035-37116105
  hyper
agagggcttgcccccgggacaacttggagcctgcttctggggagccacacacgtcctctcccacttcttg

SEQ ID NO: 203532 - DNA, 80 bp, Homo sapiens
  chr14:37130817-37130897
  hyper
attcagcattttaccagcctgattttgctgtctttttgtgccgcttctgggaagatgtcaaacacccattttcattgtat

SEQ ID NO: 203533 - DNA, 37 bp, Homo sapiens
  chr14:37131797-37131834
  hyper
aagaccgatttctccccctgcttcgggagacttttga

SEQ ID NO: 203534 - DNA, 174 bp, Homo sapiens
  chr14:37131888-37132062
  hyper
cacggcaggaatgagggagggggtccgattggacagtgacggtttggggccgttcggctatgttcagggaccatatggtttggggacagccccagtagttagtaggggacgggtgcgttcgcccagtccccggatgcgtagggaggcccagtggcaggcagctgtcccaagcag

SEQ ID NO: 203535 - DNA, 199 bp, Homo sapiens
  chr14:37135437-37135636
  hyper
gggtcagagaatttggaaaggcctactctgaggggagtaaaacttcaccaggccctgggctggaagcacaggaggtcgcggctgggcccagcgccctcgggaggccaagggcagggagccgacccaaggtctaagccctccagctctccgtcgcgggtttgggtcccgtctcaagagtggggcgcgcgggctgggcctc

SEQ ID NO: 203536 - DNA, 36 bp, Homo sapiens
  chr14:37136618-37136654
  hyper
agttcaaaactctcaaaaaaccggaccttaaggcaa

SEQ ID NO: 203537 - DNA, 200 bp, Homo sapiens
  chr14:37641762-37641962
  hyper
gcgctctcgcagaggcgccctcggctccgaaaatgtctctggaaagaagacccgcggatgggtttgggttggctcaccgcagcggctcaggctttgtctcctagattggcgcccacgcccttctctatcaggagcctccggtagtttgtcaaactagacggttgcctctgataactcaagtgaagtgacccaggcctgga

SEQ ID NO: 203538 - DNA, 118 bp, Homo sapiens
  chr14:37666992-37667110
  hyper
tcgactactttctctccaaactcctcccgggccttcttcccaagctctctctttctcctggaggccccgcctcgcggcccggcagcgcggcacgcgcatgcccggtgctcgccgcttg

SEQ ID NO: 203539 - DNA, 232 bp, Homo sapiens
  chr14:38052533-38052765
  hyper
acacacacgaggtcaagacccgcagtgtcttagtgggttttcacctccacctccgtacaatcaagagggcagagaaggcgggggctggaggtggctgaaagggcagggatggcggtgaaacccgggaggaggcgacattcgtgtcaggtggcggtcccaggcagtgtccacaggcccggaagccgaggggaccaggcatcaagccccgcgtccagatccctgcacccggggg

SEQ ID NO: 203540 - DNA, 185 bp, Homo sapiens
  chr14:38053203-38053388
  hyper
gggccaggactgcgcctgtgtgcgggtccccaggagcactgctcgcctgccagccccgcccggccgggcccctccggcgggatagagccctgctttgctcttttcgttggccaagcacaattgtgttattggagataatgaattcaatccccatcaaagggcattaggctcgcccggggcctgga

SEQ ID NO: 203541 - DNA, 124 bp, Homo sapiens
  chr14:38056999-38057123
  hyper
tttttgtaaaaatgtttgctcggtagcgttggtgggtccgagcgccaccggagctgtacacttgggtcaggaggaaggctttccctcctcgcccctcttcgccccctccctcccctccccgggg

SEQ ID NO: 203542 - DNA, 299 bp, Homo sapiens
  chr14:38057503-38057802
  hyper
gggctcaacaggagatttattcgctaggaagggaaaatgcccaaacaatgaagaactatctgcacttgtcacctcgagacgcttgctgtcctgctctgtccgccttccctggcaaccagctgtcctggccgccaacccgcgcgcgtcctaacgcgcgggtggcaggtcgcatcacccagaggtggcggagtgtgcggtctgagaactgcgagaagcccacaaagcaggggctgggcctgcaggctccccgcggtccagctcccgaggcaggtctccaaagtgcccccgtcccccgcata

SEQ ID NO: 203543 - DNA, 176 bp, Homo sapiens
  chr14:38057832-38058008
  hyper
cgagagctaaggccaacttaagcttggtggggtgaaggcaaggcgctgatgtttctaatacgttgaaaaggagaaagggaacatcacagagaggacagcacagaagttaaacatcttagattcagtgggggcgggattccgaggcccaagcccacgcctttatattacatttggaa

SEQ ID NO: 203544 - DNA, 100 bp, Homo sapiens
  chr14:38058220-38058320
  hyper
ctcatctggggaggcaattacgcgataattaagcgactcacacggctctttttatcttgtccgcggtgtggagtggggcgatcaaagtaaaggctgtcca

SEQ ID NO: 203545 - DNA, 230 bp, Homo sapiens
  chr14:38058546-38058776
  hyper
caactttaagttcttaggaacgacatttttgaatcaaaatttaaaacaatcttcacaaaatgcaaaatagcggctaccctaaaatgtcctgtcggtacaacgcttcccctgcgagagtgaattaactcccctcctcccacctcctccagagctaccctgatggctaagtttcgtttctcttttaatgagaagagagttcatgagtctccgttggacacaacttaattcta

SEQ ID NO: 203546 - DNA, 101 bp, Homo sapiens
  chr14:38060543-38060644
  hyper
ccagacaaaccccccagtcccgggagctaggaagtgtttaggacgggtctggaatacacaccttggtagtacgccggctccagggctgagggctcgatggg

SEQ ID NO: 203547 - DNA, 599 bp, Homo sapiens
  chr14:38061332-38061931
  hyper
cggatggagttctgccagcgctgctggttctgccggtaataggggaagaggtccatgatccactggtagatctcgctcagcgtgagcatcttgctgggcgcctgctggatggccatggtgatgagcgagatgtacgagtagggcggcttggcgtgcgggtagctgcgcttgaacgtcttggcgtcgccgccgccgcccgcgcggctgcggcccaggttggacggcgcgtacgccatggggctcatgcacgggttcatggcggccgcgtaggggcccaggccattcatggaggccgcctgctgcgcacccatggcgcccatgccgctcgggctcagcgccgtacccatggccgtcacgccggccgcagtcatgctgttcatggcgcccgccgagccccccggcatgccggctactgcgccgggactcaggccggcccctaggcccgggttggcataggacatgttgaaggacgccggggtcatgttgccgctcgtagtcatggtgttcatggtcatgtaggtgttcatggagttcatggagcccaggcctgagttcatgttgctgaccgggacggaggagtaggcctggagtggagacag

SEQ ID NO: 203548 - DNA, 230 bp, Homo sapiens
  chr14:38062091-38062321
  hyper
tgcacggcagggggaaaatcctagcgcggcaggcatgaaagataaacgctcacagaaaatatgaccccaggaagatgtgtaatcgccttacacgccaggctcaggggctggcttccagggccccctcatcgcctcctccatccacgccaggcggtatcccaagtctccaccccaaccagcctcggcaaagcgccctttggggggaaatcgttgatagagcaaatcaccta

SEQ ID NO: 203549 - DNA, 336 bp, Homo sapiens
  chr14:38063637-38063973
  hyper
tttcattattgagacacccaacttggcggcagagcgctttaatcagaagacgtctgcgaattaaacggtgggacgaagaggtcgccttgtgggtatgctccggctttctcagagttgcttccaactcgcaccggcgctcgcccgcccgctgcaccccgggcccggctcctgctcccgctcgctgctgggaagaggcaagcgcttcctagagccgctgttttcaaagcccggagtttcctaaaactccctctccggctgcgagagtcgggacagagcagggcagcaggtcccgcttccaggcccggccaaggcccggccggggccacaccggcgggc

SEQ ID NO: 203550 - DNA, 70 bp, Homo sapiens
  chr14:38064237-38064307
  hyper
cggcgcggggcgggggaggggagctgagcagctgcagtcacccgagcgcccgcgcgggcccaacgccacc

SEQ ID NO: 203551 - DNA, 446 bp, Homo sapiens
  chr14:38064549-38064995
  hyper
gcacctacaaagcccgaggtgcacctgcaaggcggccgcccgccagtccggccgccgcgcctcccgccccgccgcttcaccgctgcgcgcgacccctcccccgcgacccctcccccaagcggggccctcactttgtttgcaaagcagtgtaattggtttaggcccggaggctagggaaagagggaaatggggagggagggggtgtaaccccctttggaaaaagaaaaaataggcggggccaggcgggcgggcgggctagggctctggatcggaacctcgcagccggagaaggccgggggcggtggcgtcggagactgggcttagagaccttgtgggataactgaccccggggtccctccccagaggtacacgccaccttccgagcgcgggctgcggcccagtctcgcgcccctcctgctctttgcttcctccctcctgattcctga

SEQ ID NO: 203552 - DNA, 643 bp, Homo sapiens
  chr14:38065025-38065668
  hyper
tacagacttttttttttctttcctcctgagagcttcagactagaaaagggaaaaagccccacttttgcttcgtcactagaaaccgggtcatctgagtcagccgagccaagtgacgttaggccgacccgggccccgggctagcagagcggaggcgctgccacgaaactcgtacctgcggctaagagcaggtgagtcacagcaccggtttatatctttatgacataactttttttttttgttccgcctcggtccgctcctctccccttgtcatctgtagcgaccacaaagaggaagaaactgagagcagatgtctgtgtgatagggcaggcggacccaagtcgggccgtcctccccctgccgggctcctcctcccgccccccttcagccgcttcagggagtgagctggagacgaccgtctggtttctgataggaaaaggtcagggggaggggacatctcccataacacgcgcgttagctgggagagcaagggcctgggcgcgggaacgcatctgcactgcgaaagagatgccaggcagaagcccgagactgcccgcagcggcgcttggtcctgtctgtgacccggagggtccgggctgagatctcaggggctcgcttggttcctaatcggtcctggacgtcggtg

SEQ ID NO: 203553 - DNA, 179 bp, Homo sapiens
  chr14:38677134-38677313
  hyper
gctgacatcctagctcttcccggaaaaactcgaatgtcgccctgccgttcctggggttggtgacaggtctggtcatcgcacggcggcagctcctcacctggatttagaagagctggcgtccccgcccgcccaagcctttaaactctcgtctgccagaacccgccaactctccagggtac

SEQ ID NO: 203554 - DNA, 31 bp, Homo sapiens
  chr14:38677488-38677519
  hyper
agacacggggggctctgagcgctacgagctt

SEQ ID NO: 203555 - DNA, 213 bp, Homo sapiens
  chr14:38677548-38677761
  hyper
ggtccctgaacactcccaatagcctaagctgcctgctgtgttatagcgcagaagcccctaacgcacggtggttgtcctttcttctcataacgctcgcagcttagggccagtttccgcgattctaagagtaattgcgtgggcacctgtgctggggccaggcgcaaagaagggagttggtctgcgcgaagatcgtcaacctgctaacagaccgca

SEQ ID NO: 203556 - DNA, 382 bp, Homo sapiens
  chr14:38677790-38678172
  hyper
cagtctggaggttgcgcactttgggtaaggagggcccggaacttccctggcgggtctgagctgcaaggcaagcgagggtgggaagagggaatttagggttctggactgcgggacgggagagaagctggggtctccagagaaaagggcagcaatggagggaaactgagatgaactccagacatccatgttcatggatccgtttgagtctttgctttgggtaggagaggagtggaatgagacagaatctatacctttggttcccacccgccctccagtaaggccgaggaactctcttggttcctctgagagcaagaggcagatggtgctgcgagggaaccccggaaggagccactaaagttgagcagagtgcaggactgggaag

SEQ ID NO: 203557 - DNA, 316 bp, Homo sapiens
  chr14:38678202-38678518
  hyper
acctatgtgctctcctccctttctccaccccacccccttttttcgtagctgctgacgcgctggtggtgcctattaatcatttaccagtccagagccgcgccagttaatggctgtgccgtgcggtgctcccacatcctggcctctcctctccacggtcgcctgtgcccgggcaccccggagctgcaaactgcagagcccaggcaaccgctgggctgtgcgccccgccggcgccggtaggagccgcgctccccgcagcggttgcgctctacccggaggcgctgggcggctgtgggctgcaggcaagcggtcgggtggg

SEQ ID NO: 203558 - DNA, 52 bp, Homo sapiens
  chr14:38725469-38725521
  hyper
cccggtgcagccctgagttattctggggtcaggaacacagctggcgccgggt

SEQ ID NO: 203559 - DNA, 83 bp, Homo sapiens
  chr14:39583445-39583528
  hyper
acttgctcagctccgcgcctaaggtgtctattagtacgcctgcgctgtgacctagaatgggcgcatgcgccgagcggaactgg

SEQ ID NO: 203560 - DNA, 243 bp, Homo sapiens
  chr14:39735535-39735778
  hyper
ggcactttattcgacggtcctaaaaatagagtcctaaatttagaaggcaaggtgctacttttagctcctcttctcggaggaaaacagcacgcaccgcgccaggccaaggtccacggggatttgatttagcatttgggtaactggccgctaatggaactgaagacagctgggcctaacaagtgcccaggtgactcaggtaagcgaggaaaccagatcgaggttctcttgcgtgggacaggttaa

SEQ ID NO: 203561 - DNA, 242 bp, Homo sapiens
  chr14:42076386-42076628
  hyper
tcccttgaggatgtgaattgtttagcagctggctgctcccttaggatccttgactttggggagctctggctgtgaacacagcccacccatataatccattttgcacggtccgttatatcagaaaaaaaaagcgcaactggacgggggtggggcagaccaacgaaacctagacagacacacacacactcagaggagagaggaagaattgaaagacttgagaagactttgataacctccctgct

SEQ ID NO: 203562 - DNA, 51 bp, Homo sapiens
  chr14:42077719-42077770
  hyper
aggcagaaagtcttcctacgaccgtcttttcccttagaggcaccaggtaac

SEQ ID NO: 203563 - DNA, 215 bp, Homo sapiens
  chr14:45431367-45431582
  hyper
caccatggaagcaatcggtttggtcacgtggtgcccttggttacgcccggtggcagctgtggggtctagggctcagacgggggccattttgccagaggctgcctcccggagttgggggcggcctggcggcaggctgaagctgttcttttgcctcttctgcagcttggggcttggagaggatctggaagtctgggctccatcgagccctttggaga

SEQ ID NO: 203564 - DNA, 89 bp, Homo sapiens
  chr14:45603790-45603879
  hyper
tgtctttgagtgacgtcaaggctgtgctatgagggcttctttgttgagtccgggttgaaaaacctaccgcggtcgtctctgcagtcgac

SEQ ID NO: 203565 - DNA, 118 bp, Homo sapiens
  chr14:50511811-50511929
  hyper
gcacaggcaagcctggttctcgtccaccacatggctcagcttcctgttcctcccctctgctcggagtcacagtcccgaggccagcggggtgtttaccgacttgggcctacccacaccc

SEQ ID NO: 203566 - DNA, 71 bp, Homo sapiens
  chr14:51027134-51027205
  hyper
gacgggccgtagccgagccgctccctgtttgggcggaggaaccatggccgagcggtacccgcgtcaccgaa

SEQ ID NO: 203567 - DNA, 160 bp, Homo sapiens
  chr14:51027685-51027845
  hyper
gccttctgccccaccccgacgtggtaccccattcagaccagccccaagggtggctttgttctttgattttaccttttggagacattgggctcatgattcagcaccaggccgaggggaggggaaaggagaggcgagacccagtatgttcacaccgcgagtg

SEQ ID NO: 203568 - DNA, 125 bp, Homo sapiens
  chr14:51027881-51028006
  hyper
gcagcgatgcggaagaaatcgcggccccgcccgccttgctgctccagacctagttctggacggttagtgtgggcaggctgggcgtctttttgtcgtaggttcccgatttcttgcagtcacagtgc

SEQ ID NO: 203569 - DNA, 224 bp, Homo sapiens
  chr14:51410345-51410569
  hyper
cctctgcaccacacttagccactcccagaggcctgagacttacgaccttttcccagctcggcgtttgtctcccctcccaaaataccaagctccagcaaggcaagatttttgtcccttttgtttagggctgagtgtccagggcagagaatagtgtccggcatacaggacaagaggcccccgtcacctcttgattaaatgctgagagtcaaagttccaaaaaagtt

SEQ ID NO: 203570 - DNA, 293 bp, Homo sapiens
  chr14:51410740-51411033
  hyper
cacgtctcctctggacttcggggcaaggaccgggtgcaagggaccactctgaggggttctccacctcgtcccgcccggccgcggccggagactccgactccgggctggaccccggcccgccgtcccgcccccggttaccttggggcacttgtcgtagtagtgctgctgcgtgcggatccagcgccccaccaggtggtcgcgcaccgtgtgcgccagcgcgaagtagtagtcgcgggtggtggccacgttgcggtccttgaccagcgtgaagtgcaggtgccggttgaaactct

SEQ ID NO: 203571 - DNA, 197 bp, Homo sapiens
  chr14:51411159-51411356
  hyper
gctggaagtgcggccggaggcgctgggctgccgggcaggggtggagtccgccccgccgcgccagcagctttcaacgcgcacgaaagtttggggcccgccccctcgggcggtgccgtccccgctgcactcccaccgcgtcccggcccctgccccaggccggagggcagaggaagtgcccggcccctcccgaggctctg

SEQ ID NO: 203572 - DNA, 223 bp, Homo sapiens
  chr14:51562012-51562235
  hyper
atagggcagtcttcgctcgcggctgcaagatctctgaagggggccggcgtgcggaggctaggggaccgggaaggaggagttaggcgggatgattcatcctcgcccggcttacttccgacctccggtgcagtctcccaggagctgggggcgtgagaaacccctccccgcagcgagtgggctgccggagggggctggggcttctcgccagcgtttgcgtttggct

SEQ ID NO: 203573 - DNA, 931 bp, Homo sapiens
  chr14:52117843-52118774
  hyper
ccccaaagccactatcgggaggggacaaaaataatttctgaggggccatgggcactaaaaccacagcagacagaggctgtgtctacctgaggaactggagaggtagaattagagggggaggctgggcatcctcggcggcgccccctccatccagcgtgaaacccacgaggcgcggcgtctcgagtggcgggcgggcagggggctgcaggattcacgaagccacctccgccggggaccgccttctctcggagtggcctcccctccggcgttccgctttagtaagacgacactcaggccaaacagccgcccccggccagcccgactcggctctggagggagcgccccgagggagtccagccggaggcggagaaggccactcggccagaaggtggggagccgccggcgtcccctcgcacctccgtctccacagcagggggaaaggccctgatcgccgtggtccacaccaccgcgtccacctgaggctcgcctcgcttcctgggtccctagaggggtggcgtactccgctttctcctgcccccaagtggccgcacccctccgcgggacgcttggttgggtccagggcggggcgggcgggcgctccccgtactgccgcgagctcagcgcgcagctcccgcggctcggctgccgccgcggccagttggggcgggtcgggggcggggtctcagggggcggggattcgggggggcgggtcgggtcgggaggcgtgggtggggggcggggcggacgcggagcgcccctctggctggcggggccaaggggctgagaggagtggggcaggctcggcgccggtaggaagagtcagaggggtgaccagagagcccaacgcctggtgctcaagactttctccgaggtatgaacaagaaccaggcgtctgggccctttccgctcgccccatcgctcagccgccgcg

SEQ ID NO: 203574 - DNA, 402 bp, Homo sapiens
  chr14:52313655-52314057
  hyper
tttgtgtggtgcagcggctgggatcccactgcatctacatggcaaccaggaaatcagtcattcagagtttccatggtaaccagagggggggaggggtggaaaaatccattttatcacggtatgctgtgtcccttcctggaagcctacagaatttttagacagaggtcattatgaaatcaacaacaacaacaaacgcccgttggcatcaagacaggcctgtgaactggcatccccaggcaggctgcagactgggagggtgggagtgagcatgcagctgaccccaccatgaggcacagggcgtcgccttctcccctcagcacagaggagaggtgacgaatgccacttggtctctgcagcgtctgtagagggaagtctgtaagcgggagtgtcaaccccaattgg

SEQ ID NO: 203575 - DNA, 301 bp, Homo sapiens
  chr14:52327326-52327627
  hyper
actagtccctgggctgcagccgctgctacacatactcacaacgctgccgccgcgctccgtgggcaactcctactactgctgggctgggctgggctgggctgggctgcgccggagctcgcctgcacagatcagctccggagaggggaaaaccacgctcctcggaccaagcctcgggagctaaggtaaatgaaacgttttccatgttgctcgtttttaattgagaaaaacgaccgtcgcttgtggttttaaggtccgatttctaagggatgatagagacatcgcttcaggactaggggaaatg

SEQ ID NO: 203576 - DNA, 44 bp, Homo sapiens
  chr14:52455679-52455723
  hyper
gatttgagagttaggagagacagaatggcaggaattggtgacct

SEQ ID NO: 203577 - DNA, 75 bp, Homo sapiens
  chr14:52455753-52455828
  hyper
gtgagggacgatctcggcttcagatttcactctggctgaggatatctggaacgatcgcatcgtattaacaattgt

SEQ ID NO: 203578 - DNA, 102 bp, Homo sapiens
  chr14:52536504-52536606
  hyper
catgaaatactactgtgtgtgatccgctccgtttggggagtaggatgaggcatcccgcttggttaccaggcagaaaggggcgagtcgcggggatgggaagac

SEQ ID NO: 203579 - DNA, 210 bp, Homo sapiens
  chr14:52734271-52734481
  hyper
actggcctgctccgcgctcttcaatgccagcgccaggcgctcaccctgcagagcgtcccgcctctcaaagaggggtgtgacccgcgagtttagataggaggttcctgccgtggggaacaccccgccgccctcggagctttttctgtggcgcagcttctccgcccgagccgcgcgcggagctgccgggggctccttagcacccgggcgccg

SEQ ID NO: 203580 - DNA, 103 bp, Homo sapiens
  chr14:52735582-52735685
  hyper
ttagagaaaggaagggaaaggctgagcccggcggtgtctccctagcccagcaaaaccctctccatgtggcagaactccctcctctctgcttccttctggggag

SEQ ID NO: 203581 - DNA, 325 bp, Homo sapiens
  chr14:52781103-52781428
  hyper
ccagggcaagccgccgtcggcgcgctgggtgcgggaagggggctctggatttcggtccctcccctttttcctctgagtctcggaacgctccggctctcagaccctcttcctcccaggtaaaggccgggagaggagggcgcatctcttttccaggcaccccaccatgggcaatgcctccaatgactcccagtctgaggactgcgagacgcgacagtggcttcccccaggcgaaagcccagccatcagctccgtcatgttctcggccggggtgctggggaacctcatagcactggcgctgctggcgcgccgctggcggggggacgtg

SEQ ID NO: 203582 - DNA, 79 bp, Homo sapiens
  chr14:52782046-52782125
  hyper
gaccacctcattctcctggctatcatgaccatcaccttcgccgtctgctccttgcctttcacggtaagtcactccctac

SEQ ID NO: 203583 - DNA, 38 bp, Homo sapiens
  chr14:52782173-52782211
  hyper
cctccaccctttccaccgccctacaaactttttgcaac

SEQ ID NO: 203584 - DNA, 40 bp, Homo sapiens
  chr14:53161604-53161644
  hyper
aagcagccattcttccgcctaacatcgaaatctgagatca

SEQ ID NO: 203585 - DNA, 202 bp, Homo sapiens
  chr14:53173877-53174079
  hyper
tcccccgcccggacggccatggccattcccggcatcccctatgagagacggcttctcatcatggcggaccctagagataaggcgcttcaggactaccgcaagaagttgcttgaacacaaggagatcgacggccgtcttaaggagtgtgagtgcacctttctttccatttaatcaagtgcctcgactcgcttctgcctctgac

SEQ ID NO: 203586 - DNA, 169 bp, Homo sapiens
  chr14:53196918-53197087
  hyper
ggcctgaggggtacggagactctgggggagggagacggcagcggcatggcggccgggtgtaagacgcccgaccctcctcttccctgtcttcgccgccgccgctgctggagtcactgggaccctgtagtctgcgtgtgttagttgtaatcccgccgccctcctgtcagcc

SEQ ID NO: 203587 - DNA, 135 bp, Homo sapiens
  chr14:53417820-53417955
  hyper
ccgccccctctgtccgagcctggctgggctgggcgcgctggctccctccttcgccgcccgcagagctgccctgagcgggtccggccggcctcgcctctgcccccgccctcccggcgccgcgctcgggggaggggg

SEQ ID NO: 203588 - DNA, 360 bp, Homo sapiens
  chr14:54420341-54420701
  hyper
ctcccggcggcgctcggcagagccctcggccggtgccccgcggccgccgcgctcccagggctactggcgcagcgcacggagaacccggttctcggcgcggtgcgtcgtgctgggcccccgcgccgggccacctgaagccagaggatttggggcgcactgaagggactgcgtctcccagctcgaacccggcttaagtggggccgggagcgaggtcgggaaagtctcacccgcccaaagcctcaccaccgagaggcacttaaaaaggaaagcgcagagggaccctgcccacgcgcgtgtacacacacacccccccacacacacacaagcaaacacgagctccccgccacttcctccccaggg

SEQ ID NO: 203589 - DNA, 140 bp, Homo sapiens
  chr14:54422201-54422341
  hyper
ttattgggggaaaggaatgtaactcggggtggttgtccttcacttccctactcgaatcttctcctaatgccgaaatgtgtttacaggtagcctcagtttaccaagtatgtatcttttgggggtttaacctctcacaaagc

SEQ ID NO: 203590 - DNA, 39 bp, Homo sapiens
  chr14:54422971-54423010
  hyper
cccacagtttttcccaacgacccccctaccaagggcttc

SEQ ID NO: 203591 - DNA, 76 bp, Homo sapiens
  chr14:54430607-54430683
  hyper
agccacccgcgcggaatttgcatccatccgcacgagaggttcctgagacgctaagcgttctcgcctaccagaactt

SEQ ID NO: 203592 - DNA, 130 bp, Homo sapiens
  chr14:54687124-54687254
  hyper
gattgtgttggtgcactgacttgttaactgtgccacgctgtgaaggaaatggcatgatttagatcaagtgctcacgacggctgttcataagaaacacttgagccaagctgttgctgctcagaatgtgccc

SEQ ID NO: 203593 - DNA, 33 bp, Homo sapiens
  chr14:54687296-54687329
  hyper
tgagggcaggcgcaaagcgctgcaatcccgggg

SEQ ID NO: 203594 - DNA, 87 bp, Homo sapiens; identical to SEQ ID NO: 124608
  chr14:55518071-55518158
  hyper

SEQ ID NO: 203595 - DNA, 128 bp, Homo sapiens
  chr14:55595810-55595938
  hyper
cgcccctgcggcggcggctcggggtgtctggccggcgcggggctcgcccagcctggtccggggagaggactggctgggcaggggcgccgccccgcctcgggagaggcgggccgggcggggctgggagt

SEQ ID NO: 203596 - DNA, 133 bp, Homo sapiens
  chr14:55595968-55596101
  hyper
cgcccgcagcacctcctcgccagcagccgtccggagccagccaacgagcggtgagctgcgcggggcgcgggggacgcggctccggccgggcaggggagagggcgcccgggcgctgcttggggcgcggtccgga

SEQ ID NO: 203597 - DNA, 458 bp, Homo sapiens
  chr14:55596153-55596611
  hyper
cctgtgctctgccctccaggagcggggcggcgggcagcgatctgggcccggggcagtcgcctttgattatcgagggcgctggcgttcggggaaggttggcagcaccttacgagacccacacacgtccccggggcggcacgggccaccttctgcggagcctcgtgggcttcgccgccgtcgcacctccgccgcctgcgctctgcggccccagagtaagccccatccggtgacgagccgcagtctggtcaccccagtcccaccaggtcccgctgcgaggggaggcggaggggctcgctcagcaaaccagacggccgctccagtttctctaattggggttggagccccgtcacccttccccagatcacggccgcgggggagcgaagggacttcccaggactgcatagggcgcctcccgggacccacagcttggctggcccggccccttttgagcatcagct

SEQ ID NO: 203598 - DNA, 158 bp, Homo sapiens; identical to SEQ ID NO: 124629
  chr14:57265912-57266070
  hyper

SEQ ID NO: 203599 - DNA, 42 bp, Homo sapiens
  chr14:57270894-57270936
  hyper
atctgccctacctgcaccctcgactcgggcaagttgattttc

SEQ ID NO: 203600 - DNA, 110 bp, Homo sapiens
  chr14:57272911-57273021
  hyper
aaacttggaaaaaccgctcaaccactattattccacatttgaagtcatttccggtaatcattttcacctaattagtagtctgggtaattagatttcgaggtaagtaacag

SEQ ID NO: 203601 - DNA, 33 bp, Homo sapiens
  chr14:57279657-57279690
  hyper
ccaataaactacgagttggaaatggacagtgtt

SEQ ID NO: 203602 - DNA, 112 bp, Homo sapiens
  chr14:58331910-58332022
  hyper
gcgctggcagcgtctcaacagcccggagtgaacgagctgaccccaccagcgccgggacccacgtctgggtcggccgcccccgccagccccacccccgagcctccccagcctg

SEQ ID NO: 203603 - DNA, 108 bp, Homo sapiens
  chr14:58332055-58332163
  hyper
cggggcatgtatcccctagggctgactttccgctaagtgaacagccatgttagcctcctccgggcgtaaatccaccagggtgagccggccaacggcggtcaggagcgc

SEQ ID NO: 203604 - DNA, 212 bp, Homo sapiens
  chr14:58711341-58711553
  hyper
tcagataccacgacgccaagcggctcaaagtacgcgaaccgaaggaggagcctttgctttccccaaccccgcctccattgcttctgcacatgcgcgccgccagcctctcgcggcccgcttttttcccacaatactcctcgtcctgggggccggagccgcggaacgagccacagagaaaaaggttattggttggcagttcagccaatgagcgg

SEQ ID NO: 203605 - DNA, 83 bp, Homo sapiens
  chr14:60097110-60097193
  hyper
gtcccgggtttcccgtgcgcctcaggcatgcactactgaaataaagagaataccctgacttttccagttgctccacacacagt

SEQ ID NO: 203606 - DNA, 58 bp, Homo sapiens
  chr14:60385921-60385979
  hyper
ttcaaaatacaatgcgtaccttacagcacatgtcaatttggacaagccacatttcaag

SEQ ID NO: 203607 - DNA, 197 bp, Homo sapiens
  chr14:60558407-60558604
  hyper
aaacattcattaccgtcggtgtgttgagtggtaacgccagtgtgcgaattcattaatggaaatcacgggaccccgagcggttggagatctgccacacccctctgcctgcgttaagacagcctgacccgacctctggtaaattaatgcgcaaaatggcggttgcacgtctgtttccccaccccggcgcacaatcctga

SEQ ID NO: 203608 - DNA, 75 bp, Homo sapiens
  chr14:60794398-60794473
  hyper
gaagcagaattgggcgctcaagactcagacccggactgatgagctaagactgcttgcaagagggagtgggagtcg

SEQ ID NO: 203609 - DNA, 120 bp, Homo sapiens
  chr14:60974092-60974212
  hyper
aaagttgtccttccggctgattcggaagtcgctccaagggaaagaaggtttatgctttgtcattatcttcatcgccctctttattttgcccctgccttgtcgtatttcaagaaaatgaac

SEQ ID NO: 203610 - DNA, 136 bp, Homo sapiens
  chr14:60982999-60983135
  hyper
ctgctaccctgtcattccacaaagcctaccccacctccactaagttttccgtgagccagtgagctccacacagataatgtgccaccaccttttttaatgctcccaccgcaccttatctaaacgtctgttttagcgc

SEQ ID NO: 203611 - DNA, 188 bp, Homo sapiens
  chr14:61104864-61105052
  hyper
ttcctgaaatgtttgagggaacatccagggtttttatccccacatcaggccgggcgatgggctcgagtttcaggccttgtcactcagctgtcaccaaacaaacgaagctctcagagcccaggagagggagagctacctgctattcatgacccctggagcaggtgatcgctcatgggaaaaacaggtag

SEQ ID NO: 203612 - DNA, 281 bp, Homo sapiens
  chr14:61108286-61108567
  hyper
aaggtcgcggaacacgcgtgcaggcgatgagactgagccttcgggtccctcagtgtgaattgtccatgggggcgcggtggggacacacactagtgcgctggcttcgggcagctgaaggaggtagtctccgagagtttttagagtcccctccaagggaaagcttggaaaaaagagaaatggagcggagagagcacgtgggctaccagcgaccaccctcaccttaaacctaacccacctgtccctgtcaacgccaccctaacaaatcagggcagaaggtgagc

SEQ ID NO: 203613 - DNA, 141 bp, Homo sapiens
  chr14:61114722-61114863
  hyper
tcttaatttggggcgccggggagtaaatgcagcgccaactctccccaaagctctctttttgttgtatctttaaaagtctcctccatttgtccagctagtgagaaatgaagcaggctacctctaaaccaaaagactatcaag

SEQ ID NO: 203614 - DNA, 74 bp, Homo sapiens
  chr14:61114923-61114997
  hyper
cccctctggggagcaagaggagagaggttcgcgaacctcagctcccaccaaacccctttccttgcgacaccaat

SEQ ID NO: 203615 - DNA, 207 bp, Homo sapiens
  chr14:61117028-61117235
  hyper
ggttcctgaagcttctggactcaatttccccatctgtgcggttgtgttttgcagtgccacctctgctactgaggaatgccgagaggctttacttgctattagcaaaaatgctttgggaacctcgtacgaaaggcgctggatgtggtgtaaattaaataaaactgtgcccggctccaataaccgtccggttgtaatataatccttacc

SEQ ID NO: 203616 - DNA, 400 bp, Homo sapiens
  chr14:61119136-61119536
  hyper
ggaaatgagcaactctagccagccggctgctgccctcgctgcagcgcggctcgggagggaacaccgctggcaaggagcgcccgatgccaggtttcggctctccagtgcctcctctgtgcaggtaacggccgcgtgcgctttagtcgatgaaaaagcattcagtgggacagcattagctgttgctagggtttctcggctgggttgacaggccttgatgcaaacacccctagctgggacccacttgtttcccttctggcttgtagcaagatagttaggggctcccgggccgctttcttggaattctttcaccatccagaacgacggtgaggattctactctacctacaaatatttggaaagggagggcatagagaggtgtttcttcaataaattcgtgtcat

SEQ ID NO: 203617 - DNA, 616 bp, Homo sapiens
  chr14:61119639-61120255
  hyper
ccggctccgatggccggcgtggcgccggagcagcagcccacctgctcctgggggacgccgctccccgcgaggtctgaataggcctggggctcaggcagagagatttgcggactcagagaagagaaacccaaaaccagtccattagtaaatgagttttgtgttgtcaaggttctttcccatccacttgctgttctgaaaaatagatcacgtttcgttatctttagtgggaatctgcaacgtgacaccggatccgcgcggcccccgcctccctccctgcctcgctctgcctggctgaggggagcaggcgggcctcctcagcttatttctgaacaatgaagatttgtctcttccccaagtgtatttatgtatgtatggagggaggaagttttctcctggaagcgggaagctcgagagcagagcctcctacttctttggtgcgaaaacgctgcgctggcccaagattcagggcgactgacgccccccaccacctccaccgcccacacctggacaaacagagccagctgtgagcctggctcgccgctgaaaaccctgccgccccgcgcggctcccgaaaataccatctccgtattgtctcgaggtcagggaagggagaaag

SEQ ID NO: 203618 - DNA, 331 bp, Homo sapiens
  chr14:61123209-61123540
  hyper
tctgtttttgcattctcacacgagcatattgctcgggttctaaaggatccagattttcgcagacagaagctcgaccgcctctgttcccaaaagggccgagcggcgtttgtctgaatcaccagtcctctgagcagtgggaaaagagatactgggtagagggtgctgggaaggtgcccactcatccatgcccctctgcgcgtctcgcccactcgcttaggcttggactttgcaacaaggtttccaacaccgctgcagtgcttgacaaagccctcctggaagccagcagggtgaggctgccagcaagcaggcgggctgcgagggacgcttttag

SEQ ID NO: 203619 - DNA, 608 bp, Homo sapiens
  chr14:61123681-61124289
  hyper
gcgcgcgcagccaagtatccgcgcgcggacgccggggaggcttcaccgcccggtgtgctggcggccccgcccgctggctcgcagagcggggtctcgcagagctgggcctcacccgtcgccccgccgcctgcaccagaaactccctccccgggctgtgcgggagctcttgggcgccgcgtctgcgccggggccgactccgcccaggcttgtagccagaggtcgcgctatctcgccgggctggcccggcgctctctggggttgttccctcgggcggtgcatggggcccacaggcgtcggggcttgagggaagaggggccggggcctgaagggcggggaccacaacgaggcgcggggaggtcagtggagcggagagccggcgcaggccggcggcggcgcggccggaggagaaagagggcgctgtcttcctggcaaaggagttttcgcctggccggcaggaaccgaaacaacaacaacaacaaaaaaaaaagaaagaaagaaaatctgctccgccgagtccccggagtgaagagcgcgcggcgggaagggtctggggtagcggagcggattctcggcccaaagcctggggaccgctcagcccaccttggctt

SEQ ID NO: 203620 - DNA, 524 bp, Homo sapiens
  chr14:61188627-61189151
  hyper
tttggttaccgcgagggccggatagggcaccaagcctccctcccagccttgggcgaggaacgccggagcccgagccgtcggacccccacaggggcccagaagcggcaagggcgggctgagaccggctctggaatgcgctggtgatcaccttcacctggcgcaggcgggctggatccccggctcccagtttgcttccccgagaagaaccttcgagctgcttttggattctttctctcctatccccgcggggctggagacaccaggtctttaggcgaccttctccttactttgtttcgtccaacaaaacacacagacgcacacaccaagtgtctgactcgggaggacgcacaaaagaggtggaaaatccggtattttttttaccagagggggaaagcagtctgccaggcaaaaagctcaaacccagtggggtgggagcgcccccactcctttgctgccgcccgccgtaagccggcctgccccccacccataactaccgtaccaggagggagccaagcagcgttcgg

SEQ ID NO: 203621 - DNA, 64 bp, Homo sapiens
  chr14:61748033-61748097
  hyper
tagttccaggccctacgagcagtgcccacaccctcccagttccgcctccgcccaggtgcgctgc

SEQ ID NO: 203622 - DNA, 124 bp, Homo sapiens
  chr14:61788057-61788181
  hyper
ctcaggtgtttgctcgggctgggccacgaaccctttcctttttggcctgcgcccggggtggcccctaacccgcagcgcacggccagacccagcgctacaaggagggcgcgcagggcggcgcaag

SEQ ID NO: 203623 - DNA, 304 bp, Homo sapiens
  chr14:61788418-61788722
  hyper
aagcaagaggaggcgggggaagagacgcttggggctggggctcaccggacgggtaggtccggctctccagggagaggagctgcccggccctggagaaggggcgagtcctgcgcgagtccccgggaggcgccgcgcgcttggaagggacggtcgggcttccccggcccgctgagggctcggcggcgggctcccctcctttccacctcgggagggagggaaggaggggagggaaaagtcccacggaggaggcagaatggccagtcgaggggcgcttaggcgctgcctttccccagggctgcctcga

SEQ ID NO: 203624 - DNA, 252 bp, Homo sapiens
  chr14:61789205-61789457
  hyper
tttgtgtccacccaacccccgttccccttatgtttttcaaaactcacccgggtcccgctttcccatcgctttgtggctgagggaattccctccagactttggtcttcgtccacgtggccgcggcactggtgacgcgaccgcggtgggtgtgtgcaggcgcaggtgtgtctccaggaagccggcctggacacgatcccctttcaggacagcggcttggcctaacgggaagtcgggcaggggtccagggcggtc

SEQ ID NO: 203625 - DNA, 144 bp, Homo sapiens
  chr14:61943723-61943867
  hyper
tgtgacctctttgacgtcagtaactgtttcctgtttatttgaactccctgctcaccctgtagatgactttgtctgagaaaaataataaagcaacggtacttaggagaagttcaacactgctatctgttacggagatttccttct

SEQ ID NO: 203626 - DNA, 400 bp, Homo sapiens
  chr14:62162324-62162724
  hyper
ggagaggctcggagccgggcccggaccccggcgattgccgcccgcttctctctagtctcacgaggggtttcccgcctcgcacccccacctctggacttgcctttccttctcttctccgcgtgtggagggagccagcgcttaggccggagcgagcctgggggccgcccgccgtgaagacatcgcggggaccgattcaccatggagggcgccggcggcgcgaacgacaagaaaaagtaagcccattccctcggcccgccgccttctcccccggcgaccccgcccgcctgcccgccctgggctcctgggccggcctcggcgttaatgggattggggggggcagcctttttgtttctgctgctgctcccctcccctctcttcccccaacctcgccggccgggct

SEQ ID NO: 203627 - DNA, 220 bp, Homo sapiens
  chr14:62163024-62163244
  hyper
cggaccctgcacgctggtcctggctttccagtggacttggggccttgagttcccgactgagggactcgcgtggtcggatgcgatcttgtcctgtagttgtccagccgtcgcgggtgtctttgcctttgtgcattagggatttgccgcgatggccttaagatgcgaactttttagtttgcacgtgcaggttttgtttcgttttaatcgccttgaaaaactt

SEQ ID NO: 203628 - DNA, 79 bp, Homo sapiens
  chr14:62584399-62584478
  hyper
caccccgcccccaaccactgaagagtagccagctgctggtcccaaatgacctgattcgattttttaaatgtaaacctta

SEQ ID NO: 203629 - DNA, 31 bp, Homo sapiens
  chr14:63511825-63511856
  hyper
ccttaccactggagcgcctgacgatgttctc

SEQ ID NO: 203630 - DNA, 480 bp, Homo sapiens
  chr14:64761256-64761736
  hyper
acaaggatagtggcgcacagatggcgctccccgcagccccagtctcagatttaagaggtctggagtagggcctgagaatatgcatttccaaccaggtcctgggggatgccgacactgatacagccagtctggggaccacacttcgaggatcacgtcctcagcccctgactcacataagtgtcattcagaacagatgtctgattctaaggagccagtggtgaaaccagagaggctttgggtttgtcaaatccccagcagcaaacgtaacctcgggccctggagtggcaaagccgtggactagaggtggagggagtgggttctcagctctcaagaggtcactgggaaggcctttcgcgttagatcaaagatcccaggtacttcctcgaactcacttgaagtggcaccggggagacctgtgcctccggccacggcgcccttctccgctggaggcacctgcccacccctcttctcgggcgaagg

SEQ ID NO: 203631 - DNA, 187 bp, Homo sapiens
  chr14:64805571-64805758
  hyper
cagccagtcatcaccgacttcctccacgttttccttgtcctctccggccggcagtgtagcagcagcaactccctacgttgaagtcgtctccctccgtccccgcccttacttccttttcccttaaggacctcgcgcgcgcttccatattcagaggggcgcaggcgcggtagcgcggcctcccgagctg

SEQ ID NO: 203632 - DNA, 213 bp, Homo sapiens
  chr14:64931838-64932051
  hyper
aggagaggagatgtgtaatgcgactgtctataatttgaaaccggacctcactatttagcgtctcagaaaacgcggggttcattgccctggtcccccccgccttcccccgccccccgaaccttccggctggctctcttgcggtccccgcctcggcgctgatgtggtctggcagtggagattggcgcccgggcggagcacgatgggcttccccgc

SEQ ID NO: 203633 - DNA, 43 bp, Homo sapiens
  chr14:65005557-65005600
  hyper
tttattttatttttttgagacggagtctcgttctgtcgcccag

SEQ ID NO: 203634 - DNA, 117 bp, Homo sapiens
  chr14:65008409-65008526
  hyper
gcaggcgagcatcgagatcgactcgctctacgagggcgtggacttctatacgtccatcacgcgcgcccgcttcgaggagctcaatgccgacctctttcgcgggaccctggagccggt

SEQ ID NO: 203635 - DNA, 120 bp, Homo sapiens
  chr14:65008556-65008676
  hyper
caagggccagatccaggagatcgtgctggtgggcggctccactcgtatccccaagatccagaagctgctgcaggatttcttcaacggcaaggagctgaacaagagcatcaaccccgacga

SEQ ID NO: 203636 - DNA, 217 bp, Homo sapiens
  chr14:65008720-65008937
  hyper
gcgacaaatcagagaatgtgcaggacctgctgctactcgacgtgaccccgttgtcgctgggcatcgagacagctggcggtgtcatgaccccactcatcaagaggaacaccacgatccccaccaagcagacgcagaccttcaccacctactcggacaaccagagcagcgtactggtgcaggtatacgagggcgaacgggccatgaccaaggacaataa

SEQ ID NO: 203637 - DNA, 90 bp, Homo sapiens
  chr14:65009279-65009369
  hyper
caagatcctcgacaagtgtcaggaggtgatcaactggctcgaccgaaaccagatggcagagaaagatgagtatgaacacaagcagaaaga

SEQ ID NO: 203638 - DNA, 113 bp, Homo sapiens
  chr14:65016816-65016929
  hyper
gctgggcgcaaggcgggccctgctgcccccaaccggcgccgcgcccctcgccctcctccagaggcgggtcgtcgccttcgccccgggctggcggttctcaaagacacctggcc

SEQ ID NO: 203639 - DNA, 201 bp, Homo sapiens
  chr14:65171074-65171275
  hyper
acccacaggaaaaattcctggcccgcccctccctcgctccctcgctccctcgctccctcgctccctcgctccctcgctccctcgctccctcctgccctcccgctgcagctccggctccgctcgacttcctgccgggcgctggcaagccgcgcgctgcctggggtctccgggggccgcgcttgcagctggccgagtccgggc

SEQ ID NO: 203640 - DNA, 184 bp, Homo sapiens
  chr14:65171494-65171678
  hyper
acgctggggccccagtcccttcgcggcccccgtgccagccccctgcggggtgaggaccggggcgaccgaggagggcctggaactgtgttggctgcttcccgggccaccctgccgcagagtgcgcgagcgcaggagggtcgtatggggagactttttctgtctttttttccctccactccggaaa

SEQ ID NO: 203641 - DNA, 183 bp, Homo sapiens
  chr14:65171770-65171953
  hyper
ggctggagctgtgggcctggcgggtggacccttctgcgcgaggacccgagcctcggctcctgccagccccggaggcgcctgcagcctgttccgggttggcgccgcacggtgctcgctgttgggaatctcggctacctgtccggcagggaggagagtgggggccagaagcggggagcggaaagc

SEQ ID NO: 203642 - DNA, 203 bp, Homo sapiens
  chr14:65381155-65381358
  hyper
tcgcgaggtttcgtcttcccggaagcgttggaggacattccctgttgactgcgtcgcgatgtgtggcgactgtgtggagaaggaatatcccaaccgggtgagcgactgggcgctcccttggcccgcgggcggcccccgaggtgtctcatatccaaggctggccttcccagagaggccgtacgtggggcggactcggccgcact

SEQ ID NO: 203643 - DNA, 65 bp, Homo sapiens
  chr14:65438693-65438758
  hyper
tggaactcgttgtcggtgaagcggcacagcaggcaggtcttgcccaccccggagtccccgatcag

SEQ ID NO: 203644 - DNA, 204 bp, Homo sapiens
  chr14:66974387-66974591
  hyper
tgtcatagtagccaccgttctgccactcatgcagctttctaagacacctctcggttccccagcgctttcagtggggcggccggccattcccgagggttgcaagaggaggcccggggtgctgagccagcctcgctgcccccgcgtagaaagccggcccgccggcgagagccagcctaaggcgcggacaaccaacgaggtgtcagg

SEQ ID NO: 203645 - DNA, 360 bp, Homo sapiens
  chr14:66975393-66975753
  hyper
cggcctcgggaggagggaaggctgaagaagggaaccgcgggggtgcattttacaaccgctgagaaccgccggagattgggggtgttcccgcgggtcccctcccccaggccccaggagccggggtcgaccccgtgggatgttaggccccagcgccttcggaagcaaagtcctgggcccccggggaccgaggggccggtgcggagggcgctgcggggctccgcgctgtcggtgcaggcggcgggatcccggctccgcagtctgaagcatgccgctctcggctggcctgggcgcatcctccgctagtgctcttcagagagaggggggaatcccatctccacccccttcctctccttcccttcc

SEQ ID NO: 203646 - DNA, 251 bp, Homo sapiens
  chr14:67825995-67826246
  hyper
gaatgtctggctacgtaaactgtgagctctgtagggcagaggtggcgacggttcagttatataaatccagtgcccggctcaataagggtatgtggaatggatgaatccattaatgaataaagacagcagacctccacaaaagcccgccggccgggcgccttttcctaccggctgggatcgcttcgtccagcctgattcactcaggaggaatgcgcgaagaggccgtcaggaagcctcgccctagactcaag

SEQ ID NO: 203647 - DNA, 126 bp, Homo sapiens
  chr14:68141650-68141776
  hyper
gctcggacgagagcgtctcgtcccggggtcgcgcgttgctccgggtgccaggttcagcccgcgcggcgacagcgggcttcggcccgatttgatgtatgtttgcgtctagacgtcgtcctcactgtc

SEQ ID NO: 203648 - DNA, 227 bp, Homo sapiens
  chr14:69259278-69259505
  hyper
cgtaaaacaggatcgcccaaaacttgtcccaatcccagccctccccccgaagcccccgggctgccctgccaggcaaacttcgcccctcaaaaccctggcctccagattcacatgtaatccccgccagcaactgttgaaactcaaagggtgggaaggacggggccaaattccttcaaacttgggagaaatgccggaggagaaaagaatcatctcgctgcaccactttc

SEQ ID NO: 203649 - DNA, 360 bp, Homo sapiens
  chr14:69262330-69262690
  hyper
tccaactcccggaggccctcccctccccctctccccgggggcgcgggctccgcaaggctgcgactggcctagcccgctcgctcccgagttgtttaccggccccgccgaccaagggtttgttccagctcccagagcctgtctctataattaaactcttttttaaattgtcgggttgaaacgtcatttcggggactttccaagggtgagggagccgagaggagggagcgagtcccttaacccttcgctgacccggcgtccccgccgcggtgagggcccgagggcgggagccgacccgccctcgcccagacgtggtcgacaggtgcccaggggtggcgggagggcggccctacggtgcaggaa

SEQ ID NO: 203650 - DNA, 565 bp, Homo sapiens
  chr14:69444743-69445308
  hyper
actggccactgtgcccgggtcccatcgccagctccgagcccagctcccgtggcggggcgcgcacccggcacaccgcgcctgcctgggatgcagctccgtggctaagtagggatccccagtgactggccccaaatatcccctaagactgaccctcgttctgcagcccctcaactcgaaccgagctgcccacctttcccgggggtcggaggggcaggacgtagcgcaagcccatgtcggggttacagcttccaacccactgagttaagcaataaaacggtctgctgtcctgaccccgcccccacagggcccgcgggggagcccgcgtacgccccccagttttctcgtccccagccgcactccagctggtccttctccaggcagatccggaggcggccgccgatctctccggcgctctcccctccgcctaaggggcagcagggtcccgggaggcccgccgctcaggttgaacccagggcggcccaggaagcggcgctgccaccgcacgccatatggagaggtggccaggggcggaagaaaagggaaaatcgatccggagcaagcagcc

SEQ ID NO: 203651 - DNA, 299 bp, Homo sapiens
  chr14:69445727-69446026
  hyper
ctggctgcatgtaatcgttggtttgctgagaatcataatggtccatgatggtgcgcgcgtgctagggtctggatttcttcctccaccttctctctgagcaacggctgctgccctggcgtggggagggagtagggctgggctgggctgggctggcggggccgggctcgctcccctgcgcccggttccgccgcggcgctgctggcgaaggctgctactggcggcgacagcggcggctgggctcgcggactgcctgcctctgggcgggcgcttggacctaatctccacgcacactgaactag

SEQ ID NO: 203652 - DNA, 561 bp, Homo sapiens
  chr14:69446238-69446799
  hyper
ggtgcccgttcccccgcggctcatgtgacgccagcttaagctgaacgggaccgaagccgggagacgcctccccgagctcggggactgagtggcagcgcgcttgggaaccccaggagccgccgggattggacccgttccccgccaccgttattgcgctcccacgcgcgctccaaaccccggggtgggagggggctggagaaaggacgcgaggaaacccgaagaacattcattttctctttcccagggaacctgggtctgggcaggtcggcaccctaggaaagggggcggagtggggcaatggaaaggaatttcttgggaatttcacgactccaccgccgccccccccggccccgccccaccccaccccaccctacaaggcgcgacccggctgatccctgccctgcaggaacccggtttctcgccagcgaactgctctcagaggctaccgagcgttcccgcctcgccgcaggaactcttctagctcgccctcgggctctggggaccgctccacagcggggcctcccggaattccctgccggtctccgcgggcacacttggctg

SEQ ID NO: 203653 - DNA, 104 bp, Homo sapiens
  chr14:69618203-69618307
  hyper
aagctaagcgccacgtccagcgctgggttcccccttcatccctcccaatataggaaaagggacagaagagggcagcagccaagcaggaacgcccaatcagccgt

SEQ ID NO: 203654 - DNA, 95 bp, Homo sapiens
  chr14:69658738-69658833
  hyper
tttctctcctggattcgtgtgagccgccaccctcgctaccatccctgtcctcccagaccacaccctgctctgggccttgccgggagccacctctt

SEQ ID NO: 203655 - DNA, 362 bp, Homo sapiens
  chr14:69864916-69865278
  hyper
ggactcgggtagccgcggaggcctttctcaccatcgcgccaaactctcttcgctacagcagctgccgacaccgccgccgttacacgagcttaactacaacgccgctaacagccaatcctcgcgagaggagccgccggaagtcgtcgaaagtgcaacgcaaaagagccttttggatcatagaggcacagtcacttccggcagctagagcagctactgactctgtttcagccatcttcgataaaggcaaaaaggtaagggaaagtttccaagctttaggaagaattattttttttcaagacgctgtcttccgtactttcgttattaaacatacggctcaagtgatcaccggtatagacagtgac

SEQ ID NO: 203656 - DNA, 365 bp, Homo sapiens
  chr14:70193443-70193808
  hyper
ctgccatgccctttggcaggcagccgtccccacgcccggaaagccccagcttcggctcagcccacagcacaagggcatatccttctgcctgcgcaggccagggtgctcgacgccctcgcggtccgcctgcgcgcccccacgcaggctcagcagcgcccgggcctgcagcagaggccggaggaagcgccacgggcggctcagacctgaggccgcaagggcgcgccgggcgggcagggcggagggtccgatttcctccctctgaacggaaaaaaagccactttccctgggaagaactcgaagaagttggatgtctgatcttcaccttggatttgtggtctcggcccgcgggcgactcaccccaccca

SEQ ID NO: 203657 - DNA, 126 bp, Homo sapiens
  chr14:72399486-72399612
  hyper
aggctgtggggagcggcgcggagacggactagacttcccctccgcccccaagaggctgccggtccccggttccctgggcttctccagctttatcatgaacctggcgcaaggttggctttaggaaaa

SEQ ID NO: 203658 - DNA, 50 bp, Homo sapiens
  chr14:72400239-72400289
  hyper
gaccgtgtttacagtcaccagcaggctgcgtaaagaagtggcccagtgag

SEQ ID NO: 203659 - DNA, 240 bp, Homo sapiens
  chr14:73359750-73359990
  hyper
gcaggcaggcagaaattggctgttggacccggggctggcccccgcgagtcctcgcccggcccgccccactctgtccaggatctgggcaagcgctcaaagtctccccgaggcggccagaggcacctgcccctcgcccggccgggagcagacgctgccccctcgggccaggagccccaaaaccgcctctccgcctgcctcagcgcctcacccagaggtggcgagaacaccattcataagacc

SEQ ID NO: 203660 - DNA, 327 bp, Homo sapiens
  chr14:73393291-73393618
  hyper
gagggctgccgcgctcccgctgcagagctcggggtgggagacaggcgcggcgaggaaggccagggaaaggggcggggaggggcggggaggagtgagcacgtggaacgccggcgccaccgggcctaggtggcagctgggccggcgcgctccgcccgttctggggcgcgtggggccctccggccggatcagtgctgcaaccgtaaacacgcagggagggcaccccgagtgtcgccgctgagggcgtttctctaagcgcttctctgagacctgctgctgaaggccccacccgacacctggcgggggctgggctgcgggccttggggcggt

SEQ ID NO: 203661 - DNA, 180 bp, Homo sapiens
  chr14:73957467-73957647
  hyper
atttttaaattgctctctgagtgtagattccttgtttgtttggcaagggttcttgccgctgccgctacagcttgaagccaaacatttaatgaaagagagcgggaggggccgaatagaagaatgatgggcgtggccaaccccgaggtggctggaggccgcgcccccttcccagagtgcacc

SEQ ID NO: 203662 - DNA, 154 bp, Homo sapiens
  chr14:74111425-74111579
  hyper
gttgttagggggacgttttaaggtttttaactttaggcggacaagtcactacagatcagctgaaattgctttcggtcctgactactcctgtgcggggttaagacctaaggaagcaaaagggcagccagcaacagccggacgggaggaccccggc

SEQ ID NO: 203663 - DNA, 201 bp, Homo sapiens
  chr14:74180377-74180578
  hyper
gactgtggctcaccgtgctcctggccttagaacaataccagacactcccaccaagtaggcccgagggaggcgaccttcatgcagtcacgattaacaaagacagagtcctgatctcgcccttctctgcccccacagtcagtccgtaggtgcactcggagccgagctcggggacgctgaggcagtcacgcggccgtcgccatc

SEQ ID NO: 203664 - DNA, 44 bp, Homo sapiens
  chr14:74225613-74225657
  hyper
ggtcctgcatgtgcgacttgggaggcgacgtgaccagctccacc

SEQ ID NO: 203665 - DNA, 126 bp, Homo sapiens
  chr14:74238690-74238816
  hyper
ggctcaaagcctcacgtgctcactgggctggttccatgaaaacgcaggtgtgaaaatcgtctggggccctgagccagctgggggctggaggcagagtccacgctgtgaacccgagttactcagcca

SEQ ID NO: 203666 - DNA, 116 bp, Homo sapiens
  chr14:74252875-74252991
  hyper
ctacagttgcagtctcgccactggcccgggccgccagcccctagttactctgcaggaatgtcccaaacttctcagctgttctttaaaaaatcctgcgccacgaggctaccgagggc

SEQ ID NO: 203667 - DNA, 136 bp, Homo sapiens; identical to SEQ ID NO: 9841
  chr14:74253328-74253464
  hyper

SEQ ID NO: 203668 - DNA, 98 bp, Homo sapiens
  chr14:74254304-74254402
  hyper
agaaaaagtttttccgtttggtgttggggctaaaagggtcatgtcagaaagcagtgtgctctatgtgttcttaatgcctaaagtgggccttaaaacaa

SEQ ID NO: 203669 - DNA, 241 bp, Homo sapiens
  chr14:74708533-74708774
  hyper
agcctcagtttcctcgtctgcaaaatggagtggtaggcgatgtagactggacggtcccaccagccgtagctggagtagggtggactgcatcggggtacagactagaaagggttttgttttgttttgttttgttttgtttttgtctttaaatggaaattacttgcacaaagttaaaactcagtagatgccgacaggtatatcttgaaaagtaacctacccttctcccacccccgccctcatt

SEQ ID NO: 203670 - DNA, 58 bp, Homo sapiens
  chr14:74709107-74709165
  hyper
ctgggaaactccactgttgaccgccaccttttaaaacggcctatcctcaccccttagg

SEQ ID NO: 203671 - DNA, 144 bp, Homo sapiens
  chr14:75179349-75179493
  hyper
tttctctcttcaccgagaggagtacacggtatatactcgagaacaatcatccacctagctgcacaaagcaccatatcggctaggaaaaccaaataggaaccacagcctcagggctggaccatagacaccggataccccaacgct

SEQ ID NO: 203672 - DNA, 100 bp, Homo sapiens
  chr14:75179845-75179945
  hyper
cgtagaagtattgcgccgttggtgattacggaagaaccaggagtttggcgtgaccatggtgagagaagacggtccaagaagggacgttatcaggccactt

SEQ ID NO: 203673 - DNA, 145 bp, Homo sapiens
  chr14:75230400-75230545
  hyper
agcaaatgcagtgcgtgcttcagccccaccaccttcctccgccccctctgccgcccccgccagtgatgccggggggcggctacggagactggcagccgccaccgccaccgatgcccccgccacccgggccggccctcagctatca

SEQ ID NO: 203674 - DNA, 274 bp, Homo sapiens
  chr14:75535958-75536232
  hyper
cagccccgctcccgccaggcgggcggacgccggcatcctgcggcggaagcacgcggaggcacagccagggcctccgccctttgccagacaagggcacaccccaaggtctgggagcgtcgttctcagaaaagtacaagttcttctttgaaggagctccagaaaagcctctcccgcccctccccggctccccaagggcagggctggaccgagctgcagagttggccggacactgactgggtcaagtgaccttgggctgaccgcacccccacccccg

SEQ ID NO: 203675 - DNA, 196 bp, Homo sapiens
  chr14:75743668-75743864
  hyper
agtggcccagttccacgaatccccgcctcctgccctccccgctcctgccgggttggatctctaagaatggaggttagcgcacagcctcgcgcgggccgctcagcccccggacccggcggatgatgtcaggcgacgggagcggccgcggccgggccggggaggccgcggcccaggggagctgggagggagggtggcc

SEQ ID NO: 203676 - DNA, 165 bp, Homo sapiens
  chr14:75743897-75744062
  hyper
gttgcctggagacggccctggcggcgctgtgttgctgtaaacagccgcttccctgttactatctatagcaggatctcctggctcccgggcgcggcggctggaggcaggtctgcggtccggctccccgcgcgccccgaactatccgcccgccggcctcatcctgcc

SEQ ID NO: 203677 - DNA, 164 bp, Homo sapiens
  chr14:76044577-76044741
  hyper
aacacttaggtggcgccgggctttggtgcacgcgcgcagggcatgcggacaggcaccggagaggctctattttgggcattacttcgggaaggcggatcttcttgcagggtccgctgatagcgggtggcaaatgaatatgaggggcagtgcaaagggtgggggtt

SEQ ID NO: 203678 - DNA, 72 bp, Homo sapiens
  chr14:76605465-76605537
  hyper
tttagtggcttcatctacgagatgaaagaagttggaaatgactttctctgctttgcgcggcaagaagcttca

SEQ ID NO: 203679 - DNA, 68 bp, Homo sapiens
  chr14:77227531-77227599
  hyper
ctcagggcccctgcgaagaatctttttcaagaaattcccgaccgcaggaattccttctgcgctaggaa

SEQ ID NO: 203680 - DNA, 62 bp, Homo sapiens
  chr14:77228494-77228556
  hyper
ggcggggaatgtgcgcgtcggcgcgcgccccctccccgctcccggccagctgcgagtcttgg

SEQ ID NO: 203681 - DNA, 361 bp, Homo sapiens
  chr14:77428119-77428480
  hyper
tttctactatttggcggaaccttgaatgcaggggggcgggacagagaaaaaactagaaagctcgacttctgcctgcggggccggaagccccgctgcggccccagcccgcggttagcccctgtttgtcattttgcaaatctggtcaacccacctccggtgaaaactcccaacctcaccccagggggcaatgactaattacaaaacacattttctctcgttttcgtcaagctcgctgtcccgcccacacatcccccgcctatcccggcacccgtcggcttcctcaggagcctcactcaactgtgttgaatgaactcttggcctggtccctcccccagagacttcacaccgtggggttctttcc

SEQ ID NO: 203682 - DNA, 295 bp, Homo sapiens
  chr14:77493464-77493759
  hyper
gacgccgccgctgaagaagaattggggctctgacggttcagctctgggggtccctcctctggtgttggtttggggaagccgtttgggccccccaggccgttgggcagtcgcgcggtgtggctgctgcttcccaggctcaccggcggtggcgggtactcgaagcggctgcgctgttccaccgcagcggcggcggcggcggcggcggcggcggcagcgcttaggccgtagcgctccaggccagacggggccgccagcaccgcaggcttgctggaaccatcaacgtggttgagctgtt

SEQ ID NO: 203683 - DNA, 201 bp, Homo sapiens
  chr14:77499644-77499845
  hyper
ctaaaggagtaatcccggtatttgaaaaaaaaaaaaaaaaagtattaacttaggccagggcgtagggttacgcaagagccactcgagcatgaaatcccaggaacaacgtgattcgctgagaagccccgggggaggaaagcctgcaccgcctgccaggacctgcccagcctggggcgcgcgggcagccgggctctccgtgca

SEQ ID NO: 203684 - DNA, 201 bp, Homo sapiens
  chr14:77564278-77564479
  hyper
ctcctctgaaccccgcctggaaaccttgcccaagccgctcattgctcaaggcccccgtacaaaatggcggcgaggcctgaggaaccaaccatagagacgcccgccggccgcggacagagcgtaggcctctgagcgctggccccgccccgcgccggcctggtcttccggcgggggcggggaaagggcgcatttccaagggcc

SEQ ID NO: 203685 - DNA, 132 bp, Homo sapiens
  chr14:77591041-77591173
  hyper
agctcaggaatggtcgctattgtgacaaatagaaaacccgccaggagacagagaggaggtgggtccctggaccgcggtggcacatgagggctaagaacctcccaggaggggctgggctcggagcgcgctctc

SEQ ID NO: 203686 - DNA, 116 bp, Homo sapiens
  chr14:77591751-77591867
  hyper
ctagtctgtttattaagtacccggcacctgcgagggaatttttgccctcggcggccggcgggtcaggtggaggggccgcgctgccccttagctgcgcctcctggcttccttcccca

SEQ ID NO: 203687 - DNA, 177 bp, Homo sapiens
  chr14:77606580-77606757
  hyper
ttctccgtccctgcgtccccacccacacacacatcttgggcagcactcagggacctcaccaggttacccaaggctctttggaggtatgtgtgcgtgagggaccacgatgtgtgtgtgtgtgtccttgtctgtgactctgtacgtgtaatctgtgtgcgcttgagtatctgtatttgt

SEQ ID NO: 203688 - DNA, 55 bp, Homo sapiens
  chr14:78266694-78266749
  hyper
cggcgcgcggccacgtggctcgggtgactcgcattgccccgcccccctgcagtga

SEQ ID NO: 203689 - DNA, 254 bp, Homo sapiens
  chr14:78432197-78432451
  hyper
aaatagcatgcaccggacaaacatgcatgtaaatgattgaatgtgatgatggtgacggcacattttatgcccatgcttgatttctgtctctgctccctctctctcccccttccctctctcctgctctctgacgttaaatgcttggttactcaaggccgcagttacaggatgttaggtaaacagccctccgtccctgcccccgcccttttactttcaataccgagaaaatggaacagaacgttagggaaggaggc

SEQ ID NO: 203690 - DNA, 98 bp, Homo sapiens
  chr14:79745242-79745340
  hyper
agcgcgcgtgcggcaccaccgcgtgcagcagctccagcgctcgcgctgcctcaaggggtttatttttatttctatttggagctacttcggccttagcc

SEQ ID NO: 203691 - DNA, 196 bp, Homo sapiens
  chr14:81421419-81421615
  hyper
cgggctagccagggctgcgtgcccgcctctgaccctcagcagaggtgtctctggccaggaggagctgaagttctgcaggacattggtccgcccgcggacagtccactccgcggggactttctctggataaggagtgcgtgcgagtggctcccaggcagacagggtgtctagaaggctacacgctagggaaggtggc

SEQ ID NO: 203692 - DNA, 139 bp, Homo sapiens
  chr14:81901893-81902032
  hyper
gcgtcgggagaggcggggaggcaggcagagaccaggagctgcacaaaagcacagttaatgattcactcacagccctcaggcagctccttccagtaggggttgcaccagaacacacggacgcgcacacacacgcacgaat

SEQ ID NO: 203693 - DNA, 587 bp, Homo sapiens
  chr14:81902236-81902823
  hyper
ggggcgcggcgccaacccggggtttcaggcgaggggagtgtaggggaagcaccgtccccagggacacctgttgtcgcctccccactcgggccgatgaagacatcctgggcgtcccaatctcgaagacacccgtcggccagaagtgtctgtgtatggggccaggtgtcgcaggagtcctcctccacccctacctgccttaagcagagtcccctcgtcctcccccaccccgggacgcccgcggctggtggaaacgccgcgcctccgcgtggctcgaccaggcaggctcgggggcgccagggggcacagcggcgctaggacctcgcggccggcccgcccccgcccccgcccccgccccccgcccgctccacctgcggggcccctcttggggggcgcgctcgcctcctgctgcggggcgtgggtgcagttacctgcgccgcggtccgcagggtccccggcgtccgccgaaaggtcgccgcggcaaagccggcttctctggccgcgggatacccacccggccgcactgctctcgccacgatccctcccggccgcagcgccgacgccggctccagactcgagctcgctctgcg

SEQ ID NO: 203694 - DNA, 156 bp, Homo sapiens
  chr14:81903005-81903161
  hyper
accccgaagctgggattcttcccctctgcgcctagtggggccggccgtccaggcacgaggcaacacggaaagcatcgattcgagcgacatggaaatggcgtggaatggggagcgcatgggagtcccacccgctccgcctgcgggctggtagttgag

SEQ ID NO: 203695 - DNA, 53 bp, Homo sapiens
  chr14:82000012-82000065
  hyper
actgacccgaggacgccgaggccaagctcagcagcaccgcacacagcagcagc

SEQ ID NO: 203696 - DNA, 61 bp, Homo sapiens
  chr14:85996080-85996141
  hyper
ttgggggatgtggacgggggcggagagcagagaagtaaaggaataaaaccaacttcgctgg

SEQ ID NO: 203697 - DNA, 102 bp, Homo sapiens
  chr14:85998186-85998288
  hyper
cgcacgaaccgggtagtgtgcgcgtgtgtgtgctcgcgtgtgtgagcgcgtgtgccagcgtgcgtctccgcgcgggcgtgcgtctgggtggatccttgcgtg

SEQ ID NO: 203698 - DNA, 78 bp, Homo sapiens
  chr14:88459631-88459709
  hyper
tgacgcagctggcggagtgttgagaaaagaagcagcgagctttttcttatcgctcgcgtgtctgtggtcagctactgg

SEQ ID NO: 203699 - DNA, 51 bp, Homo sapiens
  chr14:88789656-88789707
  hyper
ccccaccccggccgcggctcctcgcccccggcgacgccccccacttcccgc

SEQ ID NO: 203700 - DNA, 75 bp, Homo sapiens
  chr14:88789887-88789962
  hyper
ggaggcggtcgcggacttgcccgcggggcggcgggaggcggtgggcggtggcggggaagccgcggaggggcgggg

SEQ ID NO: 203701 - DNA, 782 bp, Homo sapiens
  chr14:89020631-89021413
  hyper
cagtccttccctgcgccccttctcgccaaagttatctggcgaatttcacgtttatatattctgagaggcacaaatatgcctaacacatttaaaaccctgatccagaattaacccgcaacaatcggccagggcgttcggaatagaagttcaagactccttttagaaattactcaagtatatgagagcgaacctgaaaaacaagacttttctctttgttacgctcccgctacgggtctggccgccgcgccccattctccgggattccggggccgcgggcgcgctccggggtccgggcgagtggacacaccccaccgctcgggccagccgcccgcccctcccgccggccggggaccgcgccctcacctgctcccgctcccgctcccgcatcctcggggccgcgcgccccgctcagcgacccgcctcccggggccccgccgcgcggccgccgcagccgcacccgcacgccagcccgggccgcggcgcgctcatggggctcgcacgcctcacttcctgtctccaaaaacccggctcgcagaccattcccctgggcagagtccggcggtggcgacggcgaggggcgaggcctggaggtgggaccggccggcgaggagcgccgcacaaagaagccccgtgggggcggggggtggcaggaggacggacagaccgtcggaccgacgcgggacgcgcggccggagcagcggggcggccgggcccaggcgtccctccccctgagccgggcgggcggatccggggaggcggcggcggcccgtgacctcagagag

SEQ ID NO: 203702 - DNA, 427 bp, Homo sapiens
  chr14:89290763-89291190
  hyper
ctaactcactacctttttgtttagccgcggtgccttcttttcaaaatcaatgaaacctgtagcctttaaaagtagacatctttttccaaccaagtttaggcaagccctgtagccgagttctgcttgcggttgtttttctttttcctgttctcaggcgcgctgcgggcacctctcggacaaggccccagccgtcgcgggttgccgggcagagtcggacgccgccagctcttcactccacgcccacctctctcctggagcgctgggccttcgctggccgcaccggcagccatgagctcggagatggagccgctgctcctggcctggagctattttaggcgcaggaagttccagctctgcgccgatctatgcacgcagatgctggagaagtccccttatgaccaggtaccggccagctcccgtcagcctg

SEQ ID NO: 203703 - DNA, 238 bp, Homo sapiens
  chr14:89506861-89507099
  hyper
tagggggcgccagcgggcttgttttccaggatggccctaaaattctctccagcgaggagaggaccatgacggccaggccacgcttgctctgaaaagcgccgagcgtggaagggtgtcttggaatggggtctaaaagggagaacgacatccttatgacttgctttaggctgctttctggatgtattttcagagctggggatgaggagaggttgcgtaaaggtgccggcctgctgctggc

SEQ ID NO: 203704 - DNA, 81 bp, Homo sapiens
  chr14:89818034-89818115
  hyper
tgtttgataaggtcatttgtaaatatttactgatttgcagagaaaagaagttaaattacataaacccgtgcccacctcctg

SEQ ID NO: 203705 - DNA, 211 bp, Homo sapiens
  chr14:89884080-89884291
  hyper
cctgataggacccccagggccttccgagccctctcccagcgaccacctcgtgtcccggaggtaagcaccgcagcgtcccacccaggtggccgcgtgtctcccgagggagggccggtggccattacaagacaagaggcaccgtcctaaaggccacgccggtggggcctctcaagtgggttgtgcggaacgccccggccggcctagagagaaa

SEQ ID NO: 203706 - DNA, 366 bp, Homo sapiens
  chr14:90085338-90085704
  hyper
taggaggcaggaaatgagccccattttcgttaccttcgatcgcctgcccccccgctgcttctcgcggccgcattggggggctgcggcgacgctggactcgcgggtggccccgccgccgggtcgcgccgtctcccggccgagctgcagcagatcgcggccggaaccccggctcctgcgcccggcgcccgcccggggtcggcggcgcggctcccaccccggcctggagccctgctgggtcctagtgcgcgccgcgcgcccgcctcgcggcccggtctgcagcccgcaccgagggcaggcagctcccagcgccgcgagtctccgggcgaggccgccaccctctcggtcccttgcgaaagcggccgcggg

SEQ ID NO: 203707 - DNA, 325 bp, Homo sapiens
  chr14:90420694-90421019
  hyper
ttaccattaatagactatatagagagaaaggagatggaacttggaggtagccgtagtcctggacggggagccaggagccctgcagctccaggatcagtcattaaccacgaccctttggacaggcagcccaggtcttatctgcacacccggcagagtgagacccagacacgggagaggaagcgagaggcccaggccaagctgaagtccgaggctcagtcgccctccggaaacctacttccacccacttcctgtgttccgagggactggcttcccacgtccgcgacctggctctggcctcggagaagaacatcgcgactacaacaac

SEQ ID NO: 203708 - DNA, 200 bp, Homo sapiens; identical to SEQ ID NO: 9902
  chr14:90421129-90421329
  hyper

SEQ ID NO: 203709 - DNA, 727 bp, Homo sapiens
  chr14:90422068-90422795
  hyper
ctggttctcctctcgttttaagaagtctccaggaagtaagccaagagctaggagagaccaggtttccccagccccgtcctgggtaaacacccggcgggctttaggacccagcggtgggctctccggaaggggaaggggccgggcctcgaggcacaagccgctgccgccagggtttgaactgcgcgcatgcgcggcggccgccgaaggggcgggatccgaggcaagcgttggttctgtgcgcctcaggtacgtgttgggcggcagtgggcgcggactcggtgcggtctctcgcgggctgcggtcgggcccgggatcctgctcctggccgagtcgcggtgcgcgggctgctggggtccggcagggctggaggcggaccgcgaggaagcggcgcggccgggaagatggggcagggtcgcctcggccccggggcctcggtttcctccgatcacagcgcctcagggggcgcgcacgggcgctgcggagacctgtgtcctgccggggcgcggcgctaggggcccctgctcgggtttttattcccagacctaagcttacaggtgcgtggtcccagaaagtgagtaggaaagcgcccaccacgtgccaggcgcttaagctttctgtgctcggtttcccagtataggaggacggtcacggtacgtagtatagagttgtcctgagggtgaagcgagtttacacttggtgaggcgcttcgaatcgtgcctggccggcc

SEQ ID NO: 203710 - DNA, 332 bp, Homo sapiens
  chr14:90527180-90527512
  hyper
agggcagggccgcggctgccaggaggcccgggaacagtcccgacggagcggcgcggagagggcgctccccggaaggtgagatctgagcgcggcagcggcgccagcgcccgctacaaggcggggtctcggggagggggccccggcggtttgctggagagccttgctactgttctgcatgaggtgggggatgccttctgcgcggaccccgcgtccaggcaaaactctggaacgcactaggcagccaagcccggggggaagagatggaacgctccaaggtcaaggtctcctggccgcggagcccttccagcccccagtgtttggcctcctctccg

SEQ ID NO: 203711 - DNA, 226 bp, Homo sapiens
  chr14:90527931-90528157
  hyper
ggcacctacaaagccagcagactgacacccgtgtcctagccgtcggcggcctgcgaagcgatagtcaaaggaaccaggacccaggaccccggcgctctgcttacccgcagacctccggaccgcgccccccccccgccgccccgccccgccccgccccgccccgcgaccgtctctttgcgggaaactcgagttggctcgagcttgccctgaagacgcgccacgcccc

SEQ ID NO: 203712 - DNA, 210 bp, Homo sapiens
  chr14:90798373-90798583
  hyper
gaccccgaagcgggaggggcggggcccagagaggagggtcgtcaagggactggggcgcggcggggcagggagaggcagggcaaagcagggtggggcggggccaaggggggcggagcgaggagtgacgggttcctagtggttgggaccctgtgagaaccggaactgcgaaaaccggagaagggaattgttgaccgcgaaagggactaagga

SEQ ID NO: 203713 - DNA, 59 bp, Homo sapiens
  chr14:90849381-90849440
  hyper
aggacctgggaaaaacaaaacgacccgccgtagaggaaaaggaaaccccaaacaaaact

SEQ ID NO: 203714 - DNA, 382 bp, Homo sapiens
  chr14:90849476-90849858
  hyper
cgccaagaccccttccgtccggggctgtccgcgctgccactagtaaagatggcggccataggcggagccgctcactccgaaggccgcaggctaccctgccggccacgaccattcacgcggagccctccacgcccttcgcggcttgacgcattgcaggtgcagcgcgaccaatcagacggcgcggctcttttcggccaaccactgcagggtcgcgccggcctatcagagcgtccttgtcaaactgaacgaggaaagaagcctcagcagcgccaactaagcaaccggctacagaccgcgttccggtgcgtgtgtgacgacaccgccgtgtgctcctccgctgggagatatagtgccctcgcccttgcctcgccccgcccgcgag

SEQ ID NO: 203715 - DNA, 53 bp, Homo sapiens
  chr14:90849897-90849950
  hyper
cgcttgacgggcggtggttcccccgagacagaaacttgactgaaaaataatac

SEQ ID NO: 203716 - DNA, 63 bp, Homo sapiens
  chr14:90850476-90850539
  hyper
tcccatgggccacatccgctgccatggtctgtgtcgtgccagaaggtacctctcagccctcag

SEQ ID NO: 203717 - DNA, 86 bp, Homo sapiens
  chr14:91580266-91580352
  hyper
ccctctgttgagccggggagagcaggttaactcttgcagggagaactgggcttgcagggtccagccagctgccagcagctctgcag

SEQ ID NO: 203718 - DNA, 215 bp, Homo sapiens
  chr14:91580494-91580709
  hyper
aaccccccgtggcgcaggagagcagaagaaagggggcctttatgcccttttgagggaagcacacattctgcaaggccgtggaaacaaagggaggaactgtttgtagccctcgtccagacgccccaaacaaacagtaagtcagaagggaacagagcacagcacagtccctccctccgccccaggcagtatccaccttgccccgccccacctaagga

SEQ ID NO: 203719 - DNA, 204 bp, Homo sapiens
  chr14:91755427-91755631
  hyper
ggccaggacggccgcccctacctttccccacagacccgttgtgggcgtcgcgctcttctgcacagttggagcccagtgcgggggtgtcggggttctcggcctgtgatctgagcggctgagaggccgccggcgaggcggggtctgaggactccagctgccagggagggctgtccacggtggattttaagcgttccctcgaaccct

SEQ ID NO: 203720 - DNA, 144 bp, Homo sapiens
  chr14:91976436-91976580
  hyper
ccagtggctcccttccgctccccctgttttaaacgtcagaagccgacaggcgcctgatcctgctgcaactgctaccactgcccgggagactctgagggcccccggccgcccaagcgacccggactagtggaagtcggtttccct

SEQ ID NO: 203721 - DNA, 300 bp, Homo sapiens
  chr14:92302298-92302598
  hyper
tccccctaggcagagccgcccacctggccagcggggacctagcctcgccccgtcgcccacccctggtgccctccagaccaccgcgcttccagctgtcgcggggcctaaagctctctcaggcccccgcgacacaggcgtcgctgaggagacgtgggaacagcccctgggccccaccacggccccattttaaagaaagttaaagacaaaagagacagaactgacactcacctccagcccgcaaggcggggccgccctcacaggcaccccccacagccctgagcgagctgccaggtgggagaa

SEQ ID NO: 203722 - DNA, 195 bp, Homo sapiens
  chr14:92413707-92413902
  hyper
agtcgtggagaggacacggggagagcgccggggtcctcccagccactgcagagccctcagcgcaagcacctggttttgcttagccctcttcagtaattcagcattaaaccaattggaggaggaatgttaaaaatgaacacttcattttctaagtatgttaaacaatgcaaatggggcctcagtctggacacagct

SEQ ID NO: 203723 - DNA, 187 bp, Homo sapiens
  chr14:92980770-92980957
  hyper
cgctgggcgtggggtcggagacccggacccccgcaactttgggtgcccgcggcccaacagctgaccggccctcctggaccgagggtccactgggcccttttcccgccgcccctctgccctggccgtagacggtgaccttcggaccggccctggtcgagcctagtgcttgggtagggtccagggcgca

SEQ ID NO: 203724 - DNA, 357 bp, Homo sapiens
  chr14:93214736-93215093
  hyper
tcccagccctgaggtcgagagcctgagagagcagacgggaggccctggcctcgggcgtggggactgaacccggttctgtgctggggctcgcggttacctgtggcaggcgaccgtggtggcagtggtggcggcggcggcggtgagtgaccgcggtggtggcgccggcgggaccgtgagaactcgcggcggctcgcagcctcacaccaaacacccacgacgtcggcactgctgtgattgctgcgggcgccgccgctcctcgcttaagggccactgtgccgcggtgactggtggagctatggggcgtggcatctgccaaaaccaatgggaggagaggacgaggccggcgagccaaaggga

SEQ ID NO: 203725 - DNA, 147 bp, Homo sapiens
  chr14:93582647-93582794
  hyper
gggccctcctaggcgtaggacgtgaccaccagttctcactctaggtccccttcactgaggggggaaggggcggggactggaggcgacagcgacaacagcggccgtccccggagaccccttcctcaggggtgcgggtcagcgtcggcg

SEQ ID NO: 203726 - DNA, 31 bp, Homo sapiens
  chr14:93896994-93897025
  hyper
gtgcgccttatgaatggaaatactcctcccc

SEQ ID NO: 203727 - DNA, 47 bp, Homo sapiens
  chr14:93897078-93897125
  hyper
cggtctccccgcccacatcaacgcgggcagctccaggaggggacgga

SEQ ID NO: 203728 - DNA, 220 bp, Homo sapiens
  chr14:94492920-94493140
  hyper
ggcagggggcgcggtgggcggggtcgctgccggagcgggtgcacccgcgggacgggggtcggacgcgaggctcagcccccagctcgcccccgccgctttccgaccccctgaaatacggagtccggacggatactgagggccaagtcgcgcccccctgtaccccgtggatgtgcagctgaggaggtccagctcggccccgagcccccgcccccagcgtgtc

SEQ ID NO: 203729 - DNA, 260 bp, Homo sapiens
  chr14:94547568-94547828
  hyper
ccacgcacgtactcgtgcgcgctggggaggaagtcccgcccctatggcaaactcagctacctgattggctgcctcgcggaccgcagcagtgccggcgggagagctggcttggggcgctggcacctcctcttacagctttactcctgccagcttgggaaaaggccggagaaggtgaaattctgtgtgctccctccggcgagagactttgtcagctcccgcacagtaacgtaagttttcttgtattcttagtgtagtttcgt

SEQ ID NO: 203730 - DNA, 71 bp, Homo sapiens
  chr14:94640376-94640447
  hyper
aggcaaaaggctctgcgcacgcgctgtggggtggggcacacttggttgggggcggacgggggtttaggaga

SEQ ID NO: 203731 - DNA, 123 bp, Homo sapiens; identical to SEQ ID NO: 51636
  chr14:94889915-94890038
  hyper

SEQ ID NO: 203732 - DNA, 276 bp, Homo sapiens
  chr14:95235713-95235989
  hyper
gtgttagagcatccatccgcacacccgccaaagccagtaagagaattcaaaacaaaacaaaacaaaacaaaacccagtttccccgggcaggcactgaattccagttttcgcgaactctggccaaaagtttgcagcaagaagtttgcaaactcctgcgcccgatcggcaaaagcggaggggggagttgcaagaggagcaaagtttgaggaaggtgaattaaccaaccggctccatgggctaaggaccgcagtgggcggcagaggccggagcgagcgc

SEQ ID NO: 203733 - DNA, 240 bp, Homo sapiens
  chr14:95236553-95236793
  hyper
acccgcgggtaggacggagctcagaccagctgaacctcttgttggttttatactgagtcgacgtcatcctggatttagttcctggtaatatgcagatgacaaacagaaccagatttggccctttcttttcctttgggtgggggaagagggttggggggagggggagaggtgccaaggggagggggttacaaggcctgaaaagagattgtggattgcgaattaatgaaattaacctaatct

SEQ ID NO: 203734 - DNA, 36 bp, Homo sapiens
  chr14:95864478-95864514
  hyper
tgtatggagtgtgtccgtgtccgtgtgtgcctctgt

SEQ ID NO: 203735 - DNA, 47 bp, Homo sapiens
  chr14:95932542-95932589
  hyper
actcgctccagtgcagccacacccactcgatgcggctgtgggcacag

SEQ ID NO: 203736 - DNA, 295 bp, Homo sapiens
  chr14:96152751-96153046
  hyper
gctggaaagctacacgtgtgagcctagaggcgggtcccggttgcagacttgccatggcctccgaagcttctgtgcgtctaggggtgccccctggccgtctgtggatccagaggcctggcatctacgaagatgaggaggggagaacctgggtgactgtggtcgtgcggttcaatccctcgcgtagggaatgggccagggcctcccagggcagcagagtgagtcctgggcacgaggggaggctgtggggagggctgcgcactgacccctgcccgtgtgggaccgcggtgggggtcag

SEQ ID NO: 203737 - DNA, 40 bp, Homo sapiens
  chr14:96342210-96342250
  hyper
gcctctttcacccgcgtccccaggtccccatgtacgccac

SEQ ID NO: 203738 - DNA, 60 bp, Homo sapiens
  chr14:96342530-96342590
  hyper
cgcagccgccggccctccccgcactggagctccccctcccctccctccccgcccctcggc

SEQ ID NO: 203739 - DNA, 76 bp, Homo sapiens
  chr14:96505691-96505767
  hyper
tggagccagaagcccagagacagccgagtgcgccgtgcggtctccggacgctcgctgctcagcccgatccccgcca

SEQ ID NO: 203740 - DNA, 56 bp, Homo sapiens
  chr14:96678043-96678099
  hyper
gggattgaatcccaccccattcctcccctgctgtgtgacctagggcaagagatgtg

SEQ ID NO: 203741 - DNA, 57 bp, Homo sapiens
  chr14:97685959-97686016
  hyper
tgccagtgccactacctctgcttatctccaggggcaatcatcggctgtctcagcttc

SEQ ID NO: 203742 - DNA, 95 bp, Homo sapiens
  chr14:99736020-99736115
  hyper
taaaatataacataaatattcggctctcggccgcccggcagccagtcctctgcggtgactgggcgcgcagccctctcgagctccgcgcgggcagc

SEQ ID NO: 203743 - DNA, 60 bp, Homo sapiens
  chr14:99736213-99736273
  hyper
aaaaaaaaaaaaaaaaaaaaaaaaaaaaaaaaaaggaacggcgacccaggcaccgcgaga

SEQ ID NO: 203744 - DNA, 149 bp, Homo sapiens
  chr14:99736431-99736580
  hyper
ttcccctctgctaaataaacccaacagggacggtggaagctgctgcttgtcttgccccgctgcctgactttgcccgcccagccacatgcttgaaatcgacacgatttcagccggtggatttccactgcgacctgccttgtttatttaga

SEQ ID NO: 203745 - DNA, 236 bp, Homo sapiens
  chr14:99737162-99737398
  hyper
acgccgctcggaggggcgagcgtccagccgggctcggcgcgcacacacacacactcctccagcctgcatgccccctccccggcccggagccggctccgcaggcccccgagcccgaggcgcgtccggctgctcggcgccccaactccccgggctgcaaagaaactttcctatggcccccgccccccgccatgctccaggccgacgccgtagactctgccagccagcgggcggccccg

SEQ ID NO: 203746 - DNA, 420 bp, Homo sapiens
  chr14:99737462-99737882
  hyper
ctccggcccctcgcgcgcactccgcagacacttacgggtgatgagctccctctgggacaagtgctgcgggttgccctgtttgcggcgggacattgccccggcatctattctggcatcgcccggagagctgcactgatggggggagccgggggagggggtccgagccgccgccgcgccgctgccgccgctgccgccgccgccgccgccgccgcacctcctcctctgcccgggttggtgttttttttcccttcctctctttccctctcttcctcctcttcttcttctttattttgctctttcttctatgctgttttttgttttgtttgcaaaaagaaaaaaaagggaagaaaagcaagaaaaacctctcgatctaaaataagaaaaagaggcaaaaaaaaaaaaaactgctgttgctttccg

SEQ ID NO: 203747 - DNA, 459 bp, Homo sapiens
  chr14:99740032-99740491
  hyper
tcgtcccgaaggtcttgggtggggcgatggcaccaacaatttaacagcgcccagagtccgtgagcgagaacagaaagagatcccttccagtcccataccctaaaaaataataacaataaaatgtgccctggcttgcagttctgtaaactgtgggctccacggtgggcggacgcgaggccgagcggatggagaccgggggcggggcgcggacttgcacctcctcgccctggccgggcaggctgcacccggctgcccacccccaacaccccacctccacgtggtccaaagtctagtagggcctccctcttctgccatccctctcaccgggaaaatctttccaggaaagtggcttaaaaaaaatatgcccacacgcacctttaataaacttctttaagacattcataaactggccatccctactcgcccggactctaaatttgaaagatcaactcgcgctct

SEQ ID NO: 203748 - DNA, 500 bp, Homo sapiens
  chr14:99740713-99741213
  hyper
ccctcaggaaaagggagcccctccgcgagcggcgcaagggctctcggagtcccagctgcagccgccaccccgcgtgcggtaaggggccgtgcctggggagggggcaccccctccccactcccagcaggaagtagctggcgtgggccggcgcgtgccccacggacccgaggagcacttcctcattggccccgcgctgccccgacggcgggaagagggacgcgcgggcgggcggacgcagggccggacacgccgccgcccgccggcgcgctccacctcgcggcagccggggagaggctgctctgcccctgcccagccttgagccggccccttcgccctcctcctcccccttttcctccgcatcttcctccccctcctcctccttctccccctccttcccctcctcctcctcctcctcttctcccgagaggcggccgggcgcaggcagggagcgatcccagctgccactccagtctcctctttttccctctgcccgtctggca

SEQ ID NO: 203749 - DNA, 51 bp, Homo sapiens
  chr14:99741277-99741328
  hyper
cgctccatgtctcacgttccaagccggatcaatagccgcctctcggccgac

SEQ ID NO: 203750 - DNA, 1190 bp, Homo sapiens
  chr14:100069898-100071088
  hyper
cgcgcctcgagctcgcgcagcttctgctgcgagcgggccacctcgtgccacacggcgccggccgcgtggcgcccgaagcgctgccactcgcgcgccagcttgcgccccttctgccggtcgtcgtcgaggaagcagcagagctcgcgcagctcctggttgtcgtcctgcagccgctggttcacgtccttgaggccgcggatctccagcaggtgctgctgcagccgccggttcacgtcgcgcatcaggccgccgtgctccagcatgaggcccaccttctcgccctcggcgcgccgcagccgccgcgccagctcctccttgctccagcgcagcagctcctcgtccggcacctggctcagctcctccgacgccgccgccgccgtcgccgcgggcttagccatggcggggccgtcaccgcggcatcgccctcgccctcgcccggccggcgcttccccgcgccggggctccgctgggccggtccgcgcgcgggcggggggcggccgggggcgcgtgcggcccgccccgcgccgcctggcgcgtcctctcgccgcgcccgccggggccgcccgggagcccgcgcgcctcggggttgacgagcggaggcggctgctgcgtcggcggccgcggtgccgggcgctctcagggttctggagaagcaggcggaggcccgcccccggcccagctcccggagcccccgccgccccgcccaccccgggcggagagtgggcgggtctccgaggcccggccccgcccccgagggcgactggggagcagaggcgcggcccccgccgtccccctgcgcggtgcgcccgcccgtccagtgccctctcagaggcgcgttccggccgcggtcccgccctcccggccgggcgattgggccgctccgggggtgtgcgggaggggcggggcgcgcgcgggggaagctgcggcggtggtacggtccatccgcggggtttccgacccccgcccgcggccggctcccggcggttcaagtttctgcgcccggaggacgcggccttagccaatcccagggctacagggcgcttttaaaatgcaggtacggctgcggggagggggacggtgggaaaggtagggccgggcttcccttaaaggcgacgcgcgaaaatagcagtcgagccccctccccggcccgcgtccccggtcctcttccctctccccagataaacaaatac

SEQ ID NO: 203751 - DNA, 321 bp, Homo sapiens
  chr14:100071268-100071589
  hyper
ccggagcacgcggcggggctgcgtctccactcctagcccagggctgagctaaacgctggcgtccgcgcccctgcagggccagggccttgccagccgcgtcccgcagcgcggtcagtactctctgccccgatggggcgagagctccgggaacctgccccctgcccggagcggcgctcggagccccgctccacctccgctcactcgaccgctaaatccctgggattcgggagataatctgcaattcgcggggtggaaaccactgggaagggtgggaaggtctcccactggggcctgaacgccggggtccgggggcgccgagcc

SEQ ID NO: 203752 - DNA, 1097 bp, Homo sapiens
  chr14:100149750-100150847
  hyper
ttacgacagagggggaagccctggtcattatttcgaaaataccttctcctccgctacccccgcctccccggcacatttcccgctttccctggagggcggacccagattttcatccctccaactccaactccttcgggcctgagccagcgcctcagatggggcttcgcctggtctaggagggtccgcaggcccccgagtctctgggagaacagcctccggccacgccgtgcgctctcggtcgcagacacaggcgtccctgggtcccgcaggatcctgccaccagcccgcgggccccgctggcggaccacgggcgctaggcgtggactgtccgggcggaggaggcgccccggggcaactggagaacaactttgggggtctggggttccaaggagaagtttgggaacagtcggcgttatgcggacttttgcaggctgggatggggtttccgggcaggtttgggggaaaaaggaaggggcctaagaccgcgcgcggaaagatgccgttatttggaggcgccgaagcgggcggagccagccagcaggacttcgcgccgccgccgggccagagcgctgaggatcggcgttgccagggacaacgcgttctgggcggagctgctgctggggcggacctgagtctgaagaggtgggggcggagcctggggggctgagccagaagcggagttgtgattggtgaagaccacatgctcggggtggggcctgggctggggcggtgtggaggttggggcggagctctggggggcggggcggggcgggggagggcccggagcgccggagccggaggcggagacgtggttggcggggactgtgcgccctgggaggggtcggagtcggcgggggcggagccgagcgggcggggagggtgctgggtcgcgcctggcctggggccgaggcggcgcgcggcgctgacagctgagtcggctcgcggcctcccggccccctcggcgcccggcccgaccctggcctggcctgccctgccccggagccatgagccccgggctgctgctgctcggcagcgccgtcctgctcgccttcggcctctgctgcaccttcgtgcaccgcgctcgcagccgctacgag

SEQ ID NO: 203753 - DNA, 279 bp, Homo sapiens
  chr14:100259401-100259680
  hyper
cgcccgccgcgccccgcagcccctgagcccccgtgcgcggaggcggggcctggccaaggggacagcgggcggcagacgcgcccctgcggctcccaggccgcccgggccgcgctccccgcggggaaagaggccgcaggcgcggggaggctcggccccgccccgccacgtccccctcccggcccgggccccgcggccgccgaggccgccccctcgcgggcggagcgggcgctgggctcgcgcggctgcggcggcggcggcgggcccggggttgccatggta

SEQ ID NO: 203754 - DNA, 38 bp, Homo sapiens
  chr14:100260262-100260300
  hyper
tggaaatgactggatgaagaactcgggaaacaaatcct

SEQ ID NO: 203755 - DNA, 55 bp, Homo sapiens
  chr14:100438971-100439026
  hyper
aggcccccaaatgtaccgctcgttgatgtatcacccagctcgggagcctgctgat

SEQ ID NO: 203756 - DNA, 66 bp, Homo sapiens
  chr14:100613202-100613268
  hyper
ctgcggcaggtggtcgtagtactcgggcgcgatcttccgcacctgtagagaggagggcggggctca

SEQ ID NO: 203757 - DNA, 370 bp, Homo sapiens
  chr14:100773262-100773632
  hyper
cgaaactccgcgagcgggaatcgcccgtggggagcctctgcccgtcccgcctgcgcgcccgcggcggcggtggcctccggggcttccggactcctggccgaacccgccgggttctgggggtcggacgcgcacgggcgcttcctgcggagcctgaggctgggatttgggcggagagcagggaaccttaaaagggaaaggggccatgggcaaagggcgcagcaggccttcgggccacagctccttcccgaggactgcgggtcgcgggagccgcggaaggttgtggagagagggaggttcctggactgggctgcagagtggagtcgggccagatcgcagcgcctccgtcagcggcggccggacggggcgagac

SEQ ID NO: 203758 - DNA, 78 bp, Homo sapiens
  chr14:101192402-101192480
  hyper
ttgtgtttcagcgcggctaaggccctgactgagatgctgtgtgtgcgggggtgggtgtgactgaatgcgggcacgggt

SEQ ID NO: 203759 - DNA, 37 bp, Homo sapiens
  chr14:101544235-101544272
  hyper
gagcaggtgtctgagcctttgacgtagacttcccgag

SEQ ID NO: 203760 - DNA, 213 bp, Homo sapiens
  chr14:101924579-101924792
  hyper
ttaaaggccagttaaacgtttctccgagcagggggtgggaagaggccgagacccctgccccctccccagggtcacgccaggcccgtggtcgggggtcggcgacggtgccagcctgggacggcctggccaggtgcctgccgattgttcacccccaggcgggcgggccggcgggctcccggggctttatgtaagccggtgggctttgggcccgac

SEQ ID NO: 203761 - DNA, 131 bp, Homo sapiens
  chr14:102027041-102027172
  hyper
cgggcgcggccagggcggcgcgggctggggcggcgcgcggcagcctcgggcagcggcggggggcgcggagcgcggtgtgcgtggcggggcggtgcggggggcggccgtgtgcgaggcgcgagtgtgagcgc

SEQ ID NO: 203762 - DNA, 107 bp, Homo sapiens
  chr14:102030909-102031016
  hyper
gatgtgagcgcgggtgtacatggcagggttgggtaggggtgcagaggggcgcggcaggcaggatggaagagacgcccccgttcagccaacggcgtccctaattctgc

SEQ ID NO: 203763 - DNA, 32 bp, Homo sapiens
  chr14:102606251-102606283
  hyper
ctttccaagatggcgacggagggaggagggaa

SEQ ID NO: 203764 - DNA, 377 bp, Homo sapiens
  chr14:102975681-102976058
  hyper
ccgccacctcctacccgtcccctcccggcctgcacggccagacgtcgggcggcggagggtcgcggggccgagcggggcgtccgcgcgcaggtggccggcgcagcgagggctgcacctgcgtgcgcgtgtgccggaggaggagggggcggcggccgcgggcgcggcgcgggggacggggactcaccatggggggcgcgggggccacaggccgggcgtccccgcccctgccgcggaccggagcgcgcgctgtcccccgcgggcgagcgggcaaaggtcccacgacggacgcacgggagggagccaccgccgcccgcgcccgccgcagccgcgctctgagccgccgcggccggatcgcagggcggcggtgccgtcgccgg

SEQ ID NO: 203765 - DNA, 96 bp, Homo sapiens; identical to SEQ ID NO: 125264
  chr14:103011360-103011456
  hyper

SEQ ID NO: 203766 - DNA, 206 bp, Homo sapiens
  chr14:103057881-103058087
  hyper
ctctccaaggcagcggctctcaggctagcctcagcctaccccacccgcccgcaccccgtgttctccctcgtgggggtgccggggggagtagggaggcggggcgggcggcaggtccggaaaagtggctgccctcgccccgaaagaagttgaccctcctcccgtgccgagagcttgggatgaaaatagcttcttcctctttacccttc

SEQ ID NO: 203767 - DNA, 173 bp, Homo sapiens
  chr14:103242390-103242563
  hyper
gctgtgcctgtggcgcagacgggggtgccactgtggcctggtgagtgtggctgtagaacaagcatctgttgggctaatggagccagagacatggtccaatgtctctgatgtccagatagacttccagcagccaggtcggactatctggggttctggaacgttccatgggtgaa

SEQ ID NO: 203768 - DNA, 61 bp, Homo sapiens
  chr14:103394622-103394683
  hyper
gaggaccccgggcctgagctcgcccgggctccttccgtgcacagggtctcggcttctcgtc

SEQ ID NO: 203769 - DNA, 160 bp, Homo sapiens
  chr14:103430222-103430382
  hyper
tcccttccaggtcctcgcctgcctcatggcacagcagagctggcctggtttttatgaaactgacgttcattatcgtatcctcgtaaaaccagatctgcaaagaggagactctcagcaaatactgactgaatcactgctgtgtgaaaatggcgttctcgtt

SEQ ID NO: 203770 - DNA, 1541 bp, Homo sapiens
  chr14:103523058-103524599
  hyper
gatgagggggcgggacgatcgaacgcggatgtcgagcctagggagggcaaggagggatgaaaagctagcggagggacgagggtgcaaggagcggctggagagagatgggctgcgggcctgggggcgctgccagagcgagaggaggcgaagcccacgagctgggtgggcaggagggcggcagggtctgtccgggcggggatgggcgggcgtggggatgcgcgggctggggcgcgggggtcgcagagccgcaggtccggccctgccggcgcgcacttaccccactcgaggaactcggccacgtacttgtcgcggcgcagggccgagtggctgcactcggtgtacaggcagacgagcacgtcgagcagcgtttccacgctcagggcgctctcgttgcgccagggcccgtccaggagcagctgctccagcttcttgagccgcaccttggccgacatggtgccgcgcggcccgctcccgacgcgccggcctctcaccgccggctcggccagtccgtcagggcgcgccctcgggggctcggcggctgcgagccccggcagcagcggcgcctcctcgccgccccgtccgcgtcgtcgcgccccggcctaggccgacatcttgggctccgtcccgacggcgcagagtctggggcgccgggccccgcgggtccatgggccgctctcctcccctcggcgccgccgccctcccagctcgggcggcccgcccccgccgccctcagccccgcccgcggccgcgccctccccgccgccgccgccgcagactaggagcggcgaggagcctagcgctgcgcaagcccggccggcgcccgagcccgaccccagccccgacccggcggcccagccccgcggcccgcagccaaccagggcgcggccagcaccagcgcagccaaccactacggggccggccgccgccgcgctgacctcagcgcgccgccccgccccgcgcccggctccctgctcccggcgggctcgggcctcgccgcttgccgtagggagccgggatgctgggaaggcagggccgggcctggggagcggcgcggggtgggggtggggggggcggggcggggcgagtgggccgctgagattgcggagcccgcgcatgcgcagagcgcgcctggtgggcgtgtgcgccttcgccctgcggacccggtgccttcagtattcggggtccgaccgcgcgcgtcgcggatcccggggccgaagacgaccccaagtatcggagaggcagagtcgcgatctcaggccgtcgagccccgtcccgcagtccgcgggcccatgttgcctgcggggcctcggacctgcccggccgaggtgggggtcgagggcggcccggcaggcgcagctctgatggcctcggcgggttgtgggctatttaaaacggcttgtcccagctcgaagcggtcctggaagactcgggccctacccctgactttaccgatgagagactgaggcccagacggtgtggggtcagggcccaggcttctgggggatgctgccaaggcgggagccagcgtccccagtgcccgg

SEQ ID NO: 203771 - DNA, 77 bp, Homo sapiens
  chr14:103541957-103542034
  hyper
gggggaggctggaggcggcggcgagggggacaggagtgtcgcccggctcctccgcccgcggccgccgagggacgtgg

SEQ ID NO: 203772 - DNA, 190 bp, Homo sapiens
  chr14:103593784-103593974
  hyper
gacctggaggccgtggtggagcggctgaagccgctgttccccgccgagttcggcgtcgtggcggcctacgccgagagctaccaccagcacttcgcggcccacctggccgccgtggcgcagttcgagctgtgcgagcgcgacacctacatgctgctgctctgggtgcagaacctctaccccaagtgagcag

SEQ ID NO: 203773 - DNA, 140 bp, Homo sapiens
  chr14:103594004-103594144
  hyper
ggtgtcctctgtaggaggggtgtcgaggggtgtcgaggtgtgccgccggcagcttttagtgaggtcggtgtttgcagagttttgggtccgagaatgcaggggtgggacttggactccctggggcagagcctggacaggca

SEQ ID NO: 203774 - DNA, 34 bp, Homo sapiens
  chr14:103739884-103739918
  hyper
gggctgcagagactgggccgggcggaggagaccc

SEQ ID NO: 203775 - DNA, 49 bp, Homo sapiens
  chr14:103745189-103745238
  hyper
tgtttttctttctcactggagctggttccagattagatctggtcggacc

SEQ ID NO: 203776 - DNA, 85 bp, Homo sapiens
  chr14:103745819-103745904
  hyper
ggccgccgagcaagcgcctgcgccggccgtgggaacccggggccgtcccgcgggtgctggtgggcacccaggccgacccggacga

SEQ ID NO: 203777 - DNA, 112 bp, Homo sapiens
  chr14:103989042-103989154
  hyper
cctttgcacgcagcgcccctagcccgggcgcggacgcccccggcccccgggcccactcaccgggcggccgggcgggggcgggggcgctccgtccgtcggcagctcccggagc

SEQ ID NO: 203778 - DNA, 122 bp, Homo sapiens
  chr14:103989597-103989719
  hyper
ccccggccagtgcgagctggcccggagccgccgaccttcctcaaggtgcccgcaggcgtttcctgggcgatcctggtgcaaagcgaaggcgcgcgggaagcgcagtctggctgcggcccagc

SEQ ID NO: 203779 - DNA, 153 bp, Homo sapiens
  chr14:104582879-104583032
  hyper
tgtgggctgcggggtgggggttcagggtctgagaagcagaaacctccctccctccagtttcactttctctttacccctccccttccccctcccacgaagttccctttgaagtgagaggggctggggtgggtgtgtccagcccagcccccacac

SEQ ID NO: 203780 - DNA, 489 bp, Homo sapiens
  chr14:104583110-104583599
  hyper
cggccaaggtggagccccgggccctccgtgcgcccgagcacccccggcccagacgagacggttcgggcgtggcccggcggggacccagaacccgggaggccaggtgcgcccaggccaggcgctggaggctggggcgccggatggggcggggcggccgctgagtcagggccacccccgcgcgggcgcgcggagcaggtccccgggccgtggaggatcagtcgcgggacctatgggcccgggagccgccccgcccggaaaaaccggtcgggccagcgcggcgcgggcacattccggcgccgggaagggcggctgcgccgcataaaaggcgccgccgcgctggccaccgccgctcggagctcagccgccctgccacgcggggcccgcgggacgaggggacgccggggccagcgaggacgcggcggggctgggcttggcggctgggatcccccagcgccaggcgagggcgtctaaggcgtccggtacggcgtc

SEQ ID NO: 203781 - DNA, 139 bp, Homo sapiens
  chr14:104603375-104603514
  hyper
aggggcgcaggaccggtgctcccgaccgctgcgtgcttctgtgttgcgtgtgtgggtggggggacgggatatagagagtgtgtgtcccggagcagtggagcggcgggaggcggtgctgtctgccggcagtgcggggtgg

SEQ ID NO: 203782 - DNA, 199 bp, Homo sapiens
  chr14:105070705-105070904
  hyper
cggggaggtgggtctgggggcgctgggggcatggaaggggcgccgcgccgggagcggcccccacttacccctcgtgtcccttgcagaggaagaagagcgtgcgccaggcgtgcgcggcggccagcagcagagacaggaggctggcgagcaggctgaagcggcaggcggccggcgggccccactcctgcaccgtgaagcg

SEQ ID NO: 203783 - DNA, 200 bp, Homo sapiens
  chr14:105156381-105156581
  hyper
tttccgcgcctcgcggctgccacatcctgaccatgaatcagccacagttgggaaaataaacttcaacttcgggtccgccgcccgggtggcaccccgaggtgcgcgccggcctgcggccccaccctgactgcttggcttccagctgcccacgcgcaggtgggcgcacagggagcccttcccaccccgcaaccgctggcagg

SEQ ID NO: 203784 - DNA, 208 bp, Homo sapiens
  chr14:105189965-105190173
  hyper
ccgggcgggacgcggggcccctgccgtggggcagaagtgcgggcagttgcggggacacaaagtcctcggagaggacgcgctgcgcggctcttcgcggccgccagggggcgcgcccgcgcccagggcactcggggttccacggggggcaggtgcgctcctcgagagtgcggaccctctaggtggggtgcaggacgcagctccccttttg

SEQ ID NO: 203785 - DNA, 37 bp, Homo sapiens
  chr14:105190455-105190492
  hyper
gaggtcaccggggcgtcactgcgcccgccctggccct

SEQ ID NO: 203786 - DNA, 148 bp, Homo sapiens
  chr14:105196124-105196272
  hyper
cgtcgtggggaggagcgtggcgtcggcgtcgtggggaggagcgtggcgtcggcgtcgtggggaggagcgtggcgtcggcgtcgtggggaggagcgtggcgtcggcatggtggggaggagctgtggggtggcaacccagaggcaaggag

SEQ ID NO: 203787 - DNA, 484 bp, Homo sapiens
  chr14:105330456-105330940
  hyper
ggtgcttggggtggggctcccgccatactcaagggcgcctcttgactccctctgaactcgcaatcccgccccagggtccggcacaagggctctgctggggctgagatccgtgaaggcagatgcggagaggcgccgctggattgcgagcaggcccaggtgcggggccaggtgggcgttgtcgcagccgggaacgcccagccgctccagctgcccacaggacaaagcccagggttccccggccgggcgcacgccttccacattctccctcacctccacgccttcgctcactgcgttccccaacacctggaatgcagcaatgcccttcgggcacgctgccccgcccccacgttgatcccgtcccctagcttggctccagggacaccggatacgcctattgtagcacccggcaaggagcgagcagtccgcgggaacttacccaggaaccccgagcgcctccgtagttcccaaccccacccccacccct

SEQ ID NO: 203788 - DNA, 727 bp, Homo sapiens
  chr14:105330980-105331707
  hyper
cgtcgatgcccaccaccatcgcccccagctcagcccagagcgcccggggtcagaggtggagatgtcggacatacgcccagtctggccaggctcgggagggaaaatctgggagcggcctctggaactcaccctgactccttcaccgtccgctcctctttttggcttccggggccaaaggttggggactcgaggcgcggctggagcctacagctcctggagcgtagttaagcgttaacccgctggccctgggccagggcgcggggctgctgtgcgcacccggttccgcccgtcgagctggggccggaccgggaggcgaagcggggggcgctgccgagacgggagggcatggggtctgcgccgggtgcgagatgagccggggaggccagcggggcctgggcggtgggggaaggtgggcctggggcaggggcgggatggcggctcgccaagcctctgccgaccggaccacgcgcggggctaccggggcgggctcacctggcggccgcggacccgccctaacctggtttccggcggggcggcgcggggtgcggcgcggccgggcgggggcggggcgggcgggggcgtgcccggggcggggcgttccgggggcggggctgagcctcccgcagacgtcagggacccgcgcgcgaggccgccggcggccgctctgccgtgggctcggcccgggctgccacgagcgtgcgggcctcgccgggcatgtcctaggcgg

SEQ ID NO: 203789 - DNA, 71 bp, Homo sapiens
  chr14:105331744-105331815
  hyper
cgcgagggcagggaccgagccgggccgagctggggaacaagccggggaccaagccggggaccaagccgggg

SEQ ID NO: 203790 - DNA, 44 bp, Homo sapiens
  chr14:105511922-105511966
  hyper
aaaattgggaattatttcaaaataaaaagctggataaatgcata

SEQ ID NO: 203791 - DNA, 92 bp, Homo sapiens
  chr14:105512395-105512487
  hyper
ggctcatcttaggtgtgggacgtgtactatctgaattaataccccaccaggcctgtgggacagtcactgtcaccattcgcaaattatggatg

SEQ ID NO: 203792 - DNA, 86 bp, Homo sapiens
  chr14:105662851-105662937
  hyper
ctgcccccgccctgcagaccgcacaccgagccccagcctcactccccagcccccgggagccccgagccaggtctgccgtcgcctct

SEQ ID NO: 203793 - DNA, 36 bp, Homo sapiens; identical to SEQ ID NO: 51778
  chr14:105715538-105715574
  hyper

SEQ ID NO: 203794 - DNA, 180 bp, Homo sapiens
  chr14:105781805-105781985
  hyper
ggggcgcgcaggactcggttgtatcctccgtccagcgcgcggtggagatgccctgtcctgcggggcggggtcgtcctcgcgggtacctggttggcgctgtctctcatttagaggcgtcgccaagccagtactgctatttgcgcctcccagttgatcttgccattgcggaagactggctgt

SEQ ID NO: 203795 - DNA, 420 bp, Homo sapiens
  chr15:22892204-22892624
  hyper
tccccagcgggctctgcgcgccgacctgcagctgggacccgcgcctggaaccctcccgacgagcgcaggtgagcgcctcctgccaagtggggcggcgccacacgggcgtcctgggtgtccccctgagctccttccgcagctcaggccaacccccgccctgacccggtggagccccgggacagggtgcggaccccgttccttcgcgctccgaaccggacggacccgcaggaggaccccacgcccgctccgctccgaccccgccgtcccgcgcaggctgcggtgacccaggccggcaggtagccaggggctctctgcctgggaggacaccttcggcggctggcgtggggaaaggggccgcccggccggggatgccccgccaggaggagggagcggccggggccgcggccgggagggaggagc

SEQ ID NO: 203796 - DNA, 677 bp, Homo sapiens
  chr15:22893131-22893808
  hyper
gcacagctccagtggcgaaggaataccttagtgtttgacgtttttgttggaaagtaaggagcaggcagattgttaatgttgcactaaggtcgcgcagcaagatctgaacccgtttttgtttcgtgcccctgtgaggagcggagggagcctggtccgcggagccattccgggcattcttggagagaggagttttgggctttgttaaggaggcgcgatcgttacggaggcagcactgtttcgcacaagcatctgaattgtgtattttaaggctgaaatgcgtgagcttaatttgcagcacattgtgggtgtgacaagaagggtgcaagaataatcgggaaacggggttgatggaacgtgttttaagctgagaggggcgtctggacggtgtcagctccgctattaagtccagtcagggagcggctgctgattgagcccagcgccgcgtggtcgccgctggggactgaggctcgggagcgtttgttttctggcggcggagggcaccgtggctgcgccgggagcggtggtgtttcttgcagtcgtccgtcggactccggaatgaggcgtggtcggagccgcggtgatgcctggtgcagtgcgcacattgctatgcttgacagcttggcggcagagtcccggccaggccgggacccgcgggggccccacgcatgctgcctttt

SEQ ID NO: 203797 - DNA, 192 bp, Homo sapiens
  chr15:27017019-27017211
  hyper
aggaggcagccttggaaaaaccgcagagacacccctggaacgcacagaccactgtcttcgttcccctttcctgcagccagaatctctttccaaacgacaacaaaggaaaccttaagtacctcttacctagaatataggagccacccccacatctcgcctctcccggttccccagcgcctgttgctaaggagg

SEQ ID NO: 203798 - DNA, 46 bp, Homo sapiens
  chr15:28339717-28339763
  hyper
aaaaatagatggttcagagtcggtggaaccttccagtcctcacact

SEQ ID NO: 203799 - DNA, 275 bp, Homo sapiens
  chr15:28340034-28340309
  hyper
caggaccgacagaggccagggcgcggcgccgggcgtggtcctgacacctgccctgccgggaaggggacggcgttccacgcctgggcccttctccactgcgtacaggagcctgggtcacctgctcggcccaagaaaaggctccaggcctgcgggtgtgaatgagcagcagccaagagagcggtgctgccggcgctcaagctaggccgggtcaccgcctcctgcccaggtccaggcagccccggcctttcccgctggtactggcacgcccgtggccg

SEQ ID NO: 203800 - DNA, 218 bp, Homo sapiens
  chr15:28340905-28341123
  hyper
tctgacataataccggcaaggaacgagaagcaccaggtttaggcgctgaggtgaaaatttggctgttgaaaggcagtccctctgcagccaactcccctctggtggacagtgtctaacatccagagaaaacacccgtcactgaacgctcccctccccacaaagcgctgcttggccccaaatcgtccctaatgcgctgctcagccccaaggcgtccctct

SEQ ID NO: 203801 - DNA, 91 bp, Homo sapiens
  chr15:28351667-28351758
  hyper
gtgctctgagacctcgttgtccccaagggtctctccaccctccgggccccggcctccggccccgcctggcatgaggagcggggagcgcaca

SEQ ID NO: 203802 - DNA, 45 bp, Homo sapiens
  chr15:29107356-29107401
  hyper
tggcctcccaagctactgggattccaggcacgagacactgggcct

SEQ ID NO: 203803 - DNA, 360 bp, Homo sapiens
  chr15:29561868-29562228
  hyper
tggccgccagagcggccccggttcctcggtttttgcaacatgtctccggcggcaggtgccggcgcacactccggtaggcaagcagccgcggcggggattgcgggtcggcgacccgctaacgccggtgcctggaggcgcgcgcagtgtcggctgagactgcgtgctgcgtcatgaagcctgcgccttgcgtcagggcggctgggcggtgcgcctgcgcggctgcggcgggtaccaaaaggaacagcgttttccgtgcagccctgcaggtccgggcgatgatttttagtatagtgaagtgttgttaccaaaccatgcaaacagagagcgagaaccgaaactcctaaacaagtgtgtcgctaa

SEQ ID NO: 203804 - DNA, 63 bp, Homo sapiens
  chr15:29862439-29862502
  hyper
gcgggcgcctggctgctgtttcctccaagaaaagtaactccgggaatcagcgcaataggagcg

SEQ ID NO: 203805 - DNA, 91 bp, Homo sapiens
  chr15:29862582-29862673
  hyper
ctactcggccccggcgttggccgccggaacttgccgcccgcggtggcgtcccggcggccgcagcgcctagcccccccggcccgcgcagtcc

SEQ ID NO: 203806 - DNA, 66 bp, Homo sapiens
  chr15:29863453-29863519
  hyper
atcaagggcaacggcatcagcctccgcggcggagccctgggtcggctgcgcggaggggcccgatag

SEQ ID NO: 203807 - DNA, 58 bp, Homo sapiens
  chr15:29864126-29864184
  hyper
taataaagggaaacggccggtcatttcctgagaccattcttccgtgtctttctagcag

SEQ ID NO: 203808 - DNA, 45 bp, Homo sapiens
  chr15:29966982-29967027
  hyper
gcgcggaggaaggggcgggcttccccctgccggcctcccttcctt

SEQ ID NO: 203809 - DNA, 307 bp, Homo sapiens
  chr15:30113559-30113866
  hyper
tgtgaaagtttaattcaagttaaattattaaatgttaaagaggttattttcaaagttaccttaaataagtaatacagcatgaaagaaaacccgacctactacgcctcacaggctgagtggagtgttttgcagtctcaaagccttatcgctggcgtgcgcataccgcagggagtgacatcagatcgaaactacagggtttcgccggggaccaaccactcctccaaagacagcagctcccggccagcaggaggtggcaccccaagccccgacccgctgagagccggcttccagcccccgaaccctcact

SEQ ID NO: 203810 - DNA, 319 bp, Homo sapiens
  chr15:30113984-30114303
  hyper
ccctccccggccgcccccagtgcggcccgcgccgcccccgcccgaggggctccccgcggcccgcggcccgcggcccgcggccccgcgccagccctgcccaccccgccgccccggggcccagacagccgccagcgagggagggcgggacgcgggccagatgccggtgggcgggcggcgacggtcggcccggtctggccctggcggccgcggaggcgctcaccttggcggccgcagctctggcggacatcttgtctctctccagcgccgcgcgaggctcctcggacccgaaactccgcggcgctggcccgcccgctcctca

SEQ ID NO: 203811 - DNA, 431 bp, Homo sapiens
  chr15:30114349-30114780
  hyper
cgggggcggccggaagggcccggcccagggggagggaattcaactcggacaaaagtccgggaagcgcccgccccgcccgggtcttctccacggggcgcgcccgaccggcacctccctccgagcgcggccacccactcggcctcccgcagctttcgcagcccggccacgtcggcctcgcccggtcgcccgcccgtcagcagcacccgtggcctcccggcgtctcctcggaagccggcttcgccacgtaacttcccgggaaccggcggccgccaaggaacgcggcgtccgctggctcagccggcgccggcaactcagcggccacgcaaacctgccggcccggcccactgagcatgcccggcccggcgggggcggggctggacgaggcgaggcgaggcgaggcggggagggggcggggccgcggcgggggaggg

SEQ ID NO: 203812 - DNA, 249 bp, Homo sapiens
  chr15:30114810-30115059
  hyper
aagcgcggaaggaaaagccgggtaacccaagtaacttggaagacagtttccgctgccgtgcgagtcttcctgtttgtttttatccaaggtctggcagaattcgcccccaaggagaaagcgcctgtgcaccaaagctttccttaagagacttgtccacttgctcctcgacaagccacgcacatcatggggtgagccccatgcatgagtgcggctggaaaggccggcagagccgatacccgacagttgttt

SEQ ID NO: 203813 - DNA, 131 bp, Homo sapiens
  chr15:31507691-31507822
  hyper
cagaccgcatgagcgtaggggtcaggggaccgggtcccccagaggtgtcagaaaaatgctcccaggaggaggacgccaggctgctgaggcctgtggctgacaccagggggcagggcggggcggcggggaca

SEQ ID NO: 203814 - DNA, 261 bp, Homo sapiens; identical to SEQ ID NO: 125434
  chr15:31620800-31621061
  hyper

SEQ ID NO: 203815 - DNA, 313 bp, Homo sapiens
  chr15:31621342-31621655
  hyper
ggggtagagggtgagagcggggccatttctaggcattcggggtcagttaagggtgtgggggctcaggttgggggtgggagtcagtgtgggctcagagttcagctcgggacgcggctgcagggtgggtgtggccctgggggaggggccaggctaggctcagctcggctccaggtggatcctgagtatcgggtgggggcagcgattggggcgtggctggggttgagatccgctttgggggatgatgcccgtgctgggcaggatacttaatgtttgggaaatttttctacggcctctgtcagggtggcctgccact

SEQ ID NO: 203816 - DNA, 44 bp, Homo sapiens
  chr15:31621685-31621729
  hyper
gggggtggccgaggggaggggctcgccgtcgtgggcggggccgg

SEQ ID NO: 203817 - DNA, 631 bp, Homo sapiens
  chr15:32162667-32163298
  hyper
ccccgccgcccgccggcagcaccgcggccagcgccgtcttacctgccgcgccgcgccgctccgctccgccagcccgcagcgccgcagtcgccgctacccgacttccattttctctcgctttaaaggaaaaccagatcagctgttttgctcccgctcgggctccgcggccccctccccagctgccgctcgcggtcccggtggcctctcctcccccgcctcctcccgcgctccgctccgcccctcgcgcccctccgctccgcccgcggccgcgcacaacgcccgcctcccggctccgcctgctgcctccgggcgcgcgccctcctctgacgtcaccggtcgcgttcgcgccccgcccccgccccgcgcggacgtgcgcgcgccgcgcctgtgccccgcccccgcccctccggggccgggcacggagagcgcgtgctcgcggccgcgagccgaggaggggacgtacagcgcccgcgcgcccgcgagcccgctccggctctcccatgcttgcccctcggggtgctccttctgcgctctccgcctggactgcaggaaaaggctgcttaaacagcctgccttttcctgctgcctgactcgcgccatctgcggccacctgtctcgtttcttccccctg

SEQ ID NO: 203818 - DNA, 38 bp, Homo sapiens
  chr15:33011671-33011709
  hyper
cctcctcgaccgactccgaatctcggctcttatagaca

SEQ ID NO: 203819 - DNA, 172 bp, Homo sapiens
  chr15:33603879-33604051
  hyper
cgccggcaactgctgctggagcctgacttgactgactgcctgtcgtgtgttcgagagctgtggcttctgctcctggctcccgcgagccccgcaggacagggaaaccccagtcagtggctccgcgtcactcaggtcccctccttgacacctgagggcgctgctccgtcccaga

SEQ ID NO: 203820 - DNA, 43 bp, Homo sapiens
  chr15:34729901-34729944
  hyper
cgccgtcctcgccgcgccgctgccgggtctctcccgggggctg

SEQ ID NO: 203821 - DNA, 93 bp, Homo sapiens
  chr15:34730043-34730136
  hyper
ccgcagggccgcgccacatggcgcacgcgcactgagctgcatacctaggtgacaaacgtgcacgttttgcacgtgtatcccagaacttaaagc

SEQ ID NO: 203822 - DNA, 234 bp, Homo sapiens
  chr15:34806641-34806875
  hyper
gccaacagcccccaagcttacgccacgcgaggagtcggagagacgcgccctcccctctcctcccacccaagcctccggcagtcccgggccggggctgggccagttgcgggagaaaggggcggggaactggggcctctctggggaaggctcccctttgtcctgggactccgggcgccccctctctgccctcgccctgccccgcgaggccgccgccgggcgcctcacagtcatgtt

SEQ ID NO: 203823 - DNA, 71 bp, Homo sapiens
  chr15:35014080-35014151
  hyper
ccttctgcaggagagaagagggaatgtgctgaatgagttaaagtgccctttgtccaccccccccccccgcc

SEQ ID NO: 203824 - DNA, 124 bp, Homo sapiens
  chr15:35014287-35014411
  hyper
gggctggcgctcacgcaggccgccagcaccctgcgctccaccccaccctgctccctaatgagaagagaggagctgaacccagacagccgctccctgttgacgccttaggcgtttcaaaactaga

SEQ ID NO: 203825 - DNA, 37 bp, Homo sapiens
  chr15:35046833-35046870
  hyper
ccctttccttttattgtacttaaaagagaagaaatgg

SEQ ID NO: 203826 - DNA, 103 bp, Homo sapiens
  chr15:35087492-35087595
  hyper
ctgcgaggaccaacgcccaggacaaaacaagttagaaccaaatcaaaaagtgtgggctttaaaaaaaaaaaaaaaaaggcagtcgcagagcggcaggagctgg

SEQ ID NO: 203827 - DNA, 65 bp, Homo sapiens
  chr15:35280590-35280655
  hyper
cgcgggtcccgagcggactgggactctggagacgtgcccccaaccccaccgccattcaccctgtc

SEQ ID NO: 203828 - DNA, 256 bp, Homo sapiens
  chr15:37179523-37179779
  hyper
gaacggccctctcgcgggcaacccccacgtctgaccctcccacacacacaatgtagtcatagaaacacctagagaacctcgagccccgccgcggaagaggcaggagagggaagaaaagcctcgggcggccgaggtgggggtgggggcgaaaggggacggccagccccagatccaaaccagttccaacgacaaaaacagccagcggcggggggcgaggggagagggacggtctccccacccggcggccaaccctccc

SEQ ID NO: 203829 - DNA, 284 bp, Homo sapiens
  chr15:37391107-37391391
  hyper
cattatttagcagcggattccctgcgtccttgtcaatttcagagacaaaacaagcagcccaggctagtagtctaggcggcggcgcagcggctgcggcagcgcggccccagcggcggccccggcggcggctcctacgcagcccgtgcccgccccgagccgcgcgagccacggcggcagcggcgcagcagcggcagcaggagaaccgggggaatcgcgctgctggggtaaaagctggagcgaggcgaaagcgtgtaacgattgcacacgcacacacacacaccact

SEQ ID NO: 203830 - DNA, 340 bp, Homo sapiens
  chr15:37393563-37393903
  hyper
cccgtgcgcgcgcgcgactagtgtgcgtctccaaagtggatctcactcagagctgggaagcacaggaggaaaagacggagagagtgggggagaaagaagttgccgggcgaggaggagtggccggcgctcacagcccagctttgttgtggtcgcccgaggcgcagcggcgggccgcggtaacgcctgctaatggctgtgttaattacacaggggcgatttcgcggggtcagggagatggggccagctccgaaagaacttttccaaaaaggaaaaggaaacgaagggaactaccccacaccgtttgggtggaaactagttgtggccggtgccctgtcctccc

SEQ ID NO: 203831 - DNA, 120 bp, Homo sapiens
  chr15:37394737-37394857
  hyper
atggcccgagcagggacggccagactcacggagcttcagggaggagagtgtagcccaggttttcagccactcttttttgccgggcttcaagcctgctagagccgacgggtaggaaatctg

SEQ ID NO: 203832 - DNA, 148 bp, Homo sapiens
  chr15:37403336-37403484
  hyper
gtggtttcatttacattttaaaaatcatttttgcgttcttcagcgtggatctcagcactttccctgtgtctcaggccgactaactttgcataaacaaagcaacaaccgaagctcatagtgggtgaaatcttgcggggaaatgaaggca

SEQ ID NO: 203833 - DNA, 135 bp, Homo sapiens
  chr15:38365202-38365337
  hyper
ctccccgccggcccgcggccgcagatgggctggcctgggcacgccatcctgcaacccgggcgcgcggcccggcctggcgcgcacagggctccgattcaggacgccggggctggccggggcgacccgggctgcttt

SEQ ID NO: 203834 - DNA, 360 bp, Homo sapiens
  chr15:38543230-38543590
  hyper
gggattcagtcccctaaggtggttcatgtacaggctggttttctaagtggagaacagataatagaatttgcagagccaggagctctgactcctgtggctgggctgaccttaggctccagcccgcaaccccagtaggtttctgtgcaaaaatcttttgagatgaatgcatactttgtcttctaacaatgcattcgtgacagctgtctatccaatcggtccgcctccgttcagagcagttcgtgccacagaagcatctcctgcgctatagttatgcaacctcactcgcagcgggagttatttcctccgttctggctgcgccagattcatgtaacacgcctaccctgggcttcaatggaagtc

SEQ ID NO: 203835 - DNA, 344 bp, Homo sapiens
  chr15:40074971-40075315
  hyper
tggaagaagccgccggtccagatccctcctgcctgtgggaccgctgtttccctggcaaccagatgcgcgatgcttccggtctcgcgatagcggaaagggctgtaccatccggaaatgggaccggggccggcggctgttggagccctgcgagctgggacggccggcgtgtgtccttccgtcttcgctgccgacggtgggggttgggagcgatttttcgtctttaggttggattcggaacgcggacgtctggatgcttgtgtatctctgtccctcatattgctgtgatgccttacaggtcagttatcctctccgagcacagtttcctcctccgtaaaatgggaaca

SEQ ID NO: 203836 - DNA, 36 bp, Homo sapiens
  chr15:40559555-40559591
  hyper
tactcagagaaagttctgggcggccgcgcgtggtgg

SEQ ID NO: 203837 - DNA, 50 bp, Homo sapiens; identical to SEQ ID NO: 125537
  chr15:40651001-40651051
  hyper

SEQ ID NO: 203838 - DNA, 56 bp, Homo sapiens
  chr15:41046993-41047049
  hyper
gccagcagaagtcaccgggagcaggcaggcgggcgggcgggcgggggtaaggagag

SEQ ID NO: 203839 - DNA, 260 bp, Homo sapiens
  chr15:41136857-41137117
  hyper
gggccaccgcccgcgccccctgggctgcccgcgggagccgactgcctgaacagctttaccgccggggtgcctggcttcgtgctggacaccaacgcctcggtcagcaacggagctaccttcctggagtcccccaccgtgcgccggggctgggactgcgtgcgcgcctgctgcaccacccagaactgcaacttggcgctagtggagctgcagcccgaccgcggggaggacgccatcgccgcctgcttcctcatcaactgcct

SEQ ID NO: 203840 - DNA, 44 bp, Homo sapiens
  chr15:41137147-41137191
  hyper
gcccagggagggcttcatcaactacctcacgagggaagtgtacc

SEQ ID NO: 203841 - DNA, 326 bp, Homo sapiens
  chr15:41523057-41523383
  hyper
agtccccgaagggtacaccctagggttcccccccacgcgaagtttctctccgcaatccgtgccacctatcgagtaggattcctagtgttcgattcctgtgagaaaaggtagactacgctgcctgtcgcaggttagtttgttgtaaaactgttggtcaatgacgttgcccttttaattgcgtcgttagcgaccgagtggcatcgcccctttaaggccggtggcagctgcggttccgggggcggggtccgtcttcagcaggacttgggctggagctgggctgattcattcggggctggaactcgaacgctgacgttggctcctgagcc

SEQ ID NO: 203842 - DNA, 181 bp, Homo sapiens
  chr15:41576046-41576227
  hyper
cgaaagagtggggcgagtgctattgattgacgtgcattccaaccaacctacgacgcaaggagagcgcgcgcgagcaagacgatgcccaataaacactcagccccagcggcgggggcggggcttgtgggaacggcccaccgcagggttggccaccttgagaagctgcgaagatggcggagta

SEQ ID NO: 203843 - DNA, 380 bp, Homo sapiens
  chr15:41786424-41786804
  hyper
gcgggagagggactgcctcccggcagcgggctcttcgcacctgcagcagccgcgccgcctttccacctcgtcggtctcctccactggctcctcgtcgctgctcgaggactcggaggacgacctgctgagcgacagtgagagccggagccgcggcaacgtgcagctggaagcgggcgaggacgtgggtcaggtacgggccgcgggggcggggccagcgccgggcgcgggggctgcacgggggacctggctgggtgctcccggaggacccgctcctgtccatgctccctccagcggaaggtcctgttctcgcggtttaggaggaatctgggggtcagagggaggcgcctggccgacctctcgcctgggcaactttcacctcg

SEQ ID NO: 203844 - DNA, 200 bp, Homo sapiens
  chr15:41805869-41806069
  hyper
gctccgaaccacaccagcagctgtccccagcagcccatccctgttgggtccacccggcaacaaaagcccttgcggtcgcggccacacccctgtcaacctaaagttgacagctcattttgccacggcagccctggccaccacttacaggggtgtgctgccgctggcgagacactccccggacctaaagctggtctggccac

SEQ ID NO: 203845 - DNA, 154 bp, Homo sapiens
  chr15:41913579-41913733
  hyper
ggccctctaactaccctccctctccgcgtgcgaacgactcggcgccgcttcgagctcggtgccaggtgattagcgggtaggggcgggcttgcgaccagcacgtgacccgaactggcagccaatgactagccgggtggtccagcagcgcgaggat

SEQ ID NO: 203846 - DNA, 156 bp, Homo sapiens
  chr15:41953174-41953330
  hyper
ccaagggaaacggtgtcggcgtcgcttttctgagaacttggcgcagcgttttgacacctgtgcaaacgtcttttctaacaagtaatttccggccaaattgtttgaggcaggacgtcaagtttaataaaggagggcgaggaagtgagctgtaggagt

SEQ ID NO: 203847 - DNA, 160 bp, Homo sapiens
  chr15:42119937-42120097
  hyper
gtgcaggtcgcggcgcttcctgcctcatcctcggctgcatggggcgggggcgctgtttttaacgtgcccgtttgtactgatgtatgaacttgtcaataaacacaattgtttgttaaccctgggatgccggccagtggggcaggccgaagcgggcgctgcc

SEQ ID NO: 203848 - DNA, 36 bp, Homo sapiens
  chr15:42263898-42263934
  hyper
ggtgcatgaactgaacgtaggcggcctctttatccc

SEQ ID NO: 203849 - DNA, 97 bp, Homo sapiens
  chr15:42841085-42841182
  hyper
ccgtgggacccggcgtccgcgcctaacggcgctgggctagtgctaggccacttcatagcttcggggatggtcaatcaggtacgtgggggtggcggtg

SEQ ID NO: 203850 - DNA, 88 bp, Homo sapiens
  chr15:43394990-43395078
  hyper
tgttctctctttctcatcatctctgtctcactctcttttcctctgtgtgtgtgtatatatatgcacacattttcctcctcaaagatct

SEQ ID NO: 203851 - DNA, 101 bp, Homo sapiens
  chr15:43397760-43397861
  hyper
aaataccaggtgctgcgttcccatcatcaagagtaaagggttagtactgcttctatacgaaaatggctcttgctccaaccccgcctcggcccccacatcaa

SEQ ID NO: 203852 - DNA, 152 bp, Homo sapiens
  chr15:43802598-43802750
  hyper
ccctccaatactgcgcagccttccagagcactcccagggcccggggcaaggacagggaaaccgaggatggagacctcgggcaggacccaggcaggcagtgacaaaaaacaaaaaaaaaaaaaaacacgccaaacaacgataatacagacaca

SEQ ID NO: 203853 - DNA, 185 bp, Homo sapiens
  chr15:43809675-43809860
  hyper
ggagctcagacgtcgtgaaggcaaagaaacagttaagtctccagtgcctcgtcacggaccagcccctcttccccgccctggcgccgccctcctcatcaagcacccccctcccccccccaccgcccgccccactcccaccctaagtgctgcagactcttccctgaagctgccggctgaggccggag

SEQ ID NO: 203854 - DNA, 49 bp, Homo sapiens
  chr15:44068769-44068818
  hyper
tgagcgcaggtgaagcagtgtccccaggatccggcgtccggagcccggg

SEQ ID NO: 203855 - DNA, 794 bp, Homo sapiens
  chr15:44486896-44487690
  hyper
agagcagggtaggacttaggggtgtgggacgcggagactcgccccgcggcggcggtgacacaccgggtgccagggctccggcaggggctccggtgaagacgccctgcactagggcggtccgccgcaaccaggaacggacaaagcacggcgctggggctggggcgacccctgggcggcggccgccgccggccaagttgaccagacttgggggacaagggggtcccgcgggcggggcggggcggcgcggcgctgacctggatggtgcaggtgtactcgctgtcgtccagcagccgcacggtgcagctgtactcgcgctccaggctcctgctgctgccgctcatcaacctgctcagcatcttcccgcccgcccgcccgggagcgacgcggcggcgctgcggaccctggaccaggcgtccctcagcccggcagctccgcaccgaccccaggcacctgcaccatcaccccggccccgtcgctgccgttgcctcctgctggcctcgttcctcctccttatcctcctccttccctcagccgccaccgcctccccccagcccagatcaagcgccgggctctgtctcctcggcgccccagtgcccgtgcccagctcgcggggcggggcctcaactggagggggccaatgggggtcagcgcggcggaaccgagtggcagaccgaaaagccaatcgagatagagtactgggatgatgggcgggataaagaagcaatcacagaaaagcagtcggacctagtcaagccggagcagccctctagcgtcccaaacgaggggttcctctc

SEQ ID NO: 203856 - DNA, 92 bp, Homo sapiens
  chr15:45459390-45459482
  hyper
aggaacttgatgcttcgaaagtgcttttcacagccgggctgtgtctgctccagagctgatttatacgcagaatctgcgctcgcttctccgct

SEQ ID NO: 203857 - DNA, 204 bp, Homo sapiens
  chr15:45479833-45480037
  hyper
cgaagtcgcgctcccgctgcagcctgtaggcggccaggatgtccgggggcggcgcggggggcgcggccggagagggcgcaggggggcggtagtcgggctcggggggcgccggcttgctgccccctccgccgccgccccccccgcggaagcccaggtgctcccggagccacttggctactccgccgctgccgccccctcctgggc

SEQ ID NO: 203858 - DNA, 320 bp, Homo sapiens
  chr15:45492665-45492985
  hyper
cactatacgatcacggcgagctactagggacacaggacctcggcttgtcgcctgaactcttctctgttgaaagccccgcccccttgcaatgtcattgatttgtcattgtttgttctagcctatctccaccctcgcagccatctgagggcacgcaagagcattaatctctgctttctcgattttggtccacacttgcctgcgcaccagacacggtggccgatttctccaccgtggaggctgctcttggggttccccttacctcgcgcctcaaggaagttgtatggtggtgggtcagaactgattttccttcttgtaaaatt

SEQ ID NO: 203859 - DNA, 174 bp, Homo sapiens
  chr15:45493371-45493545
  hyper
actctgcgttgtggccgcagcaacctcggttcgaatccgagtcacggcattgtggaaacaatggtacggcaagggcctctttttagacttagaaagccacacattcttctgggaagctaactctaaaagctgttacctggccagggctgaaattataacggacaatgaagtgtg

SEQ ID NO: 203860 - DNA, 224 bp, Homo sapiens
  chr15:45669906-45670130
  hyper
ggaagccagaatgtcggagcgattccagtactagaagcatgggagggtctgctgccagggcagccgagggcggggagcgcagaaactctgcttacaggctgcactcgccccgactcctctccagacgtgggatcccatgttatacttggagtgaatctggtcgctcgctccccgtccccgattcccactttgcttgcctcttctccccatccatctaccccaca

SEQ ID NO: 203861 - DNA, 274 bp, Homo sapiens
  chr15:45670188-45670462
  hyper
cgccacccttttactaagaggagcctccgtcgtcccaaccccttgctccgagcgggaagcttggtgcagcgcaccaaggtccggtagaggggggcggcgccccctgcgccgtgggccagcaggccgcggacgcgcagacagcaagtggaccccaagggctggagccgcaacgcaagttccccctgactgggggacgccgcccagctcctggagcctgcgaaggctcttgaagctgagcttcccagggataccagaagggacactctcgtgcaat

SEQ ID NO: 203862 - DNA, 34 bp, Homo sapiens
  chr15:45671015-45671049
  hyper
cgcgacttctgacgaagtgacaatggtctatgca

SEQ ID NO: 203863 - DNA, 153 bp, Homo sapiens
  chr15:45722445-45722598
  hyper
tttagaagggttggctttccctcaggcctcggctatctgcgctcccctcttagggggttccacctcctactccccaaacctccaaactcctcacaagcacctaggggggccaagagcgaccggggtcggcaggtaaggaagaccgcggcgagc

SEQ ID NO: 203864 - DNA, 360 bp, Homo sapiens
  chr15:45722599-45722959
  hyper
gcagggggcgccagcgcccgcgttcgggcgcttcacgtcagccgcagaatgtcctgcagggggcgcccgggagtcgcgtgcccaacggggaaagcgagtcaggtccctcgcgctccccgccccacgcgcgtgaccagagcgcgctggcccggcccacccggggcggttgtggtcgctatatataaggtggggaggccgccggcccgttcggttccgggcgttaccatcgtccgtgcgcaccgcccggcgtccaggtgagtctcccatctgcagagacgcggacgcgccggcccgcagttggcctgcggagcgcggtggacggtttggcgcccaccaggcgatcaatactttggattttta

SEQ ID NO: 203865 - DNA, 89 bp, Homo sapiens
  chr15:47476468-47476557
  hyper
cgcggaggccgggcggcaaggggagtttccagtcctcgataagtggagtccctgctctgcgctgcgccagcgccttccgcctgggcccg

SEQ ID NO: 203866 - DNA, 226 bp, Homo sapiens
  chr15:48009298-48009524
  hyper
aagagggagggaatcgaaaaggttgcttcgcaggctgcagcacccactgcgagctggatgactgaggcactgggagttgctagaaggagcagctactcagaggtggggagagggagggtgcgcagcagagcgccggagaggagggacgcggaggccaccgaggggtcagcagggccgcggcgccagggtgggggcctccaggcggcgctggccacggttcacccgc

SEQ ID NO: 203867 - DNA, 211 bp, Homo sapiens
  chr15:48009670-48009881
  hyper
gccgtgcatcggtttgttttgctcctgctctgtcccgctgctgctgctgctgctgcaaggggtggtggcgagtttcaggattctatcaaggaagccaagacctaaggagacagagggatatctatttttacaatatttttctttattttctttcttccttgcgcgtggcaagcttttttttttctttttcttttttcttaccagcctcccc

SEQ ID NO: 203868 - DNA, 222 bp, Homo sapiens
  chr15:48010897-48011119
  hyper
gctcggtgctgagatgtgttacgttctcatctccccatcaattatggatggaaacaaataaggaagagtcaattttgctgagccccttctccggcaacgagaggcgttctgcagccgggagggagccgccgctcgcgccggcagccgctggcaggggcatggtgaggaggaaggtagggaaacttttatttcccgtcttgacagcggcggtgtttgtccctg

SEQ ID NO: 203869 - DNA, 127 bp, Homo sapiens
  chr15:48469937-48470064
  hyper
cctgcaaaccgtggcggtcgctgagctttgctcaaagattctttaaccaaagtcagggaagaggggtgttcgctgtctcgggctagaaatcagggaagagcgctggtccccgggcccccagccccgg

SEQ ID NO: 203870 - DNA, 52 bp, Homo sapiens
  chr15:48470094-48470146
  hyper
cgggcggggaagggcctgggagcggcccagctgcacctgctcctcaggaagc

SEQ ID NO: 203871 - DNA, 158 bp, Homo sapiens
  chr15:48470215-48470373
  hyper
cgcccggtagactccccgccccccacctcgccccggttcccggaggaaaagacaatacattttaacgccattggagctgctgctgtgctgcggctgctgcttctccgcctccgcggggtgcggctctcgccgcggctcgcccggcggctctgcgggct

SEQ ID NO: 203872 - DNA, 68 bp, Homo sapiens
  chr15:48936658-48936726
  hyper
tggggactaaacaaccctagcacctctaaggtgcccccaggaggtcttgccaaggagtcttccacagg

SEQ ID NO: 203873 - DNA, 34 bp, Homo sapiens
  chr15:49448552-49448586
  hyper
gaatttcaagagaaccgagcggaaagggaaatcc

SEQ ID NO: 203874 - DNA, 79 bp, Homo sapiens
  chr15:51058036-51058115
  hyper
ctttccggctgcccgactttaactcacaccgaagcctggcgggagaacggatttctcaaggctcggaagtgtctgagcg

SEQ ID NO: 203875 - DNA, 126 bp, Homo sapiens
  chr15:51973520-51973646
  hyper
tacaccagctggccggtcgcccctcctttgttccattcccgggggattggagtagcgttggagtcaccgacgccatcccctcccgcctctggcgtgcatggagcatgcgcttccttcctcacttcc

SEQ ID NO: 203876 - DNA, 264 bp, Homo sapiens
  chr15:52028982-52029246
  hyper
aggtgtcacattcgcggttgccagtgagcccagagggtgtaatttcacttctacataaagaagcataatcgatagaaccagaaccacccagtaggaacaactgcaccattcctgactcatcacggagcttgttttcacagacaacaaaattcacctcagttgggctttgcgtaaatatagagtagtgtgatggggcctgcaaattgggtgaaggtggttcacggggatgccaaagccctagtcctcttcggcctccctcacgcg

SEQ ID NO: 203877 - DNA, 181 bp, Homo sapiens
  chr15:52404392-52404573
  hyper
tgcccgtcccgccccgtgtcccggtgtccgccgcgtgctcacccagccgccctgagcctgcagccaggcgcggtgctgccccatgagccgcgagctcagcaaggccaccaggcgctggcagtcccgggcgacgtcgccctcctgctcctttagccgcggctggaagccccacttcttccac

SEQ ID NO: 203878 - DNA, 624 bp, Homo sapiens
  chr15:52587421-52588045
  hyper
gaggcgctccagtcccgggagatggggacgcacgcgcgacccctgggcactggggattctaggccccgaggccggagcggcggagggggcggcccctcccacagggtcttcccacccacagggcacccaggcgcagcggagccaggagggggcttacccgcgggcagggacggagcacgccggggccctggaggggcgacgctcgctcgtgtccccggtccccgtggcccctccgcggcgcctccgcggcccccagcgcgcgcccgcccgccctgccgtgtcaggtgcgcaggtgtggcaggtgtggcccgggcgccaggtcgagtcagcgttagcagggccggctcccccacagcgctcccaggagcccagcggaccctcctacctgcgtgtacagctcggccaccgccatgggcaggaggggccggggccaggccggggctgccgaacgtgcgaggctcgggggctgggcctgcgccgcagaggccgggcgcaggagagaccgccgcggaaatcaccgccgggccatcttgcccaaagttttccaacggcctcctgttcccgttcccgagttggcggcgaggggagggggcagcggcgggattggtccctccaagcttggcc

SEQ ID NO: 203879 - DNA, 279 bp, Homo sapiens
  chr15:52821287-52821566
  hyper
cgcgatgctgcctccgctgccgccgccgccaccgccgccgccctgtgcattatgggagcgggaggaggctgcgctccagcgctgccaccgcggctgctctgggctctctcgggctcacgctgcctcccatcggctacgagcacagagcatcatcatcatcagcctgccagccggccccgccgccgcctcgcgccctgccgaggcccggaaacccgcccgggacgtgagccccgagggcgcggcacaccccgggcgcccccaccccgaagcgagcccggg

SEQ ID NO: 203880 - DNA, 227 bp, Homo sapiens
  chr15:53078992-53079219
  hyper
gggggaggagggatattgaagtccagagcaagagcctccagggggcgggggtgggggatggggaccgagttttcccggaggggtagccttctccatttctatcttcttcccacattcccccgctccactctttggcttcagcgggcactgcctgggtaagaggccctgaagcctggctctggggtggtgtgggtgtgtgaaaaggcactaccttgggctctggagag

SEQ ID NO: 203881 - DNA, 217 bp, Homo sapiens
  chr15:53080082-53080299
  hyper
ccagctgaactcagaaacacctggggcttggggtttcgggcaggagacctctgctcctagacttgggggtcatttacacactctcatccccaaacccccctcccgcacggggattcagacgaaaatcgcgaagaggaataataaaacaaaatgcaaagtcctcagggagtcggcagcggagtcggtcccaggacatggctattgctttgcagctctc

SEQ ID NO: 203882 - DNA, 159 bp, Homo sapiens
  chr15:53082144-53082303
  hyper
cgcacggagtccggtcttcacatcggctgctggcgactgttgccttccttcctctcactgtggggctctgtctctctctctctctctctccgtgtgtgtgtgtccgtgtgtgcgtgtgcgtgtgtgtgtgtgtgtgtgtctcgccttccctcttacccc

SEQ ID NO: 203883 - DNA, 126 bp, Homo sapiens
  chr15:53091078-53091204
  hyper
cactgctgggggtagagccgccaggtcccctccccctagctagggtcctgggcccttggaggcgaagctgagtgagggagaggggcgacccctggccgcagtgggatggggcgatgcaatgctagg

SEQ ID NO: 203884 - DNA, 333 bp, Homo sapiens
  chr15:55489070-55489403
  hyper
acacttttcgatacgcatgttgaacccgcgtgtaaccccaccaaacaaacgccaagcttgagaggaagtgatgcaaccccgtcaccggaagttaccttcttcccccttccccgaccggaaaaaggcaagcgtccttcgttctcgcgggtctgttagaccagatgcgaacacgactgtgcctccggcggccgtgtggtcaaatgcgctgccgtttgacgcaggcgcagagctgcagactagacctgttcgctgttactttggggaaatgtggttctgcgccaccttgtgaacttgctctcacagcgcctagttttttctctctgtgtgtcggca

SEQ ID NO: 203885 - DNA, 89 bp, Homo sapiens
  chr15:55699900-55699989
  hyper
tcatcatcaggctggcgtgctagcggaagtctccgggcattatttaatatttaatctttctattcctgacatcacgggggctcaaatgt

SEQ ID NO: 203886 - DNA, 504 bp, Homo sapiens
  chr15:56285864-56286368
  hyper
gaggcgctccctcagcgacagcagcgcctcccgcggcgagcgggcactagcggcacccggcagcgcggcgggaaaaggccggcggcgcgcgctcctggggctgggcgggggcgcgcgtggcggggctcggggagtggggagggcgtgcggcggggctcgggtgggatgagcgcgcgcggcggggaccatggcgtggggagcgcgcgtggcggggcgcgccctcggtcccttcccgggaggtgggtggttgacgggcccgccggggagccagggagcgccgggaagcgccgggaagccaagctgcagtgttcctcagcaacaagtctcgctgagatccgacccagagttcggcctctgactagacgcctgggaatccgtgagcttaatccccgcttaaatcccaaacggaaaatcatagcgctttcttgtcggttaagggtgtcattcccataagaagctggacctggggaccgccagggaaagcctgagcgtggcagcaaatgg

SEQ ID NO: 203887 - DNA, 255 bp, Homo sapiens
  chr15:57598925-57599180
  hyper
gggctctttctgggcccagctgcctttgtgatcccgcgccccggtcctcggcctctcacctccagcgccggggcgccccctgctgtcggaagcggctgtgaccgggcagaggtgctatctgggactctgggttctcagcccggggacagcgaaccgaggggcagatgatccatcagaaaagagccggcactgcccagccccgcgcccctgcccctgcctttttccgggagcgcgccgcgccgcacccgctacggc

SEQ ID NO: 203888 - DNA, 360 bp, Homo sapiens
  chr15:57668561-57668921
  hyper
ttgaagggagggttgggcccgccggcagccccggcgggtccaggcccccggccagcccctgcccctcctcccaggagggcgggcggcgactgcggggcggggcgcgggctcgctcggcctcccggcggcgccgcggcccttgcactccggccgggctctgctggctgcggcgggagctggacgcgggaggaggcggcggcggcggtgagtgagctccgggctggagcggggcggggtgtgcgccggcagccgggtttcggggtgctaggggccgcccagggcggcgggacccccaggggttcgggctcagccaggtgcactgtgctcagtccgcgcgtccactctcggtgacccgcgccg

SEQ ID NO: 203889 - DNA, 213 bp, Homo sapiens
  chr15:57668981-57669194
  hyper
ggcgcagaacagatgcgggcgatccctggggaacccgcttcggggcggggtgggagggaggaggccctgcagaacctccctttagtgaagagggactttctgccttcgcacccctgcctggaccctccggctctagtgacagctgggagagactcacacgaagcagtttctgacctatcctgtcgtacacaagtcctcggcgtgctcggccgg

SEQ ID NO: 203890 - DNA, 151 bp, Homo sapiens
  chr15:57883948-57884099
  hyper
gaccctgggagggcgcagcgccctgggagaggatggtgctcaactttaaccgggtcggcgccctcgggagaaaatgcagcctgacgggtcgggtgagcgcgctcggccccgccccggcccggcccggccccgcccccggccccacccccgg

SEQ ID NO: 203891 - DNA, 218 bp, Homo sapiens
  chr15:59225884-59226102
  hyper
ctggcccctcccccggtccgccaccctagcgcaacctgcagcagcagccgccagcacccggatgacggccgcgcgtgcgcgttggcgcagggaccggcagcggcgcgctcggtcgagcgggccgcggccacttgggcggtgcgctcccttgtgtggactgggaggtcgggcacgtcctaccgcagcaacgtccgccgcgccgccgttctctcgtcgct

SEQ ID NO: 203892 - DNA, 39 bp, Homo sapiens
  chr15:59396925-59396964
  hyper
catccctgagcaacccggaggggccggttcctgcaccca

SEQ ID NO: 203893 - DNA, 453 bp, Homo sapiens
  chr15:59397170-59397623
  hyper
aaaaaacaccccaaccggctgttgtgacaatcaaacgtgtctaagaaaattcagccaatgagagtgcgagagtgcatcttgtgttggccaatgagaacagcgacccgtgcgcagggccgcccaatggggcgcaagcgacgcggtatttgaatcctggaacaaggctacagcgtcgaagatccccagcgctgcgggctcggagagcagtcctaacggcgcctcgtacgctagtgtcctcccttttcagtccgcgtccctccctgggccgggctggcactcttgccttccccgtccctcatggcgctgctccgacgcccgacggtgagtgtgcccggggaccgctctcagaggcgagtccgtcggccccacagctcccctgtcgcttctctcatctgctccgagcttctccgtcccaaccggggctgcttttctcttctccggagctcactgctt

SEQ ID NO: 203894 - DNA, 132 bp, Homo sapiens
  chr15:59663973-59664105
  hyper
ggcgtccggggcgcggagaccctcggggccggcgcccggcacaggtccggggcggcgtggttgccgcccgcgcccgagtctccctggctcttgacagcccgccggccgccaggtgctcgccctacctggcgc

SEQ ID NO: 203895 - DNA, 420 bp, Homo sapiens
  chr15:59664451-59664871
  hyper
ggccacagaaagtttcgcgacgcagaaaccgacttggaataaagttttccttggcccctcgctcgctctcccccggcccgggtttacggaaagcggcaggaaatcagagctcgcgacgtgccggctcccgcgtccaccttctccacccctggccccggcagcgcgcccaaggtgggtgcaccacgccggggtttcctgccccgtccccgggtccggcgtcctaggacgcggcgcggccaactcaccatggtgactcgcgccgcggtcgcgtcttcgccgggtcccgctgccggggaactggggctggaacgcagtcttctgggcgaacttcaaaagttggttcccctcgccaaaaacaggctcccgacacccaagcactcacaggagccaatgggaacccagaggggactccatccaggc

SEQ ID NO: 203896 - DNA, 102 bp, Homo sapiens
  chr15:59729554-59729656
  hyper
tgtcccccgcaactccgctgaaatcctgcccaccgagaggaagcacaattatgagtgaatgggcttgtgcgtcctgatgagaatccaaaatcgagaggaagg

SEQ ID NO: 203897 - DNA, 85 bp, Homo sapiens
  chr15:60289225-60289310
  hyper
atttctggggcgtcggtaagtccttggggcaacctggttttcccctgctgacaagctgtgtcagttaactgcaacccaccaagag

SEQ ID NO: 203898 - DNA, 36 bp, Homo sapiens
  chr15:60289626-60289662
  hyper
aactcagcgggggacgcatggagacaagaaaacaaa

SEQ ID NO: 203899 - DNA, 301 bp, Homo sapiens
  chr15:60291900-60292201
  hyper
tgggtgggtacggagtcctttcactgcccgtcggcagttggcaccagagcggaaagtgtgtcccctcccccgcctctctcccttgggcagtttgatttcccgccagactcagtcggagtggcctggaagagcgggctcaaactccaaaggcagtcgtgggagagtcgtagcggatacgtttcccctgacatgcgccgggtgctcgtctctgccccccacccgcccccaaaacccaaacctgcaagtcgatgttgtccggtgaccccgggaaaggagaactttctgagctagttccctctgg

SEQ ID NO: 203900 - DNA, 278 bp, Homo sapiens
  chr15:60298179-60298457
  hyper
cacctcactcgccttccctggctcccagtcctgccggcccccacctgggaccgccaccctaacttgttcatttcaccttcggccaacccgccttgccccaagagaactttgttttggacccaggagaccaaacacaaacttgcagatgggccgagaggcgcgtgggagttgtcctcgcccccacatcaaggaaggccggggccacctgagccgaaccatcccctccctgaggccccgaaaccccctcctatttgaccggcgggggaaaccctgtcacc

SEQ ID NO: 203901 - DNA, 78 bp, Homo sapiens
  chr15:60690265-60690343
  hyper
cctcccccttacacggcccgctcccaccccaagtcaggggtgactcaccccggcccgccggcccgcagggaccgcgcc

SEQ ID NO: 203902 - DNA, 420 bp, Homo sapiens
  chr15:60884659-60885079
  hyper
ccccggagccccctctgccgccgccgcgccgccgccgcccgagccacagcagcagctgccgcagctgcccgcccgccgagagccatcccgagccataagaggctccatgtgaccggctgacatcacggccgccgctctgtttacaccgcgcccctccgcttcctcccggggcgggaggcgggaggcgggaggcgggaggcaggcgcgccccagcgccgcgccccgccccgcccccgcgggcaggtgagtagcagcggcggctctgctggcccaccccggccgggcctgccctcccgcgccccgggccctcgcccgggcgcccgccttcccctcgccttcgggatcacctgtggccgccggtcgcttttctgcacgcagcgccccgcggaacgcgcctctgaccactttctgcccccactc

SEQ ID NO: 203903 - DNA, 389 bp, Homo sapiens
  chr15:61519472-61519861
  hyper
ctgttacataacccgctcgcattccaaatccaccgtctcagggtctaaatatactctttgcagccaaaagctccccgcacacaaactcaccgagctagcggcaggtccaggcccccagccctcatccccttcccttttgtcccagccctcgccgcccccctcccgctgaaaccgcggttcgccgcggtcaccctttggaaatcgcctttaattaaatgtttttcgcgtgtgtcatcctgatggcttttactgtactcgaattccgtgaatgggaaagcgcctggacagggggtgtggctaaggtggggggggggatactgtaaaacagccagcacatgatcagccatattcctacctccaactacaacatcgagaggaagggagcagtt

SEQ ID NO: 203904 - DNA, 52 bp, Homo sapiens
  chr15:61520356-61520408
  hyper
tgcttggaacctccgagagggaaggattcccagagcagaaataagtttcggt

SEQ ID NO: 203905 - DNA, 58 bp, Homo sapiens
  chr15:61520497-61520555
  hyper
ccagcctgggcgccgggctccgaacccccggtctgcaaacttgcgcatctcccctcgc

SEQ ID NO: 203906 - DNA, 178 bp, Homo sapiens
  chr15:61520576-61520754
  hyper
cgaacagctcgcccgcccgcaccccgcttccttcggcccttccttcaaatcccaaacgcaccgccgtgctccaaagaaggtgtccacgtcgcccccagaccccggagcgccccctctccacccccgggacttcccaggtcgctcactcctcccgccccccgcccagatctgagaggga

SEQ ID NO: 203907 - DNA, 60 bp, Homo sapiens
  chr15:61521496-61521556
  hyper
ggtaccaaaaaaaaaaaaaaaaaaaaaaaaaaaaaaaaaaaaaaaaaaagaaggagaagg

SEQ ID NO: 203908 - DNA, 43 bp, Homo sapiens
  chr15:61521578-61521621
  hyper
aaaagcaggcggcggcgggcgggcaagcaaaagcgcgagggag

SEQ ID NO: 203909 - DNA, 111 bp, Homo sapiens
  chr15:62358992-62359103
  hyper
cctccacctgaagccggagagagaaagaactgggtctccaaaccttgctcagcaaatccagccacgtggcagagggacagggaagagcctggcgtcaggttaccaggcagc

SEQ ID NO: 203910 - DNA, 402 bp, Homo sapiens
  chr15:62359104-62359506
  hyper
cccctctgctcggcccactggcaagcgctcccagcggcaggtataaaagctcaggctggcagtccttgaacactggtgctgaaccccgccgcgcgcgctttgaatttcccagccgctaagcgcctctcctggtcggtgtcccaggcagaaaggtgcagagacccatctgacgcaggactccaggtattttaggagggacccatcggcttgcttaattccctgggggattcgtctgaggctctttgcctctgcaaggggagaaccagccacagtttcccggaaggaataacaattactttaattctagctgaggactagactgctatggtccaaagagtcaggaaacgattgcaaggcaatcgttggcacagagaacagagcgactgaagttacaatccagca

SEQ ID NO: 203911 - DNA, 121 bp, Homo sapiens
  chr15:62359734-62359855
  hyper
caccttgcgggactcgctctgacgatccttgtgcctttgtgcactgcaggtagacaagctccagcagagagtggccagatgtggtgcctggagcgactccgcttgggtcctgagtgccttc

SEQ ID NO: 203912 - DNA, 97 bp, Homo sapiens
  chr15:62456139-62456236
  hyper
gccccgatcccggccgcgaccctcatcccgggccttgacgcgaacggccaggcggcgcacctcgtcttccgagaggccgtcgaagcaaaagtcctgg

SEQ ID NO: 203913 - DNA, 291 bp, Homo sapiens
  chr15:62456395-62456686
  hyper
cgggttcccggacagtactcagcagccaggcgcagggcgtcgccggcgcggcccagagccacggtgcccttggcctccaggcgctcaggaagcggggccctggatgacagcgggctcgaggagggggcccgggccggggactcggatcccgcgcggcgctcctcgtcctcgttcccgctggagacggagcggacgcgggccaggcggcgactccttccagcccgcagcgcgcgactcagcagcccgtcggggacgcgcaggaggcggcagcggcggggccccgcagcgagc

SEQ ID NO: 203914 - DNA, 130 bp, Homo sapiens
  chr15:62457008-62457138
  hyper
cgcagcgccggggcacggcggcggcccggattggagactcgagcgtgcaaggggccggcagccgcggcgggatgcagaattcggggatgcgattcggcgtgagcactttggcgaaggcgggcttcggcgc

SEQ ID NO: 203915 - DNA, 187 bp, Homo sapiens
  chr15:62457296-62457483
  hyper
cccagaccctgtaaacgtcccccacgtgtttaagaccccagaccagttccagccttcctctcccctgcacccacaacaaatcagccccgcttcagacctttctctcttcttcagtgtctctggatctggttgcaagctcagtgccagtggcctctagcccgctgccgaggcgccaccttcagtactg

SEQ ID NO: 203916 - DNA, 211 bp, Homo sapiens
  chr15:63130456-63130667
  hyper
ggacagccacattgccgctgctagggatgcagggattccggtcactgcccctgccttcaagttgctgactgtccaggagggaacagccagccacaagcgtggtaaaggctgcagtgaagccggcacagcacactccaggcacacagagggagagggtatgggtagagctaagggagacaagcgaaagtgatgtctgcgccaagtcctcaag

SEQ ID NO: 203917 - DNA, 189 bp, Homo sapiens
  chr15:63334720-63334909
  hyper
ggtccccatatatagtcatatccaccgtcaactgggaggccggcggccggcagcgaatgggcgagcggcccccgcgggaggagcggggagggggcacggggcggagggaggagaggaggaaggggggcaggagaaaaaagcttttccaaaaaagtattggctgtcttgaggaatgcggtcgcccccttg

SEQ ID NO: 203918 - DNA, 202 bp, Homo sapiens
  chr15:63448918-63449120
  hyper
ctagaaaagggctttcgcacgatcaggaaacatatggtaaggcaaactttgtccttctttactcaactgcgtaatgaactgtcttcgatgaaaactgcgcgaagtcgaggtgctaagcaaagaaagtgaccccgactgtggactcgcttagagtagaaactgctgaagtagaccagacaacgtcagcgcctgggtgattttt

SEQ ID NO: 203919 - DNA, 91 bp, Homo sapiens
  chr15:63795380-63795471
  hyper
aggatgagcagaggtgcccccggtgggtggataccattaggcagaggtctatgcggaagaggccgacttgtggcgtgggaggtagggagga

SEQ ID NO: 203920 - DNA, 350 bp, Homo sapiens
  chr15:63795501-63795851
  hyper
tgctctaggactgcattgcggggaggtgcccggctctaaccactgcccggcccggttaatcatttcctgaccttccttcctcctctcgctctggccgcaggattgccacatcagtcttccccctcctcctgctcgccttctggccccgaggctccttcgccgggttttacaaggagccccaacttggaagcaatatttgtaatagccccggacgtcctcaagtgccccagtgagatcgcaggctcgatccagggtatgccggcccaagcggccccttgaggcttgccctcttctctaatccctcactaaaaagaggtcagagggtcagggatccaatctccatacagatc

SEQ ID NO: 203921 - DNA, 343 bp, Homo sapiens
  chr15:63795894-63796237
  hyper
ggtaacagctggtagggtgttgcgaggcttaaatgcggtatgggaagtgcctggctgggagaccttaggtatctaacaaatgctagatcccttcccttcttatcgcctggtaatggggagtttagcttgcccagcaatcccaggctacgtttatctcacttgaacttcctggcttgaaagtcctacgatgtgctggaggtaacgcagatggtgagtcacagtgacaggatttgaacgtgggttcatgggcgcccctgcgggcccacccacgcagcatctaggtggctggctaacgccacgtgttcagaacctagaaagggctacggatcgcacctgccgcaag

SEQ ID NO: 203922 - DNA, 56 bp, Homo sapiens
  chr15:65067772-65067828
  hyper
tgcgaccggcgagtgcgccgcggcggcggcggcggcggcagcggcggcggggggcg

SEQ ID NO: 203923 - DNA, 79 bp, Homo sapiens
  chr15:65281790-65281869
  hyper
gtcacaagcacaccgaccaccccacagcccagattcggccccagacacacactcacaagggcacgtgatcacgtgcgtg

SEQ ID NO: 203924 - DNA, 110 bp, Homo sapiens
  chr15:65321808-65321918
  hyper
cagggaggcttctcgcggactctggagtcccggcagtcctcccagccgagtcgggccagtgctcgccactggggactcggcctcccacgcctggcgccatgagccagcgg

SEQ ID NO: 203925 - DNA, 390 bp, Homo sapiens
  chr15:65670244-65670634
  hyper
gcggtgggggactggggccgcatgcctgctcagcagcgcggggggcgcagggggagcgccgcttgcgccatcttgcacccacccgggcgatctgtcagcctcgcccggggtgcgcgctccacactcgcaccgctcgcggccgccccgccctcctccccagcccgccgcccccctcctctctgctcccggtcccctcccccagccccctctccccggaggcccggtctggggaacaaaagagccggcgagcgctttaagcggccggacattcccggctgcgcggcggacgcgccccctgcgctttgaactgtggctggagcggccggcgccgtcccgggctgcagccgggtatcccctccccgcgggccagccggggacctggggggctga

SEQ ID NO: 203926 - DNA, 175 bp, Homo sapiens
  chr15:65714831-65715006
  hyper
ctgcggacacgacaggagcactcccaacacacacacacacacacacacacacacacacacacacgactccagactctgcgaaccaaaggcacacacccactgcggacaagcacgccccacaaacgccccccggccgcagctcgcagacccccgcgcaggcatcgcgggcacctgg

SEQ ID NO: 203927 - DNA, 198 bp, Homo sapiens
  chr15:66084910-66085108
  hyper
agaatccagttcgcgccaactgacctgtttcttccttcctccccggcactctgggagtcctgagattgccttgctcggttcgtctcagacttgctagatctgagcagctgctgctcctccaccaagggtgctcacattctccaggaaactcccttaagggttagcaaccgccgagtaggtttcggtcccaagatagaa

SEQ ID NO: 203928 - DNA, 65 bp, Homo sapiens
  chr15:66586477-66586542
  hyper
ctgcgaagctgacatcgcctgctttgcagccacaggtttcctgacctgcccgcactgttgcccca

SEQ ID NO: 203929 - DNA, 165 bp, Homo sapiens
  chr15:66678950-66679115
  hyper
ggtggaggccgcgcggcacctggcctggagagctcaccacacagcgacacagacttcttctcagctgggtccacctgcttgcctcggggcgacagagggcgccacggcgtccgcgacggaccccgcccccaggcagtgcgccgcgctcccgtgacgtatttccgc

SEQ ID NO: 203930 - DNA, 507 bp, Homo sapiens
  chr15:66992920-66993427
  hyper
ctgctgttcgcttgcgatttgtgcatttaacgtgcactatctccagggaccttcgtggttctgtgaagcacgaagggcaagcatcctcatccgcggtttcaaacaagaaactgaggctaggaccgctactttaatttggccaaagtagtaggggatgggtgtgaggaagtgtctcagtccgatctttctttcggggagcaacggccactctcagagagcgcagcgcgaacagtacctggttccaggtaaagctcagcaaagggttctgaatcctccttgcaaatgccacccttcccccagcgcacacagactctgggcacggccgggggttcgcaccgccgcgcactccccaggctagctccacgcgtggtcactctccagggagacccgcccgccggcgccccgcggtcaccgcgggggaatggcgcccagccccgggccaatgagagtagcggaatttctttcattcagcgcggggccaggctcctgcccggaaaggggcggggc

SEQ ID NO: 203931 - DNA, 289 bp, Homo sapiens
  chr15:66994945-66995234
  hyper
tccaagtgcatctagcgcctgggacctgagacggcgttggcctttcgtgcatgcaaatccagggatttaggttttgtttgggatttccttttctttctttccttttttttttctttttgcagggagtaagaagggagctgggggtatcaacaagcctgcctttcggatcctgcgggaaaagcccatgtagttaagcgctttggtttaaaaaaaaggcaaggtaaaggcagggctttccagacacatttaggggttcgcgcgagcgctttgtgctcatggaccagccgca

SEQ ID NO: 203932 - DNA, 758 bp, Homo sapiens
  chr15:66995267-66996025
  hyper
ctttctggcggcgcgccgcctgcagcccccctaaagcgcgggggctggagttgttgagcagccccgccgctgtggtccatgtagccgctggccgcgcgcggactgcggctcggcgtgcgcgtgttcccggccgtcccgcctcggcgagctccctcatgttgtcgccctgcggcgccccttcgacgacaggctgtgcgcggtctgcacggcgctccgcggcggagcttcatgtggggctgcgacccgcgcagccggcgcctcgctgagggaacggacccccggtaaccggagaccgcctcccccccacccctggcgccaaaggatatcgtatgttcaggtccaaacgctcggggctggtgcggcgactttggcgaagtcgtgtggtccccgaccgggaggaaggcggcagcggcggcggcggtggcggcgacgaggatgggagcttgggcagccgagctgagccggccccgcgggcaagagagggcggaggctgcggccgctccgaagtccgcccggtagccccgcggcggccccgggacgcagtgggacagcgaggcgcccagggcgcggggaggcgccggcgcgcagggggccccccgaggcccatgtcggagccaggggccggcgctgggagctccctgctggacgtggcggagccgggaggcccgggctggctgcccgagagtgactgcgagacggtgacctgctgtctcttttcggagcgggacgccgccggcgcgccccgggacgccagcgac

SEQ ID NO: 203933 - DNA, 125 bp, Homo sapiens
  chr15:67547184-67547309
  hyper
cgtgcttggaaaccgcgcctccgcggaggtagccgttccctgacctagccatggcacagaacactgaaaaccacgaccctgtcggatccatcttaatccaggtgggaaacgggcttcccccggcc

SEQ ID NO: 203934 - DNA, 165 bp, Homo sapiens
  chr15:68112674-68112839
  hyper
acggaggcagcgcgggctcggccagtgggaggagaagcgcgcaaggcgcagctcgcatccagagtccggctttccgacccctggtgccaccgggaagcggataaaagagagagaatcttcaataatgggggtcaggaaggccaagggcagcgacgcctgcccgct

SEQ ID NO: 203935 - DNA, 60 bp, Homo sapiens
  chr15:68125163-68125223
  hyper
attagcctcagaatggcaagcgagcccagcaaacggcttgcaggcatcattacatggagt

SEQ ID NO: 203936 - DNA, 224 bp, Homo sapiens
  chr15:68126244-68126468
  hyper
cctgagcgaggaacaagccattcggacccgaccgatgtaaatacagccgcccgtccgcccgccttcctcccgggctccccggccttgcccgccccctcccgggcgtccctgtccagggccccggcttggtttccaagtgtaaataccgcctcgcgcctcaaatccccctaccccgtgtgaactctagggcatcggacctcaaggggttaactggacagacgggg

SEQ ID NO: 203937 - DNA, 50 bp, Homo sapiens
  chr15:68126855-68126905
  hyper
gtacccgtgactttcgtttttaataataataataataataataaaagatg

SEQ ID NO: 203938 - DNA, 363 bp, Homo sapiens
  chr15:68127129-68127492
  hyper
cttgggcccggaatggaggaggggcattacgtcacggtccttagcgcagcggtcccgggctctttcctcaagagctcgaaggcgccgagggttcatccatgcccatttccacgcctgccacaccggggaagttacctccggggcgctcacagacagggcgccctgccgggaatcccaggttcaaccagaattgtccctttagatggcgcgggcaccgccggcctggcctggcctgggagcgctgcggcagggcggaggtctcagggagtaaggtggtctccgccgggcaggcttggaaaggaaggcgggacttggagagctcggtcacagacggcctcccgtctgccccgccgctacccgaaa

SEQ ID NO: 203939 - DNA, 92 bp, Homo sapiens
  chr15:68128502-68128594
  hyper
gcaaatgctccttcccacccttccttcccaactccccccaaagtggaaaagctcctaggcagctggggccctccggaagggacgccccatct

SEQ ID NO: 203940 - DNA, 51 bp, Homo sapiens
  chr15:68260709-68260760
  hyper
gagaggaagaagtgggggctgagctgatccgagcatttcagatcttaatac

SEQ ID NO: 203941 - DNA, 40 bp, Homo sapiens
  chr15:68521278-68521318
  hyper
cattcattctctggacggcagcttccgcccttccccgctg

SEQ ID NO: 203942 - DNA, 57 bp, Homo sapiens
  chr15:68723466-68723523
  hyper
ggagccggggagcccggtgtgggacggccggggccagggtaccctagggcggagagc

SEQ ID NO: 203943 - DNA, 304 bp, Homo sapiens
  chr15:69114202-69114506
  hyper
atagacctagtgaaagagaacggcgcacggtttattctaatcgtccacctgagtcattcggttcggtttgggttgccaaggaggctctaactggagccctttctcctggtttttcggcgtggttgccttgggtatttttgaatcacattaagttttaagagaccttaaagccccgatgcccactgggttaccgacttacggcactaagttggctgcctgtggctgttaataaaccacggggattgttgtcaacgaggacagatacatccttacctttccacacgactgtattttagtgtttgtt

SEQ ID NO: 203944 - DNA, 42 bp, Homo sapiens
  chr15:69136422-69136464
  hyper
agctcgctggggcgcctcagcgactctcacatctgttcagca

SEQ ID NO: 203945 - DNA, 79 bp, Homo sapiens
  chr15:69366730-69366809
  hyper
tcggggcaggaaagcaggctcctgtctctccaggatccagcctcccgatcaccgcgctagtcctcgccctgcctgggct

SEQ ID NO: 203946 - DNA, 360 bp, Homo sapiens
  chr15:69453540-69453900
  hyper
gtgtaaaccttgtctctggaggcagatcatcggggtcttgggggttctttgagcgggcgtgggcgtccgtttcgcattgctgggatgaagaagcagtgtgtccgggttctggggagaggggtctgttcatcggtgtctccgggtgagagagcgatgtatccgttccgctggggccggggccgccttggggggttgttgggggctgagggtgtgtagcggcgaccagcgtctggccggggtttctgctttgcccggagcggggcggtaacttggcatggtctccagtcttttgggggcgacggggcgagttagctggcccccgggcagtctctcggggtgggcgcggctccgcaggcgctg

SEQ ID NO: 203947 - DNA, 68 bp, Homo sapiens
  chr15:69591245-69591313
  hyper
ccggcatgggtaggcgcggcgacccgcagggccaggtgcagggcccgcgagtccggggtcgccgcagc

SEQ ID NO: 203948 - DNA, 76 bp, Homo sapiens
  chr15:70391279-70391355
  hyper
agcctgtaggtgtctcggtcgctagcctggacactccgagggacgcggacgctcccccgctcgctcgccccggccc

SEQ ID NO: 203949 - DNA, 80 bp, Homo sapiens
  chr15:71054803-71054883
  hyper
cgccattcttgtaacgtgacaaattatctaaatcacaacatctgcggtcaggctgtttctcaagatttctgttctcctgc

SEQ ID NO: 203950 - DNA, 298 bp, Homo sapiens
  chr15:71054929-71055227
  hyper
cgctgcaggtcagcaccgaaagagccccgcacggatcccgccccacaggtgcgatttacacaacccacatcaccaccacccctcccaacttcaccacctctagggtcaccaccctgtggggttttgtctttacgactaagccgattccctctgcctcgctggggaatcaaacttcccagtgacaacgacagcggccagcacgggacgtccaccagcccggcagggcttgacgctgtctcagacccggggaaggtccggagtccgggcacggtggcgcggggtgcgcagccctgcccac

SEQ ID NO: 203951 - DNA, 366 bp, Homo sapiens
  chr15:71055270-71055636
  hyper
caacacggccgagcgggcgtgggcagcagggcgagcgccgggagaggagagcgacgagggggggtcaacggaaagagcggagtaggggtgccaatcgaggaactttggatttaggaggagggggccagaaccgccccactgaggtttcttccagaagttcggaggcttgggagaaaggggtggggaagagacccgtagaggctcgggtgcggcggcggggaggatccccggggtctctgggctgacggagtctccggcctcagggaggagtcgccagggccgccgaagccgaactggcagaggaaaagcagaggaaggcggcgcgcgaactcgccagcaaaggagggctgcgctgctcccggagcg

SEQ ID NO: 203952 - DNA, 42 bp, Homo sapiens
  chr15:71055815-71055857
  hyper
gcagcggctgcagcagaggcggcgcgggctgtaccagcccca

SEQ ID NO: 203953 - DNA, 263 bp, Homo sapiens
  chr15:71055980-71056243
  hyper
cgggaatggggcgggacttcccttttaaactgagtaacacccttcctctcccagctggaggaaaagtttgggaactttagcccgggaaggggcggaggaggtgggcggccagaggcgtggagatgcgcgcaggccgggctccaggccaccggcgcccgcccacccggagcttaagatctagagagagcacggggtcccgcctttgccacctctcatcttcccggactcccctcctctttccacccacgcgctctttaccaagt

SEQ ID NO: 203954 - DNA, 119 bp, Homo sapiens
  chr15:71056447-71056566
  hyper
aagaccttgaaagacgttatagtaagttacagtacaagttacgtgctcgtttatttgttgagtgaagaatccgccgtattggaagcaaagggacggaatgggggcggggagggaggaga

SEQ ID NO: 203955 - DNA, 195 bp, Homo sapiens
  chr15:71184274-71184469
  hyper
ctcgcgtgtccaggcggcctgcttggtctccctcctctcccctcttaggtgccggggcgggcacccggtgcagggtgggcacggcgcctgccaccagcctcaggcgctgggagaagcgcaggttcttctggataaccgaagagacgtcaaaacaggctggggcaaagtggtcagagcagatgaccgagcggtcat

SEQ ID NO: 203956 - DNA, 470 bp, Homo sapiens
  chr15:71184795-71185265
  hyper
ttgatatcttcctcctcctcctccctgcgctgctccccaggagccagtggacacaagcagagggatacaaatttcgcgcgggcagcgctgaggtgggccgtaaagaggaacggaccggaagtggtggtggttatagcaaccagtgtggccagcctcttccccagcttatcctcctcccaatactcccgctctgtttttatgaggctgggaaaatagaacgaggaagtggtgacgcactgggctctcacgaatacaactagaagctgcaacgactgtgtggctctatcgattcgggagaggtccagaccggaaatggtcgtttccatggtaaccctgagcaggttgcctgggagatgacctctttcgggtctctttgaatctccgctgtagcgtcacctggaaggcagatctaacagagaacctggactgtctcctatcatgattcccgggaaatatcgctctgtttctgg

SEQ ID NO: 203957 - DNA, 141 bp, Homo sapiens
  chr15:71185295-71185436
  hyper
ctactttctctttcttcccactggtactctttctgactggcgtctttgtcctaggagatgggctgtattattaggaccggcaccgctgggtctactcaagctattgtctgaccagggtttgaggttcgtgggctggaccaa

SEQ ID NO: 203958 - DNA, 284 bp, Homo sapiens
  chr15:71407571-71407855
  hyper
ccccctcccgccctcgtggcctctgtctagaccgtactccctcctactgggtgatgtctcttcccctgggacccagggaccatcccgttgttgacctccggggtcaggggtgcggatgggggccggcccttcccgcggtcgccgccagggggcggcaggagcggctccagatgacagcgggaggccgcaagaggggagggaggaaggaccgagggagcgcggatcccgctctcggatcgcaaactctgagccagagctctccgcgcgcgcctgaaccgctggcc

SEQ ID NO: 203959 - DNA, 205 bp, Homo sapiens
  chr15:72072623-72072828
  hyper
atttcctgctctgaattttaaaattagatattaaagctgtcatatggtttcctcacaaaagtcaacaaagtccaaacaaaaatagtttgccgttttactttcatccattgaaaaaggaaattgtgcctcttgcagcctaggcaaaggacatttagtactatcgattctttccaccctcacgatgacttgcggttctctctgtaga

SEQ ID NO: 203960 - DNA, 141 bp, Homo sapiens
  chr15:72409488-72409629
  hyper
gacaccacatctaccgggagtaagaacaccatgacagcggctatctgaaagccgtgatggctagggttagtgctagtcggcttggtgatgagcgagctgggaggggttctactaagaagagtagggcgaggggcacatggg

SEQ ID NO: 203961 - DNA, 309 bp, Homo sapiens
  chr15:72522193-72522502
  hyper
cccgcggcctccgcgttccacaatcaggacgcatttgttaaaaaatgtgccggataattaaaaaaaaaaaaaagaaagaaaaaagaaaggaaaagaaagaaacgtgccggagaggcgcggaacgggcgagggccaggaggccccagcaaagcctgcagaggtttatcccgcccgttacgaggcccaaggccatcgcccggtgaagcggggtgggccctgggcgcggccgctacgtgcagcccggccgcggcgagatggagcgtggtccctggcggccacccggcaagggccggtcgagctctcgggccc

SEQ ID NO: 203962 - DNA, 1074 bp, Homo sapiens
  chr15:72522952-72524026
  hyper
aggggaaccagaacgcagtttcaatgagttacacagaaagcattagaatcaggggacacgcacagcttgaagaggagggggtggaaggaccagacttaaggaggaagaggggaaaacgagcacggaacaggcggcgcggagaaaggggaagcaagggtggaatcaatcacgagggaccgagagaaggcaggcgaggatggaggcgcattgaggattggggcaggaggaagaggatgggaccagaatgagggggtagggctggggcgggaaaggagccggcggacccgcctgatctggaaggaacggcgctggggacttctgaagagcaggccccaggcgtgaggagccgttctcctctctctgagctccactgcatcccagacgccctggatcctgcgccgccctgcctgcgtgcccggggccggccggcgcgccgggattccgcactagccgggcgactggcccttggtggggactgatggcgtagcctcctgcaccgctcacctccggcgctgaccgactcgggctacgctgcaaagacgaagagatccggagccacggcgcgtgcagctgctgtgcaaggagccactgcctcagcctcaaggttatcccgctgcgggccgccgcaatccctccgccgccccgccctctgcccaatcccggctccgggcgacccgggccccgccccctgcgtccccgcgggcgcagtcaccttcaggaggaagcgcggcggcggcggcggaacgcgcgggcaggttgccctttcggtgggactaaattctgcggcggaaggacacagattcagagtcacattttaagaaacctgatgaccaatggggacgcggcggggcaacggggcccgcccccggagcgactttcctcccagacccccgggcgccgggccacctgttgccgccaagttgggctgccagatggggtgtcttttcttggctctcggcccaggccaccccagctgtcccggcctacctgggcagggcccagatttatgggttccggggcagcattctcccggccccgccctgccactccccactcctccgggtgtctgctctg

SEQ ID NO: 203963 - DNA, 123 bp, Homo sapiens
  chr15:72612098-72612221
  hyper
gggtacggcgggaccggggtttagcccgctcatgccgacgccgctgtccgcggtgctgaaacccaggcgcgggccggggccagcgggctgcgctgaccctcccggcgccgcggccatgtcccc

SEQ ID NO: 203964 - DNA, 100 bp, Homo sapiens
  chr15:72612906-72613006
  hyper
attcctcttctctattcccactatcgagccagtccctcggagccaatcccaccccgccccatcacacatctctgtcttcggtgtctttaaccactttctt

SEQ ID NO: 203965 - DNA, 101 bp, Homo sapiens
  chr15:72978671-72978772
  hyper
tcctggagagaggcggagctgggtgccgagcgtctcagggtgggcggggcgacacggtcccctttttactgtcccgggaactggtcgcctggggcaagtct

SEQ ID NO: 203966 - DNA, 268 bp, Homo sapiens
  chr15:73344037-73344305
  hyper
cttgggagccggaggtcagcggctgcgcggccggccccctcccacgggagccgcgccagggcccagcaagagtcgggcgggatcgctattgtttttggcgagcacataaatccccgggccgacccactgcgcacccaggtttcctcccggaggcctttcggtttcctctgaggccctatatagaggctccaggcccggactgtgcagaggtgcgcgcccacgccggcctcccggaccagcctgagctcggagcgcctctcgccctcag

SEQ ID NO: 203967 - DNA, 326 bp, Homo sapiens
  chr15:73661061-73661387
  hyper
tgtctcgccgcccgggctttgtggctggccacccgcgagctcgcctcgcctcctctgccccggcccgtccggcccgtcccggggctcccgccgcaaccgagcggagcccagcgacccgccgggcttacatcagcggccgcctcccccgaagcgccctccggcagcgctcgggctcccgcgccccggaatattcatgaagccgccgcagctcgcgggttgccataggagcggctccagcagccgggcctgcctacctgggcttcttaaaggggcagcggcgcacgggccgggggctggaaaggggcggggggcgggcctggcaaggg

SEQ ID NO: 203968 - DNA, 981 bp, Homo sapiens
  chr15:73976465-73977446
  hyper
gtgggggatgggcagcgccctgctccgggagccgagggttttccccgccagggtcaggcctgggggcggggcggggcgggggcgggggccaggccgtgtgctctgcccagcgggctggctcaggcctcggtcagcagccgccaccgcggggccaatccggcctcagggacgcaccggagccgcctttccgggcctcaggcggattctccggcgcggcccgccccgcccctcggactccccgggccgcccccggcccccattcgggccgggcctcgctgcggcggcgactgagccaggctgggccgcgtccctgagtcccagagtcggcgcggcgcggtgagtgctggcgtggcgcgggcggcgcggggtggggcggcctttgtctgctgcgggccgggcctggatcccgcggaggtccgcacgttcccgctcagggctgcaggagctgagcagggcgccttccctccgggctcctgctcccctgccctcccccaggtccgggcggcccccctcgcacaggagtcccgggaaccgcgggcgcccctcctgccctgggctgtggggcccgcggagagctgggggctcccggatcctaccccgcccccctttcctcgggttgagaggggcccgggcgccgtcggacctgcagaccccggaagctgcggaccgggccgggtgggtgaatgcgcttttgcaggccccgggtctggagcgggcatgggggcagatctgtcccgtgttgaagcttaacgaagccaccggccggcgctgggaggttagcggggtctcgggtcctgcagaggaaaacgcccagctccgggaggggagcggcggggagggaaggcgagtggttaggcgtgtccactctgcagggcccagcagggcgaaggtgtgggcgactggtgcacttccacaggcagccgtgggcagcatgaggggtcagattccgggaaggacaggtagagacggctggcaggggcc

SEQ ID NO: 203969 - DNA, 191 bp, Homo sapiens
  chr15:74045464-74045655
  hyper
gtcggggctgggcctcccttcaccgcctcgccctgccctgccccgccgggctcccggggcctgggcccgctccccaagcgccgcggcgccgcgccgcccgcgccccggccgcccccggcccgccccgccgccccccgccggactggccgcccgggcgggcgctggctcccttaaaggccgcccggctcgct

SEQ ID NO: 203970 - DNA, 278 bp, Homo sapiens
  chr15:74219934-74220212
  hyper
gaccgccgctactcgcacagtctgtacagcgagggcacccccggcttcgagcaggcctaccctgaccccggtcccgaggcggcgcaggcccatggcggagacccacgcctgggctggtacccgccctacgccaacccgccgcccgaggcgtacgggccgccgcgcgcgctggagccgccctacctgccggtgcgcagctccgacacgcccccgccgggtggggagcggaacggcgcgcagcagggccgcctcagcgtgggcagcgtgtaccggcccaa

SEQ ID NO: 203971 - DNA, 190 bp, Homo sapiens
  chr15:74268224-74268414
  hyper
acaactgagcttaacgtttataaccacaggatggatggctgcttgccaggggatccaaccgtctgctcagagccccaccctccacattcggggaggagagaggaaccgaaggttgatcaccaatggccagtgatgtaattgatcatgcctacataatgaaatcgccataaaaacccgtaacgactgagtt

SEQ ID NO: 203972 - DNA, 117 bp, Homo sapiens
  chr15:74420324-74420441
  hyper
ccctcccctcccccacccctacttccacacacctgattagttgtctgtttctttaatgatcaaagacgtgggcggcggcgggatgaggtcttggttcccggctccacagccctccct

SEQ ID NO: 203973 - DNA, 135 bp, Homo sapiens
  chr15:74428235-74428370
  hyper
tccttctgtcctcccacccccaccccacttctggccagttggagtccagcccggtgcctggggcgcctttcagctccgcgctcagattttcctgttttcgttgttttcaaagacagcgacatttcgggtctggtg

SEQ ID NO: 203974 - DNA, 76 bp, Homo sapiens
  chr15:74685108-74685184
  hyper
cgcattctccccacccccggctggcagctttctccttcctgatgctcagaccaaaagccttcgaggcatcccagac

SEQ ID NO: 203975 - DNA, 453 bp, Homo sapiens
  chr15:75075813-75076266
  hyper
ggaaccgaggctcaaagggagaagttgctaccccaggcctctagtggagttaggctggctgtcctttcatccccagctatacagggctggatggctgtgggtggaaggaaaccaggcaggcaccttcacccactggggacacaggcccccagcccggccccagagggaccttgttggttgagcacgtgcttccctgcagagggctggagggagtgaaagggcttccggctccagctgtggctgggtcagctagcaggagatgtggggaatgtgtggtgtatggccatctgtgtggtgtggcaggaaggtccggtcctggccccggctctgagttgaaacaacctggtggtcagtcctgacccagcactcgccacacctatggcccagctggcacaggagcagccaagttcaggatataaatggggtcacatgggaaccgtggaagctctgtct

SEQ ID NO: 203976 - DNA, 200 bp, Homo sapiens
  chr15:75230421-75230621
  hyper
agcgggcgggggccggacaggctcacagcgggcggagcacgtaggcccgcccactgcgactctggcgcgtgggcgggaggagccaccgcgcggccggcggcggcgggggctacggcggcgcgctgaggacaaactgttagcctcgcgtcccgccttgtctctggtcaggtgacgtgcagctgccatcctgtaagtaggaa

SEQ ID NO: 203977 - DNA, 97 bp, Homo sapiens
  chr15:75248843-75248940
  hyper
ggggccggagcccgggccgcctccctcggccccgcaccccgctggcgcctcttcggagcgcaccttacggaagttctccatgcgccgtcgtcgccgg

SEQ ID NO: 203978 - DNA, 89 bp, Homo sapiens
  chr15:75251811-75251900
  hyper
gtgagggaggaaggatggggtgctgtgaattagggtaatgtggcaggcctggaggaagctggagtgggagagagcgggcagcgagcggg

SEQ ID NO: 203979 - DNA, 45 bp, Homo sapiens
  chr15:75470851-75470896
  hyper
cagccgttggggtggaggggttggggggaggtgcaggggcgggca

SEQ ID NO: 203980 - DNA, 91 bp, Homo sapiens
  chr15:75495098-75495189
  hyper
tgtgggccatgcacgtacgtgcaggcacgggtttgcatgcgtggcggcggcctgtgtgtcagcctgctggatgcacgtgcgtctcggcgcc

SEQ ID NO: 203981 - DNA, 392 bp, Homo sapiens
  chr15:75640583-75640975
  hyper
ggcaggcccggttctcgctgcggccaagcggccgattcggccgctcccgccgctcccccgcgccaggccgagcttcgctctttccctcggtggtgagcggccagatccaggcgggtcctaagtgtggggggaggggggcgcagggaggggcggccacgcgatcctaagaccctttcagatggtgggagagcctggagaaagagacagcgtgtgcggagggggtgctccctcagatggggggtcaggaagtctccctcaagtgtctgggacagagggacagcaggggccaaggcggagatgagatccgtgagtgaggggagccgggaagaagtaaggctgcagccgcggccccgcaaggattgggactttcgtctaaacgcggtggaagccca

SEQ ID NO: 203982 - DNA, 200 bp, Homo sapiens
  chr15:75939285-75939485
  hyper
ccacttgcctcttctcgaagattctctacctgaccacttctctccttgctgccgctggctagcacagaacatccagtccccgctgctgtactaagcaacacggaaccgggtggcacctagacttgttccctgtcgctgcagatgtagagtagtgtctttccctccttccaagctagtcgcccagggcagggtcgccctgt

SEQ ID NO: 203983 - DNA, 134 bp, Homo sapiens
  chr15:76629531-76629665
  hyper
ttttgcgcaaaggcaattaggtttgatttagggatgtgggtttttttttttttggttgttgtttgtttgcctttcggtttttcaaagctaggaagctttctttcgcttgctctgggatatttaaactaagaaat

SEQ ID NO: 203984 - DNA, 367 bp, Homo sapiens
  chr15:76632803-76633170
  hyper
ggtcatccgcgtctggttccagaacaagcgctgcaaggacaagaagaaatccattctcatgaagcagctgcagcagcagcagcacagcgacaagacggtgagcagccgctgggccggaggctcgagtcgggtgggggctgcgcttccgccgcggtatctgcgtgcccttttctgggcgagccctgggagatccagggagaactgggcgctccagatggtgtatgtctgtaccttcacagcaaggcttcccttggatttgaggcttcctattttgtctgggatcggggtttctccttgtcccagtggcagccccgcgttgcgggttccgggcgctgcgcggagcccaaggctgcatggcagtgtgcag

SEQ ID NO: 203985 - DNA, 138 bp, Homo sapiens
  chr15:76633206-76633344
  hyper
cggcagctgcagaaaggtgggagtgcaggtcttgcctttcctcaccgggcggttggcttccagcaccgaggctgacctatcgtggcaagtttgcggcccccgcagatccccagtggagaaagagggctcttccgatgc

SEQ ID NO: 203986 - DNA, 97 bp, Homo sapiens
  chr15:76634854-76634951
  hyper
gccggcggaggccagttcaggggtcaggctggcgtcggctgccggggctccgcgtgctgcgggcggggcgggcccggtggggattgggcgcggccga

SEQ ID NO: 203987 - DNA, 81 bp, Homo sapiens
  chr15:76638236-76638317
  hyper
gagctcaggaaggccggttccccgttgggaaagagcgtgtttaagttaaggcgtggtttgagagtagctaaccagagatca

SEQ ID NO: 203988 - DNA, 107 bp, Homo sapiens
  chr15:76639126-76639233
  hyper
cccgagccgcgcaggctcccggctgggtggggcctgggtttgcttcttacgcctcctcctctccgggacgagggggcaatgagaccgttcaattaaatgtttaattg

SEQ ID NO: 203989 - DNA, 101 bp, Homo sapiens
  chr15:79237308-79237409
  hyper
cagcgtggcccacatcgcagcgctggcggcttggctcttgcgctcagggtccgcggaggtggcggcccagagcgtcaactgggagcgcggggggggagcgg

SEQ ID NO: 203990 - DNA, 60 bp, Homo sapiens
  chr15:79383268-79383328
  hyper
cccctccccagacacacacacacgcacacgcacacgcacacactcaaaccctgccctccc

SEQ ID NO: 203991 - DNA, 110 bp, Homo sapiens
  chr15:79603182-79603292
  hyper
ggtggacctgggtcgacctggggggatgctcagccctgcgggtccgggagcgcgcagaacagcggggagggcttctccctcttctgggtaggggcgcgctaggtggagcc

SEQ ID NO: 203992 - DNA, 75 bp, Homo sapiens
  chr15:79723976-79724051
  hyper
ttgcaaaccactgcagagtccgaagccccgagtgctccctgggaagaggagagccgaggacactcttcgcccctg

SEQ ID NO: 203993 - DNA, 85 bp, Homo sapiens
  chr15:79725539-79725624
  hyper
agcgataatttccttgggctaccgaatccatcagagtagtcatttgtcccctcgccggcggtgcggggagcgtaacatttgagta

SEQ ID NO: 203994 - DNA, 1247 bp, Homo sapiens
  chr15:80215297-80216544
  hyper
tgtacttgcaagcctcgaacccccaactccaactgacctcccctctgccagagcaagaccacgagtacccgccgagagcggacctggctggctacacaaagccaggcgcccgaccagagggatcctccgggacgtcctccgccaccggggcgtccccgcccagccccgcccggcgcccggcgctcaccagctctcctccccctcctcctagcctgacagacgctccaggtcgtctagcaagccgccctcccccgccgccagcaagaaggtggcgtctcgcagctcctcgttattcgtccgcctcgggtccatccggccccgccgcccgactttgcgctgagacccaaggggaagccccgaggggaccccgcgccgtaggagggagtggaggagccggcgaaccgcgatggagccggggcccagcacagcgcgagcggctcctcggctgttcgtgctgcttccccagcttcttcaccggcacctgcagcttccgcacctcctggtccgcgttcacgttagagttaacgtcctccatcccggccccgctgcctccgccgcccgcggccctctcgctctcgcagcaacaagggaagagccggaggaaagaggcgtccacgccgctcactccagccgaggcccccgcatatagcagggccaggccccgtcgccagggttcccccagcgcgggtcccgaagcaccgctggccacagatgaaccgcctcctcagcgcaggtccgggattcggggaggcagcgccaatatccggtctctgcagccatcttccctccgtccctccgcccaccgagggtcggccctgtaggtgacctcagagcgtcggggatgggcgtggccccgtcgggcgctaagaagacctagcgcagagaggaccgccgagctcccgacggggcggggccaggtgtgtgaggggcggggattggacccggaggggcgtgtctggactgccggcggaagtggaacgcggcctgacctgcgacggaaagccactgcaagcccggaggcgaacagaaggcattccgcgagccgggctgagttggtgaacacggtcctcgttcaccccgcctattggtctgggcgtgtggggtattctccacccacttatacggcgtgtgggaccgacgggcccgtcctgcccggctccggtccggatctcgagtaggcgctcaatgggattcggggagacgtagtttactttgttcagcaaatatttaaccgatgcctattttaa

SEQ ID NO: 203995 - DNA, 55 bp, Homo sapiens
  chr15:80285825-80285880
  hyper
tattggggcttctgccgttgctgggcttggcagactatcacgtaggaaaatgtcc

SEQ ID NO: 203996 - DNA, 35 bp, Homo sapiens
  chr15:80351965-80352000
  hyper
tggctctcctccgcggtcgcgtcataggccgaaca

SEQ ID NO: 203997 - DNA, 146 bp, Homo sapiens
  chr15:80352850-80352996
  hyper
ctacacagttgggacgctatgatttaccttcacatctcggaagttgtaaccagttgtgaggaagttaggaccttggggttacctaaagataatttatattaagttgttgggccataaaaactgggcagaattggccacgcgcggtg

SEQ ID NO: 203998 - DNA, 265 bp, Homo sapiens
  chr15:80988126-80988391
  hyper
gctcggctgcatgttcgtgcgctgcgcgccctccagccgctacacgctgctcttctcgcacggcaacgccgtggacctgggccagatgtgcagcttctacattggcctcggctcccgcatcaactgcaacatcttctcctacgactactcgggatacggcgtcagctcgggcaagccctccgagaagaacctctacgccgacatcgacgccgcgtggcaggcgctgcgcacccggtgagcctgccggggtcgccaggcctgactt

SEQ ID NO: 203999 - DNA, 57 bp, Homo sapiens
  chr15:81071770-81071827
  hyper
gcggcgcggggagccagcggggctgagcgcggccagggtctgaacccagatttccca

SEQ ID NO: 204000 - DNA, 263 bp, Homo sapiens
  chr15:81071867-81072130
  hyper
cggcgcctggcggtcagcgaccagacgtccggggccgctgcgctcctggcccgcgaggcgtgacactgtctcggctacagacccagaggtaagagggcctggctgggggcgtcagggatgagctgacggcccatgccacggaagagaggtaagaagtgggggcccgcgcctccacccggcacagggtaaacgttacccgcctcagtttctgtttgtctgtccaccctgtgctgtgcagtctacctctatctgtctgtttgtcc

SEQ ID NO: 204001 - DNA, 301 bp, Homo sapiens
  chr15:81072789-81073090
  hyper
gaggagcgctgtgcgccctgggtcctcagccgcagacactctctgcgacagccgctgttccccaagggtcggacgctacggcagtcccaggagttccgccagctgccgggtttgaggtcctgagtccttctccaagcagccaacgctacccacaggtgagagctccctttaaaaactaatcttctgatgtgtgagccagtgcctggctgcagccccataccagggacggtgagccggggagcgcgtctctccatccctgcggtctggaaagtgatccagggcgcgcccgagggcggggagc

SEQ ID NO: 204002 - DNA, 207 bp, Homo sapiens
  chr15:81294107-81294314
  hyper
cctgagctgcctcccgcgctcctccccgaggaaaggattttgatttcaaagaaaggaaggaaggaaggacaactcccagcttccccgtcccgccctccccgctccgagggccgcgccaggccatgcccaagaaggcggcggcggcggcgaaccagcagaagggactttcctggcagcccggcgacgaggagcgcggacagtgagttt

SEQ ID NO: 204003 - DNA, 445 bp, Homo sapiens
  chr15:82337283-82337728
  hyper
gaagacacggggaaggggctcggggaaggcagctgaagtcgcgatgcctcagcgctggtcgactgggggtagggggtggggtgtgagtcccgggacccattgttcctcctctgggctccattccgctttgcagaaatccagaatcctcctcccatcctatgctcactcctcctccttcctcctcccaaaggactgatcaaaggccccctcccccaagcatcttacatttaaattgtctttctggaggtgggctggttggggggcgttaggggagaaggcagtgattttagcagaagaaagtgcatcccgccagggcagcggcgcggctccgggagacagcctgcctgcactttctttgtctggggcgccggcccatcgcgcggctcttcctctctccccaaggcaccccacgccgcggatcccgatactgaacacgccttcccct

SEQ ID NO: 204004 - DNA, 51 bp, Homo sapiens
  chr15:82338056-82338107
  hyper
tgcgcgccgcgcccccgccggccctcggctcggcggcgagaagctgcggcc

SEQ ID NO: 204005 - DNA, 214 bp, Homo sapiens
  chr15:82339664-82339878
  hyper
aggaaggaggatttgaggggcgggccggggcggtgcgcgctggtcctctccgcgcgcatccccctccgccgcccactagggcggacgccccttcgggccccgcgcgctctgctgtcctttgttccgggagccgccgggctcgccgcgccctttgcgtcccgctgcggatcgttccgcagagcggctgggcccgcggttcatagagtcgcccaag

SEQ ID NO: 204006 - DNA, 86 bp, Homo sapiens
  chr15:83377915-83378001
  hyper
tacatccagggcccgccttcctgaagaggccccaggctcaagctcaagttcgctgactcagacccctcccccacatttttgggaag

SEQ ID NO: 204007 - DNA, 125 bp, Homo sapiens
  chr15:83378087-83378212
  hyper
ctcgaaactgagctggcccatcccccgccagcccctatctgcccccctccgcgtcctaggccggcccctggagccggggtgccagcgctgcccgcgctgggccggggctccaggccgcaggaggg

SEQ ID NO: 204008 - DNA, 46 bp, Homo sapiens
  chr15:83379042-83379088
  hyper
gatacctaaggacgctccctttcccgccccacctttcctacaaaat

SEQ ID NO: 204009 - DNA, 217 bp, Homo sapiens
  chr15:83654751-83654968
  hyper
gttttcgactgcccagccaccaggcaggctgaaagtgcatggagggcatcatccacctttagacagctacttgcccacacctcatcgagctctgggcgttgtgccagcatttgaagaagcgatctgttgcaaagcgatccacacggagagccttagttatcgcgagacttgacaggcaccctcaactttagcccgccggaagcggaagtcaggtggt

SEQ ID NO: 204010 - DNA, 126 bp, Homo sapiens
  chr15:83875522-83875648
  hyper
ggggcaccgggaatcgcgctcagggaaaactcaacaagtctagaaggcaaagagatggatgaatgactgccaagaggctcccgctggcctctggatgaccactaccactttccaggatttactgcc

SEQ ID NO: 204011 - DNA, 57 bp, Homo sapiens
  chr15:83951724-83951781
  hyper
tctgggccgctttaaatgccctggccttcagaggactgaggcgagcacagccataaa

SEQ ID NO: 204012 - DNA, 227 bp, Homo sapiens
  chr15:83952822-83953049
  hyper
atcagctgtttcacaaattctgaggtaaaagaaaaaaaaaaaaagaaggggtcgacccccacaggtggaaacagcaagtcctaacgtcctgggctgaagcctggggtgcgggcggcagagagtggcgtgtagggtacccgccgagtgccgccgccgatttccacaggctggcccgccggcacctccgacgcgcccgcagatccggcgcggagaccgtttgccagctc

SEQ ID NO: 204013 - DNA, 96 bp, Homo sapiens
  chr15:84115617-84115713
  hyper
gcagattgcacccagagcaccgcgtggagagagaagaaagcccgccacccacagaccgcttcctcctaccacaggtcccccatcgagttgcatttg

SEQ ID NO: 204014 - DNA, 139 bp, Homo sapiens
  chr15:84116949-84117088
  hyper
agagctgacagcctgcaggggagacacggagacagacacgtaaacaaacagtgctagacacacctccacgcacagaggatgacaaataacacagtgggggcgtcagggagagcttcccggaggaggagacatgtcattt

SEQ ID NO: 204015 - DNA, 148 bp, Homo sapiens
  chr15:85200368-85200516
  hyper
ctgggccctcctgacattggagcaggggcccggctcacctggatttggggtgcggggcggctgaggctcacgcccagagccttctttagcaggaggattccgagcagatcatgactcagctgcagtcgctggtccctcagggaggtgt

SEQ ID NO: 204016 - DNA, 56 bp, Homo sapiens; identical to SEQ ID NO: 126306
  chr15:85923617-85923673
  hyper

SEQ ID NO: 204017 - DNA, 107 bp, Homo sapiens
  chr15:88798457-88798564
  hyper
cagatgagggtggcaaaggggtgtctcggaaatgcccaaaatggggctggagagggcgggctgcaggaggggaagggaagaggtaggcgtccatgacggcctccaca

SEQ ID NO: 204018 - DNA, 223 bp, Homo sapiens
  chr15:89010954-89011177
  hyper
gctgtgagaaacgcggggtcgcggttcctgcggtcctggacttggccccagacagccgggtaacaaatgactgccccctcgagcccaccgccacctccaggactatgctcctactcgtgtcccttgagccacccgggccccagtgaccgttaggccgtggccctcaccgagcttttcttcccagcagggtcgtggccagaacgccggccgggaccatctgcac

SEQ ID NO: 204019 - DNA, 268 bp, Homo sapiens
  chr15:89438062-89438330
  hyper
cacccagggctctgccctccaccctccctacccttctggcctcgctgtccctggggcaagaaccccggtgagcgaggtctggaacccataggcatcagttgcctttgccccaggcgcccagagccggccagctgcggtccagaggcgcaggtccgccagccgcctcgcaggttgccctcagcccctcccaggactcccggggcccccggagcatccaacagatacccaggggcagggcctggggcgccgcggacggcactggaggcag

SEQ ID NO: 204020 - DNA, 250 bp, Homo sapiens
  chr15:89438421-89438671
  hyper
ccgctcgggctctgctccctcacggtgggcacgagggtccggcgcccgcatccccgcgccgctccctccccacttgtgccccgggcgcccctcgcccgcgatcacagcccatctcagcccgggcctccgcagtgcccggcccacgcctcctgccccttccccggaccctgcccgggaggtgtggggacccgcagggcacccaaagcggtaagggaggaacccggcccgcacacagccccagaagcccagc

SEQ ID NO: 204021 - DNA, 107 bp, Homo sapiens
  chr15:89438672-89438779
  hyper
acccctaagccacgtaccgtccccaggcagctcctcgacggctagagctctcgggggccgcgagctgtcccggtccaaggcagcagtctgatttcggggaaattaaa

SEQ ID NO: 204022 - DNA, 122 bp, Homo sapiens
  chr15:89438863-89438985
  hyper
caagggctgggctcgaagggaggagctgctgcaggcttgagcggtctccagactcgctgggaaccaccgcaaagagggtgtgcaagagttgaggccctcacgtcttgggaaaggagagtagg

SEQ ID NO: 204023 - DNA, 124 bp, Homo sapiens
  chr15:89902214-89902338
  hyper
ctcaggtctggaatccggcgggatgggggactgggcgacggcattgtgagggctcggcggaggcgccagggggcgctagctggctcctcgcagccgatccaggccgcggcggttccacgaggtc

SEQ ID NO: 204024 - DNA, 191 bp, Homo sapiens
  chr15:89905554-89905745
  hyper
gggaaaagctgggaggcaagcggggcgtggggaggaaaggccaaggcacacggctgggcgcccctcacagccttcctccgccgcctccattccgcactggtcggggtgaaggggggggcggggggagccgcgctgacgtcactgcgggccgtgcccgcccgagaaggcggcgctgggagccgctcagagcc

SEQ ID NO: 204025 - DNA, 53 bp, Homo sapiens
  chr15:89921886-89921939
  hyper
aggcacaaactcggaagccgcggtacggcaagagcctaagcaaagaatccttt

SEQ ID NO: 204026 - DNA, 54 bp, Homo sapiens
  chr15:89942572-89942626
  hyper
aaggccccatcaacctagcccgggcccacgaccccaaatgaaacatctttcact

SEQ ID NO: 204027 - DNA, 154 bp, Homo sapiens
  chr15:89949942-89950096
  hyper
atcataattattttatctataatttattctaaccccaaggttccaagaaaatctgtaatgaacgttaatatctacagcctcctggtcaatctgcatcgggcgagagagccgtcgggttcttcgcagtgggtgacttcaggtccctgtgccttgt

SEQ ID NO: 204028 - DNA, 84 bp, Homo sapiens
  chr15:89956216-89956300
  hyper
acaccccccgcccccgacctactgacccctcttcccccctgacatgaatagtgggactcacagcctccccagcctctccaacta

SEQ ID NO: 204029 - DNA, 66 bp, Homo sapiens
  chr15:89959772-89959838
  hyper
aggcgctggggggcgccgtgaagtcaggatgactgggaagtgggggcttggagagggcgcagtgag

SEQ ID NO: 204030 - DNA, 46 bp, Homo sapiens
  chr15:89962759-89962805
  hyper
ctctggctctgaggcgagatgggagctgtcctcccagtggtgctga

SEQ ID NO: 204031 - DNA, 242 bp, Homo sapiens
  chr15:90455967-90456209
  hyper
aggcctacccctggtgggcggcggggtcccaggcccctggcagccggacgctctgcaccgccttgttccggagcgcgccgtcgtggtagatgcggctcattctcccgaccgcccgggcaccccggcacagagccggcgcactgggctgggggcgcggcgcgggaagtgctgcaggacgcgcggggacccgcgattcccagccggcggatccgggaatggcgcggcccggccctcaggcgttc

SEQ ID NO: 204032 - DNA, 68 bp, Homo sapiens
  chr15:90628227-90628295
  hyper
ctcacctgatgaggtcttggttcccatccagcttcccccggtgctccaggccacgtgtccaggcaaag

SEQ ID NO: 204033 - DNA, 243 bp, Homo sapiens
  chr15:90631580-90631823
  hyper
ccagcctcacctcgtcggtgttgtacatgcccatgcccacgccgcctgcggggaagttgtacacttcccactccttgacaccactgccatcttttggggtgaagaccattttgaaagtgccggcccggtctgccacaaagtctgtggccttgtactgcagagacaagaggatggctaggcgaggagctccagtcggggggtgcccaggtcagtggatcccctctccaccctggcctacctggt

SEQ ID NO: 204034 - DNA, 81 bp, Homo sapiens
  chr15:90634777-90634858
  hyper
gcactaccttctccttgatgaactgccagataatacgggtcatctcatcaccatccatctccaccacgggcttcgccacct

SEQ ID NO: 204035 - DNA, 217 bp, Homo sapiens
  chr15:90792593-90792810
  hyper
agtcccatgatacaccggaagaatctggcgtcgaggccggccagctccaaagggcaaacgctgtctcccccacccaaggtagcctcggcccgcgcccaagtgggtgtggctgcgggaaagccccgcccccaggacgcttctccaatgggaactgccctcgtgtccatggcaacggcggcggccacgggcttgctagaggaagcgctgccccggcagc

SEQ ID NO: 204036 - DNA, 72 bp, Homo sapiens
  chr15:91414358-91414430
  hyper
ccgtccctgggcacttaacccggtcaggctcaaattcgtcgcccaggagtggggaagcgggggacggagagg

SEQ ID NO: 204037 - DNA, 164 bp, Homo sapiens
  chr15:91475572-91475736
  hyper
tcaatgaggtgcacgccccccacgtttccttcccagtccccaccacccaggtgccgcagccggcgctccgcggccgacgcgcccaccgatggggtggttgatgtagggggtcccctcggggtccttccgccgctgctgccggtgcttgcgagccgcgaagtcgg

SEQ ID NO: 204038 - DNA, 38 bp, Homo sapiens
  chr15:91643799-91643837
  hyper
tgcgcttctttgaaagcggcctccccaagggctgtttt

SEQ ID NO: 204039 - DNA, 123 bp, Homo sapiens
  chr15:92459207-92459330
  hyper
tcttgcccccctcaggtgagcgtcctgaccaccctggagcgtaggttcaacctgcagagcgctgacgtgggtgtgatcgctagcagcttcgagatcgggaacctggcgctcatcctcttcgtg

SEQ ID NO: 204040 - DNA, 36 bp, Homo sapiens
  chr15:93198354-93198390
  hyper
atgtaccaggaaaatccagacgagcacaccccggcc

SEQ ID NO: 204041 - DNA, 221 bp, Homo sapiens
  chr15:93199039-93199260
  hyper
caccgccgccgccaccaccaacacgttgcaaggagtcattcgacgggccgcggccccacgtgggcggggcaggccacccggcctgggtcccggctgcgctccgctcgcccgcgaccccaattcctcgggacttgagaccccgtggtgaagcagcaactgccacgatgacacttgggctggccctgtgttacacgtttcacgtgttttatttatttcattta

SEQ ID NO: 204042 - DNA, 178 bp, Homo sapiens
  chr15:93615723-93615901
  hyper
tggctccacccctgggcacccggcaggtttgcaaactgctgggcgaggagctgaagaaagtgtccccagcaccgagggcgtgcctccccttctccccctcttcccgagcccctaggaggcacgttcccagccaccccctttctcggaaaaagggaagggagtgaggcaccccggcccc

SEQ ID NO: 204043 - DNA, 87 bp, Homo sapiens
  chr15:93616753-93616840
  hyper
agtagaaaaactgtccttggaggcaaatcccagccctactttccaaccagactgccgaccccaagcttccaccgacgccccctggct

SEQ ID NO: 204044 - DNA, 236 bp, Homo sapiens
  chr15:96596585-96596821
  hyper
agaagcagtaaatccattgtcgttaaacagcggggagccgctggcgctggcagcctgcccaccggcgacggtgaaccgggctggcaccgagcagggagccgggcctgccagcctgtccgcctcgcgagaggaggcccgggctcgccctctctgccctccagatgactctttgcattcttgtcaaatatatttagaacaagaggtgtccacttaaagagaaacgtttgttaatcact

SEQ ID NO: 204045 - DNA, 130 bp, Homo sapiens
  chr15:96864824-96864954
  hyper
gccctgccagcctttactccttggccacttgggttcgcagtacccagccaagggccccgggcgggtttccatcgctgggggtggcctggtacccccaaagctgagttcccgcctaggagaggacgctgac

SEQ ID NO: 204046 - DNA, 650 bp, Homo sapiens
  chr15:96873518-96874168
  hyper
gttgtgtgtgcgcgctgcgctagtctccccgccggggcggaaacctcgggtgcgggatgtggggagagcagaggcagcgctcgcagggccagcacgggcccatccccctctcggcggcggcggcggcggcggcgcggccaccccgtccccgcccccccaacccccggtcccccgcgtgccccgcgccgcgccggcgacgccgctcgcgctaggaccgggctgcgcccgcggccgccatggcggggccgccgcagtccggccaatgacggcgagggggcggcgcgcgcgcgcctggccaggccaaccccggctgctgccttataaggcgcgccgtcgccatggcaacgtgcgctaagttgcagcagtcgtgtcaaagttcactatatagagagctcagtgagctgatcgcggagaagccacttctgccagccccggcgcctataaatcgcattccctcccgcgcccccctttttagcatatttgatcactttgattctctgttcttttctctccgcggtgtgtgtgtgcgtgcgcgcgtgtgtgttttcttcttctcctcctcctctccccgagttgcctcctttctccgggtgccgtactgccttttttcccctctttcattctttctctccgtctttttctcccccctc

SEQ ID NO: 204047 - DNA, 199 bp, Homo sapiens
  chr15:96876621-96876820
  hyper
cttacaggccctgcccaggctccgctagtgccggccgcctgctccctgcctctcccggcttcctctctctttagccggcctctctctctccgccctctccctccgtctctttctccgagcacactgattagacagacgccagacctccgctctctgcttgtctctcactgggggggttccccgccgggctggggctggg

SEQ ID NO: 204048 - DNA, 84 bp, Homo sapiens
  chr15:96884341-96884425
  hyper
ctgcactcctgggatgtgcattaagcggcgacaggcggggggggcgagggcgggggcggggggcggtcagggggagctcgagcg

SEQ ID NO: 204049 - DNA, 164 bp, Homo sapiens
  chr15:96884499-96884663
  hyper
cgcgagcgccgggctgccaggctcggcagggccgggtaatagaaaacacattggttaccaaaaagaaaaaaaggagggcggggggcgctaaaggccattccgtctgcaggcagaaaacccttttttaaactcttgctggcaagtgagtccggtcctcggttctt

SEQ ID NO: 204050 - DNA, 248 bp, Homo sapiens
  chr15:96897605-96897853
  hyper
agcgagctccgcgagtcctggcgagagccgagggctccccgggttcaaagggccgcagccccgagggaacgccctccttgctgtgccccggggggcagaagcggactgctgggcggtgggaccggcctgggccacggtaggaaccgcgaaacctccggcttccctaaatagagctggtctcgggggagggcgccggggagttcggagcccggagggacatttttgccaagaccgagcggaagccgagc

SEQ ID NO: 204051 - DNA, 133 bp, Homo sapiens
  chr15:96903477-96903610
  hyper
ccaggctggggcagcgagggcgtgggggtctcctagaccggcccgggtgacggcggtaggggaccagcaacttccattttccgaccccgagaagggaaactcaacggagggggccggtcgagactcctcctcc

SEQ ID NO: 204052 - DNA, 303 bp, Homo sapiens
  chr15:96960826-96961129
  hyper
ctcccttttaaattatttcctgcccagttatttttcccccaattaatccagaatagttttctcatctgctccagatgcacgcaaactgcagagctgaaatgaactgaactaagagcggaattgaaatacaccaggggtttccctgcaggaattgttccaacgaggtatccacgggtttcaagatccgttgaaatgcttcaggtgtggtttgcattctcaccgaccctcgggccagttccctcgcccccaaccgccgttatttgttccccccacctacttcaatagttgcgcctcacccttcct

SEQ ID NO: 204053 - DNA, 119 bp, Homo sapiens
  chr15:97491101-97491220
  hyper
tggagatttctttaatttagcgaagactgcttcccgggctccgcctggcccgcgccggcccgcgtcctcggtggtctgggcgccccggctgagccgctagcgggtcactcgggcggctc

SEQ ID NO: 204054 - DNA, 64 bp, Homo sapiens
  chr15:97491238-97491302
  hyper
cgcccgcgccgcccgcctccccgcgctgctgcccggctctcgggctctcgcttttttttttttt

SEQ ID NO: 204055 - DNA, 255 bp, Homo sapiens
  chr15:98503622-98503877
  hyper
acagatactgtttcccactgtctgtccacatgggcgcaccgcctcactattggccagggctccaggactgtgcctggcctcagccagtaaacggcctgtgcacgtgcacgccggagcctcccgattggccaacactccctgatcacgcacggccttcctgcgcccacccacgcgtgggagcgccaatgaaatgactcagtgaccatctacaacaaatcagcaagaagcagggctcgcagctgaccaatggccgcc

SEQ ID NO: 204056 - DNA, 51 bp, Homo sapiens
  chr15:98503946-98503997
  hyper
cgagccggtgccccatcgggtaccgcacggctgccgcggcggccttaccct

SEQ ID NO: 204057 - DNA, 294 bp, Homo sapiens
  chr15:98504228-98504522
  hyper
gtccgagccggtggccctgcgcgcgctgcgcctggaggcccaggggcgcgccaccgccgcctggggcccgagcacctgcccccgcgcctcggccagcaccgcggccctggctgtcttctcggaggtggagtacctgaacgtgcgcctcagcctgcgggagcccccggccggtaagcgcaggcgagcgcctggggttcccccgccaggctgcggggccggggaggggctgggaggccgcgcaccctcgggatgcccacctggcaggtgagatcagggcgggcttccgggggtggg

SEQ ID NO: 204058 - DNA, 74 bp, Homo sapiens
  chr15:99091044-99091118
  hyper
gcaggctcgtgctctggaggcggggtggggccgggattctgcagctgtaaccaactcccccgctgggggcatgg

SEQ ID NO: 204059 - DNA, 236 bp, Homo sapiens
  chr15:99091372-99091608
  hyper
actccgcataaactcccgttccagcccaaatcagaggcggtcgcagcagccgttcctcgtctccatcagcatccgcgttgccatttccccgtcctgagctgttgctcatatcaaatgtcactcggggatgactaagagccgatgttgatgaggagccttcagcgttacggtaaaggagctcgtgcaaacttagaccccagtcatctgacggtcacgtgggcgggcgtcgcggccca

SEQ ID NO: 204060 - DNA, 41 bp, Homo sapiens
  chr15:99091663-99091704
  hyper
ggcaggcgttacataaacccggcgagctcacaccgtgcggc

SEQ ID NO: 204061 - DNA, 409 bp, Homo sapiens
  chr15:99191317-99191726
  hyper
tttcaatgaacctctcccagccccgcactccccgcccacccctcccctctcctgcccacccctcccctgcctagcctttccctggctacccacccctgccccgccgagaccggaccggcggcgggggcattgtttttggagtcgggcgggaggggagggcgcgtgcggggtggccggcgcagtgcggtgggggcgggagcgggtgggcacgcgcgcgtgtctctgtgtgcgcgcgggaggcggtggggcgggagatgggggcggcgcctcgcagtctcgcgccccacgcccgggctccgctccgcacgtcttggggaaccgggctccggttttttgcgcgcgccggcctgggccgggccctcggcgcgccgctgctgcggcggtggccgctcgagtgtgcgagcgggcg

SEQ ID NO: 204062 - DNA, 63 bp, Homo sapiens
  chr15:99191748-99191811
  hyper
cgcgcgcgcgcgagcccccagtgtgtggcagcggcggcggcggcgcggcgaggctggggctct

SEQ ID NO: 204063 - DNA, 120 bp, Homo sapiens
  chr15:99192612-99192732
  hyper
ccgcccgccccgtccgcgcacccggagggccccggcggcgccgccttcggagtattgtttccttcgcccttgtttttggagggggagcgaagactgagtttgagacttgtttcctttcat

SEQ ID NO: 204064 - DNA, 110 bp, Homo sapiens
  chr15:99192792-99192902
  hyper
tcatcccaaataaaaggaatgaagtctggctccggaggagggtccccgacctcgctgtgggggctcctgtttctctccgccgcgctctcgctctggccgacgagtggaga

SEQ ID NO: 204065 - DNA, 265 bp, Homo sapiens
  chr15:99192941-99193206
  hyper
cttttcctccgaggggctgcgccctgtttgcgaaacccgagttgccaccgtcgcagctgtcgggcccccgggctcgggagcggcggggtggggcgcagggcggctctgccgggagggaggctgcagcggacccgggacccgggctcgttcgtctggagccccgcgggccctggctccgcgcatccccgcgcgggaagggcttttctctttctccgtcctgacagcccagccgtgtttcccggctaggcgcgaggactcggtaggg

SEQ ID NO: 204066 - DNA, 247 bp, Homo sapiens
  chr15:99193667-99193914
  hyper
gcttgtctcttccggggagcgccactgggtccccagttcagagggctctgggatggtctcccagtttctcccgggccgggggatggaggggtactagggccgcatccgagtgtgcgttggtgggtgtgtggtcggagccgacgtgcattccgacacacgtgctcgcagcgcggggtgtagtcgccgcctcacggggacacctagacgcccgtccctggcgagaggtgtcgtacgctgtggtttcagc

SEQ ID NO: 204067 - DNA, 166 bp, Homo sapiens
  chr15:99194186-99194352
  hyper
ttttattcttctgaaaaagttgaaagtgtggcttactggtacattcaagatggtagggtaatttgaacacgattaaaagtttaaatgtcgcagaactgggactgggaacggtgagggcgtgttggtgagtaatggttgccgagggtatgcaggtggtgccgattaa

SEQ ID NO: 204068 - DNA, 42 bp, Homo sapiens
  chr15:100273862-100273904
  hyper
gggccctggcttgttttcgcgtctgttcggagtaataaggca

SEQ ID NO: 204069 - DNA, 51 bp, Homo sapiens
  chr15:100273946-100273997
  hyper
cgcagctttctcgcccgtaaagaggcctttgaccccacttgtgggtaatga

SEQ ID NO: 204070 - DNA, 97 bp, Homo sapiens
  chr15:100881161-100881258
  hyper
cgccccacccccaccctccacggcgaccactctgcgtcgcaacagaccggacgggccgacccggaggtggcgcgggcagtaccaggccgccggcggc

SEQ ID NO: 204071 - DNA, 474 bp, Homo sapiens
  chr15:100882092-100882566
  hyper
gccgtcacacatggtacccgggaccggcagcccccccggaccgtggcggcgaagcaggagcgcgctaggcggcggcgccagccggagtgaagccctccagcctttggaaaaagtaattagcgctgcggacaaacccaacgtggtaaaccccaagccccgccttcccctcggaaggcgggaggggattgggccctcgctttcctccgccccgcctcctccttccctactggttgggatgggtcgaaaccacagtgcgtagttaggttgtcagcgctttcttacacgtggtttctgggcagtggcggggacacggcaccaggtggcgcgcgggagccgaccggagccgtgggaccctggaagagctggaggatgcggggctggtcttcagagcttgtcctcattttggaactctctcagcctgctgcccagtttcccgggaaggtagggcggaaatcgccccggccaagcggtttc

SEQ ID NO: 204072 - DNA, 319 bp, Homo sapiens
  chr15:101835610-101835929
  hyper
ctagggtgtgtttcggagtctggaggacccctgattccagacgttggtgtttaaaagttaaggcgaatgtggaaacacccgaggggaactttctcatgcattagcgcacctcgaggtgggaggggaagcggtgactgtcctccctccaccagccgtcgcgggaacccgtggggttcagtgaagggtccagcagttcaggtgcccgccccgggcctgggccttggctccgggctacagtgtgagatcccgggctaggtggcccgcctggggcaggtcgccgggacaaccccaccgccccgcaagtccagcccggcctcgg

SEQ ID NO: 204073 - DNA, 66 bp, Homo sapiens
  chr16:103517-103583
  hyper
gaagcggtggcagcgttgtccctcctccacgatcagcccgttcccgcagccggggcagaacagcag

SEQ ID NO: 204074 - DNA, 83 bp, Homo sapiens
  chr16:475426-475509
  hyper
cgcgcccgaagctcgggacccccgctctggcgaaacgaggaatatgacatacagcaaaacaccccttcgcggccgctgcactg

SEQ ID NO: 204075 - DNA, 215 bp, Homo sapiens
  chr16:577464-577679
  hyper
gccctctgggagttgtagttccagctcctcctcgggccgccccactccctgataatcctggagcgcggcgcctcccggggaccgaggcctcgggcccggccgtctccagcagcgagggcaggagaagtggcccgggcggtcggcggactgggagggcgccacccgaggactacaactcccggcctgcctcgcgcaggcaccgccccgagcttccg

SEQ ID NO: 204076 - DNA, 37 bp, Homo sapiens
  chr16:619792-619829
  hyper
caggtgaggaaaccgagctgacgcggggctggcggcc

SEQ ID NO: 204077 - DNA, 50 bp, Homo sapiens
  chr16:717960-718010
  hyper
ggcgccaggaccctgcgctgtccgccgtggccggcgcgtccacacggtgg

SEQ ID NO: 204078 - DNA, 104 bp, Homo sapiens
  chr16:755704-755808
  hyper
ggagaggatcggccgccccaagcctcccaccggggaggctgaggctgtgcccagataaataaggccgctttgcagggaaccaggcgggcgcctcctcctcccct

SEQ ID NO: 204079 - DNA, 111 bp, Homo sapiens
  chr16:765207-765318
  hyper
gctcccgccgccgcccggacccgcgccccgccggggcagcggtggtgagagccccgactccccggacgccgcccgccgtgccatggggttcccggccgcggcgctgctctg

SEQ ID NO: 204080 - DNA, 243 bp, Homo sapiens
  chr16:1429037-1429280
  hyper
gctgcctcagccccgggcgttaggaaaccaccggccccgctgagtcaccgcgacacagcccggctctgccgtgacacagcacattcaaggcgccgcggtcccccggggtcagggacacgcgaggacaagctacagactgctcggaactcaggacagggcgggggagccgccgacgccagggaaattcccgtaccacgcgggctgagtgcaggcgggccaggccaggacgcaggggtcggccct

SEQ ID NO: 204081 - DNA, 401 bp, Homo sapiens
  chr16:1660482-1660883
  hyper
ccgcgccaagcccgccccagcctcgatgggactcgcgaggggccgcggggactcggcggcgccgggatcgtgggaggagacgggagggtcccgacgcccgccaccggtcacatcctcggccccaaaccccggcctggctcctaaggacctgggtcggccgccctagccctaaggccactcacctctgccaggccgctgagccgccgcgcgttgccgggacaacggcgcgccaggaacgcggaaatagccgaaggtgagcgaggcggccccgaggactcccgaagcgccccgagcggccggaaagagccgaaggcgatcgggcacgcacgtgcagctccgaggcccgagcgtcgggggccaggttattccgctctgcaagagagaagcgggacgagcttttt

SEQ ID NO: 204082 - DNA, 121 bp, Homo sapiens
  chr16:1663980-1664101
  hyper
ccccgtgcgggcaggcgagcccgcgcttctcccgtcccggggtggatccggcctcctctgtcctcctccagggccagctctgggggccggcgcgtggggcaggtgcgcggggcccgggagc

SEQ ID NO: 204083 - DNA, 65 bp, Homo sapiens
  chr16:1875917-1875982
  hyper
ggcggcaccaaatacgggggctggggcctcccttagaatggggtacgcacgccctgccgatgcac

SEQ ID NO: 204084 - DNA, 105 bp, Homo sapiens
  chr16:2040742-2040847
  hyper
agcagcctagcccactggggcgtccctgggagggccctgctgctccttccctccggcaggggaggtggcagttgggtgccgagctctgggttttgtccaggtggc

SEQ ID NO: 204085 - DNA, 96 bp, Homo sapiens
  chr16:2042503-2042599
  hyper
cgggacctcgcgccacgcggcgagcccaggcgaggcgccccaagcctcgggcccaccgacctttcctcctccgggcgaggccgccgtgggccaccg

SEQ ID NO: 204086 - DNA, 86 bp, Homo sapiens
  chr16:2042617-2042703
  hyper
cgcgccgcactgttcgcaggactctggtccttcctgtggttcgtgggcttctgcttcctcaccaatcagtggcagcgcacggcgcc

SEQ ID NO: 204087 - DNA, 158 bp, Homo sapiens
  chr16:2058558-2058716
  hyper
cctttgatgtaaacgtctacttaaagaaagaaaaggaaaaaaagaaagaacctacacctcaatactgctctgcatcacttctggggagaagaaagttagattcctggcagatgtcaccagccgaagccttctatgaacaaaccgggggaatttcacaa

SEQ ID NO: 204088 - DNA, 228 bp, Homo sapiens
  chr16:2301867-2302095
  hyper
ggctgccggtgttcgtgaccgcgagctctcggccgggcccagctactgcagtatcggcgctggaaaggcgatcaaagcacggaacccctcccgagggggccgtcagggaggccaggggctgcctggggtgagcccggcctcctgcccctttgggaacaggatcagagctgcaggtttagtcaccgaaatgggggtgggggcagcagaacccagcggtaagaacaggcc

SEQ ID NO: 204089 - DNA, 215 bp, Homo sapiens
  chr16:2732189-2732404
  hyper
tgtacagtgtagacgtttgctggcatggctcttcctttgaccagttcatgaactggagtcagggtgggggtgaaggctagggtcgaggtctgggtcaggcgctcgtgcaccgctcgtgggaggtcgaggctgatgtccgctgctccccatcagcgttagtgcccagatcaccccgtgctccgctcccgccggaagcgggcccagcctcctgcttt

SEQ ID NO: 204090 - DNA, 215 bp, Homo sapiens
  chr16:2732524-2732739
  hyper
agctgttgcggggcttgctgggatcatggcggagaatcactgcgagctcctgtcgccggcccggggcggcatcggggcggggctggggggcggcctgtgccgccgctgcagcgctgggctcggcgccctggcccagcgccctggcagcgtgtccaagtgggtccgactcaacgtcggcggcacctacttcctcaccactcggcagaccctgtgcc

SEQ ID NO: 204091 - DNA, 102 bp, Homo sapiens
  chr16:3078252-3078354
  hyper
cgatcaccacctgcatgtcgtcctgcgggaggccgtggtcggctcagcgccggtcccgccccttgccccgccccgcacacgggccccgcccctcacctgcca

SEQ ID NO: 204092 - DNA, 344 bp, Homo sapiens
  chr16:3078384-3078728
  hyper
ctggcggatggcgcgcagcagctcccgagacagggagtctcgctccagcgagacgcggttgagctgcagggacagctccagggccctaggcgggcaggagcagaagacgcgtttgagggcgctagggcctcagggagccggggtggcgggggacttctgtacccgggcgggaggagggctgcaaacacctagatcaaggaggtcagggggcccctgggtgggagtggggatcattataacccgtatcagaagaggaatcaggagcccaggagggcccagagggcgctggggcggtggtcaatggcttgaggcttacttgttcacggcctcgtcccggtctgaga

SEQ ID NO: 204093 - DNA, 146 bp, Homo sapiens
  chr16:3184680-3184826
  hyper
gcatcccttcgggcggagcagaagctccacttgtggctaggccatgtgccctctccgttcctcgggccagccttggcttcccctttttgtcgctcaagggccagggtcgcaaggaaatgtgaaaaaaaagcggagacaaaagagaa

SEQ ID NO: 204094 - DNA, 322 bp, Homo sapiens
  chr16:3200663-3200985
  hyper
tacagccgcagggccgcgtggcctaatggataaggcgtctgattccggatcagaagattgagggttcgagtcccttcgtggtcgttgccatgttaacgttttcttccagctccacttaaaatttcttcacctgggactgcaccctgggcgactacgacactcgaactgagtgcgccggtcgctctcccctcacccccgtaggaacactgggacctcgccctgcgcctccagtcgcgaagctaaggacccagggccagaatagcagcgagggcgacttagagaacgccggcagggccctggcggactgcggagcttgaagcca

SEQ ID NO: 204095 - DNA, 100 bp, Homo sapiens
  chr16:3208999-3209099
  hyper
tttttttttttctgaacaccatcattttctcgcggtgaagattgaggagcttcacggagtctcggccgcagggaacttggtctctccgtggcagctgcag

SEQ ID NO: 204096 - DNA, 226 bp, Homo sapiens
  chr16:3222239-3222465
  hyper
cctcagctacaagggacaaggatgctcctgaggctggcctggtcggcacttgcctcagcctcgagggagtcccgcgcccttctccttcccaaccccagaccagagaagctgtaccctctgcagcccgggtcgctcagctccacatgggctccgggtatggtggaggccggtggttgggttctgagtgatcgagtagtgtgcacggtctgggcgggccctggagagc

SEQ ID NO: 204097 - DNA, 48 bp, Homo sapiens
  chr16:3238043-3238091
  hyper
gaaaaaggaaaaaaaaaaaaaaaaaaagaaaaaagaaaaaaggaagcg

SEQ ID NO: 204098 - DNA, 549 bp, Homo sapiens
  chr16:3550753-3551302
  hyper
actcagaacctgtcacccagcgcgaaacgtccgcaaagcgtgtaaacagacgcccagaagctgggaagcttgcagccctcatagacgccggtatcgccacgccctctgccctcggcgtctcaggagcgctctctgccggcccgctctccccgtgcgtatgcacgtgccgccgcgtcttcgcttcgctttttgtttgtccctgaccgtgcgccgtccaagggtccattggttgccatagagatcgtcgagcgctgggcctgtgatcgctgaggggcgagcagttgcgaccctgggctcctggggacctgagcgttatgtctttccgcgacctccgcagtaaggcagccccgcgcccctgtgacctgcgggtcttccagagattcagggctcccgcccgccgggtcccctgtgtaggcgatccctgaggcttgcgctgccggaggctcctttcgggcctctgcgcctcagggaccgcctgacccgcggctgcaacccggccgagcgtcccaggcccttcttcggccatttctagcgaggatggaaagttct

SEQ ID NO: 204099 - DNA, 1164 bp, Homo sapiens
  chr16:3781398-3782562
  hyper
gcagggggtcggggtcgacgatggggggcagggtgttgatgacaggcccagcgtgcaggtggatcacgaagaagacctgcaggagaggaggggctttagtcccacacaagggacatggcacctccagtggtgagctcagggcaggcgcagccacccagcctgcagaataggcaggtggctgagcctgatggccctgatgccttgggatggaacaaaattggtgacacgttgcatgatgtcacccaactggtccacttggtttcctgggggccacttccctcccaccacagacctgcacacgggcccacgcccgccagctgcgagtctttccctcctcccggccagaggcacggctgcagcaccgcagcccacgcctacctccttgtgcttctccatggtggcatacagcttctgggacaggtcattggacacgttgggcatgctgggcttcttcttgttggcgcggctgatgctgcttttgttcttgttggttttcttgttgttcttcttcttggcattcttgctgtcgccctgactgccctgcaacaacacgcaaggctgtgagaccaggcaagtgcccctccacacttggcacggacgcccagctcccaggccgtgggcatcaggaagctcaggccaaagtaggtcaccaccaggcagaccccatacgtgaacggctacaggtggctgtaggtgctgcagccttcgggacagagcagggcctgtcctcggccaggctggtgtcattatcagctttatgccacgctgcctctaaaggggaaaagagacccagagtgcgagttcagaaattaacaaatgagggcagtgggggctgtttccactgtgccacaaccagatgcggaagattccacgtcacaactgtggtcagcagctgtctgccttgaggaaggctctacacacccgagaaagcatgagagcttccaggagacaggaaagctgctgatgggaaaagcagctgccccatcaagagcagggactctgaggcccctgcggggtccactcaaggcccacggagagcaggctggctccctgctggggccatcagtgctgcgcctgactggctgaaggtgggcttgctctcagcccacaggctcctcctctggaaagaacgcaggattaccactcacttacactttaacagag

SEQ ID NO: 204100 - DNA, 309 bp, Homo sapiens
  chr16:3931082-3931391
  hyper
acgccagcccgggcccgcccgtcccgctggggcggcgctgcgtgttcccagctcctcgcgtccccttccccagaccctcctaggtggcgtcggtcgggaacggtcggggcgaccccagcccaggccgcgccactagccttcgccgccggccagggaagtggaatggcctctgcaggttacagaccgcccttgggtcctgccgacgaggtgggcggatggggaaactgaggcggggggcgagcaactgctccaaagtggtcgaggcaggaagtggcagggccgggattcgggtcccgccctacctcgtga

SEQ ID NO: 204101 - DNA, 562 bp, Homo sapiens
  chr16:4165866-4166428
  hyper
cagccccgcgagccgcctgcgcacaaacaactccgctggcggcgcggagccctccatcctgcaggagccgcgctccgatgcgtcaaaggcggcgcgcggccggccccgggcccggaccccgacccggagcagcgagcttcggcgggcgcccccggctcgcgctccccggccgccccccgcgctccgggccggccctgcccgcggcggcgggcgctgggggtgggggcgccccgggctgcgagtgcgcggagcccgtcggcgcggcccgtctagtggggcctgcttccccccgagtgcgccgccgctcccgccgcggccgcagctgtcccgggaccgagcgcgtggaaccacggacgcgggcccctcgccgggcggcggtgcagacgctgccgcagagccgggctcccgcgacgccggccgggacgcccgcccgcccgcgcccacgccgggggccgcctccccgagctagagatgcggccgccgccgcgcccgccgccgtgtcccccgcggccgctgcctcatgtcggaagagctgccgccgccaccatctccggcccctgcc

SEQ ID NO: 204102 - DNA, 454 bp, Homo sapiens
  chr16:4166526-4166980
  hyper
ggacacgcgcacgggccgcgcgccgccccgccttggtgcgcgcgctgggctggggctgcggggcggggcggggcggggcggggcgcgcgctcggctccgccccccgccccgggcggcgccgcttctaggcggcgggctgtggccgctgtccgcgctccgggcgctgtgggcccgccctccctcggcgtcccagaggccgcgcgccgcccggggtcccgaccctgcggagagacctgaaggcgcctgccgtggaagaagccgctggccgcaacgtttgggaaatcaaaatgttgccttcccactcggcacgcctttgggataaatcgaagtttccaaccgttggatttccctcccgggaggctccccttgctctgtaagcaatgaatgcgggccccggggcactcggcctgccctggacctgctcacggggcgaccttcacgggcctagcctcca

SEQ ID NO: 204103 - DNA, 217 bp, Homo sapiens
  chr16:4233232-4233449
  hyper
tggagttttcattcgctaagggctgcccttcggttttcaattactggcggagagggcggttcgtttctggcggggaagggaggtgacattccggtaggagaatctcctaaaactcgcatttcctgtttgccctgggcgccggcctcaggtggaaacctcaccccgataactgagggcagcagtcggccttgggcgttcttccgtcacccaggtctcc

SEQ ID NO: 204104 - DNA, 204 bp, Homo sapiens
  chr16:4234087-4234291
  hyper
gagcggccgcgagatcggtccctgtccgcagggtcgggtagtggccccctcggggacagcgtgtgaggattcgggcgcgaaggacggggtcagattcagccaggtgcccactttccccacggtcacgaccctggtccagaactgccctgccccgggcctcagtttccccactaaggagaggaggcgtgccggggaaatctgagg

SEQ ID NO: 204105 - DNA, 69 bp, Homo sapiens
  chr16:4363851-4363920
  hyper
ttgctaacagatttaaactagcgtctcctgtaccttttttctacacacctcgaccccagggctgcagtt

SEQ ID NO: 204106 - DNA, 172 bp, Homo sapiens
  chr16:4364080-4364252
  hyper
ccctcctggaagcgctaggtcccgaaactggccttcccccggggcccatctcccggctaatgtttaacccggccacactccacattatccacactcaggagaccggggtgaggtgagggtggaggctgggggaggtcacctccaaatcgccaacttccgagcctttgctcca

SEQ ID NO: 204107 - DNA, 97 bp, Homo sapiens
  chr16:4465717-4465814
  hyper
ataacacggaaagcggaagagcagagctgacatcgtttccaaggcgcacccctcatcagtcctcctgccgtttcgggggtccgaagggtctcccggc

SEQ ID NO: 204108 - DNA, 907 bp, Homo sapiens
  chr16:4986646-4987553
  hyper
cctctgcgcaagagcgaccctgggacacgggggtgccctgtacccccagctcagctgcccgtgccctaggccctcaaggcaatgctccctgggctcccggagtcccctgtgttatgctccccctcggggaccccagccagtcccttcccacctggcggcgcttcccagcttcagggtggcctcggtcccgcgttcccgagagtcccgcactccgggttcagttcccggttcctggacccccgtaccccccattcctacactgcccgggaggtcttccaggtcctgtgcgcccacaggggcaagagcgtcccggagcggagctgtgggcgcctcctcacctccgggtctgcacagtggggctgtatttgcctttgtttctcttcctgaagagcgagttcatggtggcgctcggggtgcgggcggcggcggctggcgggccgggcgcgcaccgaggggcgggcgggagcgcaggtgagcgagcggcggcgcggggagcccggactgcggcgcggcagtggctccgggtccctactcgctgggggcggggcgcccgccggccactggctctgcgggccgctccccgagaaggtggtgcttaccttcccgaggaggggccaccgcgcgggcggggcttggacgcgggggtggggacactgggtcttggccggacgccgcccacccccagccgggggactccggaggccgggcaggcactggggcgcaaaggccgccggggcgagcgctcgcagccccaccctcctcgggcccggcgcgcctctggccgaggccttcacctggttctgcgctaccgcggaactcggcgctcctggtgctttggcggacacccagctgggccccgcaagacaggtgcggcagagacccgcacggattcatgtgccctagtagc

SEQ ID NO: 204109 - DNA, 681 bp, Homo sapiens
  chr16:5007929-5008610
  hyper
tgtaaacagtactgtcggccagacgcagggtccggggcgggtcggcccggactcagggtctgcttggaggcagagctagattagggcggggtcgtcctgtggcctaccattccccgaggctgagggccttggagggcggggccagtgaagggggaggggacttcctgaggtgtgaccaatctagagaaaggactgggctgagggcgtggtcaaacaagcgacatctaaaaataaggggcggggctagaaccagggggagttcgcctggggcggggccagagtggggcgggaccagttagggggcagggccaacctgggcggggccatggccggggacgtgggcgggaccaggtcaggggcggggccaggccaggatctccgctgtcccgggtcctggagctctctcggcccggcaggtttcgctcccgcccctccggccttccacagctgtcctggccgcagggtgttcaaggcgggacacaccaggctagagatccgcgatcgggccccgcctcaggtactgcgctccaggccaggcgggcgcgggtaagcgctcagctcccgagccaggcgggcttccagggcacttcccctaggctgcattcccaaaggctcccgagggcgagggtgagcaaagctgcggggacctgtgtgtgcatgcgtgtgcgattgcctctacgt

SEQ ID NO: 204110 - DNA, 91 bp, Homo sapiens
  chr16:6069594-6069685
  hyper
agaaggaaggagtgagccgagccgagcaccccacatctggaggggacagccagccgtgggccccgccccggcgtccggagcaggagaactc

SEQ ID NO: 204111 - DNA, 48 bp, Homo sapiens
  chr16:6070019-6070067
  hyper
tgcacccaccctgacctggtgggtcaggtccagaaggtctcatggagg

SEQ ID NO: 204112 - DNA, 185 bp, Homo sapiens
  chr16:6070269-6070454
  hyper
acctcgtccgtcctcctgggagcgagtcctaggtgccaggagcagcgggagcctgcctgcgcactttgattagtctccctggccggctgcaagcgtgcactcagcgcgcccccggaccgctgcctccgcccgcagggtgtgcaggaggaggcatcttagtgacccgggagggtgtttaggtgccc

SEQ ID NO: 204113 - DNA, 54 bp, Homo sapiens
  chr16:7354124-7354178
  hyper
ccccaggcggggagagccagggaggagggaccggcggggtgcggtggggggagg

SEQ ID NO: 204114 - DNA, 150 bp, Homo sapiens
  chr16:7354238-7354388
  hyper
gagagagagacagcgcgagccaccggtcattgacttagataaccagcaaaattaaaaaagaaaaaaaaaaattgtagcgcccaggcagagagcaacgtgattgcattcaagcgtccccactcgggctcggcgggcgccagagagacatga

SEQ ID NO: 204115 - DNA, 565 bp, Homo sapiens
  chr16:8767886-8768451
  hyper
acctctgactcccagcgccctgtttgtcttccggagcgctggggccaggcggaggaaagtagctgggagcaagaagggctggcagggccctgagcgccgagatggggagtgaggtggggagggcgggatgctccttcccttctccgcaaaggaaccccttctgattccgactctggagctccagagaccggatccgagacgcgggtggaggtggagttacactcgcctgcagccctgagggtgtaaatggcccattaagatccaggttaaatcaacctatggagctgccccccagagggtcagggtccccacaacttgacgggggtcctcagccgtctcctccccagtcccaggactccctcccagccctcgcggtccctctggtgggtcccgccccagcccccgtctcccccgcccccggaggctggactctgcccccgccccgcctgccacctccctcctgggggcggtggcccgtggcgggcgcacccattggctgtggcgaaagcgagggccggggctggcggcgctgattggccgggacgctcggcggagccagggagtc

SEQ ID NO: 204116 - DNA, 39 bp, Homo sapiens
  chr16:9053887-9053926
  hyper
tgttgattcaatagcgtctacaccgaccatctgagtatt

SEQ ID NO: 204117 - DNA, 214 bp, Homo sapiens
  chr16:9056293-9056507
  hyper
ttggaaaattactgccacatcggcagaaaaccgagttacctttcgagtcaggtttgattctgatgcaggcagccatgtgcggcagggctttcgcacggttgcaagcgcacacctggccggatgctggctgcaccacacactgccaagtacaaactccccgaaaaacaggtggattcggaaaccaacagcgcccgggtcagaactctgggccagt

SEQ ID NO: 204118 - DNA, 327 bp, Homo sapiens
  chr16:9186867-9187194
  hyper
accttgctgcattgccgattcagggaagggccgcctgcgtcagggtgtctgccctgcgttccaagtgtgttttctgctccccagcccagctgctaaccttgaataccttgcaacttgagaatcgcggcggtgctctagctagatccaccggaggcgattttgacacctccctccgccccccgggacagatggcaacgcctggggacgtttttggttggcttctcctagaaggggctgttgttgggcacccagtgtatagaggctgctgaaggtcctgcagtgcccaagataaccgccccggccccctctcagcgaagaattatcatg

SEQ ID NO: 204119 - DNA, 38 bp, Homo sapiens
  chr16:10480336-10480374
  hyper
tgctttcagaaattaacggataaatctccacctccacc

SEQ ID NO: 204120 - DNA, 772 bp, Homo sapiens
  chr16:10673913-10674685
  hyper
aagaagtcgctcctcgccgctcgggggcgcgacggagcagcggcgggggcctagaggggtacgcagcccaggaggacccgctggcccggcctggcgcaccagtcctgcccgcgaggcgagtctggggacgctgcccgggaatccctcacgcgacctggggatctccctggactccaagagccccgggtgtaagtccggcggggcgaggggaggcgccctgactcctccccaaacttttcccgcctgcttcggctcaaaaggcgtgggaagctgtcccgggatggcgaagtggaattctggggccggagcgagcgtggcgcagaccagaggtcggcggcatgggtggcacctcggccctcccgttactgtcaccaattccgggggctgctcccggtccagtaagtggaggggtcgcgtccctgctgcccgggcgtacacgatcccggggcccccccgatgtcgccccgcgccctgggtgcgcccacaactcacccggcgctggcggctgcgctggcagctggatcgacggactggctgggggtgcgaggcgaggccgccgggctgttttgaagctctgggctgggactgcgcgccctccctccaccctctaggcggcggggcccctccttccccgatcccgcctcccgggccgtgacgccaggagccgggagagccgagtgggaggggccgccggcgaaaggagggggccctggagggaaaggccgaggccgggagcgccctggcgcccccgcaccaccgttcccgcccgcct

SEQ ID NO: 204121 - DNA, 114 bp, Homo sapiens
  chr16:11035552-11035666
  hyper
gaggggaacagcagtcgagaccctactccaagtacgcatcaaagacgtcgagctccgagtcagcatcgtaaaggcccgagccggggtcggagagcacgccgaggtccacgagcg

SEQ ID NO: 204122 - DNA, 193 bp, Homo sapiens
  chr16:11762783-11762976
  hyper
taggggtccaggtgacgtccggcgcccgtctcgcgggtagggaaactgaggccgggccgcagcgttcggcgcccggttccgtgggcagcggctgcgcggcgtgggcatgcctagctcccctggtccccgtcccacaccccgcctccgtcgggccgattcgagctacctccccagctgccgtcccctctccagc

SEQ ID NO: 204123 - DNA, 88 bp, Homo sapiens
  chr16:12211191-12211279
  hyper
aaccgtggaaacaggcgtggtcaatacgtgcttcagtgcggacgaaccgtggaaacaggcgtggtcaatacgtgcttcaatgcggacg

SEQ ID NO: 204124 - DNA, 449 bp, Homo sapiens
  chr16:12897345-12897794
  hyper
aggaggctcctagaccagatcgctctctcggcctcgcctctcaactgcgcccctggaatccctaagagcaggctttgatgcagctatggcggctcccaggccccggtgcagccccggatggtgtccgactggcggagcgcacacctgaacaaaaggttcccccggcggaaggttccgcagccccagagtcccctccccgggtgaggggcgggcagtacctgcgggaaacgcggccagggtcctgcccctggctctgtggaaaacaccccccgcctctgcagccgacatggcgagcgagtttctggccttcacttagaacactgcgtgggtggaagccgcgcgacttcacacagaacaaccgctggacctgtcccgctttgggcgacgccctttgatctcggggcgggactggggcgggacggggaggggcccggtggctcggggcgcca

SEQ ID NO: 204125 - DNA, 379 bp, Homo sapiens
  chr16:14396710-14397089
  hyper
gggcttggaaattgacgaggcggtggagcgtccgcgtccccgcccccaccccggaaagcccgctcgggaaactgactcgctgcgtgaccccgatctcaatgccgcgcgcggagcaggccggccgcgcccgccgctccacgtgcgcccgagccccgctggcatgggcggcggcgcctgcgggggccgggccccggggatcccggactagccgggaaccaccgtccccagagagttaccgccgccccctaaagttgtcagctccctccccccgagaagcaggcagccctggcgcgttggctttagcttctgcaggacgggggcaaaaaaactaggttccggggtgcggagcggggtgtctgtgcccgagacaacaccaagt

SEQ ID NO: 204126 - DNA, 130 bp, Homo sapiens
  chr16:16043203-16043333
  hyper
cccaaagatcccaggcgcttccggaaggcgagccaacgctccccaggcccgtccgcgagcgggtgggcctaagccttggaggatctggggtgggggtggcgcggggtccaggcccggggcgccgagaggt

SEQ ID NO: 204127 - DNA, 103 bp, Homo sapiens
  chr16:16155950-16156053
  hyper
ttgtctcagaggaaaagatacaagccagagggcgctggtgatgaggtttggtctgtgccttgtgtcccgcttaggaggggatgggcagcgtgttctcacagct

SEQ ID NO: 204128 - DNA, 207 bp, Homo sapiens
  chr16:18812906-18813113
  hyper
ccgcccttcccgacggcccccgcgacgctcgctcctcattggacagaccgagcttacgcctcaaggaagccgggccaaccgaagctcagcgcatggcttgaaatcgaggtcaaaggagacagaggcagcgccgggccgagggggaggggacacggagtgcccaatcagcgcccagggactgcgcgacgccccgcccagcgctgtggg

SEQ ID NO: 204129 - DNA, 216 bp, Homo sapiens
  chr16:18995158-18995374
  hyper
ctgcttgtcgccaccgctggatggagccttgccggatctcccgggctctgcagcccctctgcggtccctgatgctcggctcctcgcgggggcgccccactccggcttctgtgatgtcagcgccggaacctggaatcccggctccgcgagggaaggccggggaggcggcggcggcggcggcggctggagagggtcctcggcagcctctgaggagcgc

SEQ ID NO: 204130 - DNA, 32 bp, Homo sapiens
  chr16:19179914-19179946
  hyper
aaagtggccgtggcggcgccatgcccgggccg

SEQ ID NO: 204131 - DNA, 142 bp, Homo sapiens
  chr16:19421882-19422024
  hyper
gaaagaatgaatgcagactacgggcggtgaatagaggtctcggatgccagcaggcgtcccaacccagcaggaactggctcaattctcagaagaaagcgatcggccccgaggcaggaaggccggctccggtgcagggagcgcc

SEQ ID NO: 204132 - DNA, 217 bp, Homo sapiens
  chr16:19422166-19422383
  hyper
ccctcgccggctcccagagaggctgggaagaactgggaggggtgtccccaatgcggggcgcccaagcgtggcagcacgggctgggagcggggagccagcggggtgcggcgccggagtgcggggagaaccaccaggcgccggaattggggagcacgtggagggggcagcggctccagccccagaccgccgcgctctgtcactttgcattaagaaagct

SEQ ID NO: 204133 - DNA, 182 bp, Homo sapiens
  chr16:20817451-20817633
  hyper
aaaataggcaggcactggctcaaggccacacagtcaaggccccagggttcgtccgcctcgggctcctgtcaccctcgggtagaaggtggcccaaggctgaagaccgaggtccagggaggcgcctttccaaccgtgccagagagggcaggtcgcagacgccggggctgcggggaatagaggcc

SEQ ID NO: 204134 - DNA, 216 bp, Homo sapiens
  chr16:21531391-21531607
  hyper
ccacgatggagaagacgccgcacgcggcccacaccaccagcgccagccccggcgagcctgcctccttgagcacgcccgtgggcgtcacgaagatgcccgagctcatgatggcgaccacgatgacggccacgcccttgagtagcgtgatgttcccctgcagggtcacgccctcgccctcgcctgccggcgccgcgccgtccgcgcgcttggcggcca

SEQ ID NO: 204135 - DNA, 84 bp, Homo sapiens
  chr16:21964475-21964559
  hyper
gctaggagaagaacgcaaaaagcagtgacgtacattattctctgcatatatttacttgggaaattgtgcgtctccctattctga

SEQ ID NO: 204136 - DNA, 59 bp, Homo sapiens
  chr16:23159923-23159982
  hyper
gggtgcagtgggggcgcggcggcgcgcgggctcaccttgaagtcgcggctgtgctgcgg

SEQ ID NO: 204137 - DNA, 114 bp, Homo sapiens
  chr16:23313275-23313389
  hyper
tgaacgggacaggtacacgcgtggggtgggatggagtgttcatatatgtggcttgtgatatgtactgaggggacgtggggtacactcggatgaggggtctgtggacatattcgt

SEQ ID NO: 204138 - DNA, 97 bp, Homo sapiens
  chr16:23766000-23766097
  hyper
agcgcccggggcccgcgaaggaggaggtggctcaggtgtcagggcgcaccgtgggaaccggccccgggggaggcgtggaaacgcggggcctgggact

SEQ ID NO: 204139 - DNA, 103 bp, Homo sapiens
  chr16:23766130-23766233
  hyper
cggagctgaaacagcccgttgttcgcagcctccctctgacccgccaccctgcacattgttttccattcgcccgggtcgcgggtgggaggagaggcacgccggg

SEQ ID NO: 204140 - DNA, 44 bp, Homo sapiens
  chr16:24354628-24354672
  hyper
acaagcagatgcccacgtgtatgtagttccgaattccctcagta

SEQ ID NO: 204141 - DNA, 165 bp, Homo sapiens
  chr16:25704644-25704809
  hyper
gactccagcgaaaggtcactttatttcagggcgaggggaggaggtgtcaccctgccctgcctcccgcgctcctcatccaaggaggtgctgtctgaatctgcccagctccaagcctgggaacccccagccctcctgcctgctgggtgtttccgaaaccaggctctt

SEQ ID NO: 204142 - DNA, 143 bp, Homo sapiens
  chr16:27121251-27121394
  hyper
agccgccccacccgccgctccccgctcccgccccgccgcgcccgctgcaaactttggcctctgcagccccggcatccgctggacggaagagagagagaggagctcctcccgtagctttctcccgaaaacgttttctcttccct

SEQ ID NO: 204143 - DNA, 54 bp, Homo sapiens
  chr16:27215267-27215321
  hyper
gttcttggcgtcgcgttggtgtaggcctagtgcgcctgcgcgggttttatactc

SEQ ID NO: 204144 - DNA, 258 bp, Homo sapiens
  chr16:27280121-27280379
  hyper
cccattggtggcctgcggcttattcgcccgtccgttgagtgacgcacttccggttctccgtttgcgccattgccctggtggttccgcctcgtgggttagatcccaaattacgcccgctctcgatccttaataatgggaaggggcttccacttgtcgccctccgcctcctgcacctcagtgacttccctgaccaaggaggaagaattggcgtgcagcctgggcttccctcaatggccaccattccgctggcacaatgta

SEQ ID NO: 204145 - DNA, 290 bp, Homo sapiens
  chr16:27413511-27413801
  hyper
gggtggcagccagcggcctcagacagacccactggcgtctctctgctgagtgaccgtaagctcggcgtctggccctctgcctgcctctccctgagtgtggctgacagccacgcagctgtgtctgtctgtctgcggcccgtgcatccctgctgcggccgcctggtaccttccttgccgtctctttcctctgtctgctgctctgtgggacacctgcctggaggcccagctgcccgtcatcagagtgacaggtcttatgacagcctgattggtgactcgggctgggtgtggat

SEQ ID NO: 204146 - DNA, 157 bp, Homo sapiens
  chr16:28304161-28304318
  hyper
gcggagacttcctcggtatttagaagacagcaagccccctacggcaccgcaaggactccccctcctcagtctgggcccccgccccaagacctagaacgcagtgcccccaggccgggattgcgagaaccccctcccaagatccggtcattacaactcc

SEQ ID NO: 204147 - DNA, 213 bp, Homo sapiens
  chr16:28874907-28875120
  hyper
ccctttgtcccgaatttcctccgggaggacgctctggtgggatccaagcacttcccccgctgcgtctgtggtcgcttttaggtgcaactggagaaggcactgaagccctacgagattcacaccgtcttcggtctcctggggtcggcgccgagtgggaggatggcggaagtaagtatgaaggtgcccttccctcccgccgctgttctctatggt

SEQ ID NO: 204148 - DNA, 281 bp, Homo sapiens
  chr16:28891234-28891515
  hyper
ggggccactgccactcccggcatgcgccgggcggacggccgctccaccaatccccgcgcccgtcggcgcccctgccccgccctccccagcctcctgacgctgattggtcgaggggaggactcgctcctagtggcgggaaagcgcggcggtgtgatgatgactccaaggagcccggcgcccggtcagggagggcactggcatccctcattacccgcccagcctggccttagcccttccccgcgctccctaggcacccccacccccgcagggcatctccaggg

SEQ ID NO: 204149 - DNA, 93 bp, Homo sapiens
  chr16:28936699-28936792
  hyper
gggtcgcgcggttcgggaggacgcctgcctttcaagcccggaagaggatccttaagaggtcttgcccggcgtctctccgtgaccttggaagcc

SEQ ID NO: 204150 - DNA, 79 bp, Homo sapiens
  chr16:29606232-29606311
  hyper
gcgaatagttggtgccgccgctgctcagccgagaccccggggctctgcggctcattaccttccccgacacgacatggcc

SEQ ID NO: 204151 - DNA, 117 bp, Homo sapiens
  chr16:29607010-29607127
  hyper
tggtgccctggggtgcgagcgcacacaggcgtgcccttggtttcacgtgcgccagttttcccactttctacgggggggagtggaaagtgaaaatagtaagatcgagaggtggatatc

SEQ ID NO: 204152 - DNA, 537 bp, Homo sapiens
  chr16:29624654-29625191
  hyper
agcagagcgcgcccacgatggagaagacgccgcacgcggcccacatcaccagcgccagccccggcgagcctgcctccttaagcacgcccgtgggcgtcacgaagatgcccgagccgatgatggcgcccacgatgatggccacgccgttgagtagcgtgatgttccgctgcagggtcacgccctcgccctcgcctgccggcgccgcgccgtccgcgcgcttggaggccagcatcttctcccgcgcctcttccttctcctcggccaccggggccgctagcgcccgccgcttcgggcccgcacccgccatgctctgcttaccggccgggcctgggacacccgagagccgcagccgagcgaggattgtgcgcgccgctcgccgcccgcagctgcgtcaagaaccccgcccgcgccgccttttaggccccggcccgctggccccgcccaccgtccgcggctcctccccgccccgtggcccggccgcggctctcagccccgccccctcgacccagctcggagcacgtgcgtcctccggcctag

SEQ ID NO: 204153 - DNA, 285 bp, Homo sapiens
  chr16:29822515-29822800
  hyper
cactaagaactgccgccaaccccaagggtttcttctcggcctggtgtccgtcaatccagccttgctctgccctgtgaggctgtgaggttctggctccgccctccccaggggcagccttactggcggcagcacagatacagggcggggccaaggctgtggctgtggagagcaagttccaggtctctggggaattcccaactcggacaggcccagaatagcccctggaggtttgaagaggccccgtcagaaacccaaacagagctgccagacgggaatgccgccctc

SEQ ID NO: 204154 - DNA, 136 bp, Homo sapiens
  chr16:29836031-29836167
  hyper
gagattgtgccacttcactccagcctgggctacagtctccaaaaaaaacaaaaaagagattcagtatatcagctactcacagttgaccctgaagatctctgggaagtagtgactcatgactcgtttatttattaag

SEQ ID NO: 204155 - DNA, 112 bp, Homo sapiens
  chr16:29888512-29888624
  hyper
gagccaccacgaccggccacctcccgggatctctggcctgcccgacccctgcccatcccgggactctatccctcagtacctttgaagtgcaatacgaagccctggcccaggc

SEQ ID NO: 204156 - DNA, 74 bp, Homo sapiens
  chr16:29888772-29888846
  hyper
ttcccgcacattcaatctgcagggggtgagaccaggcaatggggcggggctgcgactggcccctcccatccagc

SEQ ID NO: 204157 - DNA, 168 bp, Homo sapiens
  chr16:29910605-29910773
  hyper
tgcagggggtggggccgagagggccgaaggggccgggtggcctgggttaccctcctgctcaggcgcctgggtccactgggctgtctggaccccaagctaggggactggggaggagaaagacagcttctgggggtttagggtggggtcgaggatcgagggggtctccac

SEQ ID NO: 204158 - DNA, 62 bp, Homo sapiens
  chr16:29910888-29910950
  hyper
gtcagatcctggggacgggcggagggaggggcctgggatttatttgacggggagggaggagg

SEQ ID NO: 204159 - DNA, 325 bp, Homo sapiens
  chr16:30077527-30077852
  hyper
cccttagccctggcggggatcctaagaggcagtgaggggtgggggccggcccatgtacagccccagggttctcgcaagtgggagcttggtttctgtcctgggaaacggggcgcccttcgcgaggagggaaacccctccgcggtgcttgatgcccccttaacactttccctgtctctccttatcgggcgaccttgattctgagcccggaacagctgcagccatgcgaagcgacgggagcatttttcaggggaaggcgcttgctcctccacgttcttgccccgtaggaacagtgacgatggcaaagcttaccgctttcctcgcctcg

SEQ ID NO: 204160 - DNA, 208 bp, Homo sapiens
  chr16:30380080-30380288
  hyper
gctatgggggaagggagatgcctgcacccctcccaggctatccaccctaagggaccaagggtctctaccagaaccctcgcccaaccaaccctccagaatatccggcctgtagctggagttccccatcaaagagcagggatgacctcaggtatcatctcattcaatccactttatagaggaaaaaactgaggcacggaaatggggaagc

SEQ ID NO: 204161 - DNA, 177 bp, Homo sapiens
  chr16:30583154-30583331
  hyper
ttcacttcatggccgcttggacatagacacccgggttaagggacccggaaggtgccttctgaaaatatggcgaccacccttcaattgtcacaggctgctcttaagggcgccattatttgaccatatcaaatatggagcctttctgacttctctggcctcatcgtcccacttgccctt

SEQ ID NO: 204162 - DNA, 188 bp, Homo sapiens
  chr16:30620879-30621067
  hyper
cggatctagagcagccggttcccagtcatcggtgtttcgttccaaccaggagatgagggctggtttgggacctgcgcaccctggggaaagagaacaaatcagaaggccagctcctagatcacgccgagtagtatctccccgacggcacctcctgctaagcccctgcccacctcccctgacaacctggt

SEQ ID NO: 204163 - DNA, 905 bp, Homo sapiens; identical to SEQ ID NO: 10625
  chr16:30621123-30622028
  hyper

SEQ ID NO: 204164 - DNA, 76 bp, Homo sapiens
  chr16:30786651-30786727
  hyper
ggagagcgtggtggtcgtcgcggagccgcctgtcctgctcccaccgaccccggtctgaccacgtccttggctgtca

SEQ ID NO: 204165 - DNA, 231 bp, Homo sapiens
  chr16:30787247-30787478
  hyper
cggcggcggcgggcacgctggtggaagcgcgggccgcggcaggggaggacatcgggccgcagagaaagtgccgatggcctggggcagcggtgcgagggtgggaaaaacgcaggatattgcatcatagagacgcggccaccttcgcccctggagagcgccagtctcaggagcgccgcaccggtcacgggtggaggtcagccaggcctccgtaagcgcggtccccttccagga

SEQ ID NO: 204166 - DNA, 274 bp, Homo sapiens
  chr16:30797729-30798003
  hyper
ggttaatgacagggccgacacagagcatggacgtgggaagaccgagggaggccgaggcgctgggagcccaggcgccaggcacgccagcctgagacctcgcgatggccccactgcagagggagggaatgaggagccgcctcccgagagatgtggggaacggcccagggtgaccctgacatggaggcggcgggaatgcggccgcccggcccggcccccccaccgcttggctccggacttctgctcccccggagccgcgacccccgtcccgctgctg

SEQ ID NO: 204167 - DNA, 386 bp, Homo sapiens
  chr16:30798319-30798705
  hyper
ccccgggaacccaggcgtccccaactcacggctctggggtctgggaaaagccggaaggcggaatccagccccaggggacttaaccccttcagtgccctgcctcgggggacggactgggcgccgaggactctggggtccttctcaaggggtgattccaggctgaggacccggggaccagttcagggtgactgggacggagcaggaagtgaccccagcttcccgggcccctctagcctggagtcagagcatcagctctatgggatttaaccctttgcctcccgcagcctggggaaaaaaggggacagcggtgggagcagggaggaggctgggacgacgcccctgtccccgtctccagtgggagcaggcagcgtgggcatctgggagag

SEQ ID NO: 204168 - DNA, 162 bp, Homo sapiens
  chr16:30816842-30817004
  hyper
gcggcgacggcctcccggagctgaaggggttattcccactgagacgcggtcgcctccgctcctagagaggcccacggagggcgccgcacttccggcctgggtccagctttggctccggctcccgctcctgacctgctgcttcccgggctggcgtccgggccg

SEQ ID NO: 204169 - DNA, 200 bp, Homo sapiens
  chr16:30817038-30817238
  hyper
cagaggcagtgccgaggaccgaaggaggggaagggattccccaaaggcatccctgactcccgaattccagcaagggagaatcaggcgctggggaggcaaggagagggccgcggctctcctcgggggccgcggggcgcgactcttccaggacctcggctgcttttcccagtaaagcccaggcggcccgaggctggccgagg

SEQ ID NO: 204170 - DNA, 100 bp, Homo sapiens
  chr16:30935543-30935643
  hyper
cccctggaagggccgcgccgcagcccgtgggagggcctcgcccccggcgccccccatctccactcgccgccgtcccggcctccgccggagggaggggccg

SEQ ID NO: 204171 - DNA, 518 bp, Homo sapiens
  chr16:30959757-30960275
  hyper
cccttcctcgagcgcggggtggggcttcgggaccccggggatgagccgggccaggtcccgcccctccgcgcaggcctccggggggccggggcttaccatgtaggggaggggagatctatccacatacctcaggtaacagggaggtgcgcgggtggggggagggctgggcggaccaaaggccggaggggtggggcctggggatagcgagaggcttgagaatggggccgcttgggggagggaagaggcagcccggcgaggggcaagcgggggacccagccgggctgggcccctgggccccgggtctgtacaatacggtttgctataaaactcaaaatcttccagccggggctgcggagttcgtgtgtgtatctgcggggtccctacctacagatgagtgggctcacctctcctggactcattttgggagggatttggaagtgtggacacctggggtgtccagctgtaccttggagggggctggggttggcgtgcacctcggtggggtccgggcgcttgga

SEQ ID NO: 204172 - DNA, 164 bp, Homo sapiens
  chr16:30964613-30964777
  hyper
ctcatggtctccacgtgtctgctgccccacattgaagctgtgagcaacatccacaacctcaactctgtccaccagtcgccacaccagagactgcaccgctacgtggagctggcctggggcttctccactgccctgggcacctttctcttccttgctgaagttgt

SEQ ID NO: 204173 - DNA, 197 bp, Homo sapiens
  chr16:31075206-31075403
  hyper
cagcgtgagtacgccggtgcttgcggaacactgaagggtcagcaaagctcttgccgcagtcggcgcaggcgtaaggccgctcgcctgtgtggccacgctggtggatcttgagcttggagagcgcgccataggccttcgggcagtgcgcacagcggaagggcagttcgccagcgtgcgaggccaggtgcacgcgcagg

SEQ ID NO: 204174 - DNA, 196 bp, Homo sapiens
  chr16:31085565-31085761
  hyper
tagcgtgcaaagacgccgcgttgtgacctacgtgggcggagtcagccgtgcagacctagaacttagcgccggaagtgtgtctgcgtaaaactgcggctcggaggcgggacaggcagtgctcccgaagcggaagtttcgcggggaagcttttgcacctaaggacacttcctgtttcctagtaacaataggaagtgtc

SEQ ID NO: 204175 - DNA, 319 bp, Homo sapiens
  chr16:31117073-31117392
  hyper
cctgtatacagtattctgaaaagggggtcgcgaggtgcatgtccaacctccgccgccgggggcagcagcgagtccaggccgagccggggcctagcgagcggggtcaaatggggtgaggcctgtgccagacctctccacctcggtggcagccgcagcctcctccgcctgcggctcctgtccacgccgcggccacgtgagcgccagattctggcgcacagaccactgccagtcctttgctgctttgcgcagcctgtcctccccgccaggagcacccttcccgctcccttttaccacgggctccagccgtggctgccttggg

SEQ ID NO: 204176 - DNA, 271 bp, Homo sapiens
  chr16:31153837-31154108
  hyper
agggcagagcgcgtgcggcgggtctccgggcagcggtactgccgccccctggcggccgtacaggcagtggcaccaccagccgcctaacagctccgcctccagcagcgcgcctgggccaagcgcgggttctggaagggaaaaggcagggagcccgcgctgcggcccagacggcccctgcaccgcccggtgccgcccggcccagcgccggtccccagctcacccccgcggccccagcgggccaggcggcagcggctcccgggcaggaagtagt

SEQ ID NO: 204177 - DNA, 477 bp, Homo sapiens
  chr16:31213467-31213944
  hyper
ctggcttggctgccgactgaggaggggcctggatcccagctggcgcggctccagagcctggaaggatatgggccaagtgatccccttcccttcccttcccgccgtggggccggggtcccgttggtcggtaggccaagcgtggggagcctcctttccggtagagcagctttgtttaggggtaggaggaacagaaagcggaagagcccgcggggtaagcgctggtgtgggtggaggggaaagacggggtggaggggaacgggggcggctcaccctggtgcgtggccgcctgcagctgcccggccatctcctgcaggcccatgtcgcgcagcacgttagcggtgagctcggcgccgtaggtctccaggtagaagctgaccagcttgtcggtgaggtccaaggcgtccatggacagcagcgcgccccgcgggatgcgcccgtagccctcgcgcagcggcaccgacagcagcttcagcttga

SEQ ID NO: 204178 - DNA, 45 bp, Homo sapiens
  chr16:31214140-31214185
  hyper
gtccgttgccctccagcaaaaggcgcttccttactacacccttgg

SEQ ID NO: 204179 - DNA, 84 bp, Homo sapiens
  chr16:31228313-31228397
  hyper
cagcaccttcaggatggcctcgcgcttcgttcccatggctcagccctgcgcctctgagcctccgagggcctggagccatcaggt

SEQ ID NO: 204180 - DNA, 211 bp, Homo sapiens
  chr16:46723139-46723350
  hyper
ctagccccgcccccgggccctacaggcggctcattgattggcctacttctaggaacccgagtctcgcgtgcttattggccctgtcacttaacgctagatggacggacctgagcgccagccaatctcaccacagcgtgcgagagtgggcggagcagtgcagggcagtggggatcgcccggcggcaggcaggagacaacaggagggaaaggca

SEQ ID NO: 204181 - DNA, 110 bp, Homo sapiens
  chr16:47175828-47175938
  hyper
ccattggaggaggcgctaccagcccctaccctatccagctcgattttatcaagttctgcaggtaaagcggtgtgacagatctacgcgatttcatccgggggtgctctcgg

SEQ ID NO: 204182 - DNA, 166 bp, Homo sapiens
  chr16:47176606-47176772
  hyper
gatttattcagtccgagtttcaggagcaactttgtatcccaatcctaattatctatgtatataaattttcatctaaattaccacctcctgggaaatgcaaagccggtggagtaggttttagagctctgtgctctggacaagccaactgttttaattcccagtacaa

SEQ ID NO: 204183 - DNA, 218 bp, Homo sapiens
  chr16:47495527-47495745
  hyper
cagctccactctgcgtgtgcccccgactctattccgcttgtgagccccactcggaaagtaggcagcggtccggacttcccttagagtcttctaacttaaaaatcgggcggcggcacattcctgggaaagggaatgtgtcttccctgtgaatgtgtctttcctgtgaatgttctctgcaaaagtcagatagcttaatcagaccaagtcagatgtaacta

SEQ ID NO: 204184 - DNA, 60 bp, Homo sapiens
  chr16:49308950-49309010
  hyper
ctttagccttccattgggtccgccccgccccaggacccaacctgcaatctgtgggagagt

SEQ ID NO: 204185 - DNA, 65 bp, Homo sapiens
  chr16:49316711-49316776
  hyper
cttttctgttttgcacttaaaatttacattttgcatccgtactttttatttactgtgcaccctta

SEQ ID NO: 204186 - DNA, 191 bp, Homo sapiens
  chr16:49316844-49317035
  hyper
cgatttttcgagaataatttttaccctaagtggattttcgtgccacgcatggacttggaactacacacacgtagtccaaaacgtgaaagtcaaaatgcagctttgccaagtggcagggagaaaggagagctgagaagatgaggagaggaagggcgcgctccaggctttccagcccgggtgcggtagacgta

SEQ ID NO: 204187 - DNA, 221 bp, Homo sapiens
  chr16:50582032-50582253
  hyper
ggccgggctgttctgtcccaatacgcctcctggacaagccgccccgccgggtcgccagccctggagctcggcccccggccccagaccgcggcagggagcgcggactgtgtcccgcccctcccgtcagcgccccgccctcgtccccgccctgccccgcctccggccccgcccccgccgcaaccagccttgcctttgatgcgccgcaccggccaatgggcgcg

SEQ ID NO: 204188 - DNA, 66 bp, Homo sapiens
  chr16:50773734-50773800
  hyper
agatatctctcttcccggtgagcctgaatataagttcagaattagctttaacgcaatgttctaagc

SEQ ID NO: 204189 - DNA, 76 bp, Homo sapiens
  chr16:51184601-51184677
  hyper
cgaagtaaacttccttaccgctggcagcaaggccgggcggcggaggccgggccgggtgccctggggccggcgccgg

SEQ ID NO: 204190 - DNA, 75 bp, Homo sapiens
  chr16:51189108-51189183
  hyper
acggtgcttggccaccctaccccagaaatggaggacgtctccaagtgctctccctgcacccctgtttcctcagtc

SEQ ID NO: 204191 - DNA, 58 bp, Homo sapiens
  chr16:51189374-51189432
  hyper
cagtccctcccctgcccggaggtgggtgggacagagcgggtggccagctgtgtgtgtg

SEQ ID NO: 204192 - DNA, 198 bp, Homo sapiens
  chr16:51189680-51189878
  hyper
gctctccgtagattcggttatttttccaaaccccgggaccttgcttccccgggagtttcagaaactcctttcctactgaactgctgtcactcaatcctaacctctcttagaacactggagcggcttcgaacccgaagtatggagcaggcttgggtgggtacctcgcccctggccaagtctacactgtgcgccctcggc

SEQ ID NO: 204193 - DNA, 105 bp, Homo sapiens
  chr16:51190251-51190356
  hyper
agtgcctcgccaaggggcctctgggtatgaaattcctcccagaggaaatgtcccgacgtagagaaagtggaaaaggctaatcgaatttataaaaagaaaatcttt

SEQ ID NO: 204194 - DNA, 201 bp, Homo sapiens
  chr16:52579631-52579832
  hyper
gttttcgacaaattcggcgctgggggcttcagggaggacagaggacaccggatggtgggggggaattccgcgcggcccgggtaccagggctgcgactctcgcccgcctcgctgctccgagcgacgcccgctgcccttctgaggtccacctcgccacctggaacgctcggtcctcgaagttggcgcagggggaggtggagaa

SEQ ID NO: 204195 - DNA, 360 bp, Homo sapiens
  chr16:52580072-52580432
  hyper
gtccgtaagcggccccgaggccggctctggagtaggtgggggaggtaagaaggactgggggtgggggagggcaagatcatcggaccaggagatcagggacccctgcgtagcccccactcagtccaggggggctgcgatcgtgtttactaataacagcaacaaacaatcacacgccagcccttctttcagtcctcgggctctcttcgctttttgggggcagcaaaggagagtctggcggggaggtgggagggagcggaggggctgaggagagcgccggctgggggacaaaaagcggcgtgggatggggcagaaagagaagcggggagagctggacagagacgaaggctcaaaggtagaaga

SEQ ID NO: 204196 - DNA, 33 bp, Homo sapiens
  chr16:53468698-53468731
  hyper
cacgctggaggtgcgctcgcgggcggaggggcg

SEQ ID NO: 204197 - DNA, 299 bp, Homo sapiens
  chr16:54319055-54319354
  hyper
gccaggccctcgccccccgtgtcctcctcctcccccccgagctcctcctcctccagctctagctcgcgtttgccgtcctcctcgtcctcctcttcgtcttcctcctcgcgctcgctcccataagcgtttccctcctcgtcagtgcggctgcgaggcgcccaagtcatcttattctccttcttgaggcgccggcgcgcgttggcgaaccaggtggacacctgggtgagggtcatcttggtgatgatggccagcatgatcttctcgcccttggtggggtaggggttcttgcggtgctcgtt

SEQ ID NO: 204198 - DNA, 126 bp, Homo sapiens
  chr16:54319649-54319775
  hyper
gcgccccagcgccaacccctccttccctggctccgcgggctcttaccagctgcgggaagatgggcagctccgcggcgtagggcaggaaggcgccgtagccttgggcggcggcggccgcagcggccg

SEQ ID NO: 204199 - DNA, 360 bp, Homo sapiens
  chr16:54320075-54320435
  hyper
gccgcccgcgctgcgctgtgctccgcgttcgcctattgatctgctccgcggcggcgacggcggcggcgagggcggcggcgaggagccaggtcaggtccgaacagattggcggagattcccggggctccgggctctgattgacatttctacggggcgcaagcccctcctctctgcgccgcgctccctcctctcggccgccggagctgcctctgcccgctcctcgctcctcactgccctcctctccccagcagtgtcgcgcctcgcttccttcgccctcctctagttttcactccccctcctcgcccttcctctcccctcccctctccgcactcctcttccccccaggatcgcttccgctgc

SEQ ID NO: 204200 - DNA, 244 bp, Homo sapiens
  chr16:54320495-54320739
  hyper
ttccctttctcacgagggcttttgctctccggtccgttcccttcacttcttcctttctcactacttctattttgtaaatctctctctttactcacacgatactccccgcgacctttccagcctctgcgccctgggctaagtaaggcagccaaaagttgtggacacttagggtgccgcgcggggggtgtgtgtcggtgtctgtctgtccatccccgcccttccaccccctccctcgcctttcccc

SEQ ID NO: 204201 - DNA, 206 bp, Homo sapiens
  chr16:54321080-54321286
  hyper
gctcgcacctctcgactcccggccactttcagcagcttagggagggagctagcagccggcgtgggggtggggagcgagggagtgcgtcctaacagagtctccagaggccacctcgctgccttgcgggggcgaggcagcccccaacccagcaggaccaaacccagagattagccacttaacgccgcccccgggtccgtgtgcgaatc

SEQ ID NO: 204202 - DNA, 242 bp, Homo sapiens
  chr16:54962409-54962651
  hyper
aagggctctactccggaaagccgtgtcccggacgagagccgcggcgacgaagggaacaggcgtggacagaggagccacgcccacgcgcgcccgccccgaaccccgacacccggagaggctcgaccggcgccgacgcggcccgaggcccaggccctagcccacgggacgtctggtcgggcgcggggcaccgccgcgtccgttcggcccacgaggggacacgactagaggggcggacggcgcgg

SEQ ID NO: 204203 - DNA, 202 bp, Homo sapiens
  chr16:54963939-54964141
  hyper
gctgattctctgtctggcagttcttgcccaccacccctactctagaaaaaggctaccccggtagttccaggaaccagtgtcttctccctcgccgtccggcggggggtcggtagaaggaaggcgaggcggagacgtgcagacgtctgaggcctgtctctcgcccacctgctgctgccggcgcagaggggcagtcatcccggac

SEQ ID NO: 204204 - DNA, 300 bp, Homo sapiens
  chr16:54965776-54966076
  hyper
cctccaaaatgttgcaaatccgtaatcctatcttcgcaatccgatttgggagtattaaatttctgaaaagtcggtcgagctgcggtgcatccgggatttttcggccgggttgtaacttcggtctggggtagtatttttggagggtgggagtgcgtgggcatggctcagctttttgtttgcatttcttagctgttgaaaaaagaaaaaaagagccttgacttcccttgttttccccccttgcgcccaacgtgcgtccgctcccccgccgagcgcggagtcgcctcagttgcccaggcctct

SEQ ID NO: 204205 - DNA, 106 bp, Homo sapiens
  chr16:54966659-54966765
  hyper
cgcgccggcgcctcaagaaagagaataaaatgacgtggacgccgcggaaccgcagcgaggacgaggaagaggaggagaacattgacctggagaagaacgacgagga

SEQ ID NO: 204206 - DNA, 69 bp, Homo sapiens
  chr16:55090597-55090666
  hyper
gctgtaattgctcccagccccggagtctggcaaaacgctcttgtggggcgtcggctgcggccccagatt

SEQ ID NO: 204207 - DNA, 32 bp, Homo sapiens
  chr16:55091068-55091100
  hyper
gaaatcccaccgctgctgctctcaaagctgtt

SEQ ID NO: 204208 - DNA, 88 bp, Homo sapiens
  chr16:55359125-55359213
  hyper
atcctcctcttgtgttctgggggaagccagaaggagcaaggaccagggtaatgtgtcacagcctcctctgacatccccagtccctaaa

SEQ ID NO: 204209 - DNA, 112 bp, Homo sapiens
  chr16:55404803-55404915
  hyper
ttttagatccttggacagatcgcagcctcacctacgggaagatctacatcccctcctccagggctctaccgagggagaaccaaggtagaaaagcatgcctttccggctgctg

SEQ ID NO: 204210 - DNA, 38 bp, Homo sapiens
  chr16:55405244-55405282
  hyper
ggggaacaaagcccggcggactagctcactatcttctg

SEQ ID NO: 204211 - DNA, 138 bp, Homo sapiens
  chr16:55499096-55499234
  hyper
ctgaagctaatggaccgtgattgtgcattaaagccactagatggtgccatgagcccagagaatgggctgatctaggccgctctgagccctgaggctgcttctccaaaagtggccaccagatggcgcagcctatctgca

SEQ ID NO: 204212 - DNA, 142 bp, Homo sapiens
  chr16:55513539-55513681
  hyper
cagtggtgagttgctgcgctggcctcaaggaaccacgtttagacaaacttcggaggcaaaggatgggggtgtctctccccctgccctcggcggtgggcacacagcgtgggggaggggcttcggtaaacagcttggggggtct

SEQ ID NO: 204213 - DNA, 60 bp, Homo sapiens
  chr16:56225663-56225723
  hyper
gccgccgccgccgcctcctccacctcctcctccgccgccgccgcctcctcctcctccggc

SEQ ID NO: 204214 - DNA, 268 bp, Homo sapiens
  chr16:56225881-56226149
  hyper
ctccggagccccagaccccggccaccctcgattcgacaaccccagacccctgccagctgccgcgagtctccgctgctggaatcttgttagcggctgtctttttggagggttctggtttcccgacatttttgtttccagcccaggagaggatatcgtgattttccccccttgagcccaggctctgctctctgggggggtggggggcgctccaagccggggagccgtgccagccgagtcgtgcgggctgtggcagggaaggggccaccat

SEQ ID NO: 204215 - DNA, 89 bp, Homo sapiens
  chr16:56228280-56228369
  hyper
ctcccgaggggggacgttttaaaacttcagaagtctgtaatcagcagtggcggactcggagcccagtagaagccccagccacctgagct

SEQ ID NO: 204216 - DNA, 71 bp, Homo sapiens
  chr16:56228591-56228662
  hyper
cgcaggaggggaaggaggagggggagaggccagagtctgcaaattaactttgcatccgccaaagcaactgc

SEQ ID NO: 204217 - DNA, 33 bp, Homo sapiens
  chr16:56659821-56659854
  hyper
atttcccagccctattacagagggtctctgggt

SEQ ID NO: 204218 - DNA, 165 bp, Homo sapiens
  chr16:56671949-56672114
  hyper
acgagagtgagaggccgacccgtgttcccgtgttactgtgtacggagtagtgggtccgagggacctaggtgtggacagggacaggcaaggcgacagcgaggagaaacgaaaatcacatcggtggcggttgctctgcacacaactcgctcgctaccgcacgctcca

SEQ ID NO: 204219 - DNA, 122 bp, Homo sapiens
  chr16:56703438-56703560
  hyper
cgggagtagcaggtaatctcagggaactgggcaggcccggcagggtgaaacaagcagctcacccgggtgcacagcccctcccgcgggagccgctgcgaaagggccgtccccgcggtgtgcac

SEQ ID NO: 204220 - DNA, 237 bp, Homo sapiens; identical to SEQ ID NO: 10711
  chr16:56703621-56703858
  hyper

SEQ ID NO: 204221 - DNA, 72 bp, Homo sapiens
  chr16:56709742-56709814
  hyper
gggtggggacagcgcgaccacctgggaatgggaaatggccctcagggtggcaggggcggcgcgtacctctgg

SEQ ID NO: 204222 - DNA, 67 bp, Homo sapiens
  chr16:57023303-57023370
  hyper
gccagggtgtgggcgcagcagggagcgggtgtgttaggcccccgcccatcccgcgcccgagccccat

SEQ ID NO: 204223 - DNA, 205 bp, Homo sapiens
  chr16:57318149-57318354
  hyper
gtccgtgcgggaagcgccctaggggtacgcgcagcgcgtcggtgacagtgtgagcccgggtggggagcgcaaggttcgcgaaaaatgaacgcagcgccggagtccctcacccatcctggccggaccgggagcccccggccaaccccgtgggcccgcgcgtgctctcaccagctgcagcagcatgagcgccccgaggcgggagcgc

SEQ ID NO: 204224 - DNA, 204 bp, Homo sapiens
  chr16:57318414-57318618
  hyper
ctggtccgcgtgctaactttcgacgggaactcggccatggcggctccgcttgcctcccgaggtcgctacggccgccgtcgccgcccctccagcggtgggtgccggctcccgcgccgcttttcccccaggctccggatccctgtgtggctccaggcgctgcaggaggcgtcggggctgggagcctggggcgccaggtgcggccga

SEQ ID NO: 204225 - DNA, 256 bp, Homo sapiens
  chr16:57481512-57481768
  hyper
gagaggcggggagcgcggagggggcgcgaggccggcttcagctgggttcgacggtggggggaagaggccgttggggcggcccacgagcaaggtgaggtgaagggcatcggcgcgggctcgggcgagccgcctggctagcttcggccctgctccgctgtctgtgaggggcagatgcagcggggcagggcctgtcacccccatttcatggagttggcagagcctcagagagggctcggggtacgaaagtcacgcagcc

SEQ ID NO: 204226 - DNA, 311 bp, Homo sapiens
  chr16:57519803-57520114
  hyper
tttggaggaggtgagcgaacaggaggccccggggaggagcaggaaggcagagagaaggttgggagctgccaggggctgggttatgccccttccgggggggcaggcccgggagcgcagggcctgggttgctcggatgaggtttgtgtgggtgcgggtgaggtcagctcgcgacctgggctcccccggagaggaaagctgcgggtggagagagcgcagggagtttcagggcccaggcactggcttttggggggcgggtctctaagctccccacccgagagtaggaaggtcccatgggacggagcgtcctcagg

SEQ ID NO: 204227 - DNA, 613 bp, Homo sapiens
  chr16:58059965-58060578
  hyper
tcgggagccgggccccaggcgctgggcgccgaggctgcggaacctcgccgggggcagctccggtcggccccctttcccgccggctggttccgagctcccggacctgccctgcccgcttctcctcgggcttgggaatttgccgaggcgacctaggcggctccggcggggaccgggagcccgaggtccgcggcgcgcctgccgggccaggagccagggagcgtcgcaagtttccaaggcgcgtgcgaggatccggcgtgcagtgttccgagctgggctgggcgccgagagcatgggcagcgacccgagcgcgcccggacggccgggctggacgggcagcctcctcggcgaccgggaggaggcggcgcggccgcgactgctgccgctgctcctggtgcttctgggctgcctgggccttggcgtagcggccgaagacgcggaggtccatgccgaggtaagacccccgccctgccctttggctgcgggctgggggcttggagggagaggcgccacgtccgcaggctgggacttggaggtggagggagcggagacgcgccccctgttctgggccgtggcggggaagcaagcggacttggcagtctgcccctccccagct

SEQ ID NO: 204228 - DNA, 366 bp, Homo sapiens
  chr16:58060638-58061004
  hyper
cgctactcctacagccctgttctgggcactgagcccccaccccgacccccttacattcagcctgtgtcccgggagccgcttccgccgcccccagcccttgcctcccctccttccttccctccagggcagccgattcctcgagagcccggctggcgcgcagtggcgctctttgcgagtggggagggggctgctctcggggacagccacaggcggagcaagagctgggcggctgggcaactgcgctcctgcccaggtggcctcccgtctgggtgataccgagccgcgcacggcgggccaggatggaggcggggggatgggtgcaaacggctgaggcagcggactcgggttgcgggggcgctttggcga

SEQ ID NO: 204229 - DNA, 193 bp, Homo sapiens
  chr16:58061107-58061300
  hyper
gccctggattcgagagggtggaccccgcgcctctcttcgctaggagcccgcttggcgtccctcccggggccccgctctggatgggtcccgcgggtgaccaggcgcgacatcccggcgtagagccgagtccagccagcgccccagctccatggtgtctcccgagcgaggacaccgaaggcgccagctttcttgc

SEQ ID NO: 204230 - DNA, 124 bp, Homo sapiens
  chr16:58426260-58426384
  hyper
accgctccccagccgtgtcccgctgctctaaatctgcagacttgatcgattgcttctgcctgggcggtaccgcccgaattgactgctcctgtctgatgcgtccccgggcgcgggaaacgagttt

SEQ ID NO: 204231 - DNA, 56 bp, Homo sapiens
  chr16:58549095-58549151
  hyper
ccagaccctcggcttccgatccagaaaccgtattttgttcttgcacccagaccgca

SEQ ID NO: 204232 - DNA, 577 bp, Homo sapiens
  chr16:58549238-58549815
  hyper
gcactcgcagcgcgtgagtgcaattggagatcctggactcaagatgttttcatgaggaacgattccagcccgcggtaactccggccagtctgcagcgtggacgacaaaacaggcaccacgtggttccggcgccggggcggggccagagacgccggaagtgaccgcgcggtgcgccggcccgcgaggaaacgcgctcttagaccatggcgacccaggcgaagcgtccacgggtgagtggcgggcgcggggtccagccttttcctccgcgcctcaccccttctccgttcgcagaaccgtccgcctgcgccccctccgctccctcccgcgggtcccgcgcccctctccgctcgtcccctcctccacccaaagcccgttctgcgctcgcgccgcggtctcctgcagttcccagcggcctctctgggggtcggacctggtcactgcgcgcacttatctcaggtggcggggcccgtggacggcggcgacctggatcctgtggcctgcttcctgagctggtgccggcgggtggggctggagctgagtcccaaggtgagcgagcgagccggcgggcggaggaccc

SEQ ID NO: 204233 - DNA, 76 bp, Homo sapiens
  chr16:62068387-62068463
  hyper
agtgttgtaaagagaacaggcgcttcaaaagccagcccccatccctcggatctgctttgcgatggtaccggatgcg

SEQ ID NO: 204234 - DNA, 97 bp, Homo sapiens
  chr16:62068548-62068645
  hyper
agcagctgatctgattagcagctcgggcgcgctaagggattgtcgaatcatgcctcctaaggaggaaactcttgtggaatcttcaggaaagggtggt

SEQ ID NO: 204235 - DNA, 187 bp, Homo sapiens
  chr16:62068765-62068952
  hyper
caacaataaacaattaatgtggtttgatttcttacatttagcaacccaagcaaacagctgccatctccgctggtggaggcaaacggctagtccttgacatgccgccggctccgtgcctgcgggggaagggtcaaccgcaaggaaactttgaggattctgccagactgggtgggggaaggctctggtg

SEQ ID NO: 204236 - DNA, 676 bp, Homo sapiens
  chr16:62069435-62070111
  hyper
agctgagccttggcccgcagccctgccgcgggggtcgccctccctcgcctcggagatgaggcggtgcagaaaaccagccatagaccactcgggccccctcgcctccttttttccctggcttgcaccctccgcacagcgggctgcaggtgcttcccattcaccgcacggaccccgcagtgaaggcgcgcggctgcagccgcgcctgcctgcgttgggaagcggcgaaatagccaagtcgccgcagggaaggaaaccggcaggaaaactggaggggcacagcctggagcttgctactctctaggatctgttgtcaaagcagtttgcaaaaacagtcaggcaaaaccttgaggcgtacgtacgttatcacccacggatatcgcgaaagacacagcttagcccagagcctatgctaagaaccctcatccaccatctgaggggcaggaggcgcgcaaggtgtccgaaggggcatgggaattcctataagaaacggtcccttctggatagtcggaacatagaggaaaacgggggtgggttaggggaacacttactcttgtggggccctgcgctggcgaatgtcaagcctccaggttcacaaatggctggaggtgctcggggttagctcccgagggcggcaagcgccgaccggtcctcgctcgctaggcaggcgcctccggat

SEQ ID NO: 204237 - DNA, 200 bp, Homo sapiens
  chr16:62070245-62070445
  hyper
cggagcttggaggaggcagggagattccaaataaatccactaattctgggctgagcgctccggcgtgcgagcccgcctgcctgccaaatgtaactgtgaagtgatgtggaaaagtgagccgggtgcctcccctgacggatctcattgggcagagcgcagaggcaggtctaccacttggaaattcatgtaagcagtccccc

SEQ ID NO: 204238 - DNA, 401 bp, Homo sapiens
  chr16:65155276-65155677
  hyper
agccccggggagctttcggcagggatccgggaggatggagtaagaaccccgcagagcgcggtcatgtcgccgctttggggaagcggcgcagggctggcgggcaccgcgccgtgggcgactttccccagagatatgaccggggacagtcggcgtgtccggaggtctgctctgcagtctcttgccccagccaggtacaaaccccctctgctgtggcctcggcgcagaccccacaggaggccggagccagggagagtcgtggagcgcacatctgaagcctccgtcccctgctttgcccgcgcccacagctggctcccttctccctttctgatttttaaacaaatctctccctcccttttgctttgcgttagtgaagccttctcgactcagataccaccgtcccc

SEQ ID NO: 204239 - DNA, 31 bp, Homo sapiens
  chr16:66638044-66638075
  hyper
tgtgtgtgtgtctgtgtgtgtgcctggagct

SEQ ID NO: 204240 - DNA, 72 bp, Homo sapiens
  chr16:66638452-66638524
  hyper
aagaaggtggagtctgcggaggccccaggccggggagggggcgggtcgggcccagcatcccccgcagccggg

SEQ ID NO: 204241 - DNA, 48 bp, Homo sapiens
  chr16:66959201-66959249
  hyper
cgccgcagccctcccccagcccccaggtcgcggcgccctcacccggga

SEQ ID NO: 204242 - DNA, 150 bp, Homo sapiens
  chr16:67189018-67189168
  hyper
agaaaagtctgggcaggtggcggcggcggcggcggcttcacctccgacagagagggcaccgggggctgcaagggggccgaagcgacctccccgtcgccaccccgggcccccgagccgcacttcagatttcgcagcgcatcctccagctca

SEQ ID NO: 204243 - DNA, 374 bp, Homo sapiens
  chr16:67189259-67189633
  hyper
tgaccctagcccggccgcacctgctgggctaggatgcaactcaaacagcgctcctcgtccgccagcaaagcgtccagccgctcggcgccggcgcgcagctccagttgcagcggcaccgagtgctgggcgagcgcggccgccaggctcctctgcagcgcggcgcgcagcgccccctcgcggtaggcgcggaggaagcggccacagggctgccgcccgcagaatcgcagctgcacgatcagctgcgggtcgctgcggtggatcttcagcatctgcagcacgtccgggctcccgccgctctctgcggaggcgggcggtcaggcgccgggcggtccccaagctcggccgttctccaaacggccggaggaggggcgaag

SEQ ID NO: 204244 - DNA, 226 bp, Homo sapiens
  chr16:67197367-67197593
  hyper
agctggagcccgcgctgcccgctgagagcgtgacgcgcgtcctgcagccagccgtccccgtggctgcgctgcgcctcaacctctcaggcgacaccgtaggcccagtgcgcttcgcagcacaccactacgccgcaaccctgtgcgcgctcgaggtgcgcgcagccgcttcggccgagctgaacgccgcgctggaggagctggcggcgcgctgcgcggccctgcgcga

SEQ ID NO: 204245 - DNA, 270 bp, Homo sapiens
  chr16:67198282-67198552
  hyper
ccccttcctatctgcttgccctgcctggggcttcactgtgcctctggccattaccttctaggacttgcccagcccacaccaggtcgcgcaccggcgatttctcctgtagaacaaagaaggaaatagagggaccgagaggggtgggactcgaacccaagtctcccactcatctcaccccaccccaccccactccaccccaccccacccctccactccactccactccacacatcccatccagccagccttttctgcctgctggtgcctcgg

SEQ ID NO: 204246 - DNA, 256 bp, Homo sapiens
  chr16:67204060-67204316
  hyper
ctgggtcgcgctcagctctgcaatgcatgcgttctgtgatcctggtgagttggtatccttctctgaacttcctctgtgacaggcagagaagaggggtcgatgacaagatagatggaaagcacctggaaattggcaggccctgagtgggcgctggacgtgtggggccgcgggccgaactgccccctcctggcctcatctcctggtgcgccccgggtggggagggaaagctgactacatgcacgtccccagccagcgc

SEQ ID NO: 204247 - DNA, 283 bp, Homo sapiens
  chr16:67204317-67204600
  hyper
cggcctccgcggtgtggctcctagtgcccggggaagaaccctcaccctccctattcccagcagccctggccgccccgcccccgccgcagctgctgcacccacccccaccctgcccggccctttctgcaccgtcatctcctgccccgccgaggcttgacccgtgagtggggacgcccaaaacgggccagaccgggagccccactcccggctgtgggagggaagggaaaccgagattgggcagaatcagcgccccaccacccgctgcggcgctcgggggtcgggg

SEQ ID NO: 204248 - DNA, 105 bp, Homo sapiens
  chr16:67261057-67261162
  hyper
tgcttagtgattgcggtttcggtcgctctcccgtgtttcccgggctgggtatttgcctcgcaccatggcggtaaggaggatggatagggcggggtccgcaccagc

SEQ ID NO: 204249 - DNA, 215 bp, Homo sapiens
  chr16:67280008-67280223
  hyper
tctcaccacccctcccgccagcgctcagaggcggggctggccgcagcgcgaggaatgcgggctgggggcccggggcacattccagggaagaccccaggcccaaggggcaagtttacgcaactcgccgcccagctgaggctgggagcaggggagggcacccaccccgactctctctcctcttctccagcactggaggcggccgggctggtggggag

SEQ ID NO: 204250 - DNA, 74 bp, Homo sapiens
  chr16:67280819-67280893
  hyper
gccaccctggcagaccgacggcgagtggaactcgagcacctccccaggtgcgcctaattcgaagggcagtcaga

SEQ ID NO: 204251 - DNA, 457 bp, Homo sapiens
  chr16:67281140-67281597
  hyper
accgcgggtatctgcgcgcccaagggcagcgccccgtccaggctgcaggtgggggcccggcgcggctccggaaagttggcacatgcgaaggggtcggtgtcttccaggtactgcaccctcacggtcaccactgataccggctctccgtccccgcggtcttccccgcccgccatggctctgcggccggctcacgcagcgcgcctccgagtcccggccccagtgcagcttctactcaaagcacactgtagctccgcggttcgggcccggccggaccggacgcggctggaggggcggggccagacggaggcggggccgaggaagggggtggagccaagattagtccccgagtgcgcgccaggaggtaaccactgccggaggcggggccgccgctagccactcacagggcccaatgggaatcccgttagttcactggctaggagggcgggaaaaaccgagc

SEQ ID NO: 204252 - DNA, 61 bp, Homo sapiens
  chr16:67427472-67427533
  hyper
aggctgtctcggcgggagagtgaccaaggtcacgccggccccgcccacgaggccccgccct

SEQ ID NO: 204253 - DNA, 131 bp, Homo sapiens
  chr16:67464693-67464824
  hyper
gtgctcacctgagcgcggcggcttggcggccccgggcgtgtgggtgggggcgcggcggagagctgaggccgggcacccgggctggaccgacgggccctctcccaagcaccgcccgcagccaggcggctcct

SEQ ID NO: 204254 - DNA, 263 bp, Homo sapiens
  chr16:67465267-67465530
  hyper
gctgctggccgcgctcgactggctgtgccagcgcctgctgcccccgccggccgcactcgccgtgctggccgccgccggctggatcgcgttgtcccgcctggcgcgcccgcagcgcctgccggtggccactcgcgcggtgctcatcaccggtgagtgcgcgggtcgcggagcgcggggactccaggctcgagggcgggactggacactcaacaggactgactccccatgggcacagccaaggcgggctcctcagcgcaagagtg

SEQ ID NO: 204255 - DNA, 219 bp, Homo sapiens
  chr16:67571279-67571498
  hyper
ggaaccccagtcaccggtcccgccccatccaggcgggctgagtcaggcggcaggaactgggcggggggcggcgccgggaggagccgaagccgagccagagccgctgggagcgagcccggagcccagccgggcggctcgaagtggccagggccggaaggtccgcggggggcgagcgcgggtcgggggccgtcccggacccaccatgaacaccaagaagag

SEQ ID NO: 204256 - DNA, 272 bp, Homo sapiens
  chr16:67571731-67572003
  hyper
ccccctgcctggagggcgccgggacgcccgggccggtgggggctgggggcagcaggtcacgctggcaggcggggggcgggcgacaaacccgcaccggctgggcctgtcgggcagctccgcagggctccgagcgtggccccgccccgccccgtgacctccttgggctcccggggtggggggccccgagctccgggtgccctggggggggaaatcgggggcagggctggggaggctgccccgcccccgggtaaacaggcgcttccgcacattct

SEQ ID NO: 204257 - DNA, 132 bp, Homo sapiens
  chr16:67678786-67678918
  hyper
ggcggggtggaagccgggggcaaggacccgctggaggcccgccacacccgcgaccctcccggccacgccactgcccaccccgacgtctaccctggcggagaagctcctgggcgacggggcgggcgggcaggt

SEQ ID NO: 204258 - DNA, 39 bp, Homo sapiens
  chr16:67876117-67876156
  hyper
ggcggcaggaatccgcacacacccgccccggaagtgagc

SEQ ID NO: 204259 - DNA, 66 bp, Homo sapiens
  chr16:67969396-67969462
  hyper
gcatctgaagtcaaccgctgcgacgccgtttggagtgaggccaaggtcacaggggcagagttcgag

SEQ ID NO: 204260 - DNA, 109 bp, Homo sapiens
  chr16:67969492-67969601
  hyper
gtgaagggcagacggctgtaggagccatggggatgcacaccgtagagctgcggtccagtcaggtctacgccgcccacgatcagcgatgcacccacgtggccctggtacc

SEQ ID NO: 204261 - DNA, 155 bp, Homo sapiens
  chr16:68118915-68119070
  hyper
agtgcttcagcaccccttcctcgacatgagctccgcccaatgaggagaagggtcttctgcattggccggtggtggtcccctatccaattagagaggctaacggccttctctcgtctggtttagaaggaatcgccgggggaatacaggccaaacta

SEQ ID NO: 204262 - DNA, 72 bp, Homo sapiens
  chr16:68269813-68269885
  hyper
caggtcccgtcccagcgcacccgccgtagccccgaagaggacgaccagtgatccgggccaggggcaggggtc

SEQ ID NO: 204263 - DNA, 112 bp, Homo sapiens
  chr16:68269896-68270008
  hyper
cggccgcggggtcagggcccgggggagggggcggcggcggcggcggagtcatggccgcagaggaagggggctctcggccagacacgcggaccgacgaggcgcacgcacgcac

SEQ ID NO: 204264 - DNA, 105 bp, Homo sapiens
  chr16:68270022-68270127
  hyper
cgcggatcagcttgggcgggacaccgtgtatcgggggcggcacctgcggcccggctggctcagtgggcgctgccaagacccgcccgtggcgccccgcggggcggg

SEQ ID NO: 204265 - DNA, 146 bp, Homo sapiens
  chr16:68270157-68270303
  hyper
agttacctgccggccccgccggccacgtgaccggggcggctccgggaaccttgggggagggccgccagaactcaacccaggacgcaagagctcacgctcccggcctgggcgcacgcttaggatccggattcctacttccagggctg

SEQ ID NO: 204266 - DNA, 379 bp, Homo sapiens
  chr16:68270867-68271246
  hyper
gcgagcgctctggccgatggggggctagcgttgagcgtgtgtgcgcgcatgcgggctgcagatcctcccttttccatcccgcacctacaacccaattgacagccccgcatttggggctcccattcctccctttgcccagtggagcttggtgaggctcctttatggcgcgtttcccggccgttccttactttcccaaactctcccagggaggtgactgagaaactgaataagtgactgagaaactgaataatccagcaggaaggagggggctccagcgtggcgggaactgagtcacgcggttgcctagcccgactcgagactgagacgggagccgcaccacgcgctttcggacaaggagggtgctgcggcccggcccctg

SEQ ID NO: 204267 - DNA, 57 bp, Homo sapiens
  chr16:68298829-68298886
  hyper
cgagggtgaccgggacgctgagtgcgcgggccgcgccgcgagcgtgagactgtgcga

SEQ ID NO: 204268 - DNA, 810 bp, Homo sapiens; identical to SEQ ID NO: 53222
  chr16:68481955-68482765
  hyper

SEQ ID NO: 204269 - DNA, 116 bp, Homo sapiens
  chr16:68504292-68504408
  hyper
atgtgacctttgtttaatacacgttcttatttgatcttcacaaccatgccacttggcaggtggggaaactgaggtgcagggcagggtagtcatttggccatcgccacaaaggggag

SEQ ID NO: 204270 - DNA, 137 bp, Homo sapiens
  chr16:68679207-68679344
  hyper
tgctcaaaggggcaagagctgagcggaacaccggcccgccgtcgcggcagctgcttcacccctctctctgcagccatggggctccctcgtggacctctcgcgtctctcctccttctccaggtactccacagcctcgc

SEQ ID NO: 204271 - DNA, 385 bp, Homo sapiens
  chr16:68679362-68679747
  hyper
cgctccctggggggcgggcggggtccgcatggggcagtggcgtcggggagagcgcggggctgcgctccctggggccaagggagtcccggaaggcccgtgaggaccctgcggtgtggggagtgcagggccgggcacgcctggacccagcctccttcactctctgccctcgggcgcaggtttgctggctgcagtgcgcggcctccgagccgtgccgggcggtcttcagggaggctgaagtgaccttggaggcgggaggcgcggagcaggagcccggccaggcgctggggaaaggtaagatcctcagggtggaaccgcagggtaggggccgcacgtgaccattttggtgtggaccgcgcgaggggtgttcgggccggggcaagggact

SEQ ID NO: 204272 - DNA, 625 bp, Homo sapiens
  chr16:68771324-68771949
  hyper
ccttggagccgcagcctctcggcgctgctgctgctgctgcaggtaccccggatcccctgacttgcgagggacgcattcgggccgcaagctccgcgccccagccctgcgccccttcctctcccgtcgtcaccgcttcccttcttccaagaaagttcgggtcctgaggagcggagcggcctggaagcctcgcgcgctccggaccccccagtgatgggagtggggggtgggtggtgaggggcgagcgcggctttcctgccccctccagcgcagaccgaggcgggggcgtctggccgcggagtccgcggggtgggctcgcgcgggcggtgggggcgtgaagcggggtgtagggggtggggtgtggagaaggggtgccctggtgcaagtcgagggggagccaggagtcgtggggacgatcttcgagggaaggagaggggcatccgtagaaataaaggcacctgccatgccaagaaaggtcgtaaataggagtgagggtcccggggataagaaagtgaggtcggaggaggtgggagcgcccctcgctctgaggagtggtgcattcccggtctaaggaaagtggggtactggagaataaagacatctccaataaaatgagaaaggagactga

SEQ ID NO: 204273 - DNA, 559 bp, Homo sapiens
  chr16:69139856-69140415
  hyper
cgcgtggccttcggccccactcgggggacccagcttcggagagggcgcaggggctgcgagtcttgcgagccggagccgcgtccacccgggactaggcgtccccgccgagcgctggcttgtggcgctccctgggaccgcgcggggtcgggggtgcgcccgcgggggccctcccactctggtcaactttcccggccccagggccgggggaggcgcctctcctggcgggcacgcgccgggtacttaagggcggctcggctgggcaggcggcagtcggagcgcgcggcggcgcggagcggagcgggaggaggggcatggagccgccgcgggcctgctgagctccggagcgcggcagccggcggcacggtgagcgcgggccggccggcacccaggaggggagggccgcgcggggctgcgccgaggccggggcgcgccgggtggcaggggtgcctctcgccgagccccccgcacccggccagctcccagccctgcgggcgccgcgtccggcgcggggaggcgggttgggggcggcggcagccccgggcttcccggcggccgttcc

SEQ ID NO: 204274 - DNA, 89 bp, Homo sapiens
  chr16:69373055-69373144
  hyper
ctttagcgccaggcgcgtcgcacctgcagctctgctggaagctgggcaaacggtcgagcaggcggccgagcgacgcctccacgtcgcca

SEQ ID NO: 204275 - DNA, 376 bp, Homo sapiens
  chr16:70472227-70472603
  hyper
aggagagaggagagacgaggttcagaccagcctccacgggactggcgctttggccaagtttctggcttcagccgtgcctcagtttccccaaagtaggaaggtcgagccgtgagaactgggccactgaggatggttagggggcagtgccaggtaggggaaagatcacaggggagagaggaaagaggagctgatggggcagacaggctctggccaagagtggggccggggtctcccaggtggagcagaggccgggagacccagggttagcggtacgaactagggagtggactggaagtcgggaccagggcagagagctcttccgagggctggggctggggctggggttggggttgggggctgccggcaaaggagcgga

SEQ ID NO: 204276 - DNA, 337 bp, Homo sapiens
  chr16:70719172-70719509
  hyper
agttaacggttctccgctttattattttttcctgctttggcggtgacagcattgtctgggctccggggccgtgggggaacatggtggtggaagggggcggaggccggtaagaccccggactcgttaaagggccctagagtcggtcctggatccaaaccccattcatggtttggcggtctggggcgcagggagcctgcgtgtgcacaggctcgggtcaggaccccacggggccaccgcgggcaccgcacggacaccccgacacacgagcacccacacccccagacgggcacccggagacacgggcgcccagcagacgcaggcaggacgcgctcagaca

SEQ ID NO: 204277 - DNA, 788 bp, Homo sapiens
  chr16:70719541-70720329
  hyper
cgaggctcggccacccgccgccacgcgtccccggggggtcccgcacccgtcgccgcgcgcccggccccgccgcgccccggttaccttcatgtcgttgactatggcctggaagagcccgcccagggcgccgcactccttctccgccgtctccatgctctggctgggccgggccgcggcggcggctaggcgcacggagcgcggggagcagcgcaagggagggggccaggccgcgcgggcgctcgctccgaggccgggccgggcctcccgcctccaggctgcgctcagcggccggccgcgccgcgctccggggtcgcgggcctccggcgggcggcgcgggccatgtcgcagcggggctggcgggcggcgcggggggcgcggcgcgggcagctcgcggcgcagcctcggcgcggggactgacggcggcggtaatccgagccgccgaggatcgggcgtcacgtgggcgcggcggaggggggaccgcgaggagggagggaaggagggcgggccgcgcgggagggggctgtgggaacggccgcgcgggcgcaggcccattcacggccagaaaccagggctttgaaatccgagcccgggcgctgccagactggtccggcgagcggggccgacgggcgcgggcgccaccgagggtcggggggcggcgctgggcggggcccgccctgcccacgcaggagcgggactggcggttgggcctcggcccccgggcaggggctccacgatatcttctggcctttggtctggggcggggggcttctcgcgcttctaaagacagg

SEQ ID NO: 204278 - DNA, 130 bp, Homo sapiens
  chr16:71323303-71323433
  hyper
tcaagtcccactgcgcacgcgccctgtaggccgggccggagtcacgtgcgccaacgttacgcacgccggcgactctcgcctcgcctaggcctcagctccctaggttttgcttcgcggagtacagaagctg

SEQ ID NO: 204279 - DNA, 929 bp, Homo sapiens
  chr16:71659878-71660807
  hyper
ggctgtgggtcgccccgcccgggtttccagcagcagcaccccagcccccacccagcacacaggcacccctcccgcccgggccccagacgcgctcaggccgccccctgagggcgcccgttctcaggtgagctcccggactagcgcgcatgcgcacaggtgagtgcccgccccgcccccgggcttggccacctgcccaagaaacttgttggttgttgccctcaggtcgctcccgggcggggacacggaacccggccatggaagatccgtcgggggctcgcgagccccgggcccggccgagagagcgggacccgggacggcgcccccacccagaccaaggccgcacccacgatcgaccgcgggaccgacccggggacccgcgcaggaagcgaagcagcgacgggaaccggcgaagggacggggaccgggacccggagagagaccaggagagggacgggaaccgcgaccggaaccgggaccgggagagggagagagagagggaaagagacccggaccgaggcccccgccgggacacacacagggacgcgggccctcgcgcaggtgaacacggagtttgggaaaaaccgcgccaaagccggacgcgggacggagcccggggactgacctgggacgcagccgcgcctcctgggcccgcgccctgggaagccccggagccgccgcagccgcagaggaagggagaccccgggcgccgcagacccgaaaggtgagaggggccggggcgctgcgacctccgcgccggggacacctgtggcccaggccggcccgcgaggccctggcgtccccgggttctcgtcctaggagcccgtttaaatgaacaaatgccgtttctcccttctgcgctctcagaggcgacctggcagggaaggaaaactttagggttcccccttctcgtggcctgaacccaactaaca

SEQ ID NO: 204280 - DNA, 208 bp, Homo sapiens
  chr16:72699010-72699218
  hyper
cggcttccgggtgggcggcttgaggtggcttccggccgccaggcgagactccgcgggaaaactccctgctagagagactaggagatttggggctgcggccgtttcctccggagcacccacgggactgtgtgctggggtccctccaccggctgtgtcctttattcttctttctcacccaacgatttacctgaacggttataaagtgcac

SEQ ID NO: 204281 - DNA, 291 bp, Homo sapiens
  chr16:73091594-73091885
  hyper
cagagtcccctctgggcgctcgcggcgctgccagtggggcagggcggagagcgcacaggtagaggatcgcgcggccgcctcgccccctccgggaccccgtggctccgaacgggctcccgcgtcgccggcaagtcgagccccagcgcggaaggcgctcgcccggccagcggtggcggccgcggcagcagcagtggctgcgaccgcggcgactgctccgggccgggtgcgcgccccgcgcggctgctcagcccggggccccggcgcctctcggggtggggcaaagttgggggc

SEQ ID NO: 204282 - DNA, 117 bp, Homo sapiens
  chr16:73091900-73092017
  hyper
cgggggcactcggcaccgcggacccccccatactccccccaccgccggccgccgcctttgtctccgagctggtaccccggccgccctcccgccctcggcccgcgccccggccggccc

SEQ ID NO: 204283 - DNA, 49 bp, Homo sapiens
  chr16:73100590-73100639
  hyper
ctggaaaggagagggcgcggcgaggggcgcacctcgcgcccagggccca

SEQ ID NO: 204284 - DNA, 37 bp, Homo sapiens
  chr16:74352126-74352163
  hyper
gggcaggagctggggtctgggaggggaggtgggtgtc

SEQ ID NO: 204285 - DNA, 213 bp, Homo sapiens
  chr16:74659412-74659625
  hyper
aaaaaaaaaaaaaggacagaccaggcgcaatggctcacgcctataatccaaccttttttcttctgccattgacttgttgtggaagccagatcagctgtcttatagaacgcccacaacccggacttgtgtatatgctttctgtgctatcattaaacttgttctcctctattccctgcaactccagtcaatgaaagttagcgctagcttctagag

SEQ ID NO: 204286 - DNA, 166 bp, Homo sapiens
  chr16:74700794-74700960
  hyper
ctcccgccagagccgccggcaggcatgctcctattggacagaagccctacgctgtggccaatacccactcttcttcttcaatgggtcccccgatagctgaagcagcggtgctctcattggctggtagttcgtcctgacgaggcgggaccgcgcttgaggaagcctc

SEQ ID NO: 204287 - DNA, 40 bp, Homo sapiens
  chr16:75018963-75019003
  hyper
ccgtccccagtatcccgggaccgtgcgccccacacagcca

SEQ ID NO: 204288 - DNA, 45 bp, Homo sapiens
  chr16:75032744-75032789
  hyper
tttctgtggctaacgcccagtggtcaggccgcccaggtcacaggc

SEQ ID NO: 204289 - DNA, 212 bp, Homo sapiens
  chr16:75033799-75034011
  hyper
gggcaccggcgactccgagagggcgcccggcggcggagggtctgcgtccgactccacctatgcccatggcaatggttaccaggagacgggcggcggtcaccatagagacgggatgctgtacctgggctcccgagcctcgctggcggatgctctacctctgcacatcgcacccaggtggttcagctcgcatagtggtgagtccgcgggtggtg

SEQ ID NO: 204290 - DNA, 41 bp, Homo sapiens
  chr16:75285013-75285054
  hyper
gaggaaactgaggctcggaggcagggcgcagaggcccaagg

SEQ ID NO: 204291 - DNA, 306 bp, Homo sapiens; identical to SEQ ID NO: 53284
  chr16:75285434-75285740
  hyper

SEQ ID NO: 204292 - DNA, 274 bp, Homo sapiens
  chr16:75299751-75300025
  hyper
gggcctggcgggcagcggcgccagcgggctgggggctcgggtccgcccgcgccgctcagaggccccgcgaggggtcccggcgctttccggctcctccggctcctgagcgttcccggacgccggactgtccggccgctccagccgcgccgcgcatgcgccgcccgcgccgccccccccaccgtctccgcggccagggacgcgttaaaggtgaggaccccggacctaggcctttttctgtcggcccaacgcggcggggaggcgcggtctcctccgc

SEQ ID NO: 204293 - DNA, 165 bp, Homo sapiens
  chr16:75529727-75529892
  hyper
agtgtcccaactgggaagagcggagagaccaggtggccttaggagctgggtccgcagcttttcccctcctcctgcgcattccctgccctagcctaggcccagaggcgcaggttcatagcaggtccagataaagacatgatacgtttcaataaataagatatttcc

SEQ ID NO: 204294 - DNA, 84 bp, Homo sapiens
  chr16:75600000-75600084
  hyper
gccagacgttttccgccaccaacgctcccgagaccccactcctgtcaccagttccccgaacattcctgcgagcaatgtcgcaga

SEQ ID NO: 204295 - DNA, 68 bp, Homo sapiens
  chr16:75681563-75681631
  hyper
aaggaggatagtacgttaatttccaggtcaaggtgcgaagccccacctcttccgggggagagggggcg

SEQ ID NO: 204296 - DNA, 82 bp, Homo sapiens
  chr16:77246930-77247012
  hyper
accgtggagcggggcggggcgtgctgggatctcgaggcggggcctctgccggacccctcccaccagtcgagccccgggcgcc

SEQ ID NO: 204297 - DNA, 204 bp, Homo sapiens
  chr16:77247511-77247715
  hyper
taccaggcactgttctaagcactggattttaaacagcgcggtcagcgacggcctcacctaggaagtggtatctgagcggagaagcgaggtagagaagcgagggggtgagccctgtgggtgtctggggaaaggtgggcctggcagaagacatgcctcatgccaaggcgggaggtgaggctgcacttcgctgtgtttgaggagacg

SEQ ID NO: 204298 - DNA, 66 bp, Homo sapiens
  chr16:77469120-77469186
  hyper
ggagtgatagggagggagggaccgaccgccatgagaaggaggggagcgcccagggtcaggcttgga

SEQ ID NO: 204299 - DNA, 744 bp, Homo sapiens
  chr16:77756211-77756955
  hyper
ccggccctaagtcccgccccgcgcctctccccacctcaagtcccgcctctggctataagccccgccccgccccgatcccggcctccgatcccagatctcgcaccgccccgccccctgtctccgccccagacaccaccccgcctcgtgctctaagccccgcccctctctctggctttaggccgctcccaagcccagagctgctctgcgcaagcgcgaccgaccgagcagctccgaggagtccgcccggaaacaaacattccccagggcaatgtcacgacttggtcttcccgaggagccagtcaggtaaaggctttccgggccctggcaccccgagcttggtcaggcccggccttgatcgtagcggaggccaccggggccttttggccgggactgattttgcagctcccgccagtccacctgcgagcgccggatgggggagcactcgcctccagcaacccgcagggtccccgaacctttgcactgctctggccaggaacagagccggcttaagccagtatggtttacatacacgctgctccccttcccagccggcttggctgttctgcaatccgcgtctccagagttggaccccaggacccccgacagtggcacagacccgcagcaggcagccccggattcaagtcccccggtggctactttcagttgtgaccttgggtctgtcagtttcgtaaactctctgagcctggaggtgaccctgtgatcacttgccgggctgttgtgagg

SEQ ID NO: 204300 - DNA, 49 bp, Homo sapiens
  chr16:77822068-77822117
  hyper
acgacccaatttcccgactatcccgcccagcctcgaagatgggagggag

SEQ ID NO: 204301 - DNA, 179 bp, Homo sapiens
  chr16:79633613-79633792
  hyper
cgtgctcatgggggtggaggacagcgagcccccggcgatgagacggccgcactggctgatgatgcggtcggtctccaccggttcctttttcacttcaaacttcatcagatcgaagtcattaacatattccatggccaggggactggtgggcaggtcggagttgctcattgccagttctg

SEQ ID NO: 204302 - DNA, 491 bp, Homo sapiens
  chr16:79633843-79634334
  hyper
gctgcaggagaggggccagcgggctgtgctgggtggccagcgggtgagccagcttgccgggctggggcgcttctagcttgcgcggcggtggctggcccgaaacctccgagcgcgctcacacacacacccccccgccctgcccgcgccccccgcgcccgccctccctcccccctgctcacgccaatgtgctccctcgctcgccccggcccctccttgctcgctcgcctccttgcgcgccgagccggcggcttcaggctcgggaagatcctccgcgagctgcggtggcggcggtggtggctgcggcggcgaagctggaggagcccggcccggtgcgcggcgtcccccgctcgccgctccgctgcgcgctttgcataaggaagggctcgcctcgccggcccgggctgcaggcagggcgcgcgcggcgtccgctcggggctggaggcgcggcgggcgtctgtccgggcggcgcgggccttggcacgggggagtta

SEQ ID NO: 204303 - DNA, 195 bp, Homo sapiens
  chr16:79634364-79634559
  hyper
ttggctctctttattattttttttctttcctctctctccctcgcgcgctctctacctctgtgcaaagtgcaaggcagaggtgcagcccgactggaggagagggaggggggagtttagttctttcttgcctttttttaaaaaagcaaaatagcgaagtcctggggaaagacgaggcagagagcaaaggggggaggg

SEQ ID NO: 204304 - DNA, 65 bp, Homo sapiens
  chr16:79635694-79635759
  hyper
gggggaaaaacaataccccagccctcaccagctaccctcgaagggttaaattttaaaccgcggtt

SEQ ID NO: 204305 - DNA, 103 bp, Homo sapiens
  chr16:79636191-79636294
  hyper
aaactattgttggagcgagttggtttttacctcaacagcgccacctttcggcaaaggtcagttgaaattgatccgtgtccagttttgtcgatgaagtgaaaag

SEQ ID NO: 204306 - DNA, 70 bp, Homo sapiens
  chr16:80574538-80574608
  hyper
ttccggtactgtttcgtgcattttgtttggtgcattttgtccgtctccctggcacctggtgggtggtgaa

SEQ ID NO: 204307 - DNA, 93 bp, Homo sapiens
  chr16:80575052-80575145
  hyper
gggcccacccaggcacgggcggtccaggggccgcggcggaggctggtggctccaggatcttcctggaggggcgagagggagaccttggaaagg

SEQ ID NO: 204308 - DNA, 303 bp, Homo sapiens
  chr16:80837424-80837727
  hyper
gggggtgagggaggtggcccggggaccccggggagcggtttggcggttgtccccccgaacccccacccagcctcccccttcgcagccccccgggaccccgcctcgccccggccaggctccgctccgatcgcccgcccccctcctcccccgcgcccccggcccagccgggccgcgcaacccccgccccacacccccgccggccgcggcgcgcccccccgcattcccagcacgtccggcgccgacttttacctgtactttctgtactcgaggcggctcgtcgggcgagaaacacctccccgggac

SEQ ID NO: 204309 - DNA, 360 bp, Homo sapiens
  chr16:80838207-80838567
  hyper
tgtttttgcagaatgacaggcttgggggctgcctatgcgcagaatcagagcgggcggcggcggggctggcgtaaccggcagcagcggcggcggcggcggcggcggcacgagcgcgggcagcagcgacggccgcgcagcgcgcccgggaggcacggacgcggcccgagcgccgcggcccccgcgacccggcgacccggcggcggtggctgcagccggcaacggctcgccccggcgccgcctgcaggaagccgcccggcgcccgccgccggcccggacgctgctgccactgggcgagtccccgccccccgggagcccggcccggcccccggggcggggaggcgggggctgctgcccggccgc

SEQ ID NO: 204310 - DNA, 222 bp, Homo sapiens
  chr16:80838747-80838969
  hyper
cctcagggaaggggccccagccgagccccgccggcccggggtccccacctacctcctccaccctcgaggggagtggacgccgcctgggagacctggcccctcggggctgcgcggcccctccctccaggctgggttgtaagatgtggaggccacagggaggaaggatgaaatggcccatccagaggcaccatggggatccaggacaggcgtggccaccccata

SEQ ID NO: 204311 - DNA, 295 bp, Homo sapiens
  chr16:80966104-80966399
  hyper
gcggagccaagcccggagcctcggggagccgccagcgagcgcagactgggagggagccggccgggctccccgccaccccttcctccgcgcgccaagacctgtcagtttcacccagcccggcttccctggaaaggcgggatccctctgcagatttccaggctcttggaagaggaccggcgcgtctattaaacccgagtcgctccacgggctctccgcccagagcacaagctgccttcccccgggaactggacctcggcagcggcctgcgcagagccgggctccggggccctggccg

SEQ ID NO: 204312 - DNA, 33 bp, Homo sapiens
  chr16:80966431-80966464
  hyper
ccagagggagaaccaccaggaggccgcgcgcgc

SEQ ID NO: 204313 - DNA, 132 bp, Homo sapiens
  chr16:81040580-81040712
  hyper
gtccactggggcacggcagcgtctaagccacaagccgagcacataagccaggtcctaacggagcctatgtgtaagtccactactggtgcaaggttgcacacttctaagaagagcggcgtggggggctcggcg

SEQ ID NO: 204314 - DNA, 75 bp, Homo sapiens
  chr16:81779773-81779848
  hyper
tggcacaaacaaggccggcctgctggataaagggaggtagaaacgctttcagccctccccggtgcttcccggttt

SEQ ID NO: 204315 - DNA, 134 bp, Homo sapiens
  chr16:81780013-81780147
  hyper
gaaatgtagtcgaaacggccgctggggcagagtgagcacccacagtggtgccttctggggagggtcgttttcacgtagtccaagagccaggggtgggaaccgcggggctctcaccccagcgccgggaggggatg

SEQ ID NO: 204316 - DNA, 161 bp, Homo sapiens
  chr16:81812592-81812753
  hyper
cctggactgcggccggctctccaggaatgccatgatattggggaattccctttgcacctggccaagtggcctcgggcaggtagcctcccctcgggttgcctcagtttcttctttggcacgcagaggcggggctccaggcctgggccgctccatggcgggga

SEQ ID NO: 204317 - DNA, 275 bp, Homo sapiens
  chr16:82660904-82661179
  hyper
taggcaccccccacacacaggctcccactctggcgtgcgtgtgtgtgtgtgtgtgtgtgtgtgtgtgtgtgtgtgtgtgtgtacgttcgttaacgggaggaggagagagctcccagtccttttttgctagcaggggcgacattctcgcccacatcaagtggggtaactttggttccctcctccggaggctcggtgcattggagaaagactcagttagaggcgactccaacgagccgcggttttccccagcccaacgcccagcggccgaagcgctg

SEQ ID NO: 204318 - DNA, 38 bp, Homo sapiens
  chr16:82661795-82661833
  hyper
tcgcctctctggcaggcgttgggacttggagtgagctg

SEQ ID NO: 204319 - DNA, 128 bp, Homo sapiens
  chr16:84328194-84328322
  hyper
cttgggaggagaccgccccagcctgcaaggaagtgctcattatggagagtggagagtgacaggccactcccggccacgtctccaagcaagccggtgccccctcctcctgctgccaccgcccactgagc

SEQ ID NO: 204320 - DNA, 282 bp, Homo sapiens
  chr16:84401741-84402023
  hyper
cacctcgctcccggcgccttagagccgcccaccctgggttcctcaagaggatcacctggggctcgttaaaaacccagctcccggcggctccaaaccgtgactgggcagggaggggtctgggaatccggattttaaaccagcatttgctcctccacctcccccactccaggtgattcttaggatctgtaagtttgggaaacagcccaagccctgaggcgacgcagcctctccctgggcctttcatggccagccggcgctgtccccagagcccctggggtccca

SEQ ID NO: 204321 - DNA, 817 bp, Homo sapiens
  chr16:84650976-84651793
  hyper
ctcccacgccatgcgccaggggcaccccatgtggccaccggttcctcccgggttcgctctggccggggctccccgggtgcagacaacctcccaacgaccgcgcatccgcccggcaggcgcgcctccctacctgtgcactgctggatgaagtgctggtactccgctccctgctcgccggggacgatggtggagccgtcatatttaaaagtcaccctttgggttgggagaagaaaaaaacacacacacacatcagcgctggtggccgcgcgacgcggcgcttgcagaggacaatctaacagacgcgctggccacggagaagcccgcgggggcctggcacgccgtcccggaataaggcgaggaagacagcgcgggaggcccgaatccgtcccgcctggaggccggctcggtgcacgaggccccgcgcgagcccggggagcggggcgtggagacgaatgaaaagttcctaccagatgacggccgagccgtcgtcgcgcaccaggttgtacgccgcccggcaagcctctttgtcgatcttggtggccatcgccgcggagccgcagcgggacactgtccggggcggccgagcgcgcccctggccggcggcggggatgggagcgcggcgggtacgcgccgagggcgcacgggctggcggcggtggcgacggctacgcggcgcctgcaagctgcgagcgcggcggcggcttccactgcggacggagagcgcgcggggaccccaggccgtggcccgccccgcccccccgcgcccattggccgcccaggcggcggcccgcctcttcattggccgtcgggctgcgggg

SEQ ID NO: 204322 - DNA, 204 bp, Homo sapiens
  chr16:84853661-84853865
  hyper
gcccgcgctgtcgccgctgctaccgcgtctgctggacgcgggagacgccagcgagctggtgattggagccctgcggaggtaagtgtgatttccatgcttctcccttttgcaaactgttacccccccgagaagctggaataactaggacagatgccacctcgcagggctgactgtgtgctggcaccacaccgagtgctctgcttg

SEQ ID NO: 204323 - DNA, 110 bp, Homo sapiens
  chr16:85482269-85482379
  hyper
ttaatgcaaactggcaggggcgatggaggggggctccgggggcaccactggcagcccgccccacgccgcccacatccccggccctgcaacccggggcaggaaaccaccaa

SEQ ID NO: 204324 - DNA, 920 bp, Homo sapiens
  chr16:85589833-85590753
  hyper
gcgccgtggcttgaacggtgctttttgttcattcctgggttttaatattattttccttcttcatccctctctggccactatggaattctaatttgaaccatgtttggattgaagccgcctctgtattacttaccaggtaagcgagccgtgcgcctccctgggtcccgcgcggcgccggcgcgcccgggaccctccctcacccgacccccctccgccagacccccgagccagggtcggggcattgggtccgccggtgccccccgcagacgcgcgcggcctcggatcctcccgctgcggtcaagcccgcggtgtgcgcggctacgtgcggcggggagcgcccacctggcccgccgcccccatcgcgccgccgccgggggttgcgcgtctcgctccttttgtctgccgggagccggctccgccgcggcggcggagcgagcggccgaggcacttaaaccttccaaggtgaagtaagcgccgagtgtgaagttactttcctgcaggccgccccgatcgggtagcatgccccccccccccccagtcctggggtttatttccctctccctccagccaacccccttgcgcggtctcggcgcgagcgtggctcgccggcccccccgccgccccccttcctgcctgggattccctggaaggttttgttccgccgaggtcggaggagggggccggggaagctcaggagggtatttggcgtggcttcctgtttccttaaccttcctgcgcggtgacagccgcttgccctgtaactttctgtttcggggcaagtcgcgctttcagcctggaggggaggggaggggagggggttgacagctggaggtttggggagcccctcctgaattcaccttatttggatttctaaaccttaaaaaaaattaagtgtaggctacatggaagctggtgatcca

SEQ ID NO: 204325 - DNA, 342 bp, Homo sapiens
  chr16:85722487-85722829
  hyper
acctcggcagcgtccatggcggcgcgagctgcaggccagagcctcacggtctcctcgggcccctcagcgtcccggaggagacgccgcggccgccgttttcccgccacggcgagagcccgccccggccggaagacggcctgcgccagcctataggaaggcggtagacagcctataggcgctgtctgcgggcgggggggcggagaccgcgctcgcgaagagcccgcggattggcaaggccgagggaggctgcgcgccggccccgccccggcccgcggacaggccccgcccccaccccggccccgccccgcccgtgggcgtgcacctggcgctgtcaggatctcc

SEQ ID NO: 204326 - DNA, 178 bp, Homo sapiens
  chr16:85932120-85932298
  hyper
gcgcctagcaccttcgatgctcctgtttcagtcgcggtctcagcgggcagtggcctcctttgaagctgggattctcctgcccctcccgggcagcgcaggccaccggtgacccgggacggtctgtaaacgaccttcgcgtccccgtccccgtggaataacgcgcggcgggcatcactgc

SEQ ID NO: 204327 - DNA, 49 bp, Homo sapiens
  chr16:86321068-86321117
  hyper
gaggaccccccaccagctgccgcagcctctgctgcgaatccccccacac

SEQ ID NO: 204328 - DNA, 392 bp, Homo sapiens
  chr16:86334431-86334823
  hyper
caaataggattttgtttccccgacgtccaggctgagtgcagccagatgggatgacttgacaaagtcacaaacgctgacaaatcccggcgggggagttgtggcttcctccaaaggaaggtaggtctgtgtttgtcaattgatcagctcagcggtggccctgagtgaggccgtgaggaaagtaactccgtagttttaattctgatgattacttcctgaaaaaggaccctgcaatggtgggtccaacctcctccttccctccgtctctgccagtcgctcggtctctgtctgtgctcccctccagctgcctgtccctccccctcaatgggggcttaggggcccagctcaccactcacgctcccacaacgtccagcgtccatgcctgcagcctgttt

SEQ ID NO: 204329 - DNA, 227 bp, Homo sapiens
  chr16:87417941-87418168
  hyper
ctgcggagctctgcagggaccttcggggatcccgagctccctgcggaagccccggggagggcttggaggggcggcggccggcgcggcccaagagatccggggatgcgcgcccggtctggaaagggaggccctgccatgcggcgccgcccaaagggcgcctgttcctgcagctgctgggagccgcgcacgcctgctccagctgggctccgccgaggccgctgagcggg

SEQ ID NO: 204330 - DNA, 64 bp, Homo sapiens
  chr16:87418200-87418264
  hyper
aaggcgtcctctcacctgagcagccgcgcacgtcgccgtgggctcgcctcggaccccatctctt

SEQ ID NO: 204331 - DNA, 800 bp, Homo sapiens
  chr16:87525701-87526501
  hyper
aggcacgagccgaggaagcgaagctcgagcgggatgcacaggtccagcaggccgcacaggaactccacgcgctgcggcgacggcagctccgagaaccagcggtacacgccgtccctctgcagcgggcagcgcttctccaccatgctgccgcccgcgccgcgccgcgacccggggccggggaccgcgcgggggcggccggggggcgccgggggccgcggccggggcgcgccgggaccggggacgcgcgggccggggccgggtccgggcgagggcgcgcgggcgccgcgggccgggcgggcgccggggcgggggcggggaccggggccgggcaaggctcccgtcaggggccggcgggcgggcgcgcgcggggcgccgggggggcccggggcggccggggcggccgggggcggcgagcggcctcgggccccccgctcacggggaggcgccttccccgcgcccgtgcccagcggcggccggtgcgcggcggcggcggcggctgctcctcgtcgtcgtcgtcgtcgtcgcccgggaggcggccgcccccatctccccccgcgccgcagggtctgtcactgcgggccgccccccgacggagccgccccggccatgccgtcgccgccgcccgcgcctccgcccaggccggccgttaccccgggccgcgggcgcggcgtcgccgcctggggagcgctgggggccgcggccgcgaaacggacgctggagggggagggacgcgcggcgggaggcgcggagggatccggccgggacttgccggccttgctgctcccgcgcggcggacggat

SEQ ID NO: 204332 - DNA, 523 bp, Homo sapiens
  chr16:87526561-87527084
  hyper
gaggcgccggccgaggagcggagggatcgtcgcgctcgcggctgacgggcggccgggatcagcagaagtgggcggggtggccgcctctcgcgacagcccgggcctgccgggcccgtcccccccccactgattggctcaggcggcccgttctcggcccgtgattgtgccgggtccccaatcccattcgcccgttccgcggccacgcctccctgggggctgtcgatcatgttggggccaccgcctcccgtccctcggcggccgtcaagacgcgattggtccgcggaatcggagaggcggaaaacccgggctggatttctggttgcttttgttcccgcaaatttgcgtggagcattgtttttcggcgaaaacggggcgttcggccttcctgctttatttttgagcggtgtaagagggaggtagtgggtatcttcgagaaacggccgccgcggggtccggagccccgggttccaatcccgggtcggccactgcaaagctgtgtgaccttgggcgagtcacttggcct

SEQ ID NO: 204333 - DNA, 149 bp, Homo sapiens
  chr16:87635591-87635740
  hyper
cattgtttgtcaccggagaaaaccacctgtggtttgcaaagggcctcagtcgagtcaggggcaggcggggcagatccgagcccggcgggaggggcgaggcgcgggggcgggcaggggcgagggtaggggcgctcagctggcaggtcctg

SEQ ID NO: 204334 - DNA, 124 bp, Homo sapiens
  chr16:87635827-87635951
  hyper
tttaaatcccactcccggagggggcgggggcgccccggctggaccccggtttccagtccggcgggggccccggggaagcccagggcggggagcgcggggctgggggcgcggagggcggggcgcc

SEQ ID NO: 204335 - DNA, 191 bp, Homo sapiens
  chr16:87637320-87637511
  hyper
acagtgcccctgtgccagctgaagggtgttgggggctttccaggggcagagccaggcggggcccagcagagcctccgtgcgtcggacacagcaggccggagacctgcgggaagggccaggctgggcccgcggccctggggaacccagcaagggcagagggggctgggagaagggcccctccccttgttggc

SEQ ID NO: 204336 - DNA, 255 bp, Homo sapiens
  chr16:88519054-88519309
  hyper
ggcttcctgagccggttgtcactgcccccaccgcgcacgtggagcgtgcggcagagcccaggggtctagggagggaccaagggctgggggcggagttacagtgcgggggcggagcctcggcgtctcaggacccaaccaggtcgggtcaggtttggaggcggagctggcgccgagaggcggggcgcaggatgcggtgccgcggggcagcagaacagaaccgaataggtctcagactcccagcgcggcctggggaca

SEQ ID NO: 204337 - DNA, 107 bp, Homo sapiens
  chr16:88636352-88636459
  hyper
gcgttgaaccgcgcggggagccaggcagcccacgggaaaggtaagaattgttaggcttttaatctaaagtcgatacctcaaaaaataattccggaggtaagcattta

SEQ ID NO: 204338 - DNA, 203 bp, Homo sapiens
  chr16:88729780-88729983
  hyper
cggcgatccggggtctgggcgcggcgaggtgggcgctgttgcctgtgggggctacctgtctgctggtgctgtgcgggcttgtgcggggctgtgcggcagctgtgtggggcccgtgaggagctgtgcggggggctgtgcgaagggctgtgtgaggcgctgtgctgggggctgtgcggagaccttgaggcgctgtgcggggtccg

SEQ ID NO: 204339 - DNA, 114 bp, Homo sapiens
  chr16:88851818-88851932
  hyper
ggacccctcccctcccgcagtcttggccccgcggctccgagcgtgcgcggcggtgggcaggggcgcttctcgctgggtgggctgcggctggggcccgggcgctacataaggggt

SEQ ID NO: 204340 - DNA, 507 bp, Homo sapiens
  chr16:88878527-88879034
  hyper
aagtgcgagtcaaggcgcccttccttgtctcgggctacgcttctgactgcagccaggcagctgtgggccggggccttggcggctggaggaggggcgtgagctggtctcgcccacgcacctggcgcgcgtacgggccgcgccctttctcctttattggccgagatccccacgctgcgcgcgggaggctggcgcgcggggtggagaagggcgtgaggaagcggtccaagtagcaggagggcggtgcagggcccggagggagcagcccagggcggaggcggcgggcctgggctggaccggccgggggcgctggcctctcgcggatgggccctgccgttgaggcggctcttccccgcccggacccgggggagggaggccggaaggtgtggccaggccagggcgcgcatccgcgagggcagaagcccttctgtccgcctgcagaggccaggtgaccccttagccttggggtggggagctgtgaaccccctggccgcccgaggactggtaccc

SEQ ID NO: 204341 - DNA, 381 bp, Homo sapiens
  chr16:88950011-88950392
  hyper
gtggctgtgcccatgggagacgtgagtgacgcccggcagtggccgactcttctgcggtggctgcgcccacgggagacgtgagtgaccccggcagtggccgacttccacggtggctgcgcccacgggagacgtgagtgatgcccggcagtggccaactcttctgcggtggctgtgcccacgggagacgtgagtgacgcccggcagtggcttactctttcgtggtagctgcgcccacgacttctggagacatcagaggcttccaggccccactgttttctgcatttggccactgcccacgcttctggggctgaggtctccctcttggggcccttttcagcccctaaagatctcctagcctccgaacctgaaatggctccccca

SEQ ID NO: 204342 - DNA, 272 bp, Homo sapiens
  chr16:89007036-89007308
  hyper
ggacccccctccccagaccggccgccgccacctctgcctctcccagggccgccctcggcctccccactcccgggtctccgtcacgcgggccgcggggcctttgttaggaaaaccgggcggccccaggggagcccgcgagactcccagcgcccgggcgcgtcgttcccctcgaagtttcgccgcagcccccgcaggtcaggctctgctcacggggggctgcgctcagcccggatgggtgggcgctgggcgggttggctccaccctgccgtggg

SEQ ID NO: 204343 - DNA, 91 bp, Homo sapiens
  chr16:89007789-89007880
  hyper
gcctccgcctcctgccccccgccgccgccgctgcgccacctgcctcccgcccggcgcccatggcgctcagctccgccccggggcgccggcc

SEQ ID NO: 204344 - DNA, 373 bp, Homo sapiens
  chr16:89007995-89008368
  hyper
gggagaggggcgcggggagggggcgacgggcgcgccgcctcctgcggggggcggcgcggggaggcgcaggcgggggcgagcgaagaggttgaggggtgcgggcgccgtggagggggcgcggctctggggggcggcccccgcctgcgcccaccctctccccctccgcaggccgcgcacacccacctcgcagcagtcggcggccgcgggcctcgcagctttagaaccgcggcttctggcggccgcgcgggaggctgaacgggagttggggggtgtggggggggtggggaggtggggagttgggggggaggtcgctccttcggccgccgcccccgccccctgccccgcgctcgcccccagcgcggcgcctggcccg

SEQ ID NO: 204345 - DNA, 274 bp, Homo sapiens
  chr16:89189485-89189759
  hyper
tgctgacagcaggcccgggaacatttccagttcagccaaggagtcggtgcagcaggtggagtacagctgccctgcggggcctggctccaccaggggccaagacccttcgtggggaggagcacagcctgagggcctcagggtttgtgccctccgacacctgagattcagggctcccagaggggtgggtgggcgccccaggacaaccaggtgatgatgggcgctgtgaactctgaaaagccccagcatcagagacctgctgctctctcatgtgaag

SEQ ID NO: 204346 - DNA, 40 bp, Homo sapiens
  chr16:89266729-89266769
  hyper
gagagctgtgctcagcggcatttcccggtgaggcccttga

SEQ ID NO: 204347 - DNA, 157 bp, Homo sapiens; identical to SEQ ID NO: 127778
  chr16:89267957-89268114
  hyper

SEQ ID NO: 204348 - DNA, 263 bp, Homo sapiens
  chr16:89614907-89615170
  hyper
ggctgctgccgcccgtggctgtggagggacagccgtgctttcagcgcagcaggggctctgcggagaggtgtggatctgcagcaccacctctggtgaaactcatggtcccgaccgtcagtaggaacgggagatgagttttggtgacgggtgaccggtgggctgaccgcctctgactgccgttccgtggctgctcagtgtggggtctgcgacgtctgtgaggagagaggaccaaactgggaatcggagctgctggaggtttccat

SEQ ID NO: 204349 - DNA, 153 bp, Homo sapiens
  chr16:89627717-89627870
  hyper
cggttcggtaccacacgaaggtgcgcgccggccgcggcttcagcctggaggagctcagggtgagtactggcagcgctgcggtgtcaggaaggccccgaagtcccctctgttggcctcagtcgcgtgatgacattctccggaatcgctgtacgg

SEQ ID NO: 204350 - DNA, 208 bp, Homo sapiens
  chr16:89894364-89894572
  hyper
ggtcaccttgcccggggctcggggaggccactgcgggctttgtctgctcagctcctcccggctccctcccgcgttcccagcggcaaacctcccaggccccccgcggtcaccgcagtgtcccgggctggatgccggcccgggcttttgtgggcatcggccgtctgggtctgcgggggagcgccgggggtgtcaccgcgtgtccgagcgc

SEQ ID NO: 204351 - DNA, 45 bp, Homo sapiens
  chr16:89927371-89927416
  hyper
ctgctggtctggggccgtggtctctgctgccgcctgctggggccg

SEQ ID NO: 204352 - DNA, 202 bp, Homo sapiens
  chr16:89989101-89989303
  hyper
tggtggaggaggtcgggtgcccaccccctccccgcccactgcggaagccggcgacccacggagctcgctctcggccgccgccacccctctgtgttcgcgcccttccgagctctgatccgacgctttgtttcttctcagtgggttcagggcctgggccagcctttacctacctcccccacccaaaaccggcaaaagctcagag

SEQ ID NO: 204353 - DNA, 217 bp, Homo sapiens
  chr16:89990062-89990279
  hyper
gtgacctcgggctgtcgaggcgcagctcacgtcagtcgcgaagcctcagccccctccacacctgcgccccctccacacctgcaccccctccaccgggcctccgcaggtgcagctgggagccctgtctgggcgtggccctcttttttggggccgcggcatagccttgagtgagacgggtggggtaggcaggtttgggtggggtggggggttctcctca

SEQ ID NO: 204354 - DNA, 123 bp, Homo sapiens
  chr16:90085456-90085579
  hyper
ccacccaccaaggagcgtgccgggcacggcttcccgggccgggagcgcagagaacaagggggcggagactcggtccgtgtgcccccagccccgcgcggggaccgcgcccgggaggtgcccctg

SEQ ID NO: 204355 - DNA, 528 bp, Homo sapiens
  chr16:90088770-90089298
  hyper
ggtccttcatcagcacgtctttactgagcacgtgctgtgtgctgttctaggcgctgaaggatagaagtgaagggttcccccctcgtggagcttaggttccagcaataagcaaaacatgccctgcagcgaaaggcttctgggctgccggcgacattttcccaacgttcacaaccgggttccttccggacgcccgtctctagggacgcactcccgcctttggcagggccgctgcccggcggagtctcgcgaggatcttgtgacttatcgcggcatcgcccagcggttgccgggaaacggcgtggcttccgggggcgggcgccctggtcccggagtcgccgctgggcctgtccgctggcgtcatggtgagcaggggcgggagcggggctggggtcctcggcaggggcccggagacctcggggcagggaggcctcggtacacggagaccctgggaatgggaggcctggagcgctgggtttctggaattgagagctcggtgctcttgtgggggtctccgtggggcaaactcag

SEQ ID NO: 204356 - DNA, 383 bp, Homo sapiens
  chr17:523544-523927
  hyper
cagcccgattcacccgcttcacctgctctgaggctggtctcatgggacaaagagggaattgcactgaagtctcagggttttaggaccagaagggtaggagctagagaaggtggcagaggtgaaggttgaacaagtgagtgggactccaggtacaagtcccagcctgcccccggcttcaaccacagtagctcagtttcacggtcttacacattagctccgtggcctggagtaagtttcaaatgagcacagcgcctacttcctatggctgatgaagcacagtgactgactgcaggtaaacgcacctaatatagcgtgggtcaccaagtggatgttcaaagcatgacagctatgggtgtttcagattctacattctattttttttt

SEQ ID NO: 204357 - DNA, 464 bp, Homo sapiens
  chr17:576379-576843
  hyper
aaaaacaacggcagcatcatttcgaaagccaggaggtcctccagagagcagaaacatggatgagtgctaccacatctgataagccctacacggaagccctcaccacatccactgagggtggacaccaagggtcaagtcgcctctctttagagaaagtctcttcttttgttactgctgaccaccccggcatcactgagagctgttgctatggaaacgaggtatccccagctgaaacagaggtgcttcagccagcctcagcaatgctaacaatgcagcccgctctccacgacggtgctcaacagcagcagaggctgcgggactctcacacacccagcctcagcaatgccaacaacgcagcccactccccatgatggtgctcaacagcagcagaggctgtcggactctcacagccacagatggctgcacgtctacagctctttgcttccctacgtgtccgagaactc

SEQ ID NO: 204358 - DNA, 138 bp, Homo sapiens
  chr17:635798-635936
  hyper
ggagggttgaaatcgcgcggccgggccggggcgcgccgagccgaacccagccacgcggcgccagcgaggcggccggacccgcagccccgatgctgctgacgctggccgggggcgcgctcttcttcccggggctcttcg

SEQ ID NO: 204359 - DNA, 171 bp, Homo sapiens
  chr17:635959-636130
  hyper
cgctcccagcccggatggagccgcaccgactgcgtgatgatcagcaccaggtaccggcgccgccgagacgccccccgaggcccggggcgctgcccaccgcaccccacccggccgcggggcccagggcggaaaaggggggcggcaggaagcccgggggctgctccctccgcg

SEQ ID NO: 204360 - DNA, 208 bp, Homo sapiens
  chr17:900045-900253
  hyper
gggaaatgtagttgggtgtcggattagaactacaaatcccggtactcaccgcgctgcagccccgaccgtgagggcgctttctggtgaatctgaatctcgtttgtctgtgacatggggaaagctgtccaagcccaattccattttcacaagaggctttctttttggaaacatgatagcggtctcgctggtgtgcgcaccaggagcgttg

SEQ ID NO: 204361 - DNA, 212 bp, Homo sapiens
  chr17:1011776-1011988
  hyper
cctcttgcctcagctcggagacaccaagtccctgtctcctggctgggaagagggtggcccctctcttgcggttgccgtggaaacgggggattcctgcccacccgctccagggaggcggcgaggctcgggctgacaggcgcgccaggtgactcctggcacagccgccggagccctgagctgggctggcctggagggggcggccaccactgccc

SEQ ID NO: 204362 - DNA, 91 bp, Homo sapiens
  chr17:1390869-1390960
  hyper
cgggggagggcgggaggagacgcccgctgcggtgcccccaggtttaaaatctagagggagggccgggcgcggtggctcacgcctgtaatcc

SEQ ID NO: 204363 - DNA, 182 bp, Homo sapiens
  chr17:1420195-1420377
  hyper
ggccgtcttccggcggaagttgtctcttcgccgccgccgcagcctctgccccactcgtgagggatccgagggctccgtccttgtgctgtcttcgccccggctcccaggggtcaaacgagggtcgggggtggggacacgcagcctagccactgtcctgcctgggatccggtctcccccgcccc

SEQ ID NO: 204364 - DNA, 183 bp, Homo sapiens
  chr17:1588082-1588265
  hyper
cctcacacaagaggccgctttccccgcagcgcaatggcggccagactgcgtccgctccgcgttcccagcgccgggaagtgcgcaacccgagttcagcagttgatccagtcggcgccgaggtgctcagatggattagtgagacgaccaattagagttgcacactgcgccgaggaggcgggccca

SEQ ID NO: 204365 - DNA, 111 bp, Homo sapiens
  chr17:1901382-1901493
  hyper
taccgagggagagctgccggggctggcaggggagccagacggcggcggagggggcggggaggcctccttggctccctggcccggattaaatatttactatgttttgtttgg

SEQ ID NO: 204366 - DNA, 118 bp, Homo sapiens
  chr17:1928280-1928398
  hyper
gatccgctcgtgcccggtggcccggccccgcaggggcatggtgagctccagccccgcgccgagggcaccggcgcccgcaagcaaccgtggtgctgcccggcagccccgcgcgcttgct

SEQ ID NO: 204367 - DNA, 207 bp, Homo sapiens
  chr17:1929166-1929373
  hyper
ccggctgccccgcaccccgagtcccaggacactgttctttcgtggggagaggaggggagcaagcattcggaaagggccagctgcaaattccagggagaaggaaggacccgtgcgggttcgggtgggccgtctccgcctgggtggggtggcggcggggggtctctgatctcccttggtccacacagaccccgccggggggttcgcgga

SEQ ID NO: 204368 - DNA, 91 bp, Homo sapiens
  chr17:2206903-2206994
  hyper
aggagctgggcggcgcgactcacctctgctcccggcctgcggggccagagtagccaggatcccgcgcagctccgacgcggagatccgcaca

SEQ ID NO: 204369 - DNA, 50 bp, Homo sapiens
  chr17:2302239-2302289
  hyper
tcgccccgactaggccgccggccccgcagctcccccgccccttgcccgct

SEQ ID NO: 204370 - DNA, 77 bp, Homo sapiens
  chr17:2627362-2627439
  hyper
attgtcggctttcccggggaagggcgtggcccccgcccctcctgtctcacaggcaggtgggaccaggccaggatcgg

SEQ ID NO: 204371 - DNA, 780 bp, Homo sapiens
  chr17:2756656-2757436
  hyper
ggtgcctgttttctctccctctgttttaaaagcagtgacagcatcggggaagtatccggggccgggccggggagggcggcagccgcctctgcctggggagggagctcggggccgccggcgggagtgcgggcggggaccagaaggagcgggcgaggggaggcagggccggggccggggagggcgcctgggagccgggcaggggggtcccgggagcgctgtccgcctcctcctgcgcttcgcccgctccctgtgccccgcgtcctccaccatccgggcggccgaggccggggcgcgggaggcggggccggggcgggtcccggcgcgggcggcgcgtctgagcgggagccgggagccgccggcccgggccgcgccccgagcgagcctcggaaatgcccgcgccgggggagcggacggcggctgccccgcgggccccgaggagacgctgaaggtcgccgggagggaggggagagcgcgcggtcacctgacccccggggcgcacctaggcggggcggggcccatgcgaggcggaggccgggggccggggcgcgggctcaggggccgggtgcggagcgcgcggagccggggctgcggggacgcgggcgggcgaggtcgggcaccgcgggcggcctcgccatgtcccagcccgcggggaggaggcattgccgaaaggcggggatccgcgccgccgtggtgctcatcggactcctgcacaaatcccggaggcagaataaagagaaaaggtaaacccctgcagcgccggccgcttccctccgctctcct

SEQ ID NO: 204372 - DNA, 140 bp, Homo sapiens
  chr17:2951983-2952123
  hyper
gtaggaaagaaggacgctttcaggaaggatggagggcccaggacgatttcgctccccggtggacgtggagggcgggcagggtcatcctttctcctgaaactggggagccctacgaaggggttccggagaagacgcacgga

SEQ ID NO: 204373 - DNA, 261 bp, Homo sapiens
  chr17:2952280-2952541
  hyper
ctcattggctgtcgcctccgggcctgcgactttgctcagcccctccggggagtggaatcgggtgtgcaacaggccgtgaggtccggctttgcgaggaactcccattggtcagtcaaacaggagtcccaccctcctgggcttcccattggttgctgtcccaccgctgctctcagtttcccagcggctggggatctgggttttctgggggtggaggggtgcagtacgctgctggaagctcgtttctctttccaccgttgtgtg

SEQ ID NO: 204374 - DNA, 120 bp, Homo sapiens
  chr17:3599053-3599173
  hyper
gggaaaaccgcgtgcacgcctgcgaattccaggaccctggagaaggacgcggcggctggcacccgccctgcccctcccccgccttcccaaaagtccgcggagaacttacacgaccaggta

SEQ ID NO: 204375 - DNA, 169 bp, Homo sapiens
  chr17:3599244-3599413
  hyper
cggtcttgtagtcgaacagcgacaggcagagccccttgcagcccgcctgccccatggcgcgctctcagccgggcttgcggaccgcccggcccacgtgcgctcatggggagcactcggtccctcggtccctgcgcgcccggcgcccgcctcggcccgtctgcgcccgctc

SEQ ID NO: 204376 - DNA, 184 bp, Homo sapiens
  chr17:3867210-3867394
  hyper
aagtccgggaggaccgcgcagagggtgccaggcgtccggtctccccagctggaacccgctcccagcccccagcccccagccccggcgccggcgaaggtggccgcgcagccccgccgggtgccccaggagcatccgaagaggtttccggagccctcgcttcctgcccgcccagagccgggtgggg

SEQ ID NO: 204377 - DNA, 81 bp, Homo sapiens
  chr17:3908049-3908130
  hyper
ctcctggaaagcgccgggacgcggcggctctggctcggcagcgccacccggtggccggagacagaggcggccgggccgagc

SEQ ID NO: 204378 - DNA, 148 bp, Homo sapiens
  chr17:4402640-4402788
  hyper
ggcggggggcagccgccgccatcctcagcttgggcaacgtgctcaactacctggacaggtacaccgtggcaggtgagcgagtgccccacccagcccgaggaccaagaccccaccccatcccaccacccgcctcgagggaggtacccca

SEQ ID NO: 204379 - DNA, 218 bp, Homo sapiens
  chr17:4545056-4545274
  hyper
aggtctccaatcaactccgcctaccgctggggcccccagctccaaggagcagagcttcaaggggcagaattcagccccagtccaaaaggcggtgtcctggcgagagcagggagtggaaaccactatcttgacgggagggagaaaaagaaaaggatttggaccgaaaacacgcaggaagagggaatcaacgcctggtacagcaggcaggcgaggtgggg

SEQ ID NO: 204380 - DNA, 499 bp, Homo sapiens
  chr17:4853393-4853892
  hyper
gcgggggtgagtcaccgggcgcgcgctgccccggcgccgacgggaagggcctccgagtcgggccgaggcgccgtgtgtcccccgccggtcggctggtatggctgcagaggagctcggggcagaccccgcactggccccagagccggcaaagtggagatctctaccgagggcagagacctacctccccgcagtgctacaagtggggcgccggaagagccccaggcgtgcagaagctcacaaaaggccacccgtcctcggtccattcatttttgttcactgttgattcagccccattcattgatgggctggggccgtgcgctgagcgcccacagtcgatggggaaaggggctctgaccgacagtccccacgccgggcgacaagtgctgtcccagcgttatcagtcgggcgccttgccagccgaaagggcctgtctaaattcgtttcctgtcccctaactcatcccggcgctggctggcctggagagggtaggatggggcgg

SEQ ID NO: 204381 - DNA, 358 bp, Homo sapiens
  chr17:4890353-4890711
  hyper
agatgggaggaggcccgtcgggctcggctatgtgcagtgaagctggggttggggtaaggactccgccccagggcgcaggtgcgcagtcctggctaggcagcctgccagggtgcggagcgggagcgggtccttgggctgcacttgggcggcgccggatcggacgcttggcactctgggcggccccccggcggagtggtggtcccaggagaacctccgaggtgggagggtcccgcccgcatagagggatgttctggagaagccgggagcagagtccgcgggcacgcggtgggcgagggacagtgcaggtgccgggtgcgggggtctccgggacagtccccggcacgcgctggtccgccgt

SEQ ID NO: 204382 - DNA, 118 bp, Homo sapiens
  chr17:4901561-4901679
  hyper
tgtgctgtttgttccgcggaggcgcagagaggtgccaggcccgggcggccgccggctggctggacaggaggacgggtccgcatggccgccctgagaggccgggcggggacctgtgtga

SEQ ID NO: 204383 - DNA, 55 bp, Homo sapiens
  chr17:4981985-4982040
  hyper
gaccttgaagtttatgcctccctccattccccccgcccccaggccttcatttcca

SEQ ID NO: 204384 - DNA, 106 bp, Homo sapiens
  chr17:5389578-5389684
  hyper
tttagttttcccgcgactgcccaatcaacgccaagcaaccgcaatccgtagagacctaaggaacgcacatccgccaatcacgagttgcgtcgccaccgcccccccc

SEQ ID NO: 204385 - DNA, 34 bp, Homo sapiens
  chr17:5390233-5390267
  hyper
ttagacagctcaactcgccgagatgacctgggca

SEQ ID NO: 204386 - DNA, 204 bp, Homo sapiens
  chr17:5974393-5974597
  hyper
gctccctctcgttccgctaccaagagaggcttccggtcagcggagggtttgctccgtctcttggtgaacttgaacagaggcagaggcaaaagcaaaacgtatgtattttgtccagaaaattacctagtgtagagctttgcgtcttcgtaggtgtggacggagactcacgactgaaggttgctaaattgcgtttttcttggctac

SEQ ID NO: 204387 - DNA, 134 bp, Homo sapiens
  chr17:6347035-6347169
  hyper
gagaggcaggcattccgctggagagagggagggatgcgtggggcaaggcgggggcggggagccggtgtagacgggtggagggcagaccggtactctggtctatccccgcttccgggacgcgttttctagggagg

SEQ ID NO: 204388 - DNA, 337 bp, Homo sapiens
  chr17:6347453-6347790
  hyper
ctgaaccctgtgcgcgctccagggaggggacccggtgtgcgatgcgcgggggctgggctagcaagggcagtggcgcgagcgggacgcaggatacaaagcccggagccacgaggctggcggcggggcgggggccggagcgatgaatgggcacggccgggccaatccaagcgcagcatttgcagccgcgagagagggagccaatcggatccccggggcggtggcggtggcgggggcggggacggaaccaatcagctgtgaggacggggccgggggcggagccgcgcagagtttcaaatcggctgcggtgggcgaggagcagctgtgctgcggctgtgct

SEQ ID NO: 204389 - DNA, 134 bp, Homo sapiens
  chr17:6347820-6347954
  hyper
tgggcacaagtttcgcccttgttgcccaggctggagtgcaatggcgcgatctggactcaaaacaatttttttgttcggaggggagggcatcaggttctgttcacaggggagggcatcaggttcggacacgcacg

SEQ ID NO: 204390 - DNA, 337 bp, Homo sapiens
  chr17:6939629-6939966
  hyper
gtgcagaggtgcggcgtccagaacccggctcctgcagaggctctgggtggcagcagccctgttaccgcttagatggcgcgcaggacagagccccccgacgggggctggggatgggtggtggtgctctcagcgttcttccagtcggcgcttgtgtttggggtgctccgctcctttggggtcttcttcgtggagtttgtggcggcgtttgaggagcaggcagcgcgcgtctcctggatcgcctccataggaatcgcggtgcagcagtttgggagtgagtgcggcgcctggatctggcggactgcgaccctcggaagggagagggaatgcggcgactggg

SEQ ID NO: 204391 - DNA, 160 bp, Homo sapiens
  chr17:7146355-7146515
  hyper
catgtgatctcaaagagggcggagcgtcacgtggcgggtgcgcgaagtagggccggcttgggagggcgccggggaggcggggccggctgggcgacagctgggagggggaccgacgccttcccggacagcggaggtcggggcgccagccacctgggggcag

SEQ ID NO: 204392 - DNA, 67 bp, Homo sapiens
  chr17:7146588-7146655
  hyper
caggtttctcctttcgtgcttccatagccggtttctcctttcgtgcttccatagcctgcttctccga

SEQ ID NO: 204393 - DNA, 369 bp, Homo sapiens; identical to SEQ ID NO: 128019
  chr17:7166376-7166745
  hyper

SEQ ID NO: 204394 - DNA, 133 bp, Homo sapiens
  chr17:7184885-7185018
  hyper
ggcctcattggcccgccccaccaactccagccaaactctaaaccccaggcggagggggcgtggccttctggggtgtgcgggctcctggccaatgggtgctgtgaagggcgtggcccgcgggggcaggagcgag

SEQ ID NO: 204395 - DNA, 259 bp, Homo sapiens
  chr17:7254485-7254744
  hyper
cagtgcccgcggcgcgcacgttcccacccaggctcggagcgcgaggtccccaggtgggccccaaccgccggatcctgcccttctgcactggggcccagccgcctcccggcctttcctccctcccccaggagatgagacgtatcttgacatcttccgcgacttctccctcatggcgtcagacgacccggagaagctgagccgtcgcagtcatgacctccacacgctgtgacccgaggcccacggggcccgcgcctgcctc

SEQ ID NO: 204396 - DNA, 1038 bp, Homo sapiens
  chr17:7254804-7255842
  hyper
ttcacttcttgggcgccaccttcgggcccgtagggtgttgggcgctgcggctcccgaggtgcggggagcagctgggggtttgcgagctccagtccagcaaggtgcgactccggggagcgaggcggcagcttcggccgcggcctgagcgcagggcgctgcggggcgggggctctcgggctggggcgacgtggccagcccagtcctgccgaggggtggggctggccctggggctcgctggccccgcgccgccgcggagagagcgcgcccgggccaccccggctggaaggcatccccggaatgcggcggctcagcacccgccccctcgggaattccccgggggagccgctgggagggactcggctcccgggctgggccggccgggcctcgggctctgagcggtgggattagaggctccagccccgccgacttgcagacgtgagatcgggcacacctgagcggcggcggggcggtcgtggccacatccggggcgacgtgcctgagtcaccccgtcccgccagcgtctgccagtccagccagtccgcccagtctctcgcgtccgagactcgcctccagcctcccacctccgcccgggccgcgcgagcctcgcgggggcgggggcggggcgccaaggggcggggctgtctcttaaagggccccgggccgctgcccttaggccacttcctgggggcggagaggacctcagcggctgcggcgacacccagggaaggcggcgcggccgggtcccgaaactcctggctgtttccatcagagccctcggacactcccagcccgggctgagcacgcatcgtcgctccccggcggatacaagggggctccgccatccgctcccgtcagttcggcctccatctcctgggacccgcgccggcagccaggccaggcctctgagtggccccagagccctggctggactcgtccacggcggcagcgatctgcccggggtctcggaggccatcccttcagagtcggccctgtgctcgccaccgtcacctgctggttggattccggaaacccactgtc

SEQ ID NO: 204397 - DNA, 456 bp, Homo sapiens
  chr17:7284208-7284664
  hyper
ggggcttctcacagtcggggcgatctggtctggaggagggaggggccgccagtcgccctggggaccgtcaccttgtcccactagggaactcggggtgcggccctcgccggccccgggccagcggccaggtccccgccctccgcgggatttactcctgtcccgcctcctcggatttagcccaggcagcctgggaggttccgcagtcgccgcttccgccttgaccaggtgagggtccggaccgagcagggggcccgggctggggagagccggcggagcagccgtcgctgggggcgcgtccggggggcgctgggcctgtcctcttctcctgcgtccttccctcccgcagccgcgcttcctcctgtctcccttctgcgctccccgcttcccaccgagcgcgcagggccgggtcccccagggtcctgggctttctccttcccaacccaaccctgttcgcgc

SEQ ID NO: 204398 - DNA, 189 bp, Homo sapiens
  chr17:7349037-7349226
  hyper
ccagggtggggcggagcttggtgctcaggggtcaataaatggcagcgggtggaggttcggggctgggtggattatgagctgaaggcagggccggggacagagctaggcggagggctaggcaggggcgggtctggtaggttgataggctgggagtgtagacggcaggaagaggtgtttctgagatagagg

SEQ ID NO: 204399 - DNA, 56 bp, Homo sapiens
  chr17:7349259-7349315
  hyper
gacttggacccgagaggatggggctcagaaaaagggggcggcgttcccaggagaga

SEQ ID NO: 204400 - DNA, 70 bp, Homo sapiens
  chr17:7554521-7554591
  hyper
tctagacggtttggtggggggtgaagctgcattcataccccttcctcttgttattctcccctgctctgac

SEQ ID NO: 204401 - DNA, 49 bp, Homo sapiens
  chr17:7554793-7554842
  hyper
gcaaccccccgccccgcgcccggactcgccccgcgccaccaagatggtc

SEQ ID NO: 204402 - DNA, 165 bp, Homo sapiens
  chr17:7571719-7571884
  hyper
cacccctcagacacacaggtggcagcaaagttttattgtaaaataagagatcgatataaaaatgggatataaaaagggagaaggaggggaagggtggggtgaaaatgcagatgtgcttgcagaatgtaaaagatgttgacccttccagctggacgtggtggctca

SEQ ID NO: 204403 - DNA, 773 bp, Homo sapiens
  chr17:7572184-7572957
  hyper
tgaccctgagcataaaacaagtcttggtggatccagatcatcatatacaagagatgaaatcctccagggtgtgggatggggtgagatttccttttaggtactaaggttcaccaagaggttgtcagacagggtttggctgggccagcagagacttgacaactccctctacctaaccagctgcccaactgtagaaactaccaacccaccgaccaacagggagagggaacaagcaccctcaagggggtcaagttctagaccccatgtaataaaaggtggtttcaaggccagatgtacattatttcattaaccctcacaatgcactctgtgaggtaggtgcaaatgccagcatttcacagatatgggccttgaagttagagaaaattcaacagtgagggacagcttccctggttagtacggtgaagtgggcccctacctagaatgtggctgattgtaaactaacccttaactgcaagaacatttcttacatctcccaaacatccctcacagtaaaaaccttaaaatctaagctggtatgtcctactccccatcctcctccccacaacaaaacaccagtgcaggccaacttgttcagtggagccccgggacaaagcaaatggaagtcctgggtgcttctgacgcacacctattgcaagcaagggttcaaagacccaaaacccaaaatggcaggggagggagagatgggggtgggaggctgtcagtggggaacaagaagtggagaatgtcagtctgagtcaggcccttctgtcttgaac

SEQ ID NO: 204404 - DNA, 46 bp, Homo sapiens
  chr17:7573922-7573968
  hyper
tcacctggagtgagccctgctcccccctggctccttcccagcctgg

SEQ ID NO: 204405 - DNA, 301 bp, Homo sapiens
  chr17:7576546-7576847
  hyper
tttatcaggaagtaacaccatcgtaagtcaagtagcatctgtatcaggcaaagtcatagaaccattttcatgctctctttaacaattttctttttgaaagctggtctggtcctttaaaatatatattatggtataagttggtgttctgaagttagttagctacaaccaggagccattgtctttgaggcatcactgccccctgatggcaaatgccccaattgcaggtaaaacagtcaagaagaaaacggcattttgagtgttagactggaaactttccacttgataagaggtcccaagactt

SEQ ID NO: 204406 - DNA, 163 bp, Homo sapiens
  chr17:7578570-7578733
  hyper
gagacagagttgaaagtcagggcacaagtgaacagataaagcaactggaagacggcagcaaagaaacaaacatgcgtaagcacctcctgcaacccactagcgagctagagagagttggcgtctacacctcaggagcttttcttttttttttttttttttgaga

SEQ ID NO: 204407 - DNA, 36 bp, Homo sapiens
  chr17:7579249-7579285
  hyper
atgcagggggatacggccaggcattgaagtctcatg

SEQ ID NO: 204408 - DNA, 60 bp, Homo sapiens
  chr17:7579880-7579940
  hyper
tcgacgctaggatctgactgcggctcctccatggcagtgacccggaaggcagtctggctg

SEQ ID NO: 204409 - DNA, 329 bp, Homo sapiens
  chr17:7590625-7590954
  hyper
agctgaaaatacacggagccgagagcccgtgactcagagaggactcatcaagttcagtcaggagcttacccaatccagggaagcgtgtcaccgtcgtggaaagcacgctcccagcccgaacgcaaagtgtccccggagcccagcagctacctgctccctggacggtggctctagacttttgagaagctcaaaacttttagcgccagtcttgagcacatgggaggggaaaaccccaatcccatcaacccctgcgaggctcctggcacaaagctggacagtcgccatgacaagtaagggcaagtaatccgcctgccggaggaagcaaagga

SEQ ID NO: 204410 - DNA, 48 bp, Homo sapiens
  chr17:7739847-7739895
  hyper
cccgtccccgcctgccggcccccaccgagatctcgcccaggagagaga

SEQ ID NO: 204411 - DNA, 49 bp, Homo sapiens
  chr17:7744964-7745013
  hyper
cggagacagacaccgggacccacgcacagccgaccgtgtcagacagact

SEQ ID NO: 204412 - DNA, 219 bp, Homo sapiens
  chr17:7761384-7761603
  hyper
tagtagtgagtacgtgctgaggagcaaaggagtaaccaagagatccagtgaccgacagagcaagagccatgccgcgccggggcctggtggctgggccagacttggagtattttcagcgtcgctatttcacgccggcggaggtggcccaacataacaggcccgaagacctctgggtatcttacctgggacgcgtgtacgacctaacgtcattggcacagg

SEQ ID NO: 204413 - DNA, 100 bp, Homo sapiens
  chr17:8022390-8022490
  hyper
taaaatcctctgtcggttctacaagcctggcttttcctatagagaaccctcttataagcaaaaagtaaagctctcgtgaagagcccggatagctcagtcg

SEQ ID NO: 204414 - DNA, 37 bp, Homo sapiens
  chr17:8055129-8055166
  hyper
tcttcccctactccccgtccaaccacacccctactac

SEQ ID NO: 204415 - DNA, 83 bp, Homo sapiens
  chr17:8055823-8055906
  hyper
ctcttcccggcgcctgattggctagtggtctccactaaggtcagggctgtgtcacacacacgggcgcacgtggacctgggtgc

SEQ ID NO: 204416 - DNA, 91 bp, Homo sapiens
  chr17:8093691-8093782
  hyper
gctcccgtcgccccgccctttctgaaagctgatggggcagatcttaaagaccaaggtcctcaaattcctgagtcccgaggggtggggctca

SEQ ID NO: 204417 - DNA, 35 bp, Homo sapiens
  chr17:8191800-8191835
  hyper
tgctcgtgaccaccgggggcgacatagaccctaac

SEQ ID NO: 204418 - DNA, 43 bp, Homo sapiens
  chr17:8280080-8280123
  hyper
cctagaggcaccgcggacaccgtgcagcgctgttcacccagat

SEQ ID NO: 204419 - DNA, 101 bp, Homo sapiens
  chr17:8533060-8533161
  hyper
ccctccccccggccgtcctgctgcagcgcgccccgccacatttcccgcctcgccccctcaaaccgcctgggcctcgcagggcgtccacccccggcctaggc

SEQ ID NO: 204420 - DNA, 192 bp, Homo sapiens
  chr17:8533199-8533391
  hyper
ctccttccccggcgccggcggagtccgaccctccccacgcccgcggccggctccggagcccctcacccgccgcgcgcttccccggccgcgcagagccaatgccctcctgtccctccacccacgggtcgggcgcgcgccgcccgccttccaagcccatggtgaacccctctggtgctgcgggggaccggtcgc

SEQ ID NO: 204421 - DNA, 90 bp, Homo sapiens
  chr17:8649035-8649125
  hyper
agaaatgtcaaaacacggtaacggaaatgaccctatttaaaatgttgactccgtggtggccgccttccttgatcccgtcaggctgcgtgc

SEQ ID NO: 204422 - DNA, 37 bp, Homo sapiens
  chr17:8869471-8869508
  hyper
tcctacttctattttctttcttttttttttttttttt

SEQ ID NO: 204423 - DNA, 218 bp, Homo sapiens
  chr17:8907838-8908056
  hyper
acgtacggcctacggagtttgaatgctggggccttcctgttgcggcacccccagcccactggtgcagcgggatcgtgcgctcccgccgcagccctaatccagaggaccgcgccgcgccagcgccttcagccaggctgtggcgcctccagtgggtagggctggctcggctctagccaggtgaagctccagactctggattttcccgtcttcggggttca

SEQ ID NO: 204424 - DNA, 34 bp, Homo sapiens
  chr17:8925556-8925590
  hyper
cgctcgccaccccgccgagagctggagggcgcgg

SEQ ID NO: 204425 - DNA, 83 bp, Homo sapiens
  chr17:8925833-8925916
  hyper
gcgccgctgcatcccggactttgtcaatgcggccttcggcaaggacgtgcgcgtgtccagcacctgcggccggcccccggcgc

SEQ ID NO: 204426 - DNA, 360 bp, Homo sapiens
  chr17:9548165-9548525
  hyper
cctctctgagcccccttccttgccgattaaagcaagggtgatcaagtcttgcaagtttttggaaaatgattctaacccaatctgtggtgtaaaaaagcaaaccacaaccactcgggggcttttttcacagggcaacacgtggctcccagttcaggtcccgggttggcgggtgcaggcacagactctgcctccccccaaggggcagacggtctggaaggaggtggcgacacctgtccgcacacacctgagcctgcggaggaaccagcggtgcacaaaagcgctccccacccccacacagcgcccagcgcgcgcctctcaccacgcccgaggctgtgctctggagatgcctgccttgccctt

SEQ ID NO: 204427 - DNA, 926 bp, Homo sapiens
  chr17:9548585-9549511
  hyper
ccgtaatttccactgcttgaaggctgctcgaggaacaggagcagcggcgaaacccaggtctgtcggtttacgaggtaaggaagggtggggaatccgaccacgaagactcccagtcagcgcagcgggggcggcaccaggcaggggtaggggtggcccggcgctgccctggagggggctggtcgtgccgccggattcccgcgcggggcggggctgccccgcccttggctccgcctccgccccgtccccgcacacctggcccgcaggtagccggcaccaggagccttagagaagctgtagggcctgctggccgctcgtccgcctcgcgcccgggggctccgcgcctggagctgcgccggcggcagccatggacctgggccccggggacgcggcaggagggggaccgctcgcgccccggccccgccgccgccgctccctgcgccgcctgttcagccgcttcctgctggcgctgggcagccgctcacgccccggggactcaccgccccggccccagccgggacactgtgatggcgacggtgaggggggcttcgcctgcgccccgggcccagttccagcggcccccgggagccccggggaggaacgcccgcccggaccccagccccagctccagctccccgccggcgatggggcgcggccgccgggcgctcagggcttgaagaaccacggcaacacctgtttcatgaacgcggtggtgcagtgtctcagcaacaccgacctgctggccgagttcctggcgctggggcgctaccgggcggctccgggccgcgccgaggtcaccgagcagctggcggcgctggtgcgcgcgctctggactcgcgaatacacgccccaactttccgcggagttcaaggtaggcagcgctgcgccgccgaccgccctgtccccctggtttcgcctcttgaaaagtg

SEQ ID NO: 204428 - DNA, 41 bp, Homo sapiens
  chr17:10600737-10600778
  hyper
aaactcgagtccgcgaggcaagaagcgccaaagttggccac

SEQ ID NO: 204429 - DNA, 187 bp, Homo sapiens
  chr17:10632700-10632887
  hyper
gggggtccccaagccgactaaaaagtttaatgatgctataaagggttttggtcggcttcgtctcctaggccctgagatatgttcagtgtcgtccgcgggccggacgttaacgcaggagccagggccgcttcttctgaggtcccctgggaagttccacgcgcggaaccagccccttccagggtgtgag

SEQ ID NO: 204430 - DNA, 295 bp, Homo sapiens
  chr17:10633350-10633645
  hyper
tagcccccactcagcgacccattcagcccgccccgaacgccgcggggtgtaggcggcgccgtcctggtttcgcggatgggaaagcgagtccctcagggagcgcaggtctcggtggtggacggaagtcgaatttgaacccgtataggttcaactccaaaccctgttttcactaaagctaccttcctcacaaaaaaaaaaaaaaagaagaaagaaaaaaaagaaggaaaaaaggaaggaaggcaggcgggaggggagagaggaagaaagagaaagaaagaaaaagaaagaaggaaag

SEQ ID NO: 204431 - DNA, 545 bp, Homo sapiens
  chr17:12692658-12693203
  hyper
aaagctgctggtgacgctgccttctcccacctccgcactccactgtccttgcaaactttggacagaggaaaggtgggcacggggcgcgaaactacaagtcccggcatgcacggcgttctccgcacaggcgcacggggaccgccgggccagccggccagccagcctgcggagactcccgggtccccgcgccggactgggactgggagcaggcagcccgggcggagcgggccggtgccgaggacggccccaggcattgctctgccccgggcattgcgcggcgcgcgtgagggggatgcggcaggaggcggcgcggcgggaggagtaggcggcggcgccctcgggagggagctgcgcgcgggccagacggcgcccggaggctccgcagtgccgccgccgtcgcccgggaggctccgcgcgggagccatgtaaccctgcggcgggctccgggctgctccgtccttccccagctcccgggctagcgcggcagcggggccacgatgaagaagcagttcaatcgcatgcgccagctggccaaccagacggtg

SEQ ID NO: 204432 - DNA, 135 bp, Homo sapiens
  chr17:12877185-12877320
  hyper
cgctcttgccaggactgggctgcccagggctgtgtcttggccgccgggagcagccagggtgctgggagcacagcccccaatgcatcgcttcccgggcccccggggtgctaaagctgcgctgctcttctcccaacg

SEQ ID NO: 204433 - DNA, 48 bp, Homo sapiens
  chr17:12877650-12877698
  hyper
gggcgggctggtgtgcggtgcagggggtgtctgggttggccgcactgg

SEQ ID NO: 204434 - DNA, 109 bp, Homo sapiens
  chr17:13505656-13505765
  hyper
ccctctccaggttccccgcgctctgctcccctcttggcactgttgccctatccttccccatcccactgctttccatcgcctggaacctactcctcgtccccttggaagt

SEQ ID NO: 204435 - DNA, 123 bp, Homo sapiens
  chr17:14203888-14204011
  hyper
ggggttccagtgcctagtgcatctcctaccctgctctccctcctccaaccgcctccctactctgcaacacgtaagcatcacgaaacctcctgcgaaacatctggatggggactggtgtcccaa

SEQ ID NO: 204436 - DNA, 260 bp, Homo sapiens
  chr17:14204242-14204502
  hyper
ccacaccccctcgtcctgggagcgggttggctgctgagctctcggagaagcgcctgtatttgcatggcgttcggggtttttggtaggtagagcagcccgtcactctggaaggccgggaccgcccactccacctcggtccacagctctcttcctgcgcagttcgcctctgcagcctctgcggggaagtgccggggctgctcgaggctcagttcttaggactgcaaggaggcagccccggcgtgcggcggtgcgcacagtct

SEQ ID NO: 204437 - DNA, 168 bp, Homo sapiens
  chr17:14204834-14205002
  hyper
catggggcagcgcctgagtggcggcagatcttgcctcgatgtccccggccggctcctaccgcagccgccgccgcccccgccgccggtgaggaggaagctcgcgctgctcttcgccatgctctgcgtctggctctatatgttcctgtactcgtgcgccggctcctgcgc

SEQ ID NO: 204438 - DNA, 122 bp, Homo sapiens
  chr17:15164530-15164652
  hyper
ggtgcccagatttccgtctgagacctggagacagccgtggcatgcggtgggggagacagcggcgaggaggctggtttcccagaccccagtgctctccgcattccgtttgtctccaagtttcc

SEQ ID NO: 204439 - DNA, 80 bp, Homo sapiens
  chr17:15164715-15164795
  hyper
ggctccggagaggtggtgcagagccagagtagtgtggaaagaaaagaatggctcgagagggttgcccggaccctgcgctt

SEQ ID NO: 204440 - DNA, 160 bp, Homo sapiens
  chr17:15165789-15165949
  hyper
acaaactcgggtgcgttggctccgctgctggcgccgccaaagctgcgctgcggggctgcgcgcgcgcgaagcaagggggcagtgggaggctcctggcgttcccctttaacgggaacaacgccctgtttgcgtcgctgcagtagggtgtgtccctgggtca

SEQ ID NO: 204441 - DNA, 266 bp, Homo sapiens
  chr17:15244586-15244852
  hyper
tgggcatcccttgaaaacccttgaaaagcatcagaaaggtaaattacgaggaaaccaacgtctgggtgggaggtgcctgtggatttgtacggtttttatttggaaggaaaagtgaagatcgcggggaggaattgcagggtgtccgcgacctcccgcgatcctgaggcgagaagttggagtcctggttggcgaagggggatcctttggggtagtcctagaggcaggctagagtcagcgagaccactcacctgtcggcggatgcccgg

SEQ ID NO: 204442 - DNA, 264 bp, Homo sapiens
  chr17:15848879-15849143
  hyper
catctgtgtcccgctcaggtgaggcgctcggcgtcgcccgaactcggggccccgtcggagctccgaaatgggtcgtcttctccaggccggggttcctccctcgggggccccagacgggccaggctgggggcgcgcggggcgcttggagggctggttcccagcctggccaccccgcaacgctagaccagtgcgcccgggcacccaagacatcccagatgcgcgtcgctctaaggagatctgcgtagggacagctctagggggtcc

SEQ ID NO: 204443 - DNA, 207 bp, Homo sapiens
  chr17:15849211-15849418
  hyper
aagcgtcacccccgtgggcgggtggagcccggggcgcgggagttttggtgatcacatctccactcctgccacgaaggccgttcctaacactcgcccgcagcggcggtgcagcggcagtcccgtgagtgctgcggctcccggaggcccgggaggttcccactaagggcaaggcaactttggacgctgggcattcgcaccgtcagaatg

SEQ ID NO: 204444 - DNA, 35 bp, Homo sapiens
  chr17:16256906-16256941
  hyper
agggagacccggcccgcccggccgctgggacgcac

SEQ ID NO: 204445 - DNA, 80 bp, Homo sapiens
  chr17:16257038-16257118
  hyper
tgaatccagcgggctcttcgtaccttcccgacctggaggggcctgggttgggcctgaattcgcaggctcatccgagcggg

SEQ ID NO: 204446 - DNA, 52 bp, Homo sapiens
  chr17:16283875-16283927
  hyper
agagcgaaactccgtctcaagaaaaaaaaggaaagaccccccctccttctcc

SEQ ID NO: 204447 - DNA, 674 bp, Homo sapiens
  chr17:16283956-16284630
  hyper
cgcctgtgcggcgcacgcgcgctcagttacttagcaacctcggcgctaagccaccccaggtggagcccagcaacaacagagccaccgcgtcccccaccaatcagcgccgacctcgccttcgcaggcctaaccaatcagtgccggcgctgcaaggaagtttccagagctttcgaggaaggtttcttcaactcaaattcatccgcctgataattttcttatattttcctaaagaaggaagagaagcgcatagaggagaagggaaataattttttaggagcctttcttacggctatgaggaatttggggctcagttgaaaagcctaaactgcctctcgggaggttgggcgcggcgaactactttcagcggcgcacggagacggcgtctacgtgaggggtgataagtgacgcaacactcgttgcataaatttgcgctccgccagcccggagcatttaggggcggttggctttgttgggtgagcttgtttgtgtccctgtgggtggacgtggttggtgattggcaggatcctggtatccgctaacaggtactggcccgcagccgtaacgaccttgggggggtgtgagaggggggaatgggtgaggtcaaggtggaggcttcttggggttgggtgggccgctgaggggagggcgtgggggaggggagggcgaggtgacgc

SEQ ID NO: 204448 - DNA, 53 bp, Homo sapiens
  chr17:16285065-16285118
  hyper
agccttgtaaaattgaggggaggcttgcggaatattaacgtatttaaggcatt

SEQ ID NO: 204449 - DNA, 133 bp, Homo sapiens
  chr17:17140479-17140612
  hyper
gccgacacccaggcgcgtgactccctgagccgtaccaccacccaacactgcggtgggggtgcgggagccgtccgagcgcgtcctgcaccgcgaggagagccgggcctccctagctctcgcaagcccaggaaca

SEQ ID NO: 204450 - DNA, 81 bp, Homo sapiens
  chr17:17398323-17398404
  hyper
gccgggaggggagacgccagtccgcgcgcgctcccggcctggggcgcaccgggccgttggatttgacttaacaaaaaggtc

SEQ ID NO: 204451 - DNA, 166 bp, Homo sapiens
  chr17:17398440-17398606
  hyper
agctgatgacgcagcgctccttgtccttggcctggctgccggcgctggccttctcgcggatgtacatgaggtcgctgtgtacgctgggccggcgcgcgaagggtgccacgatgccaaaggcgtcgcccgggtcgccgccgccgccgccgctgccggcccgcagcag

SEQ ID NO: 204452 - DNA, 276 bp, Homo sapiens
  chr17:17399572-17399848
  hyper
cggggtgagcggctggagggctctgctcgggctgggcgcggctcgggcttggggctccggctccgctcgggctgggctcgggctaggctgggctcggctggggttctcccaggatctgggcacaggccgcttgctctggctttggcgcccggccgccgcccttatatgcagcctgctcggctgccccgccccggccctcccagctcggtgcgtcacgccccgcggggcccgcctcccccgcaccggctcccagtcccggcgacctcgtcacccgct

SEQ ID NO: 204453 - DNA, 1755 bp, Homo sapiens
  chr17:17685254-17687009
  hyper
tcggggccccgggccggccgccccctttttgcggggggagagcaggagccgcctctcgcagccactctgcgcgcggggtgggagggagagagggaggcgaagggacgacagcgccgggctccccgcccccatcccacccggttccaatatttcgcagaaaggcacgcggctcctaatcggtcttttccaggctgagatttagccgtgcgatgcccgcgcaggggcgggggccgcgggccaggggaggcgctcagagtccggagccgccgagcgaggtgaggagcccgcgtcctcggctggtggagcgggcgggcgggcgcgcaaacccgagaggcagatatagaaaggggggcaggttaaaaataaccctctccggctgggaagctcgcgcgcgctctctcgcctcgttcggtgccagaggactccaggggaggtggcgttggggagggcagagcgggattccccctcctccgccgggcggggtgcccgcctgcgcgccgcggttgcacgtgtgcggggccgcgcgcccgggccccctctgcacccggtcggtgggtgccccctccccaggaccgggcgcatctggcagtggccccccgcccgcagccttgcgcggctggagggaagcgctccattattcattatttacgagcgttaataggtttgagccacgggggcggggggttgggggggcgacgaggacccagtggggaccgaagcattagaagaagggatagggagggagggggaagggcgggggcggggctgtgccgcggcctggaggaagaggtctcggcctggggcccggcgagccgggcgcacctctccgtcaggtttctccacaccgccggccgtcgaggctgctcagggcgccaagagggcagcacgggccttagattttgctctcggcctctgtccttcgcgtcctcgcccttaccgaggcgtggggagggagctgcggaggccgtacgccccgccctgcgcgccccttgccgccgccgcgtccccgcggcagccccggcctcatttatcatcatctttggtcaagtggagtgtgcaaggaacagctgcttcactcggctgacttcgagggcggctacgggagaatcagggagatgaatgatgggggctggtggcagccccccgcggtccccgcgcaggcgagagggaggcggggacgtccagggccgcctccgcctcatggcgagtgcagcgcccccttcctctctcctggcgcctgcagcgaccggggaccgggggaccggggcaccgaggaccgggcccgccccgggaggggactgggcgcggggacgggggggcgcccttcgccggcggagaactggcgggcgcgctgccggcagagcccgaggttgccgtgaccttgctggggtcagcgggctgggctgcggaggcggcggcgcggcgtctttggtgcgctttccggattggcgcagaggccgggaaacaaggcgggggcgggcgggggaacacaaatagaaggtgaaattttacctgcccctgagggagtcctgcggattttctccggcagcagcaggcgctctgcctttgtcttacacggctgaaacatctgttgcagaggggcggagaggccgcaacaacccccacacaccctgcgctgctccccgtccccctctgccccagccgggctgcaggactccaggcgccgcgttaaccctgctcgcgctggggcgcgcgcccgcactcgctgccgcagtccagcgcctcgcgtggggc

SEQ ID NO: 204454 - DNA, 378 bp, Homo sapiens
  chr17:17687055-17687433
  hyper
cccccctccacctcgatggggtgctgaggtgtaggcggggggcgggggcggaaagggttaatggcctagtcgcagaccctaattgtcagagccggccccgcttcgtttcaattaccctaagtagagactgaatgcgcaattaacgaagtcagcttgccaactggaaagccggccccgctttcacgttgagcagaatactccaccagctgacttggacgaagcaatttcctcctctctctctccccttttttctctccttctctcttccaatccccctccctctttttctctctccttaataataaaattataccaagcagtttgcggtgtggcaggcggccagaaaagcgtttctttaaacgccgccgtctcacaatt

SEQ ID NO: 204455 - DNA, 81 bp, Homo sapiens
  chr17:17991153-17991234
  hyper
cagcgggcggaaccgatagtgtctggcacttggctcgcccggactctgaatcctggagcaccaggcgcccacgagaacgct

SEQ ID NO: 204456 - DNA, 219 bp, Homo sapiens
  chr17:18266789-18267008
  hyper
caaccccaaaccccgaacttggcgctggaccgctcgagctcaggaaggtgcactctgcgcgccaggcttgggcttggccccgcccccggaggcgcccaatcagagagcgcagccaagcatgggccgccaccaaacgcacccgcgctattggctgcggcgcagcggcgggcagggcctgtttctccggggcgggccggaggccgcgtagtgcagctgcgc

SEQ ID NO: 204457 - DNA, 205 bp, Homo sapiens
  chr17:18761717-18761922
  hyper
actggggcgatctcgcgcccgcggcccttccatttttccctcccttcttcctctcccgccaggggtcggcgggggcgggggacgggcgtccggtgcctgggctctctcctctccctgaggcgccgctggggagtcgaaccctgatgatgggacctgtggtgagcagccctgaaagcaagcccagacccagccattctccgtccct

SEQ ID NO: 204458 - DNA, 887 bp, Homo sapiens
  chr17:18907421-18908308
  hyper
gctggggcaccgcgcgctcgggggcctctccgcggcctctgcttctctgcccatgagcaatctgcgggaaagacctgatgagcccggctcggcggggagggcgggccgcgcggggaggggcggcgggggcggggccgggaactcaggtgggcgtgggaaggacggggctggggctggggctgggaagatgaggtgggggcactggactgggatgggaagaaagtaagggatcggaacagcggtgagggagcggtgggccacgtcccagggctcagcgtgcctctacgtgcagggaacccatatcccagatttccggagctgcctgaagtcctcgcaacttctgagggaaactagggcagccggggaacttcccagtagcttcttagagtgggaggcggccccggcacagaggcgccccgcaaaccgagggcttccgggtaagggaggggtcttaaaatttccgggtgccggcaacccaggaggcctgcccggaggaggctggggctctgggaggggtccaggagacccagaaacgcggttgcggggcggcgacgccccgcgagacccgggatccggggggcgcggccgggacttgcttaccgagcgggcgctggcggagcggggcgcacacgcggcggctgcggcggcggcgcgaggctgggcgggggcgcgccggtgactcagggccgccccgcttaccccgccgccgccacctgcggtcacgtgccgcccggggcggggccggaagctgattcacccctcgacagacagacagacctggggcggacgcactgcccacggtcccctggtgcccgaattccgaaaatatcagaggcctaagcccaagagctcctggaacacccatcccagagagggacagtgttctc

SEQ ID NO: 204459 - DNA, 328 bp, Homo sapiens
  chr17:19140730-19141058
  hyper
caaactgagccagacgcggcggtggcggcggctccgcgggctacggtcgctcccgcctctcgagcgctgccggtggccgcagcggcgcacccacgccggcccggaggagcagaggtgagccacagcccgtggggctccaaggccagagcgagtccccggggcgaggaccctccccctctccagggcgcggacgcccccagagcacaggctcccctacctcaccagccccgccagggcatgcgcccctgccgccccgctggtccctacgccaggctctgggggatccccttctttccaaccaggccccgccccacggactggagcatgg

SEQ ID NO: 204460 - DNA, 144 bp, Homo sapiens
  chr17:19265481-19265625
  hyper
ctcggccaagcctcggctcctcgcgttaaccccaggaggctcctgccagtgatccaagcaagtgggcatgacccgtgcgagggcccacaggcttgcccgagtgtgacctcggtactagctcaacatctcgaggtctgcttctat

SEQ ID NO: 204461 - DNA, 138 bp, Homo sapiens
  chr17:19281498-19281636
  hyper
agcttcatggggacgcgcgcgctacgtgcaggggcgttgccttccattcacttggcgcccgactgccagtgcgcatgcgtttgaaggcggtgcagggcggggagcacacccctgcgaagtgccgggcaccctttgggc

SEQ ID NO: 204462 - DNA, 392 bp, Homo sapiens
  chr17:19282073-19282465
  hyper
ccacgaaccagccgcgcgcttctgcccttgtcggtttaggaaactgggaagttccctggtcctgctccccagcccgcagaggggacactgaggcccacggtaggtggtcctctcctcacccgagtctccacacagacaccatggccgagcctctgaaggaggaagacggcgaggacggctctgcggagccccccgggcccgtgaaggccgaacccgcccacaccgctgcctctgtagcggccaagaacctggccctgcttaaagcccgctccttcgatgtgacctttgacgtgggcgacgagtacgagatcatcgagaccataggcaacggggcctatggagtggtgtcctccgcccgccgccgcctcaccggtgagcttcctgagccgtcg

SEQ ID NO: 204463 - DNA, 246 bp, Homo sapiens
  chr17:20059180-20059426
  hyper
tacagatgaggtgggcggacagtatgcagatgacgggggcgggccgcgcctggcgggcggtgtgcagttgaggtggtccggcaggatgcagatgaagggggcgggccgcgagggcgggcttgatgcagatgagggggcggggcccacgggcgcgggagagcagcggctccgccggcagctgctgggaactggaaggcgcccggtcctttctttgactggagcggacccgccggacgcaaccgcctc

SEQ ID NO: 204464 - DNA, 132 bp, Homo sapiens
  chr17:21030040-21030172
  hyper
caactgtgttcttcgccggaagtccacggaacaccaaccacgaccttcggaatttccctccggaagatgaaggcactgtagttatgcgggtggaccctatcagatctcgggtccatcgggtcctgtgtacac

SEQ ID NO: 204465 - DNA, 212 bp, Homo sapiens
  chr17:21189752-21189964
  hyper
tatggtggctggagccgggtgggctggataattatgccttacataagtgggaggccggatccctgaccattgcccaaccactgtgagtaactcgggaggcactcgacgggggaggtgtctggggagggacttgcactgcacagacctcgtggagcttgggaaccaggaaatcagacacttctccactctggagagctcggggaagggtagga

SEQ ID NO: 204466 - DNA, 202 bp, Homo sapiens
  chr17:25659906-25660108
  hyper
ggctctgcagtcgcggctctgcagtcgccttggagcggctgcccttccgaccccgcctgggctatgactcatcttcggtggaggagaaaggggcctttgtgagcgcccagctccggcgtctcctggacagcaccgccctccggtggccgcgagtcaggagggctggggaagccgcccgagaggcagcgcccgagctccccac

SEQ ID NO: 204467 - DNA, 90 bp, Homo sapiens
  chr17:26555139-26555229
  hyper
tcgtggaagtggagggtggaggcgtgggggccagaggagagaaaacctactcggacagaggcgctccaggacaaggctggggcgagcgcg

SEQ ID NO: 204468 - DNA, 239 bp, Homo sapiens; identical to SEQ ID NO: 53814
  chr17:26903937-26904176
  hyper

SEQ ID NO: 204469 - DNA, 332 bp, Homo sapiens
  chr17:26925694-26926026
  hyper
tgggttctgccagcccgcccctcctccctccctaagaagcccaaaatgcgattagaagagtacgctcgcaccctagtcgcgcaggagcagcaaggcgaacaaagactccacaagcccccaaccccgggctcgacccaactttccaggacagtagacacggccggtgcccccgcgacagcagcccggcccagttctctccgccagagatctcccgcttaccgtctggggcgaaggcgacaggctgaggctcagttttttcactcgccacatcttcaaccagaaggcaggcctatcacgtctcagaccaagtcgaggacgccatgttcacccgc

SEQ ID NO: 204470 - DNA, 342 bp, Homo sapiens; identical to SEQ ID NO: 11045
  chr17:26926083-26926425
  hyper

SEQ ID NO: 204471 - DNA, 56 bp, Homo sapiens
  chr17:26926827-26926883
  hyper
gatctcctatgcacgggaaacctgttgaaggtaggacagccgaaaggtcagtattc

SEQ ID NO: 204472 - DNA, 326 bp, Homo sapiens
  chr17:27038323-27038649
  hyper
aaccagacttcccgcccatcccgcgggcgacccagcagggcctcaggaccccagtcctcaatcattggcccgcggctcgacgcgagcccgcccccggccctagctccgccccggccctagctccgccccggcccagcactgggccccgcctctctcgttggtttgcccgtctccctcgtcggtttgccggcttcccgcgtgcgccgctcggggtctgcgagccgggccgcgccctctgcccagcccctgccccgcccctcttaccgcggcatctgctctcatcccacgagcgggccttgggctcggtcttttccttagtccatctt

SEQ ID NO: 204473 - DNA, 72 bp, Homo sapiens
  chr17:27044882-27044954
  hyper
ctgtaacacgatccccggaaattcctggagaagggccgccccccgcccctctcctggcggctccaggcctcg

SEQ ID NO: 204474 - DNA, 320 bp, Homo sapiens
  chr17:27070824-27071144
  hyper
agaagcggagccacgatctctgtcccccaggggaaagaaaagcccatgatcccgtgggtgggcgagactggcggtcaccagacccaaaaaccatgcactcgggggtgggcggggccgcgagggcgcgcattaggaccgcgcggccgcggtccgccctctcttccggagggcgggcttcacagccgagccctggccgcgaccgccagtcggcgccgcccggagccgggagcgccgctccagcgaggcgcgggctgtggggccgccgcgtgcctggccccgctcgcccgtgccggccgctcgcccgccatgcctggcttcga

SEQ ID NO: 204475 - DNA, 54 bp, Homo sapiens
  chr17:27893141-27893195
  hyper
ctcgtagggccagggcaggccggcctcgaaccactctcggcagcgcagcacggg

SEQ ID NO: 204476 - DNA, 402 bp, Homo sapiens; identical to SEQ ID NO: 53841
  chr17:27893344-27893746
  hyper

SEQ ID NO: 204477 - DNA, 127 bp, Homo sapiens
  chr17:27940911-27941038
  hyper
gatgaatccttagaggagcgctgtccctatcccttgctccttctggccggtccgcatttctgttcactaaccccactccaggacactgcccctgaagcctttgcatctctgctcttcactcctgggg

SEQ ID NO: 204478 - DNA, 811 bp, Homo sapiens
  chr17:27942604-27943415
  hyper
tggtctcccgcgaggggcggagttccctccccagtcccgcccccgggcccagcccaagaaggcggggtccggagttcgggactaaaagccggggcggggccgagcttgtgcgccccgccccgctccgcctgcctggcgcgcggggctagtccgtgccgtccaccagctcgcacagcatgttctccagagccgtgatgcgctgctcctgggcctgcacccgctcgcggagggccttgatctcttccagcagcgtctccagggtgtgctgctgctggggcggaggacagagaggccgtgtcgtataggggcggttgggggagatgtagattgggccagagtgcagcagggccgatcttaccgacaagggggcgtcgctggccgactggctgcggcgggggccggagggcgggcgcacgtccaggatgttgcgcttcgtgacccggagctcgcggtgcttggggggcacatagccgtccctcagcgaaatgagcacgggttcggcgtcctggccggatagccattcgtccgcttctagggccggctccgggcctggcgtatccgggtacagatcgtcctggaagaggtctgactgcgggggtgggtggacaggaggacttgcgtgagagggtgcggggcttgctccgctcccttccgcctcgtagccctgcccaacccttctcccggcccctcaccttgcggggcacagtcatgatgataggttcacactttctttcgtgtagcttgtagaacctataagggagcagggttcagcaccctcgcagacttccacgtccttaacttctcctgtcta

SEQ ID NO: 204479 - DNA, 73 bp, Homo sapiens
  chr17:28088056-28088129
  hyper
cgcgctcgccctcgcttgattgtttgctccccaggatgctggggaaagcggctgctgaaagagcaaactttct

SEQ ID NO: 204480 - DNA, 37 bp, Homo sapiens
  chr17:28562514-28562551
  hyper
cctcctcgcctcctcgcagggcggtggggcgcagcgg

SEQ ID NO: 204481 - DNA, 242 bp, Homo sapiens
  chr17:28563016-28563258
  hyper
gagcgaggaatcctgactttcctgctctttaactttgcgggaggggggaggctgcacaaaggagcaggtgtgcgcctcccctgccgccccgcgcccacaggacggcacacaggggtctgctcgtgccgctttctcttgacctcggacacctccccatcgtccccatcccgaaagctgctctctctttcttcctgggacctagcagtactcgatacccatgcgtttatctgactgaccggctg

SEQ ID NO: 204482 - DNA, 251 bp, Homo sapiens
  chr17:29297829-29298080
  hyper
tttctagcagctcgcggcatgttggtttcccagggcaagaggccgccactgaaggtcagctctgtctttccagctgggcactggaggctctaagtctgttttcagcaggatcggaggaaggagacggggtggcgccaaggaaggaggagaaaaggcggccgagaaaaggaggagggcaaggggaagaggaagggcgagggaggagcctgaggagactcgcccggctcaaccccgacgtccgcgccccggcc

SEQ ID NO: 204483 - DNA, 31 bp, Homo sapiens
  chr17:29298581-29298612
  hyper
tctaaaagtcgagttccgctcttcggaggca

SEQ ID NO: 204484 - DNA, 488 bp, Homo sapiens; identical to SEQ ID NO: 128356
  chr17:29421899-29422387
  hyper

SEQ ID NO: 204485 - DNA, 59 bp, Homo sapiens
  chr17:29422762-29422821
  hyper
cagaggtgggtaacgtttaggggttctctcttcctcttccctccgtgaccctcctaact

SEQ ID NO: 204486 - DNA, 144 bp, Homo sapiens
  chr17:29483000-29483144
  hyper
cttccaataaaaacaggacagcagaacacacataccaaagtcagtactgagcacaacaaggaatgtctaatcaatatttccaaatacaagttttctttggttataagcggcctcactactattttaaagaatgttaacaatatg

SEQ ID NO: 204487 - DNA, 91 bp, Homo sapiens
  chr17:29486027-29486118
  hyper
agaatatttggagaagctgctgaaaaaaatttatatctctctcagttgattatattggatacactggaaaaatgtcttgctggggtaagta

SEQ ID NO: 204488 - DNA, 191 bp, Homo sapiens
  chr17:29490203-29490394
  hyper
caaccaaaggacacaatgagattagatgaaacgatgctggtcaaacagttgctgccagaaatctgccattttcttcacacctgtcgtgaaggaaaccagcatgcagctgaacttcggaattctgcctctggggttttattttctctcagctgcaacaacttcaatgcagtctttagtcgcatttctaccag

SEQ ID NO: 204489 - DNA, 109 bp, Homo sapiens
  chr17:29496908-29497017
  hyper
gttacaggaattaactgtttgttcagaagacaatgttgatgttcatgatatagaattgttacagtatatcaatgtggattgtgcaaaattaaaacgactcctgaagggt

SEQ ID NO: 204490 - DNA, 68 bp, Homo sapiens
  chr17:29508439-29508507
  hyper
aaacagcatttaaatttaaagccctaaagaaggttgcgcagttagcagttataaatagcctggaaaag

SEQ ID NO: 204491 - DNA, 46 bp, Homo sapiens
  chr17:29508715-29508761
  hyper
ctttatttataggcattttggaactgggtagaaaattatccagatg

SEQ ID NO: 204492 - DNA, 163 bp, Homo sapiens
  chr17:29509520-29509683
  hyper
tgcagaatgtgcagaaaagctatttgacttggtggatggttttgctgaaagcaccaaacgtaaagcagcagtttggccactacaaatcattctccttatcttgtgtccagaaataatccaggatatatccaaagacgtggttgatgaaaacaacatgaataag

SEQ ID NO: 204493 - DNA, 174 bp, Homo sapiens
  chr17:29527439-29527613
  hyper
aagttatttctggacagtctacgaaaagctcttgctggccatggaggaagtaggcagctgacagaaagtgctgcaattgcctgtgtcaaactgtgtaaagcaagtacttacatcaattgggaagataactctgtcattttcctacttgttcagtccatggtggttgatcttaag

SEQ ID NO: 204494 - DNA, 123 bp, Homo sapiens
  chr17:29528054-29528177
  hyper
aacctgctttttaatccaagtaagccattctcaagaggcagtcagcctgcagatgtggatctaatgattgactgccttgtttcttgctttcgtataagccctcacaacaaccaacactttaag

SEQ ID NO: 204495 - DNA, 75 bp, Homo sapiens
  chr17:29528428-29528503
  hyper
atctgcctggctcagaattcaccttctacatttcactatgtgctggtaaattcactccatcgaatcatcaccaat

SEQ ID NO: 204496 - DNA, 140 bp, Homo sapiens
  chr17:29533249-29533389
  hyper
ttctctagtccgcattggattggtggcctaagattgatgctgtgtattgtcactcggttgaacttcgaaatatgtttggtgaaacacttcataaagcagtgcaaggttgtggagcacacccagcaatacgaatggcaccg

SEQ ID NO: 204497 - DNA, 59 bp, Homo sapiens
  chr17:29541468-29541527
  hyper
agtcttacatttaaagaaaaagtaacaagccttaaatttaaagaaaaacctacagacct

SEQ ID NO: 204498 - DNA, 47 bp, Homo sapiens
  chr17:29541556-29541603
  hyper
tgtccatggtgaaactaattcatgcagatccaaagctcttgctttgt

SEQ ID NO: 204499 - DNA, 136 bp, Homo sapiens
  chr17:29546009-29546145
  hyper
tttttccttgcagaatccaagaaaacaggggcccgaaacccaaggcagtacagcagaattaattacagggctcgtccaactggtccctcagtcacacatgccagagattgctcaggaagcaatggaggtaagggga

SEQ ID NO: 204500 - DNA, 80 bp, Homo sapiens
  chr17:29548867-29548947
  hyper
gctctgctggttcttcatcagttagatagcattgatttgtggaatcctgatgctcctgtagaaacattttgggagattag

SEQ ID NO: 204501 - DNA, 124 bp, Homo sapiens
  chr17:29550461-29550585
  hyper
ctcacaaatgcttttttacatctgcaagaaattaactagtcatcaaatgcttagtagcacagaaattctcaagtggttgcgggaaatattgatctgcaggaataaatttcttcttaaaaataag

SEQ ID NO: 204502 - DNA, 156 bp, Homo sapiens
  chr17:29552112-29552268
  hyper
caggcagatagaagttcctgtcactttctccttttttacggggtaggatgtgatattccttctagtggaaataccagtcaaatgtccatggatcatgaagaattactacgtactcctggagcctctctccggaagggaaaagggaactcctctatg

SEQ ID NO: 204503 - DNA, 250 bp, Homo sapiens
  chr17:29553452-29553702
  hyper
gatagtgcagcaggatgcagcggaacccccccgatttgccgacaagcccagaccaaactagaagtggccctgtacatgtttctgtggaaccctgacactgaagctgttctggttgccatgtcctgtttccgccacctctgtgaggaagcagatatccggtgtggggtggatgaagtgtcagtgcataacctcttgcccaactataacacattcatggagtttgcctctgtcagcaatatgatgtcaacag

SEQ ID NO: 204504 - DNA, 74 bp, Homo sapiens
  chr17:29554235-29554309
  hyper
gaagagcagcacttcagaaaagagtgatggcactgctgaggcgcattgagcatcccactgcaggaaacactgag

SEQ ID NO: 204505 - DNA, 84 bp, Homo sapiens
  chr17:29554540-29554624
  hyper
gcttgggaagatacacatgcaaaatgggaacaagcaacaaagctaatccttaactatccaaaagccaaaatggaagatggccag

SEQ ID NO: 204506 - DNA, 441 bp, Homo sapiens
  chr17:29556042-29556483
  hyper
gctgctgaaagccttcacaagaccattgttaagaggcgaatgtcccatgtgagtggaggaggatccatagatttgtctgacacagactccctacaggaatggatcaacatgactggcttcctttgtgcccttgggggagtgtgcctccagcagagaagcaattctggcctggcaacctatagcccacccatgggtccagtcagtgaacgtaagggttctatgatttcagtgatgtcttcagagggaaacgcagatacacctgtcagcaaatttatggatcggctgttgtccttaatggtgtgtaaccatgagaaagtgggacttcaaatacggaccaatgttaaggatctggtgggtctagaattgagtcctgctctgtatccaatgctatttaacaaattgaagaataccatcagcaagttttttgactcccaaggacag

SEQ ID NO: 204507 - DNA, 140 bp, Homo sapiens
  chr17:29556852-29556992
  hyper
gttttattgactgataccaatactcaatttgtagaacaaaccatagctataatgaagaacttgctagataatcatactgaaggcagctctgaacatctagggcaagctagcattgaaacaatgatgttaaatctggtcag

SEQ ID NO: 204508 - DNA, 123 bp, Homo sapiens
  chr17:29557277-29557400
  hyper
gtatgttcgtgtgcttgggaatatggtccatgcaattcaaataaaaacgaaactgtgtcaattagttgaagtaatgatggcaaggagagatgacctctcattttgccaagagatgaaatttag

SEQ ID NO: 204509 - DNA, 84 bp, Homo sapiens
  chr17:29557859-29557943
  hyper
gaataagatggtagaatacctgacagactgggttatgggaacatcaaaccaagcagcagatgatgatgtaaaatgtcttacaag

SEQ ID NO: 204510 - DNA, 117 bp, Homo sapiens
  chr17:29559090-29559207
  hyper
agatttggaccaggcaagcatggaagcagtagtttcacttctagctggtctccctctgcagcctgaagaaggagatggtgtggaattgatggaagccaaatcacagttatttcttaa

SEQ ID NO: 204511 - DNA, 514 bp, Homo sapiens
  chr17:29559717-29560231
  hyper
atacttcacattatttatgaaccttttgaatgactgcagtgaagttgaagatgaaagtgcgcaaacaggtggcaggaaacgtggcatgtctcggaggctggcatcactgaggcactgtacggtccttgcaatgtcaaacttactcaatgccaacgtagacagtggtctcatgcactccataggtgagatcaaatgaaagtttcatatagaaatacaaaacctagagaactggcatgtaagagaagcaaaaattacttcagcaaggccatgttagtaaatttgcatctgtttgtccacattaggcttaggttaccacaaggatctccagacaagagctacatttatggaagttctgacaaaaatccttcaacaaggcacagaatttgacacacttgcagaaacagtattggctgatcggtttgagagattggtggaactggtcacaatgatgggtgatcaaggagaactccctatagcgatggctctggccaatgtggttccttgttctcagtgg

SEQ ID NO: 204512 - DNA, 104 bp, Homo sapiens
  chr17:29562628-29562732
  hyper
gatgaactagctcgagttctggttactctgtttgattctcggcatttactctaccaactgctctggaacatgttttctaaagaagtagaattggcagactccat

SEQ ID NO: 204513 - DNA, 278 bp, Homo sapiens
  chr17:29562761-29563039
  hyper
ccagtaaaataatgacattctgtttcaaggtttgtatcattcattttgtgtgtatgtgtgtgctgaggtatgtcaagtaatgattatgtacagaatgtgcagggctgattgtcttcttttaaggtaaaatatatggagcaggtataataaactcctattcgtgcatttctgtaggtatatggtgctacctatctacaaaaactcctggatcctttattacgaattgtgatcacatcctctgattggcaacatgttagctttgaagtggatcctaccag

SEQ ID NO: 204514 - DNA, 136 bp, Homo sapiens
  chr17:29576001-29576137
  hyper
gttagaaccatcagagagccttgaggaaaaccagcggaacctccttcagatgactgaaaagttcttccatgccatcatcagttcctcctcagaattcccccctcaacttcgaagtgtgtgccactgtttataccag

SEQ ID NO: 204515 - DNA, 63 bp, Homo sapiens
  chr17:29579955-29580018
  hyper
gcaacttgccactccctactgaataaagctacagtaaaagaaaaaaaggaaaacaaaaaatca

SEQ ID NO: 204516 - DNA, 159 bp, Homo sapiens
  chr17:29585361-29585520
  hyper
gtggttagccagcgtttccctcagaacagcatcggtgcagtaggaagtgccatgttcctcagatttatcaatcctgccattgtctcaccgtatgaagcagggattttagataaaaagccaccacctagaatcgaaaggggcttgaagttaatgtcaaag

SEQ ID NO: 204517 - DNA, 98 bp, Homo sapiens
  chr17:29586049-29586147
  hyper
atacttcagagtattgccaatcatgttctcttcacaaaagaagaacatatgcggcctttcaatgattttgtgaaaagcaactttgatgcagcacgcag

SEQ ID NO: 204518 - DNA, 147 bp, Homo sapiens
  chr17:29587386-29587533
  hyper
gtttttccttgatatagcatctgattgtcctacaagtgatgcagtaaatcatagtctttccttcataagtgacggcaatgtgcttgctttacatcgtctactctggaacaatcaggagaaaattgggcagtatctttccagcaacag

SEQ ID NO: 204519 - DNA, 147 bp, Homo sapiens
  chr17:29588728-29588875
  hyper
ggatcataaagctgttggaagacgaccttttgataagatggcaacacttcttgcatacctgggtcctccagagcacaaacctgtggcagatacacactggtccagccttaaccttaccagttcaaagtttgaggaatttatgactag

SEQ ID NO: 204520 - DNA, 111 bp, Homo sapiens
  chr17:29592246-29592357
  hyper
gcatcaggtacatgaaaaagaagaattcaaggctttgaaaacgttaagtattttctaccaagctgggacttccaaagctgggaatcctattttttattatgttgcacggag

SEQ ID NO: 204521 - DNA, 433 bp, Homo sapiens
  chr17:29652837-29653270
  hyper
gttcaaaactggtcaaatcaatggtgatttgctgatataccatgtcttactgactttaaagccatattatgcaaagccatatgaaattgtagtggaccttacccataccgggcctagcaatcgctttaaaacagactttctctctaagtggtttgttgtttttcctggctttgcttacgacaacgtctccgcagtctatatctataactgtaactcctgggtcagggagtacaccaagtatcatgagcggctgctgactggcctcaaaggtagcaaaaggcttgttttcatagactgtcctgggaaactggctgagcacatagagcatgaacaacagaaactacctgctgccaccttggctttagaagaggacctgaaggtattccacaatgctctcaagctagctcacaaagacaccaaagtttctattaaa

SEQ ID NO: 204522 - DNA, 341 bp, Homo sapiens
  chr17:29654516-29654857
  hyper
gttggttctactgctgtccaagtaacttcagcagagcgaacaaaagtcctagggcaatcagtctttctaaatgacatttattatgcttcggaaattgaagaaatctgcctagtagatgagaaccagttcaccttaaccattgcaaaccagggcacgccgctcaccttcatgcaccaggagtgtgaagccattgtccagtctatcattcatatccggacccgctgggaactgtcacagcccgactctatcccccaacacaccaagattcggccaaaagatgtccctgggacactgctcaatatcgcattacttaatttaggcagttctgacccgagtttacg

SEQ ID NO: 204523 - DNA, 203 bp, Homo sapiens
  chr17:29657313-29657516
  hyper
gtcagctgcctataatcttctgtgtgccttaacttgtacctttaatttaaaaatcgagggccagttactagagacatcaggtttatgtatccctgccaacaacaccctctttattgtctctattagtaagacactggcagccaatgagccacacctcacgttagaatttttggaagagtgtatttctggatttagcaaatcta

SEQ ID NO: 204524 - DNA, 194 bp, Homo sapiens
  chr17:29661855-29662049
  hyper
gtattgaattgaaacacctttgtttggaatacatgactccatggctgtcaaatctagttcgtttttgcaagcataatgatgatgccaaacgacaaagagttactgctattcttgacaagctgataacaatgaccatcaatgaaaaacagatgtacccatctattcaagcaaaaatatggggaagccttgggcag

SEQ ID NO: 204525 - DNA, 582 bp, Homo sapiens
  chr17:29663350-29663932
  hyper
attacagatctgcttgatgttgtactagacagtttcatcaaaaccagtgcaacaggtggcttgggatcaataaaagctgaggtgatggcagatactgctgtagctttggcttctggaaatgtgaaattggtttcaagcaaggtaatcacttttcttttgccttctgtactatagcatatctgttttatcatcaggaggttttttgttttgtaattacttttaaattaaactgaacttttttgtgctaaaactttgagtcccatgtttttttttttaaaaaaaaaaatcctgcttctttacaggttattggaaggatgtgcaaaataattgacaagacatgcttatctccaactcctactttagaacaacatcttatgtgggatgatattgctattttagcacgctacatgctgatgctgtccttcaacaattcccttgatgtggcagctcatcttccctacctcttccacgttgttactttcttagtagccacaggtccgctctcccttagagcttccacacatggactggtcattaatatcattcactctctgtgtacttgttcacagcttcattttagtg

SEQ ID NO: 204526 - DNA, 215 bp, Homo sapiens
  chr17:29664385-29664600
  hyper
aagagaccaagcaagttttgagactcagtctgacagagttctcattacccaaattttacttgctgtttggcattagcaaagtcaagtcagctgctgtcattgccttccgttccagttaccgggacaggtcattctctcctggctcctatgagagagagacttttgctttgacatccttggaaacagtcacagaagctttgttggagatcatggag

SEQ ID NO: 204527 - DNA, 321 bp, Homo sapiens
  chr17:29664836-29665157
  hyper
gcatgcatgagagatattccaacgtgcaagtggctggaccagtggacagaactagctcaaaggtatgtcctaaattaaatataagttgtaaaaatatgcatattgttgaaaatacagctattactgtatgatcaatgttataatttattatttagtatatataaacacaaaggtttttataagttctgtggatcttttaattgcagatttgcattccaatataatccatccctgcaaccaagagctcttgttgtctttgggtgtattagcaaacgagtgtctcatgggcagataaagcagataatccgtattcttagcaag

SEQ ID NO: 204528 - DNA, 102 bp, Homo sapiens
  chr17:29665721-29665823
  hyper
gcacttgagagttgcttaaaaggacctgacacttacaacagtcaagttctgatagaagctacagtaatagcactaaccaaattacagccacttcttaataag

SEQ ID NO: 204529 - DNA, 141 bp, Homo sapiens
  chr17:29667522-29667663
  hyper
gactcgcctctgcacaaagccctcttttgggtagctgtggctgtgctgcagcttgatgaggtcaacttgtattcagcaggtaccgcacttcttgaacaaaacctgcatactttagatagtctccgtatattcaatgacaag

SEQ ID NO: 204530 - DNA, 127 bp, Homo sapiens
  chr17:29670026-29670153
  hyper
agtccagaggaagtatttatggcaatccggaatcctctggagtggcactgcaagcaaatggatcattttgttggactcaatttcaactctaactttaactttgcattggttggacaccttttaaaag

SEQ ID NO: 204531 - DNA, 141 bp, Homo sapiens
  chr17:29676130-29676271
  hyper
tttgtagggtacaggcatccttcacctgctattgttgcaagaacagtcagaattttacatacactactaactctggttaacaaacacagaaattgtgacaaatttgaagtgaatacacagagcgtggcctacttagcaggt

SEQ ID NO: 204532 - DNA, 142 bp, Homo sapiens
  chr17:29677200-29677342
  hyper
ctttacttacagtgtctgaagaagttcgaagtcgctgcagcctaaaacatagaaagtcacttcttcttactgatatttcaatggaaaatgttcctatggatacatatcccattcatcatggtgacccttcctataggtaagt

SEQ ID NO: 204533 - DNA, 158 bp, Homo sapiens
  chr17:29679274-29679432
  hyper
gacactaaaggagactcagccatggtcctctcccaaaggttctgaaggataccttgcagccacctatccaactgtcggccagaccagtccccgagccaggaaatccatgagcctggacatggggcaaccttctcaggccaacactaagaagttgcttg

SEQ ID NO: 204534 - DNA, 123 bp, Homo sapiens
  chr17:29683477-29683600
  hyper
gaacaaggaaaagttttgatcacttgatatcagacacaaaggctcctaaaaggcaagaaatggaatcagggatcacaacaccccccaaaatgaggagagtagcagaaactgattatgaaatgg

SEQ ID NO: 204535 - DNA, 410 bp, Homo sapiens
  chr17:29683977-29684387
  hyper
aaactcagaggatttcctcatcacaacagcacccacatttacgtaaagtttcagtgtctgaatcaaatgttctcttggatgaagaagtacttactgatccgaagatccaggcgctgcttcttactgttctagtaaggatttcccctttttgagtcccccaccctcaaatttttattccagtctacttttaggaggcccttaaatattaaaaacatgaataggatacagtcttctacttctcacccaaacagataacaattcagccacaaagtaaaaatgttgtgtgtttacttttttgcatcttggcaggctacactggtaaaatataccacagatgagtttgatcaacgaattctttatgaatacttagcagaggccagtgttgtgtttcccaaagtctttcctgttgt

SEQ ID NO: 204536 - DNA, 143 bp, Homo sapiens
  chr17:29685497-29685640
  hyper
gcataatttgttggactctaagatcaacaccctgttatcattgtgccaagatccaaatttgttaaatccaatccatggaattgtgcagagtgtggtgtaccatgaagaatccccaccacaataccaaacatcttacctgcaaa

SEQ ID NO: 204537 - DNA, 47 bp, Homo sapiens
  chr17:29685986-29686033
  hyper
gttttggttttaatggcttgtggcggtttgcaggaccgttttcaaag

SEQ ID NO: 204538 - DNA, 217 bp, Homo sapiens
  chr17:29687504-29687721
  hyper
caaacacaaattccagactatgctgagcttattgttaagtttcttgatgccttgattgacacgtacctgcctggaattgatgaagaaaccagtgaagaatccctcctgactcccacatctccttaccctcctgcactgcagagccagcttagtatcactgccaaccttaacctttctaattccatgacctcacttgcaacttcccagcattccccag

SEQ ID NO: 204539 - DNA, 3665 bp, Homo sapiens
  chr17:29701030-29704695
  hyper
gaatcgacaaggagaacgttgaactctcccctaccactggccactgtaacagtggacgaactcgccacggatccgcaagccaagtgcagaagcaaagaagcgctggcagtttcaaacgtaatagcattaagaagatcgtgtgaagcttgcttgctttcttttttaaaatcaacttaacatgggctcttcactagtgaccccttccctgtccttgccctttccccccatgttgtaatgctgcacttcctgttttataatgaacccatccggtttgccatgttgccagatgatcaactcttcgaagccttgcctaaatttaatgctgccttttctttaactttttttcttctacttttggcgtgtatctggtatatgtaagtgttcagaacaactgcaaagaaagtgggaggtcaggaaacttttaactgagaaatctcaattgtaagagaggatgaattcttgaatactgctactactggccagtgatgaaagccatttgcacagagctctgccttctgtggttttcccttcttcatcctacagagtaaagtgttagtcctatttatacatttttcaagatacaagtttatgagagaaatagtattataaccccagtatgtttaatcttttagctgtggactttttttttaaccgtacaaaactgaaagaaccatagaggtcaagcctcagtgacttgacaccataaagccacagacaaggtacttgggggggagggcagggaaatttcatattttatagtggattcttaagaaatactaacacttgagtattagcaataattacaggaaaataagtgcgaccacatatatcttaacattactgaattaaaactatggcttctaagtccttatccaaactcagtcatccaaactagtttatttttttctccagttgattatcttttaatttttaattttgctaaaggtggtttttttgtgttttgttttttgtaaaccaaaactatactaagtatagtaattatatatatatatatattttttcccctccccctcttctttcctaactaattctgagcagggtaatcagtgaacaaagtgttgaaaattgttcccagaaggtaattttcatagatgtttgcattagctccatagcaaaatggaatggtacgtgacatttagggtagctgatatttttattttgttaaataatttccaagaatagagtatggtgtatattataaatttctttgataagatgtattttgaatgtcttttaatcttcctcctcctctccaaaaaaatcagaaacctctttaagaaaacatgtaggttatatatgctagaattgcatttaatcactgtgaaaagactggtcagcctgcattagtatgacagtaggggggctgttagaattgctgctatactggtggtatggattatcatggcattggaattttcatagtaatgcagatccaatttctttgtggtacctgcagtttacaaaataatttgacttcagtgagcatattggtatctggatgttccaatttagaactaaaccatatttattacaaaaagatattaatccctctactcccaggttccctttatatgttaagatataatggctttgaggggggaaaaaataaacctaggggagaggggagtttcctgtagtgctgtttcattagaggatttcagtaaattaaattccacagctaattcaataaataatggtacatttaagtgttctgattttaataatatatttcacatttatccacacagtaacaatgtaatatgttaatgtaaataaaattggttttgatactcagaaataacaagaatttaattttttaaatttgtttacagtcctgggaaaagtaagaattatttgccaaaataagaggaaagaaaaccttagtattattaatgagtttaccatagaattgttggaaatactgaagacaggtgcaatttactaaacttttgtttttaaactattgtagaggctgcattagaagaaaatgtttataatgacagagcaactatgactatataaaaaagctgaaattagaactgtgtttagaaatagatcagtaacccagtgccaaggatgccaagctgccaccatggtcttggctctcccacaacccagtgtttctggggtaagtttcacagtttctaggccctggaatagcaggcagtgtaagcctttgataactttagttcgatgtttttcttgtttttgtttgttggtttggtgcatatgatagtgggtgttatgctattttgctcttcccatcaaaataaagaaacttccagaggtttactgttaaaaatactgatatttccataaacgggtttaccaagggtgtagtatttcataccgcctgaaatgatcagcattggcacaaatcaaaattcagccgcctttgaaatgcaaaaatacctttgactagtaagtacatcctaggagtttgaaaacttaactaaggtttaaaatttaccttgtttaaagaacttctgacttttgaggaaaatctagctttccaagtaactaaaatgtacatgagataaacctctcaccactatgtgtcccttgagaaatgcaacacttttttagtcttcatacttgtaatctataaaagaaattctgaagtttagaccaagttgcccatttctgcgtaattgacataagttctgttaaaaatattataagtaattcgtttcggtttgtagatgtttcccctgacttgttaaagaggaaaccaggaactcagtcatgtttttgtcctggataatctacctgttatgccagtactcccatccgaggggcatgcccttagttgcccagatggagatgcagttcagtagatttggggcaaagtggctacagctctgtcttccattcactcaacacctgttcatgactgagccaggtgcccaggacacatcctaaacagtcagcttctatcctgtgtcctagttggggagacagagtgccagccagcaaccctcccaggtttgtaggttttaggggttttcagttttgtttgggttttttgttttttgtttttgtttctacatccttccccgactcccaggcataatgaggcatgtcttactcaatgttatgcaatggatttaggcaaaaattcattcttagtgtcagccacacaattttttttaatgcagtatattcacctgtaaatagtttgtgtaaaatttgacaaaaaaagtatatttactatactgtaaatatatgtgatgatatattgtattattttgcttttttgtaaagcagttagttgctgcacatggataacaacaaaaatttgattattctcgtgttagtattgttaacttctttttgcgactgcgttacatcatttaaagaaaatgctgtgtattgtaaacttaaattgtatatgataacttactgtcctttccatccgggcctaaactttggcagttcctttgtctacaaccttgttaatactgtaaacagttgtacgccagcaggaaaaatactgcccaacagacaaaatcgatcattgtaggggaaaatcatagaaatccatttcagatctttattgttcctcaccccattttcctccttgtgtatgtacttcccccacccccctttttttaagtaaaatgtaaattcaatctgctctaaga

SEQ ID NO: 204540 - DNA, 143 bp, Homo sapiens
  chr17:30454644-30454787
  hyper
atgacgcccgtgccggagcccacgtgagcctttgccaaggagagattcagagatatgagcagaaaaactggaagatggacttcttcaataaggcagcgggacggtttggctgatggaagatgtttcccggaagcctgttcacg

SEQ ID NO: 204541 - DNA, 360 bp, Homo sapiens
  chr17:30592744-30593104
  hyper
gcgcccggggtggggtgcggggcgggggccggcgttccccgcgagcagccccgcccccgcccgcgcgccgcccccgaggactccgcggggaggaggagactcgggcgcagagcgggggccgcgagaagcgggaagggagcgcggggagcggcggggccggggccggcccaagggcgccctcgcctcggagccgggcgcgagggccggggcggaggcggaggccggcggggcagctagcgcagtgaagtttggcggcggaggggccgggcgtcccggggtcgcgaggaggcggcggcggcgcggggaccggggccatgggggcgggcgcgggctgcggagcgggcgcggaggcggcgcggc

SEQ ID NO: 204542 - DNA, 89 bp, Homo sapiens
  chr17:30813422-30813511
  hyper
cagcctcagagagggcgggccgcgcgctgccagggcagggactcggccgagagtgcccccgcggccggcagctgcgggcgccgcggcgg

SEQ ID NO: 204543 - DNA, 31 bp, Homo sapiens
  chr17:30846452-30846483
  hyper
agacaaagggaatctgcacccgccgggtggg

SEQ ID NO: 204544 - DNA, 90 bp, Homo sapiens
  chr17:30846659-30846749
  hyper
ccgccgacagcccctcccagcccgcctgcccgccctccttccggctgtttttgtttgtctgtctttcccgagaaggtgatgatttggggc

SEQ ID NO: 204545 - DNA, 108 bp, Homo sapiens
  chr17:31203740-31203848
  hyper
cccctctcgggaaagcgcagcctcgcgcccctgcgcgcggccgctccgccctcacctgagcctgaggttggccatgaactcgggcatggagacggtgtccatcagcac

SEQ ID NO: 204546 - DNA, 57 bp, Homo sapiens
  chr17:31254914-31254971
  hyper
ctgggaccgccagcccggggcggggcgcaggcagggaccctccgctcccctctccgt

SEQ ID NO: 204547 - DNA, 377 bp, Homo sapiens
  chr17:31255335-31255712
  hyper
cggggagaggggaggcgggtgccgcagctttgttcttgccgcggggccgcgcgcccgaagttggggaaaggagtaggagccgcgccccggagcgctccggggcccgtgcggcgcgtcccgggcgggctgggggtccctccctcccggggacagagtgggcgtcctgggtggacgagcacggggaagcgggtagggtcttgggtctgttctgtccttgtggttctggaaccggaggggaagggggaaagtaagggagagagaaagagacggagaaaaacaggaaaacttactcttcagtacgcagggaagaatagagaaagaaaaacacaaagaaacgccacgcagactgcagagaaggaccacgaacacacgctccg

SEQ ID NO: 204548 - DNA, 124 bp, Homo sapiens
  chr17:32483868-32483992
  hyper
tcccccctacacacgccactagagacaagattaaaagcgagagcgagagagaaaatgcttaaaacaagtcgctgagcagctcggagcctgttaaccagcgcataatgccccatgttaaccatcc

SEQ ID NO: 204549 - DNA, 226 bp, Homo sapiens
  chr17:32906078-32906304
  hyper
ggggtagggtgccccctacccgcgcctctggaagagcggctgcaaaacacctccggcgcccggtggggagcgtgcatcctttgaaaagggacatcagtgactgcggtggcgtctaccctggagaaacgcagctgagggaggtggaggctcctcccgccgcagctggccggccccattcgggtcccagcgctagccggcgttgggaaggaaaaatcaaacataaaat

SEQ ID NO: 204550 - DNA, 78 bp, Homo sapiens
  chr17:32907146-32907224
  hyper
cccctctgcatcttacagcgtttatggtcatcaagctggagtcgacgtcctgggcaggaagggctcggggcagggcgc

SEQ ID NO: 204551 - DNA, 111 bp, Homo sapiens
  chr17:33446952-33447063
  hyper
cgcccctctccaccgcctgcacaggttcccgagtcccacgaccccctccgcgctcaacacgccacccgcggccacattcggcctctaccttctgccgcaacacacacaccg

SEQ ID NO: 204552 - DNA, 307 bp, Homo sapiens
  chr17:33700165-33700472
  hyper
cggttcctgctccgcgccccgcagaaaccgcggctggctggccaggggctcttccaacttccagcgggagcaggtgcacaggtcaggcccgccccgcccctaatgccttctacccccattacccacccccgccccgcccgccagtcctccatagtccgctttttagggaacctgctgagcaaactagctgggcccccggacaggggagaaaagcacagatacccccactccactccacccccagcccctccgcacccctccagcccctccccacaccccacaccctggctggggtggggtgggaagg

SEQ ID NO: 204553 - DNA, 206 bp, Homo sapiens
  chr17:33701376-33701582
  hyper
accccggtaaccgtcacgctgctagtgatatgaaaaaaacctgccagcgttctgcttttctgccccgctgcagtctttagcacccgccaggattctgtccgagtgtttggattttgtaatcctcctgtctttggccaactccccatccttggcggagcgctcgcccttggccgggctccgtgctgccagccttgcggaaccctagg

SEQ ID NO: 204554 - DNA, 179 bp, Homo sapiens
  chr17:33701612-33701791
  hyper
cactgatgcggagtggcccgagggtgggagcagcggttaatgccgcactgattaatacaggctccagtgaaagcgaaagtaagaaaataaaacggatttcattatacatatacaatgtgtgtatggatacatgtacatacatattacacttatgtgtatgttacgcacgtttgttaaaa

SEQ ID NO: 204555 - DNA, 300 bp, Homo sapiens
  chr17:33814447-33814747
  hyper
ttgctctggcagcgccccacctcgtcccggagcccacggaccaccccccccggacccccggaataagaaacggaggctggaaggtttggcagtggagcgggacgaatttatctgccagcaattccctggaaacaggattccttgcaggcgctgtgccagcgcgggcccttaagcaactgaaagttaaacgcccacgtgaatagctctgagggatcacggagaagttctcgtttcgtctgtacctatttgtattttctaaggcgaaaaaaaagttatttaaagaaaaagagaacgaacctg

SEQ ID NO: 204556 - DNA, 189 bp, Homo sapiens
  chr17:33914229-33914418
  hyper
tttctaggtctaccgcgcaccccgatgacgtcacgcggcgacgttctctgacgtcagagtttcctgcccaccatctttgtccctggcaaagtgggttttgcgcagtggcttagacctagaaaagaatcgtgacgggcaggaaaccattacaccaccacctgggctgtgctctccggctcccgccgccac

SEQ ID NO: 204557 - DNA, 119 bp, Homo sapiens
  chr17:35078956-35079075
  hyper
ctccctcgccagcccgccagctccctaaggttttgtggttttttgtcaccaccacacctcagtgttgagctaagtgaggacgtccccccagcaaatgtattggacggaaggaaacggtg

SEQ ID NO: 204558 - DNA, 58 bp, Homo sapiens
  chr17:35292661-35292719
  hyper
ttcccccgtttcagcttccgtctggtctgcgcatcgcgagtggggtccaaaggccaat

SEQ ID NO: 204559 - DNA, 196 bp, Homo sapiens
  chr17:35293473-35293669
  hyper
actttgcaagagtgctctgcgggagacagacactcagctcgcccaggacccggaccctgtggactttggatggattgggggagggggcacagaaagagggacgggaggagggagattctgctgctaagagcctcctccccctccaaagatgtgcgctgcgcttgggacaaacttccaggtcaagaaagtacggggg

SEQ ID NO: 204560 - DNA, 223 bp, Homo sapiens
  chr17:36003366-36003589
  hyper
aatcgagctgcgtctgccgagaagcgtctcgtgtcgaatttggcccccgcgccgagccggcgaaagagatcgtggacgtccatctttacccagaaagcgccacagttctacggcgcctgcgcagactacttcccaggccccgggcagcgtcggaagagggcgtgagcataattggctcctgtaggcggagcctggctgggtgagaaacgaggctattttatta

SEQ ID NO: 204561 - DNA, 88 bp, Homo sapiens
  chr17:36101943-36102031
  hyper
tcacgtgtgttcaccgggaagagccgggagagctggttatttttgtttgtttgtttgaaaacacagctcaggttcagaggttccctaa

SEQ ID NO: 204562 - DNA, 202 bp, Homo sapiens
  chr17:36102080-36102282
  hyper
aagcgcaggtgtcaaacgccggccgcggcgcccgcagggtccgtcccgcacgctccttctcaaacaatgactttgctgcccacgagcagagaagcctggactccagcgcagtccgcagcgcgttcgttaaggagcccaacttcggcttcttagaatgcagcccactttctagacgcccccggcgcacctgcctcgaggccgc

SEQ ID NO: 204563 - DNA, 143 bp, Homo sapiens
  chr17:36714788-36714931
  hyper
aaggggtgggatggcgaagggcaggggcgggatggcgaagggcaggggcagagggctaagttctggggaagaacagaggcaggaggagaacggatggggatcgtggagaggggagcgttaaaatgggccatgcaaagggggag

SEQ ID NO: 204564 - DNA, 445 bp, Homo sapiens
  chr17:36715092-36715537
  hyper
tccatcatcccggaatggggacgggactggaatgaaggactcaagcgctggcatttgatagagcttctatggctgggacaggaagactaagttgatgatcgatccaaccctgttccaagcctgaatggcgggggtgggcaagatcttacccgttgcccagatggcaattctctgccccctccccagcctgtctctgctaattatcctcacctgacggcccctgggcctgcttgaggagcggactcggcgatgccaagctcctgacaggtgggaccatctgccaagcagggccggggagactgttggggctcaggagggaggagctgagaggacttgggggaagggctctcgctgactcagggaaagggatgcagggcaggaaggaactggaactgccccgagggatactgacgacggaggggctcagtgggtgactggggctcca

SEQ ID NO: 204565 - DNA, 255 bp, Homo sapiens; identical to SEQ ID NO: 53978
  chr17:36716048-36716303
  hyper

SEQ ID NO: 204566 - DNA, 46 bp, Homo sapiens; identical to SEQ ID NO: 11164
  chr17:36762362-36762408
  hyper

SEQ ID NO: 204567 - DNA, 202 bp, Homo sapiens
  chr17:36859556-36859758
  hyper
gacaaaggcttcccggcccctgtctccaagtcgtccatccctggggcgtaggcacgttttagtgagccctgtccggcgaaacccgaaactgcggccaccttggcagcggtgggccccaaaaggaaatattcaaatattctgaaactcgtgcatgatttaggactgacatttttacgtttaattttcttgcagttttattctt

SEQ ID NO: 204568 - DNA, 222 bp, Homo sapiens
  chr17:36886754-36886976
  hyper
gctcccggcccgtcccgccggtgtctggcttgcctcagctcacaggcttttcccgagcgccagtccctgccaggacctccgcagccagcaccttctcttgcgacctttttcttaccctctcattcctccctcgccccttcagccctgtcacctcctccttcctagatggcctcccgtgtccttccctttccactgattttatttttccgtttccaaaccacc

SEQ ID NO: 204569 - DNA, 37 bp, Homo sapiens
  chr17:36904350-36904387
  hyper
tcccatcggggcttgcgaagaacggccggcccccatc

SEQ ID NO: 204570 - DNA, 450 bp, Homo sapiens
  chr17:36905017-36905467
  hyper
tagaccaaagggcgcggggctccggcgggggacgcgacgccttcagccaggcgtccgagcgattttcattcactccaagtgacactcccttaaaattaataactgcatctgggagggcgagcgtgtcctccccactccccttgccccctcggcggcaggggcgctggccccgaaaagcggcgcaccaggatccagcctgggcgcctggcagggagcaatcgcgagaggggagtggaggtgcggggtgaggccgggtggggggcctcgccgcggggggatcgggtagctctggcggaggctgcgcccccggcgtgctcgggcagagaagaacggaggcccgctgaggatgggaactcaggctccgggtctgggacacaataatccggccgaaggcgagcggccacactggactaggaaacgaggcgccgggctgtaaggtgggcccgcgcc

SEQ ID NO: 204571 - DNA, 834 bp, Homo sapiens
  chr17:36905507-36906341
  hyper
cgccctgcgctgcgcgctgcctgtgcgcctccctgggcgcgcgggcgggagagtcgggcgagcgccaagacggctgggcccgactcccactggcgccccggctccacctggcgctggggctccggtccgcagtggctccggcaggagggagagaacgaggagggaggcttggaaacgccgggagtagcggtgaggccgacgccggggaagcgaatcgatactgcgttactggacgcccgtgggcctcatgaggatggtcgattccctcattcgttattcacgatttattagggatggcggccgcgtctgtccctccagagagctcgattatccatccggccagcagcgccattaagcgcactgacggtgggaggctcgagttagaaattaggataggaatcttcgcccagttttggagcgcctgcctcctcttccctcgttgctcgcagccaaggcagccgcgaagctgggggcctcgggtgaatgctttcgccctctggccggcgaccaggagacctgcgcacactggccgccgagtgaccccagctcgagcctgcagccacaccagcgggacgggggcggggaggaagaggaagggcggagagacttccttccagagggagtggtccgagaaccggcgggagaagggccaagggaagatccggtcacctgctccggagcctgcaggcggagaggcgagtagttcaccggccccggaggaaaggggaccctcccactgttcccaggcaaatgtgtcgccggcatcctgcactctgccggggaagacgcgcatccactcgctctgcagggaggggaacgcgggaaggactccca

SEQ ID NO: 204572 - DNA, 211 bp, Homo sapiens
  chr17:37009959-37010170
  hyper
acatcttgaacgccggaaaaaagaaaaaaggaagtcgattcaaaggacactgggatatgaactttaacgccccgcccaccctcctcacgtggccggagcaaaaaccggcctcttccgcctctgggcgctgccttattacgtaataagtttacgacgtcgcttttagccctctctgcgaagtgggagttgaggtagaagcgcaagagatagg

SEQ ID NO: 204573 - DNA, 91 bp, Homo sapiens
  chr17:37183607-37183698
  hyper
ttggcaactactgtggctactagtccaggaggctcagcctctggagtgggtccaggaccggctccagccgacttccgaccctctggggccg

SEQ ID NO: 204574 - DNA, 147 bp, Homo sapiens
  chr17:37310273-37310420
  hyper
gtgtggaaggagaagtctctcgaaatatttcacttcgggggcgtcccactctcctgccctgcagaagaccccttgccacgtctcggagcttctttctccctcccacatgctcacgcggcttctcccgacctgtcttccccagcccag

SEQ ID NO: 204575 - DNA, 67 bp, Homo sapiens
  chr17:37365973-37366040
  hyper
ctggctcagggggcgggggctgtaaaccggaaccggtggaggagggggcgctcatcaggaaaggcag

SEQ ID NO: 204576 - DNA, 39 bp, Homo sapiens
  chr17:37382418-37382457
  hyper
ggaagcttggggagatcatagtagcgtctggatgggttg

SEQ ID NO: 204577 - DNA, 54 bp, Homo sapiens
  chr17:37756136-37756190
  hyper
gagagggcaggagagttggctgcgctagagccataccctggctcacatctgggc

SEQ ID NO: 204578 - DNA, 212 bp, Homo sapiens
  chr17:37756404-37756616
  hyper
ggctggcgcccctgtcccagtgctttaggttggagaaagtttccagagcagaacagccctcccaaggcagctgcgccctttcttaccacttctcacccagggaaactttgtcgagaatttttaaagctgcaggacagaaaggcagaagctgcttcaggattcagaaccggggcagggttttaaggtttctcacagttcaggtgtcatttctg

SEQ ID NO: 204579 - DNA, 606 bp, Homo sapiens
  chr17:37757285-37757891
  hyper
aagggacaggaatggagctcaacagtgaagggacagggagtaactgctttccttccctttcccgccagatgggcaaatggcctggactcggagatacctctttttctctgtcatcttccaaatgctggacttggaatggggtctggaaaatcaagaggaagatgtcctcctgattgaacttggatccagccgtcgggttcagcggcccaggggttgagctgagccggctggtggacgcttggagagcctgccgctgaggctagggcaagaagggcgtcctctctgtgccttctccccaggccaggcacagcgctggcccctttcctcctccctcccctgcttctgttcttggagcatctctgggtgtgtgtgcgcaggcgggagagcaagcaagagaaagagacctgcgaggggacgtttggggccgcttgtccgcgcacatcttcttctcctgctcatcacaccatctcgccagggaagttgagcactggggaggagggtgatgagaggctagagccagccagagtgcagggaatgtggggggaagggtcagaaatcgggaaaggggcgactggtgtggatgccgggattcaccagaagctgagt

SEQ ID NO: 204580 - DNA, 141 bp, Homo sapiens
  chr17:37759987-37760128
  hyper
cctcaatgaaatgaggccaccgtgagaaaccggtccggctttgcatctcatttacataaatatttattaatcgtcattaaactgaacagaaacacgcaatgcacttcgggtgtccgacgggagtttcatcttcgctacaag

SEQ ID NO: 204581 - DNA, 71 bp, Homo sapiens
  chr17:37762839-37762910
  hyper
ggcgggtcagcatggtgcctgagggcgccccgcgggcgggaaggggagacagacagcacaaagtgaggggc

SEQ ID NO: 204582 - DNA, 169 bp, Homo sapiens
  chr17:37764307-37764476
  hyper
tctgtcactctctactccaaaaaaaaaaaaaaaaattaaataaataaaggaaataaataaatatttctgccgccctcccctccccgcccaacgcagggaaagcagggattgagaggaaggtgggaggagttgccccctgtatatagagaccccctcacgggaacaatgg

SEQ ID NO: 204583 - DNA, 339 bp, Homo sapiens
  chr17:37774745-37775084
  hyper
gttctgtggtatttgcgagtaataaatcattggatgggagcgaggaagctggagacctggcccattttcattctgcataaaattttaatggtctctctggctgatccgggacggcagcgcgcggagaggctcttaaagggccagtggcggcgggaaggggcagcggtggggatcgccgttgaccccggcggggactggcaccctagaaggagttggagatgcggcctcacattctgcaggggccgtctccggcgtgcggtggcttctgcctccccctctggggctcagtgtcctccttagtggcttctaaggagagaacctgggcggggaccaggagct

SEQ ID NO: 204584 - DNA, 336 bp, Homo sapiens
  chr17:37782849-37783185
  hyper
tctccccacgacctcgcaggcctctctgaaactcccagtaccaggaccacgaaggggttaaagccagagtcctgcctccccgctgcccctctccccctccctccccctttatcctctctgctggactccatcaataatgcagcttcaagttctggggagaccgcagggggccccccagctggctccccaggccttggctctaactcccaccctcctcccagccccaggagaacacgattctccatgctcattggccagtttcccctaaaccctccctccgagcacccgggcgccagtcccaggcggaggggacgggctggggaccccaaagctggg

SEQ ID NO: 204585 - DNA, 76 bp, Homo sapiens
  chr17:37783775-37783851
  hyper
ggcttcttcgccctcccaaggcgctgccccggccggactggcctgggggtgggggcgcaaggagagccgggctctg

SEQ ID NO: 204586 - DNA, 50 bp, Homo sapiens
  chr17:37793985-37794035
  hyper
tcatttctaatgacacgttccctcaccccgcatttttgggttagtcaatg

SEQ ID NO: 204587 - DNA, 52 bp, Homo sapiens
  chr17:37823746-37823798
  hyper
ccccggcggccctccgcgaatgcgtcctgcccctcccctgcccaagccctct

SEQ ID NO: 204588 - DNA, 493 bp, Homo sapiens
  chr17:37823945-37824438
  hyper
cacagctcacctcccctatcgcgcctgccatcggacgggcagtgccgcgccctgctctggggcccccggagcgaccacagcggaggccggaacggactgtcctttctggggcggggtggggagggggtgtcgctggagggcccggtggcatagcaacggacgagagaggcctggaggaggggcggggagggggagttgtgtggcagttctaagggaagggtgggtgctgggacgggtgtccgggagggaggggagcctggcggggtctggggcctcgtcgcggagggcgctgcgagggggaaactggggaaagggcctaattccccagtctccacctcgaatcaggaaagagaaggggcgggctgctgggcaaaagaggtgaatggctgcggggggctggagaagagagatgggaggggccggccggcgggggtgagggggtctaaagattgtgggggtgaggaactgagggtggggggcgcccagaggcggg

SEQ ID NO: 204589 - DNA, 63 bp, Homo sapiens
  chr17:37856349-37856412
  hyper
cccccgggcagccgcgcgccccttcccacggggccctttactgcgccgcgcgcccggccccca

SEQ ID NO: 204590 - DNA, 322 bp, Homo sapiens
  chr17:37856726-37857048
  hyper
tcgggcgggagggggcagttacacggcagcggctcgagatggcccatccaagagactggcgctttccaggctccgaggggctccgggaacttgtcaaagaagttctctgaaattgttcagaaagttttcccgcaaagggtgtattgcgtagagcgcgcgcgcgcgtttccccccttcttgagccccctcaagctttctcaaagcctttccagttggcagcctccgcctccggactggcctgggctggattccttgggggggtcctctgccctgcccctcctccagcccctccccgctccccttcagacgattttggtttggt

SEQ ID NO: 204591 - DNA, 360 bp, Homo sapiens
  chr17:37895591-37895951
  hyper
agagctgccccgccttctcccattgggtatttttcctgagtgagagtgggcggggcctcagagtcctgggtcctcccttatactaggagtcatccaggggtttctcaccttctcacctgggccctgcaccctaaaaaattataagcctctcccgtgggggcggggcgtggagtactgggcggacgggggctctcccgccacatccaggcccctggcccaggcctcagtcccgcaagcccttccccctgctctgggaagcagagttgttttctgttggccctgaacaccgggccccgccacctgcccttagggccagccaggtggggcgtgattcaggaagtaaacaaggaggttgggagg

SEQ ID NO: 204592 - DNA, 279 bp, Homo sapiens
  chr17:38020426-38020705
  hyper
tccacgtgctcctgccgtcgcctggactcagcgcgcagctggcgggagattcccggcgcggggagtccccgggatccggcagccgcgtcggcgcagactgaaaagggcaggagccggcgacctgccggtgcgcggggttacagcggcgctggctggcggcggctttaaaggacgctggccgcggagtgccgcgggttccgcgcctccagccccctttcgaatgtcaaacccaaggaaccccgacaggatggaaatgtcgcatcactaaattgtctcaaa

SEQ ID NO: 204593 - DNA, 39 bp, Homo sapiens
  chr17:38228513-38228552
  hyper
gccactggtgttccccgcctggcccggcccacagcagcc

SEQ ID NO: 204594 - DNA, 37 bp, Homo sapiens
  chr17:38228861-38228898
  hyper
acatgcaggcagcctcgctggacgtggagtcagaaga

SEQ ID NO: 204595 - DNA, 163 bp, Homo sapiens
  chr17:38348018-38348181
  hyper
ctttgcgccagttggagggaggcgccctcttctggcatacgcaaccccagggcgcacagcttggctaatggaccctgtctttgtgcaaattagtgaaaagcccggatcccgcctgagtcacggcaggcagcccttggccaggtcaggtcgcagacttggctgt

SEQ ID NO: 204596 - DNA, 252 bp, Homo sapiens
  chr17:38474111-38474363
  hyper
acttccatattacgccgccgcctcacttctcagatttaggtgtgggtgtgtgtgtggttggggggaaaggagtgtaggataccacacgctgcggtcttctccaccgagcgctattttcattctttccgcagaacctcaccccgttcttgctctgaatcttcggttctgggtctgagggagggattctcccggattcccacggtccagtcttcaactaggagtggctcctttaagactcgcccttcccgaggt

SEQ ID NO: 204597 - DNA, 119 bp, Homo sapiens
  chr17:38478476-38478595
  hyper
ggcaccttggagcagtgagggggattcctcaagcacaaaaggcaggggagaagtggcagggaagaggtggcaggggagaggtggcaggggctaggcacagttgggaccttgcttgcctg

SEQ ID NO: 204598 - DNA, 436 bp, Homo sapiens
  chr17:38498112-38498548
  hyper
cgtccttgtcccctcgcagccccctcctctccctgtactcggcgtccctctgtactctgtgtactcctcatctggagcctttcccccttcctgcttctctcctctcctcccccttcccaggctgcccccacttgcctgtccacatgccgcctctccctctcggttccctgcgtttctcccgctgcagccggacgcgccgggaatgggttaagccaggggcggtgcctggacggggcggggcggtggaaagggggtggtgcccggaggggagggggcgcgcagagctggggtgggggggccgtggcgcgtaccaccagagaccgagcgagtcgccagctgcccctggcctggcgggggcggaaccgcgcgggatccccacccccacccggaatcctcgccacggagaatccctggagaagccccggatccccggctg

SEQ ID NO: 204599 - DNA, 493 bp, Homo sapiens
  chr17:38498596-38499089
  hyper
cggcctgcggacttggggagccgctgtactctgcctcggacgccacgagactctagacgggagtcccctcgaggtgaagccgctgagttcccgggccccgccaggcttccctgggagagccgacggaccccccctcccagcacacacaacttccctgcttttcaccgggactggcggagcggccggcggacttagacgcggggacttcagggcagggggcgccccctgcccgggtcaccagtcggggcgaggggacgtctcctctcccccagctgctctgctcggatggcgccgccggctgagtgacgggggcggcgcgcaggacttcccagctcggacctcttgccttcgaggggaaagatgtacgagagtgtagaagtggggggtcccacccctaatcccttcctagtggtggatttttataaccagaaccgggcctgtttgctcccagagaaggggctccccgccccgggtccgtactccaccccgctcc

SEQ ID NO: 204600 - DNA, 159 bp, Homo sapiens
  chr17:38604453-38604612
  hyper
gcctaggtgtctctcgagggccaggggctggcgttggggagaaattgtgagggtaaaatcaggcaacaggaaagaggaaatcctctggctttcgccacaaactttgcagccggtggtgccaaagccgtgtggcctcttctctggcgccttcccttcctc

SEQ ID NO: 204601 - DNA, 293 bp, Homo sapiens
  chr17:39683516-39683809
  hyper
ccattcttcctaaacgaatgggccccagggcgggagagtgggaggaggccaaagcctgagagggatgaacactagacccttccggccagagaaacggaatgcaggaggccctacgctgcggtggcagagggggcaagactggccccgggtggaccagatcaccaaagccaaactctcgcatcttcctgcggcagcgcggcccctggcctagacctctgggcactctacagccgggtcccatctcctcccactcttcaggcctcgctgacccgcgtcccttcttcgtcccgggg

SEQ ID NO: 204602 - DNA, 786 bp, Homo sapiens
  chr17:39683839-39684625
  hyper
ccccacccacttatctgccctgcccagttctcctcccctttccaccaccccggcctctgcatccagccccgaggtcctgccccgcacgtctcctgtccccctttactcggccccacctgtggaccttcccacgtcctaacgggctcctgcccgccgccccgcctggaacctcgcccggcccgcggggctgggtttccgcggcaggtgcactgcacttcccgcggccgggcctccgcccaccttgtcccgcaggtcctggatggtcgtgtagtagtggctgtagtcgcgggagggcccaggcccctgcttctggtaccagtcgcggatcttcacctctagctcgccgttggccgcctccagggcgcgcaccttgtccaggtaggaggccaggcggtcgttgaggttctgcatggttagcttctcgttgcccgccagcagcccgtcggacgcggtcaggacgccgccgtagccgccgccgtaggcccccgaggaggacgaggacacaaagcgggcggaggacacggatacgccgcggccgccggagcccccgtgaatgctgggcgcgcgaaaggcgacccccggcccaaaacgcacggagccgccgcccaggcctccgaaggacgacgtggccgacgactggcgatagctgtaggaagtcatggcgaggcggagcacggacggagcaaccctggtctcagaagctgcgattcgcgggaggagcggcgaggccctcacctggcgccttttatgcccgcggccggtggaggggggaagggaggaatggtg

SEQ ID NO: 204603 - DNA, 48 bp, Homo sapiens
  chr17:40400778-40400826
  hyper
agcgaagagcagcgatttccttccaaaaggtcagctgcctcagacaga

SEQ ID NO: 204604 - DNA, 77 bp, Homo sapiens
  chr17:40427488-40427565
  hyper
gtgagttctttcctctttgttcaccccgaccatcttgccagattcctttagcctcagaccagcttttgtgatacaac

SEQ ID NO: 204605 - DNA, 378 bp, Homo sapiens
  chr17:40428884-40429262
  hyper
tcaataattatcctgggtttgcccccgggagggcgtctcagccagggctcctgccgcctgcatgggcacggcaggaattcacattcgcccaggccgaattcacctgtccgagttccagggtgaacctacgggggacggggcgcctggggccggttcccttcctgggaaaatctggctggctcccaccagtcagagctgcgggagggactgctctctctagagaagaaagaataaacagggtcatctgtaggatccaggggaagggggtcccccagatcctttccacgtgctgaggagggggttgcggttgtgggaagccaggctgagtcacccactctcctttcctctgctacgtctatctcccggagctggccagcg

SEQ ID NO: 204606 - DNA, 212 bp, Homo sapiens
  chr17:40573874-40574086
  hyper
ctgtccacccactccaccagcccctcttgcactcctgacgcccactcttccccgcccagccccgcccgcttccaggaggcccagggtgccagcgcgccgcgggtgagggtgtcctcaagggcctgaaaatgcctggtggccaggagcagagagcagcgaggggacaggggtgggccgccgaggccgatgtgggggcgcgggggcgcagggtc

SEQ ID NO: 204607 - DNA, 330 bp, Homo sapiens
  chr17:40575109-40575439
  hyper
ctccatggctacccggagccgtgcgggaccggccgggtggggctggagctggagcgggagacccggagagaagcaggagcggaagggaggagagctagcgggcgagagcggagagcagaggaaactcgagccacgtccgtgcgcaccgggacagcggccagaactgctgggcgggggatcggtgagctccccagctcccgggccaaactccggagtctgatcgctgattggctggccccaccccagaaagggagggaccggggcagaaggggagatcgacgaggcggggcggcggagggggacccaagagccgagcgccccacccttccc

SEQ ID NO: 204608 - DNA, 214 bp, Homo sapiens
  chr17:40760808-40761022
  hyper
aaagaggagccctcgctcactcttgagcggctcaagatgttaccagaagctcccgccagatgtgcggggcgggggtgcgggcacaggtaaggcagagaagatgggtggacggccctgggaagaactagggtgccgaagcctgcaggcgggatggagtggaaggaggtgaggcaaaattaggcaagtacaggaaggagccagtgcagcgaagaaa

SEQ ID NO: 204609 - DNA, 311 bp, Homo sapiens
  chr17:40831605-40831916
  hyper
gagctgagcaggaagaaaggcggggccggcgggggcagccgcggcggggttgaggccctgaggggcagctcccaccccgtagcagcctccgcaggtcctggcggaagcgcaggcccaggaaggcgtagagaacgggattgaggccacagcgggcgagggccaagccgctggtcaccagcagtgcgacatccttgcgtttgctggcagggcagctccgctcgcgcgcagccagtagatcggcagtatccagcagcagggcgaggctgtagggcagctgcagcaccacgaaggccgccaccagagccaccacg

SEQ ID NO: 204610 - DNA, 62 bp, Homo sapiens
  chr17:40897135-40897197
  hyper
tacccgtgccgcgcggacgcactactgtcatttgccgccaaaaccccgcactcaggagtcct

SEQ ID NO: 204611 - DNA, 362 bp, Homo sapiens
  chr17:41150140-41150502
  hyper
ttccccctcctagcgccagagaaaggaactacaacaaagcctagctgctgagtccagagcgcacagcacagtcgccctcccagctcttccgtcggccgggaggagtctcctttgctcttgtctactgctggagctgctaataaagtttcattcgaatacttgagctgccgcgccctgcgtttccctcatgagcttcttccgcccgcaacacgagactcagcaccacacaatcagcgtggcaaagcctgaagggcgggacaggaagtgaggtcactcctcaccggggtgaaaggttagcggaagtgtccttctttcctttttgctggtagggccgggtggttgctgccggtaagtagaagctt

SEQ ID NO: 204612 - DNA, 85 bp, Homo sapiens
  chr17:41624075-41624160
  hyper
ctcctccggctggcgtctgcacacgtctctgcatctgcgtgtacgtgggagtatgaacatgtctgtgtgcgcccaggagggaggc

SEQ ID NO: 204613 - DNA, 90 bp, Homo sapiens
  chr17:41723688-41723778
  hyper
gccggggagggtcggtcacgagcggatgacgggcttcccggagcacagcccggcccacgggcccggagagaggcaggaaacccgggctta

SEQ ID NO: 204614 - DNA, 195 bp, Homo sapiens
  chr17:41790829-41791024
  hyper
tgaaatcatttttgtaaaatcgcaatttgtcaccaggggttttgactttccttattgcctcgtgggaggtggcagaggcagcacatctcagaccgagcctcggttcctccccctacctcccaccgctgcgcttgaagaaagatgctgcagcctccccagtccccatgccagcgctcccacttttctctgagcttt

SEQ ID NO: 204615 - DNA, 259 bp, Homo sapiens
  chr17:41791085-41791344
  hyper
cggtcaaatgaaaaaataccagctccgcccccacgcgggctggccggggcgcctggagcgccagggcggctgcagcgcgctctccgcggccgtcggccctgagctcatttcctggggcgcgcgcgccgggctatttcagcctggcgctgtgcaaacaggacaatttactgcggccaaaagggacccaaattacaatcgtatcacagacaaatatccgccacgccaggtctccaggggccaggaggggcctctctcccgg

SEQ ID NO: 204616 - DNA, 39 bp, Homo sapiens
  chr17:41791412-41791451
  hyper
cgtttgccaccgagctgtgcctgctctctgcaacaggaa

SEQ ID NO: 204617 - DNA, 566 bp, Homo sapiens
  chr17:41910113-41910679
  hyper
ccacgccggactcaccctcgggctgctccccgcaggaggccgagcaccgactcccgctcgctctccgaaggaacctgtgggagaacaaggagcgcactgggcgcaggagcagcgaccccgggggacctcggagggcggtcccggaggacgcggagcagcagggagcggggggcgcgcggcggggcgggcgcgggaagagggaggcgggggccgaggggcggggttgagactcccgcggtgggctcggtgggccgcgaggctgtccgggagcacgggaggagggtctcggcccggcctcccgcccctcccgccgcggcgcccagctccctcgtccgttcccctcgcggcctcctacctcgtcgcgccgggatgtgtgctccgcgaacgggagccgcgcgagtgcccagagcctgggccgccgctggctccgccttcccggacccctccctgcggctgccgcgccgggcgggggtggcggagcctgaggaggcgcggcgcggggaggaggcgcggcgcggggaggaggcgggggaggagcggaggccgccctccgcgtctggcaccgc

SEQ ID NO: 204618 - DNA, 283 bp, Homo sapiens; identical to SEQ ID NO: 54132
  chr17:41910700-41910983
  hyper

SEQ ID NO: 204619 - DNA, 404 bp, Homo sapiens
  chr17:41984572-41984976
  hyper
ctcaccaccttggtgcctgaagccactttggagcccctaccgcaggggcggggaccagtgtcaatgggcagcggggcttggttctcccaaccagcaccccagaaagagggcccaggggcgggggcgggtggacagggagggaacgggcctgggtgaaaggggcctgtggagtttaaacccagtgaatagggtcctaagtgccgtgtcaggacgaaaagaaggcggaggtcttgggataggagctggcccgggggccgggggacgcctacctgcgccccgggaagcccctagctccgggcggctccagcgcagccgggcgctcagcgtttattgcttgtcaatcgctagcccggctcttaaagcggcaaggcctctccgcgagggggcggaggtccggaggagag

SEQ ID NO: 204620 - DNA, 286 bp, Homo sapiens
  chr17:41985015-41985301
  hyper
gaagtagtctttcccagcagctggtacgggggcagccaggtagtggtttgggagacaccgcacagaccacgacgccctgctggagtcccactgggaagggttagggaggcaggactggtaccagtacccgctggtgcccctcggctcccaaggatcccttaaaggggcgatggtaaaagtgcctaatgagaccggcttgattactccgcccacccatcttggcttagaccggcgttctagttccaggcgtgcctcacttttcctcgttatcctgcttccatattga

SEQ ID NO: 204621 - DNA, 84 bp, Homo sapiens
  chr17:42030245-42030329
  hyper
cgggtttctggggtcgggagtgcgtatgcaaatgacgtgggcgtggttggcagatctcccaggaggcctcaggggtcctcacca

SEQ ID NO: 204622 - DNA, 92 bp, Homo sapiens
  chr17:42030794-42030886
  hyper
gagcagggccagaagcactgtggtcaaggcgggccacggcctgcgcacgaacaccatctgggaaggcgacattgggacgtgggtcattccaa

SEQ ID NO: 204623 - DNA, 237 bp, Homo sapiens
  chr17:42081912-42082149
  hyper
ccctgtccggaccccgccccgaccaggtccagccccgcccaacggcaagttaagagccccccagtgccagacgctccagacagactgccactcttggggggcaagagttggttgtcgtcatggcgacggcgctgatggctgtggttctgcgggcagctgctgtagccccgaggctgagaggccggggaggcactgggggcgcccgaaggctgagctgtggcgcgcggcggcgggcgg

SEQ ID NO: 204624 - DNA, 323 bp, Homo sapiens
  chr17:42083719-42084042
  hyper
gcctaagggagtataggggaggagttcagccctgggtgcccagatctgcgccctccctggctaaggactccgggcggaagtaaggataaaggggtcagagaaaagagaggtccgtgggggtaggggggcagtccgtgccggctgtgggccaggctcacccgctgactccggacacaggtcctgagtaacgtgaacctgcccgccgacctggacctggtgtgcaacgccgagtgggtgagcacaaaagaacggcagcagatgcggctcatcgtggacgtgctcagccgcctgccccaccactcctcggccgtcatcaccgccgc

SEQ ID NO: 204625 - DNA, 267 bp, Homo sapiens
  chr17:42091861-42092128
  hyper
cccccatgtcgaaatacaggtaaggcactgggatgtcgggcttcctgcgagccgggagtggggaagcaacgaggacagaatgaagcggtgggggaagaagcttgagaccccttgagttcccacaggctccactgctcccccaaaccagactcccctcccatgggcaggaccgccctaccagatttggtccgacacccagaccagaacccctcccagggaggtcccaattcctcccagttcaagggtcccgacttctagcccccaatt

SEQ ID NO: 204626 - DNA, 191 bp, Homo sapiens
  chr17:42092357-42092548
  hyper
cagagaagcaggcgcggggatgggacacgcagcttccgggtcaagcgctttttctttttcctcccggaaacaacggtgtcattctctagttccggatctaaggtgacccagttgcgaagtccagccttctcgtctgctcatggagccttcagggccatatttgtccctgcgaatttgaaaactagactaga

SEQ ID NO: 204627 - DNA, 111 bp, Homo sapiens
  chr17:42264411-42264522
  hyper
ccctacggaaagacgagtccaggggccgtcctggcgaggtcaaaacatttagtctggtcttttcaggtgaggacttccccatccaggcacagtgccggtccaatccccctt

SEQ ID NO: 204628 - DNA, 232 bp, Homo sapiens
  chr17:42386109-42386341
  hyper
cagagggcccagccgtgatccagcgacgggtttggggctccgggaggggtgggggggcagcgggcggcggcagcagtggccgcacatctggatggaagcgagctttgtccagaccaccatggctctggggctgtcctccaagaaagcgtcctctcgcaacgtggctgtggagcgtaagaacctgatcaccgtgtgcaggtgggcaccgctagtgggcgggggctggggtggt

SEQ ID NO: 204629 - DNA, 62 bp, Homo sapiens
  chr17:42402710-42402772
  hyper
cgtgagccgccgcgccggccttaacagcgcattttcaccagccccgccccggccgcgcgcgg

SEQ ID NO: 204630 - DNA, 195 bp, Homo sapiens
  chr17:42402917-42403112
  hyper
ggctacccgccgagacttgaaaacttcgcggcgacttctctcgccggccttagcatcgcccccatttttcaggttacaggacaggcctgcaactgcaaaacgctttgtaaaccacagggccccgcgcgggtgtgcgccactgggttagctgagctgcagcccgggccgggcgggctgggacgtgagcaagccggg

SEQ ID NO: 204631 - DNA, 152 bp, Homo sapiens
  chr17:42441042-42441194
  hyper
acagccgcgcgaggacgctggggccactcgccggcggcatcgcggggctaggccgggccctagcggtccatggctcccgcctggtcccgctcgcccggccccgcgcagccccagctctgcgccgcgcctcgcagctccggctcccgctcccg

SEQ ID NO: 204632 - DNA, 149 bp, Homo sapiens
  chr17:42462944-42463093
  hyper
ctcagggtgttcccgcgacagggggagtactcggcgcggcggccgctctctggctgagccaaaaagcagctacctacgggcgtcttctcagcctcctcagtcttttctaggacgttccagtgctgccagggggcgcaggcctggagaaa

SEQ ID NO: 204633 - DNA, 282 bp, Homo sapiens
  chr17:42633888-42634170
  hyper
agaagccgcagctccgggccattctcctttccctcgctccctccaagccccccgccccaaccctccagctccgggcctccgagttcctgagttttctcactttgaggtgccaccgaacacaaagaaccataatgggctcctttgtgttggctacggggcaattacgcctcggagtcctggtccctttaagagtctcttaaagagacaggatcccatttttcagagggttttttaagggtgtgtggagggggagggcgagggatctacgtgtaaagtgaagtg

SEQ ID NO: 204634 - DNA, 75 bp, Homo sapiens
  chr17:42635073-42635148
  hyper
cctgccccgcctgctgctgccgctgctgctgctgcccgccgccgggccggcccagttccacggggagaagggcat

SEQ ID NO: 204635 - DNA, 100 bp, Homo sapiens
  chr17:42635760-42635860
  hyper
cttctcacaggaggagacgcgtttcgcgcgcctctggatcctcacctggtcggtgctgtgctgcgcttccaccttcttcactgtcaccacgtacttggta

SEQ ID NO: 204636 - DNA, 87 bp, Homo sapiens
  chr17:42906495-42906582
  hyper
gcatgagcataatgaaatcggtatcactgccagttctcaatgaacaaaaagaaaaccaaattcgcccatttcgcaaaggaaaagtac

SEQ ID NO: 204637 - DNA, 197 bp, Homo sapiens
  chr17:42988798-42988995
  hyper
cgcatctgcctctccagggactcgttctgtgggatggagccggccggtcccgcggagccccgacccgacttggggaggtttcgaggcccggcccccggccccaggccccgcctctagcccgggggtaacgttcaggccccgccctcgacccaggtcctcgtccctggcccttctcccctggcatctcctggggtggc

SEQ ID NO: 204638 - DNA, 205 bp, Homo sapiens
  chr17:43025009-43025214
  hyper
ccgccgctggcgtcgctgcttgctcacgggtcccacagccacaccacagacagcagtacccacaccgggagagagcgccccacaccctcccctacccgcgccaacctccacccggcgccttgcgttcaaattagccgggcgggccggaccgtgcttcctattggtcagcgtccgtatcgctgattggctgtttcctaagtaacaa

SEQ ID NO: 204639 - DNA, 43 bp, Homo sapiens
  chr17:43045529-43045572
  hyper
ggctaggcgcccgcgctcaaggacggtccggcggggctgcggg

SEQ ID NO: 204640 - DNA, 178 bp, Homo sapiens
  chr17:43239156-43239334
  hyper
gtgtggctgttgacgttacaggcccttggatcgcttttcaggccagaagaactacaatccccagcaggcaccgcgcgtccaggctctctcttcccccccatcttagtggcctgagcggcttgaccagagctgctgcaactgcagcaagaggtagggctcaggcgttgggaattgcacc

SEQ ID NO: 204641 - DNA, 876 bp, Homo sapiens; identical to SEQ ID NO: 54190
  chr17:43324795-43325671
  hyper

SEQ ID NO: 204642 - DNA, 75 bp, Homo sapiens
  chr17:43339333-43339408
  hyper
ccccaaccctcgcccccgggcgctcggccgctcccacctgtcacccccatgcagaccgaggctctgtcctggagg

SEQ ID NO: 204643 - DNA, 134 bp, Homo sapiens
  chr17:43339475-43339609
  hyper
cgctggaaatattagaggcgccggtgcctgtgatgtcgccgcctctgtgacgtccccgccgcgaccccacaggcagggagccgcatttaggtttcgggcgggcggacgggggacggcccgagtgaggcgtcctc

SEQ ID NO: 204644 - DNA, 115 bp, Homo sapiens
  chr17:44849686-44849801
  hyper
gtggtgacttaaaacgttcaacgcggagtgaatgggtagcgctcccagagccgctttcccctggctcttggccggagacgggaagagcgatcagaggtgactcgcttttggggag

SEQ ID NO: 204645 - DNA, 94 bp, Homo sapiens; identical to SEQ ID NO: 128812
  chr17:44849831-44849925
  hyper

SEQ ID NO: 204646 - DNA, 104 bp, Homo sapiens
  chr17:44919338-44919442
  hyper
cagcgctgaccggcagggggcgctcctgcagaaggctggccgcggtggcgccctcggcggggcctgggctggcctggggacccgggaggcctccccctccatcc

SEQ ID NO: 204647 - DNA, 154 bp, Homo sapiens
  chr17:45056851-45057005
  hyper
aacctctccaaggtgcccattccaggatttgatacccttagcagtgaagttattccggaatctgccctgactctcttcgcttattatttaagccctcgtaagccttgctagacatcagatgagtcgccgggacccctggcgctgcccactccac

SEQ ID NO: 204648 - DNA, 66 bp, Homo sapiens
  chr17:45330948-45331014
  hyper
atgcgctgacgacccggctggcaggcgggtcctcgtgggcgaggcgagggaggcggcgagagagga

SEQ ID NO: 204649 - DNA, 119 bp, Homo sapiens
  chr17:45331313-45331432
  hyper
aggctccggctcggcagcgtcgcagctgccccaggatctgcgccccggtcaagttgcggacttggagccggcaaacgcggagggctggtcccgcgcgtctgcgctgggaatgcgcgtgt

SEQ ID NO: 204650 - DNA, 98 bp, Homo sapiens
  chr17:45331675-45331773
  hyper
ccaaggcgaggtggggcttccgggggttgttcccgcgccttggcagagggatgccgctgtagcttcctgggtgagagcgtgcgcgcgcgcgggtttgc

SEQ ID NO: 204651 - DNA, 39 bp, Homo sapiens
  chr17:45609732-45609771
  hyper
agaagctggctgggcgcggtggctcatgcctgtaatccc

SEQ ID NO: 204652 - DNA, 117 bp, Homo sapiens
  chr17:45867584-45867701
  hyper
ggccactgggcccgctgcacgcgagcgcgccgagctctgctcccgctgctcctgcgaagctggtgtccacacccgccggcctgcaggcacctcggggcccacgtgtcctccggccac

SEQ ID NO: 204653 - DNA, 210 bp, Homo sapiens
  chr17:45973403-45973613
  hyper
ctttcggttggtgcgctctaccgtccatcagtgacattgcacagacctattggtcaaatcaacgtcgctctagacgcctctggttgattggttaatagtgctgtcggtccccaatgttccaagcgcttattggtgaaggctgccgtcgctcgggcggtggcgggctccgggattggcggttgcttggcgggcggtgtcaggctctcggtg

SEQ ID NO: 204654 - DNA, 48 bp, Homo sapiens
  chr17:46089197-46089245
  hyper
tggtttccccagaagttgcccgtttcctgggccattcctctccaggca

SEQ ID NO: 204655 - DNA, 199 bp, Homo sapiens
  chr17:46089283-46089482
  hyper
tccagcggtcccctctcttccatcccgccatctctctgaggggcttgcgtctccctgatgcgctctggtgtctgtctgagccatccatcaaggatggcaggctgggggaaacatgaaaaagagcctatttggctattaacatcccctcccgctttgttgtctctctcctccccagtcccctaccagcccctcacccaac

SEQ ID NO: 204656 - DNA, 233 bp, Homo sapiens
  chr17:46124668-46124901
  hyper
cctaaatggggtcttcgcatcagctgcgttaaaatcaccccagcaggcaggttatccggccgccactccagggtcattaaatcagactctccagtgggacctcggaattcgtagcttagcaagctccccaagtgatgctgggagtaaactaacgtttgagagtcacaaacatgttttggcaatataaccagatgggactggagaaattaaaaaatgagaaacatccctaaaaa

SEQ ID NO: 204657 - DNA, 165 bp, Homo sapiens
  chr17:46125148-46125313
  hyper
ttggggtaccggtttccgccgccagcacccaagatggcggcacgagcgtcgcaaccacaagaaccacatgcttcgtgtcccgcctcagcattctcgggtctcactagacttttgcaagtcactgtgggaaccctcaaggcgagggtgttccgcactctggcggcg

SEQ ID NO: 204658 - DNA, 73 bp, Homo sapiens
  chr17:46620279-46620352
  hyper
aagaaagggagtggattaaacgctaattcagtaatacctgaattttagcaaaacacataagtctatgcgactg

SEQ ID NO: 204659 - DNA, 321 bp, Homo sapiens
  chr17:46621458-46621779
  hyper
ttgttcttcacccctcttcctccctagctctgaattcttcctcttctcctagagttggggcagaaaggaccgaatcttttctgcttctagggtctatcccagcaacaacatactcattcccctacacagatacgggtgaaaacctcaatcaaatcattttcttctagcagaaaaaaaggcgtttccccaaccagcttccaaaatcagccatagggagagaaagagagagagagacagaaaaaaaaaaagacgctgttagcggccaggcctgaaccccagtgggatattctacttccccatcccaggaatggagggggtaag

SEQ ID NO: 204660 - DNA, 189 bp, Homo sapiens
  chr17:46659085-46659274
  hyper
ggaacaggcggcagagccaccgcgggtttgggtatccttgatcctggcgcccaagagcagagatttttctcctctgcgccctggaagtcaccacctgccaatcccaccaaggcgccgcacccccctcacccctccagccgcctgagatggagaacagggtttatgggcgactcccaggacgggtttcac

SEQ ID NO: 204661 - DNA, 45 bp, Homo sapiens
  chr17:46659384-46659429
  hyper
cgctcccgggtctttccgtggcttcccagccgccttctcctggca

SEQ ID NO: 204662 - DNA, 206 bp, Homo sapiens
  chr17:46662740-46662946
  hyper
ggagcaggggctcctcgggagcagaaggggccgctgtgctcacagggctagagggagagttcagtgtcccaacgatgcgggggggcccggggccaccttgcgcggccgctcgctgacgcctcagaggccccagcctggctgtgaacttggtctaaggcggactctactggcagctccgggatgttacagcctctgcctctggtcca

SEQ ID NO: 204663 - DNA, 77 bp, Homo sapiens
  chr17:46663887-46663964
  hyper
cgtctgctgacctctgcatgatcccggactctatgaattattgatgagatatgagcgttgatttcccctttcaggat

SEQ ID NO: 204664 - DNA, 111 bp, Homo sapiens
  chr17:46670738-46670849
  hyper
gcagggcagggactcgggcgaggacagggagcagctcgaagccgcttgcctgaagcggggctcctgggcgggcgcggggaaggcgcgcgagctctcgcccaccgccccaaa

SEQ ID NO: 204665 - DNA, 103 bp, Homo sapiens
  chr17:46675757-46675860
  hyper
caaacctatcaacctttttttttttcctccttctccttcgcctttctcctctctccccccaacaacacaacgcgtcctgttccacctacgtaggatctgtgaa

SEQ ID NO: 204666 - DNA, 83 bp, Homo sapiens
  chr17:46687507-46687590
  hyper
tggctattctctgcaaacaccggccttcctccgcaagacaaacggcctcgtctccagcccgtgccggcgctgctgataaatat

SEQ ID NO: 204667 - DNA, 335 bp, Homo sapiens
  chr17:46688806-46689141
  hyper
gggaagttggtccggttctcccaagacgaggaatgaggcgagcctggctcacgactctgtctctcttggtgccccagatatgcgggcggagatggagcaagtcttcctaggtgctcctagggcacaggatccagcccacgggccttggacgctgccgtttctggtggcaaaaaaaaaaagaaagaaagaaagaaaaagaaaaaaaaaggtttgaaagtaaaagaaaaagggggttgggagggtggggagagaaaggaagggtggaggttggcccgggcgcgctgctctcccggttcccggaggcggatgcctcagtggagcgtgactaccagaga

SEQ ID NO: 204668 - DNA, 151 bp, Homo sapiens
  chr17:46689520-46689671
  hyper
caatcaggctcagccgcctccctcacccccagcgcccctgggccgagggactcgcaccacctgcctccagcccccgccccctcctctctgcagcctagcctcagcaggcgcaggagcccggtgacaggctccccaccggctctgcaaggca

SEQ ID NO: 204669 - DNA, 163 bp, Homo sapiens
  chr17:46690905-46691068
  hyper
gggagggtgggggagggggcagggacggagaaggttggaagattcgtgaacgagcctgggagaccattataataagggcaggggaccttctaccccgtgcgggggcggggggggcgcaagaaggccgcggtcggcggaggaggaggggcgagggggattagac

SEQ ID NO: 204670 - DNA, 162 bp, Homo sapiens
  chr17:46696376-46696538
  hyper
tttctagcggagaccgcaaagcagtgcgccctttatggcctgtaaaaagggggaccgagcagttttcaaactccacgcgattgtttcaaattctgaggagaaacagttgggctttttgtcgggggagaggaggcctgagaggataggatgagactgtaaaag

SEQ ID NO: 204671 - DNA, 175 bp, Homo sapiens
  chr17:46702354-46702529
  hyper
ggctcgggagccccgcagagagcagcgggggaccgcagaaaaggaagcggtagcccctgcgaggacgccgaggaggagaggggccaccggagggaaggctcccggggaggggccggcgcatccggggagggggctcagtcaccgcgtcctgggcttcccccgcccctcctgtcgc

SEQ ID NO: 204672 - DNA, 1174 bp, Homo sapiens
  chr17:46702755-46703929
  hyper
ccggcccccgccagctcctctcccggccgtcgccggtctctggccgggctttcagctggggcctccgggagagagggggaaagagggccgagagagctgcaagtcgatccccgagcccctgttccccgcaggacttggagaagtgggggcagcgctcctctggcggcctcagtctccccttctagagcacgcagctttccccttccctccgtctttccttcctctcccctcctcctcccggcccgctctccggccaccgccgcagtttcccttcacattgtccgcagtttattgcctttcccctccccgcccccctcctggccttcggcctgggtatttcctcactttttataacttactttgatccggcctctctttgtcctcgcttccttcgcaaattttattgtccccgtagccgggtctttgattagacagcacggcctccctgcccgccgaagtttccaaactgtactcgggcgtgccctgtttgagcagctccccaggcgcgcccagcagcggctccgccttcaccgccgcctggccctgccccggggccgcttcgccgcgcggcgccggctccagccaggtgcggaggtacctgctctcggccggcgggacgccctggggctggatgtaagggtggtagacggacggcaggctcccggacgcgtgcgggctcagcggcgcccaggaggcgccgaacaccggcgctttgggctggaagctgcacgaggggaactccaggtgctccgcgtggcccggctgccgcgagctcgcgtactggccagaaggaaacttggctggaggcgcgtcctcactctcgtgacttatgatcgagtcgacataatagctgctaagcgtcccagaaatggacattctcagacattatccgggcgcttgcagggggaagggaagcgctcgcgcggcggcgcccaagcagggagaggtggcacccggaccggtgtgagggctttcggacgcgacccccccagccccccaccctcccacccccaccccctgctcaacttctcagccaacaaagtacagtggagcagcccgtctcagctctccttgcaaaatgattggtcaaagtttttccgactgcctgataaagcgtcagctccgacataaatcaatcgggcgagggggctgcgctctcgctgtcatccgtccg

SEQ ID NO: 204673 - DNA, 109 bp, Homo sapiens
  chr17:46703959-46704068
  hyper
ttatgctgatgcaatgtgctatcacgtcagggctccggcggccacgtaacctcagccccagctaccggccgcccggtccccccctcccgctgcaggaaggggggcagtt

SEQ ID NO: 204674 - DNA, 105 bp, Homo sapiens
  chr17:46713828-46713933
  hyper
gaggagacagtctcggagaattcagaggtgccagaagccgagttcctagaccccagctggattttttttttttttttttttttttttccaatttctggcggcggg

SEQ ID NO: 204675 - DNA, 171 bp, Homo sapiens
  chr17:46724200-46724371
  hyper
ggcgaggacagggtccgggagggggataggcgagagcgcttcctgcctccgcccgggcggggctcggccgtctcacctgcccccacccacggcgccgtcggatcccagagcggctggtgaggagatgggcctggcgcgccgcggggaggccagaggcgcggaggagcagcg

SEQ ID NO: 204676 - DNA, 189 bp, Homo sapiens
  chr17:46755701-46755890
  hyper
caggagatgctcggggtcggggcccagggcagggaaaaccctcagctctggtcaaaagccaagtgagcgaaggaggcgatgcaacgtcaccctggtggccaaggcaggcacccaggtctcgaggttccaggagagggacgcgctgtgaccaccagccccctaggctcctgtctgctcgatgagcgtcca

SEQ ID NO: 204677 - DNA, 88 bp, Homo sapiens
  chr17:46805484-46805572
  hyper
ttctccaggagcacccagagtctgcaccacagacacgtccaggtaactggccataggctggtaggttcccggatatcccggatagaag

SEQ ID NO: 204678 - DNA, 57 bp, Homo sapiens
  chr17:46806111-46806168
  hyper
gacgcaggggcccgggcacgcgcgctgattggctgcggcctgggggagagaagctaa

SEQ ID NO: 204679 - DNA, 222 bp, Homo sapiens
  chr17:46806431-46806653
  hyper
tcatttacacgtccggggggaggggaggcgtggtgggcggaggaagaggggacgaggagccgggccccacctccttctcctcctctccctccctagctttctgtctcctgcgctttgacaggtttaacgagagaataaaaagctctctctataaagtgtccatctcctgggggggaaggggagtcgggggtggggctgggaggccgctcccggcctcagagg

SEQ ID NO: 204680 - DNA, 204 bp, Homo sapiens
  chr17:46816036-46816240
  hyper
gctctcaggtgggagaattcataggaattaaggggaacccactaactcttcatcaagactagaggccagcctaaagaattttccccctttttgtcccagagacattctttccttccttctgcgtgtgtaaacacacctggtcgggcagatttttcagtaatcccaatactgagtcacctcaccggccggggtttactccccagc

SEQ ID NO: 204681 - DNA, 237 bp, Homo sapiens
  chr17:46829742-46829979
  hyper
tgaaacattaaccccctcagggttctgaagggaaggggaacatccttagaggacacagggagaagacaaacgtcccttcatcctgagattcacttggaaatcccctgaacttccaactcctggctgatgaaacggagcaagttgtctctgccttatggcctccatcaccaagcctgaaggagagtctctcagcccggtttgggagtaaacccaaaaccgttcattcgtcagggaatg

SEQ ID NO: 204682 - DNA, 66 bp, Homo sapiens
  chr17:46830655-46830721
  hyper
ggcacagcttccagattccagtttgttaagaatcacctgaaggacgtttctctgaagggaaagtgg

SEQ ID NO: 204683 - DNA, 118 bp, Homo sapiens
  chr17:46831608-46831726
  hyper
aaattcaggatgaacgccctggctgaaagctcttcctgggtttgggacatcagaagaccttcccgggatgggctcttgtctctgcagtagctatgacctgcacataaacctgtttcct

SEQ ID NO: 204684 - DNA, 69 bp, Homo sapiens
  chr17:46832887-46832956
  hyper
gagcccaataaacggttcctctttccttctccggtcctttcccttccaacagagcgattgagaaatcat

SEQ ID NO: 204685 - DNA, 321 bp, Homo sapiens
  chr17:46970399-46970720
  hyper
caacggtaatgaacgattgactgcctcggctggggcgggtcggggactgctgtgtaagatgggcaggatcctgcgcgacacctgcccagtatccgcctccagtcttcccgagagaccattccctttcgcaacatttccttcctggggcttgggcacatttccttgacttccgatctccatgactttgctttgaagacccactgctctgtccctctgacctctaatgccctcctcagctggggcacggtgcaaggaagagcgtggtctagggaggacggacgggggtgaaggggacgaccaaaggtcgtcattataagcaaa

SEQ ID NO: 204686 - DNA, 199 bp, Homo sapiens
  chr17:46985398-46985597
  hyper
cgcagagcctttccgagagaaggggcccaaagcgagtcaacttctctactgagcttcccatgaggatgctggatccccaatcctaaccatgcagacgtctgagggtcgccgccattaacgggaatgatatggcccttcctcccccactccctcctctcttctcccctttcaacacttgaattgggctctccgctacttc

SEQ ID NO: 204687 - DNA, 239 bp, Homo sapiens
  chr17:47073560-47073799
  hyper
aggaacggcgggaggaggaggggagtggccgccgccccctcccctaagctcccgcccctcgcttccccgtgcgcggagcggaaattaccccctccccccgcgggtctgacctggggacgtgggcggggcttcccgcttagccccccgccctccgtccctctcccgccttcccgccaggatcggaatcctgcaccccaaacaaagttccgagacccgaacctagggcctagagagctgcc

SEQ ID NO: 204688 - DNA, 152 bp, Homo sapiens
  chr17:47074409-47074561
  hyper
atgaaaaataaccgtacattttaccctttaagacatgtgagatctgggctggaccatcctcccccagtttgggctggggtagggggatgggtgggggcggggcgcttccctaggggccaggttcttgcaaagggggaaggggcctgtagagc

SEQ ID NO: 204689 - DNA, 37 bp, Homo sapiens
  chr17:47210500-47210537
  hyper
cggggctctctgcttggaactcagaggcgctgaccca

SEQ ID NO: 204690 - DNA, 319 bp, Homo sapiens
  chr17:47439867-47440186
  hyper
ccgggagcccaggtaaagacgagagctgcgcatgcgcggcgctctccgtgagtcggggggcgtggttgccgaaaggaagccaaagtgaagagtgcagggggttgtagcaggcgctgctgtgggattccacaaaataggcgcgggttaggatggggaaggtaaagtgaagaaacgggccaaagcagaaaagtgggtcgacgtgagatttggaagtaaaaagagactttgaataaaaacttaacgactgctgacctccttgttctccttggagggcagtgggagtgacggggggcagaaatcagctcggcagcatgcaagc

SEQ ID NO: 204691 - DNA, 150 bp, Homo sapiens
  chr17:47563693-47563843
  hyper
acactcctgccttacgctcttggagggaagctccactcccgggcctgccaagggctggggccagaccggaaacgggatcatcttcgatcaagggctgtgggctctgctggttcctgctgcctgtgccggctcccccgtcctcccctcctc

SEQ ID NO: 204692 - DNA, 76 bp, Homo sapiens
  chr17:47575254-47575330
  hyper
cagtctggctcaagcgcctcgcttcttccctgggggaccgcgtggggaggcgggaataatcgcatgtgctgagttc

SEQ ID NO: 204693 - DNA, 198 bp, Homo sapiens
  chr17:47647459-47647657
  hyper
cgagtgagcagagcgcgcggcgggcgcggcggggcctcaccttctcccgggccaagcgcccacaggaggcgccccgagtgcccaccaggtggcgcgctgacgccactcgcctcccacgcgccacacccgcttggtctcttcatcgccccctgcggagctggcgtggaccgcagcgacttgggtccagccgacaggtgg

SEQ ID NO: 204694 - DNA, 109 bp, Homo sapiens; identical to SEQ ID NO: 128956
  chr17:47841693-47841802
  hyper

SEQ ID NO: 204695 - DNA, 154 bp, Homo sapiens
  chr17:47865600-47865754
  hyper
tacaaagtttcttttacaaaacatccctccgcaactttgagtttatataataaacggaaacgtcctttaaacaatcaggctacgaaggggttaaatctaatctcagcaacctgatggattctggggggtttccttcctcgactctagaaattaa

SEQ ID NO: 204696 - DNA, 248 bp, Homo sapiens
  chr17:47979497-47979745
  hyper
gctgccctgtggtcacgtccccgccccaccgacggaggtaggcgcccaggtacccagcctgtgggccttgggagcccgccaagctgctgatgaaaggcgctgccagattaaccctttcttggccgcacccccttgctgctgccggctgccgggtggtcgcagagcaggagggtgaggggcaggagaggagtctagacacgcctggctaacgagggggcggctttggcctctgcgcgcttgccgggtgg

SEQ ID NO: 204697 - DNA, 66 bp, Homo sapiens
  chr17:48041973-48042039
  hyper
aagacctctcccctcctcctcccccgggagcttctccagggttatttgggaaatgagggggaactc

SEQ ID NO: 204698 - DNA, 94 bp, Homo sapiens
  chr17:48042984-48043078
  hyper
ccaactctggaccccgccgtctgtccccgcggcatcaccagggtgctggagttttccgagcaggccccttgcgctaagcgagaggatctgtgag

SEQ ID NO: 204699 - DNA, 213 bp, Homo sapiens
  chr17:48047162-48047375
  hyper
gtgcgcccctaaacttctccctcgcctggttggacgcagctagcgggattcaaaccttccttggattccctgggatgtgggggtggggggagggcgaagggatggggcgggagacacggggggaggggcgggggagagttgatctaggtctcctttcaaaaccgacctggtttcgatttgcagttgtgtaaagacaggcgagagggccccccc

SEQ ID NO: 204700 - DNA, 212 bp, Homo sapiens
  chr17:48072403-48072615
  hyper
ggacaggaacggaccggagtgcgagagaggcggaagagacgaggcaggggtgtgtgtccagaaggcgaagggaggacccggccgcgtctggggggagggggaggccgagaggcgcttacaccattgcctgccgtcaggcggtcgctgcgcgcctctcctcgcgtcccaagccacaatcaaatgctgccagctccgcccggccagccggttat

SEQ ID NO: 204701 - DNA, 211 bp, Homo sapiens
  chr17:48172686-48172897
  hyper
atgcccgccagggcaagggtagggaggaggcggccgaaccgcgtcgctgggccgaaaggtgcgcgagcgctgcccgcgcggggaccacaaccaaagtcgcggccgccgcagccatgcgctgggtgtgggcgctgctgaagaatgcgtccctggcaggggcgcccaagtacatagagcacttcagcaagttctccccgtccccgctgtccat

SEQ ID NO: 204702 - DNA, 188 bp, Homo sapiens
  chr17:48206110-48206298
  hyper
gtaggaagaagcagagacagacacacaaactggcggagagtccacagggctgctgagaagaaagagatcacaccgagagtggggccacgggaactggcactgggaacaagggcttccgccgctctaagtgacgcccgagggtgggagagaagggagaagcccttcgggcaggcgataggaaagggccc

SEQ ID NO: 204703 - DNA, 177 bp, Homo sapiens
  chr17:48278764-48278941
  hyper
gacttactgtcttcgtcttggccctcgacttggccttcctcttggccgtgcgtcaggagggcggtggccgctaagaggagcaggagccggaggtccacaaagctgaacatgtctagaccctagacatgtagactctttgtggctggggagggggttagcgtccgctcatgcgtggcc

SEQ ID NO: 204704 - DNA, 144 bp, Homo sapiens
  chr17:48503201-48503345
  hyper
cagcacgtgacccgagggggcaggggatggatggatcttgaccttgccatctggcccctcacggatgtgctgctggctctccctctaggaaatcaacaaatttttgcgcttctaacatccaggcccctgaggatggtcgcgagg

SEQ ID NO: 204705 - DNA, 39 bp, Homo sapiens
  chr17:48585621-48585660
  hyper
cctagcagcagggcggggcgaggcgggtcatgcacccct

SEQ ID NO: 204706 - DNA, 218 bp, Homo sapiens
  chr17:48619736-48619954
  hyper
ccaagtggactttttgcggggtgtggcggccgggtctcgaccacagcgtggatcaccggctgtttaggaaactgcagctgcacaacgtggggtgcaaaactgccccgcttcctttacagctcttctcaaccctcacctccatcccccgtcacccaggcaccttcgcttccagatgctgccaggctgtcactcaattcggtcatttcattcatttatca

SEQ ID NO: 204707 - DNA, 51 bp, Homo sapiens
  chr17:48639832-48639883
  hyper
ccgcgggtgcctcctacccgatctccattcgatgcagggtgcttaagattg

SEQ ID NO: 204708 - DNA, 193 bp, Homo sapiens
  chr17:48712251-48712444
  hyper
ctgggtccgaccgcgctcgccttccttgcagccgcgcctcggccccatggacgccctgtgcggttccggggagctcggctccaagttctgggtaaggcgcggggctccggggtcactgcgcgggggccagggtcggccggcttcgcccggtccccgccgcctgccttcccgcggggccggcaggtatcccggg

SEQ ID NO: 204709 - DNA, 37 bp, Homo sapiens
  chr17:48997201-48997238
  hyper
atggaaacccttccccgggcgtcgggcaggaccagcc

SEQ ID NO: 204710 - DNA, 615 bp, Homo sapiens
  chr17:49021815-49022430
  hyper
cccgcagagggcagggaagccctggacctggtctgaccttgcgcgctagccccagaggtcgccgtgctctgctgtcggcgttcaggtgcccgcggtcgggccggggagggcagtaatcaagccggcccggcggctggcgaggggcgcgggtccagcgcgctgccctcggccgccgccctgagcggttatttataaccgcgggtcgcgttacctcctgaccttaagctggggcgggcgatccgcagcgattagcatctatctcctccccgccgcccgctgcgaacaaacacccctctgtgcgccctcccccgcccgccccgcgggaggccctgcaggaagcaggatgttgacccggagcctccctgcgctcctgcggcggccccgccacatgtgagtggcgggcggtggagtgcgggtgggggggaagcggggagcaggagctactcgtgtttgatggcttcccgagttgccaatgtcctggtctattctgagtgaccgccttatttacaatatagggctccccagcccgtgtctgcccaaaggggtgccctctcccaagccagtgggggccagccagccctggttggggcagcacctgcacaggtggtcccagaa

SEQ ID NO: 204711 - DNA, 115 bp, Homo sapiens
  chr17:49028000-49028115
  hyper
taaggctgttgctggcgtttagaggtacttcgtaggtgctgatttttcctaattgaactgtggctggatcttggcctaaaggtcccactgtcagcaaatccgtgtccacatgcct

SEQ ID NO: 204712 - DNA, 691 bp, Homo sapiens
  chr17:52977599-52978290
  hyper
tcgagggtaaatatttctagttattcagtatattcagtggctaactatttattttgtgggtaccagacaccgacataatcggttacgtccttcccttaattctcataattctgaggtttgtgttattaaccccctattatctttggtctacccagggcagccaaagaggcgcagagaagaatgacaaggtgcccagcaagcggcaggatcaaagcctgggtctctaattcccaggctggagattctgggctgcctgctcctcctgcacggggcgaaaagcccacctgggatccgagcgggcggccgcgccactctcgcaggctccatacacccgccactacccgcctgtaccacctgcagccggcagcgcagcctcctcgcgggtcccgcagggcgcgctgcaggtgcgctgggcgtcccgaagccccgccctcgcgtccctgccccgcgcccagctcctcacgctcggtgcccgcgccccgcagcggcagcgcagaacgcaccgcctctgccagagcccgggaagcgctcgggcgaagaggaggagccaagggtaccgagcgggtggagtcgggagccggagagcggtggaggcggatttcctgggcccggccctctggcgctaccatggcgtttggcaagagtcaccgggatccctacgcgacctccgtgggccacctcataggtaagg

SEQ ID NO: 204713 - DNA, 88 bp, Homo sapiens
  chr17:52978340-52978428
  hyper
tgcttgatccattctcggcctgcagaggacggagttagtccaacttgaaaaaattattcccctccccccgcaactttcccaaggcacc

SEQ ID NO: 204714 - DNA, 144 bp, Homo sapiens; identical to SEQ ID NO: 11387
  chr17:52978453-52978597
  hyper

SEQ ID NO: 204715 - DNA, 109 bp, Homo sapiens
  chr17:53343657-53343766
  hyper
tggcttgagccctttcttggtaagtcccaaaccttcccaagacaaccttggccttagcagtagaggaggggtacgtgtgatgaggccccaaacccggctaagtgatgcc

SEQ ID NO: 204716 - DNA, 185 bp, Homo sapiens
  chr17:54674073-54674258
  hyper
cctccccacctccctgccacctctccgcgcctccctcccggcgttccttccaccccaccccccaccccccccaaccccccaagtccggagtcccggcgaatctatgctaattatttcaaacctgcgcctggtccccagcgcagtctcaatgcccccggccccgcccgccctgtccctccagcccg

SEQ ID NO: 204717 - DNA, 353 bp, Homo sapiens
  chr17:54910847-54911200
  hyper
aaccgcggccgggctcggggtcagcggcgacgagcgggcggctgccccgctcgccctcggcctccgcgcccgcccgccgctccgcagcggaggagccctcaggtttgcgttactgcggccgccacacctacctcagcccgccgcggccaggtcgggcggtgccgcgcaggccgcctccccccctcgcttcccagtcggcttacgcatccccggcggcggcggcgccggcatcggctagaggttcggctcaagtcgggggcactcgtgtctgcgccgagcggcgggcgtgagcgcggcccctgggccccgcgcggcgcggtgctgcgaggaggatcctcgtggccttgccccgc

SEQ ID NO: 204718 - DNA, 295 bp, Homo sapiens
  chr17:54911484-54911779
  hyper
gatcggcgtgcgtgcggctggagccttaagcgtttcccccgcccggcttcatccctgctggcggcccagcgtcgttctcctcctgcgcgaggcggccaaggcctgctggcccggagccgcgcctccacccgcgcgaggtagggcttcgaggaccggcgcggcgcaggtctccggaggcctcccgagaggggctagggtcgccgggccgcgcgtgggagcgggtggggcccgggaggagacggcgccccggaggggagtgcgaggcctgggccgacggttacgggcgccgaccggc

SEQ ID NO: 204719 - DNA, 527 bp, Homo sapiens
  chr17:54911874-54912401
  hyper
gcggcggcagcagcagccgccttgggctcctggacgcgctcccgaggtggggcgggttggggagtggggattggagcgtgatggctggacgtcgccttctcggcgcggcaggtcccgggagacggggggacgaggcgcagtcccgccctcgggagagcggagccaccttcactgagggcgcccggtttggccccggaaaggcaggaagggggcggggaagggatggcgagctcggggtgcaccgcctgtttcttttctggttaggtatcgtccttggagaagatggaagcggagaggcggccggcgccgggctcgccctccgagggcctgtttgcggacgggcacctgatcttgtggacgctgtgctcggtcctgctgccggtgttcatcaccttctggtgtagcctccagcggtcgcgccggcagctgcaccgcagggacatcttccgcaagagcaagcacgggtggcgcgacacggacctgttcagccagcccacctactgctgcgtgtgcgcgcagcacattct

SEQ ID NO: 204720 - DNA, 420 bp, Homo sapiens
  chr17:55938684-55939104
  hyper
cccttgcctgatacagcaagcggtttacagtcctgggccaaacaggaaggcgacagcgctagacgcagccggcaggtccgcaaggttgaggtgcagcggtgccgcaggtgtcacctcgagagtgcagtcggagagcgccgcgggtgaatgggccaggcaaggcaggggtaccctagggatgcgacgcggggctcctggggacaaaccctgccccaggccgggagggaggagggagcaggagggtccagcccacgccgctggccacatcagagcaccaagagaacaccaactgtttattacaggaattcctatgaaacagctccaagaaaaaacccacacataggaggaaaaaaaataacaaagcaacactcaacagacatggggctggggcttcccccacagtgcgccgggtcctggcgc

SEQ ID NO: 204721 - DNA, 420 bp, Homo sapiens
  chr17:56032083-56032503
  hyper
tccccctgaaaggcgctcggctcccagcaggcgcccccgcctgccgtcgccgcccagcctgcgcccccaggcccgggcactgcggggaggggcgcccacacaaaagggggagcggcgggagaggggactcgggcgaagccggctccgggaggcctcgtctcccttccctgcggcgctggcccgcgccccccggtctaatcgcgcgccccgctcccggccccccagatgcccgcacgccccccgcgcccggggcccgggatgaggtgggggctcgggaaggaagggcgggcggggacctgccgcacgcggagctcccggggagccgcgccgacagccccgggaatcaaactcgcgacggcccggccctcccggcggcgcctgggcaacgggtcccgagaaggtggggccgctgggccgggg

SEQ ID NO: 204722 - DNA, 610 bp, Homo sapiens
  chr17:56401719-56402329
  hyper
acctggagccggggcggacgcaccgccgcccccgggtagctggggccaggcctggccagccaggcgggcgctgacgggggcgtccccgctctacggcggcggcgggaggaggcggcgcgggctgggccccgggcggctgccaggacaaccagggatttgcggccgggccgtaccactggcagcgcggcaggggcggccggccaggccccgctgggcgcaggcctatggagggcggaaccctggagcccccaggggagggcacggcgcaggtacgagcacgggaggcttggaggtggaccctgcccaggacgggaaagctccccagcccctgggagtgcgcacaccaccactgagtccttggggttctgagcacggtgcaggggagatcccggtggtcgttccccccacccatctgcacgcacccacacacctgcccttgcgccggcgctcacctctcccggggccccgggagcaggcgcccctgctctggcctggagagcagggcccgggggccaggacggcgggagcgggagcgtctcccgctggttgcgcagcgcgatctgcctctgcagccgcagcacctcccgctgggactcgcgcagcagccgat

SEQ ID NO: 204723 - DNA, 314 bp, Homo sapiens
  chr17:56405995-56406309
  hyper
cttgctgggtggctgggctggtcctaaggaggcctgggtcgatgggctgcttgcctcatagtctcagcccctgctggcctctgctctggggactgcaggggtcccttacagtccaggagcctcgagatggtgggctccgaggagggctgagcctcagaattgggtgggggggtgagccgggaagagccagccctcccctcctcctcctcctcctcccctcccacccaccaataggaagtcggctgctggtttccatggtgatggcgctggactggtgggctgaaccggctgacagggtcggggacagaaggaag

SEQ ID NO: 204724 - DNA, 1162 bp, Homo sapiens
  chr17:56429044-56430206
  hyper
cactccttcctctctcgttcccaattccgttttatctattcctttctctagtctactcagggtcaggcatcctttccgactactcactcagcagcggatccccacccgcctctgactcccagtgtctttcggctccaacgtaagttcaccgaacgtctaagagctgaggattcaaaggcatgtaagaccgcccctgccctcagctgcaagacctgtccgcgatcctacgaggtaaacgatggcctccttcggcttctcactccccctgccacctctgagttctgagacttaacttttctctttactgtcccacagccccattccgccctctttccccgaccttggtcccccatgggccctacaaccaggtccccgactgacaccttgaccagcgaacacagcaaacaggcccgcagatgccgcaggtccttcggcaccgtctccagggccatcttcgccgatgggaagaacaacagggagatagacgaccacagcctgtgcacccgcaggaagtaaatagctcgttacccagaatgcccaccacttccggcgcttagacttcctcttccggtgtgggcggacgccagctccgcccctacccccgccagaggagatggtttctcccgccagcaggcggggaggctgggcggccggccgccacctgggccggagcgcgtcgcagccacctgagcccgccgagggcgcggcggaggctgtgtggggtagtcagcgggcccccggggcgggggggcggctgcgcttgcgcgggagtgtgtcgggctgagccgcagcgccgagacgcgggctgtttgatctgggctggtggccctgggcgtcggtcctgttccccgatggtaacccgaagtttgtttttttttgttttgtctccccgttttagaagcattgggggcagtgaatccactgtctccctctggattgtctctgcagagaccgagaagaaatccagggacagccccacccctccttcctaactgcgagagcgctatagggtttccacttgcttcccacaggaatgctggcctgggagctacggcggaaaaaaatgcgtatttatcttttaaaactccgtctgtttgctcgttccggctgataatttatactttgcgcagttcttagcgcttagacacggttcctttactaa

SEQ ID NO: 204725 - DNA, 270 bp, Homo sapiens
  chr17:57970251-57970521
  hyper
ttcagatatggtacgcatgctcactgtccaccgaacgctccagctgacaatgcgcatgctctagtcctccaagcgcgacttcggctggtgttttgcgcatgtttctgccagcgcctggatcctgccgatagttctgcgcatgtccactgcccactgtttggcttcacggaaccctgtacgcatgctcctacgctgaactttaggagccagtctaaggcctaggcgcagacgcactgagcctaagcagccggtgatggcggcagcggctgt

SEQ ID NO: 204726 - DNA, 99 bp, Homo sapiens
  chr17:58228397-58228496
  hyper
tcctctaggtgggaggtggcaggaaaggcatgttaatatttgataagaagctaaaggcgcttcaagcggctgggcacagggatccgatcctggaggcac

SEQ ID NO: 204727 - DNA, 94 bp, Homo sapiens
  chr17:58498603-58498697
  hyper
ttacaacaacaacaacgacaacaataacaacaagacgtttgctgaacatgctggcatagaggacaagttaaaaagtttctggactcaaagggtg

SEQ ID NO: 204728 - DNA, 50 bp, Homo sapiens
  chr17:58676701-58676751
  hyper
gtgcaaaggttttagcgttgggattgtgaccgactcggtgaagagagggg

SEQ ID NO: 204729 - DNA, 801 bp, Homo sapiens
  chr17:58677543-58678344
  hyper
ggggaagcgcagtgcgcaggcgcaactgcctggctctgctcgctccggcgctccggcccagctctcgcggacaagtccagacatcgcgcgcccccccttctccgggtccgccccctcccccttctcggcgtcgtcgaagataaacaatagttggccggcgagcgcctagtgtgtctcccgccgccggattcggcgggctgcgtgggaccggcgggatcccggccagccggccatggcggggctgtactcgctgggagtgagcgtcttctccgaccagggcgggaggaagtacatggaggacgttactcaaatcgttgtggagcccgaaccgacggctgaagaaaagccctcgccgcggcggtcgctgtctcagccgttgcctccgcggccgtcgccggccgcccttcccggcggcgaagtctcggggaaaggcccagcggtggcagcccgagaggctcgcgaccctctcccggacgccggggcctcgccggcacctagccgctgctgccgccgccgttcctccgtggcctttttcgccgtgtgcgacgggcacggcgggcgggaggcggcacagtttgcccgggagcacttgtggggtttcatcaagaagcagaagggtttcacctcgtccgagccggctaaggtttgcgctgccatccgcaaaggctttctcgcttgtcaccttgccatgtggaagaaactgggtaagttccctggcttgtttggcgcccgcccctttttcaggcagttcagggcttttatggcaccagccccgcgtgggcccccggcacccagagcgca

SEQ ID NO: 204730 - DNA, 242 bp, Homo sapiens
  chr17:58700868-58701110
  hyper
tttcttattacagcggaatggccaaagactatgacgggtcttcctagcacatcagggacaactgccagtgtggtcatcattcggggcatgaagatgtatgtagctcacgtaggtgactcaggggtggttcttggaattcaggatgacccgaaggatgactttgtcagagctgtggaggtgacacaggaccataagccagaacttcccaaggaaagagaacgaatcgaaggacttggtgggag

SEQ ID NO: 204731 - DNA, 125 bp, Homo sapiens
  chr17:58711213-58711338
  hyper
tgtaatgaacaagtctggggtgaatcgtgtagtttggaaacgacctcgactcactcacaatggacctgttagaaggagcacagttattgaccagattccttttctggcagtagcaagagcacttg

SEQ ID NO: 204732 - DNA, 191 bp, Homo sapiens
  chr17:58725252-58725443
  hyper
gtgatttgtggagctatgatttcttcagtggtgaatttgtggtgtcacctgaaccagacacaagtgtccacactcttgaccctcagaagcacaagtatattatattggggagtgatggactttggaatatgattccaccacaagatgccatctcaatgtgccaggaccaagaggagaaaaaatacctgatg

SEQ ID NO: 204733 - DNA, 250 bp, Homo sapiens
  chr17:58733952-58734202
  hyper
aatacagggtgagcatggacaatcttgtgccaaaatgcttgtgaatcgagcattgggccgctggaggcagcgtatgctccgagcagataacactagtgccatagtaatctgcatctctccagaagtggacaatcagggaaactttaccaatgaagatgagttatacctgaacctgactgacagcccttcctataatagtcaagaaacctgtgtgatgactccttccccatgttctacaccaccagtcaag

SEQ ID NO: 204734 - DNA, 1530 bp, Homo sapiens
  chr17:58740342-58741872
  hyper
tcttatttttcagtcactggaggaggatccatggccaagggtgaattctaaggaccatatacctgccctggttcgtagcaatgccttctcagagaattttttagaggtttcagctgagatagctcgagagaatgtccaaggtgtagtcataccctcaaaagatccagaaccacttgaagaaaattgcgctaaagccctgactttaaggatacatgattctttgaataatagccttccaattggccttgtgcctactaattcaacaaacactgtcatggaccaaaaaaatttgaagatgtcaactcctggccaaatgaaagcccaagaaattgaaagaacccctccaacaaactttaaaaggacattagaagagtccaattctggccccctgatgaagaagcatagacgaaatggcttaagtcgaagtagtggtgctcagcctgcaagtctccccacaacctcacagcgaaagaactctgttaaactcaccatgcgacgcagacttaggggccagaagaaaattggaaatcctttacttcatcaacacaggaaaactgtttgtgtttgctgaaatgcatctgggaaatgaggtttttccaaacttaggatataagagggctttttaaatttggtgccgatgttgaactttttttaaggggagaaaattaaaagaaatatacagtttgactttttggaattcagcagttttatcctggccttgtacttgcttgtattgtaaatgtggattttgtagatgttagggtataagttgctgtaaaatttgtgtaaatttgtatccacacaaattcagtctctgaatacacagtattcagagtctctgatacacagtaattgtgacaatagggctaaatgtttaaagaaatcaaaagaatctattagattttagaaaaacatttaaactttttaaaatacttattaaaaaatttgtataagccacttgtcttgaaaactgtgcaactttttaaagtaaattattaagcagactggaaaagtgatgtattttcatagtgacctgtgtttcacttaatgtttcttagagccaagtgtcttttaaacattattttttatttctgatttcataattcagaactaaatttttcatagaagtgttgagccatgctacagttagtcttgtcccaattaaaatactatgcagtatctcttacatcagtagcatttttctaaaaccttagtcatcagatatgcttactaaatcttcagcatagaaggaagtgtgtttgcctaaaacaatctaaaacaattcccttctttttcatcccagaccaatggcattattaggtcttaaagtagttactcccttctcgtgtttgcttaaaatatgtgaagttttccttgctatttcaataacagatggtgctgctaattcccaacatttcttaaattattttatatcatacagttttcattgattatatgggtatatattcatctaataaatcagtgaactgttcctcatgttgctgaatttgtagttgttggtttatttta

SEQ ID NO: 204735 - DNA, 749 bp, Homo sapiens
  chr17:58742892-58743641
  hyper
ccacacattctggttattttcaatattttgcagaagataattcttgatcggtgtgtcttatgccacaaggattaaaatatgtattcattgctacaaaacaatatctcgaaatttagcagtttaaaacaacaaatattatctccagtttctgagcctcagaaatctgagagtggtttagctgggtgatagtctcgtggttttggtcaagctaccaaccagggctacaatctttcgaaggtgtcattggggctagaagatctgcttcccgcaagactcacagctgttggcaggagacctcagtttgttgccacatgttcccctccagagggcctctcacaacatggcagttatttgtccccagagcaagcaacaccggagggcaaggaagaagccatgatgttttttgtaacctagcctctgaaagtgtcataccaattctgtattttgttggtcacacagaccaagtcaactacaacgtgggagactcctacacaaggcatgaattctaggaggtgggcatttttaagtgtcatctggaaggaggctgtcacaacctggaagttaaaagcattgatattctgaaatacagcgtgtataacattgttttagtagggtgtgcaatagttatgttttggtaatagcattaatgaacaatgttattttcatcttccagacatctggaagattgctctagtggagtaaaacatcttaatgtattttgtccctaaataaactatctcactaacaaa

SEQ ID NO: 204736 - DNA, 35 bp, Homo sapiens
  chr17:59467391-59467426
  hyper
taggcctggcggcccgatcctaaggaagcccctgc

SEQ ID NO: 204737 - DNA, 59 bp, Homo sapiens
  chr17:59478678-59478737
  hyper
tttcccctgaacgaatttcggggagattaaggagaagcgagaatatttctagagggcct

SEQ ID NO: 204738 - DNA, 76 bp, Homo sapiens
  chr17:59532387-59532463
  hyper
ttcgcacgtggcccgaggcgggtgctggcgctggccatgtccagcgagtctcactccctgcaggctgtggccgaag

SEQ ID NO: 204739 - DNA, 142 bp, Homo sapiens
  chr17:59535267-59535409
  hyper
gctccagcacttttggccccctggggggctgctttgccctcctctctttgaggacctgaggaggtttctcaggaatgcattgattggagacccagagatgcctctcagcagatggggagagggaaatagactatgctgttca

SEQ ID NO: 204740 - DNA, 130 bp, Homo sapiens
  chr17:60142477-60142607
  hyper
cgcccgccggccccggcactcaccaggcagaagaggttacagtgacaatcttccaggctggccccgttcggcacgaaggaggcactcatcgtccctcacagcagccgccgccggcgccacaacccaccat

SEQ ID NO: 204741 - DNA, 46 bp, Homo sapiens
  chr17:60885402-60885448
  hyper
ctggagcggagcggcgggggcgagggggccgttacctgtgggtctg

SEQ ID NO: 204742 - DNA, 178 bp, Homo sapiens
  chr17:60885548-60885726
  hyper
gctcctcttcctcctcctctttttgcttcttcactccctacacctgcccctcttcctcctccttccccgaggctgctttccgcggcgccggccggccttgcctggggcggaggcggtgggggcggctaccgggcgtcctccggtttccctagcaaccgcgcctccccgcccccgcgcg

SEQ ID NO: 204743 - DNA, 125 bp, Homo sapiens
  chr17:61043854-61043979
  hyper
ccgccgccgccgagccgagccgaggggcgagagctggcccccgagccgccgctgacaggagcaccgccgcgggctgcgctcgccggctgcgaggccccgccgcgccgttccggggtgcagactcg

SEQ ID NO: 204744 - DNA, 96 bp, Homo sapiens
  chr17:61044393-61044489
  hyper
gcggattgctaaacgtggcagggaatgtggtgcagaacgagttgcaaaatgtgcccccagaatgcagcataaaagtagttgcgaaatgtgccaggt

SEQ ID NO: 204745 - DNA, 118 bp, Homo sapiens
  chr17:61553820-61553938
  hyper
agccccaggtgtgccggccgccctgagcccctccagcacctcccggaggcgcctgcaagacacctaaggtccccgcctccctcctctcccccccgccacacccctacccccggcaggc

SEQ ID NO: 204746 - DNA, 48 bp, Homo sapiens
  chr17:61553939-61553987
  hyper
acgtccccgcccctcgaccatggcctggtgaagaagccggccaggccc

SEQ ID NO: 204747 - DNA, 60 bp, Homo sapiens
  chr17:61554094-61554154
  hyper
gagccggaggccgctaggctcccaggccccggccgaggctgcgcggccgcacggtgggca

SEQ ID NO: 204748 - DNA, 206 bp, Homo sapiens
  chr17:61818882-61819088
  hyper
tcagcgtctccccgccaggcccaagcctattctgctctcgggctgcggcgcctcattgcgggagtcgaggacgcgggttaaaaagggggcccgtggagggtgaggtgagcccaggatggccgctccgacgaaggcccgggcctggggagatggaatcggtggcagagccaggagggactggccccggcagcgtaccaggcaccccg

SEQ ID NO: 204749 - DNA, 205 bp, Homo sapiens
  chr17:61851078-61851283
  hyper
attacataatccccgcccctgggccggaactgccctcgcctatcccaatcctcctacctaggattccgtcaagttgacgtcacacggaaccggtgctccggaagctaaaggtggccatgctgtgtgggaccacgtggccagaggcaagagtgtcgctctagtagtatatgcaacagtttaaactataggcatgttcatgtaaata

SEQ ID NO: 204750 - DNA, 240 bp, Homo sapiens
  chr17:61921000-61921240
  hyper
aaaaaaaaaaaaaaaaagactcagctgctctgtggggcagaacagcagccaactcaacttcctgtaaaagctcatgctggtagctcggaactgccaagggacctaggaggctccagacttgacccagctggtgaacggtcgacttggccaaggctgagttctaccgcacatttttaacgtggctccgcctcactttaaggaagcctggtactttactccccagaaaatgcttctagtcaa

SEQ ID NO: 204751 - DNA, 117 bp, Homo sapiens
  chr17:62776306-62776423
  hyper
tgtcaagcgttcctcgactaggaaagggtatacacttgagtcactaagcacactgggccccggaggcggggtcatcgagctgcccagagccaacaaaccccaaggtggacactgccc

SEQ ID NO: 204752 - DNA, 60 bp, Homo sapiens
  chr17:62776446-62776506
  hyper
cgcagcgcactcacgtctgctgggcgggcctcagggagcccaagggccgggtgggcgggg

SEQ ID NO: 204753 - DNA, 62 bp, Homo sapiens
  chr17:62915906-62915968
  hyper
aatattcccctcccgccccctagggaaactgaagctgaaagagccagcgaaagaaaaaaaaa

SEQ ID NO: 204754 - DNA, 1700 bp, Homo sapiens
  chr17:63555694-63557394
  hyper
cccgtgcccccaacccacctcccggatccgcgaaacctacaaaactggatcaccagccgtctcacgccactactgcctgtgccaagaatcccaaactctactgatttcaagcctgtcttttttccaaagaaaaaagtcttatctaaccaataaacaagctgctttccctagcacggaaaagatcaaactaagaagggtaggggctgaacggggtgcaaccccgggcgagaagccagggaccccggatctgggatgggtgcacgctgaacccgaccagagcctcgagccgcggggctgggcggcgcggcccacggagaagtggggctgccgttggcaccgcgctacccgggcggtgggaggtggagcggccccgttacctggaagacgaaggccgccgaagccaggctctcatgtcctccgagcccctccggcccggtcccccggcccaaatgcaactgaacgcctccagagccctggcgggcacacctcgaggccggaaccccgggacacgccagcagcgccccgagcccgggcggggggtcggtccccggcgccgccgtttgcagaggcgcccgcagaaaaagcacagaaagcagcagcctagtccagaaatggcgacgcgcggagtctctgcctctccgcaaaaggggccggggcggccacgggcgaggggcccgggccgggaggagggacgcgagggacacgggcgccccggacttgggccggtcctgcgcgcagactgagcctccgccagcgctgtgggccccttagcgcggacccgcggcagggaggggaaaaggggagggggaagagaagtaggaggagaggatggggcggaggagaggcggggggcgggggagggcaagcggggggcgccgctaccctttcatcccacctcccaaaggcactcccgcgcgcactcacacgccgactcacatccataaccgcgacagcgacgcgacccccggggggtatctgccccctctccgcccccgccactgccgccactcggataagtctcctctctgggccccccgccaacccggtcaccgcgctggggagggggctccggcgcagggcgcgcaaggctgcccggccaagccccccggaacgctgggcgccgggtccgccgctcccctccgcgccggcccctagcgcgccccgaaatagccggcctgccaacttcaaagggccgccccgcacatcaaagcgcgcggtccgcccggccgcctcggcctcggcactcaccattgatccccgcgcgcgctcggcggcgagacctcgcaggcgcccctggcaggggcccggccccggcccccggctcggctcgcggcggcagccccgggcccccccgggccggccgcggcgtcggggaacatggggagtcgtgcggcgggggagggggtgcgggaaacaacaatcccgggttcagagcgaaagccaccggccggggagggggaacggcgcgccccgccgccccttttatgcaaaagatccgagcgggcctccgcccccgcccggcccggctttcaacgcaggtcctgtttccagcagtcactcggcgcaccaaatgtcctccgggcgcttccaacaaaaactgcgctgtggatttaactgtgcacttcaaaggcgcgagccgagcgcacggtcctgaaagggaggtacgcgccggccgcgccccgggccgccccccgcagccc

SEQ ID NO: 204755 - DNA, 121 bp, Homo sapiens
  chr17:64257870-64257991
  hyper
ttagactcaggtattcggattccagaatcccctcacccttgccattaaaggtgtggtctctggaacagggacatcagcagcagaagcaagtatcatccatcacctcagagctggtaagaaa

SEQ ID NO: 204756 - DNA, 60 bp, Homo sapiens
  chr17:64961305-64961365
  hyper
acacacgcgcgcgcgcgcgcgcgcacacacacacacgcgcacacactgcccggcgcgcgg

SEQ ID NO: 204757 - DNA, 167 bp, Homo sapiens
  chr17:64961625-64961792
  hyper
aggtggaggctggcgagggggcgggaggaggctggggttggggggagcggacgggagggggggaggggttgcttggcaaccggtgtctgtgctattgctatgggaactggccatcctggggcggggccggccgggggcggggcgcgtcggtgccgctgggcgctttc

SEQ ID NO: 204758 - DNA, 41 bp, Homo sapiens
  chr17:65352419-65352460
  hyper
gaaaatgaactttgggaggccgaggcgggcggatcacgagg

SEQ ID NO: 204759 - DNA, 434 bp, Homo sapiens
  chr17:65822942-65823376
  hyper
gtggtacacaaacacgcacaaaaaaatgcgttttcacacccctagctgtggttttaaaattgtgttaaggaaacggatcatttgggttagtaggggaaccttatctggtcctgtgtgtttgtttttattcttcgagtgctaatgggcccgtgcaacagttgctgttaaatggctgattaaaaagcaacgcagaaagccaaacaagacccaaccaaatttggttattcatccgattcagaattattttggttaaatcaaaaataaaagtacaaaactacaggaacgcgcgtcttaactcatttgatcgctttgccttgcttgggaaatgcagtttcgtgtcacctgttgcagaagatatgtagttgatcatctagacataattgccgaagatgaacttctggaacaacttctaagtcacacggcatcagtatcag

SEQ ID NO: 204760 - DNA, 43 bp, Homo sapiens
  chr17:66434420-66434463
  hyper
cctggccccagccttagaagaggccactcgtccatttccagtt

SEQ ID NO: 204761 - DNA, 146 bp, Homo sapiens
  chr17:66596140-66596286
  hyper
gaaggggctgagagcgtttcttcgctgtgcggctgcaatagaaactttttcctcgtactatctgactccgggactggactgtgaggtctgcaacagctggtggggttcgggtggggaacacactctaagcccagcgccagggctgg

SEQ ID NO: 204762 - DNA, 128 bp, Homo sapiens
  chr17:68164605-68164733
  hyper
cctaaaatatatcctgtcctttaggagcaaagcttcgttaggacaccgaagtactcagaaataataggcacttactcttcggtttacacacacacacacacacacacacacggattagtttataaagt

SEQ ID NO: 204763 - DNA, 204 bp, Homo sapiens
  chr17:68164928-68165132
  hyper
tggagagactgagggcggacaaggcgagagggaacgagccgtccacccttcggagaagcctaggcgccttgtaagtaattcgcgaacagtcgggagaacaaacagccaagcggcgctgcagtggccgcacttgcgcgcgtctcaatcctgggggctctgcgcgcccgccccagtccctcgccccattgactcagtggcttctcc

SEQ ID NO: 204764 - DNA, 158 bp, Homo sapiens
  chr17:70026735-70026893
  hyper
ggaagcaggcaggagggagagcgggagacttccggaaatccctttcctcccttcccttcacaggttgccccatagtgaccctggagactcccgcctgcccccagtgaaggaattggttactctcccagagccctcccgggcatcgcccccttcctcac

SEQ ID NO: 204765 - DNA, 51 bp, Homo sapiens
  chr17:70270193-70270244
  hyper
ctaacatacttctcacgggaagcactgtgcctgtcccgaccaggaggggct

SEQ ID NO: 204766 - DNA, 39 bp, Homo sapiens
  chr17:70553092-70553131
  hyper
ctccgagactggaaccgtagagagcgaccacctctttct

SEQ ID NO: 204767 - DNA, 165 bp, Homo sapiens
  chr17:70587739-70587904
  hyper
tattcagaaagcccgtccacaccctggccaaacgcgtaccagcgtcagcctgacgggtggcccagtcctcgccggaaagctgcttgccaaacgcccccgctcaccccctagccccaacggtgagaggggctcggctgagtcgcgttctccaaccgctgcgcccca

SEQ ID NO: 204768 - DNA, 569 bp, Homo sapiens
  chr17:70588324-70588893
  hyper
accgcagggaaacttacctccagcttggcgacccagctgttaagcagaacaaatcaatccacggatggagaagaggtcgtgggtcttctgagcccagctgatacacaccaagtaatccacgttaaggggtccgcagccccccacccaattccccactttccatccaaggccaaagagcagccagaccctgtcctctgcgctccagactcgcggaggtcgcgggcgggggtcctcaggcggccgccttctcgtccccaggggtgggcgcgcgacgcgggcagggaccgggcgcccggaggaccaagcgagcgcatcccgcctactcgtgctgggacatcacccagcctggacgccgctcctcgcctttcttccccgcgcatcgccagcgccaaccaaagatccccgccgggaaagcctctctgccaagctggaaagcgctgaaggcggatcgtctctcagacttgggtttgcaggttcacaaggcccgggaggcttacggtgggcgcctgcctaacagagggtccttgcggagaagcgcagaacgacaaatgccagaggcggtgaccgcg

SEQ ID NO: 204769 - DNA, 241 bp, Homo sapiens
  chr17:71306521-71306762
  hyper
atggctgctggggttcggacgagagagagattttccctccagcaccctggaccctcaggggagggcagggggcttcgcagcgacgggggctcccaaggactccacccggatccagctgctcagctatctgggcaaacagtgggcaccgggcacacagtaagggatgtgggagccggtcagattgcaaggggtgggagtcgtggagagagagaagttccagaggcaacgagaaaagaaaagg

SEQ ID NO: 204770 - DNA, 1220 bp, Homo sapiens
  chr17:71306967-71308187
  hyper
ctcagccccggctcccgcccagctctccagccctcccggccggggcactcaccggctgacgggatccccgcgggcaggatggctcctgggggacgcgccgggggcagggggcagttttgtaaccccggctgggggcgctccggagagggggcggggccagggacggccgatccgcgcgcacccgccccaagcgggcgattaaatcattaaccgaccgctcccgcctgcgatcccgctgagcgcgctgagctcggggcgcactagcccaggagcggccgtctccccggctccaagggggcgggtggctcgactgccctccccccgcaccccgccaggaggcgcctcggcctcccgggcttccgagggagcgggcggggcgggagcctggcgggggagggaagggttcgcggggcgggagtaggggaaaggaggaccatttgttccttcggccattcccttccagacagctccttccctctggcttcccggccgggtgacattgggtggcgtgtgctgcagtgtgtgtacgagagcgagatgtgtacacgcctctgcccgtacaggcggagaattcggttcttattcatggagaactccgggcgcacacacgcccccctcgcggagatcgcgggccgcgcgccgccgattgctgcgctcctgcccacaccgacacacaccccattcctgggaagggggaggccctttaaaaccggcccccaaccccctcagcggcacccttggccagggccgggagttccagcgtggagagaggaaatggagtcccggcaacgctgcgcccggctccctgccacctcctcctccacacatcccgctctgccaggacactaggtgcgcagcttagggtcccaggcaccgcggtgggcgcggtgaaaagcgcgagcgccgagaagtgggggctccgcgcccttctccccgcgccgcggcctcgcatccccagcttcgatcctctctgccccacagggggactcgagacccccaagcccacccagggcacccagcgcgaaggcggctaccacagacagaggcggttgcccgtcgcctacctcggtccccggagacccgagctctgggccggctgcgctgtccccttcgtgggctccgcgcggcggaggggctggcggcccctgtcagcgccggcgtttgtttccctctggctctcgggctttcagggctgggagcctccaggacactccccttcc

SEQ ID NO: 204771 - DNA, 320 bp, Homo sapiens
  chr17:71308247-71308567
  hyper
cggcgccgcagcagccaatggccgtcgggaacctctgcccgactgctcggcctcctcggttcaaactgaaagcctgagactttcccaactccgtatggggcagcctgggcccgcccggcttccgggagacactcccgccccagcctgcgctccggccgcgaacccccactggggcccccagggccaggggcgcgtctccctccgggggcctggcgcgaggctcttttgaggctcttccccattcgagccggggcaagaaaccaagaactccagcccgggtggcgttcctcgttcctgctccctcccggacctgctaacca

SEQ ID NO: 204772 - DNA, 317 bp, Homo sapiens
  chr17:72210071-72210388
  hyper
agagatcagagtgaagcgagcgtggggaaggggaggaagggcgcaagaccgcctgcggggtgaggggctgaacgctgagcgggcagggcggcgcgggggaggggtaaggacaggggcattcgtctcggggtaatcctggcgcgcgaggtgcggggatgctgaggggtgccccgaagttttcgaccgtctgagattccaagatggggcgctctctttccggggctgagtggcctaggaaagtttggcagaaactgagtagagtctcccgagtcggtcttcgcagcacccctcctccccagccccggcctgcagggtgg

SEQ ID NO: 204773 - DNA, 76 bp, Homo sapiens
  chr17:72427016-72427092
  hyper
cctcccctccccctcgcgggcgctcagggttgagcaaacactccgggccgcccgccccgccaccagctggctccga

SEQ ID NO: 204774 - DNA, 219 bp, Homo sapiens
  chr17:72427594-72427813
  hyper
tgaaggctaattaggacaagtcggagcagggaacggggacgccgggaggggagagcgcgctccgagttgggcagaacctggaacggtcacaggaaacccgggcgcggggtagtcgggccgagggggacctttgcccacggtccagagtggtctggactcggcccacgcgtgagaggagcgcttggtgacgatcccacgtacgcttggtgactggtggag

SEQ ID NO: 204775 - DNA, 332 bp, Homo sapiens
  chr17:72427999-72428331
  hyper
gaaggtgacaaaggctaggtgtcccccacggagacgcgccaaggtagccccgcgcgtgtccgtaggcgcgctctctggaagacgcggtggggggtgcgcagggctgcaccctcacaccaattgccccggcgaaggccgagcccagaaagtgagtgcgcgtgagtgtgcgcgcgcccgcatgcgggggcgtggcagtcaacagcaacaacccacacgccggcagggccagaaactcccatctccctcaccagccggaaagtacgagtcggctcagcctggaggtgagtcggggcggggagggccgggcaggctttgttcctgtgtaaacggag

SEQ ID NO: 204776 - DNA, 340 bp, Homo sapiens
  chr17:72428489-72428829
  hyper
cggtcccagggagaggcaggccctgcgtcccggcccgggccccgccatcccagccaggaccgggcctggcccagcgccccgcgccgcgtccctcccacccccgcccgccccccgcctggggctggagttggccccaaacgctgcgctggagcggggccggcggcgagtcccaggtaagggctgctgccttcccgctccgccgcccggaagagtcgggtcgggacggcggggagtgggcgagggcagaggcggggggactggacatcctgcgggctggggacgccgcgccaactccgctcggtcgctgaaagttttcaaacccgagccggctggggactgg

SEQ ID NO: 204777 - DNA, 70 bp, Homo sapiens
  chr17:72428872-72428942
  hyper
ggaaaccactccataatcggggtctccaagaggagcccctccaccgcctgcctctcggtgggagtccgcg

SEQ ID NO: 204778 - DNA, 374 bp, Homo sapiens
  chr17:72449939-72450313
  hyper
ttcacctaaaggcaacggtggcttgcctcacccccaactccaccgacggcaggagagggtccgcgggggcccgggcccagggaaggttttacgctccgtccttaacccagcgtcctaacctgacccggctgggagagggggcggggccccggaaccccacccgcagacagcccactcccccgcacgcacctgggttgggggaggtggggggcggtggggggcagtgaaggtggggggaggtgggggtgggcccgagcagccggcgcgcccacgtgcctctcccgcgagggcccggccaccccagctccagccaacccgaggccgcctctcgtgccccaccccaagccccgccccggcccctgcaacccgatcct

SEQ ID NO: 204779 - DNA, 303 bp, Homo sapiens
  chr17:72450330-72450633
  hyper
cgaagccagctgtcccagctcctgctgtagcctgggggccgggccgccgcgctccgcccatccccgccctcagagctgggcctcgcagccgctagggattgcgggggccgcatttatccctgtgtctctcaggccccgcagagacgggggtggggtgggtgacgccagggaagcaggccccttttcccaagggaagaatccccttccggaggcccgccgggccatggagtttccgcgggtggaggtagtgaggccaagggcacggggagccctgtcgctgccttacgtctggctctaggccgg

SEQ ID NO: 204780 - DNA, 258 bp, Homo sapiens
  chr17:72920292-72920550
  hyper
tatggagccaaactcccgcagctgtaaatcaccctgtcctcctgggtataaagcgcctgtccatctcggcgtgggagagaggagacgctcgccgtcccctgacccccagctcagcgccggctccaagcccagccaggtgggtgccccgggccggagggcagtcggacttggggagtggggaccttggaggggtccaaccgggtgctgccgcttctcctttcttcccatccagcgagaggggcaggttccgcattttct

SEQ ID NO: 204781 - DNA, 90 bp, Homo sapiens
  chr17:72931819-72931909
  hyper
gcaccctctgggtccgagcccccgggagggtaattaacgagggattaatgagatttccaaagtcaacagaaaaatcgatgggccgcggag

SEQ ID NO: 204782 - DNA, 127 bp, Homo sapiens
  chr17:72968954-72969081
  hyper
cccgcggagtcggcggttccaacccagcgccgccgcacgccgggtgccttctcaggtcccacccggagcctcgacgctcttccttctgcgtcggagcattgtacccgcctccgctgctaccacgcag

SEQ ID NO: 204783 - DNA, 752 bp, Homo sapiens
  chr17:72983758-72984510
  hyper
cgggccaggagcagcgcggacccgagccgggcagggggcgcccgccacggcacccgcgcgctcctagcgccccagacccgcctgcgggcccggatcctccttgccactgtcccacccgccgtccctgccactccaccctttgtgtcgccgcagcccggtgcccccggctctgcgggaccccggccgggccggaccctggcaaagcgccaggccccgcgtgggctcccggcgagcggttgatggcgagggggcgcggcgcgggctctgtagcccgagttcccgacgctggaggcccggcccgcctcagccgcattgtcccgggccgcgcgcaccggccctgagctgcgccgccgcagcacccgcccgccgcccgcggggccatgcggagagccgccgggatggaggacttctccgcggaggaagaggagtcctggtacgaccagcaggacctggagcagggtgagcgcgggggcgaccgggacaggaaggcggggagcgcccggtgacccctgtccgcttctccattgttgggcgctatcaccccgggaggggctgggctggaccgggcgcgcccgactcggaggagggacgcgtctggagaaccgggacgtggagagagggggcgctgccggagaagacgcggaccggacgggcggagacctgcaaaagtggggggcggggggcggtcttcctattttcccagacgaccgggcatccgtcatccagctcgcccaccccgtcctggaggcagc

SEQ ID NO: 204784 - DNA, 85 bp, Homo sapiens
  chr17:73008759-73008844
  hyper
gaagcagtcgcaagacctgagcatggcggccaccaggtgcctgcgctggggcctgagccgagccggagtctggctgctcccaccg

SEQ ID NO: 204785 - DNA, 219 bp, Homo sapiens
  chr17:73029789-73030008
  hyper
gggcgtcccagtgccgggggctgggggctggtgctcgctaagtaaggatgggggcaggtccctgcgcaccgcggtatcttcccgcccgctcaccaaaagtgcgcgcggcagggacggacccactccatggatcgcgcctctgtcaggccttctctaggaaaaggggacactcgcttatgaggggaagggatggcacggccacgtgccccaagccccagt

SEQ ID NO: 204786 - DNA, 81 bp, Homo sapiens
  chr17:73043061-73043142
  hyper
cggaagtgggtcacgggaagatctttcctcagccaaccccaaagccaagggggtgggccttgcttcgcagatcagccaata

SEQ ID NO: 204787 - DNA, 86 bp, Homo sapiens; identical to SEQ ID NO: 11496
  chr17:73073967-73074053
  hyper

SEQ ID NO: 204788 - DNA, 206 bp, Homo sapiens
  chr17:73127281-73127487
  hyper
aggtcgttcatctcccgcacagcgtccaaggctcccgggatgggctccaggtccaggaaaaagcccggggcttcgtacacactggccactttatcctgaaagacaagagttctgggtcccggcttcccgttcccgcgaggacccgcagggaggctcctgggggctccgggcccgagctcagaggggcggagggggcgtcggtcagg

SEQ ID NO: 204789 - DNA, 83 bp, Homo sapiens
  chr17:73422368-73422451
  hyper
tgaaagcatacttcacggttttaattagcaagtggaataacttctacttgctcatgttgtcagccctacgtgttgccatcaac

SEQ ID NO: 204790 - DNA, 208 bp, Homo sapiens
  chr17:73452534-73452742
  hyper
cggccgcatcactcggcacctaattccgccaggctcccagaggggcggttgcagctacagcctagcacgccgcgtagccaataagaagccagaattccccctattctcaaatcctgaccaatcggtggcctgaactttagctctctggccggcgcctctgttgcccggaagggaggcaagcccccttagagttgccagtaacggacat

SEQ ID NO: 204791 - DNA, 391 bp, Homo sapiens
  chr17:73511094-73511485
  hyper
tggggccctggccgggaacccctcactccccaaacgtcccaagcccaacccaggggcactcccacgcggagcccgcggccgacacgggcggagggcgcccttggcagtgcctggggtcgggctggctcccccgccccccggaatgtccctccagcgcctcgcaaccccccagcccagcccagcccagcccaggcccaccggggaacaaagcggcgggagaagccgggcgggccaagcgcccgaggtataaacgcggaggatggaaaaaggggcgcgaggaggacggaaggagcggggagatggaggtgcccgccgaccccgcaagaaaagttagtttgcgcccgcccccaggggcgctgacccccagcgcgggccccgcagcctcacctct

SEQ ID NO: 204792 - DNA, 33 bp, Homo sapiens
  chr17:73521010-73521043
  hyper
tcggaggggatgggacgtcgcaggcttcccgaa

SEQ ID NO: 204793 - DNA, 71 bp, Homo sapiens; identical to SEQ ID NO: 54595
  chr17:73522482-73522553
  hyper

SEQ ID NO: 204794 - DNA, 109 bp, Homo sapiens
  chr17:73585796-73585905
  hyper
agggcgggcgtcgagcagccgcagctctgaagaagcgtccgcagatgcccccacgggggaaggccgaggttggcctcgtgcaggggtgggggggcacagtgaggggtgc

SEQ ID NO: 204795 - DNA, 212 bp, Homo sapiens
  chr17:73663160-73663372
  hyper
ctggctggttccggaactgttcgaagacccctatacacaaccccaactcagagaagccaaagcgctgggaattcagctttaggcagaacccacgcaatcttatatccgtcgcgcagtgatgacgtagcgcgagcgctggcatgagggcggagccaggcgcaggaaactgccgttttgattggtttccagtgtggcgcgggggtctcctggga

SEQ ID NO: 204796 - DNA, 121 bp, Homo sapiens
  chr17:73781201-73781322
  hyper
aacctgctggggccggtcccaactgcctccaactgccaccaacctctggtcgggctgtggggcgggaaactcggtcccggccgccgagtggggaaggcgggagctcgggatgcagagtgca

SEQ ID NO: 204797 - DNA, 56 bp, Homo sapiens
  chr17:73993576-73993632
  hyper
catcagacactgaaacggccaccgaccatcagacactgaaacggccaccgttagct

SEQ ID NO: 204798 - DNA, 50 bp, Homo sapiens
  chr17:74072427-74072477
  hyper
gagactgtggttgcagtccccgggggcagcgggagaatggcttgaaggca

SEQ ID NO: 204799 - DNA, 131 bp, Homo sapiens
  chr17:74072580-74072711
  hyper
cctcctctgtgtgcggtgtaaccatgcgctaaggaccttcctcgagagcagccttgggaccgaggtgcaggggtcgcggccctccagcatgaatgtgcccgctcagccgacgtctcccttcccggtctgac

SEQ ID NO: 204800 - DNA, 77 bp, Homo sapiens
  chr17:74073471-74073548
  hyper
caaaggcaggcgacagcatcctgacggttgatgtggcctgaaagcacttagcgggcgcgctgggatgtcacagagtt

SEQ ID NO: 204801 - DNA, 220 bp, Homo sapiens
  chr17:74136746-74136966
  hyper
tcttttagtgccgaggtatgggaaacagaagcaaggccctggggtcccacccccatcagatctgcctccctcttcctttcctcttcgaggttttattagccaaatgaagagggtaggggcatccgaggctatccttttctcccgaagagcaggaaatcaggacccccttcctcctcgcaacaaatggaagtggggcgagaagtttgggagggcggtacga

SEQ ID NO: 204802 - DNA, 221 bp, Homo sapiens
  chr17:74381538-74381759
  hyper
cgccgcagggaatgacgccggtgctcctgcagccacggctccgggcggggaaggcgagccccacagccggccctgcgacgcccgcctgggcagcaccgataaggagctgaaggcaggagccgccgccacgggcagcgcccccacagcgccagggaccccctggcagcgggagccgcgggtcgaggttatggatccaggtttgtggggttcctgctgggaag

SEQ ID NO: 204803 - DNA, 46 bp, Homo sapiens
  chr17:74581701-74581747
  hyper
tggggaccctccccgcgccctggtcgcccctgcgccctcccgctct

SEQ ID NO: 204804 - DNA, 224 bp, Homo sapiens
  chr17:74732259-74732483
  hyper
cttcctcttcaggagacttggggggactcttcgatcgcgacctggatttggattccctcttggacactgggggaggactcctggaccgagaccgggacctggaccgcgaacgagatctggagaccgacgaggacttggacttggaccttcgtgcggatctggacttggaggtcgaccgagatcgagaacgagtgcgggaccgagacttcgagcggctgtagcga

SEQ ID NO: 204805 - DNA, 232 bp, Homo sapiens
  chr17:74732973-74733205
  hyper
gccatttgcacccgcagctcgcggccgtccagcacggccccgtccatggcatccatagcgtcctcagcgtcgcgcttgtcgtgaaagcgaacgaaggcgaagccgcgggactccttggtgtagcggtcccgcgggatgtacacgtcgccgacgcgcccgtacttctcgaagacgcgcctcagcgtgtcgggcgaggtgcggtaggtcaggttgtccaccttgagggaggtca

SEQ ID NO: 204806 - DNA, 88 bp, Homo sapiens
  chr17:74864229-74864317
  hyper
gtctccgctgggtgcgcatctcttctgtgctctgcgggagccaaagcagctttcggccctcggggctggtggcgccctgggaagctgc

SEQ ID NO: 204807 - DNA, 64 bp, Homo sapiens
  chr17:74865294-74865358
  hyper
cccctggtgatgaccagtggggctgggctgggggaacggatggcgttggggttcggggtgcgga

SEQ ID NO: 204808 - DNA, 113 bp, Homo sapiens
  chr17:75082778-75082891
  hyper
gggccatgtagtagacgcctgtagttttcgcctgtccaggacgccttcacccctgcttcctttgagaaaagtccctctcccactccaagtggtactgacggggatcacccaca

SEQ ID NO: 204809 - DNA, 47 bp, Homo sapiens
  chr17:75368668-75368715
  hyper
ttattgtggaggaagggaggcgtcgcccgtccctggcttctctgaca

SEQ ID NO: 204810 - DNA, 114 bp, Homo sapiens
  chr17:75447727-75447841
  hyper
ccctgggccccggcccgaggccggcaggaccgagcggggtccccaggagaggggtggcggggagctcgatctccacgcggggaccagattttcggcctcaaaatagaagaatag

SEQ ID NO: 204811 - DNA, 103 bp, Homo sapiens
  chr17:75953641-75953744
  hyper
attatctcctcttcaagacagggacacgtagacagggaatggcctcttccaataccaacttccaagtagcactgctgatcctccactgaacgatgggggaaaa

SEQ ID NO: 204812 - DNA, 471 bp, Homo sapiens
  chr17:75953982-75954453
  hyper
cggaccgaaggcttgcgcggtgaaggtgtggtgtctgtgctccggggaaagggctgtctccccgggggactgtttcgcagcgaggcttgttttgctcgcagctgggcgctccctggggagcgactgagcgcaagggcgggccgggaggcgcgaggcgagcacgatgctccagggccccaaggactcgtgtgcgtgtgcgtgtgcaaagtggggcggtgcagggcgtgtgcacggcacgggcgagacgcgcgccggtgcgggcgccgggcgccgccgggcgcaattacagcataaagcccgggcgccgcggggcgctggcccggagaacccaccggacgcgcagaaccggatcggcacccctcccgccagcaccctaacgcggagccacagcgcccagggaccggagggcaggcggcggcggtaaaggacaccacgcaagtctccacgtaacccccccgagcagtgcaagct

SEQ ID NO: 204813 - DNA, 166 bp, Homo sapiens
  chr17:76349231-76349397
  hyper
cttcctggcagagggcggcctcgaggcgacgcgcctgcccgcccgccagcccggcggccgccagatctggaggggagtgggggcggggcgcaagaaggtgctcccagccctggggctcctgtcaccctcggcctcgatcatcccgccccgcgctcctgggaccgga

SEQ ID NO: 204814 - DNA, 206 bp, Homo sapiens
  chr17:76355660-76355866
  hyper
cgaaggccccagccggagtattccgggaacctgggatctccggcttccatccgctctgcccctacctcgtcacctccctgccgggaatgacccgggaaggggaggggaaaccgggaaaagctcccgggactgagcgagacccctccccacgccgcgctcctccttcctacctggtcccgaatcgaagtctccgtccttggggctga

SEQ ID NO: 204815 - DNA, 341 bp, Homo sapiens
  chr17:76588313-76588654
  hyper
tccccttcctgccccgcgcttctgttgacctttggtcctgtttgcaggaagctctcaagtttaactctgaacttgaagggaaggaagggagtgaaccacatggccctggggtcggggcctctggccgaagggcgctcagcttggtctgtaaaatgaaatgtgttttgaatgtcatgagtcaggaaaaaagaatttgagcgcagtctggaaatgaaatttcctgcctgtggtttgactcacgtctgtctgtctcgaaatctaccccaaggacatttattccactgtgacagggctcatctctgaggagcaccagactcctgcggtggggagggaagattatc

SEQ ID NO: 204816 - DNA, 274 bp, Homo sapiens
  chr17:76921081-76921355
  hyper
gagcagctgcaggcgtcggccgggcgaagcagcgtcgccagcagcaggaggccgagcgccagccgcagggtgcgggccgcggcgcccatggcgggccggggggctgggcgggcgggggccgccgctggggggtccgggcgctgctcgcggcggcgggctgggggcgcgggcgggggctgagccggggccgaggcgggcccctcccgcgcggctcaccctcctcacctgccccgctcggccgcgcaaactttctctcctctttgtctcgggggcg

SEQ ID NO: 204817 - DNA, 130 bp, Homo sapiens; identical to SEQ ID NO: 54663
  chr17:76921422-76921552
  hyper

SEQ ID NO: 204818 - DNA, 104 bp, Homo sapiens; identical to SEQ ID NO: 54664
  chr17:76921859-76921963
  hyper

SEQ ID NO: 204819 - DNA, 45 bp, Homo sapiens
  chr17:77020152-77020197
  hyper
gatttccctgaggcgcggcgcggggcacacacggttaatcctccg

SEQ ID NO: 204820 - DNA, 263 bp, Homo sapiens
  chr17:77071240-77071503
  hyper
tttcccggcacgggcgcgccgaggggcggggggccggcgcctgtgtccgctccgtgcacagtaagggacagagggtggcagcgcccctccgccccggtccgccccgccgtcctcgcgccactgccgggcagcggcctccggcccccgtgcgtgacccctgcctatctcagaaatacgggtgcaaacccgagtggccgcggggcccagcgggaatcccgacgccccggccagacccctgcttcccacgtcgctggtctatgcgg

SEQ ID NO: 204821 - DNA, 190 bp, Homo sapiens
  chr17:77766025-77766215
  hyper
gctgaggcggagatcgattggagatttgtacaaatcttagaattaaataaacccaacagcgcacacaccctgcgcggttgcagactcccagccacgtggcccccggcccctgcccacccaccccccaggtcagcgtcgcaagagcgagagaaggagacacatacacacacggccacggacaaacagcagg

SEQ ID NO: 204822 - DNA, 174 bp, Homo sapiens
  chr17:77771456-77771630
  hyper
gcacaggtgctggggcgccgcgggccgcgcccgaaccccgagagcctgcggcgcgcccatcggctggcttctcccccggcccccgcccccctcccccggagccgcacacccgacccccggtctccatggcaacgtcccccccccccccaagccgggtcccgctaacaaatcaat

SEQ ID NO: 204823 - DNA, 301 bp, Homo sapiens
  chr17:77774854-77775155
  hyper
gggccctcttaggcctccctgggcccgcggaccacggactcgtcctccgggagggagggtggaggctggagcactccaaggagaggggcggacgggccccagcggggcgctgggctcctgggtcttgggccaggccggcaagccctagcgcgtcctctagcttgaggatgaggccggcccggttctttgggagcgtttcaacttcgcggcttggcgggcgtcggacctgcccggtcttggccgcggacgcgggcagatttggaagccaaccgtttgcctcgggcgggccggcagtgaaatg

SEQ ID NO: 204824 - DNA, 184 bp, Homo sapiens
  chr17:77786283-77786467
  hyper
ctccccggccggcccggcccgctggggcctgggttcctttgggttggggaagtgggggtacgaacccacgcggctgtgccaaggggtcccaactccggagtccaaccccacccaccagtcctctgtgcgcacttttcgtttatttctcagcagtctcagtcctggagctcctggggcgatttcg

SEQ ID NO: 204825 - DNA, 62 bp, Homo sapiens
  chr17:77786805-77786867
  hyper
tatttgttatttttttaatttttctgcggggagcatcggggctagcccgcccagctccaacg

SEQ ID NO: 204826 - DNA, 233 bp, Homo sapiens
  chr17:77788400-77788633
  hyper
cgtgccccagtctacctagactcccaggagcgtccggccggaagagacagtgggagatgaggaaactgagattgggagggggacgtgatggggtaaggccattcctaaggcttgtggcagagctgcctcttcaccccacccccatttctttcagatgcggagatcaaagcccaggctcactggtgggtcgggagctcactcctccaagtacacttggccaacctcggggagcc

SEQ ID NO: 204827 - DNA, 281 bp, Homo sapiens
  chr17:77813600-77813881
  hyper
ctccccctcgcggcacgttctcagtgttcacggccccgggacccctgctgggggccacggaagcatccgccgccgctcccagttgcaccgaattgcgtcaccagcgccccgggacgcgcgggccccgccggcagggggcggaatggggcaggggcagctcgcgccccactgcgggccccgcctcgcctccaggctccgggcattttggagcgcgaggagggaaagggacagggcggagagaaggccgaggactgggtgccaaggagagattgaagaacgca

SEQ ID NO: 204828 - DNA, 257 bp, Homo sapiens
  chr17:77814493-77814750
  hyper
cggcccgaggggcaggggcaggggcgcgcctggcctggggtgtgtctgggccccggctccgggctcttgaaggaccgcgagcaggaggcttgcgcaatcccttggctgagcgtccacggagaaagaaaaagagcaaaagcagagcgagagtggagcgagggatgggggcgggcaaagagccatccgggtctccaccaccgccctgacacgcgacccggctgtctgttggggaccgcacgggggctcgggcgagcagg

SEQ ID NO: 204829 - DNA, 221 bp, Homo sapiens
  chr17:77814929-77815150
  hyper
ggggtgtaggggtgacggttgtcttctggtgacagcagaggtgttgggtttgcgactgatctctaacgagcttgaggcgcaaacctaggattccctgagtgttggggtgcggcgggggggcaagcaaggtgggacgacgcctgcctggtttccctgactagttgcggggggtgggggccggctctcaggggccaccagaagctgggtgggtgtacaggaaa

SEQ ID NO: 204830 - DNA, 50 bp, Homo sapiens
  chr17:77815935-77815985
  hyper
agaccacccctgccagccggtgtggggaggagctcaggtccgcgggagag

SEQ ID NO: 204831 - DNA, 143 bp, Homo sapiens
  chr17:77816033-77816176
  hyper
cgccctggaagctcccctgatgccccagagggcccttcctgggaaacctcccgggggggtgccccataccatcccacccggctgtcttggcccctcccagggagccgcaggagaaactagccctacacctgggattcccagag

SEQ ID NO: 204832 - DNA, 100 bp, Homo sapiens
  chr17:78009418-78009518
  hyper
gcaccccgaggacggcggccggaccccggcccctccccggtcccgcggctgcaggcccacgcgccccacgcgccccgcgcgcccccgccccagctccgcc

SEQ ID NO: 204833 - DNA, 579 bp, Homo sapiens
  chr17:78009924-78010503
  hyper
ctggccctccgctgccgccctctgcagggagatttctcctatttcggactaggaagggaagatacgctccggaagaccccccgggcgtccatgcaaggagtctccgtaggacccctggagaagggcaccggagccccctagggcaggagatggaaaagcgctcgccatgcgcggggtccccggcccccggtgcccccagcccgcctgccattcccgggcgcttagcagtccggggtccccaggtgcccggcaggtcccttcgggacctcgagccgcccgctgggcacacgctgacgccgctgtcgctttacagaaattgagcgcagccgaggcgggacccgggcgcagagagcgataaaggaaaagcatggtcgtgctctaatcattacagtctaagggacgacacgtcgagacggcgcgcgcctctgcgtgcgtggagatggcacaaaggccgcgccgcccccggcggcccccgccctcgcagcgcgcgtggtcccggcccggccggatgttgacagcgtcgcctagcaacgggaaatggcggaaccgggcggcgcggcgggccggtaagccgggccg

SEQ ID NO: 204834 - DNA, 53 bp, Homo sapiens
  chr17:78010812-78010865
  hyper
cgtggcggtccctgcgcgcagtcctcctaagagtagagggctctgcagggcgc

SEQ ID NO: 204835 - DNA, 178 bp, Homo sapiens
  chr17:78388504-78388682
  hyper
cctggtgaatcctttcggggttcagcaaaggcggacgctgaccgggccaaggagtgggacctgcagtgctggaccacccttttccaagcgcagaagtgccgtgcccgccggctctcaacagggcaagaggcccctctcgccgtgcagagcgcagcgcttgcggcggggacagcagagg

SEQ ID NO: 204836 - DNA, 278 bp, Homo sapiens
  chr17:78428377-78428655
  hyper
tactgcctccagagccgcttcggggccgaccccggggactcttcccgcctgcggcctcgcgccagcccggccggctcgcctagtgcccggcgcccagaaacgcgtggagctgggagaggccacacaacccacgccggaagcctaaccccgtcggcccccgcggccggcaccggccggaagcccgcgaagcctaactctcgcgagacgcctcctgagtcccgcctctccgcggttccgccagtcgccgcgctcctgtctgcgttgctgtggcagccccg

SEQ ID NO: 204837 - DNA, 384 bp, Homo sapiens
  chr17:79008158-79008542
  hyper
ggtcctccccagagttcaccttctgcaggatcctccctccaagtcctctcctcacgatgctcccccgaaatcctccttctccaagtcgtcccccactccagggccgagctctctccagggtcctcctgcagcaccccctcccccagggttctcctctctgccccgaggggccggccggggggtcgccgcccgcccggcgggcttacctgcgaagcggcggggtcggggcctctcccacctgtaagcccggcccgcggcgtcctgcgtccgagccgctccccgccccgcagcgccaggccgcgacccggcgggccgcccgccccgaagtgccacttcgcgaagtgccgcctccacgcgcgctgccgccggcgccccccgctctcc

SEQ ID NO: 204838 - DNA, 754 bp, Homo sapiens
  chr17:79008841-79009595
  hyper
tcgggggcggtgatgcgggcgcaacgggggcgggacgcaggggcggggactgccgcggggcggggcctgaggcggctataaaggtggccgccgccggacgccgggctctgtggttcgggtccgctttcgtctccgtcctgctgccgttaccgccgctgctgccgccgcttgcgtcccccgctccggtctgtggtgcagccgggacccaggaccatgtctctgtctcgctcagaggagatgcaccggctcacggaaaatgtctataaggtgagcgccccccggcgccgagctgagcccgctccgtgtgcgcctgggtcgcgcgccgcccgcgcgcccgagcccgaccagggcggccccggggccgcgcgccgggccaggaggctgggactttgggggtcttcccggcgcggccacccgggacccgggctgctggggtggtgagcccggcgccggccgctcacaggtggccacccccgcccgggcccccccatcccatgcgcgccgcggcccggtcagtccccagccccaggcccggggagcactccccgctccgacggccctgctcggcccccgcgcgctcgccttggcgtcggcgggaacggagccgcgcgccgggccccggaagccctcggaccggtcggggtcgtagcacacccgggcagggccggggcggcgggggcggcgggcccaggggttgcggcggccaggacggcatgggggctgtctgaaggccgcggtcggcgcggtggcaccg

SEQ ID NO: 204839 - DNA, 45 bp, Homo sapiens
  chr17:79317325-79317370
  hyper
tttgaaaggtgaccgggctggggctgtcggagacccgctctgcgg

SEQ ID NO: 204840 - DNA, 75 bp, Homo sapiens
  chr17:79317464-79317539
  hyper
cccttaaattgcaattaagggtgtgcggggcgggggtgcttggggggtgctgcggcaggccgggttcgctcaacc

SEQ ID NO: 204841 - DNA, 283 bp, Homo sapiens
  chr17:79317890-79318173
  hyper
agcaggaggggcgaggagacttgcgcagtcagggagccgcgaaccccgagtctcggtcctcgaaggcggcaggagaaaccgcgcgctgtgccccgacctctctcgccctggccaaccgcgacttgggacgagctggaggagcttcccccgggctccggacgcccgcgccgaaaaccgggccatgggtaccaaacccgactctaggcggtcattcactttgtccccacccaaactctgatgagctatttgggagtgcgcggggactgggaagtgagggactttt

SEQ ID NO: 204842 - DNA, 40 bp, Homo sapiens
  chr17:79318209-79318249
  hyper
ccacccatcttgcctccttcgcctccgccctttgttctaa

SEQ ID NO: 204843 - DNA, 180 bp, Homo sapiens
  chr17:79319124-79319304
  hyper
gaggccgaggcagggcgcacctcctcctgggcgaattcaatcggagctgcagaagagacaagcatttccaaactggcacccgctccgagcccaaggtgagggtggagaagggtccctggtggaagctgcaggaacactttgggccggggtctaccccgcgttcggcggctccccgaatcc

SEQ ID NO: 204844 - DNA, 187 bp, Homo sapiens
  chr17:79885890-79886077
  hyper
cggacgccggcggcgttttccagctcgagtgctcagcctagggcaggctctgcgtgcgccccctcgagtgccggcctgggccctgccaggcagaggcgctcttgcgtcaggacggcgccgccggggccccgcgattccaactcgggggtcccggagcggcgcggggcggggacggcctggcagctcc

SEQ ID NO: 204845 - DNA, 125 bp, Homo sapiens
  chr17:79988350-79988475
  hyper
gacccttgtcctcccgccgcccactggtgggacgtgaggccagccagagagcggggctggccaggtctcccgtgctgaggccgtgccacggtgcgctggggctgcgtccgctcactgcgctcctt

SEQ ID NO: 204846 - DNA, 521 bp, Homo sapiens
  chr17:79989097-79989618
  hyper
ccagccctgcagggagggcctgccggggtgcggctgttcgcccctcctcgccgctgccttgaagggacgggagggccgcgggggctgtccgtctgggggttcgggcggctgcagaccccggagttcccagctggctcccggcggcagggggcgggtccccgagaaagcgcagcgcgcggagccctccccgccgggtccaggtcgctgggctctctccggcctgcgctgcgccccgagggacccgtaggagacccccgggccggggtcgcgctggaggcgggggcgccgcagctcgcgcagctctgcccgggttcgggcggccccgccccgccagccgcgcggccgggcgccccccgcccgcccccgcccccgccccccgccccccgccggccgcgctcggctgtctccgcgcccggcgctcggcggcgctcggctgtctccggccgatcgctcggcgctcgggtccgcggccgctgcggcgccgggcatttctccgcagctcggctcgcggccgcgcccgc

SEQ ID NO: 204847 - DNA, 40 bp, Homo sapiens
  chr17:79989900-79989940
  hyper
gggctggctgcgggcgaggcggggccgccgccctgtcctc

SEQ ID NO: 204848 - DNA, 216 bp, Homo sapiens
  chr17:80503130-80503346
  hyper
tcccactcctcagctcggaattcctatcccgaattctaaaccataaattagttttgtttgcttttgaacttcatatccatgaaattgtacagagtcctttgtaggagacggtgtttgttttttattgaatactgtgtttctgaggttagtccatatttttgcacgtagctattggccattctcattactggaaagtagtaacgtggatatacaacg

SEQ ID NO: 204849 - DNA, 943 bp, Homo sapiens
  chr17:80655727-80656670
  hyper
cttccgcacgcgagtcacctgtgctccttcctctcccccggacacgcgggacccctggcctcgggaccggaccctggtctcccctcccctccgacccacgcgcagacccagcacctgggcgcctgctcgccgcgctccgccccaggagccccggagctcgcgtcccctcccgcccctcctgccccgcggccgaacgcgcacttgcggactcgagcccccgccccgggtccccacagcagcggccccaggtcgggaggagcccagcgcccggcccagccgcgggctcccgctgcgcgcagactgcggagaaggatggagactgcgccgcggggcctcgagtggaactgggggtgcaacagggacgccgcagcacgagggccagggccgggcggagaaaggcccgcccgcgaaccgcgctcctcctcagccccgcgcccccggaccgggactcctaccctccccggccacgcgccccggcctcttcccgacccctgcccggtctcgcgtccccggacccggacccccacccgcaccccctccccagccccgcgcccctccccggccccgcgcccgcaccccggcacgccctccgcccgcgctcacccgccgggtggccgtacggggactcggccgcgccatcctgcaggctcgccaggatctcgcccttgcccacgtcgctgtcgcccaccagcaggaacttgagcagaaagtcgtaggcccggaccgggctgcccagggcgctcatcgtgacggcccggcgcccccacccatgcccggcctgcggggctgagcgcagaggcggcggcccggccccgagaggcgccgcgcgggccccgagtccttgctcgcctccggccccgccccgccgcccagcgctgacagcgcgcatccccgcccggccccgccattggtggaccgcagttgctagggcagctgcgcgctt

SEQ ID NO: 204850 - DNA, 334 bp, Homo sapiens
  chr17:80656713-80657047
  hyper
ccgggctgtcgcccacccgcccctcctgaaaggtcgctgtcaccacagccaatggaggcccggagacggggcaggggcggagccagaacaagcaggaggcggggactctgctcccgcagccaatggcggggcggggtgggggcgatcagggggtggggccgggtgtttacactctcgcgtgcgcccgtgagcgccacgaactcgctcccacggtcgtcgggtctgcacgccccgagtcgggaggggcgaggggcggtgcagggtcccagcgtggggcctccccacctgcccaccagggagacctcgggtgcctggccgggtggggctcggggtc

SEQ ID NO: 204851 - DNA, 100 bp, Homo sapiens
  chr17:80657094-80657194
  hyper
cggaggagtccctgtcgccgtagaatccaggctcgcggtctctccccacggttcatccagggcctcgtcgttgccccatttacgcggcgtgcctgaatgc

SEQ ID NO: 204852 - DNA, 35 bp, Homo sapiens
  chr17:80693282-80693317
  hyper
aagccccagcgcgcccgcgaagagctgcgcggact

SEQ ID NO: 204853 - DNA, 88 bp, Homo sapiens
  chr17:80693554-80693642
  hyper
cgggccttcggcggccccggcgccggctgcatcagcgagggccgagcctacgacacggacgcaggcccagtgttcgtcaaagtcaacc

SEQ ID NO: 204854 - DNA, 198 bp, Homo sapiens
  chr17:81036702-81036900
  hyper
ttgtcaaagctggggcgggggttgctactgatacccagagtgcgggggccagggtgctgccaacatcccaccatgcgcaggacgtccccaccccaagaaccacccggccccgcgtatccggagcgaggagtgggcagcgctcggcagaggccccggcgcggcggctgcacgtcctccgggaggagggagggaagccgg

SEQ ID NO: 204855 - DNA, 392 bp, Homo sapiens
  chr17:81038995-81039387
  hyper
cggctgtcccgggagcggccgcctcccttctcggccgagcggggccgcgggcggatggaggtctggggggggtcggccgggaacgccggcgccgggagcctccgaggccgacggctcttctggggccgcccctgcccccgcggagtgattcagccccggctcgctgcctctgcccggcgggtcggtgcatccccgaaccgaggcccggggcgttccgctccagcagaccgaagccagaaacgccgcccccgccacccaggccgagtgtgtcgagaaggggccggcgcccttttcagggtgtcaggggactgtgtgcccggtaggagggggcgcctcccggagcccgaagggagggcgcggtaggcagccgagggtggcggggaggccacccc

SEQ ID NO: 204856 - DNA, 215 bp, Homo sapiens
  chr18:712223-712438
  hyper
catgaaaagcgagtgtctcccccaggcgcgcctcccactttacagaagcaatgggttcgaagtcgggaagctgcccggggcccgcagagctgcagtcggcggggcgggagggacccgggccgcaagccgcgcgtaccatggcgtccgcgcttaccatggcgtccgcgcttaccatggcgtccgcgcttaccatggcgtccgcgcttaccatggcg

SEQ ID NO: 204857 - DNA, 1313 bp, Homo sapiens
  chr18:811503-812816
  hyper
aacgcaacgggaggcggagtggcatgattccgtaaaagtggacgctgaatggtaaatttcccaacccccaacccaaaacaaaggaaaactttaaacatgttgcggttttcaatcaaaccaagtaaagccagaaaggctcatccactcgccccacacacccgctcctctccccgcacagctgctaccggcgtcggccgatacacagacccccagcctttaggacccaaaggggccgcttccctcgcccctacttcggccgtaggggcaaaaataaacctctcctccccgtcgccgggcggtccacacgaccccaaagacaaggggtggggagtgtccccacgcccctggaacctcaggtcggacttgggcgggacccggcaggtctggacagggcagagaccgagtcaggggcgagcaggtagcgcggggaacgagacaagcccgccgggcgatccgggggaggggagaagtttcttcccaacttcccgactcgggcccgcgggggcggggaaccgcggcggcggcggcggcggcggctccgggcgctggggcctagccctgtccgggcagaggtggaaccctccgcccgcggggccccaccgggtccttacctgtcctccggccgcgctctcatgagtcgctgctaccgcagctcgaggtggcggagggcggaggcgaggcccgcgggccctctccctcctccacctcctcgtcccggggcgcccggcggcagcaacgacggcagagccggcccgggacgcgttacttcaggaggagggagttcccgggctccccacgcctcggcctcactctccacctcctccgccccccccccccggccccgccccctgacttctagcgggggcgggggctgcgggtacctgcgcgcgccgccgtccgctcaccggaactcgggccacgccggcccggctccggggcccccagccttccggcgcctacgcccccgtcaggtcccctccgcgggctccgggccgctttgctgtggtcaggataggcgaccggtccgtgtcacttctcccgacccaacatggcggcggggtccggggcggattcccgggggcggtgcaggccgagggggcgtgaggaggaggtgcttccctgcccggagagcaggcccgcggcgtcccttcccacccgcgaacccaccgacgctcggctgccgcggagattgaatggagcgctccgattctgcccctctgcctttctctgttccttggcccagctctcagtagtggccagggctttggggcttgcttttgtgggggaggacggggttgagtttttttggttgg

SEQ ID NO: 204858 - DNA, 205 bp, Homo sapiens
  chr18:812869-813074
  hyper
ctcaagcccaaccgcgtgagccgggggcgttactcacaccctcatcaccatcctgatcgccgtccaaaaaacgttcacgtcttgcctccttccgaggcagggatcctgtccctgcccccaggagcttcctgttgactgtaggtcgaaccagccttgccgggaggggaaccgaagctgagttctgtttggcgactatcccagtcat

SEQ ID NO: 204859 - DNA, 145 bp, Homo sapiens
  chr18:2571378-2571523
  hyper
cctaactttaggggtcgtgccagtcttcgtagagacggccacactggcccacagaccccagttcctggggtgacgcagctgggcgcgaccagcacgcagccttccagcgacgaggcggtcgcatggaagttactgcgcgcgtcgt

SEQ ID NO: 204860 - DNA, 366 bp, Homo sapiens
  chr18:2906430-2906796
  hyper
cctttcagtcacttgcgacgcacccgcggtttccgcgtgctgtgaaatcgggaattgttgatgccggagccaagagtgaggccggtttggaaagtgcagccgtctgcgccggagaggctggaaacgccccggccccgggcaggggtccccggcggcgtccgggtggcccgcggcgtcctcggaagatgcgggcggacgcccgtgtgtcccgctggcctgacgtcgcaggggtggccgcagagtcctcacggggaccccgctcgccgggactcatggaggggaccctgacggggcagtcagggctgaggtttcctaatcccgtgtgtttctttctccccgacgcccggcagaggcgccctcgccccc

SEQ ID NO: 204861 - DNA, 136 bp, Homo sapiens
  chr18:2907034-2907170
  hyper
accgggagcggcaccgtccccggcgcagaaggcttcgcgggcgcaccaggtgaggcccggggctgcgcggggaggagcgcggggctctcccggaacttccgcctgagcctcggggtctgctgaggggcgtggcggt

SEQ ID NO: 204862 - DNA, 164 bp, Homo sapiens
  chr18:3012399-3012563
  hyper
ggtgatccgctggcgttagaagtggacagagaggctctcagtacaaactgtatctgaacgtgttcctcacaaattaagatctgcaccgggggctggggggctttgagaaaactaaccacatttgaatccggtccacacagcttgaaggcggaggtacggggcaa

SEQ ID NO: 204863 - DNA, 360 bp, Homo sapiens
  chr18:3247111-3247471
  hyper
aaaaacgacggcaaatgtttttcaagaggaagtctccagccacttgtgacctgggaaatccgtctgggccaaaaagatagtggaggcttggctgagggccccagggacacacgtttcctcccgtatggagggggcgggactcttaataaaattacactgcacacagagctagcatcaagatccgctcccgggatacgcgcactgctccggggccctcaggcggagacccagaccccgcgcggggcgtcaagcgcaggcgcactaccgcccacaagctggagcccggcttcggggcggggcgagggtcagtcacgtgggcccgcagccctctcctcgatttccctacaaggacttgggccg

SEQ ID NO: 204864 - DNA, 59 bp, Homo sapiens
  chr18:3262505-3262564
  hyper
ctggagaagtggccgggtcccggccgtgcgtgggccggccctgcgccacctgggtgacc

SEQ ID NO: 204865 - DNA, 631 bp, Homo sapiens
  chr18:3447898-3448529
  hyper
accctttccaattctcggttcccatctcggttgcctgagaatcgcagtcattagccaagtccacttggacgaaagcaaagctacctttgtgtacataatgagagccaccgcgtggccaaggagaaccacggggaagagggaaacatttttgtctcgagctggctaaagcgggcggggggggaggtagggttaaaccgaccgaaggcgtgttttgtggagtggcttcgaaagcggccgaggcagccgaagccgctttcgaagttagcaaacaaagcgtctccccagtaaccgcccggttccagacgaggctcctgccactcaggccgcggagtcgcagcgtcgcccagcccccggctcctcctccctgcgtctctcctccctccgctcccggctccccagcggataggagccaccaatcccagccacagacaacccttcaaacgaaatagcgaggcggccccctctaacgggcggcgggggcgctggccccctccctgcgccacatctgtcccgcaccgggcgcagcagctgattcatctgcagccaggtccgggaaggaactgtgctcccggcagttgcagggcagcgtccgggcgggtggcttgtccccaggaccgcgctccccccgagc

SEQ ID NO: 204866 - DNA, 2120 bp, Homo sapiens
  chr18:3449165-3451285
  hyper
ataagccaacaggaacgggtgtttacttaatggctagtttctgtttgaaatgggaggagggatcccctagcagggttccaatccgaagagtagacactgttgaccgaaacagacgagcaggcacggcgtggtcaccccttagctataaaagtggccgctgccggggttcggcgactcggggtgtcaggcggagtcttggtgaggcaggcgcgcgcccggccgtccccgggcagagacgtttaaagagcatgtgagcgtgacaagtgtctgtccgcaacgtgtcagatttcgaaactgccttgcaatccagtccggaactcgcagctttagcccgggggaacagacgttcgtttaggctgtgtctcatcattcccccccgccccacccccgccgacctcccactgtcgctgctggaggaagagccccgggaggagaagggtgcgccgcgccgcgcccgcgtgtcaatggcagccgcgcattctggaagaagttggttcttgtctcgaatacttttcctcccgtgccccgccccttgaatcagaggcggctgtctcgtgcggctagagcagggccagtagagttcggggcagctgtcaaaaacgagacggggaggcttttcttcccgggggtggaggagggaaggagggaggtgtccttttttccatctgttgcagtttccgaaccaaacgcaccctcgccagccccgggaagaaaggcccaagggagaaacctggggcgctcggctggtgcccccaccgccgggcgagggatgcgggcggtccgtgcgcggcaggcggaaaggatcgtgtttctggacccggccaccccccgcgtccgcaccgccgcccccgagggacgagtgacagcggccgccgcgctcggtccagtcttcccggctggaaggtgcgggggaggggcggaggagcggcggggcgggagggggacggggcgggcggctgggggcggaggcaggacctcctgtaccttccctcctcgcctctctcactctgacagcgccgaggtgcgccgagcaggagcagggaacaaaggagcggagaggggaggggagagagttgggcgagggagagcccccggccggctgccagaagatcccggcgggaggaagcccaagtgtcacttgaattccacccaaggagcgggcgcctgggatcagagcgtcctgtttagcaataacggctggagcacgtcctacaagttacgggagagtcggctgtgaaggagacgttcgcttatcccctgtgtccccgctcctggcccctccagacccccgccttgcctcgcgctgggaggggagatccagaatgaaaggcaagaaaggtaaggcggccgcgggctgcgcgcaccagaagacgcgagtccggggaaacgtgctggccgggccgcgccgcgcggagtcacttggtggacttttccgcccaggggctctcatgctggagtggcggccgtgctctttgttgaggctgcgtctgaaacggcagcggctgttttcctgctagacacaacacgaggggctgttgtggggcgagcctctccacgctgctggcacgttgtcaagaaacacgctcagcgccttgtttgtgcgcctgcaagtttcattgtctccgccgacaccccacgctcggcccagccgccgcgtggcttctcgctctttctcgcgtgctggggatatggggtccgagtagggaggacccagcccctcgtttttcccgatccggacccaggcggccggggccgcgggaccgccgcggctttgtctgaaagttccactcctaggctccccccgcccccgcccccgccgcccccctactcccagccgggccctagcactgttctttagggatgtggtgtttttacgatcgaaggaatgcgattctggaccccctcatcgccctcgggtgtaaacagctttggaaagctagacttttacaaatccccagtctctaaaagttttcccacgatgaattttggggcaggaggaagagttagcacccagggccagcagcttcaagcggcatgcagtcaaaatgcgtccaaatgtgacaagcaggcttggttgtaagtgcaaagagcaaggctgtcattgtttccacgaagtgttc

SEQ ID NO: 204867 - DNA, 919 bp, Homo sapiens
  chr18:3451345-3452264
  hyper
gggacggggggtggagaaaccacacaaaacaccccgaaaggtcagagtgtgaagtcccttttgaagttaacaaaaattgagtccctggctgggaggtcccccgagtgttccgctgtgggctggaggtggcgtttctgtcgtgatttatgtggagtggttcaaaacagaagttaatcactcgggaagcggacgggaggggcggcgctactgcgcatgcccgggagccgcctggagtttggaactccacattctttcagacccggcccgctgcggggcgttcctggggggtagcctcaaggccagcggggttccttcggctgcgtttctgtgggaggccctgaaacgcgcggagcttccctctgcctccaggctttcccagcgagagtgaaattaaacttgaaactcggatcaactggcagtcgttgttggtagaacgccctaaggacccctccccgcgggacggagggaggactcgggacagggaattggccctgggagaaaacgcgcggggggcgtccgagacgccccgtgaaagccgtgccgacccttgggaggactgacaggtctagagacacgcgctgtctgttgtggtgggcctcccgggaataagtgaggggctctgtgtttcgaggatggttctagcgcagagccgggtgtctgccggggtgggctccccgcattgttcgggctccggcgggggcggctctgattcctttccatggcccgcctcccaccccgggaatccccagtgctccttttccacggcttttctggcgtccccccgactctcccgcggcactttggcctaccttcccccagcgccgtggtcctccctggcgaccccctctgcgctcctggggtcctcctgcgccccccctcctccaccggcgcgctgcccacagccgcgtgccctctcccc

SEQ ID NO: 204868 - DNA, 65 bp, Homo sapiens
  chr18:3498978-3499043
  hyper
aggagatgggcaaacgggtacgggaagtggggggctgaggggggcccggggggcggctcctgcga

SEQ ID NO: 204869 - DNA, 1036 bp, Homo sapiens
  chr18:3879110-3880146
  hyper
cctgcaggtactggcaggagcgttcttgctgacacgactcggacttcaccatggcctggtccatgttcaccgaggccttctggtaaacctcccgggcccggctcacggtgagcgtggaggaccaggcgctcttcttcagcagcggggtgtccaggctgaccggcaggttggcgcaggtggagcacttgacgtcgttgttgctccgggaggccttcaccgcctgctcgctgatggtgttgtaggcctccaggaagtactgtgaggccgagcggtcggggcacctgcccatggtcatcacgcccgagggggcgtggtagatgcacatgtcaccatccaggttgtcgtccgagctccaccagcccggggaggtgctgggccgggccttgggctccgcgcgccgctccttgctcttgctgcgtttgccatagcgcgccgcctgcgcctcgtcagggctggccttgcccccgttgacgctgcccttggacggcccctccagggagtgcgacttggtgaagagcttctggaccgagtgcaccaggtggcggatgcggccggggctgtcgctgcggtgctccacggccgtgcgcttgtactgcagggtgtgatagccatcgcggctgagtggcagctgccgctcgaactggtccagcaggttggcggggatgcggttcgccttggtggccagggtgcggggcaccagggcacactcgtccttcagctcttgctgcgaggtgtagtgcctgcgggggaaggtgctgctggccagcgggtcgctgaaggggcccacgcactcagcctggaaggagttccgctgggtgtagtatgggtggtctgcggggtggtgctccactgggctcagcaggtagggcttgcggtcggagtggtgcgacagcgagtcacaggccgagtcgcaggtgaccccgtggtgatggctgcggctgcctgatagccctttcatggcggaccggaagcagccgccagggtcatggacacccggaagtcaggctccagacccgtcttgggcagggatctgggg

SEQ ID NO: 204870 - DNA, 580 bp, Homo sapiens
  chr18:5237298-5237878
  hyper
cctttcccgcctaccgagcctgcccaccacccgaagtttaagctcatcttggaggacctgacactcaggaagccgtctcccgttgttccaccggctttgtggccccaatgtctgtataagctgctgatttgccttgggaaaacaaaccagcatcgatttcagagaaattactggataatttgcgctgtgaggcgcctagatcgcaaggcgcactccgcaaatgacagccgctcccgtgcacttgtccagtcattcgggtggcatactgtccgggtggaagcccgccaaaataatccatttggaagggacggagggcttcgtcagaaattgccttcttgtagctatgagacattgagcaaaacagataagaactggggcaatggaggcataaacattaaggctaggatgtatttttggggagaaagcggcggctagcagggacgaagctcaacttcatgcgccgcgccccggaatgctttgcctttagccactagcggagccgcccgcctgagggagccctccgggagtgagcgcacgcaaccgtgcagtcagattcctccgccgaccgcggccctctctc

SEQ ID NO: 204871 - DNA, 536 bp, Homo sapiens
  chr18:5238247-5238783
  hyper
gctggcccgggagcgttcgccggcccacctggtggctttccctggacgtttaacggcgactccgcccggcctcccgactttttgatgcaggcgttctcttacatgactttcttcgaggctagattctcgaaagacatcctgaaggtggctttcttaattagctgcctcaccggctggcggagcagttcgtagtcgcctacatcgagagggagagccccgtcctggctcagtactggggcttcgtggacgcgctgtagcgggtcttcgccgtcgtgggtaggaaacagtcgggccggatccccggtgtctggggagcggctgccggccgggcccgcgcgagccgcttcactcctacaagcccggctcactagttccaagctgctggactttgaccctcgctgggaagcttgatcgccgcctgttctcgccaatctctatgcctttgcactgcccagcaacccggtcactgcccaggacctgttaaaagttgaatggacctcccagaatcacgccgctgccaccgccgtttctagaga

SEQ ID NO: 204872 - DNA, 43 bp, Homo sapiens
  chr18:5295777-5295820
  hyper
ccccagccccttccgcaccctggcccgcgcttacctgcagcct

SEQ ID NO: 204873 - DNA, 65 bp, Homo sapiens
  chr18:5543453-5543518
  hyper
cacctccccgggggaggggccggcccgcgctcgcccccagcccgaggggcaacttaaaacatggc

SEQ ID NO: 204874 - DNA, 180 bp, Homo sapiens
  chr18:6414233-6414413
  hyper
gaagacaagggcagaaagcgggtggagggaggcagcgctcgcccgtccgggcacacgacacttgtcggctgagggggacacgcgggcagacgggggcgttagccccagaggaaacaaaagccaaatgcccaccgccgggcgctcgatggccggaggactgcctgggggccctcaggagtc

SEQ ID NO: 204875 - DNA, 360 bp, Homo sapiens
  chr18:6414823-6415183
  hyper
caacgccgaccgagctacaggcggggggcgagtcggagcgcgaggttccgccagcccaggctgcggcgccgctgccccgcggtgcccggcgggaggggcgcgagggtgcacgcgcggggtgggggcgcgggagccgccccctgcccgccccgcgcgcatgctcccgccgcacctgcctcgctcagtgttccacaccccggggagccgggtggcgctgggcccgccgaggtcggggctttcccatgggagggaggtggctgcggcggaattttcagatgcgtccttctctgtattcgttccctgggaaggattcccccaaatcttggctacttcctgcctgccagcttgctccctggcagc

SEQ ID NO: 204876 - DNA, 232 bp, Homo sapiens
  chr18:6729209-6729441
  hyper
aaaacaaactttactagagccgctagcaggagccccaaaggatcccggccggtttccagtttcctagaagcggggatcacacctccccgcgcactcccgacacatgcgcgcgcacgcacacacaggcgcacacacacagacacacaggcgcgcgcacacaggcacacacatggacacacgggcgcgcacacacaggcacaaacacaggcgcacacataggcgcacacacaca

SEQ ID NO: 204877 - DNA, 232 bp, Homo sapiens
  chr18:6729720-6729952
  hyper
cgggccgcgccgcccagctgctgacagcctcccggcgcgccggtccatgctggtcccggtctttgttctggggccggcgccgagacatgcgcggctgacgatggaggtggaggactcgggcggcgtggtgctgaccgcctaccactcgtacgcgcgcgcccagccccccaacgccgagtcgcgctgcgcgccccgcgccgcagccagccacccgctcagcaggtacccggag

SEQ ID NO: 204878 - DNA, 74 bp, Homo sapiens
  chr18:6730139-6730213
  hyper
cctgggctgaagtcgttggctagcagagattagcaagcagcaggattgcattcttgatacgatttgaggataag

SEQ ID NO: 204879 - DNA, 134 bp, Homo sapiens
  chr18:7116637-7116771
  hyper
attgtcatgtgctgcatacattaagatgttttcaacaaatatttgtgactgcctagccaacacgaagccacgctgcgaagacagctctaggggtggcgtgggtgactagggttgtcccccaaaagggaaaagaa

SEQ ID NO: 204880 - DNA, 117 bp, Homo sapiens
  chr18:7117374-7117491
  hyper
cgaagtcccgcaaaagccagaggcgaggctgggctttaaccccaaagcccgaggaggttaaagcctaagcctgcaaagagcgggcagcgtccggcaggagcggcgtccccatccagc

SEQ ID NO: 204881 - DNA, 184 bp, Homo sapiens
  chr18:7566825-7567009
  hyper
ggctcgcttttcccgcagccgccgagcagcgcaggcccggcgactccgggtgcagctggccctgtgcggtgacatcgccgtccggcgccaggctcgaagccgcctggccgcgcccgcggggtcgcaggccgctggtcccgcccggccgcgctcacaaactactcgcggctcgtgacccgggaca

SEQ ID NO: 204882 - DNA, 415 bp, Homo sapiens
  chr18:7567335-7567750
  hyper
ccgcgcgcagccggcgcgggctcggtcatcggcgcgccgccgcccggggctgggcttggggctgcctgtggagaggcggcgggcggaacgcgcgcggccacggccacggccaccgccacggccacggccggcagctcgggtcccgggtcccgggcaggggaaggggagaggcggcgagctcagcaaccggaaccgagggaagattttggctccgcgggctcgccctccgctccctctgccagcggcgccagacgccgagtggggccagggacaggggaggaggacccaggaccctgtgcccgcgcccctggagccgctggagttcggacttctgcaactgttggcactttgggggcttggcttagcgctctgctgtttacccgtctctcctcgctgcctcggaaccaaagctccc

SEQ ID NO: 204883 - DNA, 85 bp, Homo sapiens
  chr18:7568821-7568906
  hyper
cccggcacgctgtcacaggggtttacaaccaggatgacctttattacctgggtgacacaggtggatagacggcaaatgctggccc

SEQ ID NO: 204884 - DNA, 199 bp, Homo sapiens
  chr18:8705987-8706186
  hyper
gcccccgccgggcgccggggccagagcggcgggcggtgccaaggctgccctgggaagcaggagggcggcgcgcgtggcgcccgcggagccgctgtcccgggctgggaagcctcccggagccgagccgccgtctgccgctgccaagggccgcaaagccaagcgcggctcccgggcgccacccgcccgcaccgtcggcccc

SEQ ID NO: 204885 - DNA, 43 bp, Homo sapiens
  chr18:8748272-8748315
  hyper
aacactaaatatattcgtatattagtaggtgccaaggcaggag

SEQ ID NO: 204886 - DNA, 70 bp, Homo sapiens
  chr18:9474876-9474946
  hyper
ttccgtggatgttcccgacagaggtttattcccgcctatccctacaggcccacggcgctctttcctccaa

SEQ ID NO: 204887 - DNA, 168 bp, Homo sapiens
  chr18:9475347-9475515
  hyper
cgggctggctggacgccggggccttgggaactacgcctcccagcgcgccccgcgcgagagcccaggtcgcctgcccttgacggcttcagccgtctgagcggagaggaggatccgggaagccggctgcggcgggaggagggaatgcgcgtgcgcgctggaccgcctcgt

SEQ ID NO: 204888 - DNA, 121 bp, Homo sapiens
  chr18:9709406-9709527
  hyper
gctggtctcatgaaaaccatttcctaaaaaagggcagcgaaagggtcgcattcttgtgcgaactgatctgtcaagatgggggtacaagaactgtagaaagaggaaatgatttcggtgagga

SEQ ID NO: 204889 - DNA, 100 bp, Homo sapiens
  chr18:9913711-9913811
  hyper
gaagagtgtgatgcgctgccagagcagtttctctagttccgtactcggagctcaaggtgacagaggactgcgcttccagccctgcgctgcgcatcgcgtc

SEQ ID NO: 204890 - DNA, 308 bp, Homo sapiens
  chr18:10455170-10455478
  hyper
ccccgcgcctgccgtctcagccctgggagagggggctctgcccactttccgaggcttgggaccgctctcccccagggcgcccggagctctttgctgcgggactgttctttttggaagggtggaagctctcccacgcagacaccttttatgtccagaatccgttgcatccagtccgagggaaactttcgtccgctctgctggattttccaactgtacactgccatgaaatcgccggctctgcgagcctttttccaaaatgccagaatgcagcaggctcttgatgtgttccaagcgtttaggagagtgga

SEQ ID NO: 204891 - DNA, 189 bp, Homo sapiens
  chr18:11148436-11148625
  hyper
cagagcccttcactttgttaagaagtcccccacccaggcgcccccctcgtcctcctcaagtgccctcggaaagcggaccagactcacctactgccaggcagatgggcagcagcagcctgaagatgagcccgcacaccacttctgaggccatcgcgtcggtccggcgagtcggagcagaggggcgaggct

SEQ ID NO: 204892 - DNA, 200 bp, Homo sapiens
  chr18:11149298-11149498
  hyper
cggggctcgccttgtgggtccggtgcgcgggcggcgctgcgagtccctccctcactcgaaggaacggcgcgagcgtggggagaaatggagaccagagcgcatatcgggtgagtgggtctcccactccctcctccaccgcctcaatttaaaactcaagagaaaaaccagcgccgtcccgtcgcccagcgcgaccaccgcct

SEQ ID NO: 204893 - DNA, 518 bp, Homo sapiens
  chr18:11947488-11948006
  hyper
tttttaaaatcactcttcctggagatcttcaaaccagaagcaccgcgggccctccccaacgggcttctgcttacctccactacgtgatgcagtatggcccccgggaggccgcccccagattctagaggggcttaccccagacacacccgaaggaccacctcgtgacctcagaggaacagccctagacccaggagagactgccagacacccccgtggcagcccgccagggcccagctctacttgtcgcctggaggtgctgcctcccttccacgccgccccagggaatggccgcccctctggggctcctcccaatcccccttcccaggactgacaatggcccggcgccctgctttgggccaggatcggcctcgagccttcctcactagcggccaagagccggaaaccttgcgtctcagattccccgggtctgtgcacccccaccccaaccggtcttcccacccaggccccccctgatgccagctgcgggcctggacctagcccggggccctgcccctccg

SEQ ID NO: 204894 - DNA, 163 bp, Homo sapiens
  chr18:12253892-12254055
  hyper
aaccagcggctcgctgagcctggggctgggctctgggggactccagagctggaggcaagtggcgctcacatccgtctcctcacctgccccacccgtggcctgggtttaaaatccacatacccgtctttccgcggccaaagtgatgctgccaggattggttatg

SEQ ID NO: 204895 - DNA, 688 bp, Homo sapiens
  chr18:12308209-12308897
  hyper
tcggccccgggacgcgcgcagccggcccgcagttgccgctgtcgtccgcagagccagttcctagcgcagagccgcgcccgccatgagggagatcgtgcacatccaggcgggccagtgcgggaaccagatcggcaccaaggtgggcctggcgcggtgcagggcctctccgcgggtcggctgctggcgggccccgggtctcccggcgcgacccccgccggggcgcgcacccgctgtgcgcccctgggtcctcggagcccggtgcggacccgcgagggccgcagggagggagcgcccggggcgtggccggccggggaccttctactcttcgctccccacccccatcccaactgggagcggctgccggcggctcaggcgcgcctggaattcggccgccggggcgcctggggtgggcgcgggtggcggcgtcccgggctctgggttctgagcgtctgtccccccgccttgccctgcccaagttttgggaagtgatcagcgatgagcacggcatcgacccggccggaggctacgtgggagactcggcgctgcagctggagagaatcaacgtctactacaatgagtcatcgtgtgagtagcaaggccgccgcgccctgcccggccgggacccgcgtggacgctccggcgccgcctcttagcgcggcgagtttgcttcgggaaaagttctctcggg

SEQ ID NO: 204896 - DNA, 129 bp, Homo sapiens
  chr18:12308927-12309056
  hyper
ctcctccggggcgggaaatccgccgtcagtttattcaaacagctcgattcagcctatcctgagggtctgagcgcttgaacgggaccacccgttagcgttgtgaaatcaacgtagcggttcctgcccagc

SEQ ID NO: 204897 - DNA, 313 bp, Homo sapiens
  chr18:12407708-12408021
  hyper
gtaaggacgagcgtcgcctcctacgcccgcggcatctgcagcaagcgcgcatcgcgcaccccagggtagcagcgcaggtctggggctgcgccacagccgcgcccgcagagctatttttagccgctgcagccagcctagccaccagacggggtgggcggcatccaagggcgccccgcccatcgaggccccgcccacgccgcgcccggagccgcgcggcccgaagcacccggcccggatcgcagagcccgcgccctgcgccggcggcaatgaagatctggagctcggagcacgtgtttgggtgaggccgggctga

SEQ ID NO: 204898 - DNA, 206 bp, Homo sapiens
  chr18:12408117-12408323
  hyper
tccccgccccgcgccggccgttcccagaccgcaacttcggcgtcccggagagggcacgcgcgcttccccgggaccgcggtctgggcgaggctctgcgccgggtacggcctctcccccggcgtgcgcaggggcctggctgcaggcacagaggccccgctggtggtcgacagccagggcgggggcagccggagcgggggcggccgggg

SEQ ID NO: 204899 - DNA, 42 bp, Homo sapiens; identical to SEQ ID NO: 11652
  chr18:12408339-12408381
  hyper

SEQ ID NO: 204900 - DNA, 221 bp, Homo sapiens
  chr18:12656810-12657031
  hyper
tctctttgtatcccgacatcctgtcaacttttcactttacaagcctgtttttcatcacaacaaattttcacatacaggaatgcaatcagtattttctaacgtccaggagccaaaaatcactatttagtctatttttccatttctccccaaagagcagaattctcacggttcagaatcatctttacatttccgaaccgaggaaaggctgtctaatgtggaat

SEQ ID NO: 204901 - DNA, 54 bp, Homo sapiens
  chr18:12657375-12657429
  hyper
tcccctgcgggtccccgccggatcctcccgggggtctcccgtggcaaaatgggg

SEQ ID NO: 204902 - DNA, 220 bp, Homo sapiens
  chr18:12658130-12658350
  hyper
cctcgcgccgtccagcgccgcccagcgcccgccccttagggggccgcacgggccgggggatgcacgctctggaggtgaggaccaggcaggagggcctcgcctcgaggcgagatggccgcacggtctctagcccgcagggctctcagagtcgcaggcggtgacgcccggtcggggggcccggtcgcaagggacacacagctgggggcgcaatggtgagggc

SEQ ID NO: 204903 - DNA, 360 bp, Homo sapiens
  chr18:13217280-13217640
  hyper
gccggctcctccgggcgcccctgcagcgtactctgcgctcggcttggagttccccgtgcggccggcggtgggcgcgcgccacgcgggcccgagccctgggcgggagtgcggccccgggtcccgcggcctcggcgcccgcgcgcctcccccactgcccacccccggcctccgggcccgccccccgcaggggtcggcgcagcctgtgagccggggacccctgagcccccgccacggcggccccggtacccgcggcctggccgcgcgccgggtccccaccgcggagtgggaaggaggaggagagactggaggagttggagacagacacagccgcggcgcgcagtcacggctggagacagacgg

SEQ ID NO: 204904 - DNA, 420 bp, Homo sapiens
  chr18:13217700-13218120
  hyper
cccggcggccgcagcgccgcgtcccctctctccccgcgctgaggctgcggaccgggcccggcgggattagcaggcgagtgcgttggccctgcccgctccgcgcgccgccgcggccggccggggatcccctgcaagccactgagccgctgccgccgctgcagccagacaggctgcgggtgcctgggaaagtggaagcagggcggggagcgcgggggaggcccgggggtgaggtcctcagctcttaaagaaccccggcgcgccgcgctccccgccggcccgccgcgcgccccctgccgcgccccgcacagcgcccctccccctggccagcagggccggtggccgcggagccgcactgcgggcagtccccgcctccgctccgggggggcggcccaggtgagtgcggacccgaggtggccgcag

SEQ ID NO: 204905 - DNA, 86 bp, Homo sapiens
  chr18:18821314-18821400
  hyper
ttaaaaatggagccgcatctctaataacaaaagcctccagctgtgaaaagtggagctaaatctctctaccgggccgcagcatctct

SEQ ID NO: 204906 - DNA, 213 bp, Homo sapiens
  chr18:18821485-18821698
  hyper
gggaggctaccgacgagccggggcccggggccggagggcgtgctcctccgggaggtgcaaaagtcggcttgggcccggagctcccgggtttgtttggttttgtccgcgccctgcccccaccctacccccttcatgcaaaaggccaagggtttccgagccaccactgcccaggccgagttcacgcttggggctcttcagccgccgtccagtgaa

SEQ ID NO: 204907 - DNA, 112 bp, Homo sapiens
  chr18:19748742-19748854
  hyper
ctttccgtacatgacgacccgagttaaagttcccaaaggtcagctggggaatgttgtcttgaggttcccgaaaccaccacgacctgagccgtagcatcccgagatagggtcg

SEQ ID NO: 204908 - DNA, 525 bp, Homo sapiens
  chr18:19748884-19749409
  hyper
tcagggcaaaaagcgcatttgctgtgaaggggctaggcgggggttggggggcgggggggcgcagagcacgttcccccttccttctgggggcgtgctgacccaaggtctggagcgcccctcccgccgcggcggcggcgcgggactgtgcactgccaactcctcccgtgccaaggctccctccccctccctcgtgtgggtgtgtgtgtgcgactgcgggagcgggagggtgcaccgccgctggatgggtgcgggtcgctagccaggtcaggcgttctgtggcctccgcccctcccccggggtccctgggctcggtgccccccgggtggactcgcccccactccggggacagggcttgcggctcagcccacgcccgcaggcagcgcggctctcattgtctgcctgggcggcgcgctcccctcccccctcgccgtcccctccccaccctcttttctctcctcccctcgatccctcctcctcctcttcacctccagcgcccagctgctcgctgagcgcagttccgaccca

SEQ ID NO: 204909 - DNA, 418 bp, Homo sapiens
  chr18:19749446-19749864
  hyper
gctcggtgagtccaatcaggagcccaggctgcagttttccggcagagcagtaagaggcgcctcctctctcctttttattcaccagcagcgcggcgcagaccccggactcgcgctcgcccgctggcgccctcggcttctctccgcgcctgggagcaccctccgccgcggccgttctccatgcgcagcgcccgcccgaggttcggctgcttcctcctcgcgcgatctccccgctttcctcccctccacccctactcgtcgcgggcccctggcctccggctctccggccctctccaggccgcggtcggctccgacggtgtttccctccttccctccgggcgggctgaggcggctcccaggctcccgggacaccgcggaccaacttctagtctctttttctctcctcgaagcgcttatctgc

SEQ ID NO: 204910 - DNA, 384 bp, Homo sapiens
  chr18:19749924-19750308
  hyper
cagagaaacttctttcttgctatctagccaggtctgtgtgtgggcattaattttagtgtggtaatctccgatgagccgaggcgatttggaagagcagcctggaggaggccagcccggctgcatttcacctccctcccccactcgctccgagtctccctgtcattcttcctgctctcccatttggggtcgcctcggctctggggcggtctcacgctcccccctccccagcccgttgcgttccccctccttttctctgctctccgctccaccccgctacgtccgattccggaacggtccggcgtttctgctgctggagatgaccgcggggtgggccgggtggcccggccggcgtgagcgcgcacgctggtggctgcaggcgcgggc

SEQ ID NO: 204911 - DNA, 349 bp, Homo sapiens
  chr18:19750390-19750739
  hyper
gggaaggacccagactgctgcccccgccctggcgtcccactttccctgggccgagttgcatttctctctggggctcgcgttcgggctggtcagcgcagtccgggaagctctgggagagccaatataggagaacgcggcggtttcgttttcggggacaggttgccttccttacgcgaagggttttcccgtggggaaccctcaccccgaggcatttcgggagaggggcatccgcagagaggcgggatgcggcggtgccgacacgcacagctacttaaattcttttgtgtgtcatcagcccgggggagacactttagggcggaaggaaagcctcagccagcttctgcagatc

SEQ ID NO: 204912 - DNA, 460 bp, Homo sapiens
  chr18:19750806-19751266
  hyper
gaccggagcggtgcctttgagggagggctggtatcccagcccttccagggccctgtggcggctgcgcaggctcccttcccctcccttattgatctccacgcccggggcagaaataggatctttgagaagtctcaaatgggatctttgagaagtcagatcccatttgaactagaaaaaggagtggaggcgaggtagcgtgcagcctacgctcttgttaacccgtcgatctcctaccatacccgtctcccccaccccacctcaggagctagacgtcagcttggagcggcgccggaccgtggatggccttgactgacggcggctggtgcttgccgaagcgcttcggggccgcgggtgcggacgccagcgactccagagcctttccagcgcgggagccctccacgccgccttcccccatctcttcctcgtcctcctcctgctcccggggcggagagcggggccc

SEQ ID NO: 204913 - DNA, 210 bp, Homo sapiens
  chr18:20512628-20512838
  hyper
ctagtggtctaaaaacgattcttttacaaatcaggagaaataggaatacctactatcggtttgaatctcaaacgaacagccacaagaaaaatggactttttaaaaaaaattatctaacagcatgttgtcccaataaataatgctgaaggagattccttctcgtttcaaatttgccagaaacttcccgtttaacctcagcaaaatacagat

SEQ ID NO: 204914 - DNA, 1246 bp, Homo sapiens; identical to SEQ ID NO: 11673
  chr18:20512902-20514148
  hyper

SEQ ID NO: 204915 - DNA, 211 bp, Homo sapiens
  chr18:20715426-20715637
  hyper
cggacacccggccccggagcccgcgagccagcggccaggcgaccggcgggcggccagccagcgagccgaactagccgagctaggtagcgaggcgtgcgcgtgggccggggcggcggcgcccccatccccagcaccgaggggcgagcatggcccgcccgcgggggggctggaccgccgcgcacgccgcccgatccccgcgccctacccagcc

SEQ ID NO: 204916 - DNA, 201 bp, Homo sapiens
  chr18:20716371-20716572
  hyper
agcgtgcaggtgccggcggccgcctttttgggctccgggacccccgggagtgggagcggcagtcggggacgcctcaactcgttcactcagggaatcctgcccatcgccttctccaggccgacttcgcagaactactgctccctggagcagccaggccagggcggcagcaccagcgccttcgagcagctgcagaggtcccgg

SEQ ID NO: 204917 - DNA, 41 bp, Homo sapiens
  chr18:20716690-20716731
  hyper
cctgtgctccgggcccgaatcccaaaccacgagggcaccca

SEQ ID NO: 204918 - DNA, 341 bp, Homo sapiens
  chr18:21033100-21033441
  hyper
gccagctgatgcttgcttctccgagcccggcggtcagcagccggaagtagcccgcccgggggcggggaaaggtgccttaaggaggagctaggggcgtgcggccaattgcaagcgactgtcctagcgaagagggcggaagaggagagatccagttccggacgcggccgccgccgtcgccgccatctgtcacctccactccggcatcagcagccagtcgcccgtgtcccgcctgtctcctcggcggagcctgctgcccgtcctgccacctctctgctctgttcttgtctctgccttcattcccgaatggatctggtaggagtggcatcgcctgagcccgggac

SEQ ID NO: 204919 - DNA, 575 bp, Homo sapiens
  chr18:21242241-21242816
  hyper
tgctggccacccctccggggaggaggcatccgtgggtgcagctggtactcctgcatgaggacccagagggtcagggtcggggactccttctgctgcaggacagcgctgaccccaggcttcttacccgcccccgacctgttacccggcgacagtccccgccgccccgtcgccgggcacagactcagccgatccacagccatgagtgcgaagcctctcaggcagggcaggcaggcaaaccgcaaacccacagggcgcacccagccccgccgcttcctcccgggcctcgcccgcagctggaggagagaggaaggaggaggcggcgggcagcgggcagcgcccaccccatcccaccccatcccaccccacccgaccccgcgggcccggccgcccgagcccggccccagccctgaccccggagtcccggtcgctcaccttgaaggacatcctgcacatgtccgcggccgcccgagcgggagccggcgcgctttgggcccggggcgccttgtcctccccggcccttcactctcccggggctctcggcgttccgcagaggggcggcctccgacgccgcgcgc

SEQ ID NO: 204920 - DNA, 138 bp, Homo sapiens
  chr18:21242871-21243009
  hyper
gcgcgggggcgcgcgcgcgcgcacactacacatggggtgtcgcgtggacgcgctccaggacctgccacacacgcgcgtgcacaaacaccccaaactccgcacgcactgtgcactttccacacacgtccacacttccac

SEQ ID NO: 204921 - DNA, 283 bp, Homo sapiens
  chr18:21269066-21269349
  hyper
gttgaggagttgacgactcaacacttggctgggaaatcgaaatgtctttgatgtgagttctgtaggtagtggcagtttcctctgctctcaaccaaattcgtttacaagcctcctttactcttaggtcacaggtggcttttctggctttgacctgagcggtgagtatccagagaggagaacgatctaattaatttctgtcctggcgcctggagggttcgaagatcccaggctcccgttcccgccgcctgggtgggagcccgggaacgcctctcccattccccgc

SEQ ID NO: 204922 - DNA, 33 bp, Homo sapiens
  chr18:21269390-21269423
  hyper
ctgctggcgcgcggctgagcgctgtcagttcct

SEQ ID NO: 204923 - DNA, 212 bp, Homo sapiens
  chr18:21269740-21269952
  hyper
tgcggggcgaccgctcgggatcccggggccgcggccgggctcagccttcacccgacttacttcaacctggccgaggcggcgaggatttgggccaccgccacctgcggggagaggggacccggcgaggggaggccccagcccgagctctactgcaagttggtcgggggccccaccgccccaggcagcggccacaccatccaggtgagggcctc

SEQ ID NO: 204924 - DNA, 174 bp, Homo sapiens
  chr18:21270135-21270309
  hyper
ggcccgaggcgaggagggggagcacgcgaggtgacatgaggctgtggtcaggttcgggctggtggaggggaaagtgtgaggctgcgctctaagagatgcaggcgcctcggcccttcccgcctccgtcacccacggagcgtcccgccaggcttgagtcctcgagggttcaggggc

SEQ ID NO: 204925 - DNA, 480 bp, Homo sapiens
  chr18:21851820-21852300
  hyper
gcgttgcccgccagcggcccaggactcccgcgccgcgcccgcccgggccgcagaggtctgcgctgcccctccgccgccgctggctcggccgcagacccgccctccggggctcgcggggagagcgcgggcgggcggcggcaaggcctgcggcgggcggctccctgcgcgcggcgggcagcgtccgggccgctcctccccttccccagcgccgctggcgggcggaggcgcaggtagggaccgccggggaagcctgcacggccctccgaggagaggtcggggactgctccttgggctctacgtgagtgccgcgccgaggcgcctgcgaggtcctagagctgctgtgcgctcggccctctcctggagacaccggccctggcaactttttttttttcttttttctttttttttttttttaaccaacccgccccttgggaaactctggaaagcaaaggaatcttctctccagtcctgcctgtcact

SEQ ID NO: 204926 - DNA, 237 bp, Homo sapiens
  chr18:21977677-21977914
  hyper
cgtccgcccgccccacgtcgaggaagtggtcgtcaccaactctggctggcactccccgaggacgctcgagcccgcgtaacgtctgtctccgggacccggcgccgggaccacggcggagcgcgaggtggcgccgcccctccccgcagcccgcccctggaacgcgcatcctcctggcgagctggcatccctcccgacacgtgaccgcagcggggacacgcccgttccccgcccactccc

SEQ ID NO: 204927 - DNA, 247 bp, Homo sapiens
  chr18:22006301-22006548
  hyper
gtcccttcccgggacgcggtggtaaatgactccctaaagtctcctggccattccgatggcgccaaggccgcaatgggcaagcaaaagccccccgccccggcgcattcctaggagacagagccgtgagggcctctggctgcaactcgcgagggtcggctttccctgggtctccgccctacgggagacagtgaaggcgggagcaaggccccaaccgagaaccccaccccaaacccgggggccaggagcc

SEQ ID NO: 204928 - DNA, 147 bp, Homo sapiens
  chr18:22653839-22653986
  hyper
aacatctttccccaccgtaagccaaaaaaaaaaaaagcttgtctactatggcatatgctttggtaaagatatataaaaataaaactgtgaaaggacaatgtattaatttagataaactgtgttaagtatgagccacctcctgagagg

SEQ ID NO: 204929 - DNA, 134 bp, Homo sapiens
  chr18:24130253-24130387
  hyper
gggaagcattttacgcatcaattgaaacccatccatcaatttgcattttttttttttaagaaagaatgaaagaccaggtctcagggcagtgtgggcttctgagtgggagttgacgatgtctttttctgcagcga

SEQ ID NO: 204930 - DNA, 77 bp, Homo sapiens
  chr18:24765230-24765307
  hyper
cgcgccgggagcggggacagctcggagtcgggcgctcaccctggccctgaccctcccgcgtccggcccggctggggc

SEQ ID NO: 204931 - DNA, 455 bp, Homo sapiens
  chr18:25756040-25756495
  hyper
ccggactggagcaggtgcttcctgccgcggaggagcctcttagtagagattaaatgaaaaggctcgctggctctctcccgagggtatgaaaagtacggaaggctccaggcaaaggcgcccccggggcgcatatagggcacaggcagccggacagagaaaggagcagccgcgtaacggaacttctcgcccgggggagatactaggcgtgagaggccagactcgttctacaggcaggcgctgaccggcagagactcctccgggcaagagggccagattttctttccaggtgggacgaacacagaatattgtgagggcaagagaagaagaaaaggaggcaactccagactgggataaagacaataggacagtagagcccttgagcaccgggaggcgcacgggtgcagggtggggtaaggtggaggcaagtcccgtaactaagacaccagagtgagaat

SEQ ID NO: 204932 - DNA, 181 bp, Homo sapiens
  chr18:25757006-25757187
  hyper
cgaagagccggaggaggcggcggcggcggcggcggcggcggaggaggaggaggcagcggcagcaccaacagcggcgcggagaaacggctccaggcagtttccacccccttcccttcccctcccctccccacccccttcttcgctgctctccgctccccgccaatggagagcgagctgatga

SEQ ID NO: 204933 - DNA, 77 bp, Homo sapiens
  chr18:28622129-28622206
  hyper
gagggggcagcccctaaatcccttttcaagtctgtgctttgagctctcagggatcctctccacccaaaggcgccctc

SEQ ID NO: 204934 - DNA, 781 bp, Homo sapiens
  chr18:28681213-28681994
  hyper
gcaaagggtcaagatcccctcccccacccgccacttccccccgcccttctctcagagtaaacaattcccagaaaggcgagcagttccctttttcacccaaggacactcgctctccgtcccggccgcccagcggttcccctttccgtggcctgggcaggcgctgaggcacagggagccgcacgttcccgaggcacagggagccgcacgttcccgaggcacagggagccgcacgttcccggggaaggtgccagaggccagctggacggccccggcgcactcccgccccggcgcactcccgccccggcgcactccgaccccggcgcactcccgccccggcgcaccctgctccccggcgcgtacccaggggccacgattttggctgggcgaaagcggcccgctcccgcctctccttgagtgcgctgattacatctaccggagacaccttcccttcccttggggatcccaactctcaggtcgcgatcctcttcctatctgccctcccccacccccgccaactccattttctagccacccagaggccccttcaccccagcttttcccgccacccccacctatccccgttcccctagttttcctctgcaccctaggcgatcgcccccttccccggagcggtggccgcggctacactcaccgcgagggtcagcaggagcagccggcagagggctccgttccaggagccggaggggcgggctgcctccatggagagggctcggggcaggtcgcgggccgagcgtcgggccggggtaggagggctccgcgg

SEQ ID NO: 204935 - DNA, 217 bp, Homo sapiens
  chr18:28682029-28682246
  hyper
ctgctcaggaggagcgcgaggcggaggaggtggggcgcgcggagaggtgcttttcttagcttctctgaagcgcctgcctctcatccaaggggcttttcctttggcggagggaggggctccagacgcgtccaaaagacaccgatcggcccctccttgttgtctatttaagacttaagacttcatttctctaagaaagccacgggtgggaactccctct

SEQ ID NO: 204936 - DNA, 57 bp, Homo sapiens
  chr18:28682286-28682343
  hyper
cggacgccacctataaggcccatctcccccaccacgccccggtgtccgctccgccag

SEQ ID NO: 204937 - DNA, 358 bp, Homo sapiens
  chr18:29077773-29078131
  hyper
cgcgctacccaggtcgagccccgccaggaggctccctcctcccgccattctccagagagtagggggtcgggaaggagagaacggcggggcggggcctgccacccacagtccccaacccaaggacgtcacggtcccaggtgcgagtgcgagcgggcgggagtccaccccgcgcctccctcctctgctgaactccccacctctgtaaaagcggcccgggccggcccccggctccattttctcgcggcggccacacctggagccgcgcctttgggttgggctgggctgggccgcgcaaccgccacgggaagacagccctcggggcggggagggagagggtggccgggccggggggaggccg

SEQ ID NO: 204938 - DNA, 418 bp, Homo sapiens
  chr18:29078255-29078673
  hyper
cctggtaagtgccgcaagcgggacaggggagccaccgccggggagggcgtcggtaggcgaggtctagacctcgcgaccagacttgcccgccgcccttgtgcgcgttacctgcccggcgctccttcctgctgcccgaggggggaaaagggccgggcaggctgcggcgagatccgacctggggcttcggaaaatcctcttggctggagccaggagagtaagttgcgacctatcgaagttgtgttttccttcccgcgtcacccaggccccagcgcccttttctgtggtgtgtgggtgtagtgagccctggggcggggaacaccattgctgggggtcggaggctttgttgagagtctctgggacgagaaacgtggaggcaatagggaacaacctcgcgcttcttccacgttccttaaatttc

SEQ ID NO: 204939 - DNA, 36 bp, Homo sapiens
  chr18:29265160-29265196
  hyper
gcctggccgcaagggcggcagcggcattaccgccgc

SEQ ID NO: 204940 - DNA, 170 bp, Homo sapiens
  chr18:29598282-29598452
  hyper
gatgacagagtagcgatagcaccgtcttaggagacgcccaatcataggtcataggtcatttttgcagcttattgtgatgacaacagtggaggatggtcttccacttcaccttaaaagcggctgttctctgattatcattaagcatggccacgcccgcacttaacttctga

SEQ ID NO: 204941 - DNA, 52 bp, Homo sapiens
  chr18:29599824-29599876
  hyper
taaaactcacagttggtgcaaagccgtggtcgtttctaagaagaatttaaaa

SEQ ID NO: 204942 - DNA, 1283 bp, Homo sapiens
  chr18:30050221-30051504
  hyper
ggagacggctgtcctcgcccgtctgccccgcgccccagctgggactcaccgttgtccaggcgcgcgatctggggcagccggtaagtgctgaccaggaggtcgagcggcacggccaccgagctccacttcacatccttgaggctgcagcccagcgagggcgccgggtccatcttccccgaagcctcctgtcccgcgctcccccgccgccgccaccggcaccacccgcgcctcggcggccgccgctgctcgcgctcgcggtctggggcgcgcgggaggcgccgggcagctccggccgcgggcagccgggggggcgcggcgactggggcggcccggagggagggggccggcgcccggctcagctgccgctgcggggcatggctggggcgccccgcgtgccctcacgcccggagaagactcagagcagccgcgcggctgcgggcggcggcggcggcccgggtggctgcggcggctcccgctccgcctcctcctctggccctgggtctgcagctgcggcggccgcccgctcgcctcctcctcctcttacccctccttccctccgcctcgagcgtgtgaggaggagccgcgggtctgagaaacgccatagcagcgctcccagcactgactaatcaacaaggtgcgagcaacgcctgcgcagctctgggagacaccgcctccgcctcccaggcgccgcccgctccgcccccagctcggcctccgcctcccgcagctcccgcggcccggcaggctcgcgtcagctccccggccggggccgccagcgcccgcggctcggcgcgctccgcaagctttagctctcgctcccccgtccgaccactcgggcgccctgcagtctcgccgggtgctgctgcgcgccccggctccttccccgcccaggcccgtccccggagcccgggaattgccgagcgagctcaggtatcgctccctgagtcgtggtgtcgggcaccgtccgcctccactcccatcctggcaatgcggtggctaaatacaaggcacaaaagatacctttagtggcgctccctcttgcttcccggtgacccagactttggtcagaagagtaccacagcccaacggggctgcggacggcaggcgtggagcacgccttggcgtttcccctcaaccctactcctctaccatcggagctggaaatgactcccaacagtctcagctttggctactagataagataaaaagggcaaagcaccgaaaagcggaaaggtggtgggtgatgagtacccacatacaggaaggtggccattcggtctagg

SEQ ID NO: 204943 - DNA, 166 bp, Homo sapiens
  chr18:30349896-30350062
  hyper
cctcgaagttgagcagcagcacatcctccaccaggtacttgttggccagcttcttggtctcctccaggccgtgcagcgcggcgatcttgcacacctgcttgtagttctgcaccgagatctggtcgttgaggaactgcacgcagagcttggtgacctgggggatgtg

SEQ ID NO: 204944 - DNA, 216 bp, Homo sapiens
  chr18:30352304-30352520
  hyper
cccaaagctctggcttgcctgaaacatcttacagagtctctctccctttaagaggacccggtcatacctctctctagctctctccgcttcgttgtctccccccgccccatcttttcctattccccttccttcttgttcttctcccttgcctttcctcctcatctgcttatttcttgcaataggagttttttctttatgagcgtttgccatacaact

SEQ ID NO: 204945 - DNA, 86 bp, Homo sapiens
  chr18:31020238-31020324
  hyper
cccccggcagtggggactgggggactgggggactgggggactgggggactgggggactgggggactggggacaggggttggaggac

SEQ ID NO: 204946 - DNA, 220 bp, Homo sapiens
  chr18:31157630-31157850
  hyper
acggtatggcatcgcgtggatccacggtgacggctctttggtcctgcattgtttgagatgctgtaggtggttcaacattgtgttaagttgcacgtacattattagttctgtatccgaagacactggctctgtaccctttcaacaaggctctgggagttcccccagccaagcagagacagggttaaggcagtccaacagaggagagtagtgcggtgtgtgt

SEQ ID NO: 204947 - DNA, 146 bp, Homo sapiens
  chr18:31157947-31158093
  hyper
cggcctgagcgggacagcgggaagcgggtggaacggcctgcacggagtgggcagcgccccaggaatttgggggctgagttggagggagaggggtctcgcgagggtttcagggcgtggctggagtagggggcgcgcggcgagtgtgc

SEQ ID NO: 204948 - DNA, 331 bp, Homo sapiens
  chr18:31158158-31158489
  hyper
cgcgtcgccattccccgtgacgtcagagtgtattgttgtgagcggggccgagcggagcatccccggagctgtcaccgcagcggccgcggcggtggcgcagcgcgagccccgcacgagcgagcccggccggcgccgcccccgcccctggcccgggccccgctgctgccgccgcccccgcccccggcccgcccgccgcgcgccgccgccgccgccgtcgcgcgcccccacccactccaccccaccccctcgctccatccctcccacccgccgccgccgccgccgccgccgccgccgccgccgccgccaccgcccgcgcgcctccccccgcgga

SEQ ID NO: 204949 - DNA, 97 bp, Homo sapiens
  chr18:31159050-31159147
  hyper
aactctgtgcacagtctgtgtgtatgttcggcgtttgtgagttcaaacattttacacgtgcatgcatggtgtgtgtccgacacggacttgtggggcg

SEQ ID NO: 204950 - DNA, 294 bp, Homo sapiens
  chr18:31802381-31802675
  hyper
atcgaggcattcgggctgccccgtgcctcccgggcagcgatctaacgataaaacctgacagtgtcctggggaaaaccccacatccaccgctagcgctacattcgggctttatgccaataaggagacactgtagactatcgatcagactcgtctgctctcagagcgtgcggccgggcttccagcctggcctttaggcgcggtggcggcggtgggacacgcgccaggcgcccagagaaggacatgggacaatggcccagcccgaggacgccagacgccgccgcccgacccggggaa

SEQ ID NO: 204951 - DNA, 200 bp, Homo sapiens
  chr18:31803102-31803302
  hyper
gctggacgatccgttcgtattttttacgggtcaccgtcttggtcttgcctgagtccccgtaagtcctgaggcaccagtcctggaactggcggtacatgtcgcgctcgctctccatgttccccgcgctcggccgctggccggatgctcccagcgcacttcgcacctgttcaccctaggctcatgaaaaatgcagccccggc

SEQ ID NO: 204952 - DNA, 272 bp, Homo sapiens
  chr18:31804502-31804774
  hyper
ctctttattctactctcacccgaggcccgcgcccgtcccggggagcggctctgccaggaaaacggcccgaccagtgcccggcgcctgggctgcgtccgagcccaccttcttccctcgtcgtcgtctcccagactaaatcccggaaagggaaagcgggatgtttgcgcccaccgcgctgtagctggtcctgacacttgcaaaatggtcagtggctcctgctcggccaggctgagtgtgtgcgtgtgtgtgagcaagggagcgagggtgtgcgg

SEQ ID NO: 204953 - DNA, 102 bp, Homo sapiens; identical to SEQ ID NO: 11723
  chr18:32074337-32074439
  hyper

SEQ ID NO: 204954 - DNA, 1227 bp, Homo sapiens
  chr18:32556605-32557832
  hyper
ccagttggtgtgcaagcccccgtttgcaggtaattaattcacagtgtggcggcgccttttcaagccccctctgcaagccgcgccggcctcctccctctcgagcggggtcaaaccacttagtttatttcacccgctggcactttcttccctgtcacgaattcagcctggcttcctttggcctgagacagcgtcttcaggcgggtcggctcggacctgcccagtggggcgcccacctgcacccgcacccgcacccgcacccgcgggaaggggcggcgctggccggactctctcgggtggactcccggagcggcggcggcggcggcggtggcagactgcgagtcacgtgcgacagaggaggcggagcacggcggccgggtgggtggagaaaacaaagcccccagctgtcagcagaggaaggaggcgacagcgccggagcaggtgagtcaagtgcatttaaagcggtaccgccctggcgcaccccgacaccccctgcactgaagcagtccctcccaggccaggggctggctgcgcctcctcctgccgctgaggtctgcagcccgcggggctcggagcaaccggaaccgggggtccagagtctagcaagaagttgtgcaagggtcggctaggcggtctccgggtgtgcaccccgccgctctcccgcgggccacatctctggttcggtgccccagctctgtgcaccccaggaaagtggagggagggagttggggctgccacgctggcagaagcgaagtggactggttctgaggggtgaggctggggctgtccagggtaggaacacggcgttggtgaaggaggggggctcgcgactgcgcgaccgcggcgcacgaccctccaggctctagctggggcgccggcactgagagagctgggggctctggcaggggctgcgcgcttgggggcagatcaggaagtgcagcgcgctggcgctcgcgcgcttgggagcatcccctggaccccgggcacttccccttcggcagccaccactctcccactccgacgccggccaccatccgcgctcccgggactcaggagccgggtgggtgcaaaaggaagcgggttgttattctgcgcccaagcatctcttctgcagggagccccgggagcgcagggcgagggctactcagcgacttcgcactcggcttagtgggaaattcttcggtctacccttagaagggctatgcggaagccagaaatcccacaaagagc

SEQ ID NO: 204955 - DNA, 45 bp, Homo sapiens
  chr18:32557883-32557928
  hyper
ataaagctgattttcagaccccaaaagggctagtgggtttggtca

SEQ ID NO: 204956 - DNA, 466 bp, Homo sapiens
  chr18:32558003-32558469
  hyper
atcaggagaagcctttgtcttaacccccaagcccctcctgctagtcctcgctgggtcagtagcgctgggagtaattaatattacgaacattagcctttccttcacctccgcaccagccaacactgctgtcccctccctgattgtcttctctatcacttgttcacatctccttttccaaaaaaagaagaacaaaaggaaaatagtgtagacccgctaggcaggaagaggtcactaaaaatactatcgtgctgtcaatgtagaatgaagggttaagcgctcaaacccgcgcccgcgcgcaccgaaacggaagaacttccttgattagcatagtatcgaccctggggccgcgctgcgaggcggaggttcggtcccagctggggtgaagtgtgcagaccggttgcgattgtggtcagacgcagcacctacttctaatctgaggacccgcgatttacacttttgctgaata

SEQ ID NO: 204957 - DNA, 556 bp, Homo sapiens
  chr18:33766769-33767325
  hyper
ttaatagagagggcccggccacacccacgtgcgggaagtgcggggcgggatgcagggttggggaggcaagggcaggaagtagggcccaggacgcggttgggagggcggggaagctcagctcacttggatcccagctgcagggcccgctccgggggaagcccccgagcttcccggttccgaaagtgtgcagccactgagaatttattagcctcgtggatccctaatctttccccttttctaccctttggtcagccgcattctaacaaacggcaagcacacgccccgctgggtagcagcaacccgagaacgcccccacccccgcccccgccagacgccggttcccgcttgagagggtgagggtcccgagacccctgcgaggaggagggtcgcggggttccaggatgccgatgccaagcaggaaagatcacctcgttgcttcttccaccggcctctccgcgagacatagctaaacttgaacttggcattccaagggtctggaaacatcttcgtgggacccatcgagaggttgtttaaagactggcacccgctcccgcgc

SEQ ID NO: 204958 - DNA, 170 bp, Homo sapiens
  chr18:33877513-33877683
  hyper
gcactttcccggctgcggtccggtcgttcggggcagcccggccgggggtagaggacccggaggaggggaggagccggagggagaggggaaggagggggcccgccggccccgcccccgccccgccccccgcggccggagcccgggctgcagcccggcgcgcctgagcctgc

SEQ ID NO: 204959 - DNA, 119 bp, Homo sapiens
  chr18:33877754-33877873
  hyper
ccccgctaaccccggggcccgcgcccccgcggcagggatgcatcatggccacgctggcttgccgggtgcagttcttggacgacacggaccctttcaacagcaccaacttccccgagccc

SEQ ID NO: 204960 - DNA, 59 bp, Homo sapiens
  chr18:35145926-35145985
  hyper
ttttttttttttttttttttttttttacattgaacagacaggatctctgtcctttccgt

SEQ ID NO: 204961 - DNA, 411 bp, Homo sapiens
  chr18:35146241-35146652
  hyper
gaggcgctgagattccgggcccggcggccgcggggagcgggtgtccgtgaggagccgggcagccggcctcctctctttgccttttgggggttctttttgtaatagcagcaggtgcaactttttgtattttaaaaatagtgatttttattttcgtgtgggtatgtaggggggctttatccaccaagctatgctctattagggcgccaggcgggcgaagcaaaggcagggatggcgggcggggcggcggcggaggtggaatgggcgcttttttcttccatctggctttatttatttatttagactagaaaagcgagccggcttggagggagtccgcccggggatccgagcgcgcattcatcagtgtcgagagaaaaaaagctacataaatatatattatgtggataaatctat

SEQ ID NO: 204962 - DNA, 200 bp, Homo sapiens
  chr18:35147249-35147449
  hyper
cctgccgtggggaccgggggtcgagccgcccggtccggaccccgccggactccccgccaggcccactggggctggcatctcggctgcgcgggaaagggagtggcaggcgcggagccgggagcagggtccgagcggccccgcctgtaggggtgaatactggtggtgaacttggctggggtagcagattttcacgttaatga

SEQ ID NO: 204963 - DNA, 68 bp, Homo sapiens
  chr18:39172188-39172256
  hyper
tgtcttgaaaaaaaaaaaaaaaaagagaacaactttgggggaaagccctaagacagtgatgtcacaat

SEQ ID NO: 204964 - DNA, 121 bp, Homo sapiens
  chr18:40857271-40857392
  hyper
tgctgaagggaaaactgcctggctggattcacttgcctggatctcaagcgccggctttcggagcgctgaaaacaacagcgcagagcccagggcaccagctcctggaacagggaggaggcaa

SEQ ID NO: 204965 - DNA, 57 bp, Homo sapiens
  chr18:40857422-40857479
  hyper
atttgccacctcggttcctgttttggctcttctgagaagctcgtctccgagactcca

SEQ ID NO: 204966 - DNA, 759 bp, Homo sapiens
  chr18:42258979-42259738
  hyper
aatgcgcccagtttcgagagcctatcacagctcacgtctgggcgcgcagtacccccccgacactgctcctgttgtgtcagatagtggcagtgttgagcccaggaatacgcgcggagcccgcggcgatccccgcggccgctcagtcttcgcggcggactccggcgcgcaggagccactgggccgcaagggcgccggggagcgggaggggcgctgggggcggcaaggggtcccagatcccaggccacgaactgttttccttttccccgggcaagagccccgctcccttcaactgacagaaattcactggggcaggggggcgagtggggagagaggtcgctcagggctcgctactggctgcgcctcccccggctctggtctgggaagcggctctgggccctccgggcgagcagcttgggcgccggcgccccctgcgaggaagatcgcggggtgacggtcggtacccgttcggctgggccgcgctgccgctccgatccacctcccttccgcgcccgcgccctcccccttcctttcactaggagtccgggattcggagagggcgcgggaggcaggcacacgggcccgaccccactccagcgctcaccggggacgcgggcgggcggcgacgggacgcggcgggggcgcggggcgggcgcggccatggagcagcagcggcggcggcggcggcggcggcggcaacactagcgaccgcgggcggacgagcgggcgggcagggccgccgggctcagcggaccgaactgc

SEQ ID NO: 204967 - DNA, 120 bp, Homo sapiens
  chr18:42259821-42259941
  hyper
atcctttgaagaaaagcaaaaaaaaaaaaaaaaaaaaaaaaaaaagcaaaaaaagaaaaagcattgatcggagagacggggatatatatatatatatatatatatatatatatataaaat

SEQ ID NO: 204968 - DNA, 727 bp, Homo sapiens
  chr18:42260083-42260810
  hyper
tgatatctctctccataaatcggtggcgcggcggaggcggcagagtcgggcgggaagcgcggggccggccggggcgcccgccgctcgccgccgcctccgcgcgcccgggggccccggcgccccccgagctagggcggccagctcgcggctcgccgtttgacagatgctcatcgccatggagttgccgcagcagcacctttgggggctcgggcgagcgacgggagccgggatctgagcgagcgccggggccagcggagccggagccgccgggacatgggtgagcacgcgcggcgaccttggcccgggagcccgggcgcccagcctccctccgcgccgcgggcccccgcactcccggaaccgggggcgacgtgtgtgccctgcatgcaaaagttcacgtcgccttgctgggtctttgactttgcacccggcgggaagggggagaccgggccgagggggcgggatgccggtccgggcgaggttgcaggagatgggcgcgattccggcgggccggcgggtgggcggcgatgctggctcaattggagtggctcgttggtggcggcgatggtggaagctttgggctggagggctgggagcttattgagtttcgcctaatctgatctaccccccctccgccccccgccttttgcaccctccctcggtcctgcagccggctggcggggctggcgggtttggcgttggtggagtggactcgggagggggagggggt

SEQ ID NO: 204969 - DNA, 67 bp, Homo sapiens
  chr18:42531892-42531959
  hyper
agacgatccccagcgacagcggcattgggacagacaacaacagcacttctgaccaagcggagaagag

SEQ ID NO: 204970 - DNA, 174 bp, Homo sapiens
  chr18:43678523-43678697
  hyper
gaatctgctaagcagcagttcccaggccccatctggtgctagaggatgagggcctcacccgtctggggtcgcggctgtcttgaggaccagggcgattaatagtgtcggtagtgttagaccgtggtttagcacgagtagcaacagtgaacagctaaaccccgggactggccacca

SEQ ID NO: 204971 - DNA, 59 bp, Homo sapiens
  chr18:43914608-43914667
  hyper
gatcgaaaggagaaagatacatgaccgtgtgtgtgtgtgtgtgtgtgtgtgtgtgtgtg

SEQ ID NO: 204972 - DNA, 69 bp, Homo sapiens
  chr18:44786784-44786853
  hyper
ggttgggccggagacggggctaggggtgcacccttcgtcccggtcagctcttgcggctgcctacgttcc

SEQ ID NO: 204973 - DNA, 42 bp, Homo sapiens
  chr18:45275509-45275551
  hyper
attagaaaagcaataataatcggtgtaattgctctaaattac

SEQ ID NO: 204974 - DNA, 217 bp, Homo sapiens
  chr18:45662366-45662583
  hyper
caggaacagaaaggagcgaccctggagccctcaccacagagcacggcgtgggggacccgacgctggatgctccgcgcggggtgggcggcgggcaggggggcgtgggtgctgggttagggggaagctctctccatcgtccttcccaggccagccccgcggccgctgcgcccgcctgcaggaactcaggcgctccagtgggtgacgccggcccgggcgc

SEQ ID NO: 204975 - DNA, 258 bp, Homo sapiens
  chr18:45663079-45663337
  hyper
gcagagttccagatcctctctcctatttcggaagaggtgcgtggccccacgccccgcaggagctccggcgaggctgggggagttgaacgctttgcggacgccgccacccgcgccagccagagccgccccgcggccacccggccacagggtccccgcagcgcgtagcgagaatgcccgcagcgctctcccggccgcccggaagggcttcctcccccaccccctccccacggcccggccgctgggctccccagagccccg

SEQ ID NO: 204976 - DNA, 540 bp, Homo sapiens
  chr18:45687833-45688373
  hyper
gggtagagggtgctgggcagcaccccagttcgccgggcccacgctcctccagttgcccggcctgttcagactggttcgcccacctttctctccctgccggccccactcgcctgacctctgagaaagcagaatccgggacatgaagcaaccacagccgctccgcccggccacaagcgccccggactccgtgcctgcccgcagcccccttcctgcagcgttcactcggctgcccggcccggcccggcccgggcgccccgccccagccccgccccgctccggaggcccctcctctatccccgccccttcccgggcgccccgccctctccctccactctgcgcccccgcggcctctctctcctcctgcgggagccatcgccctcctcccgggcgcccctccccgcggccgcagcctgtttcccgggcctctcctccgcattctcacatcgctccagctcgacctccccacccgcccgcctccccgggaggccgcggcccggcgcggcaccgcccctgcccacggttacccggttaccgcctgag

SEQ ID NO: 204977 - DNA, 164 bp, Homo sapiens
  chr18:45934609-45934773
  hyper
cgcttttctttggctcctcctggccttcatcctagtaaaaccagacaagcaaccggaaaaacaaagcagcacagcggccagagacaattcgctttcaacggagcaagagacgtacacaccttgagagaagacgcacgcagttcccgtgcgtgtcgctgggaaca

SEQ ID NO: 204978 - DNA, 221 bp, Homo sapiens
  chr18:45934810-45935031
  hyper
caggctcggcttcacttgtccgaggcttggaggaactgtgtgcgtgcgcccatttcccccagcttcccgacttgacagcagcaaggatctttgagtcctgcatgagcgacacctcgggcaaggactgtactctgctcagatctcatcgagaggtgctggatcccagcctttccagctcattttccaattttcaagaaaagacagcgcgaagtgagactgca

SEQ ID NO: 204979 - DNA, 1885 bp, Homo sapiens
  chr18:45935196-45937081
  hyper
ccagccccgcgcgccacttcgctccgggccgcggtgccagccaggaggcgcggcgcccgctcgctggctcgctctccgctggctctcccctccctccttccctccctccctcctcccgcctcctccgttgcatggctgccgcacggagcccctgaatagccaccgcagccccccgcctcctgcccaccgcgcggagggcgcccctgctccagccggcgccccaaggcgcgcggaccgccggcctcctagcaacggcccccgcaatcgctttccggcgcagcccaagcaaagccacccgcccgccgccccgcgacctcccgaactgcctcggctgccgaggtgctgtggagatcgcgaccccggcagccggcgcccgagcccggcgcgcgaagccgctcacctccgcgcgccgccggccctgcgcgcctcccgcacttggctccgggacgcagtcctggcgtcctccttcgccgccggtgtccgccggtccctgcgcgcccgagcctcgccggccgcgccgctgtcagagtctcgtggcggggctgcgccggcgggtatggagctgagcggcggcagcgggcgagcgggcagctcctccctccccgcgccgcgcctccgccctccccgcgccccgcctcccgcgccgcggctgtcagccccgcgccccgcgccccgcgcccgcgccgccggctcggggggcgcacagggctaaagggcccggatgtgtgcggtcgcctgtcgctcgcgcccgccccctccccgccgcgcggcacatgcacttgctgcgccgcagcccccgcccggctccgctaatttctattttgacagtaactgtggcgagtgggcggcgcggcggggggcgcccgggactggcggaggctgcgggcgggagtcaggacccgacgcggaggcggagtgggggggccgggcaccgccaccaaccgctcggggctccgcgtcttttctctttctttccttttttctctctgcctcctccaggatttaaagggacagccccggcagaggcgagggggccaggcggccgccgtttctccggtctcctgacgccctctgcggcccggccggacccgcccgcacccccagcgcaggcttgggaccgccgggtatttttaggtccacacccgacccggggcagcggtgcggcagagatgggctctgccgacccggggcagcggtgcggcagagatgggctctgccgccccggcgcacggctatttttacagagtccgatgggggaggaaataaaacaactcggcaactgcttttctacccgaaagtcgggagcaaggagtgggggcgagaagttaagtttcccaaatgctctcggcactccagcgagcgcaccaagacgcctagccagcacctgaaaccgcaagcttgccgcaccccggggcgccgaatctcagcgggcaatcgcgctcggcggcgctgcggcccggagtccccacccctctggagccttgggccccgcactccgcaccccacacgccggggagcagccgctggccgcccgtcactccccgggtcggcctggaaggcggccttccgaagcgtccaatcaccgcgcaacaatgccaacgggcgggcccggggagggcttgtccccgccccgtcccgccgggccccgccccctcggagtctgtcggggcaggagaatctcgctgggacgccgagtgctcagcggtgctggaagccacgaagggccagtgcgaggggaggaggaagggtcctggccctggagagggcgtgagcgttctcgggcgaggcgacacttgggcagatgttccctccagctacgggccggggaaactcgagctggctttgcctcctacctttttgcagtccacccctctgcgctccagac

SEQ ID NO: 204980 - DNA, 76 bp, Homo sapiens
  chr18:45937111-45937187
  hyper
tacatcggaggcagcaccctcgcacgtcagcgggtcctctccggggctcctccctcagaagcgggaaagtttgtcg

SEQ ID NO: 204981 - DNA, 273 bp, Homo sapiens
  chr18:46065116-46065389
  hyper
tgtaagcctggactgcgcctaagcccccagttctcccaccgcagaggcccccacccagggctgcgccagcgccgtggggtcgctgggcggcgggttttggcgtcgctagactgggctgtcttggcagctaaggcgacatcccgagcgtcctggggccaccctgctctccagggcccgccatcctggaaaagaaaggcgaactacattacccagcaggcctccagccgccctctttcctttcaagtctttgcacgtggccggaggggagggcgg

SEQ ID NO: 204982 - DNA, 420 bp, Homo sapiens
  chr18:46065981-46066401
  hyper
ctccggcgccaaggggggctcttgggggacgcacggctggagcccggctcgctttggagctgcgcggtgtagccgctgtcatgtgccgggttccgacctgggaggaggaaaagagcgagcgcgattcctctcccttttgttttgaagcccgcatttgctgcatcgagcagttggtttagtatcagccaaacttgcagctgttcagaccgcgctccgccgaggtagggagcccgtctcggggtggcgtttgggggccgggggctgcggcactcggggctgcgggagggaccccgagagtgtgtcgccacgccgcccctcccttccccggtgactgattgtgtctgtggcagcgggcgtgtgtgagtgtgcgcgcccgtccccgcgggctcggggatgtctgtggatggctgtcgtctagac

SEQ ID NO: 204983 - DNA, 480 bp, Homo sapiens
  chr18:46066641-46067121
  hyper
tgggtggcgagtgacccgagaggccgtggggtgggctccggctcgggttcatcaggacgacgagcaggtaactgtcccgggcgccggtcatgggggagggcgggcgggggggcgatggcttgggctgcggcgaaggtctggggcctcggagggccgcgtgccggtgcctggatgtggccggagggggcgtccgggacaccgcgcgcctgagccgagtgtttctctattgatggtaaaagacaatcgggaggggggtggtccgagcccgttatctgggcggcgttggctctgtttggttccgcggagttttcagggttggggctggggggtgtgagcaccgcggggtgtgcggcgtgtagaggggagggctgactggcggcgccgcgtgcgtctccaccccgaggagtgaggcgtcgcctcccccgcccggctgtttgtgtgtacacacggctccggtgtgtgtggggggcggggaccgca

SEQ ID NO: 204984 - DNA, 480 bp, Homo sapiens
  chr18:46067301-46067781
  hyper
gtgcaggagtcccaggtccgctgtgcggccggagtcacacagcccctccctccgcgtccgcgacgccccgtgacccggcagactgggggtccacccggcggcgcggggggttggtttggctgcgccgcccccagtccacgctggggtgaccccgcaccgaggcgttctatgggtgtgcgtgcccgcgctcgccgccgctgccttcgcagaccggggagagagtcagcgactgccaaccgcagccccggctcttcagtctggggacagtgggagcccaagcccagcgcgccccagcccggcccaggccgccgcccgcccggcgctgtgtctctgcggcccgaggattatcccccagtccaggggcccgcgcgaccaaggaggaagccgctggagccgccggctcggccgcggctagagcctccgtagggcgaaagtgacacagcgcgagagagcgccgccgctgctggagccagggccgag

SEQ ID NO: 204985 - DNA, 144 bp, Homo sapiens
  chr18:46476808-46476952
  hyper
cgaggagaaaagtcgtttgcctgctaaggagcgaacatgacctccgcacaccatgaagaagtcgggcgccgagttggggcagcaggcgcaggcgacagcagcagcagcaggggcccgggcaggagcggcggcggcccgaggggc

SEQ ID NO: 204986 - DNA, 104 bp, Homo sapiens
  chr18:46501913-46502017
  hyper
gcaccgggatcccgccgccaccccggcgcgcacggaggcagggttgggggaaacacgattcctggggagattggaggaggcgatgccgccgaggctgcggggga

SEQ ID NO: 204987 - DNA, 80 bp, Homo sapiens
  chr18:47087067-47087147
  hyper
taatgaggcgaggtcggaacaggatctgctggctccggctcggtttcctcgcacaggtctctccagctggatcctcgacg

SEQ ID NO: 204988 - DNA, 357 bp, Homo sapiens
  chr18:47087704-47088061
  hyper
ttcccaacatccctaagccgccgatacattatcacccacgtattgcggacgagagaaccgcctcggagaagctggctggctcgcttggagttttgcagctagtggcggagcgagcattccgagcaggtactgtgcgatcctccagcgccggccgcagctcacagccccttagctccgccgggttattgtgcggccgcgccttctgcacctgttgcggccctcgctaggcgggaagggagggagaagaggaggacaaaggggatgaccaggtggctctcccccgacggactcccggcccagggagcggatagaccactcccagagagagtgtggctttgagccttggagaggatgctc

SEQ ID NO: 204989 - DNA, 41 bp, Homo sapiens
  chr18:47088502-47088543
  hyper
cctgccaccgcccgggctccgtgccgccaagttttcatttt

SEQ ID NO: 204990 - DNA, 215 bp, Homo sapiens
  chr18:47339391-47339606
  hyper
atttctgcaggcctctccatcgattcacccggggagccctgaccaccgaggccgagcggcgggctcctgtgcgcagctgccccgcagcaggcgcccgcggcctatggcgccgccccattttttctaatacttggactcgaactagtggggtcactgttaggcgaagaaaggaatgacctccaaggtcacatgcaagcaaactttggtctcaacta

SEQ ID NO: 204991 - DNA, 400 bp, Homo sapiens
  chr18:47339758-47340158
  hyper
gcggcggccggaagcggaggcctggcctggggagggcaggaccccgaggggcgaggagaggaggagggggctgcgctcacctcggagcagagccatggcggctgctgggtcgtcggcggcgcgggtctgtggtgtgggggacgctgagcggccgctcgcaatcacccagatttcaagagcgtgggtggcgccccgagagccacgcccctgccctttcacctacttcctggggctccttggcggggtcccagcgtaagatggtcctaccccacgcgtagcgctgcccgcctcaccccagcccgagggagcccaggggacggggctcggatagaccacaacgcgccttgagagcggactctttcctcacatcctcatttttagattttctccgtttccaaac

SEQ ID NO: 204992 - DNA, 592 bp, Homo sapiens
  chr18:47720908-47721500
  hyper
cctctaggagccgggtggccggtcagtgcgggcgttcccggaaccgccaaactttctccgccaaccgaagttagggactccgaggacagtgacgaggaggacaccgcggaggggggtctcccgtcacctcccgcctccagtagccgagggagaaggcgaccctgagtactaggtggccccgagcgcgccaccccggccccggggcgcctccctcgcggccgcgctcacctggctgtagagctcgcccaccgacatggcccgggccgggcggggctcgggccccggctcctggctgccccgcggctctcagtccgcggctggcccgcctggcgccatgttcccgggctggcctggagtttctcgatcttctcgctcttctccgacctgccccgccggcttcccgcaggcgccgcggccggctcgctcccggcggcgcgacctttactcccgccgcggcggcgcagctacggccggacaggagttgcgagcgccgggggaggaggccgcgccgcaccactcccctcccaggtgtggggaggaggcgagggccggcgaggagggaggacccgctcgcgtcagagcggacggcccg

SEQ ID NO: 204993 - DNA, 228 bp, Homo sapiens
  chr18:48494204-48494432
  hyper
ctggtcctcagggcgatagctaccacctgacacacagcgacctgggaaagagggaaactcaatcactgccctcgcggcccggggggagcccggaagcgcgcccagagccaggtcccgcgcgggcgccaccgagcgcggacctccctcgcatcctagagcggccgcgcgggacccggccggcggcgcacttccgcccgggcgcattgtagccccgcggacagctgggcc

SEQ ID NO: 204994 - DNA, 268 bp, Homo sapiens
  chr18:48723995-48724263
  hyper
aaccagcccccggcgcgcgcggcggcggcggctacgccccacgccgctctccgaatgaagccggcgcgctctgattgggtgcttttaatctctgggagcccgccttctcctcccgcagccttccaactcctttccccagccccaccccccaccctccttcgggccccgcccctcccctccccagagctctctgattgggtgaccgggaccagccagttcccgaagcctactccttccgtcctctccccgcccacctccctctcattcc

SEQ ID NO: 204995 - DNA, 70 bp, Homo sapiens
  chr18:49866290-49866360
  hyper
cgctcaggatgttcgcaggctccattgacaaaagtgacttcccacgctttgcccacagagggcatccctg

SEQ ID NO: 204996 - DNA, 384 bp, Homo sapiens
  chr18:49866421-49866805
  hyper
tccctaagccatagtctgtctgcccccacccccttcccgtggaatctttgcctgatccagttcgtttccctccggtctccacattttcccttccagccctccacttctccggatcaatgtgtagtacggttccaactcccagctcgcacaccgctggcggacaccccagtaacaagtgagagcgctccaccccgcagtcccccccgcctctcctccctgggtcccctcggctctcggaagaaaaaccaacagcatctccagctctcgcgcggaattgtctcttcaactttacccaaccgacgacaaggaaccagcctcaaccttttaatgcacagcccggccacaggattgccttccatctcctcttggtccctcctggatgtg

SEQ ID NO: 204997 - DNA, 204 bp, Homo sapiens
  chr18:49868095-49868299
  hyper
gctggcggcttcgacggccaaaagaatagaaaagagcaaaatgactcatgataaggtccacttgttttgcgggacctcaccgcaagtgtagatgggcactggggtacagtgagcggtcctggcaaagaaggagaggagagcggctggatgagcattcagagagcccttcggaaacgacctttttccaaatccaaaggaaaaaca

SEQ ID NO: 204998 - DNA, 183 bp, Homo sapiens
  chr18:49868356-49868539
  hyper
aacagggaatggcacatcaatcgcggccaagcccccagcctccccggagtccgcagctccggctttctcttctctgctaagtgctgcatggccaagggttgcgaacgcgagcagaaaatgcgcctctcactgtcgcgagggattcagacagtcaagcgccaaggcagcccgaggctccccaaa

SEQ ID NO: 204999 - DNA, 267 bp, Homo sapiens
  chr18:52495626-52495893
  hyper
cagacacgccttcttctcacacaaaccttacccagccccgccgccgcggcggactccgagggtggtgccaccagccctgccactcgcagtcctgacgggcaggggctgcggaccgcccggccttggacccatccggagccacaggttggaggagataagtagctgtccccgtgctcatcgccctgtggagcagatcctgtctccttgctgacggtggagcccgggagttccagggcttgggaaggggaaggaaacctctctgaaatc

SEQ ID NO: 205000 - DNA, 65 bp, Homo sapiens
  chr18:52496020-52496085
  hyper
ctctgtgtgtgtgtgtgtgcatgtgtgagtgcgtgtgcaccttcgatcgcggtttccagcagaaa

SEQ ID NO: 205001 - DNA, 152 bp, Homo sapiens
  chr18:52989589-52989741
  hyper
ctcccagcattgtacgcagctgcctgagaactcgactcggagaaaggggagggaaaggggagggaagaaaaaaaaaaaaaaaaaaaaaaaaacaccacgtctctgacctcgctcaaaaggagagagggggcagtgttttctgactgcttggt

SEQ ID NO: 205002 - DNA, 427 bp, Homo sapiens
  chr18:53256017-53256444
  hyper
atactttctttcccctcccttttaagtcacagaatagtataactgcaaacttcgaaaaaaaaaaagggcaatttttgggggtggatgttgttttgtttttgcacttgagttcctaggcacgctaagtccctgttcgccagcactgtaagtttttaattcaacatttaccattataggccctgcatgctcttaaaacatactttttcacatcactttttaggataaaatttaagcttcataattctatcgtttcgtaataacaagcgtgctttatccggtatatgcaacataagctattttaacgtgtgtttgaaaaaaaaaacacacattctacaaatcctggtattgctagatgtgcgagtacatacacaaaatgcatgcacacactttttcccattggcaattatttaataggttgtcccttttg

SEQ ID NO: 205003 - DNA, 74 bp, Homo sapiens
  chr18:53257322-53257396
  hyper
acacaaaagtgtagtttcggcacaaatttacaaattaaactccacagacttccgcagggaagtgagataccccc

SEQ ID NO: 205004 - DNA, 40 bp, Homo sapiens
  chr18:53257761-53257801
  hyper
tgtaaagcaaataacgcccactttacgaattttatagtgg

SEQ ID NO: 205005 - DNA, 58 bp, Homo sapiens
  chr18:53446769-53446827
  hyper
aagcacccacttcacgacttaacgtttcaggaatatgaattctatgttcagaaaattt

SEQ ID NO: 205006 - DNA, 207 bp, Homo sapiens
  chr18:54318601-54318808
  hyper
gcagtggcggcggcggcggcaccggcaccttgcagtatcactggggagacggcggctgtatagcgcttgccgccccacggattatcccagcaggatctacgcaccccgcatcctccgtagttccgccctatccttgtcctccttggctggggcgcccaccggcggtctgataggctacatcgcggcatgagatgaagctgtgacagg

SEQ ID NO: 205007 - DNA, 86 bp, Homo sapiens
  chr18:55021430-55021516
  hyper
tgcagatggggttccctagttttctttttttctctcgggtgtgtgtgggagcagagggtggaccaaatgagaggggctccgggacg

SEQ ID NO: 205008 - DNA, 104 bp, Homo sapiens
  chr18:55102066-55102170
  hyper
accatgcattagaatacattagcgcctgcattttaaaaggctaaactattggctcccagctagggactctcggtaagtggcttgttagtgacgagtgtttgtct

SEQ ID NO: 205009 - DNA, 207 bp, Homo sapiens
  chr18:55103130-55103337
  hyper
gctggccagccccagcccccaccacgcgggccgcggcgccgctggctcgctgcggggccctccgccgcctccaaccgcgcaccaggagctgggcacggcggcagcggcggcagcggcggcgtcgcgctcggccatggtcaccagcatggcctcgatcctggacggcggcgactaccggcccgagctctccatcccgctgcaccacgc

SEQ ID NO: 205010 - DNA, 69 bp, Homo sapiens
  chr18:55104739-55104808
  hyper
tgaaggcacagccttgcccccgcggggaaccggcggccaggatacaacagcgctcctggagcccatctc

SEQ ID NO: 205011 - DNA, 279 bp, Homo sapiens
  chr18:55105185-55105464
  hyper
gcccgcgggaggggacgggtagaggcgcgggttacattgttctggagccggctcggctctttgtgcctcctctagcggccaagctgcgaggtacagccctctattgttctaggagcacagaaacctcctgtgtgggcggcgggtgcgcgagctagagggaaagatgcagtagttactgcgactggcacgcagttgcgcgcttttgtgcgcacggaccccgcgcggtgtgcgtggcgactgcgctgcccctaggagcaagccacgggcccagaggggcaa

SEQ ID NO: 205012 - DNA, 221 bp, Homo sapiens
  chr18:55470113-55470334
  hyper
ccgccgcatcccggatctccaaagtgcggcgggagcggccagggaacctgcaggacaccgccgggccaaggggcttgggaaggtctgggggcccccggcgccgcacccctgcttacctggcgttcgctgggccccggctggggcatccgcctggtgcgcgccgctcggagcgctcgctgcgcacctggccgctgccgccgcccgcccggccccagccctgg

SEQ ID NO: 205013 - DNA, 249 bp, Homo sapiens
  chr18:55470592-55470841
  hyper
ggctggggctggaggcgggctcggccttctcccctccctttttccctccctagggcggagaggggctggactgcaagccccggggcggcccgaggcggcccaggtccagctcctgccccacgccctccgtgcgtcctggagtcaggtgggcacccctttcagtcttccgagcccagcctacgagcccttgcctcgcccagcctgagacccagttgctgcggctgctcttagctccccgggggccgcact

SEQ ID NO: 205014 - DNA, 249 bp, Homo sapiens
  chr18:55470954-55471203
  hyper
cccgggacctgagctccctcggtaaggggagctgtgtcctcttgatgccaagtcatgtttggggaccggtcaccgaatgcgcgtcaaagttcgccgcgtggagggtgaagaaagaggctgcgcctcaagacttccagaaacgtatcctgtgattgcagccagcaggctttctgccgagtccaaacgctatcgagtttttttgggtttggagtcaaaaggagttaaggtgcggcccgtgaaccacgcggt

SEQ ID NO: 205015 - DNA, 213 bp, Homo sapiens
  chr18:55710765-55710978
  hyper
atatttcacgttgcggctcacaaatgaactgctttttattcaaagaaccatgctgtctgttttcgcgtgggtgggtgtgtaaccggggcgggcgctatgttggttttgttccctgcaaggttgacacaggcaatggcgacttgcggccacactggggcagcctctcctcggctggcagccgggccgggcggctcgctcccgggagctgacaat

SEQ ID NO: 205016 - DNA, 45 bp, Homo sapiens
  chr18:56887424-56887469
  hyper
tccgaggtccgggtcaccagtctctgctcttcccagcctctccgg

SEQ ID NO: 205017 - DNA, 202 bp, Homo sapiens
  chr18:56887502-56887704
  hyper
cggccgtgagctcccgctggtcctgctggcgctggtcctctgcctggcgccccgggggcgagcggtcccgctgcctgcgggcggagggaccgtgctgaccaagatgtacccgcgcggcaaccactgggcggtgggtgagtgtcctggccgcgggagccgcgcgcttgtcctcctctggatcagccagccggaggggacctgt

SEQ ID NO: 205018 - DNA, 60 bp, Homo sapiens
  chr18:56934840-56934900
  hyper
ggacgggggttgtggggtggacgccccccccccccccgtgccaggacctgttggcgggca

SEQ ID NO: 205019 - DNA, 100 bp, Homo sapiens
  chr18:56976025-56976125
  hyper
cgtgtctgtcccccgcagcctctttttcgccacatgggccatcgaagggtccctgtacccagagcctcgtcagtgcggggacgcgggcgggagggtaacg

SEQ ID NO: 205020 - DNA, 154 bp, Homo sapiens
  chr18:57069712-57069866
  hyper
gcccccaagcggttcggtgttgaagccaaatctcagtctgtgttgtgacactgccattgctgccgcctgcagtaccactgccgcatctgactcacattctagaaggaaggtaggtttgtcccaatgaatgcagcttggggcagctgccttgtgg

SEQ ID NO: 205021 - DNA, 182 bp, Homo sapiens
  chr18:57069918-57070100
  hyper
atctgccgtgtcagcttggaactgcaggagacgctagaggggaagacggagaaaggaagggaaacaaagattgatatgaccatatggtctgcatattgagcttgctgtcttttacatttgtgacttagaggaacctgtatcaagaaaatgtcattattcttattccacggttgaggagactg

SEQ ID NO: 205022 - DNA, 152 bp, Homo sapiens
  chr18:57363523-57363675
  hyper
cgaaagcagccacccgtgtttgctatgccccactgtttacacccaaaatccaatccaatctccttcacagacttccacacaagtatttcagggagcggcaaccatcctcaggatctcagggcacacaccctagacgcaaagtcagttgctca

SEQ ID NO: 205023 - DNA, 92 bp, Homo sapiens
  chr18:59560076-59560168
  hyper
gtggaaatggtacacgtttaggaggcaagaggctgacaggcaggaaacacaattgagactgagctttcttcagcctgcagtgaaatacatgc

SEQ ID NO: 205024 - DNA, 444 bp, Homo sapiens
  chr18:59560572-59561016
  hyper
cgtttgcccctgtccgccacctcatcaagtcaccgccacctcatcaagtcaccgtcacctcatcaagtcaccgtcactctgctttggcgatttctctactctctccagacccaggcagcgctccccaagccatgccccgaccccaggcgggattggggaccgccgcttcccgagcagcgccccacgagtccagctggctttgtcctgccgctgtccttccaggagcaagcgccccaggcgcgtgtgtctgcacaaaagacccccaacatctggcccttcacagcgctctctaatcccgggaggggccctggggcaacttctagggctggagaaggcgcgagacaaggggaccgggagaagatgagccggggtgtgtgcgggccgggggcgcaactggggcgggcgcgcgcgcacgtgcacacccaggggcgcgcgcggcgcggg

SEQ ID NO: 205025 - DNA, 164 bp, Homo sapiens
  chr18:59992238-59992402
  hyper
caggagccagtgccgtgaagggcaacccagggctggtctcccgccaacctgtctgcagcccgagcacctgggccaggggcggagaccggaccaaggaggcaccgggcgcggcgaacacccccggggcccctccccgagcggggccccgcgtcccaccgcaaacc

SEQ ID NO: 205026 - DNA, 39 bp, Homo sapiens
  chr18:59992691-59992730
  hyper
ggcccgacgcctcctcgggagccccgggaagggccgggg

SEQ ID NO: 205027 - DNA, 205 bp, Homo sapiens
  chr18:60189547-60189752
  hyper
cggccggccgggtcccgctgcgcacctcccggccgcgcgtccccacctgcgcacggtgcctccagcctgggcgtgggcgcggcccgggatcgcggcgccggggccgcaaaccggggccgcaaaccagcgccgccacccgcgtccggacccagtcccctgtgagcgacacctggcaaagtttcacaaggtgggagacagcccaccg

SEQ ID NO: 205028 - DNA, 1224 bp, Homo sapiens
  chr18:60190472-60191696
  hyper
ccagcgaccccgccggccggccaccgcccccctcgccggccgagacccgcccccggccccggccctcccccggcggcatggaggggccccgctcctgacggccgcgccgccgcctcggcccgtgctccacctcgcggcccctcccgcccgcccccgctcgcatgtctgcgccgccctagccgaggatgctgaggatgaagctgccgctgaagccaacgcaccccgcggagccgccgcccgaggcggaggagcccgaggcggacgcgcggccgggcgcgaaggcgccttcgcgccgccgccgcgactgccgccccccgccgccgccgccgccgcccgcgggcccgtcgcggggccctctgccgccgccgccgccgccccggggactcgggccgcctgttgctggtggagcggcggcgggggcgggtatgccgggcggcggcggggggccctcggcggcgctgcgcgagcaggagcgggtatacgagtggttcgggctggtgctgggctcggcgcagcgcctggagttcatgtgcgggctgctggacctgtgcaacccgctggagctgcgcttccttggctcgtgcctggaggacctggcgcgcaaggactaccactacctgcgcgactcggaggccaaggccaacggcctctcggacccggggccgctggccgacttccgagagcccgcggtgcgctcgcgcctcatcgtctacctggcgctgctgggctcggagaaccgggaggccgctggccgtctgcaccgcctgctaccccaggtggactcggtgctcaaaagcctgcgcgcggcccggggcgagggctcgcggggcggcgcggaggacgagcgcggcgaggacggcgacggcgagcaggacgccgagaaggacggctcaggcccggaaggcggcattgtggagccccgggtcggcggcgggcttggctccagggcccaggaggaactgctgctgctcttcaccatggcctcgctgcacccggctttctccttccaccagcgggtcaccctgagggaacacttggagaggctccgcgccgcgctccgcgggggccccgaggacgcggaggtggaggtagagccgtgcaagtttgccggccccagggcccaggtaaggcgcacggagcctccctggactcgcggtgcgatcgctgccccggcggcctccccggcctcgctctcggacgccccttgcccgagccccagcccgg

SEQ ID NO: 205029 - DNA, 97 bp, Homo sapiens
  chr18:60194122-60194219
  hyper
caggctttgggctagcgccggagacttccaggcggactcgagaaccacgtggatgctgcgctgggccgtactgggccgtggcgataaccctggtaaa

SEQ ID NO: 205030 - DNA, 1435 bp, Homo sapiens
  chr18:60382939-60384374
  hyper
ggtacagcgactccccgagctcggcagggaggaccgagcttcggctccggcggccgccgctgcggcagcagcagcagcagcggcggccgcggcggctctggcggcggcggccgggggcggccggagtccggagcccgcgctgaccccggcggccccgagcggcgggaacggcagcggcagcggggcgcgggaagaggccccaggcgaggcgccgccggggccgctgccgggcagagcggggggtgccgggcgcaggaggcggcgcggggcgccccagcccattgccggcggggctgcccccgtacccggggccggcggcggcgccaactccctcctgctgaggagagggcggctgaagaggaatctgtccgcggccgccgcggccgcctcctcgtcgtcgtcgtcctcggccgctgctgcctcgcactcccccggcgctgccggcctccccgcctcctgctcggcctcggcgtcgctgtgcacccggagcctggacaggaagacgctgcttctgaagcaccggcagacgctgcagctgcagccgtcggaccgggactgggtgaggcaccagctccagcgcggctgcgtgcacgtcttcgaccgccacatggcctcgacctacctgcgcccggtgctctgcacactggacaccacggccggcgaggtggccgcccgcctgctgcagctgggccacaaaggcggcggcgtggtgaaggtgctgggccaggggcccggagccgccgccgcccgggagcccgctgaaccgccccccgaggccggcccccggctggcgcccccggagccgcgggactcggaggtaccgcccgcgaggagcgcgccgggtgccttcggggggcctccgcgcgcgccccccgccgacctacccctgcccgtcggcggcccgggcgggtggtcgcgccgcgccagcccagcgccctcggactccagccccggcgagccgttcgttgggggccctgtctcttcgccccgcgccccacggcctgtggtctccgacaccgagagcttcagtctgagtcccagcgccgagagcgtgtctgaccggttggacccctacagcagcggcggcggctcctcgtcgtcgtcggaagagctcgaggccgacgcagcctcggccccgacgggggtcccgggccagccccgccgtcccggccaccccgcgcagcccctcccgcttccccagacggcttcctcgcctcagccgcagcagaaagccccgagggccattgacagcccgggcggggccgtccgcgaggggtcgtgcgaggagaaggcagcggcagccgtggccccgggaggcctccagtctacccccgggaggagcggggtgaccgcggagaaggcgcctccgccgcccccgccgcccaccctgtacgtgcagctccacggagagaccacccggcgcttggaggcggag

SEQ ID NO: 205031 - DNA, 66 bp, Homo sapiens
  chr18:60985432-60985498
  hyper
accccaccgaactcaaagaaggccacaatcctcccccagttcaccccgtccctgaagagctcctcc

SEQ ID NO: 205032 - DNA, 203 bp, Homo sapiens
  chr18:60986723-60986926
  hyper
gtgatgttttccccttctcggcaatttacacgcgcgcacacacgcgcgggcacaggcatgaatctctatccacgggaccgcttcacgcctccccaggagagagacaggggagaggggacgatgaaggagccggggacggaggcaggaatcctcttctgattaaactccgaacagcaaatgcattttccgaaaagctgctggat

SEQ ID NO: 205033 - DNA, 140 bp, Homo sapiens
  chr18:60987971-60988111
  hyper
tctcgcctggaccttttctagccgtgtatgtgggagtgtgtgtgtcgcctggaccctttctagccgtgtatgagagtgtgtacacgcgcctacacacacacacgttgtgttaccggcgctcggccgccgggggaagaccc

SEQ ID NO: 205034 - DNA, 338 bp, Homo sapiens
  chr18:63417398-63417736
  hyper
atcatacactttggaagtttagcattagagagcccagcaggggagaaaattgtctgcaagttaaaaaaaaaaaaaaaaaaaaagtagaactagggcagtccgaggagattgaaagggcaaaactatcaagcaagaaaactgtaagttctgattagttttatgactttgccttcatgcctcaggagctcaactgatcacggctttcacgacaggctaaggtgggtgttggaggggcagcttgaaaataccctcaaaactctcctccagctccgtgctttcagatgcaaatgcctcacggagagatggatgggctgcagcccctcctactttcacccctc

SEQ ID NO: 205035 - DNA, 360 bp, Homo sapiens
  chr18:63418418-63418778
  hyper
gcgccgctgggcagatgtgcgcccttgctgtgcgcctttggaagcaggactaatcagtgagcggagagcgggcggggatgtccgtgtggagtttcccttggcgtccccaagttactgcgtgttgcagtgagatgtggctctgcaaggcaggacaggcttgtggacggaggcgggggcgtttggcccggaaagccggtgttgacagacaccaggtgcgacacgaggagtagtagttgagggtaagagcaaatcccggcactctccaggtgcagcggcaaacatgggcaggctggagcactctcctcaaagaggaccacaagcaggctcctccctcaacctcggactgatgggggcacaact

SEQ ID NO: 205036 - DNA, 83 bp, Homo sapiens
  chr18:67069292-67069375
  hyper
acgggaggcagcgggacaggaggggctgtcacctgggcgggagcagcctagacttgggacgcgagagagaggatggagggatg

SEQ ID NO: 205037 - DNA, 353 bp, Homo sapiens
  chr18:67956670-67957023
  hyper
cccctcggcctcttcggccgcggcgcgccggcctgggccgccgcctttgttgcccgcagctcgccggggagaggccggggctccgcgaggcctgggcagcggcgcggggcctgcgcggctctgcgccccggccgggtccctcctcggacctccgcgggctcgggctcgggctcggggtcggggcgcggcgaggccgcaggcgcgagggcgggcctggggcgcggcgctgggactcggggacgcccccgccccaccgcgaggtcgcgccggcgctggtggaggtgcaggccggggctgctctgcggctgaaggtgccgccggccggctgcgcactcacccgggtgtagggaccg

SEQ ID NO: 205038 - DNA, 151 bp, Homo sapiens
  chr18:70210267-70210418
  hyper
attcctctcttaggcgaaggaccgattccaacgacggaatcccaggcttgggttattctccagctctggtttccagaccacggggattctctctttctcagcggggcggcagcccctgcaggtttctgcgaacttacgcgcccgtctgcac

SEQ ID NO: 205039 - DNA, 52 bp, Homo sapiens
  chr18:70210508-70210560
  hyper
cacagcctcccattaactcttccagtattctttctaagaacagagaagttgg

SEQ ID NO: 205040 - DNA, 86 bp, Homo sapiens
  chr18:70211724-70211810
  hyper
cccgggcctccctgccgcaggctgcggaccggcggactccgacagaagacgggggagtcctggccgcaaggctgaggtttgctgat

SEQ ID NO: 205041 - DNA, 207 bp, Homo sapiens
  chr18:72124520-72124727
  hyper
caccgccgcccgcgccccgagttccgcactcgcgtagctgctccgcggctcaggcccgctcggcggggagggggaacgggggaggggccgcgcgagggttggggcaggccccgcgcctggggcggaggtgcggggagggcgtccagcagcagcaacaccccgcgcgccccgagcacccactgggggtccactcgccgcatcccctgc

SEQ ID NO: 205042 - DNA, 209 bp, Homo sapiens
  chr18:72921091-72921300
  hyper
tctgctcggctagggcgggcgggtccgcccctcctccggccggcgccctccccctggctccccccttccccgcgtcgcccgctcccgctccccccgcctccccggcgccggcgcagcccccgcgaacccgggcgcaccaccccgggtgtcccggcctggggaccgctgccgccccggccgctgctcctttaatctttttgttttggttt

SEQ ID NO: 205043 - DNA, 360 bp, Homo sapiens
  chr18:74203935-74204295
  hyper
gttagatttctgcagaagaggaggacgaaggtcgcccacggaccctcgggtgacctcggtgcggcctggtggccgggcacacccgcgcatggacgaggtccctcccaggggtctccctgcaggggtctccggggaggtagtgggcacgtgggtccttaacctctccattgcatcatccccatcccggtgggtacagaagcgcagcaaccccgcggtgctcccggaagacaccgcgtctccaacatttacacggagatgctgctcggctcaggtcgggtccgtacgcttcccgaggtgcgtactacgcgagccacacacatcactaccgatattcctgagaaagtcggtgccacagtaagt

SEQ ID NO: 205044 - DNA, 147 bp, Homo sapiens
  chr18:74207202-74207349
  hyper
cgaccgcgccagctgcgcccgggcgcgggggacgcgcgagggcgcgcggggcccgccacgcgcccggccccctcctcgcgccgcccgcgcgcgccccggacgcgtccgccccgcgggggccccggcgcgagccgggctcggggggct

SEQ ID NO: 205045 - DNA, 129 bp, Homo sapiens
  chr18:74843247-74843376
  hyper
acttgagggtgaccgtccttaaactgtcccccggagcttcgccagataaaatgtccaaaacacacactggagttccctgacgtttccttcctctgaaaaactctctttccaggcggggcgttctgtggt

SEQ ID NO: 205046 - DNA, 216 bp, Homo sapiens
  chr18:77156454-77156670
  hyper
gagaacgaggtcggccgggtctgtgcgcccagggaggggcgcggcgcggaccgggaacggcgtcccccagctcccagcagcccggttccgagcgcgccttctgccaataggtgtctcctctgccccagcgctgagggcgcgaggcgaggccgccgcgggtcccgccgaggaagcggctcgcaggccggcgatttggggacgggcgaggctgggccg

SEQ ID NO: 205047 - DNA, 142 bp, Homo sapiens
  chr18:77160022-77160164
  hyper
ctggtgccgctcgtggggtcccgacgcccctacccccgggtccggaggagcctgcgccgggccgggacccccagggcacaagaggccgggggacccctgcggtcgcgcgcgcgcgagggggcgggggcgggggggacacgag

SEQ ID NO: 205048 - DNA, 254 bp, Homo sapiens
  chr18:77193428-77193682
  hyper
gcattgacacaggcttctccatctccatgtcaggacgtgcactcgccgatgaagtgtccacccaagatggcgacgggtgagcacgggcacgtgtggcccgggcgaggtctgtgtggtgctgaacgcctcctctgctctgttcccttccagcccgaccctgcccgccctggactggcagctgccgtcccactcaggcccgtatgagcttcggattgaggtgcagcccaagtcccaccaccgagcccactacgaga

SEQ ID NO: 205049 - DNA, 158 bp, Homo sapiens
  chr18:77710773-77710931
  hyper
ggtggagaagccgtcggcgttctgcgtcctgcgaatgtcccgatactgcgggacgtagggcaccacccctccgaagaccatggccgcggccgcgccccaggacaccagctggtgcagtggcaccaggagccagtccaggccctcggcctccatcgcag

SEQ ID NO: 205050 - DNA, 80 bp, Homo sapiens
  chr18:77724414-77724494
  hyper
ccggtggcgcccacgggccctcttgagtaaggcggctccgcccaggccgtcccggggcctcggctcggctcggctcggga

SEQ ID NO: 205051 - DNA, 31 bp, Homo sapiens
  chr18:77867028-77867059
  hyper
tttaggcaggggccccggggggcctgtggga

SEQ ID NO: 205052 - DNA, 251 bp, Homo sapiens
  chr18:78004742-78004993
  hyper
catcccacggcccgggcccccagagcccccccacggccccgaatccgagcagcccctggccctcaactcgccccggaaaggccgccctcccctccaatgtgtggcgcgccccgatcgcctctcactcgtggaacaaaagagcagctcccgcggagcgggtccagagtctgcccggactgtccgatggccctcggccctctgagcgccgcggctgccgggctttgtgtccgcgcggggggcgggaaggacgg

SEQ ID NO: 205053 - DNA, 33 bp, Homo sapiens
  chr18:78005051-78005084
  hyper
tcgccggcgcctgtcgcctccacgccgccccag

SEQ ID NO: 205054 - DNA, 405 bp, Homo sapiens
  chr18:78005162-78005567
  hyper
gctcttgacttccactgcgctgcaatcgtagaatcgcaaggtctgagacttgtgaaaacttcggttcatggtttcggccccggtcagcctcgccgtcgccctcgctcctcaggggccgcagaaagactcccgggggcggcgcccccaggccccggccccggccccggcccgcgctcgcttggccggcgggctgctcccggtgctgcgggcccgagctgggctggccgcgcgcctcagggactccaggggccgcgcgcgggaggagcgcgggggacgccggcgcgcgccgccccacctcccggcgcccgcgcccgcgccccgccccgcccccgagccccggaggacccgcccatatccccgcccacagccccgccccgcgctccggaggacccgccacaccacgcc

SEQ ID NO: 205055 - DNA, 248 bp, Homo sapiens
  chr19:290717-290965
  hyper
acccgaagcctgggacccagccttcatccccagtgtctcccccgcccgagccagcagggcggctgggcctccccgcacgtgcacgggttcgaatcccgccgacgcaccgggtgccaggaccgagggtcagccctctccgcgcgcagcgggagcgcccaccccaggggcggaggcgcggacgtcctgccggggtaacccgcggccgcccccacctcccgggcccgcgtgactcacctcccaggccaggc

SEQ ID NO: 205056 - DNA, 145 bp, Homo sapiens
  chr19:291052-291197
  hyper
ctcgcgacccccatccccctgggcctgggacgcggggacccccgagcctgggagggcgcgcgcagtgcggggcgcggagggaggtctggtcctcacgcgaggtccccgcctccagggtcctcggagggacgagggcgcgcagcct

SEQ ID NO: 205057 - DNA, 178 bp, Homo sapiens
  chr19:460121-460299
  hyper
aaacaccccttcccgcacccccaccgcaggccagcgtctcgggccccgtctgtcattcgtgaacagctgtccggggggctccggtggcagagacgccccggccgctcgccgctctcggcctcgcccgcccagtccgagtggggggcggtgcacctgcgcatgcgcgcccctcccccgc

SEQ ID NO: 205058 - DNA, 153 bp, Homo sapiens
  chr19:460522-460675
  hyper
actcacccgcacgacgtaggagaccccgggccccaggaccctggcgtcggggtgtagccagccgtgcgcgggtttgtggatgaagctgcccttccggatccactcggcggcggcggcggcgtccccggaccccgccgccccccgcccgccccg

SEQ ID NO: 205059 - DNA, 378 bp, Homo sapiens
  chr19:460726-461104
  hyper
gggcgcggcgcagcggggctcgcaggcgcccaggacggcggccgccagcgccgggacgccccccgggcccgccggctcgggttgggggtccgcgccccccgaggccccagccgcccgcgccgccgccgggccgcggcccaggaagccgcccggggccgcgaacttccactgcggcattcggggcagcaacgcgcagaaggtggtgggcgcctcgggctcggggggcgcggggggcgccgggggcgcgcgcccgcccggaccctgcgtcatggccgcggccgcccgacggagcccgaccgggcgctgcgcctggcgcggaggaagccctcccgctccgcccgctccctcccgccccccggcccggtgatgtcatccgcc

SEQ ID NO: 205060 - DNA, 444 bp, Homo sapiens
  chr19:461344-461788
  hyper
gaaattccacatcccttctttcccctatttcctagtggggaaactgaggccccgggaggcgcggccagggaaaagagaaccccagaccctaaggtcagcccctccctctccgttgttgcagctagaaggtaccttagggtcacccctatttcttagtggggaaactgaggcgcggggaggggaaggggcgcggccgagggctcacagacgaagctcaaacccaggagtgccggctcgggggtggggggggggggcggggctaggagcggagccgggcccctgctctgcggcctgtcccggcctcagtttctccggctgtaactcaggggagcgggctggagggtcgcggcccttcttccctcacttctggggagcccagtcccgcaccagctcatctgagctctgggcctcagcctcccaggccggtcgctccatccccagcct

SEQ ID NO: 205061 - DNA, 158 bp, Homo sapiens
  chr19:461846-462004
  hyper
cagaaaacggggtgtcactgtcaccccgggacccagcctcctggcccgacttggctggagctcccctgcacctgccccgccccaagcagggctgattgccgggaacaaagggaggggccgggacgcgctggcaggtggggagggagggaggggcgagg

SEQ ID NO: 205062 - DNA, 41 bp, Homo sapiens
  chr19:507106-507147
  hyper
ggcaggtccagccccgcgcatgctccgtcaggcttctctgc

SEQ ID NO: 205063 - DNA, 58 bp, Homo sapiens
  chr19:591588-591646
  hyper
gtggggtgtggagggtgcaggtggagggtgtaggtggggcccgccgggctagcgaggc

SEQ ID NO: 205064 - DNA, 408 bp, Homo sapiens
  chr19:603408-603816
  hyper
tcccgcaggctcctcggaggaggcactggctcgaggtgtgggcgcccctcgtcccccaaggaagagtgcccggggctggtcccgcaggtgccccggggaggcaccggcctgaggtgtgggcaccctcgcccccaggttctactgggacttcaccatgctgctgttcatggtgggaaacctcatcatcatcccagtgggcatcaccttcttcaaggatgagaccactgccccgtggatcgtgttcaacgtggtctcggacaccttcttcctcatggacctggtgttgaacttccgcaccggcattgtgatcgaggacaacacggagatcatcctggaccccgagaagatcaagaagaagtatctgcgcacgtggttcgtggtggacttcgtgtcctccatccccgtgga

SEQ ID NO: 205065 - DNA, 173 bp, Homo sapiens
  chr19:603846-604019
  hyper
tgactccgaggtctacaagacggcacgcgccctgcgcatcgtgcgcttcaccaagatcctcagcctcctgcggctgctgcgcctctcacgcctgatccgctacatccatcagtgggaggaggtgaggtggggcgggggcggggccaaggcagcaggggcggggctataatggt

SEQ ID NO: 205066 - DNA, 214 bp, Homo sapiens
  chr19:661720-661934
  hyper
cttctggggggcttggacttctcttacgggtcaaagcgtagcaacagccgggcggctacgtacacagcacagtaaatcctcaatgcctgcagcctcttcccctgggcacagggtggggagtccagacccctccacctcctgcggctgctcccctcaagctggccaagcggctcccgactgagccggctctgccactttcccgctgagccaccac

SEQ ID NO: 205067 - DNA, 167 bp, Homo sapiens
  chr19:813529-813696
  hyper
cagcggcacgtggatggtcatgtggcggcgcgcggggtcgtccagcgagggcgcgctggccctgggcagcgtgtggctgaaggtcaccatgttctccttggccatggggctgcgcggggccagcaggtccacgtccacgctggcgcgcttcaggctgcccagcgagg

SEQ ID NO: 205068 - DNA, 119 bp, Homo sapiens
  chr19:813830-813949
  hyper
gcgggggccggggccgcgggcttctctgcaggtggggcctggaagttgcccaccgcgtggcaggcctgtcggggagaggggtctgggggtgaggcctggggctcagagggctcctcccc

SEQ ID NO: 205069 - DNA, 38 bp, Homo sapiens
  chr19:814391-814429
  hyper
cctgggaacccatgccgacccccatcagaacctgccac

SEQ ID NO: 205070 - DNA, 777 bp, Homo sapiens
  chr19:941804-942581
  hyper
gtgtcaggggtggctgcaagcgtatgtgtgtgtgcacgtcgaggctggagagtgtgtgtccaaaagcgtgcctgcttgggctcgccacgtgtgcgcacgtgtgcccgtgacagacgaccttcctgtgtgcctgagcatttgggagcctcgtgctggaccctgaagcatgaggtcgcggtggggcctattaaccattagacccccggggctgctagagagtggcgctgtctgtcttggtcagcagcgcgcgtcggccgcggggcacagatcagcgcctcccctgcccgccatgggctctggagccagcctagccgatgatggagccccagtggccaccgagctatggacagggccgctgggggtgcacccccaccctctccgaccccgaggagctgccggcagagccctgtccactcttgcctcagtttccctgctggacacaaagggctgaagtccaggtcccttcgatggcccaaattacctgactgtcgatcctgactggggcggtggcgacatggcccccgcagctgcccggcggtggcacccaggggcgtcacccacgagggacgcttgactcaaggtcctctccactggccgccgggagccgggccgggagccgctgcggtgccgacctggtgggtggcacacggggggcgggtgcggaccgcctcttctccgctctgccggctgcacatggccagaggacaattgggggtcacagggttaaacgctgactaatctggccattgaaggcccaagcgccgggatatgcagcct

SEQ ID NO: 205071 - DNA, 204 bp, Homo sapiens
  chr19:942807-943011
  hyper
agcaagtaagaacccgccttccgggaggagccccgtctggattggatggcatcgcccaaaactcacgtccacccagaacctcaagatgggactgcatttggaaatagggtctctgaagatgttagtttcagtgaggtcctgcagcgtacggtggccccaaatcccatgccggtcggttgtcctctaagggggaggtcacacctg

SEQ ID NO: 205072 - DNA, 272 bp, Homo sapiens
  chr19:1173129-1173401
  hyper
cccaggtcagtctggggattggtccctccaggccccacctgccttattcttcgggactctggggtggtgggaagagtgccctacgggggacaggacccaccaggaggcctgcgcttccccttcaccgacacacgctgctcccgggccccactcgggccatctcagcccgctaccctccctcccgcctgtccctggaagccgggtttgaatgcgacccgcactcccacccccaacacgctctgcagactccgcccagacggccccggggtcac

SEQ ID NO: 205073 - DNA, 67 bp, Homo sapiens
  chr19:1260499-1260566
  hyper
tgcagggtggggggcgcgtcccctgcactccaggacccgcccctcgggatgccgacccccaccccag

SEQ ID NO: 205074 - DNA, 242 bp, Homo sapiens
  chr19:1438211-1438453
  hyper
tccgtggaggaagcggctctgcagacctcaggcggcggctgctctaatccctgcagcctgtgttttgccctccagacggcagagggcgcgtgttcgccgccgggaaagcggaagcgcgtgtgcgcgcacggccgagggggcgggacatgccggcagtctcgcgataactgcgcaggcgcggaccaaagcgatctcttctgaggatccggcaagatggtgagtgttgcgatttggcgcgtctc

SEQ ID NO: 205075 - DNA, 133 bp, Homo sapiens
  chr19:1449908-1450041
  hyper
gaatcttggtcctcggggcacccccttccctcgggggggtttcgccccccgcactcacggcccctgagcccgcgcggaggcccgacgccccgcggccgacgccggtccccgccccgggccgccattggctgtt

SEQ ID NO: 205076 - DNA, 118 bp, Homo sapiens
  chr19:1455093-1455211
  hyper
ataaacacacacggcgccgccctctgagcccgcccccgctgacttgctccccaggtgtttcctgctgaatgagattgagaaggaggagaaggagaagctctggtactactctcagctg

SEQ ID NO: 205077 - DNA, 126 bp, Homo sapiens
  chr19:1469945-1470071
  hyper
ggggcccccgccggcggccagctctccctcctcggcagcgacgtggacggtcccagcctcgccaaggctcccatctccgcacccttcgtgcacgagggcctgggggtcgccgtggggggcttcccc

SEQ ID NO: 205078 - DNA, 75 bp, Homo sapiens
  chr19:1470383-1470458
  hyper
ggaagaccttgcctctgtgccgcggaggtccaggaggaaacggggcggccgctaggcctcaagtcccgaccgtgg

SEQ ID NO: 205079 - DNA, 268 bp, Homo sapiens
  chr19:1470675-1470943
  hyper
gggcctttgcggcgcgcaggggcgaagcctgtaatcactgcagccgccggtaattcgctaatgagggctttgcagggattgttttcattctcagccccagctgtgggagtgcgggtgggggtgtggccgagccccggcaggaagccccgcccagacggtgttcagggaacccggagcccaagcgctccggcggagcccaaaagggtgggggtgggaggggcagaggccaacggatccccctgcctgtcgcaccccttggcgggagacg

SEQ ID NO: 205080 - DNA, 264 bp, Homo sapiens
  chr19:1491116-1491380
  hyper
tcccattggtcctagcggggggccgggggcggacaccggcgcggggccggagcatcgcggctcaggctgcgggaaagcggtgcgcgtgcagcggggtgggtgccctggtccgcgggcgagctcgagcagccaaccccgggcgcgtcggggccatggacggcctgaggcagcgcgtggagcacttcctggagcaaaggaacctggtcaccgaagtgctgggggcgctggaggccaagaccggggtggagaagcggtatctggctg

SEQ ID NO: 205081 - DNA, 202 bp, Homo sapiens
  chr19:1491429-1491631
  hyper
catgggcctgggggtcgcagaccggactccttccccggctacggggtccggtccggccggtggagcgcgcgaggtgactgggacctcgaggtccgcccgcagcccttcccttgcccgcgccctgcgaccctgctcccgggccacccctctctagcttccgcccctggccgccccccgacgcctccttccgggcgctgggtgc

SEQ ID NO: 205082 - DNA, 183 bp, Homo sapiens
  chr19:1546217-1546400
  hyper
tgcgcccgtttgtgcgcgggggaagctcgcagccacgagcgaagggacctgtgtctccactttggacaaatctcccgggaatttcccgggggttcagagctccgatgtcggggcggggaggggcagggtgtcatgtgcggcgctggccacacggtggcgacagagaacgtgccgttctggtcc

SEQ ID NO: 205083 - DNA, 375 bp, Homo sapiens
  chr19:1567149-1567524
  hyper
gggtgcccctgcgggcggccgagggcctgggctgcggcgcggctccccggagcctttccgggctggaggcggcccagacaaaggcggcggcggggccggagcgcgcaggggaggagcgcgggctgcgcccaactttctcccgcggcggctgcaggacaaaggcgcaaaggcagcggccgaggccggagcccacgcggggcgtgtccggtgcggggcgtccggcgcgggctgggctgggctcgggcgacccccttccccggggcggacggtgcggggacccccaggacagcaacccccgacgagggccactcaccctggcgacccacgatctcggcgacgtgctcggagctgggcaccgggacgcactcggtcatg

SEQ ID NO: 205084 - DNA, 99 bp, Homo sapiens
  chr19:1567554-1567653
  hyper
ctcatctggtcggccagcagcgtcgggggccccagggccgcggggtggggcgcgaagcccgcgaacacgtcggggggcgacggccggggcggcggcggc

SEQ ID NO: 205085 - DNA, 280 bp, Homo sapiens
  chr19:1748599-1748879
  hyper
cgctgcagccttgctcgggtcccctagcccggcgcctccgcaaaccaacccaccgcgggccgccgagccccgctccgggatccgccggctgcctccatcccagaagagtgcgcagagaattaaatctagatatttacatgtttaatggctaaaggagcctgtcttctggcagggcagggagggcgctcaggtggtttaactcagcgccgggatcccgctcagctgcgggggccgcgaaccccgccgctgggccgacgattgggcccctccggagcgcggc

SEQ ID NO: 205086 - DNA, 59 bp, Homo sapiens
  chr19:1748939-1748998
  hyper
ctgtcagccgagccctggagtggggcgttctccaggcccccaacccctgatccaggccg

SEQ ID NO: 205087 - DNA, 227 bp, Homo sapiens
  chr19:1754950-1755177
  hyper
aagccccgcccgtgcgccccggcagcccgggaccccctatcaggaagctagaccgcgatccgcgccgctgcccgtttgtaccgttgccaaaagggagaaagggattgtgccgcctccccgccccccggtcgccgcttctgcccctttcgggagcgcgtaggggttctctagtccttgttagactgctgggaggctccgagcctctccccaagcagccctcagggaag

SEQ ID NO: 205088 - DNA, 287 bp, Homo sapiens
  chr19:1755227-1755514
  hyper
gctgtgtccccgaacgagctgctgttgtcggctaaggtgccactcccctcctccagagtgggtggagaggggctgttgagcccccagccccgggccacagagctccgagacgttgcggcgggcgcctgcagctcagcagcagaggccgagcccgcgctcatccccccacctgccccagcgcgcgcttctttgtagttcggccccgcgatcgataccccctccctctcccctccggccgctggcaaaggtcacccgagaatggcgggggaggggcggccccggggacc

SEQ ID NO: 205089 - DNA, 69 bp, Homo sapiens
  chr19:1761784-1761853
  hyper
tcagttttccctctgccaagtaggtgctaatgtgagaggggctgagaaaccggcacccctcctgagtcc

SEQ ID NO: 205090 - DNA, 189 bp, Homo sapiens
  chr19:1761983-1762172
  hyper
cgtgcccgggtcacaagtgtagacgcacccggagacacgtgtgtagacgcctccgttcacactgggacgagtgcagactgacccaggacccccatccgccctctggcagtcttgagccagcaactcccctaagtggggtgcggggacatctggaagacgccccatctccccctggacgcagtggctgcg

SEQ ID NO: 205091 - DNA, 68 bp, Homo sapiens
  chr19:1762820-1762888
  hyper
gccgtcctgggtgcgctcagctccagcgcagtgggaggacaagacacgttcctcctcccctcctccac

SEQ ID NO: 205092 - DNA, 343 bp, Homo sapiens
  chr19:1766024-1766367
  hyper
cgcccgtccaaggccccacaagctgatgccggttttcccgcccagaactggaacagctttcctaacggtcacaggtttcttagcttctcacttgggtggggtttggatgtgcaaggctgccgacccccatcgtggttgagcgcccgtgcaggcgccacccacccacccacagcacctcgctcagacttcgccctccaccccgccgggacatttgggaagcctcaggcagccccacgcgggcacacccgatggtggacggaggctggcaccctcagcccgcacgcggccaacgtcaggcgcgcgcagaggcacccacgggcccgccttcaggggcgaggcggat

SEQ ID NO: 205093 - DNA, 88 bp, Homo sapiens
  chr19:1769649-1769737
  hyper
gcacagagggggcatccaggcggcccccctactccaactcacacctctgtcagcggctgtgggggatgggagcaatgacaaagctgct

SEQ ID NO: 205094 - DNA, 312 bp, Homo sapiens
  chr19:1775735-1776047
  hyper
tcaggacgcccagagggcctcgagaaaaaccagggctcactgtgttgtcccctaaagcgggtcaagaagcacatactagaaatataaaccgggtatttaaaaatggaattttaaagaataacccctcctccgtcagatcccctgccccaccgagggaggtagtagaaaacttccttcctccccacccgccccggccccctccccagggacctcagccctttccaaagtcgccaaaaacccacatcaagccggatccttacggtcccccaccctctccaaaaccaaccccacccgctggcaggacggcccctg

SEQ ID NO: 205095 - DNA, 223 bp, Homo sapiens
  chr19:1776743-1776966
  hyper
cctcctccctgaaatccccccactcatcggctgcctcccagggaggaggcggcccccctaccccccttgaaaatgcaaaagacatttctagtgaaatgcccctcccctcccccaggtaaaggctacctcactcaagctcatgtctgtgattggaaaatcacgcctgataccaaagatttctcccaaggatttgtgctggatgacaggattccctggcctggga

SEQ ID NO: 205096 - DNA, 108 bp, Homo sapiens
  chr19:1857456-1857564
  hyper
tctgactcaggctgggcccgggtgagctcaggacagcctcggaaacaggcaggctcagaaaaatggagtccaggaagtcctggaaacctggcccggccccgtctgagc

SEQ ID NO: 205097 - DNA, 119 bp, Homo sapiens
  chr19:1979018-1979137
  hyper
catcccgtaccgcgagcacaagagcctgacgggcacggcgcgctacatgagcatcaacacgcacctgggcaagggtgagctgcgcgcgcgcggcggggggcgggcgcccggaccccgct

SEQ ID NO: 205098 - DNA, 737 bp, Homo sapiens
  chr19:2164936-2165673
  hyper
ttgagtgggcaggattgggctcacccccggagttagtaaattttgtcttcttcatcttggtgaccgttggaaaatgacaggccgggtggaatgttacagaggcaccccaccgggtggttccagaaacccgcgtgcggctcccggggtgcgagtcccggcgtggcccctgaggaggcggggcgcgtgcgtccgcgcttgggaccctctggccacgctccgggctgggcagggcgcgttttcggggaaaagtgaagcaggcgctgtcagcgagcgtgtccggggcgcgagttttggggggcgcgtctgcagggcccggccgggcatccccgcgcgccctgggactcccgcgcgcgctgggcttgtgtcagtttttggaaacgtgctcgctgggggcggggtcaggacgcggagagcgctggggagcccgggctggctcactgccccgggtcggtgcgagtggatgggagagggagcgcagcttccagcctggccgcacgtcccgcgcgcggggctggcggggtagggccctggggctctggcttctctggttgggcagctccgggtgtgcgcctgggcggcctgagccgggatcccgccaggagaggtcctaggacaaaaactgaaagcagaggccgcgcttcagcgccccgaccggtttcctccctcgaaagttcaaactccagaacccttccagcctccacttctctctgttgggctctcatcgttttaggtggtag

SEQ ID NO: 205099 - DNA, 443 bp, Homo sapiens
  chr19:2168903-2169346
  hyper
tgcctggccctgcgtggtatttctagggcaggatggccctgcccttcttctagtgggaagggcacaagtggcattattggttgtttgctcggaaagaaccttcaaaggccacagaacgggaccttccccctggtgactcacaggctgtgggcgggcaggggcggcctccactggccaagggtccggactctctgactctcattaatgagtgagtacatgttccgcctgacagcctggcctggagcccggctgtgggcggcggtgagtgggcagccagcagtgagtagcagccggggcggggtgagctgtccccaccgtgactcagaaggtattttctgctgctgacctctgagcttgagtgtcctgagtaatcccagctcccccggaggcagattaacctttaggcagctttgtgtgagtaaaggagtcgctttaaataggaa

SEQ ID NO: 205100 - DNA, 31 bp, Homo sapiens
  chr19:2302951-2302982
  hyper
cagcggcttccacgcagacgcccgcagcacc

SEQ ID NO: 205101 - DNA, 258 bp, Homo sapiens
  chr19:2328984-2329242
  hyper
gccctccgccgctgcagcgccactcacttcccaccgggtctgaaatttgtgccccctccatcctccggttctgcttctccgtttcggggtctccagttgccgccggggacgcctctctccggctctgtggccttgagcaggcggctgcccacccctctccgagcctcagtttccccttaggcggaacgggcacggtgctaagctaacctcaccctagggggtgcggtgggggaacccagaggcgtcccgcgcgtcccc

SEQ ID NO: 205102 - DNA, 52 bp, Homo sapiens
  chr19:2462945-2462997
  hyper
gcgggagagaaatcccggaccctgggactatgcagcccgtgagggccccagt

SEQ ID NO: 205103 - DNA, 37 bp, Homo sapiens
  chr19:2488411-2488448
  hyper
tggggtagagtgaggggcctcgtgaagagcgctgcgg

SEQ ID NO: 205104 - DNA, 347 bp, Homo sapiens
  chr19:2488689-2489036
  hyper
agcagctcagcaaaagcgtgactcagtttccctcgtccataaaagggaaagccgaatcgccctcccacgtgtcgaggtgaaactagacagtgcactaaggcacttagcaaaacgcgctgccttgagaacccttattacgccttccttccttccacctcaccccctggccagacactctgggggtggagaggggcgctgacccaggccccagacgcccctcccgtccgccctccctagcaggcaggagtcccggctttcccgttccttaaattggataattggagacagaggcgggtgctcgagacggagaaatccccaagtgggcgaaaggcaaggggcctgtccta

SEQ ID NO: 205105 - DNA, 608 bp, Homo sapiens
  chr19:2579151-2579759
  hyper
atgggtgcccccggccgggcaggtccagacgccaaggtctgcacaggggtcacccggacacacctgactcggaccatgtggctaagtttgttttgaaatttcactgccccagcgtaacccagagtccaggccacgcccagcacggctggctcccgtccgggtctctgtgtcctgcagctcagggtggccagggcgggcgggcaggagggcaggcacctggcacccacccagacctgcgccctggccatcaggctgccccgggaagccgggcgaccgggaagatagcagagtcaacagggcgggtgcaggaaagggcgctccccatgcgagcctctgaagccctcggcacacagccctggaggctgggaatccttgagcgttttcctctgaggtctccaagtgtttatggtaacaagaggagggaggagggcgaggggacggccgccgctgggcagcagctccgcctgctggtcaccttcctcggggacatgcaaggacaagctgccgacggaaggggctttggcagaaatgcggggagcaggggacgcacccccacggacaggggcttttctggttgccaaacgtgcagacgacgggcctgacatccc

SEQ ID NO: 205106 - DNA, 217 bp, Homo sapiens
  chr19:2740072-2740289
  hyper
ccattggcctccccgagacccgctggcagaactttccatactattggctgcgaaacctgccactcatatgcgactccacctctcctaccggcacaggaaaggggtttcctcccgctgagcggcgggcgcagccaccaagcggccccggcgggaaacccggattggcgaggaacggttccggcagggttgggtttccagagctgtccaggggcgcctg

SEQ ID NO: 205107 - DNA, 266 bp, Homo sapiens
  chr19:2783367-2783633
  hyper
tgatggaggcgggcgtggaaggaagtgacgcaacgtagaggcgggaaccagctggttgttagggcaactgacctctgcgacctaatggaggccggaaatcgggtctggtttgccctctagagcgggaatgaagcggtgcacggtggaacagtggctgactccagccggtcgccgagctgaccacgtggtgctgggccggccacgtggtgcagccgcgtttggacacctggactccagagcgtcacagctgcgcaatgaatgggagt

SEQ ID NO: 205108 - DNA, 835 bp, Homo sapiens
  chr19:2944614-2945449
  hyper
ccagaaactacccctcgagcccctgaccgcttttgctgtcaccccagactgcccccagccctacccctcggccgctgtgaccacgtccccggggcccaggcgctcgtcgtgcgccgccccgcgcgtccctcagctttctccggctgcgaactcgggcggaagccggttcctgccgccccacctcgccctgggcccgggctcggctcccgcccggcactcaccatgtcccgcccgctcctgggctctccagggttagcgccccgcggtccagcgaccggcgcaggtgagcacgacaggacacctgagccgctcggggtaggcggggaagcgcgcaaggcagaggggaactcggcttaccgtcctcggggtctgattggacagatctcgggaagtggagactctgattggacagtgctgtcgactccgcacccctgattggagaattctccagtccgtccccctagcgcccttgattgggcagggctccgcttcggattaacgtctctgattggacagttccctaggccccgcccctgcctgtcctgattggataattctctcctcagtgacgggctcgtcgagaacacgcgtggctgaccctctagccgggcagccgcggatctgggagaactcactccagtccagggagggcgcggcgtcctcctccctgactgcacggcaactccagactcagtttcccctcggagcggcccctcgtgcggggaggagaggaagggcacggagtcccatggggcggagtcctgcgtgggggcgggacccgcgtgcgtgacgtcaccgtgctgtcccgcgtgggcgcggacgcctggggtccaga

SEQ ID NO: 205109 - DNA, 632 bp, Homo sapiens
  chr19:2950418-2951050
  hyper
cctcctccctggggcgcggtgccaggacttcgccattaaacgagcccgccccctgcactttgaactctgcccccatcctttgacccaaacccccctacgccccggcatcggagtccccttgcttggcctctgccacgaagatacggggccaggtccagcagtacaaggaggagaaaccgctctcacgggaggcgctgcggccactgagggagacggccgccgcgggtcacagacggatgcttccgtttccggttccggggcggctgggagctgaaaagtgggctagtaatgagcttgggattggtggagcctcaaagataggcgggacgacctacgtcgtccaatcgctgagcaggaaaagctagtttccgccgtctgggagataattggcattgttggcagatccgcccctcgagggcaagtctcgggacagaatcgcgctgtgggcgtggcttgtactggatcctccccggggcgtggctaaaacaagaccgaggtcccgggacgaggttgggggcgtggtctttcgcgcaatcctccaacgcccaattaccctgataaacaataaacgctaaaataagtaataaatgctcatttcctccagccaacacattcctcgtgataacatactc

SEQ ID NO: 205110 - DNA, 141 bp, Homo sapiens
  chr19:2977372-2977513
  hyper
cgctattggccggcgccgccagaggcctgccccccccggagcccgaacccacgtgcagctactgcgccttcattgatctgcttcgcggtccaggtggcggctgggtggggcctgggcgggacggggcggggacaaggcggg

SEQ ID NO: 205111 - DNA, 121 bp, Homo sapiens
  chr19:3061487-3061608
  hyper
ggcagtgggggtgcgttttaaggcccgccctagatggggggcagggtgcgccctctaccgccctccaaagcgccgggagggagtgcacatccgaggggggtagaaacgcgccctagggagc

SEQ ID NO: 205112 - DNA, 87 bp, Homo sapiens
  chr19:3094304-3094391
  hyper
gcccctcccattggccgcaccgtctgcccgtcgcgggctgcgctcccagcctgctaggttgtccggcgctgtcgctcggttgcggcg

SEQ ID NO: 205113 - DNA, 174 bp, Homo sapiens
  chr19:3094777-3094951
  hyper
gctgctcggtgagtgcggcccccgggcctgccggctgcgggccctgccctgcctgtgcctgccctgcctgtccgggtcgggccgggaccctccggggtcagccctgcctgtgccgtccgggtcgcgagaccctccggggtcagccctgcctgtgccttccctgcctgtccgggt

SEQ ID NO: 205114 - DNA, 331 bp, Homo sapiens
  chr19:3367271-3367602
  hyper
gtgctccggcggcccggctgggtcccccctcctttgcaagccccccagcaccgtcccggtattttcgctgcatcgattctggattctggattctggattctggagccgccgccgggaggagcgggaggcccggcgctccgggtctggcccgggcactgcggcgctgcggacgccctcgccagcccggcacctgccccgtcccctccccctccccctccccctcccgtagcctctcacccctggccgcactcccagactgccccggggccgagccttgtgcaatggccgagggggtgtgtggggagggggcggctccccccggggactcctt

SEQ ID NO: 205115 - DNA, 148 bp, Homo sapiens
  chr19:3506425-3506573
  hyper
ggagaggcggggtcggcgggagccagcgagccacgggagcgagccaggtgaggcggccggggtcggggacccgccccccgggccctaggcggcggagcttgactgcgaccccccaaaaccgggacggcggggcgggctgcgaccccca

SEQ ID NO: 205116 - DNA, 76 bp, Homo sapiens
  chr19:3721511-3721587
  hyper
gggttattcctgccgggtcttgctggcagccttgtcgggccgggctctggccgcggccgccggccccctctcggct

SEQ ID NO: 205117 - DNA, 66 bp, Homo sapiens
  chr19:3785491-3785557
  hyper
ccctgcctcccccatctccccgaccgctagtggctgggaagtgggcggtgctggggggtgagtctc

SEQ ID NO: 205118 - DNA, 178 bp, Homo sapiens
  chr19:3970722-3970900
  hyper
gccccttctcgcccgcaatctccgcacaagcccctaggcagaccccagtggctccctttgcagaacctccccccgcccccaaggccttgcccatccctaaggctccgctccagcatccctggggccgctacgcccctcgcacgcccggccgagccctttccccggcccggtcacccag

SEQ ID NO: 205119 - DNA, 37 bp, Homo sapiens
  chr19:4053797-4053834
  hyper
gtaggtgacgtgcatgtgtctgtgcgtgtacgtgtct

SEQ ID NO: 205120 - DNA, 265 bp, Homo sapiens
  chr19:4054040-4054305
  hyper
agcttgccggcgccctggatgaccttctcgcagatggggcacttctggaaggccttggctcggatcttcttctccaccttctgcgaccaggccgggtagacgtcgccgtcgtgggcgccgctgaagtacttcaggtagtagtccatgacgcccttgtcgtcggcccgcgactcctcgtcgctgtcccccgccgcggcccccgcccggcccaccgatgacatcatctgctgcagcagcgtgctggccgccagcccgtccacgtcgg

SEQ ID NO: 205121 - DNA, 55 bp, Homo sapiens
  chr19:4054380-4054435
  hyper
acagcgaggcggcctcctcctctccgccgcggccgtagtggccgttctgcgtggc

SEQ ID NO: 205122 - DNA, 170 bp, Homo sapiens
  chr19:4054471-4054641
  hyper
ggtgggggcgtcctcatcccgctctggccacagacccgggttgctgtcgccctcgtccccgtcccccgtcgggggccgctcggccggggggcccggcccatagaagtctaagccgttgcagtcgcccgcggccacggcggccacagcggcggccacggcctccttggtgg

SEQ ID NO: 205123 - DNA, 541 bp, Homo sapiens
  chr19:4054917-4055458
  hyper
ccacgttggctgtgctgacggtgagcgtggccgtgtaggcgaagtccatgagcgcggtgagcgcctcggcgctgacgaagtcgatctcgtacacgttctgctggtccaccacggcgcccgacgtgaacagcttcttgaagtactggctgcaggcggccagcaccgagcggtgcgtggggaactcgcggccctccaccaggatcaccacgtcgcacagcaggccctgcgtccgctgctcgttcagcccactcaggatgtcgctgctgtggtcggggaacgggatcccgatggggccgtccacgccgccggccatcttccgcgccgagacctgcagcagtggggaaggagagggcgctcgtgagtgggggtgcgggggttcctgtgcccactgacaagggcccgaggcccttgagaagcagcgttccaccctgctcccccagcctcacattcccacctgcacgtgaaggcggtcagatgtcgcgcctttccagccccagcttccccagctgtgcaccaaagcgatacatgccctgcctccagc

SEQ ID NO: 205124 - DNA, 97 bp, Homo sapiens
  chr19:4064872-4064969
  hyper
cgccgactgggtgtccgggcccgggtggacagcaacctcccgccgcggcccaccgtgcgcccccgccagccagcccgggcagcgcctcccagaaccc

SEQ ID NO: 205125 - DNA, 212 bp, Homo sapiens; identical to SEQ ID NO: 130504
  chr19:4182605-4182817
  hyper

SEQ ID NO: 205126 - DNA, 34 bp, Homo sapiens
  chr19:4304684-4304718
  hyper
ttggggacccagcgtgcgcggggcccgcgggccg

SEQ ID NO: 205127 - DNA, 148 bp, Homo sapiens
  chr19:4432845-4432993
  hyper
aagtcagccctggcaacacacgtgcccggccaaggctcacttctgggcaggtgcgtaggtgctaccctgtcttacacccgccctcatgaggccacctatccccgaagctggccatgccccaagcctcggtggcaatgagcttgtgtat

SEQ ID NO: 205128 - DNA, 185 bp, Homo sapiens
  chr19:4471582-4471767
  hyper
ctaagagctcccccggagcctgccccttcctctaagtcccgcctcctcgagctggcaatcgcccgtccctgttttatgttgtatcgctcttctttcgatagccaatggccgacgttcccgctgaagccccgcctcttgtgatggccaatgcctgctccctaccttgaggcgcttctcttgtggta

SEQ ID NO: 205129 - DNA, 150 bp, Homo sapiens
  chr19:4472045-4472195
  hyper
cgttatccaatcccgttaactgctgtgctccaacctctgttcttattggtcgcctcccttctctgtcccctgcacgtggtcctgatcgacggctttgccggcccgtgacggccggagggctgaacttccgttggcgcaacgcccaataag

SEQ ID NO: 205130 - DNA, 177 bp, Homo sapiens
  chr19:4639830-4640007
  hyper
ttgccccccttggcgtggggctctgctctgggaccagcacccccatcccccatgtggactctagtggactctgccccctttaactgtagggccgcaggtgctcaggccagattccagaaccctgagggcattccaggcggtgggcagctgggccagccgtgcggaggtgggcatgac

SEQ ID NO: 205131 - DNA, 77 bp, Homo sapiens
  chr19:4769517-4769594
  hyper
gaatcggaggaaccgagaacgaagaggggtgggggaacggggaaagagagaggaaaatcaagttttcttcagcacga

SEQ ID NO: 205132 - DNA, 136 bp, Homo sapiens
  chr19:5293673-5293809
  hyper
gttcccctcccagtctgggtgggaccggaggcacggtgatgggggcggggggcgtcccctcttccccctcttagaccagagggtaggggagaggtgcgggcgcagaggcttccctcccgctgggggtccaggggaa

SEQ ID NO: 205133 - DNA, 51 bp, Homo sapiens
  chr19:5338695-5338746
  hyper
cagggggaggggggcacaaaggaagggaccctgggagggggaggggactta

SEQ ID NO: 205134 - DNA, 300 bp, Homo sapiens
  chr19:5339972-5340272
  hyper
cgccgaggccgcagaagggtggggcaatgcccgagtgccggaggggcgacctcccataaggcaacgacagggcccggagtgttccaggggagacggcgtagactagggggtctccaggggagggagacccggagagggaaggcggcgggcgcagcagccctggagccaccccgcctggagccacccgtcccggctcctctccgctccggggcgcccgcatgccccccatcccccggcacagcgccccctgcctccaggacccgcccggggacccgggccgggcgccgccggggccggcac

SEQ ID NO: 205135 - DNA, 453 bp, Homo sapiens
  chr19:5608066-5608519
  hyper
ctgagctatgccatccgccctggaggctctgcatacttcagtcaagtagctgagtggtgtcctgcccctctggccttcctacgtccttctgtttttgtccagagctgagccccacaggtaaggccaactctgtcactcacgcctcagctgaatgtcacttcttcagcgagctctgctgaagctgcctcccaaatctaaacacggcctccccaacacactgacggcgtgctctaatattccttaatacgctcatcacaacacatcatatgtgtttatttcttaaatggtctttttcccgccagactaaaaaatctgtgatgacagtgaccacgtatgtttacctctgcttaatcatcagtgtccgagtgaagtcaacaaagtaactgaataaacaggttattcatggctataagaatttcctaagcccttgctgaacacacagactgttcagag

SEQ ID NO: 205136 - DNA, 103 bp, Homo sapiens
  chr19:5691108-5691211
  hyper
cagactccaggtgcgtcctgccagtgttgcggagactgggacttagggaggatgggagctgctccgggcgcggcgaaaagcgctaggcgttaataccttggtt

SEQ ID NO: 205137 - DNA, 141 bp, Homo sapiens
  chr19:5804852-5804993
  hyper
ctcccgaaggggagccgtcggagtccccggggccgggggagaaagccgtctaaagggggctctgtggttggttcccgcgcctctgccacctgcgctcctccggtcccctccggcgggggcggggagggcggggagggccgg

SEQ ID NO: 205138 - DNA, 110 bp, Homo sapiens
  chr19:5828315-5828425
  hyper
gataaagtgtggcaactcgagctggctggtgattcatcctcggcgaggggctcgcgtgtgggccacgtcgccgtctccaccgggaaagcggggaccagtggggggggccc

SEQ ID NO: 205139 - DNA, 302 bp, Homo sapiens
  chr19:5961935-5962237
  hyper
cactaccaagagcgcgtggttccccttgttttccatggccagtgcttactcctgcacagacaccatctccttcaggaagctcccactgtgagaggcgtgcctgccctgctgcactccctcccgagcaggccttatatcctgccacggggcacgcggagaccacggccacagcagctgaaacagcctatcacccagcgtacaccgcatcaacaccctgcaatgagtgtttgaactaggccctctctctgtcattcatctacacaacaccagctgctacgtactcacaaatatttactaagccc

SEQ ID NO: 205140 - DNA, 59 bp, Homo sapiens
  chr19:5962455-5962514
  hyper
tctcagtgccaaacacagagcctcacacttaacaggcactcaaccggcagttagagggt

SEQ ID NO: 205141 - DNA, 776 bp, Homo sapiens
  chr19:6110226-6111002
  hyper
cccaaactccgccgcgcgcgcggacggggtggcggaggcgggtcccgcgggcgcaccacccggacgtttggggtgagcggcggggacgtgctgcccgccccccggcccccgaacggggtccccgccgccccccacactccccggccgggctgggcccggggcggtcgcatcggtcacctggagttcgggccgggagttcgggcagcggctcccgcggcggcggcagcggctgctgcgtgttggtccccgttggtaagtaacagtctccacggctacagtctctatggcggcggcggtggcggcggcggccgctcctcctccggctcccgccgccagccagcctcgcgcagcccgcccgcccgacggggcggggcgttgttaccggcaacggttaccaggctccgcgccccaccttcctaacggcccgcccacgctcgcctccaacgggcccccaagagggcggggcgcgagaccctacggcgttccattggctgtctgcagagtctgtcggaaggaggaggcgttcccccttgaaaaagagtgcgagactcggccaatggccgcgaagaggggcgggtcttggcgggaggcgcgcgcggctcagagggttggcgaaccggtcgcgcgcgcggcgccgtgggttggtggcgcgttttgggaaagtccagttttaggggacccaagggactccgtttaccccacaggaggagtgtgggacatgtgggaacagtctgatcaggggtcagcaaactctcgctcgccgcctgtttttcacg

SEQ ID NO: 205142 - DNA, 199 bp, Homo sapiens
  chr19:6464135-6464334
  hyper
aggtgcgcccacagcgcggccccgcccccttcttgactccgccctctcagcgaggctcaggtgcacaagccggaagtgcgctctcccaggtgagtgactaaactttccgggtcacgtgacagggcggagccggtggggtcggacccacagaacgaccgacggaccgagggttcgagggagggacacggaccaggaacct

SEQ ID NO: 205143 - DNA, 75 bp, Homo sapiens
  chr19:6464628-6464703
  hyper
gcaggtgcccctggccggagatgcggtaggaggggcgagcgcgagaagccccttcctcggcgctgccaacccgcc

SEQ ID NO: 205144 - DNA, 80 bp, Homo sapiens
  chr19:6590245-6590325
  hyper
ccacctctcatcccacggcgcgcactggtgattttatttcattttatttttttttactcttaagacttcttaaagaggaa

SEQ ID NO: 205145 - DNA, 337 bp, Homo sapiens
  chr19:6590881-6591218
  hyper
agcctgtgcgaagcgctggatgcacaccacgaggcagatcaccaagcccgcgaccaatgggaccaaagcagcccgcaggacgcacccatagggcctgcgccgcaccgagcagcccgaaccctcctccggcatcgccgcggcgatcacctccgctagcgcaggaggggcgatgggggcgcggagcgctgccgagaaggaaggaaggaaactgcagccccctcccggggctcctgggcgtctacttgcttcaacctgtcaggggaccagcctgcccctctctggggatgtccggccggtcgaggggagggacttgagcaattggcgaggggaaattccc

SEQ ID NO: 205146 - DNA, 178 bp, Homo sapiens
  chr19:6767996-6768174
  hyper
gctggggtagctgcggcagctgtgacgtaaggaggggtacgcttcctccagaccgccctcccggattttccggaaagaagccccatttaggtggcgggttttgtggagagacgtccgggaaaacgcgacagcttccttcagtgacagcacgctggagcggggcgggactttggtggag

SEQ ID NO: 205147 - DNA, 159 bp, Homo sapiens
  chr19:7098896-7099055
  hyper
ctgaagcggcgaaatcggagaaaactgaagccgggcggagaaagccgaactgaacgaactgagccgaggagcggcggagaagccaaggctgggcgaggggagccaaagacgggtggtgggagccgaggtcggccgagaggaaccggaaaagccaaggcc

SEQ ID NO: 205148 - DNA, 280 bp, Homo sapiens
  chr19:7293746-7294026
  hyper
tggggtcctctccccatcgcggcgctccccgcccacgcccgcgcccccagactcaccctctccggggtacaggtggcccgcggcgcccagtagcagcgcggccaccgccaccagcagcggcgcggccgccgccccccgccggcccccggtggccatggctgcgggagcgcggggtctcctcggatcagagcgcgcggcgctggcccgcgggggtcatgctccgaggcggccacccaagaggcgctgggggccgcgcgtccttctcttccacgcccgcgac

SEQ ID NO: 205149 - DNA, 720 bp, Homo sapiens
  chr19:7294386-7295106
  hyper
gggccccgtgcgggccgcgggaaaaggcggcgcggatctggcctaggaagggactctgcgcccgggagaggcccaggagagggagggaaagcttgcaggggagggaggtgccgcccggccccgccccgccccgcccgcctccccgcctccctgtgccgggccccgcgcgggaggccctgggcgcgccgggaccgagggcgcgccccagatccgcgcgccctacagccccgagtctcctccagtttcagacccccggaggcgccccacaggcccgacgcagcggcacagatcctttctctaccattttgctattttgttcatagtgggctttggaggattcctgttgattttttaaaaaatactgcattaaaatgtttattttggtgactcgaggtggttttggtttctttctttttttttttttttcactcccttaaattttgcaccccaggcgagtagtgtctcactcgcctttcctcagtccgggcctggccagcgacactcgtcccagagcgcgtgggcgcccccagatgtcccgcccgcgagtgcgccccggcccaggggcgagacccaagccaggcccctggggacagccacgtgcccgcgtgcccagtgcgctccctgtgttcaagttggagaaatgacacctggaaaaatgtgcagacgcttctgaaagggcaaagacgacgccaaagaagacgccggagacctcgaataggg

SEQ ID NO: 205150 - DNA, 1053 bp, Homo sapiens
  chr19:7459630-7460683
  hyper
atcacccaggcttccgttaaccccacaaaacgcccacctaaccctgctgctctccctctggatccccgcaacccagctgtcccctcagagcccccggccctactgacagccaggctcgcattgctctccttcaaaaagccccccaaccccgctgacccgcccctcaaaagtcgccctcaccctcgccgcgagcaccctcccacttcggtgcccgcgcccctctcaaggccgagccgacgccccctcaccacggctcggggagcagcagccccaggtccccgggagcgccccgccctcgagggcacgcctccttccgggtcacgccctctgccccgcctccgaggcgggatcgcgcatgcgctgctctcctcgcgcggcttcccgcttccggctcccagctgctagctactgtggatctgggggggccggacggaggcatcggaggcggctgcgagagtggcagaggagctggcggagagcggcctgcgggcgatcgggccgaggtgaggacggcggcggggcggtcccgaggaaaacggggctcaggagggggccctcggtctcttcagggggtggcctggggcgcgggacccccggggctgcctcgggcctcccgccggctcctgggggacttctccaggcaggcgaacgggtgctggggtgcaggctgctccttcaatgcatggaggctctaggcggcgattgcagggtgcagaggtgcagacgatgcccgcccgctccgtccgagccccagccagtcctggggtgctacggcttactctcctccaggagaggagaggaggggtcacttgggccccagcctctgctcctcgttcaggagcgcccggggcaggaccagggatggaatggaacccaccacaatacccagcaccgtcgtatttcaggcctcccgggagaaccctcacaccccggagcagacagccctccctggcagggagcgtttgggtgcaaaaccgtgagaactatctgtgccatgggttttagtttcttgtataagaactcagttggtgctttcattgcggacgggaacga

SEQ ID NO: 205151 - DNA, 83 bp, Homo sapiens
  chr19:7660603-7660686
  hyper
gcccctgctgctccgtgcacactgcagtgaggggcccgggcggggcgcaggggcgcgccagggtccgggtccgggttcggggg

SEQ ID NO: 205152 - DNA, 278 bp, Homo sapiens; identical to SEQ ID NO: 55532
  chr19:7660714-7660992
  hyper

SEQ ID NO: 205153 - DNA, 1166 bp, Homo sapiens
  chr19:7676864-7678030
  hyper
ctggcctccccctacctgcccgaggggacctccaaaccactgtccgacaggcccaccaaagcaccagtgtacatgccacaccccgagaccccctcgaaaccatctccctgtctggtgggggaggcatcgaaaccgccagccccatccgaggggtccccgaaggcggtggcttcgtccccagcagccaccaactccgaggtgaaaatgaccagctttgcagaacgcaagaaacagctggtgaaggcagaggctgaggccggagcggggtcccccacgtccactccggccccgccggaggccctgagctcggagatgagtgagctcagcgcccggctggaggagaaacgcagagccatcgaggctcagaagcgacggattgaggccatattcgccaagcaccgccagcggctgggcaaaagcgccttcctgcaggtgcagccgcgggaagcctctggggaggcggaagcagaggcggaggaggccgattccggtccagtccctggtggggagcggcccgcaggcgagggccagggtgagccaacctcacggcccaaggcagtgaccttctcgccagacctgggcccggtgccccacgaggggctgggggaatacaatcgagcggtcagcaagctgagtgccgccttgagctcgctgcagcgggacatgcagaggctcacggaccagcagcagcggctcctggccccgcccgaggcccccggatccgccccaccacctgctgcgtgggtcatccctggccccacgacggggcccaaagctgcatcccccagccccgcccggcgagtcccggccacccggcgcagccctgggcccgggcccagccagtcaccccgcagcccgaaacacacgcggccagcggagctgcggctggcacccttgaccagggtgcttacgccaccccacgacgtagacagcctcccccacctgcgcaagttctcgccgagccaggtgcccgtgcagacgcgctcttccatcctcctggcggaggagacgccccccgaggagccagccgcccggccgggcctcatcgagatcccgctgggcagcctggcagatcccgccgccgaggacgagggagacgggagccccgctggtgctgaggattccttggaggaggaggcgtcttcggagggggagccccgggtggg

SEQ ID NO: 205154 - DNA, 128 bp, Homo sapiens
  chr19:7701788-7701916
  hyper
tctgtgagcgtgtcgtcgaggtgtgcacctccagcgacttcgtgctcggcagcgcggacgcacctgcccgtcctccccgccagggactcaacttcctgggcctgggcgagaaccgacggcggggaggg

SEQ ID NO: 205155 - DNA, 157 bp, Homo sapiens
  chr19:7939264-7939421
  hyper
gggagggggctgcgggctgcggcgccgggggagccgagccggtcccgcccctcggccgcgggcgggagagccgggggcgcgcgctcgatccggacccgggagcgcggccggcggaagcgcgccgagggggatgggggagaagcgcgctttggagaga

SEQ ID NO: 205156 - DNA, 168 bp, Homo sapiens
  chr19:7939456-7939624
  hyper
tccccagctgcgcctgaggaacccagatagtcaacggttgggactgggggagcaaatccctggggtcctccactgtccttcccaacacatacacctgccccgacccccaccacaaccacctggcaccaaggaccgcctggacgcggataggctgggccctggcaacca

SEQ ID NO: 205157 - DNA, 170 bp, Homo sapiens
  chr19:7990126-7990296
  hyper
ggccctctgagaccccggcgcagggccggctagggggcgccgcgcccctcacaccaacgcgtagtcgaactgcccgcgctcgagcgcctccttgtggtcggtccaggacgaggcgggcatgcggctgtaggggtcgagcaggatgcgcacgcagcgcaccatcaacagca

SEQ ID NO: 205158 - DNA, 300 bp, Homo sapiens
  chr19:7990894-7991194
  hyper
ctctctcagggacccgcgccggctgcgcgttcggcctctccccggcggcggcggcggcggcccgggctccggctcagcccaccccacccgcccctggagcggcggagaccgaggcaggcaagcagcgcgcgagccgggccgccgcggctgttcctatggcgacgggggcggggccgccgcggggggcggggctgcagggggcggaggctgcgcagggagcggcgcgcgagccagcgaccccgcccgggcctgcgggaggacggaaccccagccccgaggacccgcgagcacccacgacct

SEQ ID NO: 205159 - DNA, 80 bp, Homo sapiens
  chr19:8115155-8115235
  hyper
ttcctccccgtgaaggctgccggcgggacaaacagtgaggggtgaggcagggagggagactcacgttggggacctccccc

SEQ ID NO: 205160 - DNA, 48 bp, Homo sapiens
  chr19:8273923-8273971
  hyper
cagagatgggcggagcgggaacgggggcgggggcgagaatgggggggc

SEQ ID NO: 205161 - DNA, 323 bp, Homo sapiens
  chr19:8274271-8274594
  hyper
cctggggcgggcggcgcgtgtctgcagctgctccgggtagcccgctaggcgcgccgtccccagccccgccgccggccctcggtgcgcccggccgcctgcacccccaggtaagcgagcaccccgcgccgcgaacaccgccccgaacgccaccctcacggcggtccccggccccgcctccgcggccatggcggccccagcccggcccccactcgcagctgggctccagcccccatcaccccgccggggactgtccccctcggggcttcccatcatggccgtctccccgagctatccgcgctcccccacgagggccggggcgcaac

SEQ ID NO: 205162 - DNA, 723 bp, Homo sapiens
  chr19:8372857-8373580
  hyper
gggtcttcctagcaccagtgcgcgccttcccacaagcgatgaagtccaagtccacgtgctgggggagtgtcatgaactgacgtgcggtgcagccagtgactaggcgttgtcggtgcgcggcggcggggcgaagcctcgcgaggggtgggagcccgcgctgcggggcgtcactcacctgcggcctgggcagaggtcggggtggaaagcgggctcgcggcggcctccaggcctagtccgaggccgagcagcagcagcagcgccaggcccagagcccctgttcgccacgctccaacctgcgccatccaaccgccgctcatgctgtccccacagcggcgccggccacgcgctgtccagaccgctctcttatccctgcgcacgcgcacgcgcggggttggggcggggcccaagcccctgagttctgcggcgcccgcggctacgcgtaccgtaaatgtcagaatagcagggaaaagagaattagaggcccgtccccactttccccagtgaccagatcagttgaaaggtatggagcccgcttgaagttagaaacttctggggatgggaaggaatttgttggtgttcatttgcattatttcccgttccaaatgaggactgctgcaaatgttactgcctcgtgatcttctttaatatggcagccacgcccctcaggcactccgcatttcctccctcatcccactgcttttgtggcgccgacaggtaatttat

SEQ ID NO: 205163 - DNA, 124 bp, Homo sapiens
  chr19:8942732-8942856
  hyper
caagcagcagcttcgtgctgacctaagctcacagcccgaggcctcatgaaccgaaacacggctccctggagggacgcagggcccgtggctggcggtgtccgcggcccacgtcgccccctggact

SEQ ID NO: 205164 - DNA, 217 bp, Homo sapiens
  chr19:9648914-9649131
  hyper
aactttcacccagtgctcaccggaacactcagaaatcgccaggtccctgaaccgggaagatcctggggacggagccaacgcggatgcaaaaggcagcaattattttcctgccggaaaaaaattcacaaacgctgctttggaggcctttggagaggggcgcacagatgaaaacaccctgcggacaccgtaactataaacccgactcctcccgaggagc

SEQ ID NO: 205165 - DNA, 83 bp, Homo sapiens
  chr19:9649390-9649473
  hyper
tgccgtgtaatacctcctcgaggcagaaaaattctactttccatctgcttggctgcggaggaccttggggtgggctcagcgtg

SEQ ID NO: 205166 - DNA, 123 bp, Homo sapiens
  chr19:9879601-9879724
  hyper
tcgatattgggaacgacgccggaccaggaaacccagcgccaagggccgggttggaggcggggactggcgcagcgggcggggcacgcgtggaggcgtcacctaaggcttcgattgcagacagcg

SEQ ID NO: 205167 - DNA, 76 bp, Homo sapiens
  chr19:10024728-10024804
  hyper
ggcattccccagccccgccccccaacggtattcccggcccccctccccctaggcggtgttcccggaccgcctcccg

SEQ ID NO: 205168 - DNA, 226 bp, Homo sapiens
  chr19:10197446-10197672
  hyper
ttttccaggaaatgccgtaaagggatgaaaggcggggggggggcggcggaggccaaaaccaagggtcaagttcgggccgggagaacggtgcctagagatgggggagggatgatcccgtttccccttcccccaccggaacccccctgtctccatcccagctggagaagagcgtccggcgcctccgggagaagtttcatgggaaggtatcctccaagaaggcgggggc

SEQ ID NO: 205169 - DNA, 186 bp, Homo sapiens
  chr19:10207020-10207206
  hyper
ctcgtggcggccgacgcgcatgcgcagcgccgccagctcgctggcgttggcggcctcgggcgtcgcccgcgtggatgcggggccgctccagcacacagcgcccgtgaacttctgcgggggcagcacgaaggtgtaggtgcagcgcggggcgcccgcccgcgcccacgacgcgcccagcaggagcag

SEQ ID NO: 205170 - DNA, 50 bp, Homo sapiens
  chr19:10340887-10340937
  hyper
ctggtttaggaatgcgcggtatccacgctcgctcgcgcgggagccacgcc

SEQ ID NO: 205171 - DNA, 420 bp, Homo sapiens
  chr19:10381196-10381616
  hyper
tgcctggctctgctctggccgcttctcgagaaatgcccgtgtcagctaggtgtggacgtgacctagggggaggggcatccctcagtggagggagcccggggaggattcctgggcccccacccaggcagggggctcatccactcgattaaagaggcctgcgtaagctggagagggaggacttgagttcggaccccctcgcagcctggagtctcagtttaccgctttgtgaaatggacacaataacagtctccactctccggggaagttggcagtatttaaaagtacttaataaaccgcttagcgcggtgtagaccgtgattcaagcttagcctggccgggaaacgggaggcgtggaggccgggagcagcccccggggtcatcgccctgccaccgccgcccgattgctttagcttggaaatt

SEQ ID NO: 205172 - DNA, 207 bp, Homo sapiens
  chr19:10381856-10382063
  hyper
cccgcgctgcccgcactcctggtcctgctcggggctctgttcccaggtgagtcggggtggggattgccgtcgggccagttctccgaagccccgggaggaccggctcccgggtcaggtcatgcatgcttaggtagctgtttatgggaaggaggggctagagacagcgattgaaaggcaacagccagtaggttcgaatccagaccctgc

SEQ ID NO: 205173 - DNA, 38 bp, Homo sapiens
  chr19:10397588-10397626
  hyper
tctccagggtggagtcgaggaggcggggctgcgggcct

SEQ ID NO: 205174 - DNA, 214 bp, Homo sapiens
  chr19:10400761-10400975
  hyper
ctctgggctgctctgggcctggggctcttcggcctctcaggtaagagccccgctctggttcggggtggacagggcgggggcggagtccctggacctgagaaacggcctcctgtccctcccagctctgccctcgcctcgctcccacgcctctgcccccacctcgagcctgagtcttctccccttccccctcctccccaacacacacccgagcccc

SEQ ID NO: 205175 - DNA, 218 bp, Homo sapiens
  chr19:10491257-10491475
  hyper
cgagacgcctcctcccattggccgcctgaaacgcacacgcccattggcagctgctctgttctccctgctcgtcaccattggatttttttttttttgccatggtggcggcactctcattggtcctggggctcattcgtcactcagccgcgattggctgagtcggcacccagatgcgctgtcgcttctgctattggctggcactcggtggacggagacgg

SEQ ID NO: 205176 - DNA, 197 bp, Homo sapiens
  chr19:10529636-10529833
  hyper
ctgatgggggggccggtttttgctcggcgttcgcccacgccgggagccccctctggcggggagaaaagtggctgtgggggttgaagaccggcagtcttttttttttttttttttttttttcaaataaggagaagggcgcggggggagggcggtggcaaacggcatcgcgtgccctggggagcccgtgacagggggcg

SEQ ID NO: 205177 - DNA, 180 bp, Homo sapiens
  chr19:10529953-10530133
  hyper
agccatccttgggggggttgagggggatgggggcgcactcggatcccgctcgctctctgcttgctcgctcggcgcggcgctgggggaggcgggagcgtgagtcacggcgactcccgatttaggtgccggaaggggggctctgctggcgggggccgcagggaggaggctcgcctgtttact

SEQ ID NO: 205178 - DNA, 758 bp, Homo sapiens
  chr19:10530526-10531284
  hyper
cctccaaataggtagcacatgtgcgcacacatccttcacccacagacacacacagttatacacacagccaaatccagagaaacgggcagacaacagcagccaaccacgtgcgcacacacacttccagccgacactgaaaacacagacaaccctcggaagaggccacgtgcgcgcacatcccgccccgggcccgcaccatcactatcctccgacgcacagacaggagatcccacacactctgccgccgcccgctgcaggtaccgcgccggtggcactaggaccactcctcaaaaactgccccccgccaggggtagcggcgaggacacgccaacaccggactccgccctcgccatgatggaccgactgactgacactctggcaaccagtccggtgtctgcttccagatcggattaaccgtttaactccttcgtgcctgtgcgcgccgcggccaagcagggtgctttgaagacagacgagttccagcgccccctcccagcccggagcggggatctgcgtgggcgggaagggcccccctccttaggtagctgccccccgctggcccggacggaggaggaggggggcggcgctgacagccgcggcgggcggggggcggggaggggcgggacggggcggaggagccggggctggcgccgagcgggccgcggaacgcggagcgcggagcgcggagagcgccgccgggcactgagcagagctccaggcgccgaaaggaagctgcagagcccggcccgggggcgatt

SEQ ID NO: 205179 - DNA, 130 bp, Homo sapiens
  chr19:10691749-10691879
  hyper
ctggcacccaatagtcgctcaatcatgaaacagcctttgcagtcagccaatggctgcaatactggccgtgatcagcagatggtgagcgagcgcttatttcaaaacgggctgcgattctcttaagtcccca

SEQ ID NO: 205180 - DNA, 222 bp, Homo sapiens
  chr19:11199837-11200059
  hyper
aacagttaaacatcgagaaatttcaggaggatctttcagaagatgcgtttccaattttgagggggcgtcagctcttcaccggagacccaaatacaacaaatcaagtcgcctgccctggcgacactttcgaaggactggagtgggaatcagagcttcacgggttaaaaagccgatgtcacatcggccgttcgaaactcctcctcttgcagtgaggtgaagaca

SEQ ID NO: 205181 - DNA, 460 bp, Homo sapiens
  chr19:11200842-11201302
  hyper
actcggagctgggtgtggggacctccagtcctaaaacaagggatcactcccacccccgccttaagtccttctgggggcgagggcgactggagacccggatgtccagcctggaggtcaccgcgggctcaggggtcccgatccgctttgcgcgaccccagggcgccactgccatcctgagttgggtgcagtcccgggattccgccgcgtgctccgggacgggggccaccccctcccgcccctgcccccgcccctttggcccgccccccgaattccattgggtgtagtccaacaggccaccctcgagccactccccttgtccaatgtgaggcggtggaggcggaggcgggcgtcgggaggacggggcttgtgtacgagcggggcggggctggcgcggaagtctgagcctcaccttgtccggggcgaggcggatgcaggggaggcctggcgttcctccgcggtt

SEQ ID NO: 205182 - DNA, 69 bp, Homo sapiens
  chr19:11253288-11253357
  hyper
cagagggagaacaaacgggggcgggggtgggatgggggcggggccggaggccaccggcctcaggctgtc

SEQ ID NO: 205183 - DNA, 330 bp, Homo sapiens
  chr19:11308102-11308432
  hyper
tgcacactcgatccccgaaccagacttgaacccctacccagccccgggtcccactcgccttgcgcgctccggccgctgccttccctgggtcccgccgcccgagcgtcttcgcgcgcgccgcagcctgggcgcccggccctcggaggtggctccgcccgcaccacgccccctccggctggtcccgcccccccagccggcaccgccccctccagccgcccgggcgccccggccgcggtggggggtggggatggagagacgctggttggagactggatctcacctggacagcaggtgtgtgtgcgcgccggggtgtccggcctcgtccttcct

SEQ ID NO: 205184 - DNA, 105 bp, Homo sapiens
  chr19:11465993-11466098
  hyper
gttccttcctacaatcgatgctaacacgccccgcctccaagatcacggaggccccgccccacggggctatgcaaatgagacgcccggaggccccgcccctccctc

SEQ ID NO: 205185 - DNA, 594 bp, Homo sapiens
  chr19:11491658-11492252
  hyper
ggaggaggtcagggcggtgggcttgccccgtgattcgccctggctcctcctacacccccgcctggggcctcaccgctaggcgtcagcagcgacacaggctccgaccaggcgctccagaagccgccgaagctcggctcagccatacgcgcgcggacggcgaaggtgtagcgcgtccggccccgcaggttgctcagcacacactcggtgcggccctccaggatctccacctgggggcggaatcagggcgagggacgcgtagcagacaaaaatagatgacgtgggggcgggccctggtggaactgagccaatcaggggaaaggaaaacggtgccctagaattgcaatgggaccaataagagtagggggaggagcccaagaaagctcagggccaatcagagagagagtctctggtacgaaagggcgggacccgggcaatttaatatctgggctagcactcgtagagggacccgggcgctaaaggggtctagggttacgggccggagggagaagaagttggggttcaacaggcttgcgaggacattaggaaagggggtgtgtctgtgggcgtggaacggtcttcagcaccagggtaatg

SEQ ID NO: 205186 - DNA, 134 bp, Homo sapiens
  chr19:11492528-11492662
  hyper
caggcatgggggttggtcaggtgggcgaggactgagaccctctcctccgaccactcctccattcccagagcacttacctacttcattgatgtggatgacacggtgatatcgcggagcgccggaggctgctgtga

SEQ ID NO: 205187 - DNA, 134 bp, Homo sapiens
  chr19:11529280-11529414
  hyper
gctctccagctccgccctcaactggtcgcttccggccccgcgccacccaccaaaccccctcctcacctggctgcccccggggccctccgccgggctcctgcgctgactgcgctgccgccgcagggagacactgt

SEQ ID NO: 205188 - DNA, 70 bp, Homo sapiens
  chr19:11531258-11531328
  hyper
tgaatacccagggtcatggtcggtaacatttattgcgcaactctgaggccggggcggacccagctgggga

SEQ ID NO: 205189 - DNA, 243 bp, Homo sapiens
  chr19:11532780-11533023
  hyper
ctctgctgcgggcaggataggtcttctgtctcgggctgctccagaactgcagataggtctccgagcttttcggggacagggtgggacttctttcccttggaggcggagcttgagacgggacagggtctctgacgtcttgggcttccttggggagtgagagcttccccagggaggtggggcggggactctgaggaatggggtggggcttcccctgtgggcggggcctctgacgtccgggacaga

SEQ ID NO: 205190 - DNA, 72 bp, Homo sapiens
  chr19:11591204-11591276
  hyper
taaggccctctcagaccaagctctaagcgccctcagcactctgggcgcggccctgcccactctcaggccccg

SEQ ID NO: 205191 - DNA, 185 bp, Homo sapiens
  chr19:11805241-11805426
  hyper
aaagaaggaactggggaccccggaccgtagctccttccacgcatgaaccccgcacacgagtcgggattccccccatgaccctcccgtggcccccgcacaatctggagagacgcggggctgcgggcgcggagctgcccagagaggactcctgcccgggcccgcagtcgccgcgaagggacgggaca

SEQ ID NO: 205192 - DNA, 390 bp, Homo sapiens
  chr19:11805597-11805987
  hyper
ggcccctcacgctcaccattttccgaattcctccgtgtcccgggggcctctctgcggctcccacgaccagtgcaggtccctgtgtgacagaggctgccgcagactctccagagtgcctctcagcgacagagacaggagcccagcgaagtggcgtgtagaagacgccgcgggctttttcaatctcgcaccctcttagctgaagtgcgcctgattgacagttcccacgaccccgccccacggccctgattggatagtgcgacagatcccgccccctgacgactgagttacagaagcgatctcacgctggggagtggagactgatgaacgagttcttgacacagcccttggcagggcgggcttcttccctgcgctgtgacctgacccctccca

SEQ ID NO: 205193 - DNA, 164 bp, Homo sapiens
  chr19:11909169-11909333
  hyper
ccaacgaccagggcgcagggagtgagcttagccttagaaaggctgtagctaggattaatcagccgggctctgcagggctccgttacccagggcttaccctgtcactcagggctgaggggcggagcctggaaccccatccaatcaggggccctgggacggggccc

SEQ ID NO: 205194 - DNA, 60 bp, Homo sapiens
  chr19:11909732-11909792
  hyper
ggcgtcctgtcccgtccctacgcggcgactgcggccccggccccggagtcctctctgggc

SEQ ID NO: 205195 - DNA, 63 bp, Homo sapiens
  chr19:11959364-11959427
  hyper
actatccaataacccgagtgcaggaagcagctcgtgtaagcttagagaagctgttgctagaat

SEQ ID NO: 205196 - DNA, 33 bp, Homo sapiens
  chr19:11998436-11998469
  hyper
ccagagtgcaggaaggagctcgcccttggaaaa

SEQ ID NO: 205197 - DNA, 203 bp, Homo sapiens
  chr19:11999219-11999422
  hyper
catttgagcaaacagcgattcacgaatgagacacacccagtcctggcttgtggtttgtcaacggaaaaagccaaactatgtaaaataaagaagtttattcggagccgaataggagagaccttggccgagggaaaaacaaccccaagaagcctggagtaagtggtcccgaggcggctcaagacagtttggttttattcatttta

SEQ ID NO: 205198 - DNA, 254 bp, Homo sapiens
  chr19:12075818-12076072
  hyper
cccattgtttatccaggcacagagtgggtcgcattcctgtcctcacctttgtccttgcgcagccggtggttgatatccgctgtatccatccccgagagggacctggtacctctacccaggtttctatcgctctgtctcctgcgctgtgcccttctgtagtcacaggagctgtagagaggaccccaggacatctgaaagccaggaaatggtgcgtgtgcatagccggttgtcccgagacggggtagaggctgcct

SEQ ID NO: 205199 - DNA, 331 bp, Homo sapiens
  chr19:12098301-12098632
  hyper
ggctggaatagcagcgaccggctctgcagcgccctgttacccggggcttctgctgtcactcagggctgagggggcggggtaggatgccctatccaatcggggtgctggggcggggccctgccaactgtttaatccgccggaaggagggcgcagcattgccggtcttctcattgcctggctgctagaggaaacccgaagtcgggattctttctttcctgctctgagagggaccaggtccctcctccgtagcttttgtctctctattgcctgcgccgtgtcctggactgctcacgggagttctgcaggagacgccggaatatctggaagctga

SEQ ID NO: 205200 - DNA, 75 bp, Homo sapiens
  chr19:12146469-12146544
  hyper
tcgccgcctggagccgggaaccgaggagagcagggccttcgccctccccgatggacactcggcaggccccgccca

SEQ ID NO: 205201 - DNA, 44 bp, Homo sapiens
  chr19:12163011-12163055
  hyper
gtcaggagctgcctcgggattgcttactccagacttcgcggggt

SEQ ID NO: 205202 - DNA, 117 bp, Homo sapiens
  chr19:12163331-12163448
  hyper
aatctggggagacgcggggctgcgggcgcggagctgctcagagagggagccggggccggggccgcagtcgccgcgcagggaccggacaggacgcccggggtcccggctgccggccca

SEQ ID NO: 205203 - DNA, 37 bp, Homo sapiens
  chr19:12203656-12203693
  hyper
ctgaggtcaggagttcgagaccaacctaacatggaga

SEQ ID NO: 205204 - DNA, 33 bp, Homo sapiens
  chr19:12204551-12204584
  hyper
gccagcgtgtccggcctatttgttctttattgt

SEQ ID NO: 205205 - DNA, 240 bp, Homo sapiens
  chr19:12551184-12551424
  hyper
agcagaaaggctggcgccaaccaggttgaagaccccacgagggagccctctcagcagaatgcggtttcttcacctcctgtcccaggattcacccctcacttccccaccaaccaaggacgctacacccagccgcccccgtccagaccccaaatccctcagggaggcggatctggggtgtcctcccctctcctcctgttaaaccgtttctgctgcagccctcggcgtctcggtgcagtgagt

SEQ ID NO: 205206 - DNA, 141 bp, Homo sapiens
  chr19:12551485-12551626
  hyper
cggagctgcccagagagggcgccggggccgcagtcgccgcgcaggaacgggacaggacgcccggggtcccggctgcatgcccagccccaccctgcggccgagggccgacctacgccagggggacccgggtccgtagatccc

SEQ ID NO: 205207 - DNA, 538 bp, Homo sapiens
  chr19:12595307-12595845
  hyper
ctgcggccaaagagaccgagggccgagctgcgccaggaggactcgggtccacagacccgggagacaacggcggggaggcctgggtcccaccacagccagatccggccggtttcaacccgcccctctctcccatctcaagacccccagccccgcacacttaccatttcccagactctgggatgtcctggtgttctgtttacctctcccgcggccagcacaggtcctacctccacctgaggcccttcctccacctgagggccttctggggtgaggagaccccagagcggagcgcagcggctggtagccacgccctcgccgtttgcgcagcgcccctccgcccgccttcccggcggcgcccctgattggacattgcactcttggacccgccttcgttgcctgagtgacagctagtagggaagtcgcgtctctaagcaacctgcattcgtccggggtcaggaatctgttcccctgccacggatatttgcgtctaagcagaatttgttaacgtacccggggtcgggcactggtgtcttcctgc

SEQ ID NO: 205208 - DNA, 200 bp, Homo sapiens
  chr19:12595896-12596096
  hyper
gctcagtttccagaaaaaggctctttgtccacagcgaaaaaggacgcccgggccatgccagactagaacggaagggtcagacgctcccagacttagcataaggctgcgaggccattcatggatttctgactcttgtttacaaatacagacacttagagtgacagagtgacctcatcatacctaacaaagagtgactacgt

SEQ ID NO: 205209 - DNA, 73 bp, Homo sapiens
  chr19:12721074-12721147
  hyper
actcctggagtcaagcgatccacccgcctcagcccacccaccccccgacctcccccaccgcccccaccacgca

SEQ ID NO: 205210 - DNA, 200 bp, Homo sapiens
  chr19:12806992-12807192
  hyper
ccactgggtagggcgcgcgtacgcggcgtagcgcgcgtagcctccaggtgacatggtcagacacgaggtcgcggagcgcgtggcacacccgcgacaggacgtggagcacgaggcgggcgtccaggtaggagcagatctcgagcagcagctccgggggaaggctcagaaggcccggctcacttacggccgaaaccctggac

SEQ ID NO: 205211 - DNA, 86 bp, Homo sapiens
  chr19:12885894-12885980
  hyper
cctctgcccaacaaaccctgcgcgtccaggccagggtggtatcgcgagtcacctgggccccacaggcaccacgtgaccaggccaat

SEQ ID NO: 205212 - DNA, 237 bp, Homo sapiens
  chr19:12899529-12899766
  hyper
tgcccaaccccccaacgctgcccgctgcgcccccgcggggcccagccagatgtcagctgcagttattagcctgggcgggagacacaggcctggcagtgtgcctgccagactcacaggcctccggaatctcccttgagcctggggagggggaggggagccattcaagcaaggggaagaagggagggggcatttaggggtcacagggaccctccaaggacgggacgcccccagcttctg

SEQ ID NO: 205213 - DNA, 638 bp, Homo sapiens
  chr19:12900114-12900752
  hyper
actggaagcctgaccgtctgcacctcgccgcagcccttcccgggaaggggctctgggttccctcatattctccccttagattttcaggtcttctctgactcggggagggaagctctcagatgacagagctactctagggaaggaggggggctccctctaggtattctggatgatagtaggatgggacctgcagactaaaacgagagtggggcccctgactcacatgagtgagtggggggtgttggggacggagctccagatctcctggcagaagggaagggcaccccacccgagggaggaggcagccgccgttccagcccgcccaggcgccgggggcgcctcgaggcatcggcccgccctctccgcgccccgtcgggccgggggcgaagtccgacccaggcccgcgggcaggcggggacctgccgggctgggttgggccaggccgggcctggcaggacgcagccccaaagcggcggggtggggcggggccgggccaggcggccgtgggggccccgggggcggcggtcggggctggtcgggactagcagtctgggggcccaggcgcgccctgggacctggcagatagtcgggttccccgcttctggctcggggccccaggacagcgctggtcccacctc

SEQ ID NO: 205214 - DNA, 216 bp, Homo sapiens
  chr19:12902439-12902655
  hyper
gctggctgctacccgcccgcgccagcccccgagaacgcgcgaccaggcacccagtccggtcaccgcagcggagagctcgccgctcgctgcagcgaggcccggagcggccccgcagggaccctccccagaccgcctgggccgcccggatgtgcactaaaatggaacagcccttctaccacgacgactcatacacagctacgggatacggccgggccc

SEQ ID NO: 205215 - DNA, 213 bp, Homo sapiens
  chr19:12951463-12951676
  hyper
gtttggataaggggcggggccatgcttgtgtgggtgtggtcagtcgcagagggacggtcattggggggcggagactcaggtgggcggagactcaggtgggacggacagaaaggaggagtcgtacctgaggggcggggccatcccagatgaagccagaatcgtcttggaaggggccaggctgactcggcaacgaaaaaatttagagaggcgggg

SEQ ID NO: 205216 - DNA, 320 bp, Homo sapiens
  chr19:12991904-12992224
  hyper
gcagccctctctgcgccgcctccccggaccctctaagagctggcagcttgtagaccacgaacctggaggtcggagaatgcacagaaataggagagagggaagagaaggcaccccagggttccccgaggaggtagccatcccggttgagtgaccgcagccggaccccggggcgatggtaggccccccgctgcgcactcaccagtctacaggctgcccggagtccccgtagcaggtcagggccccggcggggacgcacagcagcgctgccagcagcagcgggatcatagctgctatggggctgagatccaggaatctgtgtc

SEQ ID NO: 205217 - DNA, 98 bp, Homo sapiens
  chr19:13029775-13029873
  hyper
aaaaaagaaatgaaagaaacgggtgcggtgcgtgggtgtttgtgcctttctctactccgttccggccacgcgccatgtgtggaaatcagacccgtcag

SEQ ID NO: 205218 - DNA, 77 bp, Homo sapiens
  chr19:13030316-13030393
  hyper
gtgaggctcctgggttccacggggcgcccaggttatacggatctcagagtcctgtatttattcggtgcttctaactt

SEQ ID NO: 205219 - DNA, 513 bp, Homo sapiens
  chr19:13049935-13050448
  hyper
tcccccacttagacgggtggacttcccgctggatcgaatccaaacacaagtcagattttggcaaattcgttctcagttccggcaagttctacggtgacgaggagaaagataaaggtaagagcctaggagtgggtgctcagatccgggaggacttcctggcagaagtccttgtctgtacacacacagccgggacagtccccttggaggaggacaggtggaggaagtgggggagtcttctctattctctaagtcgagggtcctcgcgagtcaaggcccaacggtgacctcactaccgtcccgtctcaggtttgcagacaagccaggatgcacgcttttatgctctgtcggccagtttcgagcctttcagcaacaaaggccagacgctggtggtgcagttcacggtgaaacatgagcagaacatcgactgtgggggcggctatgtgaagctgtttcctaatagtttggaccagacagacatgcacggagactcagaatacaacatcatgtttggtg

SEQ ID NO: 205220 - DNA, 828 bp, Homo sapiens
  chr19:13050858-13051686
  hyper
acacctaggtcccgacatctgtggccctggcaccaagaaggttcatgtcatcttcaactacaagggcaagaacgtgctgatcaacaaggacatccgttgcaaggtgtgcctgggggtggtggcaaatggctgtcatggggagattcagaggtcagcctcattggggggtggcccccgctcaccttcttccttcttcaggatgatgagtttacacacctgtacacactgattgtgcggccagacaacacctatgaggtgaagattgacaacagccaggtggagtccggctccttggaagacgattgggacttcctgccacccaagaagataaaggatcctgatgcttcaaaaccggaagactgggatgagcgggccaagatcgatgatcccacagactccaagcctgaggttggtgtttgggcaggggctctgctctccacattggagggtgtggaagacatctgggccaactctgatctcttcatctaccccccaggactgggacaagcccgagcatatccctgaccctgatgctaagaagcccgaggactgggatgaagagatggacggagagtgggaacccccagtgattcagaaccctgagtacaaggtgagtttggggctctgagcagggctggggctcacagtggggagtgcaccaaccttactcacccttcggtttccttctcccttctgcagggtgagtggaagccccggcagatcgacaacccagattacaagggcacttggatccacccagaaattgacaaccccgagtattctcccgatcccagtatctatgcctatgataactttggcgtgctgggc

SEQ ID NO: 205221 - DNA, 931 bp, Homo sapiens
  chr19:13054373-13055304
  hyper
caacttcctcatcaccaacgatgaggcatacgctgaggagtttggcaacgagacgtggggcgtaacaaaggtgaggcctggtcctggtcctgatgtcgggggcgggcagggctggcagggggcaaggccctgaggtgtgtgctctgcctgcaggcagcagagaaacaaatgaaggacaaacaggacgaggagcagaggcttaaggaggaggaagaagacaagaaacgcaaagaggaggaggaggcagaggacaaggaggatgatgaggacaaagatgaggatgaggaggatgaggaggacaaggaggaagatgaggaggaagatgtccccggccaggccaaggacgagctgtagagaggcctgcctccagggctggactgaggcctgagcgctcctgccgcagagctggccgcgccaaataatgtctctgtgagactcgagaactttcatttttttccaggctggttcggatttggggtggattttggttttgttcccctcctccactctcccccaccccctccccgcccttttttttttttttttttaaactggtattttatctttgattctccttcagccctcacccctggttctcatctttcttgatcaacatcttttcttgcctctgtccccttctctcatctcttagctcccctccaacctggggggcagtggtgtggagaagccacaggcctgagatttcatctgctctccttcctggagcccagaggagggcagcagaagggggtggtgtctccaaccccccagcactgaggaagaacggggctcttctcatttcacccctccctttctcccctgcccccaggactgggccacttctgggtggggcagtgggtcccagattggctcacactgagaatgtaagaactacaaacaaaatttctattaaattaaattttgtgtctcc

SEQ ID NO: 205222 - DNA, 131 bp, Homo sapiens
  chr19:13094456-13094587
  hyper
cctgcgcgcgggccgcgcgtgccaagaggatgccatggttacgtcaggcgcgtgcccgtcgcgcgcgccgccgtcccgcgcgctcttgcagggaggggccaggccagcagggggcgcgcggcagtagcctc

SEQ ID NO: 205223 - DNA, 264 bp, Homo sapiens
  chr19:13106028-13106292
  hyper
atgtgtggcggggtccgagtcccgctgcgtgtcagcgtgtgtctgcgctggaacgcgggccagcacgtgtcagggcggccgcgtcggtgtgcgcccccgcgcgcgcgtgtgcgtgtgttcgtgtgtgtgtgtgcatgtgtgtgcttgtgtgtgtgcgccggccgccgctcccccgccctgcccgcccctccccgcgcccctcctcccgcccgcgccgcccgcccgctccctctccccggagtgcgccgcttccaaactttgtct

SEQ ID NO: 205224 - DNA, 300 bp, Homo sapiens
  chr19:13106649-13106949
  hyper
ctatgtactccccgtactgcctcacccaggtaccggccgccgcccccgcgcgaccgggggaggggagcgggcgcgggaggccggccggcggcgcgggcggaggggacgcgcggcggccgggaagggggggccgagagcccgcgggccgccgaggggtgcaggctgtgccgcggggagcccaggcacgcgtgcgggcgtcaccgtgcgcgtgcgaccctggccaccgggcggactccttttgggggttccgggggtggccagctgcgtcgtggcgctgcccgtggagcgcaggcgggagtg

SEQ ID NO: 205225 - DNA, 260 bp, Homo sapiens
  chr19:13107129-13107389
  hyper
actgggtcccgcgacgcttcctggggagggcgcagcggttcccgagggtggcagtggccggcgtgcgtggcggcggcccttgcgtgcggccggggtgcctggggtgggccgagcggcccgggcgtctccccaaagtctttgtttaggcctcacatgggagcggggctaagaaaatggcggggctcccaaatttcggaggggcaggggaggggagaggggggcgggcgcgctgccagcggtggccgcgcctctccgacccc

SEQ ID NO: 205226 - DNA, 162 bp, Homo sapiens
  chr19:13208521-13208683
  hyper
tccctccctccctctccgccccgagcgcccttctttgagccagacgccaacttgaccctcaccagcattatcaggagcgcgctcagcaagttggtagtttcctcccccctttcccggcgcccctcccgcccccattcaacatctctcatcctatccccgacc

SEQ ID NO: 205227 - DNA, 284 bp, Homo sapiens
  chr19:13208945-13209229
  hyper
acccaccactcccccaccctgaccgtgctgaacagacccccccacacgagagaaaataaaggagcaataaagtcacgagaactttcgtcccccaatcgagagcccgaggggcaccccagccccgcctctgctcccccccaccccacccaccctcggggcgcccccctccccccgcaagccagcctgggccagccccgcttcggcccctcccgggagatccgtgcgcccgaccagcaccagcatcgcggaccgcaaaggccgcccgtcccgtcaaacaagtttct

SEQ ID NO: 205228 - DNA, 402 bp, Homo sapiens
  chr19:13209259-13209661
  hyper
tatctctatatatagtactaatggatttggtgtgcttcccccttagcgtccccctccctctgctcctcctccttcagcctggtctccccctcttctctgccctccacccccgtctctgcactgagatacataagaaacaagggtagtttactgtctgttttgttttctgggttttcagtgtcctagcggaatgcaagtaggcagccagcccgtctgttccctctccgccccgccccgccccgcccccgtcactgcgcttctgttataccatctttgcctgactctctccggcttctccattgaatggctaatgtgtatgtgaaataaagaaataaagaaaaacaaacgcgagagcgcctgacccttcgctaacgcgaccgtgcgggactgggtcggggtcgg

SEQ ID NO: 205229 - DNA, 202 bp, Homo sapiens
  chr19:13213414-13213616
  hyper
gtgtggtttccagcgtcaggccaggctctgctgtctcgcgagggtccggcctcaatgctccaggccccggcgttgggccgcgcctcctcgtgggcctcggaaggccaggatagccgaggtctccgcgtaggtcccccccagggaaagtgagcggctcccgggccggcccgccttctccccgcccccggcggcccggtttcct

SEQ ID NO: 205230 - DNA, 93 bp, Homo sapiens
  chr19:13213834-13213927
  hyper
tgtagggaccccgggcctctggggacccgggccccagggcagccggggagggaggtgcctggatgcacgcagggggtaaactgaggcagggaa

SEQ ID NO: 205231 - DNA, 1275 bp, Homo sapiens
  chr19:13265775-13267050
  hyper
caggggctggcagccgctcgctggggccccaagaaccggtctgaccggttaccacgtgggcgagagagggttgggcccccttttccttgcccgggcattccctaactggtggagccccgcctcccccagatttgggggttcccttgaaattgtcctacaactccgggacagggagatcggggctttctgagttgagacaatagtgctaaacacactgccccaagcggagctggggatcgattgcacgcactttgaagccttgaaaggtggtagatctcgcccccaccccctagaccaaactgaatcagctgtggccggggccctacagtatcaggtggagctgagcgggtgagctttgaagggctctttagtccccagttcccgtatcttcctcgaggaatcgttgtgtgtctcaggcagggacgtgcagcctcagtttcctcatctgtgaaatgggcctctaagcagcttctccacccggcattaggtttttaaaaatgcccattagagccctagttattttcttgggtcactccccagctctagaataaccaccccgaaacgagaaagccctttcaatataccccacgtaggtttaagagtggggttgtgggcgttgccccagggcgaagggagggggcctgtcgggaagacaaaggagtcgcaggtgcggggagtggtggcggcggcaggcgccgggaaagcgctcgccccgccccgccgacggctggctctgccgccgcaggcttcccatgaccccaggggaactgaccccgtggccacagggtagaaggaggggcaagccggcctcagaacgtctgctggtggaatctgggagctttggctcccctcccgcccaacccacaccccctttcctctcctgtgtggattgtgaaggagagcttctcaccgttctccagccaagctcgcccccacggctgcctgattccttcctgggaacacgtggggggacttttaaaaggcgccacctactccgagtcctgacccacccaactctcccaggggacgtgggggcactggagccccacaccgcaggcggtagctcaatgcacccgcgtcggagttcctcccccgcgagcgtggcaaggctcagggaagtcccgggcccctggggagggggccttgccgcgcatcctgtcgcaggaaccgccgggcccttccttccgcgggaagcggcttggccgacccccgcccccgcccgggcctcttgggggtttccggtgcccggccaccgtggggctggggactgaaagt

SEQ ID NO: 205232 - DNA, 62 bp, Homo sapiens
  chr19:13274019-13274081
  hyper
ggcccagcgggaaggcggaggcgggggtcgcgcccaggtcccgggggcgtcagaggcaatgg

SEQ ID NO: 205233 - DNA, 195 bp, Homo sapiens
  chr19:13954425-13954620
  hyper
gcaccctcccccacccgctgggacctctgggaaactccccgggctcccggagtagctctgggagcaaggccctccctggatccctccctctttcccggtgtgcctgtctttcccgctccatcctccagcctccaccgggaggaacgcggctgcattgttcctcaggaggaggccctgcctcggggcctggcccag

SEQ ID NO: 205234 - DNA, 418 bp, Homo sapiens
  chr19:13961290-13961708
  hyper
cggcctgaggctcgaacccaggtccgcgctggagggcggtggcggttgccgagcaacgcgctgtttgttggcgcggggggcggggccggggccggcgcgcggtgactcaccgcggcgtgatgcggacgggcgcggcgcccagcagcctggccggcggcccgatctcggctggcctcggcgtccggaggggcccggcggcgggggcgccttagcccccaagtgggcgccggaggcccgtggggaagcggcggagcaggtcccgggctctcggactcggttcgaatcccagccctgcctcttactcttgactcttgatctgtgacttcaaggctccttgcctcagtttacccgtcagtaaaagaagcgacactggagggtgcagtaacccaccactggcatttaaagcagctgagatgat

SEQ ID NO: 205235 - DNA, 1343 bp, Homo sapiens
  chr19:14073501-14074844
  hyper
agggcttagctggagggcagcgcctgcacgaagaggccgcgcgcgtcagtccgcgccagcttggccggcggctccagggtctccgggcccagcgcgggtgactcgccgccagccgccagtgagatgtcctgcggcagctcgtcctcgctctcctcctcctcttcttcctcctcgtctggaacacagggaccaagtccggctcggggcggggtggcaacgcccccgggctcctcctcctcccgagcccctccgttgtccgccacccccgggacccgcgccctgggtgggaacacgcctcgcctacctttgtcggggtccagggggttcagggaggtggccagattggcgaactggaggaagaagagaagaaaatgggtgagggtcccgccgcctggcgccccgcccgcgcccccagtggcccgcctcgcgcacctcgcccatgacggcgatgggggtctcgcccttggcctgggctacgcggtgctcgatcaggtagtacatgtactcgtcgtagagcagccggatgaggtggaaggaaccgaagctggcggcgctgcgcagggtcaggtcccggatcaccatggagctggggatggagacggagaggagaccgtcaggccccgtccggcccgaccccctctccccctccccgctgcgatgcgcccgggcctcgcgccagcccagtgactcaggctggatcccgcacagccttcccggcacatgagcccagggccccagcctgcccgcccagcctgcaggctcgggtcgtcgtagaagagcacctgagacccccagggacgcggggccttccctggtgccgcccggacccgatcccgccgcgcgcgcacctgtagaaggaccacttgaggaggaagagcttggcggccttggggaagccggcgctgccctggtagggcttgagcacctggctcaccacgccgtccagccaggccgcccactgctccagcgagttctgctgctgcagcgtcaccttgaagtcctgctccagccgctgcaccacgcggtcctcgcagcggcacacccacgaggcctgctcctggggcacagagggtgggcgggcgcccggggctcagccgccgtcacccccgcctggcccgccccgttaggctgcccctcattcgcccgccccgccccgccccgcgctcacctgcacgttggcgaagtccacgcggttgaggtcgctcagcatctggttgatctgtgcggtgttctgcagcacagcgcgcgccgcctgcgccaggtggttgagcgacgtgtagcgccgcagtgtctgcgcgaaggcgccagccgcggccacctgcgtgcagggattgaggggcttg

SEQ ID NO: 205236 - DNA, 174 bp, Homo sapiens
  chr19:14202317-14202491
  hyper
aagggcagtttgacgctcgtttctcctgcggggccgaaggagtgccggaatttcagctaaaccctggttacaaggacttcaagccaggacctgatcggcctgcacgctggggtccgaaattccctttccaaccccctgggggtgtgtgggtgggtgatcgaagtcgagaacacc

SEQ ID NO: 205237 - DNA, 81 bp, Homo sapiens
  chr19:14583720-14583801
  hyper
aaagcctgggaggaggggcgagccgtcgcagggagggtaaatggggatccagatgagaaacggatgcggaaaaaaaagggg

SEQ ID NO: 205238 - DNA, 32 bp, Homo sapiens
  chr19:14584167-14584199
  hyper
cgaggggccggtgcgcccctcaccagcattgg

SEQ ID NO: 205239 - DNA, 143 bp, Homo sapiens
  chr19:14607038-14607181
  hyper
cttcgggtggacccgacggaaacattccagagggatccctccgcctcgcccggctcttcccgactcctcccctcgccgcgaagcagtggaccgttccgccccgcctaagccgcggctggctgtaccaccggagggctgaggag

SEQ ID NO: 205240 - DNA, 164 bp, Homo sapiens
  chr19:14640086-14640250
  hyper
taccccgcccccgcgtctggcctaaccgtcgcttaccttggtttccacagcgacgccatcagggggcgtggcaaagggacgcgcggggcagagacctcctttggattggtggatggtcaagccccttctctttagcccctcctacaggcgttccgcccccttcg

SEQ ID NO: 205241 - DNA, 46 bp, Homo sapiens
  chr19:14887561-14887607
  hyper
ctcccatggttccagctgagctgccggcaggagcagcaggggaaag

SEQ ID NO: 205242 - DNA, 37 bp, Homo sapiens
  chr19:15121588-15121625
  hyper
tccgctccgcctagggttcccggccaggccgagagac

SEQ ID NO: 205243 - DNA, 214 bp, Homo sapiens
  chr19:15306318-15306532
  hyper
ggcttgtcccagacgcctgagactgaactcaacaagcggctgactcagtccttagcgtcacccgcaagatcccccccaccccggcccccagcgaaacaggtcggggcacggccgagcaagcaagggtgcgggtggcgttgggaggggagggcacagctcccgtcccctcctccaaggcccgcagggcgaccactgcggccccgaccgcgcgtcg

SEQ ID NO: 205244 - DNA, 379 bp, Homo sapiens
  chr19:15310946-15311325
  hyper
ccccttcccctccccgcgcaggggcggggtcccagggcctccgggtccccgcggccagaggagagaggcgggctgcgggcgggggagggggcgcgcgcgccgccgaggctccggctcggaatccggctccgggtcttgctgcgcgccggcctgggaagttttctccgagttcagagctcccagaacttcgcgccccctccccaccccccgcctggcccagcccgcccggggtgtcgggggcggggtgggggggcttttgtgcgagaggtccccggcctagaagtacctgggcccccaatcataacctacccaggactccaggcgtgagttggatggggacgagtcccgaactctgtacgcacccccccacctcgagtcc

SEQ ID NO: 205245 - DNA, 39 bp, Homo sapiens
  chr19:15311355-15311394
  hyper
ggactcctgggtcccttcatcttcagctctaatcgctca

SEQ ID NO: 205246 - DNA, 609 bp, Homo sapiens
  chr19:15334102-15334711
  hyper
aggcagggagagggacaggccgatcatgcgaggaatcccagcccaagcccccgaggtccccgctcccgccctaaaagatgcacgcgccaagcccttgggccagaaaaaaaaaaaaaaaacgggccgggattggctcaggctgggggaggcgggtctacgacgagacacgattttctattggcttactcgccaggactctgcccaatcgacgcgatcgtcttccccagaagacccccgcctccctcccgccggcggccgcggaggcggaagaaggcgcctttccgtcgccctagcaaccgtcagcggatctccgtcgcccgggcaactgtcccaggcctcccgtcagcctttgcctgggcccctccggtcactcggacaaccgctacccgttccggtcaaccatcaacccgtcccccgtcaccccggcaaccatcgccggacccacctacccctggacgccgtcctggtcctgtccgcaggcctcctcgccccaaacctccgccgcgggctccgacgtccgcgaccccacgtctcaggggctccctcctcctcctgcccgtcttctcgcctccccggggcggggggcattgctcctcccctggcaggggg

SEQ ID NO: 205247 - DNA, 120 bp, Homo sapiens
  chr19:15695669-15695789
  hyper
atccagggcctggcgaggggaaggcggagtatttctgagccaagaccctgacagcctctctggttgagcacagtggccccgtgctgagggcgggttgtcccagagcgcaggtggggacag

SEQ ID NO: 205248 - DNA, 169 bp, Homo sapiens
  chr19:16186794-16186963
  hyper
ctgcacctcggggacgtgaccccccccccaggctgacccgttcctcgctctgtcgtccccaggtggaggaggagctgacgcacctccagaagaaactaaaagggacagaggacgagctggataaatattccgaggacctgaaggacgcgcaggagaagctggagctcac

SEQ ID NO: 205249 - DNA, 102 bp, Homo sapiens
  chr19:16187000-16187102
  hyper
gggagcccgcggcggggccaggccggagccccggggccgggaaggcggggagagccgcagggggaggaggaagaggaggaggagaaggcggcgcctcccagc

SEQ ID NO: 205250 - DNA, 517 bp, Homo sapiens
  chr19:16187103-16187620
  hyper
ctttctccaaataagtcccgaaaaggggcactttccagcagctgtggccagcggtgccgacgtcaggccctcccccagcggtgctgacgtcggcggtccggccgggtgacctcatcgccccgacggcagccggcccggggggcggggagaggcgggggcggcccccgcgcaggcaaaggcttggggggccggggcgcggctgtgcagctctcgccggagccgagcccagccgagcgtccgccgctgcccgtgcgcctctgcgcctccgcgccatggccggcctcaactccctggaggcggtgaaacgcaagatccaggccctgcagcagcaggcggacgaggcggaagaccgcgcgcagggcctgcagcgggagctggacggcgagcgcgagcggcgcgagaaagtgagcgccccggcctcgggccccgcacccgcagcctcctcccccgcgcgccctcctttcttcccggcttcccgcgctgcccgcccgcgcgcagtcctcgggccgccttttta

SEQ ID NO: 205251 - DNA, 655 bp, Homo sapiens; identical to SEQ ID NO: 55781
  chr19:16187640-16188295
  hyper

SEQ ID NO: 205252 - DNA, 237 bp, Homo sapiens
  chr19:16222208-16222445
  hyper
ccagagacacccgccccaactactggcgtgcgccctctgctgtcgcctaacggaactccgggcgcgcgtgcgcacgcaccccaagccacgccccgccaggctgccggcgcgcgagcggttggcgccgctccctgccttccctctcctacagtggggcggggccgggccgcccgagtcgggggtggaaggcgggggccacataatgccacgcccccgcctcgtccccatttgaagccc

SEQ ID NO: 205253 - DNA, 214 bp, Homo sapiens; identical to SEQ ID NO: 131000
  chr19:16222493-16222707
  hyper

SEQ ID NO: 205254 - DNA, 120 bp, Homo sapiens
  chr19:16638141-16638261
  hyper
tgtgaggttcaatttcgtgtcctgaagctggggatgggaggctcaaagccacaaccaccaagtctcagtccagagccagtctccttgccatccttacacctgtccctgcagacagggagt

SEQ ID NO: 205255 - DNA, 61 bp, Homo sapiens
  chr19:16771042-16771103
  hyper
gctgggagggtcccgccctctgcaggccagacccccttaggggagcgcgagcgccccacct

SEQ ID NO: 205256 - DNA, 216 bp, Homo sapiens
  chr19:16772562-16772778
  hyper
agcgccagcggagtgtctataagggccactgcgctgggggctgcggtcaggttcagcgaaagtgacaccggttctcctccccactgcaactgcccagcaccctccactcccctcccttcccccacggtgctgaatctccgagcccccacgggaattcttccagccctggctccagatcctttccacttacggagcagaaccggccccaaggctggg

SEQ ID NO: 205257 - DNA, 31 bp, Homo sapiens
  chr19:17007055-17007086
  hyper
acgtcctgctgtaaaggccccggggccacag

SEQ ID NO: 205258 - DNA, 225 bp, Homo sapiens
  chr19:17008134-17008359
  hyper
cacctccccctcgccgctcgaccccgccctcaccacactgaccaccctcaacccattgcgcccagtccccaccacagtgaccacaccctcactggctcggccctgcccccagtatactgaccattccccagccacttcccttccgcacttaccactcccccagccacgcccctccccgctgaccgctcctccagccccgcctcccccgtacaggcagagcgcccg

SEQ ID NO: 205259 - DNA, 31 bp, Homo sapiens; identical to SEQ ID NO: 55797
  chr19:17008820-17008851
  hyper

SEQ ID NO: 205260 - DNA, 276 bp, Homo sapiens
  chr19:17355714-17355990
  hyper
ggggtgcacggcggcggcgcgcggatggggggctcaccggcaggtgtagctgaggttgcggcggatgcttcgcttgaaaaagctcttgcagccctcgcaggtgaagacaccgtaatgcttgccgctcgacttgtccccgcacaccacgcagtccacctgcagccccggccgctcctcgtcgcccggctcggcgtcgctggcggcaccggggggcgaggccgagtcgtcctcggccgcgcgcgggtagccgcccgccttgtccacgccgttcgtgtc

SEQ ID NO: 205261 - DNA, 67 bp, Homo sapiens
  chr19:17392435-17392502
  hyper
cccgtttttaaatgagatagtggcacacccggtggcatcctcccacccgggctcttatcggcggtcc

SEQ ID NO: 205262 - DNA, 139 bp, Homo sapiens
  chr19:17420265-17420404
  hyper
cggccaatggaagcgtgcaaagcgctcctatgtgggggcggggctagactgcacaccaatgacagggaggtggtggcgccatcagtgtgggctgtgccgtggctggaagttactgtgaggcggcggctaagaaggcggc

SEQ ID NO: 205263 - DNA, 376 bp, Homo sapiens
  chr19:17448123-17448499
  hyper
cttattcctattgtcagcctcgctgcgctaggaccctaaaaatttggtctcatgttgcccggggaacaacatttcgctacacctacctccataccgcctcccgctcccgctctcccttgcaccagccaatggaagcgagtatcttcagacggtgggcaggacgtatcctaagatacccaatggtggtcgagaatagttgagcactttactagtcaagccgcggagtgggcggggccccctgcccagacttgaagccacacaggcaggtcgggcaggcgggtcgcaggttgtaaatccatgtggcgggggctttggaccctggcggcccaagcggcacgtgggcctcgcaggtggggctacaggggaaggggtgcga

SEQ ID NO: 205264 - DNA, 174 bp, Homo sapiens
  chr19:17531180-17531354
  hyper
tggctacttcctgtgccttagttctctgggcagcctagaggtaagaggtgcccaccttcggaaccaccagggtctgcccacctcccctgcccattcacggtgccctatgccaggtgcgctgtccccgctgctagccaccctcgccgtgtcccccttccacccccagaacccgca

SEQ ID NO: 205265 - DNA, 185 bp, Homo sapiens
  chr19:17622145-17622330
  hyper
actcaccaaaatacgccctccttcagaaaatccctgccacctcgataggacgtcctcttcttgagctcccctctccggccctccctgatacagcaaggttgagcattcgggcactggcttcccgaactcacttcgactcaggcacagcaggcaaagattcaatgggtagggccggaccgactgcc

SEQ ID NO: 205266 - DNA, 239 bp, Homo sapiens
  chr19:17716539-17716778
  hyper
gggatgtggcctcctccatagggacgaggtttcccccatcccagctcaaaatgccccctaggtgctgggggcgtggcctcaagttggggatgtggctccttccttcgtcgcgcccttgggcgtggcctcccgagagggcggggcatcctccattcctaattccccaaaagggaaagctgagtcaagggcgtaggcgcagcccacccttggcgtggagccccccgagccccgcccctggg

SEQ ID NO: 205267 - DNA, 38 bp, Homo sapiens
  chr19:17790867-17790905
  hyper
gacaggaaagggggccgagagtggcgagggggttctca

SEQ ID NO: 205268 - DNA, 52 bp, Homo sapiens
  chr19:17792549-17792601
  hyper
gaggcgcgggcaggcgctgtccacggtgctgaatgctcggtcccacccgtgt

SEQ ID NO: 205269 - DNA, 224 bp, Homo sapiens
  chr19:17799175-17799399
  hyper
tgacgtggcgctgatgcggggcgggcaggcggagcccagggacgcctgatggggcgggggcgctgcgggctgggggggcgttaaagggcctggctccgggaaggggcgcctcgccccacacctcctcgttgcagggggacaaggggcgacggcggcccccaagcaggtttcctcctgtgcagaccctcacctgcactgaaatggtgcacgtgcccccgccaccc

SEQ ID NO: 205270 - DNA, 129 bp, Homo sapiens
  chr19:17958346-17958475
  hyper
catcccctgtttataatcctcaacgttctgcatcctggtatggtcgggtaccctgtgtctggaccgggaaggcctggagggtaggggctgggaactccgccccccaatccctccttcccaatccctcct

SEQ ID NO: 205271 - DNA, 34 bp, Homo sapiens; identical to SEQ ID NO: 12152
  chr19:17983839-17983873
  hyper

SEQ ID NO: 205272 - DNA, 89 bp, Homo sapiens
  chr19:18062904-18062993
  hyper
agaggagacgccttgcgggggggagggccccggctgtggccgcgacggactgcctccctcggcctgcggggtccgcgccccctccccgg

SEQ ID NO: 205273 - DNA, 279 bp, Homo sapiens
  chr19:18117878-18118157
  hyper
ggtggaagtctcctgagccaggctcagaggcggacagtcacggcaggggatgggttcagcggcagcgcattacgctgccacgagagggcgccagcgtcccgcagacgacgcagaggcaactcccgctggagaaactccatgcgacttttctttggggaaactgaagcccagagagaggtcacgccgtcccgtggccacaccgcagctgtggacctgggggtgcccgagcgtcccctgcattcagctctgtggcgggacgggggctgaggatgactggag

SEQ ID NO: 205274 - DNA, 50 bp, Homo sapiens
  chr19:18118523-18118573
  hyper
ctccctttgcatagcgggggaaacaggcctggaacagtcataggctctct

SEQ ID NO: 205275 - DNA, 99 bp, Homo sapiens
  chr19:18119043-18119142
  hyper
gcgtcggcatcttgagctgccggttcgcgagttcgaggccaggttccgcctgtcgtgggttcgcaccccggacgcgatgctattcgacaaggtgaaagc

SEQ ID NO: 205276 - DNA, 225 bp, Homo sapiens
  chr19:18336505-18336730
  hyper
tgcagcgcaagcagctgccgggcgcaggcgcgcgctcagcctgggactcccgaacgccctgcctcgaaaaccccctcaattcaggtcttcctccgtggacacccagagttcattgtgaggcccccagggcatctctttgctggcactgggacaggatgctggtgggagggggcaccaagggaaggagtgccccttccccctcctcccactgccaggacgcacagc

SEQ ID NO: 205277 - DNA, 144 bp, Homo sapiens
  chr19:18337130-18337274
  hyper
accaaaagcttcctgaagagcccgggggagccgcgcggggatccccgaggggagccgggcccggggaccggggcgggcgcgggggggccctgcatcgccaggactgcgtggaggctggaccgagcgccggctgcgcgggacctt

SEQ ID NO: 205278 - DNA, 136 bp, Homo sapiens
  chr19:18343303-18343439
  hyper
gacattccacaaccccgaaaaccttcggacccccagctatgttagcacaaggacagtcacactcagccacatacctacaggcaccacaaggggagacacacaggcacacccacaactacctgggacacatggaatc

SEQ ID NO: 205279 - DNA, 330 bp, Homo sapiens
  chr19:18420497-18420827
  hyper
gccgcccatgccgcggcctttctgctgcttctgctgctgcaggcctccgcggccgcggcccttggccaccacctcctccttgaccatgtcgatgatctcgtcggggatgcgcaggtacttgatggtgctgccgcggatgtagcactcgggcatccgccagaacttgtccccgtcctgcggagaaggggagcaggttattaacttaccaccgggccgtctggcccagccctgggagcgcgggaggccctgcagatcctgcccagcctgcaccccgtaccacccctgcaagctgcacagtatcagtcccgggacatacgtggcaaagggtcc

SEQ ID NO: 205280 - DNA, 40 bp, Homo sapiens
  chr19:18547990-18548030
  hyper
gactctcaagccccgccccactttcgggcatttttcagtt

SEQ ID NO: 205281 - DNA, 571 bp, Homo sapiens
  chr19:18548568-18549139
  hyper
acctgaagacaggccgcgcagtgaatcccgggtcccgtgcccttctccccgagccgccccgctctccccagcacgcctccttcctcagccccctggtccaccttgagaacgccaccctcgcggctgacgcgcgtcgtccggtactcgtattgcgcctcgatggcctcggggccgtagaccacgtccgggctctcgacgaagaactgggcggcggcctccatcgcggcgggctgggggcccggggtgagcagggggtcagcggggactctaagcggccggggccaagccagcctgggtccccacggaggccgtccctgccccgaaccgcactcaccggcgcagagtcgactcaggcagcggcggcggacagcgcgggctctcgggcgcgcgacctccggagaaaagcgctgcggcccctcccccgccccgcccccttccccgcctctcccgcgctgggagggaggggcccaacgtctggagacccggttcgaggcccgacaacccagagccaccgtggccatcgggtccccgcctggcggaagtggccaggcgtccacgagcgcggcgcgta

SEQ ID NO: 205282 - DNA, 209 bp, Homo sapiens
  chr19:18632799-18633008
  hyper
cttgctgccgtcgctaacccgcccgcacgacagcccgtagctcctatcctccttcagcgccgccatcttgcgaccatctctcccccgcgcccccttcccggctccagcgccgccacgccggccacgccccgccccgccgcccgctgacgcgctgcattattcatgagacgcggctggccacgccccccgagtccgaccaaaccaacagt

SEQ ID NO: 205283 - DNA, 104 bp, Homo sapiens
  chr19:18714351-18714455
  hyper
aaggactccccaggcggctggaagaagggactgcaggaggcaggggcagcccagcttcgcagagatggcagccaaggacagggtgatcctggcccccagggagg

SEQ ID NO: 205284 - DNA, 89 bp, Homo sapiens
  chr19:18715135-18715224
  hyper
caatctcccacccccttagccccagccggtaaggtcagaaggacactttctcctcccgggatatgggcgcaacaccagtgggagaacct

SEQ ID NO: 205285 - DNA, 521 bp, Homo sapiens
  chr19:18721516-18722037
  hyper
gcttgtccgctgcccgccttgacctcggctgctgtggcttcccggacgcctggcctgccgctgattcacgcccaggccggcctcagcgccccccgcctgccgcccccagccaggccgccccggggggtaggaagtgggggggggggcgagggcggcgccgagtcaactttccctcttaagccccgaaggaatgtcggcggatttcctgaaacccgaccctggccgcccgccggccctcccgcccctcacctggaccggctcccccgggaacagcaggaggggcgcgggggctcaccttgggggccggggtcaagtcctctttccgctcacccccccagcggcctagtgcagcggaaagggggctgggtgtgcggcaatcagcctctttcccttctcccctcaggcgacctgggtgatcgacccactcctccagcctcagtttctccttctgcaaaagggcgcggggtgtccctcctccctgatgcgttttaagcaatgcccaaaggtcacctcccatcatt

SEQ ID NO: 205286 - DNA, 50 bp, Homo sapiens
  chr19:18811449-18811499
  hyper
gtgcatgccagctggtcattcgcccggaaatctctgggaggaagtatcag

SEQ ID NO: 205287 - DNA, 119 bp, Homo sapiens
  chr19:19336136-19336255
  hyper
tccctgaaagcctcgccaagccaagggagagacacatggaagctcgctttgtgataagccacatccctgggtgagggccacgcccccgggtgaaggccacacccgttacgacaagtctt

SEQ ID NO: 205288 - DNA, 326 bp, Homo sapiens
  chr19:19431245-19431571
  hyper
gcctgagaggaggcgggggctgttacctgcaacatcccggttgtccatcttgagactcatccaatcccacaatgctccggcgccccttaaggggccctgttatagtgtgcatcgcctgatgggagatgtagtccgcctcggtcagactcgccctattactgcgtgaacgactgggtttttttttttttaacctccagaaacggaagcctcagcctatcagcgatgcctaagtcccagtcacgataaccaaacggcgtcgcccttttacaccttcccggagcggcagtcatcccaaatacaaactacatgttccaggatgctttggg

SEQ ID NO: 205289 - DNA, 84 bp, Homo sapiens
  chr19:19651027-19651111
  hyper
cgtcctggttcaacgtggaccaccccggaggcgacggcgacttcgagagcctggctgccatccgcttctactacgggccagcgc

SEQ ID NO: 205290 - DNA, 99 bp, Homo sapiens
  chr19:19729152-19729251
  hyper
tatccagcccgttccgtttgaaccccatacatcccttcgtcctcgggacccccctccagccctcctcaagcgcccctcgtcagtctggcctccacgccc

SEQ ID NO: 205291 - DNA, 135 bp, Homo sapiens
  chr19:19729395-19729530
  hyper
gcggggcggggggcgatggcgcggggcgcggcggggcggccatgagcggcagggccgggcgggcgctgtgagggtgccgtcgagcctggagcactaccactggcgccgcagccaaccgccgctgcctgagcgccg

SEQ ID NO: 205292 - DNA, 162 bp, Homo sapiens; identical to SEQ ID NO: 12178
  chr19:19729585-19729747
  hyper

SEQ ID NO: 205293 - DNA, 50 bp, Homo sapiens
  chr19:19738572-19738622
  hyper
cgagggggcggtgccgaggcgtggaggtgatcggagtggacagagaggcg

SEQ ID NO: 205294 - DNA, 126 bp, Homo sapiens
  chr19:19738668-19738794
  hyper
cgggcggggcaataggctgttccgggtgggacggaggacactggcggtctccgggacaaagacagcggttggggaagggatggatggccgggcctccaggcgtctccagactggggaaggggtagg

SEQ ID NO: 205295 - DNA, 247 bp, Homo sapiens
  chr19:19739428-19739675
  hyper
tccctgatccgacttggctcccaccgcccggacccccgcccagcttcggctttgccagctcgcagtatcagcgagccgcggcctcctgtgcgaggcccacctctgcggccccagctgatcatcgggcgcacgctagggttttgcaatcccgcccccgtacccctcaccctgggacagcgctgccccctgcaaagcccggccctgccctgccctgccctgtggcttcctccctcggcctccctgcggc

SEQ ID NO: 205296 - DNA, 261 bp, Homo sapiens
  chr19:19843330-19843591
  hyper
aggaacctgaccccggcagcaaggacctagccaggcttcggttctcacaagtgaggaaacgcacccgtggattcatcgtaaggtttccaaccaagtggtttcttaaacgcacaaaccccacagaccgagatgggatctccccaggaccctcccgctgtcaccgaacaatccggggagacgcggggctgcgggcgcagagctgcccatagagggctccaggaccgggggccgaggtcgccccgcggggacgggacaggacgc

SEQ ID NO: 205297 - DNA, 68 bp, Homo sapiens
  chr19:19844044-19844112
  hyper
ctggcttcagtccggcttgtccccgccaggacgtttgcgtttaaaccgaatgtgttctttgcctccca

SEQ ID NO: 205298 - DNA, 259 bp, Homo sapiens
  chr19:19887242-19887501
  hyper
ttacgcaccaccccgatgcatactgggattgtagttctgaagctacctacccatgggctgagagcagtaaagagactacaactcccagcataccaggcgcggcgcgcaccgccctgccccttcctctggggttgcgaaccgcccccgagcctggtacaggctgggattgtagtcctgcagccttgtggccgaagggctgggactggccatgagattacatgtcctagcatgctcagccaggcgcgcgcagctctgcccc

SEQ ID NO: 205299 - DNA, 79 bp, Homo sapiens
  chr19:19932101-19932180
  hyper
cctgacgaccttcccgtggcccctgaacaatctgggaaagacctgtgggtgcagagctgcccggagagggttccacgcc

SEQ ID NO: 205300 - DNA, 44 bp, Homo sapiens
  chr19:19932461-19932505
  hyper
cctgcaggtcacagggccacagaggctgggcctctaggagctga

SEQ ID NO: 205301 - DNA, 52 bp, Homo sapiens
  chr19:19932709-19932761
  hyper
gactgagtgaagaaagagagacagtctaagctgcagccttttctttttttaa

SEQ ID NO: 205302 - DNA, 695 bp, Homo sapiens
  chr19:19976554-19977249
  hyper
agcggctggggaggcggggccttaggcattatccaatgagggacgctgggccggaaaccgtccaatcaggcacgcagctggagcgaaccacatggtttctgggggcctttgtttctcgctgcagcgggagctccaggtttatcctcagtgttctgtgtcctgtgcttatagaggcccgtcctctgtggccgtgtgacctgcaagtattgggagagccacagctaaaccccgggacccctggaagcctagaaatggtgagtgccgggtccaacgtcccgagagaggggagaggctgtttggaacggtgggaagtggctctggcgggactctgcttcctcacagtcagctccacaatctgccgccggagttctccctgcccagctcggcctcagtccccttcagccataagatggcggctgcggtgacatccggggcccggcacagtgattgtgccctggcctggagccctctttcagcagctctgcacccgcagcaccgcgtctctcccagatcatgcaaggaccacgggagggtcgtcaggggagaatcctgactcggttccctgcgggttcatgaatgggaagagctttggtccgtgaggttgttagaaacaagcgcttggtgccgcaaaacaacacaaaacaaaaaactacccagcacttagaaaatttcacaggaaggcatatttacttctg

SEQ ID NO: 205303 - DNA, 60 bp, Homo sapiens
  chr19:19977294-19977354
  hyper
aagaaaggaaggaaggttttttttttttttgaggcggagttttgctcttgtggcccaggc

SEQ ID NO: 205304 - DNA, 82 bp, Homo sapiens
  chr19:19977572-19977654
  hyper
aaaggggtttttaaccctaaacgccgttattgcctctgtgtccttcccccattggccggggtctgacctcacaatctaggct

SEQ ID NO: 205305 - DNA, 323 bp, Homo sapiens
  chr19:20011267-20011590
  hyper
aggaagagactttacgttaaaaataaaaaccccttccctcctttgttcagggtgctcttgcgatcgtgattaatgcaaacaaaaaccttttgcagaagtaaattgccttactaaaaaaacttttgcctgagtactggtttcactttgcgacaccaaacactttacttccaacggtattattaatatgacaacgaaatacttctgttcaccttttcaatacattcaaaaagagagagtaaaaaagagaatgttcccatgctctggggtggacgtggctcagctcagagaggaagccctggctgaaaaggctgcagcttaggctg

SEQ ID NO: 205306 - DNA, 71 bp, Homo sapiens
  chr19:20011650-20011721
  hyper
ggcgggaccttaagaattatccaatcagggacgctgggctggaaacgtccaatcaggcaagcagccggacc

SEQ ID NO: 205307 - DNA, 108 bp, Homo sapiens
  chr19:20011722-20011830
  hyper
aacagggcggcttctggtttggcgggtcctttgtctctcggtgcagccggagctccaggtctcctcttcactactctgtgtcctgtgctcctacaggcccagcctctg

SEQ ID NO: 205308 - DNA, 73 bp, Homo sapiens
  chr19:20162581-20162654
  hyper
actttgagcaggctgggaaacgatcccagacccttgagggtctgtgagaaatcaaactttcggcactttggaa

SEQ ID NO: 205309 - DNA, 145 bp, Homo sapiens
  chr19:20188872-20189017
  hyper
agcctctgtggccctgtgacctgcaggtattgggagatccacagctgagggacccccggaagcctagaaatggtgagagtgcctttccagcattccgagagaggggagggactggttggaaccgatgggaagtggctgtggcggg

SEQ ID NO: 205310 - DNA, 120 bp, Homo sapiens
  chr19:20189077-20189197
  hyper
gcctcagtccccttcagccataagatggcaacagcgccgacagccgggccccgcggcgtcctgtctcttccctgccctggcctggagccctctctgggcagctctgcacccacagcgctg

SEQ ID NO: 205311 - DNA, 120 bp, Homo sapiens
  chr19:21541709-21541829
  hyper
cagcgacgctgggctgggaactgtccaatcaggcacgcagcttgagcggagaggacggcttccgggatgtggcgggatttgtccgcttctttgtctttggctgccgctggaactccgggt

SEQ ID NO: 205312 - DNA, 180 bp, Homo sapiens
  chr19:21542069-21542249
  hyper
tgcccagctcggcctcagtcgccttcagccataagatggcggttgcgccgacagcccggcccccgggcgtcctgtctcttccctgcatagtgactgtgcccttgcctggagccctctctggggaatctctgcacccgcagcgccgcttctctaccggattgtgcagggaccgtgggaggg

SEQ ID NO: 205313 - DNA, 120 bp, Homo sapiens
  chr19:21542309-21542429
  hyper
tggggttcccagttcctattatctcctattaaaagttaatgggagtcactgcaaaaatattaaaagaatttaatcaaagagtggttctaggctgggcgcggtggctcacgcctgtaatcc

SEQ ID NO: 205314 - DNA, 335 bp, Homo sapiens
  chr19:21579819-21580154
  hyper
gggcctgaaggggcgggcccttaaaccgtatccaatcagacacgcagaactgggaaccgtccaattaggcacacatttggagcggcgaggacggcttccgggatgtggctgggccattgtttctctctgctgccggagctccaggtctacccttcactgctctgtgtcctcagcgtgtgtggcttcgtgacctgaagatactgggaaatccatagctaagatgccaggaccccctgaaagcctagacatggtgagagtgctgggtccgacatcacgagagaggggaaggagttgctcggaaccggtgggaagtggctgtggcgggactcaggcct

SEQ ID NO: 205315 - DNA, 101 bp, Homo sapiens; identical to SEQ ID NO: 12199
  chr19:21580233-21580334
  hyper

SEQ ID NO: 205316 - DNA, 40 bp, Homo sapiens
  chr19:21646195-21646235
  hyper
ggtgcttcagtttatttttgaacagggtaaagtaggaact

SEQ ID NO: 205317 - DNA, 97 bp, Homo sapiens
  chr19:21646437-21646534
  hyper
gctgagctgcggggcactcaggctcacaagaccgtcccgccaccgccatttctggcgcgtcccaaagaggcctcccccgtctccaaacgccctgccc

SEQ ID NO: 205318 - DNA, 211 bp, Homo sapiens
  chr19:21688290-21688501
  hyper
agctaggctgtcacgcttcattctgcccagcaactgatcaccctctgtcactcagggcctgagagggcgggtcttaaacattatccaatcaggcacgcagctggagcgacaggacggtttccggaatatggcggggcgtttggctcttgctgcagccagagctccaggtctcgtcttcatttctgtgtcctttgttcttagaggcccagcc

SEQ ID NO: 205319 - DNA, 170 bp, Homo sapiens
  chr19:21769119-21769289
  hyper
tcccccagcccgcccgagagggtttgctggggcagggtggcccctgggacgggttccagacagttctaggcgctcaggtccgcagctgtgctacccccgccgcccgggacgcccggtccccgccagggccctctcactgtagctttaaggagggctggggccgggtgcag

SEQ ID NO: 205320 - DNA, 34 bp, Homo sapiens
  chr19:22018874-22018908
  hyper
gtggatcccccaatacccgcaggtcacagagcca

SEQ ID NO: 205321 - DNA, 60 bp, Homo sapiens
  chr19:22019028-22019088
  hyper
ccgtgcctgattggacggtttccagcccagcgtccctgattggataacttctaaggtcct

SEQ ID NO: 205322 - DNA, 87 bp, Homo sapiens
  chr19:23299824-23299911
  hyper
cggcctttgtttctcgctgccgccgaagctccaattttcgtctgtctgctttgtgtcctctgcacgtagaagcccagcctgtgtggc

SEQ ID NO: 205323 - DNA, 120 bp, Homo sapiens
  chr19:23432613-23432733
  hyper
gcgtgaaccaaagcgcccggcctgccataaatttttaatagggggaaagatgaactggaaacgcagcggactaaagcccttcccattcatgaacccgctccccgagtcaggattctcccc

SEQ ID NO: 205324 - DNA, 169 bp, Homo sapiens
  chr19:23432793-23432962
  hyper
ctgcccagagagggctccaggtcagggcacagtcactgggcggggaagagacaagacgcccgggggccggctgtcagcgaagccgccatcttatggctgaaggggactgaggcccagctgggcaaggagaactcagggcgcagtttgtggagatgactgcggggaggcc

SEQ ID NO: 205325 - DNA, 120 bp, Homo sapiens
  chr19:23433023-23433143
  hyper
cggagccgccactctcaccatttctaggcttccaggggaggccctggcgtcttagctgtggatctcccaatgcttgcaggtcagagggccacagaggctgggcctctaagagcaggggac

SEQ ID NO: 205326 - DNA, 132 bp, Homo sapiens
  chr19:23433296-23433428
  hyper
cccttcaggccttaagtgacagaagacctgaccaaacgctggactgaatgaagaaagagtgacagcctaagctgcagcgttttcaggcagggcttcctccctgagcttagcccaccccggagggtatttgca

SEQ ID NO: 205327 - DNA, 124 bp, Homo sapiens
  chr19:23456491-23456615
  hyper
gggcaacaaagcaagactccgtctcaaacaaacaaacatgtttaacaagagactgggagtctcacctgccacagctccttctacgcacacacgagtcggaattctgccctaatgacccgcctgg

SEQ ID NO: 205328 - DNA, 237 bp, Homo sapiens
  chr19:23456881-23457118
  hyper
tcccagcttccaggatgtcctggcatcttagctgtgcgtctcccagaacctgcagatcacagggcaagaggctgtgacagtcaccgggggctcccgaggtggaggacgtaaaacagcagagaccgatcccaagctgtggcgggagtgagatacaaaggccccaccaaatgccggaagccacgccctcctctccaactgggcggttcctgcgctagcgccactgattggataaagcac

SEQ ID NO: 205329 - DNA, 58 bp, Homo sapiens
  chr19:23577691-23577749
  hyper
attaaattatttaatcttttcgcggtgacgcccataaatttttaatagaaaaaaagag

SEQ ID NO: 205330 - DNA, 120 bp, Homo sapiens
  chr19:23578195-23578315
  hyper
acacaggctgggcctcctggagcagaggacacagagcagtgaagtcgagacctggaaactccggcggcagcgagagacaaaggcccagccacatcccggaagccgccctgtccgctccag

SEQ ID NO: 205331 - DNA, 82 bp, Homo sapiens
  chr19:23598013-23598095
  hyper
cgttaacgttttaacgttgactccctttactttgcaagagaagaagctgggcgcggtggctcatgcttgtaatcttagcact

SEQ ID NO: 205332 - DNA, 89 bp, Homo sapiens
  chr19:23598868-23598957
  hyper
ccgccaaatgccggatgccacgccctcctctccaactgtgccactgattcgataaagcaccagcactcgcccagtaccactccctccac

SEQ ID NO: 205333 - DNA, 180 bp, Homo sapiens
  chr19:23869522-23869702
  hyper
ccggtgacggccctcctgtggtccctgcacaatctgagagaaatgcggcgctgcgggtacagagctgcccagagagggctacaggccagggcacagtcactaggcagagaagagacgggatgccccggggctggctgtcagcgcgccgccatcttatggctgcaggggactgagccgagc

SEQ ID NO: 205334 - DNA, 283 bp, Homo sapiens
  chr19:23869882-23870165
  hyper
tttctgcaggtcacaggcccacagaggctggacctctaggagcagaggacacagagcaatgaaagcgagacctggagctccggctgcagcgagagacaaaggcgccgccaaatcccggaagccatcttgtctgctccagctgcgtgcctgattggacggttcccagcccagcgtgcctgattggacaacgtttaaggtcctgacccttcaggccctgagtgacagaagatgtgatcagacactgggctgagtgaagactgatagcctgcgctgcagccttttc

SEQ ID NO: 205335 - DNA, 700 bp, Homo sapiens
  chr19:24216104-24216804
  hyper
gcactaatgctgaacggggcgggggcagggggtgggggtgggagtggtatggggagagtgccggtccttatccaatccttggcgctggagcggcaaccgcccaatcaagcgcgcagttgaagaggagtgcatggtttccggcatttggctgggcctttgtctctcgctcccaccagagcttggaatccgtctctgctcttctgcattctccacctcgggagcccctggggactctgtgacggcctctgttgccctgtgatctgcaggtccggagagacgcacagctaagatgtcaggacatcctggaagctgggaaagggtgagtgtgcggggttgggcatcccgaaaggagagagcgggctgtgaaaccggcgggactgccttcgtcaccgctcccgggtttccgacctgaggtccctgctggcgcagttcagccccaggcccctctggccgcaagatggcggctgggcccgcagccgggatccccgcgttcagccccgtccctgcggcgcccagtctggagctccctgggcagctctgcatgcagccccgagtatttcccagattgttcagggatgccaggcggatcatcagggcggaatcctgacttggtgtgtgcgtggcaggagctgcggcaggtggggctcccgagtctcttttcttaaacattttgtttgtttgagacggagtcttgccctgt

SEQ ID NO: 205336 - DNA, 75 bp, Homo sapiens
  chr19:28284060-28284135
  hyper
tacagtggcagcagcgtccctgtgcgaggtctaacccaggtgtgggccctgcagccagcccgggggtccaatggg

SEQ ID NO: 205337 - DNA, 811 bp, Homo sapiens
  chr19:28284338-28285149
  hyper
ggcccctcaggaggaaggggcggggagatcccagctactagaggacgcccgttccaatggcaactctgccaaggcgcctatgagagcctcttggcttttacctggtctgcgagaaatcaaactttgggcacaagtcatgaagccgacaagcccgggagacacagtgtcagaattacaaggtgagatcagccgcccggccaagctatcttctcgctagcaggtgaggcccgtgaacagccaagctccccttggcacggcggaaccgcagtggacgcgtggaggggctccgtagaggagggacctttgcttgggatgcggggagctgtagtctcttatctgcacccagcttgttagttgtacgcctgcaggactacaatctcagcacaaagcaggattgtagggcggtgcggatccctggagggagacagcgcggtgcgctcctgccggccatgctggctggggtggtgtcttaggcggttccagccgttagtcacagggcggccggactacaatcccagcatacaacgggagtggaggtggtgaccttgagagagggcctgtgctgtgcgcgcctcgcggggcatgctgggagcagtagcatcttagctgcttccggccgctggtcgcagggctgcgggactacaatcttcgcatgaaatggaagagagggtggtgcggatagcttgaggaaggtacggataccttgagggaggtatggatacgttgagggaggtacggatacgttgagggaggttacggatacgttaagggaggtacagcagcggtgcgcgccttgcagggcatgctgaga

SEQ ID NO: 205338 - DNA, 32 bp, Homo sapiens
  chr19:30019081-30019113
  hyper
tccagtctccccagttcagccggcaggtgtgc

SEQ ID NO: 205339 - DNA, 99 bp, Homo sapiens
  chr19:30155980-30156079
  hyper
gtgctgtgaggcccgccggaggcaccagaaggcacaagcctcccactgcccctttccccgccaagtcccgcaggtctcgcagtcgcgggcgcccccacc

SEQ ID NO: 205340 - DNA, 87 bp, Homo sapiens
  chr19:30156299-30156386
  hyper
gagccaccgcgggggcgtgtccggcggagctggccgggacccgggcggagcgggcggggacccgggctactgcggtgtggactcgag

SEQ ID NO: 205341 - DNA, 42 bp, Homo sapiens
  chr19:30716161-30716203
  hyper
ggctcatcaaagctaaatgccgcaagacctatctagttgctg

SEQ ID NO: 205342 - DNA, 60 bp, Homo sapiens
  chr19:30718934-30718994
  hyper
ggtggggtgtgcgtgcgtgcgtgtgtatgtgcgtgcgtgtgtgtgtgtggaaggggtggt

SEQ ID NO: 205343 - DNA, 72 bp, Homo sapiens
  chr19:31839494-31839566
  hyper
aggggagaaggaaacgccagcatctaacatggacttgacagtcatctgacaatacccagaccctgtgcgctc

SEQ ID NO: 205344 - DNA, 158 bp, Homo sapiens
  chr19:31841177-31841335
  hyper
cccccaggacccgccgtagccacttcccccaattttttttccccggacaaactttcctgggcccgtcccgggggtcggtgtgggagggggttccttcaagtttcctctcctgactttgggatgatcagggtccctccaccccgcccctcgcccccggg

SEQ ID NO: 205345 - DNA, 153 bp, Homo sapiens
  chr19:31841755-31841908
  hyper
tccctgggccagctctcaggccgggaatggggcggccgcgccggggccggctccgggcgctgccgggcggcggctgctggagcgcgggggcggcctccgggcccactatccccgaggcggccctgcgcccgggcgcgccggctggggctctgg

SEQ ID NO: 205346 - DNA, 124 bp, Homo sapiens
  chr19:33166794-33166918
  hyper
gctctgcagcctgcttgccccggagttggcacccacggaggatggggaccgcaccctcagcttcgcagggagccaccgtggaggccagggcggtgcagagacacgacgtgtgactcggagtgcg

SEQ ID NO: 205347 - DNA, 320 bp, Homo sapiens
  chr19:33167523-33167843
  hyper
ggcgcctcctccggcgtggcggcgcgcgcgctgagcacccgcagcctgcggctcgaggcggagggcgacttcgacgtcgcggacctgcgggagctggagcgcgaggtccttcaggtgggcgagatgatcgacaacatggagatgaaggtcaacgtgccccgctggaccgtgcaagcccggcaggcggcgggcgccgagctcctgtccacggtcagcgccggcccctcctcggtcgtgtccttgcaggagcgcggggggggttgcgaccccaggaaggccctggccgccatccttttcggcgccgtgctgctggcggctgt

SEQ ID NO: 205348 - DNA, 107 bp, Homo sapiens
  chr19:33167907-33168014
  hyper
ctccctcccctgagaaaagactcgggatgggtgtggggtctggcctgtgcaaggggagtggtcctaaaaccccgtgtgtgcatgggtacacgcgcgtttccagtgca

SEQ ID NO: 205349 - DNA, 144 bp, Homo sapiens
  chr19:33182512-33182656
  hyper
ggcaagtcatatgcgcccttaagcattcctgcttttggtccaagcttcctgcgtgggaatactgcggtcctcctttcaggcagctgtgaatgacaaacggtcgctggctgccgtgacacccattgtcccgcgagagtgccctag

SEQ ID NO: 205350 - DNA, 39 bp, Homo sapiens
  chr19:33555231-33555270
  hyper
aaataaatatgagaccgccaacacgcctgggatggtctg

SEQ ID NO: 205351 - DNA, 383 bp, Homo sapiens
  chr19:33555692-33556075
  hyper
ccgaaagtagccgtcgttctccttctccagcggctggggggccgcgggcaacagcgcgtcggtcatgctagcggcgcgggcgcggagggcggacggcggactgaggcgcggcggctgaggctggcccgagaggacgtgcggccccgcccctgtccccgcccttccccgcccctccactcccaccccgtcccgcggcccttctagccccgcctgaggccgagcactggagccctggagacgcgccccgccccgtcgcgggccccgaacccgcgccccttgaggcgctcgtcacccggagagctgcgccctgggcgcggcgcctcggggttgtctgtgggcgtcgtggctgactcaactttgcgagtgccgcgagagcgcaggaa

SEQ ID NO: 205352 - DNA, 242 bp, Homo sapiens
  chr19:33685236-33685478
  hyper
acagacccacggacgctctaccggcggcacccggccgggcgggctgggcgcagcgcggggcggcccggggacgccggggccgggcgggctgcgcgccgcggggcatgggcgcgccgggggtccccgggcccaggccggccgcggcggggctcccggggcgcgggggcagcggcgggcgggggtcttccctggcggccgccgctgagcccccgcagggcccgtgacgccgcggccgatgtggc

SEQ ID NO: 205353 - DNA, 244 bp, Homo sapiens
  chr19:33685658-33685902
  hyper
aggaggcggcgcccgcgggcggccgggcccggcatggagaagcgcgcggccgcggggctggagggcgcgccgggcgcccgggcgcagctggccgtcgtctgtctgggtgagtgggccgcgcgggccgggcaggtccgggtcccccgcatggcagtccgcgccgcgccctgaccgacctcctctccggccgcggcatcccgagccccccaccgcggtggctcccgcgcggagacccagagagggg

SEQ ID NO: 205354 - DNA, 137 bp, Homo sapiens
  chr19:33686020-33686157
  hyper
cttcgtgcaggcggcagccttcaacccggcccgcccgcgctgagcctggagacgagggggccccgggagctggggacaaaggccaggccggctgtcccctgaagaagaaactgtttccggcccggagttggggtggg

SEQ ID NO: 205355 - DNA, 1320 bp, Homo sapiens
  chr19:33790839-33792159
  hyper
ttgactttgatatgtttatattatagatataatacataaaacatctagagtgagactctacgttctccccaaaagaagagaaccaagccgtccttccctgctcccagccccagtgatgcgttggcgggaggccacctcccttcccgaccaggagccagggcctctgggggacaagccttgtgggcagcccaggccggaggggctggggaaagctgagggcaaaggagaacccccctcacctcattggtcccccaggatcaaaagtaatcccaaaaccaaaaggaaagggagtctcagacccttcccccagctgccgacggagagtctcattttggcaagtatccgagcaaaaccaaaacaaaacaaaaaccaaataaaatggtggtttagcagagacgcgcacattcacattgcacaaggcactgctggggcacagaggccagatacaagtgttgatatcggctgataaagcaaaatatttggaaagcttgtcataactccggtccctctgggatggactgatcgtgcttcgtgttcctaggcaatgctgaaggcatacagtacaaacaaggctgagggtcccagtggcccttcaccccccatgcccgccccacagccagatctctaggtctccctctcccaccaggggtatacatcctcagagctgacccacgacctagctttctggtgtgactcggggtgggggctcccactggtcacctggtgacccccatcgcagtgagttccgccccaaggggaagcccagcctatagcaggctggggtggggtgtgtgcggagggaggtgggagaggcgtggaactagagaccctccaccttcatgtagaactaggggaacaaccttaggttccaagccccaagtccctatgtttccacccctttctaaggacaggcgtggaggagcggctggggctggcgggcttgtcgggatctcagctccctgagccctcctcctgccacgggcctgctcccctccttctctcatgggggtctgctgtagcctcgggaaggaggcaggaaacctccaaataaaatgacaaggcacgatttgctccccctactcagtaggcattggagcggtgagtttgcatttccaaggcacaaggttatcctaaatactagagttgccgggctcccagctcagccccaagaattctcccctcctcgcagggagaagccaccgcctggccccctcatcttagacgcaccaagtccggcgcagaggaagggaggggacacgcggagcaggccaggctttcaggaggcaccggaatctcctagtcctggctcgcacggctcgg

SEQ ID NO: 205356 - DNA, 1246 bp, Homo sapiens
  chr19:33792630-33793876
  hyper
cgtgggcggcggcgtggggtgaccgggctgcaggtgcatggtggtctggccgcagtgcgcgatctggaactgcaggtgcggggcggccaggtgcgcgggcggcgggtgcgggtgcgggtgcgagggcggcggcggcggcggcggctggtaagggaagaggccggccagcgccagctgcttggcttcatcctcctcgcggggctcctgcttgatcaccagcggccgcagcgccggcgccccgacgcgctcgtacaggggctccagcctgccgtccaggtagccggcggccgcgcagccgtagccgggcgggggcccgtgcgctcccccgggcatgacggcgccgccggggcccgcgggcgcgcccgggtagtcaaagtcgccgccgccgccgccgcccgtggggcccacggccgccttggccttctcctgctgccggctgtgctggaacaggtcggccaggaactcgtcgttgaaggcggccgggtcgatgtaggcgctgatgtcgatggacgtctcgtgctcgcagatgccgcccagcggctccggggcggcaggtggggcgggaggctgcgcggggcccgcgccccggggaaagccgaaggcggcgctgctgggcgcgtgcggggggctctgcaggtggctgctcatcgggggccgcggctccgcctcgtagaagtcggccgactccatgggggagttagagttctcccggcatggcgagcctcggcggcctccagcctgcgcggggcgtcgccgccgcccacccggagaccctgctcgcccgcgcccgcgcacctccgggtcgcgaatggcccggcccgcgccggcccagcttttatacccggcaggccgcgtcgccccctagagtccgaggcggcctctgtccccgggctgcggcggcgcggcgcctgctgggtcctagcgcgcggccggcatggggcggcgaaccagcgcggcacagcgccgcgctccccaggcaggccgcggcgcaacgcccaccgcctccagcgcgcccagcagagccgcggcgctcgctccaagctccgcccccggcccggccgtcgcccccgcgcccacgtggtcggtagcgggggccccctcctcctgcctgccctaggcgcccgtatccagccacggccgggagcccaggagtatcccgaggctgcacggggtaggggtggggggcggagggcgagtcttggtcttgagctgctggggcgcggattctctttcaaagccagaacca

SEQ ID NO: 205357 - DNA, 440 bp, Homo sapiens
  chr19:33793960-33794400
  hyper
gagaggtcctgagcgcggtggctctgcgtctcctagctctgatctccaggctacccctgtgattccgcgcagaggtacctctcggaggacgccggggtcccatgggcggcgccgcgcagggcgctaggaccccgcggggagcggaggcggcctcggcccgggagcctggaggacctggccggtcgatccgcccgggctggaaaactttctttataattacttctccaggtcggagcgcgcggcttgctaggcgcgcggggccggcgctgttacccggcgtggagtcgccgattttttttcctgcgggaccgcggggccccccagactagcggagctggacgccggggcgagcacggggaggggcgcaccgagggaggagacaaacttaactctggggccgggattccgaggcgggggccgcagccctcgaggcccgaagc

SEQ ID NO: 205358 - DNA, 70 bp, Homo sapiens
  chr19:34114303-34114373
  hyper
ccatctgcttggcgcgatctggcgcagcagcagagcacgtgggagaggcgttgggtgcagggaggtagta

SEQ ID NO: 205359 - DNA, 112 bp, Homo sapiens
  chr19:34175322-34175434
  hyper
gggcaggaggcagcctgagagtcggcagccccgccttggagtctgagcactcgcgcccatccgtcaaccttgcagagcattgcaactttatgcctacgcataaaaactggag

SEQ ID NO: 205360 - DNA, 360 bp, Homo sapiens
  chr19:34286932-34287292
  hyper
ttcccaagtcccgcccccagccccgggcgccgcggcggcggctgctctcctctttgtaaccgaggagtcaagaaatgtgagaaacgtgccctgtgttacttatttgggagccgaaaatttatgcccagctgaaagcgcccggggaaatattacatcagatgaaatgacaatgattaaaatcagcctctcccccgccccctccccgagcccggaggaggcccgggcgccgcgtggccggccggcggggggcggggggctgggccgcggagggcgctggggcctgggcgcaccgctcccgggagggtcctggccgcggccccggcgggaaggcgcgggcttcgggagaggcgggtggggatc

SEQ ID NO: 205361 - DNA, 576 bp, Homo sapiens
  chr19:34310890-34311466
  hyper
ccttttctgtgtcctggacccggttcagggcccccgaggaagctgcggtttggggcgagccgattgcaccagcagggccgggctgctgctcccggggctgacgcgggccacgccctcctggacgcggacacacccccatttccccgggcccacagagccacgcctggccctgcagccaaacagcgggaaggcagattggtacgagtaggtacaaggccctggaattctcgcccggttgccacacactgcacggagcataattgggggaggttgtgcaactgcccgggaagccggggctcgcaacgagggctctctccaagtccccatcacaggcctccggggagcctcgggacagagcctgacgccaccttcgggtgacatcgatggcctcgctctggcagaggagtagtgtggctctgccgagaactggggagcccgggtccccgcagggccaaggggagggagggctggcggaaggggccgcgcccacagccccaggtggcagcagcggcggtggcggtcccgactggcagagcctaacgagaacagggcctatccccaggggccccgggctgg

SEQ ID NO: 205362 - DNA, 78 bp, Homo sapiens
  chr19:34311498-34311576
  hyper
aggcgcccgccagaggccggaggctgacagtgcctttcctatcctatgggtctattgtgggcccgcggagcccccatg

SEQ ID NO: 205363 - DNA, 116 bp, Homo sapiens
  chr19:34972067-34972183
  hyper
cgcgaggaccagtccccaaccaacccgctcctagttctgggcgccttccccagcagtcagatgggggcttcagaggccggtgcgcggccacatggccccgggccaggcagggggtc

SEQ ID NO: 205364 - DNA, 149 bp, Homo sapiens
  chr19:35168260-35168409
  hyper
taatttcttggtccgggcgccatggcccttataagtagagggtgtcccttggtttcgagttgtatcgttcaccagaggacgactgtgtgccccaggacaatttgcgcatggtcctagctggccggctctaggtcgacggccccaggcgg

SEQ ID NO: 205365 - DNA, 39 bp, Homo sapiens
  chr19:35168868-35168907
  hyper
acgcggggtgatgacggcgccgacctcttggcactgttg

SEQ ID NO: 205366 - DNA, 94 bp, Homo sapiens
  chr19:35168992-35169086
  hyper
aaccttgaacaaatgggttcagtatctcggaatttcagttttgtcttcattttaaaaaataaatctggtttagaactcgacctcaagcgatccg

SEQ ID NO: 205367 - DNA, 103 bp, Homo sapiens
  chr19:35169517-35169620
  hyper
cagggagagattgacgctccggcgagtgattaccagtgtgcttttccattaaggtgtgtgacaggtgccgcaagataagcccgatttttcatgactgcttttt

SEQ ID NO: 205368 - DNA, 201 bp, Homo sapiens
  chr19:35490437-35490638
  hyper
tggcgtcagagcaggatcgaatccaactctgccgcctacctaccaggtgaccccaacaagtcacttcccatcttagaggccgggcttctccttccgtaaaaggactgattttgcccgttcctgcgctgtccccgggaaaagcccttaccaccgagttagtgggactcccagcactggggtgatgagcgcaaggtctcagca

SEQ ID NO: 205369 - DNA, 236 bp, Homo sapiens
  chr19:35531876-35532112
  hyper
gggcaggtgtctggcggtgaccctgcacgtctggtgtttacctggccctgggtctgacgtgggccgcgcctggctgctggcgggacagtgtgttatctgcctgcggacgcttccggccacttggcctgggcctctgcccttagcgctgtgttttcccggccaagccccccatcccccctatctagtgctaggactttctggctccagaggtcaccgcggccgggcggaggctgcca

SEQ ID NO: 205370 - DNA, 220 bp, Homo sapiens
  chr19:35738765-35738985
  hyper
cagttggcaacctgggggagtctaacgcgaggaagcgcccagggttcccccaggatgcgctttccctcgccgccacctggagacagcagagtcacgcccagcgctgcgcaggctgatcgccgcgccgcgcccccgccctcggtcgcaggtggctcgttccgggaattcctaagcggaaaccggtcccaagccccgcgccttcgctcggcccctttaagag

SEQ ID NO: 205371 - DNA, 116 bp, Homo sapiens
  chr19:36123862-36123978
  hyper
cctgcgtccagccttcgtcccccacgtgctacagagagcaggtgaggggccagggtcatcatccctgccacataactccccccaggccctggaactccccactaacaccctgacag

SEQ ID NO: 205372 - DNA, 194 bp, Homo sapiens
  chr19:36236368-36236562
  hyper
tgccctctccaggcgcttaccaagcgctcggaaacgccccagggcgcttgcgcgtgggaggcgcgcgccctccccatagactccccggtaggagttcttttaacagcgcatgcgtgcagtgttgcctcgcccaaagaagactacaatctccagggaaacctggggcgtctcgcgcaaacgtccataactgaaag

SEQ ID NO: 205373 - DNA, 75 bp, Homo sapiens
  chr19:36336335-36336410
  hyper
tcacgcgctggccatgatcgcgggatgacacttgcagaaggacgctcctggcggcggcggagcctttgaatgggg

SEQ ID NO: 205374 - DNA, 46 bp, Homo sapiens
  chr19:36336769-36336815
  hyper
caccccaggctccgcccagtctcgggtcccccaccccgcctccgcc

SEQ ID NO: 205375 - DNA, 174 bp, Homo sapiens
  chr19:36427160-36427334
  hyper
tctttcccagcagcgccagtgcgactccatgggaggtggggccggggcgcgtctttgagagaaggggcgggtgcctacgcctttaagcgcgggtgcgcgcggagcctgcgcctttaagcgccggtgcgcgcgctgccctgggttgccggcgaggaggccgcgggagcgcctgga

SEQ ID NO: 205376 - DNA, 63 bp, Homo sapiens
  chr19:36736769-36736832
  hyper
gccttggctcaggcggaacccgaccgggatcgccccgcgagatgcagtcgttgagggagtcag

SEQ ID NO: 205377 - DNA, 149 bp, Homo sapiens
  chr19:36822892-36823041
  hyper
ctgccgcgccaaatcaaaatttacaatcacccttggtgctgtttcctgcactttcttggagatttgcaccaggcgctggagaccctcccacctggcccatgcctgccacccggtgaacaccaagacccaaccttctgcaccaccagtct

SEQ ID NO: 205378 - DNA, 51 bp, Homo sapiens
  chr19:37095614-37095665
  hyper
tctccagtgggtcacaacagcgctgtcacaggatcactgataacagcatga

SEQ ID NO: 205379 - DNA, 103 bp, Homo sapiens
  chr19:37096594-37096697
  hyper
taggggtggcctcctgcgcccaacctgctgcattttaggtgcttgcctctctttgggatgttgtggccgattgtgtgtgaaaagtgaacggagtagtgttgct

SEQ ID NO: 205380 - DNA, 43 bp, Homo sapiens
  chr19:37287861-37287904
  hyper
ggtaggcgttccagcgcagaaatgcgcaggaaagtttctgctg

SEQ ID NO: 205381 - DNA, 170 bp, Homo sapiens
  chr19:37329462-37329632
  hyper
cacatctgctgccgagagcttccagaattccaggccgcgtttaggaagcttcagcggaggcatgcaggctgccctacctctgcaaaaggctcccagccctgggaacaggacagtaagcccaggccatcttaggctggaagtaaccttggtcccgacggccctgggaaatg

SEQ ID NO: 205382 - DNA, 156 bp, Homo sapiens
  chr19:37342189-37342345
  hyper
atgccttaattttgaggtttgtggctgcttccgtgtgtgtgtgtgcgcgcgcgttggtgatattgttgatggagggtgcgtgtgaatttgttgtcattgtgaccccaaggtgtatgtcactgggaatttgagagatgcccacggactctgtggttg

SEQ ID NO: 205383 - DNA, 36 bp, Homo sapiens
  chr19:37406729-37406765
  hyper
ctcgtgatcctcctgcctcggcctcccaaacacaac

SEQ ID NO: 205384 - DNA, 191 bp, Homo sapiens
  chr19:37407590-37407781
  hyper
ggtgattgtgatatttggttgcgcgggattatgatgaaatgtgtgatatgtgtgtgattatgattaaggctgtagcgagtgtgaacgtggcgaagtgtgcgtgattgtaatatgtctagtagttcttgtcttgagctggcttttctgtagcatttggcacagttggtaacggcttgaaaaacacttatttg

SEQ ID NO: 205385 - DNA, 61 bp, Homo sapiens
  chr19:37463932-37463993
  hyper
gcagctgggcagtctggcctcggcttcactggaggcggggaactggacatgactgtgagcg

SEQ ID NO: 205386 - DNA, 338 bp, Homo sapiens
  chr19:37701348-37701686
  hyper
cgtcacagagacctctcggcattaaaacgtgaaaatagtcctgacgccagcggcgaaatagccttcggggaccacttccacttccggtccgacttctagcacctccccttatggactgttgatattgcgcatgctctaaattaacttggaagccaatttcagcccacagtcaacagggagcacacacatatttagagacatcgtgcagtttccgtaatcggcgctcacgggcagagaatataaccgcgcccttatggtgtttatttgtgtgggtcgccatctttgatgcgtatcgattccgtacagtggaggagtccgcctcctggagtgttgactag

SEQ ID NO: 205387 - DNA, 85 bp, Homo sapiens
  chr19:37957586-37957671
  hyper
agcgctggcacaaacgccaagtctcacacatctacacccacaagcacaccctaccttgtatccacagtttttcattcattcaaga

SEQ ID NO: 205388 - DNA, 54 bp, Homo sapiens
  chr19:37998138-37998192
  hyper
atggattgggagtgtgtgggaatcaataaatgcgagttctgtgaaatgtcttga

SEQ ID NO: 205389 - DNA, 424 bp, Homo sapiens
  chr19:38145586-38146010
  hyper
gaaacaaagcagcagcacgaactcacagggaaccggcttttagaagagcagcagcgattcgtttctccttctcaagcgccttctctggaaactggcagggctggggaagcaggcagagttcaggacaccccaggcttttcttgactcgattggaacccaccctccacgcttccctggccccaactaaccgccacctgcatgcacaaatggaaacgacagggcagagggtcagcagtcacccgcgtctgggttcgcagctccgggtacgctgtagttccgcacccggttgcccacgcccgggaccacccactgtgtcttttcggaactgtccagcgtgtcctcctagaccccagacacccaccccaaatctaggtcccagcgttttgcaggggaccttcatcctggggcgttcacctctgacttc

SEQ ID NO: 205390 - DNA, 57 bp, Homo sapiens
  chr19:38182700-38182757
  hyper
tttagccttttccaaattttcgagtaaactgacgtcctggaagaagcacccttattt

SEQ ID NO: 205391 - DNA, 156 bp, Homo sapiens
  chr19:38210751-38210907
  hyper
taggaggcgagtctgagtagaaactgatccaggtagcctcggaagggatcacctgctggatgggtgtgagctcctcagggtggggcgccgaaaccctcatggctcctgaggtagagccggcctccttggtaacacatgggactgggacttttaata

SEQ ID NO: 205392 - DNA, 126 bp, Homo sapiens
  chr19:38700328-38700454
  hyper
gtctccgccctcctcctcctcgaggccccgtcctcaacccgcactgccctccccccgccaccgggcgaagggggcgggaagcctgggaacaggctgttctcacatcctctcctggcgccggagcca

SEQ ID NO: 205393 - DNA, 40 bp, Homo sapiens
  chr19:38700557-38700597
  hyper
agcttcctctgcccgtctcggacatccctgtctctcctcc

SEQ ID NO: 205394 - DNA, 163 bp, Homo sapiens
  chr19:38715050-38715213
  hyper
tatcctgctctcgcgtgcacacaaccacatgcacacctggactcgcacacgcccacgcatggcagtttacacacacattcacgcggatactcacagcctcccacacactcctactcacacaccttcgcacggactcacacagccacacgcacacacactgcaa

SEQ ID NO: 205395 - DNA, 401 bp, Homo sapiens
  chr19:38754871-38755272
  hyper
gcttccaagaaacgcgtgtctgccgccccctcctcccaccctgaggccagtcctagagcgaaggccctcctccgacgtcgtcaccaagcccaagggaagggtggcaggtgctcagcgggcagacgccccgccccgccccgccaggttctgttgggggcgaggcccgcgcaagccccgcctcttccccggcaccaggggcgggcccaggtgcgcccagggccggggagcggccgcgcaggtgcctgccctttgcgcctgcgcccagctcgccctgcctagccaggtgcgccccgccccctgcctgcccggccaccttcgggagccgcttccaataggcgttcgccattggctctggcgacctccgcgcgttgggaggtgtagcgcggctctgaacgcgctga

SEQ ID NO: 205396 - DNA, 184 bp, Homo sapiens
  chr19:38755344-38755528
  hyper
gggcgtccccacactgaaggtccggaaaggcgacttccgggggctttggcacctggcggaccctcccggagcgtcggcacctgaacgcgaggcgctccattgcgcgtgcgcgttgaggggcttcccgcacctgatcgcgagaccccaacggctggtggcgtcgcctgcgcgtctcggctgagct

SEQ ID NO: 205397 - DNA, 201 bp, Homo sapiens
  chr19:38852766-38852967
  hyper
aggaggtggtctggggatgccgcttgcctggaggctctcgccccgctgcccaatcccttcacggtgccgggcgatccctgcagccgtacgcggacccggtgcacgaccccacctggcgctggtgggcgaacaacaaacaagaccaggtaggcggagcggattgggagccgggaaaggggcggcgcccggacacccctcacc

SEQ ID NO: 205398 - DNA, 312 bp, Homo sapiens
  chr19:38853193-38853505
  hyper
tccggacgcagtcagaactcggtctgcgcgggaccagagtggagcccgaagggcggggcgagggctaccagaatctgggagcctggggggcggggacaccatcggaggggcggggcctgtctgtgagggaggccttaaccccgtttactgcccggagcaggcaccgccttccagctgcatagccaggtggacgtgggcgtggtgctggccgaccccggctgcatcgaggcctcggtgaagcaggaggtcctgattaatcgcaactcggtgctattttcggtgaggccccccggggagttgggatcaagggag

SEQ ID NO: 205399 - DNA, 82 bp, Homo sapiens
  chr19:38976232-38976314
  hyper
catggacatcctggagctgtcggagcgcctggacctgcagcgcttccactcgcacaccctgcgcctctaccgcgctgtgtgc

SEQ ID NO: 205400 - DNA, 58 bp, Homo sapiens
  chr19:38976790-38976848
  hyper
ctccgtggagttccagtttgtgcctgtgctcaagctcgtgtccaccctgctggtaatg

SEQ ID NO: 205401 - DNA, 222 bp, Homo sapiens
  chr19:39109485-39109707
  hyper
caatacaacgcgcgcgcacgccgccagagctccgggtgcttcccggtgagttcgcgcgcgcacgctcccgcgctaccggcactggaactgggtctgtgaggcccgggaaaagcttagccccgccccctcgccacgagaggcgcctgcgcactgggatccagtaagatttttctcacgctgtctgtccagcttgagtggcgcgaatgcgcacgcgccaattgc

SEQ ID NO: 205402 - DNA, 507 bp, Homo sapiens
  chr19:39139398-39139905
  hyper
aagtagaggggatacggagagtggggataatttggggagggatttctaaagaattgatgggaagctgaaaagctaaagcgttggagagaatgaggaagtgtagagggagaaggtgagatcggtgggagggagggtgagctggaatggtggataatgggagagaggttcgtttaggaaaatgaaagtctcattagaaagggaatgcgtaatggatagactgagaaaggaatttgaggagggggtgctggctcctggaggtgcagtcccgggactggagagcgtgtgtgtgtcgtgcaggcagaatgagtttggggaggaagcgttgagagtgtccaggaagaattgtgtcttttttggagagaccggaggtaggtgaagggatcctgaagcagagactgtgttcaggtggcactgtttttttggggggcggggggggcaacttggtagggccccacagcagtgaaaaggtgatcagaagtggagtgggatccccgagcgaggtgtcag

SEQ ID NO: 205403 - DNA, 63 bp, Homo sapiens
  chr19:39140557-39140620
  hyper
aggggtgtccttatccgtggccccacctactgcaggatggacaggttgcgatagttggcataa

SEQ ID NO: 205404 - DNA, 585 bp, Homo sapiens
  chr19:39574108-39574693
  hyper
tcaggaaggggaaacgactggaaatccgggcccccccagttcttccctgcttctctttttgtggcagccgctcctcacgttcaaacagattgcaaaggtttacaggggagaaccctaacttgttccctagacgtcagtttctggagttcctgcattaatacgattaaaaagaacagctgattcttatccagcccttactctgggccgggccctgttatcggcatgaaatttcatgcagcaactcgtttactcctcacaacagcccacggggtatatacgagcatcacctcctttttacaggtgaaaaaacccaaggtccagcgaggttgaataactcacctaggtcgcacagctcagaaagcccactgcaattccgggattctggttttgttttgaggttgccccgggcttctgaggaggggtcagtgggctcagcatggaaaggaaggaagccggaaggctggaggaagatgcagcgaggctggaaaggttggggatcccccggtcctgcacacctgggtacctggggatcgggcagggccaggataggggccggtgtccgtgccctggggctccccagctgat

SEQ ID NO: 205405 - DNA, 32 bp, Homo sapiens
  chr19:39754842-39754874
  hyper
aggcacagagggtgcactgcagggagaagtga

SEQ ID NO: 205406 - DNA, 219 bp, Homo sapiens
  chr19:39881990-39882209
  hyper
gaaatagggatgctgaaaagcaacggggagagacgcagtcgtaacgcacttccggcggtctacgcgaggaagatggctgcatcccagcagcaagcttcagcggcttcctcagctgctggtgtatcgggtcctagttcggctggcggcccgggtccccagcagcagccgcaaccgccagcacaactggtgggccctgcccagagcggcctcctgcagcaa

SEQ ID NO: 205407 - DNA, 32 bp, Homo sapiens
  chr19:39898001-39898033
  hyper
aaccgaagcaatccggacttccaggtcaactt

SEQ ID NO: 205408 - DNA, 93 bp, Homo sapiens
  chr19:39936090-39936183
  hyper
cgcactccgcccaggccagccctgcctctctcaagatggcgacctggaagtgcgtcgcccgtgccagccccggaaatctcgtgttaggcgagg

SEQ ID NO: 205409 - DNA, 199 bp, Homo sapiens
  chr19:39989528-39989727
  hyper
ctgcctgaaggggcggggccattctctcagatataaggcttggaagccagcagctgcgactcccgagacccccccaccagaaggccatggtctccccacggatgtccgggctcctctcccagactgtgatcctagcgctcattttcctcccccaggtcagagccaggtgggaggtggcgtggaaagggatgaatgcgga

SEQ ID NO: 205410 - DNA, 39 bp, Homo sapiens
  chr19:40022937-40022976
  hyper
tgtcatcatcacagccgactcagtcggccagaggactga

SEQ ID NO: 205411 - DNA, 110 bp, Homo sapiens
  chr19:40324144-40324254
  hyper
cgcgggggaagagtagagcaggtggacgggggaggggcgacacgccccaccctgagtgaccaccagcccctagggacccggcgtcccgccccccacccaggaggccctcc

SEQ ID NO: 205412 - DNA, 49 bp, Homo sapiens
  chr19:40325018-40325067
  hyper
ccaaccccgcaaaattgaccaagggtgcgtgctccctgtgtcagcaggt

SEQ ID NO: 205413 - DNA, 1030 bp, Homo sapiens
  chr19:40561466-40562496
  hyper
ggccacaacttccctcacttcgtacgaaatgagaaggaaataaaaggaggaggaatcggtctgagttcgaagctggttcctggggacagatctctgagggacgctgggttctcaacatgtagctgccctcctgggggaccctcaagaggcacttccagctctcatattcccaccccgagtccagatctgcgccttcttgtgcaaagcttcattctcggttcaatatctaacctccctactggggacattttcattcctctgctgcagcctctgcagctttgaaggggaaagacggaggaagcagcaggagcctagtaccaccggcacagtgacactcacacagccccagcaaaacgcactgcgtccacacgccgtcccggtcctgtgcacagggcctcacgcacacactcacacagtcccctccgtcactcaagatcgcgcaatccccatcctttgatgcccgcgcacacgcacgcctaaggatctggcagattccgtctgcgccccgggttcctcctctgagcgcctcgctctcgcccacccgcactgccgggtcggtcaggttcgagtcccagtccacgaagacctcccgcagccaccgatttcttcctaggacgtgaagaccttacccagctaggtcgtcaaccccaggagacaggaagtggaaccgctaattccggtgcggtggcctctgggaaatacagtcctgagcagaaagaacctcagaagtcttggtctatggtctgttcaggttgatcccagcatacattgggggctcctaagggacccgagcctaatggatttgtgggagttccagaccgtggggtgcagaggttgcggccacgggcgagaatccccatctgagaggagcgttgctgttttcggtgcgtcagggtaaattaccttttctctctatgcaaaagaatgcaaatgagcagaacttttaaagaagaatttaaagtaaaattacgtcaaaatgtagctgctttgacctcttcgtctcagatccgagcataggcttcccctttgt

SEQ ID NO: 205414 - DNA, 204 bp, Homo sapiens
  chr19:40791512-40791716
  hyper
gctacgcaggcgcactaggactccgacgtctgctttccctagggcctagccgtagtgattatttcccggcagcccctagtccgtatttacatacgctttgatcttgttttactcagttctgggttctgacgctcttaaaggaccccggagcgggagttagttaggaggggtttccttttcagtgtgctcgtcatggttgagctc

SEQ ID NO: 205415 - DNA, 217 bp, Homo sapiens
  chr19:40854360-40854577
  hyper
actcgtccgcggccgctctaccccaacaggccgccaccagcgagagtgcggccataaccatcacgtgaccgcccaccgacaccagcgagagtgcagtcgtaaccgtcacgtgaccgcccaccgtcggcccggcgctcccctccgcccgaagctagcaagcggcgcggccaatgagaaaggcgcatgcctggcccccgccggcctgcagtctagccgt

SEQ ID NO: 205416 - DNA, 186 bp, Homo sapiens
  chr19:40932005-40932191
  hyper
agcttgtagggggcggattctgaaggaggggcttcagggcgcatgcccgggcagctgcgcgagtgaggggtggaaagaggtggctttttactccggggaacggtggcgagtgggggcttttgcctctcaaaatacgagcccctcacaactacccatgcacctgccaaacccggcaattaagcttct

SEQ ID NO: 205417 - DNA, 150 bp, Homo sapiens
  chr19:40939939-40940089
  hyper
gccgcggccgcctcccgggtaccccggccggcccagggcggagggtgggcagcggggagggactgggccttcccgccacgcccagggcgggccgcgggcccatcccccgccgcggaggagggcaggttggggaacgtggacactgccctc

SEQ ID NO: 205418 - DNA, 360 bp, Homo sapiens
  chr19:40948827-40949187
  hyper
cgaaatctcctggagccctgttggggaacctatgttgagattcttcttcaacagtcgggatatttctatgtcctcttccttaaccgactgggagcgctcccaagagtaggaaaggggcctgtctcattccctctgcccacgctttcagattcccccaaagcgcgccccataggaaaacttgctagaactcagctcagaccaagccccgccccctcggaggtcccactcaatcagaccgcgacactgtaaggccccgcccccccatgggtccttacagagcatccaggaacgccccaatttggcccaggggcttctgggaaacgggggccaacagccgccaggtacacgaattgacgtcga

SEQ ID NO: 205419 - DNA, 85 bp, Homo sapiens
  chr19:41025294-41025379
  hyper
ttcccctgggcaggtggaaccgcatcgtggagctagtggaacagcgcaaagaggaaatgagcgcggtgctgctggtggagaacca

SEQ ID NO: 205420 - DNA, 50 bp, Homo sapiens
  chr19:41055420-41055470
  hyper
cactcatacgctgaaagacgcattcagccgttcactcattcattcattca

SEQ ID NO: 205421 - DNA, 32 bp, Homo sapiens
  chr19:41060353-41060385
  hyper
gagggcctgggggcgctggagccgggggccgc

SEQ ID NO: 205422 - DNA, 34 bp, Homo sapiens
  chr19:41074213-41074247
  hyper
aagtgaggggaggggaaagcggagagctcctaga

SEQ ID NO: 205423 - DNA, 104 bp, Homo sapiens
  chr19:41082277-41082381
  hyper
cgcctggagaagccgctggggcccgggggtgtggggcggtgtggcgggcgcacactgtatgtacctataataaaccctttggctttgacggtctatggtccttt

SEQ ID NO: 205424 - DNA, 44 bp, Homo sapiens
  chr19:41105942-41105986
  hyper
gacagcagcttttccgtcctctcccacccaggctccaggaggcc

SEQ ID NO: 205425 - DNA, 107 bp, Homo sapiens
  chr19:41106420-41106527
  hyper
ctgggcaccaaatgctcaagattgtggggcggctgggggccaaaggcctcctcctgtttcccgaatcttccccctgccctcctcccgctccagctcttgacccctag

SEQ ID NO: 205426 - DNA, 698 bp, Homo sapiens
  chr19:41111117-41111815
  hyper
gcgacgacgagcacggtgaggaaagggtggccagagtcccctccgacccctgtcaagcatttcactttgcccctgaccctcatatttcccgccttcccgagcacctttgcccagctcgccctccccgccttgtctagccccaccccgtaagaacccgtgtagacatccgtttgcccggccgtgcctcccctaggcgtggcatctatggtgagcgtccacgtggagcacccgcaggaggcgtcggtggtggtgcaccaggtggagcgtgtgtctggcccttgggaggaggcggacgctgaggcggtggcgcgggcggaagcggcggcgcgggcggaggcggcagcgccctacacggtgttggcacagagcgcgccgcgggaggacggctactcagatgcctcgggcttcggttactgctttcgggagctgcgcggaggcgaagtgagaggaggcccgtggggaggggcccggagcttgcctccgcgcgggggcgcgctcacccaacacttccccgcagtgcgcgtccccgctgcccgggctccggacgcaggaggtctgctgccgaggggccggcttggcctggggcgttcacgactgtcagctgtgctccgagcgcctgggtaagccccaggacgtccccgaagtgctcggagctggggagtggtgacaacctcaccgttcctcctactctgccctag

SEQ ID NO: 205427 - DNA, 76 bp, Homo sapiens
  chr19:41115811-41115887
  hyper
cccagggtctcgctcctgctctcactccagagcctctccagccctcccacgcttcccctctcgggtcccgccccag

SEQ ID NO: 205428 - DNA, 65 bp, Homo sapiens
  chr19:41119112-41119177
  hyper
tagggacccgccagagagtctgggagtagggcctgggttccagggcaaagccggctggaaaggtg

SEQ ID NO: 205429 - DNA, 378 bp, Homo sapiens
  chr19:41190157-41190535
  hyper
agagccggggtttcaccgtgatagccaggactgccggcctcacgctttttaacaccaacttcaaacgacttgggctggtgtcccagccaggccgcgcacccgcacagcacagcacagcggcccccgtccccctcgccccgccgcaccctgccgcgcccactcaccctgaccgggaagctgcacgtgcccttccgcaccgcgtcctcgtctgcctgccactggtgcgggcgcgacgcctcgggcacgtaggctggcttcctccgccgcaggctctgccgtaacttgttcatggtgcccgccccgtctggtgacacaggacagtgatgtgggtcaagggtgggggtcagaaggtatggagctcaacggggagggaccagt

SEQ ID NO: 205430 - DNA, 73 bp, Homo sapiens
  chr19:41222270-41222343
  hyper
acagtgccaggcccggggccacatgcttcacatacatgagatcatgtcagatagccccgtagctgcaagcaaa

SEQ ID NO: 205431 - DNA, 106 bp, Homo sapiens
  chr19:41223422-41223528
  hyper
ggtcagagctggagacgacttgtctttggacggagaccgggacagatggcctttggactgatccgcacaggtccgacctccagtttcagcccgaggaggccagccc

SEQ ID NO: 205432 - DNA, 191 bp, Homo sapiens
  chr19:41698920-41699111
  hyper
ccaagccccgcgtaaacctgggtgacctcggagacatccgttggagcatgagttcccgacatcaggcggcggcggtggtccgggagaaacccggcggcggggagataagcctgcccaggaggcagggggctgggctagctgccccgccccgcgcctgacttcgttggggagggagacgcccggctcccgcc

SEQ ID NO: 205433 - DNA, 173 bp, Homo sapiens
  chr19:41699206-41699379
  hyper
tggcgctgctcctgctgctgacgctggcgctgtccgggaccagggcccgaggccacctgccccccgggcccacgccgctaccactgctgggaaacctcctgcagctacggcccggggcgctgtattcagggctcatgcgggtaaggggctctggggacgtcctggctaggggt

SEQ ID NO: 205434 - DNA, 361 bp, Homo sapiens
  chr19:41732050-41732411
  hyper
gcccccgaagccggccggaagcgctggggtggggaggtgcccccggtgactcacgcgggggcaggaatgctgcggtcggaacgggacccggctccagaacccacctccagccccagggcttctccggccggcggcgccagctcccgcgcgctgaccctggcggggccccacgtgccaggtggctggacccgacccaggctccccgcccccactcgggccgcccgcccgggactgtactgtttctcctccgggcggcgcgggggctgcgggcgcggggccttcagggcgcggaggctgcgggagcgggcacctgaccttgtctgggaacggccacctaggaagccgcgactgaggagctccc

SEQ ID NO: 205435 - DNA, 223 bp, Homo sapiens
  chr19:41831045-41831268
  hyper
ccctcccagttctcccggggtcggggtaggtggaaaggctgagtcagggagggcgggccccgctgggagacaacccctaggtgggcatccggcccccacccccgtgtctcctgtccgtcctggccctggcctggctcgctggcctggccgccaccccgccccccacgtctgacacctccatgcgtcctgccaaagcaagctgcctccctgcactcttccccct

SEQ ID NO: 205436 - DNA, 211 bp, Homo sapiens
  chr19:41831864-41832075
  hyper
ggacctgctgggctgctgccgcccccggccggggctgaggccgagtaaacacagcaaacacagccgccggcagcctgggatatttataccgaggctgggcgtgggtccagtgcccaccacagcccctgccctgccctgccttgcctgctgccacagccagctccgagccagcgtggcaccagccggcaaggggacgcgccgcagacacagc

SEQ ID NO: 205437 - DNA, 199 bp, Homo sapiens
  chr19:41859852-41860051
  hyper
ttttgaagccgcccccggccccacccaggaagcgcacggggcgggagcgggggcggcccccagggggagggcatgggggggctgggccaccgtcctcatctcgcgtgggcgggctccgaggggggtcccttcagccctgggggaaagggggcgggcaccccggctccgccccgcaaacagggtgctgcctcctggcggc

SEQ ID NO: 205438 - DNA, 221 bp, Homo sapiens
  chr19:41870211-41870432
  hyper
ccgccattttgggcgtggctaggaagctgccatgttgagtgtggctgaggaagtttgagtgcagtttctcccagataccttctttaccaaaaaagcaaatccctaactgctccgtgctgcgcctaccccaccgaagagctctctgtggtccgggatcacaaatcagagattgaaccaggaccaagggggaattccttccaggacctcgtgtacatccccgg

SEQ ID NO: 205439 - DNA, 181 bp, Homo sapiens
  chr19:42297160-42297341
  hyper
tagaatttctaagtcgctcctaaagcacgagggtgaggaactgcggaaagttctctgcgccgccaggaggcgccatcataaaccacgtcggtgggtggccgccaggctccagctttgtttcccagccaagcaaactttgcaatgtgggcctgagtctgagctacttcgtagctggaggaaa

SEQ ID NO: 205440 - DNA, 187 bp, Homo sapiens
  chr19:42444456-42444643
  hyper
gggggggccattaggcgctaatgggaagatggaggggcctgtcggccgcgcgggccgggcctcatttgtcctgcttcccgctccattggccgctgcccccgccccgcccctcccccgccgccgcgcgccccatttccgcttcaaacctttggaggggacgtgggggggatcccgggggctgctgaaa

SEQ ID NO: 205441 - DNA, 117 bp, Homo sapiens
  chr19:42498159-42498276
  hyper
cacccaatgtcaccggccccacaatgtcacacggaagcggcgcccagccggctcagcacctacccccatcttggcggctccgcggcgagagagccaggcgggcggggcggggacctc

SEQ ID NO: 205442 - DNA, 106 bp, Homo sapiens
  chr19:42498571-42498677
  hyper
attcccagagacctccgcaataggggacttggagaccccctcaatatggagtagggcctccaagaaggggcgctcagggaaagaaaaccccggaaatcctctcatt

SEQ ID NO: 205443 - DNA, 135 bp, Homo sapiens
  chr19:42501286-42501421
  hyper
gacgcagaaggggacgggtggcgacggggggcgctgtgtgcggggaggggtctcccagggtgtggccggcctgccaggactgcgctgggcaggcgggccctggagggaagtcgggcgctctgggctcaggctggc

SEQ ID NO: 205444 - DNA, 31 bp, Homo sapiens
  chr19:42501451-42501482
  hyper
ccccgggccgccgcccaggaacgggcgcagc

SEQ ID NO: 205445 - DNA, 179 bp, Homo sapiens
  chr19:42636653-42636832
  hyper
gaggaaaccacagggccggtccgcccccttcagaagggaaaataccctggcccacagacccgccccggcagcccggcccaccccaaatcatgtgtgtgtgctggggggtgggggctagtggggcagaggataagcaggctggaagagccgactcctacggctgcgatccaagaggtgcc

SEQ ID NO: 205446 - DNA, 370 bp, Homo sapiens
  chr19:42680242-42680612
  hyper
aaaacaggcggaaccgccaccagccctgaccccctctcgcctcattttctccacagtcgccccttcctcaaatgcagggtcaaaatgggggtcccgcccagcccggggagcctctccgaagcgccgcagccagccgggagcagatgccacctcgcctctcttctctgtcctcgctcctttttgtgttcagtggccctggttgcgatgtgttttattttcatcgtctttttattggtattgttttttttctctttttcttttctttattttttggcccgggggcagcagcggcgaagcgcccactgcctgcctctttcctcagctctgcggccgtcaggctctttctctagtctgcgctcttgactccctc

SEQ ID NO: 205447 - DNA, 39 bp, Homo sapiens
  chr19:42754954-42754993
  hyper
caggaaaccgtcggcggtgggtcccggggccagtgccag

SEQ ID NO: 205448 - DNA, 116 bp, Homo sapiens
  chr19:42774659-42774775
  hyper
agctcgaaagggggcgggcagtaatgactgttcaggaagtgggtgaggttggcctgttgggcttgtcctgctttctttgaccttatcccacctatccccacttggagttggagggc

SEQ ID NO: 205449 - DNA, 569 bp, Homo sapiens
  chr19:42901074-42901643
  hyper
gcgggtccgacacgcgaggcgcttctttggagtctggcggcgaaagctatccatgacgtcagtcactatcttccagccaatggacactcggccttctacctccctgggccactcaggaccctttgcctggtaggcggggcccacagcccaactcgggcagcgataggctttcggagacgccagtctctgccaggcccagtcagtcggccaatagacccggaacctgagggatcggaatcctggtccactccgcagaggcccgagcgggctcgcgagggaacgggttctccgagtctggccgggtaagccctttccagcacgcctagtattaggattctgcacatagctcgggtggaaaaccgtgaggcttagtgaggcttgaggcggaggggggaggagctcagtcccggcgaacccatcttgctttcttggagaaactgagaccgggatactggatctgttattcatccatccgttcctcccaccctaagcctgattctcgtctgctcctgccttcctgttccttcatccgttctgcccttcctgccctcaattctctcactcacgga

SEQ ID NO: 205450 - DNA, 270 bp, Homo sapiens
  chr19:44008462-44008732
  hyper
ctccaaggcgacacgccaccggagacgggaccggaatttgagtccgggtcgtagcacgccccctactgacctcttcgaccccgcctcccctccctcatctctaggtgtcaggccttgtaccctcccagcagccccctacaatctcttggattcgcttagagcgacccatcttctccctccgagactcagcagttcggctcccgccccatccttcccggagccccgtagtcttagtcccgaccccactgtgcagggcaaccgtgcccacgc

SEQ ID NO: 205451 - DNA, 272 bp, Homo sapiens
  chr19:44029739-44030011
  hyper
caaataaagtgaggaaggcaggaacctttagacttcccagtgtgaggcaacggcagggctaggactagggtgaggctgttggtgcaagatttaaggaggcgctcactcacaggtgcggaccctgcacttacaggaccctgagagcgagtgcctccttaaatgttgcactccagggtcctcaccgtccttttcctagtcctgggctccgggttctaagcacccagatgctccttcctcaaacggaggtttccgcaagacaggactgggtctct

SEQ ID NO: 205452 - DNA, 201 bp, Homo sapiens
  chr19:44100424-44100625
  hyper
caacgcgcctgcgcgccacgagagcctacccacgcatgcgcaaaaggcttagctagctaagccgcgggaggctgaacgtcatcaaacgcgccatagggcagagaaggacccctcccgttattttgaggaccgggctggtgcgactatactactgccggatggcaaatccgggatctcggctccgagaggctcatctggcaa

SEQ ID NO: 205453 - DNA, 329 bp, Homo sapiens
  chr19:44144079-44144408
  hyper
gagggggagacggaggagaggcccggagacaatcggggggacggcacggtgggggaacggtgcggggtgcgaaagctggagaggagaggggtgaggagggcgggaaggggtgcgcgggagggcgacagcggcgtgggagcaggtgggggatctcggtgagcgcgggaaatggagggtgttgggtgagggtgctgcgtgcgggcccaggtgctgcgcgcgagggtgcggagttgctggcatgcagggtgcttgcgctgcgcggaggggagggtggcagggtgttgctggaggctgtgcgagggtgggggcgcgggcgtcgtggggtgcgg

SEQ ID NO: 205454 - DNA, 211 bp, Homo sapiens
  chr19:44174057-44174268
  hyper
ctgcgccgcgtggcgttgcacaaagcacgagaattactattatttgattagggaggatgctgaggactgaaccgcattcctccaactcatcctctgacaacccccaaccccctcaattagaccctgttccaggcgcaggcgttcgggacccagcccctacctgggacgcaggtgtggagcagcagcagcagcggcagcagcggcgggtgac

SEQ ID NO: 205455 - DNA, 111 bp, Homo sapiens
  chr19:44405797-44405908
  hyper
ctgaaactccagggatgacacgccccgttcacgccctgggtcttctggtcttcagcgcctctcatcctcaccgccggttccattccaaccagggactgtggaagcctccgc

SEQ ID NO: 205456 - DNA, 54 bp, Homo sapiens
  chr19:44406123-44406177
  hyper
tctattaagggctatgatttcaggtcgtcctgcgtgtttagaggaggcgagtgg

SEQ ID NO: 205457 - DNA, 212 bp, Homo sapiens
  chr19:44506686-44506898
  hyper
tgtcatcgtgggaggcgtttagacttcaggaattcctgtctatacactattttcgctcaaagactcaggaagagagacggacgactcacagggtcacagtccacattccccaccaggcgctcagagatatggaatacgttcccggtgggcactgcggtgtgtgtagtcaaggaccaccgcggagtccaacgcttcccgctgaagagtgagat

SEQ ID NO: 205458 - DNA, 72 bp, Homo sapiens
  chr19:44507929-44508001
  hyper
agatgttcacccaaccgagagtgtgtcctcgggaatgggtgttgataatcattaagccgtaattggtaactt

SEQ ID NO: 205459 - DNA, 70 bp, Homo sapiens
  chr19:44529637-44529707
  hyper
ggggcgcgggcggggattgccgttccagtcagctgagccttctggcgtcggggggctctgctagggtctc

SEQ ID NO: 205460 - DNA, 63 bp, Homo sapiens
  chr19:44529774-44529837
  hyper
tacgtgtgcagcccctttcagtgtggtgtggagtgtcacttaatgtccgtttatcttccattg

SEQ ID NO: 205461 - DNA, 250 bp, Homo sapiens
  chr19:44617149-44617399
  hyper
tccccactaggcaggcgctcgtggctttgggattcgttcccagtgggcacctcggagtggcaacgcttccccctgaagaatgagattttgagcgtttttccttcagcattcggaggagtgtaatccaaatgctctgtggagtcgtacacactggctccagaaggaggatacaagcaattctgggaatggtagtccagacgctcagtggagtagcggtcagcttggctccggcaggcgaatcaggggattt

SEQ ID NO: 205462 - DNA, 360 bp, Homo sapiens
  chr19:44645667-44646027
  hyper
gggatccggggaattctgggaaatgtagtcccgccaatcagtggagtcgcgggcacttccgctccagggaagagggggcgattgtcacggcacattccacggtagtttcttccagttccgcgactcgcgggcccctcctaatgtcagggacttaagattggggctcgctgggacctggtggtccggttatgggaaaagaagcctcgtgggagagcagaggtttggtggggcgagggcggcggcttttgttgtgtcagcggagccttcttgggctggggctcccctcgtgtcccgcggcgggaggcggggggcattgggacttggttgggtcgcgtctcgcctggtttgagggtttccggg

SEQ ID NO: 205463 - DNA, 89 bp, Homo sapiens
  chr19:44711963-44712052
  hyper
tctcctggcgttccgcagccagcctctcccacctacttgccagctctgccacttactagtgttataacgttttgtgagttaatcttaat

SEQ ID NO: 205464 - DNA, 380 bp, Homo sapiens
  chr19:44763972-44764352
  hyper
gcagggcggtagcctgtttccgctcgggcattctgggaagtgtagtgcagaagccgttgcaaccttgtgtacttccgctgcaggagggcgaagcagccgtcatctatcccctctgggaggtgagtcagcgcggaacctctgcatctacggcgagctttcctggcctgggcgttggactcgcaggtgcctgccctcgctctcagtgaagggaagtcgcagagggcggggacgacggtttgcttgccctttgtttttagggcggtgcatgggtctccaagttgggaatggctcctggtcgcacgtttggtttgaaggtctcccgggcgctcaagttccctcgccttccccaccttccacacgctctgctgtcttctggcaat

SEQ ID NO: 205465 - DNA, 218 bp, Homo sapiens
  chr19:44905783-44906001
  hyper
catgcgcaaggaggcctatggcctacaatccccagaaagccccgcgcgcagcagtggccattcgcaaggctaccctggtgaaggtggcctttgacttccgtgcatttggaagtcctttgacttccgtgcattcgtctaaaataacgacaatcataataacgataaaataatgaaatgttaaataaatcactatcaacgatgaaaagaagtttcaatat

SEQ ID NO: 205466 - DNA, 758 bp, Homo sapiens
  chr19:45004163-45004921
  hyper
cagctgtatcagtaactccatcaaccccggtgacccgaggctaaagcgccacccgcacagataccaggtctccccgctacactcaccaccgcttccagcttcccgcgtagaccctgcgcatgcgcgcatcggacaccaagcgctgccccacgcccctaccaacctgggcgtccgctggcccgcagcccaggctgggcctgtcaccgcctcagtgcctagcacggctctgcggcaggacgaactcgggttaggcaaccccctgccccgattctgcaacacggccgactcgggttaagctagttcggtcccctctcctagtcagcatccgcaaggccgctgggggttaagtctgaagggccgagctgctcggcgacagcaagcgtccgcgcgcgggacaatggctgctcttgtggccgaacccggaagtgcacttgggctcggagagccagaactacaattcccagaagcctccgcggcgcggacggtcagtaggcggggttccggcttctccaaggaagtggggcgggggaccgggccagaagctaagagggcgtcctcgtccggggcccgggggggcgccacacctgtgcatgtgcaggtctagggggagcactaagaccagccgcggcgccgggaggccgaggccagtgcagcgacgcatggggagtcgctctggcgtgacgtcagaatccaatagaaatggcggggaccctttctgggtgccccctgcctgtcagacgctgcgcgcgaccccttgt

SEQ ID NO: 205467 - DNA, 155 bp, Homo sapiens
  chr19:45146961-45147116
  hyper
ccactcggcaaccgcgagccgttagtaagttgctgaatctctccgtgtgcctccgtttcctcacctggaatgtgggcgacctcacacaggaagccgcctcttctagtgggcaccgacggagcgagcgcgcgtctgcagcgggactgagcgccggg

SEQ ID NO: 205468 - DNA, 332 bp, Homo sapiens
  chr19:45147367-45147699
  hyper
gggaggcccagctgctcggagcaactggcatggcccgagccatggccgccgcgtggccgctgctgctggtggcgctactggtgctgtcctggccacccccaggaaccggtgagtgacccccgcgcagtccggtggcccctgtctggctcccgctccgcatccaggccgggtacttgcccccttgggttcccgaagatgacggccccgccgcggcgccacccaccccccatctctgccccggggttggaaggaacacggtgcgagggtgcgagggcaggaccctcctcttggccacccggagagcggtcggagttgggtacagaaattcctcg

SEQ ID NO: 205469 - DNA, 109 bp, Homo sapiens
  chr19:45147734-45147843
  hyper
cctctgggcccctcggaaaggggatggagttgggtgaggaaatttcccaaaaaggcaagtgaatcccggaaaatcagcagatggtgacgcatgccggattaccttaccc

SEQ ID NO: 205470 - DNA, 135 bp, Homo sapiens
  chr19:45207399-45207534
  hyper
cttcaacggtggggccctgcccgtcgctctccgcctgggcctgtcccctgacggccgggtgctggccaggcatggcatccgccgggaggaggccggcgcctatcagtgtgaggtgtggaacccggtcagtgtcag

SEQ ID NO: 205471 - DNA, 60 bp, Homo sapiens
  chr19:45281278-45281338
  hyper
caatgcgtcgacccccggctgtccgtgagtcccccttcgctgcgggacctgctgccccgc

SEQ ID NO: 205472 - DNA, 198 bp, Homo sapiens
  chr19:45312126-45312324
  hyper
gccccccgctgcaggcgctggtcagtaagcccggacagctctaggcttgggggcggacgagccccgagcctggccccgtgcactgggaggtccgctccgggcagtgggaggtcctggccccgcgcccgggcatcgggggacgaggggggcctggagggcggggcggggcggggctgccgggggcggggcctctggctc

SEQ ID NO: 205473 - DNA, 214 bp, Homo sapiens
  chr19:45348060-45348274
  hyper
agacgcgaggaggctggggagataggggaagtgggacaaggacgcggggagtgaccaggtccggaggccggactggagcccagccccacccagcccggccgggccagcgcagcgcgggggccggtctctgctgccccctggcgggtggctgcggtgagaaggcggcgcggagcaggtgttgggaggggaggaccagggcgcgcagggaggtagg

SEQ ID NO: 205474 - DNA, 987 bp, Homo sapiens
  chr19:45349505-45350492
  hyper
ggccggagccagggtcggcttgactcgggggagcagcgggtggatcctgtgacgtcagcgggttcgaaccgccggagctgagcgagaggccgggggtgccgagccgggcggggagagctgggccgggagagcagaacagggaggctagagcgcagcgggaaccggcccggagccggagccggagccccacaggcacctactaaaccgcccagccgatcggcccccacagagtggcccgcgggcctccggccgggcccagtcccctcccgggccctccatggcccgggccgctgccctcctgccgtcgagatcgccgccgacgccgctgctgtggccgctgctgctgctgctgctcctggaaaccggtgagacgagcggacggccccctgccctcgcgcggaccccctccaaccttaccttccgagctggggaagccgagcaccttccccgcccacccccggctccccgagccccctctcgcgtgcccccttcctggctggccccacagactccgaccccctacacgtccgattctctcgaggagactctgacccctcctttctgcatctctctcaccaccacccccatccttcttaatccaattgcccatcctacgcctgcttgtctgtccccctccccatttctcggattcccgcgccgaaagggttaaatcccaggaaggcctggtgccccctccccaccccgcgccgagtagttcacccggatctgggtctctgtctcctctacccctctcaggaatgtggggaatgttccccccacctaccgcagtaaggtctcgaggaagaggcgagaccacctccctcccctatttttccttcttcccggcttgggcgtctgaggcccggagagaactgaggacaagcggacctgattcgggtcccttggagggctaaggataagagttctggcgacttagggggaagggcctgagctcggagctccaaccccgaacctcagggagttggg

SEQ ID NO: 205475 - DNA, 238 bp, Homo sapiens
  chr19:45418006-45418244
  hyper
tgggagggacacccgcctacactctgcaagaaactcaaaaagggagatgaggggatcgtgggagggaggtagggagggaggagggtgccactgatcccctgaacccctgcctctgcctccagagtgcccctccggcctcgccatgaggctcttcctgtcgctcccggtcctggtggtggttctgtcgatcgtcttggaaggtaaaagtgggatgggagaattgcggagttggagattt

SEQ ID NO: 205476 - DNA, 256 bp, Homo sapiens
  chr19:45579319-45579575
  hyper
cccggggtgctcaccgggatagttcggggtcaacggcgtccacagggtccacgggttccgcgggccgagggcgaggagggcggccccggcgggcatggggccaggggagtggtggggttcgccgccgaaccgccccgccgaggacacctccttcggggagaagggccccagccttggggcctgttggggctgcgcgtctggctcgggcttgagttcgatgacgaggtcctgcatttccatctcgtcgtctgggttg

SEQ ID NO: 205477 - DNA, 200 bp, Homo sapiens
  chr19:45656461-45656661
  hyper
gatcttcttgcgctggcttacgaacaggtgcttgcccaccgagtacacggccatgagcagccccgagcccgacagtgtggtggccgcgccgccaaacaccttgagcaggctgccgctcgggctgccgtggcccagcgcgtggccgcccagtgacaagtagagcagccccacacccaggcccagcgccgccagcagcgcca

SEQ ID NO: 205478 - DNA, 62 bp, Homo sapiens
  chr19:45755078-45755140
  hyper
cccgacccctgggggcgcccctctctcgggacccctctcttgtccccgtgcagaccgcttcc

SEQ ID NO: 205479 - DNA, 262 bp, Homo sapiens
  chr19:45959073-45959335
  hyper
tgtcaggcagccagccggctgcctgccctggacagcagcccagagtgtctgcaggagggagagggtagttcaggagcctgagtcaccctgggagaaaccccagccacatacctggccgctgacatcacccggccagggcacccccggcagcctagacaagctgactgaatcacaggcggaattcagccaccccgggcacgtggcctgctgtgaccccccgcaacacccccgagtggccgtctggctgcgggggttgggccgg

SEQ ID NO: 205480 - DNA, 85 bp, Homo sapiens
  chr19:45996037-45996122
  hyper
ctcctagtggccggcgccggtggatgggggaggggccaggtcgcctgaggcgggggctaagtttaggcacgctggggggaggggg

SEQ ID NO: 205481 - DNA, 204 bp, Homo sapiens
  chr19:46002502-46002706
  hyper
ccgcactggcacgccaggctgaggacgagttcatgctcctggcctctgatggcgtctgggacactgtgtctggtgctgccctggcgggactggtggcttcacgcctccgcttgggcctggccccagagcttctctgcgcgcagctgttggacacgtgtctgtgcaaggtcctgggggcgtggcgtggtacctttggggcttggt

SEQ ID NO: 205482 - DNA, 239 bp, Homo sapiens
  chr19:46142560-46142799
  hyper
taagccccgggagcgcggagaggagatggggggtggtctgcgaaagggtctcacccagctccaaagctactcatggcggcgggtggcggagcttcggggccgggggtggagccgggaccggctctgccgcttccggccctgggaggcgcccgggccgccgcgcccctgccccgccctccacagccacccctggagccggagggtcccaccgggtcacacatcccgggctgtggactccc

SEQ ID NO: 205483 - DNA, 741 bp, Homo sapiens
  chr19:46144643-46145384
  hyper
cctcacccagtagacctgaccgtccagcttctaaaaactctggccacgcccctcaatattgactccgccctcccagaccttccactgttaccgtgccacctcaagattggtccctccaaggctctggcaccgtccccgcttttgaactagctggccccactctaggttacgacctcgtggcctggggcatgactacatttctcgaccatttcctccctatctctttctgcggcttgacgccgccccagtccttacccttcctttttggcgctacagttgctgctggaggatgtggtccggctgcgggggtcctcacggcgcaccgaggcgaggcgctctggtgacaagtagcggcggacactgctaaaagagagcacacaggtgggggcagagccttctaggccagcaggcgagtgccgtgagcaagcgagattctccctgcaccctctgctgctggagctcaggcaaacaaaccacctctgtctcccacgaggtcttggaagaggctgggggtcccggccttgtgccttacctgcgcccggaggtcgcctccttcttgggagaggatggggacgtggcatagccacccacgcgccgcgggggtcccgagccattaaggggcgtcctggtgggaaggcctttcaagagctgacacactggagggatggggttaggggacagaagagggtgagtataaggaccaggccccggtcctccccatcccacccctccagtctaacg

SEQ ID NO: 205484 - DNA, 62 bp, Homo sapiens
  chr19:46145444-46145506
  hyper
gcgcgtagcgccgctccctgttcttcgcatgcccgcaggcgacgcagagcatccgccagcgc

SEQ ID NO: 205485 - DNA, 88 bp, Homo sapiens; identical to SEQ ID NO: 56341
  chr19:46145557-46145645
  hyper

SEQ ID NO: 205486 - DNA, 168 bp, Homo sapiens
  chr19:46180191-46180359
  hyper
ctggcccctccctaggccctcgctgcctgccgcacggcccagatcgtgacccagtactgcgtgggtgccaactacacgtggctgctggtggagggcgtctacctgcacagtctcctggtgctcgtgggaggctccgaggagggccacttccgctactacctgctcctc

SEQ ID NO: 205487 - DNA, 93 bp, Homo sapiens
  chr19:46180559-46180652
  hyper
gcggggtcggggtctgcacaggggcccccgcgcttttcgtcattccctgggtgatcgtcaggtacctgtacgagaacacgcagtgagttgcag

SEQ ID NO: 205488 - DNA, 204 bp, Homo sapiens
  chr19:46271267-46271471
  hyper
gagctggacttgcgccgcccgaggcccctcacctcttgcagggcgcgccgcctccggccccggtccggtcgcgctgtcgccggttcttgaaccagttgctgacctgcgtgagcgacaggccggtgagtgtggccaggcggcgcttctcgtccggcgtggggtagcggttgccgcggtagcaggccttgagcgctgcgcgggagc

SEQ ID NO: 205489 - DNA, 345 bp, Homo sapiens
  chr19:46404950-46405295
  hyper
gatctggttctcttcgaatgagaagcgcggcttgcgcaaccgggtggtttcctccgcttcgcccgccgccgccgaggccatggcgccccccgacgccgccgtcctgccgtctggcgcatggggggcgccggcgctgcgggcaaagggcgcacggggctggctggggttcggggtccccccgccgccgcctctcccagaccgccgggccgagagctccttagtccccgggggcaggagtgggggcggggggcgggcgggggcgacgggcacccgggtaagtcggaagcgcctaagagtagctgacaccggctgagcgcttggctcggacttcgcgcggcgcgaagt

SEQ ID NO: 205490 - DNA, 147 bp, Homo sapiens
  chr19:46476433-46476580
  hyper
cccttgcacctgccacgggagggggggaaaggatggagaaaggcgaggccccctgcccgctcccccgccccgagccgcagccctttctcacctcccgtgttgctgcgcttggtgcagaccacctcggggggcgtttcgaggggcctc

SEQ ID NO: 205491 - DNA, 108 bp, Homo sapiens
  chr19:46519147-46519255
  hyper
aggtctgggggggaagatatcgagagggtcatgggcccaggagtgcacgtctaggagttgatggggtaggcctgagggttcggagaaggtgcggtcggggaggagtct

SEQ ID NO: 205492 - DNA, 203 bp, Homo sapiens
  chr19:46519582-46519785
  hyper
cgcgctccgcttcgaccccacggcctttgtgaaagccaaggaaaggaagcagagagagatccagatgaagtcagtgccccttcctccctcacctgcccctgtccctggcccgtgcccgctcccgggctctcatctctccacgccaccatcagtctccatcccctgccacctgctcgcttctcgccggataccccgcctgctct

SEQ ID NO: 205493 - DNA, 141 bp, Homo sapiens
  chr19:46580427-46580568
  hyper
gtgggcgttcacccgggtgccggtgtttctaaatcgcgggctgcgacctgcatactcaggtgccagctgggagcagaggcggatttgcgaggccaaaacctgggtgtgacttggaatctcagtcgcgctatgggggtgcac

SEQ ID NO: 205494 - DNA, 224 bp, Homo sapiens
  chr19:46580598-46580822
  hyper
tgtgacctgcccaggctgcaaaaccaggtgcgctgccatgggcacgactcactgggctccattttcaccacagggaacttggaccgcctgacattgaaaaagactgaggtagctcgggggcagccaaaagaaaccagaggcggggatcctagtatcattcaggaagtggacccagccgcaaactcaggagcgttccaagtgtccagagcgtctggtagtcgcaa

SEQ ID NO: 205495 - DNA, 222 bp, Homo sapiens
  chr19:46850468-46850690
  hyper
tcaaaggtgcgcccgcctggcagggagggtggacagtggcccaggctgaggggtgccgggcccgcgcggaaccatagcaacgcggagctgcagcctgggcgcggggcagacactaccaagtgaccgggcgtggggaggcccaggatggcgctgccaaggagcgacatagggggcttcggagagtgatacctaggagtggcgtgcggagcgggtgctactcag

SEQ ID NO: 205496 - DNA, 53 bp, Homo sapiens
  chr19:46929942-46929995
  hyper
tcctcctgggtctgcgtgagttttcttcaactccagtaagagatctgcaaaac

SEQ ID NO: 205497 - DNA, 68 bp, Homo sapiens
  chr19:46974960-46975028
  hyper
cctgttcaggtcgcagagcaagcgggtctggatacactccggtggcgcctccacggaggccctctttc

SEQ ID NO: 205498 - DNA, 78 bp, Homo sapiens
  chr19:46992620-46992698
  hyper
gccccggccctcctcgggccccctgcttgccggacttttgtcccccagcaggtctcaccccctaatgcatggatttcg

SEQ ID NO: 205499 - DNA, 70 bp, Homo sapiens
  chr19:46996431-46996501
  hyper
gcaggccccgagagcgccacgaagagccctgctcgcctctgcaggtgcccggcgtccacacacacacccc

SEQ ID NO: 205500 - DNA, 229 bp, Homo sapiens
  chr19:47137304-47137533
  hyper
gcaggggagggtaagctgtccggagggctcagagcagaacacaaaagaggcgcttgtcgcggaaggggttctccgcggcgggtactggcgtcaccagcgggtcatctttggcatgcgtctcgcagaaagccaggagttccgctgctgcctgcgacacctgcgagcacccgggtggagatgtcaccgccctgcccggctccttggagccgcccacttaggccccgcctct

SEQ ID NO: 205501 - DNA, 268 bp, Homo sapiens
  chr19:47137787-47138055
  hyper
ggccgacacagccccggacagaccgcaggcccagaacccccgccctattccccaccccgacccagcaccttcatgcggtcgatgttcacctccagcttcagctgttccaccgtcttgcgggcctcggcaatcttggccatgttgttggacatggttgcggcggggaaggggttaaaagacgcgcgggagtgggggctgtgggggtaggttaggatacgtctgggtcccgaggtgggggcgagagggcgggccccggtaacaggtgcga

SEQ ID NO: 205502 - DNA, 272 bp, Homo sapiens
  chr19:47217682-47217954
  hyper
cactggggtggggcgagctggaaggaggacttttcggggctcctgggaaagtgggggggggggccgggggacttggactcgagggcgctggagataaggagggcgcctgccacccaatgctcaaaggacccaggtgtctgggtcctcagctttgggggcctgggggcaggaaatgaaacctagtagaacagaaagtgaaactgccccggtggggcctcgggaaggaaggtaagcggccctaacacacctggacctggcagaaaaataaaact

SEQ ID NO: 205503 - DNA, 117 bp, Homo sapiens
  chr19:47363286-47363403
  hyper
cacacaggaccaggccgtcttccctctcctggggatcagtcgttcacagaaccaaaaacaagttgcatggacgcgcgcgttggctgcagattttcttcacagccaggagaaagagca

SEQ ID NO: 205504 - DNA, 43 bp, Homo sapiens
  chr19:47494573-47494616
  hyper
tgtcttgacttggcgccatctagaggtgcgtgaaatcctgcca

SEQ ID NO: 205505 - DNA, 360 bp, Homo sapiens
  chr19:47729862-47730222
  hyper
cagctgggccccgatctcccgggcccactgttcctcctccccgcggactcccggggccgcctgggtgggaccgcccgccagagcccccggggcgctgggcacgggcgactccaggtgctgctccgccagcgagagcgagggctgaggaccttggagaggcagaggggcgcggtcagcacccaccacccctccaggcctcgaggtgtctcggcctgctcccctctttcccagccactgctccccgcctcatttctagtgatcccatcgctagtgagtcaatttctcagcttctcctccacaggcaccagaaagcaagaagtacctggggacgccgctctggggtcacctgtctggccagct

SEQ ID NO: 205506 - DNA, 293 bp, Homo sapiens
  chr19:47731298-47731591
  hyper
tggcccggctgggcccgccacctccccccgtcctctcccacttctccagttcctccgagtctccagccctctctcttcccggctcctatcaccccgggggcggggcgggcactcaccgtccgggcgcgggcctcggggccggctgcggggacccccaggccagcgggaaccccccagggcggcggtgacggcgggtggggcggtgggggcgcagaggtaggcagcgggcagcagggtgggggcggcgggggcggcagccaggccgggctcgcagaggccgcaggacactgccg

SEQ ID NO: 205507 - DNA, 216 bp, Homo sapiens
  chr19:47910163-47910379
  hyper
gtgtggctgcgtctcggtatagcccccgatgggctggccctctgggctgaaggctgcaccctgccctgcgaagggggttcagaggtgcaggctgagccccaggaagcccgggacccggctttgacgccctcctaagaaccccaggctctccgtccccgccttccccctgtacctgtgcggttggattgatcgatcataggttgcacgatgcgtctc

SEQ ID NO: 205508 - DNA, 58 bp, Homo sapiens; identical to SEQ ID NO: 56409
  chr19:47910679-47910737
  hyper

SEQ ID NO: 205509 - DNA, 112 bp, Homo sapiens
  chr19:47923232-47923344
  hyper
gctgggggcggcgggggtgggctgtggataacggagaaacagttaagctagagggtgccaggactcagggtcttggctgagtctgggggtccccatgccggcgggctctgcc

SEQ ID NO: 205510 - DNA, 276 bp, Homo sapiens
  chr19:47931552-47931828
  hyper
gcaagtggaggagcttggctgatgaatgggggcgtggttagtggaaacccacgactgacgaatgggggcatggagagtggaggtgcgtggcttgtggaagcccatgactgatggatgggggtgtggctagtggaagagctaggctgacggatgggggcgtggctagtggaagctcattactgatgggggcgtggcgagtggaagagcttggcggctggaccccggcgctgctgctatatgtgggtgtgtcccgcagacgaccgcgggccgcaaaaa

SEQ ID NO: 205511 - DNA, 169 bp, Homo sapiens
  chr19:48613936-48614105
  hyper
tgtgggaggaggtcgcgggctggaggtgtttcctcctggtcctgagcagggccaacctggaggtaaaatggcccctgcgcctttaaacagccctcctcggcttgtaggccctgcttggttgctccagctttttcagctgttccagagctcacccggagctattttcatc

SEQ ID NO: 205512 - DNA, 110 bp, Homo sapiens
  chr19:48823626-48823736
  hyper
ctggccaaacagggtggggctcctgtagggatggacatataagacccttcagacagcaggcgggccagggcccagagagggtggacaatgaactgcgagggactgggaat

SEQ ID NO: 205513 - DNA, 322 bp, Homo sapiens
  chr19:48901493-48901815
  hyper
cctccccatctcggcgcctgtccctcgctgcatctcctcctctgtgcgtctctttatctcgtctccctgtccctgcgtctcccgtctgtgcctccctctcctccccgtctctcccggcccgggcgctcagaggccgcccggcggggcccgcaggcgatgcgcggcgccggtggcccccgcggccctcggggccccgctaagatgctgctgctgctggcgctggcctgcgccagcccgttcccggaggaggcgccggggccgggcggggccggtgggcccggcggcggcctcggcggggcgcggccgctcaacgtggcgctcg

SEQ ID NO: 205514 - DNA, 182 bp, Homo sapiens
  chr19:48996833-48997015
  hyper
cctccctccaggccccgcccaactctaagctcggcctcccgccaggcccttcccggctctaggctcctgctccctccaggccgcgaccccgaaaccgcgccctctcgggttccgcacctggtcgaagaggtagacggtcacgtccccgtggaaggagaccatcttgcgcttcctctccagct

SEQ ID NO: 205515 - DNA, 107 bp, Homo sapiens
  chr19:49127266-49127373
  hyper
ctgggcctttgttacgcgtgttagagtctctgtctttgcagctaaagacctcctccctcacgccccttttcttttgtgaattcaatggatgagacaggcccactctc

SEQ ID NO: 205516 - DNA, 216 bp, Homo sapiens
  chr19:49141163-49141379
  hyper
aaaataccgagagcggaggtttagaaagaggaagattggtttccggaagaagtctgttctttaatacccaaatgtttccccaccgcgcctagaatcagaccactgagaaaacaggaagtattctgtccctttaatagctttgttttaggggtaactcccctcgccttgtggggaggcttaggacgggcgggtgcaatcctcgaaggggagtctcag

SEQ ID NO: 205517 - DNA, 508 bp, Homo sapiens
  chr19:49199689-49200197
  hyper
tggtgcagatggctcgcgcacagctggtggtgacccgactttcctgcctccaccctggggctcctcagaggcttcatggaacccaaactgctggtctcacctccgagccctgccgtcgcccagggagggcggctccgtccctcctgcactccctaatcccgctctgaatcaccgcttctgttctgggtcggagaataaaggtggggtttccaagtgatggccctacgttattgtctgaagctcccttctcctccccagggtggaagtgataatgccgggaatccgggaatcccggggaggtgcaggaagacagcgagctcgaggcagtggggtgcgactgagccggatgtgctgagctgcccggggcacggggcggttggggtagagaaaggctttcagagctgggggacaggacggggccccgggtgagcggagagctgggttatttcacgggaacagctggtgacaaagccggaggggtgtgcggggccggcgagagactgggatt

SEQ ID NO: 205518 - DNA, 504 bp, Homo sapiens
  chr19:49216985-49217489
  hyper
ctgatcctccaggatgtcatcgatgccccggttaggaagcaactgcggatggagaaatttggcgtgaactcgggactgcgacctggacctgactggagaaccctagccggattcaacccacaccctcttacctgcgccctccggatcgcttcctgcagctcctcctccagagtcagagccgctgagcccggccctgaggaaggggtcagggctggagctgcagcaggagccggagtgggagttggagccggagccgtccccggggtatccgcggcacgtggaagaggtggcctgtgagatgctgcgctgggcttgacctagagcagccaagagggcgagcgcccataagccatgcccacagggcgcaaccccacccactcgcaacgtgtggctccaccccttgatcctctcgcgacccctcgctcatcaacccctttggcctcgccccctattctttcattggctcctcttctctaaagatccgccccctgttagtctgaacca

SEQ ID NO: 205519 - DNA, 51 bp, Homo sapiens; identical to SEQ ID NO: 12499
  chr19:49217526-49217577
  hyper

SEQ ID NO: 205520 - DNA, 632 bp, Homo sapiens
  chr19:49255764-49256396
  hyper
gcagatccacagtccgcttttcgtggccggagcgcaccctccgcaaaggcaggccacatccggccgcccctggaacgccaggcgtccggctatccggcccggcagccctcccctccgcgcagcctgtccggactggcagcgagggcttggggaggagaggaaggagagggcgcggccgggagtctcgcagcgtccgccctcccgggccgggcggatggctggaaggtggagccccgcccgtcacttggcgccgagccccagcgccaggggctaaggcgatggcccctgggcccaccgctccccagatcggggatgcaggggaccgcgccctgcccctccgccccgtcattgacctgcgcgaaggcttcacccagggcaggctacctggcttctgagcagccgcagcatcattgcgtggaccaggagacggagcgcccagttgcaatgctggagccgggaggtccaatccgccgccctctctcttccggtgccagggcttagagtcggcccccgacacctgggtgcttcgagcctggccacgccccagcggctgggcagggcccccgcacctggtcccggcgagtggagcgatcgtccgccctctgccgcgtcctcctgggggatggagaacc

SEQ ID NO: 205521 - DNA, 218 bp, Homo sapiens
  chr19:49298695-49298913
  hyper
atccactcgtgggctctgattccgtactgcggaacaacggaggcagtgcgtgaggtggaagctgcactacaactcccagtaggccctggggtgttccaggccgagtgcctacggagctgtgccccagcggctcacgggaaatgtagtccacttcccagagggccccaacaatgatgggaacggggaatcaaggctaaggcggcgcagaggcttccggg

SEQ ID NO: 205522 - DNA, 153 bp, Homo sapiens
  chr19:49314168-49314321
  hyper
ggccagtggtcttcccggaagtgcgcctcccccggttatttcccagaccccggcgcggggctgcgaacccacctgccccagagcggctgcggccatgatccgtgcggcgcgtaactgtgcccgcccggggcgcggctccgaagagagacgttc

SEQ ID NO: 205523 - DNA, 210 bp, Homo sapiens
  chr19:49436772-49436982
  hyper
tccctctgtaaggcggagctaaacggtgcattcgcccagcggggaagctagaactaaatgaccgctctgccgactggagccaacgagaatcggcgtaggcgcaatacgggcggaggatggggacccgcccccggggtgggcggggcgtcaggtacttaattcgcgcctggagggaccgaaggtgccgagggctccgcatcgcaaccatgg

SEQ ID NO: 205524 - DNA, 323 bp, Homo sapiens
  chr19:49467050-49467373
  hyper
tggggtagggggcccgatttgggtctgagccaggtctagttctgagggtcccaccaaaaaagtcggggagtgccaaggggatgaggtcagcgagtggccccacccccatccgtccccgcgggggccccttcccgcgctgagctcagcatgactcagcagtcgctgcctgcaacaaggaccccagataccggcctggcggggcatctgcagatcccctcggtcaggggctgccccgcctgggctgttcggagcagctcctctgtagggcagggcctgacctcaccccacaccccagtggcttcagctccctgcccagcgcacgg

SEQ ID NO: 205525 - DNA, 193 bp, Homo sapiens
  chr19:49577262-49577455
  hyper
ggcgcagagacaagacggtggccttctagccactggtgtccggtgacactgcataaaaatagctccatcagatgggcttgggggaagtggaggggtttgatcactgagactcccaggaaagaagtcctggtcgccctctgctgggggtgtggagagaggtaggtactaagggttcgaacgccctgctaatcct

SEQ ID NO: 205526 - DNA, 84 bp, Homo sapiens
  chr19:49646032-49646116
  hyper
cctctgtccctctgtccctccgctgcagctgtgggtgggcatgcctgcctggtatgtggccgcctgccgggccaatgtcaagag

SEQ ID NO: 205527 - DNA, 83 bp, Homo sapiens; identical to SEQ ID NO: 12509
  chr19:49646245-49646328
  hyper

SEQ ID NO: 205528 - DNA, 446 bp, Homo sapiens
  chr19:49660928-49661374
  hyper
tcgcggcctgggacccgccctctccccgcctcccgctttggcgtctccaagactccccgccccccagacctcgccccgccccaggctaggctggaaagtggaggatccggtttgctctgggcgggtctggaagcagagccggcggagggagcgccggggccctgggctgcaggaggttgcggcggccgcggcagcatggtggtgccggagaaggagcaggtgagcgccggaccagggtctgcgggagcgcggagctggggacctcgcctccaggctcccagagaggagggcgctggacacccagattcctgggtcagacggaggagggggatgggagggtccaggttccagggtccagggcatgggggtcgagactcctgagtctggagcgggagggcgctgggggcccggactcctgtgtccgtggggagcgcacggggtgggtg

SEQ ID NO: 205529 - DNA, 34 bp, Homo sapiens
  chr19:49925606-49925640
  hyper
ctaccccccatttcaagccccgcgcccccaaccc

SEQ ID NO: 205530 - DNA, 108 bp, Homo sapiens
  chr19:49926734-49926842
  hyper
cttatatcgcctccgcagcccccgcaccgggcagtgacgcaggccggggggccggggacgcggggtcaccccctccccaggctcattaggagccgccagcggtaatga

SEQ ID NO: 205531 - DNA, 206 bp, Homo sapiens
  chr19:49929636-49929842
  hyper
taaccccttccttcccgctctcccccgcagctataggtatctgccagagctatgaaatcattcagccggatcctcttcctcgtcttcctcctcgccggcctgaggtccaaggccgctccctcagcccctctgcctttgggctgtggctttccggacatggcccacccctctgagacttcccctctgaagggtgcttctgaaaattc

SEQ ID NO: 205532 - DNA, 108 bp, Homo sapiens
  chr19:49956760-49956868
  hyper
ctgcggtagctcagccgctccgcctctcttagtccccgtgattcccgccgcccaataggatcgcgccctgtaggacgctcccttgagccttggcggtggcagcctttt

SEQ ID NO: 205533 - DNA, 199 bp, Homo sapiens
  chr19:50316869-50317068
  hyper
atggcgaccgtggcggggcgttgccaagcaaccaccattcagcctgatatccattccaaggctgtaaacagctgtgccctgctcaaagatggcggcacgtcgaagtccgagcaccctccttggggcgaaatcgagaaaaacaccatctcccctacaaccttcgagggtggttgagtccagcgatcgttgcctagtaacc

SEQ ID NO: 205534 - DNA, 194 bp, Homo sapiens
  chr19:50321281-50321475
  hyper
aggcggacctggacgccccgctcaaagatggcggctgactgagccgctttcaatttatttagcttttgacaataattccgtctaacccatcaggcccctagaagggctaactatgccctttctgagtcttccacgcggtgggggcgaaggaggatggagctagaacgaagcctcagcgcgtgccccgcacaaac

SEQ ID NO: 205535 - DNA, 196 bp, Homo sapiens
  chr19:50380603-50380799
  hyper
caaaatggtacctccttggcttcaattccagtatacaatatggagaaggaagtgggcgtttcaaggcgtgcttgccccaggtggtgcagctctcagaccctcccacttgtttacttcgtggcgagagggcgaacactgcgcctgcgcactctccgtagccggatccaccttcagcgtctgcgccacgtgactccga

SEQ ID NO: 205536 - DNA, 194 bp, Homo sapiens
  chr19:50553803-50553997
  hyper
cacccccgctgcctctaaacccgtccccacccctgcagcctcacaggctgccgtcagattctcaagcccctattcctctcggtggcctaaatccccaactgctcggggccacttttcaggccaaaatgggcccaaaatggggagggcaagtgatgaatgtcactagacagtggggccctcaaggacctggcaaa

SEQ ID NO: 205537 - DNA, 380 bp, Homo sapiens
  chr19:50708476-50708856
  hyper
cggggtttgaatcccgggaatcctcagccttctccgcggcgggccctcgacctttgccctccataagggggaggagcccctggcgccgccgccgccgccgcccacctggcaacaggctcaacccccgccttcccccggcccccgtcagaggccctgaagctccaggcccgccccgttcccagccgggcaggtgctgggtgacatcagagccgggctcccgccctgtgacgcgacggggccccgccctgcgctggaccgcggaggtcgctgcacctgaagagaacggggattcccgcgccctcaccccatctccccgctccggtcggcgcccccaggtagccccgaggatctgcgagttgagggggcggcgacacaggcgc

SEQ ID NO: 205538 - DNA, 44 bp, Homo sapiens
  chr19:50816051-50816095
  hyper
aagaagttgaaccctttggcaatataatcagtccccaccccgta

SEQ ID NO: 205539 - DNA, 156 bp, Homo sapiens
  chr19:50816275-50816431
  hyper
gtggggggttcctgaggccgtgggagcagagggagggaggtggctaattccgtgggaccccggctccaaaaggggggtccgctaaagagtctgggaccggtgtggtctctgggcttgggggaggtagcgcatccttgagccaggataggaggtggg

SEQ ID NO: 205540 - DNA, 413 bp, Homo sapiens
  chr19:50832538-50832951
  hyper
gacgagtcggggccgccaatgagacggagcgattggctctttctaagagagcagggaggaggggcggggcggggcgtcaagggaggcgggaccggttactactaattgtgttcggcagcactggtagccaggggaaggcggggctagatacgatagagagagaccttactgaactgaaaaaagtgcgggcggggtagagggaggaggggacacatccaagctatttaaagacgcccgactggcctggaggggcggggccaccatgagagaggccgtcctgattgggctgagaaaggggcggagagaaacaaaacagatcgcacgccctcacctaaaacaccgctaggcaggacctggtggggaggagcattgcttggaagagacagggccgcagaaagtagaaacggtccaga

SEQ ID NO: 205541 - DNA, 92 bp, Homo sapiens
  chr19:50836199-50836291
  hyper
cacccggttccattcggagccttggtctctggacaccaaaggtgaaaatgtgaggactctctgcctacgatccttcgtcccctaaaaccctc

SEQ ID NO: 205542 - DNA, 588 bp, Homo sapiens
  chr19:50836451-50837039
  hyper
tcgaggcgaggtggggatgggggaatccggggctcgagatggggggaggggtgacccagccccggcagctctgggcagcaagaggctgcagaggggggagtgacatcaccgccggaggaggggcagcaccgctcccccaacccaggggcttcaagctccgcctttatggcggaccccggggtcctggaatgccaaggcagagaggagaaacaggagacgaggtccgagggaacggtatccccgccccttagaacaggaactggtaaacccttaccaattacagccacccccgactgccacctgtggctgccgtcgcgacctgtcgcctcccacgcatgttgtggctgcgcccgcccccgtcagggcgtgaccacggcgtggactacaacgaccgtgatgctccacggagccaggagcctttgacgaaaggcagcgtaggcgagggccttcatgggactcgtagtacaaggcccatcacaagggtgcgccgtggagaaaaggggtgatacccttcgcctccctctcttcctcaactccgtgggtccatgcacaaagctttctcttcaaaaagtacgctctgaaaagaag

SEQ ID NO: 205543 - DNA, 137 bp, Homo sapiens
  chr19:50837389-50837526
  hyper
caggccgcaggaaccaccatttccctgggagtccgtgctctctccgcccccaaccccggggacaagaaatgtttctgtggccccttccggccctagtgatgtccaactaccagctccaccctctcaactccagtcat

SEQ ID NO: 205544 - DNA, 240 bp, Homo sapiens
  chr19:50871938-50872178
  hyper
ccaactgcacccaagcgcccttaagtagtttgagaggccgtgcctgcaaattcccaattggccacaaggtggaggtgtgggcctgttttcccagccaagattccccagccgccacccgtttctagagctggacccctggaacaccaggctctctccagctttcctgcttccgccctagcagttcccaccgcctggaatgccgacttgctcgctctctgcaccccacgggaaaaggagcag

SEQ ID NO: 205545 - DNA, 94 bp, Homo sapiens
  chr19:51228809-51228903
  hyper
cttcctggccacgaatggcagcgtcctccccgacccccagtctgggcgcttctgggagggctcttgcggtgccggcactcctccttgttagtgt

SEQ ID NO: 205546 - DNA, 216 bp, Homo sapiens
  chr19:51324264-51324480
  hyper
gctggggctgtggtgcgggctccccaggggcaggtggcctggcctgaagtccaaggtcgaggcccccttcccttcccagcaccctcccgcgcgtttctcgccccgcctcctccttcctcctccctcagttgccccacccagctcccgctgaaaccagcccttccctgtgtctctccagagtggagggatatcctgtggggcggggagctggacaga

SEQ ID NO: 205547 - DNA, 187 bp, Homo sapiens
  chr19:51412646-51412833
  hyper
tgcagctaccagagacgagcgatcctgagggcggagtcagggatgggatcgggaccaggaggcgggcccagggttcctgggggtgggcttaccgagcaggggcgtggtcagaggttcaggagcagtcagggctcctcggggcggagtcagggctgggaacgggctcaggaggcgggcccagggctct

SEQ ID NO: 205548 - DNA, 103 bp, Homo sapiens
  chr19:51415995-51416098
  hyper
tggcttgcgctctacggatcttgtggagacgcataggtgcgggaaggggggtggggggtgagagggtgccgtagaccgcggagggtgcacggaggggcaggcc

SEQ ID NO: 205549 - DNA, 256 bp, Homo sapiens
  chr19:51416099-51416355
  hyper
aggtcaggactgccgagaaacagcggggactcatcaggggagaggtggtgtttacagccacgaggccgggtgagatcatccaaggagtgggtgggtgtagaccgcggagccggcgcgggtgagggatagtgcccgcaggtgaccgcgacgaggcaggaatgtctctgtgtctctctgtctctcctgggtctctaacactctttccttctccttccttacttctttcccccacagcccaccccgtgtgtctgtctct

SEQ ID NO: 205550 - DNA, 98 bp, Homo sapiens
  chr19:51520492-51520590
  hyper
aggcttcggggtccaagcgcgtgtcgttttgggggagcagcgccgcctctgcggctggagaaagaaaggggacggaatcaaagcacggagggcagggt

SEQ ID NO: 205551 - DNA, 241 bp, Homo sapiens
  chr19:51522935-51523176
  hyper
cctgtggtctgccgctggtatcctctgcccagggacccctggcgggaccttcccttttaaccccaaggagtccggaagcttctccaccctcccctacccccacccccgggctccctccctttccctctgtctaattgtaccgtgggtgaggctggcactcctgggtcccagattcctgctctgggaggggccctggaatacaggcttctcccagtgcccgaaacgcccccttttcatccct

SEQ ID NO: 205552 - DNA, 117 bp, Homo sapiens
  chr19:51527588-51527705
  hyper
tggaggaggaaaggtcgggggagacatgggtgggagaggtgagtgacacctttgaggatgaagaaacatcgctctgcttccaacctcttccacgtctcccaccgaagcccccttccc

SEQ ID NO: 205553 - DNA, 216 bp, Homo sapiens
  chr19:51842632-51842848
  hyper
atttctcttcccaaacgtaactcagccccttcctttccagctccacccacttctgccaggttacttcgccccctcctggattgcactccgagaagcctccccttttcccagatatctccgcccttccttgtggaccccttcccctttctaagacaattctgcccgctttctaaatgacctcgcccctttccctggtgactccgccccccttgccag

SEQ ID NO: 205554 - DNA, 419 bp, Homo sapiens
  chr19:51869575-51869994
  hyper
gccatcttcccgccgcagccacttacagggtcagcccgcaccctcagcggctcagtccagaagccccaccacccccgccccccgcgcccctctctgcgcctgcgcgcagcacggtcagccagtcaaccgctgcagagcccgcctccccgacagaggaccaatcgagaggccggaaggaagggaggtgtggcaagcaatgcaaaccaatgggaagcggatctcggggagcgagcgggacctggagagagaaggaaaggcctggcggagagggcagggcagagaactaggggaaaggtcgtgcactggagggaagcgcgcccggagtttatagatcctcccggtcctataaacacttcccggtatccccggatctgctctccctctccagatcccccacttcttcccggcctctccaagtc

SEQ ID NO: 205555 - DNA, 102 bp, Homo sapiens
  chr19:51925272-51925374
  hyper
gtctttgtgtcctttgagctccggacctggtcctgggttcctcccacctcgggctgtgctgcagttcaggacgccgcccccagggggcgctccaccttcaga

SEQ ID NO: 205556 - DNA, 189 bp, Homo sapiens
  chr19:52074533-52074722
  hyper
gcgaccatttagcttctgttgttaagtggatctaagcctatgtcgcttactggacgctgaagtgattgggaatattagcagtgggggttctgtagggtcaggaaggggcggctggctttgggggagtgatgaggggcttgttgggggtgggggtgcgtgataaagggatttctcggctgaagacgaggc

SEQ ID NO: 205557 - DNA, 74 bp, Homo sapiens
  chr19:52531285-52531359
  hyper
aaagggtgactcacaagggccccagacccagacagagtcggactcgtcgctgatttcctcagactcttcatccc

SEQ ID NO: 205558 - DNA, 222 bp, Homo sapiens
  chr19:52531884-52532106
  hyper
ttatagctgagagtggagccttagctggagcaccatgggcacggccatcttagaggaaggcagcagccgtacggcagagaagatgctcatatccaggacaatttggaaaaataaacaaggtttgaagaagtcacggtgctggccaggaagcggtcacagagttgccaaaaccagtggtcactgaaagtgttagatttggggatagggcgggggttctgggct

SEQ ID NO: 205559 - DNA, 139 bp, Homo sapiens
  chr19:52551965-52552104
  hyper
gccgcgacctcttaaaagctgaacttacttccctaaacttcttccacttctgggcccctcgcccaactccctccccctctaaacctccagagacggtcagccgcgtttccatggagagcggaatgcggccttccggctt

SEQ ID NO: 205560 - DNA, 92 bp, Homo sapiens
  chr19:52552233-52552325
  hyper
gatttccagacacctcagccctggcagaaaatggagagcttatcagaggcttgagttcacacaggcagacacggcgtgggggtaaagtcctc

SEQ ID NO: 205561 - DNA, 114 bp, Homo sapiens
  chr19:52643387-52643501
  hyper
ttcatggggtaagcggggccgaaatagagcctgttatttactctggttcacaggcagcatgtctttggttttctgactacttcttgtcctgtgaagcagcgttgctgcctgcct

SEQ ID NO: 205562 - DNA, 160 bp, Homo sapiens
  chr19:52715132-52715292
  hyper
tcagttttcagcctcctgctcgtctactttgcaaacgattgaccgtcaagcccgggtttgagcctgactcactccagaactctggtttatggctgtacacttgcttagatacttacactggcccccaccgcctttgatcgaagcaattgctgctgaaaaa

SEQ ID NO: 205563 - DNA, 106 bp, Homo sapiens
  chr19:52800214-52800320
  hyper
gctccagtctccttgacaggtctccccggcaaaacccggaaaacagaggcactggaagcgaggcggagggaagcgcaagccccactccgccccgcccccgcccccg

SEQ ID NO: 205564 - DNA, 180 bp, Homo sapiens
  chr19:52800380-52800560
  hyper
cccccgcccccgccccgctcggacccctccgctgcgcgcgcagtttcccacaaacccggaagcggatcgcgtggagtgaaggtcacgccgcggcgcgtgagtttccctttgtgtaaattaatctgcgcttcccaactcccccgcgcttctgtacccgggatctgaggggccacacagacc

SEQ ID NO: 205565 - DNA, 167 bp, Homo sapiens
  chr19:52901156-52901323
  hyper
cgtgagtttccctttgtctatgttaagtctaggctagccagttcttctctgcttctatacccgggagctgaggggcatgcagaccttgaaatcccggcaccgctccctccaccccgagtaaattcagacatcctttgagagtctgggagtcgctttctgcgtgttaa

SEQ ID NO: 205566 - DNA, 52 bp, Homo sapiens
  chr19:52956933-52956985
  hyper
ggatcttaaaatcctcccgccgttccctccatcctaggtatattaatacgtc

SEQ ID NO: 205567 - DNA, 351 bp, Homo sapiens
  chr19:53030790-53031141
  hyper
cgccctctgccggttctaaagggcaaggtctcagcgcctcgcgccccgccgctacctcgcccaggccccgcccacctcctcccacctcccgcccaggcctggcttccgtcctgcgcgcggagattaacgcaaacccggaagcggatcgggtggagtgaaggtcacgtcgccatggtgagttttgctctgtgttgcattaagtctccgcttcccaggtccccgccgcttctgtccctgggacgtggggtccccacagacctggaaattctcgcccgtcttccttcgcccagagcaaattgagacagcccagtgagaggccgggtgtcgcttcctttcgggtttaaagtcgtc

SEQ ID NO: 205568 - DNA, 277 bp, Homo sapiens
  chr19:53104069-53104346
  hyper
gcaggtggtgacttcgctcctccctggcctgagcactccgtcccgcatcccaggcggtggccctagggaagtctctgaagctgagcacagggtggactctgcccccaccgccgacccgccctccccgaccccgagtgaatggagaatagaaagggagaggatttctgttctgtcctgtgggccctcagtatgaaatcgtagttctgcccaggcaggactttgcatttcacattctagtttgcatccccgttccagacaattccagggcttttgactc

SEQ ID NO: 205569 - DNA, 76 bp, Homo sapiens
  chr19:53105086-53105162
  hyper
tgctccccaggtctcctctccgccgtcaccgcttcccctgagcccgcgttgggaaggtgtccggggcctgtcctgt

SEQ ID NO: 205570 - DNA, 60 bp, Homo sapiens
  chr19:53141353-53141413
  hyper
gccctacagcagaaagaccggggacagcccagcctcagggcgactttaaacccaaaagga

SEQ ID NO: 205571 - DNA, 70 bp, Homo sapiens
  chr19:53193125-53193195
  hyper
cacaggacaggccccgggcacctccccaacgcgggctcaggagaagcggtgactgcggaggagagacctg

SEQ ID NO: 205572 - DNA, 210 bp, Homo sapiens
  chr19:53400792-53401002
  hyper
tgggttgagaaagaggggccgcaatttccaggtctgtggggactcaacgtccccggtatagcagcaccacaggactgggaagcacacataaaacagagcgaaactcacgcgctgtggtgtgaccttcagtccctgccatccgcttccgggtctatgccaatcagcgcaggacagaggccaggcctgggcgggacccccgagaaggtaggc

SEQ ID NO: 205573 - DNA, 348 bp, Homo sapiens
  chr19:53445362-53445710
  hyper
gggctcaggagaaacggtgattacggagggaagacctggggagcataagggcccggcacgaggagggaggtggggggcgacggcgccttaagacaagactgggaggcgcccagggcgggaatccgcctcgcggtaaggactttaaaaagtgcgggttgggaggagtcagaaaaaagttttgagcaggaaaactacgcgatgggaagtgtatacgttaccctatagcagaaagattcgggacgggaccggtctatggtgactttaaacccaaaaggaagcgacccccagactctcacggggacttctcaatttgctctgggtaaagaaagacggaggagaacttccagg

SEQ ID NO: 205574 - DNA, 245 bp, Homo sapiens
  chr19:53445822-53446067
  hyper
cccgcttccgggtttgtgcgaatctgctctctggggacagaagccaggcctgggcgggacccgcggggaggtaggcggggcctgagcgaggtaggggcggggcgcgaggcggagagaccttgcccttcagaacagacagagggcggggcgggggcggggccggggcgggacctgtgcgtctctcagcctggctcccagagcctcaatttttcgggttttggaggcgagaccggccaggaaggctg

SEQ ID NO: 205575 - DNA, 168 bp, Homo sapiens
  chr19:53465693-53465861
  hyper
caggagtggccacaaagcaccggccaccctggggctgcggggctgcaacgctgcgctccaggggccgactagagcgaggctgggaagcgctcttgcccagggcaagaatccagctccgggtgaggacttgaaacagcgcgaggcgggaggacgcgtcagaaagggttt

SEQ ID NO: 205576 - DNA, 37 bp, Homo sapiens
  chr19:53496405-53496442
  hyper
caccgggacgtcaaattttgctctggggattagccgg

SEQ ID NO: 205577 - DNA, 113 bp, Homo sapiens
  chr19:53497109-53497222
  hyper
gcaaaccagaatgtgaaatgcaaagccctgcctgggcggaacgtattatttcatgctgacgaccacagaacagaatagaaatcctctccctttctattctccactcactcaag

SEQ ID NO: 205578 - DNA, 110 bp, Homo sapiens
  chr19:53561243-53561353
  hyper
gaagcggtgactgcgaaggggaggcctggggagcagcagggcccggcacgaggaggagggaggtggggggcgacggcgccttaggacagggtagggtctgcaggagccta

SEQ ID NO: 205579 - DNA, 162 bp, Homo sapiens
  chr19:53561825-53561987
  hyper
tgtaaggtaaaaagcatagagttgtgtgggccccttctgttggaaagcaaaatgttttcttcccaccaagatgaaaacggtttatctcaaaactatttttgccagcaggttggacccgatcctgctagggagtctcctgcagctcagcggtctgggaactgc

SEQ ID NO: 205580 - DNA, 221 bp, Homo sapiens
  chr19:53606354-53606575
  hyper
gtaaaggattttaagcaggaaaatcctgcttaaacgtttaaaaaaccgggaaaggccgtgtttacttggcccaaggcagaaagaccgggggcagggaccagcctcagggcgactttaacccaaaaggaagcgtctccgggcccacacagcaaggcctatttacctgaggtggagggtgcggtgcggagattttaagtccgtagcgacccccgggcatcggg

SEQ ID NO: 205581 - DNA, 427 bp, Homo sapiens
  chr19:53606605-53607032
  hyper
tgagtctacacagaggaacactcatacgccatggtgtgatgcttgctccgcacgatccacttccgggtctgtgggcaactgcgcgaaggaaagcgaccgagcggcccggggcggggtccgagatgggcggaaccggaaaagggcggggcgttgagagagccgggctgaagcaggggccgccaggcagggaccccagggaaggaacggggaggagccaccggggaggggtggggagtgaccaagtggagggacccgggggcgggccggggaggagccgccggggaagggcggggaggaaccgcgggaagggaccgcgggggaggaaggcgaagggaccgcgggggagggaggcagagggaccgccaggaagggacccgggggagaggcggggctggacgggacacgttagggtctgcgatttcgtgtg

SEQ ID NO: 205582 - DNA, 125 bp, Homo sapiens
  chr19:53607111-53607236
  hyper
agcacagttgtgtaggttattttggaaaccaaactgctttcctcttagaatggaggcggtttatgttgaaagcattttttgctagcgcgtttacccagtaatgttattgacgctgaagcagccca

SEQ ID NO: 205583 - DNA, 160 bp, Homo sapiens
  chr19:53635604-53635764
  hyper
aggccctgagcacctccccagcgcgggctcaggggaggcctggggagcagcggggcccggcacgaggaggagggaggtggggcgcgacagcgccttcagacaggggtggggtctgcaggatcccaggaccaggcagaggacgcaaggctccccgggactg

SEQ ID NO: 205584 - DNA, 101 bp, Homo sapiens
  chr19:53635784-53635885
  hyper
cgctccaggggccgacgagggcaaggctgggaggcacccaggacgggaatacacctcttgggtgaagactttaaaaagcccggggatgggggagggggtca

SEQ ID NO: 205585 - DNA, 141 bp, Homo sapiens
  chr19:53636109-53636250
  hyper
ctcgacgccgtcaccttcacccaacgcgatccgtttccgggcctgtaggaaactgcgcatgcgcggagagaagagcccgggcagcctgaaggaatggctggagtgggcggggtctgcgccgctttaaggtaaaaaaatcag

SEQ ID NO: 205586 - DNA, 97 bp, Homo sapiens
  chr19:53696015-53696112
  hyper
cacaggacaaggcccgggcacctccccaacgcgggctcaggggaaacggtgactgcgaaggggaggcctagggagcagcagggcccggcacgaggag

SEQ ID NO: 205587 - DNA, 211 bp, Homo sapiens
  chr19:53700096-53700307
  hyper
caggtggctggaaacgcaggctcccacccgccttccttaggtccctcccggccccgccccctgcctgtccaggccccgccccacccttcgcgttttctccccagcccactccctgtgccggtcacgccccgcctaggccccgcccctaggccacctcagtcccctccggccccgccccctgccggtctctccctggccaggccccgcccct

SEQ ID NO: 205588 - DNA, 64 bp, Homo sapiens
  chr19:53758247-53758311
  hyper
gatgggcggggacaatggcgggatgggcggggcctaggggtcggactgccggacctctcctcgg

SEQ ID NO: 205589 - DNA, 113 bp, Homo sapiens
  chr19:53970643-53970756
  hyper
atggagaatagaaagggggaggatttctattttgttttgtgggccgtcagcatgaaatcgtaccttccgcccaggcagggctttgcatttcacattctagtttgcatccccgt

SEQ ID NO: 205590 - DNA, 59 bp, Homo sapiens
  chr19:54024884-54024943
  hyper
tggggtctgcagaggtggcacggccaggacgggtctccgtgtctctgaaatgtgccttt

SEQ ID NO: 205591 - DNA, 80 bp, Homo sapiens
  chr19:54206968-54207048
  hyper
tttagtgtaatcaatcgaaatcatttccttcattaagagagtaagtagccggggcatggtgcctcatgcctgtaatccca

SEQ ID NO: 205592 - DNA, 193 bp, Homo sapiens
  chr19:54372431-54372624
  hyper
gcctggagcctgagcccctcagaggcccgggtccctgcccactccggtcttagagatgctcttgggggggctctcagcccatgtttatagggatccagaaatgcaggcctccaaccctgagagtcggggtccccaccccccggaaatccgggagagggcgggcagccccggaggcgggcgggggtccgggcac

SEQ ID NO: 205593 - DNA, 109 bp, Homo sapiens
  chr19:54372682-54372791
  hyper
cgcggagacaccggctctggctgggccgcccgcctccacagccgccgcccagggttctcccgccactgccgcccgcacccccgcccccgcggggttaagatcacacacg

SEQ ID NO: 205594 - DNA, 112 bp, Homo sapiens
  chr19:54372851-54372963
  hyper
agttaactgaacggggaggggagggggcggggcttacccggggtcaccgccagggccctgctgggttccacgccacgttcctgtctccgcagggcgttcgatccctagaggg

SEQ ID NO: 205595 - DNA, 230 bp, Homo sapiens
  chr19:54382484-54382714
  hyper
tcgccctaggtcacctggaggtggctggaaggccagtggactccacatttagggagagtggttacaagaggactcggattcccccaccttcccttcggctttgggaatcccaggaaacccgccccgaacccctgaaaagtcccagagaaggtaagctgggcgtccagagtccctcccaggcgccgccgcagcgtcccgcccagcctcgcggggcacgccgggaggcggag

SEQ ID NO: 205596 - DNA, 40 bp, Homo sapiens
  chr19:54382804-54382844
  hyper
ttgcccctggcaacagagagggtctcccgggagcggggac

SEQ ID NO: 205597 - DNA, 144 bp, Homo sapiens
  chr19:54461001-54461145
  hyper
tttttacgaggatcgggtcttgagtaaacggcttgcctagagccacgtgcaatcccacttcccatccgcgttctcacttggttggaggcagcttctgtgccctttataaccaagagcaactgagtatagaggagaagaagtgtt

SEQ ID NO: 205598 - DNA, 107 bp, Homo sapiens
  chr19:54486197-54486304
  hyper
ccgtgagcgcgctggagactgctgggcccgccccacgcccaccctccccgcccccctccccctccgaagcagggaccccgagggagggggcaggggagggagggggc

SEQ ID NO: 205599 - DNA, 40 bp, Homo sapiens
  chr19:55598024-55598064
  hyper
ccccaggacccctcgccctgagcccgcactccctacctcc

SEQ ID NO: 205600 - DNA, 158 bp, Homo sapiens
  chr19:55691158-55691316
  hyper
accgcctcggtctccacgctgcctcttgaccccacataggcgtcttccctgtgtctgcctccccaacccgcctgtctctcttccctatcgcctggcctctgtctccagggtctctccctctcccctccgcctgcgccccactccccgccctcggctct

SEQ ID NO: 205601 - DNA, 96 bp, Homo sapiens
  chr19:55691680-55691776
  hyper
gtattgtgtgtgcccgtatttggtctcgggtaggcggaaagccctgccccgcccctcctcccgcctccacccgggaacctcgatgacgcccacaga

SEQ ID NO: 205602 - DNA, 638 bp, Homo sapiens
  chr19:55728004-55728642
  hyper
aggaagtgacaggggcctgactcatcaacttgtaagagagctggggttctcctagatccatgctcgcactgaggtgagaaatgagaagccagggccgggagcctcctgggggttggctgccaacgccaggcaggcggggaatggtgattttcgcttgtatcgtggaggatgccacgcacagacgtgaatagaaagagcctggaccgtgtcctgaggtcagcgactgaggtcctgggtggggccagccaggacctgcccgggggctactgccctctgaatcaatacctccagggaccctacgttgacacccatggcctcccactctccacccctcagtcctgcgtgcggcacgtagtgctcactgggcgtctgtgtagggggttgaaggctgaggctggaacaagggcgtggcggtcgcaggctccagggcacgacggtccttcctcttccccttctcagccacatctggggctccgtccctgcagccaaggctccctggcgctgtccttggtgctgacgcggttctggaagtgcggtgccagggtggctggtgcggctcccgatggaaaagccccaccaaccccacaaagcagactcgggagagaacacgccaccgtctttagcgaatcttaccaacc

SEQ ID NO: 205603 - DNA, 321 bp, Homo sapiens
  chr19:55866138-55866459
  hyper
ctaggacgcccgagccccagccaatgggagccgtcgtgcaccgcggggctggtaggggcgcccccaccccaccccttgctcccccgacgccccctcgggggcctgcgcgtgcacacaggcaccgaggtgcgactcgctgagtctcaggctcaagctttaatctctgcgaagttgggcggctccacgggctcgcccccgcccccccccgccccccaatatataaaggcatatccatagttctggtatctaccagagggggcaaatccccccaagcggctttcaacattccgcttcctacagtcggtgcgcacagaaccctcg

SEQ ID NO: 205604 - DNA, 204 bp, Homo sapiens
  chr19:55962684-55962888
  hyper
gcgttcaagaggaggcgggcccgggcgggtggggaaagcccagagggaaggggcgggctcttgctggagggcgcggggaccccagttccgggcgccaggggcggcggggcggggagaccctgggggctgcacgggggcgccgtgcctcgcgggccgcggggaaggcagggaccgagcgagggaggaggaccctcccccgacccg

SEQ ID NO: 205605 - DNA, 67 bp, Homo sapiens
  chr19:56098517-56098584
  hyper
tgcaacggttgagatcgtcctcagggtaaaattcccgctcctgtcctctcctcgcttcccacccccc

SEQ ID NO: 205606 - DNA, 258 bp, Homo sapiens
  chr19:56111238-56111496
  hyper
aaaaaaaagaaagcgaagtgcgccaactgcaatacagagctggaaaagaccggcaccatcttatccacttagcactccatgggcttcgaagcctgtccggtgccatgttaattacgggcactgggcagccattttcccgctcctcatcattcggtatctgtctttgggtcacccgactgtgggctttgtgagaggaaaggcgtttcgaggtggttggggatgtggtgctgggttatttcccactggggacacaccagg

SEQ ID NO: 205607 - DNA, 32 bp, Homo sapiens
  chr19:56915935-56915967
  hyper
gtttgacagtgtggaatcgtgtgtgagaccat

SEQ ID NO: 205608 - DNA, 120 bp, Homo sapiens
  chr19:56987582-56987702
  hyper
tcttatttttccaagctaccttggtaggaaggggacacaaccatacttagcgtcagtggagggctctgtcctccactcaaatgtacacatgcagaaaactgacgacgcaggtggttggcg

SEQ ID NO: 205609 - DNA, 172 bp, Homo sapiens
  chr19:56988112-56988284
  hyper
cacagtcacacactcataaccgcaaagccactgacgctaagtggcagacagacgcccaggcaagtcacacagtaacccaaggctacaataaacgcccacatcagcctgacactgacacacgcacacactccagaaacacaaatcttcacagtcagcgtcacacacccactcc

SEQ ID NO: 205610 - DNA, 159 bp, Homo sapiens
  chr19:57049618-57049777
  hyper
cacccatcagagtgatcctccggactccggaggcccccaagattgcctttcccttcccggtcggcagtgacgctcccgcaaggagctgacgcccaggcccttagcacctgtcacagccaagcacccttttactccggccctgcggtcccacccctcgcc

SEQ ID NO: 205611 - DNA, 34 bp, Homo sapiens
  chr19:57049807-57049841
  hyper
cgcctgcgcgactcccagaagcctttggggggtg

SEQ ID NO: 205612 - DNA, 46 bp, Homo sapiens
  chr19:57079253-57079299
  hyper
gggcaaagtcctagagcccggggaagttgcccgggcggggcagcct

SEQ ID NO: 205613 - DNA, 72 bp, Homo sapiens
  chr19:57182840-57182912
  hyper
atacgggctgacaccgctaagtgaacaggtgcagacacaatggcactcggggacgggctcacacgcggtcac

SEQ ID NO: 205614 - DNA, 206 bp, Homo sapiens
  chr19:57683360-57683566
  hyper
cgggggccgcgggccgcgaggggggcgggggccgcgagggggcggggcgtgcgagggggcgggggcgtgcgagggggcgggggcgcgcgagggggcggggcgcgcgagggggcggggcgcgcgagggggcggggcgcgcgagggggcggggcgcgcgagggggcggggcgcgcgagggggcggggcgcgcgagggggcggggcgcg

SEQ ID NO: 205615 - DNA, 118 bp, Homo sapiens
  chr19:57683899-57684017
  hyper
gctgtaaactaaaaatcaaattctaagctcccagccaactgaatggacccctcctctcagctaagagcatggcaaacttaaccggaaacactagttcggccgcgataggaaggagatg

SEQ ID NO: 205616 - DNA, 70 bp, Homo sapiens
  chr19:57702682-57702752
  hyper
gggaggaaaacttgcgccgtgaagcgttcctcccgttgttgaacacatgaggaaaactacactacttaga

SEQ ID NO: 205617 - DNA, 33 bp, Homo sapiens
  chr19:57703385-57703418
  hyper
cccaggtatcccctggatttgtcttcgcagtcg

SEQ ID NO: 205618 - DNA, 177 bp, Homo sapiens
  chr19:57791725-57791902
  hyper
cttgcgtcggccgcggactctgggccattgacgacccaggacaggagagttttctgcgggccagggcggcggaggcgggacttccgcttcttcgtgtgacgtcatctccgtgggccggtttggccctgaaacagtgtggggcctagagcgctgggtgggcgcgttctgcggcctgag

SEQ ID NO: 205619 - DNA, 90 bp, Homo sapiens
  chr19:57831523-57831613
  hyper
gcccagcccatgatctcaatcggggcgaatatccccgcctcctgacctcaattttcctaagctagaaaggacctttcgaccctccgactt

SEQ ID NO: 205620 - DNA, 33 bp, Homo sapiens
  chr19:57832400-57832433
  hyper
gtgttggcctccgacaggtgctcagtccttggt

SEQ ID NO: 205621 - DNA, 35 bp, Homo sapiens; identical to SEQ ID NO: 12660
  chr19:57863221-57863256
  hyper

SEQ ID NO: 205622 - DNA, 475 bp, Homo sapiens
  chr19:57874397-57874872
  hyper
agtgtgtccctttggcggtgtagccgttgagaacttgctgtgcttcacaatccgatatcataggtccctcacatttctgtgagtatcctagaccttacttcaagaaaatctggttatgtcgcctttaagagcaacccaagccccgtcctgtccgtggagtccggcactctgtttaccagctcccctgacggtgccactgagcctctatccgccatataaggactgaccaacgctctaaggcaagtccagaagcggtgtcgaaacttcataacccagaagacactgcggttctcggcagcgcgactgacccaatgaatgtgcaggaaggaacctttgcgtgcgtgcgtgcgtgcgtgcgtccgtcctcgtgctcgcgcatcgtaggagggcgggacttccggcgtcctcttgccgtggttgatttgattttctctggtgttttcactagttccggcctttggcgctctatgacgtc

SEQ ID NO: 205623 - DNA, 217 bp, Homo sapiens
  chr19:57875005-57875222
  hyper
gcctttgtcgcccccgcccctctcttccctggctggacttgcggagtccccgccgaagaacccgaggtgggtgccccgtcccaggcccccccccacctccgcccgacccctccttccagtgctgaagcccatagaaggggccctgcaggtcaggccccttgtctcgaagagaggggcgttcctgtgtggggtccccgtatcagctggtttgatgcag

SEQ ID NO: 205624 - DNA, 58 bp, Homo sapiens
  chr19:57875252-57875310
  hyper
cagagcatggaggtgctgccaagtgggccgcgtcggggagcccggagtgtgggttgtt

SEQ ID NO: 205625 - DNA, 83 bp, Homo sapiens
  chr19:57901385-57901468
  hyper
cgctggggacagtggcgtccttgtcttgcctttgtcgctcccgccccgctcttccctggctgggctggcggaggccttgctga

SEQ ID NO: 205626 - DNA, 76 bp, Homo sapiens
  chr19:57998876-57998952
  hyper
tccatctcctattccgttatctccatctccatcatcatctccatctccgtctccatctccatcatcatctatcatc

SEQ ID NO: 205627 - DNA, 32 bp, Homo sapiens
  chr19:58039267-58039299
  hyper
cctgagcaaccggggtttttaattctgagtct

SEQ ID NO: 205628 - DNA, 54 bp, Homo sapiens
  chr19:58070515-58070569
  hyper
acaggcccagggagcagctccggaaacaacatcctgagcgacgtccccggaccg

SEQ ID NO: 205629 - DNA, 37 bp, Homo sapiens
  chr19:58094924-58094961
  hyper
cgcctcccgcctctgggtacagtcaaagggctcaggt

SEQ ID NO: 205630 - DNA, 39 bp, Homo sapiens
  chr19:58111073-58111112
  hyper
tccacctttctccatagcaacggggtcattcctccctga

SEQ ID NO: 205631 - DNA, 50 bp, Homo sapiens
  chr19:58125365-58125415
  hyper
tgagggtcctttaaaaggagcgaagccacgccctgacctcagagtctcag

SEQ ID NO: 205632 - DNA, 189 bp, Homo sapiens
  chr19:58144181-58144370
  hyper
ctgtctctggggcaagaggtcggggagctggaagaggcaggaaaaggagcacactcgaagtaacgtttattggggaaaaaaaacgcctacgtgtaaatggacccgcacagctcaaacctgtgttgttcaagtgtcaacctacttaagacctcaaacaccgaagcccctcagtcgccctggaaggcagca

SEQ ID NO: 205633 - DNA, 209 bp, Homo sapiens
  chr19:58144745-58144954
  hyper
tcccggtccagctccgcccacagactcggatggcgaccgcactgagggacccggcttcggtgagcgctgcgatctccgggcctcccccggccgagattcttaagtcccaagtgagaggcaccagctcacgtctctgtagcacagggtcggggacactgaggctcgtgggtggggcccctatttctgacatccgatgtggtgggcagggg

SEQ ID NO: 205634 - DNA, 32 bp, Homo sapiens
  chr19:58144987-58145019
  hyper
gacgggcaaccgagaagggggcattcaggaac

SEQ ID NO: 205635 - DNA, 223 bp, Homo sapiens
  chr19:58175983-58176206
  hyper
ccagggctggcaggcggcccggatggcatgccgtctcctgcggagaattccaatttccccctaaatcgctcaacaagcgagaaggttttgggattcgaattcagtggggcaagcgaagtcgcctttccttcttaaacagatggaatccctggtccacaaacgtaccctgtgccaatttcatacaacacgctatggctgctgcggatgagaacacagcaactct

SEQ ID NO: 205636 - DNA, 314 bp, Homo sapiens
  chr19:58193123-58193437
  hyper
cctccttctcccctagaggccgaagtcgccatttccctgcacggggcacagcacctcagaatacaagttcgcagaggtcaaagcagtggacacactccgaagagctccgtggagttttggaaactacattatccagagtgcagagcgcaaaacggcggcggagttgagccaatgacagcccaggatagcaacacttccgcgcacgcgcagcgcgacgggccggaacttccggcgtcctcctcgtggcggtcattttggcctctgtcctgtttgtccagcccgccagtttctgcagtggaggtcgcgactgaggg

SEQ ID NO: 205637 - DNA, 222 bp, Homo sapiens
  chr19:58193585-58193807
  hyper
gcagtcgcgctgagggactcggctcaggtgagttgtgcgtcctccgggtctcgcctacctcccccagcagaagccttaaggcccagtgagggatgcctgctcacagccctgcagcccaggccccagtaccctggacaagaaggcgcttgtggattggacccgtttgtgacgcccagtgtgtacggaaatgtgacgggcagttgactggcgcgtgcagaactt

SEQ ID NO: 205638 - DNA, 43 bp, Homo sapiens
  chr19:58239193-58239236
  hyper
ccgagtttcaaagggctgacaggacttccgtcctctttttttt

SEQ ID NO: 205639 - DNA, 668 bp, Homo sapiens
  chr19:58258068-58258736
  hyper
acataacccagaaatctctgcgtcgaatgacagcgcgtcagagccaatgagggctcaaaataaaggcgtttccgcggaaacagtataaaggtgggacttccggcgtcctctactagtggccattttgattggtgttgggtgtattttccagtgagagaccgcggagtgttgggtcgtgtagaagtgactgaacccagaaggtggagacgagacgttgtcccgactgcacagaggctgctctgcagctccttaaaggcgctaggcgtgacccgcaccaaggccgggatcgggaccaccgtgcccgggtacctgcactgctcgccccctcctttcgaccccgctttccccacccagtcggatggcggcggccgcgctgaggcccccggctcaggtaattgtggcgtcttccgtgccctcaggtcacctcatctttacctaagtccaaaagcagagaggaagcggcgcctgctcaaggttttacaccctgaacccggcgtcgggacactgaggcgctctctatgggcccccgtttttgacacccgcgggatgcgctcaggagagctacaggcacagggagcggtgcaggcaaaggcctggagatgaactgagccgagaggatcgtaacctagggtccacaggcacctgtcgggagcaaagtgtgaggcaga

SEQ ID NO: 205640 - DNA, 165 bp, Homo sapiens
  chr19:58280746-58280911
  hyper
acagtacccccagaaatgtgcgtatggcctcttctaagatgggagaccctcctccgcatctggacctggagtcgccatttcctagcgcccctcgcagtggagcttgcccctttcttcggaaagtcggaagaaagccaccttaagcgctgcccatgtctgggaact

SEQ ID NO: 205641 - DNA, 62 bp, Homo sapiens
  chr19:58281371-58281433
  hyper
gggtgggatccctgtttccgacacccagttgatgcggtcggcagagcgagactggcggaggg

SEQ ID NO: 205642 - DNA, 77 bp, Homo sapiens
  chr19:58331143-58331220
  hyper
ggccccggactgctacgtgggactgcggtgaatgaacccagaaggtggagaggaaccgttctcggtgcacagaggcg

SEQ ID NO: 205643 - DNA, 67 bp, Homo sapiens
  chr19:58459305-58459372
  hyper
gagacgtacccaggtttctaccgattgctgtctgccagtgtttgtttggagacgtgtcatttcatgt

SEQ ID NO: 205644 - DNA, 145 bp, Homo sapiens
  chr19:58610001-58610146
  hyper
cagctcacggttaagaaaggagggagaccagcccaggatcaagaaagggaaagaccagcatgggctcaagaaaagaaagagaccagctcaggctcaggaaaagagagagacccagagaaaaggagcactcgaggctgagacagat

SEQ ID NO: 205645 - DNA, 188 bp, Homo sapiens
  chr19:58665953-58666141
  hyper
cacaactactaaatcaacaccgacacactcataagcagccccttcctcgtcctttttttccttctgagctcgggaacgtctgctgggggtgagggggactcgcagaccacccccccccccgccccaggcggaggtcgggggccgtcacctggccaggtgtccggggaacggctcgggcggctgacacc

SEQ ID NO: 205646 - DNA, 224 bp, Homo sapiens
  chr19:58666733-58666957
  hyper
tgggcagcggacagccaaaatcctgaaaccccgcggtgctccctgtgattcactttccagaggcccctcagtgccccgacgctggcccggagggcggtcgctgactgtcttgagactgaagctcactttcggatcctgggcgttcttgccaggttttttttattaatacagagaaaaccagtggctttgtgacagttagttttgaaactccctgaggagggccg

SEQ ID NO: 205647 - DNA, 540 bp, Homo sapiens
  chr19:58789998-58790538
  hyper
gtccggcccgcgcagacgtgcacggtccccagccattaggaggagcagacggtccccacccccacaatcagtcatctctcggggtccgcccttgcttcctgcccacgagtgaggcctctggttgcccgcaacctaaggggcatcgcagccccgagcaacaccgcccccaccagccttagctgagtgctcccattggccagaggccagcgggtgggggctcccattggccatcggccataatgcttccattggtcgaaggccagaccagcggagactcccattggccgagggctgtggttcgccgcacggcctactgggagttgtagtcgccgcgtcgccggtgcggccgccattgtccggcgttcggcgagtcgggtggtccctttggctggagtgcctctctggtctggggatcacctcaggcgctgtccttcactgggcgatccagcatggaccccgaggacgaaggggtagcgggagtgatgtctgtggggccgccggcggcccggcttcaggtaacaataacaacaataacgacgg

SEQ ID NO: 205648 - DNA, 197 bp, Homo sapiens
  chr19:58858560-58858757
  hyper
cggttcctcgcccgcaattcccccacgagccctggggagacccagcgctaaccaggggtgcccaagggaggagccgggagaggccctcctggaggtgggcacagcccaggcaaacatcagcagacggaaccagcacccgggacccagggaaacgtcacctgccaccaggagctccacagggtcgctgagctccgatt

SEQ ID NO: 205649 - DNA, 316 bp, Homo sapiens
  chr19:58874184-58874500
  hyper
cgtttctccccactgcgcctgcgtaactatgccgcggctgcgggcgcgcgccttctggttcccatggggacggcgccacagccaagctactcgggcgtcctgcgttgccatggatgcgctccgccccttcctgcacccggccagcctctgcggcacacacccaacagctacacaggcgcctggggctgcccgggtcgcggacgcaagtcgggccaacgtagcttctccctggcggtcctcctccggccccaggccgtctttaccacccctggaaccttgctgagttgacgccactgagctgcgtctcacacccacg

SEQ ID NO: 205650 - DNA, 379 bp, Homo sapiens; identical to SEQ ID NO: 56778
  chr19:58919475-58919854
  hyper

SEQ ID NO: 205651 - DNA, 308 bp, Homo sapiens
  chr19:59066308-59066616
  hyper
gcccgcacgcccgcccgggatccacggtccagcaggggccactcaccggagctgggacggacacccgtttccgcttccgggtcacgcttctctttctgggatccccgacttgcccaccaactaaggcccctcggtcctgtcgccgccgccgccgtttccggattaaacgacgtgacgtaacatgccccgcccgcacccggaaggttgggaaactccaggagcgcgcgtgcgcccgtgccccggaacgggccagcgtccgagcgcatgcgcaacagctcccgtttcctctgcgcgtccgagtgtttcat

SEQ ID NO: 205652 - DNA, 131 bp, Homo sapiens
  chr20:327871-328002
  hyper
ggccgtgtcccgccagggccgggacctttgcgcctgagcctcggctttgggaggtgggggtcccagggaagcagcaggggcgggagacagaaacagccccatcgcccctcgacgcctcagggttgataggc

SEQ ID NO: 205653 - DNA, 41 bp, Homo sapiens
  chr20:362798-362839
  hyper
taacccgccctcatttccctgggtcccgagtgtggcaggga

SEQ ID NO: 205654 - DNA, 333 bp, Homo sapiens
  chr20:524322-524655
  hyper
ggaagcggcagcggcggcggccgctctcccctctgctcacacagacaatatggcggcgatggaggaggagacacacggctcggccgccagccgcagggaccagagcgaggctgcagccgctgctgccggaagcggaaaccccctcctaccaggaggcggggcgagacagcttccgactccgcccccagaggaatctctctgaatgcggccatgctgggatgtcctattgtaaccttagggattcagttctggcctagggtgcaaaatggaaggaatccccaacgcaaagcagaataaggagacttgcaatagttaagcgcattttatttcaat

SEQ ID NO: 205655 - DNA, 224 bp, Homo sapiens
  chr20:657125-657349
  hyper
agagtaagtctcccctcccccctgctcgggctcccactggagccccctgttgggtttggggttcaactttcttcttccagaactggtggggggagcaagtcccccacgccgatgcctggccttgctcggttggtcctgttccggtgcctagctcaggcgggcgctgcaagaggaagtgaaaatcgtccagtaattaattttcctgctgccggggggtggtggtt

SEQ ID NO: 205656 - DNA, 59 bp, Homo sapiens
  chr20:708541-708600
  hyper
ctgggattacaggcgggagccaccgcgcccggcgggatattatatttccataaggccct

SEQ ID NO: 205657 - DNA, 51 bp, Homo sapiens
  chr20:708851-708902
  hyper
gccgggccgggtccgcagctgacggtgggggtggggagcagacgggcgggg

SEQ ID NO: 205658 - DNA, 474 bp, Homo sapiens; identical to SEQ ID NO: 56810
  chr20:708944-709418
  hyper

SEQ ID NO: 205659 - DNA, 203 bp, Homo sapiens
  chr20:1165689-1165892
  hyper
gcgaggtcaggctcgccgtccttcgccgccactccccgcccccggccctcggcctcctgccgcccccagcggtcccctctccgcgtgcgtacctgtgccgggcctccctccccgcctcaccacgctggggcgaagggcgcccggccgccggcgggcgagggtgcgtcctctccggtgcccgtccgccttcctgcagccggcgt

SEQ ID NO: 205660 - DNA, 218 bp, Homo sapiens
  chr20:1207191-1207409
  hyper
agccctctctccccacgcccctctcccagggtccccgcccggtccccttccgaccccttcctccctcccttcgctccctccccgccaccgccgccaccctgccctttgcgggccggtttccacggagtggccccatcccggtggcttcacgttgcacgaagtcagttcaatctggagactgaaaaagcctccgggacgtggggcgggagggtgcgggg

SEQ ID NO: 205661 - DNA, 160 bp, Homo sapiens
  chr20:1874960-1875120
  hyper
aagcggggagcagccgcgcggccggagtccggaggcgaggggaggtcggccgcaacttccccggtccaccttaagaggacgatgtagccagctcgcagcgctgaccttagaaaaacaagtttgcgcaaagtggagcggggacccggcctctgggcagccc

SEQ ID NO: 205662 - DNA, 130 bp, Homo sapiens
  chr20:1875155-1875285
  hyper
cggcgcaggtccgggcccggcagggacggggaggggcagagcgggaccggtcggggctggggaccagccgcgcgggcttctgaacgggcacgctgtcggagccggaggctcgtctagtcccgagccccag

SEQ ID NO: 205663 - DNA, 39 bp, Homo sapiens
  chr20:2187674-2187713
  hyper
ctctggtgtatctcttttgacgtctgctacccacagcct

SEQ ID NO: 205664 - DNA, 487 bp, Homo sapiens
  chr20:2188036-2188523
  hyper
ccgtgccccttccggcgtttctcccgcgtccttcaccatggcaactcgggcgtcgggagcgtgggctgcgagccgagtgggtgggggagccgccgggctctatccgccagcccacgagaagtgacgcaggtgacgggaggccgcagggacctgagggcggagaggggaattcagaaagtgccgggcggcggcttccgcttcctctgcggggtctctgggtggtcgtggctgggagctgccggggcccggtggccgtgcgcctctgctccgggcaagctctccctgcaaggcccgggcggcggcagggggcagtagcggcccgcgatgctcagaggctcgctggcacggagctcccgggctggggcgtccagatctggagaagccgggggccttggtcacactcagagctgacgtccagtgcggcccttgctgaggactcgagcgaacagatctctacccagcccccgccccacgcgcacccagcctg

SEQ ID NO: 205665 - DNA, 218 bp, Homo sapiens
  chr20:2444432-2444650
  hyper
agtcctgcaggagcctggggcatgggaaccccagctgggattcctctgccagcagccctgccgatccctgggcccccggcagctccagcaagtggaactcgagcaataccagtctgaaaaataaacaaatatgctctgatgcccagtgatctgaagatcagaagtatactttggaatatcattgccaagagagcccctcgaaatagcttataaatact

SEQ ID NO: 205666 - DNA, 111 bp, Homo sapiens
  chr20:2539193-2539304
  hyper
cgcgccgggggcagcccaagcccggggtctccccggaggaagcaaacagggcgcaggagacacagagaagagctgggggagcaggagcggggcgaggcagagaggacctgc

SEQ ID NO: 205667 - DNA, 36 bp, Homo sapiens
  chr20:2668734-2668770
  hyper
cctttcattttaattaccatcggggatctgacagga

SEQ ID NO: 205668 - DNA, 119 bp, Homo sapiens
  chr20:2731110-2731229
  hyper
gagcagtgaacacacgtggagaggcagtgtagaaccccccagcctggctctatttggccgctggccgagtcttctccatttccatcctcccgccccgccccagctgagccacccacttc

SEQ ID NO: 205669 - DNA, 225 bp, Homo sapiens
  chr20:2731391-2731616
  hyper
cgcggtcaaggggctgacaatcaaggaaaacctttggtagggagtgcctgctgagcccggctcaaccgaaacccgagggctgagtggggaggttgacctggggaaggaagggtggttgcagaaggaatgataaggaccgatccccagaagtgagtgctttctctttgccgggaaactaaaggaaatccactaagtcaggatcagaggtgaaggtagggctctgag

SEQ ID NO: 205670 - DNA, 765 bp, Homo sapiens
  chr20:2731675-2732440
  hyper
ggggaaggaggaggagaagggcgtggggagctgggtcagacgcgcatacacacacacaccccttgcacaacgccagggtaagcagtgaacacaacacacgtggagatgcaatgtagaatctggccgctggccggatcttctctacttccatcctcccgccccagcccaagccacccacttctccagttgcttccctggggtgcatgcaaacctctagccttcagatgctgcagagagtccacttgagccgtgataaatggagattgttaagttttttcttttttataataaactcctgatttgaccagatgaaaagagaaaactctccatcgagtcctgcccttaggactataactcatatgtgtatacggtttcccttttttctaatcacaaatgggtgcatgtgtgttcataccaagcgcctagggccgaggacagaggctggctcagtaaatatttgttgagtaaacaaacgaaagaactgaaacttccctgaatctcgctgccgggggtgcctggagttttccgggggacttgggctgggcctggtggagggggctgcagcgaggctctcggactgggcgctggcctgcttttggcgccctgcgtctcaccctgggagtggggggctgcgggggagacgtcctccaaacgccgcccccttccccagctctgaacgagcccaccattgactacggattccagaggctacagaaagtcattcccagacaccccggagaccccgagaggctgcccaaggtactc

SEQ ID NO: 205671 - DNA, 65 bp, Homo sapiens
  chr20:3052454-3052519
  hyper
gggagggagggacccgcagccacaggggcgcgccccgctccggcctcgcctgagaactccaggag

SEQ ID NO: 205672 - DNA, 99 bp, Homo sapiens
  chr20:3140538-3140637
  hyper
tccgcctgctgcgcgagtgacggatgcggccgaggctcaaaagactctgtcagcgtttcccaaggacattttccactggaggacgttgttgaggaggca

SEQ ID NO: 205673 - DNA, 260 bp, Homo sapiens
  chr20:3154656-3154916
  hyper
ccgctagggaggggtcgggacgagccgtcgcgggtggatccgcccggccgagcaacgacccgcccgggcgcgaggaccacgggctgtcgtgcgggaggcgtcgaggggcagtaaactccgttcgtgaccaaacggagacgatttgaaacttgctgctcacactggatcaccgtctggaaggtgcgacggggaaaaaatacacattacactccagcaggattgaacgctttcaccctgtgccccgcgcctggcgtaacgcg

SEQ ID NO: 205674 - DNA, 539 bp, Homo sapiens
  chr20:3220010-3220549
  hyper
agccgggctgggctgctccccgccgcccgcagctgctgggccaaaccgagtagacccggctccttcgagcctgtgcgcgccggacccagcagacccagcgtcgcgagtttaggggctggacggggccggggagcttctgggaaaacgttcgactgcgccacgagcccaccgagctgtgcgactgaggcagaccccgggagggcttcccccgcgtccgctttaagtacgcggccggcccctgtctcctcctttcgaccggggacctccgcagggccacgcccgctggctgccccgcctcctgcatttatcccggtagctccggccgcaagtccttctcctcctcctccaggaagcgcgccccgactgactagacggacctccgtgcattccccgggctacgccctcgcccgctgagacggcgctctccgagctcggctgctttgggttttcgctgcgagcctcgccaacttatctgccagcctcttcacgtcctcggccttctatgaggtcaaggtcatggttcgccccctttttccttc

SEQ ID NO: 205675 - DNA, 145 bp, Homo sapiens
  chr20:3229108-3229253
  hyper
caatcacctgaagctatctgcggaggctacaccctttcccccgggccagcttccacatctgcccagtggggcatttccccttgtcccacccagcgactggttgacaggaagcagggtgtctatggactggcggcgggcgcccctt

SEQ ID NO: 205676 - DNA, 154 bp, Homo sapiens
  chr20:3229326-3229480
  hyper
gaaccgcctggcgagtggaacccgagcttgcacggggacagctgatgcctttctggtcgctcctctagagctccgcgggctccggcaaacccccccgttagaacttgcggttccaacgcgcagcgccaaatctggcccttacttgacccgtcag

SEQ ID NO: 205677 - DNA, 31 bp, Homo sapiens
  chr20:3229526-3229557
  hyper
cgccaagctttcactgcgcggaaacgcgccc

SEQ ID NO: 205678 - DNA, 158 bp, Homo sapiens
  chr20:3229659-3229817
  hyper
cgggtgggccgggagagccccgttcccatagccggcttccttgagcccctccccaagttctgggactccccaagttcccaccccgcaagccagtgtggtttcttcagatgaattttattcttactctccacgggctgctccggcgtctagggagggag

SEQ ID NO: 205679 - DNA, 436 bp, Homo sapiens
  chr20:3451349-3451785
  hyper
gttagggcagagtgccgggtctctaggagggcaacactcaacgcagtcggctcctaggcatccagtggggctgcaaccccgccgccggggacgaaaggcgaagggggaaaactagagctttcgccggccgggacagcgcagccgggtttcagctcgttctacggtccacgtcagaagatcgcctccggcgccgcggacgccggagaccactgtctgcgcccccgcacgcacgcacccacgtactcgcgcacgcgcgcgccggccccgcccaccgccccgctgtggcccctttggaccgcacgagccaccgtccgcacagccccgccccgcacggccaggcgaagcggagccggccgtgcggtgtgtgtgtatgtgttcgcggggcgccgtctcagccccgggaagatggtggctgcagcggcggcaactgaggcaa

SEQ ID NO: 205680 - DNA, 166 bp, Homo sapiens
  chr20:3452159-3452325
  hyper
ttcaggtgagtggcgggtggtgtcggagggtcgggtccaaccagaggctggggctgaggggcgttcgagacggctccaggtcagagggagatgctggacagaaagtggagagggtagggccgccctatggggtttgagggccatttgcttccggggagatcatcgt

SEQ ID NO: 205681 - DNA, 57 bp, Homo sapiens
  chr20:3766679-3766736
  hyper
gggtgcggggggcagcgtttcgcgcgcgggcgcgggccacgccgctgcaggacacca

SEQ ID NO: 205682 - DNA, 171 bp, Homo sapiens; identical to SEQ ID NO: 132507
  chr20:3801162-3801333
  hyper

SEQ ID NO: 205683 - DNA, 897 bp, Homo sapiens
  chr20:4129347-4130244
  hyper
gcttctagcttcccggctcccggcggggcgggcccggggaggagctcggcgggtccccgcccagaggcggagcggagggccgggccggagcggggtgggtaggggacgcgaggcggagcggggccccacacaggccgcggcggctggctcgggcccctacggtcccggcggcggctggaggaggaagccaggcggctggcggaggaggagagacggaggaggccgagaccggagcgccgctcgccgcagacttacttccccggctcagcagggaaaggtacggtgcgcccgctctccggccccgggccccggctctcagcctcccccgggcgcaggcaggggctgcggccgccgcgagagggtgaggggcccggagcggtccccgagggctcggccggcccggggcttgggcggccagcgcggcgctcgggcgctcgggcgggggtgcggggcgttccgggaggctcgcggggagcagggggcgccgcgcccccctggcttccgccggggtaagcagtggtgtgggccggggtggcggcgatcccggcgccagggctgctcggcccgggccgggcgccgggggtagagggccggacggacccccgggctacgtgcgggaggggagcgtcccgggcgccctgcaggcgcgctccgtgggcgcagacaaagccgggcgcggacgccccgcgacgactcgggctgccgggagggtgggcaccggggagaggacagaaggctcccgggtgatggcccgaacgccaggagaggctgtgctgacttccccctctgggctccgggcgtccgggtggtccccttggggccccgggcagggtgaggagcagctttctcttaagggccaactaggggctcacgggttgtcccgggcttggcgggagc

SEQ ID NO: 205684 - DNA, 413 bp, Homo sapiens
  chr20:4804008-4804421
  hyper
gttggaaagtgggggcgccgcggctggggggctgcttcagctgcgcctcggccagcgatcggcgggccgggctcaaatccagccaggctgggcaggcggtggccgcgcgactggggaccgggcgccccgccctcctcgctcccctcctccttcctctccctccctccagccccttggcctttttcagcccctaccggatctgctcgtccgctgtcctctcttttctctcgctcttcatatcactctccaccccttcgccttgccttcgcctttcttcctccccttgtctcctgccccctcctcttctcccctcccctctaggggcggagcttctcccctccctcccagacaatgctgtggctgcgtccccttccccgccagctcgtccaggctcccgccgccagcgattcttc

SEQ ID NO: 205685 - DNA, 840 bp, Homo sapiens
  chr20:4981671-4982511
  hyper
gcccgggaggaggcggcggcagccagtggggttctgggggcgccccatttgcctccccgctgcgcggcctgagggcccgagcgcgctgtggctcccgtggcgggaaggggtgggtaccccgggggcccggcccggccggcagaacggcaggagctgagggccgccgggcatcttgggccccggggccagggtggccggcgggcgcggggtcccgggagatgggtcggggtgggggcgcgcaggccgcgccgcggggccggtgggtgacagcgcgcgggggccgtgccaggccggcctcgtgggcgcggcgagcacctcgcggccccgccggcaggtgcggcccgcaggccgggcagggggcgcggcggccgggctctcacctggctgcagctcgcgtggttcccgtcctgccgccgcgcctcggcgccgcagtgcccgctgcagcctccgcctccggtccccgcgacagccgcctgcaaaatggcgccgcggaggggcgggccgggggcggggtgcagcggagccgcccgcccccgcgccggtctggggcccacctccctccccgcccccgacccctgccctcgggcctccccccggggaggggctgctccctggcacccggcagcgctccccggaacatcccgggcctcgcacccagccgtccccttcccgttcctttcatttccctcccctgcgcagaaagatcgccccccttcgcgacccttcccaccagtcacacctgttcctggggacccacctggcaagcagagcgctggtccctgagtgtcctggtccaggtcccccctttttaccccgcctgccaccgagccctgtcattgc

SEQ ID NO: 205686 - DNA, 345 bp, Homo sapiens
  chr20:5107291-5107636
  hyper
ggctaatcgcacactgaaacgcacgccttttcccgcccctgacgctgccgtccaatgcgcgcctctcgactctgctccgccccgccccgcccccgtcgccctgcctccctggcgtatttgcgccattggtggatattccggaccgtgatggtggcgctgcgcgtgcgcactcgctccgagccctgctcccgggagagggagctctcgggtcggggctagggaaggctgaccccgctcggcccgggtgaaagggcggtgacggcactgggtggggccgagctccagggctggctgctgggctgctaagggaactgtgagccgctcagagccgcgcgcctcccgggc

SEQ ID NO: 205687 - DNA, 84 bp, Homo sapiens
  chr20:5297756-5297840
  hyper
gaaggtgaccctttcaaggaaagcccggctccgacgagtgcggtgtgggcctttggagatggcggtgaaggaggaggcccccag

SEQ ID NO: 205688 - DNA, 57 bp, Homo sapiens
  chr20:5891858-5891915
  hyper
ggggagcaggctgaggcactcgaagcgggacctcccgcctcccctaccatctcagat

SEQ ID NO: 205689 - DNA, 327 bp, Homo sapiens
  chr20:5892269-5892596
  hyper
gagcggggccatgcagccaacgctgcttctcagcctcctgggagccgtggggctggcgggtgagtgggcgcggcgggccggtcagcaccgcggacagcgccagcctcgctcttccccgccgctcccgcagccaggctggcggatcccgggagagagggagggttgaggggaaggtttacctcttgcttcgtttcttctcctccctgggtgttttccttcagctcctcccacccgtttgacttggaaaaagctagagggcttcctagcccaaccaggggagcctcagtctttctgtatctgagttttcctctagataggaaggaagaa

SEQ ID NO: 205690 - DNA, 210 bp, Homo sapiens
  chr20:6748553-6748763
  hyper
gctggagcacccggcagagcgcgccacagcgccgtggcctctgctgcccgggctgcgccagagccgcggacgggcgcgcagagcgccggggactccggagccgatccctagcgccgcgatgcggagcacctactgcaggagatcgggggcctgggacgcgctggccgaggtgtgatcggaccccaggctagccacaaagggcacttggcc

SEQ ID NO: 205691 - DNA, 360 bp, Homo sapiens
  chr20:6749273-6749633
  hyper
gcggagcctgcttcgccatctccgagccccaccgcccctccactcctcggccttgcccgacactgagacgctgttcccagcgtgaaaagagagactgcgcggccggcacccgggagaaggaggaggcaaagaaaaggaacggacattcggtccttgcgccaggtcctttgaccagagtttttccatgtggacgctctttcaatggacgtgtccccgcgtgcttcttagacggactgcggtctcctaaaggtagaggacgcgggccagggcccggggtgggtggtgggtgggagggggatttgggcagccactgcggtagagcccttccttacgtccaggccagaagtaaacagacccctc

SEQ ID NO: 205692 - DNA, 76 bp, Homo sapiens
  chr20:9488206-9488282
  hyper
gtgtggggcctcccagagttcgtatatggccctcactggaccaggggagagaggccggggacaggccacccttgag

SEQ ID NO: 205693 - DNA, 210 bp, Homo sapiens
  chr20:9489214-9489424
  hyper
tcggcagaggcttcccggggcataagaacttcaaagaaagtctcagaggagccacgctaccaggaactttcgtcgccctttaaaattgtcagatagacaagtaaaaacagtaactaactaagggaacaatggactcttgtgacatgtgtaactcttccaggtaccccaacactaaagaccccgtggttcctgtcgccatggcctgaacgt

SEQ ID NO: 205694 - DNA, 80 bp, Homo sapiens
  chr20:9489716-9489796
  hyper
atactgagccatgagcaaccaggcccacctaccgccgcgccatccaaaggtaacaccacagaccacgggccatgtgtcct

SEQ ID NO: 205695 - DNA, 181 bp, Homo sapiens
  chr20:9495002-9495183
  hyper
ccagatgcgttttcagaagacagtactccagtgataaggtatctacaccacttaataactgtacctggtaaggagatttaataaggctgagggtggtattaagtttctcagaacagactcatctttgcggatgcagttgcagaacaggaaacagacccagggagaagtttagtccccccag

SEQ ID NO: 205696 - DNA, 50 bp, Homo sapiens
  chr20:9495690-9495740
  hyper
ttttcttttaggggaggagggagggccttcctcgccggtggcagggaatt

SEQ ID NO: 205697 - DNA, 53 bp, Homo sapiens
  chr20:9496982-9497035
  hyper
aacccacttcaaagacgcagtcagtggtgagtggaggctggcatggctgggga

SEQ ID NO: 205698 - DNA, 511 bp, Homo sapiens
  chr20:10015468-10015979
  hyper
gcagctaccccatcccgcccaggccggccacctggcgtcgaagccaggcgcgaggggcggaggcggaggcgggggcgggggcggaggcggaggcggaggcggaggcggaggcggaggcggaggcggaggcggaggcgagcaccgccccaccgcgcacgctgcggttgccccggcagccgcgccctgcgtggcggaagctcacaatcagcccggtccctccggcttccaccccgccccctgcgctcacctgcccgcgcgctcgccttccggggacccggggcccatggacacatacacccagccctgctgtcccgcgcgccagctcaccagccctacccaagggacatcattcacgcctgggcgcctccgccgggctccgggagcccaaggtcgcggctgggccagcgctgagcgtcagaggacgagagcaggggcctccccggtcgccccagcaggcccaggcacataggtgcccagagatccctggcttctgatcgcccggaagactaag

SEQ ID NO: 205699 - DNA, 49 bp, Homo sapiens
  chr20:10198955-10199004
  hyper
ggaccctcttcggagaaaacaaatcgccgctgaaatttcccccacccct

SEQ ID NO: 205700 - DNA, 74 bp, Homo sapiens
  chr20:10199241-10199315
  hyper
ttgcgggatgaacgcgtttgcccaagaccgagtgttaaaatggagtcataagagtcgccccgtgcgggtgttta

SEQ ID NO: 205701 - DNA, 139 bp, Homo sapiens
  chr20:10199934-10200073
  hyper
ttttcagagatatttaggctgttgagttttcctcccctgtcgttctaaccctattattatgactgttgtcgttagggtgctattatccagggaagaattaagggggagacagggtgtgggtgctggggaggcgaaagga

SEQ ID NO: 205702 - DNA, 98 bp, Homo sapiens
  chr20:10200196-10200294
  hyper
tcgtgccgggtgggagggctctgcggagggctggcgcgggtgggctggcttcggggactgcggcggcccgcgctcagcaccctggatagcaacaccga

SEQ ID NO: 205703 - DNA, 738 bp, Homo sapiens
  chr20:10415371-10416109
  hyper
ctcttcacagattagataattcacccggcatttccccatcctgcttctgggttccaggacaaaacttttattctcttttaacattaaaaaacatataggaagttatgttcaaacatggctatttttattaaaatttatccggcactgtgaaagctacctttcctttctcacaatctttcgcaccgaatatatgttccattcttgagctagtcattttccaatgttaagaaaacacaccacagaaaagcgtttttttttctctcggtcagttcaactgcctagcaccgtgagttaccatgatacgttatttgctaatgagagtcattggggtcccagcctttaaaaatagcctgcgtccggcgccatttttgttttgggcccactttgaaagccgcgatattctgaacagaggccatttttcttttgggcagattccacgggccatcgaagtgtttcgctgccatcttaaatcctggctgtggcctcaatcctgcagcgaagctgcccagatcattttgtgtttgggcggcggctgagttcccaaacgcgcgcggagaccctgggaaggaggaagtaagcgcgaaagtgcttcccttaagcttctgaaggttggctgcagttccggctacctgtgtagtccgagtttccacagccaggtactactccgccagtgaccctggacagtaacaaaacatataaagcccgagcccaaaccccgccaccatcataggtaagcac

SEQ ID NO: 205704 - DNA, 380 bp, Homo sapiens
  chr20:10653644-10654024
  hyper
ccccacacacctgccggcgagggaaggaggtaggtcagcgcgggagaaagctgttttcttcgagtatagaggtggcgactccctcccactccccgccccgacgagccctcctcgccgagtgaaaataattttgcgaaactacgttcaaggactcaacatgattccggggcaaaaaaaaaaaaaaatgcacgagtgcggaagaaatccgacgacttcccggggggcaacagcggagcgaacgcgcccctgtccggcctggaggggtcaccctcaggaggcaggggctcccgtgggggagttggcgcgctcagcccaggtgcagccgctcgggcgcaggggcgaggagtcgggcgctcgagggctgccgagcctgctcgcgg

SEQ ID NO: 205705 - DNA, 1019 bp, Homo sapiens
  chr20:10654669-10655688
  hyper
cacctctacccagcacgccgggcagggcgcatgcgcgcttattaatattcatgagagggcgtgctcaccctgggcacgcccctccccttcacgttgctggggagggggtagtgcgaggaggaacttggaaggggttgggggcagcgggatgctcagggcggcgtagaagaaccagggccccacaccaacccccgccctcgggagcttcgggccaggagggaagggagagtgcggggaggtacttggaagggatcgttgctcagggacgcctggaggcccccagcggggaccgccccctcgggcgccccgggccgtgcgcctttgcccgcgcgtcggggccccaggtgtaggcgccgcggcgctgactgagcggtcggagcggggcagcttccgccttccgaaccgcctgcgtcagctgcggctttcgccccgggaggagggcctgcctgcccgccgggagttcggcccgcttcccgcgagcgagccgcccagagcgctctgctggcggcagaggcggcggcgaggctggcgcgcttgccgccgtctgctcgccccgcggaggcgacctgggcagacgctgctgggaactttgaaaaactttcctggagccaggcttgccgcagattcgaggggaagcctcggccgcgtcccaccccctcccaaatccgagtctgcggagcctgggagggctcccagcttcctatccaaaccgcgccggggcagaggcgcggggaaaccgggggtagaaggcggcgggcacgccggggccctgttcaggctttgggaagggccggcggagatgctggtgggcttggacgccctccccggcccgacgccccggccgcagtgccgggattgcacctgtaggcggcctccgagcagctctctgggtggcaagagatgggcctgggagggaccgtgtccccagcaccgccagccgcggaacttgccttctctggggtggcagtggaaaccgatactgttttccaccttgaggcaagcctcgcaattaacagcta

SEQ ID NO: 205706 - DNA, 1239 bp, Homo sapiens
  chr20:11871115-11872354
  hyper
aaagccaaatgcaatcggccctctattaccggaggatgccctgtatcccgcacatccactctgccagtgcaagtgttcaataaatgcttaatacattcattgatgaatgacccagagagaaaaactgcagttcgtgggacaaggacgaagtggcctctcagagatgcgggagtgctggctctcctccaccctccccgccttctccaagcccgggttcccgcccacccctcactcctgcttgaggacagggcagacattgcgcatgccccgtatccaaggccgcctccgggagcacctcccatgccgctccgctccctcccggtgaccgggcacgcgcgctcgctcccgcagagcgtgccctgcgtgcgggtgcccgccgagcccgccgggcgctggatctccgagtgccccggccggggcctgaggagcgggcacagggcaaggcggcggacggctgcgtcgcccgaggcgaggaggagcgctggcggtgagtgagggcgccgcgggcgagcgggtcggcgcctccgcgcgtgcgcagcgcgggaccgcccgggcaggggcgcgcgccctgcggccggccggaggggccgagcgaagcgaggagaggccgggctggtggccgcaggtcggcctcggacccacgggaccagaggatcccatatccgtcccccgggctcgagaggcgctggccgcgcgggctggctttccgagggggggggggtcccagtggggcgcgtcgggcccgcgcggaggtcctggtgccgggggcggaggggcagggccgcctcagccgaaagaccgcggggaggggcgcacgagcccgcctggccgtgcggacgcccgcggggtgcgcgaccccggaggtggcggaggtccaggcagggggcgcggtcgggaagcctcggcgcctagcaggtggcgggggccgcgcccctctcccggggaggcgcgcggtgggaagcggagcaaacttcccctaagtaactttcctgaggcgctgccggcggggactccggggaccgacgctccgggtttgcgcggcctcaggcgccgcgggaacccagcgagtggcggcgggcgatggcgggggcggcttcctcctgaggctggactagtcctccgagttctgagtggcatttgtggcccgtttgctctaaaaatagacgtacaagtttggtgttcgggaagaaggatgtttgctctcttgggaagaaaaggcttttacctcctggccttttc

SEQ ID NO: 205707 - DNA, 336 bp, Homo sapiens
  chr20:11872384-11872720
  hyper
tccctatttatcaagcaacccattgtcctgtgtgtgcctggtgaaagcgagctaattctattattagtcctcaaaagaccaagggagatcacggtgctttttcttttttaaatattccccgccacctcgccaaatcctgtaatacagtttccccaaacttggctgcacagaggagtcgctggggagttttaaaactcttaaagcccaatcgcacaccagaccaattaacacagtgtattttttaaagatccccaggtgatcgcgcagccgagtttggaaacactggtttaatataagaaagtcaaggctttagtttcacatagtagtagcattcag

SEQ ID NO: 205708 - DNA, 221 bp, Homo sapiens
  chr20:13200824-13201045
  hyper
ggaggaggggaagcgcagtataaaagtcccggccggactgagcgtccgctactccgagtcacttcggtaaggcgggagcccgagcaaggtcaaggagggaagtgcgcggtgccacggaccgacacagttcgctctagcatctgacgctcggactccgcgccctcagccggatcccagagcccttccattcgccaaccgcccactgcaaggcatgagccgca

SEQ ID NO: 205709 - DNA, 73 bp, Homo sapiens
  chr20:13201055-13201128
  hyper
cgaggctgcagcgcggtcatgaggcggtggcccgggatcgacagctgcgcgacgccagcccccaaatcccctc

SEQ ID NO: 205710 - DNA, 99 bp, Homo sapiens
  chr20:13201565-13201664
  hyper
acaagggctctacccgcgcccgtcacagcgacctcggcagcgggcacttggtacagcccggcaggctgacgctgccgccgagggcgccccggctaccgc

SEQ ID NO: 205711 - DNA, 360 bp, Homo sapiens
  chr20:13976688-13977048
  hyper
ctctgttgccctcggcaccccgtcaccttctcccgaggcggtgctgcgttcgcctcgcttgcggcggggacccccaggcggcagccccgggcgcggcacaagttcctctgcaccgcagctgggacttgggcactgccggcctgggtgtcccgcggacaggtgcccgtcggcgggcgctcaggctgcagctgccgctgtgcctccgcgctccgtgcaccctcatttctttccttctcgcccctgtccccccagcccccgaatggcaaagcgtacccaccatcgggtgtttaccccttgtctaggtttccttccttcgctgccgcagcgtgacttttgaaacctggaactctaggggagccc

SEQ ID NO: 205712 - DNA, 223 bp, Homo sapiens
  chr20:16553758-16553981
  hyper
gccagggaccagccggtgacacttttaagtccaggctggctttgggggagctggaaacaggcttcctctgggtgggggcgcgacgagggggcggggcgcgggcggccccactcacctgcgattcatgggccggaccctcacggccaccttgaccgatgccatcgctcatcccgaaccagcccgcgcggggtcccactagcccagaactccgcggtcgccggcg

SEQ ID NO: 205713 - DNA, 53 bp, Homo sapiens
  chr20:17208803-17208856
  hyper
gagaggtggattttgagggggattccctacggagaagtcgaggtgtcctctcc

SEQ ID NO: 205714 - DNA, 269 bp, Homo sapiens
  chr20:17549782-17550051
  hyper
aaagataaataaatgctccttgtttttccagacctgaaattaacggtgactcacagagcactctgcatggccacggtcgcctcgggaaggaggaaaaatgtgcagacttttttcccctcacgcgagggcaggacaagccagactgggccaatcaggggagggcggcgggaatcgcaccaaagtaggtaaaaaatgcgggaggcgtccccgctgccgcggcccgcgactccgctcccgtgggtcctcccccagtgcgttccccctcctcg

SEQ ID NO: 205715 - DNA, 187 bp, Homo sapiens
  chr20:17661564-17661751
  hyper
atggagaccccgaacgaaacaacttggtcggggtcaccctcgccagccggggcactctagagctaaaactcgcgacttatcattcggagaggggtccctgaagcactgcgggcgccccactggaagcgcagaccccggcctgcctcccctaatcagggcgcagcgggagagccggccgggccggggc

SEQ ID NO: 205716 - DNA, 208 bp, Homo sapiens
  chr20:17949251-17949459
  hyper
gagcagggcgccacgtgctcccccagagcagcctcccagtccccgctgccgtccatcttggagccgggcaaagacgccacgtggggcctacccttgctccgctccacgaggaggccgccaaccgcagggccgcgacacggacgggaagcaacggacactctcccagcaagacgcgtctagagaaagaccgcgtttcggtgcgggggga

SEQ ID NO: 205717 - DNA, 208 bp, Homo sapiens
  chr20:18037959-18038167
  hyper
gcaattagaggctcccactacggggaagggggcgcctagagtctggggcatcccagtccctcattgcctgccctaacccgcctagaagacccccgcgtgccccccggaagagggggatgaggtggggagcccgcccctgccgatgagcagagaagacccgccaccccttcccccaccccgggagcccagcgcccaggcccggcccccg

SEQ ID NO: 205718 - DNA, 129 bp, Homo sapiens
  chr20:18038209-18038338
  hyper
cgggagctcatcccagctgcggaccgagacccccaggctcctcctcttcaccaggaagactttgggcatggtggggtcccctctcccgactgcggccccctcctcccggctgctccccgctaggggcaa

SEQ ID NO: 205719 - DNA, 83 bp, Homo sapiens
  chr20:18038356-18038439
  hyper
cggctcccggcggccagagcccaccttcccgcctcgcctgccctcttcctccaccccccgccgcggcgcggcccaggcctctc

SEQ ID NO: 205720 - DNA, 63 bp, Homo sapiens
  chr20:18039584-18039647
  hyper
aaccggcacagcctcttgtgtcgctgcggtcgccctcctccaggaggtcgtcagacgtgtgcc

SEQ ID NO: 205721 - DNA, 91 bp, Homo sapiens
  chr20:18039936-18040027
  hyper
tctgccctcaaggagtcaccctctctggactgaactctgaactccagcttttctctaagaaaaaccagctaagaacgaaaaagactttgat

SEQ ID NO: 205722 - DNA, 158 bp, Homo sapiens
  chr20:19192501-19192659
  hyper
aaacccgggaggcccgcgagaagaggcgaggccagaggctgggcgcgggcagccaagcgcactcgcggcgccccgactccaggtagcacgtagagaggaggctgaagagcccctcggttttccgaaagtttccagcgaatccttcttggtgaagatcg

SEQ ID NO: 205723 - DNA, 119 bp, Homo sapiens
  chr20:19673387-19673506
  hyper
caaatcctctttgaagattccggcgcgctgaccgacgatgctgagaaattccaccaggtggcgctgcgtccgctgacgctttattatcgggcgaaaacgtggaaaacagaagcccactg

SEQ ID NO: 205724 - DNA, 180 bp, Homo sapiens
  chr20:19738432-19738612
  hyper
aactctggtcctcgcctggccggggaccgcagaagacaggggcggcagcgccaaggcgggtcaggggccggtccagccaagtttgctccggcttagataaactttctgatggcagtttttcctggttgcagcctgggttccttgtaacagggtaagcgtagcgggtggttgtcaagaggg

SEQ ID NO: 205725 - DNA, 152 bp, Homo sapiens
  chr20:19739200-19739352
  hyper
gacattccggagcgcgaggtggccgctggtcccggcagggtcaccgggtgtcctcagctgacctgtgcggggctggggtgagggacagctggagggtgcaggcactatggctcgaggtgcggaggtgcgggtgtgcgtgcgtgtgcaccgga

SEQ ID NO: 205726 - DNA, 150 bp, Homo sapiens
  chr20:19739786-19739936
  hyper
ttgcagaagttcagcttgaaagcctatgatatgttgccaagaaatacagggcaagatcggtcccctgggccctgagaggcgcctgtcttctcagagctcttaaatccctggggctttcctaattccgcagtgtagcggcacttccttgcg

SEQ ID NO: 205727 - DNA, 58 bp, Homo sapiens
  chr20:20344271-20344329
  hyper
agaagagggaaaggcggaggagagaggaacggcggtggggggggaggagcacccgcca

SEQ ID NO: 205728 - DNA, 93 bp, Homo sapiens
  chr20:20350750-20350843
  hyper
ccccttggcggggagaagctttttttcttgctagtattcgctgtgttcatggtctagaaatgcggtctggtctcgcctcgcctaccaatctct

SEQ ID NO: 205729 - DNA, 120 bp, Homo sapiens
  chr20:20693388-20693508
  hyper
tgggcgctacgcacgcgcacacaggccgaactctcctggcgggacactagcccgtccgcgccaaaacctagcggggacgcgctcagagggccgagaaggcgcctcgaatcacaaaggagc

SEQ ID NO: 205730 - DNA, 192 bp, Homo sapiens
  chr20:21080370-21080562
  hyper
tgatgtttaaaagataagaagacatttgtcagggcgggtgcttgaggctctcagaggactccgggagacactgccaaaacgtttccaaactgaatagtcattgggctgccagataattcagaaactatctgtatgagctgtttatcaaattattaaccgcacagatgttgtttggctgaagagcagctgaat

SEQ ID NO: 205731 - DNA, 115 bp, Homo sapiens
  chr20:21084470-21084585
  hyper
gtgtccgaaatcattagacttgagtgatcttgtggacgggggtataagactaactgtttttcctttcgcaactttgggaattgttagtctcctggcatcagtcacgcagcagact

SEQ ID NO: 205732 - DNA, 69 bp, Homo sapiens
  chr20:21499015-21499084
  hyper
acgcccgggggaaaggcaggagaggggaggaagagaacctgtgcccctggaagctagaggagagcctcg

SEQ ID NO: 205733 - DNA, 202 bp, Homo sapiens
  chr20:21501158-21501360
  hyper
gcatccaataaaataaaaggcgaggaaagccgtttaactttcatggatgttaaattgaacacgaactgtggctccgggcacgctacaaaatggaaccggcctctctccaatattttctttaaaaacctagctttaagcccccctcgggccaaacgagcctgtcccagccaatccattatcaccggtttattggggaaccaaa

SEQ ID NO: 205734 - DNA, 216 bp, Homo sapiens
  chr20:21681908-21682124
  hyper
gtggccagtgtcagcggaaacggtgctccatccaccacagctgacccgactcattttcgataataaacatttccagggtagcgaacatcatggaggcctaggcaaagaaccaactttacgaccgccttggtcagcagcaggccaaaggaaaataagccgcgggaatgggtccgcgaagccaaggacgttatttctcgctcttgggggctctgtttt

SEQ ID NO: 205735 - DNA, 71 bp, Homo sapiens
  chr20:21682184-21682255
  hyper
tagtcaggagaggcaggttctgtgcaaaacgcactccccacctcgtccttgaggatccactctgttgggag

SEQ ID NO: 205736 - DNA, 221 bp, Homo sapiens
  chr20:21686742-21686963
  hyper
tcctggagaagctgcattctcctctgatccccagccttcagggggcagttgagcaagtctgggaagggagtgttccaagtagacgcgctaaaagtcgcgaaagggcacggagggctacaatgcgccgcgctccactccgcggctcctctgcgcccttgcccactccaagccagacccaggcggtttgcccttggactccgagctgtctggggacccacagg

SEQ ID NO: 205737 - DNA, 239 bp, Homo sapiens
  chr20:21694603-21694842
  hyper
cccctgcccacagcgagctccgagccgcgggtgtcagcggactcgacgcattggctgctcttcgcacttgtgcgggcgcctggggtttggaaagggtgagggtccgcgcaacgttagagtcctgttcccttctgcggaagtcgccatcagacctgaaaccttcccagccctctgcgcccttcacttcctttactgagcaggtggtgagggggttggacggcaacgggaattgcacctgg

SEQ ID NO: 205738 - DNA, 202 bp, Homo sapiens
  chr20:22557194-22557396
  hyper
caagccagggccacctccagacccccggatgtgtagaagcatgcactgccccgaagaaaacgcgttgcccccaggtaacttcaggtacctcctagggctaacgcctccttctatgccatattgagccttatctcttgcttcttcccgcccccctcccacattaaaaggcccccaaagcattgaggagcggcttctctttatg

SEQ ID NO: 205739 - DNA, 288 bp, Homo sapiens
  chr20:22558696-22558984
  hyper
caaactcccatgcaccacgcacatcattttctgctgacccccacactagattctggggccaagggggttccccacaccccaccctccactgttctctggaaacatgctgctctcagatcgaatccccagacccgagccgctcgaggggcctgtgtggcttcctcggggccctaccaaactcctctaactgagctcagagcctaagcggtctgagtttgcaactctacgacccctcatccttccaagtcatgcactttccgaaccccctgcaaaaaaacccaacgcctt

SEQ ID NO: 205740 - DNA, 380 bp, Homo sapiens
  chr20:22559242-22559622
  hyper
tttatttgagctcaaaccaagcgactgttgactttagcacacaaagcaaagatttcactgcccgctagtttaaaaatgaatattttaccaagatatcgatcagcgttataaaattcagttaagtacaatgggatcctggcaaaaaaaaaaaaaaaagaataataaaggaggggggaggcaatataatatctgtgcaaatttgctgaagtgtgacgtggcatggaaagtttaccctcctggaattcggatctagaatgtttttttcggttgtttacagactttgtttattcacagatcatggttgcttaaaccggcgcgcggaaagcgtggggaaaaaaggaaaaaaaggaggggggagagtctctgcaccccacaatgag

SEQ ID NO: 205741 - DNA, 201 bp, Homo sapiens
  chr20:22559772-22559973
  hyper
gtattcggacagaactatatcttatcggccgggatcagtgaaggggggcgcgctaagtagtttaaaacgaccctcgcacaatgggcgtgccatacgaaacatagcaggttagggcagcgctttcagcctccattgtcccccactcggcccccggccctgcctctcggctccttcgccacgggagccttttatgtgataatg

SEQ ID NO: 205742 - DNA, 250 bp, Homo sapiens
  chr20:22563313-22563563
  hyper
ctcagcgtcagcatcttgttggggctctgctggatggccatggtgatgagcgagatgtacgagtagggcggctttgcgtgcgtgtagctgcgcctgtaggtcttggggtcgcgggcgcggctcaggcccgcctgcccgtacatggggctcatggagttcatgttggcgtagggggccaggccgcccatggccccggccgcctgccccccgagcgggctcaggctgggactcaagtgcggccccatgcccg

SEQ ID NO: 205743 - DNA, 34 bp, Homo sapiens
  chr20:22563602-22563636
  hyper
tggcgcccgcgccgggggacatccccgccaggga

SEQ ID NO: 205744 - DNA, 101 bp, Homo sapiens
  chr20:22563663-22563764
  hyper
cgacatgttcatggagcccgcgctcatgttgcccgagccgctgcccatggcggccgccgacatgctcatgtacgtgttcatgccgttcatccccaggccgg

SEQ ID NO: 205745 - DNA, 360 bp, Homo sapiens
  chr20:22563794-22564154
  hyper
gcggacagagccccgggagggaggcgacagcgttagcaccgcggctggagggtgcccagacctcccacccaccgcccaggcctccgcgtccggggaggcctccggggagccctttcgtccccgatggcccagtctccggactccgagtctgtttcattcagggagagtcatgatcgatcgcccttgggaaggtggcgagcggattgctgcttgggcatgtggcccgttcctagcccttctccacctcgcccagattctagaacaggggtcccatggagtactcccaagccagcaccccaaatacattcccctaccccagagtctccccaaactctcccaccagcatactgagctggcgcc

SEQ ID NO: 205746 - DNA, 47 bp, Homo sapiens
  chr20:22564188-22564235
  hyper
cagcaagcaacctgcgggacaacgcgcggggcgcctcgggctgcctc

SEQ ID NO: 205747 - DNA, 848 bp, Homo sapiens
  chr20:22564265-22565113
  hyper
cggtctccctccagggaccccctcccttgtcccagggaaactgcaaggcagtgcctgtgcggagtgcgggggcggctggaggcactgaacggggcaatagggaaagaaccgagacctgaaccacacgcggctgagctttgcaggcaaaaactttctttctctttgtccactagtctttgactctgcctccacttcagcccccaactcctacccatcttctcctcctcagctccccaccccctcgccggccgacctcccacccctccccagccgcgcgctgccaaacataactctgttaggatagtgcgtggctcggccacgaagaggatttggaggcgccgcaagtcaatatttgatcacaaagttaatattatctcaaggctaacagtgtgtcgtataaaaaagagacccatttgattccaaggagggcggaaaaggcggctgcccagaaaggctggggttgtggggcggggtgggggggtgccagcgagggaagcggtcctgaggttggggaaggagcgagcgccgccgctccacttccccctggaaaagacgagcgcttacctcgggctctgcatagtagctgctccagtcggacggctcgtgcccttccatcttcaccgctcccagcatactggaagccgagtgcatggcagtttaaaatttaacagccacaacaaacgaccagcaatcaccccccacccccaccctcttttaaaaaaaagtcagccaaagcaccgtcccctcctccctccctctctcgcgctccctctccctgggctccactccctctctctccctgggcaggccggaggcggtagttggaagtgggcgggaggtgggggggg

SEQ ID NO: 205748 - DNA, 239 bp, Homo sapiens
  chr20:22565713-22565952
  hyper
cgccccgtctcatcgcgccgggcgcccggtgcgcctgtcggagggcgcgtccagcctcagtgcccggcagatccctatgaaagccggatttatttatgccgggtttcttcgctctcagtgctcattctctgtcaaaacagcaagtccatgacagccaatttgcaaagcgctgtcctatttagaaaaactacgtacacacctttaactcgcccgctgctgctcctgcgaggcccctccct

SEQ ID NO: 205749 - DNA, 42 bp, Homo sapiens
  chr20:22567768-22567810
  hyper
cgcctgcccatgggaatgcgagcggggtctacggttagcttt

SEQ ID NO: 205750 - DNA, 259 bp, Homo sapiens
  chr20:23030486-23030745
  hyper
ctgccctggcgcagggaggttctcgggcggggccgacaggggcaggcgccagggaaggccagcacccctgtaacaagacgactgtccccgcccaccactcgggcccccacgcgtgcagccctctttcatctcttggtcctcctttctttcttttcatacatgttacagccacttccaaggaaagcctggattgcaagagctctgggaaccggagacttcagagaagagggctttgaatggggagtgggggaggtggtgc

SEQ ID NO: 205751 - DNA, 258 bp, Homo sapiens
  chr20:23617972-23618230
  hyper
tgtgcctgcccccgcgctgcggcgcagctcgagctggctcctggaagctgatcttaggcgccgggcgcggacctgacgtgtccgtgcggttccaggccaggccagactcagggcattcccggacacgcccgccaagggctcgggggtgacagcgaagaccgggaacagggtccgggtgagaagcccaggcgccggagaggagcagcacggggtccgggagcagcgcggggggaggctgggacggcggggccggggctt

SEQ ID NO: 205752 - DNA, 109 bp, Homo sapiens
  chr20:25129521-25129630
  hyper
ttagagtcggtagattacagcgaagctgcagtcagcagctcgtctgcctggccctgcacaccgtgagactcgaggcagtgcccgggacgggaccacctggggaagagag

SEQ ID NO: 205753 - DNA, 83 bp, Homo sapiens
  chr20:25228118-25228201
  hyper
gctgcctcgcgccctcgggaacgggcgtctccagctcgctggcagctggttttctccacgtctgtcatcggcctggagtggca

SEQ ID NO: 205754 - DNA, 35 bp, Homo sapiens
  chr20:25566244-25566279
  hyper
gggggcggggcgagcgaacgggagagggggcgggt

SEQ ID NO: 205755 - DNA, 1022 bp, Homo sapiens
  chr20:30192834-30193856
  hyper
ccttccagaggagcccagtgcggccctcgcctctacccgctgccctgcccggtgccctgccaccgacccacccttgctgttctgaaacccgggtcgtctttccacactgcgagcaggcactagacgagcaggaggctggacctaggagcgcgggtcacgcccccatgccgcccattggctgcttttgaacgttctgagcccgcccctccgggggccgtggcgtgtttataaaagacaagctgtggctccgcactctcattccacgttcttaactgttccattttccgtatctgcttcgggcttccacctcatttttttcgctttgcccattctgtttcagccagtcgccaagaatcatgaaagtcgccagtggcagcaccgccaccgccgccgcgggccccagctgcgcgctgaaggccggcaagacagcgagcggtgcgggcgaggtggtgcgctgtctgtctgagcagagcgtggccatctcgcgctgcgccgggggcgccggggcgcgcctgcctgccctgctggacgagcagcaggtaaacgtgctgctctacgacatgaacggctgttactcacgcctcaaggagctggtgcccaccctgccccagaaccgcaaggtgagcaaggtggagattctccagcacgtcatcgactacatcagggaccttcagttggagctgaactcggaatccgaagttggaacccccgggggccgagggctgccggtccgggctccgctcagcaccctcaacggcgagatcagcgccctgacggccgaggtgagatccagatccgaccactagatcatccttataccgacggggaaacggaggccagagagggcgtgggcgcttgcaccacttccgtcccatccttgcgggtacctggctatgcgggggtgcctaaggagcctggaaaaagcgctcccccgtcgtgcttcctggggaagggggcgttcgctgcgctcggagcggcgtcccttccaacccgccggtctcatttcttctcgttttcacagg

SEQ ID NO: 205756 - DNA, 203 bp, Homo sapiens
  chr20:30193992-30194195
  hyper
gagggagaacaagaccgatcggcggccactgcgcccttaactgcatccagcctggggctgaggctgaggcactggcgaggagagggcgctcctctctgcacacctactagtcaccagagactttagggggtgggattccactcgtgtgtttctattttttgaaaagcagacattttaaaaaatggtcacgtttggtgcttctc

SEQ ID NO: 205757 - DNA, 303 bp, Homo sapiens
  chr20:30196329-30196632
  hyper
gacccagcccatctggaggccggctccgcggcggcctgggagcgtttccatcagctgggcccgaggaatgcggagctatttaacctgagcatccccaggtgtacggaggcgcctggctgtctggggcccgcagcctttggcacagccgcgctagacaaacagcgcgccgcccccgccctgcccctccgcccccagctgcagccgggcctgggaaccggcgggcgccggcggcttgcataagaggctccgggcctcgcagagggaggggggacagaggccaccggtgtgtgtgcatgtaacaca

SEQ ID NO: 205758 - DNA, 304 bp, Homo sapiens
  chr20:30457820-30458124
  hyper
ggacacatgcagacggagagcaggactcactgggagacagcctgggagtgacagccacagcaagacagcgagagacacacagagtcacggagagagggcggacacagcggggacagagacgcagggtcagagagggggagacccgacagccgcggtctcgagtcacagggacacggagatgccgccgcacggagaccggcgagaacagaaggtcagaggcgggcggaccgagctggtcagcgccgggccgcggcggccggggcggggaccggggaggctgcgcggggcccgccccctaccttgg

SEQ ID NO: 205759 - DNA, 54 bp, Homo sapiens
  chr20:30458610-30458664
  hyper
ccggctctgcctggacgtccctgcgggccccgggggaaagcacccaacttctcc

SEQ ID NO: 205760 - DNA, 70 bp, Homo sapiens; identical to SEQ ID NO: 12901
  chr20:30458690-30458760
  hyper

SEQ ID NO: 205761 - DNA, 495 bp, Homo sapiens
  chr20:30555391-30555886
  hyper
ctcagcttcaaaacgaagacaataagaaaaggggacccctcaagatcaaaggaggggatggaacaatatgtgagcactcaggaaactggaaatgagcgttagcatggagtgactgctaaagggttactggggggcccgcccaagtcccccagctcctttcttccaagtcccccacccacccccccgtcagacccaggccactggaggtgaacacaggagaaaaacgaagtggagagaatgggaagggggaggcgataaacaaaaaagaaggaagtgcagtccgaggggagatgagagacagaaagcatggggttggagccccgcgcctccgaggaaggagggagagggtgacctggggtgcgccccgcctcccctgcttccgcattcccgggggctgcccccccttcggccgcagctcaggcgggtgggggcggggcggggcggcgccgaggagaatgaataattgaagtggaggggaggaggaagaagaggaga

SEQ ID NO: 205762 - DNA, 269 bp, Homo sapiens
  chr20:30556403-30556672
  hyper
ggacagcgccggcgccttccggaccaaagaaggcagccccgagccgggtccccagcctgcgccctcctcggccagcgcctaccgccgccgctgctgccgcctctgcatctggctgctgcagaccctcgtccacctcctgcagctcggccaggtctggaggtaggagaagcgcaggtggagggacctgagcccgaggagtgggggtggcgaagggctacctgacgtcccagccctgatctgacctttccgggctaccctcctgtcctgac

SEQ ID NO: 205763 - DNA, 96 bp, Homo sapiens
  chr20:30946058-30946154
  hyper
tacgactcccaggcgccctttcggtttgtttttgttcaaaaaaaaaaaaccccacactccccctcctcactcttcacacacactcacacacaccca

SEQ ID NO: 205764 - DNA, 112 bp, Homo sapiens
  chr20:30946218-30946330
  hyper
cggtcctgtctcagtccctcagcagagcgggaaagcggaggccggagccgtgacctctgaccccgtggttatgcggagccgccgcattccttagcgatcgcggggcagccgc

SEQ ID NO: 205765 - DNA, 290 bp, Homo sapiens; identical to SEQ ID NO: 12906
  chr20:30946345-30946635
  hyper

SEQ ID NO: 205766 - DNA, 83 bp, Homo sapiens
  chr20:30954186-30954269
  hyper
gtattagaaaactactcggatgctccaatgacaccaaaacagattctgcaggtcatagaggcagaaggactaaaggaaatgag

SEQ ID NO: 205767 - DNA, 109 bp, Homo sapiens
  chr20:30956817-30956926
  hyper
tgggacttcccctctcgcatgcctcaatgctatgctacattccaattcaagaggaggagaggggttgttttataaactgcctggccgaatcagccttttcacgctcaag

SEQ ID NO: 205768 - DNA, 386 bp, Homo sapiens
  chr20:30959966-30960352
  hyper
gtgtgagccactgcaccaggccccttcatcttaattttaatatatctttgaataaacaccattgtatgaacctgctgtaagcttgggagtggtctgttagtctacagcttgtgtctgagatgtgctaattgaatatttgctcagtacctcatcttaactgcctttggctttatgttgcttatccttcatagtatcttgttcattggccttttacatccataggcatcacttctctgatattcgttgtgctcttttaatggattaatggtttgcttggttggttcctctagttagactgtaaactccttgagagcagagtctgtattttattaattacccacagtactaggtacatagttgccttcaataaatatatatttaatgaa

SEQ ID NO: 205769 - DNA, 295 bp, Homo sapiens
  chr20:31015930-31016225
  hyper
aaggatgccctgcagtggtctcgccatccagctacagtggagggagaggagccagaggacacggctgatgtggagagctgtgggtctaatgaagccagcactgtgagtggtgaaaacgatggtaaggaccctttaatggatgggtgagggagccacagcaggcactagggactaacctttattttcctctcttccagtatctcttgatgaaacatcttcgaacgcatcctgttctacagaatctcagagtcgacctctttccaatcccagggacagctacagagcttcctcacag

SEQ ID NO: 205770 - DNA, 104 bp, Homo sapiens
  chr20:31017140-31017244
  hyper
gcgaacaaacaaaagaaaaagactggggtgatgctgcctcgagttgtcctgactcctctgaaggtaaacggggcccacgtggaatctgcatcaggtatgtgtaa

SEQ ID NO: 205771 - DNA, 153 bp, Homo sapiens
  chr20:31017703-31017856
  hyper
ggttctcgggctgccacgccgatggcgagagcggcagcccgtccagcagcagcagcggctctctggccctgggcagcgctgctattcgtggccaggccgaggtcacccaggaccctgccccgctcctgagaggcttccggaagccagccacag

SEQ ID NO: 205772 - DNA, 359 bp, Homo sapiens
  chr20:31019123-31019482
  hyper
gtcaaatgaagcgcaacagaggggaagaaatagattttgagacacctgggtccattcttgtcaacaccaacctccgtgccctgatcaactctcggaccttccatgccttaccatcacacttccagcagcagctcctcttcctcctgcctgaagtagacagacaggtgcacatgggcagcctcccctttgcctctctctgggtgggcttctgttctcttttaagtttatttattaggatttttttcccccttgatccttctaggtggggacggatggcctgttgcgtctcagcagcagtgcactaaataacgagttttttacccatgcggctcagagctggcgggagcgcctggctgatg

SEQ ID NO: 205773 - DNA, 106 bp, Homo sapiens
  chr20:31020682-31020788
  hyper
gtgaatttactcatgagatgcaagtcaggatacgacaggaaatggagaaggaaaagaaggtggaacaatggaaagaaaagttctttgaagactactatggacagaa

SEQ ID NO: 205774 - DNA, 634 bp, Homo sapiens
  chr20:31021086-31021720
  hyper
gctgggtttgaccaaagaagagtcattgcagcagaacgtgggccaggaggaggctgaaatcaaaagtggcttgtgtgtcccaggagaatcagtgcgtatacagcgtggtccagccacccgacagcgagatgggcattttaagaaacgctctcggccagatctccgaaccagagccagaaggaatctgtacaaaaaacaggagtcagaacaagcaggggttgctaaggatgcaaaatctgtggcctcagatgttcccctctacaaggatggggaggctaagactgacccagcagggctgagcagtccccatctgccaggcacatcctctgcagcacccgacctggagggtcccgaattcccagttgagtctgtggcttctcggatccaggctgagccagacaacttggcacgtgcctctgcatctccagacagaattcctagcctgcctcaggaaactgtggatcaggaacccaaggatcagaagaggaaatcctttgagcaggcggcctctgcatcctttcccgaaaagaagccccggcttgaagatcgtcagtcctttcgtaacacaattgaaagtgttcacaccgaaaagccacagcccactaaagaggagcccaaagtcccgcccatccgg

SEQ ID NO: 205775 - DNA, 4888 bp, Homo sapiens
  chr20:31022234-31027122
  hyper
attcaactttcacgtatcaaaccaccctgggtggttaaaggtcagcccacttaccagatatgcccccggatcatccccaccacggagtcctcctgccggggttggactggcgccaggaccctcgcagacattaaagcccgtgctctgcaggtccgaggggcgagaggtcaccactgccatagagaggcggccaccactgccatcggaggggggggtggcccgggtggaggtggcggcggggccaccgatgagggaggtggcagaggcagcagcagtggtgatggtggtgaggcctgtggccaccctgagcccaggggaggcccgagcacccctggaaagtgtacgtcagatctacagcgaacacaactactgccgccttatcctctaaatggggagcatacccaggccggaactgccatgtccagagctaggagagaggacctgccttctctgagaaaggaggaaagctgcctactacagagggctacagttggactcacagatgggctaggagatgcctcccaactccccgttgctcccactggggaccagccatgccaggccttgcccctactgtcctcccaaacctcagtagctgagagattagtggagcagcctcagttgcatccggatgttagaactgaatgtgagtctggcaccacttcctgggaaagtgatgatgaggagcaaggacccaccgttcctgcagacaatggtcccattctgtctctagtgggagatgatacattagagaaaggaactggccaagctcttgacagtcatcccactatgaaggatcctgtaaatgtgacccccagttccacacctgaatcctcaccgactgattgcctgcagaacagagcatttgatgacgaattagggcttggtggctcatgccctcctatgagggaaagtgatactagacaagaaaacttgaaaaccaaggctctcgtttctaacagttctttgcattggatacccatcccatcgaatgatgaggtagtgaaacagcccaaaccagaatccagagaacacataccatctgttgagccccaggttggagaggagtgggagaaagctgctcccacccctcctgcattgcctggggatttgacagctgaggagggtctagatcctcttgacagccttacttcactctggactgtgccatctcgaggaggcagtgacagcaatggcagttactgtcaacaggtggacattgaaaagctgaaaatcaacggagactctgaagcactgagtcctcacggtgagtccacggatacagcctctgactttgaaggtcacctcacggaggacagcagtgaggctgacactagagaagctgcagtgacaaagggatcttcggtggacaaggatgagaaacccaattggaaccaatctgccccactgtccaaggtgaatggtgacatgcgtctggttacaaggacagatgggatggttgctcctcagagctgggtgtctcgagtatgtgcggtccgccaaaagatcccagattccctactgctggccagtactgagtaccagccaagagccgtgtgcctgtccatgcctgggtcctcagtggaggccactaacccacttgtgatgcagttgctgcagggtagcttgcccctagagaaggttcttccaccagcccacgatgacagcatgtcagaatccccacaagtaccacttacaaaagaccagagccatggctcgctacgcatgggatctttacatggtcttggaaaaaacagtggcatggttgatggaagcagccccagttctttaagggctttgaaggagcctcttctgccagatagctgtgaaacaggcactggtcttgccaggattgaggccacccaggctcctggagcaccccaaaagaattgcaaggcagtcccaagttttgactccctccatccagtgacaaatcccattacatcctctaggaaactggaagaaatggattccaaagagcagttctcttcctttagttgtgaagatcagaaggaagtccgtgctatgtcacaggacagtaattcaaatgctgctccaggaaagagcccaggagatcttactacctcgagaacacctcgtttctcatctccaaatgtgatctcctttggtccagagcagacaggtcgggccctgggtgatcagagcaatgttacaggccaagggaagaagctttttggctctgggaatgtggctgcaacccttcagcgccccaggcctgcggacccgatgcctcttcctgctgagatccctccagtttttcccagtgggaagttgggaccaagcacaaactccatgtctggtggggtacagactccaagggaagactgggctccaaagccacatgcctttgttggcagcgtcaagaatgagaagacttttgtggggggtcctcttaaggcaaatgccgagaacaggaaagctactgggcatagtcccctggaactggtgggtcacttggaagggatgccctttgtcatggacttgcccttctggaaattaccccgagagccagggaaggggctcagtgagcctctggagccttcttctctcccctcccaactcagcatcaagcaggcattttatgggaagctttctaaactccaactgagttccaccagctttaattattcctctagctctcccacctttcccaaaggccttgctggaagtgtggtgcagctgagccacaaagcaaactttggtgcgagccacagtgcatcactttccttgcaaatgttcactgacagcagcacggtggaaagcatctcgctccagtgtgcgtgcagcctgaaagccatgatcatgtgccaaggctgcggtgcgttctgtcacgatgactgtattggaccctcaaagctctgtgtattgtgccttgtggtgagataataaattatggccatgggaaacattgtatatttagtgtgtgtattttgataatgattgatcttaaatctgtatacagaatatcattgatataatactctttaggcaggagcactcttgccttcccccaaaatttacactgctaaagccctctgtcacttggcgacccttctggtcttgctggaggggtttcctgggtataacccattgggctgcccaaggccagccagcctgagctctcctgcaagacagagcctgatgtggcacggagtggggttgcggggggtggggggactgcctgactcccagagggacttgaaactgaagcaagaaggttgcattctccaccaagggagttaacctacctgaactaagtagaaatgccagtcttccactaccccctccctgccatcttttcttctgctactttggggagttgatggccaggaaagaagccagcacagggttaaagtaactcctggcattgcccaccagggggctggtgcacctgctgacctcagggtcacagttgagtcatttgccagttgacggagcaagtttgaccttggttctgttgctgaagcaaatttggaacttttctgtctcagtgtgatccactaacccacaggatcatttggaaccttgaatagctctgcttggacaatggggttggggaatagggttgtctttcctatgaaaatgccatctgtagaccttgtgagtcagccgtccagatgtttgcaggtgaattcctctgcttgacatcctccctgtcactttggaccctatgggagtgggcatctccacgcacctgtgtatgtgaaagtcattttacatttcaaagcagtgtgtgtttcttatttttatatttttaactctttattcttggatgtataaagtgaactttttggcttctgtaagtatgctctatgcacctctaatgttttatcatgtatttatatgttgtacacagtactggctgattctgtaaatggatgtattgtacagagaacatgaacgtctcttcctaattttacatcttcagcatcattgcattaaagtggtgtaatctccttctctacatctgttgtcagagccactgagtgctgtgctgctcgacgtgagggtgaaatgattgacttgtgacctgccaggttgcccgatgccctgttgggtcaccggctggacctgctgcagcctgcagagccacagtcagcctgcccacatgccaccgagcaaacgcatcttgcttttcacatctctcctcctacagccttaatggctgcttgctgccatatgtgacaaatcaccaccaccagtgttaagtgcttctggattcatgggtgagttccctgggcagcccccaggaaggccttccagatctggctccagggtcaccacctgtcacagcaatacctgggaccatgctctcctgggactgtgaggctccttttgacgtacttttgacatcaggcaggtttgggaagaaacaaagccatgcctgctcctgcctctctcccaacatgtttccagcaagtagatgcccctgtgtgtgttttcccttgccttgtttcctgccttatatcttgtatttcgacttattacagagttgagggttcttgcttaatttagatcaagtataaaatttgtatgacttcaagtctcattttatctgaaaggtttttttctcatttaatctgatgtggcattttcgtcatctgaagcatgagtgacaagttgggaatgatgtggtgatttagaatgcagtattggccaagtccaagttgtcaacttaagcgtctgtttaccaaagaccgggaacaggggcccaaacatgtccagtcctcttcttccctctgctggaacctttggggacactcaagggtacagtttgacactgatctggtccatgaggctgcccagagaaagcactgcttctgtatgtctcttgtggtattggaacaataaacccgtacaacctgca

SEQ ID NO: 205776 - DNA, 74 bp, Homo sapiens
  chr20:31172328-31172402
  hyper
ccccgcggcgggacccgcccgcggccgccgcgcgcgcactcaccgagcccgtcttgaccggcacatacaccact

SEQ ID NO: 205777 - DNA, 71 bp, Homo sapiens
  chr20:31172882-31172953
  hyper
ctgctcgggcggcggcggcggcgttggcggcggcggctccggctcgcctcctgctccgcctcctcctcccc

SEQ ID NO: 205778 - DNA, 480 bp, Homo sapiens
  chr20:31350980-31351460
  hyper
gcaggtgggcgtccgccccttgcaactgggatgtggggtcttcaggcgaggcgctgtcccttcccccaatcccagctttaggaaagagctcgtgagtgtgggcttagactcgcgcgggctggggtgtgcgccgtggagggcgtgaggcagagggcgacctcccggggtgctcctgagctgagccatcaagcgcggggagcagcggggctgccctctgcctgtgcacacctggcccgggaggagccggccggaggggcggcgcctccctgtcccggccacgccgcctaccctggggtcttaccttccattcttagcctaactcccgtgtgcggctggccccacttcccagactcgcacactaaggcctcaaaacctctagcaccagctcctggaagataagcttcccggctcgtggttgcatggggagggtgtattgagctccactttatcggggagaaagtggaagcggagaaagaccta

SEQ ID NO: 205779 - DNA, 41 bp, Homo sapiens
  chr20:31797761-31797802
  hyper
ggagggcagaagcgggaaaggctgtccgttctgaccggaag

SEQ ID NO: 205780 - DNA, 179 bp, Homo sapiens
  chr20:32031787-32031966
  hyper
aacccagtgagcccgcgcagggggctcggcgctcggaatgcccatcgagggccgggactgtaactcccggacgtgggagcgcatgaaaaagagacagaaccacgtatcctggtgcgaagcactgggcatcgggctgggctgcatatggcggagggctgggctgcgtatggtagagcgtt

SEQ ID NO: 205781 - DNA, 210 bp, Homo sapiens
  chr20:32398868-32399078
  hyper
cactcctacagagcgcaggccaaggagactacatttcccagaatgccacacgccctttgaccccagctacagcaaaagacgcgccggggagcgcctgaagccggaagactatagcttcccggcatgcagcacgcttccccctattagatttgaggcgcggccggcgcgttgcccactgggagttgtagtcagtggcgcgttgccctgacg

SEQ ID NO: 205782 - DNA, 104 bp, Homo sapiens
  chr20:32700168-32700272
  hyper
tcgccaggcatgccgggacttgtagtccatttataagagggttgcgcttgcgctgtagccgcccagcgacctgtgcgcggcgtctgagcgagctgcagccggaa

SEQ ID NO: 205783 - DNA, 112 bp, Homo sapiens
  chr20:32899334-32899446
  hyper
gggcggagagggggcggagggcgcacaagcctgccctttggccgcggggctttagcctgccctagcttcagcatccccgctcgcctcccggcggtcctgcgtctcactctgg

SEQ ID NO: 205784 - DNA, 199 bp, Homo sapiens
  chr20:32899515-32899714
  hyper
agccggattaagcagttctgtggagttcctcccttcttgtccaccccgctaggggtctctcctttcccgctgtatccacgcccctccctccaggccccctgggcccacctcgaagtcaccgctgggctggggagtacagaggtgggggacttcttagagaccctgggacagggcccccctctctccctcaatccttctc

SEQ ID NO: 205785 - DNA, 360 bp, Homo sapiens
  chr20:33103991-33104351
  hyper
gtccagccagaaccagcatcttttctgcacggctggagttgggaattttccacagcttagcgcactgctccttagcttttcgctttgccacagtggaaagcagattttccaagaatcctggcggagccaagatcggctcgcccgcccccgcctcacgctggctcctgataggcagctagagctgtccgttttgacagaaacctttgcgcaggcgcagaaaggcacaggactcgctaagtgttcgctacgcggggctaccggatcggtcggaaatggtgagcgtgcgccggggtcttgtggctggcggccgcccaccaccccacgccaggccttcagtcttccgaggatgaggggatctca

SEQ ID NO: 205786 - DNA, 68 bp, Homo sapiens
  chr20:33297165-33297233
  hyper
ctggactcggtcccgcccgcctccagagcagtcccctggaggacctcctcatcgagcaccccagcatg

SEQ ID NO: 205787 - DNA, 483 bp, Homo sapiens
  chr20:33464343-33464826
  hyper
ggccccgcccctctacggaggccccgcctctagttcggcctgttttctcagtcccggcacccgccgcgaccgcaaaggcggccgcggttctaggaacttgacgtgatggggcttcctgaggagcgggtccggagcggcagcgggagccggggccaggaggaagctggagccggaggccgggcgcggagttggtctccgccgcccgaggtcagccgctccgcgcacgtcccctcgctgcagcgctaccgcgagctgcaccggcgctccgtggaggagccgcggggtgaggcccggcccgggcgggcctggggtgtcagtgaggagaagagtgggggctccctgggggagtcgggggctcccttgggaagctgaggggtgggtgaggagatggaggttctgtgaaggaagaattgcggttctttgaaaatggaaaagggattccgggaggagacgagggttccatgggagctggggagttccctg

SEQ ID NO: 205788 - DNA, 131 bp, Homo sapiens
  chr20:33680634-33680765
  hyper
ttctacggggcggcggaggggtcgccgcagcgcccccagtgggccgtcggcggaggcgcaagccgcgtggcagggaccgtgtgcggcgtggaggctactgggaattgtagtcctgcgcggcagcggggtag

SEQ ID NO: 205789 - DNA, 59 bp, Homo sapiens
  chr20:34190072-34190131
  hyper
agggggcaggtccccgcgcgccctcacggacaaggtgaccttaatgaaacccttggtcc

SEQ ID NO: 205790 - DNA, 218 bp, Homo sapiens
  chr20:34330350-34330568
  hyper
ccattcagtgaggcgcctttcactccccctccgcgtaagcacccaaatctcgcgagacagagcgggtctctagggcaaagacagttggtaggctgcctgtcaatctttcagagagctcttcgctgagtggagctcagcggtcacctccccctcgtggcgcctcctcacggccatctgaagattcctccggcacagccgatcgcccccgctccggcctc

SEQ ID NO: 205791 - DNA, 469 bp, Homo sapiens
  chr20:34359742-34360211
  hyper
gttcctgctagggcgcgggcctgtttcccgcgcgtcagggtagtgggcgtggcctgcgcaggccgttgccacagtgatcgggcagacggggcagggggcggggcagctgggaccttacgtcactcggtggtggcgatgatgcgtgtgtgtggggggcggggcatacgctgggcgcgtcccgggggtcacgtggtgcagagcacgcagagtccttctgtcggttggtcctggagcggcgcagccggagtggggccgtgaggtgagctcgcggccaggcgaagccggccggccgggccgggttgggccgggcccgcgctgcgcgcgcgccgtgcgggcggggacggcgacggacgccaccgctgcttcggtcccctgcccggccccgctccccgcctggccccgctcgcccagcctggagggaggccctgggactgctgctgagagcgtggcgggcgtgcgagcggtgccc

SEQ ID NO: 205792 - DNA, 237 bp, Homo sapiens
  chr20:34680127-34680364
  hyper
gggcgcggggccgcggggttaccccggggcaccgggcacagagccgagaagtctaagctagggaaaatcgaggtcggcgctggcgggaacccgggaggacgtgggggccccgggtggggtctgctcctcttcttcgcccggcctctgagcccgccgcagctcaggttgacgccgggcccacgtggggaagccggcggcgggtccccagcgccgggagggttcgcggggctcagcccc

SEQ ID NO: 205793 - DNA, 944 bp, Homo sapiens
  chr20:34680573-34681517
  hyper
gaggagggggctgagcgccgtgggagggagagcaggagcgagcgcgcgagagagcggggcatttctgcgcagctctagcgcgcctcggagcccgccggggcagccgccggacaccaggaccgcgagccagacagctcccggaagccgcgccgccgccgccaggttagccgcacccgccgtccccctccgcgtcccggggaccccgccgcgtcgggtcccgcgtgtgcgtgtggggtggccgccgagggcggcgggctcgattcccgatctttgggcactgacaggccggcgggccggctccaggagccgcgggcttcggttcgtgtgtgtggggactgtcgcgggtttgtgtgtcggggctccagtctctgggtgtgtgttaggtgtgagcgcgcgtgtgcccgtggatccgtgcgagcggctgctcggtgtgcgcgcgcgtgcgtgtgtgcgccgggtgtgcatctgtgtgtgcgtgtgtgagggtgtgtgccttgcgtgtcttcgcgagtggtgcgtgcgtatctgggtgagggtgcgtgtgtctgcgtgtgtctgtcggtgaatgtatctgtgagagggtgtgtccgaatgtgtagcagtgtgtacacctctgggtgagggcgtgtgccagtggcttcgcttgtggctgcagcctgtggcgggtgtgggtgtgtgtgtgcgcgcgcgtcgctgtgtgcgcgccagtgtaactcccgtgtgtgcgcgtgtgagtgcgggtgtgctcccgcgtagcccccgtgtgcgtgtgcgcggctttgtcttcgcactgccgggaggaagcggtgggggcggcggtccaggcgccgccgccgctgggagctgggcacctggcctgggcggtgggtggcggcggcgggggtgtcccttccccgtcgggcagagactccctgctggcaggtgggcggccacaccccgggggt

SEQ ID NO: 205794 - DNA, 161 bp, Homo sapiens
  chr20:35201303-35201464
  hyper
acaacacataccctatcacccgaggatgagacgggatgacacacacgaagtgccccgcacagcgtcgttgtaaagcgttggctgttttcacctctggccgccccctgtgagcccgatcatgtgctttttgggcttaggtcggaggcggcctcccagattct

SEQ ID NO: 205795 - DNA, 37 bp, Homo sapiens
  chr20:35201548-35201585
  hyper
cagtttcccctcgaagcaacgggaccaatcgcaccgc

SEQ ID NO: 205796 - DNA, 125 bp, Homo sapiens; identical to SEQ ID NO: 12949
  chr20:35201647-35201772
  hyper

SEQ ID NO: 205797 - DNA, 138 bp, Homo sapiens
  chr20:35579324-35579462
  hyper
gttcaaggagctgcggttagcgcggaggggtcccgcgagcctggatgacagcaagccgcccaccaaggtctggggaaaaatctccttctaactaaaaaaaagggacccgagtctcgcttgtcccgcgccggggtggca

SEQ ID NO: 205798 - DNA, 252 bp, Homo sapiens
  chr20:36781072-36781324
  hyper
tcccattttccaggcagacccggccctttcccacccatcagactgatttcctcccgcagcgcccctgcgctcaccccagcccaacttcctgcctctgcatcaccagctccacagttcccgccccgggatgtgggtcactttagtcactgtgccgcttggctgaccgccactccaacccgccgccgggtgaggccaagcaggaggaagggggccatcccccagaaccacgcttcccattccctgaactctgaa

SEQ ID NO: 205799 - DNA, 44 bp, Homo sapiens
  chr20:36793837-36793881
  hyper
ggccggacgagggcgccccctgggggagcggacagggacacaca

SEQ ID NO: 205800 - DNA, 115 bp, Homo sapiens
  chr20:37075186-37075301
  hyper
cttggataaagggcgttagtggagggacagaattgcagctccgtcctcccagggggcgctgcaggcacgtctgcttgggcaggggcccggcggaagcgccgctctaggctgcagc

SEQ ID NO: 205801 - DNA, 76 bp, Homo sapiens
  chr20:37274625-37274701
  hyper
agggctctgcctctcgcccccagaagtcctatccccctgccaaaacttgatcctttctggccaggtcgcctctttc

SEQ ID NO: 205802 - DNA, 546 bp, Homo sapiens
  chr20:37274731-37275277
  hyper
agtagcagcaggcgcccccagctctgcgacgcaggcctcaagacttggctgcggaggatgcacgcagacagggacaaggcgggggacggcctcgaggcggtgagtgcccccgaccccagacaggtggagaagggccgaggcgacaggagggcacctggggcgcggtgcttcccttcctccaggtccccgctaccgggctgccagcaacggcccagtgaggccaccagggggcgttgcggcgccgtcacggggagcgaggaggcgtggctgcgaaacgagggcttagaagcgggttggggaggggaaatggagtgactcggagacttcccctagaaaccgtcaccgccgccccatttttcggcagcccctggccgagggttgggaaaatgggagtcgctctgcggggtgtgaggtgattggggctgggtgggggatagtagaagggaagagccttccaaaaatactgagtattcctaggaggggtcctgaacacggttccttattaaagtcccgattagagaaattgatgagcgttgaggctgcacc

SEQ ID NO: 205803 - DNA, 78 bp, Homo sapiens
  chr20:37303401-37303479
  hyper
cctgtttccctgggtgggagtgggaagggagttttaaactgaattgtgctcagactcccagcccagtcttcccggagc

SEQ ID NO: 205804 - DNA, 58 bp, Homo sapiens
  chr20:37358242-37358300
  hyper
ccaggtcgaggtttgttcgaatctctcccctgggggcgggtccatctgagaatttggt

SEQ ID NO: 205805 - DNA, 79 bp, Homo sapiens
  chr20:37434033-37434112
  hyper
cgtctgtcaaatgggagcagggataccgtccttggcttccctctttccatggtcggggtgggggttaggaaaactattt

SEQ ID NO: 205806 - DNA, 217 bp, Homo sapiens
  chr20:39318166-39318383
  hyper
ccccacctctaggccaaatcaccgctttcccctcctcgcgcactctcctccctcagttccctttgcaccccacccccatcccgtgtcacccccaaggaggctcagaatgagcgccgggacaacgcctcctgggccctttgttcccaagcggcccccgcccagtgggcgacgctctgtgtgtcctcgcggcttctggccgtgtgtgtcgtgcgttcct

SEQ ID NO: 205807 - DNA, 113 bp, Homo sapiens
  chr20:39318415-39318528
  hyper
gggagggcgggctcgaggctccgagagttgtgttcagacccaactcttaacctcaggggacctttctcaggccaagcgagggcccctcctggcgggtgcagtcgcagagccct

SEQ ID NO: 205808 - DNA, 109 bp, Homo sapiens
  chr20:39318768-39318877
  hyper
cagatcccggcgtcagcccgccgcggagaggctcaaacaggcataaagtgcgaccccaagtggccactgtgcgcaaaggcgccgcgaccgcccggcccacggccggaag

SEQ ID NO: 205809 - DNA, 170 bp, Homo sapiens
  chr20:39968625-39968795
  hyper
tccaggaaagccgcgagccacagatccaagaggaaaaagccgttcccggcccgggccttgcccaaggcacgagagtaaatgcaccttccgcgtgcctcggcgcacctgggctcacctgtcccctcccgcagtgcctgcagacagggagggagcgcggctgggccagaagg

SEQ ID NO: 205810 - DNA, 204 bp, Homo sapiens
  chr20:40247056-40247260
  hyper
ccctaacccatctcgggcccgccttccctgtcgcgccattgggcttcgccggtccaaaacacagacccattggtcatcccggctgccgctcagacagaagcccatttcaagcttgcttgcaggggcgagtgatgggctcgctccattgtgctcgtatttgcatggatgtgatcgcggccttgattggccggcgctgagaccgcc

SEQ ID NO: 205811 - DNA, 204 bp, Homo sapiens
  chr20:42086252-42086456
  hyper
cccgaagagatcgcgcacagttttataaaaggtacaaattagaaagcagttctgcggctggattagagacattgtgttttcaaagacggtggggagggctagagaaaaatcctagaagctagcaagaccgcactacaccgaaacgtcgcgggcaacggactcgccagtcaccatctagcccagggacgacgcgggacggacgtg

SEQ ID NO: 205812 - DNA, 163 bp, Homo sapiens
  chr20:42296100-42296263
  hyper
tctgaggcaggggcgcgcgtaaagctggggggctcttgggcgtccctcgcggctccccaggcctgttgggcctcggagctgggacgggcgggtctcttgggacccgggccaagccgtgcatgatgtcattttgtctcccgcctaattgcgggatgggggtggg

SEQ ID NO: 205813 - DNA, 129 bp, Homo sapiens
  chr20:42876305-42876434
  hyper
caggactgctcacctgggaagcgacaggccctgtctgggccccaggagcacagttctcaattttaggagcatccattctgcctctttccctcccagaaacagccggtctgttggggtgcggggcgggtt

SEQ ID NO: 205814 - DNA, 144 bp, Homo sapiens
  chr20:43017166-43017310
  hyper
ttttaggtaactaaatccaacgagctgtgattggtgatcgaaccgagcaggcctcctctggatttggagagacatagtgcgtctgggcctgtgattggcgggattgctgtgattggtgaagtccctaaggctatctaagtttct

SEQ ID NO: 205815 - DNA, 131 bp, Homo sapiens
  chr20:43017399-43017530
  hyper
gccctccggcccagcgcggtgcctgccctgccctgcgccctggggcaaccgcgggatgaggtggggcggcaaagggtgtcagggctcccagctgcggcccgggtggccacgcttctctgcacagttccttt

SEQ ID NO: 205816 - DNA, 49 bp, Homo sapiens
  chr20:43726868-43726917
  hyper
cggggcacgggtccacgctgctcggcgtgtcgctgtcctcgtcccaggc

SEQ ID NO: 205817 - DNA, 49 bp, Homo sapiens
  chr20:43729513-43729562
  hyper
cccgggaccgtcccggagccacgtccctccccaaaggaggccccttacc

SEQ ID NO: 205818 - DNA, 287 bp, Homo sapiens
  chr20:44034866-44035153
  hyper
tggccaagggtgccggaggcagggttcgggtgcgtagtcgttgcgtgggcgctgcccaaaaggcgcagagcatcaagtgtgcgtgggcagaaccggcgcgggcgcccgccgcgggtctgcgcggggcgggggcgcagcaagtgcatccgagcgagcggagactagcgcaccggcgtcggtggcgagggtggtgcagaggagtccggctgggcggagggaggaaggatgggtgcgggtaactttttgaccgccttggaagtaccagtagccgcgctcgcaggggctgc

SEQ ID NO: 205819 - DNA, 74 bp, Homo sapiens
  chr20:44453063-44453137
  hyper
agactgagcctgagcccagccgctgccgcctctccccaccatcccctgcctccgagggacacccgctcaccgtc

SEQ ID NO: 205820 - DNA, 45 bp, Homo sapiens
  chr20:44639093-44639138
  hyper
cctccttcctctggctcttacgctacaggatccaaaactactcgg

SEQ ID NO: 205821 - DNA, 170 bp, Homo sapiens
  chr20:44642199-44642369
  hyper
gggagggggctttgcggaggggctgcccgtcccttcccgcccactggccctgtgtccaaggcttagagcccgtcctttccctcctcgctttctcaggaagtactggcgattctctgagggcagggggagccggccgcagggccccttccttatcgccgacaagtggcccg

SEQ ID NO: 205822 - DNA, 177 bp, Homo sapiens
  chr20:44660428-44660605
  hyper
gggcggggagggctcagcctcagtctggccctgcctctcgcgcgcgcgccgctcggcgctcccgccatcacccttactccttggctccggggaatcagggcgagtttccccttagctgttctggtcctttgagaactcggaagctcattccccatccccctcaaccagtgcgcctgg

SEQ ID NO: 205823 - DNA, 191 bp, Homo sapiens
  chr20:44669700-44669891
  hyper
gcggcccccgagaccgctgtccacggtgctgaaacacagcattgcactaatgcggtgcttctccaccttggctgcttattagaatcacttggggagcttaagaaaaaaaaaaaaaagccaatggccaggcttcatttaaattaaacgaggaactctggatatggggacctggcgtccgtgtgtttaaaagg

SEQ ID NO: 205824 - DNA, 279 bp, Homo sapiens
  chr20:44718536-44718815
  hyper
cgtaggacaaaggcgccaccaaccgaccggcgcgggcacgaggcaatggcggccgggcggagagtggagatgggggcagagggcgcgcacgtagcggcaggcgcggcactgtcgcaagaccgcgcgtgtttacggcagggctgagttggggcgtcgatctccttggcaatgagggcccgggaagtggctctcgggcgggagttgagaacgcagggagttgcctagcaacagcgtcctaggctgaggatgggccccacggtggtcgcctcagcccccgcc

SEQ ID NO: 205825 - DNA, 52 bp, Homo sapiens
  chr20:44879679-44879731
  hyper
ttgcccacatacaggggctccgtgcccgtgtactcctctaccacgaagaact

SEQ ID NO: 205826 - DNA, 166 bp, Homo sapiens
  chr20:44935840-44936006
  hyper
caaacagcagcttctctgcccgccacaagggggtgccctgcacctcggggagacctcgggggatcctggatcagccctaccctctgcagccccgcctgggacagggcccgacgttgccagagaagaggcagcggggaggcgcgagcgagacgggtccacactgtgc

SEQ ID NO: 205827 - DNA, 81 bp, Homo sapiens
  chr20:44937643-44937724
  hyper
aaaggcaccttgcacagaccagatctgccagttcagaaacagtcactgtgcattgaggtggacaccgaccaggtgcccagg

SEQ ID NO: 205828 - DNA, 79 bp, Homo sapiens
  chr20:45142272-45142351
  hyper
ggggctctcccgggccccccgccggctttccggaccacagtccccagaaggcgtcgcggccaccgccctaccctgaggg

SEQ ID NO: 205829 - DNA, 149 bp, Homo sapiens
  chr20:45985481-45985630
  hyper
gggtttggcacttcggctgatgatctggccgcctaataaaagctcatccccgattggctgccccggcaaatcggagtgtaaagccgccccggattggctgaaacacttcctgagcgattatctttgtgaggctcgggtgagcaagagcc

SEQ ID NO: 205830 - DNA, 145 bp, Homo sapiens
  chr20:46414490-46414635
  hyper
gccgggagccgcggacggctggggcccggggcgcggggggcccagccgcggtgccctcctcgagccctccgcgcgctagcgcttttacctccggcctgggggacgcgcggcccgcgacccggccctgcctgtccccggcgcacgg

SEQ ID NO: 205831 - DNA, 223 bp, Homo sapiens
  chr20:46414914-46415137
  hyper
cacacaaaccagggggcatcgctaataaatcaaatatcgtgataaattcaggagggccatcgatcaggtccacttggctggaaacgacgtgaatctgcctcttttccgctttcttcttctcctctctcggagctggagggagccaaatgttccgcggggagtgcgacagccccggccgggcgctcccctcgtaatgacacgttaataaatgttttcttttatc

SEQ ID NO: 205832 - DNA, 74 bp, Homo sapiens
  chr20:46415520-46415594
  hyper
ccagcagctgcagaaaacacagccgagttgctagctaaggggaaacagacgccgctgtgggaaagcacttgtaa

SEQ ID NO: 205833 - DNA, 59 bp, Homo sapiens
  chr20:47934765-47934824
  hyper
aggtgggtccgaggaggggtcgggtctgggagcctccgcccccaactcaaggcaggcta

SEQ ID NO: 205834 - DNA, 124 bp, Homo sapiens
  chr20:48099000-48099124
  hyper
gtcatgcccgccggcatcgctgatccggccgcccccgccccccctgcccccccaggccgctgtcactcgacggcaaggcccgctgctgcgggggaggggggcagggagcgctgtgggctgctgg

SEQ ID NO: 205835 - DNA, 59 bp, Homo sapiens
  chr20:48099573-48099632
  hyper
gggggagctgcatgaaaactttctttctttatctttttctttctttcttcttcttcttt

SEQ ID NO: 205836 - DNA, 169 bp, Homo sapiens
  chr20:48099692-48099861
  hyper
agattttgggggtgggggaatggcagcgggcttttttccaaatcttaaaagatttgggggaattccgggggttccaggtgcccacctgtccgaggtcacaacagacggggtgtgcacaacagcccctctgtcctggagcgacccctcttcccaaacactggagcatctc

SEQ ID NO: 205837 - DNA, 82 bp, Homo sapiens
  chr20:48100505-48100587
  hyper
gggaccgcgcatcgtcccggccgcccgggcgcccccgcccgtgggcagcggcggtcccggggccgggctgagccgggcctac

SEQ ID NO: 205838 - DNA, 164 bp, Homo sapiens
  chr20:48330532-48330696
  hyper
ttgcgctcgccgccgaccctcgctcggcgcccacagcagcccgcatggagtaatcgccaaatggcgacagaccctctcccagtgcggccaccgcccaggctttcggggaatgtctcccaagtgctccgcgctagctcgtcccccatctcgggggccaaggggcc

SEQ ID NO: 205839 - DNA, 984 bp, Homo sapiens
  chr20:48598696-48599680
  hyper
gacccgcctcttaacggtcgccgcgtcccgtctctcccccaccaaagcacacttccctttgcattgtaattatctgtttacttcgtctgtctccctcactggaccagaagctacccttcgggagaggctctgagtgttctgtccggggctgtgccctggccccaggtacagtgccccacacgtgctgggcgctccgtaaacactggataagggaaggaacgggtgctcttggctagctgggccaggctgctttgcaaaaaggccgtggcatttcaagccgccgagagccacgtgcggtgtccctttcctcgcttcctccccagtgatgtgcgtttccctcgtcaatgccacgctctccaggcgccagccgggcggaggaaatttccgccccctcccaagcccgaggcgggggcgggcgtcggaaggtcaggtgtcccggccggcgcgcagcgccagggggcgtcagaagcgctcagaccaccgggcgctgagccggtgggcgcgcggcgtcctgccggggtcccacctcgcagaggcctcgcttcgctcgacgtcccgccccggacagccccagcaccggggacgacccgcgctgcgccagcgaaccccgcctcggaggagtccccgcccgggctctcaccgccacgcggcgcgagcccggccagcagccggcgcacctgctcggggagtggccttcggcggagacgagcctccgattggcgcggaggtgacaaaggggcgtggcagataaggccccgcccctcccaccccccaccacccccccggagtacttaagggagttggcggcgctgctgcattcattgcgccgcggcacggcctagcgagtggttcttctgcgctactgctgcgcgaatcggcgaccccagtgcctcgaccactatgccgcgctctttcctcgtcaggaagccctccgaccccaatcggaagcctaactacagcgagctgcaggactctaatccaggt

SEQ ID NO: 205840 - DNA, 131 bp, Homo sapiens
  chr20:48729833-48729964
  hyper
aaggaaatatctgcgtgctcgagggcccagcaacctgcaagtccccacacatcgggtgcgagggaggttgtgatgtgcttagtgagaagggcaggggtgactaggcttgggaaggcgcgattgtgaaagaa

SEQ ID NO: 205841 - DNA, 184 bp, Homo sapiens
  chr20:48771157-48771341
  hyper
tttgtttacagcagggcccccgtgccaggatcggggctggaacatggtagaagctcaataaatgcttgatgaatgaattaaggctcagccagatgcgtctaatacttcggcagataaatgacagcagcagggatttaccccaggtctaaccgacaacaaagtatgcaataatttctcatagaaa

SEQ ID NO: 205842 - DNA, 588 bp, Homo sapiens
  chr20:49224900-49225488
  hyper
tctccccaggctggacgggactcacttccactgcacctccagctgcagcttgatggtacccaactccgtgatgtccaccacgatgacctgcggccgcgtcgtgaagaagtcggcgatgtcacacgtcactgcacccacagccagcgagcccaggccccgcaactccgtcacctgggggtgggggctggagggtggtgtctgagccgaacacccaggcaccccagccctgcccccgggccccatccccaccttgatgtccaggttctcatgcagcgtggggatgaaggccttctcctcttcgtcccaggtctggctgtcatctgactcgatccgacccttgagcttccaacgctggcggcccagacgcatgagcacctgtgaaccagcccgagaggggccgcgtcagcccaggtgggtgtccccttgctgtccgcccagggccctccctgccaggcagagccccagctgcaaccctggttcccagcagctcccgtcccccaaagacctggcggggagccctgaggattgaccccagagagtggccgtacctcatagtggtctccgggacagaggcgtgcgtagcccacc

SEQ ID NO: 205843 - DNA, 323 bp, Homo sapiens
  chr20:49225976-49226299
  hyper
ccacaggcagagagacgcctccttggggcccagaacacctcctccagcccccactggcccagctctcgatgtccccactgcccggcccagctcttgctgcccctgctgcccagcccagcttggcccggcccacctcggcgcactcgtgcaggctgcggcccagctcctgcaggctctctcgggctgcgcggctcggggggcaccgggcgaaggcccgctgcatgctggaggcgccgtcgcgcaggcggcactggatgcagtagtcctcgtacagctcatccacctgtggtgggcacacgggctggtggcgctgcccacgcgga

SEQ ID NO: 205844 - DNA, 217 bp, Homo sapiens
  chr20:50158039-50158256
  hyper
aagcattgggcccagcccggggaagtccccagcccccagcaactgagggcagttggaggcacagagtgacaaagttcaggcagaaagagcctgtgtccttctgaatccatgctgcagctgcccctcaccctaccccatcccaccacatccattaggactaagcgtagaagatcacttaatatagctcagaccaatcctcttgtgagtggtaagtgat

SEQ ID NO: 205845 - DNA, 938 bp, Homo sapiens
  chr20:50158751-50159689
  hyper
actgacgcctcccctccctggcacctgggtaggggcaccctccctccaggccccttaggaagggggacggctggagccaagaggactcctgtgcccagtccccaggcctgagcccctggcgggctcaggggccaggccaggggtagcctccaccgaccttcgttcggattcaaatactcatagtcgaagaggatggagaagtcaagctcgtcttgggggctgcccccaggctcgtggcctggggcgtccccgccgtcgggttggggctgccgctcgggggcgttcatggcgcgcagggcgggaaggctgcggggccgggggcgagggcgggcgcggctggctctgggacccctcgcagtggggctggcggaggcggctcgagcggcggggtccctttcctcgtagggacgcacgccgggtccggggacggcgcgcctggcgcagcgggtcctggacgcgcccggggaagctgagcggcggcggcgacggcggcgcgagcttcctgctccggaggcacctgttgcagcccggggaggcggggggggggggggcgtggaggcggggacagggcggccaggccggcgggggcggggccgccaccaggggaccggaggggaggggcgcgcggcctgggctggccggtgccgggaggaaggaggctgtccgcggacctgaccacactgtcccgggccaccgctgggcgctggggcggccgctgtctcccaccctccacgggtgagtgcgacacgcgctgcgcgaaccagggtctagacaagaaagctgccgccactaggacttttgccctaagggacccactggccccacactttttcctgcttttcttctccatggggtggaagggggtatccacccccttctattgcagacccgtgtctccaggcgtctccgtgtgcccacgggggcggcatgattttcac

SEQ ID NO: 205846 - DNA, 221 bp, Homo sapiens
  chr20:50179337-50179558
  hyper
tcggcgcggctccgcgatccggcttactccagaggcaacgcgacttccttccccgcgctccgtgtttataggctttcaatgcagtaaaataacgggattccctcactgtttcctcctgtttatccagcgccatggaaaccactggatcccgtccatctccaaaactaagggctttcctgcaaacttcacactcaggaatccatgacgtcgcctcctccgcg

SEQ ID NO: 205847 - DNA, 590 bp, Homo sapiens
  chr20:50383655-50384245
  hyper
cccttatggttcactccacccgccgcgtctcctgttccgagcaactgacgctgcaataagcggccgccaccgggaaatgcccagagaggaccagacgcccgaggaagggcggagcagagcggccgcaggccccgcccaacaccgcgctcagcctcccgcgggctccagcctcacctgcgcggcctgtggagctgcacatctccaggccccgccccccagaactctgattggcgggtctaggcgggggccgggaaatctgcatttgcaccagcgcccacccccgtccttcccacccccgcccctcacgcccaggtaagtctatggcaggcgatacgagagccccgcaaacctcaacgcgtcacgctgccatcctccgaacaggaagacggcgaggcgcaaaataccaacccgtcccctcttcccaaatgcagaaaaacccttgcctgttccgcgcctaagctgccctcggggtctcctactgcgggaagggcacagcaggtggcagcccctgtcccagccgtgggattccttccccgaaattgtggggggagaacacaaggggtagtgtcaccaagcggccagtaggagac

SEQ ID NO: 205848 - DNA, 249 bp, Homo sapiens
  chr20:50384400-50384649
  hyper
tgagcatatctgggctcccgagtaatgctccaagcgcagagctcggtgtgacactgaccaaattgttacctcagatattaattacggacagatattaattacggaacaataaaacggtgagaaagcacggctgatccgaattccgcgagtgtgtaaacagcactggggcgggcccggcttctcggggtttctaaaggaaggtgggcaaggaggcccaggcaaccgggcgctcgaaccccaaagggccgg

SEQ ID NO: 205849 - DNA, 243 bp, Homo sapiens
  chr20:50384928-50385171
  hyper
tggccgccgcgccccccgcgccgcctgggccgccgcccggtccggcctccgcgccgccgcccgccggcgccgcgccgccccgggggaggaggcggcggcagcgggcgggccgggcccgcagcgagggggcgagctcgcgagcgccgggccacgcgcggagcgcccgcgcggcccgaccgacggacacgggcgcaccatgggcccgagctccgcgctgcgcccgctcgctccgcgccgcgccgc

SEQ ID NO: 205850 - DNA, 88 bp, Homo sapiens
  chr20:50385230-50385318
  hyper
gcccccggcccgcgcccgcgccccccacgcgcgcccacccggccacgcgccccccgcccacgcccgccgtgcgcgcaccctgccaccg

SEQ ID NO: 205851 - DNA, 126 bp, Homo sapiens
  chr20:50417183-50417309
  hyper
ccggaggaagcaggcgggctgagggttaacccttttgttccaggtgggccaggccacgaagccttcacgctcccctcaacccccaccccaccccgcccccaaccaaggcacaaagagagtccctcc

SEQ ID NO: 205852 - DNA, 265 bp, Homo sapiens
  chr20:50418076-50418341
  hyper
gctggaggtcaggccccgaaaggttagggcgaagatcggcaggcggcgcagcccgggcagaaaaggcgaaatccagaaaagaaaaaaattttaaagggaaacattgagccctcctcccccacctctctgggccctccaatcccctgcgcagcgcgggtggcccgcaccccagctcctgagggtggggagaggtcgcgccccctccccccacttggcccgggaggggcgcgtgcaacagatcgtcctcctccggggggtcttccag

SEQ ID NO: 205853 - DNA, 296 bp, Homo sapiens
  chr20:50722302-50722598
  hyper
cgctgtggctgctgcgctgcacaggctgcgcttttagattcggacttaattggtctgggctgggacctgggcactgggatgtttttttaaaaaagccgtctccctccctcaccacccccatcacacacacaggtcattctgatgtgcatccaagctgagaagcacgacctccactcctggttctcaaccctgctgcatacccaaatttaaattttaaatgaggagtgtctccaactgcagggagaaatgcagattccgaaagttctggattcaggtggccgaggccagaaatgtgt

SEQ ID NO: 205854 - DNA, 77 bp, Homo sapiens
  chr20:51590002-51590079
  hyper
taaccccgtcctctctcgccttctctggtctcccaaatcctccccttccaagctccggttgggttggggtgagctat

SEQ ID NO: 205855 - DNA, 166 bp, Homo sapiens
  chr20:52209197-52209363
  hyper
cccctcgggcgggaccgcccaggcagccccaaatccagcctcccgggcccccagcagcgccctccgcctctccaccatcccgtccggctcgcagtcggggccaaatcgagagacaagagggctgtgcctgaaactgagcggtttcaccactcggcacctcctggca

SEQ ID NO: 205856 - DNA, 159 bp, Homo sapiens
  chr20:52790210-52790369
  hyper
ctgggaaaaggaagcaaagagggccagctggtgtgatggagcggggtgaggcgggacaggcagcagaaaggacctcggcgaggatgctcgacgctgcaccacgcgacagcctcagagcattggtgcctccttgcactggccgcaggggctggaagaggg

SEQ ID NO: 205857 - DNA, 183 bp, Homo sapiens
  chr20:52790429-52790612
  hyper
aggctgacctctagggtctggctggagccacggggaggtgtcaaggagggtagatgagatgctgctggcgctgcgtttcctcctgtccctctccatgttcctatgcccagggaccatgcatttatggagacagagcatgccctgggtggccaatgagcacgcagaggagggcggagtggcccc

SEQ ID NO: 205858 - DNA, 60 bp, Homo sapiens
  chr20:53092081-53092141
  hyper
ccccaccccttcctcctctttcctcctcctccttcctcctcctcctcctccttcttctcc

SEQ ID NO: 205859 - DNA, 180 bp, Homo sapiens
  chr20:54578794-54578974
  hyper
acccaggcatatttgggaaggcgagtgctttacatgattccccatttcccaatcggaccagcttagcctgggcaggcagcctcgtgctgaggtgcctggagaccgcccaccccctaggtgctcgcttccccccgggtctgacctgatcgaagtaaatgatgcgcgtcttgttgctcatct

SEQ ID NO: 205860 - DNA, 151 bp, Homo sapiens; identical to SEQ ID NO: 57368
  chr20:54579139-54579290
  hyper

SEQ ID NO: 205861 - DNA, 393 bp, Homo sapiens
  chr20:54934126-54934519
  hyper
cacctggctcctgggcgccaccgccccctgcgccccgccgcccctggccctggccctgctcccgcccaggctagacgcccggctgctccgcacggcgcgcggggactgccgcggccaccaggtaagcaccccaccccgaccctgatcccgggcggtgtccaggtccccagacgtccgcagggccgcgccggggtccggccgcctccgccaaggacgcctttgcacttgtagctgcccgggaccgagctcttccagggtccccgaaaccccaaatccctgcaagccaaggaagcgatcctcctagttgacagccagagaaactgaggctcgggaaggtgtggcgctctgcccaaggtcgcgcagtcttcggccgagccccgggtctgcagagcc

SEQ ID NO: 205862 - DNA, 275 bp, Homo sapiens
  chr20:55203829-55204104
  hyper
gggaactgggcgtctctggcgcactggggctccagctgcatgatcccagctcagaccttaagcctcagtggggtgtaggtgggatgggatgtgtttttaggagatgaggagaccccggttgttgagtcgctccccaaatgcgcagtttcttaactccaggtgacatccgtcttttggaggaacgagtgaaggccgtttaggcgaaagaggggtgggtttcagtatttggatcccttcccccagctctgccaatctcaggtgtgtttacggtggag

SEQ ID NO: 205863 - DNA, 216 bp, Homo sapiens
  chr20:55205088-55205304
  hyper
gaagcacgaaaacaaccgaagtttggctttcaaaagaagtgggggctggggagtggtggtgggggtgcccgaggccagatggggccgtaagagctcgcgagtgctccagcctgtcggacaggttgagctagagtttcggagagtgggagggaagaaggaggcggcgagcgggaagaggaagaagacgcaggcagcgctaggcgagctcaggggcgc

SEQ ID NO: 205864 - DNA, 135 bp, Homo sapiens
  chr20:55206463-55206598
  hyper
cgccgccatcaaccccctgcaccagccggcgcccacaggcagccagcagcaggcctggcccggccgccagagccaggagggagcggggctgccctcgcaccacgggcgcccggccggcctactgccccacctctc

SEQ ID NO: 205865 - DNA, 109 bp, Homo sapiens
  chr20:55206774-55206883
  hyper
cctgttcaccctacggccttctgcccccaccccgcactcctctaggctcccccgaacttaagggaattttgtcctctctcccccagaatgtcgacgaccagcacctgtt

SEQ ID NO: 205866 - DNA, 244 bp, Homo sapiens
  chr20:55839359-55839603
  hyper
ccatgttgacacagcgcccgtgggcgtgagtttgctgtcttgacttggttcgggttttcgcagcaagttacacaagtagaatgaaagcggctcaggaaacagcgctatcggggtgtgttatctcggaaaccaaatatttgatcatcagtcccgcagcgcgctggcgctgccggggggttagtttgagcaagtctggagaatgtgcgcgcacatatggagggggagctccccggccctcgctgca

SEQ ID NO: 205867 - DNA, 69 bp, Homo sapiens
  chr20:55840796-55840865
  hyper
tgaggaaatggctatcttgcaggctggccagaggggggccctgggtactgaagacggccttgtaggggt

SEQ ID NO: 205868 - DNA, 117 bp, Homo sapiens
  chr20:55841873-55841990
  hyper
tgcctagagcctggcgggacgtcgcggggatgcggctggaggaatcggagccggccctgccctctcggcactcgcggtccggaccaggaaggcggcccgagcaggacgggtgggctg

SEQ ID NO: 205869 - DNA, 268 bp, Homo sapiens
  chr20:55964189-55964457
  hyper
tggagacatggggccgccggagggggggagggattggtgatccagatacccaagggggcccgggggcggggggcgaaggagtgcgactggacccgcacctgggcaaccgcgtctccagcctccacggccctgtcccgcccccttccgggcaggcagaggccccggggctgccctgccgcctgggcccggcccccgcggcagcagccgagcggccgcacccctttgtggggctgtcgtgccgggaggggcgcgggcgaggcgggcccgg

SEQ ID NO: 205870 - DNA, 145 bp, Homo sapiens
  chr20:55966824-55966969
  hyper
ccgtggtcatcaccgaccgccagacgggcaagtcccgcggctacggcttcgtaagtggcccccgcgcccgggcccgcaccccgccgcacaccttatcgcggcccgggcgccgagtccactccggggcacacgcccagacggcccg

SEQ ID NO: 205871 - DNA, 649 bp, Homo sapiens
  chr20:56284038-56284687
  hyper
cgcacggacatccactcagagcccgagacacagcgccgcgaacactccagacacacgcccggagccccagacacctcgcagaccagacagtgtctcacacgcccctccacccccgcccaaagttgataaagagccggcctaaatgctccatcgcgactgccctcagggaaataaaatggaaacttcacggatccgcccgccccaaccctcccgcgccgtgcgccgccgctgagccccgggtccgagtccgggcgggcggggcgcggacagcgggggccgtgccaggctcgcagcgccgcgggacaaagccgggccggccgccagctgccgcgagccgggagggcgcgcccggggcgcggcgggcgctgcccgggcgcagggcgttcggtccgagggggcgcgcagggcccggacccccgctcgcagctgtgccccgacatagggtccgagcccgatggagtctccggggaggggggcgtggggtcactcactgatctccatgctctggaacaaagagcgtttgcagttgcacgtgcaggagacattgggctgcccggcggcggcggcggcggtgctgttgacccccatcaagcggtgcatggacggcgcggcggcgcggcgcggggcgcggggggctcgggggcggccg

SEQ ID NO: 205872 - DNA, 452 bp, Homo sapiens
  chr20:56285346-56285798
  hyper
tgccagccgcacccgggcgggttgctggtgcgccctcccctcgcccccgtccctggggtccttgacccaggctcttggggctagcctatcttctgaggagcacaaggtccctgggggctcagggaagagaaattggagaaagggggaggaagcccccaagatggatcacccattgcctggtttcgcaggagactgtccgccttcagttctccagcagctcggggatcatggcccactgaacccccaagcgctttcacccgaacccaaggaggacgaccaggaaagacgggaactcgcgtagacacgcccggaagcccttgtcatgtaaatagctgtcggggactggtgtattgtcgccgccccagccggcgggacctggggcgaatccacacccattgtctgctgcccaaggggcctccggctggggggcgcggctgcggagttcaaaaggg

SEQ ID NO: 205873 - DNA, 284 bp, Homo sapiens
  chr20:56784961-56785245
  hyper
ggatggacgcggatggacggcccgcctggatccgcgcgaggcgccactcggggagttgatctgcggtctcgcagtgacacctacaggccgccgtggccgcgcacctgcggcaactgcgttcgacagcgccacctggcgggagccgacgccggcaggcccggagaggattttcttcgtgaatccaagacagaggggtggaaagtgctcaggacctctggggtgtgtcctgtgggccgctggggctggggtgcagcccacgaggaagtgtccgtggggtgtgcgta

SEQ ID NO: 205874 - DNA, 127 bp, Homo sapiens
  chr20:57225466-57225593
  hyper
cctgcacgaaccccgccgacctggcccggggcggcaagtcgaggtgcttagggcgccctgggcccggccaaccgtggaaaacccggcccggggcacgggggggcgcgggggtcgcagggccagggcc

SEQ ID NO: 205875 - DNA, 158 bp, Homo sapiens
  chr20:57415180-57415338
  hyper
ctcagcagtggcgccgagctcgccataattacaacgacctgtgcccgcccataggccgccgggcagccaccgcgctcctctggctctcctgctccatcgcgctcctccgcgcccttgccacctccaacgcccgtgcccagcagcgcgcggctgcccaa

SEQ ID NO: 205876 - DNA, 302 bp, Homo sapiens
  chr20:57415539-57415841
  hyper
accgagcctgagaccgcccccaccactgagcccgagaccgagcctgaagacgatcgcggcccggtggtgcccaagcactccaccttcggccagtccctcacccagcgtctgcacgctctcaagttgcgaagccccgacgcctccccaagtcgcgcgccgcccagcactcaggagccccagagccccagggaaggggaggagctcaagcccgaggacaaagatccaagggaccccgaagagtcgaaggagcccaaggaggagaagcagcggcgtcgctgcaagccaaagaagcccacccgccg

SEQ ID NO: 205877 - DNA, 2076 bp, Homo sapiens
  chr20:57428311-57430387
  hyper
caccgtgttatgggcgtgcgcaactgcctctacggcaataatatgtcaggacaacgcgatatcccccctgaaatcggggaacagcccgagcaaccacctttggaggccccaggggcagctgcccccggtgctgggcctagcccagccgaagagatggagaccgaaccgcctcacaacgagcccatccccgtcgagaatgatggcgaggcctgtggacccccagaggtctccagacccaactttcaggtcctcaacccggcattcagggaagctggagcccatggaagctacagcccacctcctgaggaagcaatgcccttcgaggctgaacagcccagcttgggaggcttctggcctacactggagcagcctggattccccagtggggtccatgcaggccttgaggccttcggcccagcactcatggagcccggagccttcagtggtgccagaccaggcctgggaggatacagccctccaccagaagaagctatgccctttgagtttgaccagcctgcccagagaggctgcagtcaacttctcttacaggtcccagaccttgctccaggaggcccaggtgctgcaggggtccccggagctcctcccgaggagccccaagccctcaggcctgcaaaggctggctccagaggaggctacagccctccccctgaggagactatgccatttgagcttgatggagaaggatttggggacgacagcccacccccggggctttcccgagttatcgcacaagtcgacggcagcagccagttcgcggcagtcgcggcctcgagtgcggtccgcctcactcccgccgcgaacgcgcctcccctctgggtcccaggcgccatcggcagcccatcccaagaggctgtcagacctccttctaacttcacgggcagcagcccctggatggagatctccggacccccgttcgagattggcagcgcccccgctggggtcgacgacactcccgtcaacatggacagccccccaatcgcgcttgacggcccgcccatcaaggtctccggagccccagataagagagagcgagcagagagacccccagttgaggaggaagcagcagagatggaaggagccgctgatgccgcggagggaggaaaagtaccctctccggggtacggatcccctgccgccggggcagcctcagcggataccgctgccagggcagcccctgcagccccagccgatcctgactccggggcaaccccagaagatcccgactccgggacagcaccagccgatcctgactccggggcattcgcagccgatcccgactccggggcagcccctgccgccccagccgatcccgactccggggcggcccctgacgccccagccgatcccgactccggggcggcccctgacgccccagccgatccagatgccggggcggcccctgaggctcccgccgcccctgcggctgctgagacccgggcagcccatgtcgccccagctgcgccagacgcaggggctcccactgccccagccgcttctgccacccgggcagcccaagtccgccgggcggcctctgcagcccctgcctccggggccagacgcaagatccatctcagaccccccagccccgagatccaggctgccgatccgcctactccgcggcctactcgcgcgtctgcctggcggggcaagtccgagagcagccgcggccgccgcgtgtactacgatgaaggggtggccagcagcgacgatgactccagcggagacgagtccgacgatgggacctccggatgcctccgctggtttcagcatcggcgaaatcgccgccgccgaaagccccagcgcaacttactccgcaactttctcgtgcaagccttcgggggctgcttcggtcgatctgagagtccccagcccaaagcctcgcgctctctcaaggtcaagaaggtacccctggcggagaagcgcagacagatgcgcaaagaagccctggagaagcgggcccagaagcgcgcagagaagaaacgcagtaagctcatcgacaaacaactccaggacgaaaagatgggctacatgtgtacgcaccgcctgctgcttcta

SEQ ID NO: 205878 - DNA, 100 bp, Homo sapiens
  chr20:57466877-57466977
  hyper
gacaagcaggtctaccgggccacgcaccgcctgctgctgctgggtaagggcgggcggggggcgccggccccggcccgggggccctcgaagggcgccccgc

SEQ ID NO: 205879 - DNA, 33 bp, Homo sapiens
  chr20:57470653-57470686
  hyper
tttcattttctaggtgctggagaatctggtaaa

SEQ ID NO: 205880 - DNA, 251 bp, Homo sapiens
  chr20:57478608-57478859
  hyper
acatcaaaaacaacctgaaagaggcgattgaagtacgtgctggctccttgtgctgtctgtcttgtagcgccctcccagccagtgctgttccctgaccgctttgctaaatcattttcagaccattgtggccgccatgagcaacctggtgccccccgtggagctggccaaccccgagaaccagttcagagtggactacatcctgagtgtgatgaacgtgcctgactttgacttccctcccgtaagctacaccc

SEQ ID NO: 205881 - DNA, 397 bp, Homo sapiens
  chr20:57484445-57484842
  hyper
gaccaagttccaggtggacaaagtcaacttccagtaagccaactgttacctttttatataacagagatcatggtttcttgacattcaccccagtccctctggaataaccagctgtcctcctccccaccagcatgtttgacgtgggtggccagcgcgatgaacgccgcaagtggatccagtgcttcaacggtaggatgctgtgggcttggctgttcgtaaagaacgctttgcttctgtgttgttagggatcagggtcgctgctcacgctcttggctttgctctctttggttaagatgtgactgccatcatcttcgtggtggccagcagcagctacaacatggtcatccgggaggacaaccagaccaaccgcctgcaggaggctctgaacctcttcaag

SEQ ID NO: 205882 - DNA, 204 bp, Homo sapiens
  chr20:57485751-57485955
  hyper
cagtggagatgggcgtcactactgctaccctcatttcacctgcgctgtggacactgagaacatccgccgtgtgttcaacgactgccgtgacatcattcagcgcatgcaccttcgtcagtacgagctgctctaagaagggaacccccaaatttaattaaagccttaagcacaattaattaaaagtgaaacgtaattgtacaagca

SEQ ID NO: 205883 - DNA, 57 bp, Homo sapiens
  chr20:57797335-57797392
  hyper
gcccgggcgggcggcggggtgggtgcggacccctggctgggcgctcccgagaccccc

SEQ ID NO: 205884 - DNA, 319 bp, Homo sapiens
  chr20:57797935-57798254
  hyper
gagcaggctgaagccgaaggaagggagagcagggttttgatcctagttccttggcttctgcaaatcggctgggaccccccgctgagcaagcgactgtcgtcacggcccccgcaccagacgaccccagcctgtggatgatgtttcactgccctcacataaacgccacccagaaatgcaagagtaagaatgttcacgaagaggggaggcaggagccccagctgataacaggaggaggcaggaagggggccttggaggaggtcagaggggggacattatttcagtttcccaggaccagggtgagagatgggggtgaaagaag

SEQ ID NO: 205885 - DNA, 176 bp, Homo sapiens
  chr20:57875365-57875541
  hyper
cgtgtgcgtgtgtgcgcgcgctctcgtggccttccggcagctggcagctgtcccggcccccaccccaccctaccccaccccacccagccgcgccacgccacgccgcccccgcccctcgctgtcctgggtgcgcctcgggccgctgcgctcctggccagctccccccagcgcctggg

SEQ ID NO: 205886 - DNA, 223 bp, Homo sapiens
  chr20:57875889-57876112
  hyper
ttttcgggctcacagtgacctccgccgcaggtaagcgcacggggcggcgcgcctctcctggcgcgagcgcacacaaaaggacccagggcgggggacccgaggcgcggagaagatgtgcgtcgcggggagcaaactcttgcctgggctctgcactcgtgaagacgcctgggggagggctggggagcagaagcggcgcgcaacgactacccgcacgggctccggg

SEQ ID NO: 205887 - DNA, 254 bp, Homo sapiens
  chr20:57978841-57979095
  hyper
gctgcacccccactctggcgcagcgaagtctgcagatctctgggccccggcgctgccgaagcctcccccacgcgccgcgctcactcgctgcacaacagcgccaccacgaggccgcgggcggaactgccggcagcacagcggtcgcaccccccgggccccccgccggctgtgcggatcccgaatccctgcttggctcggagctgccaggtctaagccgaccctcagagacgcacgcccctgacccactgggcagc

SEQ ID NO: 205888 - DNA, 135 bp, Homo sapiens
  chr20:58090760-58090895
  hyper
aggaatctcctctcccgagtttgcagcccgcgccttctgccgggcgtttggcgcatttcttccagagaatacggatccgaattattccagaggagcctcggccgcagtctctccagccgccgccagagggaaacc

SEQ ID NO: 205889 - DNA, 54 bp, Homo sapiens
  chr20:58180712-58180766
  hyper
ggcagagccgccggcagggagacgaagggcgtgcgccaggacagagcccggttt

SEQ ID NO: 205890 - DNA, 129 bp, Homo sapiens
  chr20:58514400-58514529
  hyper
acacgcgcaccgtaccgctgatgccaaggtccgagcaagtgacacgctccaggcacacgagctgccgctgcaggcgctcgccaaagtcggcggcctcgacgggcggcgggaaatcgggcaccaggcaat

SEQ ID NO: 205891 - DNA, 164 bp, Homo sapiens
  chr20:60552337-60552501
  hyper
acaactcccaacagctgtcatttcccccagctggcatgaaaactaagttctgctccgatggtgaaagctgctcacatatatttaagtacaaagattacgatggcatctttacagcacattctcaaccaaagttaagatgctggaaggagcggattctgctgtgt

SEQ ID NO: 205892 - DNA, 36 bp, Homo sapiens
  chr20:60639843-60639879
  hyper
ccccggcgccggcgccgcagccgccgcgccgggccc

SEQ ID NO: 205893 - DNA, 180 bp, Homo sapiens
  chr20:60757905-60758085
  hyper
ccggcgagaagcgcggctgcagctgagcgctccgcatccctcctgccgttgctcctgcttccgctaccagggacaaggtcgcctctcggtccgtcggcgtgttttctgcacctgcgcactgggcaagccttgggcttccggagccaaaaggccccggaagtggtcggccgcttgcgacgc

SEQ ID NO: 205894 - DNA, 243 bp, Homo sapiens
  chr20:60941671-60941914
  hyper
aagtcccgccctccccgggatcccggacttggggccgccagggactgggcccggcccccctcccgccccggtcaccgcagtcgaactggaccggcgcccagccgcccccgggtccatgccggggactttaattccgccttcccggagggacgcgaagtttcccggccgagacggagcggccgggtcggggtgccttcttgggcccccaaaatgcggaaccagagagtccgcacctggactcgc

SEQ ID NO: 205895 - DNA, 61 bp, Homo sapiens
  chr20:61447609-61447670
  hyper
tggccggacctggcgacccctgagcttctgggaaatggacatggccagcaccgccttcagg

SEQ ID NO: 205896 - DNA, 51 bp, Homo sapiens
  chr20:61447763-61447814
  hyper
gtctgggtttggagtctggtcttagccggtagcaactgacgtggcctgacc

SEQ ID NO: 205897 - DNA, 259 bp, Homo sapiens
  chr20:61492757-61493016
  hyper
cgcccgggcccgccgccgccagcagcgccgagttgaggcgcgtctcgagctcgccgtcagccgccgcctccatgtgcgagcagaggatgtgctgcagctgcgtgtactccacctccgtcatctccaccaggctcaggtcggtggtcgtgaagctcagccccggctcgcccagcgccgcgtccccgccgcccgcgccctcgacggccgcctcgccgcctgccgcgcctgcctccggcggcggctcccgcggtccggggcc

SEQ ID NO: 205898 - DNA, 75 bp, Homo sapiens
  chr20:61560210-61560285
  hyper
taaacagtacacttttgtaatgtgtagacaccagtttctgcaacccccatgccacgcaaagtttcagggaaagtc

SEQ ID NO: 205899 - DNA, 90 bp, Homo sapiens
  chr20:61585209-61585299
  hyper
cagatcacagccctgtcaggcgccaattagaggggagggctgccctcagcgggccctgccccttgctctcttcctcttcccccacccacg

SEQ ID NO: 205900 - DNA, 93 bp, Homo sapiens
  chr20:61733167-61733260
  hyper
gtatgaatgtgtgtggtaggcgacagctgtgtgtgtacgtccgggtgcgtgtgtgcgtgtgtacatgtgagcgtgtgtgcacgtgagttagag

SEQ ID NO: 205901 - DNA, 74 bp, Homo sapiens
  chr20:61734534-61734608
  hyper
ccagccccagcctcgctcagggccccaacccgcagaccatgtaattaagctgcgttctgcagccagggcaaggt

SEQ ID NO: 205902 - DNA, 247 bp, Homo sapiens
  chr20:61810310-61810557
  hyper
gggtgcgtggggcggcgggctagggtgcggcgctgtccgcggtgctggcggcggggcggcccccgcgggacgggagggcggccaagtgcggccctcgcccccacagcgggcgccctggacagttgccacggcaacgtgggaggaggtggggcagggtctgaggtcaccgctaagtctgcccttcctcgggccgctgcgccgcggggcggggcggaggcggcgctcgctgtggccccagagcagcccc

SEQ ID NO: 205903 - DNA, 285 bp, Homo sapiens; identical to SEQ ID NO: 133337
  chr20:61810632-61810917
  hyper

SEQ ID NO: 205904 - DNA, 178 bp, Homo sapiens
  chr20:61847113-61847291
  hyper
ggcccggcctccgcgaccccgggctctgcgttccagccccaggacctcaacccagaccccgcgcctcggccccggccgcggcccctgtaacccggccccgctacctgggtgtccacgctggtggccgacatgcttcatgaacaactagacgcggggccggggcgcccgccggctcggg

SEQ ID NO: 205905 - DNA, 36 bp, Homo sapiens
  chr20:61886327-61886363
  hyper
gaggtcccctccacgggcgggcgggccgaggactca

SEQ ID NO: 205906 - DNA, 291 bp, Homo sapiens
  chr20:62185031-62185322
  hyper
tgggtggcatctgtaatgggcggggccttgctgggcagagcccgcggcgggggaagccgcccctctcctctgtccaggcgctgggtggtccatccgcctggtcaccggccactgcctctctcccaaattcctccgagggattcccgaggagtgcgctcggactggggggttgagcaggaactccctcccagtcacccgaggctcctgcgccccgcccgaagccgggggtgcgtggggagtggtgcgcccgcggaagggctccgggacgggaaccccccttggagcctggct

SEQ ID NO: 205907 - DNA, 393 bp, Homo sapiens
  chr20:62273400-62273793
  hyper
gccccggccccgccccggcccctgcccgctccgagctccgccccggccccgcccccgcaccttctcgcgcagccgctcgcgcagtgcggccaggtgtgcctcgcggatctccttgctgagctccatcttgtagttgagcttctcctccgcctggcggctgaagttgttattctcctccagcgccttgtgcagcacctcgcgctcgtgctcgcgccgctccgccagctgcttcagcacctgcgcctcctgcgtctgtgcggggccggcgggcgcgcgtgagcggcaaccccgggccctgcccggccggactcctccctgctctccgcctcccgcccagcgcccgctcgcctcacctggcgcctccacctgcccaggcctcggtgggcgccggga

SEQ ID NO: 205908 - DNA, 360 bp, Homo sapiens
  chr20:62283922-62284282
  hyper
taccttcgaaggcggtgggtccgccccgcgggaggtggaggggcgggaggggcggagccctctggtctccggagggtttggggatcgcagtcgcccctcccccatccagaccccgcggcgcaaagggcagtggcttttctggccagagcaggtggcgcgggcgtcgcaaagggtggtccccgaggccgcagcggtgtggggggagggcgcggtccccctcactccgggctccgccgtgtctggcccgcccccctccttcagcgccccctccagcccctgtgctgcactggcgcggggagcgccgggttcccggctggggctttggcagagggtcccaccctctccccgcctccccacgaa

SEQ ID NO: 205909 - DNA, 380 bp, Homo sapiens
  chr20:62384603-62384983
  hyper
ggtgtccgatcagacgcctccctggaggcagagaagaaacaaacactgtggagtaatacggacccaaaagtgtgcaggcgaaatgggagatgtgggtgcaactcaaagtcctgggctcttcttgctggacgccggagaagcagccagacccatttaatcaagttcttttcccccaaccctgagacccaacgtcactcagtggcaggaactccacaccaccatctccatggtgcgtgccctggggccaggctcaaaaacctgggggaccctcagcacgcccagtgccgttatgctactcaggcccagataccagcacgtcagacctgggcatgggccactgagagagcccggagcagccacgtccacgggaccctacggga

SEQ ID NO: 205910 - DNA, 63 bp, Homo sapiens
  chr20:62461228-62461291
  hyper
aatatgaaagattctacaatcgatacaattaaaatgcccgtgagttctcggcgcacaggtgtc

SEQ ID NO: 205911 - DNA, 227 bp, Homo sapiens
  chr20:62461639-62461866
  hyper
ttgagttgtcagacaccggctcgcgctcccccgcgaaactgacatgtctatttacagagaaacaaagacgcggctcgcagcggaccccgcttcctccgcgcgccccgtccgccccgcgcgccccgagccctccgcgccccgagccgccccgccccgaggcccctgcgccccggttcggccggcgattaagatggagaccaggccggcgcccggcgtccggggagaca

SEQ ID NO: 205912 - DNA, 339 bp, Homo sapiens
  chr20:62495239-62495578
  hyper
gagcaggctaaggccgtggtggtaagggactcgggcctgtgcaagagtaccaggaagacacctgtgggaggaggtggccgggtgaaggaaggggcagtgggaggagcttccatgcctagggaccagtaccaccccaggctggaagcccagagtggagtcctaggacatcagatcctaaagggcttgaataccgtttaaggcttttcttccgggagcaagtaggagccaaagaagggaagttgcgggacttgttttcgtggggccagttgcctggtggttacgcgcctctcctctgaagtcaggcatcctgttccagagtatcctggttgcgcttcaact

SEQ ID NO: 205913 - DNA, 759 bp, Homo sapiens
  chr20:62600809-62601568
  hyper
ggcctggcgcgcgggtgagcgcggccagggacgcgcacctggggccagcctcgccacccacctgtcacctggggccgggagcgggcgcggggcgcgggcctcggcctggccgggcagggccgatcgcgggcgcggggtgggggggcgaaggcagtgaaccaaaatggcgactttttctggagaaggaggaggcaggaagacggcgccggcgcggggcgcgggggctcgggcgcggcggggggcgggggggctccgggcccggccccctccttggcctgcgcgcagggtcgagatccggggcgcggtgggcgccggggctgcggccagaatgggtccggggcgcggccgggcgcttacctgcggcgcccagcggggctgcggccgggccgggccgggccggggcggggggcgcggggcgcggggcgctgggtccgggcggcgcaggctgcgcgccgcgctgcgcacatgcgcgctcccgcccctcccacctttgacagttttactgcgggggggagggggcgaactctcgcgttattcccgcggccgctccgcgacggggagggggcggggagggggcgggggcgggggcgggggcccggcgctggcctgtggttcccccgctccgcggttccgcccccgtcggccgggcccgcagtccagagtagccggttctgccgtcctggggcgggggacgttttttggacagtggggtaaactgaggcccgataggggcgctaggcactgcccggagtccggcgc

SEQ ID NO: 205914 - DNA, 79 bp, Homo sapiens
  chr20:62601569-62601648
  hyper
cacggattgaggcgacctgattccgccgcatcctggcccgcgcggcgagtgtggtctctgggctcgggaccctgacctc

SEQ ID NO: 205915 - DNA, 40 bp, Homo sapiens
  chr20:62680176-62680216
  hyper
cgggccttgcgcgcctgcttcttgcggcgcggccggtact

SEQ ID NO: 205916 - DNA, 93 bp, Homo sapiens
  chr20:62680443-62680536
  hyper
ccccgccccaccccggcccgagccccccccgccctctcccccttctctgccgccctcccgccgctcacccagcatcttgctgagcaccgcgtt

SEQ ID NO: 205917 - DNA, 222 bp, Homo sapiens
  chr20:62680956-62681178
  hyper
caggccgggagggcggatggcggtggggacggcggtggcctcgggccgggcgggcgcccagatatagcggctcagggccaatcggcggcggggcgggcgggcgggggcgggtcggggccgcctcctccccgggggctccctttcttctcaggccgggcgggattccgctgaggcctcccccgcgcacagcccccccacctcccccgcgacctctcagaagga

SEQ ID NO: 205918 - DNA, 251 bp, Homo sapiens
  chr20:62694767-62695018
  hyper
aaccccgccccgccgagaccccgtcgagcccgccgacccccgttagggccggaagacgacctgaggggcaggacgagacccctccccggcagagactaaccgggacgcaggggagacccccacccgtggccgagacccctgccccgggccagccctgccgttcactcccgcaaccccggcagaggccgcgatcaggcctggaccttgtcccgggagagccacccgctctggactcagacccctccctcgcc

SEQ ID NO: 205919 - DNA, 51 bp, Homo sapiens
  chr20:62695048-62695099
  hyper
cccttaactccagacccccagcctggcccgtcgactccttccttggccctg

SEQ ID NO: 205920 - DNA, 148 bp, Homo sapiens
  chr20:62714866-62715014
  hyper
gggtccggcgtgtgcggaggcgggcagggcccctcccctttccccgcccctaccggggcttgtctgcacctcttggcggtccagggggtccgggatccgcgcgggcttcagctgcggcggcaggaacagctccagccggatggcggcg

SEQ ID NO: 205921 - DNA, 102 bp, Homo sapiens
  chr20:62715069-62715171
  hyper
gggtagctgagcgcgcgccgagccccgccccgccccgccccggccggctccgctcaacgctcccggtgcgccccctctgccctccgaccccctcgcctcacc

SEQ ID NO: 205922 - DNA, 175 bp, Homo sapiens
  chr20:62715621-62715796
  hyper
caccgggccctgcccgcccctcggcagggccccaacgtgcgccccagctcccgcccgctgggctctccgcagtcggttttgagttccgcacccccagcctctgagctttgcccaggcgctctccctctcccaagcgcacgtccccagcagctctgccatcggctgatcctgctca

SEQ ID NO: 205923 - DNA, 67 bp, Homo sapiens
  chr21:15588289-15588356
  hyper
actctcacccactctcccaccgcccagccctacgccaggcgagggagcagtgcggtgggcggtaccc

SEQ ID NO: 205924 - DNA, 87 bp, Homo sapiens
  chr21:15588911-15588998
  hyper
acagcctggtcactgttctccgtcaagtagtaagcacgcctgacatcccccaaaaggagaggggtcgcttttataatgtttcctttt

SEQ ID NO: 205925 - DNA, 164 bp, Homo sapiens
  chr21:16130747-16130911
  hyper
tctagtttttggaaatctagtctactgttgcttgagcttcttggcaggtcatcagtaccaactagaagcgggtaatagattactagggatgccagcggcatttaagcaggacagttttttactggccctaactgctaatcgccagcagtgctccacagatccta

SEQ ID NO: 205926 - DNA, 217 bp, Homo sapiens
  chr21:16436461-16436678
  hyper
gcccctggctcctggtaaaatgatggctgaggcctcgggtccgtgagcctcgccatcgggaggggaccgcgagtgcgggcagagcggcccggggtcgggtgggggccgggcgagctgtcccttttcctattcactttcccagccgggtatccagcgagcaaggagcagggaggcacccaggcgaaaggcgccgcccaggatccggctggacagcagg

SEQ ID NO: 205927 - DNA, 1160 bp, Homo sapiens
  chr21:18885248-18886408
  hyper
cggcgctcgcagcccggcccgggccgctgccggaagtgacgcgagttcacctgccgagcgggggctgggaggaggggcggagggtgcagaggtgccgccgccgccgcgagccagtcgggagcgcgcgaggcgcggggagcctgggaccaggagcgagagccgcctacctgcagccgccgcccacggcacggcagccaccatggcgctcctgctgtgcttcgtgctcctgtgcggagtagtgggtgagtaggggccatggggtcctcagcacccgcccagcccgggggcgctcgctgcccgcggccacccaggaacaatggggcgtgggggagggggcgggcgcgatttgggggcgctgctgcaggggcggcggggcgggcagaattgcacaggggcgcttttgctgggccgggcgctcctggagccgtcccgtagggagccgcgcagggcgcgcggagtgcccggggacggagccctcggcggggggtggaggcggaggggctcgggcgcggcgtgtcgggtgcgcctcgcagctctcccatagcattctctgccccggtgcgggcttgcctttctttgctctcgccgtctcccttgtcagccttcgtgtcggttctctccagcgttacccgatttcaaaaaccttgggcggcgagttttcaggtgtcgagtcgcccaggcggggaggctgaattgcaaacgccattattcaatggacatggagctgcccggtgcctcggatcggccaggctacctctaggaaagaggcgctgagcgaacgccagcctggacggtgttagtctcctggaagcagctcgcccaggcaggagctgctaaccagacgcgcattgtgaaggagaccgtggaaaatcaaaagtgggttcctgcaaaaatgtagcattggtttctgcagtccttgggcgaagtgcaaaggagaattcagtgacctcgtttttgagtttgtaatgagtcgttcattttggagataagacgggctgagttgtacagggtaattgctagaggatttgccaagtgcgtttgtcgactgctcctttctctgggaggggaaaaaaggcatgtgaaaaatgcgtggaccattaggaggcgtaatcattttgacactttaaaaaacggattttccatgtcggtgttttaaccaa

SEQ ID NO: 205928 - DNA, 319 bp, Homo sapiens
  chr21:18983992-18984311
  hyper
ccattttaaatatcgcacggtgacgtcatcctgggacctcgtcaccgcggcggctgctcctcaagttctactttgttccacaaggctcctctgctcacggctgcgtggataaaacccaaagggaatccagaatcaagctcggcctcgcaggagtttataacttttgtacttttccctcccttgtaacgaaaagctaatcgcaaacgtttctaggaacacatttttctcctgatagacgttcccaaggtggagggcgcgagaagactggcccgtggggtgaggagccccggcccgacctcagcggcgccacaaagccatg

SEQ ID NO: 205929 - DNA, 88 bp, Homo sapiens
  chr21:22370943-22371031
  hyper
tgtggcgctttattgcatttactttccctcccccttccacccggccaagagaggcaaagagggaggcgcaggaagaatgaaatgaaag

SEQ ID NO: 205930 - DNA, 37 bp, Homo sapiens
  chr21:26934818-26934855
  hyper
ggaaggaggggtgttcgaaacctaatacttgagcttc

SEQ ID NO: 205931 - DNA, 122 bp, Homo sapiens
  chr21:27011487-27011609
  hyper
ccatctcctcagagcgccaccccctcagcttcgcccgttgggcagaattttccaaatatctccacccctaggctgaaaagccagaaagaagttttgagccaacgaggggaagaaaggagttg

SEQ ID NO: 205932 - DNA, 133 bp, Homo sapiens
  chr21:27011639-27011772
  hyper
atacatccccgtccccgagacacccaatccccccacccccagcctgcccgcgcctcccgcccccagctcctcgccctggggacagctggcagccccgcgcggaccagacacaaagccgatcaatcccggaggc

SEQ ID NO: 205933 - DNA, 167 bp, Homo sapiens
  chr21:27012725-27012892
  hyper
agaattacttttatcctctccacctgcacatctacattcacttagagaagtctggtctggggactctagccagctgctctgtcctcaggggacatccaacgggacgattgttagaaagattcagaagccacatgatccagtagctggggagacgtcccaaagccaat

SEQ ID NO: 205934 - DNA, 106 bp, Homo sapiens
  chr21:27541703-27541809
  hyper
aactaaaccagagtccccagagctgccagggaagaggccgcgccttaatcagacaaacgcctccttggatgcacaggacagagcccgtgcctccccaccatccgcc

SEQ ID NO: 205935 - DNA, 1562 bp, Homo sapiens
  chr21:27541871-27543433
  hyper
agcccagcacagaattaagcctcggaggtgatccgagggtgggaagcagaggggccccgaggctccgccagaagccccggcagcgtctctgccccctcccaggcggacgcgcagccccgggaagggagccgggcgggagcctcggtggcgcactgagactaacgcggctcggcccacggcgagggcggggtgtcgcggcttttgttcccgcggaccttctgcctctcagacagagcttagggtgcgagcgaactcccgggacgtccagacttggggaaggcgcggggtggctatgggtctccgacccctcccatttctcgcaagttacacaaaagggagacgcggacatgcacaaagtttgcctgtggaaggcggtgcgcgaccccgacgccggctcgggctagggtcgcacccaggctgccgccgccagcagccgcgaaaagaggttggagcaaggaagggggatgggggtgagagaggaaggtgaaacgaggcggagaacgcagggaaaagcgaggggctcctagcttcctgggctgtcccgactcctcctcctcctccccagggcccaagagaaaggaaagggcaacgattcaagagcgaaggactggctttagggacgctgcgttttcggttttccccacgtgctccttcccccttcccccctgtctgaatgtctctcgcctcccccgacccccgcttccaaggcagggactaagtcggggtctgggctcagggtcgccccctacccttctcgccccgggctggcgcggaaccagggagaccagcgcctcgcccgctccctctcagcgggccggagcgcgactccctggggcagggctgggccgaaagcggggatgcgctggacgtccgcaagcgggggcggagaggagaggggtcccattgacggacccccggcttctctgcattaaagacttgggttaaggtcttggggggtatcgcgtccccaccgtgcagcctccccccgccttccgaggcgcggcacccacctccagcgcccgagccgtccaggcggccagcaggagcagtgccaaaccgggcagcatcgcgaccctgcgcggggcaccgagtgcgctgctgtgcgagtgggatccgccgcgtccttgctctgcccgcgccgccaccgccgccgtctcccggggcccccgcgcacgctcctccgcgtgctctcgcctaccgctgccgaggaaactgacggagcccgagcgcggcggcggggctcagagccaggcgagtcagctgatccggcccaccccgctcggcacccgagagagacccctagcggcgccgccggggaactgcgcccgctcgcgccgggaggggccctcgcgccccgcgcccacaggtgcacgcgcccttggcgccgcctgcaccccacgcgccccctccgctccccggccgacggcccacctgggcttcgtgaacagtgggagggagagtctggggccaggagagggacggtgcaggatcagggaaaggtgagtcctaggacgctgaggctctagaaaagtcgagagcgctcctgctcgtccccgtgagct

SEQ ID NO: 205936 - DNA, 160 bp, Homo sapiens
  chr21:27543508-27543668
  hyper
ttcgttttttctctcggtttggagaggtggggcaggcgtttctggaagagaatgagaacgagtgaagcttaaaggaaataggattttctttgcttgttgagacagcaaaacctcattttttaacccccaacgtcaaaagcaggcacgagcaacctggaat

SEQ ID NO: 205937 - DNA, 104 bp, Homo sapiens
  chr21:28215838-28215942
  hyper
gtagcaggaaggaccggcagtgactttcaacagtgcttgagagcagaattatggccgcgagagggagtgcaaactgggaggcggggcaaacccgggaaagacct

SEQ ID NO: 205938 - DNA, 126 bp, Homo sapiens
  chr21:28215997-28216123
  hyper
tataagggggaaaggggacagaagtctgcagaacagagatcctagcgtagccgctcagggtaccttcccaggtcaccattgctcctctgccctctccacatccgccctcccgtgagcgcaggatgc

SEQ ID NO: 205939 - DNA, 155 bp, Homo sapiens
  chr21:28217933-28218088
  hyper
ggaaggggcgctgtgaccagcactttgtactgctggggccgctccagggagaagactctcccttccaccgcttttctccctcgccggtttcctggaccacccttcctccccaccgcccggttgcggtaactcagttaccgcgctgggctgcggtt

SEQ ID NO: 205940 - DNA, 150 bp, Homo sapiens
  chr21:28218402-28218552
  hyper
tgtttgcttatgccttcaccctccaccaacccccaccccgcacgccacctcttcaccagagacgactttgtgagggcccggtttcacatttctggaatgggtgatctgggacgcggctcaattccctagagcataaggagggaattgcgc

SEQ ID NO: 205941 - DNA, 44 bp, Homo sapiens
  chr21:28218718-28218762
  hyper
agaaggaaatcggcttccttcccggacccctccttcctcttcct

SEQ ID NO: 205942 - DNA, 83 bp, Homo sapiens
  chr21:28338753-28338836
  hyper
gggtatttgttatttgctatgaagttaacggggcgggggatggggacacacacacacttgcttgcaggattgagtcaagtgtc

SEQ ID NO: 205943 - DNA, 139 bp, Homo sapiens
  chr21:28338887-28339026
  hyper
gcgtgcgaacttttctttgttgcttgggaaaatgtttggattcgtgctccagaaagaggtggggtggggggggggggaaagaaaagattaaaaaaaaaaagtcggatagtggagattcagcaaatacgggaaaaggaaa

SEQ ID NO: 205944 - DNA, 76 bp, Homo sapiens
  chr21:28339086-28339162
  hyper
aaaggtaccgcgcaccgggctggcaactggtgcgcgcagcctcccgcccccgcgctgcgctggacaagccggctgt

SEQ ID NO: 205945 - DNA, 350 bp, Homo sapiens
  chr21:28339501-28339851
  hyper
ggagagcttcccccaccactcccacccttcccagtccgcgcctaatcagatgggggagggcaaaagaggagggtgatcgaggaaagggagacgaagtaggaggaagggactgggacccggcgaggtggtaggaggggagaggggaaaataaaaagtaatggggcaagaaaaacagatttccttggccacttttaaagccacagcggctccgggtctgtctgatatttcacaaccaattggggttggctaaccttggcttacctcatctcctgaacgggtgttttggttaaagttattgagacgtttcaagtctctccctgcctccttcttgcctgcttttctcgccctcg

SEQ ID NO: 205946 - DNA, 115 bp, Homo sapiens
  chr21:30365298-30365413
  hyper
gtccctgaccatccgccaccggagacgtcacagctaaagccacgcctgtctgagtgatgtcattcctggccaataggaagccaagcattggacccgtggcgccaaatcctgtcct

SEQ ID NO: 205947 - DNA, 188 bp, Homo sapiens
  chr21:30396784-30396972
  hyper
atttatataacttcgtggttatgtcagagacgagaaaacccattgacaaccaaacccctaaacccgaacatccggcgcaagccgcacgcaggcgcagatttactagcgtcagagccgatggtcccgggaggtgggggtggggtggtggtggcctagccacttcccataatgccgcgttccggaagtta

SEQ ID NO: 205948 - DNA, 132 bp, Homo sapiens
  chr21:31312181-31312313
  hyper
tgcaaaagtcgggggataggcacagacagaggagggaaaagggggaaagaagactaacgaagaaggagagagggtacagggtgagttggtgcaggggctctgagcaagcctgatgagctccagcaggttaac

SEQ ID NO: 205949 - DNA, 154 bp, Homo sapiens
  chr21:31312503-31312657
  hyper
ccctcaactttgcgctctgctgctgggaagtcgatcgagtgttgcattctcaagacagatcaaatctaaactattggtccgagcagagaaagcctctgctgtccgctgtgagtggcaaggaagccttcttggtaatgtccgtgtgcacctgtta

SEQ ID NO: 205950 - DNA, 187 bp, Homo sapiens
  chr21:32716048-32716235
  hyper
cagcgggacagccccgggcaggacgcatcctgggtgggtgacgtgatcccgcagtctcctccccgaccccatatcccatacaatgatcctcgcttacagaagtcaagggggaaagatgacgctttcaaagcccgaatctctttaccctggagccagaaccagcgtcgccgccgtcccctgcagctca

SEQ ID NO: 205951 - DNA, 89 bp, Homo sapiens; identical to SEQ ID NO: 13211
  chr21:32931770-32931859
  hyper

SEQ ID NO: 205952 - DNA, 154 bp, Homo sapiens
  chr21:32932326-32932480
  hyper
aaggttgtggagaacgcggaaacggagacgctggcggtacagcctcgagcgaaacctttccctacacgaggccggagcttcctcctctcctgaagagctctagacttccccatttacaacaaaggctgggatgtatgttccttacaccttgatt

SEQ ID NO: 205953 - DNA, 45 bp, Homo sapiens
  chr21:33058221-33058266
  hyper
atcaaagctgtgggccgggtgtggtggctcacacctgtaatccca

SEQ ID NO: 205954 - DNA, 194 bp, Homo sapiens
  chr21:33244727-33244921
  hyper
cagaacaaaagcatcgaagagaggcgagcgccggtccacctcctgcaatcacaggcatcatttcaatggaaggcaaagaaggtgtaagctacaagcagaggcagcaaacgccctggttcctacattgctgctgctactattactgctgtggctgcgcctcctccaacacagccaaccaggctgcgtgcgagccc

SEQ ID NO: 205955 - DNA, 290 bp, Homo sapiens
  chr21:33245047-33245337
  hyper
ggagttcgagagccttcccccttccccccgccccgggtgggtgcggccagtgggggatttcaccgccgaaaggtccagaaaacccaagcccagaatccgggcaagaggcgcagccggaggcggcccgacctgggcggcccgggagcgcgcgcctccgaggccgcgcaggttctccctgtctggcgctcaggtggcttctccgtccactccgccgctcccctccccgggccctcccctctccagcgagggtcgagtttgactgtggcgcgcggggaaggaggggctactag

SEQ ID NO: 205956 - DNA, 194 bp, Homo sapiens
  chr21:33245489-33245683
  hyper
ggagcggccgcccagcgcacggctaggagcgatcgcgggagcccgacccaagcccgtgcgggccagacggcggcggcgaggcggaggctgcggaggcacccgggctcccggacccaggcacccggaccccgggacccaggcgccgccggaccgcgccccaccccgcgcgcccgagcagggcgactgtcattagc

SEQ ID NO: 205957 - DNA, 75 bp, Homo sapiens
  chr21:33245718-33245793
  hyper
ctgaaaggggcccgggcgaccctaagaggaagaacttttgggggcggggtccccggtcccgcgtcccctgggcag

SEQ ID NO: 205958 - DNA, 132 bp, Homo sapiens
  chr21:33245877-33246009
  hyper
ggctgggcccagggcggcggcgggagaagccggggaagccgaagagcctggggaggaggagctgcgagcgcgggagacgagcaggagccgcgcgggccgcggcgagcgcgatgccggcggcggcgggggacg

SEQ ID NO: 205959 - DNA, 127 bp, Homo sapiens
  chr21:33246414-33246541
  hyper
agcctttcccgaaggcggcctgcggtccgctgcccgggggttgggggcttgggaggggacggccttgccccgggaagcgtcccgcgcggccgttctgctcgtggaagggcgccgcctggcgacacta

SEQ ID NO: 205960 - DNA, 90 bp, Homo sapiens
  chr21:33783941-33784031
  hyper
agtgcgtccggccccgccctgggcctcattatctacgtttccgcgtcacgcccgccgcgaacttggcaggccctcccgccgggttcggga

SEQ ID NO: 205961 - DNA, 832 bp, Homo sapiens
  chr21:33784080-33784912
  hyper
atccatagggtttgggtcgctgggcgccaggtacccgcacccggcaagcagccacggagcccctcgcgcacttgtcctcgatacccttgagttggggctacgcaggccactcctaggccactggctgggcgtccgaacgtgggtcaccccgcgcacagtctagaggttcagaaagatgctgtggcccactttaaaacaaagcccaattattagcgctcggcggctgtttgcgccggtgcagtgtcagatcccccagcgctgcggacaaccagcacccaaaggaagccgagctggagctaaagatcccggctccggagccatctgaccggttttgagacctccagctcgtcgccgtcctggctgcgagagcttgggcacggcgccggggctcagtctcctcttctgtggaatggcgataactgtatgtgccgggtgactgcacgtggcgcgcggcgggtggcggggatggcagcggtgcgatcccacgcctccaggaccccaccttcctgcggcccccgatcggccccgccccgggggcgccccagctgcacgcgcggcgctggctccaaagtgcgtcacgggcaccggccgcgctccttctgccgccagggcgaggctggcacccggccagcgcgggcagggccacgggtgcccggctgtttcccgggtgtggaaggcgctcaaggtgcgcggcccggggcgcgctactgggggcgccctccgcggtgggcagcgcgccagggatcggcctgggcagccgcggggcgcgcgaaggctgcgctttccctacggcccccctcgcttcctccggcacggcggcaacggagatttc

SEQ ID NO: 205962 - DNA, 323 bp, Homo sapiens
  chr21:33784965-33785288
  hyper
ctccgccccctcccctttgctggggcgcctgggctggcccgcgcaggggaggaggctctggcagcctgggcagggaggcggcggggggccgcggagccgctggccatcgattctccccgccatgtgacgccgtccttagccctgcgacccccagcgcgtcccgggcctgcgcctccgccccgccgcgcagcgcacgatgcttctgccgggacgcgcacgccaaccgccgacgccccagcccgtgcagcatcccggcctccgccggcaggtagagccgccggggcagctcctgcgcctcttctactgcactgtcctggtctgct

SEQ ID NO: 205963 - DNA, 49 bp, Homo sapiens
  chr21:33785325-33785374
  hyper
gagcgccctccctggctgtgtgcccccggcaccgcggagcgcccaggtg

SEQ ID NO: 205964 - DNA, 51 bp, Homo sapiens
  chr21:34100892-34100943
  hyper
ctcacagggttctatcgaagagtgcttaggtgtatacgatggagagtggga

SEQ ID NO: 205965 - DNA, 298 bp, Homo sapiens
  chr21:34602440-34602738
  hyper
cgagcgtcgggtcccagagccgggcgcggctggggcccgaggctagcatctctcgggagccgcaaggcgagagctgcaaaggtaacgcagcgtggcggggtcgcgggagcggagcgcgtggccagctgactggagggaaaacgccgcctccctgcagcggttcccggaatcccctccggttccctctcgctctccccgactcctcctcctcctcctgccctccctctgcgtcttgagtatgcggctagtgcgcccttcctctctcccggggccgcacctgcgaccccaggacccctcc

SEQ ID NO: 205966 - DNA, 627 bp, Homo sapiens; identical to SEQ ID NO: 57604
  chr21:34602763-34603390
  hyper

SEQ ID NO: 205967 - DNA, 360 bp, Homo sapiens
  chr21:34776292-34776652
  hyper
cgtgaagccggtaacctcggctgcgccacctcccccacccgcgcgcccgcgccgggaaagccagcgtggccccagtctccgaatttctcggaatgaacaacagcaaattgaatccagggctccggcgggggccgcctttgctggccactggttctgcagcctggcgagactgcgcttagtccccgcctggagtgcctcccgaaggcctggctggaagctagactcagtccctttgtagtagcagcggtggagcagggaccagcgtcttggacgggtgacccagactcaattccgactttggccgagggcatgtttgacactgggtgtgaaatctagacagttcccgcggtcatagagatg

SEQ ID NO: 205968 - DNA, 219 bp, Homo sapiens
  chr21:34915084-34915303
  hyper
ctgacaacttatgcggacacggtcgcctcaagagagacggctcctgtaatggcgcctgcgtcagacactaacatggcggacatagtcgtgcgcggcgcaaacgtcagcacctctaccccagccgctcagaaacagcagaggagagcagggccgtgctcactgattggtccctcggtggagcgggccggaccgggcattccctttggagccaatcaggaa

SEQ ID NO: 205969 - DNA, 57 bp, Homo sapiens
  chr21:35013432-35013489
  hyper
agaaacgcagatgttcggccccgacccagacctatcccaaggcgatgcttacatctc

SEQ ID NO: 205970 - DNA, 50 bp, Homo sapiens
  chr21:35747796-35747846
  hyper
ttccccggcaggacggtagaagtcgtggtttgtgcgcggccaggcgctgg

SEQ ID NO: 205971 - DNA, 247 bp, Homo sapiens
  chr21:35986732-35986979
  hyper
agagcgcagggggcggcggcgctgccccaccttggggagcgaattcacccccctagtcgcaccagcctgggcgcacacgggggccggggcgagcctgtgggactctgcagtgagctccgcgcgccccgggggtgctaggggaccgggaccctcggggcgccgtccccacgccccagccctgacgggtccgcggccgagcagcccgggggacgtcgctgcctccccgccccgcgcgcggccgggactg

SEQ ID NO: 205972 - DNA, 1781 bp, Homo sapiens
  chr21:36160097-36161878
  hyper
tatggtgtatgtacttgtcaaactgtttatttgccattcacactgattgtaacactggatttacagaagaaactgtggtacaaagagaggaaggctctggtggctcctgaacagcagcagtccagctgccctgctcaggctgggcacgacgaatgctcccaggagaggggaggcggcccacccgactgtgtaccgtggactgtggacagtgcagtgcctgctctcctgtgctatctagaaacaccttggagagagggttctgggatattctctcatgtcatctggctgaagacaccagcttgacagttcccctttaagaagcattccatacgtttgtaccagggagaaagaagcccacgcacgaattttcaggatgttttgtgaccaaacccaataactgccacacaaatagaccctaggtgggggctggcttaaataggaccacatttcccgttgctttttcagtagatgtgttataccgtcatttcaatttgaaagtttatttttttccattgatttttatacatccagaataacacaaataaccaacagttctttttctttttttgcacattcatttcccctagaacaaaaaaagtgaacttaaaaaaaattggaaccatgctattagctgtttacaaaagtgaataagaagtagctcattttaaagtctaaaataaacaaagtagaaagaagcatttttttccctacagtatttagcaaacctaagaaaaagtccttagaaacacacacaaaaaaattgaaaaaaagttataggcattaacaatattttataatgaagcttaaaatctatttacatacataaatacaattaactttgttgatgcaactcttctggaaggaaaaaaagagccaaatgatcagcctcatcaatactgacctggctaaaaacaaaattcccaacaaacacacaaaaatcccaaaacaaatgtatacgctacggtaaacaaaaaggcattttgttcagatgtaaaatatgttttgtgagattattgtcaaacaaattttcatgtataaaagacccaaacatgtcattccccccaaaaataaaaaccaacaaaaataaaaatcatcaggacggaatgtcccaaagaaacaggtatttcaaggcagaaatctgcaatcctaaattgcaggacatttgagtggaaccattcatttcctttctaatcagagcatttctgtttatctgcacagaaacccaaggcagcagaaaggctgtctatttactcactgattgtgatttgcccaggaaagtttgctggtttggacagcaagcagatccaatatggttggcaatgtctctgttctgctggaagaaacccataaacaggagaaaggctgacaaaccatgttcctttatgtgaagggggaagaactggaccttcttgtgttctgaaatttggtactgggtgggggtatgtgctatctgcttaagagaacacaggaaaaggaggagggagaaagtggggtttggaagatagaggaagagagaaaaaaagggagatattggggggaagagagggagggaaatgtattttcagatagtgagaaaaagaaagaactgaaatatgtatccatgttgaaatcataaatagggacatgagtaagcagtagaaatggcttattcaatacttctcctggaccagacacatgcagttattacatgattggcttaagggtctcattgataccttaactttcctgagggcaatgaataaaaagataccttaatctacctgaagtcaatgaatgcaatt

SEQ ID NO: 205973 - DNA, 3126 bp, Homo sapiens
  chr21:36161932-36165058
  hyper
tgagacctatcgccaaaacaactacagtttgattttttttgaaacaattaaatactatatatgctggtaagagtctgtgaaactctaaatgaccaatccagtgagcctacaatagtgacaagccccctccacacatggctttgagagtaaaggttcaatgtaaaagattatctaatcagagcatgaggctggttttgagttggaatatcttcagttaacagaattaaactgaaaaacataattttttccttcatttttctccagcatttttgcaggtcagacatggtaacatgtgctgaaaaaaaacatttacgtttaatttgggggaaatgggctaatggtgcttttcagaaattaaatttttacatttgctgacattttatggtaatttagctgcaaaaatgtaatacggaataatatatgaaactgagttgtggagggaatcctgtcaaaaatgaaagtgaatatattctgagtttgtccgagatctgctatagctcttctctagataagaacgacctgacaacataagctgctttactctttaactcttaccaaagtgctactgcatgtgtgtaaaacaaataatcaatatatatataagaaaactcaaaaacaagttgttttaaataagtccagctgtttttgctgcctgcagccaaagatttgcctaatttgaatgcttaaatttataaaataaaaatcaaacactgttctgaagtcctgctttcaaatactcttcagagttgacctgaaatcgtttcaacgaattttaagaggtacgttaaataaccaccagatcatttggagcacacatgtgtcaaaatcagcagttagtatttatgagttgtacaacaactgcattctgaccaaatcctccaataaaaatagtgccataaaatttacagcgacattggatacctttgaattgtagccacggacagtagtgacatgaatctttcctgtcacactggtgcacaggtaaaagcccatataccccatagggtagggtctcagcctggtgaaagcaacacaaagatgttgttgagtgagcagcacaggacagggggtctcgcacaggtgggaccatgttttcccacttgtctccactgaggcacacagaggcaaattgactcctcgaggcctgcttctggtgggcccttaaattgctataatcgtaacccctaaattcattgatttggttcctatgtaaatgtggctcccctacacagtttactttggctgtgttctgttacacagcatctgtgaaattatcagatgaccttggggtgagcaaatccctgggcagaaatcaaatcctctccaaagatgtaattattggcacctgcctcaaccctctggaactagattgaccttctctgttttaaggaggaagttagatatgagacccttgttgagcctggcagaaaattccatacttctgatccttggagtgaccctcagtgtctaaaaatcctattaaaaacgttgctgcgtgagctactcacttgtttgattaacatgaaagggagtttaatgtaaacaatacttctggataaccaagcgatcacattactcattctttttttctagccttcttcaatgtgatacatttaactttggctactatcaagaacaaaagaaaatgtagtacttgatatttttcttaatataagtacatttaaataattaaaaaattatcaacacataaatgtctgaacatcaagatacataaatatctggggattccttgtgggaatacagtagttaaaaatgacccaaagctgtagctgtttctcaaaaaaacaaaacaaaacaaaaaaaaacaactacccaaaagtccaaaagaaaagttaaataaaacttaaagaaaagggaatcatatttctttccatggtcaaagcaagaaagaagcaagctcaatttatatatatttatataaacgtatataaaaataaaaaccacccaaatgcaaatacgcattttgcaattgataaggtgcggaaaaattaaaaataagaattagatgccaaacagggcgagttgcatccctcctctccccccaccccaaccaaaattccacactctttggaataaacaacttggttaaaaagttaagtcaagggtataaaatctttctttttattcacagcattgctaaatcagaagcattcacagtttccctccgggaatcttcctgtttgctttccagcgcgtcccctgggtgctggggccggcggacaccctcgaggtgcgtcgcctcggacacctccgcgagggccggggcgccagcagacggcggcggcgtgggcttctgggcgcaggaggctgcgcgggcctgacctacagcgagatcctggccgtcgggcgccctcggccccaggacggtggccgggcccagggcccgggatcccggcgggcttgtcgcgaacaggaggcccgcgcgcccggaggcgaaggcggcggcccgcggggcccagccgggccaggcctggcgcctcagtagggcctccacacggcctcctccaggcgcgcggagggcgccatgttggtgggggagttgctgtggctgccctcggcctccaccacgtcgctctggttcgggaggctggggttgagcagcgcggagccggtggaggcgttggtgcagggcggcaggatgcgcggcggcgagcgctcgccgcccaccatggagaactggtaggagccggccgaggcgccgtagtacaggtggtaggagggcgagctggcttggaacgggcctccctgcgcttgcgacgagccggggtagggcggcggcaggtaggtgtggtagcgcgtggccgagcccatggccgacatgccgatgccgatgcccgaggtgaccggcgtcggggagtaggtgaaggcgcctggatagtgcatgcgggggtcggagatggagggcagcgcggggaactggcgcgggtcgctgaacgctgtcaggtcgggtgccgctgcagggcgggcaagagaacggagcggaagtgagtaggaggttgcggaggccacagctcttccctctgccccagggggctacccaggatgataccgcctaggaggatgggaagccacccaggatgctactgctggggaggacggggacca

SEQ ID NO: 205974 - DNA, 162 bp, Homo sapiens
  chr21:36171597-36171759
  hyper
ttgagagtcgactggaaagttctgcagagagggttgtcatgccgctggcacgtccaggtgaaatgggcgttgctgggtgcacagaaggagaggcaatggatcccaggtattggtaggactgatcgtaggaccacggtggggatggttggatctgccttgtat

SEQ ID NO: 205975 - DNA, 203 bp, Homo sapiens
  chr21:36206695-36206898
  hyper
ctggtacttaccctgcatctgactctgaggctgagggttaaaggcagtggagtggttcagggaggcacgagggttgggcgtgggggctgggtggtgtgggctgaccctcatggctgtgcgccgcagctgctccagttcactgagccgctcggaaaaggacaagctcccgggcttggtctgatcatctagtttctgccgatgtc

SEQ ID NO: 205976 - DNA, 105 bp, Homo sapiens
  chr21:36231770-36231875
  hyper
ttcgaggttctcggggcccatccactgtgattttgatggctctgtggtaggtggcgacttgcggtgggtttgtgaagacagtgatggtcagagtgaagcttttcc

SEQ ID NO: 205977 - DNA, 179 bp, Homo sapiens
  chr21:36252845-36253024
  hyper
taacgtacctcttccacttcgaccgacaaacctgaggtcattaaatcttgcaacctggttcttcatggctgcggtagcatttctcagctcagccgagtagttttcatcattgccagccatcacagtgaccagagtgccatctggaacatcccctagggccaccacctaaacaccagtca

SEQ ID NO: 205978 - DNA, 266 bp, Homo sapiens
  chr21:36259127-36259393
  hyper
ccgggccagtaccttgaaagcgatgggcagggtcttgttgcagcgccagtgcgtaggcagcacggagcagaggaagttggggctgtcggtgcgcaccagctcgcccgggtggtcggccagcacctccaccatgctgcggtcgccgctcctcagcttgccggccagggcagcgccggcgtccggggcgcccagcggcaacgcctcgctcatcttgcctgggctcagcgcggtggaaggcggcgtgaagcggcggctcgtgctggcat

SEQ ID NO: 205979 - DNA, 169 bp, Homo sapiens
  chr21:36260355-36260524
  hyper
tgggagttgagcagccgcagagtcacacacatgcaaacacgcactcttcggaaggcagccactgtctacatcagctgggtgactcagccctgactcgggcagcagcgagacgatactcctccaccgtcgcccagcacccgccggttagctgctccgaggcacgaacacc

SEQ ID NO: 205980 - DNA, 39 bp, Homo sapiens
  chr21:36265221-36265260
  hyper
cgtggacgtctctagaaggattcattccaagtatgcatt

SEQ ID NO: 205981 - DNA, 117 bp, Homo sapiens
  chr21:36421138-36421255
  hyper
ctctcatgaagcactgtgggtacgaaggaaatgactcaaatatgctgtctgaagccatcgcttcctcctgaaaatgcaccctcttctgaaggcgggggactcaatgatttcttttac

SEQ ID NO: 205982 - DNA, 131 bp, Homo sapiens
  chr21:36421464-36421595
  hyper
cacgctgcgaaaccctgtggtttgcattcagtgtgattcgtcctgcctgctgaccactatgctgggttcagacttctgacactgccaggctacccaacttgtggttctgtggttgtttatgaggcccaaag

SEQ ID NO: 205983 - DNA, 373 bp, Homo sapiens
  chr21:37528252-37528625
  hyper
caggggtcccaagcccgccgcgccccctgcgccccaaacgtgtgtggagggcttggacgtggtccagagggaaaagatggggtgaaccaggtgccgcgcacccttcgaggagcccccgcttctccgtttctgtgagtgactccaaagcacctccgagggccgacacacgcgcggacgaccttgggcgggcactgaccaatgtccccttccactcggttgtgtcgggggtccccaggtgaggcgcgaacgccgccccgctcacctgtacgaggcctttcccggagcagcccggctacgaagcgacacccatggcggagaagctaaggaagactcccgctccctcacaccgcggctgaggcgactgaaccgcccc

SEQ ID NO: 205984 - DNA, 139 bp, Homo sapiens
  chr21:37692217-37692356
  hyper
gtataccgcatctcgcgccaggcttcaaactctagatccccgagtctcgagctccagctgggtgtcgagacgggtacgggccggccgcgcctcgcgcatgcgccctaggcccgcagggccccgcgctggaagctcagct

SEQ ID NO: 205985 - DNA, 241 bp, Homo sapiens
  chr21:37757666-37757907
  hyper
cgggggcggggcctgcggcgcgcgggaagcggcgcgcgctgcgcgggaggtgacggtgcctctgactgtccgggtccctccaggtacggcttccctggcccgggcagctccgcggctcttttggtcgcgtcggtccgggccagaggccctcgccgagggcgggcccctgggccccgggatagctccggagcggcgcgcgttggggcggcggggccccgtccacccccggccccgcgcggcc

SEQ ID NO: 205986 - DNA, 167 bp, Homo sapiens
  chr21:38064290-38064457
  hyper
gtgtcactgaacggcgctcctcccacggcgacacctccgtgctctttttgcttgtatttattcaaaaattagatttgtcaataacgcagggcctggcaaataggaggacctctccaaaattaaatgcaagattgaacataggtctctcacatcataataaagcggtt

SEQ ID NO: 205987 - DNA, 283 bp, Homo sapiens
  chr21:38064683-38064966
  hyper
gtctttgtctatactcgcaggatgggaaggacgatggtgcaatcaccgagattattttgttttcgtcctctaaaaaatgaagaggggactggagtcgggaccaaaattattggcagaccgcacggtttgcagtcaccctgaagttaccagcagccgatgctgtgtccagggaaaatattcttgagctggaaaacgtgctaatttaaagtctttcgtttcacacgaaaatgtgctgcactctttgactgctcaggaatttgctctagcacctagaaggaattct

SEQ ID NO: 205988 - DNA, 44 bp, Homo sapiens
  chr21:38066154-38066198
  hyper
ggccaacccagcggggcccgcctgcccgccggcctttctgtaac

SEQ ID NO: 205989 - DNA, 571 bp, Homo sapiens
  chr21:38071064-38071635
  hyper
gcgcctgctggtgaccttcccgagagccacaggggcggcctcggcacccctccttccctcgccctccctgccgcccatcctagctccggggtccggcgaccggcgctcaggagcgggtccccgcggcgcgccgtgtgcactcaccgcgacttccccgaacccgggagcgcgcgggtctctcccgggagagtccctggaggcagcgacgcggaggcgcgcctgtgactccagggccgcggcggggtcggaggcaagattcgccgcccccgcccccgccgcggtccctcccccctcccgctcccccctccgggacccaggcggccagtgctccgcccgaaggcgggtctgccataaacaaacgcggctcggccgcacgtggacagcggaggtgctgcgcctagccacacatcgcgggctccggcgctgcgtctccaggcacagggagccgccaggaagggcaggagagcgcgcccgggccagggcccggccccagccgcctgcgactcgctcccctccgctgggctcccgctccatggctccgcggccaccgccgcccctgtcgccctccggt

SEQ ID NO: 205990 - DNA, 104 bp, Homo sapiens
  chr21:38071687-38071791
  hyper
cgcctccgcctccgcgccggccgcccccaccccccaggaaggccgaggcaggagaggcaggagggaggaaacaggagcgagcaggaacggggctccggttgctg

SEQ ID NO: 205991 - DNA, 63 bp, Homo sapiens
  chr21:38071905-38071968
  hyper
ccccccgcacctgcccgcggcccactccgcggactcacctggctcccggctcccccttcccca

SEQ ID NO: 205992 - DNA, 248 bp, Homo sapiens
  chr21:38073877-38074125
  hyper
tctcgggcgcagcggtccttcagcccagggcaggttcctccctttcctactcggaacgtggcaaagataccccagtcccagcccctccagctgagagctgttgcccaaggtcgtcgctacttgtccgctcaatggtgaccccttggcagagaactagggatgattccactccggttgatgttttaggggaaattaaaagaacattcggttttctgagtctccttccggggaggcgtggtggtaactgg

SEQ ID NO: 205993 - DNA, 313 bp, Homo sapiens
  chr21:38080772-38081085
  hyper
ccagttcggcctgtggcccatccctctctcaccgccggcagattggagtctgctctcggggagcccccaggtaaacccctcacagggagaaggtttcggattggaaggaggaccgcgctcgtggggcgcctgtgagagctgggaagcccaaggggtagcgtgtagggggttttttatgcgggaggagctgcctcctgggcggcggggactttctgtctcagcctgtctgcctttgggaaaacaaggagttgccggagaagcagggaaagaaaggagggagggaaggagggtccttgggggaatatttgcgggt

SEQ ID NO: 205994 - DNA, 44 bp, Homo sapiens
  chr21:38119710-38119754
  hyper
atatgctgcattaacgtgtattacttaacaggcattccacctgt

SEQ ID NO: 205995 - DNA, 300 bp, Homo sapiens
  chr21:38378628-38378928
  hyper
cttcccgctgtctccagcccgagctcgtggccccaatccctggtacctccatcctctggtcaccccttctctggtgccccctccccgacttttctttgtcccgtccccacccttgcccgggcctgccggacccccctccttgacacccggcgccacctccttgagcttttctcgtctcctccccatccccggctccctggtcccctcccggaacttctctggtcccctccgctcctccgacccgggcttttccttcgtaccctgcggccccctccgcacccctcacggagctcctcgggt

SEQ ID NO: 205996 - DNA, 260 bp, Homo sapiens
  chr21:38379263-38379523
  hyper
ctgctgaacccccgatccccagcggagctccggagctcgacggcgacgccaagcaagctcctgagccggcagccgggttcccgggaggggcgctcagttctccggttccaacgcacagctctgaagtgcggaggcccaggatgtagctggccaggaaaggggccgacgcttccgtgtagaggagatctcagttagccagccggggacactgcagtctcgggctcctaagccagccttgcaaaggcaatctctcaccttgc

SEQ ID NO: 205997 - DNA, 256 bp, Homo sapiens
  chr21:38593106-38593362
  hyper
ttcggggacccgcaccggacaggcggcccaggccccctggcgcccagctggccgccctgttgcagctctcatgccaagacctgcgcctaacggcagggattccggcggtcatcatttattcttggcgctaagctgccgcttctcttttttatcaccacagagtaacgcagaccccaccgtttccttccattctgagccaaccactccagcagccaccggggcgccaggttatgctggggctgcaccacccggcccg

SEQ ID NO: 205998 - DNA, 109 bp, Homo sapiens
  chr21:38608386-38608495
  hyper
caacacaattcaatttatgaatgaaaaatttcttggcacataatttaagaaagatgatattagggtttagcaacaaaagtttctatccaaagaaatgtgcctatgttaa

SEQ ID NO: 205999 - DNA, 64 bp, Homo sapiens
  chr21:39047606-39047670
  hyper
agaggaaggaatcaagttggcggggatttttccgcgagtggctgcattggctttaagaaactgc

SEQ ID NO: 206000 - DNA, 310 bp, Homo sapiens
  chr21:39288394-39288704
  hyper
caggtccggcttcccggcgtccgcgggtctccacccctccgcccgcccagcctctccagccaggtgcggccgtctccggactggctccctctggccgagcgcggagagcagggctgggcgctggggccaagggaggggcggaggggcgcgcgtttgggcagggacgggggagggagactgggtggaatgaagtggggaaagataagagtggcagaagaaaaaaaaaatccccggttaggagaaaagtggtggaccacgcagagagacgtcatgaaatccgcagattcaatgaatgctactcaattccagc

SEQ ID NO: 206001 - DNA, 279 bp, Homo sapiens
  chr21:39288901-39289180
  hyper
aggaccgggcttggtgggggcgggctgggcacaaaccaacgtgcatcccccgccactggaaacgtgggtgctccatgctgggggaatcttttgggtttcggtccccgaccccccagtcccaacctttctcccagtgccactaagtaagttattcccggagaaacgcctggaaagcaggaaagagccgaagctcggggagcagttttgtctgctggttgtaggggttcggcttttagggttttgtgagataaggaaaaagaggctctgggcactgcctcc

SEQ ID NO: 206002 - DNA, 35 bp, Homo sapiens
  chr21:40032286-40032321
  hyper
gccgtccctcccggcgctggacgccccacctgtcc

SEQ ID NO: 206003 - DNA, 158 bp, Homo sapiens
  chr21:40032367-40032525
  hyper
cgctgccttcctccccgtccccgcagccgctgtagccagcgtgggagccgggcaggtcgcgtggggcgctggacttaccgagaggttagcgccgccgtcgggggagggcgtgtcccgcacgtgtgtgtccgcgcgtgtccgcgcccgcgtgtgccagc

SEQ ID NO: 206004 - DNA, 66 bp, Homo sapiens
  chr21:40032848-40032914
  hyper
gggccgcgcgggcaggtttggacactacgcgccctgctcgggtttaggacgcggctggcggctccg

SEQ ID NO: 206005 - DNA, 132 bp, Homo sapiens
  chr21:40032974-40033106
  hyper
aggagcagaggctgggacggccggaggagagagtccggccccagcaggaaaggaacccagcacgcgactactggaggggcgaggagcaagggaaggaccagaggggaggagagggggtcaggggagggaaag

SEQ ID NO: 206006 - DNA, 75 bp, Homo sapiens
  chr21:40033358-40033433
  hyper
gccggatacagccgccgggacgcggggatgccgagggcaccgcggcctggtctgaccgacgcacgcggtgacagc

SEQ ID NO: 206007 - DNA, 152 bp, Homo sapiens; identical to SEQ ID NO: 133575
  chr21:40033449-40033601
  hyper

SEQ ID NO: 206008 - DNA, 142 bp, Homo sapiens
  chr21:40105802-40105944
  hyper
ttaaacccaaattattgccagagaaattggtatatttattcagatgaaaaatacttgcattagtaagcgaaaatatctgtcatcgtcactttacagaaaatggaaaaggatgaggattgcacaaaaactagaaattccatcc

SEQ ID NO: 206009 - DNA, 341 bp, Homo sapiens
  chr21:40105997-40106338
  hyper
cggtggcgctcgaggcaaacggtgtcatgaaacggtcactggatgcactgaccctgaagatgctctcaaagcacgagtccgttcatcagagagtggacttgacacccatcagaaacattcccggagtgcgttggtgtgaaggtgcgaggagagtcggggaagcatcccgaagccctgctaggcgaatgggtactgctgagattacagggtcagcacaaagcagaatacaggacccgaaaataacagctgcaccggaagaatacttgaccactgtttaagaaggaatttgacgaagagcagtcaccgagtgcagccctgggccggctaaaggaaaagaaaaa

SEQ ID NO: 206010 - DNA, 1162 bp, Homo sapiens
  chr21:40177485-40178647
  hyper
ctcagggccagccggcgagggacccagccgagtgacagcaggaggcggagggaaggttgggccggaaggtgtcagccccgccccgcgctccctcgccgcctccgccctcctcttctctcccctcgtgcgttccctctcctctccctccgctcccccaaccctcctgctgcccccttccctctcctcccgcttctccccatcctgcctacctcccttcccctcctcttctctctcctccccttccctcccctctctcttctctcctccctcgtttcctcccctcccctccactcggccgtccctccttcctcctccctcctccctcctcctcccgctcctgaagagcgcgccgcgtgggggacggcccggttacttcctccagagactgacgagtgcggtgtcgctccagctcagagctcccggagccgcccggccagcgtccggcctccctgatcgtctctggccggcgccctcgccctcgcccggcgcgcaccgagcagccgcgggcgccgagcagccaccgtcccgaccaagcgccggccctgcccgcagcggcagggtaagagctgggcccgcagagagcgcccggcgcgcggctccagtcccatggagggtcacccggggcctgggcgggggtcgcggggggcactgacacgcagatctcggggcgctgccgggggtgcaggtgggggtggcggctgctgcgaggactctaggggcgcgcgtctgagttccgcgccggctcgttttccggttatggagtggcctccggggctggcggggtcggccggggggttcctgcgtgctagggccgctgtcttcggggtcgcctagcggcgggcgcggccagggcgcgctggcttgtttcgctcgcttttgtttttaaaaggaaacgcaggcctggtagggggtcctgcccagtggatgtcccggcgaacatgatttcgcgaacgggagtgggggcacaggagagcgtgtccgaggtggcctggcgccccggctttgagggtgacttcctggagcggcgccgggcccggaggatctggggcgcccaagacacctgaaggctgcggcaccgcgggaacctgcggggcgcggggtgccatggtcacctgctcgccgcgtccagggcccgggctggggacccctcggtcgtgcgagg

SEQ ID NO: 206011 - DNA, 99 bp, Homo sapiens
  chr21:40752032-40752131
  hyper
aaagaaacacggacgtcagaaaactggttcagtagggatgggtgctagaaggctacggaaccgccgaaggcccaggagaaacccggaacgtgttaaccg

SEQ ID NO: 206012 - DNA, 70 bp, Homo sapiens
  chr21:40941233-40941303
  hyper
catttctctacacatcgtctcctacagctcctgctcattcaccctgctccacccacgctggccttggctt

SEQ ID NO: 206013 - DNA, 85 bp, Homo sapiens
  chr21:42539458-42539543
  hyper
cgactgaaatgaggcggaggagcttggcgaggggaggcgcaggctcggaaaggcgcgcgaggctccaggctccttcccgatccac

SEQ ID NO: 206014 - DNA, 295 bp, Homo sapiens
  chr21:42539583-42539878
  hyper
cgccactgccgggcgaatagacccccgcggacccccaagcgcgcggggccggggccctagttcaggccctcgctgcccctttaagggttctcgaaactttccccccggtatcagatgagcctcgtcacatccgttggccgtggccgctggggcgctttccgaggaaattcgggactcgagtttcccggggaagaggcgcggcctgagcccggcgagggtggggagggcaggcgcaggtggaccccggcgccccccgagccccgctgtgaccttggccgcgggggaggggctgggc

SEQ ID NO: 206015 - DNA, 840 bp, Homo sapiens
  chr21:42540178-42541018
  hyper
cccgccgtgggcatgggcgcactggcccgggcgctgctgctgcctctgctggcccagtggctcctgcgcgccgccccggagctggcccccgcgcccttcacgctgcccctccgggtggccgcggccacgaaccgcgtagttgcgcccaccccgggacccgggacccctgccgagcgccacgccgacggcttggcgctcgccctggagcctgccctggcgtcccccgcgggcgccgccaacttcttggccatggtagacaacctgcagggggactctggccgcggctactacctggagatgctgatcgggacccccccgcagaaggtagggacccccggctgctgccgcgggcttttcgggctcgttggagggagggggctgtccagagacgcctccacgcggcttagcgtcgcccccaaagcagcagctgtccccgcacagaagagcggggaacgcagaggggctcgggtgggccggggagcgggggcgctcgctcttgagtcgcggaggacggcagcccccgcccggggcgcactgaggggtgtgcgcgagtgtttcagaacttgtgagctccccctccgcggggctgggcgggagaggagacctggaacttgccgcctccaataacgtgatttccttcttgcgggcgacacctacttccagcgggagacggagcggtgggccttgggcgacgggctattatggggaaaatcacctcgtgttcataccctccctcccccccgccccccccccaccccaccaccatgctgtctcattgctaaagaggctcgtggccggcttccaaaggcgcagtaccctttaaaaaggatttatgcatga

SEQ ID NO: 206016 - DNA, 265 bp, Homo sapiens
  chr21:42879240-42879505
  hyper
ccggcacggagcgcaagcggaggagccagaccggctcctcccgggcgggttcctgccggtgccgggtgtccaggaggccccggccctgatcgccgccagcgggtcgccgcaacggggcctgagtcgcgagcagtccctccccgagactgactggccgttcgcacctcgcccgggggccctccagcagcctggcccagcggtccccgccgcgccggccgtatcgttcccggcatctcagcgagtttccagtttctccctacctcag

SEQ ID NO: 206017 - DNA, 134 bp, Homo sapiens
  chr21:42879925-42880059
  hyper
gggcatcggcgggtcccaggcgcccaggttcccctccccagcccggaccccgagccgggaccctggtaccggcgccgctcacctgccgcgctccaggcggcgctccccgcccctcgccctccgcctccgcctcc

SEQ ID NO: 206018 - DNA, 121 bp, Homo sapiens
  chr21:42880104-42880225
  hyper
ctcgctttaatctcaggaggcggtgtcccagggtccagggcgacacccccaagcgggtcgcgggtcaccctgggcgggcgggggcgggggcggcgggaggaggcgtttcccaagggaagtc

SEQ ID NO: 206019 - DNA, 142 bp, Homo sapiens
  chr21:42880260-42880402
  hyper
cggagggacccataagggactctggggcgcttcccgggcccggccacagcggccaacctgcccctctccggtccgcggcgcagcgctgcccgagggctcgagtttgggttaaggaaggggattctggggagcgctcctggag

SEQ ID NO: 206020 - DNA, 276 bp, Homo sapiens
  chr21:43181626-43181902
  hyper
cgcccctcccctaccagtgtggcctccctcctccggacactctgccccggggcgctggcgaaagtccttccgtaggactcagacccacatccactgtgcaaccgtgtgaggcacaccctcctcgccggagggttttgaggaaatgacaattcgggtgtttagaggccagccattcgcaagggtcatttttccacattaagtagacattctgagagtgaactctctaagccaaagctgactgataataaacacgtattctgagaacaatgtcaatca

SEQ ID NO: 206021 - DNA, 261 bp, Homo sapiens
  chr21:43182202-43182463
  hyper
tcctgaaagcggatcccggctagaatttcctaacggagtccaccccagctttgcgcaactgcctgaagggagcccggcacgacttcccccttccatgggccacacatttgagggcactttctcgaggaaaatcagctgtcctggaaaaaaaaagtcattgtttccgtggacaaaagtgttgtgacagcatgatccaaactggcttggggtagacaggattccagctgaggaagggggtcccgggaccgccctgtgggagat

SEQ ID NO: 206022 - DNA, 106 bp, Homo sapiens
  chr21:43186592-43186698
  hyper
cgccccggtgggtcccgggcgggccggacgcgcctcccaagggcgcgggtccgaggcgcaaggcgagctggagaccccgaaaaccagggccactcggggagtgtca

SEQ ID NO: 206023 - DNA, 507 bp, Homo sapiens
  chr21:43186889-43187396
  hyper
ttggtttcccccccgaagctgctccgggggtgagttcgggagagagaggcaggaccccgggaccagagcaccccgaccccgaccccagcccgggccccagccgccccagcgccccgcccgggccgctcacctgtcgtcgacgtgcaggctgggcgagcacttgatggccagccaggtcttccagtggacatggcgcaccttgtacacctgcccgaagccgcccgagcccaccttctcccagcccgtgaactcgcccgcgtcgaaggtgcgcagcagcgccagggcccatggggtcccgccgtcgccctccatcgcgcacgtctagccagcgccgcggcggctgcccaggtgcccaggtgcgcgctccgccctgttacgtcacttccgtaggtcgtcccgcccccaggccccgcccacttacccgccccccgggcgccctctctgccagcgcccggtgactgcggacggatgaatagacgctgcgggtcactgcgctctcccctgggt

SEQ ID NO: 206024 - DNA, 240 bp, Homo sapiens
  chr21:43373583-43373823
  hyper
cgggcgcggcccctctccaggctccaccgcccgccgctggggctggggtcgcgccctggccagcgcccactgcgccaggtacaggcctaccgtggccagggccgcgacgaagagcgacaccagcgcgagccactgcgcctccccgagccacgagcccagccgggccatggccatggcgcatccccggcccgcctcgccccaacttccccggcagccccgggccggaacggcggactcagg

SEQ ID NO: 206025 - DNA, 46 bp, Homo sapiens
  chr21:43639848-43639894
  hyper
accggggacttctcgcgccatccccaggaacgccaggcaaggtctg

SEQ ID NO: 206026 - DNA, 110 bp, Homo sapiens
  chr21:44513219-44513329
  hyper
gcccagatctttcacgatctctcgaccgcctcctgtcacgctcccgtccgccgccacctccaccaccgccaccgccaccgccacgaccacggtctctagaccgagaacga

SEQ ID NO: 206027 - DNA, 176 bp, Homo sapiens
  chr21:44514586-44514762
  hyper
cgacggcggccatacagctcccgccgcagctctctggaaatgggcttcaaatgcatgaagttgcagaagccgcctcgtgtgcattctctgtgggtgggttggaaggagacatttactacctcgtgtgcacacggccccgaactgtgctcagtcacgtcactggccactcctcactc

SEQ ID NO: 206028 - DNA, 38 bp, Homo sapiens
  chr21:44847473-44847511
  hyper
ctccacgcggcctgcgttcgtccagactcagagcctcg

SEQ ID NO: 206029 - DNA, 59 bp, Homo sapiens
  chr21:44847864-44847923
  hyper
cgggggcgcgggaccacttgcttgcccgtggccgatgcctcatccgaacggaaaacgtt

SEQ ID NO: 206030 - DNA, 214 bp, Homo sapiens
  chr21:45381427-45381641
  hyper
ctcatatggaaaacagtgagcgcgtagacactttgtctcgtgggaaatggtgaacccacatacactttgtctcatatgggaaacggtgagcgcgtatacgctttgtctcatgtgggaaatggtgagcgcatagatactttgtctcatgtgggaaatggtgaacccacatacactttgtctcatatggaaaacggtgagcgcgtatacactttgt

SEQ ID NO: 206031 - DNA, 71 bp, Homo sapiens
  chr21:45526943-45527014
  hyper
gtgccaggctgggcgtccgtgcggagcgcgcccagcgctggagcgcgcctaagaggcgccctgcagtgtgg

SEQ ID NO: 206032 - DNA, 63 bp, Homo sapiens
  chr21:45553436-45553499
  hyper
tggatagggctgagacgggggcgggtcttggctccgcccagaaggctgcgcaggcgcagtccc

SEQ ID NO: 206033 - DNA, 164 bp, Homo sapiens
  chr21:45660235-45660399
  hyper
gggggagggcgtgtccgcagaccgtgggcaccagctggccttggagagcgctcggccggtcacctccctccttctcccttcttctaggaaatcagcagtgccagggagtggaaggggcagcgcccgtgccccggcgtgcagggtgcgcccgccttccctccctc

SEQ ID NO: 206034 - DNA, 277 bp, Homo sapiens
  chr21:45713496-45713773
  hyper
atgggactggtcccgctgtcctgcagcctgcgtggcaccgtgaggctcctcacttgcgcctagacccgccgtccagccctgggtggtcccaggggagagcgcacagggctcgggttcgggttcagctacatttcccccggccccccgcgtcaccccgcgctgttgcctcccacagaacctggctcctggtgcgcgttgcggggtgtgcggagatggtacggacgtgctgcggtgtactcactgcgccgctgccttccactggcgctgccacttccca

SEQ ID NO: 206035 - DNA, 224 bp, Homo sapiens
  chr21:45875732-45875956
  hyper
cgggccgcgcgcacagggcttggcttctctgttttctcggtttccttcttcaggcagttgaaagaaaaggcgcggttctgtgcccggtgcgagccgcggctcctttagggctggcagggaagggcttgctgggttatgacagtttttaggggttgtcggagtcagccaggcgttggctgctggagtagcccctggcgcgcgagcgcccgctggtgcccggccac

SEQ ID NO: 206036 - DNA, 169 bp, Homo sapiens
  chr21:46129207-46129376
  hyper
ctccttacaagaatcggaagggtccctgcaatcgcccttcgcactgaggcttcctactgtgtggtgtaaaaacacaggcttgtcctcccttgctgcccacggggctggagccgcctgaaaatcccagcccacaacttccccaaagcctggcagtcacttgaatagccaa

SEQ ID NO: 206037 - DNA, 282 bp, Homo sapiens
  chr21:46130970-46131252
  hyper
gcacagtagcctcccgggctgctgcgacttcattcttcattcccaaagcaggtgtcagcctttcccgggaggcccagcaggtaagcacttgtggaggccccggtggctgctggttagctcttgaagctcgtccccaccctgcgtgcgttctaaagagccgcgtttctattgcaactgcctgccctgcgctttcatcttccccacctgtgctcctcccgcctctgcccatctccacagggtgctacctgccagtcctgccaaagcgtcctcgggcaccgcggc

SEQ ID NO: 206038 - DNA, 344 bp, Homo sapiens
  chr21:46800406-46800750
  hyper
ccgtccgtgcacacacgctcacctcgcacccagcgtccgtccgtgcacacgctcacctcgcacccagcgtccgtccgtgcacacgctcacctcgtacccagcgtccgtctgtgcacacatgctcccctcgcaccgagcgtctgtccgtgcacacgcttacctcacacccagcatccatctgtgcacacacgctcccctcgcacccagcatccgtgcacacgctcacctcgcacccagcatctgtccatgcacacactcccctcgcacctagcgtccgtccatgcacatactcaccttgcacccagcatccatctgtgcacacaccctcacctcgcacccagcat

SEQ ID NO: 206039 - DNA, 302 bp, Homo sapiens
  chr21:46800780-46801082
  hyper
cactcccctcgcacccagcgtccgtcggtgcacacacgctcacctcccgcacctcccgtggaggcggcatccaggcagggaagcaaggacactctgcgtccattcctctctctaaacaccaaggcccccgcaatccgaggaatatatttgacagaaacaagaaaaaaggatgaaagtggccaagacaagccgatcccttctatctgttttcaggaacatgattttgtggccccaaactccttgaagcccgatgcttccacctccctcccactccactctcccccgacacatccgtccagctc

SEQ ID NO: 206040 - DNA, 64 bp, Homo sapiens
  chr21:46825761-46825825
  hyper
cgggactgaccgcgggcggaaggcggcggagcgcggggcgtcgtctccgcgtttccaacctgtt

SEQ ID NO: 206041 - DNA, 104 bp, Homo sapiens
  chr21:46950778-46950882
  hyper
aaggaagaccagccccgcctgcgtggccgtgacgcccgcgatgagcagcttggaccagcgcgcccagcggatcttcacgaagcccgcggcgaaggacgtgatgg

SEQ ID NO: 206042 - DNA, 54 bp, Homo sapiens
  chr21:47062898-47062952
  hyper
tccccgcccaccgcggatccgccccgtccaccaaggtctcgctcaccaacggcc

SEQ ID NO: 206043 - DNA, 139 bp, Homo sapiens
  chr21:47063293-47063432
  hyper
ccactactagtgaccggcccgcccgttcgaggccccgcctcctccccgcccaatgctcggccccgccccgcgcgtcattgggccaggtccccgccccgcccccagccccacccccgcccctttgactggagttggcttt

SEQ ID NO: 206044 - DNA, 106 bp, Homo sapiens
  chr21:47394340-47394446
  hyper
accagtgttgagccgtcgcacccccgcttgggaccaggatgggctgcactttccccacccgcggccctgggacccgccccacccgaagcccggggagatccaaccg

SEQ ID NO: 206045 - DNA, 110 bp, Homo sapiens
  chr21:47717450-47717560
  hyper
agatgttccagaaggagaaggcggtgctggacgagctgggccgacgcacggggacccggctgcagcccctgacccggggcctcttcggagggagctgagggccgcgttcc

SEQ ID NO: 206046 - DNA, 84 bp, Homo sapiens
  chr21:47717589-47717673
  hyper
ggctgcggggagccggggtcgcacacgaataaataacgaatgaacgtacgaggggaacctcctcttatttccttcacgttgcat

SEQ ID NO: 206047 - DNA, 116 bp, Homo sapiens
  chr21:47717748-47717864
  hyper
cgtggcccccgcccgggagcaccgcgcagcgctcgcctctcgcccttcaagggggtccctgcccggagcctgcgcccccggagaggaaggggctcgaggggcttgggtgccgcagc

SEQ ID NO: 206048 - DNA, 44 bp, Homo sapiens
  chr21:47799137-47799181
  hyper
gtcatccggggctgcgtgtcgtgagctgcgcccgtcttcctggg

SEQ ID NO: 206049 - DNA, 52 bp, Homo sapiens
  chr21:47799225-47799277
  hyper
gagccgcacccatcttcctggggctacgtgtcttgagcggcacccatatacc

SEQ ID NO: 206050 - DNA, 110 bp, Homo sapiens
  chr21:48087089-48087199
  hyper
tggcatctgggcctaaaagccgtgatgcaggtgagcaatgatgcagagggctctgtgcgcctggcgggctctgtttgcctgctgggctctgtgcgcctgctgggctctgt

SEQ ID NO: 206051 - DNA, 72 bp, Homo sapiens
  chr22:17601506-17601578
  hyper
acgggcagcaggaggcgccgctgccggtcccggtgccgcccgcgccccccgccgagcggctcccggggcccc

SEQ ID NO: 206052 - DNA, 237 bp, Homo sapiens
  chr22:17849877-17850114
  hyper
ggaaagcacttcacttctctaggcttcatatttctagggtggacagcccgctcctgctccggctctgccctcggcatcaataataactgaactcccacacgtgcacgtttctgtctctagcccgaccgaaaggaccaccccgcgggccctttaaaaggacgcgaccactcaggccaagtgggggtgggagagctcctggccgtcctcccttgggaaagtgcttcaactccccagtcc

SEQ ID NO: 206053 - DNA, 36 bp, Homo sapiens
  chr22:18441176-18441212
  hyper
acagtggggtcacagctcagctctgccttcctgcta

SEQ ID NO: 206054 - DNA, 31 bp, Homo sapiens
  chr22:18593348-18593379
  hyper
gggcagcctcccccgcgggcgcagtccccgc

SEQ ID NO: 206055 - DNA, 274 bp, Homo sapiens; identical to SEQ ID NO: 133753
  chr22:18923626-18923900
  hyper

SEQ ID NO: 206056 - DNA, 128 bp, Homo sapiens
  chr22:19706043-19706171
  hyper
gcccagtcagggggatggctcggtcggcctcgggggtcgacgatcccccgggtaggcgacgtgccctgtccaggcctcacttcccgcgtccgcaaaacggggtggacaacgcagcctaaggcagagcc

SEQ ID NO: 206057 - DNA, 146 bp, Homo sapiens
  chr22:19748443-19748589
  hyper
cctgagcagcctgggggccgcggggggcttcccgggcgccgcgtcgcccggcgccgacccgtacggcccgcgcgagcccccgccgccgccgccgcgctacgacccgtgcgccgccgccgcccccggcgccccgggcccgccgccgc

SEQ ID NO: 206058 - DNA, 40 bp, Homo sapiens; identical to SEQ ID NO: 133782
  chr22:19749084-19749124
  hyper

SEQ ID NO: 206059 - DNA, 433 bp, Homo sapiens
  chr22:20255237-20255670
  hyper
taaccccttggtggccggggcgctccgaggccgggccccgcccttccagcccacggcccccgccctcgacttggcccagcatcggggaccctcggaccgccaccctcggccctgccgaagccgtcaactttcccgggaagcggcaacttttcctgccgcctccggctccgccctcccggggccggggcgccagcggccccagcctggcgcggcactgcggtggctttccctgccgcccggctacgcttccctcgcctcggcagcccgggacgggccctgcggctccggggagggggcgagccgcccccctccgcgccccgccgccggccgggctcgggtgcagcgcggacactcacctccagcggacgccctcttcatcgtaggggttgggcggggcgcgtcggggactgaaagtcgtttcggggcgggcgcc

SEQ ID NO: 206060 - DNA, 390 bp, Homo sapiens
  chr22:21319195-21319585
  hyper
tccctgggaggtcgcgaggatccccggagacccagactcgggcccggggcgcccccggccagagcggcccctggctgcctccctacgccccgcgactccggtccggacgccgagggcctcggcctgcccctgtcccccggccgccccccacctgctccggcccggcggggcggtgctgggcccgcgggctccccggccgcagtgcaaacgcagcgccagacacgccccgcccgcgcctccccgcccccccgcgcccgcggccccaagcggttcccgagcccaggcccgcgccgagcccaggtgagcgcccgccccggggaccctggtccccggaaccccggtccccgcccgccgccccgcctcttcgccccggcgccgggggccagcgct

SEQ ID NO: 206061 - DNA, 76 bp, Homo sapiens
  chr22:21368225-21368301
  hyper
ggctggagacgccccgcagagggctacgtgccctgctggacagaggtctcctgcctcctcggcggcgccagcccac

SEQ ID NO: 206062 - DNA, 115 bp, Homo sapiens
  chr22:21368697-21368812
  hyper
gtaggttgccgtagaaaccgtggctctcctgcgctgaggctcctcgcctgagaggataaactgcacgcgccacgggctatgcactgggctgggcgccttgtgggcatcctccctg

SEQ ID NO: 206063 - DNA, 216 bp, Homo sapiens
  chr22:21385764-21385980
  hyper
gctcgcccatggatacgtaggtgaacaggtaggcagagcccgtgcgtggcacacgtgccccaaattctgcatagcatagggctgccagcagggaggccacagcggccacaccgaaggacaagagcacagcagggccagccacctccttggccacggcacctgtgagcacgtagagacccgagcccaccatgccacccacgcccagaagagtcaggt

SEQ ID NO: 206064 - DNA, 35 bp, Homo sapiens
  chr22:22005759-22005794
  hyper
atatacttcctagtcatcagcgaagggtaggcgct

SEQ ID NO: 206065 - DNA, 165 bp, Homo sapiens
  chr22:22006759-22006924
  hyper
ctctgctccactctgggcctccaggcagaagaatatgttagaaaagaatccagagtgtatctagtgcagggcaaggggccagggatggagtcgtcagctagaaggggcgcgtcgtcccggggtggggccgccctttttctcctggagccgcgggccgagtcaggg

SEQ ID NO: 206066 - DNA, 321 bp, Homo sapiens
  chr22:22012021-22012342
  hyper
gcgccgagaccctcgggagccccgcccagacgcctgctccgcttccaggccacccgggctctccagccgcgctcgctcgtagagatcctagacaagttcgacagcgaggtcccgcagagcaagacctgccagcagatctccgaggaggacttggagaggcaggcggacacctacactgggcgcgcgctgcgcctcctcttccgcagccccgtccgcaacccgtcgctggcggagagggtggtacaattggaacagcgcgggctctcttttttccggatgcggccgcggggcatgggaccggctgggcgggaactgtcacta

SEQ ID NO: 206067 - DNA, 216 bp, Homo sapiens
  chr22:22292760-22292976
  hyper
taaggcaaggctgcgctcccagggaatgcgggcagggagccagggcggagggcagaggacgagagcgaggaggagagcgcgggcacccactgatgctggcggcctcgggtattcgctttctctctcttctcccaccttgttccttttccccggatgcacgcatgcactagtaatgccgaatttagaacaacagggaaaggaaaggaaatggcaaag

SEQ ID NO: 206068 - DNA, 150 bp, Homo sapiens
  chr22:22862458-22862608
  hyper
tgcattaagagtcccgacagcgacgcagtaaatgagacaagacgctgcggtaggggagagagacccatacattcaaatgccttaaggggtctgggcctacaggtctccagaactggggagggcctggggttacaaagcagttttcagatt

SEQ ID NO: 206069 - DNA, 401 bp, Homo sapiens
  chr22:23523110-23523511
  hyper
cgcgcagcccggcggcgcaggtaaggccggccgcgccatggtggacccggtgggcttcgcggaggcgtggaaggcgcagttcccggactcagagcccccgcgcatggagctgcgctcagtgggcgacatcgagcaggagctggagcgctgcaaggcctccattcggcgcctggagcaggaggtgaaccaggagcgcttccgcatgatctacctgcagacgttgctggccaaggaaaagaagagctatgaccggcagcgatggggcttccggcgcgcggcgcaggcccccgacggcgcctccgagccccgagcgtccgcgtcgcgcccgcagccagcgcccgccgacggagccgacccgccgcccgccgaggagcccgaggcccggcccgacggcgagggtt

SEQ ID NO: 206070 - DNA, 89 bp, Homo sapiens
  chr22:24236849-24236938
  hyper
aacggagctggggggcggggcggggggaggacggtggctcgggcccgaagtggacgttcggggcccgacgaggtcgctggggcgggctg

SEQ ID NO: 206071 - DNA, 149 bp, Homo sapiens
  chr22:24552924-24553073
  hyper
aattgcaggctttcccagcccttgtctgcagagagaatcattacctgtggatggcgcggggaatcccttgccctcagtagccccgcctggagagacaggaccgcgttgtggggggtggggtgtaggagtgggcggaggccagggcgccc

SEQ ID NO: 206072 - DNA, 36 bp, Homo sapiens
  chr22:24643678-24643714
  hyper
tgcctaagaaagggccggggtcgctgcaccctctgg

SEQ ID NO: 206073 - DNA, 91 bp, Homo sapiens
  chr22:24989196-24989287
  hyper
aggaggccctgcttgcgtcagtcttggcgctagaacccgagggcctggagccgccaggggagacgcggagctcggccgagacgaggtggct

SEQ ID NO: 206074 - DNA, 254 bp, Homo sapiens
  chr22:25348188-25348442
  hyper
gtgcccttgcttggcgcgaggaggcgccagcaccgcgcacagaccttgcccgcccccgggccggcaccagcagcccaggcaagtcagtgggcccacatttatggagcgcctcctgaaatcctgggttgcattaggctctcggggtcgccggctgggcagcgggtcggtgccggtggcgggggatcctggctggtgactggggaacatccagggaacgcgggagggtacccggagcaaagttcccaattggacag

SEQ ID NO: 206075 - DNA, 787 bp, Homo sapiens
  chr22:25348485-25349272
  hyper
tgtccaagcgagtcgtgacctctgacccgccggagaggtcccaggcccaggcgccactgcggactcgggtcctgcctgctctgctcccctccgcgcaggcgcggccggcggcagttcccatggtgacgggggcgcgtccccgctcgaggccccgcccccagcaggctaggctgcgcggggctgcgggctcccagggcaggtgccgcgggctgcgggcaggtggcggcgcggcgcgggctggcggtggctccacggtaggttgcgcagcggctgcgggcagtgggggccggctggccgcctcctgtccccggccgacgaggtagctgggggtgacggcggctggcgagggccgccaagtttctgcccggccgaggccccgggagaaaagttggcaaagttggccggggaagaggcggggagccggaggatttccccagactccgggtctgcagggagggaggatcccggtttgggagccggggaatccgtctcccgagacttgagagtggatcccgcgggaagatcccgcacagggcaaccaatggatcacgtgccacctggttggcgacttgggagtcgatccctggaggggatcgggcgctggaggcctggggtcccactggatccccagtcaggggtgacggcgaagggtgattcgagactgggagcgagaggatcaatctcctcccatgccagcctgagccttgggaatggattcagagagatcccgtggctaggagctgagggatcgctggagatctgggttactcagcctggagctgctagg

SEQ ID NO: 206076 - DNA, 409 bp, Homo sapiens
  chr22:25349348-25349757
  hyper
gtcgaggggagcccggaggacagcgcggtggttcggggggcgtgagaggggcggcgcgcggggcccctcggacgcggaggctccggacacgtcctctcggcctggcctgcgccccccctccgctcgtcttcccagggcggaggcgccctgatgggattaagcctcagtccccctgttaccaggcaggcccgcgtggtccccgccccgatggcggcgcggcccacccgggctcacgggtggggccctcgggatgggaagcggctcgttgacccccacccgagcctgaccttttcacaccctgctggcacaaactcgcctgggagtggggacgccgcgccttaaaaccctgctgtttgtccagtcccggagcaggcgtgtgacctccaccgcgcgacgcctaggtggctag

SEQ ID NO: 206077 - DNA, 306 bp, Homo sapiens
  chr22:25507512-25507818
  hyper
aagtgagctagccgcctgccggccgacaggtttggaatctccagccagaggacagaaaacctgcatgggtcaggtgagcggggtctggccgagggcagccgggcagggggcagcagggtgcggcagcttgcccaccggaacctcccagggtgcacctcaggggggctgcctacctgaagggaagtgaggacgagggtgcccaaaggccgccccctccacccccacccccatccccatcccccgcctttcgggaccgtcacgccctggagtgagtgcagccggcttgttcctcaaagctccttgtct

SEQ ID NO: 206078 - DNA, 42 bp, Homo sapiens
  chr22:26565123-26565165
  hyper
ctggaaaatggtccgggtgctctccagcctggcctggccagg

SEQ ID NO: 206079 - DNA, 126 bp, Homo sapiens
  chr22:26565999-26566125
  hyper
tttgcagccaaagaggttctccttggagtggggtcgcctccaaaccccaaattcccggcgcttctctgcaaccgcacccggggctaggtgccagataattatcttcctctccgggagaggacagga

SEQ ID NO: 206080 - DNA, 315 bp, Homo sapiens
  chr22:26756625-26756940
  hyper
aagaaaaagcctccccgaccagggggcgggaaagtgaggcttctcctgtgcgctttccccagcacagctgagaccacactgggctgtaatgacccggtaactgttctctgttccccattcgactgagttttgggagaacagaaaacgtgattctctaattcactgcttcatacccagctcctagcacagggatggaacattggaggaacagagtctacgggctgaaaaaaaaacaaaaaacaaaaacaaaaacaaaaaaaacacggagagtgtattctggactctgggagttcaaaagctataaagtgttgtgca

SEQ ID NO: 206081 - DNA, 247 bp, Homo sapiens
  chr22:26763714-26763961
  hyper
ggtgatctcccagggcgttacctggcgttctgcaaaccctaatactcttaacgcccccagtttgtgcacacggggaatcgtgagcgccacctggtggcagctattattacacattattgctttaagcctcgcccccacctcccagatggtgaagtgagaaaattgcatcttagaatccattgaacactcatcactaaaattaagttgtaacacactaagtaaaatttggattcgtttatctggactt

SEQ ID NO: 206082 - DNA, 112 bp, Homo sapiens
  chr22:26825000-26825112
  hyper
atgactgcacgcccgtcgccgcctgcgcgcaacctcgggctgggcgggcgctgcgtctcggggcgcactgccaggaccctccggagcggcggcgggcgcggcctcgggtcgc

SEQ ID NO: 206083 - DNA, 171 bp, Homo sapiens
  chr22:26879459-26879630
  hyper
gcagcccccggggcgcaggcagcgactggtaacagcactagggctgtgcggtgtctggccccagctctacgggactgggaaatggtgggcgaacgcctaaggattaggcggggtcgggtcacgctctaagctgggggcccgcccctcggtatccccgcgctccgagcgccg

SEQ ID NO: 206084 - DNA, 139 bp, Homo sapiens
  chr22:26880366-26880505
  hyper
caatgaattagtaaacggaaaccattttctggcacgtggtaagcactgtgccagtgtttgctattaatattatgccgatgttgatattattggtggtggtgacacgagggaagcaacatgaacacgtgactgctatcat

SEQ ID NO: 206085 - DNA, 267 bp, Homo sapiens
  chr22:27053250-27053517
  hyper
gggggctgcggagtgctccctccaagaccggttgcaccccgctttcctggccaggactctgggcgcgggtaaggaggggttgggtgtgaggttgtaggggcgcaaggaggcgggaggagggtggaggtgagggccgggggtggggcgcctccgcccgccagccgctcccgcattaaaatttcatgggcgctgcagcagctacaaagacgacgccggctgcgctcgcgggaccagagggagggaggctgcggacgagtgcggggagga

SEQ ID NO: 206086 - DNA, 550 bp, Homo sapiens
  chr22:27299049-27299599
  hyper
tcctgagcggctattttgagagcgatggaggggagagggtattagattcctgaccttgaggtcggggaggggagggtgatgctagtggtggacgaaagacttgaagataatgagaaattgcatcaactttacccaggctgtttctgggtctagaagcaagcaaaaataaggcgggagcgggtggggggaagaaaaagaggcatttattttggagccgtatcggaagcacaagtgtcatgggctgaaaggccgccttctcctgcgggctaagggtgtgggcgacagctcgcacattcaaataagggagcgattacacggcgcttgcttctgaagacggatttcctggtagggggagcgggcgggggggctgggccggtgtaaaggggacggcaacattaggctttggcaagttaattagggttcaggagtccagcgagcgagcagggggagaggctggatttgcataaatccatttacataatgttcttcacaaattgtgcagccagaaggcagggagggggtggggagggaaagggctggggagggggag

SEQ ID NO: 206087 - DNA, 163 bp, Homo sapiens
  chr22:27496885-27497048
  hyper
ccttgccgcgcctgtcaccccgcagggctgtgccttacagccggcgctcgaccctggaaaaaattgactgtctgtttctgcctgactgctcgagagttacaggctgcaggggcggggggaggaggcgcgagggcaggcgggcggctgcctcctcatcaggatg

SEQ ID NO: 206088 - DNA, 284 bp, Homo sapiens
  chr22:28196682-28196966
  hyper
tgagggacggggggcggggtattagctcctctcctgaagctccgattctgcccggggagggcctctcacatcttgcgaggccgcggggcctctaggagccgtgttggggggcccatgccccgggcggttgtcacagccgcgggtgggtctgcggggaggggacgaagccgcggatgaacggagacaaaaagttaagtggggggaatggggagggaagggggttgggagagcagagcgatcaccttctcaagtccgattgggtctgctggggagccctcaggacg

SEQ ID NO: 206089 - DNA, 66 bp, Homo sapiens
  chr22:28198503-28198569
  hyper
agaagacacgcacgaagagggcgcacccgccgggccgcacaccttgccctgggccacccggtccaa

SEQ ID NO: 206090 - DNA, 48 bp, Homo sapiens
  chr22:28198605-28198653
  hyper
taagagatcaattaaactgaagaggccgaggaatggaattgggctgtg

SEQ ID NO: 206091 - DNA, 137 bp, Homo sapiens
  chr22:28838042-28838179
  hyper
cccacatttagaaacgttatttctgggaccaatagcaatttattttgatagaaccgctggatttttttttttcttgagttctcaacaaaggagccatattaggaaataatctcgcaaaaagcaaagtgccccctccc

SEQ ID NO: 206092 - DNA, 60 bp, Homo sapiens
  chr22:28838449-28838509
  hyper
taaccccttggggaaataggtgttataacaccacctgcggggcctgtgtcaggggtgcag

SEQ ID NO: 206093 - DNA, 243 bp, Homo sapiens
  chr22:28838551-28838794
  hyper
cctagtaggtcttggctggctcctgcaaagctaatcgtgtcgctgtctgcacaggacttctaaagcaaacgggtgcttccgagctgtcacccctggggctccaggcatatcatgaaggaaaaacttaaagggcagtggatgcagaccagatttggtaactcgtccctaagggactgatgcaagtcccaaaggaaccagggctgtttggaccagctggcccagcaaactacggaaggggtggag

SEQ ID NO: 206094 - DNA, 240 bp, Homo sapiens
  chr22:28838844-28839084
  hyper
ggccccattcccctctccaggacacttaccttcttccggggctgccatttcatcatatttgtaaagccgatacgtggaacatcaagatgttggctgggggctgggggcagatgcagggcagcgacgactgcaagtcatgctgcctccctcccaccccctaattctttcccatattcactgcgaagggaaaagccccaggagagtccagtcttttcgccttcagttcaatgaaaagtatcc

SEQ ID NO: 206095 - DNA, 425 bp, Homo sapiens
  chr22:29468748-29469173
  hyper
cgggccgaggccccgcccctcacctgctgatcctacccttggatgggacaaacagagggccctgctgggccggcccaggtgaggcgagagatgggcggggcctgatgcgtgagtggcaggagcagcgcgcggccggggcggggcgtgcgtgcgcagtgggctccgccccccgggcctctccgcggatccgggcgggccccaggctgcaggggcggtggcggcgctgagctgggcgggccggggcggggcggccgggcggccggggcggggctacactcgggccccgcgtcctgctcccatggccgcccccggctccccgcgctgccccctttaccccgggccgcgccccggggccccgcactgacggcccatggcgccgccagccgcccgcctcgccctgctctccgccgcggcgctcacgctgg

SEQ ID NO: 206096 - DNA, 202 bp, Homo sapiens
  chr22:29469213-29469415
  hyper
cggtgagtgtgagcgaccccccgccgcccgccctgagcggagcccactcgaggggcgacaagggccggccggcctgagagccccctccctcccgcttcaggaccttccgggccccttcccctcgcccctaggcgacgcccctcaggccgggatggtcccttcctgggacccgggctacccccaggcccgtcatcgacgcccc

SEQ ID NO: 206097 - DNA, 45 bp, Homo sapiens; identical to SEQ ID NO: 13392
  chr22:29469460-29469505
  hyper

SEQ ID NO: 206098 - DNA, 394 bp, Homo sapiens
  chr22:29702352-29702746
  hyper
ttaaaaagagcccagcggggcttaaccctcccgcgtccggccggcctccgatgccccccgtcccctgttctgtgcggaactccggctttggccatctgcctacttctctgagcttcagtatcctcatctgtaaaaccggttcccctcatttcagggtcaaaaatgagcattcagtgagcacaaggagccctcagtcgccaggggcatcctccccctccccgcggcggtgccgtttatctggccaggggaggtccacccgggaggaggtgactttgcagcctccagccgctatcgcttcctgccttcatcttgggaacaggccgtgctgtgcgccagcccggggagcccaccgtctggggaggggggcgattaaaaggtcccaacctcctcccca

SEQ ID NO: 206099 - DNA, 514 bp, Homo sapiens
  chr22:29702806-29703320
  hyper
ggccggtcgcagttgtctgggggccctggggctctctgcgtcgagagcgctcgaagacccgggattcctggcccgatcgcgggcggggggagaccccagctccaccccagctcccgccggctcggggaaggggcggcccctttaagagcgcgcggccccgcccgccccctccgggcaggatccgaattccagggaggcggggcggagacggcggcgaggaggaggccgcggcgcgggacgcatagagctgcggctcgggcggcgcctccctgcggcggcccggcccggctccggcccccgctggggcaatgctccccggggccgcgggatgagccaggtgagcgcggagacccccagcactccctgcctggtgcgcatggacgggggtggggaggcggggcgggaagcggcgtcctcggcctctgttccccggggctgtgtgaccttgggcggccccgcaccctctctgggcccagagccccagcaccggcagggcctgcggaggccgctctga

SEQ ID NO: 206100 - DNA, 112 bp, Homo sapiens
  chr22:30642966-30643078
  hyper
ataatgaagccttcgacaaaacgccctgtggttttcctgcctggcttgtcccgggagttgtctgaagatgggcatcgccaggagggggcccctggccgagtcagcaggggtc

SEQ ID NO: 206101 - DNA, 264 bp, Homo sapiens
  chr22:30792874-30793138
  hyper
gacttcaggagggcggagggggcccgtgtcagagccttccgcgccccagcgcatcgctccctactccgcctctcgggatcctttaagaggcggggcttggctgccagctccgcggcccgggcaaaaggctgggactttactccgggtggcggcgaggacgagtctgtgctccatcagctgccgcacccgccgcctcccgcccccaaaccccatccccgcggttgagccacgatgagcggcagagtcggcgatctgagccccagg

SEQ ID NO: 206102 - DNA, 105 bp, Homo sapiens
  chr22:31002803-31002908
  hyper
tgcagctgcagctcccgttccactccttgtcctgggctaggtgggcactaccaggggctcctttggtaaggagtaccgggtaggcacccggtcctgccaatccac

SEQ ID NO: 206103 - DNA, 174 bp, Homo sapiens
  chr22:31002957-31003131
  hyper
acagatcaggcatcaggccctctgcgctggtcccgggctctttaagcaggaacgtgaatggcctcaagatgtctcacatggtcccactagccctcctcctccctttgttccctacctccaggagggctgctctgcccttccttcctctgttctttggccttatgttccccgcca

SEQ ID NO: 206104 - DNA, 43 bp, Homo sapiens
  chr22:31003186-31003229
  hyper
tggaggattaatcagtgacaggaagctgcgtctctcggagcgg

SEQ ID NO: 206105 - DNA, 360 bp, Homo sapiens
  chr22:31090400-31090760
  hyper
gtggcctctgggtgccgtacctgcttcccacccggctttcctgggtggcggagagcgaacccaccccagcctgggttgggggagggggcgtcggcgcagggtcccgtgggcagagctgcgctgggagctggcgggctccgcattcatcattgttcctccagcgcctggcacggctgggccgaagcagagaccgtggcctgaagcgcgccatccccttcggagttgaccgaccaccaagctcttccgcccacaggtgttgtcagagctccttccaccggccggacctaggaaggacccagggtccaaacatggcccgaggctggccgagagcacaacagccggcgggcgctgacgggcacg

SEQ ID NO: 206106 - DNA, 409 bp, Homo sapiens
  chr22:31198752-31199161
  hyper
gctccagggggcggagggagcctcctcgggcggtggggaggaggctggaggaatgaggacgcagcacggcgcgcccttgcagcgctcaggctgacgggcgggcgggcggagcgggcgcacggctcctctaggtccggctgctctctgagctcgcgggctggacgctgtccgcggtgctgaagcggcgcccgcggcagggaggcggacccggagccgccgggcagcacacacccaatcccgggaccgccctcctcccaggctcggagaggcggtggcagccggcactgcacccagatggactgagagcgcggcggcgggaaggcggcggcggcggcggcagcagcagcagctgcaagagccctcgcagcctcggggcaggacccacgtccacacccgagagcccctccct

SEQ ID NO: 206107 - DNA, 120 bp, Homo sapiens
  chr22:31477077-31477197
  hyper
tgcccacccgactcgctaaagccaccgaggcagacgaccccaagactcccaatttccgacctccctggcccgcgaggggcggggccttcctctcggggcgtggccgtcaaattgaatttt

SEQ ID NO: 206108 - DNA, 306 bp, Homo sapiens
  chr22:31556066-31556372
  hyper
tccgcttcctgcccgcaggcggaaccttagagcttcagccatggaaattaacctcttccggttggggccggaagtccctccgagaggggcggctccgcgtcatgtgactggagtccgcgtaggaggggtcggaggtcttacccaacagattgacgcggcgttagtattggccgtgtacccgaaaaactgattgactgggctggcgttaactgtgcggaggcaggtatgtgaggggctggggttggggcgggggcgccaaagtttagggacgggggcgggagacccgggtccgccttcccaggacac

SEQ ID NO: 206109 - DNA, 212 bp, Homo sapiens
  chr22:32145988-32146200
  hyper
cctccgcggcccgcgcttgcccagccagctcagcccctgcagctgcagccccgtcgtcgccaggtctacctgagcctacggagccgacagaggccgggggcgctccggccgccgccacctcttcgtctctatggtccccctgcacttcctcatccggggcccgagccagccatgcggactcgcccaaatcccgcccccgcaccgcgcgcgcg

SEQ ID NO: 206110 - DNA, 204 bp, Homo sapiens
  chr22:32149786-32149990
  hyper
cgagggcaggaaacgccaggaggtggcccaaggaagaggccgcacacgacgccccgcccccggctcgagccccggatgaggaagtggtgcggccaccgagacgagacggaggcccggcgagagcggcgcgggggcgcgagggcgggaaggaggcggggccccggggcggagccaccggagcggcgcgggttctcaggtgagcgc

SEQ ID NO: 206111 - DNA, 192 bp, Homo sapiens
  chr22:32340155-32340347
  hyper
cgtttcagggtggggctatgacaatgcactgcatgtgcagccgccatcaccgcgccccctccaccggctccgcagtctcctgcccggctttcccttctccacctccatctctgcggcggtaaaatgcagcactcgcagagcgcctgcgcggctttcaggccgggcggcggcggcggcggtggctatttatag

SEQ ID NO: 206112 - DNA, 95 bp, Homo sapiens
  chr22:32571844-32571939
  hyper
tgttccctggagcccgacttggggagggcggacggcaggaaacgcgggaggcgaaggcgaggctgctcagcggcggctcgggatgcctccagcaa

SEQ ID NO: 206113 - DNA, 420 bp, Homo sapiens
  chr22:34316313-34316733
  hyper
accgccggggccgactccacctcccgcgctccaagccgattcgtcccttcagggcagggcctgcccgcgaacagcccggcgagacgagcgcggccgcgcccccagcttcgggcgcccgggctccggcgcggcggcggggcaggagcagactggccgggccgggcgccgaacgcggcggcgcggggggggctgcaaccggccgcggcgcgctctcccccagggcctgcgccgcccgcccgcggctccgcgggaaagaagcgccggaaaaggcctcgccccggcctggggcgcggggccgggggcgcggggctaggggaggcgccccgggaaggtcacgggagcggaggcgcggcgagtggatcgcggcgcggtgggtgcggggagccgaggcgggcggcccccgccgccgggagcgctcgc

SEQ ID NO: 206114 - DNA, 256 bp, Homo sapiens
  chr22:35767978-35768234
  hyper
tcctttcccgagccacgtggccgtgtttttcctgctgagtcacggtcccgaggtctattttcgctaagtcaccgccccgagatctgttttcgctgagtcacggtcccggtgtctgttttcgctgagtcacggtctagagatttgttttcctcagagttccagctgctccaggtttaatcccctggggcaaagtccggactgtccggctggagtctggagtcgggacatgcctcagccagcacgtcctcggcctcgt

SEQ ID NO: 206115 - DNA, 191 bp, Homo sapiens
  chr22:35777069-35777260
  hyper
ggccgcggctccggcagtcaacgcctgcctcctctcgagcgtcctcagcgcagccgccgcccgcggagccagcacgaacgagcccagcaccggccggatggagcgtccgcaacccgacaggcaagcgcggggcgcgggacgcgggacgggcgcctttctctcccaaccctgcttgcgtcctagccccaccc

SEQ ID NO: 206116 - DNA, 195 bp, Homo sapiens
  chr22:35796009-35796204
  hyper
tcggcagacagtccgggcggcggggctggagggctcagaacggtccaatcgctggccgcgaggctccggcgaaccaatgggagcgcagcggctgcggcgtccgaacaccgcctcttgtttttcccgcgaaactcggcggctgagcgtggaggttcttgtctcccctggtttgtgaagtgcggaaaaccagaggtg

SEQ ID NO: 206117 - DNA, 58 bp, Homo sapiens
  chr22:36424337-36424395
  hyper
tgctcaggccgggatcggctccgtctcctcccgctccgggcaccggcagctccagctc

SEQ ID NO: 206118 - DNA, 78 bp, Homo sapiens; identical to SEQ ID NO: 57980
  chr22:36424418-36424496
  hyper

SEQ ID NO: 206119 - DNA, 186 bp, Homo sapiens
  chr22:36425195-36425381
  hyper
tcctggaggcacagcgcggctggagtgcggggcagcgcggggggggcggggtctgtctcctttctgggcggggccgtatcctggagcaggcggggcttgagagacccgaaggccagggagtggctcctgcttgcggtactagttgtacagagttaagtcctgagtttactcgcctgagcaccttgg

SEQ ID NO: 206120 - DNA, 278 bp, Homo sapiens
  chr22:36462014-36462292
  hyper
atggcaggaaatcagcgttttccaagaacgcccagtggcgcgggcacgggcctgagtcccgccgcccactgctctcgagaggccggagcagcagctccgtggcgccccctggaggccgcccctgctggcgccgtcccccgggtgtcaataggccatggcgcgcctccctctcggttgagagctgtgggagcccaggacgtgcctattaaaggtatcttttgaagtgagagggacaagaaaacgccttctctttatgtgactctctgttccccagcaaa

SEQ ID NO: 206121 - DNA, 207 bp, Homo sapiens
  chr22:37172011-37172218
  hyper
gaaaaggtgcaagcgagcggacacggcctgtgctccccgcccagcccctcagcacagccctacccagagggttcaaggaaggacgatccggctctcctccgatcacaagtaccgggccggatgcactctccaagcaaccatagcccacctgccccgcctcctcctcctcctcgctgaccctcgattggttgccgccaaaagctccca

SEQ ID NO: 206122 - DNA, 50 bp, Homo sapiens
  chr22:37172609-37172659
  hyper
cttgctctgacttcgcgcggttctcgcggcttccccggttcccgggttct

SEQ ID NO: 206123 - DNA, 119 bp, Homo sapiens
  chr22:37252548-37252667
  hyper
acctcctctaggtggcgctgcggagcggggactcggctgctgatcgcggcgccccctggcggtctgttcccgtcaacatttagattaagcgcagagccggttccgccagggaagtgcgc

SEQ ID NO: 206124 - DNA, 479 bp, Homo sapiens
  chr22:37414885-37415364
  hyper
cctccgcactcccccgggttccttgtttacagcaagccagcgaggctggggcgtgcagcgggataagtttgcagattccctctggaaagccggccccgcccctcccagccggcccgggggcccagcgcagaagcgggtggggcaagagtttccgaggactccaagtaggggcgcttcctggggcggggatctggctcctagaagttacagtactcgatcccgccaggaaagagcaatgaaagcatgcccgggatggggggcgatggcatcttgggcttagaatcccctttccttccaaggcagagggggtgggcgcacggctaggaagctccgcgagccgcgcacacgccatcgcctgcggcctccccaggcagcccgagctcgcccgcctccagagtgcccgagtccggcccgtagctcgctgccctctgccctaggtggatcaggggttcccggggcaccccgtcccactctcgcaa

SEQ ID NO: 206125 - DNA, 40 bp, Homo sapiens
  chr22:37595694-37595734
  hyper
cgctccagccgtccccgcagccctgcgacaggcttttgag

SEQ ID NO: 206126 - DNA, 179 bp, Homo sapiens
  chr22:37640350-37640529
  hyper
cgtttgcagggggcggagcatgcggtctggcagagcagctggtgggaggggcgctcaggtgctgggctgagccctggccatccccacaggccccctgcgtggaggctccagcaggagacctgggggccctctgtgctgggaggctcacttcctgtccacggggcgggcccagaggctgt

SEQ ID NO: 206127 - DNA, 500 bp, Homo sapiens
  chr22:37914933-37915433
  hyper
ccggcccaggtcgtggcccactcgggacccgcggctcaccggtgcggttgacgcggcacgggaagcggtaggtgctcagcacctcctcctcgtcctgctcgtcgatgacccggcactggcgcagatacggcgtgagcttggccgggttcagggcgcgagccagccgatgccggacgccctcgattcgctcccacagcgcgtcctcctccgcctcagaccccgagccggccccggcctcctcctcggcctcccccgcctccgcccggcccggcatggccgtgtcctcagggtctgcgggcaagaggcgcacgggggtcgaccagggctccctagggctagatgtgcggccaagcacccccggggcgtcgtccgcagacccgccgtcgggggcgcgccccgagctccccgcgactcaccccgcacgctacagtcgcctcgggctcccgggtccgcactcgggcggcggctccgccggcgcaggggggcggtgcccgtggcgc

SEQ ID NO: 206128 - DNA, 615 bp, Homo sapiens
  chr22:37956588-37957203
  hyper
gagccaggtaacagcccgggcgcgcgggtcctcggggcggaggccgtggaggccggcgggtcccggcgcccgcggggactctgcaccctactaggctcccggggccggaacggggacgggacccgcccgggagaggcgcccccgggtgcccacaggaaggccgggcgcggccgcggagccgcgcgaggaaactccgagctttcgggcttcgtgtcccgttccaggctggtggagggggcagaggatcggacacggctgagcggccaaaatgcgcgaggagggggcgagccgaggggcagagcgggggctgtctccgcgccttcctgcgcgggggaaggaagggccggggcgggcagcgggcgacgcggcggaatgtctcccctccgccgaggcccacgcggagagcgggaagtggggggtggggggcccggggagatggacaggcaccctgcccccctccccgaccgccgcattccaggctggagccgcggatgaggtcatcccgtccggttcccctccggccaagacagccggtcgtccccttcccccgcggagcgaccctccgcgtcctgagccccgtccccccagggaatgttggatggccgaagtctttcc

SEQ ID NO: 206129 - DNA, 375 bp, Homo sapiens; identical to SEQ ID NO: 58009
  chr22:37957264-37957639
  hyper

SEQ ID NO: 206130 - DNA, 34 bp, Homo sapiens
  chr22:38072875-38072909
  hyper
ttggtcagaggatgccgggcgggaacaaccccac

SEQ ID NO: 206131 - DNA, 58 bp, Homo sapiens
  chr22:38302076-38302134
  hyper
tccgcactggaggcggagctgctgctgggtggggcgcgcctccggcgcggacggaggc

SEQ ID NO: 206132 - DNA, 308 bp, Homo sapiens
  chr22:38577844-38578152
  hyper
gggccacgtgatggcctgaccaccgctctccgccaatcactggtggccctgtcccaggcctcctctaggctccgcccccgcgcccgaggacggcgggaggcggggtccgccattttttttaactgcccaatggaaggggctcccttagccaggaggacgagctttcggcgggagccaatcctcggcggcgaggcgcggccatgtttgtgcggggcagaaggtgcccggcttcttggcagtcctgttgatgagggccaggagtcctaccctagtccgccttccgcctcctaaagcgaccagagcctgga

SEQ ID NO: 206133 - DNA, 31 bp, Homo sapiens
  chr22:38713592-38713623
  hyper
gcgcgcgggcttacgcgtgggggtgggggag

SEQ ID NO: 206134 - DNA, 95 bp, Homo sapiens
  chr22:38863833-38863928
  hyper
ggcctccagtttctgcggagggaaggcagagggcacttggggcatgggcgacatgggtcgtggcgggcacccggcgcacacggcagccgggcgca

SEQ ID NO: 206135 - DNA, 208 bp, Homo sapiens
  chr22:39052566-39052774
  hyper
ttggcgcaggctggcgctgggaacccccgcgccggttacccctttcctcggtggtagaggccgggcggggcagcgcatgcgcgtggcgggcaggcggcaggaggcgggtgggtcaaggtaactctgggctacagagtccttgctgggggttcggggagcgcttggaccccggcttctgggacgcgtcaggtacgtctccgagtccggc

SEQ ID NO: 206136 - DNA, 167 bp, Homo sapiens
  chr22:39239179-39239346
  hyper
cgcggccgggcggcccctcacaccacccgggcggctcccccgacggcgcgcggcgctcacctccaggcggtcgatgcggtcccgcagggcgcgcacggcgtcctccagctccagaatgagcgcaggcgagtcccagggcccgtcggccatggtgtcgcggcggggcc

SEQ ID NO: 206137 - DNA, 32 bp, Homo sapiens
  chr22:39239412-39239444
  hyper
tggtgtcctggtcggcgcggatgcgcgcctcc

SEQ ID NO: 206138 - DNA, 31 bp, Homo sapiens
  chr22:39268735-39268766
  hyper
atttctttaaaacatcgccccccacccatta

SEQ ID NO: 206139 - DNA, 47 bp, Homo sapiens
  chr22:39638593-39638640
  hyper
cgggcgggcggcctgcggccctcgaggagccccgagaacaaaaggag

SEQ ID NO: 206140 - DNA, 189 bp, Homo sapiens
  chr22:39715621-39715810
  hyper
ggtagaggccggtcggccttacgggtccgctatataaagccaaatctggccccgccccttccggcgtgcgagcgcgcccccgcggcagacgacaggtcgggggcacgtaccgagcgccatttccacgcacgctcttccgctcctagctttcgttcagaagttgacgtcagcttcggagacagaaattac

SEQ ID NO: 206141 - DNA, 177 bp, Homo sapiens; identical to SEQ ID NO: 134161
  chr22:39898684-39898861
  hyper

SEQ ID NO: 206142 - DNA, 91 bp, Homo sapiens
  chr22:39930975-39931066
  hyper
gacagctttctcacgcggcgagactccaaggcctcagctgcgcccacccgggctaggtgggggtgggggtccggacgtccttctgcctcgg

SEQ ID NO: 206143 - DNA, 34 bp, Homo sapiens
  chr22:39953430-39953464
  hyper
aggggtgggagctcaccagccgccgccgtcagtc

SEQ ID NO: 206144 - DNA, 267 bp, Homo sapiens
  chr22:41418720-41418987
  hyper
tctggcttcccgagctgcgctcgctcccggcttccgccgaggtgcccggggcgccggcctggagcaggcgggggtctgggtgcctgggctgcggtcgggagcgcctccgaagaagcactcggtgcctgccccgctgggagcgcaagcattgttacctatcagcgccgcacttaacagttgttaatagcagtaagccctcactaaattgtcactgctggcagaccgcagtaactcggtctgacctcaagcacccgataaaagagttct

SEQ ID NO: 206145 - DNA, 191 bp, Homo sapiens
  chr22:41593089-41593280
  hyper
tcctccgacttctcccgcaccgcggccgcaatccagcccggacactctgagggctctctctgagctgggcacggtcctcgctgctcggccgagtgcagccccctcacctcagtgcgactgagacaaagcaagggtcccaccggcccctgtcccctccctaaggcgcgccctcagggcgggagacccacctc

SEQ ID NO: 206146 - DNA, 231 bp, Homo sapiens
  chr22:41682703-41682934
  hyper
ggaaatagtaactatcgtagagaagctccgcagacaccacttgaacggccacgttaacatcaacagcaggacaagctgacattcatcgcacgctttctgtgtgatgcactgagaaaaacacggcgtcaccgtccggtctataatgcatgaccttagtctaatcatgagaaacccaagctgagggacatggtacagaataactgatctgtacccttccggaaatgtctgtat

SEQ ID NO: 206147 - DNA, 451 bp, Homo sapiens
  chr22:41697265-41697716
  hyper
ggaagggcggaggcgctgggtttgagcagcatcagcccagaaatgcagaactgccaaaagaaacccccctaaaaggcaggacacttttaaagaaaataaaggtgaattccaggcatgagctttcgacggggaatggggcttccccgactcgcccccacgccccccgcccttctccccaggtgcgcagcccgcgccgcccaccccgggcgcggcgaggcgacgggagccgagctctctaggacccgaggaggaagagctgcagggagacagtgcctccagcgggtgctgccgcgagcggccagccgaggggctggaaatgaaagtaaagcgctccagagccacatggacggagctgccggggcggcggcgccgggagcaggatgcggccgcccgtaattaaatagcatttactcttattattactaataataataacgtaatcatacctcta

SEQ ID NO: 206148 - DNA, 212 bp, Homo sapiens
  chr22:41763239-41763451
  hyper
gtcagaggattggcgcgacagctccacgtgctgcagctggcgcagggccaggcccgccctgccaagcagcgggaagggaaggcctggctgcagccggagctggcaggtggccgagccgggggtggacgggcgggctgggactggtgctggccattggctgcctcaaggctcccaccccgcctgcctccctagcctgcggctggcggcccctg

SEQ ID NO: 206149 - DNA, 395 bp, Homo sapiens
  chr22:41864720-41865115
  hyper
gttcctgcctccacgtcgctgtgattggttctctaagcttccgtcagtttacaatccttgcaccaggcccgtcttgctctcgcgcgagtttttgtcgctgctgggcggccaggtcctggcaggtgcatgaaactcttaaaaactctcccagatttggatggcggagataactaaaatttgttcttgggtaaaacatctttgtgcttggtatctatttctgcaagtgtctttgggcagtccgatttcctcttgcgtgtctgttcgttgcacgtgagctccgcccattgcgttcacagggttctggcgcctctagggaggcctcgccttcaccgtgacgccccactcttccgggcacgcccctgcccaaaggctttaaaggcgccgtgtgggacgtc

SEQ ID NO: 206150 - DNA, 269 bp, Homo sapiens
  chr22:42016977-42017246
  hyper
agaggccgccctgcgctgctcgcgcccccacacccgctaccggcaacgactactgtgaggtgacagagaggggacagggagggcccacacggaagagggggcgggggcagggatgcacttttgcgcatgtgcttacagtcctgacgtaggaaggggcggggctttgccgaagggggcggggctctcgctgatgggttggctttcgtcagggacataggtagaagctggttggggagtgtgcgtgccagcctgacgcgatatagtgcgca

SEQ ID NO: 206151 - DNA, 80 bp, Homo sapiens
  chr22:42228658-42228738
  hyper
gtccaggtttgactccgctggctttctcaggcgggcagggcgggggtaggcagctgggaagatgacgtaatgtgctccca

SEQ ID NO: 206152 - DNA, 98 bp, Homo sapiens
  chr22:42310966-42311064
  hyper
ctccccggcccggcaggtgtgcgggtcttggccctagcggaggccgcgccggggccgcgggccgcccgactgcgctaccttcccgccgcgctctcagt

SEQ ID NO: 206153 - DNA, 47 bp, Homo sapiens
  chr22:42311269-42311316
  hyper
cccgaaacattcatcggaactgggcgctcgaaggggatcagttctag

SEQ ID NO: 206154 - DNA, 144 bp, Homo sapiens
  chr22:42322755-42322899
  hyper
ggctccggggccctcgcctcatggtgccgacgccgccgcacaagctgcggggactgaggctgagctgggctccggggccctcggggaggaagcggggggcggggggagcactctgccctgccccgcccccgcctgctgggtggg

SEQ ID NO: 206155 - DNA, 413 bp, Homo sapiens
  chr22:42470216-42470629
  hyper
gaggggcgttaactccagcctcccgggcggggtctcccggctcccgcggccacgttgcagcccaggcggaggcgcgggatctcgagctgggatcgccctcttgggcttcggtgcgatcggcggcgggaggtgagagtgggcccggcgggctccgggaggaggtggccccagggaaggtgtggccgcggggaagtggcggcgaacagccccgacgcgaggacggggaaaccaaggcggcagccagggagaccctgaccgaggtgacctctgtttagggcgacaaccgggttggggctccccgcagtggccactggcccggcggtcccgcacccccagcccgcctctcctccaacaaaagaatccaggaagacggtggggcgggcgggaggcccggtgtgcggtggcctggcccc

SEQ ID NO: 206156 - DNA, 400 bp, Homo sapiens
  chr22:42669780-42670180
  hyper
cctctggctcaaagacggcttttggaaacactgtatcactccttttattacaaactcctctgccctcctccaggcgcctgggccactccaggattacaaatggagccttctgcctctaggtcactgattctactaccatctgtcagcgtggattgattgaggagactggccctgctcggcagatcagtgacttgtgcgaagtgagccagggtgtcggtgccttcagagcaggcggatgtccttcctcacttgccagctctcgtgagcagacacacagccctcacctttatccttcaccaagctccagctctccttcctcttgggaggcgccgcctgctaactcagtcacaccaagagggaggcctggaattcctgctcacaagctcggggcttcatctgc

SEQ ID NO: 206157 - DNA, 186 bp, Homo sapiens
  chr22:43115875-43116061
  hyper
gcggaggggaggaagccgcagagagggtgtcgtgagggaaaggtgggtgcaggggaaatggcgctttaacccactcagggccagaggctcagccgagactatccaggtgggaacttgtccctccggatgacaggtgatgaaactgagggaaggggactcgccctggcagtgaaacgggatgggcgc

SEQ ID NO: 206158 - DNA, 117 bp, Homo sapiens
  chr22:43116624-43116741
  hyper
gccgcgcggggttcgtgcgcgcacaaatgtcgcctccagaacaggtggcccgggctagggcggcggcccagcccctccgcccctgcccctgccttcccgaggcgcctcctccccact

SEQ ID NO: 206159 - DNA, 126 bp, Homo sapiens
  chr22:43547284-43547410
  hyper
ggacacacggcaacgttttagatgttgggtctggccgggcggccgtcaccggtcaccatggggaggaggaggagccgagagacttgctcgcggccggggggaggcagaagcgcgtcccgcgggaga

SEQ ID NO: 206160 - DNA, 491 bp, Homo sapiens; identical to SEQ ID NO: 13484
  chr22:43659642-43660133
  hyper

SEQ ID NO: 206161 - DNA, 132 bp, Homo sapiens
  chr22:44287922-44288054
  hyper
tcacctgcgccccagccaatgaagtccccgggtcgcgatcagcccccactccagttgtgcgccaggtgtgccccagaagtgcccgcgcgctgtgtatacgctggcgccgcccccacgcgcccgccccggatc

SEQ ID NO: 206162 - DNA, 98 bp, Homo sapiens
  chr22:44351287-44351385
  hyper
ggcgcggagaaggcggggaatcatggccgcccccagtgttccgcgtccgggggtttgtgggagttgccttgacctgcagctccgccaccgcggacccg

SEQ ID NO: 206163 - DNA, 123 bp, Homo sapiens
  chr22:44420680-44420803
  hyper
ttccatgagcagtgacgctcacgtgtgcagggcactctgggcagacacggcctgggggacccactactgggtgttgcgcgggcgccctgcagggtgcggggctcagggcgtgcagggctgagg

SEQ ID NO: 206164 - DNA, 642 bp, Homo sapiens
  chr22:44893741-44894383
  hyper
caggagggtgaggggcggcgtggagggcccgcgcgtgggtggcgaggctgcacaaagccccgcggcgcccgccccgcgcccgcccgggggagaacaaagggggctgctccttggcggccgcgggcctgggggccaccacagtggcggggcccggccgggcagggggccgggggcacgcgtacctggggtctcgcggttcctccgcggctctgtccgccgccggccgtgaccaagatggcccgcgcgggggacgcggccaggccgatgaatcaccgcgcggaccgccgagaactgcttcccggtcagcgcagccaagcgacggcgctggcgatggcggcgggcggcctccggcaggtgcagggaccgggccaggccggggccggggcaggggcggggccggggtcgcggcagagggcgggtcaccgcgcggcctttgtgcgggcggggccggcgcggtggcggtggcgggcgggccttaggctggccccgctggttgccatggataccgaccgctcccgcgcgtgcggagacgaccgctgccccgcccccggaagtgatgcacaaagtcccacccccccccaccccccaactcgggctgctgccaatcggggaagactgtagttgctgcggcgtcttcatcag

SEQ ID NO: 206165 - DNA, 557 bp, Homo sapiens
  chr22:45097773-45098330
  hyper
acatcgtgtgggcgcgaccgcagtgctgggcggggggcgggcgcttgggcttgggccctgcgtcctgtgcgtgttggtttcctgtgggcacgtggggccctcggaagaggggaggagggtgagcacgtcctcagagggcagacccagcgaggcgtcgtggcagctgcggccgcggagacgccggctccgcctcttgcacacgccccctcgcctgaggccccgccccgcccgcgatgcccccgcccccttccccgccccgccccccggggcgccgagacccgcccctgggcccgcccccgggtccgcccccggcctccgtttgcgccgggtctgtgctggccgcgcgcctggcgctccacgctgagcctctccgtgcaatgattaacccggcggggcggccggcgcgggacccgagacggaggcgcggggccggggcgggaccccgcaggaccgctcggcttcctgctctcgccggagtttccgcgtagagggcgcatcgccggcccggggcccttggtgcggcgtggcgcagggcgcggcgtggggcgcgcgtgggc

SEQ ID NO: 206166 - DNA, 470 bp, Homo sapiens
  chr22:45098381-45098851
  hyper
atgagttcgcccagcctcagtgacctgggcaagagagagccggccgccgccgcggacgagcggggcacgcagcagcgccgggcctgcgccaacgccacctggaacaggtaaggccgcgccctcccggccacccggaggccctggagccgggggaggggacccctgagccgtccgcgggctaggggccgccccgagccaggaacgctgccgaaggcggcgcggcgcttcacagtttgcaaagaacttgccccgccggagtggtgcgggcctggaggaaagttcagtgcagcgtggttccagaacccagggaagggagcgaggcccgccagcgcccggggctggcccagaagcgcccggcgggtgggcggcggggtgggccgggaagccgcgtgcccgcctcctacccggggtctttccacgtctccactgcggtgctcgtgacaacctgggaggctaacggagcaggaagt

SEQ ID NO: 206167 - DNA, 92 bp, Homo sapiens
  chr22:45098900-45098992
  hyper
gggtcgcgcaggcttcctgtgtctctttaagctcccttcggctttcccttgagaggccccctgtcctccagctgtcagcagggggtgcggca

SEQ ID NO: 206168 - DNA, 454 bp, Homo sapiens
  chr22:45148203-45148657
  hyper
gcatgggtgccgtgcgggacggggacgcggcccagccgggaatcggggtgcccagggtgcgatgtgcgaggggctcctgagcgcgtgtgctccgcccgaccccgccctgtccccccgacacacaggtggacccagggtcagctcgtgcacctgggaaatggctcccgccgggtagcaggggcggaggggcggggctgggcggaggggcgggggggcggggcctgcccgggagccacgtccggggaggggccaggtgagcggcagacccggcacgcaggtgggggccggcggggtccgtggccaggtaaggcgggcggcggcgggagggagcgcgcagggaggaggccgtgctcggggtgggggggtgcgccgcgggggctcccagggcgtgtacggggacaaggggccgctggccgggtagggacgcccaggcgggcgcgacgccacgtgcggc

SEQ ID NO: 206169 - DNA, 169 bp, Homo sapiens
  chr22:45148870-45149039
  hyper
tgttccttttttgcttccgtcctggggtctcaggttaggtcgggtcagcgcctgggggaggcacctcccccgcccccacacaccccaaacctacaaggtgggtgaggtcattcccgtttcatagatgagaaaacggaggccggggcaggtgctgcgctgattcaaactc

SEQ ID NO: 206170 - DNA, 42 bp, Homo sapiens
  chr22:45403189-45403231
  hyper
ttctctctcgccagggtcaccggcagccgccccaacctcgtc

SEQ ID NO: 206171 - DNA, 197 bp, Homo sapiens
  chr22:45403714-45403911
  hyper
gtgctgaaaccccgagcgctgagctcagcgcaactaagtcacaatggacaacttttcctccccggagggggcccggaggggggggagcggtcgcgcctccgacgcgtgggagcttctcaggtgtccccaactacacctaacgcccggagcccaaagttggagcagaactggggagtcccgggggcgcgtttcttttg

SEQ ID NO: 206172 - DNA, 54 bp, Homo sapiens
  chr22:45899073-45899127
  hyper
agcgccgaggcctcggcgacgcccccctcccccacggccagctccggtcctcat

SEQ ID NO: 206173 - DNA, 38 bp, Homo sapiens
  chr22:46302277-46302315
  hyper
gccctgttttactgaggaagaaacggaggcccctgggg

SEQ ID NO: 206174 - DNA, 57 bp, Homo sapiens
  chr22:46363503-46363560
  hyper
ggtccacacccaagcaggggccctgggctccccataggcacccacctgccctgccag

SEQ ID NO: 206175 - DNA, 508 bp, Homo sapiens
  chr22:46366558-46367066
  hyper
gcctaaggctgaaacgccaggattctggggagggggaggcttcctggcctccaaccgctagacgctgaaattccaaagtcccctggttgatccagttcctggaaaggacaccagaagcaggacccagggaccctggcactttatcagcctgggtccccactgctcaggcggtccccacccgcatgcgccctgctgccccgcccccctcaggcgatgcctccgcagccggggctgcccgccgggcctggagcgctctctgtgcccggaccttgtaattatgtcccacagcccgggaaaccgcgggcctcgcagcatctggctgcggttgcgaacttttgtttcaagatgcgcgactatttatagaaggaaaactggtaggatagtaatttcctaggagcaagaggagaaattggctgcgtctttattaaatgggggtgggggcgaggcgatgtattaggactgcaaccgcatggggggagggggtggcgcagggagcgggaaggcagcg

SEQ ID NO: 206176 - DNA, 236 bp, Homo sapiens
  chr22:46367124-46367360
  hyper
gagggggaagggaagagaaggggagggagagcaggctctgaggtttaatcagtagcatccagcttaaattcccccaaacggcggttccataaatgaaacttctttttaagtcagaggccagagcatatgcgtcccattaggaattcggcgaagccaccactgcgcgccccctgggctcactgggctggactcggccctgcccggagcttctcagagccccgtgggctctgccttgc

SEQ ID NO: 206177 - DNA, 274 bp, Homo sapiens
  chr22:46465987-46466261
  hyper
cgccaaagggccgtcgcaggcgtctggggacatcagctccatgcggctctgggccagggcatgctcgggcagggggacggggtctgcgaatagtgactctgtgtccgcgtgcgtccccgagagccggaggcccaggccggcccctctgcggtttgggaaccactcaggcgcctctgtggagcgggcgggaaaagacgccgcggcctccttggcattctaacccgtgtccggaccctagaggccggccggtctcaaccaccgggagggcctggga

SEQ ID NO: 206178 - DNA, 42 bp, Homo sapiens
  chr22:46512497-46512539
  hyper
agcagcccccacctccgaggccagccccgcctgcaccccccc

SEQ ID NO: 206179 - DNA, 33 bp, Homo sapiens
  chr22:46933056-46933089
  hyper
ggcggcgccatggcccggagcccgagcccgagc

SEQ ID NO: 206180 - DNA, 179 bp, Homo sapiens
  chr22:46933237-46933416
  hyper
ggcctcccccgcagcttccacttcgagagcactttgcgaaagtttgcgaagttggtttcaagatggctcctccgcgcgtcccgggagggcgccgcgcatcaacctgcggcggcggcggcggctccaggcggctccaggtggctccggcgcgggctcggccggacgggcgtgggaagcgg

SEQ ID NO: 206181 - DNA, 420 bp, Homo sapiens
  chr22:46933836-46934256
  hyper
ccaccccggcagaacagatccacggagaccgccgccaggagtgccgcgcgggtaggacccgggggcggaggactggggccgagaggccggggagcccccccccacccattaaggactgcggaggctgtcgaggagggttacccattttacagcaagacgcacggaggctaaaatgcttcaccccgactaaaactccctggactttgaagcccaataggcagctaccggatctgcgtcccacttggtttaaagcgcaacttttaaatgaaagaagaaaaccccggttgacataagggatttggagaggacggcggaggcgcgctcatctcccgcgtgcggcccgacccgagcgttcgcggacgcatcgcggaatccccgagcgtccggctcctcccgaagcgggttgcggggaaggcgggg

SEQ ID NO: 206182 - DNA, 73 bp, Homo sapiens
  chr22:50170510-50170583
  hyper
cagcccagagcccctcggtgtgtgatgaacccttccccgggaggttggccagggtggggctccacacagggca

SEQ ID NO: 206183 - DNA, 87 bp, Homo sapiens
  chr22:50242069-50242156
  hyper
tcagccccctccccggtcccccaggaaggggccagactccagctcagcacccagcgcttcctggtctttcccttctgggcgccctcc

SEQ ID NO: 206184 - DNA, 91 bp, Homo sapiens
  chr22:50242190-50242281
  hyper
cgctcccacccccggccgccgcctggacagaggcgcgcaatccggagggcgcaggctccggcccggagaagggggtgccgccggcgttccg

SEQ ID NO: 206185 - DNA, 189 bp, Homo sapiens
  chr22:50242512-50242701
  hyper
cagagtcacggagacactttcccggtgtgggcgcctcgccgcgcttcctccccgcgggctgcggccaccccagggcaggacagagccgagatgcccgggtgggagcgatgcccgcgtgggggcgatgcaacgggggagatgcctggggggagggtggtaaggtgaaacctggtggagaacaatgggggt

SEQ ID NO: 206186 - DNA, 401 bp, Homo sapiens
  chr22:50246433-50246834
  hyper
ccaccgtgcccggccgatatttgaatgtcatatacttttcatatatgctaaaatactgttttaattctcccccaacctcttaaaaacgagaaaagcattcttagctcaggcaccatagaaaacccggctgcaggctggacgtggactttggaacagtcggcgtgcgggtgaaggggcacagccgcggggcaggggcgggctccgggcagaggcggccgtgataactccacgctcccgctccagccggtgaccgccacgcgggctcctctcactctcacactcaggccgagaaaatgccgaaagccgtgtcaccaacgggggacctcggggccacattcagcatgcagagtttatttggtctgctcaaacatttgtgttaggaaataacacattaaaagtgc

SEQ ID NO: 206187 - DNA, 84 bp, Homo sapiens
  chr22:50745645-50745729
  hyper
gagaccatctccgctcggcgcacggagctcggcggctgaagagtgagaggcaggcgcggaggagggatccgacgcggctccgga

SEQ ID NO: 206188 - DNA, 183 bp, Homo sapiens
  chr22:50765110-50765293
  hyper
gcccctccaggaggcggcggccgaaggccagggagagtgcggggcggccgagggccccaagcgaggcgggactggccccgagaggcgcagccctgcccacccgcccgcgcccgcgctcgcgcccgctcacctccagcgcctggcccagctccaggtcgaaggtgaccacgcacacacactcca

SEQ ID NO: 206189 - DNA, 307 bp, Homo sapiens
  chr22:50874004-50874311
  hyper
tgtgtggcagaggcgggcccagctgtggcctctcctccctatacccgtgtaaggtgaggaagctctggatagtcctccccgcaccccaggaccatagtgaggggactcctgggttgggctccattagcccctggcgaggtcaggcctgccggctgccatcacaaataataaaagcagggcaggaggagcttccccacatcctggagggcaaagtagatgggtggaggtggaggccagggacagctccccagggcaggggcagtttaaggaggcgaggggcaagcaggaagctgttggatcattccat

SEQ ID NO: 206190 - DNA, 265 bp, Homo sapiens
  chr22:50964979-50965244
  hyper
ctcccctacaccccgtccccctcaccgagcgtggtgaccaggtcccttaagtctggcgggcctgcgccgtccatgcagagcagcgcctcctccacctccagggcgtggcccacgcagcgacccaggggcttgtccatggcggtcagcgctgccgcgacccgaagccctaggctggctcccacgccaacctgcggagaggaggctcagcgtggaccccccatggcggggccttctgcagccggttcttggtcgaactccagcccct

SEQ ID NO: 206191 - DNA, 639 bp, Homo sapiens
  chr22:50970392-50971031
  hyper
tctaccggtgttgggcggcagcttgtatttgggcccggggcctccgtagtgcgccgcgatggggccgcggggccggtgtggccgccaaaggcccacccaggcgtccgagcccatagcgcgggtggggggcgcttacggctcgcagcacctgcggacagaaggcggtggccgcggcccctgcaccgcaaattcttggggagcgcactttcccactaccctgggatcagcgcggggcggggcggggcctggaccgtatccctggcgccagcaaaacaaacgcgagcttccttcccggctgtgtggagcttggggccgggagcggatccagggccatcacccggactccaggcgcattaggcagggacgtgaactcgcgggggccaagtctagacccagacttggtgaagggaatcacctgggggtggggtgggggcaggagattttcgtgctgttgggaaagggtgccccgggaagggcctgcgtgggggacccggtgccccgaggtgcactgacctgttgtggtagctcctagcgtgggaaaacaaagcgacgtggctggacatccccgctccgccccgcccacctcccagaccccattgtggccctttcccgcttcctggcaaccgcactgactgcctg

SEQ ID NO: 206192 - DNA, 69 bp, Homo sapiens; identical to SEQ ID NO: 134410
  chr22:51021437-51021506
  hyper

SEQ ID NO: 206193 - DNA, 207 bp, Homo sapiens
  chr22:51066542-51066749
  hyper
aggaggagccggtaccgggctgcgggcgcttccgcctcggccccgccccgtgacctgtgacccttgcggggcggggccgggggcggggccgggggcggggccgggggcgggccggggcgaggggcgttgctgcgcgtgctcgctccgaggccgccgtgtgcgcctgaggctgttggctgcggtcttgaaacgggctctgggagcttc

SEQ ID NO: 206194 - DNA, 77 bp, Homo sapiens
  chr22:51112317-51112394
  hyper
ctggaggtccccgtggtccgacccccaggcctggggcgggggggggtccccgccatctcctccaggcccgaagctgg

SEQ ID NO: 206195 - DNA, 618 bp, Homo sapiens
  chrX:2815892-2816510
  hyper
aactgtaactagcgcgtcataaatcccagcccttatcttgaacaagagtcaaagaccggacttgaaggcatcccccaagataaaggtaggccctctgcagggcagctgtaagtcagctctcctccacccctctggctggccccctccttatccgagtcctgcttccttcctctttaaatctgcagacaatgctgcttctctgcaggtctctgcatattccctcagctcacagaccggctgcatacttggtattttcagggttaggtttgcaacacatgactggggaaatgcatgaaaaggaaatgatgcaagaattcaccgcggacacctttaggtgagaaggagatgtgacaaaaagtctctgcctggccaaaccgtagccaggctcctgaagcccctcccaggcccggtggtgcgtttccttatagaattagatttcagcaaagtaccggctaagtcagtttggcgagaagccaccattcttgatatcatgttcctcgtcgtccaccacccctggttgatgtttaacccccttggctggctttaacaagccaggttggtttagccaggacccgcttcacctctgatgtttccttttagtgctttgccatctgtaca

SEQ ID NO: 206196 - DNA, 129 bp, Homo sapiens
  chrX:2846678-2846807
  hyper
ccggggaacacggccgtgctggaaggcatcgagctggggggttgggggcgggacggggtgcctcttaggaagtggggcgggcaaggctacgcttcgggggatggagccttggggcgggacggggcgcgt

SEQ ID NO: 206197 - DNA, 156 bp, Homo sapiens
  chrX:2846856-2847012
  hyper
ctttgaaggccgaatccgggcagcggtgtagctgggcgtggaaggcggaggacccagcagggcgtgaccggcccagtttccgctccctccgggtcccggccagccttcctccgccctcccttcccttcctcctttgttctctttccctgcccttcc

SEQ ID NO: 206198 - DNA, 585 bp, Homo sapiens
  chrX:6144328-6144913
  hyper
aggaagaaggcagagaaaaagaaacccgcagtccggaaaaaaaaaaagccttctggggaaggggaggggtatgatgcggaggacgtcctccggctgcccctcgctctccatgcagaacatccgttcccagggtggcccgggccaggcctcgggggtgcaagggttggcctgacccccctgctcccgcccccgccgctccgggaagaaagggcgctgtgtctggcggcgagcaggcgccggaatcgtgcgctcgggcccagggttgcacggagcactgggcccggataccgggggcgcaaagcttcgggtgcggcccaggagaaccccgccgagggaccccagcctaccggttctcggaggggcgaaagagccaggtcaggttgagggacaggaggaggaaggggtgtccaggagactgactgaaggatgagagtgtcctccggggtagcgaccggcctcttggaaaaccagaggcggagggagcagccgcggagtggagggcgcaggccgggacctgggcctctcctcccacagcaagccccccacccacgcatcatctgcagccgagcggcacctacctccctc

SEQ ID NO: 206199 - DNA, 76 bp, Homo sapiens
  chrX:6145850-6145926
  hyper
ggcccggagatgaaggagggaaaaaaaatcgcttaaatgcgaccccaaccaagccggttttccctttttctttctg

SEQ ID NO: 206200 - DNA, 327 bp, Homo sapiens
  chrX:7065514-7065841
  hyper
gccaaaatgtctcctgacatcgccattgccagatgccctcagggctgcaaaaccgccaggtagagaaccgctaccatgcaggatgctaccatcaaagtgcgcccacagcagcaaccttggagcaggcaggcaagtatcctccaggctactttgcagacggggaagctgaggctgggcaccgctcaaggtcgcacgcatgcgtaaccgaaaagagagcgcggaggtcccgccgcgcctcgctctgaggagaggacgcggagccgcgcgcccgcccggtggaccccagggactgctcccacgtgctccggccccacgcgcgggccgccg

SEQ ID NO: 206201 - DNA, 373 bp, Homo sapiens
  chrX:7066303-7066676
  hyper
cgtcctgggctgcctagtggcgctccgcgcacgcgcaccttgggctttcgccgcagctgtagctgcagacccgggatgcggcgcgggccggcgctgtatgtttacccgcatcaattcctcctcacttcacacccggaatcgggccaagctactcagccagcggccgcgcagagccgaggccctcgtctggggacaaattcagtgcttgagtttggatcaggggtgtgaatgaggaaggagggacagtacaaggggctgtagagtggggaaaggggattgaagatgctcagggtggtatcacttctagccatcaggttgcagacaaatggccttggtcaggaggtccctgggtgggttcgcccgagcccccagt

SEQ ID NO: 206202 - DNA, 33 bp, Homo sapiens
  chrX:7895589-7895622
  hyper
cgcaggcaaggattcctcgtttagagtcatgtt

SEQ ID NO: 206203 - DNA, 213 bp, Homo sapiens
  chrX:8699223-8699436
  hyper
agaccttgaatctttggggttccgaattgaggcgcgcacagccactcgcacccccaacacgcgcatacacgcaccctggaacacgacttggcacaagtaccctggctggggctccaagggtgggcagcgagctctgagccctcagagagtgaaaaccatctttcaaaagagacaaagtgtcggcccgcgggcacctgcggggctggggctcga

SEQ ID NO: 206204 - DNA, 98 bp, Homo sapiens
  chrX:8699940-8700038
  hyper
cgctggacgctcccggcagacagcgactcgtccagccgccgcgcagcagccgcgccggggccggccgccaggcagccgctggaggccgccagccagag

SEQ ID NO: 206205 - DNA, 184 bp, Homo sapiens
  chrX:8700460-8700644
  hyper
ctgcccctcccaccttccccctccgtccaggtaaacgtcggtgtgagcaggtccaggcctgccaggaggggtgctcccttcagcaggagggaagaggcctcaggacccccaggggcgtcccacctgcctggggattgaccccgcgcccctaagtggcttgctttctccccgacctcccctgggt

SEQ ID NO: 206206 - DNA, 241 bp, Homo sapiens
  chrX:9433471-9433712
  hyper
cgctgctcgcgacgaggtgagtgcgcagggctcggcgggccgggcgcggggtccgcaaacttctgcggggaggcgggtcccgcgctgaccctccagggtccggccggcggctcggggcgcccgaacgctccacccgcccctggaactcctgtaggtgcaggtcgccaactgtccccgcggcgctcggactggggtgcggcgcgctcccaggagcctgaacaataccccgaggtggccgctc

SEQ ID NO: 206207 - DNA, 583 bp, Homo sapiens
  chrX:9433838-9434421
  hyper
tgccgattcaggggcttgctgggcaaacctgcgccaccgcgggctccggggaccggggtggagggcggtggcgggatttccccgctgttggggagaagagccccattcatacccgggacgcgggccggccctcccggacccgggtggaagcgcagcctcgcggagtggggcaagcggcgggcgaggtggcgcgggccccgtgtctgctcagtttctgacgcgcagaaactgtcaaggaagtcgggagccccagtcctccgcccatctccccggcctgagcgcacggctgggctgggggcacccttggcccgtcgagggtctgcagagcgccgcccggggagagcgcagacctgttgctgctcctgggctctgacggggcgggtggggtgggtctcgcagatcctgggccccggccttgctatccagggggaccttccctaacgatgggaccggtgctcggagtggagtatggggagtgcgccttcgggagtcggcgctggccggatatgtgacaactgtgggtcgctggaggcccgcctgcgctgggatagggcctggacttcacgtgcgtcgcctgtgttcc

SEQ ID NO: 206208 - DNA, 44 bp, Homo sapiens
  chrX:10023769-10023813
  hyper
cccaccttccaaaagcgctgtcaaacctccgctgtctccctacc

SEQ ID NO: 206209 - DNA, 160 bp, Homo sapiens
  chrX:13707093-13707253
  hyper
tcaggagcaatcgacccgaaggaaaagcacgatccaggccccgcctgcctcggctccaccttccccgcgcccgtcccccagggtctcggccgcgggaccccgccttccaggccccgccccgctttttccctggccccgccccggcccgtcgccatgttgt

SEQ ID NO: 206210 - DNA, 199 bp, Homo sapiens
  chrX:13707434-13707633
  hyper
accgggcggagtgcgcgggtgtcggggtctgagggggcggctcgggcctcgggcagctggggcggggtgcggtgcgcgcggggctagcgcgggtcacaaggccgccccgggagagaggacggctggttgtctccctgcctcctctctgacgcaggaggaaagacggtccccacacccttggggagagggactcacagaa

SEQ ID NO: 206211 - DNA, 999 bp, Homo sapiens
  chrX:13752357-13753356
  hyper
tcccaaaacaaagaatcttccggctccaaaaggcaacagtgcagccgttaagaaaccctgggttagctgaatgacccagtgaaccgcgaaaccacagcccccgagagggcggacgtctgcaggtggaagggctgcgcggatgagccagcggagggctggcaggtccggcccggccaccccggggaggggtggaggtacaggaccaacatccgcgtcacgcaggggctacgaagtcctccagggactcaaaacacccgccccccgccgcacttgctccattccctacctgcagtgggaggccgacaacggaaacgcaatgtcagtttccgcggaagagacccgcgccccgaacctgtagccagaacgccgaagcagttctcgcgataccctgggatgtgctctcgcgatacgtaggcggagcttccggccggtgctgggcaaccaagctcatgcgccgtagctcttcagctcgggaaggctatatttagcaggtttccggaagttgccggactggctgtgaggcggtcctgcctcgctgccttcagtccctagtgtctgggtccccgccctccagccgcctttgagtcgtgcctgggtcctcgcccttgcctcagaaccgcgaagaaaggaagctcgcgtgtttgctagaaaacctagttgggagtgcgaggcagagaacgttcagcacctttgttcctcccgaaccctcgggacagaggcagggttctgagggcagggattccccctcgtcttggccccaccgcccgggctgggcactaaactcgggccgcggcggggcgagcgaggcgggctccggagggagctgacgcctgatgatggcgcaggtagacacacctgccccttctcgggcggaaataaagtcttgttttgtgttcgttaaactttcgccgctaggcctcttatggcttccccggaggccactggtctgttttcagacgttcacgttccctctgccccgcaggtaacctataaccattt

SEQ ID NO: 206212 - DNA, 321 bp, Homo sapiens
  chrX:15756366-15756687
  hyper
tggggcgtaacagggcacgagggggcgtagcttcgatggccggacgtgcaggctgcggatccccgtaggcgagcgagcggctaggttcgtgatctggagagacgctcaggtaaggacgggtggccgagaggagtggggggcgaccagggacaggccgatccagacagggccgtgattcttcccacgactctccgctctggcgcaccgggttccggagctaggagagctgttgatcctgcgagtattgtctgggtcccggcagggcgcccgggagtactgagtggggcctaatggggtgtcgaactcccccaccccagccct

SEQ ID NO: 206213 - DNA, 134 bp, Homo sapiens
  chrX:15808573-15808707
  hyper
cgccctttcctgccagacctggaggggcggggcggtgccggcaagatggctgcgcccgagaagatgacgtttcccgagaaaccaaggtaagcgccgtacggggagatgagcaggcgagcgggccgatcgtgggc

SEQ ID NO: 206214 - DNA, 99 bp, Homo sapiens
  chrX:15809046-15809145
  hyper
aatcttccagccacaaaaagtacagggccgccctgaagaaggagaaacgaaagaaacgtcggcaggaacttgctcgactgagagactcaggtgatggac

SEQ ID NO: 206215 - DNA, 82 bp, Homo sapiens
  chrX:15817994-15818076
  hyper
gactctcacagaaggaggaagaggaggacacttttattgaagaacaacaactagaagaagagaagctattggaaagagagag

SEQ ID NO: 206216 - DNA, 122 bp, Homo sapiens
  chrX:15821797-15821919
  hyper
attatactgataggcaaagattacatgaggagtggttgctaagagagcagaaggcacaagaagaattcagaataaagaaggaaaaggaagaggcggctaaaaaacggcaagaagaacaagag

SEQ ID NO: 206217 - DNA, 87 bp, Homo sapiens
  chrX:15822233-15822320
  hyper
agaaagttaaaggaacaatgggaagaacagcagaggaaagagagagaagaggaggagcagaaacgacaggagaagaaagaaaaagag

SEQ ID NO: 206218 - DNA, 39 bp, Homo sapiens
  chrX:15826355-15826394
  hyper
gaagctttgcagaagatgctggatcaggctgaaaatgag

SEQ ID NO: 206219 - DNA, 122 bp, Homo sapiens
  chrX:15827322-15827444
  hyper
ttggaaaatggtaccacatggcaaaacccagaaccacccgtggatttcagagtaatggagaaggatcgagctaattgtcccttctacagtaaaacaggagcttgcagatttggagataggta

SEQ ID NO: 206220 - DNA, 214 bp, Homo sapiens
  chrX:15833799-15834013
  hyper
atgttcacgtaaacataatttcccaacatccagtcctacccttcttattaagagcatgtttacgacgtttggaatggagcagtgcaggagggatgactatgaccctgacgcaagcctggagtacagcgaggaagaaacctaccaacagttcctagacttctatgaggatgtgttgcccgagttcaagaacgtggggaaagtgattcagttcaag

SEQ ID NO: 206221 - DNA, 56 bp, Homo sapiens
  chrX:15836709-15836765
  hyper
gtcagctgcaatttggaacctcacctgaggggcaatgtatatgttcagtaccagtc

SEQ ID NO: 206222 - DNA, 110 bp, Homo sapiens
  chrX:15838329-15838439
  hyper
ggaagaagaatgccaagcagccctttctctgtttaacggacgatggtatgcaggacgacagctgcagtgtgaattctgccccgtgacccggtggaaaatggcgatttgtg

SEQ ID NO: 206223 - DNA, 535 bp, Homo sapiens
  chrX:15840848-15841383
  hyper
tgcaggtttatttgaaatacaacaatgtccaagaggaaagcactgcaactttcttcatgtgttcagaaatcccaacaatgaattctgggaagctaatagagacatctacttgtctccagatcggactggctcctcctttgggaagaactccgaaaggagggagaggatgggccaccacgacgactactacagcaggctgcggggaaggagaaaccctagtccagaccactcctacaaaagaaatggggaatccgagaggaaaagtagtcgtcacagggggaagaaatctcacaaacgcacatcaaagagtcgggagaggcacaattcacgaagcagaggaagaaatagggaccgcagcagggaccgcagccggggccggggcagccggagccggagccggagccggagccgcaggagccgccgcagccggagccaaagttcctctaggtcccgaagtcgtggcaggaggaggtcgggtaatagagacagaactgttcagagtcccaaatccaaataaactagttttgttcttaaa

SEQ ID NO: 206224 - DNA, 224 bp, Homo sapiens
  chrX:16730628-16730852
  hyper
cctcctcgcccaccttcccctctcctccctgctgctggcccagctcactcacgctggtgagcttggggtttgcacccgggtttgtgcaatggtccaaaacaagcgcctaaaaagtgattcctccagcacaggcagctcccgtcaccctccgctctggacgcactgggccccaggcctcgcccagcccggggaccgctcctccctcccgtggctcactttgcaaa

SEQ ID NO: 206225 - DNA, 56 bp, Homo sapiens
  chrX:16730902-16730958
  hyper
tcctggcaagccgagaccctcgctcgggtcctcccgtgcagatctcacccttgtaa

SEQ ID NO: 206226 - DNA, 327 bp, Homo sapiens
  chrX:16888225-16888552
  hyper
agccaagagcagcccgaccgctggcgctcctgcctttcccaagcgcgtcacactccccactgtcgaaagcccgggccccgtcttgctgcctgggtgctccccagacgccgcgtccttctttcctgcctcctccccgctcgcgggtaccgaggtctgaggcgctcttctctctctctccaaacttggaacgagacttttcaacccgcgcctcccagcccgcccaggcagctgagcgcaggcgcatccgccctgggaaaagtgagaggaggcggagaggcgggtctgggagccaacggctccggcgccgagaccaatgacgcgcggcgg

SEQ ID NO: 206227 - DNA, 70 bp, Homo sapiens
  chrX:27999798-27999868
  hyper
ttatttgaaaggtcacgaagtgaatgcaaagaactctgatagtcttgccaccagacggcaacattttggc

SEQ ID NO: 206228 - DNA, 358 bp, Homo sapiens
  chrX:39680206-39680564
  hyper
cggcttggagcgggcgtataaattaaccgggggccgcagagtgaatacattgcacgcggtatttattatgcggccggacctccgaggggttctccggctcccggacgtggcaaatcttgtccggagcgccgctggccgcgctgccaagggctaggacgagaggacccgtggcggggggcggggggcttctcctccagtcctcgggagccccggggcagcccgcttacagcggcggcagcggggagggtttaggcgaggagagacgcggccccgggcgccgctcgggctaggggccgggcggggagggcggggcggtgggagcgggcggcgcgcccggccccttagcattccgccggcg

SEQ ID NO: 206229 - DNA, 193 bp, Homo sapiens; identical to SEQ ID NO: 58276
  chrX:39680630-39680823
  hyper

SEQ ID NO: 206230 - DNA, 1155 bp, Homo sapiens
  chrX:39910498-39911653
  hyper
ttcaattttctcctttcctcaacagttttattgccttttaagaaaatttttgtaaaatataaatacaaaggcagagaatttacttacaaagttaaaacacagatttcaaacataaacacacgattcagaaaattttagttttatgtacatttccaagcaacctcaacatattatgttagttttcaatattttacagggtacagaaaaaaatagctcaaagtcttctttaaataagagcataaaatgtttaaacatataaacaatccggtttgatgcgtgaaaactaatttcacagcttttaaattaggatataaaagtttcatacaattagttgttgtgtgtggatatggtttgaatttatattacacactactggattacatccaatagcatttacctggcccgagcaggtactctgtaaacaaaacaaagttatatcaccaagtgccttccccgaattcgctccctcaaaccaaccacacagttctgaccactctacagtcatggcctgtcatcagagctttgtatgaaattaagtcaaagtgtggagctccttttactcatttttttttctccttaaaaaagaaaagaaacaaatgttccaagtaaaaacaaacgtatcccaaagcatgtgtgcattgaaaagtaaagaaacattataacaacttcataaaaactgacttaaaagtttaaaaggaaaaaaacatgtttctaagtccttctgactggagtaatttctcttatataaagaagagatattttcatatgtaatagtgtcctttctttacagaaatagttgtattatgacacatatgcacaaggattaacactataacacactgtacatggtgggtccagcttgctcaccagtagttgtctgaggccagatcactggggtggagccactctacagaggagcccagcagagtctgaatttcgttcgtgaattccaccagatctaacagctccttactttcagggttgaaggcttccaggtctttggagcaagagaacaagagacttgcagaaacctgccgataaaattctgcctctgcaatggtgacaatttccacgtttggaaaattgcagcgaaatatgcgggaggacattttcaatttcttaaggacatccgaaagcagtagccagtttcgtggc

SEQ ID NO: 206231 - DNA, 157 bp, Homo sapiens
  chrX:39913138-39913295
  hyper
ccctgagccacagatacttggatgttataacacggtaagaggggggtctctgaaaattcaaattcaaacacatcgctataggcatcgtcatcatcatcctggtcttctggtcctggggggttggctaaaacatcatagccactttcatcatctggtt

SEQ ID NO: 206232 - DNA, 78 bp, Homo sapiens
  chrX:39913508-39913586
  hyper
cacaaacagagctgccatagaagtcccaagtgccactggcgtcatcatcattgcgaccctggaggtcatttaaataat

SEQ ID NO: 206233 - DNA, 146 bp, Homo sapiens
  chrX:39914620-39914766
  hyper
ctgttaagaacttttccataagttcactgtgggtcattttcatgatggttctacctgagtacgtagccaaggtggggtcagcaccataagagagaagtagtcggacaatttccaagtgatcgttctcaacagcatcgtgcagaggc

SEQ ID NO: 206234 - DNA, 167 bp, Homo sapiens
  chrX:39916407-39916574
  hyper
ctggttccatcctgggcactacagttgacatcagcgccatattcaaggaggtgtcgcacaatgttgagccagcccctagcacaagcttcatgcagggcgcagtaacctgcgttgtcccgatgatttacatcacaaatcttgttctctaagcagtacaggaccacttc

SEQ ID NO: 206235 - DNA, 273 bp, Homo sapiens
  chrX:39921382-39921655
  hyper
gggacacacctcatagccaagcctggctgcccgctgcagaagggtctcgccagcgttcttattgacaataagtctccgtgcttccggcggcatagggcgagactgggtggtctcctgaggggaacttgagcatggcagctgtgtggactgggaggctggtagcagttgctgcaagcggtcgaagggctttggctcctgcttggctggtgacagatcatagtccgaactgggctccggccgctttctgaatctccggacagtcacctatcataa

SEQ ID NO: 206236 - DNA, 326 bp, Homo sapiens
  chrX:39921998-39922324
  hyper
cttgccatcggcattctccacgtagtattcccctgtcagtggcaatccccgcctggactcctgagggatcaagtgtttggttttgcacagtctcttcccggatggcttctcgctgttgtcggtgtatttctgcagcagggaggcagcctggcaatcctcttcttcgtctgcacacagcacatctgtcttctggttttctttaattttctgctgtttggcaggcggcctggaggctggtgcgcagcttggctgagcctgctttttgccgcctgcactggtggatgaaagactcttcatgggcggagagccggagaacacaggcaagc

SEQ ID NO: 206237 - DNA, 345 bp, Homo sapiens
  chrX:39922860-39923205
  hyper
cttgttcattgtcactgggtttaagagactcttccgaccagcttctgttgcctttggcctctgcccttttcctgccaggtttctcttcagtgatgttagtcccctgaggaatggcctcaggctgagtggcctgggtcacttccttcctgctttgccggccaggtttgccatctgctgccgacacctgctgctcccatcgttctctaaggtgcagcaagtggcgttgttttttaggatggagccctgttaattcaatgcacaccttcaggttggtcagctcactataatgtgggtcttctaagtggttagaggaactgtttgtcatttccctctcaggccagtcat

SEQ ID NO: 206238 - DNA, 264 bp, Homo sapiens
  chrX:39923588-39923852
  hyper
ctttagagactcgtcggcgtttggctttcagcagagggtcctctggcacctcctccgcagtggtctcagtgtggctgctgtcacctgagactttgcgtttcctgtccacccggagggtggggctgtgaggcatgtccgaggccacctggtctgcgggaggctcgctcacaggctgcctctccacaaagtacttctccacaggaagatctttgtcctctggggcttcaaagggatcacggtgcttgtttccaacactatactcgc

SEQ ID NO: 206239 - DNA, 187 bp, Homo sapiens
  chrX:39930225-39930412
  hyper
atctctcactttcgttctgttctgcaatggcctcctccagggtgaccgactttggctttttgtcctgatttcctttcaacctttcccagtcggctgggctgaatttgcacatctcggagtctttggttgctgggtggccaccttctctttctttcatctccaactctgagaagcgcatcattgcacg

SEQ ID NO: 206240 - DNA, 54 bp, Homo sapiens
  chrX:39930889-39930943
  hyper
ctcacagtaagcagcgggtagacataaaatactgtcctcttgtaatccttccat

SEQ ID NO: 206241 - DNA, 2832 bp, Homo sapiens
  chrX:39931601-39934433
  hyper
ctgcaatgcccgttgctcccggctgagctgactggaatctgcatacagttcggtagtgacacatttgaatcggtcacccacgtaacccgctgagttggcgattctctttgccagcttagatggcttcggtttcagaactttgccatcatttgattcagcctcatcagctccatctttggtataggtgggggtcacatccacacttggtggggcactgcccacacaaaatggtttgggatcctcttgggttttaccaaaagttacagcagggccatcgctccccagaggtggctccaggaatggagtcgagactggcaaccctaggttctctttgttggtacctgccagaacactgtccttgcttacggtgaagactggctgtttgaaagtataagtttcgtggaagtcactgatgcgccccaactcctctctcagggcgatgaaatcacggtgctgctgcagggccggctcaactgagggcttggggggctcagcgctctggccaacactctctgctgcaaagctgggtttggacacgtttgtgtcagttttagcatctggttcttctcggagaaggtctacgtagacaagcttgtcgcttttgacaacagtcttcccttgattccagttggggttcggctttaggttcttgtcggtggggacatctggatgtaacttggtgctgctagtttccaaaatctcggaaaaccgattccggagggttgggtcctcgtaacgggctctctcatgggaccgggatctcctctctggtttctcctctttagtaatctctatgggcgtgtgtggtatcaacatgggatgcaccatgcccaaccccagggcatcttggtaggtcacaaactctggacggccggtgggaagcccatagggcagcccaggctttggggcaaggtgcccaggaaacagactgccattgggtaacaaaactgggtgagggtagacaggtcctttgccatgtaaggagaggggacttacagcaatgccctcaggggctgggtaagggaggtaactcctggggtagggaattggtggggacctgaatgcctcatttggagacagaaatatagagcttggtggaaggccgttctcgtttgctttgaaactcggttctgggttgctggctttggcgcccttgctgctggtgctgctactgtgcttggcaggagtggccgggggctggcccacgtgctgaataacggatggtgtggtttctacagagctcctgctggttttggtgccatctgcattggcattgggggcgggtgatgcggaggctgggcggcctgcactcgacactgaccctgaaacgttagtgatgacagcatcggtgccgcccatgcgcgggcatgatgaactccgctgctgtggtatcgcccagtccaatgccttgtttttcagcgacatgcttttgccattgttctcttcgttaggacttggcccgggcaccacccaggatgagggagcagtgctgatgatttcagatctatagatagcacaaccatttcctggaggagatagtgtttctttcggaatctcacttccggagagcactaagccacttccagccctgctgtgaaccaggaccgtgggagccatctttttcatgtggtcagctttggaagcatctacatccaccactttagaagacaagtctagtggcttatctgtgacgtctttggtaacggtctgcttctccaacagaggaggtgagctgccatcttttctgtcttgaaccgctgtcttccgggcatgcccgggcactggctgggcaccttcgcccccttccggagccttgggatacttgccattggagagcctggccgcggggaactcgctgctaactgtcatgtatggctttgacagggcaactgaaggagaggtggagatcctggcatagtgcttgtggaactccgagtaggtgtctgcagcaggctgggtgggaaggtggactcggggtgacggccgaggcgaggggggcaacaggagagctgtgtcccccggcaggccactggtgaccgccttggcagagggaaccctgggctgcttactgttctggatgtgaggataggcgtgggaatcaacaggattcccagggctgacgcccatcttccacgggaggcttttgtctgcgcaatggacgagaggcgggatggctggggaggccgaaggtgtcgagagcctcatgggtgatgccaaggacgatgggatgtggggaccgacgtagtgaggtggcggcaggtagagaaagcgctccccattggtgcagactggagaatacagcggctgggccaagctgtaggactgctgaggtagcaaggccttgtacatgttcagtgaatacttatttggcgagtcgaggaaagggtagatggctggcgtggcaccctccatgtaaggattgacccagggcagccgcagataactagcaccattgatgttgagagggctctgtttgtcgctggcaggcctgtccaagcccagcgcttctgctgtggctacagcacttttttgtattccaggcggtgttttgtatatagcactgaagccatttgggggttttccagagacggcagaagcctccactgtctcgggtgtattcggtttgaactgcatctctggatttctttccgaagaaaacccaaggccacctagagtgcttgtggcagcctcccgacctttctctgagcccagtccacacaagctagaatagacgatgtttcccgggacccgcagcccttcccggatcaggccagtgcggtccatgctcagtgctgccaggccatcgatcctatgggccgtgctcgcatccac

SEQ ID NO: 206242 - DNA, 79 bp, Homo sapiens
  chrX:39935706-39935785
  hyper
cacgttgtggttcaagggattctcttccctcagttccagtctggcttttgaagcgtcaccatcatttacaaggattttc

SEQ ID NO: 206243 - DNA, 126 bp, Homo sapiens
  chrX:39937096-39937222
  hyper
ctgtcttcgctcgccccacacatgcggaccctctcgctgttcatccagctgtgaacgttcccatacaggggggttgctgagagcatgtcgtcttctgggatggcagctttgcttcaagcgtctagt

SEQ ID NO: 206244 - DNA, 927 bp, Homo sapiens; identical to SEQ ID NO: 58295
  chrX:39953710-39954637
  hyper

SEQ ID NO: 206245 - DNA, 1847 bp, Homo sapiens
  chrX:39955009-39956856
  hyper
agacgccggcggcgcgcgccctggcgcgcgggcactcacagcctctagctggagatcgcggactttctggaaaagattcattaacagcaaattacgcctcgcccggccacggcctacacgctgccagactcgtccgtctccgggaccccgggaagggcccactcgagcgtgcgagcggcgggaagcccgccgggaccacgcgtgacttcggccgccctactccacacacggtgccccaaggctctctccgtaaacagcaggcgctcgtcaccgccgccgcgagcccccgagttggcggaggctctgcggcgcagccgcccgccggctccgagcgcgggccccgcggcgcctcgccctccccgccttggccgaggatcttgccccggtgcgcaagttcctcttcgcctacagcctccttgccacacgccctccgagtgggaccaacttcctccggccgcagactttcacacgcccatcagggctacccaccagactccccattgcccagcggagggcccaggtctcgcccgcccccgccctccctccacgacgctgcccccgcacaagcacattctacacccacccctgggggctcataacttaaaacctacgctgaacatcggggagggagaggagggggaaagcgggagggggatcgcagattataatcttaaaagaacatttacaaaacaaagcgtctgacctggctggcgggcgggccaagtcggaaccccttgctctgctcgatttcttagtagtttttttttttaatccacgtgattcgtgctttggggcaagccaagaaaaaacgggactcccctcccgagttgcgcggcagcggcggcaggtcgagctcggctcggcccgaggcactcgccacacaccctcgcgcacgcacacgccgacgttccacttggaggaacgaccggcccccggagaggcgagacgaggcggcggtggcggcggctgggggtttttacagttctttcccgagtcgaaaaagaaagcagacggcaacccgctgccctccccttcctgctcgcgagctaacgccgaacccagcttcccagcttccagcccacctcccccccctccgcccgactcgcggcgctcagcggcgaccgcgctcccgcgcacagacacacacaggctgcaaacttccactctgcgaactccctgctctcctcctggcccaccgggaggcgccaggcccccagccgcgccccctccctccctggtgcccacgcggggccgcttaggttggctgcattttaaataacatagctatgaaataaaaacgaaagcgagccaagcagccaaagggaagcgcgaggcaaaagcttcgcggggtacgctgcgggagggggccccgggagagggggccgactgcagccctcagcgcgcccgcccgcccacccgtccgcggtctcccgggggaaaggtgttccgggcactgacctgaaatccccggtgggggagtaggcagggagcctgcgatccggctctttgaagttttcccccaagcggactcgaggcggcgagaaggagcggggggcggttgggtgggtggagagagatatgaggggtggggggggttggcgacgttaacgagcggagaaggagccgggccggagaagcgcggcgagcagcaaagtttgcggtccccggctgcccgcagcccgctcgcggcgccgcgctcactcgactccctcgccgtctgctggcagccggctgccctcggggtcggccccgccgaggggtgggctctgggccgggtgggggcggggcggggcgggctcggggcctccgggcaggtggcgacagccccgtgcgatcctccgggctcc

SEQ ID NO: 206246 - DNA, 435 bp, Homo sapiens
  chrX:39957469-39957904
  hyper
gattccccaggaaaggtttgcccgagtttccccggccgtcatcgatgcacggcccggcacgttttggcctctctggatccgaaccccggaccacttgggtggcgccccccctcctcgtcccccggcctcccctccccagctcgggccgagttggctgcgcacgcccgacccgggcgcacgtcctgggcgagccggagaccgacttgggcggcggcggcggcgagggctgccggcagagccagagccgaagggatgggggcggcgggggcggctctcccagccgcgcgccgagactcccctcgctacccagaaggccagtggaggaccgcaattaccataaagcgcctcgcactccgctcagccaaagctgtcaaaccccagcggcagcagccgctgccgccgcctcttgccaccagcgctgcgctctcccggcct

SEQ ID NO: 206247 - DNA, 528 bp, Homo sapiens; identical to SEQ ID NO: 58299
  chrX:39958064-39958592
  hyper

SEQ ID NO: 206248 - DNA, 645 bp, Homo sapiens
  chrX:39963955-39964600
  hyper
gttggggcctgccgcggacggattgtccctggggagctgaaaccgcccagcggggaaacccctcctctcgcccttccccgaaaagcttggccgcggtctaagctccgagcaagcgggtatccgctgacagccgggcctcacgtaaggcccacacgcgtcccattagtcagcccgagttcccctcgggcgagccgcctggcgcggccccaaggccgggctcaggcggggagagggtgcggggccgcagcgagctgcgggcggaggtgcgggctccgcggagcccggccaggctcggttccgcgttcctgggcccgcgggtaagctgagtcggcggggcaggccgctccctggctggcgccggggcgccaagctgcgcttcacgtgcccgccatatcagcagcagcggcggcggcggcgaggagggggtgctgggaggcgcgcggccgttcccgcggggtctccggaccccgcctccccgcccctccccgtgggggctgggccgagaccaccctgcggcccccatcccagcgcaagccgaaagcggcgctgccagacgcagagaggctcctggggcgccgttccgagagccgcgcggcggcagcagccaggggagggtgctcctcgcggccgccccgccgccgccgc

SEQ ID NO: 206249 - DNA, 297 bp, Homo sapiens
  chrX:39964630-39964927
  hyper
cgccccgagcggcctccgctggccccagggctgttccagacgagggctggccgcgcgtcacccctgatccctcctcgccccaggcgaccacccgggccctgcggtatcccggtgtaagccgagaggacccttcctgcggtccgatgagatgtccctgtccctctgctaccaccataagcacgcccccccgcaccgctcgcagctccgcagctgggaccggaggggcgcggagccgccactccggccgggcaggaacacctgctcccaggccctgcagctgggcgcgtgctgctgtga

SEQ ID NO: 206250 - DNA, 992 bp, Homo sapiens
  chrX:39965257-39966249
  hyper
ggagtaggtcatggcggcaccggtactccacccgcccccctccacgtagggacgtagggtcggctgcggggctcggactttgccactccacctagggaagggccaatggacgctccccgtctcctccgtgtccggaggagatccggcggcggagctgacctgcaaggcttgccctgcctcacccaccccccacctccgtcccaccctccccgactctcctggcccagggcccggcccgggaaggcgttgttttgccagcgggagccgagcgagtgcacagagaaaagcctccctactctaatgagagtgcacacagcgctgcagcgaggaggatgattacccggcgggcggggggcgcgggctcgggccgcgggcggcgtgtgcggcggccccgcgggcccggagtccccgcctgtctggctgctaatcgcacgctttctgctgttacggaggcaggcgggagccggcggccgagcccagcgccgacgactcggcgggtgacacggaaacatggcgcagcgcccctcccccgcccgcgctcccgcctcccgccctccccgcgctcccgcctcccgcctcgcacttcctcccgcccgcgcggcttttgcagttttaatgctctgctttcggcctggcaccattacgctagcagccgcttctccgcggccccgcgcgtctctttcccctttgttttcggggtctatagaaaacgtttgcttttgtcccgagctctcgttaaaccaaacttgtggtggcaacggaaggcggtgcaggcggggaggggtccggggattttggcagtagccggccagagcgtggtggaaacttctctcgctgggttctccgctccctcccactccccctccccaacacagagccgccggcctcccgacgcttctcccttcgcccccgagaggccccagtgctccaggaaggtctgggccacagagactgtgaccaggggtgaagaactcagagtgcgtgtctgtgag

SEQ ID NO: 206251 - DNA, 95 bp, Homo sapiens
  chrX:40005424-40005519
  hyper
cgctctccgcacggtagcctgatccatctcgtgggcgcggaggcggggcgcggggctccgctcccgcggaggcgcggagccggggctggggagcc

SEQ ID NO: 206252 - DNA, 244 bp, Homo sapiens
  chrX:40005842-40006086
  hyper
gcgatcagcagctctgcacgcgcttcagtgcatgaatggattgcggaagatgcctgcgtccgctccgctcaggaggctctaggagcgccccctccccgcccgccgcgcccgcccccgtggcctccctaggccctgcgggcgcctcggggttcgcaagctgggccctgcggcgcgatcactctcacccagaacccccgccgccgttcccagggccttggcacctcgccaccgagtgtcattgggg

SEQ ID NO: 206253 - DNA, 66 bp, Homo sapiens
  chrX:40017525-40017591
  hyper
ggctgacacggggctgtcgccgcttctcccccggacgcgggcggctgcgcaccggccgccatcttg

SEQ ID NO: 206254 - DNA, 53 bp, Homo sapiens
  chrX:40017968-40018021
  hyper
gttgaggccagagaggatttgagagttaccacggtttagggctcctgattgga

SEQ ID NO: 206255 - DNA, 229 bp, Homo sapiens
  chrX:40030832-40031061
  hyper
gagcggatggaaaccgaggcacgcagccctcgaccccggccaggcgtggagtaggggagcagggggtgccccgcgtgggcgcaccctaagaaaccagtgcggacatggcgagcgagaccagagcgcagttgtgtgtggtttttccccaggtttttattcttccagccctgtggaaaggaggagagccgcaacccggagagggagccggaaagaaacacttaatcaccgg

SEQ ID NO: 206256 - DNA, 215 bp, Homo sapiens
  chrX:40031175-40031390
  hyper
cggcggccggctccggctcacagagcctctctcaacgccggcaagtgcagccgggccgcccagcccccaggccagcctggccccctctgggcctggggttggcgagggcagctgggcgtctgcgctgcccagcccagccgcggatccatggggtttcgcgagctgaaagtaaaggcttgagggagtggggacacccacaccgacccgcggcacgc

SEQ ID NO: 206257 - DNA, 669 bp, Homo sapiens
  chrX:40031434-40032103
  hyper
actactagcggtggccggaggctcagccaccttcgcgggagaggggatttaccgccaccctcatccacgcgcaggccccaccgcccggtcctctcctctgatccccgggccattgcgaaacacggagcgaacaggtcctcgccagcagccgtcatttcccgggaagatgggaacccacaagcctgactgtgcttcctaaggatactagcgtgcgcgcagaccttggggggaaagagggcagcgcggtctccccgacccggactcttccctggcgcagcacacaaccgccacgggcttccgaagcgcccgagcggggaggaggaaggaaaagcggaggcccgggaggcgggctgcgcgcttggaagccgtgtgtgtttatgtgtctgcgcgcgcgccctggccggacgggtgttgaggggagagtgatcgtgagcaacccggaaccagcagtcccaacctggactgacgaactgggctctccagtcctgggccgtggggctccatgcctcgggctggcgggacaagcggcggggagcccggagcttcggagccgccgccgggcatctagccagctccgcgggagaagcccgggggcgcgtcgggagccaggggactggtgtgaactagccgcccccgcaggcggacgtttagctccggcacccgggagca

SEQ ID NO: 206258 - DNA, 206 bp, Homo sapiens
  chrX:40034219-40034425
  hyper
ctggtccctctgagaatccacgttttctagcccgagaaggggcaggcggccctcatggcgcctccttcggcggtttcctggcgaagcgcccatcctccccaagcaccaggaacggaggccgtccatattaatactcgcgggcagcctgttctgacctatactgtcattttttccatcggtcgggatcgggctgggggtggggtggg

SEQ ID NO: 206259 - DNA, 464 bp, Homo sapiens
  chrX:40035057-40035521
  hyper
aagagccgcccttactcgactggggtgaggggcgggaaactttgcaagaagactgttccgcgccttccccgcgtggcacctcagaagaacgtgggtgggtttcccgtccgaggccagaccacgctaccctacttttccaggtttcggacctgaacctcgtggactacgggagggagagtacatttcgggccactgcggggggcggagggacaccaaagacaggcgtcttcaagggttctggcagatggccaagtttgtgtcctttccctcccacgctagagtagcgcacgccactttggggaagcgtgagaccgttcaccaccggccacgaggccaccaatgtcttccaggtggggccgatggtttgtctgcagcactcccttccgccttgcggtcctcgcctggctcccacagtcctggggagcccccagagctagcccgcgtcttccctcgcccgctcttcc

SEQ ID NO: 206260 - DNA, 461 bp, Homo sapiens
  chrX:40036121-40036582
  hyper
agctgcctgttccggggcacaaacaatttttgctctgacgcggggtctctcgggggccctggcgtcctctactccctgctccccaccccaccccaccccctaccttccgggtaggagaactcaaaacaactcgctgaccttcgggccgaccagctccgtcttccactgactccagcattccgttcaaacccagcagccacggcttctaagatttcactccgctctgggctgggggggagggggcgagttctccgggagggggtgtctcagatcgaaagagccacttcacgctctttctcctcctccgaggtgagtttttagactatttggaggccttggggaaacgcgagcagccgcgtgcaaaggagcccccccgccttctccccgcacatgcagccttgtctagtgtgacccgatttccagggtcagcagcagagggcctggccagcttcggaaatacc

SEQ ID NO: 206261 - DNA, 61 bp, Homo sapiens
  chrX:40126402-40126463
  hyper
ccgggacgcgcagccgcccggcgcagaggaagcccgggacgctggggacaccgcctggagc

SEQ ID NO: 206262 - DNA, 427 bp, Homo sapiens
  chrX:41135195-41135622
  hyper
ggtgctgcgaggtgcgacaaggctctccctcgctgcaaccacggaaaaggcggatcagcctccattacaaaccgctgtaggaggggccagaagcttggcctggccagaccgggccgtcgttgaatccctgcatccatcttgcccaggttccctgctgagtcccccgctgggctgtgatcgttgcggatttaaacaccacactgtggaagcggagatggccccgcgtgcaccgctgaagtgaaggggctcgtggcaaatgatgcggggggacagcggccagagcagaccccggcggggtggcccgcccgggaggtggctgagggtccccggctgcggggtgaggggcgggaccgggaggcacaccctccgtgatcgccaccagaggccgcctggaacccgagtttcaacctcccggggatcctgtccc

SEQ ID NO: 206263 - DNA, 175 bp, Homo sapiens
  chrX:44733192-44733367
  hyper
ttcatgaagatggcgccaggacgaaggccctactgggcaaggtaaggcagctgcgagtcggagcgcggacaccgtctccctggccggcgccgcgctcgccccgggccccgcggccgggtctgtgctcattgtggccacggacgatggtcgaggggcttccggaaactatttcctg

SEQ ID NO: 206264 - DNA, 37 bp, Homo sapiens
  chrX:54834568-54834605
  hyper
ggcagggtgtgcaaacgtaacacggaggaggatgtaa

SEQ ID NO: 206265 - DNA, 558 bp, Homo sapiens
  chrX:71525285-71525843
  hyper
gtttgcggacagctcggctgccctcctcgccgcatcccagatggagccgcggaaccgggggcggccgggagcatcccttgcacggcgggcgcgtgcacccaggccaccggggccctgagcgtccgttcccgcaagtgctgtatcaggaactgatcttagagacaggatggacaggcaggaaggggcacggggtgtcggcctccgcggcgagtccgcactccggcgccggctgctgccactctcgcgcctgatcaacacttactgagcgcccgctgagcatccgacgcggcagcaggctgagcctaccccctagccaagccgcctgcggtcagtgctaaaaccccgctaggagaagagtgagagaggctcggagaggtgcggtaacttgcccaaggtcacagcgctagaaagtggcggagccgggattcgcagccaggtctctctgactccaagtccggtgctctgcgaagcagggactcggcgcgcggctcgccagcccgcgtttatagggagaggggtgtgcgcgtgggtgtgtgtgtgtgggcgtgtgtcggggga

SEQ ID NO: 206266 - DNA, 290 bp, Homo sapiens
  chrX:71525998-71526288
  hyper
cagatgcggtccgggagattagcaaagtcggtggaagccaagctggagaaagcgcgggcgcagggagaaaaggtgctgccgtctccccgggagaagcgggcacccggccccgctggccggcaggggggcgcgctggcaagcgaacccgagcgctggcgggcgggcgggcgggcggcccctcgcccccagcagagcagctttccaacagaaagcaagtctccccagaaccctccggcccgcctggcggccgcccactccccatacccgctccacgggagtcctcggccccg

SEQ ID NO: 206267 - DNA, 295 bp, Homo sapiens
  chrX:71526588-71526883
  hyper
cagcttcggcgccggactccggggcggtggcggtggcggccaccgcgctcccttcccggcgctggggacccggctctcaagcccccattgccgcccggagagccctgacgcacacgcacacggcagcagactggcctcggctaggaatcccaggaaggacagaccctttttttccctttttttttctcccctcaatttccacgtctttataaccggcttagggcattattagcacatgtcctggctcgtgggcgagttggtggcaaaatctgaactggatactcacggagggccc

SEQ ID NO: 206268 - DNA, 31 bp, Homo sapiens
  chrX:71526917-71526948
  hyper
cctcaccgagaactgcccctcgccggcggac

SEQ ID NO: 206269 - DNA, 562 bp, Homo sapiens
  chrX:73163983-73164545
  hyper
ggaaactgggggagggtccacggcaacggctgcggcacggcaacggctgcggcacggcaacggctggggcacggcaacggctggtgcatgttgccggcggaggcatttaggtagtgcacgacggctgggcgccgggcctgtttggctgtgacgcccacccccggctttcatccgcctatgccctagggctagtggaagacttaagatggcggcgtttgcacggagtgcaatcactgcgtccttacgggggttgcaaggcgtccgaagtatgagtccactaacaaaagtccagaaactcgccagttaatagtattgtggtgagtgatgagcctcacgttggctagagaagtggccgttagcgaggctacacactttgggatcgcgtggcctgagtcgggggagtaaccggcctgtattccatttttctctctccagtctcttcaaaatatcggagaataatttctttctcgctgatcgcctaacttctactgacgaagcttggaagttgcagaaggtagctcctaggagggatatatgggtcgttctttcctttttccttatt

SEQ ID NO: 206270 - DNA, 224 bp, Homo sapiens
  chrX:92928171-92928395
  hyper
gtcactagtgctgctgctagagctactgctgtcagattcttccccagaatcactagtcgagctagccatctcctcttcggcaaccccatgggcgacaggttccgagaccattttaaaatctgcttctgccatcttgcaagcctacaaactctaccagggagaccgcgcgaccagagatgggcagaaaatgactcacggatgcttgagtggcggcggcggaggcc

SEQ ID NO: 206271 - DNA, 101 bp, Homo sapiens
  chrX:92928507-92928608
  hyper
cggtggcggcaaggcctctcccggctgcagctagagtgccgagatgtaccgcagccgaatggcgcagtatgagaccccgagatctcttctcgttttagatc

SEQ ID NO: 206272 - DNA, 86 bp, Homo sapiens
  chrX:92928609-92928695
  hyper
cgagccccctccccttgcagtcagacctcccgttaatttcgttcccagtgtgcctttagttcgctcctcatttgctggtccacctt

SEQ ID NO: 206273 - DNA, 215 bp, Homo sapiens
  chrX:92928736-92928951
  hyper
actcctggctccgcccaccttcccagacgccgctcgctggctgaggtgcgaccccttggaaggtgtccccctgccccccaaaaagtctatatttatagttttataattaaaaaagaaaaaaaagcgtagacatgaggtaaaaataccagccatagttcctaacaagggcaaaagaggcgtgtcttccttctcccatccgcccaccctgaattccc

SEQ ID NO: 206274 - DNA, 41 bp, Homo sapiens
  chrX:107003164-107003205
  hyper
tcaggagctcccaggccctgagggaagcctggagctcctgg

SEQ ID NO: 206275 - DNA, 98 bp, Homo sapiens; identical to SEQ ID NO: 134582
  chrX:123094335-123094433
  hyper

SEQ ID NO: 206276 - DNA, 223 bp, Homo sapiens
  chrX:123094493-123094716
  hyper
gaaaaaaaaccccgccggatccgaccgccactttcaaaaccccccaccgctctagaaccgcgggagcttccgtccctgagtagaattcgagggtgtaaagaagaggaaggggaaaaatatcttgtaccagcccaggggtgaagaagcccccggcctgagaaagaaggaggagtgggggaggcgaacagtctcgttgctgcctctgtgtacgctgaggggggag

SEQ ID NO: 206277 - DNA, 124 bp, Homo sapiens
  chrX:123095161-123095285
  hyper
atgggtggcccaaaatggagaacgcggagcagcgcaagatggaggctccgcttctctgtgtagcagtagatttaggttccttttctccggcaggctcctaagcctaggagagcccgaactggag

SEQ ID NO: 206278 - DNA, 151 bp, Homo sapiens
  chrX:123095555-123095706
  hyper
ctctcttcctcccttcctagagagggaacaacattcatgtgacgggcccctctgcttctcccccgccccatcatctccagcgcgtggtgggggaactgctggggaaggcgattggcatcgatctctccatcccttccgaggcccgacttcg

SEQ ID NO: 206279 - DNA, 65 bp, Homo sapiens
  chrX:123155216-123155281
  hyper
gtggccaccgagtactaaattcacttgggaataaaagaaaaacataagaaaattataagagaaag

SEQ ID NO: 206280 - DNA, 141 bp, Homo sapiens
  chrX:123156380-123156521
  hyper
gaattgtcttagaagaaagaaggcaagccaccattttacccacgtaaatatatgaatatatttctgacattgaggtgttccagaagatgataaagaaatgatagcagctccagaaataccaactgattttaatctactaca

SEQ ID NO: 206281 - DNA, 79 bp, Homo sapiens
  chrX:123159689-123159768
  hyper
ggagtcagaaacacatttttcttctgacacagattttgaagatatcgaaggaaaaaaccaaaagcaaggcaaaggcaaa

SEQ ID NO: 206282 - DNA, 165 bp, Homo sapiens
  chrX:123164810-123164975
  hyper
acttgtaaaaaaggcaaaaagggcccagcagaaaagggcaaaggtggaaatggaggaggaaaacctccttctggtccaaaccgaatgaatggtcatcaccaacagaatggagtggaaaacatgatgttgtttgaagttgttaaaatgggcaagagtgctatgcag

SEQ ID NO: 206283 - DNA, 97 bp, Homo sapiens
  chrX:123171376-123171473
  hyper
tcggtggtagatgattggatagaatcatacaagcatgaccgagatatagcacttcttgaccttatcaacttttttattcagtgttcaggctgtaaag

SEQ ID NO: 206284 - DNA, 77 bp, Homo sapiens
  chrX:123176418-123176495
  hyper
gagttgtcacagcagaaatgtttagacatatgcagaactctgagataattcgaaaaatgactgaagaattcgatgag

SEQ ID NO: 206285 - DNA, 205 bp, Homo sapiens
  chrX:123179013-123179218
  hyper
gatagtggagattatccacttaccatggctggtcctcagtggaagaagttcaaatccagtttttgtgaattcattggcgtgttagtacggcaatgtcaatatagtatcatatatgatgagtatatgatggatacagtcatttcacttcttacaggattgtctgactcacaagtcagagcatttcgacatacaagcaccctggcag

SEQ ID NO: 206286 - DNA, 152 bp, Homo sapiens
  chrX:123181203-123181355
  hyper
ctatgaagttgatgacagctttggtgaatgtggcactaaatcttagcattaatatggataatacacaaagacaatatgaagcagaacggaataaaatgattggaaaacgagccaatgagaggctagaactcctgctacaaaagcggaaagag

SEQ ID NO: 206287 - DNA, 74 bp, Homo sapiens
  chrX:123182854-123182928
  hyper
cttcaggaaaatcaagatgaaatagaaaatatgatgaatgcaatatttaaaggagtgtttgtacatagataccg

SEQ ID NO: 206288 - DNA, 135 bp, Homo sapiens
  chrX:123184024-123184159
  hyper
cccccattcagtgatgcgatagctgaaattcgagctatttgcattgaagagattggcatttggatgaagatgtatagtgatgcctttcttaatgacagttatttaaaatatgttggttggactatgcatgataag

SEQ ID NO: 206289 - DNA, 278 bp, Homo sapiens
  chrX:123184966-123185244
  hyper
ttagcaaggtgaagtaagactcaaatgtcttactgctctacaagggctttattataacaaagagcttaattccaaactggaactttttaccagtcggttcaaggttagtattacttaagaatttacaaataacttgtcatttgcaaacacttttctcttgctttccttttaaaaatattttaatttttttgtccttaggatagaattgtgtctatgacccttgacaaagaatatgatgttgcagtacaagcaataaaattactcactcttgttttaca

SEQ ID NO: 206290 - DNA, 108 bp, Homo sapiens
  chrX:123189977-123190085
  hyper
gagtagtgaagaagttctcactgcagaagattgtgaaaatgtctatcatctggtttattcagctcaccggccagtagcagtagcagctggagaatttctctacaaaaa

SEQ ID NO: 206291 - DNA, 112 bp, Homo sapiens
  chrX:123191715-123191827
  hyper
gctcttcagtcgtagagatccagaggaggatggaatgatgaaaagaagaggaagacaaggtccaaatgccaaccttgttaagacattggtttttttctttctagaaagtgag

SEQ ID NO: 206292 - DNA, 131 bp, Homo sapiens
  chrX:123195073-123195204
  hyper
ttacatgagcatgcagcataccttgtggatagcatgtgggactgtgctactgagctgctgaaagactgggaatgtatgaatagcttgttactggaagagccacttagtggagaggaaggtaaggatgttta

SEQ ID NO: 206293 - DNA, 104 bp, Homo sapiens
  chrX:123195620-123195724
  hyper
cactaacagataggcaagagagtgctctgattgaaataatgctttgtaccattagacaagcggctgaatgtcatcctcccgtgggaagagggacaggaaaaagg

SEQ ID NO: 206294 - DNA, 306 bp, Homo sapiens
  chrX:123196749-123197055
  hyper
aggtgcttacagcaaaggagaagaagacacagttggatgataggacaaaaatcactgagctttttgccgtggcccttcctcagttattagcaaaagtaagtttgtgtcaatatcatagtgttactaagaaatgagttttttttccctaaatgcctcacagaatattataatgctttcttattgtgatatttttaacgtgatctttatatttcacagtactctgtagatgcagaaaaggtgactaacttgttgcagttgcctcagtactttgatttggaaatatataccactggacgattagaaaag

SEQ ID NO: 206295 - DNA, 213 bp, Homo sapiens
  chrX:123197688-123197901
  hyper
attttgcagcatttggatgccttattgcgacagatccggaatattgtagagaagcacacagatacagatgttttggaagcatgttctaaaacttaccatgcactctgtaatgaagagttcacaatcttcaacagagtagatatttcaagaagtcaactgatagatgaattggcagataaatttaaccggcttcttgaagattttctgcaagag

SEQ ID NO: 206296 - DNA, 71 bp, Homo sapiens
  chrX:123199725-123199796
  hyper
ggtgaagaacctgatgaagatgatgcatatcaggtattgtcaacattgaagaggatcactgcttttcataa

SEQ ID NO: 206297 - DNA, 262 bp, Homo sapiens
  chrX:123200024-123200286
  hyper
tgcccatgacctttcaaagtgggatttatttgcttgtaattacaaactcttgaaaactggaatcgaaaatggagacatgcctgagcaggtttttatttatttgctagttacacatttatctttgaaaagtgaagtcttgtgacttttaaattttaactgtatcctttgattctttttacagattgttattcacgcactgcagtgtactcactatgtaatcctttggcaacttgctaagataactgaaagcagctctacaaag

SEQ ID NO: 206298 - DNA, 93 bp, Homo sapiens
  chrX:123202413-123202506
  hyper
gaggacttgctgcgtttaaagaaacaaatgagagtattttgtcagatatgtcaacattacctgaccaacgtgaatactactgttaaggaacag

SEQ ID NO: 206299 - DNA, 175 bp, Homo sapiens
  chrX:123204998-123205173
  hyper
gccttcactattctgtgtgatattttgatgatcttcagccatcagattatgtcaggagggcgtgacatgttagagccattagtgtatacccctgattcttcattgcagtctgagttgctcagctttattttggatcatgtcttcattgaacaggatgatgataataatagtgcag

SEQ ID NO: 206300 - DNA, 140 bp, Homo sapiens
  chrX:123210181-123210321
  hyper
atggtcagcaagaggatgaagccagtaaaattgaagctctgcacaagagaagaaatttacttgcagcattttgtaagctaattgtatatactgtggtggagatgaatacagctgcagatatcttcaaacagtatatgaag

SEQ ID NO: 206301 - DNA, 102 bp, Homo sapiens
  chrX:123211806-123211908
  hyper
tattataatgactatggagatatcatcaaagaaacaatgagtaaaacaaggcagatagacaaaattcagtgtgctaagacccttattctcagtctgcaacag

SEQ ID NO: 206302 - DNA, 150 bp, Homo sapiens
  chrX:123215228-123215378
  hyper
gctttttaatgaaatgatacaagaaaatggctataattttgatagatcatcctctacatttagtggcataaaagaacttgctcgacgttttgctttaacttttggacttgatcagttgaaaacaagagaagccattgccatgctacacaa

SEQ ID NO: 206303 - DNA, 133 bp, Homo sapiens
  chrX:123217270-123217403
  hyper
agatggcatagaatttgcttttaaagagcctaatccgcaaggggagagccatccacctttaaatttggcatttcttgatattctgagtgaattttcttctaaactacttcgacaagacaaaagaacagtgtat

SEQ ID NO: 206304 - DNA, 224 bp, Homo sapiens
  chrX:123220396-123220620
  hyper
gtatgtttacttggaaaagttcatgacctttcagatgtcactccgaagagaggatgtgtggcttccactgatgtcttaccgaaattctttgctagctggtggtgatgatgacaccatgtcagtcattagtggaatcagcagccgggggtcaacagtacggagtaaaaaatcaaaaccatctacaggaaaacggaaagtggttgagggcatgcagctttcactca

SEQ ID NO: 206305 - DNA, 390 bp, Homo sapiens
  chrX:123224424-123224814
  hyper
ctgaagaaagtagtagtagtgacagtatgtggttaagcagagaacaaacactgcacacccctgttatgatgcagacaccacaactcacctccactattatgagagagcccaaaagattacggcctgaggatagcttcatgagtgtttatccaatgcagactgaacatcatcaaacacctcttgattataagtaagtacatttgatcattttctgtactataactttattaattacatagaaaaagttaagttaaaagaggaataaaattctccttgaagcacgcaggtaacatggatgttagctcaaagacaacaagaggaagcaaggcaacagcaggagagagcagcaatgagctatgttaaactgcgaactaatcttcagcatgccat

SEQ ID NO: 206306 - DNA, 127 bp, Homo sapiens
  chrX:123227867-123227994
  hyper
tcggcgtggcacaagcctaatggaagatgatgaagagccaattgtggaagatgttatgatgtcctcagaagggaggattgaggatcttaatgagggaatggattttgacaccatggatatagatttg

SEQ ID NO: 206307 - DNA, 78 bp, Homo sapiens
  chrX:123229221-123229299
  hyper
ccaccatcaaagaacagacgagagagaacagaactgaagcctgatttctttgatccagcttcaattatggatgaatca

SEQ ID NO: 206308 - DNA, 2083 bp, Homo sapiens
  chrX:123234423-123236506
  hyper
gttcttggagtgtcaatgttttaataccagtacacaattaaatctgtggtgaagtcattttctaagtggaagaggaaattttaaagtgtggtagatacagtgaaattctgtacagatttttctctaaggagaatatgacatgcttatgcttaccaagatcaagtgcattgaggggcagttttgtttgcctgaataaacgtaaaggacaagtaaacaatttgatgataagctacagtttttcttagaaagtaaatattttatttatgcgctgttagttggcttttgaatcgattatttcatgcttttttttaaaaaaaaaaaaaaacaaaataacaatctgaagaggcatttggtacagatatgaattctcttacatttatttactggttgtactaaataatgatgacctctgctggatttctgtttacatccagaaaacaatgttaaggatgtatttattcccctaccctgaagaaagtgtaggatagaattgtttttagcattctaaatttaaatgcttaaaacgtcaatcaacaaaactttgttttaaatattgtaattgtggagaaaagtaaacttataagcagaacttttacaattttttcatctaaaagtattttaagatatttttaaaatccaagagcttctctatacttttcagaaatatccagatgcagtgaactgccagaaggtaaccagtctcaaacatgcttatcccattatcaaccctgaaagtttgcttgtcctttaagataaaaatgtaatgttgtgatattccttccagtaatgccactgtattttgtctccaaataaaagaagcttattgtagtatgtttgcagaaaaattctaaacaaaaattatacagcttattagagtgtgggaatagggatctaaattttaaataaaattatatatatatataaattggtgctgattttataattgcgcagtttgtttagttttttcttacttttaaattccaacttaaaattatgaggtttcagaaatatattgaaagtttaacaatgtttaaaaatagaaaagcatgagtgttcatgctttaaaatgatttttaaatttgtattttatattgttttatctatctgtctttgcaagcagtcttcaggttaaagatacttctaacaggttacagtacatttcctctgtatgtaaattagatgggataatagaattcataacccataatattctttgaaagctaagctttaaacttcattttatgtcctttcacaaataaattagtttaaaacagaaagtggctacttgccattttgacatcaactcattttgcgaggcttaggcagctagacatcgtttaaaacaaaatattaacttatattacatgtgtatctatctattgtcagtcgtctctcagttcttgaggtatattattttaatcattccatgccttaatatgcttgcaatacaagaatatcttcagatgggtgaataccaaaaggctttcagtttttagtcagaaatcaagcattgggctgtggtagccaaaaaccataggttagctaaaaagatcatgatacaattattttattaagtcatggttaataacaaatgaatccagacttgtctaacagattttccatcaacaaatattgttatgtgcaaaagtattgcctatgttgttttacacaccactgcattaactagaactgctgagaggactgtatatatgattttaaacctaagttgattttttttctcactcttgaaaggagtacttctttgtgaaagcagttcttacagctttgttttcaaccagctaaaaatgttttatatattactctaacctgttgtcctccacattctattgtcctaattgtactgttttctgatttgtatttatgtcttgagacagtaactttttgaataaaaataaacctacagtatgttgtatgttttctcttgtactcaaagggggagggtggctataaatggtttgcaaatttatatctattatcacatcttttaatgtgtttggggaataatttatagagaataccatcagtttatatttttaataaatcatatgtatttacaatgaaa

SEQ ID NO: 206309 - DNA, 136 bp, Homo sapiens
  chrX:129139163-129139299
  hyper
ggggagtggccacagcaggtcctatctggtggtgagtggctgtcatgatctctacagcaccgctctacagcggcgtgcacaactggaccagttctgaccggattcgcatgtgtggcatcaacgaggagaggtgagg

SEQ ID NO: 206310 - DNA, 91 bp, Homo sapiens
  chrX:129146553-129146644
  hyper
aagagcacctctttctgatgaggagtcaacgacaggcgactgccagcactttggatctcaggagttttgtgtcagcagcagtttttccaag

SEQ ID NO: 206311 - DNA, 3264 bp, Homo sapiens
  chrX:129146925-129150189
  hyper
gtggagctcacggcagttggaagtggcagcaatgcccggggggcagacccagatggcagtgctacagaaaaacttgggcacaagtcagaagacaagcctgacgatccccagccaaaaatggactacgctgggaacgtggcagaggctgagggcttcttggtgcccctgagcagcccaggagacgggctcaagcttcccgcatctgacagcgccgaggccagcaacagcagggccgactgctcctggactccactcaacacccaaatgagcaaacaggttgactgctcacccgccggagtaaaggctttggactctcggcaaggtgttggagagaagaatactttcattttggcaactctgggaactggagtccctgtggaggggaccctgcccctggttaccactaacttcagtcctctgccagcccctatctgtccccctgctcccggttcggcctctgtgccccactctgttccagatgcattccaggttcccctctccgtccctgccccagtcccccattcagggcttgttccagtccaagttgccacttcggttccagctccttcccctcccttagcacctgtcccggctctggctccagcgccaccgtcagtgcccacgctcatctctgactcgaaccccctttctgtttcggcctcagtcttggtgcctgtgccagcttctgctcccccttcaggcccggttcccttgtcggctccagctcctgccccgctttcagtcccagtttcagctcctcccttggctctcatccaggctcctgtgcccccttcagctccgaccttggttctcgctcccgtccccactccggttctggctcccatgccagcatccacgcctccagcggcccctgcccctccgtctgtgcccatgcccactccaaccccatcttccggcccaccttctacccccaccctcatccccgcctttgctcctacaccggtgcctgcacccaccccagcccccatctttactccagcccctacacccatgcctgctgccacgccagctgccattcccacctctgcacccatcccggcctccttcagtttgagtagagtgtgctttcctgcagctcaggcaccagctatgcaaaaagtccccctgtcctttcagccagggacagtgctgaccccgagccagccgctggtatatatcccgcctccaagctgtgggcagccactcagtgtggccacactgccaaccactctaggggtttcctccactcttacgctccctgtcctgccgtcctacctgcaggacaggtgtctcccaggcgtgctagcctcccccgagctccgttcttacccgtatgcattttctgtggcccggcctctgacttcggattccaagctggtatctctggaggtgaacaggctcccctgcacttccccatccggtagcaccaccacccagcctgcacccgatggggtccctgggcctttggcagatacctcccttgttactgcttctgccaaggtgcttccaactccacagcctctgctgccagcccccagtgggagctcagccccaccgcaccccgccaagatgcccagtggcaccgagcagcaaacagaagggacttccgttaccttctctcctcttaagtcaccgccacagctggaacgagagatggcctctccacctgagtgcagcgagatgccccttgatctgtcctccaagtccaaccgccagaagcttccattgccgaaccagcgcaagacaccccccatgcctgtgttgacccccgtgcacaccagcagcaaggccctcctctccacagtcctgtctaggtctcagcgcacaacccaggctgccggtggcaatgtcacctcctgcctgggctccacttcctcgccctttgtcatctttcccgagatcgtgaggaatggggacccgagcacctgggtgaagaactcaactgcactgatcagcaccattcctggcacctacgtgggagtggccaacccagtgcctgcatccctgctgctgaacaaagaccccaacctgggcctcaaccgtgacccccgccatctccccaagcaggagcccatctccatcattgatcaaggagagcctaagggcactggtgccacgtgtggcaaaaagggcagccaggctggtgctgagggacagccaagcacagtgaaacgatatactccagcccgcattgcccctgggctgccagggtgccaaaccaaggaactctctttgtggaaacccacggggccggcaaatatttatccccggtgttcagtcaatgggaaacctaccagcacccaggtcctgcctgttggctggtccccgtaccaccaggcgtctctgctttccattggcatttccagtgccgggcagctgacccccagtcagggggcgcccatcaggcccaccagcgttgtttcggagttttctggtgtgccatctctcagctccagcgaagccgtgcacggacttcctgaggggcaaccacggcctgggggctccttcgttccagagcaggaccctgttacaaagaacaaaacttgccggattgctgccaagccttatgaagaacaagtcaatcctgtcctcttgaccctcagccctcagactgggaccctggcactgtctgttcagcctagcggtggggacattcgaatgaatcaggggcctgaggaatcagagagccacctctgctctgacagcactcctaagatggaaggcccccagggggcttgtggcctgaagctggcaggagacacgaagcctaagaaccaagtgctggccacctacatgtcccatgagctggtcctggccaccccccagaacctgcctaagatgcctgagctgcctttgctacctcacgacagccaccccaaggaacttatattggacgtggttccgagcagcaggaggggctccagcacagagcgcccacagcttggaagccaggtggatctggggcgagtgaaaatggagaaggtggatggtgatgtggtcttcaatttagccacctgcttccgggctgatggcctcccagtggctccccagaggggccaagctgaagttcgggctaaggccgggcaggctcgagtgaaacaggaaagcgtaggggtctttgcttgcaagaacaagtggcagccagatgatgtgacggaatctctgccgcccaagaagatgaagtgcggcaaagagaaggacagtgaagagcagcagctccagccacaagccaaggccgtggtccggagttcccacagacccaag

SEQ ID NO: 206312 - DNA, 177 bp, Homo sapiens
  chrX:129154948-129155125
  hyper
cctctccacagtgccggaagctgcccagtgacccccaggaatccaccaagaaaagccccaggggggcttcagattcaggaaaagagcacaatggagtcaggggaaagcacaagcaccggaagccgacaaagccggagtcccagtctccaggaaaacgagccgacagccacgaggaag

SEQ ID NO: 206313 - DNA, 81 bp, Homo sapiens
  chrX:129156871-129156952
  hyper
gttccttggaaaagaaagcaaagagcagtttccgtgactttattcctgtggttctgagcacccgcacgcgcagtcagtctg

SEQ ID NO: 206314 - DNA, 392 bp, Homo sapiens
  chrX:129158962-129159354
  hyper
aggaagcatctgtagctcctttgctggcatggcagacagtgacatgggaagccaggaagtcttccccacagaagaagaagaggaggtaacccccaccccagctaagcgtcgaaaggtgagaaagacccaacgggacacccagtatcgcagccaccatgcccaggacaagtctctgctgagccagggccgaaggcacctgtggcgagcccgagaaatgccctggaggacagaggctgcccggcaaatgtgggacaccaatgaggaggaggaggaagaagaggaggagggcctgctgaagaggaagaaacgaagacggcagaagagccgaaaatatcagactggggagtacctgacagagcaagaagacgagcagcggcggaaagggagagcag

SEQ ID NO: 206315 - DNA, 227 bp, Homo sapiens
  chrX:129162609-129162836
  hyper
atttaaaggcccgtaagcagaagacttcctcctcccaaagtttggagcaccgcctcaggaacaggaaccttctcttgcccaacaaagtccaggggatctcggattcaccaaacggtttcctcccaaataacctggaagagccagcctgccttgaaaattcagaaaagccatcaggaaaacgaaagtgcaagaccaagcacatggcaaccgtctcagaagaggcaaag

SEQ ID NO: 206316 - DNA, 222 bp, Homo sapiens
  chrX:129168429-129168651
  hyper
ggcaaaggtcgttggagccagcagaagacacgatctcccaaatctcccaccccagtgaaacccacagaaccatgtacaccctctaagtcccgaagtgccagctcagaggaggcctcagagtcacctacagcccggcagatccccccagaggcacgtcggctcatagtgaacaaaaatgctggtgagaccctcctgcagagggcggcgcgtcttggctataag

SEQ ID NO: 206317 - DNA, 167 bp, Homo sapiens
  chrX:129171341-129171508
  hyper
gatgttgttctctactgcctccagaaagacagtgaagatgtgaatcaccgtgacaatgctggctacacagccctgcatgaggcttgttcccggggctggaccgacatcctgaacatcctgctggagcacggggccaacgtgaactgcagtgcgcaggacggcacgag

SEQ ID NO: 206318 - DNA, 148 bp, Homo sapiens
  chrX:129173111-129173259
  hyper
gccagttcatgatgcggtggtcaatgacaacctggagaccatctggctcctgctgtcctatggggccgatcccacactggctacctactcgggtcagacagccatgaagctggccagcagcgacaccatgaagcgctttctcagtggt

SEQ ID NO: 206319 - DNA, 78 bp, Homo sapiens
  chrX:129184691-129184769
  hyper
atcacctctcggatcttcagggccgggcagagggtgatcccggtgtatcctgggatttttacagcagttctgtgttgg

SEQ ID NO: 206320 - DNA, 157 bp, Homo sapiens
  chrX:129185834-129185991
  hyper
aggaaaaagacgggtttgcctgtgacctcctacataatcctcctgggagctcagatcaagaaggagacgatccgatggaggaggatgatttcatgtttgaactctcagacaagcctcttctcccttgctacaacctccaagtgtcagtgtcccgcgg

SEQ ID NO: 206321 - DNA, 2230 bp, Homo sapiens
  chrX:129189828-129192058
  hyper
gccctgcaactggttcctcttttccgatgtcttgaagaggctgaagctttcctcgaggatctttcaggcccggttcccgcactttgaaatcaccaccatgcccaaggccgagttctacaggcaggtggcctccagtcagctgctgacccctgccgagaggcctggaggcttggacgacagatcccccccaggctcctctgagactgtggagctggtgcggtacgagccagacctacttcggctcctagggtccgaggtggaattccagtcttgcaacagttgaccgggaaaacagcccctcctcttctttctccttccgagttcgcccttcccccacctccttgtctttccccgaccgagcaccagactgcagaatgaggcaataatacggaccaacaagaagccgccttatcaatgccagcattagcgactggactgtttttgtttttttggttacaattagttctcatctccctgtcgtcgtcattgttatcgtggttgctgatgggggtggaaagttgaactccatgtctgaggacaagaggtcccgggggtggtgggaggtggcgccggggtcccttggactggcctccttgttcatgaccaagaccaaacctgggccctggatggccttggcctgtcccgaggagaaatgagaaaatcccagatctctgagcgccccccaactccattcccctgtgttcttctgtcttctgtagtatttattttattagtatttaatttgtattgtttcattggtttctgataagtctgtatcactgtgacgatttgagacaacttgttgtattgagggactttctgtacctccttttctttttctttgttgatgagctctgacaaagctattccctggtgtttttttcccccactggggagggggtgaggtggaatggggtgggggaacatggacttgtgactaacgaagctggttgctgctggcccagggctgggggcttgggggtaaatcctgaggctttggtgctcccccacccacccattcccgccctttgcagcagccccgctatcttgagattagtgttgacagggaggggaggattgtgaggtgaggggttaataagttactctaataaaggagcgtggagaagggatctgaggggtgagggtggcccccctcctcacgccttcttcactgcccccctcagagtgcacaatacgagtttgttcctgcctccactctcccaccccgttctggcctccctgtctcaagatactgagcctctcacctcccagccctcagccacccccatccctgccccttctgagactcacagcacccctttccttcctctcctcccacctcctccctcagcccctcattctccttgggaatctgcagagggctctgggactcactgccggatgtgaaatccaggcgtcagctgtttcctaggcaagggcaggaaagtggtctccagcccttgctccactcatgcctgggggcctggggctgagtggtatccctacctggcctccccctggcctctgggcctccagcgctgggtttgtcgagtgagagagagagaggagcttgggttgcttccctgtccccgccccctctgtggcattgtccctcccactcttatttttctaccaattgctatttttccgaacaatccttgtagagtatgtaccatccaaaggcaggagggcctcgccgtggccggctctggttggagatggtacagttttattgtacaggtgctaaaacaacaacaacaaaaaagaaaatggaaaaaaaaaagattaaaaaaaaaaggaaaaaaaaaaagccagtttgaggatgggacaatctgttctctagaggctcctgagccatgcgggagcattggtggttattttctttgtattgtgtttgttctttgttcctgggggggaagttctcggcccccttctgtaggactgctccccacccccaccatactgcccagttggttttgaacagttgttttccctttttaagaaaaaaaaatacatatatatatacatatatatatataaagttgaggggttttggactttaatttgttggttttgttggggttcctggtattgtgtagtttatttcatgttctgtttgcctttccttttttcgcatttgggtgtatattctggctgccctttatgtttcattttaagcaactggctgtggagtcaaaaacacttgcatactgaaaaacctgtgtcaggg

SEQ ID NO: 206322 - DNA, 51 bp, Homo sapiens
  chrX:130110130-130110181
  hyper
tatacaaacaggaaacgctgcgtgctatattcccgtcgagagtccaatata

SEQ ID NO: 206323 - DNA, 156 bp, Homo sapiens
  chrX:133507341-133507497
  hyper
aagggcgctccgcgagcccgtctctcctcgaatgaaaggaaacaacctccggcgacagagccccgctctcaggcactgctggagaaccgagaccgacttctttctctttaccctcattggcgcttctctcctgcagtccgcctctgggccctgccg

SEQ ID NO: 206324 - DNA, 184 bp, Homo sapiens
  chrX:133511601-133511785
  hyper
catttcttgagacttaaagtggcattctaaaggcaatttaaaaatcatgtcaagctcagttgaacagaaaaaagggcctacaagacagcgcaaatgtggcttttgtaagtcaaatagagacaaggaatgtggacagttactaatatctgaaaaccagaaggtggcagcgcaccataagtgcatg

SEQ ID NO: 206325 - DNA, 102 bp, Homo sapiens
  chrX:133512034-133512136
  hyper
ctcttttcatctgctttggtatcatcacactctgataatgaaagtcttggtggattttctattgaagatgtccaaaaggaaattaaaagaggcacgaagctg

SEQ ID NO: 206326 - DNA, 134 bp, Homo sapiens
  chrX:133527530-133527664
  hyper
atgtgttctttgtgccattgtcctggagcaacaattggttgtgatgtgaaaacatgtcacaggacataccactaccactgtgcattgcatgataaagctcaaatacgagagaaaccttcacaaggaatttacat

SEQ ID NO: 206327 - DNA, 44 bp, Homo sapiens
  chrX:133527938-133527982
  hyper
ggtctattgccgaaaacacaagaaaactgcacataactccgaag

SEQ ID NO: 206328 - DNA, 479 bp, Homo sapiens
  chrX:133547517-133547996
  hyper
cagctgatttagaagaaagttttaatgaacatgaactggagccctcatcacctaaaagtaaaaagaaaagtcgcaaaggaaggccaagaaaaactaattttaaagggctgtcagaagataccaggtccacatcctcccatggaacagatgaaatggaaagtagttcctatgtaagtaaaaaaaactgttggattcttacttttgttgcaccatgaatatttcatttaaactatctataggtaaagttcatcatttgaaatgttaagtaagcttgaaataccgatagcatattttcatgattttttttaagttcgttttttcttttacatttgcagagagataggtctccacacagaagcagccctagtgacaccaggcctaaatgtggattttgccatgtaggggaggaagaaaatgaagcacgaggaaaactgcatatatttaatgccaagaaggcagctgcccattataagtgcatg

SEQ ID NO: 206329 - DNA, 277 bp, Homo sapiens
  chrX:133549045-133549322
  hyper
ttgttttcttctggcacagtccagctcacaacaacatcaagagcagaatttggagactttgatattaaaactgtacttcaggagattaaacgaggaaaaagaatggtctgtagtttttatatttgttatgcaacattacacttgatttgctgctttaaatttagagtacatcccaaatttatccagtcatcagaaaatttaaagtagttcgtatgttaaagcaaagtatatatttgacttatttgtaatataataaaggatgctgatgttactgaaa

SEQ ID NO: 206330 - DNA, 134 bp, Homo sapiens
  chrX:133551198-133551332
  hyper
aaatgtacactttgcagtcagcctggtgctactattggatgtgaaataaaagcctgtgttaagacttaccattaccactgtggagtacaagacaaagctaaatacattgaaaatatgtcacgaggaatttacaa

SEQ ID NO: 206331 - DNA, 130 bp, Homo sapiens
  chrX:133559230-133559360
  hyper
actatactgtaaaaatcatagtggaaatgatgagagagatgaagaagatgaggaacgagagagtaaaagccgaggaaaagtagaaattgatcagcaacaactaactcagcagcaacttaatggaaactag

SEQ ID NO: 206332 - DNA, 3132 bp, Homo sapiens
  chrX:133559690-133562822
  hyper
gttcatgggacagagttagaaaactgggaatgaataagacatccataactactattcttttttcactgttttctaaaatcaaaaagggtttgtaactttttactgcccaactcttagatccttcattgaactgcctaaaaatgtcttgtttgttttatgagccctcactagaaggctgagtttgacatgttgatattacgtagctatagtttgcagtttctgggaagcaattgaaacactattaaccctgtgtatagtgtcaacagttaaagcagacgaaacgaagtaagctatatttctggactgaacaaagctctgctgtttagagcatttaagtttgtttagtggatccatactcaaaggaaagcataagcaaattttcctttacaatgcaaacatgccactggtggcagcacatggtaatttgtggatttttttttcatactcaagtaatggaggctagaaatgaagagaaccttctttttctcttgactttgacagcacatgctaaaaatctcttccaagaagtatgctaaagcttttcatttggttcctgttaaagttgttctcactgaccagcatggactcaggcaactggtaatgataagctatgagctccagtgcttttgccaaaattctcttgacagcacacctcctctctttccatgttatacaaaggacttctggcaaaatgattgagtccttcaagtttaaactaacatttggcaacagcaaattaaacgtttttaagatgtaaagaaagggttaccgcttgctaaggacttcagacaccatgtccgaaacctgttcctctcaagtgccctgttgtgtggaacacttcacatattggcgcacagtacgtaaggaggtctcatgtgctgtaggagtaaaaaagtctttgcataaaacagtatttatttttacttttgtgaccactattttagaaactttatttaatattttaatgttttcagtcattgctttggttatctataaaataggcttttgtgccctacttttcttcttgtagggcttggtggtgttttatcgattgtcagaattgtttttgaaagcctaagaacccagctttttagaaaggattttcacactggcatttctaggtagtgatattttcttccacttacctgctgaagcacatttatgcatttctttatggcaaaaccaaataactttagttgtggtctgcctgatactaccatagcacctcagtaccaaggggagggattttgactagttgaattattaagccaccacaataaagcagatttttaaataagaaataataatgttaacttgactgtacattgagatattctgcagctgatagagcagcattttaaaaatgtaacaggtggaaaattacactgtgcttaatgactgatttttttttaaactgcgagtcccttaagatcacgtttgtcaagtgtgtattcacacatttacttaaatcaagggactcaatgcttgcttttattttaaccatcttttactatttttagaaggaaactagctttagtagtgggttgccctgtatgttttctctttttgctcttaatatgccattgggtttttgtgtgtatgtgattttcaaaattcatgacttgaagtgcaaggacagatctagatgtttgtttaccaagctatgtgacttctcccaaaggatctgtactttctttccttacaacagcttgaaaatcattattttaaaatccttaaatcactgtgtctagatcattttttacattgtgtgccatagacttacccatgggacaacagagctccttcatttttggacaactactgtaatcattttttttttaggaaaaatggaaggtgccgggggtaatcatggccagtcaataattatataaaggagttcaaatactatagctgtcagttgatgaatttgttatgtagtaaaatgtatgactttgtatgggtttcttcagccctttttctgccactagcaaccagaatagcactttaccttttggttggctagataagtggctgactacctgtttttctcactgtggtgtgattggctaaacaatctcgcattaaaaattcaaatgtaaattgaattcacatgaaaaatcatgtttggttgtaaacctccaatgttttgattctctaatcatgttttcgtcacatgctgagtaaaagtgccttacaatgtaaaaattgtacagtacttatgttcccaagtagcatcatcatcttctgggtagtaattacattgtggtattaatatttagaaaaatggacctcagcagtgtatttactgtacatctcttaagtccttaactgtagttttaataagcatgacattatttgataagtatataacatttacatcatttcaaaaaatactgccgttactgtcttttatgcatattttagcctgaaattttgaagcgtcttttttctttcttttttctttttttgttttgttttttgttattgatattaaacagtgtaatctttgcaagcgtatattgaagattattctggagcatttattgccttaccagaaatgttagtaggaaatgttctttagagtagaaagatagacttgagtttctatacttttaagaagagctctttgttcctgggggaggggggcagggggtgaattttactttcatctcaagttattaaaaacccacaactgaagtaaattttatttcaagaatcagcagttttagaatttcagatagtacttgctcagaagtacatgctactcaagatattaagagataacaagatctgtagatctgctattgaatcagaatctgtgtacttgaacaaatgtgtgaatctcaaatatctcaaagcaaaagaaaaagtgttctagagtgttgttgcttttttaaaaaaagcgctgaagttagaccaaggtatacagttttgttctaacagacatttaggttaattgtaaagataaggaatgcattatgggtcaaaaatcaaacattcctctcatgttatgtatattttgttcctgttatattggctttattttcaaaattgtagtttgtagtattagtttccttttattggtattcttgcatatactattcattcaataaatgacttatgactttcata

SEQ ID NO: 206333 - DNA, 191 bp, Homo sapiens
  chrY:2802951-2803142
  hyper
tggctaggactggcgccgagaggcgataggtctcgggagagcctggcgcagggtgtgggagattaggaatcccaggtccaccggagatggcagggggtggcctggcccggtgcggggccgcttgcctgcacgcaaccaactaaggcggtggtgcgcaagtagtggtgacggcgggcgcgcggagaaaagga

SEQ ID NO: 206334 - DNA, 39 bp, Homo sapiens
  chrY:2804296-2804335
  hyper
acccgtttcagcaggtggcaattcgggcatctaggctca

SEQ ID NO: 206335 - DNA, 83 bp, Homo sapiens
  chrY:6778627-6778710
  hyper
gcatgctagcggccgctcccagtggtggtcaccgccagtgccaatcccttgcgccgccgtgcagtcccgccctctgtcgctgc

SEQ ID NO: 206336 - DNA, 265 bp, Homo sapiens
  chrY:14532892-14533157
  hyper
cctctgccttgggcctgcgcctccctccccaagcctctcagctctacgtccccgcccccgtctgtcctccatactgaggcagcctccgtctccccgtgcccactgcgcctggaccacctgtactcctcagcactcggcgcctcggctcggcccacccacccgcaagcgccgctagcctatccctgcgccccgcacccctccccgcctttgcttttgggcaacctctctctgacctccagctcccagcgcctctcgccccacctct

SEQ ID NO: 206337 - DNA, 56 bp, Homo sapiens
  chrY:14533221-14533277
  hyper
cgctgtacgccacccaccctcgagacctcctaggcgttcgggcagcctcagcgccc

SEQ ID NO: 206338 - DNA, 249 bp, Homo sapiens
  chrY:14533307-14533556
  hyper
cactgcatacgatcccctgcaccccgctgcagcccccgcacctcttccggcgccctggctgcctctgcccaaagccggcgctgggggcccggagggcagcgattggcctctgtcctgaagcccggccccgcctccgcccagccctggtaggcgcgggtcagctcctcagccctgcagcccctgcccgcaagcccgcgcgcctcctggtgtccagccccagctaccaaggagagagacccaggaaccgcc

SEQ ID NO: 206339 - DNA, 55 bp, Homo sapiens
  chrY:14533613-14533668
  hyper
ttggcggtttctaggtttggacatttaacctttaattggccggccccaaagtaaa

SEQ ID NO: 206340 - DNA, 34 bp, Homo sapiens
  chrY:14774179-14774213
  hyper
gagggtcgcaggtcgcggcgctggggatggtggg

SEQ ID NO: 206341 - DNA, 113 bp, Homo sapiens
  chrY:15591519-15591632
  hyper
gtgagcgacactgcgcaggatttcatggaaacaacaaatttccaagtcccacgacgatacccaaccttaatcgagtagttgaaaagacgccttcaatcgctgcttgagactgt

SEQ ID NO: 206342 - DNA, 229 bp, Homo sapiens
  chrY:15863195-15863424
  hyper
cttaggaaacaaagcgtgtggaactaaaggaaggtaggacgcccctggcggtcctgaggcctctttggtcctgctaaagagagcacccctgctggcaggcgtgggcctgctcacacctggacggagaggggaggtaggaggggcaggaagcggttggtgcggacggggaggcgactgcgtggggtcttccgacatcacccttcagctgagtgtccggggtctcattccc

SEQ ID NO: 206343 - DNA, 380 bp, Homo sapiens
  chrY:15863736-15864116
  hyper
agggctgcctggcggccggccccggagcagctgctgctcagctgctggacgagtcgctgtctgccgggagcgtcctgcgcgcccgctgcgcctccaggtgcctaagcttgccaatcatacgcatctctgccttcttccagcacttccaggttagtggagactcccgcccgccccgggttctttctggtgctgcggccgcggcgggagtgcacccgggcgcgagagtgcacccgggcgcgcgccgaccagcctaggcgcgaaaagttttcggccagcgcagcgagctgacctggcttctcctgggcgtggatcttacagtcggggtgcttaaatcgtgttttccagcctcctcccggctcccgatacgaaaaagaagcccg

SEQ ID NO: 206344 - DNA, 360 bp, Homo sapiens
  chrY:16636061-16636421
  hyper
gtatcaggtgatccggagccctagtcggtgcccactaagaacaccccttctcccatcgggggttcggaggagtgttaagcctgcgggtctgccagtccctaaggtagggatgggggaggggtctgaggaatccgttccaataggcacaccatccccacagccctagaaaaggcaaccaccacccgctccttcctcccgcaccatcccatctcaaggctctctgctgacccgggccgatttcatctggtctcttctcccccgcttcccacctcccaattcccgcgcagctcggctccgttccctcccactcccctaggcggaactgaaagcgaagatcagccaagagcacagtcggaggcg

SEQ ID NO: 206345 - DNA, 616 bp, Homo sapiens
  chrY:16636541-16637157
  hyper
ggcttgacctgcggaagcgcgggccgggatggcgtggggagagggaggtaggtgccactgggctgcagatgacgagtgggttgggggcttgctgtgggacaagaggttcaggttccggcctgcgccttccactccgcggtggcgctctctgcctgcggttttccaggaggccgatctaccccagggacactctcatccttcaggcggtctcctggacgccctttcctccccttgcctcccagcctgacctggctctttcgcccctcggagaaccggtaggttggggtccctcggcgggggtctagtgagccgagtcgcgagctttgcgcccccggtatctaggccccgtgccgcgcgcaaatccgggcccaggcgtacagttctggagcctagtcgccgccagacacagggccctttgtacccggaggagcgggagcgggagcgggggcgtcagggcaacccttgcaccccagaggcctgcctaggaccaccctgggaacaaatgtctcgctcggaaaacgaggtgaacccggaggatgtcctacgcatcatacccctccccttcttgagaaggctttttctttttttctttttttttcccggtttccttttctct

SEQ ID NO: 206346 - DNA, 61 bp, Homo sapiens
  chrY:21729023-21729084
  hyper
aggcataggttcccgaggccactttcggctctgtcggcctgaggccgagcccaggatttaa

SEQ ID NO: 206347 - DNA, 44 bp, Homo sapiens
  AC209420.3_23583-33864:1609-1653
  hyper
ttcttgaaatgacatgacaaagtatacagatggagatagattca

SEQ ID NO: 206348 - DNA, 403 bp, Homo sapiens
  AC211344.3_7702-13588:3923-4326
  hyper
cagaactgggacagtaaaggcgtcactgctgcaaccacagggcgccagcctcccgcatccctgagtgctggtgctggagatgccgcctccgccggccaagcgctgctgctgctgctgctgctgctgctcgcatgggccgtgcatgccgctttccgttccaagttgggcaggtgctgctgacagggaagctgagggcgtctgcctgcaccgccgttggcagcttctccaatgcaaggcagacccggcctcctaaggaggggtttctccaggaagttaaggtgcttagacggtgaagaacgaaacggcccacaacagtccttctatttcgctgctttgtacaaacaccgttctgcccacacctcaccttactgccctcatagtgcagctgagccttgtagaggtg

SEQ ID NO: 206349 - DNA, 70 bp, Homo sapiens
  AC241851.2_88-34049:15063-15133
  hyper
cttttggcccccggcgccgcggctttttgcggctttttgccgccgcgggtttttcctgccgcggcttctt

SEQ ID NO: 206350 - DNA, 50 bp, Homo sapiens
  AC241851.2_88-34049:15553-15603
  hyper
gctttttgcccccgccaccgcggcttcttacccccgccaccgcgactttt

SEQ ID NO: 206351 - DNA, 98 bp, Homo sapiens
  AC241851.2_88-34049:15843-15941
  hyper
cttgcctagacgctggcgccccgggctctgctcctgggccgctgcagcctgcatagagcagcgctgcgctcggccgcgttgggagagaagaaggaggg

SEQ ID NO: 206352 - DNA, 45 bp, Homo sapiens
  FP325318.4_87426-89530:1058-1103
  hyper
ggaggcaaaaagccgcggcgggcaaaaacccgaggcggcgggcgg

SEQ ID NO: 206353 - DNA, 126 bp, Homo sapiens
  JH636052.4:789299-789425
  hyper
gcgacggctgccttccgctcgccgccccccggttttcccggctccgaccctatcctctaacccgtttcctgcttcagctgaccacattgttttcctggatgtgtcccgtgccgagcaggctttttc

SEQ ID NO: 206354 - DNA, 112 bp, Homo sapiens
  NW_001838402.2_289580-297926:6069-6181
  hyper
gtgtcagtaaccaggcgctgcctccagcgccgccccgcccgccgccccgcccgccgcctgcgccaatccccgacgggcccgtcttccagccccgaagcggtcacctcctgac

SEQ ID NO: 206355 - DNA, 64 bp, Homo sapiens; identical to SEQ ID NO: 197231
  chr1:859736-859800
  hypo

SEQ ID NO: 206356 - DNA, 149 bp, Homo sapiens
  chr1:872320-872469
  hypo
gcgtgtgcgtgtgccggcatgtctgtgtctggggtcctgtggggtgcacgtgatgggggttgcccggcagctctcacccatggagtcaggacgtgttcgtgcacttccgggctcacaggctctacggggcctcacgtgtcctggacccg

SEQ ID NO: 206357 - DNA, 37 bp, Homo sapiens
  chr1:879361-879398
  hypo
gcgggccccggagcgagaactcggcacaggagagcag

SEQ ID NO: 206358 - DNA, 269 bp, Homo sapiens
  chr1:897149-897418
  hypo
gatcccggtgtcccccgaccctgtgcctccctcacctgcctctcggtgccccgtagactctgctcccagccgccagtctcctgcagctgaatggcgtccgagacgcttgctgcaagtttctactgagtcagctcgacccctccaactgcctgggtatccggggctttgccgatgcgcactcctgcagcgacctgctcaaggccgcccacaggtacgtgctgcagcacttcgtggacgtggccaagaccgaggagtttatgctgctgccc

SEQ ID NO: 206359 - DNA, 390 bp, Homo sapiens
  chr1:898264-898654
  hypo
gcgagggggccgggcctgtgctttttgctgtgggtatggccccccgcccgtttccctcttgccctgtgccttctactccccaccagcacaagcccaccccacctgtgccggtcaggtcctgacctgcccctccgcccctccattcaggggcctctccaggagcctggggtgtggcccagcagtgggatccactcacgagtcccgtctccacctgccctccccaggcggcgggagcctgtttgccatccacggagactgtgaggcctacgacacgcgcaccgaccgctggcacgtggtggcctccatgtccacgcgccgggcccgggtgggagtggctgcggtggggaaccggctctatgctgtgggcgggtaagcctggaggctggactt

SEQ ID NO: 206360 - DNA, 38 bp, Homo sapiens
  chr1:898690-898728
  hypo
gacctgcagtggcttaattccgctagctatgatgggac

SEQ ID NO: 206361 - DNA, 109 bp, Homo sapiens
  chr1:898776-898885
  hypo
gcagccggaggtgtccatgggcacaaggcgaagctgcctgggtgtggccgccttgcatggactcctgtactcggccggcggctatgacggggcctcctgcctgaacagg

SEQ ID NO: 206362 - DNA, 788 bp, Homo sapiens
  chr1:899137-899925
  hypo
cagggtcctgtgcccaccagcgggccctgcctggtaggactttgcggtctgagtttgactcctagggtaagatttcagccattccgctggggagggcaggtcctggggccgggacgcctttctgtctctgctgagctgtggctgcggtcctggtgcccacagtgctgaacgctacgaccccctgaccggaacgtggacgtccgtcgctgccatgagcacccggaggcgctatgtgcgagtggccacgcttggtgggtgatggggcctgcctggggggcatccccaccttcccccaccgtggagaccccactcccagcaggagtgccacgggtgtgttgacttccggcagatgggaacctgtatgctgtgggcggctacgacagctcctcacacctggccactgtggagaagtatgagccccaggtgcatagtgcacccctcctggccaccccctcccgtgcgccgcggggccctcctccctctgtttacccacatcccccccattcctgacaccccaccctggagtcggggctgcggcagaggagggatgccagtggcgggtctgcgtccagcccacgccctcgcccccaggtgaacgtgtggtcgcccgtggcgtccatgctgagccgacgcagctcagcgggcgtggccgtgctggagggtgccctgtacgtggcagggggcaacgacggcaccagctgcctcaactcggtagagagatacagtccaaaggctggagcctgggaaagcgtggcgcccatgaatatccgcaggtccgcagtggggct

SEQ ID NO: 206363 - DNA, 37 bp, Homo sapiens
  chr1:913466-913503
  hypo
ttcccccgcaaccccgggaaccacctgccccgcacac

SEQ ID NO: 206364 - DNA, 214 bp, Homo sapiens
  chr1:918153-918367
  hypo
gagagttcagggcacgatactaggagactggggtgtgcgccgtgaggggtggcagtgagagctgggcgtgcagaaagtgcatgcctggtgccatacgatgcttttccagaaagtagctgccacgagaccacaggacaaggcgtcccgccacgcagggccggcctgacttgagctttcacaagtggaatcgcaccctgcatccctttctgcatct

SEQ ID NO: 206365 - DNA, 53 bp, Homo sapiens
  chr1:918577-918630
  hypo
tccaggacgcttggggtcagcgtcagaaggtgccgccccgttccccaggtggc

SEQ ID NO: 206366 - DNA, 269 bp, Homo sapiens; identical to SEQ ID NO: 197233
  chr1:935362-935631
  hypo

SEQ ID NO: 206367 - DNA, 360 bp, Homo sapiens; identical to SEQ ID NO: 197234
  chr1:935691-936051
  hypo

SEQ ID NO: 206368 - DNA, 32 bp, Homo sapiens
  chr1:942678-942710
  hypo
cggtttatcgccaggcgcggcggctcacacct

SEQ ID NO: 206369 - DNA, 392 bp, Homo sapiens; identical to SEQ ID NO: 197235
  chr1:955508-955900
  hypo

SEQ ID NO: 206370 - DNA, 201 bp, Homo sapiens
  chr1:980098-980299
  hypo
acgtccatccggtcgatgtatcacatcaattaggtaaaagtggtgcccggtgtgtgtgatgcgcgtgcacagatgtgtgtctgcagaggggcgttaactgtacggtttggaggaatgtgggtgagaacgcatgctgacgtcttcagatgtctgtttctcgatttgcaaggaagctcgcgtgtgtgtgtgcacagagctgcg

SEQ ID NO: 206371 - DNA, 191 bp, Homo sapiens
  chr1:982294-982485
  hypo
gggaagacgccctcgctggacgcagagggctccaactgccccggtgagtggacggctgggcgaggggagtgtgaggatagcctgggctcggccgaggtgctgccccctcgcctgggcagcaggtcagtgccgggggttatggtcttgggactcggccccctcaaacatgtgcgtgccggggaccccacgcc

SEQ ID NO: 206372 - DNA, 228 bp, Homo sapiens
  chr1:984139-984367
  hypo
tccgtctcaaaaaaaaaaaaaaaaaaaaaagcagggggcggtttcagggataaaagtggggaatcctcggagcttttccagccggccctcccggtcgccctttgcagtgcttggcgcccctgtgccggccttcgagggccgctccttcctggccttccccactctccgcgcctaccacacgctgcgcctggcactggaattccgggcgctggagcctcaggggctgct

SEQ ID NO: 206373 - DNA, 218 bp, Homo sapiens
  chr1:984401-984619
  hypo
ctggcattggcgctgctagatggccgcgtgcagctcaggtgggcggggaggggacggggccggggcagctcaggtgggcggggaggggacgggcgggggagggggggccggggcagctcaggtgggtggggtggggacgggggcggggcagctcaggtaggcggggtggggacggggccgggcgatggtcctgagcacctgctcctgccctcaggttt

SEQ ID NO: 206374 - DNA, 575 bp, Homo sapiens
  chr1:987799-988374
  hypo
ggacatgtagatatgcgtgtgtgactatgcggccgtgtgtgtgcatggctccatgtatgtgtgtgtatatgagggagacatgcaggtatgtgtccgtgtgtgtgtgtgtgcatatgggtccatgtatgtgtgtgtatatgagggagacacgcaggtgtgtgtctgagtgtgtgcgcacatgggtccatgtatgtgtgtgtataggtgagggagacatgcatgtgtgtgtccgtgtgtgtgcatgggtccatgtgtgtatagtgtgtacacatgggtccatgtatgtgtgtgtatatgagggagacacgcaggtgtgtgtccgagtgtgtgtgcatgggtccatgtgtgtatagtgtgtgcacatgggtccatgtatgtgtgtgtatatgagggagacacgcaggtgtgtgtccgagtgtgtgtccatgggtccatgtatgtgtgtgtatatgtgggggagacaggtgtgtgtccgagtgtgtgcatgggtccgtgtatatgcgtgtatatatggggggatatgtagatgtgtgtgtgtatgaacaggtgtaagtggggagcactcaggtgtgtct

SEQ ID NO: 206375 - DNA, 436 bp, Homo sapiens
  chr1:990531-990967
  hypo
cgaggtggcagcgtggagggctcggcgtggatggcagcctcaggacacacacccctgcctcaaggtgctgagcccccgccttgcactgcgcctgccccacggtgtccccgccgggaagcagccccggctcctgaatcaccctcgctccgtcaggcgggactcgtgtcccagagaggaaggggctgctgaggtctgatggggcccttcctccgggtgaccccacagggcctttccaagcccccatttgagctgctccttcctgtgtgtgctctgggccctgcctcggcctcctgcgccaatactgtgacttccaaacaatgttactgctgggcacagctctgcgttgctcccgtgctgcctgcgccagccccaggctgctgaggagcagaggccagaccagggccgatctgggtgtcctgaccctcagctggccctg

SEQ ID NO: 206376 - DNA, 217 bp, Homo sapiens
  chr1:1018240-1018457
  hypo
gccaagtgcgtggcgtggtctcggcctccaggtcagacattgctgatacgggcctcccccgggaaggcagcgggatccgtggccctgtccaggggccgctcccgcctgacgtagcgcggcttccgtactgaaacgggtcagagacaggcgaggtcagagtgggacctggacagcagggacagtgcaggcctcagccctcaccggaggctctcgggag

SEQ ID NO: 206377 - DNA, 127 bp, Homo sapiens
  chr1:1019320-1019447
  hypo
ccagcaccactgaagcgatggctgctcaggagggcctggcggaggccggctgcgtctgtcctcgggtggagctggacttcaaggaggagcaggtattgggggtctgccctgtcgtggtgggtcctcc

SEQ ID NO: 206378 - DNA, 300 bp, Homo sapiens
  chr1:1047207-1047507
  hypo
agcaagcaaaggaagccaacgtgaaacgtagctttaagggcccaataagaactgtctggggcctctctacctaaagatccctctcgtgctttgatagaaaacaaataccgcaaaccccttgatggggtgtaaaggagacatccccctttgttgacatgcatggtagtcgctgcccacctacccgtgggctcagcacaccggagtcgggcggttgccgtaggtggctcagcagacgtgagcagggcaggatcgggcccatccccccaccgggaatgtcaggccaccatcaggtgatggtca

SEQ ID NO: 206379 - DNA, 660 bp, Homo sapiens
  chr1:1047627-1048287
  hypo
ctgggcgagttggctcaagcgtgtgcactgagaggcaaaatggcggcgtgtaaccgttctatgaccttctagggacgtttgacaggtaacggaagaacgcctcaggtgagcatgggcactactccagtgaacacacggcgcacggtccctccctccagtgaacacaacgcacacgctccctccctccagtgaacacacagcgcatgctccctccttccagtgaacacacggcacatgctacctccctccagtgaacacacggcacatgctccctccctccagtgaacacaacgcgcacgctccctccctccagtgaacacacagcgcatgctccctccccccagtgaatacacggggcatgctccctccctccagtgaacacaccgggcatgctccctccctccagggaacacatggcgcatgctcccgcccaagtactagcaagatgctgcatgggtggacagcccaccctgaagaaggatcaggggagaaggggtgcaagaccccagaagcctgccaggctataaaaccccaagtcaaaaggtgaaaccgcacacctgatctctcacatcgcccgtctggccctcctccaagggtacttcctttccttcctgctctaaagcttcttcaacaactttcactcctgctctaaaacttgcc

SEQ ID NO: 206380 - DNA, 395 bp, Homo sapiens
  chr1:1062954-1063349
  hypo
gacagagtggggctgagcagcggccacgggaagccaccggccacccagacccccgtcctccccgggtgctgccctgggcctaggtggccaggtctggggggccgataccacgggctacgcccagccccacccggctcctgtgtggtgtcaggggctctggcatgccggcaggccagtgctctcgtgagaggtgggtccccaagccggccccagcgaaactcagttaaaggacgagtctgcttttgggccttatgtttcccaactccatgggcagagccacagggccgctgcctcctccaccgtggctggagacaaggcggccccgggtctctgtgaagccctggccacgttcagccgcagggccctgggtgtcatcgccaccgccccactgtggc

SEQ ID NO: 206381 - DNA, 266 bp, Homo sapiens
  chr1:1064886-1065152
  hypo
gccgcctgtgaggcacagagcgaatggggcaccagcctgccctcggcctcagacacggagaggctcccacggcactgagccacgcatggccacgcgacagagggacagaatgccgtggccgtgtaggggagctgcactctgcgtggccctgggatgggaaaatccagggaaacagacactgttatggatgtgagcatcggctgccagaacgagaggaagcagaagaggggaaaaggccgattatcgtagaagagttaggaaaatca

SEQ ID NO: 206382 - DNA, 316 bp, Homo sapiens
  chr1:1069739-1070055
  hypo
taacatccagttccccgagggaccagggggctgcctcaggggggaggggtctcctgcaggcctggcatagtgtggctgtccctacacccagaccctgcacacggccccgcgacacggggaggctgaggcctcgcagggccctgggtgtctccaccagctcctcggggtccgctgtcctgctgaggtgcccgcaggaccctcagtgggatgggcaccagcccttttcagcgttccgccgaacaggggcccagagtgcctgagaggcgcctgtgtttgcacatttggaggccggtgggggtccgtgcaggcgcagagc

SEQ ID NO: 206383 - DNA, 57 bp, Homo sapiens
  chr1:1079129-1079186
  hypo
ccccgtgtctgagggcgcggctgtgtggagtggggtcccctcggccaggcgggaaag

SEQ ID NO: 206384 - DNA, 180 bp, Homo sapiens
  chr1:1095072-1095252
  hypo
cagctgcccaggtgggaggaaccgtggacggggctggggccttcctcgtcccagggctggtgagctgctcgctcactgtttctcagttccaggtagacacagtttataattctgcagaaaactctggggccttttgcctttgtgttttcttttttgagacagggtctgactctgtggccc

SEQ ID NO: 206385 - DNA, 415 bp, Homo sapiens
  chr1:1095497-1095912
  hypo
ttttaccactgaggtcagagggcagacgttgctccaagcgtttcgtctgcgggtggagctttggaactgatggagaaggcagagtcctgaccaggggccgccatcagagcgcagggacggtcgggggggatgcgcagggaggagggaagggaaggaaggaggtgccaagccctccgctcagtggaggtcagtggaggtttgcttcctgctcacactgggcctgattgggtcggagggcacgcgggggccgctgtctgtcctccgtggggccttggcttgtgtccaagggagggagacagtagagggacccacggctctgtgaggcgttccctggcatgacctcacctgtgtgctctctctccctgtctcagtcagagctgaacccaggctcctgtggaccaagagggggtccagg

SEQ ID NO: 206386 - DNA, 32 bp, Homo sapiens
  chr1:1146886-1146918
  hypo
ccgggctccagcctggcggggcccagcgtcca

SEQ ID NO: 206387 - DNA, 261 bp, Homo sapiens
  chr1:1151687-1151948
  hypo
tcctcccaccacctgcgctggccgtggctctgtgaatctcgtttgcctgggaaccagcccaggtgccaacccgccctctcggccccacaggggcccctgggcaggtgggctcagggcagaggccggtcacatgggcaccacagggcagactgaagaggacacactcccggcttccctgagctcccactgggagagccaggacacagcctgggcccccacacgccacagagcaggacccccaccagccgtcctaacacaccc

SEQ ID NO: 206388 - DNA, 259 bp, Homo sapiens
  chr1:1160633-1160892
  hypo
aggtcttgagaccccggctggtgcgtttgccggaggcatccccgagagtagggtgccctggccccttgcctctatgctccgctcaggggcagccgcggccacgttatgaggtggcaagcaggccctcgtcaggcaggtgtggcctctgggacctgggccaggcaagcttcgagggtgcacacaccgcaggcacggctcagaagcactgggcagagatcctcatggaagaaggccaggctgccgctcacacgcgcccctc

SEQ ID NO: 206389 - DNA, 81 bp, Homo sapiens
  chr1:1168269-1168350
  hypo
actctgcgactactacctgccctacgcgctgggcggcggctacgtgctctcggccgacctggtgcactacctgcgcctcag

SEQ ID NO: 206390 - DNA, 310 bp, Homo sapiens
  chr1:1168984-1169294
  hypo
gtggtttcacatcaatccgctttcatgggattttggtctctgtccagtgacttcgtggtaaatgtaactcagtgtttgcttgcgacttatttataaatattgtaagtttgtgtcgatgagtgtaagttggcagtgcgcacgtctcggtttttttacatgatttaaggaaagacttttatgtcagaacttggtgcctgtaccgtcaaccccgctgctgcccgtgtttaaacgcaggagaactttaaaactggccatctatcttttcagtgtacaagtcactgaacccattgtttctttctgaagagacttt

SEQ ID NO: 206391 - DNA, 128 bp, Homo sapiens
  chr1:1190081-1190209
  hypo
gccgtcactggccccgctaagcctcatcaccacacggccaggccagaccagcacccgcggacgccagctccacccctgggccccgaggttcccacccgctgaggagccgggagctccgagaaacgcgc

SEQ ID NO: 206392 - DNA, 329 bp, Homo sapiens
  chr1:1190395-1190724
  hypo
gctgaggctccagtctcctccaaagcccagtcacacattttggtttttgcttcccctttcaggtttttaaaagctaaacctaggagcctggtgggtctgcctgtgctgggcagtgtgtccagcctgccgaggtcacgctctggtgcgcggtgccctcagtggcgccttgggtctcggcgcctgggcctcactcctgcgcgatgctcctcagcacgtacttgaccgtgtaagcaaaggctgcaaacccaactatcacaaacaagttcgccagggcgccacccaggagtccgtggtgccggttggcctgctggagccctgcgaggtttggg

SEQ ID NO: 206393 - DNA, 67 bp, Homo sapiens
  chr1:1221510-1221577
  hypo
tgtccctgggagccctggtcgcgctctgctggcagctggggctcctctttgagcgtcactggcaccg

SEQ ID NO: 206394 - DNA, 31 bp, Homo sapiens
  chr1:1221607-1221638
  hypo
ggagcgcaagctgctcccgctggtcaccctg

SEQ ID NO: 206395 - DNA, 282 bp, Homo sapiens
  chr1:1234770-1235052
  hypo
aagccagtgagtgacggctgccaactcctggtgactggtggacccgtccccaactcctggtgactggtggacccgtccccaactcctggggggctctcccctatcccaaaatagccactcctgcctgcagccaacctctgcccgggatggtggccggggctgctgtcccacaggcaagcaaaggccccgcaaggagccagtgactgaggccacagaggtgaccaccgcctcaaaaggagatcccagcagcggccccacccacacgtgcccctccactgcaca

SEQ ID NO: 206396 - DNA, 226 bp, Homo sapiens
  chr1:1238482-1238708
  hypo
gcctccctcggcctctcccccaaccccaccttgaggtcagaggtcagtcggcccctcaccgagatgacggtgtcgccctggcactgctgggacaggtcgcggacgccgctcacgaaaagcctgctggtgctgacgtaggccttaccggcttccaccatgccactgcacagcttcaccagctgtgggccagcggggcgtggtgagcacagtgggcactggcgcctgc

SEQ ID NO: 206397 - DNA, 206 bp, Homo sapiens
  chr1:1246223-1246429
  hypo
ggaggatgacggctgtgctggtgggtcacgggcggctctgggtcacaggtggctctgggtcacaggtacggaggatgacggctgtgctggtggccgtggggctgggggctttggcacctgcccaggtgaagacgattctggagagccaagatcccctgggcaagcaccagacacgtgtagccccagcccacggcttattcctcaag

SEQ ID NO: 206398 - DNA, 360 bp, Homo sapiens
  chr1:1247741-1248101
  hypo
ggaagttctgtggggcagggacaggtcagtgagcgcagcagcggccctcccccctccagagaccgtcctggcactcacgctgtccttcatgatcagggtgccgtgcaggagccgaggcttcttggcctcagggagcagccctgcggaggaggtggcaggagccatcaatgtgagggccgctcccagccgcctgccccgagcaccctgccctgccctgcccagcccgcataccctgcgccatctcccgcttcagcagccccagcgagatgcctacggggatgctggggcttgtgggcagcgtcaccgtctcgccattggccggcatgtagcagttgacccctggaccccgggggaagagag

SEQ ID NO: 206399 - DNA, 135 bp, Homo sapiens
  chr1:1253110-1253245
  hypo
gcccatgcccagagacagaacgttgtttgcaaagtgcagagacaaaatactgtcaacctaaaatcttacacacctaagggaaaaaaagtcctttaagaacgaggataaagtaaatccatttgcaggcaaataaat

SEQ ID NO: 206400 - DNA, 150 bp, Homo sapiens
  chr1:1266864-1267014
  hypo
aggaggctggcctccgcagccggacacggcccagcagccctgtgtgcaccaggtacagaggtgggacggcctgggtcggggtcagggtgaccaggtctggggtgctcctgagctggggccgaggtggccatctgcggttctgtgtggccc

SEQ ID NO: 206401 - DNA, 108 bp, Homo sapiens
  chr1:1272384-1272492
  hypo
gaccctggcttaccggcccaaggtccgctccgctagtccttcagtctaaggcttgtttagcacaagacaagggatagcacgagttacacgcccggctgcctggcacct

SEQ ID NO: 206402 - DNA, 110 bp, Homo sapiens
  chr1:1273361-1273471
  hypo
ctctgctgactcccggtgctgccgctgccatagctaaagcccgggtcctggtaggcaggcgggaagcagggtgggggtcccgggtactggtaggggtagccctgacccag

SEQ ID NO: 206403 - DNA, 115 bp, Homo sapiens
  chr1:1280781-1280896
  hypo
ggtcccaggcagagccctgccgtccccaccccagccagatgggggagggtgctggaggctggccaggcattgggggcgtacccacaacccggggtccccgcgcctctgtagcagc

SEQ ID NO: 206404 - DNA, 285 bp, Homo sapiens
  chr1:1280926-1281211
  hypo
gcgcccctgccggcactgtgcccccaccttgggattccctgtgaggcctggctaacctgtgtgctgcccccacagacccgccccggggaggaatccactcagaggcagcgccctgggagccagcatggccacacaggatgcagagaaccctccagactcccagaggccacagccagctgccctagacgtggcgtggtcccgaatgcaccccattctcccaaggcggagcaggaagctggcaggggtagctggcccaggacaggcggtgcagagccatcctgtgcc

SEQ ID NO: 206405 - DNA, 360 bp, Homo sapiens
  chr1:1377746-1378106
  hypo
gagcgacaaggttgtgatccacgtggcaggtgttcagaaggctgggggcgggcagcgctggggagagccctgggtacttcgaggagaccccgaagggaggctgctcccacacctgcgccagtttccaccctctctgtgagcagggctgcggtcacctcccacatctgaagagaaccaacctgaggatttcacgctggctgcgtgccagaccagtccctgacaggttgtgcgaggcccttcgctggacagcccattgctggccactggacggagaggcagagggggctgaaattcgggcccatgcctctgtgagcgatgacggagcaacagctctccagcacgtgaagctctccagacagc

SEQ ID NO: 206406 - DNA, 47 bp, Homo sapiens
  chr1:1389833-1389880
  hypo
agacgtcccgcatcacggtgcttgaggcgctgcggcaccccatccag

SEQ ID NO: 206407 - DNA, 158 bp, Homo sapiens
  chr1:1400495-1400653
  hypo
catgaggtgatctgcccgcctcagcctcccaaagtgctgggattcattcaggtgtgggccacggagcccggtcagttttcactgtgcaagtctttcaccttctcggtcaagtgaatttcaaagtattttattctttcggatgctattgtaaatggaaa

SEQ ID NO: 206408 - DNA, 87 bp, Homo sapiens
  chr1:1421578-1421665
  hypo
tgggccaccaggcaccgggaagacgctgtttgccaaggtgagagcgcctggctgaacaggtgggccaggggccgctggggtctcacc

SEQ ID NO: 206409 - DNA, 213 bp, Homo sapiens
  chr1:1476925-1477138
  hypo
gtcagcaccaccaggtctgagctactcctcccaagcagtggtcggaggtcactgagggcggcagggctaggcctctgccacctcctcaggggcgagggtcgggccaggaattcaggaccaggcacaatgacagcagcatctgtttattgacaattccaggtcattcctaacacgccgcagcagggctctgtacagtccggcccggtggggagg

SEQ ID NO: 206410 - DNA, 209 bp, Homo sapiens
  chr1:1491937-1492146
  hypo
tcattttgatagcgaatgcttttttggcaaagcacagaggctgcacaaacagaactcaggaacccctcgaaaaggtctcatggccatctctggagctgctgggcacccaactgtaaccgtggcctcaacacagagccacacaaggctcaggccagctctgggggggtccaccatggccttgcgactgcaggcaccgtgaaactactttg

SEQ ID NO: 206411 - DNA, 151 bp, Homo sapiens
  chr1:1492359-1492510
  hypo
aaatatcttaaggccgtaatttacattttaggcatgaatgattttctaaaacccacgatcagagtttctctgggaatcggcgtctggcttaggaacacattcatttgtttgacaaataccttcccaaaactattttaaaacacagctgctg

SEQ ID NO: 206412 - DNA, 300 bp, Homo sapiens
  chr1:1494492-1494792
  hypo
actgaggctgagcgaggaaaagtcatggcaaagaaacctgggacttagaaatagttccacgcatgctcagcgaaagaacaaaaggctgcatatgaactggacagtgtggaatgagcagacctgtagcacgggaagcagctaaactggacggtgtggaacgggcggacctgtagcacgggaagctgctacaggcactgggaggagaatgggcagcagcaaacggccttgggagacgaaaagcgtctcaaaaccaattgtggtgacggctgcaactccatgaatgtcctgaaacccacagaa

SEQ ID NO: 206413 - DNA, 360 bp, Homo sapiens
  chr1:1562229-1562589
  hypo
tcgggaaggtggtgaaagtgtttggagacgggaacctgcgtgtagcagtcgctggtcagcggtggaccttcagcccctcctgcctggtggcctaccggcccgaggaggatgccaacctggacgtggccgagcgcgcccgggagaacaaaagtgcggcacagctcaggcggccagtgggaggtggggctgcccctggccaccactaacctcagccctgcccccaggctcactgagcgtggccctggacaagcttcgggcccagaagagtgacccagagcacccgggaaggctggtggtggaggtggcgctgggtaacgcagcccgggctctggacctgctgcggaggcgcccagagcaggc

SEQ ID NO: 206414 - DNA, 355 bp, Homo sapiens
  chr1:1563308-1563663
  hypo
cccctgcccgtgagtgctgctccctgggtgccctggctcttgacccaagcagaagtcacccccaggtgaccactgactccgccccagcaggacgcccactcggacacgcccctgcactccgccatctcggcgggcactggagccagcggcattgtcgaggtcctcacggaggtgccaaacatcgatgttaccgccaccaacagccagggtttcaccctgctgcaccatgcctccctcaagggtcacgcgctgtgagtgtggggtgggcacacagctgcagccggcctcttgctgtgctgcctgggggcagtcccaggtcccagaccaacctccctgctccacagagctgtgagaa

SEQ ID NO: 206415 - DNA, 193 bp, Homo sapiens
  chr1:1647565-1647758
  hypo
caatcaaatcacacccgttcttacttccagatgcagtgaaaactcactccctcaggacagttctcttggtcagcctcgtccagcgttcactgtgctgtttccatgtctaccacttctgcaacaaatgtgacttctattgccaaattcttcttcattgctgtgacaggacacactaccacggccctttcataaa

SEQ ID NO: 206416 - DNA, 98 bp, Homo sapiens
  chr1:1729268-1729366
  hypo
gagaccccacccaagggaggcgcacaggacacactgaaaggcaggcgggcaaatgccaagaagtcagccatgaccacgcccagtccctcactagtcct

SEQ ID NO: 206417 - DNA, 209 bp, Homo sapiens; identical to SEQ ID NO: 197243
  chr1:1737747-1737956
  hypo

SEQ ID NO: 206418 - DNA, 44 bp, Homo sapiens; identical to SEQ ID NO: 197244
  chr1:1747214-1747258
  hypo

SEQ ID NO: 206419 - DNA, 36 bp, Homo sapiens
  chr1:1781840-1781876
  hypo
ggattacaagggtgagccaccgcgcccagcctaaat

SEQ ID NO: 206420 - DNA, 214 bp, Homo sapiens
  chr1:1874787-1875001
  hypo
tgcacattcccggcccatgccgggcccacaggagtccgacagcaggaggacaggcgccgcgggagctgttcctacccaggtcaccggggagaggtggctgtgcctggggccggtgcccggggcctctgtgtccgcacaccctgctccttggtgctggtggcacaggggctccgtcatggaaaccccgcaggcccagcctcgccgtccctctgcg

SEQ ID NO: 206421 - DNA, 144 bp, Homo sapiens
  chr1:1888228-1888372
  hypo
agaggacatggagtgaactcagggccaccgtgccaggcccacagggtgcccagcgtgaggcctgcacgtggctccaggcagggctgccctgagcatttgtgcgcgttgtgcactgcacaagcaggtacacgattcaacccagaa

SEQ ID NO: 206422 - DNA, 647 bp, Homo sapiens; identical to SEQ ID NO: 197247
  chr1:1981169-1981816
  hypo

SEQ ID NO: 206423 - DNA, 290 bp, Homo sapiens; identical to SEQ ID NO: 197248
  chr1:1981817-1982107
  hypo

SEQ ID NO: 206424 - DNA, 413 bp, Homo sapiens
  chr1:2013582-2013995
  hypo
tcaggggtgctggacgcgtcagacgggttctttgcagcccttggcagcgtcgcccgctctgtcccgcctgttgtgtgcgccttttccctgctccagggctgtgtatttggcaagagggaggctccgtggcacgatcacacgtgcaggagctgggggctgccagagcggctgttcaagatggacttggcaaatcacctctttcaagttgccggctacccggctgccgtagacagagtgaagtctggtagtttgtgtttatttatttatcttggccagcagagagaattgagtttgcatggagactgtaatttcattctgtgagtgtaagatcacgtccgcgttcctagcgaccggttttgtgatgtgggcagtgccgtgctggtaaatgctctgtgaggaaggaacgatggtgg

SEQ ID NO: 206425 - DNA, 190 bp, Homo sapiens
  chr1:2014025-2014215
  hypo
aaatgctcccaccacggccgatttcaggctgccgaagtggaggggttcagtgaaggtggagttgggcaagggcgtacacggtcggcttctgagagttggtccccccgcccaaccctcccctggagatgggatgtcaggagacctggttccatttgtttttttgcctgagcgtccgggggtggctttgagg

SEQ ID NO: 206426 - DNA, 408 bp, Homo sapiens
  chr1:2016617-2017025
  hypo
atttaaagggaagacaaagacgtagactgtacggctctctgaaacttcagcaacttttccgagacacgttgtaccatccgccctacctggcgtgggcgtgaagctggtagcacacagaaggtcccggagcaggagctggccccgagccagcagctttgtgccctgtgttaccggatcttcagaatgcgcctccagcctgttgaccatcttactgctcacctgggtccgcagcccgccagataccaggcttgactttactcctggcggggctagggccagaacccagactggttgctgcgcacggtgctttttgccaaacctcacatttgttggttgcgtttttcacaactcttgtcctctgaagatgcctgctcagagcccatgcagcgccacgctggaggggctgag

SEQ ID NO: 206427 - DNA, 547 bp, Homo sapiens
  chr1:2025646-2026193
  hypo
ggagctggaagggacgtggttccagtcctgctgtgccaagcctggtgacccgagggtaccctcggcctcccggcctgaactcttctcctaccatgatggtgcctgggatgctgtgtggtgcccgtgggcagtggcggaggcagtggccccggctcgttgaaccttgggcactgcccattctgaggcgcccgctgtgcccggctcgttgaaccttgggcgctgcccgttctgaggcacccgctgtgcccggctcgttgaaccttgggcgctgcccgttctgaggcgccctctgtgcccggctcgttgaaccttgggcgctgcccgttctgaggcgccctctgtgcccggctcgatgaaccttgggcgctgcccgttctgaggcgcccgctgtgcccggctcgatgaaccttgggcgctgcccgttctgaggcgcccgctgtgcccggctcgttgaaccttgggcgctgcccgttctgaggcgcccgctgtgcccggctcgttgaaccttgggcgctgcccgttctgaggcgcccgctgtgcccggctc

SEQ ID NO: 206428 - DNA, 201 bp, Homo sapiens
  chr1:2039530-2039731
  hypo
aagtcaggtagcccagggcccgcactctcaatagaccttcagagaaaaggcatcgaggtaaatgccgcactcgagtacccgtgtgatctctgggtggggccatgatccttctgggcgctggtccaagcgcgtggtgaggccgtcctctcctgcagaaccccggcctcttcgcccctgcccgctcacctgttctgtcctgct

SEQ ID NO: 206429 - DNA, 185 bp, Homo sapiens
  chr1:2041058-2041243
  hypo
ggagagtcccggccgtggtgaggacacggggttgcggcagctcacgcccactgcagtgtccggaaggcggtgctaggtccacctcatttacggggtcgggctctcattctccccattgtacagcccagcctgtagaggcaggtgaggtccaggccatgggcctgtgggccgtgccacgtcgctca

SEQ ID NO: 206430 - DNA, 218 bp, Homo sapiens
  chr1:2065387-2065605
  hypo
tggccgcccctgggggtctgcgcctcttgtggagcccaggcctggcgcccaggtgggtggagtgtggagggggcacaggctgcacgaccccagcctggcctcgggcttgctgggagtcgcgtctgtggccggaggggcctttggtgtcaccaggcctctgtcaaaccccaagccgcatcctgggagggctgggtgggctgagccgcccgctgccgtga

SEQ ID NO: 206431 - DNA, 434 bp, Homo sapiens
  chr1:2065918-2066352
  hypo
agcaaagtgggacacggtgttgaggaaggacaagaccagccgtctggttacaggcttggtgccgcctttctcataagaggcacagtccgcatgggctggactgtcaaatgcatgttataaagatgatgtttttggtaacttgcgaatggaaacgggtgcacggtcggtttggctctcctgccctgagatttattaggttaaaggaaactcgactggagagcccggggcctcgcgccgcttgcgtctggcgagttgttgaagtgaagtcagtggcgctctgcaccttagcctggcccaggctccactgtggcgtccactcttcctcctctgacagtcatgtgtaaatattgaggcccgtttgaactatccctgtgcggaaaaaaaggcctgtttttcacagggctgcctggggaggaggggggtggaaaggaaaa

SEQ ID NO: 206432 - DNA, 75 bp, Homo sapiens
  chr1:2103118-2103193
  hypo
ttcgaggacctgccggactgtcttccgcagcagcggcgctgttctgcactcctaccacaacgtgccatggctccg

SEQ ID NO: 206433 - DNA, 213 bp, Homo sapiens
  chr1:2103460-2103673
  hypo
gcactgcccccatgacggcatccccacccccaggttctacgcggccgagatctgcatcgccctcaacttcctgcacgagagggggatcatctacagggacctgaagctggacaacgtcctcctggatgcggacgggcacatcaagctcacagactacggcatgtgcaaggtgcgtgccttggaccgcctcccctgaccatcccgcatgtgcgt

SEQ ID NO: 206434 - DNA, 581 bp, Homo sapiens
  chr1:2116400-2116981
  hypo
tttgagtatatcaacccattattgctgtccaccgaggagtcggtgtgaggccgcgtgcgtctctgtcgtggacacgcgtgattgaccctttaactgtatccttaaccaccgcatatgcatgccaggctgggcacggctccgagggcggccagggacagacgcttgcgccgagaccgcagagggaagcgtcagcgggcgctgctgggagcagaacagtccctcacacctgggcccgggcaggccagcttcgtgctggaggaacttgctgctgtgcctgcgtcgcggcggatccgcggggaccctgccgagggggctgtcatgcggtttccaaggtgcacattttccacggaaacagaactcgatgcactgacctgctccgccaggaaagtgagcgtgtagcgtcctgaggaataaaatgttccgatgatgtggaagctcctctgatgccttttttccgtgagtggcgcctgccccacatctcagacgcaacccacacgtaggggggcagcttaggagccagcgggacacaggtgggggcgggagttgaagtacctgtggggacacaccgcaatcaagaattg

SEQ ID NO: 206435 - DNA, 33 bp, Homo sapiens
  chr1:2121714-2121747
  hypo
gaaggacgccgtcaccggcgtgcaggctgccaa

SEQ ID NO: 206436 - DNA, 380 bp, Homo sapiens
  chr1:2132534-2132914
  hypo
catcccctgtgcagccggctgtgaactgtgggctccaaccctgcttggtttgcttcaactttctgagtgacgtgcagaccttcacagaggagccgtggggtggctccatccaacgcctccctcgctgcccctgtgttggaaaataaggacagtgggtggcctgggccctgcgcatcctccagagggtcagggacacgcacggtgagcgacctctgtaggctcgaaggcacagcctggaaggactgggacacccgtgggcagggagcaagaaggcaccgccgggggcttaggtcttctttgttcatctggtagaattgctgacttttagagaaagggacctgaggctgggcacggtggctcacacctgtcaaatctcagca

SEQ ID NO: 206437 - DNA, 204 bp, Homo sapiens; identical to SEQ ID NO: 197249
  chr1:2136135-2136339
  hypo

SEQ ID NO: 206438 - DNA, 37 bp, Homo sapiens
  chr1:2141559-2141596
  hypo
ttgggggctctggagatgggcggctcacctgcctgcc

SEQ ID NO: 206439 - DNA, 123 bp, Homo sapiens
  chr1:2141684-2141807
  hypo
gtgagcctcgaaaccaccttctttctgtatcgtttctgggagtggcgatgtcggccagtgggacacctgctgagggtcctcttttcccatccgggtgctggcgggacagggggtggctgtgac

SEQ ID NO: 206440 - DNA, 209 bp, Homo sapiens
  chr1:2142358-2142567
  hypo
cctgggcctgggcttagcgactgctgcccctatccagatgcctgattgggaccagggtgtggggccgggccctgcagcgcctgtcttgcccgggctggagccctagagctgtgcgacctggggccagggtgttctgacagactcactctcaggggctggatgcccttgggcaccacggcgggtgcctagcagaccgtgctgtacaccat

SEQ ID NO: 206441 - DNA, 100 bp, Homo sapiens
  chr1:2154150-2154250
  hypo
agactccatctcaaaaacacaaacaaaaacactttggttcccttcagtgaatgaaaattgggagccaagactgggcttcctggtgcgctcactactgctg

SEQ ID NO: 206442 - DNA, 319 bp, Homo sapiens
  chr1:2167223-2167542
  hypo
ccagatggactgagcacctgcgttggccatggcccggaggtggcgtggtggtgcctggcgcctgtggccctcagcatgtgtcctgccggccgcctagtaggccttcgcttgaagtgcttattcctttgagtaatgctcctgtcttttgtttggggggaaacagataaagggggctttgagaggcgtctcggcgtgatcctgggaaacggccgagattctgttcggtgcttggtgttcgtgtcttctctgattttacctttttgactcataaagatggaaggagtgctctgcctcggtgcctctgcagctgcagatgctg

SEQ ID NO: 206443 - DNA, 62 bp, Homo sapiens
  chr1:2170983-2171045
  hypo
gacctgaatggagtcaggaagggtttcaacctggatggcccgcgtgccggggacccgcaagg

SEQ ID NO: 206444 - DNA, 496 bp, Homo sapiens
  chr1:2190967-2191463
  hypo
tgtgtagttattttttaaaacggctttttgaggcataattaacataagctgcgtatatttaaagatacagttagataacttttgatgtatgcaaacacatataaaacatgtataaaaccctcgctgccgtccagatgatgaacctgtccgtcacccagaagctctctcctacccacacccctttctccccaggctgcagcagtctgcttttgggcctgtagattcgttgccttccttagagctttgtctaaatgaaatcctacaatatgttcttcttttggtctggcttccttccctcagcgtcattattttgggctccttggatgcgtggcgtgtgctgggcagtgttcccctgcgtggatgtcgcgtttgttcctccatttgcccgttggagcgtgtggagtgtttccagttcttgactgtcacaaagaaagcggctgtgaacattcgggtacaagttgttgtcgggatacacggttttatttccctggataga

SEQ ID NO: 206445 - DNA, 125 bp, Homo sapiens
  chr1:2218535-2218660
  hypo
agccagctctgggcgaaaatctagagggcccctgcgcaccctcccgcccggggtgccctggcccagggtgcacctgtgctctggaccctgggccgtgcggggctccagggcgcctggagactgcc

SEQ ID NO: 206446 - DNA, 462 bp, Homo sapiens
  chr1:2237785-2238247
  hypo
cagaagccaggcccgggaccacgttccgtgcgtgcccccccgacgggcacagggtgggtggttgctgggccctgcgtctcgtgagcctgtgtcctagcaggtggaggaggggccggcacgcggcactggggagggacagggagcggcgcaggagcctcgggtgggggaagcagcgtcgggccggggcagggcagcgagcaggcgccgctgaccactcggctccctttcagatcgaagacctgcaggtgaagctgcagcacgcggaggcggaccgggagcagctgcgggccgacctgctgcgggagcgcgaggcccgggagcacctggagaaggtggtgaaggagctgcaggaacagctgtggccgcgggcccgccccgaggctgcgggcagcgagggcgctgcggagctggagccgtagattccgtgcctgccgccgcagcgccgccgacaacgcgggtgca

SEQ ID NO: 206447 - DNA, 162 bp, Homo sapiens
  chr1:2238918-2239080
  hypo
ctcctctgcaccccgtgattctgcccacgctcctccaccacgaggcactgacctgcgtcgggtggtgaccgtggctggcggtcacgccctcagcccctccgggcacacgtgccgcctgaccgggcgacccttttcagttcggcaaacgtcgctcccttcatt

SEQ ID NO: 206448 - DNA, 208 bp, Homo sapiens
  chr1:2239611-2239819
  hypo
aggagttctttgcttgaatccgttctaacacccgcggcagctgcacgcgctcacagaaggtggaggttacttgcccaggtacagacgacctcggggcagtgacgagcaaagaccagagactgctgagccctcgcatctgggtggcggaattgcctgcggggttttgcccttggtttactgaggggggtcttggttgctgctgaagccc

SEQ ID NO: 206449 - DNA, 207 bp, Homo sapiens
  chr1:2239999-2240206
  hypo
gcaacatgcagaatgctgtttttagccttgttttaccagagttgttttttttttcagttatttcttcaagggaaactaaatgatttagttggagcaaagctttaagtgtgttggcgtgcttctgtgtggctgtcctgtgtcgccaggtcgaagatcacagtgaggtagaggccctgccccatccccagggccgccaggcttgctccg

SEQ ID NO: 206450 - DNA, 204 bp, Homo sapiens
  chr1:2254568-2254772
  hypo
gggatggctgggacgcggtggaccggttgatggtgtgagggctgctgtgggaccacgggggacaccgcgtggcactccagccgctcccgtcaccaaggcctcactggctacagccccggccacacgggtgccgtccccacgaccagggtggctctgcttgttctcccgctgcgccagaggcagctccacggtggcatccagacc

SEQ ID NO: 206451 - DNA, 360 bp, Homo sapiens
  chr1:2257956-2258316
  hypo
cgaggccagtgtccacagggaccgcacatggggaggtggtgcaggagccctgggcggtggactgggggtgcgtctgggcacccactgcgtgcctgggactgcaccttcatgcgggtgctggtccctcactcctgtccctcacgcgctggccatgacggccctggcaccggctgccctctggaggccccagtaagtccgcaccaccccggcgccatctcctgccagttctgcctgaggcagcagctgccaccaccgcgcagacacatcctgctccctcctgactttcggaggcctggcctggcatcggcctggcagtctcggcctccccgtcggggttggtgtctggggatcagggtgaag

SEQ ID NO: 206452 - DNA, 261 bp, Homo sapiens
  chr1:2259051-2259312
  hypo
cagaggctgtggacggctgcgagtggcccgtgcggcttttagaagcacagacaggagatggggtggacgaggcggcacagggggagggccacgaggaggggcaggcgcggcgggcaggcggcaccacctctgcaaggctaacaaggtgctgcgcccggctccctcctcttgcctgtgcctctggcggtgaccagaatggcccattggccgaattggccgccctgacgggtgagggccgctttcccaaggccccgcatcgcg

SEQ ID NO: 206453 - DNA, 140 bp, Homo sapiens
  chr1:2265973-2266113
  hypo
gagcaggcctggttttgggctgcctgtcccaacacgacgagagggccctggctgtgtggccgtggagccggcaggaggcaggggaagtggccgctggtcacagatgtgtgccccgaagagacgacatcatttgaacactg

SEQ ID NO: 206454 - DNA, 169 bp, Homo sapiens
  chr1:2266194-2266363
  hypo
ccctttggctgggaggcccaggctgggagcagacgccgacccctccgttctctcaggtggaaaagaacgaaagccttctttctgctgaaataagacgttccaacatcaccctcagcgcggaggttgccacggttctggagcgaagtggaggtgccgccctgggcgttcg

SEQ ID NO: 206455 - DNA, 209 bp, Homo sapiens
  chr1:2267768-2267977
  hypo
agcgaggcccgtgtaggctcactgtcttcccagaccaggcccttggctcccctgggccttccccgtcctcctggcccagctgatgaggaggccacagctgaccctccgaacacctgcaggtggggtgggctcatcctacctgctgcctccaggaggctcctgtgccgtgggtggtgtccccctggggtgcaggccgcctctggatctgc

SEQ ID NO: 206456 - DNA, 145 bp, Homo sapiens
  chr1:2269856-2270001
  hypo
accgatggtttccacgtggactgcactggagctaacttggactgcgtcttttatcgacaccccctggacaataaagacaccagctctgtatcctaatcatgcggacaccctcaccctcggcaaggtgaccgctccagagtgggcc

SEQ ID NO: 206457 - DNA, 426 bp, Homo sapiens
  chr1:2270534-2270960
  hypo
aagaggaggccctccgggttggccaagacgctttttgttgcaagcgagagaaacgagaaatggtgaaaagcggaaggggagggtcgtccccagccttggcctcagaggagccttctagatcccagcgcatctggaccaggagcccacaccgtgtgtctttcttctggatgtcacctccccctccctcaggctcttaccgccgcatggcacgggtccacggagggggcgtttctgctgccacacggtggggactgcctgaccatgagagacagcggtccacctctgccatgcactccctgagtcggggctgcaggctgaccgcagcggcccctgggtcctggctgtgaccgcctttcccgaggccggcaccgcacccgccaggtgctcaagctgaaagttgggggtcagcctcgttgcccctgcacc

SEQ ID NO: 206458 - DNA, 202 bp, Homo sapiens
  chr1:2273549-2273751
  hypo
caagataaaggtcaccgtacgacctcgggggcctcgggaaccgagaggctgagccagcccgggacgggatcgggcagcttgaccgctctggagggaaattccaattcattatctttttacggcggactcaattagactccctagtcacctgtgtagggcaccaggcagcaggcagggatgctgcccgaatcaacaaggctgc

SEQ ID NO: 206459 - DNA, 254 bp, Homo sapiens
  chr1:2275835-2276089
  hypo
cacattctcactattggggtggcaggaaggcccagcgaccaggagcatgtgtggggtctgggaaaggcctgggggacggggtgtggggtgcaggagccccaaggccgatgctgctgaggaggccaggagcggggaccgcacagacggcagttcctctggaggggggtcccgtgtgggccgggctgtgcaaaggacacactggtccctgctggcctctcagggcaagcgtgaggaccctggcctgctccggcctc

SEQ ID NO: 206460 - DNA, 685 bp, Homo sapiens
  chr1:2276200-2276885
  hypo
gcctgcagagcctgggggcagggctgaagctggccatggaggaccttgggggccacctccaccttccagcagcaaatgccaagtccccgaatgcagaattctgccagagggagcatgaccgtctctctgttggcacaaagcgagagcatcaaagacagcgtcagcccccgcgagggtccacgcatgctcacactctgcgctcatggatggccacacacaccctgaaaacggcgtcagcctccgggagggtccacgcgtgctcacagcactcatagatgaccatatgtgccccgaagacagtgtcagcctccaggagggtccacgcgtgctcacgctctacgctcatggatggccacatgtgccccgaagacaacgtcagcccccgcgagggtccacgtgtgctcacctgcgctcatggatggccacatgtgcccgcaccctcgcacaggcatgggcggtccccaggctgccacactcagggtctgtctgtgccccggcacctccaagccattccttccaccaggccagggccaggcctggacacctgccacctaccacccgctggggcagcagccacgcactcccccactgctccctgttggcggccaggcatgggccggccttgttgggggacacaggacaattcggggcacttgtcttgcctccgtcctccttggagagcctc

SEQ ID NO: 206461 - DNA, 37 bp, Homo sapiens
  chr1:2283082-2283119
  hypo
agaagcggaggggcccgaaacccgcttttcttcacgt

SEQ ID NO: 206462 - DNA, 282 bp, Homo sapiens
  chr1:2288195-2288477
  hypo
actgcacaggagggtttgatgtgcactgctcgctgcaccggagggattaagctttgattcaactccatgagtaactctggaatgatccctgtgaagtctaggccgcacattctatggaagtgcagttctcactggccccagccttggggggcagagttgggggctggggggttctgccggagcacctgggcctcatctccacgaagaaacgtgaggcaacccgtgcagaagcggagcagcgggaaaccctgacctcgagagagcagtcggcgccgcggcccc

SEQ ID NO: 206463 - DNA, 234 bp, Homo sapiens
  chr1:2304093-2304327
  hypo
gagtcagcagtgggcaccccaggaaccgaccagagcccagtgtggcagctggaacacaagcacatgcgggggccgaccctccgcaaaccaccttgcagagcagcgacctgggcagtcgtccacactcagaccgtgaggctcggctctgctggcctggagcactgtggaatcgaaccaagtggaccaccggggccacggagcatgcaagagacacaagtgggcggtgtggggctg

SEQ ID NO: 206464 - DNA, 62 bp, Homo sapiens
  chr1:2304481-2304543
  hypo
tcctggcagccagggccgcccctgctccaccggggcctgcagggcatcgctgtgggtggtgt

SEQ ID NO: 206465 - DNA, 201 bp, Homo sapiens
  chr1:2329575-2329776
  hypo
gtgcctcatttggcgtctcttcaggtgtggccctgcagccgaggatggacacacagacatcagttagccctcacatccggcgttcagccgaggatggacacacagacatcagttagccctcacatccggcgttcagccagggatggacacacagacatcagttagccctcacatctggcgttcagccgtctgactggaaaa

SEQ ID NO: 206466 - DNA, 45 bp, Homo sapiens
  chr1:2331318-2331363
  hypo
aggttaccttttcccgtagccagagggttccacaggcagctcact

SEQ ID NO: 206467 - DNA, 197 bp, Homo sapiens
  chr1:2331437-2331634
  hypo
tctgaggagctgtgagctgaagtgttcctggtgcttcgtgctccactattggaagacttacgcagctcctgggcctgcctgggccaggtaggggccctgagttcatgcctgactggccagccccaggcgaggaacaaacaactgcattccaggacgtggtggccattgagggaaaacccacacgcagctccctgcca

SEQ ID NO: 206468 - DNA, 57 bp, Homo sapiens
  chr1:2331902-2331959
  hypo
tgggacaggcctggcgcccgggttccacggtcagcgcatcctcggccccgccctgtt

SEQ ID NO: 206469 - DNA, 218 bp, Homo sapiens
  chr1:2334771-2334989
  hypo
caagtgtttctcacggatggaattctagtcagctgcaggcgggaagccaggcgggtggagcccatgggagcaagggcgagtggccggtccccgctgtgccaggtgggcaggcaggagcaaggcctgcgagggaggaacgggccgctccccgccagccgccttccccagcagccgcaggtggtgccagccactccacagagcccgagggatgatctagc

SEQ ID NO: 206470 - DNA, 335 bp, Homo sapiens
  chr1:2336000-2336335
  hypo
agtctagagggtcacggcccccccgccctcctccgtctctggcaagctgaccttgactaacccaggaatacagggtcatcctcattcctaagtaagtcaaacagcaagacatggtttgcgcgggtctttgccggaagccggtcctgctggccaggtgttttacgtcagcagggaaatgtggcacacgccctcgaggcattttaacactgcgcttcaggaaatctcaagttccatcttgtgttagtaacgtacccacattttgctggagttagtttattaaagatgcctacggtgaactctctggcgcaggttaaatgcagttttgaaaacctgga

SEQ ID NO: 206471 - DNA, 32 bp, Homo sapiens
  chr1:2336365-2336397
  hypo
ggccgagctgaggggctgaacacagcagtgac

SEQ ID NO: 206472 - DNA, 31 bp, Homo sapiens
  chr1:2336427-2336458
  hypo
ccccccaggagagggctcgggcgcccctggc

SEQ ID NO: 206473 - DNA, 192 bp, Homo sapiens
  chr1:2341160-2341352
  hypo
tctcagggcctttcccggctgcttgctctgccggtctggaaaatgctcttccctaagacgtggtctttatctctgagagcccctcacttcccaagatgctctgtgacgcagccacatctgtctcccgcccaccgagcacactctccatggcggcaggatgcccggggcgagcccctcgtagggaaccaggct

SEQ ID NO: 206474 - DNA, 92 bp, Homo sapiens
  chr1:2359880-2359972
  hypo
actgggtgggcaagcgtggactgcatctgtcctgcatggggtcctgcgtctggctcgcccggtgccgtgctgtggggcccacgccaacggct

SEQ ID NO: 206475 - DNA, 54 bp, Homo sapiens
  chr1:2411364-2411418
  hypo
ccggcatcagcgacgaggacagcctggctcgccgccagcgcaccagggaccaat

SEQ ID NO: 206476 - DNA, 180 bp, Homo sapiens
  chr1:2412263-2412443
  hypo
ggtttctgtttccggaaagcctgctgggccgggggagagaaactctgcccgtcagcaggtcctggttccgggtggtgctggctgagccagcaaaccaggccctggggccttgctgctttgctgcagcttggaaagcgggttctgtgggtgcaagtgccaggccctggggtctctgacacg

SEQ ID NO: 206477 - DNA, 35 bp, Homo sapiens
  chr1:2412563-2412598
  hypo
ctgacagctccgccgtgtccagcccctgccagctc

SEQ ID NO: 206478 - DNA, 149 bp, Homo sapiens
  chr1:2439887-2440036
  hypo
agggaagggctcccgctctgggctccccccatgggaggagtcgggaggggcccctgctccgaaataaaacatcgcagatggctccggcctcttttaaaaactctatttggtgcgtgcccacggtgctgcgtcccgtcagacatacctgt

SEQ ID NO: 206479 - DNA, 361 bp, Homo sapiens
  chr1:2450394-2450755
  hypo
actcaggtggccacggtgccacaaaatgtaggctgcccagaatcagtcagaagggaggggtgctgggcttcttggcccccaccctccaggcctccctgggggtgctgcggtgtctaaccagcatgactgattgggaagatcctggggggtctgcgttagaggctggggagggcggcgcatccgttaccttggagaagaagttgatgctataggtgatggtgcgcatggtcacggggtggccccggataaagaagcctccaaagtacacgcggtccaggctgtgcagccgtgcgtggaggcaggccagctgcccaatgtcgttgctgatcatgtgcagcaggctcttcgccatgtcttcttt

SEQ ID NO: 206480 - DNA, 457 bp, Homo sapiens; identical to SEQ ID NO: 197255
  chr1:2461988-2462445
  hypo

SEQ ID NO: 206481 - DNA, 177 bp, Homo sapiens
  chr1:2463122-2463299
  hypo
cggcagtgacccccggctctgagtgactcgcttggtgggcctagctccaggaggtcctcagcacaaggatggacggtccagggggcagccaggacagtgctgggacagcaggggaagacaggacttcaagccaatgcagggtggctctcccacaggccagccggacaccattgtgaa

SEQ ID NO: 206482 - DNA, 71 bp, Homo sapiens; identical to SEQ ID NO: 197256
  chr1:2477791-2477862
  hypo

SEQ ID NO: 206483 - DNA, 68 bp, Homo sapiens
  chr1:2483772-2483840
  hypo
gcaatgatgtaaacgcttagtattgtcctggaacctgcctccgaaaaggccgtgcgctcccgcctggg

SEQ ID NO: 206484 - DNA, 75 bp, Homo sapiens
  chr1:2483873-2483948
  hypo
cgctccgctgcctctctgggctggctcagccgttgcatgttcctgcgtgtgcactgagacgtccaccctggcacg

SEQ ID NO: 206485 - DNA, 89 bp, Homo sapiens
  chr1:2522316-2522405
  hypo
tggcatggttggccggggcgggacgtacactgggtcgccgctagctgcaccttcgcacagatgcctccgagcagcgggtgggcgtgggc

SEQ ID NO: 206486 - DNA, 98 bp, Homo sapiens
  chr1:2537660-2537758
  hypo
cccctgcccaccggcgcggctcgtacgtagatgatgtgccggctggagttctggtcgtcgttccagatgaagaggtcgatgaggacgcgcctgttgaa

SEQ ID NO: 206487 - DNA, 197 bp, Homo sapiens
  chr1:2716539-2716736
  hypo
accatgtggggagggagtggcgggggcagctttcaccctggctctgcaggggccatgccgtcctcctaccttggggttcgctgccggtgggatgggcctcgagggcccggctgcatgctgccaggcagtcctcaaacctgccgctgtggagcagagcttcaggtgacagggtgtcactccgggtgcccctggggtcc

SEQ ID NO: 206488 - DNA, 60 bp, Homo sapiens
  chr1:2717239-2717299
  hypo
ggccagggcagtgcgcacactctgcagggctgagggggcgtggcagctgaatgcagccag

SEQ ID NO: 206489 - DNA, 143 bp, Homo sapiens
  chr1:2833979-2834122
  hypo
ggcatggagacagggaaggcagaggccatgcatatttaacgtggcggctccacgaggctgcgtgtgagcggacgtgtgggcaaaccaccctgaagcatcgtggcgaggcgggcaggggtgcagggtcccggcagggcagccca

SEQ ID NO: 206490 - DNA, 57 bp, Homo sapiens
  chr1:2846736-2846793
  hypo
catgctcacacacacgtgcacacacatacatgcaaacacatgtgcacacacacacgt

SEQ ID NO: 206491 - DNA, 177 bp, Homo sapiens
  chr1:2846823-2847000
  hypo
gtgggcttcttccgtgggcaggcacagaggtcgggtgtcggcccagaggttcatggaggcgctaatgagcggctccgggcccgcaggagatgcggctcacacaggtcagatttcggatggatgatgaaggaaatgagggccaggccagcctctggttacagtttaggaaaaacacga

SEQ ID NO: 206492 - DNA, 204 bp, Homo sapiens
  chr1:2847180-2847384
  hypo
ccggtcacacagtgtcccccatggaggggcctcgatggccgggctgcgcatggcacgtgtcgtgtgtggatccacagcagggccgctgcccccacccagcgccagccgggaggttgggaagtgttagcgccaggagcagctttcagctgaaaaatccccagtttattaactttgctccagaagccagggcgtctgttatttatg

SEQ ID NO: 206493 - DNA, 463 bp, Homo sapiens
  chr1:2850532-2850995
  hypo
cacatggcctgcaccggccagccgggctctaacatgtcctcaactttcaggaaaccagagcctccgagtaagtatcagatgagttgctaatgttggaaaaaaagcgagaaacatgcttgggggctctgttttacggctgcacttgaagtcggaatctgcgatcgtaacccaatgctggcctcgccaacgtgttttcggtattgtcgggataattgaaagtccagacaaatttggctatcagggctccaggcagcggaatcccatggtggcccctggtgtgatgagctcgccgaggccgtctcaggtcctgcgcccaccacggtcttcgggagcagctgtcggctttgcaaaagccccaggactttccgggtggacatggggggcttggctttgtcaccgggacctcttgaaaggcagccggtcctgggcctctcatctggccccgcacccttcttggccaccg

SEQ ID NO: 206494 - DNA, 53 bp, Homo sapiens
  chr1:2851025-2851078
  hypo
gcagggccatccgtgcctcggggtctgccctcggcttgtgtcacaggcagaat

SEQ ID NO: 206495 - DNA, 530 bp, Homo sapiens
  chr1:2938631-2939161
  hypo
ttcgagaacttcggcgtgcccgctttctacctgtcggaccaggcggtgctggctctctacgcctctgcctgtgtcacgggcctggtggtggacagcggggatgcggtcacctgcactgtccccatctttgagggttactccctgccccacgcagtcaccaagctccacgtggcgggcagggacatcacggagctcctcatgcagctgctcctggccagcggccacaccttcccctgccagctggacaagggtctcgtggacgacatcaaaaagaagctgtgctacgtggccttggagcccgagaaggagctttcccggaggccggaggaggtcctgagggagtacaagctgcccgacgggaacatcatcagcctcggggacccgctgcaccaggcgcccgaggccctgttcgtgccccagcagctgggcagccagagccccgggctctcgaatatggtctccagcagcatcaccaagtgtgataccgacatccagaagatcctctttggggagattgtgctgtcgggggg

SEQ ID NO: 206496 - DNA, 183 bp, Homo sapiens
  chr1:2939191-2939374
  hypo
gcttctcaaggagctggagcagctggcctccaaggacacccccatcaagatcacggctccccccgaccggtggttctccacctggattggagcctccatcgtcacctctctgagtagcttcaagcagatgtgggtcaccgccgcagacttcaaggagtttgggacctccgtggtgcagagaag

SEQ ID NO: 206497 - DNA, 316 bp, Homo sapiens; identical to SEQ ID NO: 197259
  chr1:2984307-2984623
  hypo

SEQ ID NO: 206498 - DNA, 101 bp, Homo sapiens
  chr1:2999262-2999363
  hypo
ggcaccctgttgccgcagcaaggagaggtggggtgcgcttcatctcagctgccccagggctgagctcagctttgcccgctttgtgcggagtccaccgaggg

SEQ ID NO: 206499 - DNA, 236 bp, Homo sapiens
  chr1:3052661-3052897
  hypo
cctaggagccacccctgggaagaaagggggtctcgggcagcctcgccatgggaccaccagctttgggccttcgttacaggggtgatgctgccccgctgatagggttgggggcctggggctgcagcgtagctgaagtggaacctgcccagcctgcacttcccagctggccagccccgcgcgatgctccggggtctcggcgaggcacgccaggcactgagtcctcagacccgctgtcc

SEQ ID NO: 206500 - DNA, 54 bp, Homo sapiens
  chr1:3052927-3052981
  hypo
cgaggcagtggaggcccagaaagatggaccgacagtccccgccttagagtggct

SEQ ID NO: 206501 - DNA, 146 bp, Homo sapiens
  chr1:3107294-3107440
  hypo
cccacctgcctggaggaaatcacccgtgagcgcatttgctcgccgtggggtctgcaaaaacaatgattttcacatttgttgagtaaatcatgacatttatcatcatgctgtttattttgctaattaagaggcggctgcccggtgac

SEQ ID NO: 206502 - DNA, 145 bp, Homo sapiens
  chr1:3109586-3109731
  hypo
tcacagcggccagacggcgagtacccagcagacacagcggccagatggtgagtactgagcagacgcagcggccagacggcgagtacccagcagacacagcggccagacgacgagtacccagcagacgcagcggcttaccaggggg

SEQ ID NO: 206503 - DNA, 139 bp, Homo sapiens
  chr1:3111098-3111237
  hypo
aatatcaaggctggactctgcggcaactggccactgtctccccaccacacgccaccgtctccccaccacacgccaccgtctccccaccacacgccaccgtctccccgccacacgccaccgtctccccgccacatgccac

SEQ ID NO: 206504 - DNA, 340 bp, Homo sapiens
  chr1:3111463-3111803
  hypo
gcctggctctgggcacctctgctgctccactctgcgtggagagttctgcgtgaggccaggaagctttgccgcgcttccccactcaggagcttctggatgtttctatggaggcctcacgtctaaaaccgtgagcgcaccggccagtggatgctctgaggagtgttcccgtggagccagcaccgggcagctcggcgaggcacacagcgtcgggatttggagagagacggggccctgtgggatggtgcggagcctgaggccaccgtggggacagggatgcagagaaacccatgggcctcggcgttgctccgggagaagccggcagtgccgtggaggagtcaca

SEQ ID NO: 206505 - DNA, 387 bp, Homo sapiens
  chr1:3122848-3123235
  hypo
caccagtgggcctggacccacgcccttggggatgagcaagctctcgtgtatttgctgtgtgtgcaacacggggttcctctcggggcactggggatcccgaaagcgtgtctggtgcagaaggcgtgacctccaggcagctccgagacgggaagtgattggagtgtaggcgtgaggtcccggtgctggatagacgcacacgccttcacgcatcctcagaaagtgatgttgctgagtgaatagaaggtgcacgtggcccttcctgagtctgctcaccctccggacacacacgcatgccttcccacgctcctgtgcacacacccctcccggcccttccatggaggacctgtaggaacccgtggcctagggtgagctgggtctgaggctttg

SEQ ID NO: 206506 - DNA, 164 bp, Homo sapiens
  chr1:3124782-3124946
  hypo
acaaggggacctcttcttcccgggatcttgttccgacctttgcttaaagcagtttccccactggctcggttcacgtgcgggcagcgattctctggccctgcactgtagggtgtttagtgtgcccgaggccaccccgagtgatgacgacgattgaaaatgtctcc

SEQ ID NO: 206507 - DNA, 584 bp, Homo sapiens
  chr1:3127861-3128445
  hypo
ttttctaagtagaccgattgaaaataagtgaaagtcatttccgggcagcagtgtccacctgaaagttgagatatgcacagtgttgaccgaacatctctcgtggtgtctggtccagcagtgtgaaaagccgtgggcttgatctagctggagatgcggccgtgggtggactcctaagaaaagactcaaggcagagtctcttggggcccgtcgggggctgcagcagattcgtgtcttgaaaacaggttgggtccagctccctctgctgtgaggtccctgcctcattgctgggacttttgtctcaaggccccggcctcgtccttggtcgtccagcccactggccgcagcagtgggggccggcgctggtggtcagtgctcgctcaccctgccctgcacagcccctaatgttggcacttcacggacaagccggcctgggtcctcagaggagaataaatgtgcacggaacagcacacggtggcccatggccttgcagcacgagcgtgtccatgcgtgtgcacgtgtgcatgcgtgtgcgtgcgcgtgcatccacgcctggcggcctgggcccggcgtgagtgtgtgggtgg

SEQ ID NO: 206508 - DNA, 255 bp, Homo sapiens
  chr1:3128477-3128732
  hypo
gctgtaaaggctcgctgcagtgggcaacatggaggagacatgaaagaggggacaataaatagcttcctaccttgcctggataatgggcgagttctccgggtggattaatcctcgcgtcgtctttgggccgtcagtttgggagtgacagtaacaaggctcccggggaccctgctaatttgcactccattcaccggctcgtgaaaccgtcagggctgcggaaggactgcgcggcgcgggcctccattcactgggagc

SEQ ID NO: 206509 - DNA, 189 bp, Homo sapiens
  chr1:3179305-3179494
  hypo
acagaaaacatgagggtgtgcgagcatggggtcccagggacgacacctgcggggtgctgccacgatggtgctgggaggtgcggggtgcagtaatgacaacacacagacaacacgagggtgtgcgcgcatggggtcccagggaggacacctgcggtgtgctgccgcgacggtgctgggaggtgcaggtga

SEQ ID NO: 206510 - DNA, 84 bp, Homo sapiens
  chr1:3182799-3182883
  hypo
atcttaatctttattaaagagacgtaaacttccacggatcgggcgggcctgcctggcacagccggacgccaggagagccgggca

SEQ ID NO: 206511 - DNA, 99 bp, Homo sapiens
  chr1:3182917-3183016
  hypo
caccagagaacaatgcgcgccggagccttttcgccccgagagcccctcgcacttacctcagtagacgcgaattaattctctccccctgagagccccaga

SEQ ID NO: 206512 - DNA, 41 bp, Homo sapiens
  chr1:3184584-3184625
  hypo
gtgcagacctcaggggcctgcggaccacggctccccggccc

SEQ ID NO: 206513 - DNA, 300 bp, Homo sapiens
  chr1:3184697-3184997
  hypo
agacttcggctggcccactggtctcaggagaagggcccgacgctcctgctgcggttgcagtcgcccccggctcggcgcgcgtcagaccaggtgcgcgtggaagtgtgtttgtctccgctaatccacgggggaaggagaagggcagagtctttgtcaggctccgagcaattaggataattaaaaaagaaggcttattgggtaaacatgctctgggattgtgaccccttaattaatggactacggggagaaattacagcagtggcaggataattaacgtgtgcacttcgcaaagccggtaga

SEQ ID NO: 206514 - DNA, 459 bp, Homo sapiens
  chr1:3195278-3195737
  hypo
gaaaactggccacccgagaacttttccagtgtgactgctggcctctctggcagacgtgtccaaactcagaaaacctctgctgctctgaccacagggaacgtcagaggggacggggcagcggaacaaagcacaaagcgtccctgcgtcctctcaacgtggcccagctcctgcagacactcagcgagccgtggcctctcccatcctcccacgcttccctccggccggccctggagatccgtggagccacacggtgccgagcgcggcgctggccgtgtgctccgtgtctgtcatcgtcagccctgtccacctttggggcaggggcagctgggctggctccagtttctctccatgtcaactttgcaaaggaaggaggtggatgcagaagctgccaccaatagccacgtgggcagctgtggccccgagtccggggatgcagttggtcatcaggagcctcgaagc

SEQ ID NO: 206515 - DNA, 342 bp, Homo sapiens
  chr1:3228903-3229245
  hypo
cactgggccggtgacatgaggatcactgggacaggcacgggtgtggtgggaccacagggccccgagggcagcaggcagcccccagcctcctccgaggtctgtcctggaggctggccgcccacccgccggctgcacctcacagccgctcctccccagcctgctggtgtctgacgttggcatcccctctgtgggatacatcaggagcccatccggatccggggccggcaggtggggttcccgggatgggttgggagttcccagaagtccggtgaggggctttcggaaagggaccgtgcaccctcctgtgcagaacccggcctcggccaagctgcaggctctgac

SEQ ID NO: 206516 - DNA, 874 bp, Homo sapiens
  chr1:3321124-3321998
  hypo
tcacagcccggccacggcagagaggaggtgggcagggagacaccagcatgtgctctgatccctcggcagcgtggtgggggctccgaaggggcactgggaacaagctgtatggttggggtcccctcccgggcagagggcaggtagtcgggccccgcagtgagcctcgtcctctgcgcagcctggagcagcacatggtcatccacacggaggagcgcgagtacaaatgcgaccagtgtcccaaggccttcaactggaagtccaacctcatccgccaccagatgtcccacgacagcggcaaacgcttcgaatgtgaaaactgcgtgaaggtaacctgcggggcggccccgtctcagccccggggcagcaggaggctgcagacgggcgcccgcccccgtgctccctacaccccctggtccaaatgtagatggagtgcggcagagtgggtaggaggcccctgcggtggctcgggcccttccgtgtgactaggaaggaaaggaagtctcagggaagaccgtgtcccccaggtcagaaggatcagggccgagaccagaacccaggcccctccagagcgcggctcctgtcctcccgccggtgtggaaggaagaggctggcggggctgagccgagcctccaccccgagcccgccagggtctcagcaccacagctgaaaacgctttctgcagccctgtctcacgcagcctcagttcaggaattgttcttgaggaaagcagccggggaggctctgcggctcacttaaggccctgcagcgggtccttgctacacagagacctgtcccggcctgcttggtgcagactgcaacgtggcaagagagacaggcagggccctgccccccacagccggttggtccgccagcc

SEQ ID NO: 206517 - DNA, 119 bp, Homo sapiens
  chr1:3322260-3322379
  hypo
cgtggcggtcgggccgaggtgggccatcccccaaggtctcccccgatccgaggggccccagtttgttcataaagcactcatggcaggttctgacatctctgccgcgtgcagcctggtcc

SEQ ID NO: 206518 - DNA, 56 bp, Homo sapiens; identical to SEQ ID NO: 197260
  chr1:3325182-3325238
  hypo

SEQ ID NO: 206519 - DNA, 238 bp, Homo sapiens
  chr1:3327630-3327868
  hypo
cacatgctcatgtgtgcacacgtgtgcacactcagacacgcacgcttgcagaatacacacacgcctgcccagacacggacacttacgcacacagacacacatgcacctgcctgtgtatttgtgtgtacgcacacacgcatgtatgcacagtacacacatatacacccatgcccacgcacatgcacccagacagactgcttccagccccagcctcgcccctccagcggctggctttccc

SEQ ID NO: 206520 - DNA, 190 bp, Homo sapiens
  chr1:3328343-3328533
  hypo
tgctacctcccacatcgctgctcaagagccccctgaaccacacccaggacgccaagctccccagtcccctggggaacccagccctgcccctggtctccgccgtcagcaacagcagccagggcacgacggcagctgcggggcccgaggagaagttcgagagccgcctggaggactcctgtgtggagaagct

SEQ ID NO: 206521 - DNA, 498 bp, Homo sapiens
  chr1:3328625-3329123
  hypo
gctcggacctggacagcgacgtggacagcgaccctgacaaggacaagggcaagggcaagtccgccgagggccagcccaagtttgggggcggcttggcgcccccgggggccccgaacagcgtggccgaggtgcctgtcttctattcccagcactcattcttcccgccacccgacgagcagctgctgactgcaacgggcgccgccggggactccatcaaggccatcgcatccattgccgagaagtactttggccccggcttcatggggatgcaggagaagaagctgggctcgctcccctaccactcggcgttccccttccagttcctgcccaacttcccccactccctttaccccttcacggaccgagccctcgcccacaacttgctggtcaaggccgagccaaagtcaccccgggacgccctcaaggtgggcggccccagtgccgagtgcccctttgatctcaccaccaagcccaaagacgtgaagcccatcctgccca

SEQ ID NO: 206522 - DNA, 465 bp, Homo sapiens
  chr1:3342321-3342786
  hypo
acgcggggtggggcagcccccagagcacccacacgggcaggccccacagagggggagggggaacagcaggggagtgggcgccgggcagggaagagggccacagactacccctcaggaagccaacaggcacccctcaaaccgtggtcattaaagagaacctcgtgctctccggtgtccctaagaaacctgcctccctaacagcaccccaggtgtaccccgttcgcggttggtttgccccacggagggaggggtccagcgagaggccgccccctgatgctcccgcccctccgcagtgagccagcaccccggggtcctcacgaaccacctggggaccagcgcgtcctctcccacctcagagtcggacaaccacgcacttttagacgagaaagaagactcttatttctcggaaatcagaaactttattgccaatagtgagatgaaccaagcatcaacgcgaacagagaa

SEQ ID NO: 206523 - DNA, 388 bp, Homo sapiens
  chr1:3351338-3351726
  hypo
tcttccttccctcctctgtccctgcctcggccaccccacgcgggaacccagcgccgtcctctgaaggcagggccttggccacgtcctgggtctcccacctcccacctgaccccagcggctccggtgtcctccacgtggctgccctggggagcaatcccagcggatcgctccgggccaccaagccgcacctgtgcctgagactccggatggacgacacagtcgtcacgtcgctcttcctgcgggttcttggcgagacacagcttgagaacagaagggcgtcgggggaacctgccgcaaggagcagagacagcacagccccccgggcccagccgcctccctctcttgggacgcaacttcttccccactcggatgggctttaaattattcc

SEQ ID NO: 206524 - DNA, 320 bp, Homo sapiens; identical to SEQ ID NO: 197261
  chr1:3370942-3371262
  hypo

SEQ ID NO: 206525 - DNA, 110 bp, Homo sapiens
  chr1:3378249-3378359
  hypo
tagccacaacagccccgcaaagtgcctggaaacagacctctgggcccggctcctggaggccgtgtcggctgggggctctgcacatctcggtcacacggggtccaggccat

SEQ ID NO: 206526 - DNA, 332 bp, Homo sapiens
  chr1:3379794-3380126
  hypo
cttccagccccaggtcccggcacccccacagcctcggcccccggggcacgaggagccatggcccatcgtcctgagcacagagagcccggcggccctcaagctgggcacccaacagctgatccctaagagcctggctgtggccagcaaggcaaagaccccagcccgccaccagagcttcggggcggctgtacttagcagggaggccgcccggcgggaccctaagctcctcccagcccccagcttctccctggatgacatggacgtggacaaggaccccgggggcatgctgaggcggaacctgcggaaccaatcctaccgggcggccatgaagg

SEQ ID NO: 206527 - DNA, 339 bp, Homo sapiens
  chr1:3385504-3385843
  hypo
aagggccctgggcgggagggctgtcccccatggcctgggccatgcaacacccggggaggggcagcagccacggtggcaccacccagccatccctctgcggccacctccagtgccaggccctgtcacgctgaccagcgcctcacacagccccgggctgtgcttccacctgcgccaggccctgacggagccccttcacgtcaccgggtgaatcctcggagtccaggggctgccatcacccccttctctgacaaggacgggggtcgttgcccagcttcagccggctcataaggcacccagccaggggcatccagggacgtcgggctggcatctccaagctgg

SEQ ID NO: 206528 - DNA, 424 bp, Homo sapiens
  chr1:3389566-3389990
  hypo
tgcatgtctgtgtgtgcacacgtggggcccgaccaccaggcccgtggcaccctcctcacccctccttgccttcaggttcttcgaggacctggagcagcggcacaaggcccaggtgctggtcgaggacatcagtgacatcctggaggagcacgctgagaagcacttccacccctacatcgcctactgctccaacgaggtctaccaacagcgcacgctgcagaagctgatgtgagtgggcggccccgaggcccgcagggtggctcaggagcatcctgcaccctggtctcccaaagcacattcctgctcccagcccagcttctgcaggtcctgcctgattttggtacaggctggccatgcagagcctggaaggacagccttgtcctcttgcagaagcagcaacgccgccttccgagaggccctgaga

SEQ ID NO: 206529 - DNA, 73 bp, Homo sapiens
  chr1:3393357-3393430
  hypo
aaccaagtaagggtgcggggtcccagctgggggagggggctcccggggtgggtcagggcgggctgcctggggc

SEQ ID NO: 206530 - DNA, 82 bp, Homo sapiens
  chr1:3408704-3408786
  hypo
actgggtgccacacacatgtactggcacacatgcacacacaccctgctgtacgcactgttgcacgtgcgtgcacagacacac

SEQ ID NO: 206531 - DNA, 360 bp, Homo sapiens
  chr1:3435700-3436060
  hypo
cacaacccacaccccagcaaggcccccacccctggccagggccagatcatcctgcccagcgcccgcctttctgggtggtcagctcggcccatgcttggctgcagtggtccagacccactggccaaggtgacaggtgggtccctatagacaagtgctagcagtgccctattggcctaccaggggcaccgtgtgctttagggagtggcaggcagcagctggaccacacacatggaatgaaggaggccagacggcgggggccaacaggggcactcccaggtgggagctgcacggcgcaccatgggcacccaatgcccgcagtgcttgcaccgccacacgcgcctactcgctgctgagcgtcag

SEQ ID NO: 206532 - DNA, 523 bp, Homo sapiens; identical to SEQ ID NO: 197262
  chr1:3447461-3447984
  hypo

SEQ ID NO: 206533 - DNA, 160 bp, Homo sapiens
  chr1:3448901-3449061
  hypo
gcacctatccttggtcgggggtcactgggctcccactcctagcctccatggagatggaagagctgtgaccagcaagctgtggtgctcaatgaccctcagcagtgatccctgcctgggaccagcccagcaccacctccagcactggcggtgagggtccaca

SEQ ID NO: 206534 - DNA, 677 bp, Homo sapiens
  chr1:3548480-3549157
  hypo
gagaaacccttaacaaaaggcgggctgcagtgtgcccagccctgctttctactcagcagagtggagcaagtgagcagggtggaggcctcctgactcatgcgcggacctgcggctgctgcaggacaaaggcccagcgcctccaaggagcttctgtgagcacctcggctactgcagaaacgtgaaaggaggtgacgtgtcggaaacccccaacttcattttcttttccagtcgcttctacacctggggccacaggacacagtaaagggtgagacagcacctgcgtcagcacaactgaccgttccttgtcgccaggaagtagctgtcaggactaaatgccagcattcctatgccgattttcgggtttgctctgtcggtaacaggtttcagtgtctgtaaggagactgggacagaggcgatctcatctagaacaccaacaggaagaacacgccattgtcaccctttcgggaagtacgcacgcggctgagaggctgctgtgcctgcatcgggcatcgcgaacccagctcctctgttcaaaggggaggaaagtgcggcccaagggcaggaagagctaagcaaagcctggcagccgcagcgaggggcctgcccgcaagtgccccggatgagagtggcaccatcacctgccaggcccgactaggtggggggtggaccccacgtgc

SEQ ID NO: 206535 - DNA, 444 bp, Homo sapiens
  chr1:3552661-3553105
  hypo
gactgatgttcttaacgcacttaatttccttatatagaaattgacaaaatctcaacagctctatcctggaaatgcatgaaatccctgtagagctgctgctggggctgcaccgccacagatgccagcgtcagtgcctggccagcccccaagggcggcttggtctccccgcgcctgcactcgtgtgcacactctccccctcacctttccttgcctggccagcccccgagggcggcttggtctccccgcgcctgcactcgtgtgcacactctccccctcacctttccttgcctggccagcccccgaaggtggcttggtctccccgcacctgcactcatgtgcacactctccccctcacctttccttgcctggccaggctcactcctttagacccagctcagacaagtcccttccagagcactgcctggatcccgggttctgcactct

SEQ ID NO: 206536 - DNA, 104 bp, Homo sapiens
  chr1:3562356-3562460
  hypo
acattcccctccgcgctgagctcagcacggaggctgttgtgcggtacctacagcaggtgaatgggcggctgccgaccgccccgagccacgcccccaggccaggc

SEQ ID NO: 206537 - DNA, 151 bp, Homo sapiens
  chr1:3576146-3576297
  hypo
gaatctaatatggggcgcacaatatggctttctactgaaatatatgttctttctacatcacccctctttctactaaaaataatctcagtaagattattattattattattatttttgagacagagttccactccgtcgctcaaggctagag

SEQ ID NO: 206538 - DNA, 674 bp, Homo sapiens
  chr1:3615176-3615850
  hypo
ggaggcggcggcaccgtgagtggactccggggcggttagcaggtggaaggcagtgagggttgaggagagggtggggcgaggcccttgcaccaggccacagtgggcggctcaaatgtgggtccgtggaggcccggggggcaccaggctaccctggagtcatctgaagtcacctgggcgtgtggagggacatgcatctgcaaggcccccatgtggcgctaagcacagagtgggtgctgcagacgggctcagccgctgcgggcaggtgcaggcaggatagcagcggtggccctgggcctcgcagtcctgcagacacacgtctggggactgctcctgggggcgcgtttctccggtgtgaggtgtggaaagttccacatggccctggcacgggattgggcaaggcctcgcctcagccccgggtgagagcagagggtgctgtgggtgagagcacagggtgctgtgggtgagagcagagggtgctgtggatgagagcagagggtgctgtgtgcacattgtcgggagagggaggcttccccccagccgcatgtcgaatcttgttggcatttccattcgtttaatcacgggctccgggagatgctgtgggaagtaccggcaggacggaggtcttgccctggtgggatgggctctcttcctccgaagcccaggctgcttgtcag

SEQ ID NO: 206539 - DNA, 37 bp, Homo sapiens
  chr1:3622993-3623030
  hypo
taatagggacaatcacggtgcccgccgcaggcccggg

SEQ ID NO: 206540 - DNA, 214 bp, Homo sapiens
  chr1:3623373-3623587
  hypo
ggtgtgtggtcctggcgggggagctgcgggtaggggcctaacgagagaaccccgggccagggggcagcaggggtgaggctttgccggcccctgagcgtggagcggcctttccagtcggggtgaggccgttcaccgagagatgaggccgcccaactgggaaaattgggctcagccattgaacagcagttccaccttatcccaccacctagagggc

SEQ ID NO: 206541 - DNA, 149 bp, Homo sapiens
  chr1:3651334-3651483
  hypo
cacctccccgggggccgctgacagcacagtcgcctgggtgcacgcttgtgggggcagcaggaacggggctgtcggctctcaggggatctggctgcagccagggcgagggcctggcccttccttccagctccttccggctccttccagct

SEQ ID NO: 206542 - DNA, 211 bp, Homo sapiens
  chr1:3655597-3655808
  hypo
ggttcctcctgaaaacgtcacccacctttaagggttctgacaaagtgtctgaagagctctcgataggagtcctggtagcggctagcctgggtctgggagcgaagggacagggacatgccccgcccggtgatgcccaaggaattctgattctccatctgcagcacgccttgggacccacacacccagctaacgacctctatctaacctgcgg

SEQ ID NO: 206543 - DNA, 52 bp, Homo sapiens
  chr1:3659498-3659550
  hypo
ctggcttctggtctcgagggaagctactggcgagaagcattggagggttctg

SEQ ID NO: 206544 - DNA, 181 bp, Homo sapiens; identical to SEQ ID NO: 197267
  chr1:3663335-3663516
  hypo

SEQ ID NO: 206545 - DNA, 116 bp, Homo sapiens; identical to SEQ ID NO: 197268
  chr1:3663983-3664099
  hypo

SEQ ID NO: 206546 - DNA, 204 bp, Homo sapiens
  chr1:3680100-3680304
  hypo
gacgcccagacgctgcctgctctggtcagtgagctggagcaggggcaggtgtcggcagcctcacccaggctggcagagccctcccagctgccgcagtggcccggccctctccttctgtccctcactgcccctgcttgctcctgctcaccgcctctgcctctgtgcccaggagtgattgcgtctttacaacaacaagtggatttc

SEQ ID NO: 206547 - DNA, 150 bp, Homo sapiens
  chr1:3680359-3680509
  hypo
tccgagagcggaggcagcagctacaagccatgaccgacaaggtggccgtgcgctcagtaccggcctccgctccatgagcatgggccccaggcttcattaacccccggcagctcggggcaggcgctgcccgtcccatctactgatggagac

SEQ ID NO: 206548 - DNA, 186 bp, Homo sapiens
  chr1:3695643-3695829
  hypo
tgagtgtgtgggcctcgtcctgtctggagtcccctccctcccacagtgggcgagacgggaaggcctggcggtgaccagacaagtgggtccaggtctcaaggcagcctggcccatgtcctgcaaggctctgaagagccacccagctgttagtctgcccactgcacagggccccgggcctctcaggtt

SEQ ID NO: 206549 - DNA, 152 bp, Homo sapiens
  chr1:3697565-3697717
  hypo
ggtgaaaatctaacggataattcagcattgccgcatagaaacctccgcaaaaccggccaaacaaacgcggacaggcggccctggcgtcagcgcacgacagtcacgtggggaggggcagtggccaggtcggccttggacgggtacaccacctt

SEQ ID NO: 206550 - DNA, 208 bp, Homo sapiens
  chr1:3731642-3731850
  hypo
cgagcgcctcccggcggtgctctctggctctctccaaacaggacgcttccttctctgattctaaggaaggcctgagacagccctgaaggcttaatgtacagtgcggccaggtcctggcactgcacgcaggatctttggttagctgcatccatatcgtttgcacgagagctgacggcacagacgcgtaagaggcgtgcacggcggggag

SEQ ID NO: 206551 - DNA, 45 bp, Homo sapiens
  chr1:3746112-3746157
  hypo
cccactgtgtcctcacggctatcgttattccgtttgcagcctggg

SEQ ID NO: 206552 - DNA, 272 bp, Homo sapiens; identical to SEQ ID NO: 197271
  chr1:3817822-3818094
  hypo

SEQ ID NO: 206553 - DNA, 180 bp, Homo sapiens
  chr1:3818733-3818913
  hypo
gccaccgcgctcggcacactgttctgttcttaagaatttcaacatagaaatgaaatccagccttgccttaaaccctccagccctcaagttctctgggctctaggatgtgtgtcttcagaaaagggcgcagggtggaagccacatcagaggccgaggacacctggcccctcccctctccgc

SEQ ID NO: 206554 - DNA, 34 bp, Homo sapiens
  chr1:4659113-4659147
  hypo
ataaacctcactcaaaggaacggcagtcccacgg

SEQ ID NO: 206555 - DNA, 207 bp, Homo sapiens
  chr1:5922609-5922816
  hypo
ccaccgctgggtgcagcccaccctccgctcaggggcacaggaccctccgcccctcgcacttctacccgactgctgccgtctcagagccggggtctcagcccccacccagggcaggcttgagcggcctctccatgaggacacatggcatgggctgcctgaccggcccccaccatgtctcctcaaggagaaaccgggcttgtgctgtag

SEQ ID NO: 206556 - DNA, 51 bp, Homo sapiens
  chr1:5927906-5927957
  hypo
gtcaggcagagcacggcgatgggcttgccaccactcgctcggaacaagacc

SEQ ID NO: 206557 - DNA, 50 bp, Homo sapiens
  chr1:5933036-5933086
  hypo
ggaactgcggcttcacacccggagagccctgggctgtgagaaggcggcca

SEQ ID NO: 206558 - DNA, 229 bp, Homo sapiens
  chr1:5933144-5933373
  hypo
gccctgcccagcgaggacacggaaaaggccattcccaggcccacgccacccctgccctgacctggccccagccctcccctccaggaggggagagaaggacacaagggtcaggccctgggaatacccaggaagccccgagatcagtttgtcctccgttgcccctttaccttggcgtgtttagtgggcactgcgctggacttccaaggtgacacggcgtccatgcccttct

SEQ ID NO: 206559 - DNA, 69 bp, Homo sapiens
  chr1:5935554-5935623
  hypo
cctgcctgggcccagcgtccacaggagaggacatgcccccggcctgctgagtctcggtcacaccgggtc

SEQ ID NO: 206560 - DNA, 398 bp, Homo sapiens
  chr1:5940547-5940945
  hypo
aatgaaagcgtgtggcactcacagttcgctgcacatggattcttacttctggatctctgggtcgcaaggcgggctgcctcacaaactctaacctcggcctctcgatggccacattgatcaaggataggcctgtgtgcatttacacgtgcaaatgtctggctccacacacacccagggtgaaagagcccccataaactggagccttcaccagagttgtgttcataacagaaggctttggcaagcaagtggtgtggcctcgggacaagcgtgtctcacggccggtgggtgtggcaccctacaaacttgcaacttgcaaacctgagtgtcctgggggaagccgtgcttgcccacggcacactctcctgcaaggatgggacccacaacctcggtgtggcctt

SEQ ID NO: 206561 - DNA, 624 bp, Homo sapiens
  chr1:5942158-5942782
  hypo
gcgaaggatgggaaggctggctgcctcctcccacgccctaggtggcaaccagaaaggccagtggtgcacttacccagccatctctcagtggcgcgcttacccagccatctctcagtggcgcgcttacccagccatctctcagtggcgcgcttacccagccatctctcagtggcgcgcttacccagccatctctcagtggcgcgcttacccagccatctctcagtggcgcgcttacccagccatctctcagtgacgcgcttacccagccatctctcagtggtgcgcttacccagccatctctttccaggggaattaatttcgttcttgccaatgtcccagtagctgacaccccccgcctcttgttctttctccttgacctcgacgtcagcaccatgctgtgcagcaggacagccgtgctgacttccccctcggcccaggtccctgctacatccccataaagacgcagcctccatgtcgcccacatgccctacactgtgcttctgccttcgggctaccaaccgcctcctggcacctgcagcgtccactcagtcctcactccaagccagcttcctgggaacgagcacctagaacaagggctatttcggtcctctccctgttgctctc

SEQ ID NO: 206562 - DNA, 244 bp, Homo sapiens
  chr1:5943159-5943403
  hypo
actacaaagaagccacgatcagggtcctcaaagacttcccagattcatgtgggaaaatggcagacaaacaagcaggctggggcgaggaagggacggcagcctgaaccagcccagcctgcctgtgccagggccagagctgcgggcaccagcactgatgttcacactccgggccacgctgccctccacatgacgaggagaaaatgccaccgatgttcacgctccgggccacgctgccctccacatg

SEQ ID NO: 206563 - DNA, 51 bp, Homo sapiens
  chr1:5944449-5944500
  hypo
ggaaaggtcacagaacacaagtaacacacaagctcccagccgaacccccgt

SEQ ID NO: 206564 - DNA, 143 bp, Homo sapiens
  chr1:5950822-5950965
  hypo
tgcgggatagcgcccgctccttccaagcagacagacgctggaagcgtgactcgtcccatgagggacgcagcacccactgtgcctgtccttccagagagccgctaccttcatctggacggcagcagatccgatgagcagcaggg

SEQ ID NO: 206565 - DNA, 145 bp, Homo sapiens
  chr1:5958567-5958712
  hypo
gcacgagccccccagcggctctgccgggcagacagccacgcctcagatgccgctctctgagtggatcttcctcctgatcgggacatggcaaaggcctgggaagctggaaccaaggcattctcccatctacgcgcattcactcaga

SEQ ID NO: 206566 - DNA, 45 bp, Homo sapiens
  chr1:6046166-6046211
  hypo
gtcagctaagagcaataacacgcatttgctaacagcacattttgt

SEQ ID NO: 206567 - DNA, 142 bp, Homo sapiens
  chr1:6046277-6046419
  hypo
aggctggcgcgctctctgtgggtggggagggacaagcacgttttgggtgaagatcctgtgccagtcgttcatcctgcccgcctgagggtcccgtgggcttcccggatgatctgtgccagtcgtattcaaataaagagaagag

SEQ ID NO: 206568 - DNA, 148 bp, Homo sapiens
  chr1:6129708-6129856
  hypo
ggagcagccccatccagacccggctgagacgtgtgctccccaccccacacgcagcagccatgcttacaaagcgttcagcctggaggcgccctgtcccttcgcatcccttctcccgaggcctggcagcggatggcagaaccaataccat

SEQ ID NO: 206569 - DNA, 83 bp, Homo sapiens; identical to SEQ ID NO: 197275
  chr1:6137223-6137306
  hypo

SEQ ID NO: 206570 - DNA, 81 bp, Homo sapiens
  chr1:6171947-6172028
  hypo
gaaacaagccaaggtgagcagggtgagaagtgccccagctctcacgcacaggcaggcttggagagccgctccctccctact

SEQ ID NO: 206571 - DNA, 69 bp, Homo sapiens
  chr1:6280174-6280243
  hypo
gtaatcatttgtcaagagtaaaacccagaagctctgacaggccataatttcagatcctttggcttgggc

SEQ ID NO: 206572 - DNA, 114 bp, Homo sapiens
  chr1:6281662-6281776
  hypo
ttacaaagcctgatcggctaacgcagcttcctggtttaggaacattttccccggtcgtatcaatcccccaggttggtaaatgaacagaagggatgaataaagcctactttttag

SEQ ID NO: 206573 - DNA, 96 bp, Homo sapiens
  chr1:6281825-6281921
  hypo
ttctgtcctgctaagaggctcaccccgcgacctcttctgtaaactgccactcagcagcggcctgcaagccctcacgaaaggcttcactctatgctg

SEQ ID NO: 206574 - DNA, 52 bp, Homo sapiens
  chr1:6284776-6284828
  hypo
acagagtccatctctcccagcgagtcctggttatcctttacttacactctgg

SEQ ID NO: 206575 - DNA, 250 bp, Homo sapiens
  chr1:6284858-6285108
  hypo
ctccccaggtaactctggagggcgctgtggaatattgctgtgatttgccccttactcgtctttcacccatgttccgccttgattcggcataaggacagactgctccagtggggccttgggtcctcaggccttctgaccgcttggtcttgagtgacattccagaagagtgactaatgacataaaacgattaagaaaatccatgtggcagcggccaaccggaaacagttttgtcccaggctgcacagggtcg

SEQ ID NO: 206576 - DNA, 161 bp, Homo sapiens; identical to SEQ ID NO: 197279
  chr1:6296163-6296324
  hypo

SEQ ID NO: 206577 - DNA, 39 bp, Homo sapiens
  chr1:6313883-6313922
  hypo
cgccgcttgccctgcgcgtcctccaccacgatggtgggc

SEQ ID NO: 206578 - DNA, 133 bp, Homo sapiens
  chr1:6313952-6314085
  hypo
cccacctgcacggccagcgtctggaagagggcgatggctgtgcagatcacgcccatggccacgctgccgcccaccagcagcaggaagcagacgccaaagcccaggccgatctcagccacgatgaagcggcagc

SEQ ID NO: 206579 - DNA, 215 bp, Homo sapiens; identical to SEQ ID NO: 197280
  chr1:6321178-6321393
  hypo

SEQ ID NO: 206580 - DNA, 217 bp, Homo sapiens
  chr1:6333337-6333554
  hypo
ggagggctacatgctctcatctgcgccaacctccttctcagcacccatgctcgggttctaggcacatgggactcactggccaccggatgttcctaagcgctaaccaatgaggcgacaggggcagcttcaggatgcaggtattttcccatcacaagactgactcccgctaaatgcaggcaaaaggaacagagagcacgacactggattctgagcctca

SEQ ID NO: 206581 - DNA, 403 bp, Homo sapiens
  chr1:6333775-6334178
  hypo
aggaagccagtgtaagagcccgcacacgggcgcagcggtgcccatcccagggcgagtgcagaggctgcgcgcggccaccacacagtgcttccgcccactcttttgctagtgaaattctctgggagtaggtgcggcccctccctgccagcaggagcctgtggcaacggggtgtctaggatgtcgaggcagcagagaccctagggccctgccccgtgacaaaggccccacgtggggacctctttctctgtcctacatcctgggaccggacctctcttcttgtcctggtccggcctggacacggtcaggaatggccacctctgctcctgaggcttcttcgagaggaacggggcccatgcgaggaccccaggcccctctgcacaccgtgcctgggggtcaggcaggt

SEQ ID NO: 206582 - DNA, 178 bp, Homo sapiens
  chr1:6334536-6334714
  hypo
gccacgctgtcctctcggctggcgcggggcttacccggcccctgcactcatgcaggtgaaccagctgaggccaggagaaggaggtcatagggcagcagcagaagcgaggtgggcaccatgttccagagccttctgaaagttgtgtgggtctgtgctgaggccacgcctcacataaggc

SEQ ID NO: 206583 - DNA, 214 bp, Homo sapiens
  chr1:6338580-6338794
  hypo
agcagcacagaggcggagagggatttttttgcgggtgtgataatgagttccattcaggacaaactgtatttgtgatgcttttgggaaccctgttgaggggcagcactggccaagtcaatttgggagtcaatacaacacacaggcgatgctcgaggcacagaccatggatctgaccaccccaggagagaagggccacaggttaggacatgtcaaa

SEQ ID NO: 206584 - DNA, 330 bp, Homo sapiens
  chr1:6345508-6345838
  hypo
agtcacgtgctggccgtcacctgcccacggggcagcacagactgattccgcccttcctgctaattcctccatggcgcagccatgtgctgtcattcctcccactgggtcagagcctggaccatccaggctgccggccaaatcatgaccatgcccacaggtccctccaccaaatgtggaggcgggtgaggctggtcatgcatcagagagctgaagacagcgtgtccaggtggctctcgggagccctgaacctgacaggaaaggcagaggcagggcccgacaagcactgcctgcagacctggcgtgtcacacggaggtcaggatgcttcaggg

SEQ ID NO: 206585 - DNA, 153 bp, Homo sapiens
  chr1:6347156-6347309
  hypo
tttcaagctgcctgagagccaggagttccggcacaagtgcacggggaccaggtgcagtcactccgcagtccagggcaggcctcaaaggtggctgtagccgcatgtaatcaatgagggtcaagcttcatcactcacactcgaggccctgacggg

SEQ ID NO: 206586 - DNA, 35 bp, Homo sapiens
  chr1:6363866-6363901
  hypo
tcactaagtggttcccggacgtctgggagcatcat

SEQ ID NO: 206587 - DNA, 138 bp, Homo sapiens
  chr1:6382126-6382264
  hypo
ggccaagccacaggtcgtgcgaactggctgcaatgcaggatgtcggggcccccaggggctccttcccaaaagccttggcacttggaggggtctgttggttggctttgagatcgcgaccctgcacgccagctcccagag

SEQ ID NO: 206588 - DNA, 261 bp, Homo sapiens
  chr1:6405518-6405779
  hypo
gtctctgtaaacacagataataaatggtcccaacaggctgctgcagagattcgaggggataacgaatgggaagaactcggtgcttaggaaacgcccaggagaggcagggatagctgtctctctctgacatgcggggataaggcaattgacaaacgtcaagtgcgtggaccatgcccggcatccagtgagggcccagagagggtgcggtctcatcaccatgcccagccccggccgtcttctggctgacggcagctctgagga

SEQ ID NO: 206589 - DNA, 179 bp, Homo sapiens
  chr1:6409753-6409932
  hypo
gaactcacactggtgcggcctccagggcccagaggtatggggcccagacccttaccccgttctggctgttgcaatgccgggtgctgatgatggcgcctgcctcctcgatcatcttcaggatggtccccccgtggacattgccggccacgttggcatcatctggccgcatgatcctaggg

SEQ ID NO: 206590 - DNA, 328 bp, Homo sapiens
  chr1:6486768-6487096
  hypo
ccaataggaagggagcgcctttctcaggagctggggcttaggtcacatttcaccatggttctgcctgggtgcccgctagccagccccgacctttgggctcggaggggacagactgaaccagtctctggcccccccactcccagctttctagcacacaggaggggcctcggtgttgtcctcagcttcctatgggccatcacattctctgccccatcttcctccctgcctccttagcaggacagccagacaattgcccccaccccgcaggctgcctgaagaccctactagtggccccggcgcccccagctccctccgtgccctcttttcc

SEQ ID NO: 206591 - DNA, 115 bp, Homo sapiens
  chr1:6527795-6527910
  hypo
ccctccccaaatgcgatgctcccaggcatgagtgggcccccatgccagtgccctgagccacctgccctaccccagtccaggccactcacgaggcagtgagcgtggagttaagcag

SEQ ID NO: 206592 - DNA, 242 bp, Homo sapiens
  chr1:6528247-6528489
  hypo
aggaggctggcctcggacttagacttgagcaggtggggcgggcagctcaacagctggacaggggtgcggcggcggagacggggcgagggtggaggggaaggaactcgtggggactctggggcccgaggcactagctctgccattgggcctggggccacaaagtcttgtaaggaggttggggagagggtgccgtaggcagagtccatggagcaggagcggccgtccaccggacccaggggcag

SEQ ID NO: 206593 - DNA, 62 bp, Homo sapiens
  chr1:6537439-6537501
  hypo
acatttggaacaaaaggaaccgtaacatactcgggtttcattatttacagtcgacttgtcct

SEQ ID NO: 206594 - DNA, 190 bp, Homo sapiens
  chr1:6537537-6537727
  hypo
cactgacacaggagctctgggggccgagctgcggctcccgcctgtgctcaccttgtgggggaaggtcgaagcggacatgcccatcataatgcatggtgctgtggaacttgctgtcacaggcctcgcagaggttgaggggcccccggcggtgcagctgctggcagtcggcgtggtgacatacctggggtgg

SEQ ID NO: 206595 - DNA, 32 bp, Homo sapiens
  chr1:6639452-6639484
  hypo
acggccagcgtctacgacggcaagtacctgcc

SEQ ID NO: 206596 - DNA, 40 bp, Homo sapiens
  chr1:6672155-6672195
  hypo
tttagccaggcactacgctaaaatttaacagcttaggaaa

SEQ ID NO: 206597 - DNA, 141 bp, Homo sapiens
  chr1:6675989-6676130
  hypo
agagaggggtcctcaggtggcgctagcttggcagggtcagccaggagtgaactccagggtccaggtctccgagagctctggagaatgagtggttgatttttttttttttttttttttgagttggaatcttagctctgtcta

SEQ ID NO: 206598 - DNA, 352 bp, Homo sapiens
  chr1:6711963-6712315
  hypo
ctggctccccctacccctcccggcgcagccccccgccacctgcagagcaccgactgcggtccggtgtgccccccacccccgcatgcactgccgactccttttcattttcatcctgcgccaaatgtctcccaggtcactggggcggtcctcaggagcctgatgttaaagcccagccgcggttccacacccgcacagccttggaagtcacagctgagcctggctgccgtgtttactagtctgggtgactttcaagcaactcttcaatgttaatttgatgcagctcaatttgctcggcagaactggctgttaaatggccaccaatcagtgaaccatcacgcggaagagagcacct

SEQ ID NO: 206599 - DNA, 105 bp, Homo sapiens
  chr1:6713809-6713914
  hypo
ggctgggaatgaagcgctttcttttttaagtggctaattgcatcctttcataaataaagatgagaaaaaccctgggcagactctcattccagctgcttggtgtgc

SEQ ID NO: 206600 - DNA, 307 bp, Homo sapiens
  chr1:6714041-6714348
  hypo
actcctcatcatagcgatcaaaaaggtcggtggcatctactccaacgctgatcgttccctggggcagaaaaacaagccgtcagcagaacgggtggtatttgtggaatgaaagacaatgctacacttcaacagccagctcgctttaattgaacaagtcatttgacttcagggttcactgggtttaggtaggacactccaccaggaagcccacaaagcatgaatgtcacagtccgaaccaaactgcagagcaccacagacgtccagagctagaaaacatcatttgaccaggagagccggtccgcatgtc

SEQ ID NO: 206601 - DNA, 120 bp, Homo sapiens
  chr1:6720536-6720656
  hypo
gcatttactgcagcttctctgtccctcaactagattattcagcttcatggcaggattaggttgtctgttttattctctgcggaatgttcacattcctaaagtgtctggcacattacaggc

SEQ ID NO: 206602 - DNA, 134 bp, Homo sapiens
  chr1:6738112-6738246
  hypo
cacccttgaagaaatcgtctcccatcaaccccctgctccgcttgctcccgccccacacctgggttaaaaattactggttcggtccatccctcttccgttttacttgacaggttagggaacgaaggacaagtcag

SEQ ID NO: 206603 - DNA, 83 bp, Homo sapiens
  chr1:6871010-6871093
  hypo
gggagctttcagaggcggaagttttggaagtgcagttccagttgaaagttgggatagtcaggtggtgacgcttctcaggaggc

SEQ ID NO: 206604 - DNA, 45 bp, Homo sapiens
  chr1:7407200-7407245
  hypo
ctgagtaacattcctcggtggggagagcggcggatggttctcaga

SEQ ID NO: 206605 - DNA, 84 bp, Homo sapiens
  chr1:7550323-7550407
  hypo
gagatgcagttaggaatgtgcggtcactgccgcgggcatcgattgcccagaacacaacagtgagccctccataaagtcggaact

SEQ ID NO: 206606 - DNA, 144 bp, Homo sapiens
  chr1:7550707-7550851
  hypo
atctcaaaaaaaaaaagtgacaaagcagcccctctgccagggagtggccagtgtgacctgaggccttggcacccagccaccgtgcgttaccttttgaggtctgtgctagaaggtgctgctgccgcaggagtcctctgactgggt

SEQ ID NO: 206607 - DNA, 208 bp, Homo sapiens
  chr1:7700400-7700608
  hypo
ccctgaccctggtgggctccatgccaccctcatgctgccagtctctgctctccccacagaaccccgacatcgtcctggtgcactacctgaacgtgccggccatcgaggactgcggcaagccttgcggccccatcctctgctccatcaacaccgacaagaaggagtgggcgaaatggacgaaagaagagctcatcgggcagctgaaacc

SEQ ID NO: 206608 - DNA, 1347 bp, Homo sapiens
  chr1:7723194-7724541
  hypo
caaaggggcgtgggacggcccccgggcttggggtacgtgtccaagggctgagagtctgtggcctgcctggggtaccgggcctggactttgccagggaccccagccgctgtggggcaggtccaccacggtcctagctctgactctcttttgtgtgtgcatgtgtgtgtgcacatgtgtgcctgcgtgtgcgtgcgcgtgttgtgttccgatctccgcaggagctggcggcagcgtgcatcacaagtgtaacagcgccaaacaccgcatcatctcgcccaaggtggagccacggacaggggggtacgggagccactcggaggtgcagcacaatgacgtgtcggagggcaagcacgagcacagccacagcaagggctccagccgtgagaagaggaacggcaaggtggccaagcccgtgctcctgcaccagagcagcaccgaggtctcctccaccaaccaggtggaagtccccgacaccacccagagctcccctgtgtccatcagcagcgggctcaacagcgacccggacatggtggacagcccggtggtcacaggtgtgtccggtatggcggtggcctctgtgatggggagcttgtcccagagcgccacggtgttcatgtcagaggtcaccaatgaggccgtgtacaccatgtcccccaccgctggccccaaccaccacctcctctcacctgacgcctctcagggcctcgtcctggccgtgagctctgatggccacaagttcgcctttcccaccacgggcagctcggagagcctgtccatgctgcccaccaacgtgtccgaagagctggtcctctccaccaccctcgacggtggccggaagattccagaaaccaccatgaactttgaccccgactgtttccttaataacccaaagcagggccagacgtacgggggtggaggcctgaaagccgagatggtcagctccaacatccggcactcgccacccggggagcggagcttcagctttaccaccgtcctcaccaaggagatcaagaccgaggacacctccttcgagcagcagatggccaaagaagcgtactcctcctccgcggcggctgtggcagccagctccctcaccctgaccgccggctccagcctcctgccgtcgggcggcggcctgagtcccagcaccaccctggagcagatggacttcagcgccatcgactccaacaaggactacacgtccagcttcagccagacgggccacagcccccacatccaccagaccccctccccgagcttcttcctgcaggacgccagcaaacccctccccgtcgagcagaacacccacagcagcctgagtgactctgggggcaccttcgtgatgcc

SEQ ID NO: 206609 - DNA, 123 bp, Homo sapiens; identical to SEQ ID NO: 197290
  chr1:7843509-7843632
  hypo

SEQ ID NO: 206610 - DNA, 40 bp, Homo sapiens; identical to SEQ ID NO: 197291
  chr1:7843653-7843693
  hypo

SEQ ID NO: 206611 - DNA, 188 bp, Homo sapiens; identical to SEQ ID NO: 197292
  chr1:7844213-7844401
  hypo

SEQ ID NO: 206612 - DNA, 57 bp, Homo sapiens
  chr1:8044539-8044596
  hypo
agggtgtgcgtgccgccacatgttgattggggtggcttctgcgttcagcgctgccgc

SEQ ID NO: 206613 - DNA, 255 bp, Homo sapiens
  chr1:8044977-8045232
  hypo
gtgtggaaaaagacggcctgattcttacaagccgggggcctgggaccagcttcgagtttgcgcttgcaattgttgaagccctgaatggcaaggaggtggcggctcaagtgaaggctccacttgttcttaaagactagagcagcgaactgcgacgatcacttagagaaacaggccgttaggaatccattctcactgtgttcgctctaaacaaaacagtggtaggttaatgtgttcagaagtcgctgtccttactac

SEQ ID NO: 206614 - DNA, 154 bp, Homo sapiens; identical to SEQ ID NO: 197295
  chr1:8085938-8086092
  hypo

SEQ ID NO: 206615 - DNA, 120 bp, Homo sapiens
  chr1:8148903-8149023
  hypo
ctgtgcaccaatagtccatcccctgcattgctgtatggcgtttcagtgcatgaatatagtacagtttattgttaatccatttttgaaatgcaggcttgaaaagcgaagcatttccattta

SEQ ID NO: 206616 - DNA, 42 bp, Homo sapiens
  chr1:8385723-8385765
  hypo
tggtgagtttgcaggcggcttttccaccgggctgtgcttgag

SEQ ID NO: 206617 - DNA, 61 bp, Homo sapiens
  chr1:8442482-8442543
  hypo
ctttggctcagccacgtgcgcatgcgtgcgtgtgcatgagagagcgcgcatgctggggaag

SEQ ID NO: 206618 - DNA, 41 bp, Homo sapiens
  chr1:8540771-8540812
  hypo
aggcacgagccaccgcatccggcctaagcctgtttttaaat

SEQ ID NO: 206619 - DNA, 146 bp, Homo sapiens
  chr1:8746806-8746952
  hypo
ctcaaaaaaaaaataaaggtgtagtttgtgatgaagacaagtactctaggggaaaacagagcagagtaaggacaaagtagagccgagactgagggtcaaggtaggcctctcactgagactcgaaagcgggacggtgagctacagat

SEQ ID NO: 206620 - DNA, 130 bp, Homo sapiens
  chr1:8781130-8781260
  hypo
agtatttctcaggtacccgataggtcatcttagaaggagcccaccttgaagacactgccctaggctggtaaaacttggacagttaacactgcattcctcagacaactgggagcactgcagaggtctgctt

SEQ ID NO: 206621 - DNA, 32 bp, Homo sapiens
  chr1:8781290-8781322
  hypo
tccctgcaggcctgaacacaagatctcaggaa

SEQ ID NO: 206622 - DNA, 35 bp, Homo sapiens
  chr1:8941149-8941184
  hypo
aaatggaacaccatgctgggcgcggtggctcacgc

SEQ ID NO: 206623 - DNA, 123 bp, Homo sapiens
  chr1:9004947-9005070
  hypo
gaaggcctgctgacgtttgccattccaggaccaagtggacaatgagttaagctaggccaggagggggttcagctccccataacaaggcaggggtggccctttgtgtccggcagcatggtagcc

SEQ ID NO: 206624 - DNA, 152 bp, Homo sapiens
  chr1:9027898-9028050
  hypo
gaagtcttcccattcgattgcctggttaacaagggttctccccagcatctcaacgaacgtcaacaactaaggggtcctacagtattttctgtgtgcagggctactgtgcctcgtctagccaaccttttttttttttttttttttgtgagaca

SEQ ID NO: 206625 - DNA, 150 bp, Homo sapiens
  chr1:9074712-9074862
  hypo
tccctgcctggccaccgtcccacataccgcattgatgcccgacagctgctggccggccatgagcacgatgatggagaggagctgccagcgcagggaccgcagggcacagaggtgcagcacagacaggtggccctcggcgcgctcggcccg

SEQ ID NO: 206626 - DNA, 81 bp, Homo sapiens
  chr1:9084938-9085019
  hypo
agatggcagcctccacggaggaagatggcggctaccttccacccacgaccccggtcagctgctgcccggcccaccttgtgc

SEQ ID NO: 206627 - DNA, 201 bp, Homo sapiens
  chr1:9165457-9165658
  hypo
ggggtgcagccactgtgctgcgggaaggaatcaggctgtgcctcctctgggggcagggacgacaagggccagggagggcagacctacatgcagaaccaccagcaccggcgtctgcacggccggggagccacagagggtcagcacgaaccgcacggtgctccagaccctgaggccgatgaagatgagcgggatgagcaccag

SEQ ID NO: 206628 - DNA, 279 bp, Homo sapiens; identical to SEQ ID NO: 35016
  chr1:9188943-9189222
  hypo

SEQ ID NO: 206629 - DNA, 52 bp, Homo sapiens
  chr1:9205248-9205300
  hypo
agccctgtggaaggccgctgggcagagacagctcctccgttcacaggaccct

SEQ ID NO: 206630 - DNA, 189 bp, Homo sapiens; identical to SEQ ID NO: 197299
  chr1:9352965-9353154
  hypo

SEQ ID NO: 206631 - DNA, 68 bp, Homo sapiens; identical to SEQ ID NO: 197300
  chr1:9353809-9353877
  hypo

SEQ ID NO: 206632 - DNA, 334 bp, Homo sapiens
  chr1:9384863-9385197
  hypo
ccaacactgggccagacagtcgtgtttgcgacaagtctgttcgcctggccgtggagccagcacggtcttgtcggatccagaccagacaaatgctttcttggaaaagcgagtggggtgggggagcagggacacccggcctggcgggctggtggatcggaggcgcctgtgagcgggtcagtactgggtaggcagccccattgggagccacagccactcactggctgctgcctcctgaatgggcagccggtgtggatgcagtggctgcactcgctggaagctgggactccagagctcagcacgtggagttggatgaagcttcctgtgctctcactgt

SEQ ID NO: 206633 - DNA, 137 bp, Homo sapiens
  chr1:9402328-9402465
  hypo
agtgacgatccctccgtgagaatgaagaaatgcaacccatgagaagaggtttgcgtagtgacaagtccagaaactgtgtgcatcagcctggggcacccctagctgtgggcagaagctccatggtgcagctcatagtg

SEQ ID NO: 206634 - DNA, 102 bp, Homo sapiens
  chr1:9402616-9402718
  hypo
acgtccctctcccgcctcatcctgccttgttcccagtgtagtgatcaccctgacatcggttctcccatgtcctcatcccccgccagcccgcggggtcatccc

SEQ ID NO: 206635 - DNA, 252 bp, Homo sapiens
  chr1:9420430-9420682
  hypo
ttgggtcagggggcacgggaggagcctgatggagtggctggaggaagacagacagggtattcgtctcctggagctgctgaacacattaccacaagcaggacagctgaaaacagcagaagcgctcaggaggccaggtgtctgcgatcaggatggtagcgggctcgactgcctccgagctctgagggggagcccgccccatgcctcccctcgcccctgggggctgccgggaatccttggcgtcccttggtctgt

SEQ ID NO: 206636 - DNA, 165 bp, Homo sapiens; identical to SEQ ID NO: 197301
  chr1:9489050-9489215
  hypo

SEQ ID NO: 206637 - DNA, 92 bp, Homo sapiens
  chr1:9539439-9539531
  hypo
aaaaaagaggttattttccaagttttctccaaagatacagagtttaaatttatgccagcagcctttatccgagcaagcggccagttcccatt

SEQ ID NO: 206638 - DNA, 32 bp, Homo sapiens
  chr1:9579431-9579463
  hypo
gacgcagtggctcacgcctgtaataccagcac

SEQ ID NO: 206639 - DNA, 218 bp, Homo sapiens
  chr1:9655906-9656124
  hypo
tggggtcttccaggccaacccgctctttccttggtccacaggatgaagccaacgcacacgatggtcaactgctggttctgcaaccaggatacgctggtgccctatgggaaccgcaactgctgggactgtccccactgcgagcagtacaacggcttccaggaggtgtgggtcacaggcaggcggacgggtgggcacgcgggggtggggatcttgagatt

SEQ ID NO: 206640 - DNA, 219 bp, Homo sapiens
  chr1:9664191-9664410
  hypo
cgtctcgaatcttcggttctcgaggaagtgttgacagtgtgatgctaatgtctgcttttcttggcgttgggtagaagcaggacatctgtgtgtatgtgcgtatttaaattagattatttataataaccagagccagccctcgcgctggccaggatcctcctgccgagctgatgtcgctcctgccctctgccggggtccggaagcgacatctcaggaggt

SEQ ID NO: 206641 - DNA, 111 bp, Homo sapiens
  chr1:9664794-9664905
  hypo
gcagcctccacgccgcacctgccacattcagccctgcccaggaaggaacacatgacccttctgtctgtgactgttgctgagtctctgtctcatgtcgtagaattgtggata

SEQ ID NO: 206642 - DNA, 127 bp, Homo sapiens
  chr1:9666790-9666917
  hypo
agaagcatggttgacgttctggcgtggggccatcaggtcctgttgtgtgatttgtaccatctcgagttaaagagacactgtcaccttccgtctttcgggcagccttgcggtcgtggatgggtctctt

SEQ ID NO: 206643 - DNA, 132 bp, Homo sapiens
  chr1:9670774-9670906
  hypo
gcactcgcctcacaacggcagcctcttcaccatggagccgccccatgttccccggaagccgcccctgcaggacgtgaagcacgccctgggtacggccttctgaccaccccaaggggccgtgggagggcctct

SEQ ID NO: 206644 - DNA, 287 bp, Homo sapiens; identical to SEQ ID NO: 197303
  chr1:9711787-9712074
  hypo

SEQ ID NO: 206645 - DNA, 177 bp, Homo sapiens
  chr1:9780744-9780921
  hypo
gggggcatggagccggcgtggaaccagagccctcactcctgcccacacccctcagcagctgcagctgcgggaaatcctggagcggcgggggtctggggagctgtatgagcacgagaaggacctggtgtggaagctgcggcatgaagtccaggagcacttcccggaggcgctagcccg

SEQ ID NO: 206646 - DNA, 149 bp, Homo sapiens
  chr1:9781134-9781283
  hypo
cctccaccctgaccccggccgcccccaagcctgacctcggctccccccagatgctctacctgctgtgctcctggccggagctgcccgtcctgagcgccctggagctgctagacttcagcttccccgattgccacgtaggctccttcgcc

SEQ ID NO: 206647 - DNA, 85 bp, Homo sapiens
  chr1:9795910-9795995
  hypo
tgagtggtgtgcagtcgagcgctcggtgttacctgcacgcctctgccactgtcttcgaggacctgcaggtccagcccctccttgc

SEQ ID NO: 206648 - DNA, 263 bp, Homo sapiens
  chr1:9930045-9930308
  hypo
gtggtgagctgctgtcccagggagctgcctgagccactgcctggaaggtttctgctgagttgggtgcacaagccaggtcacacccagcatcggtgcttgggaacaggcccctgtgccaggacagagccctaagacatccaggagaacaagggctggctggtgatctaggtcaggccccgcatgccagcctcaaagcacagcaaacgcagccgtcagcactctgctttcgggggcccgctcgcgtctggacatgccacaggttg

SEQ ID NO: 206649 - DNA, 49 bp, Homo sapiens
  chr1:10091839-10091888
  hypo
tccaatccacttatagtcttcgtcagcggcaaaatctggaatttcatgg

SEQ ID NO: 206650 - DNA, 70 bp, Homo sapiens
  chr1:10091914-10091984
  hypo
gatttatattttataaatatatatatacatacatatatatatattttttgagatggagtcgcgctctgtc

SEQ ID NO: 206651 - DNA, 43 bp, Homo sapiens
  chr1:10123669-10123712
  hypo
aggtacatctgggccgggtgaggtggctaatgcctgtaattcc

SEQ ID NO: 206652 - DNA, 82 bp, Homo sapiens
  chr1:10150449-10150531
  hypo
attataggcgtgagccaccatgcctggctgagacctgtgttttactctttgctctgtttctaacaggcgaggaggtcctaag

SEQ ID NO: 206653 - DNA, 360 bp, Homo sapiens
  chr1:10174923-10175283
  hypo
aaaaaaagacacaataattaattgcctttgtttgttaagggatcccacacggacctgcccagccttgtcatgactctggcgagggctttgtaggtggcttagttacctactcagtcggcagggagttggctgccttgttcctttgactgcttctcagcctcattgtctccctttgctttcacctgtcaggcctatgttataggttgttggagttcaaatttactagactctgggctgaacgccttgaatttcaaagtagcattgtttctccttcttactgaaatactttaataccatactttttttttttttttttttaatagcaggccaggctggtctcgaactcctgacctcaagtga

SEQ ID NO: 206654 - DNA, 175 bp, Homo sapiens; identical to SEQ ID NO: 197307
  chr1:10271266-10271441
  hypo

SEQ ID NO: 206655 - DNA, 385 bp, Homo sapiens
  chr1:10495105-10495490
  hypo
tggccgcccctctgcggagggagctgcagcgtgtccacggtggtaattgcttgcaggtgtacacagaatggcaggcaggggttttcatttgccgcatttgttccgagtaagacgcactccttggaaagtgggtgacttgctttcagctgctaaagcctcagcttttacaggtgatttatgctccgctcttcaattagtaccgcaggtaattgaaaacaattgcaccaaattgcttttatgaagcaatttgaatgacgaaggcctgaaagggcgaaagtgttctaatttgctgccacttggattcggtgccagcctctcccacaccccttacttttcaccttgttcccgttagctctttgtttctcgggtgcgtgttttgaatgaa

SEQ ID NO: 206656 - DNA, 199 bp, Homo sapiens
  chr1:10653908-10654107
  hypo
tatcaaggtgctgccgtcgtaatttcatgccccaatgagaagagcaaggtcgaagcaaatgcttccatcggcatctgctaacacactaactcataaacaaggcccggctggatcaggtggcacggaataatacaggctaatgaaatacagcacagctttccattactgttagtttttacagtgtcgtcattacgtgtaa

SEQ ID NO: 206657 - DNA, 90 bp, Homo sapiens
  chr1:10659098-10659188
  hypo
tgttgaggctaatattctgtcgcttaaggttaaattgcaactgagagaggttccggagaatctgaaatcggggaggcaacttactaggat

SEQ ID NO: 206658 - DNA, 273 bp, Homo sapiens
  chr1:10676484-10676757
  hypo
cggccgtgttgtgacgttccttcccagagttcagaacgctgctgattttccctctccccctttctcccagatgagcagcacactgtgggggcgccttccggatagctctccactggtgctgtgatcgccttccccgctggtctgtgtcccacccacgcccctcctgatgacagatccttcggggggaggcagagcacccgccacgtggcctggagatggccgctccagaaaggtgttcgcagtggagacggggctctcccgcgtgccttggag

SEQ ID NO: 206659 - DNA, 406 bp, Homo sapiens
  chr1:10680890-10681296
  hypo
cacctcttgggacccggttcttctccctctgaactggtgcccccttcaaatcactgactgtatacaagcaccaagaagaatgtgacacgaacgccagagtcctcagatgaatgccctggctgtaatgagcagtaggcactgtcacatggccacccatggagggcctgtggcctgacgggagcgggagggcagctcggcagcccgccttagcgtgggcactcacacggagctgccacttgtagtttctacgaagctctgggctctccgctctgttttaaaaagaaaagaaacattgcaatatcagtcacaatggtaacaagagaatttctaaagcatctgctcagtttctcgaaattaaaaaaaaaaaaaaaaagaaatggtaaaaagccctcgactggctttataa

SEQ ID NO: 206660 - DNA, 85 bp, Homo sapiens
  chr1:10692421-10692506
  hypo
cgtggaggagaaacggacagaaacctgggcccggaggccttttgcccctgtgggtcctgagcaccgaattcggcttttgaggaca

SEQ ID NO: 206661 - DNA, 194 bp, Homo sapiens
  chr1:10692785-10692979
  hypo
catgcttggaggccgggggacagctgccctgacctcaccccggaccagctccctcggtccccggggtctgtcccggctcctccggtaactcgctggttctgccttgggcaggggcatctactttgggaaggacaggggacctcccttggtgtttgcgactcgcaggacaggccaggaggcgggggagttgcctt

SEQ ID NO: 206662 - DNA, 173 bp, Homo sapiens
  chr1:10699817-10699990
  hypo
caggttgtccacgcggtcgtggtgctgcgcgtgcttgtacatgtgcgtgcgcccgcagaacttgtagccgcagttctcgcgcgtgcagtggtagtgggtgaccttgagcgagaactgacaagctgcgtccttgcagtcctcgtaaaggtcgaagcgccggaagccctccagca

SEQ ID NO: 206663 - DNA, 263 bp, Homo sapiens
  chr1:10703773-10704036
  hypo
cacccacggggcctcgctctgggccgagaacaaacagagcaggcgggactgaaacagcatcatggggcaggtgagggcctgtccgctgccatggcgcccaggccggccaggtgtcttctgtcatcccccagctttgtttggccccaactatcgccaaaaacaccacaagttgagtaaataatagcaactgcagaataccctgacatctgtaaactgagcccagggacagcacaggccgcaagtgttgacgcttattggcatgg

SEQ ID NO: 206664 - DNA, 331 bp, Homo sapiens
  chr1:10707728-10708059
  hypo
catgccccagagaggctggggacagcagcaccatccgcagtgaggaacagggcctcctagcgcccttgctagcacctactcccgagacgcgaggggaacgcgggactcccggctcatcgagggactcacttctcctggaactggaggaatccgggtttgacctggggcttggcgttctctagagaagtcgttgccaagggcgaggcgggcaggtgaggcactgacgctgggatctgaggcatctggggtatggtggaagccagctgcttccaggcgagcagggtgggggtggagggcacggaggccgggctgggagcgggcccctccagag

SEQ ID NO: 206665 - DNA, 309 bp, Homo sapiens
  chr1:10708278-10708587
  hypo
tagaccccggtgtccgtccctactcgtccccatcactcagctccagaagtcccctgtgaccccaccaggacagaaggactggagggcaaactgcagcgtcccctggttccgaacttggtctcctggcttgggcctaaccatgccttcctacttgtgcccttcctcggtccccagctcctccatatgtgtgacagcaggccctgccccaggaagcctcttccttccagaacctgctcggaggtcttaaaggtaggattctcagtattcacagcaggcttccccgcgggctacggccgagggtgcctacgc

SEQ ID NO: 206666 - DNA, 186 bp, Homo sapiens
  chr1:10714453-10714639
  hypo
cccccaccaggctcccgcttacctgcagtggaagtgcgtggtcttctgtccgtagaactggcagtcggctgtgccacagtcttcggtggctcggaagcgctggaagccgtcgttaatgagctgggtattcttcttgtggaagttctcgtgggtcatcacgtcagacgtgctcgtgtacaccttgtt

SEQ ID NO: 206667 - DNA, 202 bp, Homo sapiens
  chr1:10715698-10715900
  hypo
gaggcacctgcatgcagtgatagtgggtgctcttcccattgaggtggcagccgtggtagtagacgctgcagtcgtccagcgggctgaaacgcatgaagccgtgctgcagggagttgtcgcgcttcttgtgcatgttgtagtggcggatcacgtcctgcttactcgtgaacctctgccaggagacagcgccacgtgggcagga

SEQ ID NO: 206668 - DNA, 149 bp, Homo sapiens
  chr1:10716607-10716756
  hypo
aaccccccccactgccgtccccgcctgccgacttctaagcgcctccatgctgtgctggtggcggagaggcggagcccatctggctgtggccgtacctggtagttacactcagggtcaaggcagtggtagtgctcgcggtactggtaggc

SEQ ID NO: 206669 - DNA, 285 bp, Homo sapiens
  chr1:10719285-10719570
  hypo
ccccagccagggtggcgccttctcagccaaccacaggcctgcattcagcacccatggcagcaggtagagaaagcctgtcatgggcagatggggtgtgctgtcatgggcagtcccggtgtgcatgctagcaaaaggcagagcacacttgtgcctgggagtgtgggcgtgtgtgggtggcgtgtgtggggggcgtgtgcgaggtgcacgcgcaggtccaggagcgggggggcgctgcaggagggctcacgcatggttctgtaggtgcaagagtgaatgtgagtgcgg

SEQ ID NO: 206670 - DNA, 944 bp, Homo sapiens
  chr1:10719690-10720634
  hypo
tgaggaaggaggcctcctgtctagtctggctcctggctctgggcattgtggggtggggagcgccttacttgacagtggagacggtccccgtggtgatggagtctgttttggagaaggttgacttcaggtactcgggagtgttgaaggacagggaggcaggaggctctggccctggcccgggggcgctgggggcactgggcacgctggcgaggggtgcgggagccaggctgggggtgggcggaaccttggcggggcctggcttctggatgccccggacgtcgtacttggaagggcgccccaccttgcctgtcttgaaggcgatggccccgcccatgtcggggctgccctccccgggtttgaagaggtgcaggtacttgacattctccaggtcgtacttggatggcttcttgtaggtgctcccgttctggggccgcagattctcgccggtcttcagtttttggatgaagaagtcgtacttggaggcccgggctaccaggttctgcatctggacactgctgtgcgacggcaggggcaggatggtggccttggtctccaggtgggccgtgctgctgggcagccgcaggccgggcagggtgcccaccacctccttgcccacccgctcctcggtcttggtgctgggggccggccaggagagctgctcgccagccttgagcttgcggatgtactcctcatacttagagaaccgcgcccgcttgctgagggtatcctcggaggtgggcagcatggaggaggtggctgcctccggggtggagcccgcgtgcagcttctcaaagctgatcttcctggccagctcgtcccgcgtgttctggtcatcatagccaaacatgccgaggaactcggtcatggtggaggccgcgtagtcccgcagcgaggaggcctctcctgcagaggaggatgggggcgcatcacctctgggagggagt

SEQ ID NO: 206671 - DNA, 46 bp, Homo sapiens
  chr1:10725222-10725268
  hypo
ttggagggctcctccgcgtggtcttcctcatcgctgcacccctggg

SEQ ID NO: 206672 - DNA, 107 bp, Homo sapiens
  chr1:10725478-10725585
  hypo
cctccgtgtgggagccggcgtcagctcgcttctccaccaccacctggcggctcagcttggcgcagatggcgttcagcttcaggccacccttgcgtttgggcgccatg

SEQ ID NO: 206673 - DNA, 198 bp, Homo sapiens
  chr1:10765349-10765547
  hypo
aggggatcctactggcgggagggcatcttttcccatcagggcggaatgggtggggtggctgcagttccccatctccaccttctcatctccccctgggtgctcagcaggactgaagccagcccagggtgacacgtgcattaggtgagtggtcaccagtcggggagaggacgcgaggctcagggaggggctcaggcctta

SEQ ID NO: 206674 - DNA, 76 bp, Homo sapiens
  chr1:10780357-10780433
  hypo
cattgtcatcatcatcgccatcgctaaacacttctctaaccaggatatggtaactaggaatcgtgcctttggggct

SEQ ID NO: 206675 - DNA, 41 bp, Homo sapiens
  chr1:10810301-10810342
  hypo
gacgctgctttgcttcgattttcttttcttttcttcttcta

SEQ ID NO: 206676 - DNA, 75 bp, Homo sapiens
  chr1:10815561-10815636
  hypo
atcaactgcgtcacccgccgagaagtcccccgagtagctccagacagggcaggtgcccccagcccttcccaatcc

SEQ ID NO: 206677 - DNA, 204 bp, Homo sapiens
  chr1:10823336-10823540
  hypo
ttacagaaatcacaacgggctgagaaccaggagacgtgggtccgagtcccacttctgtccccgaaacctccatgggcccttagacaagcctgctaatctccctaggttccgtcccctcaccagccagacggagacgatgcctaagacttccctcctaccttgcaggctgcgcggaggatggacaagaggcgtgaaagggtgtta

SEQ ID NO: 206678 - DNA, 1216 bp, Homo sapiens; identical to SEQ ID NO: 197311
  chr1:10854661-10855877
  hypo

SEQ ID NO: 206679 - DNA, 612 bp, Homo sapiens; identical to SEQ ID NO: 197312
  chr1:10856315-10856927
  hypo

SEQ ID NO: 206680 - DNA, 211 bp, Homo sapiens
  chr1:10997239-10997450
  hypo
tcagacatgggagaccggtgtcaggagccacaggtggccatagtcctggacagtacagttctagattggcaggttatgtctgggttggataaacccccagcttccagagcgtgcgcaggtgagagggtcccagccccctttctctcggcctagcagagcctcccctttccttccttgccagccttgcccagcctctcgcacacagccagga

SEQ ID NO: 206681 - DNA, 376 bp, Homo sapiens
  chr1:11130959-11131335
  hypo
gacctgctgtcggacggagatggcctgttctgctgcagctttgcacgcctcctttgcctgttcccgggcagctgcaagggagagaacttgtctctggagttggtgaatccagcaaccaccctcccctccatctccatccccctccgacttggcctagccacaggggttgtcacggctgattcctcctccctctcaggtccccggtcccccatctctgcaggacaggctgcctcagagctcaggctcaggtgctctgcccaccttcagctacacgtgagctgatcctccccagccctgcctgctcctcttctgtgaacctaaatgctcagtggcctgtggacctgagggcgtttaacaggatcgtcaccatcaccat

SEQ ID NO: 206682 - DNA, 262 bp, Homo sapiens
  chr1:11140985-11141247
  hypo
aacattcaaaatcaacgggaatcaaaattgtgccctgggctctggaaaatgtttggctcttttcatgaatgtaaggagcaaacctaagaactagaacctggccagacacagagcccaagtgtcgcggtctgtgtgactgcggctgaggtgtaccttgaggcagatgtccctgctccgttgccacaccacctgcagctgcaccggctgcccgttgccgcgctcccacatctccagcctcattttgtcatagatatatagcagg

SEQ ID NO: 206683 - DNA, 38 bp, Homo sapiens
  chr1:11141852-11141890
  hypo
ttctgggccaggcgcggtggctcacgcctgtaatccca

SEQ ID NO: 206684 - DNA, 76 bp, Homo sapiens
  chr1:11264689-11264765
  hypo
agctccaggctcagccgtctcagccattccagccagtcatctttggagaccctcctggcagcgccccaggcctgtg

SEQ ID NO: 206685 - DNA, 204 bp, Homo sapiens
  chr1:11308057-11308261
  hypo
gacgaggttttgttccgaagcccatgagatctttgcagtacttgtcgtgtaccagctgctgctgtgtgatttcttccatttcttctctcagacgctatatatatgaggaggaaaaaaatcatctttacttatgactggcattcaaactgggcactgtggattctacagacaattacatttgcctaatcccgaaacgcaactact

SEQ ID NO: 206686 - DNA, 360 bp, Homo sapiens
  chr1:11313448-11313808
  hypo
ctgtgaaagctcgtgtttactgtgaaccgtgggcctattaatttggcccctccttccctctcccttgctcccggtacaccagccatacttccctttcttctgtttcatcaatgtctcacactcttccacctcaaagcctcagcctggaacacagtcccccggcctgctgcaaggtagctccttcgtgtcatgtggacccccgtcaaataacaccacctcagggagggccttccttgaccctccactcaccccctccccatcactctctattctattctggtttgactttcttcatagaacttgctgctatctgaaattatcttatttacttatttattatgtttcctgccacaaaatgtc

SEQ ID NO: 206687 - DNA, 262 bp, Homo sapiens
  chr1:11315988-11316250
  hypo
ccaggtgattctctacgcagatgtgctttgctagtggtgggaatggagccatctccttaccctgtaccactgaggcttctgcatctccttcggctcacgctgggttgtgagaatcagacaggcacgaagggcggctacagctccctcacggatggcctgtttggggtcccacacggccacaaaaatgttgtcaaagaagggttgcacttgctggaagaagaaggtagggacgctgatggccagctcacggagaaccaggacc

SEQ ID NO: 206688 - DNA, 44 bp, Homo sapiens
  chr1:11323832-11323876
  hypo
ccaataaaatatgatgcattcgtttgggcgcggtggctcacacc

SEQ ID NO: 206689 - DNA, 52 bp, Homo sapiens; identical to SEQ ID NO: 197314
  chr1:11538821-11538873
  hypo

SEQ ID NO: 206690 - DNA, 122 bp, Homo sapiens
  chr1:11596362-11596484
  hypo
ctctcctcttgcccccaggacgcccgaacgcagcgccagtggcgtacgctggaggccgtgcggcacgtgggcgtggccatcgtctccagtgccctcaccacggtcatcgccacagtgcccct

SEQ ID NO: 206691 - DNA, 351 bp, Homo sapiens
  chr1:11596583-11596934
  hypo
gctgggcatcatggcgcccagctctttcactcggacccggacttccttcctcaaggccctgggtgccgtgctgctggcaggggccctggggctgggtgcctgcctcgtgctcctgcagagcggctataagattcccctgcccgcaggggcctccctatagcccgggacgggctctggacacttgcacctttggtcccatgggtgggggacaggagctgcttcccagctcgacttcagctagctgtgtccccaggcctgggcccagggcgccctgcgggccagcgtggaggctgacacccacacagatggtgtggaccatgctgccttgtggagctgggagttggagacagc

SEQ ID NO: 206692 - DNA, 73 bp, Homo sapiens
  chr1:11809703-11809776
  hypo
agctggagaggagtgcgtgggcccggggctgatgtccctctgcccaggttcctaagcacgtgctgcctgggga

SEQ ID NO: 206693 - DNA, 244 bp, Homo sapiens
  chr1:11856146-11856390
  hypo
gagatctgggaagaactcagcgaactcagcactccacccagagcccccagcctgtgcgaggacggtgcggtgagagtggggtggagggagcttatgggctctcctgggcccctcacctggatgggaaagatcccggggacgatggggcaagtgatgcccatgtcggtgcatgccttcacaaagcggaagaatgtgtcagcctcaaagaaaagctgcgtgatgatgaaatcggctcccgcagaca

SEQ ID NO: 206694 - DNA, 265 bp, Homo sapiens
  chr1:11861112-11861377
  hypo
gggcccaggaagaagtaaaggaccatttcaggaaccaagttcaggctaccaagtggcctccgggaaagccagaacccagagtgtaggggagtgctggctccacacctccccgcagcgccatgatgttcttcaggcccagctgcttagctttgtgcagatggcccgtgatctcctccaggcgctgacggcagcaggtcatgtgcaggatggtctccaggccacagtagttcacggcggtgctggcgatcatcatggaggaggtctc

SEQ ID NO: 206695 - DNA, 143 bp, Homo sapiens
  chr1:12041765-12041908
  hypo
agggctcctgcagggacctccgtggtgcctcaaacccgcacatggcggaatacgtgtgcacagtcaggattggtcccacacctctgcgtttttttccccagggcacttcctcacatgccagcgcaactccccaatacctcaat

SEQ ID NO: 206696 - DNA, 42 bp, Homo sapiens
  chr1:12075718-12075760
  hypo
tgttggctggagtgcagtggcgcaatcacggctcactgcaga

SEQ ID NO: 206697 - DNA, 99 bp, Homo sapiens
  chr1:12078706-12078805
  hypo
gcgccggccacctcgcccggctaatttttgtatttttaggtttactggcgtgagcaaccgcggccggccccaatactacactttcttgtttactgtgta

SEQ ID NO: 206698 - DNA, 66 bp, Homo sapiens; identical to SEQ ID NO: 197322
  chr1:12123950-12124016
  hypo

SEQ ID NO: 206699 - DNA, 42 bp, Homo sapiens
  chr1:12188609-12188651
  hypo
gatggtgaagtaattcgtttaaggccacgtgctgggtgagcc

SEQ ID NO: 206700 - DNA, 518 bp, Homo sapiens; identical to SEQ ID NO: 197323
  chr1:12226890-12227408
  hypo

SEQ ID NO: 206701 - DNA, 206 bp, Homo sapiens; identical to SEQ ID NO: 197324
  chr1:12227438-12227644
  hypo

SEQ ID NO: 206702 - DNA, 114 bp, Homo sapiens
  chr1:12251958-12252072
  hypo
ggcttcggcgtggccagaccaggtacggggtggggctcaggtccttggggacgcccatgggcctctcctttgtagacatccttgcagtgtcacgggcatcaacccattaattag

SEQ ID NO: 206703 - DNA, 37 bp, Homo sapiens
  chr1:12267963-12268000
  hypo
ctcaaaagaaaaaaaaaagcaccgcctccaaatgcca

SEQ ID NO: 206704 - DNA, 253 bp, Homo sapiens
  chr1:12304438-12304691
  hypo
gttggaaagggaacgtaagaaagcactacttcaagccctggaggagaaatggaaggcaaggcagagatcttctgggccataagagcagttgtggtgacacgtgtaagatgagcaagaacactagattgagctaatgctgactcttgtctttgtagaatgaccgccagcagaaaggggagtcctattggtattcagttaccgcctccgtagttacaaggattgtggagaatattgaagtaagtcctgctgactt

SEQ ID NO: 206705 - DNA, 166 bp, Homo sapiens
  chr1:12460133-12460299
  hypo
ttctgagcaacctgcgcattatgaggccccactcaagcgtaaaaatgaaaactgagccactggtctgtttttgtttttgctttgctacctttccatggccgtaggtggacaatcagctcattggtaccacgcagcccttcatgctctatgtgactcccctgagcaa

SEQ ID NO: 206706 - DNA, 106 bp, Homo sapiens
  chr1:12565969-12566075
  hypo
gacctgggaacaacgccgttctggacccaggtttcagaacacttccaggtggagcctggctctgagcaattcagtttgccagcaggagctcgactgccactccgtc

SEQ ID NO: 206707 - DNA, 165 bp, Homo sapiens
  chr1:12607962-12608127
  hypo
tctcccctctgtggacgcaggcaccagcccagtgctcagcatgccacagccacccagtgccgtggagtgaagggacatcaggccactcgcagggccccagggcatcctcttgtgcccgcctgggtcacccttcaccccggccgagctccacgtggatttgggccc

SEQ ID NO: 206708 - DNA, 35 bp, Homo sapiens
  chr1:12629954-12629989
  hypo
atcaaagacttgttcttattcggtctattttttgt

SEQ ID NO: 206709 - DNA, 214 bp, Homo sapiens
  chr1:12630200-12630414
  hypo
tgaggaatcaggttcgatttgggtgtcacatcctctggggaagcgtcctgggctcaccttcaggcttctcctcgtacaaccggagttccgacgcttccccagcaagccctggtgtagtccccacccgtttacttgtcaagcctgtgggggccttcatggcgggtatttcatctctgatccccaggccctcacatgggcccggcacagagagggc

SEQ ID NO: 206710 - DNA, 173 bp, Homo sapiens
  chr1:12663579-12663752
  hypo
ttgaacctcagctggcgctgaggtccgcatggggaccgcggggcttggaggctggtagaagtggttgggggaggtgggacgcagacaggagaccgtgttccctaggaggctgtttcagtgtggacaagatcatcatacgcttcactcatcaaaatccccgaaaggctgctgaa

SEQ ID NO: 206711 - DNA, 191 bp, Homo sapiens
  chr1:12711251-12711442
  hypo
ttttgggacgatacccgtgaggctgttccagccgaaggcagcatcctccagaccccggcgaggcatcatcttctaccatggaggggccacagtatttgggagcctgggtaaggggcttccctgtggctttgtagaggaagggcctcatctgcatgcatagcctagctcatgcctcccgcaagaacccttct

SEQ ID NO: 206712 - DNA, 264 bp, Homo sapiens; identical to SEQ ID NO: 197328
  chr1:13840257-13840521
  hypo

SEQ ID NO: 206713 - DNA, 202 bp, Homo sapiens
  chr1:13881447-13881649
  hypo
ggtcaggcctcggcggggcctacacgcttcgctggatcactggctcccgcctcccgccccgtgcccggccgtggcagagcccttgtccgcccagcgcctatcgcggagtcaaagctgtacttcctcatcgcccggtacctatcggcgggcccgtgtcagagagcggcccaggtactggtgcaggagctggagcagtggcagt

SEQ ID NO: 206714 - DNA, 32 bp, Homo sapiens
  chr1:13952169-13952201
  hypo
tatttattgagatggagtctcgctctgtcgcc

SEQ ID NO: 206715 - DNA, 194 bp, Homo sapiens
  chr1:14121945-14122139
  hypo
gtttgtgctacctctcgtctgtggatctaggcgtgaggaggtagaagggagcccctggtcacgcccctgtgccgccttctagtggcatggcctttaagcagcaaagaatgtgacttgtaagcaccttgtctgctggacaagaagcaccagcagatttgaaggagctgaaaactgtgttgcgggtgaatggatgt

SEQ ID NO: 206716 - DNA, 120 bp, Homo sapiens
  chr1:14746304-14746424
  hypo
gttcggggtctcgctggtctcggaagtgaagccagacacctttgcggcgagtattacagctcgcacagacagtgagaccccaaagagcgagcaacaatgggatttattgcaaagagcgaa

SEQ ID NO: 206717 - DNA, 90 bp, Homo sapiens
  chr1:15107455-15107545
  hypo
tacaggagcccagagggtgccgagtggagtgggggacactgaaggcaccgagagtaaataacattaaaaggcaagaaacttggccgggcg

SEQ ID NO: 206718 - DNA, 108 bp, Homo sapiens
  chr1:15110198-15110306
  hypo
gcggtggccttgagcggggtcctggctgaggagtaggtgttttctggtaggcaggcacggcagaggggctcctggaagacagaagggcatgggcgcacaagagacctg

SEQ ID NO: 206719 - DNA, 210 bp, Homo sapiens
  chr1:15129598-15129808
  hypo
ctacatcatggctaccgtttactgagggctccttataagacaaacgctgtgctaaagcctcccttcatctgcgcagtgtctgctgaggaaagtattggtgtccccattttacagaggaggaaactgaggcttagagaagtgaagcaagtcatcctcaggtacccaggtggggattagcggagggggattcagccccggatgtagctgacc

SEQ ID NO: 206720 - DNA, 187 bp, Homo sapiens
  chr1:15151515-15151702
  hypo
gaggtgtgctcacagcgcatcccccttgctgaagccgggggttcacccacagccttctctgacttttcccactgccccaggcctaaacagggaatttcagagtctcgcaaaagctagcaaggactgccttttaagtcatgtccattcaaaggcctggaccatccctgaggccgcgaaggcacagaga

SEQ ID NO: 206721 - DNA, 337 bp, Homo sapiens
  chr1:15194448-15194785
  hypo
agcattgcataggcaggcatcgcatatgcaggcattggatacacaggcatcacaaacgtgggcatcacacaggcatggcatcgcatagcatggcatcacatacgcacagcattgcatacacaggcatcacatacgcacggtatcacatacacaggcattgcatacacgggcatcacatagcacggcatcacatacgcagccatcgcataggcgggcatcgcataggcaggcatcaaatagcacgcatcacatacgcaggcatcgcatacgcaggcattgcaaacacatggcatcacatacgcacagccagggctgcgtctgaggccactggagggga

SEQ ID NO: 206722 - DNA, 261 bp, Homo sapiens
  chr1:15283870-15284131
  hypo
gttgggtggatggagccattcgacagacgttaccgagtgcccgtgatgtgtcgcgcagtcactgtttccagcgctgaagacccaacagtgaaggagacgaggcaggatatgcgattgggccccgctctcggatcctgtgtccaccaagcacgccgctggggagcgagtgagcctccacgtcactacggggttttgtccgggttgcctgccgtgctgttgacgctggacaggagcggagccgttttaggtctcttgaggctg

SEQ ID NO: 206723 - DNA, 403 bp, Homo sapiens
  chr1:15374955-15375358
  hypo
caacttagaatgtcaaggcccgagcccacatgagcctaccgttgcccccgcaggagcctcccctccatggccagagccagcgttgatccttggttgttggtcctgggtcgttgatccttggtcgttggtcctgggtcgtcggtcctgggtcgctggtcctgggtcgtcggtcctgggtcgtcggtcctgggtcgtcggtcctgggtcgctggtcctgggtcgttggtcctgggtcgttgatccttggtcgttggtcctgggtcgttggtcatgggtcgtcgatcctgggtcgtcgatcctgggtcgtcgatcctgggtcgttgatccttggtcattggtcctgagtcgttggtcctgggttgttggtgctgggtcgttggtcctgggtcgttggtccttggtc

SEQ ID NO: 206724 - DNA, 240 bp, Homo sapiens
  chr1:15836199-15836439
  hypo
tggtctcattgagaagaaattccagagcagaaagaggtgagagaagctcaggagagcggatgctcactgtctgcgagtccacaggggcccagcacacagcaggtcctcaggaaatacttgcagaatgaataaatgaataaagatgattattttccatcaacatcaaaagagttttcatttccgttagcaagaagttgactggccaccagcctaaaaggttatgagatgttttttcttttt

SEQ ID NO: 206725 - DNA, 155 bp, Homo sapiens
  chr1:15892452-15892607
  hypo
cctcttcatcctcttcggcactgtcatcgttcaggctttcaggtaaatgtcctgtggcttctcggtgcaccaccatggttggtgttgacactttttttgtaaaactccttttttcttactttagcgactctaatgatgagcgagagtcaagccct

SEQ ID NO: 206726 - DNA, 120 bp, Homo sapiens
  chr1:15929107-15929227
  hypo
aaattaaatacacgtgaaataccaaaccctctagtaaacagcgagctacatacaagtcccagacactccacgaccgtttctagattgaaaatcctaggccaggcgcagtggctcacacct

SEQ ID NO: 206727 - DNA, 104 bp, Homo sapiens
  chr1:15930726-15930830
  hypo
tgcagtgagctgagatcacgccacttaaaagaaacgaaactttgctggtgaccatgtggtgatgaaactgagcgttttggagcgcagcaaggtgactccccatg

SEQ ID NO: 206728 - DNA, 156 bp, Homo sapiens
  chr1:16053711-16053867
  hypo
ccacggagagcagcgagcgctccgagccgggcctgctgatccctgagatgaaggacacctccatggagcgcttggggcagcccctgagcaaggttatcgaccagctcaacgggcagctggaccccagcacctggtgctcccgtgctgagcccccag

SEQ ID NO: 206729 - DNA, 120 bp, Homo sapiens
  chr1:16101036-16101156
  hypo
cctctcagaagaagacgaccctcgtgggttggggtgggtgtgtcgtggatggttctggcagtggcctctgtcctaggacacactggagaggtgcggcaagtgtggcgaggtggtccggga

SEQ ID NO: 206730 - DNA, 85 bp, Homo sapiens
  chr1:16165179-16165264
  hypo
cagggcgacgggggggagactccgtcaaaaaaagaaaaaagaagttttgatttgcgttatttacgttctgcttgtgtcttgatgt

SEQ ID NO: 206731 - DNA, 698 bp, Homo sapiens
  chr1:16273064-16273762
  hypo
taggaaagggaggaacgcagcctctggaagtctacagcaaggcacctggcccatagtgggcatctgagggcttttatcttagcagctaagggaagtggaaggaggggctcaggagaacagacccgcaggagggtttaggagcctgcccgtgtgcaaaggcactgaaccaggcacggctcccgggtgctctgtaggggaaaggcaggcagagaggccaccctcagacctgaggctaacccttgccagcacccacaaccgaggcagggccagatgaggaaactgagacccagaaagtcagaggcagagcccacatcaaaagccaaggtctctggccatctgcttgggagcagctgccaataacctaccttctgtggccaaggcctccgcatttcccccagggctggtagccggctcagcaagtgacttgagggcatggcaggccgtgatgatgtcctgcatttggaggaaagtggccacggccagcacatcatccacgttctcagggctcaggctcagcttggccgtgtacataaactccagcacctgccccaggcctaccaaggacaggacagctgtcacagacccacctcaagatccggcaccggcagcctgccccaccactccactcagcagcaggacgcagggatttaggaacagctgagtggcaagcctgcatcgccccatctcctctgtggaga

SEQ ID NO: 206732 - DNA, 378 bp, Homo sapiens
  chr1:16274647-16275025
  hypo
ctcatggcctgaagcctgtgcgggaggcctgttgcatcccacagcctgcaggtgctgcccctggagggcctagcatggcacagggccggccatagcttctggctatcagcaagctcagccccagccctgacggggtacctgccgcgttactgatgtccaggtgcaccacgtccttctggtccacgaagagcatcttgaagtactcgctgcaggccgccagcactgctttatgagccttaaagtgaacaccgtccaccacaaaggtgcagtcacagagaagccccagctgccgctgctggttcagctgttccaagacatgctggctgtgctggggaaagtccatggctgaagaaagccaaagggcgttggggttagcac

SEQ ID NO: 206733 - DNA, 219 bp, Homo sapiens
  chr1:16283816-16284035
  hypo
gcaaaaaccctgaggcgggcatgactttggcacaggggccggtgtgtgtggagaggaggaggtgtgtggcacaggggccggtgtgtgtggagaggaggaggtgtgtggcacaggggccggtgtatctggagaggagcaggtgtgcatgagaatgacagcagcaggggctgagctcgcccagggtctcagggacacagcggactttggatttcttctaag

SEQ ID NO: 206734 - DNA, 148 bp, Homo sapiens
  chr1:16457640-16457788
  hypo
acatgtgcacacatacggatgcacacacatgcatggacacacggatacacacgtacaccccactccttttttcatctctgcactctctgaatcagctcctggaacccagcacaaggcctggcacgcagtagatcctcaagaaatattt

SEQ ID NO: 206735 - DNA, 56 bp, Homo sapiens
  chr1:16458832-16458888
  hypo
atggccaggcatccccgccccctacaacccacatccttacccgaaggaacttgtcc

SEQ ID NO: 206736 - DNA, 514 bp, Homo sapiens
  chr1:16464269-16464783
  hypo
cgagccccagatggccgtcctccttaagccccacctgggcaggccccatagggcacagctgccacccctggacctcacctgtctggttgatgctgacactggcagtacggaagctgcggctggttaccaggcctgagacgccattgcgggcctccacggtgaaggtgtagttcatgtggggctccaggtcgctcactgtcacactggtgcgggtcagtccgtgaggaggctccgagtagcgcacactggcctcacacggcccgcattccccagactcgggccagcactgttcgcaggtgacgctgtagacaatgtcctcgcggcccccgctgtcctgagggggcgtccagcgcagctccaccttggcacccatgcccacggctgtgaggtagtgtggggcggaggggggtcctgcacagacaggaggagtcagtgctgtgctggacccaggcggacacgtcaccctcagtcacgccaccctgacccactgcaagactcacgtgtgcaaggcatc

SEQ ID NO: 206737 - DNA, 102 bp, Homo sapiens
  chr1:16466891-16466993
  hypo
cagtacctactatgcgcagggctcgggctaagcactgtaccctcatttagtcctcgcaatagacctgctatatacaggcactattagcgctggttccacttt

SEQ ID NO: 206738 - DNA, 189 bp, Homo sapiens
  chr1:16474842-16475031
  hypo
ccttccctgcaacccagaaccgtcactcaccctggcaggcatcctccaccttctcgtagcctgcctggcacaggcactgcccaatgggcaccagccactcgccatccactgcacagtgcatacggggctcttcaccccccggtggcaccacggcatggtccacacaggtgccggccacagtggccaggg

SEQ ID NO: 206739 - DNA, 96 bp, Homo sapiens
  chr1:16475432-16475528
  hypo
cggtacacccagttggtgcggagccagttgtcctggtcgccagacatcacgttgcacacggagtacatgtagatcggcatgtcattcatgatgttc

SEQ ID NO: 206740 - DNA, 738 bp, Homo sapiens; identical to SEQ ID NO: 197342
  chr1:16481738-16482476
  hypo

SEQ ID NO: 206741 - DNA, 251 bp, Homo sapiens; identical to SEQ ID NO: 197343
  chr1:16482544-16482795
  hypo

SEQ ID NO: 206742 - DNA, 54 bp, Homo sapiens
  chr1:16567830-16567884
  hypo
tcatttgcaggagccggcacaggcgcaggaaccatcaggcgagcaggagcagtt

SEQ ID NO: 206743 - DNA, 32 bp, Homo sapiens
  chr1:16624057-16624089
  hypo
ctaagaagtcaagtccaggccgggcgtggtgg

SEQ ID NO: 206744 - DNA, 135 bp, Homo sapiens
  chr1:16810656-16810791
  hypo
cctacccggagggcgccagacgctccctccaggcctctggctgagcccagaacgctcaagccccttcctacctggacctgcagctcgtgcttgtgtaaggtggagtggatcagggcgagcgtggaggagtctgag

SEQ ID NO: 206745 - DNA, 35 bp, Homo sapiens
  chr1:16957469-16957504
  hypo
tctgcggggcgaacggcctcggcccggcgaggagc

SEQ ID NO: 206746 - DNA, 44 bp, Homo sapiens
  chr1:17270869-17270913
  hypo
tcctgggcctcctaccgtctggacccctccgatgtcgggttttc

SEQ ID NO: 206747 - DNA, 37 bp, Homo sapiens
  chr1:17330879-17330916
  hypo
gaagaggtaataccgcagcacccgcttctgggtggga

SEQ ID NO: 206748 - DNA, 208 bp, Homo sapiens; identical to SEQ ID NO: 197347
  chr1:17591036-17591244
  hypo

SEQ ID NO: 206749 - DNA, 44 bp, Homo sapiens
  chr1:17734378-17734422
  hypo
tctcttgggtccaggcgagaggagggttccgggaaaggcacctc

SEQ ID NO: 206750 - DNA, 505 bp, Homo sapiens
  chr1:17736189-17736694
  hypo
gcgagcgatgtgctcgcccgagagtggatctgctgcggccagttggtgccatctgtcatcaagggtgaggacagccacccagcctggccagcaaccctgtgcactctctcctgcagaatgattgttacctctcaaacaaatcttagcgtgagacaccaggaaagccagctgagatggtaaacaagacaacccaaacagactgcgatgatcaaaatcatgaggagtgacataccactgggtacggacacgtccccgagctggcacagctgcccccactcacctgctctgagaaaatgccatccagagtctttacctcctgggctgcagtggaagacttgggcttgtggtccccgtagccctggcgaagcaaacaagatgttcgcaatcgaggatccatgtggctcagtccacaagtggggaatcacggcaacatttcctggcccccactaaccagaagccagtgatgatgccctctggcccatgacaagcccggccacccttgcac

SEQ ID NO: 206751 - DNA, 731 bp, Homo sapiens; identical to SEQ ID NO: 197348
  chr1:17865970-17866701
  hypo

SEQ ID NO: 206752 - DNA, 130 bp, Homo sapiens
  chr1:17897819-17897949
  hypo
gccgcaggtgacctcgtgagctggctggcaaagcggtgggcacacacttggttgggaataggtagctcagcacagaataggagacagggacaggagacggagcatgggcactcctcggggaagtcttgta

SEQ ID NO: 206753 - DNA, 197 bp, Homo sapiens
  chr1:17919150-17919347
  hypo
gcaggtcagcaaggccggagtgggtccgcagcgtctggaggaaatcttcaagatttcccagattgccgcagacctagtctggagttgtttggaatcctgggcttctccttacatgtgctgtttcccaaatccggaacatttgagcctcctgcgtcctgtcccgcagggtccatgcgggacgtgaggcatggcagata

SEQ ID NO: 206754 - DNA, 51 bp, Homo sapiens
  chr1:17934561-17934612
  hypo
caggcctaggactcacgtctgggtcccagggattcccgggtatgtgtggtg

SEQ ID NO: 206755 - DNA, 203 bp, Homo sapiens
  chr1:17949438-17949641
  hypo
agggagagaggctgcggcctggcctgcggcctcaccccgccctccccggcaggactaccgcaaccccctgatggagatggagcccaaggcgctgagcgcccgcaagtgccaggtggtgttcttccgcgtgaaggagatcctgcactgccactccatgttccagatcgccctgtcctcccgcgtggctgagtgggattccaccg

SEQ ID NO: 206756 - DNA, 67 bp, Homo sapiens
  chr1:17996867-17996934
  hypo
gctcaccggggcccgtgtcaacaccgcgtcctccgcgttcatgatctagatcgcaccgccttcaaag

SEQ ID NO: 206757 - DNA, 35 bp, Homo sapiens
  chr1:17997213-17997248
  hypo
atgctattggatctccgcaacgctgaggagtgacc

SEQ ID NO: 206758 - DNA, 56 bp, Homo sapiens
  chr1:18021388-18021444
  hypo
ttcccccaatgcatccgtatggcagccccactttacacaggcggaaactgaggctg

SEQ ID NO: 206759 - DNA, 338 bp, Homo sapiens
  chr1:18023466-18023804
  hypo
ggaggacaagccagacgggcaggcacacgagcccatgcccgatagccacgtgggccgagagctgacccgcaagaagggcatcctcttgcagtaccgcctgcgctccaccgcacacctcccgggcccgctgctctccatgcgggagccggcgcctgctgatggcgcagctttggagcacagcgaggaggacggctccatttacgagatggccgacgaccccgacatctgggtgcgcagccggccctgcgcccgcgacgcccaccgcaaggagatttgctctgtggccatcatctccggcgggcagggctaccgcaactttggcagcgctctgggcagca

SEQ ID NO: 206760 - DNA, 199 bp, Homo sapiens; identical to SEQ ID NO: 197349
  chr1:18434092-18434291
  hypo

SEQ ID NO: 206761 - DNA, 34 bp, Homo sapiens; identical to SEQ ID NO: 197350
  chr1:18434816-18434850
  hypo

SEQ ID NO: 206762 - DNA, 131 bp, Homo sapiens
  chr1:19203883-19204014
  hypo
gcggcgggggtgacggtgccactcacgtcgcccactttgatccgactgtgctcctccagcagccgccctttgatctgcggccacagcgagtgcggcacgtagagacgcgagcacgcggaacacttctggcc

SEQ ID NO: 206763 - DNA, 379 bp, Homo sapiens
  chr1:19208520-19208899
  hypo
ccactcctccaaggcgtctggccctatctccaaaagtccctgccaaggaggccacggcacagcccaatctgccccacgctctggccaaggctccctttccccagaagcctgcaccaaccggtcctgccatcacctaggcaggtctgttcttactgctagagtcactgagtgctcaccgggcgcggcggggcaagtacacacgggctctctcagcacatgtcctgggtcaggcatgtgcagcagccaggcacgtgggcgcctggccatgcaccgtgtttgtctgtgcacagatgcatgaggacgtccccatccatgtccctagtacacactccggcatcagcatccagtgcccctgtctggggctcggggttcccgacaa

SEQ ID NO: 206764 - DNA, 143 bp, Homo sapiens
  chr1:19245955-19246098
  hypo
tctctactcagaccgagggaagcagaagtggggagggggcgggaggagggtgcctggtctccgatgcatccaatgcatccgtcatcctcatggtcaaacacagccagccaggattctaactagaagccgagccccggagcctc

SEQ ID NO: 206765 - DNA, 325 bp, Homo sapiens; identical to SEQ ID NO: 197362
  chr1:19639187-19639512
  hypo

SEQ ID NO: 206766 - DNA, 263 bp, Homo sapiens
  chr1:19676456-19676719
  hypo
taaaagtggctgccggaaggaaaacattttcatgtgttgtggctgcagatgttccacgaggtggttccaatggcgtctgaagccggagcctggcccgtgtgtccccagcaggcgcctctcctcctccccatggccctaacacaggcaagtgtttggaagctggcagcctttcccccagaggggatgtattacacctcccactgccacgtggcatcttctagcgcgacccgcagggcgtggccctaaggcatgggccccactca

SEQ ID NO: 206767 - DNA, 72 bp, Homo sapiens
  chr1:19676822-19676894
  hypo
aatgtacacaaaaggcctagagcgggacttgccagaatggcagctctcaccgattgtcaaagcacagctcca

SEQ ID NO: 206768 - DNA, 31 bp, Homo sapiens
  chr1:19680339-19680370
  hypo
tggggagccttgacgccgtgtgcggctctgc

SEQ ID NO: 206769 - DNA, 72 bp, Homo sapiens
  chr1:19721243-19721315
  hypo
aaagtgagcaagccacgcaacatagatttgagataatggtacatacagcacatctggcggagtaacacagat

SEQ ID NO: 206770 - DNA, 388 bp, Homo sapiens
  chr1:20060808-20061196
  hypo
cccttggggtctgccgagttgctgccgtgtgagtgtgtgcagatgcgtgtatgaatgtgtgcaggtgtgtgtgtgagtgtgcatatgtgcgcatgtgtgtgaactgtagggtgcccagcaccagtgcccccgggtcctccttggcaggatccactcagttactcattcactccacagtttaaagacctcaatctttccccagcgttgaaccagttgtttccaactccttagcctggcacagtgccaggctcccaccctgacctattagcatttcccaccaacccacctggggggcctcttacgtgggctgcagagacaccagatgccaccgtttctagacacccctgagagccccgcctttgcccatgctggccgaccctctggaatg

SEQ ID NO: 206771 - DNA, 68 bp, Homo sapiens
  chr1:20127471-20127539
  hypo
actttaaaagccctggaggtgggcgggtttaggctgccttgctctccgctgtgtgcccagccccaggg

SEQ ID NO: 206772 - DNA, 289 bp, Homo sapiens
  chr1:20230247-20230536
  hypo
tgagtcatgctcatccgtgactgtccagctgggacgggagcttcagtacctctaagcgtgctgatgatcaaataaggcttgggaaccagagggaagttgtatgtaggtttcttcaagaccagcaccgtttttgtgcaaaagttcaccaggtgcgagtatagaggatcgttttctgttaagctcacggctctgaaaatcagctgaggtgactgtgtgctgtcagaggcagcagtcatttgccagtgttggcatttagacatgggagtgcgaatgcctttcttactgagca

SEQ ID NO: 206773 - DNA, 199 bp, Homo sapiens
  chr1:20554750-20554949
  hypo
tctaagattctaatccgggcgacatggttctagaaccattctctaccatctcctgttagcaggatgcaggcttctgcacccaaaactgagacatcaggatatggagatgtccgccagggctggagtccctgagaaacagatcctgagacggagacttgcatataggaaagttcattggcaagtgcgctccagatcacac

SEQ ID NO: 206774 - DNA, 34 bp, Homo sapiens
  chr1:20680360-20680394
  hypo
gtgtccctcaccacccgcccgtctgagtccaaga

SEQ ID NO: 206775 - DNA, 140 bp, Homo sapiens; identical to SEQ ID NO: 197371
  chr1:20812696-20812836
  hypo

SEQ ID NO: 206776 - DNA, 178 bp, Homo sapiens; identical to SEQ ID NO: 197374
  chr1:20878727-20878905
  hypo

SEQ ID NO: 206777 - DNA, 34 bp, Homo sapiens
  chr1:20920113-20920147
  hypo
tggaagtacagtggcgcgagcctagttcactgca

SEQ ID NO: 206778 - DNA, 92 bp, Homo sapiens; identical to SEQ ID NO: 197376
  chr1:20959849-20959941
  hypo

SEQ ID NO: 206779 - DNA, 156 bp, Homo sapiens
  chr1:20977499-20977655
  hypo
cctttgcccctaacacgaggaactcgtttgaagggggcagcgtagcatgtctgatttgccacctggatgaaggcagacatcaacatgggtcagcacgttcagttacgggagtgggaaattacatgaggcctgggcctctgcgttcccaagctgtgc

SEQ ID NO: 206780 - DNA, 136 bp, Homo sapiens
  chr1:20983634-20983770
  hypo
caggtgcaaagtccccgaggggggtgggcacggtcaccagcaaggggcccagtgtggcttagctggagagaaaggagtgagcagcaggaggtaaggccgggtgaagtgagggcccaggctgcgcagggctctgcac

SEQ ID NO: 206781 - DNA, 157 bp, Homo sapiens
  chr1:21062548-21062705
  hypo
tccacttttgacagcgcacactccatcccagtctccaacaccttcacatgttgagttatttcacctttgaacactatcattctgttctctcagatgtgtcctggcggccatccctgcaatttatcaacattgtcccccaaaaataggtgacctagaa

SEQ ID NO: 206782 - DNA, 41 bp, Homo sapiens
  chr1:21122639-21122680
  hypo
ggattacaggcgtgagccatcgcgcccggcctagaatttat

SEQ ID NO: 206783 - DNA, 370 bp, Homo sapiens; identical to SEQ ID NO: 197378
  chr1:21563147-21563517
  hypo

SEQ ID NO: 206784 - DNA, 234 bp, Homo sapiens
  chr1:21573434-21573668
  hypo
tcatgcccggccacaggtgatatttgtatcaccattttatgaaggaggagaatgaacttaagaaaggttacgaaatttgcccaaggctacaaagctggtagtttgaaagaggctgggatttaaacctgtgcctgtaaccaggatgtcctgctgcctctcgtaaaagcccgcccaggtcccactctcctgagtcagactgtcatccccacccctgcccacctgcccaagaagagg

SEQ ID NO: 206785 - DNA, 124 bp, Homo sapiens
  chr1:21889588-21889712
  hypo
tctcccacctgcagacgtacaacaccaatgcccaggtccctgacagtgccggcaccgccaccgcctacctgtgtggggtgaaggccaatgagggcaccgtgggggtaagcgcagccactgagcg

SEQ ID NO: 206786 - DNA, 166 bp, Homo sapiens
  chr1:21944017-21944183
  hypo
ctgtaccccactgggcgccccaggacaccctcccaactcagacctggagccgcttctgtcgtggctaaggggtatgaggggacaggccagagcctgtgtgggccccagggttctgctccagccctttccctcagccagacccagacagcgccgagacccaagtctc

SEQ ID NO: 206787 - DNA, 133 bp, Homo sapiens
  chr1:22001538-22001671
  hypo
tgcttcccagtgcccgcagagccatgcctcggcagctcgagacatctgttcctgatgttcttagcaatgacaatcaaaacaactgaagctgcccctttggggcagaaactgcccatcacggagacataaatct

SEQ ID NO: 206788 - DNA, 211 bp, Homo sapiens
  chr1:22003571-22003782
  hypo
gacgaaacgagaatcgggctttaggtcataccctttacctgtttttccctgtaccaagtgagaagggtggcaatgcaaaaccattcaatacaagcatacgtttctttgcaactctgcctactatgggtgggagaggccccaagcccagggtttcaaagagtacaggagtggcctgtggatgcagattccgattcagcgggtctagggcctg

SEQ ID NO: 206789 - DNA, 66 bp, Homo sapiens
  chr1:22023365-22023431
  hypo
gtggtggtggtggccggtgggggcggtgggggatggggggtgagtgagaggcgcaggggagattct

SEQ ID NO: 206790 - DNA, 223 bp, Homo sapiens
  chr1:22023679-22023902
  hypo
tttgttcagggtgccgaccactggcgagacactgcctgaggatagtttagctctagccctgaatctacataggcaactgagtgattctaagattcacgagaaaaagttaagtgcacatgtgagttaaaaagaaaaaaaaaaaatgaaacccgatgaaacatttttctcagtctcgactgttgaaagaaaaggtcaggccaggcgtggtggctcatgcctgtaa

SEQ ID NO: 206791 - DNA, 193 bp, Homo sapiens
  chr1:22032531-22032724
  hypo
aacaaacagaatccacgatatcttaaaaaataccagagtcaaccaaatcagtaacaataaaggaaataaaacatattttgtttctacctaacaaatttccgccactcttctacaaagaactgagacacgatgtagaggacatccgtatcctagaacacaaaaatcacaaaacagtatccgtcaattcaccgcc

SEQ ID NO: 206792 - DNA, 625 bp, Homo sapiens
  chr1:22198753-22199378
  hypo
gagctgggcaccctcgggcacgggttccacagtgaattctcctgtcaggcggctgtttcgctgtgggttcaccagggcaaagccttggaagtccccaggggcaaagtgggtggagatctggcaggggaaaaaggagggggcgtcagcctgagcaccggggtgccttggtgggggatggggcacgggagggtgttaaggtgcggaatggggtcctgttgagatcaggactgcgagagaaataatgggggcatgtgagggtactgaggcggggatgagggtcgctgggctcagtgctcagatggacagtaacaggcagcaggtggcaacaccgcctggggctgggcagcacaggctctcaccaggtggcgtgtgtaggcagagctggcgcactgctgggtgatgcccatacagaagcagggcaggcagccgtctgggttgctggcactcaggtggaagtggtggggccggcagtggctgcaagtgaggccttccacctgggcctgggtagacggatggaaggaggcaggcaggggactcagtgggtctcctgcacccccagcagcctgaggccagcctccctggccacttccagcagccccgggcagcccctgccctgtcccccatg

SEQ ID NO: 206793 - DNA, 46 bp, Homo sapiens
  chr1:22202047-22202093
  hypo
tgtgctgtactgcaccgcttagatggagcccctccccaagcccatg

SEQ ID NO: 206794 - DNA, 118 bp, Homo sapiens
  chr1:22202123-22202241
  hypo
gctctcagcgggctgctgggcgtaggatgctcggatcaggagggtgtcgatgcctgccagtgccatcagcaggtgctcccgtgtggctggctgcccatcgggccgctgccatgcttgc

SEQ ID NO: 206795 - DNA, 157 bp, Homo sapiens
  chr1:22465799-22465956
  hypo
ccacacgcatgggctcgctctttcttcccaaccaccattgtgcaccatttgcatcagtgggctccattttacagatgagaaacccgaggctcggagaggttaataacctgtccaaggtcactcagctgggcagggcagagctcggttggatctcaaa

SEQ ID NO: 206796 - DNA, 218 bp, Homo sapiens
  chr1:22584478-22584696
  hypo
aagcagagagtgtgcggccgggctgaggtaaggcgcccgcgactttccaatttcctggtctggcctggctctgctccgcaccgtgaatttttcattaatgtgcacaggtgacgccacggggcagccgcaggccaggtaggctcccacggcggcaaggcctgggctggaccttgctgggctgggctgggctggggatggcacagcgggttttgtaccaa

SEQ ID NO: 206797 - DNA, 157 bp, Homo sapiens
  chr1:22777697-22777854
  hypo
acaaagagtgcgggctggggacgcggctcaggtcgcctctccgcctcgcacgtgaatgtgttgttttggaaaaacgaagccttttgtgttcacttccttgccctcctttgaaacaaaatcctaatcctagagctgccggagcgagactgcggagctc

SEQ ID NO: 206798 - DNA, 56 bp, Homo sapiens
  chr1:22927884-22927940
  hypo
ccatccgcatgggccggtaccgagaccacttcgctgcgggcggatactcctctctg

SEQ ID NO: 206799 - DNA, 575 bp, Homo sapiens; identical to SEQ ID NO: 197381
  chr1:23037602-23038177
  hypo

SEQ ID NO: 206800 - DNA, 108 bp, Homo sapiens; identical to SEQ ID NO: 197382
  chr1:23038250-23038358
  hypo

SEQ ID NO: 206801 - DNA, 133 bp, Homo sapiens
  chr1:23063031-23063164
  hypo
ggagcctgggagcctcggtggggcctgcaggccgcggtctggttcccagaggccctggagggggccccttcacagcttcagcacgaggccctttgagggtgggggcagcctccgcagcgcggcatgtttgcgc

SEQ ID NO: 206802 - DNA, 33 bp, Homo sapiens
  chr1:23063499-23063532
  hypo
tgcgaatccagccatcggcgtgacgaggaatct

SEQ ID NO: 206803 - DNA, 85 bp, Homo sapiens
  chr1:23091396-23091481
  hypo
atggggtttcaccctcgccagtttgggttcctccaagcaggggctgcggttggggcagatgcacgggaggcgctcagagagggag

SEQ ID NO: 206804 - DNA, 343 bp, Homo sapiens
  chr1:23111024-23111367
  hypo
gatgaagttttcggtgcgtgactgcagcagcatccccagcgtgcctggctcctgcaaggagaccttcaacctctattactatgaggctgactttgactcggccaccaagaccttccccaactggatggagaatccatgggtgaaggtggataccattgcagccgacgagagcttctcccaggtggacctgggtggccgcgtcatgaaaatcaacaccgaggtgcggagcttcggacctgtgtcccgcagcggcttctacctggccttccaggactatggcggctgcatgtccctcatcgccgtgcgtgtcttctaccgcaagtgcccccgcatcatccagaat

SEQ ID NO: 206805 - DNA, 322 bp, Homo sapiens
  chr1:23191506-23191828
  hypo
cggggtgcctgcacccgctgcggggacaatgtacagtacgcaccacgccagctaggcctgaccgagccacgcatttacatcagtgacctgctggcccacacccagtacaccttcgagatccaggctgtgaacggcgttactgaccagagccccttctcgcctcagttcgcctctgtgaacatcaccaccaaccaggcaggtaagtgcttccgacgtgggccaggggagtgccccatcgcgctgtgccagggagggtcctgcagtcctcacaaaagactccttcacatctatggagtgatttcttcttttcaaaggcttttca

SEQ ID NO: 206806 - DNA, 211 bp, Homo sapiens
  chr1:23201492-23201703
  hypo
gtctccacaagcagacgggctacaactctgcgttcctcaaactttcttagccacagaatacgcagtgccaccctagcaccagttgtcagcttttccttttttctgtcccataccactctctaagaggcccatcagaaagaatcaaaggcccactttctggaagttttatttgcagaaattcggttgtgagaattatcgtcaggtcatccag

SEQ ID NO: 206807 - DNA, 181 bp, Homo sapiens; identical to SEQ ID NO: 197384
  chr1:23346189-23346370
  hypo

SEQ ID NO: 206808 - DNA, 188 bp, Homo sapiens
  chr1:23411432-23411620
  hypo
tggcatcacagactcgcacagagtatacggaaacgagggagctttattggttacatattgtactgcagagccaacagagagcattcgcgccagaggatacatgcagacaggcagctccaatgatacacatgcacccaaggagccctgagccactgctttgccctggtttccagcgacaggttctggcc

SEQ ID NO: 206809 - DNA, 36 bp, Homo sapiens
  chr1:23440075-23440111
  hypo
aaagaaaatatgctcaaggccggacacggtggctca

SEQ ID NO: 206810 - DNA, 120 bp, Homo sapiens
  chr1:23567755-23567875
  hypo
aaaaaaaaaaacagttcataggaagaagacaaagaacccactagaaaaatgggcaaatgcccgggtgcggtggctcacggatcacgaggtcaggagatcgagaccacggtgaaaccccgt

SEQ ID NO: 206811 - DNA, 138 bp, Homo sapiens
  chr1:23762544-23762682
  hypo
tcagagcatggaccgtgtctgcccagctgatccctggggccctcccacaggagatacagctctctttttctccagaaccatgtcctgaagacgtctagatctgaggctcccctctccccaggctttttttttagacag

SEQ ID NO: 206812 - DNA, 197 bp, Homo sapiens; identical to SEQ ID NO: 197388
  chr1:23857853-23858050
  hypo

SEQ ID NO: 206813 - DNA, 101 bp, Homo sapiens
  chr1:23954418-23954519
  hypo
ttccgcaatctcaccgtctccaccgttactacctgtgtccgaggcaccactgtttcttgcctggagttgtgtaagagcctctcagtgacgttccctgcttt

SEQ ID NO: 206814 - DNA, 143 bp, Homo sapiens
  chr1:23963133-23963276
  hypo
aggcctggctggagtgggcacgaggtgtggctgaaaccaggggtgcttagcggggatagacggagctgcagcctcgcccttgagtgggttgtaccagtcatgtcactgagcactgacgctgcgctctgcatcctggagaaaat

SEQ ID NO: 206815 - DNA, 105 bp, Homo sapiens
  chr1:24110632-24110737
  hypo
gcttctcattatgccgctcataaatgtttactattattattattctgtggtgcatcattcttagaaacactttgaagtaaacatttgctttcttttttttttttt

SEQ ID NO: 206816 - DNA, 45 bp, Homo sapiens
  chr1:24111037-24111082
  hypo
aaattacatgcattttgccccagctaatatcgaggcctcttctgt

SEQ ID NO: 206817 - DNA, 380 bp, Homo sapiens; identical to SEQ ID NO: 197392
  chr1:24126329-24126709
  hypo

SEQ ID NO: 206818 - DNA, 224 bp, Homo sapiens
  chr1:24424243-24424467
  hypo
aggcccccagggaagcgggagtctccagggctgccctggtcacccaatgccaggctgaacagccttgtgcctatggcccttcctcaggtctcacgcagacccatgtccttgtctgcccagcttgggtttgctgtggcccggagtgcctgttggggttgggaggacttactgcggacgaggactttggcgaaggaggaggcctggccgtgggcgttcttcactcg

SEQ ID NO: 206819 - DNA, 45 bp, Homo sapiens
  chr1:24611879-24611924
  hypo
gtctccggagcacacgcaggctgctacatgcctaaggagatgtgg

SEQ ID NO: 206820 - DNA, 106 bp, Homo sapiens
  chr1:24611967-24612073
  hypo
gagagaggagagcctgtggtgtacagcgtggccccagcaggcacctgtgctgatgggaaaacacacagacaggccaacgaatacacgtacgcgcacgcacgtacag

SEQ ID NO: 206821 - DNA, 32 bp, Homo sapiens
  chr1:24683006-24683038
  hypo
gcgtgagccaccgtgtccggccacatttatct

SEQ ID NO: 206822 - DNA, 142 bp, Homo sapiens
  chr1:24701524-24701666
  hypo
ggcacacaagaaagtcgtatcatttaagattgtgatcacatttgcaagcattcccttgtctcaactttcctgaactgaccagaaattaagaattctggccaactcacgaaatacatttgagagtgcgcgatgtgttcagaac

SEQ ID NO: 206823 - DNA, 88 bp, Homo sapiens
  chr1:24706236-24706324
  hypo
ttggaaataaaatccgatgggatagtgtatgcattcgctgcagggtatttagaaatgatggtgtccaatcgggcgcactgtaaggaga

SEQ ID NO: 206824 - DNA, 257 bp, Homo sapiens
  chr1:25070657-25070914
  hypo
aaaaagcggggctgcgtgtagcacctaggtgattctgatgcacactcaaatttgacaggtgagccggggggaagaaatgggtgtgggcagtggggaacaagatggacaacgacttggaagtccttagtggcctgcaggcactgagattgcagttcaagatcttgagctttgggagttgttactctccaagggctagctcagagcctgaaacacagtaaggtttcataaatatttgtgaatatgcgcccggcgcggtg

SEQ ID NO: 206825 - DNA, 39 bp, Homo sapiens
  chr1:25115718-25115757
  hypo
tagaaacaggctgggcgaggaggctcacgcctgtaatcc

SEQ ID NO: 206826 - DNA, 199 bp, Homo sapiens
  chr1:25229008-25229207
  hypo
gggcgtggcgctgtaggggaaggcagctgacatggccccgggataatgcatcctggggtctgggaagcggctctccgtgagggttggcagcgtggggaaggagcggtcaaactggcgggggtcggagaatgggttcagttccgaggtgcctggaggacagcagggaagaggtcagttccagctcgagacaaccccagga

SEQ ID NO: 206827 - DNA, 31 bp, Homo sapiens
  chr1:25230202-25230233
  hypo
tcctgagccccaacacgtacttgagagggag

SEQ ID NO: 206828 - DNA, 334 bp, Homo sapiens; identical to SEQ ID NO: 197395
  chr1:25255277-25255611
  hypo

SEQ ID NO: 206829 - DNA, 133 bp, Homo sapiens
  chr1:25396320-25396453
  hypo
tggctggcctaaactcgtctcttgaagggaagaatatcaaggaatttgggggcatagttttaaaccgccatcttcctttaggccttgctcaaatgtcaccttcccagagatgccttcccggacatgtctgttt

SEQ ID NO: 206830 - DNA, 168 bp, Homo sapiens; identical to SEQ ID NO: 197396
  chr1:25870618-25870786
  hypo

SEQ ID NO: 206831 - DNA, 158 bp, Homo sapiens
  chr1:25890394-25890552
  hypo
gaccagacccagcccggtagtgcccaggcgcaggataggggatgaacaatgtcccttttgaacctgaggctgcatccccaacaggcttggctcccagcacagctgtctcctcacaatgcttggcctcttggcctgagcgtccacggctctgcccacca

SEQ ID NO: 206832 - DNA, 124 bp, Homo sapiens
  chr1:25919183-25919307
  hypo
taaataagtttgtcctgtttaccgctctatatccagcacctagaacagcgcctggcacctaagcaggcatttggtaaaactgtgccaaatgagtgagtgcggacagcgtcctagtccttcacca

SEQ ID NO: 206833 - DNA, 117 bp, Homo sapiens
  chr1:25919337-25919454
  hypo
cagctgtgtctcccgcacgggccggcgggcgctgtgatggaggcagtgcaggatgccgtgtgagcccgaggaaggacttgcagccctgctgaggggacgaggcgaggcttcttggat

SEQ ID NO: 206834 - DNA, 214 bp, Homo sapiens
  chr1:26121478-26121692
  hypo
agccttctccccagccggggtccctccagggtgcctcatctcaggatggtgccaccagctacccaagctcaacccatggctgatgctggtctttcctcttgccgtccacttctgacccatccgcaaatcctgtctgtggctctgctacactcatatatcttgtccacgcctgcccaatccctgccatcttatgtctgggcgactgcattagcct

SEQ ID NO: 206835 - DNA, 120 bp, Homo sapiens
  chr1:26634350-26634470
  hypo
caagccatccgcccatctctgcctcccaaagtggacagcattctttatatgcaaattggaagctaaagagagctactactactgagtgccaagtaccagatggtaacatgaaatttacag

SEQ ID NO: 206836 - DNA, 841 bp, Homo sapiens; identical to SEQ ID NO: 197401
  chr1:26662518-26663359
  hypo

SEQ ID NO: 206837 - DNA, 142 bp, Homo sapiens
  chr1:26678029-26678171
  hypo
aaacagggacatttggaaagcgccataggcatcaggaaagcgacaggagagcaatgttaaaggaggcggccgatcatgagatcagatattgtcgatgacctcctaccaatcagaatttaacgtctttctcaaccagcccaac

SEQ ID NO: 206838 - DNA, 97 bp, Homo sapiens
  chr1:26807958-26808055
  hypo
cttgtagccaggactacaggcgcacacagcaccatgtccagctagttttttgtttgggcggggtttttgaggcagaatctcaactccgtcccccagg

SEQ ID NO: 206839 - DNA, 106 bp, Homo sapiens; identical to SEQ ID NO: 197405
  chr1:26855980-26856086
  hypo

SEQ ID NO: 206840 - DNA, 50 bp, Homo sapiens
  chr1:27056297-27056347
  hypo
atgaccatgcagggccgggcgcagagtgccatgggcggcctctcttatac

SEQ ID NO: 206841 - DNA, 117 bp, Homo sapiens
  chr1:27057988-27058105
  hypo
agcagccagcaccctcgacgctctcccagcaggctgcgtatcctcagccccagtctcagcagtcccagcaaactgcctattcccagcagcgcttccctccaccgcaggtaagatatc

SEQ ID NO: 206842 - DNA, 240 bp, Homo sapiens
  chr1:27189668-27189908
  hypo
gttagcccgccgcccgcctgtgtgtccccagagccatggagagagccagtctgatccagaaggccaagctggcagagcaggccgaacgctatgaggacatggcagccttcatgaaaggcgccgtggagaagggcgaggagctctcctgcgaagagcgaaacctgctctcagtagcctataagaacgtggtgggcggccagagggctgcctggagggtgctgtccagtattgagcagaaaa

SEQ ID NO: 206843 - DNA, 196 bp, Homo sapiens
  chr1:27220858-27221054
  hypo
gcagcgcttcatgccgttcccattcctcaccccggtcatcgtcctaaaaggcagggagaggtgatttgcctgagcttcctgacctcatgccccgagggagggaagctcagggcacaggaggcatgtgtggctagcctcagcgccattccttcagatttctccaagaagcagcacatatttggcccctgaccaacac

SEQ ID NO: 206844 - DNA, 125 bp, Homo sapiens; identical to SEQ ID NO: 197408
  chr1:27286497-27286622
  hypo

SEQ ID NO: 206845 - DNA, 141 bp, Homo sapiens
  chr1:27426938-27427079
  hypo
agtctccttgctccgcatcatgatgcccccatcgtcgtcctcgtcctcctcagccacctttgcaggatcccggctcaaccctaagactttgcccttcagctcttcattcaccaggtccacagactcgggtgactgcgggga

SEQ ID NO: 206846 - DNA, 79 bp, Homo sapiens
  chr1:27427840-27427919
  hypo
gcacaccccacctttcgtatatgcagggcgcttgctccccctcccttgtgcctgtgtgggcacccgtactggcccctca

SEQ ID NO: 206847 - DNA, 154 bp, Homo sapiens
  chr1:27628429-27628583
  hypo
ctccaccacctgactgtgtggccttgaagaaagcacagcctctctacctacctgcacaaagagcacgaagccctgcccagctcccctcagtgtgctggagaatgaactgggccatcggagtgtggtctgtaaacgtgaacggtgagctcatagg

SEQ ID NO: 206848 - DNA, 216 bp, Homo sapiens; identical to SEQ ID NO: 197410
  chr1:27719000-27719216
  hypo

SEQ ID NO: 206849 - DNA, 44 bp, Homo sapiens
  chr1:27798548-27798592
  hypo
aaatggaaatcagggccaggcgcggtggcttatgcctgtaatcg

SEQ ID NO: 206850 - DNA, 278 bp, Homo sapiens
  chr1:27875530-27875808
  hypo
tggtggcaggcaggggcccccggtaggcggtggggcatagccggcgctgtgggcgctgctgggtgaggcagggaggctgttgccactgccataggcgaagctgcagtccttgctgttagcgcagtcctggcctgtaaagggcttagttggggcgaatacgctttgtccggccccatagccgccgtactggggcaggtaggtgttggcaggcgggtgggtggtaggtgagcgggccatggctgagggcgggggcaccagcttggggaaggtctcggctg

SEQ ID NO: 206851 - DNA, 209 bp, Homo sapiens
  chr1:27875838-27876047
  hypo
catagcttgctgctcgtcctggtgggaaggtctggcgcgcggacaggacaggctgaaaggaggggtccgccccagccccgctgctacccactgccactgggctggccttggctccccggctagggaaggtggccaggccccgctgggcaggcagggcactggtgggtggccctgcataggtgcccgatgccttccgggactctgggcga

SEQ ID NO: 206852 - DNA, 420 bp, Homo sapiens; identical to SEQ ID NO: 197414
  chr1:27902249-27902669
  hypo

SEQ ID NO: 206853 - DNA, 95 bp, Homo sapiens; identical to SEQ ID NO: 197415
  chr1:27928761-27928856
  hypo

SEQ ID NO: 206854 - DNA, 219 bp, Homo sapiens; identical to SEQ ID NO: 197416
  chr1:27929078-27929297
  hypo

SEQ ID NO: 206855 - DNA, 128 bp, Homo sapiens
  chr1:27942073-27942201
  hypo
tgcccggcttcagcgtcttcaccgccaccttagtgctgccgttccacgtgcctgctcggaggctgtcttgtcaggaccctctcccccgagcccaggccctcgtcccggcccccgggagctccgtaccc

SEQ ID NO: 206856 - DNA, 204 bp, Homo sapiens
  chr1:27994789-27994993
  hypo
aggatcgcagaccagctcatcagcgaggcagccaccgagttggccgcgatgccggcgccggtgaagcccagcgcgggcagcccggcgactgcgagtcctggaggaacaggagcaggtgagggagcgtccgcggcagaggcccgccccgcctgcccgagatcctcgccctccagacccacctcctccgacggccatgaaggtcag

SEQ ID NO: 206857 - DNA, 33 bp, Homo sapiens
  chr1:28148833-28148866
  hypo
gaagtgattgcctccgatcgttctcccgctgag

SEQ ID NO: 206858 - DNA, 37 bp, Homo sapiens
  chr1:28364954-28364991
  hypo
aaaaaaaaaaaaaaaaaaaaaccgaacacagattgga

SEQ ID NO: 206859 - DNA, 91 bp, Homo sapiens
  chr1:28663349-28663440
  hypo
tctcactgttgtccacgctggagtgcagtggcattgtgtttttaagaaacggtgtttcgggcagggcgcgttgctcacgcctgtaatccca

SEQ ID NO: 206860 - DNA, 78 bp, Homo sapiens
  chr1:28727742-28727820
  hypo
aaaaaagttttaaaacgcattttgaggctgagatacttggctacaacagggatatatgacctgctttacttttttttt

SEQ ID NO: 206861 - DNA, 52 bp, Homo sapiens
  chr1:28853770-28853822
  hypo
agacagtgtctgtctctttcgcccaggctaaagtacagtggcacaatctcag

SEQ ID NO: 206862 - DNA, 43 bp, Homo sapiens
  chr1:28854229-28854272
  hypo
taaatacatgtggccaggcacgatggctcacgcctgtaatccc

SEQ ID NO: 206863 - DNA, 323 bp, Homo sapiens
  chr1:28857207-28857530
  hypo
gcgccattggctgcccggggctgcgggttggggggccgcctttggcccacagagagccccgggcgcgcacctcccgcaaatgccgctgtccgctcttcctcccgcccctcctgcctctccactggatggtggagggaagagtccgtttctgcagtggatttgcccgggagctgaacttattcactggcggacggcttgggcatggaggagggcttggatggagactggggattgttctctgacccacgtagtctcccttgctttcggtgcagattctgctattataattagctttctgcggggcaaggtggctcacgcctgtc

SEQ ID NO: 206864 - DNA, 260 bp, Homo sapiens; identical to SEQ ID NO: 197424
  chr1:28879731-28879991
  hypo

SEQ ID NO: 206865 - DNA, 34 bp, Homo sapiens
  chr1:28891701-28891735
  hypo
gtgttccacttcaggctgggcgtggtggctcatg

SEQ ID NO: 206866 - DNA, 35 bp, Homo sapiens
  chr1:29074338-29074373
  hypo
taagaactgctggcactggccgggcgcggtggctc

SEQ ID NO: 206867 - DNA, 46 bp, Homo sapiens
  chr1:29116013-29116059
  hypo
catgaccatcaagaccgtgtggtctggccgacgcctgacacctctc

SEQ ID NO: 206868 - DNA, 66 bp, Homo sapiens
  chr1:29422743-29422809
  hypo
gggtcccaagcattcggtagttcctagtaaaagccagatgaccacctcgtcggagtctctgcaaag

SEQ ID NO: 206869 - DNA, 31 bp, Homo sapiens
  chr1:29513701-29513732
  hypo
gcacacacaggttaacgcaagagcttttctc

SEQ ID NO: 206870 - DNA, 54 bp, Homo sapiens
  chr1:29605969-29606023
  hypo
cagctaccagagcatcgagtcatcagacccggcagtgaacgtgccaggcccacg

SEQ ID NO: 206871 - DNA, 140 bp, Homo sapiens; identical to SEQ ID NO: 197428
  chr1:31192212-31192352
  hypo

SEQ ID NO: 206872 - DNA, 157 bp, Homo sapiens
  chr1:31194412-31194569
  hypo
agaactcctgcttcacggtgctggcatagttgaccatgcccacccgggtggcattgggccccacgtccagcgactcgatgacctgggacaggaataccttcactttctcaaattcaacaggccgaacgctgcgagagctgtcgacaacaaacaccag

SEQ ID NO: 206873 - DNA, 34 bp, Homo sapiens
  chr1:31239979-31240013
  hypo
gattacaggcatgagccaccgggcctagccttct

SEQ ID NO: 206874 - DNA, 87 bp, Homo sapiens
  chr1:31240595-31240682
  hypo
gcctgtaaagtaagtcgcaataatccctggatttgcttatgggatttttcacctttttttttttttctccttttttgaaacagagtc

SEQ ID NO: 206875 - DNA, 88 bp, Homo sapiens
  chr1:31260793-31260881
  hypo
cctttccccagagcacgggactcctgtgtccatgctcacttccaggagttcacgcagctgagtgacggcatctcgaaatccacaggcc

SEQ ID NO: 206876 - DNA, 202 bp, Homo sapiens
  chr1:31347131-31347333
  hypo
cccaagcctcacctacgagcacctccttccgctccaggatactcttctgaggcagctgagcagctgagctgcccgagtcgatggcattgtccaggaggccagggcccgggcgggcacccttgggcagtgtcccaggtggagatgatgccttggccgcagcccctcccacagctaccacctcattggctgtgtctggttgtgt

SEQ ID NO: 206877 - DNA, 64 bp, Homo sapiens
  chr1:31478716-31478780
  hypo
gacaggaatcgcccggggatgagctcaacacatactccaccatgctaacgcctagtcccccact

SEQ ID NO: 206878 - DNA, 62 bp, Homo sapiens
  chr1:31639518-31639580
  hypo
ccacccaggagaggtcgctcctccctgtagcccctgcagccaccagccgtgctgttaacagg

SEQ ID NO: 206879 - DNA, 36 bp, Homo sapiens
  chr1:31732224-31732260
  hypo
ggattacaggcatgagccaccgcgtctggcaaaacc

SEQ ID NO: 206880 - DNA, 37 bp, Homo sapiens
  chr1:31871814-31871851
  hypo
tacacatgtgagccgctgcgcccggccagattttttt

SEQ ID NO: 206881 - DNA, 196 bp, Homo sapiens
  chr1:32139297-32139493
  hypo
cccactcaagagaggcggcgtgacttgtctaaggaaagtgggagcctggattggcgtgggcctgtcctaggccacagccagtgctctctccccaggcttcctggactatgggtgcaggtggtggctggggctctgggtcagcatgccccggggtgccatctgaccccttctccacactatgcgcactttctatttg

SEQ ID NO: 206882 - DNA, 119 bp, Homo sapiens
  chr1:32221874-32221993
  hypo
atgagcaagacctcgacaaagcggaaggctagggcagcgggcgccagcaggcgcggggcctcggagggctcagccgacaggcacagctgcacgaagttcttgtcgaagtgcaggaaggt

SEQ ID NO: 206883 - DNA, 77 bp, Homo sapiens
  chr1:32407225-32407302
  hypo
ctacctcatgggctctttcacgtatcgataataacgtatgaaaacacttgagaaaggccaggcgcggtggctcacgc

SEQ ID NO: 206884 - DNA, 47 bp, Homo sapiens
  chr1:32751094-32751141
  hypo
tttcacccatcaacccgtagggatgaccaacccggaggtgattcaga

SEQ ID NO: 206885 - DNA, 299 bp, Homo sapiens; identical to SEQ ID NO: 197437
  chr1:32757388-32757687
  hypo

SEQ ID NO: 206886 - DNA, 101 bp, Homo sapiens; identical to SEQ ID NO: 197438
  chr1:32852880-32852981
  hypo

SEQ ID NO: 206887 - DNA, 36 bp, Homo sapiens; identical to SEQ ID NO: 197442
  chr1:33005606-33005642
  hypo

SEQ ID NO: 206888 - DNA, 221 bp, Homo sapiens
  chr1:33169644-33169865
  hypo
tatacccttgtaaggtacgcacgagaaaaagccaggttttgaggctgctggtcattttctgacttacccccgaactattccaggggaggaggctggcgaagcctcagctgctgggcatttgacatctgctgcccgccagaggagagctaaggcagcaagggcaggcctgccagaggctctgtttgctgtggtaccaagcaacaggcggcaagggtggcatt

SEQ ID NO: 206889 - DNA, 283 bp, Homo sapiens; identical to SEQ ID NO: 197444
  chr1:33207587-33207870
  hypo

SEQ ID NO: 206890 - DNA, 480 bp, Homo sapiens
  chr1:33235336-33235816
  hypo
agcggcggagcactgtgctgggactcccgcagcatgtgcagaaggagcttggtgaggcctgggttaggagggcagtggtggggtgggtggggagccttggtcatcccctctctgctgaccccacctcctccctgtcccttccaggcctgaggaatgagcgtgaggcaccaggcacgccccgggctcctggtgcacgggatgccgtacgcatccccacagtggacggccgcccccgaggcacctcagggatgggggcccgggtgtccctgcaggcgctggaggcggaggcggaggctggcgctgagacagaggccatgctgcagcgccacattgaccgtgtctaccgggatgacacctttgttggccggtccacgggtacccgggccccaccattgacccggcccatgtccctagcagtgcctggattgacaggaggggcagggcctgcagagcccctgagcccggccatgtccatctccc

SEQ ID NO: 206891 - DNA, 341 bp, Homo sapiens
  chr1:33237281-33237622
  hypo
ccctcctccagctccgccagccccagctcctgctagttccgccccagggcatgtggccaagctccctcagaaggaaccggtgggctgtagcaagggtggtgggcctcccagggaggacgtaggtgcgcccctggtcacgccctcgctcctgcagatggtgcggctgcgctccgtgggtgctccaggaggggctcccaccccagcactggggccatcggccccccagaaaccactgcgaagggccctgtcagggcgggccagcccagtgcctgccccctcctcagggctccatgctgcggtccgactcaaggcctgcagcctggccgccagtgaaggcctct

SEQ ID NO: 206892 - DNA, 120 bp, Homo sapiens
  chr1:33264186-33264306
  hypo
cagcactttgggaggctgaggtggaaagatcacttgagcccgggtgtctctccaaaaataaaaaacaaacaaacaaacaaaaagaaattagccaagtgtgatggtgcgcatctatagtcc

SEQ ID NO: 206893 - DNA, 164 bp, Homo sapiens
  chr1:33415196-33415360
  hypo
gacctgaagtgtgtttggtccgaactcgtaaagtctgggccctctgttgacgggccatatcgcatgtctgatttggatgccatatctgcttgcagtggtagcagaactcagtctggcaaccttccctctcacaagttagcttcgggcagctggcacagccatag

SEQ ID NO: 206894 - DNA, 78 bp, Homo sapiens
  chr1:33431248-33431326
  hypo
gaaaaaaatagcttacgattgaaatttatttattttttttcctgagacggttttgctctgtcacccaggttggagtgc

SEQ ID NO: 206895 - DNA, 37 bp, Homo sapiens
  chr1:33432070-33432107
  hypo
aaaaggactgcctcgaaagtcccgcacatttttgcca

SEQ ID NO: 206896 - DNA, 125 bp, Homo sapiens
  chr1:33441642-33441767
  hypo
tagatccttcataactaagactcaccttcaccctcaccagtcccaccgcctccttgcacgggagaccccatccctctggacccggggcccttccagggatagccatcacttgcatacttgcgact

SEQ ID NO: 206897 - DNA, 498 bp, Homo sapiens; identical to SEQ ID NO: 197450
  chr1:33721208-33721706
  hypo

SEQ ID NO: 206898 - DNA, 444 bp, Homo sapiens; identical to SEQ ID NO: 197451
  chr1:33896380-33896824
  hypo

SEQ ID NO: 206899 - DNA, 80 bp, Homo sapiens
  chr1:33985125-33985205
  hypo
ctgtgcacactgtgctgactgtgaactccgcctcgctggccatgatgtctgtgggctggatgttgcggtcgtacattggg

SEQ ID NO: 206900 - DNA, 224 bp, Homo sapiens; identical to SEQ ID NO: 197453
  chr1:34629913-34630137
  hypo

SEQ ID NO: 206901 - DNA, 548 bp, Homo sapiens
  chr1:35226870-35227418
  hypo
ctgcagggcctgctgagtggcgtgaacaagtactccacagtgctgagccgcatctggctgtctgtggtgttcatctttcgtgtgctggtgtacgtggtggcagcggaggaggtgtgggacgatgagcagaaggactttgtctgcaacaccaagcagcccggctgccccaacgtctgctatgacgagttcttccccgtgtcccacgtgcgcctctgggccctacagctcatcctggtcacgtgcccctcactgctcgtggtcatgcacgtggcctaccgcgaggaacgcgagcgcaagcaccacctgaaacacgggcccaatgccccgtccctgtacgacaacctgagcaagaagcggggcggactgtggtggacgtacttgctgagcctcatcttcaaggccgccgtggatgctggcttcctctatatcttccaccgcctctacaaggattatgacatgccccgcgtggtggcctgctccgtggagccttgcccccacactgtggactgttacatctcccggcccacggagaagaaggtcttcaccta

SEQ ID NO: 206902 - DNA, 61 bp, Homo sapiens; identical to SEQ ID NO: 197454
  chr1:35394790-35394851
  hypo

SEQ ID NO: 206903 - DNA, 131 bp, Homo sapiens; identical to SEQ ID NO: 197455
  chr1:35394911-35395042
  hypo

SEQ ID NO: 206904 - DNA, 44 bp, Homo sapiens
  chr1:35664856-35664900
  hypo
atatcttttcttaatctttttttttccttcgctgctttatggaa

SEQ ID NO: 206905 - DNA, 39 bp, Homo sapiens
  chr1:36056553-36056592
  hypo
cagtgagcacacacgtatgtgtgcgccactgtgtacgtg

SEQ ID NO: 206906 - DNA, 285 bp, Homo sapiens; identical to SEQ ID NO: 197458
  chr1:36173411-36173696
  hypo

SEQ ID NO: 206907 - DNA, 93 bp, Homo sapiens
  chr1:36641759-36641852
  hypo
cccccacggtgaccggcttcgcctggccttctacccccagatcgcagcctgcagctgagcgcatgggagagcagcatcgtggatcgtctgatg

SEQ ID NO: 206908 - DNA, 42 bp, Homo sapiens
  chr1:36774202-36774244
  hypo
ctccttttggattctaataccggttgagtatcgcttatccaa

SEQ ID NO: 206909 - DNA, 186 bp, Homo sapiens
  chr1:36857026-36857212
  hypo
ctctctccccacttgcgagggtatggtgacgttcccacagcgaaggccttccctctgcacctgccctctggtttctctttccagcagtcactttgtggtgtcagtcagtcctcttaactccagttgtcagaggggccggaaaattcagaagttttctctgctaggaccctccgttctccctgaagg

SEQ ID NO: 206910 - DNA, 223 bp, Homo sapiens
  chr1:36881339-36881562
  hypo
ctgtgcccggccataaacttgtttttcttaatatctgtgcaagtctagagacatgaaactcacagattgcctcatcatggagctgtcataccagagatctgcatcttgtttatttactgataggacagatacgtttgaaatcaccagcatcgctctgggataggtggagggaggaggctgcggctgcttctcggcacctcacggcccacctccaaggccctgg

SEQ ID NO: 206911 - DNA, 866 bp, Homo sapiens; identical to SEQ ID NO: 197462
  chr1:36931643-36932509
  hypo

SEQ ID NO: 206912 - DNA, 218 bp, Homo sapiens; identical to SEQ ID NO: 197463
  chr1:36933230-36933448
  hypo

SEQ ID NO: 206913 - DNA, 261 bp, Homo sapiens; identical to SEQ ID NO: 197464
  chr1:36936980-36937241
  hypo

SEQ ID NO: 206914 - DNA, 77 bp, Homo sapiens; identical to SEQ ID NO: 197465
  chr1:36937669-36937746
  hypo

SEQ ID NO: 206915 - DNA, 150 bp, Homo sapiens
  chr1:36979463-36979613
  hypo
tggtggtggcagcagcggcggtagagaagcagcaggaagaaatggaaagataatcctttacttccatcgaggagccaggacccttcctgtttctaagggtcagctttccctcggcactcagggagcgagtgtgtgcgtgtgcacacccat

SEQ ID NO: 206916 - DNA, 377 bp, Homo sapiens; identical to SEQ ID NO: 197467
  chr1:37940492-37940869
  hypo

SEQ ID NO: 206917 - DNA, 37 bp, Homo sapiens
  chr1:38294272-38294309
  hypo
ggctgggaatgttctttttgaccggggtgctggttac

SEQ ID NO: 206918 - DNA, 313 bp, Homo sapiens
  chr1:38492844-38493157
  hypo
ccccatgctgctgacggtggggcactgagcagttagagctgcacgtcctccagcagggaaggcagccaacagatgcagactcgctctgcctacctgtggaggccggtgaggccagggcctgttgggacttgaaacagtgaggcaagtgggtgtgtggtgctgggctccccgctcaagttctcccagcgtgccagttcccggagccttatgtgcagggtgttggggaagggcgggctgaatcgtgggtgggagtcttggctcaaagccccaggtgagtggaggaattgggggcggacctgaagtactgtcttga

SEQ ID NO: 206919 - DNA, 144 bp, Homo sapiens
  chr1:39174396-39174540
  hypo
cagacagaccgaccgactggggtgtttcgtgaatgtgagaggtaagcgccgcggcctgcatttccagagctgcccttcgcctggttcgtggcgccttgtgacccctgccacctgcaagtcggtaaccgcgctgtgctcctgtgc

SEQ ID NO: 206920 - DNA, 120 bp, Homo sapiens
  chr1:39345657-39345777
  hypo
ggattacaagcgtgagccaccgcgcccggctctgttaatacgatttgcaaaagcatcaaccttctaaaatatagttgtattcctgaaatagagaaactttccattgactttattatgtta

SEQ ID NO: 206921 - DNA, 31 bp, Homo sapiens
  chr1:39739272-39739303
  hypo
ctttttctttttttttgagacggagtcttgc

SEQ ID NO: 206922 - DNA, 31 bp, Homo sapiens
  chr1:39739543-39739574
  hypo
gagccaccgcgcccagccttgtttcttttta

SEQ ID NO: 206923 - DNA, 148 bp, Homo sapiens
  chr1:40771002-40771150
  hypo
aggcgtgagccaccgcgcccggcgtgatcatttatttcatgtctatttcttccattaaactataccctccatatgaagaggagactcatagttgcaagtgtttagtgaatgtttatgcaatgaataaatgaacgaacaactctgcctg

SEQ ID NO: 206924 - DNA, 212 bp, Homo sapiens
  chr1:41281553-41281765
  hypo
aggtctctctgaccccgagctgctgtccttaaggtcaccacgaaacatgaatataaataaagccacatagaaggtgacttgggccacacatagggaggcaagcatcgggagttggcagttctgaaggggggatagtggggtgcgggaatcagaggctccgtagagctttgtagcatttgtgttcctgtaggcgtggacgatgagcagagtct

SEQ ID NO: 206925 - DNA, 95 bp, Homo sapiens
  chr1:41485953-41486048
  hypo
ctgccagctccttgaggattaggtgctcctccagggccgtctgcaggcgccaggggagggaggccagggtgtccctgtggacagtcacctgcacc

SEQ ID NO: 206926 - DNA, 112 bp, Homo sapiens
  chr1:41486164-41486276
  hypo
ggggttcagatggcccacatagagagtgtgcgccgagggagcctcctcgaggtcagagtactccgtcagggactgctctgcgggtagctccggcagggactcctcaccccag

SEQ ID NO: 206927 - DNA, 475 bp, Homo sapiens; identical to SEQ ID NO: 197483
  chr1:41832018-41832493
  hypo

SEQ ID NO: 206928 - DNA, 47 bp, Homo sapiens
  chr1:41967566-41967613
  hypo
cccagccccaaaccacgggtaactagagacgccgggagcaggtggat

SEQ ID NO: 206929 - DNA, 494 bp, Homo sapiens; identical to SEQ ID NO: 197488
  chr1:41981667-41982161
  hypo

SEQ ID NO: 206930 - DNA, 35 bp, Homo sapiens
  chr1:42120784-42120819
  hypo
tctgagctgtctgaccgagccgacccttccagctt

SEQ ID NO: 206931 - DNA, 35 bp, Homo sapiens
  chr1:42802314-42802349
  hypo
aagagggaatcctgctctcccgcccaggctggagt

SEQ ID NO: 206932 - DNA, 189 bp, Homo sapiens
  chr1:43203989-43204178
  hypo
gacaaagcagaggggcgctcagctctgctctggccccccgaggccactggggctggggctgcctgccatggttgtgattgtgcaggagtgaggggcactcacctgccaggatgaagagggctcccccggcgatggcaacacggcccttggcaatggggttgctgtctcccacccgcgtacacttcatgc

SEQ ID NO: 206933 - DNA, 88 bp, Homo sapiens
  chr1:43296453-43296541
  hypo
ccggcaagttccacgtggccctactagggggcacagccgagctgctctgccctctctccctctggcccgggacggtacccaaggaggt

SEQ ID NO: 206934 - DNA, 195 bp, Homo sapiens
  chr1:43310138-43310333
  hypo
attggggcaggggggcggtggttattataaggaattggctcacgtgattatggaggcggttaaatcccaagatctgcaggataagtcagcaagatggagtcccatgagagctgatggtttagttccagtctgatggcagcaggcttgacgccaaggaagagatgatgtttaattcaagtccgaaggcaaggaaaa

SEQ ID NO: 206935 - DNA, 206 bp, Homo sapiens
  chr1:43353358-43353564
  hypo
ggccgcctgccgcagcctcccgcacacgctcctggggctctgccgcagctgctgctcgggccagcagctccttctcccggtgcgaatgttgtctgttgtcttgctgagggcggggggcccgcttctgcctcaccttgcagtcccaggagcagaagatagtgacggcgtggatgccagaggtgctgcccacccggtattagcattag

SEQ ID NO: 206936 - DNA, 31 bp, Homo sapiens; identical to SEQ ID NO: 97386
  chr1:43478271-43478302
  hypo

SEQ ID NO: 206937 - DNA, 89 bp, Homo sapiens
  chr1:43521465-43521554
  hypo
ccagcctggatctgttttctttagggggagtggggttgggagtggggtggggagcacacgcaggtacagtcacacgcatgggaggctgt

SEQ ID NO: 206938 - DNA, 83 bp, Homo sapiens
  chr1:43533472-43533555
  hypo
tcagtactggatcactacaacgccatccagaaactcccgtaaagaaccgaacatccaaatgcgagcacccagagagggtccca

SEQ ID NO: 206939 - DNA, 404 bp, Homo sapiens
  chr1:43534661-43535065
  hypo
tcactgacaacaagccggaggctctgccatgggcccgtcccagggtccccctgctcatggccttctgtctggttggttcagtgtggtggacccgaggaatgagttccgttaatctcctggaggacagatgtggggctgaaggagggagatggggtgagggtggaggcgccaggtggctggagaggggactggagggcaatgcatctgggaaatgactttccagaggtccctctgccctccccctgcagctggggacggagctggaaccccagaggccatgagggtgggctggggaaccatccaggatccagcctcaccctggcctcccaggaacaggatggggattgtcccgtgaattctatggaattaaaaaatggcaccttctcagcgggaagggagctcgg

SEQ ID NO: 206940 - DNA, 32 bp, Homo sapiens
  chr1:43702286-43702318
  hypo
aaggcaatttccagccgggcgcagtggctcac

SEQ ID NO: 206941 - DNA, 209 bp, Homo sapiens
  chr1:43738645-43738854
  hypo
cagctgatgagctcggctgtgcaggacatgaactgcatccgccaggcccaccatgtggccctgctgcgcagtggtggaggggccgacgccctcgtggtgctgctcagtggcctcgtgctgctggtcaccggcctgaccctggccgggctggccgccgcccctgcccctgctcggccgctggccgccatgctgtctgtgggcattgctct

SEQ ID NO: 206942 - DNA, 163 bp, Homo sapiens
  chr1:43754321-43754484
  hypo
acaaatgctgagatgcgggagcacggctggcttgttcagctacaacaaggcggccgcttgatggagtgcagaaagaggggtgcagatccaagggtctacaccaggtgcatatcaggagctattcctgaggggcctcaccggatctctccgggagatgggaagc

SEQ ID NO: 206943 - DNA, 151 bp, Homo sapiens
  chr1:43783572-43783723
  hypo
gaatatgccccctacgggaacctgctagattttctgcggaaaagccgggtcctagagactgacccagcttttgctcgagagcatgggacagcctctacccttagctcccggcagctgctgcgtttcgccagtgatgcggccaatggcatgc

SEQ ID NO: 206944 - DNA, 43 bp, Homo sapiens; identical to SEQ ID NO: 197492
  chr1:43803509-43803552
  hypo

SEQ ID NO: 206945 - DNA, 208 bp, Homo sapiens; identical to SEQ ID NO: 197493
  chr1:43805020-43805228
  hypo

SEQ ID NO: 206946 - DNA, 67 bp, Homo sapiens; identical to SEQ ID NO: 197494
  chr1:43814927-43814994
  hypo

SEQ ID NO: 206947 - DNA, 268 bp, Homo sapiens; identical to SEQ ID NO: 197495
  chr1:43818177-43818445
  hypo

SEQ ID NO: 206948 - DNA, 57 bp, Homo sapiens
  chr1:43842607-43842664
  hypo
tatggcaaagtggcaagagtcgtagagtatgccatgacaaaacaaagtctgaaggac

SEQ ID NO: 206949 - DNA, 287 bp, Homo sapiens; identical to SEQ ID NO: 197497
  chr1:43919241-43919528
  hypo

SEQ ID NO: 206950 - DNA, 119 bp, Homo sapiens; identical to SEQ ID NO: 391
  chr1:43919541-43919660
  hypo

SEQ ID NO: 206951 - DNA, 88 bp, Homo sapiens
  chr1:43969026-43969114
  hypo
gcaggtgagtagaaccgccccgccccccacgaccctctgatttcaggtgttgaggagctagtgtttcatgtagcggggggctgcccag

SEQ ID NO: 206952 - DNA, 189 bp, Homo sapiens
  chr1:43987296-43987485
  hypo
aaataaagagagtgccgtcgcagtgatggaaaactattttagatagggtggtcagctggtcagcaaaggcttatctgagagggtgacatttcagtggagacacgatagacccctcagatccccttccaccatttttggtgagggggtgagaggcagacgcagccccaccttcagcgtgccttgccttcc

SEQ ID NO: 206953 - DNA, 35 bp, Homo sapiens
  chr1:43991183-43991218
  hypo
caacatcaggccaggcgtggtggctcacgcctgta

SEQ ID NO: 206954 - DNA, 212 bp, Homo sapiens
  chr1:44029987-44030199
  hypo
tggcttctgtggagcggctgaagggcagggggagccagcagccctgccacctacgaggttccttcatgtgtctcgtccctgcatgtgtctccaggcgcacgtgttttggcataggtgtgtctggctgtgcatgtctccacatgtgtgtttgcgtgtctctgtgtgcaccgcctctggatctgcttgcatgcgcctgtttccacaggtgctag

SEQ ID NO: 206955 - DNA, 102 bp, Homo sapiens
  chr1:44044918-44045020
  hypo
gtgtgtgtgcacacacgggcacacttatctgtgtgtaaatgcatgcatacctggcctggctttccttcagtacatcctcctgcctgccgcagcatggtgggc

SEQ ID NO: 206956 - DNA, 93 bp, Homo sapiens
  chr1:44063579-44063672
  hypo
gtggatggcatcagccgtgagcactccagctgggacctggtgggcctggagaagtggacggagtaccgggtgtgggtgcgggcacacacagac

SEQ ID NO: 206957 - DNA, 148 bp, Homo sapiens
  chr1:44069555-44069703
  hypo
cgaggacctgcccagcggcttcccccaaaacctgcatgtgacaggactgaccacgtctaccacagaactggcctgggacccgccagtgctggcggagaggaacgggcgcatcatcagctacaccgtggtgttccgagacatcaacagc

SEQ ID NO: 206958 - DNA, 324 bp, Homo sapiens
  chr1:44084831-44085155
  hypo
ctgcaaccccctagacgcagggcccatggtggtgcactgcaggtgagagggtacagtgccacccagaggggtgggtggggtgggaggtgggggcgcctgtgcctcaagctgagcccgtgtcctgcagcgcgggcgtgggccgcaccggctgcttcatcgtgattgatgccatgttggagcggatgaagcacgagaagacggtggacatctatggccacgtgacctgcatgcgatcacagaggaactacatggtgcagacggaggaccagtacgtgttcatccatgaggcgctgctggaggctgccacgtgcggccacacagagg

SEQ ID NO: 206959 - DNA, 189 bp, Homo sapiens
  chr1:44132657-44132846
  hypo
ttcccttatggttaccatgccggctttaaccatggttttaactgtgcggagtctaccaattttgctacccgtcggtggattgagtacggcaagcaagctgtgctggtaagtctgcttgatttctttctataacaccatgacaaaaatgagcaaattctggttagatacgttggctggtgattagagtat

SEQ ID NO: 206960 - DNA, 257 bp, Homo sapiens
  chr1:44170222-44170479
  hypo
gccatttctgggcacgtggcagcagtcgctgatctcccagctgaggggctgagcactggaatgctgtggctgcactggccccagtccatagaggggtcaactatgctggctggactggctgccttgttcctggcctaggacttagcttcataactatcacctgcaccgactaggctgaggtgctggtacttgccccaacccctacttttgtatttatatgtgtgtgtgtgtgtgcgtgcgtgcgtgcgtgcgtgtat

SEQ ID NO: 206961 - DNA, 74 bp, Homo sapiens
  chr1:44351017-44351091
  hypo
ttccagtgcaacttccgtctcctccttccccgggtccttctcacgcactcacacacaccctgctgaaacctgat

SEQ ID NO: 206962 - DNA, 120 bp, Homo sapiens; identical to SEQ ID NO: 197500
  chr1:44444589-44444709
  hypo

SEQ ID NO: 206963 - DNA, 206 bp, Homo sapiens
  chr1:44463253-44463459
  hypo
ctgcccacaatggggatctgcgccttgtccgggtgcagtggctggacctcgaagccgtcctcaggagagggggctatggtgggggcgtagcgccctgtccggtgctccaggagggcagggccccagtctctgcttggctttgtggcatttttcaaacgctgcatgaggtaggcatggggcacaggggcagggcacgtcaggaggga

SEQ ID NO: 206964 - DNA, 131 bp, Homo sapiens
  chr1:44463699-44463830
  hypo
gcacggggcaggtgtgggagtgggcgtgaggccgacccagagcccagaccccaggccatccctctaccagcaccctttcctctctggtttcccaaactagaaaagggcatttggggcagaacagggacagc

SEQ ID NO: 206965 - DNA, 149 bp, Homo sapiens
  chr1:44718164-44718313
  hypo
gacacctcagcgcagcctgctattacatgcaaacactgatcgccctgtgaaattacattgctgggcccgcgaaatggaatcgtgtataatcagcctcctccatgcactgtcagtcccatcacaaacacggcgcccggcggcttatgggg

SEQ ID NO: 206966 - DNA, 120 bp, Homo sapiens
  chr1:44726773-44726893
  hypo
agtcctttgagaactcgacaggcctcgacttgaaaagggtgctaaaagcaatgatgtctccaagtgtgatgggagatatttgtgtctgctttacccttggctttttgctccggttcaggt

SEQ ID NO: 206967 - DNA, 355 bp, Homo sapiens
  chr1:45087574-45087929
  hypo
tgtgtgagtgcacgcgcatgaatgtgcgagcacagatgtggcaagcgtagtgggggcagcaggcagggagggacaggaacagggatattaatgtttctgaagtggatctgatttgatacgtcttgttccattgtcagcatctgtttagcagggatttgtaatactttgtggctctggatcactcatgcttagcgcaggatgtggccttgcataccaattttgttattaaacacagtcctcgcctcccccacagcccatccatcacctcccaccccagcccccgcctgctctgagccgcccaccatatttcagggcccagctcccgcctgcctgccgcgcccgatgccggagggcc

SEQ ID NO: 206968 - DNA, 99 bp, Homo sapiens
  chr1:45101746-45101845
  hypo
catgagaacaacaaccgctttgaggagtatgagtggtgtggacagaagcggatacgggccaccactctcctggaaggtggcttccgaggtacaagcagc

SEQ ID NO: 206969 - DNA, 569 bp, Homo sapiens
  chr1:45106053-45106622
  hypo
tttagttctctctgtcgcctgttgggaggggtgaggagaggtggcaaggagcaaggcaccttctgtcccccgtggcaactgatgggatttaatcgccttttggaacacaattgttaagctaggacagagggagtgcaggcagaaggagcaagtatcaatggttttaaacggcgtctgtctctctgcgtctctcctgacgtgaggcagtgaaacgcgttatcgaggaggcccggaaagtggctaagtgcgtttgacacacgccaactccctgcctccacactggataattgcattgtcaactgttcagcgaggtggcaggtgacactgcaggccgattgattgtcccgcatcgcagctccccagactgtcagctccccaatcgatggcgtttacacaagacaccgtaactgcatctgtaactaattccagtgtaaaactcgccggaagctgctgcccctgccctccgtgttggagagcacaggcccctggagggccccgagacgtttcctttctccctgggctctggttttgttgggagcagcaggtgaggaaatcgatgcctccttttt

SEQ ID NO: 206970 - DNA, 255 bp, Homo sapiens
  chr1:45111998-45112253
  hypo
gtcataaattcattccagcccgttgtggttgatcagtttatctcggccggggccgcgagtgctgctggcatgatgtatgggccgcggcgcagggcccggctgcccatgaatcaccgcagctgctccgtgtcagcgccggagcgggccgtatgggttctgcgcaaccagcttgtggtggggaggaatgacgtatggatgtttatttaataattctctcctactccagctgagcagggcgggcggggttgtaagggg

SEQ ID NO: 206971 - DNA, 203 bp, Homo sapiens
  chr1:45120345-45120548
  hypo
acccggcgtgccaggcgtgcctccaccatgcgttctatgtctctggccaggactacttcgtcagccctcgagtagaggtagagctcgggccagcgagagcccgcgtcctgtagcctgtcatagaagtgggtgtggaagagggctgtgatgggagcaagcaggacgtggaacaggacgaccaccagggcaaaggccaccagcag

SEQ ID NO: 206972 - DNA, 215 bp, Homo sapiens
  chr1:45268611-45268826
  hypo
ggccctgccctataggtacacgctgctctgcgggagccctccctttgagacggctgacctgaaggagacgtaccgctgcatcaagcaggttcactacacgctgcctgccagcctctcactgcctgcccggcagctcctggccgccatccttcgggcctcaccccgagaccgcccctctattgaccagatcctgcgccatgacttctttaccaagg

SEQ ID NO: 206973 - DNA, 83 bp, Homo sapiens
  chr1:45454356-45454439
  hypo
ttgccgtcgacagcgatgtcgaacacggtggggttaaccatggctgatcgtacagagctcctggcgtcggtggctgcatttgc

SEQ ID NO: 206974 - DNA, 120 bp, Homo sapiens
  chr1:45950719-45950839
  hypo
taattaaatcaaattaaattaaaaataaaaaataaagtctaaaagaatataaagagactattcaaagtgtttgggagagggcatggaaccaggttaataaagaacagagatggaagtaag

SEQ ID NO: 206975 - DNA, 79 bp, Homo sapiens
  chr1:46131435-46131514
  hypo
aaaaggaaagtttccaagtcttgtttatttcattacttcttttccacctgttactttcgactcttcaaggtcaaattac

SEQ ID NO: 206976 - DNA, 89 bp, Homo sapiens
  chr1:46751246-46751335
  hypo
cgccatcctccttctcgccagccacaataaaaacgaagtcatacaggtcttcagactctgcaccaggcccctgacgggtgcgagcaccc

SEQ ID NO: 206977 - DNA, 59 bp, Homo sapiens
  chr1:46752071-46752130
  hypo
gctgatcacaaagacgcctgtcagaagacacatcaatggtcccacgtagaacatgggaa

SEQ ID NO: 206978 - DNA, 243 bp, Homo sapiens
  chr1:46963445-46963688
  hypo
aattaaagccatctatatggcgcctgtggcgggagatccgccgatctgcttgcttaatgaaatataaagattcttttaaccaatgtaagcacaattcgacagcttgtgaaacgcggccgcgccgtgatggatggctctcctggctcgccaggaattgcggggcggcaccttttaaatatataattgattctgtttggagtgtgcagtggactgagcccaggcagggcccggcctggggccaag

SEQ ID NO: 206979 - DNA, 104 bp, Homo sapiens
  chr1:47035269-47035373
  hypo
agtcctccgattcccgactagaaggcaaaagcctggcccaggccacgggaggcacttcactaaagaagaaaaacctgagctccagcaagctcagtaacttcatc

SEQ ID NO: 206980 - DNA, 87 bp, Homo sapiens
  chr1:47035403-47035490
  hypo
actcagtccaggctgcacaaattgagtagcactgctctgcagctcgctgcactaaaagtggaagatattttccattacagcaagtgc

SEQ ID NO: 206981 - DNA, 230 bp, Homo sapiens
  chr1:47041013-47041243
  hypo
actggaagcaattgcggctaataacactgaatactaggtgtgtgtcctggaggcaagcagcaaataattacttgccctccctcttgcccataaatcacggggcagtatttacattgcctggagaaaatggaaacatctgtcaaatggacttggggcctaacatgggcaccgctagaccctaactgctaagcgctgcttaatgaaacggccgcgttcctggccactgtagc

SEQ ID NO: 206982 - DNA, 58 bp, Homo sapiens
  chr1:47041273-47041331
  hypo
gtctgcccgagtatttcagtgctctgccaacaaggtcgtcttgtaactcagtagggaa

SEQ ID NO: 206983 - DNA, 198 bp, Homo sapiens; identical to SEQ ID NO: 197515
  chr1:47078538-47078736
  hypo

SEQ ID NO: 206984 - DNA, 45 bp, Homo sapiens; identical to SEQ ID NO: 197516
  chr1:47078782-47078827
  hypo

SEQ ID NO: 206985 - DNA, 405 bp, Homo sapiens; identical to SEQ ID NO: 197517
  chr1:47903680-47904085
  hypo

SEQ ID NO: 206986 - DNA, 179 bp, Homo sapiens; identical to SEQ ID NO: 197521
  chr1:48190695-48190874
  hypo

SEQ ID NO: 206987 - DNA, 142 bp, Homo sapiens
  chr1:48270033-48270175
  hypo
cacggcacatgcctcggatgaaagtgtccatgtcgagttgatccgctctccttccctgggggcctgggacacaggcttcccgtgactacactcggccactgcacacacctgctcccttgtttctcggcgtcggcttggccaa

SEQ ID NO: 206988 - DNA, 469 bp, Homo sapiens
  chr1:48459792-48460261
  hypo
ctgctgggccaggtagaggtcgagcacgggcacaccacggaagcgcacgtccctctctgtgagcgagtttaccatgagcatcacccagacgggcctcttgcgctcccagttgcccgcgatggcattgaataggtagtcagcatagagccccttgccccgctgagcgggcgtcatccaggagggcatcatcaacttcacgtagtccaggtggcgcttcaagcgccagtaaagctcgtggggcagcacgtcctgcaggttttccccgtgcggcagcagctggcagctggccagggccgagatggtgtaggggtctgtaaggtccagctcaaagtagacacgggtgctagcctggaaggctgccttggagttgtccgggatgaagtcccagacgcgggtgtaggggacgtgaatagtgccaaacaggtaggccggaggatcacgccgaatcgtccacaggaaggagttcaag

SEQ ID NO: 206989 - DNA, 59 bp, Homo sapiens; identical to SEQ ID NO: 197523
  chr1:48463406-48463465
  hypo

SEQ ID NO: 206990 - DNA, 48 bp, Homo sapiens
  chr1:50919071-50919119
  hypo
agtttagtccctaacgacatacaaaagacttgccggtgtgatttattc

SEQ ID NO: 206991 - DNA, 35 bp, Homo sapiens
  chr1:51424030-51424065
  hypo
aaatggttatctgaacgttaatttgtaaaaataag

SEQ ID NO: 206992 - DNA, 309 bp, Homo sapiens
  chr1:51439564-51439873
  hypo
gttatgaaacttggaaatcccgagattgccaggagactgctacttagaggtgctaatcccgatttgaaagaccgaactggtttcgctgtcattcatgatgcggccagagcaggtttcctggacactttacagactttgctggagtttcaagctgatgttaacatcgaggataatgaagggaacctgcccttgcacttggctgccaaagaaggccacctccgggtggtggagttcctggtgaagcacacggccagcaatgtggggcatcggaaccataagggggacaccgcctgtgatttggccaggctc

SEQ ID NO: 206993 - DNA, 74 bp, Homo sapiens
  chr1:51761677-51761751
  hypo
cctggctggtctgtccatagcggcctacacggtgggagtggcctacacagtgggagcacgatgtgggacccacc

SEQ ID NO: 206994 - DNA, 210 bp, Homo sapiens
  chr1:51763389-51763599
  hypo
ctgtcctggtacacattgtctcctatctccctgctcccactcctgtcccctgcaagccatttcgcacactgacctttttaagtcagatcatgtcagttccttctggaaatctggttatattccatcacactcaggagacatctcctacaatttccttgacacctgcagcactccagccacacgacggcctcagggcggttcccaggacac

SEQ ID NO: 206995 - DNA, 44 bp, Homo sapiens
  chr1:52060513-52060557
  hypo
gcctgccaggcaccgaactgcttacccccgtctttgaactcctc

SEQ ID NO: 206996 - DNA, 203 bp, Homo sapiens; identical to SEQ ID NO: 197532
  chr1:52081941-52082144
  hypo

SEQ ID NO: 206997 - DNA, 38 bp, Homo sapiens
  chr1:52089596-52089634
  hypo
cttttttttttttgtcggagtctcgctctgtcacccag

SEQ ID NO: 206998 - DNA, 322 bp, Homo sapiens; identical to SEQ ID NO: 197534
  chr1:52194968-52195290
  hypo

SEQ ID NO: 206999 - DNA, 104 bp, Homo sapiens
  chr1:53053490-53053594
  hypo
actttccacactgtagaaggggaccagagccggttaccgctgcttgcttggctggccagcttttattcccccgccccgcccacgtcctgctgatttgtccattt

SEQ ID NO: 207000 - DNA, 79 bp, Homo sapiens
  chr1:53129044-53129123
  hypo
tggcgttcattatgcgctcctatccaccaaagcttatgtttgctttttttcttctttccgtatctttggtagtttaact

SEQ ID NO: 207001 - DNA, 168 bp, Homo sapiens
  chr1:53238154-53238322
  hypo
ctctcacgattacaccgatctgtgaaggagtaaggcccttcttggccagtttgtaaatctgctccttcacgtcgtcagatgtcaacttcaaccaagtggggaagctgcgtcgatagggtaaagccgactgggacaggcccttctcaggagcacgcatacgacccatga

SEQ ID NO: 207002 - DNA, 47 bp, Homo sapiens
  chr1:53479848-53479895
  hypo
ttacaggcgtgagccaccgcgcccggccctgatagaacattcttaac

SEQ ID NO: 207003 - DNA, 208 bp, Homo sapiens
  chr1:53905598-53905806
  hypo
aggggtaaagagtcgccatgcactgttgccttcctgagaggcctttctggagtcctcacccaactatgccggtttaggggaatggtcatctccatggcagtgacgttccacggtgcgaatgggcagagagagccagtggcttccggccttacataaccttctcacctggtaggtaggtgagtttcccccagctcacacaccactcctg

SEQ ID NO: 207004 - DNA, 75 bp, Homo sapiens
  chr1:54060385-54060460
  hypo
gcttcaggctgccctcggggaggtgggtctcgggctggaggcccaggccagagctgggttcgctgcccagaaggt

SEQ ID NO: 207005 - DNA, 160 bp, Homo sapiens
  chr1:54260083-54260243
  hypo
ctgcagcaagcagcacgtgtctggttgggtagaaagtgacacggcagtactaatggcatatagagccgtatgggatcccgaagtttatgaaatgcctttaaccattcattccctattaatcagtcattccatcagcaaacatgttataatttctcccatc

SEQ ID NO: 207006 - DNA, 266 bp, Homo sapiens
  chr1:54408679-54408945
  hypo
gaaaaatagaaatgcgactataatttttactctcagtggtgctcacaaatggaaaaaggatttaaatttctttttttttacacctcctggggcgtgaactggactcaacaaatgcacattttaagcaggaagactttggagagacaaggactttcgttcaaagtaaagattttaaatttctttcatccctgaaaacgtccaagaaaagtcggtaagagatcataatctatggaagaaggcaaagaaatctacgaaggaagccaaag

SEQ ID NO: 207007 - DNA, 210 bp, Homo sapiens
  chr1:54474564-54474774
  hypo
tcctgcccttgtgcgctaggatttgattttcatgtgaagggttatcagtgccattccagccagccttccatgctggcctgagtggcccactcagggtccgggacaggcatactcatcggaccagtcggagcagtgctgtacatggtcgcggcagagatgcctcggtatacagtcgcagtacttgaagaaggttgaaggacagcgccacca

SEQ ID NO: 207008 - DNA, 166 bp, Homo sapiens
  chr1:54602338-54602504
  hypo
gatcctgaggttgccgccgacctcctgggcggcacagctccggctgcccaggtagaccttggtccgctccagcggggccagcgcctgcgtggagatcaggatctggaagtccgtgcgggagcagctcacgttcatgggcaccactgggaatcggagggaggagctg

SEQ ID NO: 207009 - DNA, 204 bp, Homo sapiens
  chr1:54605374-54605578
  hypo
gcaaagcctccccttcgccctcagtggacccactcccacagcccagctgacctccgatgtaggccacagagaagcccctgcgggtggtgctgcggtctgtgtgcagcagaagcagaagctggttgtggcttgaggtcacgggtggtggcaggtggtgtccacaccaattccccagcaggggtgcctcctcgctggccccatcga

SEQ ID NO: 207010 - DNA, 50 bp, Homo sapiens
  chr1:54610116-54610166
  hypo
gtccctaaggccccccgttgacctttctggtagcccgcagaaaagccatg

SEQ ID NO: 207011 - DNA, 208 bp, Homo sapiens
  chr1:54725170-54725378
  hypo
agacaggcctccattcgctcttccccacccatgactgtgctgttttttagaggttggtttttagaaaaattcaaaatgtgcacagggggtgagtgtggctaaattaaaaagagagaggagctgcctaggtagggtttcccccttggccttctcctgcagagccaggctgccagccgcctgcccactggggaggaggggcgtgggccca

SEQ ID NO: 207012 - DNA, 207 bp, Homo sapiens
  chr1:54746227-54746434
  hypo
tcaaactcagctgccgacaggcttgaaagaacgagagatgttatgatcgagagtgtcatcataaaagttccttacagccctgcacgctgtacctctctaagatggcattccccagtctcaagttggcttaaatcacatgaaccgccgaggagaaggtagagacagaggaggcggcgcagagagggtggcagccgcgcccaacctggc

SEQ ID NO: 207013 - DNA, 260 bp, Homo sapiens
  chr1:54808633-54808893
  hypo
tatggatcatgtttcgtgactagcaaaacacgccagccgggacactttgagaacccggccggttttcaggaacaggattttacacatttcccaggattggcggatctgcgctcgcctccacccgcctgcgagctccatagcccggatcctgtaccagggggatacttaggacaggtggggggaagaggggaggctgtgccctaaccctctgccgcttttcatattgctactaccatttatgtattgaacacgtgatacat

SEQ ID NO: 207014 - DNA, 121 bp, Homo sapiens
  chr1:54818601-54818722
  hypo
aaaaaatgtgagccgacgccgggcccctcaacggattctgaatggcaaacccgagaactgcaggagagacaggaggcagtaggtgacgcggggaggcggcccgaccggacagcgccgtgtc

SEQ ID NO: 207015 - DNA, 94 bp, Homo sapiens
  chr1:55033218-55033312
  hypo
tgggattacaggcgtgagccactgtgcctggccttttttccctaatttttatcctgcctaccacctcccatcatctccacgaccaagtccccta

SEQ ID NO: 207016 - DNA, 155 bp, Homo sapiens
  chr1:55050846-55051001
  hypo
ctgcctgccctgcagcgctccttcccttgagttgaggtgcgctggactgagcccatttcattccttttgttgcaccggtgttctccaacctacagcgctcacagcctggtagggtggggatgggggatagacaggtgacccgactgttccccagc

SEQ ID NO: 207017 - DNA, 72 bp, Homo sapiens
  chr1:55065738-55065810
  hypo
gttatgaggattcaatgagccgttactagtagaacgccagagaaaatgtccggtaaaggtcagccattgtgg

SEQ ID NO: 207018 - DNA, 189 bp, Homo sapiens
  chr1:55066933-55067122
  hypo
cccctcagcatggaggtgggcgtgtgcgtggaggcctatcgccaggaggctgagacccaccggcgccacatcaacagtgcctttatgacctttgtggtcctggacgcagatgaccagccccagttgctgccctggattcggccccagcccggcgtaagtgggaccagcgccctgccccaccagcagctc

SEQ ID NO: 207019 - DNA, 207 bp, Homo sapiens
  chr1:55067377-55067584
  hypo
tcagatgtgggttggaacctcgcctctactacattcaagtgatgccccctcgagctttcagtctccatttgtaaaatgggtgtatctgcagtccctacctcacaggactgtggggcgatagatgcagtactgactccatgcctggctgcgccctgggagcggtcaggaggatggtgaaagcaacgcaaggggcacgggaagacagtc

SEQ ID NO: 207020 - DNA, 236 bp, Homo sapiens; identical to SEQ ID NO: 197543
  chr1:55352448-55352684
  hypo

SEQ ID NO: 207021 - DNA, 451 bp, Homo sapiens; identical to SEQ ID NO: 197545
  chr1:55462222-55462673
  hypo

SEQ ID NO: 207022 - DNA, 198 bp, Homo sapiens
  chr1:55517831-55518029
  hypo
tgaatatatttaaggcgctttcaccagtgcctgggatgtgctctgtagtttctgtgtgttaactataaggttgactttatgctcattccctcctctcccacaaatgtcgccttggaaagacggaggcagcctggtggaggtgtatctcctagacaccagcatacagagtgaccaccgggaaatcgagggcagggtcat

SEQ ID NO: 207023 - DNA, 183 bp, Homo sapiens
  chr1:55620060-55620243
  hypo
caaagcgagcttcccggcctattcgtccaatcaggctcaaaagcttctgtcttactctatcactctcagtctcccagctctgtagaacggaaaagacacaggaattgcttcacgatcaaactggcaaaatatgcaaaaattttaaacttgagctaaaaacattaacaacgtaagaaaagtaca

SEQ ID NO: 207024 - DNA, 360 bp, Homo sapiens; identical to SEQ ID NO: 197547
  chr1:57044295-57044655
  hypo

SEQ ID NO: 207025 - DNA, 207 bp, Homo sapiens; identical to SEQ ID NO: 197548
  chr1:57044835-57045042
  hypo

SEQ ID NO: 207026 - DNA, 121 bp, Homo sapiens; identical to SEQ ID NO: 197553
  chr1:59369443-59369564
  hypo

SEQ ID NO: 207027 - DNA, 190 bp, Homo sapiens; identical to SEQ ID NO: 197554
  chr1:59762030-59762220
  hypo

SEQ ID NO: 207028 - DNA, 204 bp, Homo sapiens
  chr1:60220992-60221196
  hypo
cgatatgccagatgccgagtttggcagtgaaaataattataacaattcctgctttaaggcgctcacagtctagttggggaggctgatctgttaacaaaaaaatatggtgccatgtcataaacgctatgatagacggaagcagaagttgctgttggagcacataactcaatataggtgggaggcaggcagcggggatgagtcaga

SEQ ID NO: 207029 - DNA, 245 bp, Homo sapiens; identical to SEQ ID NO: 197555
  chr1:60280812-60281057
  hypo

SEQ ID NO: 207030 - DNA, 76 bp, Homo sapiens
  chr1:61445392-61445468
  hypo
caaagcagggatgttcggctatcaacatcaaaaatagtgaaacgaaccgagctgctaaacttaatttttttttttt

SEQ ID NO: 207031 - DNA, 178 bp, Homo sapiens; identical to SEQ ID NO: 197557
  chr1:61508954-61509132
  hypo

SEQ ID NO: 207032 - DNA, 40 bp, Homo sapiens; identical to SEQ ID NO: 197558
  chr1:61516034-61516074
  hypo

SEQ ID NO: 207033 - DNA, 36 bp, Homo sapiens
  chr1:61541526-61541562
  hypo
ttttttttgagacagagtctcgctctgtcaccaggc

SEQ ID NO: 207034 - DNA, 359 bp, Homo sapiens; identical to SEQ ID NO: 197560
  chr1:61547845-61548204
  hypo

SEQ ID NO: 207035 - DNA, 621 bp, Homo sapiens; identical to SEQ ID NO: 197561
  chr1:61548587-61549208
  hypo

SEQ ID NO: 207036 - DNA, 177 bp, Homo sapiens; identical to SEQ ID NO: 197562
  chr1:61549310-61549487
  hypo

SEQ ID NO: 207037 - DNA, 252 bp, Homo sapiens
  chr1:61601535-61601787
  hypo
ctggacatatccatagagcacgcattttaaatctgaaagaatatatgtagtctcccctaccccagctttttttaagtagcaagggctattgaaaaaaatcagaaccctccgcttacgctcgcatacatgtagcttaaaatatatgttgcttattgaaagcattgtttaagttgaactcacgagatatactacatcatgtaatatgtctgcatttgtccatgcattcttttcggaaacctgatcttacttatg

SEQ ID NO: 207038 - DNA, 416 bp, Homo sapiens
  chr1:61913159-61913575
  hypo
aagccgcgaaaccccgtcgccactgcattttccgcagcagagccatccactgcactgtctgggctccacccagaaaatccggcagtgccatcatgaccaaatagataggaactctggacaatttcatcgggtcattgtccccttaatctccacgctgcacctcagatctcaagcagcttccgtggcgcaggctcaatttaatggatagaatctatttttcatgaaaaagcaggaaataagctgtctctttcataaaaagatttacaaaatgtaatcattgttgaaatattccctttgaactgccgtgtccacgggggtctccggctcccagagtcgtgcttcattagaaccccgtcataagcggctccagaagggcaggtacgctggtggtgcccggctttgatgtcttgaatgaa

SEQ ID NO: 207039 - DNA, 117 bp, Homo sapiens
  chr1:62119988-62120105
  hypo
ccgcagacctgggcgccgaggctggcttgcagcccgctgcttggggccttgcgtcagctccccaggaccgaggagctgcagcaactgctcttcatcaacaacgcgggctctcctggg

SEQ ID NO: 207040 - DNA, 420 bp, Homo sapiens; identical to SEQ ID NO: 197564
  chr1:62207842-62208262
  hypo

SEQ ID NO: 207041 - DNA, 519 bp, Homo sapiens; identical to SEQ ID NO: 510
  chr1:62208291-62208810
  hypo

SEQ ID NO: 207042 - DNA, 58 bp, Homo sapiens
  chr1:62729380-62729438
  hypo
atcaggacacctgcgtgtgtttaataggcatagctggaaaatcgcaacatcttactaa

SEQ ID NO: 207043 - DNA, 202 bp, Homo sapiens
  chr1:63832612-63832814
  hypo
acagccgtccatgcgtgattggacagaagcctagactgagatggaaatagtggaactggaaaggaagggatcaatgcaaaaggaaaagtgtgcaggtcttactaacttactagataggtatttttggcaagtttgggaccaggtgattcaagctgcccgctggggcacgtgtagtggctactcgagggcagggctgtccttt

SEQ ID NO: 207044 - DNA, 130 bp, Homo sapiens
  chr1:64383872-64384002
  hypo
tgttgtactttctgccaaagcgtccctccctgagtcagaatagtggaaggctgactatattccacccagcacgacgcactgaatgcttggtatgagcagcacatcatacgacaggaatctcacaacaaag

SEQ ID NO: 207045 - DNA, 419 bp, Homo sapiens; identical to SEQ ID NO: 35809
  chr1:65210939-65211358
  hypo

SEQ ID NO: 207046 - DNA, 39 bp, Homo sapiens; identical to SEQ ID NO: 197579
  chr1:65720329-65720368
  hypo

SEQ ID NO: 207047 - DNA, 230 bp, Homo sapiens; identical to SEQ ID NO: 197582
  chr1:66258847-66259077
  hypo

SEQ ID NO: 207048 - DNA, 45 bp, Homo sapiens
  chr1:70661586-70661631
  hypo
gggagtacaggcgtgagccaccacgccaggacctatacttactac

SEQ ID NO: 207049 - DNA, 48 bp, Homo sapiens
  chr1:70710406-70710454
  hypo
tctaggagtcggcgacgatccaaaagcccaaggcggagaagatctcat

SEQ ID NO: 207050 - DNA, 36 bp, Homo sapiens
  chr1:71555024-71555060
  hypo
ttttttttttttttttgagacggagtctggctggag

SEQ ID NO: 207051 - DNA, 34 bp, Homo sapiens
  chr1:72383170-72383204
  hypo
tgcaaatgtaaagagtaagtcggacgggtgcggt

SEQ ID NO: 207052 - DNA, 41 bp, Homo sapiens
  chr1:73222393-73222434
  hypo
taaaaatttgacttcaaggccgggtgcggtggttcacgcct

SEQ ID NO: 207053 - DNA, 162 bp, Homo sapiens
  chr1:78254759-78254921
  hypo
aatttctttcagcaacgtgtatatatatatatttttaaattgtagaagtctttcacatctttggttaattcctaagtattgtattcttttggataataatctaaatggaattgtggggggcggttgcttttttttttttttttttttctttgagacgaggtc

SEQ ID NO: 207054 - DNA, 90 bp, Homo sapiens
  chr1:78458353-78458443
  hypo
caggttgagaatcagcgtataagttttattttaccatcagacaagcaaaaacaggttgacctttattctttttttttgagacagagtctc

SEQ ID NO: 207055 - DNA, 80 bp, Homo sapiens
  chr1:78463740-78463820
  hypo
gagccaccgcaccggcctctgtttgactatctttaaagctcttaaaacgatctcatttcgttattaactttttattgttt

SEQ ID NO: 207056 - DNA, 129 bp, Homo sapiens
  chr1:83243221-83243350
  hypo
agacagtgagatggcgattgactagacagcgagagatggaaagagagagagacagcaatcgactaggcagtgagagatggtggctgcaacagtaaggagctgctaacactgcagcgttgtaacactagc

SEQ ID NO: 207057 - DNA, 809 bp, Homo sapiens; identical to SEQ ID NO: 197610
  chr1:84543409-84544218
  hypo

SEQ ID NO: 207058 - DNA, 358 bp, Homo sapiens; identical to SEQ ID NO: 197613
  chr1:85462924-85463282
  hypo

SEQ ID NO: 207059 - DNA, 218 bp, Homo sapiens; identical to SEQ ID NO: 197616
  chr1:85666945-85667163
  hypo

SEQ ID NO: 207060 - DNA, 196 bp, Homo sapiens
  chr1:85743316-85743512
  hypo
tttatagggggagactgatgaagagacgactatccccagaccgtattttaactactatggcgctgtgtaagaagcaacctgagaagtgtggatgaaaagctacaggtagagccctgggcccaagacggtggcttggacaacatgctaaataaactataaactagatggtatttgaagctacgagagtagataaaaa

SEQ ID NO: 207061 - DNA, 1168 bp, Homo sapiens; identical to SEQ ID NO: 197618
  chr1:85929935-85931103
  hypo

SEQ ID NO: 207062 - DNA, 127 bp, Homo sapiens; identical to SEQ ID NO: 197623
  chr1:87793799-87793926
  hypo

SEQ ID NO: 207063 - DNA, 84 bp, Homo sapiens
  chr1:89148474-89148558
  hypo
atcctttctgtaactccaaagcctaggaaaccatctggcttttagttaccagtaaaggtaatcatatcccggcctttccaagtg

SEQ ID NO: 207064 - DNA, 805 bp, Homo sapiens; identical to SEQ ID NO: 197625
  chr1:90098532-90099337
  hypo

SEQ ID NO: 207065 - DNA, 439 bp, Homo sapiens; identical to SEQ ID NO: 197628
  chr1:90308853-90309292
  hypo

SEQ ID NO: 207066 - DNA, 198 bp, Homo sapiens
  chr1:90448905-90449103
  hypo
ctgcagtcagtttcccgtattaacatcttacattagtatagtccagttgttacaattaatgaatgagtactgatgttattaataactgaagttcataacttatgcagttttttttattttctccctcatgtctttcttctagaatctcatcgcatccaggttatcacatttcatttcgttgccgcgtcttcttaggct

SEQ ID NO: 207067 - DNA, 112 bp, Homo sapiens; identical to SEQ ID NO: 197633
  chr1:91184082-91184194
  hypo

SEQ ID NO: 207068 - DNA, 328 bp, Homo sapiens; identical to SEQ ID NO: 197643
  chr1:93250604-93250932
  hypo

SEQ ID NO: 207069 - DNA, 1055 bp, Homo sapiens; identical to SEQ ID NO: 197645
  chr1:93913410-93914465
  hypo

SEQ ID NO: 207070 - DNA, 285 bp, Homo sapiens
  chr1:94048132-94048417
  hypo
agttccggggacctggcgcctcattctgcttggctgtgagcagttctgtgtggcttccctgggcacatgagggtagctttgctcccctgccgcagcctgtggcaaacgctgggttcagttcacagtagttggcctctgagttgagccaggcagagggagacgagggaaccttgaggaacggcaccttgcagggcttaggcgggggcttagggcacagttgactgtctgatcccctcagcgcctccccagccctggcgtctgaggagaccctccgaaccactgctg

SEQ ID NO: 207071 - DNA, 66 bp, Homo sapiens
  chr1:94354603-94354669
  hypo
cttttcacaatgaccgaataccgcagtagccacagcggcacccactcgtgcgcttgaatgtcagga

SEQ ID NO: 207072 - DNA, 278 bp, Homo sapiens
  chr1:94495948-94496226
  hypo
tagtcttcttaggacaggggcgcgtaggcacttacggaagccacccttccttcaggcagcggttgccaaagcctggcttattcaggaggacgtctgcaagtaccgtgaactgctcactgcctggttcatccatgctagacagagtgagacatgtgactgggacagagcaggcgcgtgccaacatcatgcaactcagagcctttactggatagctgctgtgtgccaggtatgtattggaggcaccgaatgctgccttgggatggcgctagctctcctgg

SEQ ID NO: 207073 - DNA, 43 bp, Homo sapiens
  chr1:94507308-94507351
  hypo
cataaagaacacacacgtgcatactctcactaactggagatgt

SEQ ID NO: 207074 - DNA, 102 bp, Homo sapiens
  chr1:94507711-94507813
  hypo
ggatgacaaaccctcagagaaaggcacggggcaacgctgtgtgagtagagcaagggggaaagctctggcttgaccacggggttgaaccgtgctgttacctct

SEQ ID NO: 207075 - DNA, 102 bp, Homo sapiens
  chr1:94546400-94546502
  hypo
tccttaatccagctgcgaaaaacaaaaaacaaaacctactgccatctacttagggactaggagaatactaggatgagccttaaagaaaatcacagagtggcc

SEQ ID NO: 207076 - DNA, 514 bp, Homo sapiens; identical to SEQ ID NO: 197649
  chr1:94702421-94702935
  hypo

SEQ ID NO: 207077 - DNA, 88 bp, Homo sapiens; identical to SEQ ID NO: 197650
  chr1:94702990-94703078
  hypo

SEQ ID NO: 207078 - DNA, 221 bp, Homo sapiens; identical to SEQ ID NO: 197651
  chr1:94703103-94703324
  hypo

SEQ ID NO: 207079 - DNA, 171 bp, Homo sapiens; identical to SEQ ID NO: 197652
  chr1:94703357-94703528
  hypo

SEQ ID NO: 207080 - DNA, 765 bp, Homo sapiens; identical to SEQ ID NO: 197655
  chr1:95006902-95007667
  hypo

SEQ ID NO: 207081 - DNA, 345 bp, Homo sapiens; identical to SEQ ID NO: 197658
  chr1:95391395-95391740
  hypo

SEQ ID NO: 207082 - DNA, 257 bp, Homo sapiens; identical to SEQ ID NO: 197664
  chr1:95583311-95583568
  hypo

SEQ ID NO: 207083 - DNA, 42 bp, Homo sapiens
  chr1:97185733-97185775
  hypo
ttttttttttttttttttaacgattgacaatcccataggcaa

SEQ ID NO: 207084 - DNA, 197 bp, Homo sapiens; identical to SEQ ID NO: 197666
  chr1:98386370-98386567
  hypo

SEQ ID NO: 207085 - DNA, 154 bp, Homo sapiens; identical to SEQ ID NO: 197667
  chr1:98386618-98386772
  hypo

SEQ ID NO: 207086 - DNA, 728 bp, Homo sapiens; identical to SEQ ID NO: 197669
  chr1:99126903-99127631
  hypo

SEQ ID NO: 207087 - DNA, 192 bp, Homo sapiens; identical to SEQ ID NO: 197670
  chr1:99127671-99127863
  hypo

SEQ ID NO: 207088 - DNA, 168 bp, Homo sapiens
  chr1:99667088-99667256
  hypo
gtgttcttgtgcatacgtctttgcaatatagctgactttactaaaaataataataataataataataatgtctgtgaccttaggactggataaagccaacgtgaacctcaagatggttaagccaatgaccttgacctctttaaccccaaccaacggagtacttgatcc

SEQ ID NO: 207089 - DNA, 181 bp, Homo sapiens
  chr1:100500499-100500680
  hypo
attcccttttgcttacgttagcgagtactagtttgttagccagtgttagtttctgttgatcctaaccaaaaaaccctaactgagatatcagtctcttagcgcaaagtttgtgaatacggtcatccctccatatgaggaggggagtgggaattggttgtgggacttccgtggatatccaaat

SEQ ID NO: 207090 - DNA, 83 bp, Homo sapiens
  chr1:100928310-100928393
  hypo
acagacgctggcttcgagcactatgacctcttcttcatagatggcagcacacccagtgacaacatcgtgcgaaggttcctgaa

SEQ ID NO: 207091 - DNA, 81 bp, Homo sapiens
  chr1:100928423-100928504
  hypo
cgttcactgcaaaggtgtgtgcaaggcctcggtggtggtggctgtgcttatcgaaggggcgggccaaggaagagcaaataa

SEQ ID NO: 207092 - DNA, 35 bp, Homo sapiens
  chr1:101675509-101675544
  hypo
ctgggattacagacgtgaaccatggtgcctggcct

SEQ ID NO: 207093 - DNA, 90 bp, Homo sapiens; identical to SEQ ID NO: 197675
  chr1:101702279-101702369
  hypo

SEQ ID NO: 207094 - DNA, 207 bp, Homo sapiens; identical to SEQ ID NO: 197676
  chr1:101702796-101703003
  hypo

SEQ ID NO: 207095 - DNA, 205 bp, Homo sapiens
  chr1:108735359-108735564
  hypo
gcatcctcctcaggggcgccaaacacaatgcaccttcatcggttaaagctctggaaggagagggctcatcctaacggcttcagcgcaaaggcgcgagcgcgcaggacccgggacctgcgtgggaccgcactctgggctgcgctgggagaccgcggagttcctgcctcactcacgtctgatcagaagccccggctcccactccagg

SEQ ID NO: 207096 - DNA, 118 bp, Homo sapiens; identical to SEQ ID NO: 197686
  chr1:109204221-109204339
  hypo

SEQ ID NO: 207097 - DNA, 104 bp, Homo sapiens
  chr1:109609236-109609340
  hypo
ggcatggcagtggggcgttggaaaaacggcagactctttactgatattaccataggggaaaagacatgagagacagttctccaaatactttttttgtttgtttg

SEQ ID NO: 207098 - DNA, 76 bp, Homo sapiens
  chr1:109725168-109725244
  hypo
atccaaacccatatccgtctagcttaaaatctcattccaggccgggagcggtggctcacacctgtaatcccagcac

SEQ ID NO: 207099 - DNA, 600 bp, Homo sapiens
  chr1:109795509-109796109
  hypo
gggctagccgtggcccgggtcacagccactgaccccgatgaaggcaccaatgcccagattatgtaccagattgtggagggcaacatccctgaggtctttcagctggacatcttctccggggagctgacagccctggtagacttagactacgaggaccggcctgagtacgtcctggtcatccaggccacgtcagctcctctggtgagccgggctacagtccacgtccgcctccttgaccgcaatgacaacccaccagtgctgggcaactttgagatccttttcaacaactatgtcaccaatcgctcaagcagcttccctgggggtgccattggccgagtacctgcccatgaccctgatatctcagatagtctgacttacagctttgagcggggaaatgaactcagcctggtcctgctcaatgcctccacgggtgagctgaagctaagccgcgcactggacaacaaccggcctctggaggccatcatgagcgtgctggtgtcaggtaaggaagggcccaggtggcgctggggtgggggtagctcgcggggatggtctgggcagccactggaggtagggtgcgatccaggaagcagctacaga

SEQ ID NO: 207100 - DNA, 35 bp, Homo sapiens
  chr1:109801647-109801682
  hypo
gctgccgcagccgcgagggcggctacacctgcctc

SEQ ID NO: 207101 - DNA, 113 bp, Homo sapiens
  chr1:109805486-109805599
  hypo
tcccagtccgaatgcggcagttcgtgggctgcatgcggaacctgcaggtggacagccggcacatagacatggctgacttcattgccaacaatggcaccgtgcctggtatgggg

SEQ ID NO: 207102 - DNA, 67 bp, Homo sapiens
  chr1:109812120-109812187
  hypo
ggccctggacaaacccgtcacggtgcagttccgcctgctggagacagaggagcggaccaagcccatc

SEQ ID NO: 207103 - DNA, 262 bp, Homo sapiens
  chr1:109816071-109816333
  hypo
aagtgtctgcccaccatcagcgagaagagcagcctcctgcggctccccctggagcaatgcacagggtcttcccggggctcctccgctagtgagggcagccggggaggcccccctccccgcccaccgccccggcagagcctccaggagcagctgaacggggtcatgcccatcgccatgagcatcaaggcaggcacggtggatgaggactcgtcaggctccgagtgagtgtggccgggtgggcgggacggggtgcagcccctcg

SEQ ID NO: 207104 - DNA, 474 bp, Homo sapiens; identical to SEQ ID NO: 197690
  chr1:109940219-109940693
  hypo

SEQ ID NO: 207105 - DNA, 78 bp, Homo sapiens
  chr1:110042271-110042349
  hypo
gccaggtcttgttttgaaaacctcactgtgggagattcaggcatcctccctaagccagctggccgctgtgctaaagcc

SEQ ID NO: 207106 - DNA, 206 bp, Homo sapiens; identical to SEQ ID NO: 197691
  chr1:110052079-110052285
  hypo

SEQ ID NO: 207107 - DNA, 170 bp, Homo sapiens
  chr1:110085339-110085509
  hypo
aggccattccgaaagcggagtgttgagtgggtcaggctcctgcacctctcacgtctcctgcttcttagcagtcaccaaggcagaccctgcagctacctccggccagaaaggggatgagcttctgatccttcagctgcctggcctggcgctctgtacgcagacaaacctgc

SEQ ID NO: 207108 - DNA, 44 bp, Homo sapiens
  chr1:110085848-110085892
  hypo
aagacgcctgccctccgaaaatttgtcttcgtcttccacctctg

SEQ ID NO: 207109 - DNA, 102 bp, Homo sapiens
  chr1:110167962-110168064
  hypo
gcccgatccctgccgggccccgccccctgcctcaagcacttcccgctcgacctgcgcacgtctatggatggcaaatgcaaggagatcgccgaggtatcacct

SEQ ID NO: 207110 - DNA, 270 bp, Homo sapiens
  chr1:110170706-110170976
  hypo
ggacacccacatccatgcctcgtcctgcatgaaccagaagcatctgctgcgcttcatcaagcgggcaatgaagcggcacctggaggagatcgtgcacgtggagcagggccgtgaacagacgctgcgggaggtctttgagagcatgaatctcacggcctacgacctgagtgtggacacgctggatgtgcatgcggtctgtgccagtggcgtgggctgtgggactgagtcagtcaggggaccaggagtcacgggtgacctgagccttcccat

SEQ ID NO: 207111 - DNA, 37 bp, Homo sapiens
  chr1:110338324-110338361
  hypo
tacaggcatgagccacagtgcccggcctggaaacagg

SEQ ID NO: 207112 - DNA, 147 bp, Homo sapiens; identical to SEQ ID NO: 197694
  chr1:110453160-110453307
  hypo

SEQ ID NO: 207113 - DNA, 421 bp, Homo sapiens; identical to SEQ ID NO: 197695
  chr1:110453531-110453952
  hypo

SEQ ID NO: 207114 - DNA, 384 bp, Homo sapiens; identical to SEQ ID NO: 197697
  chr1:110753510-110753894
  hypo

SEQ ID NO: 207115 - DNA, 46 bp, Homo sapiens; identical to SEQ ID NO: 197698
  chr1:110753957-110754003
  hypo

SEQ ID NO: 207116 - DNA, 33 bp, Homo sapiens
  chr1:110947365-110947398
  hypo
ataaccttaaaatatcgtgattaggccgggtgt

SEQ ID NO: 207117 - DNA, 120 bp, Homo sapiens
  chr1:110947698-110947818
  hypo
gcctcagggccagacaaaaatcctagcttaacgacttactagctgcatgacctcaggcaagttatttaacctctgtgtctcagtttctttttttattttttgagacagagtctcgctctt

SEQ ID NO: 207118 - DNA, 151 bp, Homo sapiens
  chr1:111022638-111022789
  hypo
agcacccttccaccgtggaacagggcctatgtccctaggggtgcatgtgccttgggcctgccttctctcttagactgtgctctgtaggagtggagggcacacctgctctgtgctctaaaccccaagctccactcacggggatgacagaatg

SEQ ID NO: 207119 - DNA, 600 bp, Homo sapiens; identical to SEQ ID NO: 197699
  chr1:111148988-111149588
  hypo

SEQ ID NO: 207120 - DNA, 98 bp, Homo sapiens
  chr1:112084792-112084890
  hypo
ataatcctttgaaggaagatcgtttagaccagcttaatgaaacagacatccttcgcgtactgacggaaacactggcggcacatattgaggccgtattt

SEQ ID NO: 207121 - DNA, 172 bp, Homo sapiens
  chr1:112317425-112317597
  hypo
ggagaaaactactcccggggcctcttggaagggctctggatgggctttatggtgggtcttgaaggaagggtccatagcaaggtgccctaatgaccggctgaggctgcgagccctgggtccttccgttctcccctcactggcacataccagagttgaccgcgtctcaggtgtt

SEQ ID NO: 207122 - DNA, 1035 bp, Homo sapiens
  chr1:112524370-112525405
  hypo
gaagagaagaaagcccagttcggaggcacagctcttcagtgtgtagcccaggatccgcaggccctgggagtggcgggaaaacttgaagatcctgaagacgcggaagacccggagcgtgacgaaggcgccggacacgtcctcgttgttggtcatgaccagaccgatgtagtagggcatgatggccaccacgtcgatgatgctcatgacgctgcggatgaagcggtagcggctgggagccgcgaagagccgcaggaggtactccacggtgaagatcatgacgcacgccgtgtccaggcagaagaaggccaccgagtagcgctccccgcacggcagctccttgctgcccgggaccgtgccgcacggcaccgtctccaccacgttggtgatgaccgagacagcgatgaagaagccagtcacgtagtagaagaccagggccagcgtgctggtgtgggggttctcgaaggcccgccacatggtctggcggaagctgagcgagggcatggactcctggttgttctccgagtcgttgtcgtccatgagccgctcggcgttctccctcttgcggtccttgtactcctcgtagcagcagtccccgatgatctccgggaggatgccgtagaaggccagctcgtcgtcgtaggcagagatgcactcgtagcgcgggtagtgcagcttccccgtgcggtagaagttgagcacgcagcggaacacctcggggtcccggtcgaagaagtactccttggtgtcctcgttgaagaagaactccttctccgtgctgcccagcagggtgtccgggtagcgctccagcgtggtcctccaggtctggaacctccgcccactcacgttgaggacaatcagctcatcctgccgcttgttcttgtcggccggggccaggggcatggggcagttggccaccggcatccacccgatggccgcagcccgggcaaaaggcagccaggccgcaactccggccgccatggtgactccagctcttgggccggcagccgcgcggacgctaggcacaccagcttggag

SEQ ID NO: 207123 - DNA, 88 bp, Homo sapiens; identical to SEQ ID NO: 197706
  chr1:113051495-113051583
  hypo

SEQ ID NO: 207124 - DNA, 205 bp, Homo sapiens
  chr1:113244294-113244499
  hypo
cggttcgccatgtcccggccttcctcagaccgaacgggctcctgagaagacataagatgaggggtcaaaggaagctgttgactacatgaacctctcctgcctcacccataagtgtagcagctggaacaaatgcctccttctccagccctgacccagaaagcgcccaggccccagctaccctgggcagcttcgtggccagggatcc

SEQ ID NO: 207125 - DNA, 190 bp, Homo sapiens; identical to SEQ ID NO: 197708
  chr1:113249226-113249416
  hypo

SEQ ID NO: 207126 - DNA, 155 bp, Homo sapiens
  chr1:113290951-113291106
  hypo
gctgcattatcggcgtggttgtgggccagcttaaggcggatgaagaccccatcaaggggttccaccagatgttcctattaaagaacatcaacgatggcttttgcgccaatgacatgttcaggtttgccctgcacaatttcggctgacctcctctc

SEQ ID NO: 207127 - DNA, 360 bp, Homo sapiens; identical to SEQ ID NO: 197713
  chr1:113498605-113498965
  hypo

SEQ ID NO: 207128 - DNA, 706 bp, Homo sapiens; identical to SEQ ID NO: 197714
  chr1:113932573-113933279
  hypo

SEQ ID NO: 207129 - DNA, 778 bp, Homo sapiens; identical to SEQ ID NO: 36142
  chr1:113933305-113934083
  hypo

SEQ ID NO: 207130 - DNA, 136 bp, Homo sapiens
  chr1:114522549-114522685
  hypo
aagttggaggttcccggggaatctataacttcctgtctttttaacaggttgagatccgtagcattttagtgtccgagaggataattgctaagggagcagagacctcttcacaccttcatgcgcttagacctgccta

SEQ ID NO: 207131 - DNA, 107 bp, Homo sapiens; identical to SEQ ID NO: 197718
  chr1:114697918-114698025
  hypo

SEQ ID NO: 207132 - DNA, 61 bp, Homo sapiens; identical to SEQ ID NO: 197721
  chr1:115258668-115258729
  hypo

SEQ ID NO: 207133 - DNA, 1147 bp, Homo sapiens; identical to SEQ ID NO: 197724
  chr1:116184427-116185574
  hypo

SEQ ID NO: 207134 - DNA, 51 bp, Homo sapiens
  chr1:116214053-116214104
  hypo
caggccgggagcctcagactccagacttttcatggtgcgctccttcctgct

SEQ ID NO: 207135 - DNA, 36 bp, Homo sapiens
  chr1:116224397-116224433
  hypo
gattacaggcgtgagccaccgcgcgtggccaaggcc

SEQ ID NO: 207136 - DNA, 100 bp, Homo sapiens
  chr1:116226508-116226608
  hypo
tctgtttcccaccctcgtggtattaacactattctttcactgtcctttccccaaaggccccagtaacaatgccactggccagtcccgggccatgattgct

SEQ ID NO: 207137 - DNA, 203 bp, Homo sapiens
  chr1:117076615-117076818
  hypo
ctgcatcacctgatccgtgagcttttccgtcttacttgcatttttagcagcttccacgaaatctgaaggaaccccatctgaaaaactgttatctgccatctgaatgtttttatccccttgtctggtaaaccaagtcccgtgagtaactaggctaaggcactcaggccagtcctcggggagcacacgccgcccatctggctcgc

SEQ ID NO: 207138 - DNA, 160 bp, Homo sapiens
  chr1:117077074-117077234
  hypo
ctggctgggctagcgggagatttgagctgccagcccccactcgccgccctctacgcctcctccgctgggccgccggcgaggaagccgcccgcagcgcagaacaaagcgacttgaccttcagggcagtgggcggcagggcaggggcgcaccgggtgctggg

SEQ ID NO: 207139 - DNA, 171 bp, Homo sapiens
  chr1:117131423-117131594
  hypo
cgctgtcgctgacctcggctctctggacggtgaggctgaacaggccccccgacacatgcctctcaaactggagcctggctctcaggccctcctcctcggcgtaagtaccgtattcaaaggcggagttgtgggtggtcttcaggataagcttgccatcggcatccgagggct

SEQ ID NO: 207140 - DNA, 34 bp, Homo sapiens
  chr1:117157580-117157614
  hypo
aaggcttgggtcttacgggtctcctgctgggaac

SEQ ID NO: 207141 - DNA, 338 bp, Homo sapiens; identical to SEQ ID NO: 197729
  chr1:117209809-117210147
  hypo

SEQ ID NO: 207142 - DNA, 73 bp, Homo sapiens
  chr1:117297901-117297974
  hypo
tgctgatgaatcggcgagctaagagtggggcgagaagaagaggctgactggagagcagcgggcctttcatcga

SEQ ID NO: 207143 - DNA, 35 bp, Homo sapiens
  chr1:117451189-117451224
  hypo
ctgatcgcaccactgcactccggcctgggtgacag

SEQ ID NO: 207144 - DNA, 69 bp, Homo sapiens
  chr1:117503897-117503966
  hypo
aggtccccgggtttgcggatgaccccacagagctggcatgccgggtggtggacacgaagagtggggagg

SEQ ID NO: 207145 - DNA, 151 bp, Homo sapiens
  chr1:118147372-118147523
  hypo
attgatgtcctatcgcattaaagttcctggatactcactctcctctccctcgctgggaaagacatatttgagaactcttcatagtctgacagacaggagaaccacacttatttcaggcagggttggaagagtagggcggaggagatgtaaa

SEQ ID NO: 207146 - DNA, 80 bp, Homo sapiens
  chr1:118163137-118163217
  hypo
cagtaaagccagccccgtaactttctgtaattattagaacttaattgtgtagctcagggttccccacccccctgaccacg

SEQ ID NO: 207147 - DNA, 233 bp, Homo sapiens
  chr1:118163673-118163906
  hypo
acagtaaacattattcgtcacagattttgcttgggatccataacctaggagtgctttgtaggatgatctagatagcctaggactttttaacgctgttcagaggcacttttgtcttcccctccacgagtactctgtagcgagcaatagagcgctcatccccagattggtcctgcagagcctgctgtgatcacatactcagcccgctgctttctgcctctcggccccaaccaaca

SEQ ID NO: 207148 - DNA, 228 bp, Homo sapiens
  chr1:118166362-118166590
  hypo
ccttcaaaaccacttcgctgaagaagagagaagcaagtacgactacctcatgatccttcgcagggtggtgaacgagagcaccgtgtgtctcatggggcatgaacgcaggcagactctgaacctcatctccctcctggccttgcgtgtgctggcggaacaaaacatcatccccagtgccaccaacgtcacctgttactaccagccggccccttacgtcagtgatggcaa

SEQ ID NO: 207149 - DNA, 150 bp, Homo sapiens
  chr1:118172978-118173128
  hypo
cagccttggaatgaagctcccgtcgttgccacccgggacctctagggttccagaagtacacttctaaacgagcggggattctttttctccttcactgtccgagtagtcgcctgggcgggatagtaatgcgcttggttgtaatctggggtt

SEQ ID NO: 207150 - DNA, 204 bp, Homo sapiens
  chr1:118173582-118173786
  hypo
cagaatctagggagctggagcctgtcgggaggcttggtttcataccattcctcacccagctcagagcaacgcaggctacctgttctggccatgactggatcacaggtctcccagctcagggcattttcaccacagcaggccatcccagggccaccttttacttaggaagtttccgaaaatgggaaatgtccctaagggaaaggc

SEQ ID NO: 207151 - DNA, 84 bp, Homo sapiens
  chr1:118173816-118173900
  hypo
gggtgcttccctggaaaaaaggtatccgaggctatagtgttcgagagagagagagatggagacgggcagcaccacagcaacttt

SEQ ID NO: 207152 - DNA, 170 bp, Homo sapiens
  chr1:120166012-120166182
  hypo
gggtagggcttctcgcccgtgtgcaggcgccggtgcttgagcaggtcggcgcgccagctgaagctcttgccgcagtcggcgcacaggttgggccgctcgcccgtgtgcaggcgcaggtggttggtcaggtaggtgttgcggctgaagcccttgccgcactccccgcagcg

SEQ ID NO: 207153 - DNA, 39 bp, Homo sapiens
  chr1:120166427-120166466
  hypo
ggctatccagctccccgaggtccacggccatggggtggt

SEQ ID NO: 207154 - DNA, 34 bp, Homo sapiens
  chr1:150283344-150283378
  hypo
tccagcttgggcaacggagcgtccccaaaaaaaa

SEQ ID NO: 207155 - DNA, 110 bp, Homo sapiens
  chr1:150529747-150529857
  hypo
gggtctccagctgcgtactggaaacgagtgggacactctgcatgctcagcgtcctgcgggaaaggtgagacatcacagtgcgttccccgcatctcggtccaaacccccca

SEQ ID NO: 207156 - DNA, 87 bp, Homo sapiens
  chr1:150579404-150579491
  hypo
tttgtaaaatagggccgggcgccgtggctcaaccctgtgggcataagcctttgggaggctgaggcgggcagatcacttgaggtcagg

SEQ ID NO: 207157 - DNA, 43 bp, Homo sapiens
  chr1:150581803-150581846
  hypo
gggattacaggcgtgagtcaacgtgcctggatgtaacagttct

SEQ ID NO: 207158 - DNA, 138 bp, Homo sapiens
  chr1:150633720-150633858
  hypo
aataaatgttatgtatattttaccacagtaagaatgttactcgttgatttacatatgacccagttatctactcctagctacatacccacaagaaatgaaaacatgttcaaacaaaaacttgtccgtgcgtgttcacag

SEQ ID NO: 207159 - DNA, 38 bp, Homo sapiens
  chr1:150643983-150644021
  hypo
aaaaaagaggaaagaagggccgggcgcggtggctcacg

SEQ ID NO: 207160 - DNA, 37 bp, Homo sapiens
  chr1:150941388-150941425
  hypo
cttacagctcaaagaagtatcgaacgatgaggaagag

SEQ ID NO: 207161 - DNA, 34 bp, Homo sapiens
  chr1:150941756-150941790
  hypo
acatttactgttaggccggccgtgatggctcatg

SEQ ID NO: 207162 - DNA, 37 bp, Homo sapiens
  chr1:151019715-151019752
  hypo
gtgagccaccgcgctcggccagagctctgggttttaa

SEQ ID NO: 207163 - DNA, 31 bp, Homo sapiens
  chr1:151098357-151098388
  hypo
cgtgagccaccgagcccggccaaatttgtat

SEQ ID NO: 207164 - DNA, 64 bp, Homo sapiens
  chr1:151148217-151148281
  hypo
atgtgagacacatcgacaatgtaaactatacacagttaaggggtaggacggcacagtggcagaa

SEQ ID NO: 207165 - DNA, 125 bp, Homo sapiens
  chr1:151252542-151252667
  hypo
caggtgggtattataatccccgttttactcatgagaaaacaggatctgggaggttgagcgacttgcccattgcgaccatagggcaagtggtggctccaggattcccatccagaagttctgattca

SEQ ID NO: 207166 - DNA, 47 bp, Homo sapiens
  chr1:151252761-151252808
  hypo
aaaactttgccgggcccggtgggtcacatctgtaatcccagcacttt

SEQ ID NO: 207167 - DNA, 211 bp, Homo sapiens
  chr1:151338751-151338962
  hypo
tcgttcttgtagaagcgctggatggtggagctgagtgcgcagcccacaaagccttgggcagcgtctgggttgtgcaggaagcggatctccaagggaataagcccatcttttagagacagggtctgcacaatctcatggcgctgccagtcccatacatataagtggctcccgtacagtcctggggtgggagtggggccggaggataggctca

SEQ ID NO: 207168 - DNA, 169 bp, Homo sapiens
  chr1:151339197-151339366
  hypo
cagcctccacatcagcggggttgaagccatctcgtaagacattgggagctgcccactcagtgctgatcatgacattgtgtcgaggctggtaccagaagtcatagcccaacggtgcagcacccccaggtctctcccatgtccccttcacctcgaacgtctccccatccag

SEQ ID NO: 207169 - DNA, 284 bp, Homo sapiens
  chr1:151378239-151378523
  hypo
gggccacagctcgccgggcatggggagtcaggtggtgccgcagcatgaaacgcacagcccactcataggagatcttaaaccccccttccaaagaacgtcctattttggtggccttctggaacaaggtctcctcatttacaggtagctgttgttcgcgctgggttagcacccactcagccagtttctcttctgcctcaaagctcagatatttgccctctagattctccccctgggaggcctggaaacgtcgaagccaacggcgaatacgtcgctggggatttcgg

SEQ ID NO: 207170 - DNA, 149 bp, Homo sapiens
  chr1:151481647-151481796
  hypo
gggtaaccacccaaattggtatttactacaaatatactaagtatcctaattgctaaggtgttatctaggggagtttaggcgcttccgcctttccaatatctgagtcaatttaatatcccacattaaaaaaaaaaatctccttacaaaca

SEQ ID NO: 207171 - DNA, 61 bp, Homo sapiens
  chr1:151557511-151557572
  hypo
gagcgtcagcccagcacgggaaaagaagcagcagcaccctgcctgccgaacaactgcccca

SEQ ID NO: 207172 - DNA, 104 bp, Homo sapiens
  chr1:151597623-151597727
  hypo
aaactttattgttattaatacgcgcttttgcccagtgttaaatttttggacgtaggtgctttaaaaatactggtgtaggccaggcgctgtggctgacgcctgta

SEQ ID NO: 207173 - DNA, 40 bp, Homo sapiens; identical to SEQ ID NO: 197751
  chr1:151693822-151693862
  hypo

SEQ ID NO: 207174 - DNA, 196 bp, Homo sapiens
  chr1:151699289-151699485
  hypo
gccaataaccatctgcggtccatcttttagctctgtttattgtatctccctctgccccttgaattcatggttaagcttactcaggacattgtggggctgcatatctcccaccattcgtgggccggccggcatgttcttcatctttgcctcttgcccctggcttgagatctggttcagtgaaaatgatcgttgaggc

SEQ ID NO: 207175 - DNA, 332 bp, Homo sapiens
  chr1:152733097-152733429
  hypo
ttgagattcctcccatcagacgccgctcccagagctgtggcccgcagccctcctggggcgcctcctgccctgagctgaggccacacgtagagccacgtccactcccaagcttctgtccaccacggcgtcttgaccagtgtccagagtcaccactgcagcgatgtccacctcctgctccacgtccacgtctgcgcccagaaccatgcataagtctagaaccacgcccgcgtcctctaccacgacaactttcagaaccttgtttgtatccagaaccacttccagcactacgtccaacaccgcggccagttccccttcctcgcccagggcagtgt

SEQ ID NO: 207176 - DNA, 32 bp, Homo sapiens
  chr1:153352635-153352667
  hypo
tctggtaacagggccaggtgcggtggctcacg

SEQ ID NO: 207177 - DNA, 180 bp, Homo sapiens
  chr1:153352907-153353087
  hypo
ctccgtctcggaaaaaaaaaaaaatctggtaacagaagaatgggatgatccagaatgcgtgttgcctgtatgcttcgtaattagccttaattacgtaattagccttaattctcatgatatcagtatcatgagaagagaaatcgcaatggcaatgcacgtattggcgtcatccatgaactc

SEQ ID NO: 207178 - DNA, 153 bp, Homo sapiens
  chr1:153537353-153537506
  hypo
ttctttttgcagcaacgcccacatgcacacctcctgctcctaggcctagacccccaaagaagggcccctagactgagatatccaggggagggcctcagagcaacccctgcactgagacctcacagaggaacctggagaaaaacccttcagtcg

SEQ ID NO: 207179 - DNA, 267 bp, Homo sapiens
  chr1:153540242-153540509
  hypo
cctgttctgtcctgtacaaagcgccccttttgcccttttcgtgtgtacttagagaattctgattttgactgaatcacctgtgtacttgttttctctcagcctcacccccacatggtgagctcaccggtcttactcatttctgcatgaggtaagggtctcgcccacaccaggtgccaaccagtgcttacggctaccacatggcaacaggggtcactggaggagtgcttaggagcaagggagtccttctcaccccgtgaaatcacacca

SEQ ID NO: 207180 - DNA, 420 bp, Homo sapiens; identical to SEQ ID NO: 197755
  chr1:153651023-153651443
  hypo

SEQ ID NO: 207181 - DNA, 122 bp, Homo sapiens
  chr1:153914346-153914468
  hypo
ttccaagggtaggcggtgggggcctgagacggagtagcggtaaaggaaggtgaggaaggcgcggaaggcagggaaggcaggccagcgggacagcacagcgatggcacgccggctgcgcacag

SEQ ID NO: 207182 - DNA, 176 bp, Homo sapiens; identical to SEQ ID NO: 197756
  chr1:153936615-153936791
  hypo

SEQ ID NO: 207183 - DNA, 180 bp, Homo sapiens
  chr1:153937388-153937568
  hypo
ctgggcaacaacagcgaaacttcgtctcaaaaaaaaaaattattcgtaattggtaacattaacaaggaattatgactgggggggtcaggaaacctggattctggtccaagttctacctttatagttgtcaaatatatatatttgtttatttatacacatacatatgtcatatatgattaa

SEQ ID NO: 207184 - DNA, 330 bp, Homo sapiens; identical to SEQ ID NO: 197758
  chr1:153958647-153958977
  hypo

SEQ ID NO: 207185 - DNA, 147 bp, Homo sapiens; identical to SEQ ID NO: 197759
  chr1:153963300-153963447
  hypo

SEQ ID NO: 207186 - DNA, 32 bp, Homo sapiens
  chr1:154115066-154115098
  hypo
tatctaagaaaagttcggaggccagtgcggtg

SEQ ID NO: 207187 - DNA, 57 bp, Homo sapiens
  chr1:154116696-154116753
  hypo
aaataaagttgtagtcgtattaaaggattatactttattctacgtcttacttttaaa

SEQ ID NO: 207188 - DNA, 234 bp, Homo sapiens
  chr1:154179783-154180017
  hypo
tctaagaactctggatacaacgggaacttggatggatacagtctgggcctgctgggccagatgttccgagggcggcccggcaagcagcctgtcttgcacattgcaactgactggcttaatctacggcaagagtccttcagctccgtcacagagtactctccaatgtgttatagttatccttaaagctcttcaattcaaggaagtgcttggcacgtttactcttctgactggagg

SEQ ID NO: 207189 - DNA, 31 bp, Homo sapiens
  chr1:154243765-154243796
  hypo
gaaggcaacatgtatcgtctggcagaactaa

SEQ ID NO: 207190 - DNA, 303 bp, Homo sapiens; identical to SEQ ID NO: 197760
  chr1:154297687-154297990
  hypo

SEQ ID NO: 207191 - DNA, 36 bp, Homo sapiens; identical to SEQ ID NO: 197761
  chr1:154298038-154298074
  hypo

SEQ ID NO: 207192 - DNA, 95 bp, Homo sapiens
  chr1:154343720-154343815
  hypo
aaaaaaaaaaaagactttagtttgcatgggaagtgaatgcgttgccagcatggtacctactgactgtagtttccgtagctctctcttattttcct

SEQ ID NO: 207193 - DNA, 183 bp, Homo sapiens
  chr1:154402829-154403012
  hypo
actagctccagggctggggccgaggggcccagccacgtgctcccctcaagggaggctgccctgtctgcgaggtcagtgcgccccaggatccccgcccgcctgctgacacctgcaatgctttcctttcagttccccccgaggagccccagctctcctgcttccggaagagccccctcagcaatg

SEQ ID NO: 207194 - DNA, 241 bp, Homo sapiens
  chr1:154931248-154931489
  hypo
ccagcgtcacccatcgttagcagccaccagctgccccatgccctcacggatgtagacagactggatctccttggtcttgaggcagagatcgcaggcccagacggcagaagcttcagtggtcagcagcccataggcgctctcagtcatgcctgtgcactcacggtggaaccatttctggcaggaggcctcacacagaatggcatcctggtcatcgttcacctcactccgacaggcaccacat

SEQ ID NO: 207195 - DNA, 145 bp, Homo sapiens
  chr1:154954433-154954578
  hypo
tctttttttcaattgagagaactcaagcaatcctccctcctcagactcccaaagtgctgcgcccgaccaagggttttgaagagtaaaatttggcaaggtgtggtttaccagtcctacaaagaatgaattcggcccggcgcggtgg

SEQ ID NO: 207196 - DNA, 36 bp, Homo sapiens
  chr1:154987689-154987725
  hypo
ccctcccaccacctccgccaccgccacctcggcctg

SEQ ID NO: 207197 - DNA, 211 bp, Homo sapiens
  chr1:155012887-155013098
  hypo
agagggaagctgagcgggtttgagaaagtgctggttatacagggaggtgaccaaccagggcctctttctccagggccagtagccaatctgcgacacaatctcaacaacgtgatcgcatcgctgggctgcaccgtggagctgcagatcaacaacacccgcgcagcttggcgcatctccacagcccccttacgggccatgttcaaggacctgc

SEQ ID NO: 207198 - DNA, 37 bp, Homo sapiens
  chr1:155082409-155082446
  hypo
agtgtaggccaggcacggtggctcacgcctgtaatca

SEQ ID NO: 207199 - DNA, 449 bp, Homo sapiens; identical to SEQ ID NO: 197768
  chr1:155099556-155100005
  hypo

SEQ ID NO: 207200 - DNA, 32 bp, Homo sapiens
  chr1:155149477-155149509
  hypo
aactctgccgggtgcggcgcacccacagcggg

SEQ ID NO: 207201 - DNA, 122 bp, Homo sapiens
  chr1:155149965-155150087
  hypo
ctatagctcaggagagtgctcgaaaaaccccatgcatagctcaaaaaaccccacgcgtagctcagatgctctcaggctcaggtgcctaccgaggatgtcacgcattcccagtgctagagtga

SEQ ID NO: 207202 - DNA, 34 bp, Homo sapiens
  chr1:155161023-155161057
  hypo
aaggcgggcctgttgtccggggccgaggtgacac

SEQ ID NO: 207203 - DNA, 54 bp, Homo sapiens; identical to SEQ ID NO: 60917
  chr1:155162034-155162088
  hypo

SEQ ID NO: 207204 - DNA, 295 bp, Homo sapiens; identical to SEQ ID NO: 197771
  chr1:155164120-155164415
  hypo

SEQ ID NO: 207205 - DNA, 597 bp, Homo sapiens; identical to SEQ ID NO: 197772
  chr1:155164455-155165052
  hypo

SEQ ID NO: 207206 - DNA, 183 bp, Homo sapiens
  chr1:155403643-155403826
  hypo
accctcttgcaggctcgaaagagaaagcgaaccagtatcgagaaccgagtgagaggcaacctggagaatttgttcctgcagtgcccgaaacccacactgcagcagatcagccacatcgcccagcagcttgggctcgagaaggatgtggtccgagtgtggttctgtaaccggtgccagaaaggc

SEQ ID NO: 207207 - DNA, 82 bp, Homo sapiens
  chr1:155466712-155466794
  hypo
aggtgtaagccaccccacccagccaattattagattttctattcggcgtcagtgattttccgtctgccagtccaccacaacc

SEQ ID NO: 207208 - DNA, 75 bp, Homo sapiens
  chr1:155640724-155640799
  hypo
gtgttggattacaggcgtaagccacggcgcccggcctctcttactctttcttacgtgtaacactttattcacaaa

SEQ ID NO: 207209 - DNA, 220 bp, Homo sapiens; identical to SEQ ID NO: 197774
  chr1:155830104-155830324
  hypo

SEQ ID NO: 207210 - DNA, 127 bp, Homo sapiens; identical to SEQ ID NO: 197775
  chr1:155830382-155830509
  hypo

SEQ ID NO: 207211 - DNA, 50 bp, Homo sapiens
  chr1:155893764-155893814
  hypo
ataggtttaaatgaaaattatttcagacttatcacagctcactttaagat

SEQ ID NO: 207212 - DNA, 75 bp, Homo sapiens
  chr1:156010548-156010623
  hypo
cagaatttaacttgggttgcacctggactggacaccacctagtttagctctctcgtgccttgcacaaagctgggt

SEQ ID NO: 207213 - DNA, 36 bp, Homo sapiens
  chr1:156032532-156032568
  hypo
cctgccacttacaagtattgcgggttggtcagccgg

SEQ ID NO: 207214 - DNA, 317 bp, Homo sapiens
  chr1:156047207-156047524
  hypo
gcccaccaccagccccaccacgcggtagggcacccgcacacggatggtcacctggccgggcagagcaggagccacaccaaaggcggcgcctgacttgttgcgggaggcacggatcatggagaagtgctccgctgctgagatgatttcccgccgggctgtggccacgtcctcccgtcgccctgtcaccatgaacactggttcctcgcccctcaccggtgtcttgatgtaggtgttggtcttggccctcaaggccttaatcttgcagcctgggatagggcggggaaggagagagacaaagaaacgcacacagcaaggtt

SEQ ID NO: 207215 - DNA, 157 bp, Homo sapiens; identical to SEQ ID NO: 197778
  chr1:156084256-156084413
  hypo

SEQ ID NO: 207216 - DNA, 143 bp, Homo sapiens
  chr1:156143323-156143466
  hypo
agtggcaggtaaagttgtggcgggagcaggcggccagagtccaggacacatgtcgagctgggcagctgtgggtggcgggggggacagcacctgagctgggctgggagtgaagctgtagcagcggggtgtgacttggtgggtgt

SEQ ID NO: 207217 - DNA, 196 bp, Homo sapiens
  chr1:156179133-156179329
  hypo
ttagggaagcagagacggtcacatgagagagtattggagaggaagaagggagtgcggaggagggtgctgaaggaggtagggcggaagcgggggatgttcttagccatggctgggataccttgtgaaggtcatatcatataaagggaggtatgaacaaggagtgagtctgtcctgtattggccgaggggctgaggag

SEQ ID NO: 207218 - DNA, 38 bp, Homo sapiens
  chr1:156239861-156239899
  hypo
ttaacactcatgacattttgtgtcgtttcttaaaaaca

SEQ ID NO: 207219 - DNA, 37 bp, Homo sapiens; identical to SEQ ID NO: 60959
  chr1:156254134-156254171
  hypo

SEQ ID NO: 207220 - DNA, 495 bp, Homo sapiens
  chr1:156255262-156255757
  hypo
tcagcccagtgctccgttcccggatccccctggctggcgggacattgaaccagagccccctgagtcagaaccacttaccaagctagaggagctgcccgaagacgatgccaacctgctgcctgagaaagcggcccgtgccttcgtgcctattgacctacagtgcattgagcggcagccccaagaagaccttatcgtgcgctgtgaggcaggcgagggcgagtgccgaaccttcatgcccccccgggtcacccaccccgaccccactgagcgcaagtgggctgaggcagtggtgaggccgcctggctgttcctgtgggggctgcgggagctgtggagaccgtgagtggctaagggctgtggcctccgtgggagccgcactcattctcttcccttgcctactatacggggcatatgccttcctgccgtttgatgtcccacggctgcccaccatgagttcccgcctgatctacacactgcgctgcggggtctttgccac

SEQ ID NO: 207221 - DNA, 190 bp, Homo sapiens
  chr1:156256080-156256270
  hypo
gcttttctgcccttcggccctttggggagccacggcgggaggtggagatccaccggcgatatgtggcccagtcggtccagctctttattctctacttcttcaacctggccgtgctttccacttacctgccccaggataccctcaaactgctccctctgctcactggtctctttgccgtctcccggtaagt

SEQ ID NO: 207222 - DNA, 84 bp, Homo sapiens
  chr1:156276623-156276707
  hypo
aggtaccaataatagtaaggaagactatgacactacccaagtgcttaactattagagctgaaaacaaaacgaacctagactgag

SEQ ID NO: 207223 - DNA, 150 bp, Homo sapiens
  chr1:156362387-156362537
  hypo
agaagagcgaaattccgagtgagcgggtgtgggatgaatggcaggcccacctcccccacatcggacccagagtccaggcggctggagaggtgggggaagggccaggagtgccccagctgggggcttgggcttctccgccactgacaccag

SEQ ID NO: 207224 - DNA, 106 bp, Homo sapiens
  chr1:156432018-156432124
  hypo
agtacagatggtcatcggcattttgcagatgaggaaacccaaggcatgaagcctgactcctgtgtgctcccacaactaaggctagcacccacagccttaaccatgc

SEQ ID NO: 207225 - DNA, 144 bp, Homo sapiens
  chr1:156432942-156433086
  hypo
ggcaagtttaagagaagacgaccctggctggaaggcatggcggagtggggtggggtggtcctgtggggtgtgtcaggtggggagaaagaggctccttggcactgttaaagcactttgaaagggcaagagcggcttcctctgctg

SEQ ID NO: 207226 - DNA, 221 bp, Homo sapiens
  chr1:156553586-156553807
  hypo
agaaggagccagattctgtgcgagaacggctggtggccaagctggcagacaccgtgaggacgcgcttggcccaggtggggctggtccagactcacaccctggtgagatgacacctgagacaaggagatgggggtggagagaggttacccagagaaggggttggtggtaagcagagacgctgttccctgggatgctgcgcgcttggccgctcatctgtgttc

SEQ ID NO: 207227 - DNA, 202 bp, Homo sapiens; identical to SEQ ID NO: 197783
  chr1:156594227-156594429
  hypo

SEQ ID NO: 207228 - DNA, 38 bp, Homo sapiens; identical to SEQ ID NO: 197784
  chr1:156595265-156595303
  hypo

SEQ ID NO: 207229 - DNA, 39 bp, Homo sapiens
  chr1:156664565-156664604
  hypo
ggtgagatgggaggcggtgatgcagaaaggaggagagga

SEQ ID NO: 207230 - DNA, 586 bp, Homo sapiens; identical to SEQ ID NO: 197789
  chr1:156675863-156676449
  hypo

SEQ ID NO: 207231 - DNA, 135 bp, Homo sapiens; identical to SEQ ID NO: 197790
  chr1:156676539-156676674
  hypo

SEQ ID NO: 207232 - DNA, 300 bp, Homo sapiens
  chr1:156754046-156754346
  hypo
tgtatttatagtagatgaaaaaggagtcatgcaagatgttggcgtgctgagactgagcaaaggcagtcctgttaccaggatagcttcctggaggaggtagactggctcagaaggcgcccccactgtaagactgaagactgtaaagaacaatcttccaggtggtaggaagaaatgagtagatagaggaattctgagctcttaaggcagagtggggacttaggactgcaaaatgttgtagccatgaccccagatatgtgacaagtcagacacttcaaggtagcctgagggtgtgctccgccc

SEQ ID NO: 207233 - DNA, 177 bp, Homo sapiens; identical to SEQ ID NO: 197793
  chr1:156897224-156897401
  hypo

SEQ ID NO: 207234 - DNA, 222 bp, Homo sapiens; identical to SEQ ID NO: 197794
  chr1:156897431-156897653
  hypo

SEQ ID NO: 207235 - DNA, 308 bp, Homo sapiens
  chr1:157895542-157895850
  hypo
ctacctctttcagttccagtgtcgcgtcttctcctcagcttcattgctcctggcgccctggccttcattggccatgtggtggagcttcactgcgaagacaggagagcgtctgcacccattctgttttggtgttaccatgaaaatgtgactctggggaaagcctcagcaccttctggaggaggagcgtccttcaacctctccgtcgccgcagagcattctgggaactactcctgtgaggccgacaatggctggggatcccagcgcagtgaggtggtggcactcacggtcacaggtgggacatggcaaac

SEQ ID NO: 207236 - DNA, 75 bp, Homo sapiens
  chr1:158237172-158237247
  hypo
gaagctaggctgcctggccactgccgctcctcccgcctgagctgctgagaccccgacaccatgtgttaaaagaac

SEQ ID NO: 207237 - DNA, 67 bp, Homo sapiens
  chr1:158669637-158669704
  hypo
aagagtaggtggcagagaagcgtaggtacatgagagtcacactgccaaagaagagcgaaaagacaat

SEQ ID NO: 207238 - DNA, 79 bp, Homo sapiens
  chr1:158710986-158711065
  hypo
tgtgcagatttgttacacggggattttgcgtgaagctgaggtttggagtacggatctcgtcactcaggtagtgagcata

SEQ ID NO: 207239 - DNA, 33 bp, Homo sapiens
  chr1:158753870-158753903
  hypo
gggcgacggagcgagactccctctaaaaaacaa

SEQ ID NO: 207240 - DNA, 170 bp, Homo sapiens; identical to SEQ ID NO: 197799
  chr1:159141761-159141931
  hypo

SEQ ID NO: 207241 - DNA, 45 bp, Homo sapiens
  chr1:159229596-159229641
  hypo
ttacaggcatgagccactgcgcccggccagatacttgtttttaat

SEQ ID NO: 207242 - DNA, 271 bp, Homo sapiens; identical to SEQ ID NO: 197800
  chr1:159824753-159825024
  hypo

SEQ ID NO: 207243 - DNA, 175 bp, Homo sapiens
  chr1:159842714-159842889
  hypo
ggaggagattccagcgcacctcagctcttcaagctttttcctcttgatctcatcgatgcgctcacggcgtttctgggcctcctctttgaggcgccggccctcctcaaaggtggcaatccggttctgcacttccttctgctggttctcgcgcacctggcgccggagctcattggca

SEQ ID NO: 207244 - DNA, 51 bp, Homo sapiens
  chr1:159931978-159932029
  hypo
gggaacagaggatgggaggcaaagggaaaacatggggtagagggataattt

SEQ ID NO: 207245 - DNA, 57 bp, Homo sapiens
  chr1:159932101-159932158
  hypo
atatagacctactgagtttataagttatgcactcaagaagtttacctttggcccggg

SEQ ID NO: 207246 - DNA, 41 bp, Homo sapiens
  chr1:159932218-159932259
  hypo
gaacatatttaaatgctgacgagcagatccagtaggaatag

SEQ ID NO: 207247 - DNA, 60 bp, Homo sapiens
  chr1:160063720-160063780
  hypo
acggccaagtctgaccggattcccaccacttcctgcagagttgaccgcccaactggtgcc

SEQ ID NO: 207248 - DNA, 147 bp, Homo sapiens
  chr1:160293181-160293328
  hypo
gtttcttagatatggcgataatgtaaccggttcactcaccattcatgcgccagatcttcacttgacgatcatctgccccagatacaataaggggcatagtggggtggaaggcagcccagtttactccacgatcgtgaccctgtagaa

SEQ ID NO: 207249 - DNA, 252 bp, Homo sapiens; identical to SEQ ID NO: 197807
  chr1:160370270-160370522
  hypo

SEQ ID NO: 207250 - DNA, 216 bp, Homo sapiens; identical to SEQ ID NO: 197808
  chr1:160370642-160370858
  hypo

SEQ ID NO: 207251 - DNA, 188 bp, Homo sapiens; identical to SEQ ID NO: 197809
  chr1:160526915-160527103
  hypo

SEQ ID NO: 207252 - DNA, 207 bp, Homo sapiens
  chr1:160771682-160771889
  hypo
acgtgtgagcgtgcgggagggctaggccctcgcccccacctgccactggagaccgctccgccatccccacctcaccgccgcgcagcagagctggaagggtcctgccgatgggaccctgccaggcccagtgccactgccccccgaggctgctagacgtgggcgttaggcgtgtcccacccacccgccgcctcccatggcacgtcggga

SEQ ID NO: 207253 - DNA, 55 bp, Homo sapiens
  chr1:160924874-160924929
  hypo
atctaatcagattcgtggataggtcacaatcctcccctgcgttctccctctccca

SEQ ID NO: 207254 - DNA, 36 bp, Homo sapiens
  chr1:160985844-160985880
  hypo
tggccaggtgcaggggttcacgcctgtaatcccagc

SEQ ID NO: 207255 - DNA, 35 bp, Homo sapiens
  chr1:160986420-160986455
  hypo
tgggtaacagaatgagactccgtctcaaaaaaaaa

SEQ ID NO: 207256 - DNA, 189 bp, Homo sapiens
  chr1:161145675-161145864
  hypo
tgaggttactgtagacatcacgagggtgagaatagtcaaatgtcggtccctgatctcggccaaatagggcactgagacttcggaagccccccagtgacaggtacatcatgacagccagctgggagcccacaagcagggccagcgtgcaaggccgctccagcagcctccgcaacatcctgggggtgagat

SEQ ID NO: 207257 - DNA, 240 bp, Homo sapiens
  chr1:161367367-161367607
  hypo
catagctatgttaaggcttagctgacatacaataaactgaacatacttaaaatgtacaagttttgacacgtgtatacacctgggaaattatcaccgcaattcgggtctgatttacacgttaggcacagttcatagggcctactttttttttttttttgagacagattctctctgttgcccagtctggatctccgctcactacaaccttcgcctctcaggctcaagcgagtctcaagcctc

SEQ ID NO: 207258 - DNA, 298 bp, Homo sapiens; identical to SEQ ID NO: 197816
  chr1:161369561-161369859
  hypo

SEQ ID NO: 207259 - DNA, 313 bp, Homo sapiens; identical to SEQ ID NO: 197817
  chr1:161369945-161370258
  hypo

SEQ ID NO: 207260 - DNA, 208 bp, Homo sapiens; identical to SEQ ID NO: 197818
  chr1:161410496-161410704
  hypo

SEQ ID NO: 207261 - DNA, 80 bp, Homo sapiens
  chr1:161450487-161450567
  hypo
cctccttacactcggggcacgtgagcttgtcctgcactggctgcgctcccacgcatgacgcccctctgccctttcttcca

SEQ ID NO: 207262 - DNA, 242 bp, Homo sapiens
  chr1:161953579-161953821
  hypo
agcagcctggggacgatctgtgtgttggtgtgggtgtcgaaagcgtaggagatgttggcattccgctggttgtagctatccacggcatacagcaccccacagatgacgaagcagttgccgtagaaattcctccggagccccgtgcgccatgtggtctccttctgtgtgctcaggtccgcggcattgagcttgctcaggacaatgacctcctggctgaagccctcatcgtccagggccgggta

SEQ ID NO: 207263 - DNA, 930 bp, Homo sapiens; identical to SEQ ID NO: 197822
  chr1:162039135-162040065
  hypo

SEQ ID NO: 207264 - DNA, 45 bp, Homo sapiens
  chr1:162116825-162116870
  hypo
tgataaatacaaggccgggcgcggtggctcatgcctgtaatccta

SEQ ID NO: 207265 - DNA, 87 bp, Homo sapiens
  chr1:162335161-162335248
  hypo
ctgtcttctctgccgctgcctcttctctgcaggtacacttgctgaaggaccagttggctgctgaggctgcggcgcggctggaggccc

SEQ ID NO: 207266 - DNA, 224 bp, Homo sapiens
  chr1:162343771-162343995
  hypo
acagcaggctgtgcggggtgacctcagactggacagaaggctgtgactaactttattggcatctctctagagacataagtaggcttcaccgccaatttgcctaaggtgttcagcaggactattgaaggcctggcagctgccggaggagagcctgtctcccagccgggccttctgctccttgctccagagggctttgagcttgcggtagtacaccttgcagctga

SEQ ID NO: 207267 - DNA, 37 bp, Homo sapiens
  chr1:162426947-162426984
  hypo
ttctgctcttttttttgagacgggagtctcgctctgt

SEQ ID NO: 207268 - DNA, 36 bp, Homo sapiens
  chr1:162427224-162427260
  hypo
aggcgtgagccaccgcgcgcgcggccaggcttctgg

SEQ ID NO: 207269 - DNA, 89 bp, Homo sapiens; identical to SEQ ID NO: 197825
  chr1:163378351-163378440
  hypo

SEQ ID NO: 207270 - DNA, 45 bp, Homo sapiens
  chr1:163872823-163872868
  hypo
tcaaaaatgagttggcttggcggggcgctgtagctcacgcctgta

SEQ ID NO: 207271 - DNA, 34 bp, Homo sapiens
  chr1:164518130-164518164
  hypo
actagaaagtgcctggcatacgggcgcggtggct

SEQ ID NO: 207272 - DNA, 43 bp, Homo sapiens
  chr1:164550441-164550484
  hypo
tatccagcagctccccgaccgccatttttttttttttttttga

SEQ ID NO: 207273 - DNA, 104 bp, Homo sapiens
  chr1:164590520-164590624
  hypo
tcctcccctattttcttaacagtcttccttctctttctgtctgtctgtatttgtattttgccttccttttcttttatccccaacgggggcgagaattaggttcc

SEQ ID NO: 207274 - DNA, 173 bp, Homo sapiens
  chr1:164604712-164604885
  hypo
agcttagcccaactgtcactcgacaggcgtttgtcggacaaaatcaacactaatcaacatttattcgtctcttgcccttgggtctgaggcgcgcgcgggctgcgccattctcccgctcgtctcgccacgcttttcaccctccatccagcctcgccatatatcacccttcctcc

SEQ ID NO: 207275 - DNA, 75 bp, Homo sapiens
  chr1:164637870-164637945
  hypo
gtaacatactcttcccctttcgccttaccttccccaggcgcagccaacacttgacatctttttatcagatgagct

SEQ ID NO: 207276 - DNA, 169 bp, Homo sapiens
  chr1:164637985-164638154
  hypo
agccacagcccctcagcttgttagactgaaagaatgtgccgttttaattaatgatatgtaaatatccttgaatgggccgcatttgcatattaagagagatttgcggaatctgcggagtaatatattttaattaaggattaattaaaaataatgggaatttcatttcgcc

SEQ ID NO: 207277 - DNA, 193 bp, Homo sapiens
  chr1:164753547-164753740
  hypo
ctcgcccaggcagccggcacccatccagaaaggcaggggcctatcgcccagcacattagctttctccctgccagctggcccagggaggcgcagcgtgccaagtggggaacgtgtgaatgggatccatgcccatgcatcccctgagaagtagaaaatgcacgtgaccagaaccgccaaaacctaacccagggaa

SEQ ID NO: 207278 - DNA, 336 bp, Homo sapiens
  chr1:164761683-164762019
  hypo
ctttcttgggttactattaacgctcccttccctgtctttttctgtagttttgagtatccgaggagcccaggaggaggaacccacagacccccagctgatgcggctggacaacatgctgttagcggaaggcgtggcggggcctgagaagggcggagggtcggcggcagcggcggcagcggcggcggcttctggaggggcaggttcagacaactcagtggagcattcagattacagagccaaactctcacagatcagacaaatctaccatacggagctggagaaatacgagcaggtaaccagaaccacctggggctcggcacccaggccctttaggaa

SEQ ID NO: 207279 - DNA, 36 bp, Homo sapiens
  chr1:164765528-164765564
  hypo
gccaccgtgcctggcgctataaggtatttaagagct

SEQ ID NO: 207280 - DNA, 193 bp, Homo sapiens
  chr1:164790953-164791146
  hypo
tagggcttatcttagctttacggtcacctagtttcttgtttctgtatcggtcatgccatcggcagcattctacccacaaaaaaagtggcgattgggcaggcttcatgcaggcagctggcgtctagggctgtcagacgcaatcagtgtttgcatggcacctgcggccacatgcgttcagctagaggagctgcta

SEQ ID NO: 207281 - DNA, 239 bp, Homo sapiens; identical to SEQ ID NO: 197836
  chr1:166135586-166135825
  hypo

SEQ ID NO: 207282 - DNA, 279 bp, Homo sapiens
  chr1:167096197-167096476
  hypo
gctcagcaagggggaggactcggccttggctaagaagagacaacggaggctggagctgctggagagaagccggcagacgctggaggagagccagtctatggcaagctgggaggcggacagctccacggccagcgggagcattcccctgtctgcgttctggtctgcagacccctcagtcagcgctgatggggacacgacgtcagtactgagcacccagagccaccgctcccacctgtctcaggctgcaagcaacatagcggggtgttcaacctccaaccc

SEQ ID NO: 207283 - DNA, 237 bp, Homo sapiens; identical to SEQ ID NO: 197839
  chr1:167190164-167190401
  hypo

SEQ ID NO: 207284 - DNA, 98 bp, Homo sapiens
  chr1:167221025-167221123
  hypo
ttcataatggataacgtaaaataattcagctcactgtattttttgtttcttcgttatatctttttttttttttttaaacagagcctcactgtgtcgcc

SEQ ID NO: 207285 - DNA, 51 bp, Homo sapiens
  chr1:167393532-167393583
  hypo
tatcttccctaaggtcaggtcggggaaagaaagacttccagcttcttacct

SEQ ID NO: 207286 - DNA, 185 bp, Homo sapiens
  chr1:167393613-167393798
  hypo
gtccgcaggaggtctcactccgcaggaaacgctctcctcccgcataagtctgtacttccatcccctcatctgtggtagtagtgaaggctaggtgagtaagcgtgggctgttctacccaccagaagtccaggagctgttgtatacctcatttctaactcgtgaccgagtgacttgctttaactttc

SEQ ID NO: 207287 - DNA, 165 bp, Homo sapiens; identical to SEQ ID NO: 197840
  chr1:167423949-167424114
  hypo

SEQ ID NO: 207288 - DNA, 161 bp, Homo sapiens
  chr1:167487339-167487500
  hypo
ccctgggcctgcctcggttgctctcttgcttccttcttccttcctctcttatcactcgaaaaatctgtacctggaggagctgtgtattctagcagctggctctgaactgatgcccaactcggctgtgacggagcagatgccagcaccgggccggacccctc

SEQ ID NO: 207289 - DNA, 186 bp, Homo sapiens
  chr1:167524973-167525159
  hypo
cattaagcttggggtcggcggtttcatgaatttattgcccccgctgcccttccctgctccatgtaagggacattccttttgcttcttctaagatggcctgtctcattctctcacgggtgctcctgattctgctattctggaaactggtcaataagctcatagcacctggcctccattctttatgac

SEQ ID NO: 207290 - DNA, 65 bp, Homo sapiens
  chr1:168058062-168058127
  hypo
ctcactccttgcgccggggcaccttccacgtatgcttcagctttcgacatcgcatgctcagagca

SEQ ID NO: 207291 - DNA, 178 bp, Homo sapiens
  chr1:168150817-168150995
  hypo
aaaccgcaattacttttgcaccaacataatacaatatataattatattatatataaagcagtcagcttcaaactggggcccccatgtaatttacttacagattctctaagcgatggctgtatacatggagagttttaagggaataaaattccatatctacgatctccttatgtattat

SEQ ID NO: 207292 - DNA, 32 bp, Homo sapiens
  chr1:168151564-168151596
  hypo
gaaatagggcattttcaggccgggcgcggtga

SEQ ID NO: 207293 - DNA, 89 bp, Homo sapiens
  chr1:168878540-168878629
  hypo
atgtacagtggagtggtattcgagaagttttgcaaaggagaggagagccttgaggatacgaagcagagtggccagccatcaaaagttga

SEQ ID NO: 207294 - DNA, 332 bp, Homo sapiens; identical to SEQ ID NO: 197845
  chr1:169076042-169076374
  hypo

SEQ ID NO: 207295 - DNA, 90 bp, Homo sapiens
  chr1:169457189-169457279
  hypo
caaaaaacaaaacaacaataacaaaaacagctttccatcccttccctgaggcttgggtacctgaaccacgttaatctgtaaatcactgct

SEQ ID NO: 207296 - DNA, 90 bp, Homo sapiens
  chr1:170064328-170064418
  hypo
ttggctcctcccccttagaatatgttttaatgtccgttattctgcatggatgattcagttacatggtgcgttctttcaatacatagattc

SEQ ID NO: 207297 - DNA, 84 bp, Homo sapiens
  chr1:171554921-171555005
  hypo
agaagaatggagatacggttgagggttgagtgtctcttaccgaaatgcttgggaccagaaatgtctcggatttcagattggttt

SEQ ID NO: 207298 - DNA, 136 bp, Homo sapiens
  chr1:171555061-171555197
  hypo
aacatgaaattcctttgtttcatacatactttatacatataacctgaaggtaattttaagcaacattttaaataactttgtgcatgaaacagaagttctgacctcacttcgactgatccgtcgcaggaggtcaggt

SEQ ID NO: 207299 - DNA, 41 bp, Homo sapiens
  chr1:171640197-171640238
  hypo
ctgccgtctggaccgtggctctgctcgctgtgcagcagcct

SEQ ID NO: 207300 - DNA, 159 bp, Homo sapiens
  chr1:171707391-171707550
  hypo
gcaaccacgcccggatggtttttcttctattattcacaaagggaatgaaaacatattttgaatcttttgtttttaaagcttaagattccgaacttaccctttcacttttcacagaacctgtgacatcatcatcattgaggtggcgcttaaacttgggag

SEQ ID NO: 207301 - DNA, 77 bp, Homo sapiens
  chr1:172449159-172449236
  hypo
aaactgcacccatgagtgttacctgaaacccctctgctcactctacactggcttttctccccgccctcagcatatcc

SEQ ID NO: 207302 - DNA, 35 bp, Homo sapiens
  chr1:173714249-173714284
  hypo
tgtatctcttgggaacgttttatggttttattcat

SEQ ID NO: 207303 - DNA, 79 bp, Homo sapiens
  chr1:174166676-174166755
  hypo
ttgattctctgtttcttaagcgtagcacaatacgtctgatctcttgtttttaaaatatctgttatgcctggacaacatg

SEQ ID NO: 207304 - DNA, 33 bp, Homo sapiens
  chr1:175365936-175365969
  hypo
ggggcaactaccgggaggcaatacacagatagc

SEQ ID NO: 207305 - DNA, 200 bp, Homo sapiens
  chr1:175372294-175372494
  hypo
ctggtagccctcttcacagacgcagagcccctcctcacattgtcctcgcccactgcaggcattcagacactgccgctggccgcagtcctcaccaacgtagccctcctcgcataaacaggtaccgttggcacatctccccttccccgaacagtccccagggcacctcagttccctgcagtcctcgccagtgtagggctctt

SEQ ID NO: 207306 - DNA, 166 bp, Homo sapiens
  chr1:175372572-175372738
  hypo
cgctgtactcgctgtcacagatgcactggccatccacacacaccccccggctggagcaacccagcgggcagtagggctccgagcaattcttgccaaaccagccttcgttgcagatgcagccacaggactcaaagctaaagttgccgtggccactgcagtgagggat

SEQ ID NO: 207307 - DNA, 166 bp, Homo sapiens
  chr1:175375034-175375200
  hypo
ttgctgtgctgaaccgatgaaccattacctgactcatccccccaaaatcaggttaatgtatttcaaactggctatgcagtgtagaaaatccctgaactgaatccctcggggaagaactgcatttagatcttagagacatattaaccggcagctacagactaggaca

SEQ ID NO: 207308 - DNA, 146 bp, Homo sapiens
  chr1:175957580-175957726
  hypo
taaaatttcttggcacgaaactcatcactactaattagaggcaatgcagtttgctggttaagaatgcaggctctggagccagactgagttagcacgttcatctgtcggccaggcgtggtggctcacgcttgtattccaagcaattt

SEQ ID NO: 207309 - DNA, 612 bp, Homo sapiens; identical to SEQ ID NO: 197860
  chr1:178062500-178063112
  hypo

SEQ ID NO: 207310 - DNA, 475 bp, Homo sapiens; identical to SEQ ID NO: 197861
  chr1:178063150-178063625
  hypo

SEQ ID NO: 207311 - DNA, 110 bp, Homo sapiens; identical to SEQ ID NO: 197862
  chr1:178063733-178063843
  hypo

SEQ ID NO: 207312 - DNA, 150 bp, Homo sapiens
  chr1:178271749-178271899
  hypo
ttaccaccacatacacgtatacaaattggcaagttgattctaaaattcatctcgaaatgccatagaccaagtatagccacagcagaagaaaacaaggtgagaagacttaattactagtattaagatctgtttaaaaagtataataggccg

SEQ ID NO: 207313 - DNA, 109 bp, Homo sapiens
  chr1:178531644-178531753
  hypo
agccaccgcacccgacctctactttttagctataatgatttgcaagggcaaaaatttcacggtacaaggagctttcttttgaaacaatgagtaagctcttcacaagtac

SEQ ID NO: 207314 - DNA, 52 bp, Homo sapiens
  chr1:178531798-178531850
  hypo
tctaactgtatcctagaggctctaggttcaggctgaacggaagtacatgtcg

SEQ ID NO: 207315 - DNA, 229 bp, Homo sapiens
  chr1:178928477-178928706
  hypo
gagccaaataaggtcacagtcgcaggatcaacagcgcttcccagtctgcctccacccgctgttatgggacgcccacgtcaataccccattatcctcagagtcctcggggttgtgtcaatgcatgtcgggacagtactgtggtgcctgccccacccctgctgtgcctcctcccattccctgcaaagttgtctaccaccgagcccagggagggacacgggggcactgtggg

SEQ ID NO: 207316 - DNA, 83 bp, Homo sapiens
  chr1:178988892-178988975
  hypo
ggccgagaccctttcttgtgcattgccatggtgaaaataccagcctggtattaccatttctttcaaagcgttgctaacatctc

SEQ ID NO: 207317 - DNA, 34 bp, Homo sapiens
  chr1:179046571-179046605
  hypo
ctgggcaacgagcgaaactctgtctcaaaaaaca

SEQ ID NO: 207318 - DNA, 43 bp, Homo sapiens
  chr1:179229272-179229315
  hypo
agaatgttttgtcagccaggcgcggtggctcacgcctgtaatc

SEQ ID NO: 207319 - DNA, 48 bp, Homo sapiens
  chr1:179782918-179782966
  hypo
ctgctgcaagaagagcggaaccgaggttgcagacgaggaggaggagcg

SEQ ID NO: 207320 - DNA, 214 bp, Homo sapiens; identical to SEQ ID NO: 197864
  chr1:180123473-180123687
  hypo

SEQ ID NO: 207321 - DNA, 890 bp, Homo sapiens; identical to SEQ ID NO: 975
  chr1:180123700-180124590
  hypo

SEQ ID NO: 207322 - DNA, 96 bp, Homo sapiens
  chr1:180477770-180477866
  hypo
cggtcgcaggccagcgtgagttccaggagggcatgggatctgtgggccctgcacttggagcggcagaccggaaacactggccccgggcagtgagcg

SEQ ID NO: 207323 - DNA, 95 bp, Homo sapiens
  chr1:180478106-180478201
  hypo
agggctgaggagcccgcaggcacgcagcgctggactggttgaacagctccgcccgctgccctggcacgggatccaccaggcgaagctggctgacc

SEQ ID NO: 207324 - DNA, 120 bp, Homo sapiens
  chr1:180497354-180497474
  hypo
ggattacaggcgcgagccaccacgcctagtgttgccctctttaatgagtgctacacaaatgtcttggtgatttcacatccgcagttgttgtggggtgtgttttgtttgtttgtttgtttt

SEQ ID NO: 207325 - DNA, 101 bp, Homo sapiens
  chr1:180497654-180497755
  hypo
tgtgtgtttagtagagatggggtttcacgttgttagccacgcatttcttgaggattagactgctgttgcagatgagcgccgtcctctgtctctgagttcca

SEQ ID NO: 207326 - DNA, 45 bp, Homo sapiens; identical to SEQ ID NO: 197867
  chr1:180881296-180881341
  hypo

SEQ ID NO: 207327 - DNA, 255 bp, Homo sapiens; identical to SEQ ID NO: 197868
  chr1:180881580-180881835
  hypo

SEQ ID NO: 207328 - DNA, 115 bp, Homo sapiens; identical to SEQ ID NO: 197869
  chr1:180881864-180881979
  hypo

SEQ ID NO: 207329 - DNA, 94 bp, Homo sapiens
  chr1:180885147-180885241
  hypo
gatcaagagagcatcccctgctctgtctccaggttactttcatctggacaggactcaacgccaagacactttggggccccgggaggttgtgggg

SEQ ID NO: 207330 - DNA, 41 bp, Homo sapiens
  chr1:180891951-180891992
  hypo
tgtctacctgcagataggatcgggccccacaggttgagggc

SEQ ID NO: 207331 - DNA, 101 bp, Homo sapiens
  chr1:180892052-180892153
  hypo
cacttcggaccaaccagctataaatcggggttcccactgttccttccttgggtttaattttataggacggctcacagaacgcaaggaaacactttacttgc

SEQ ID NO: 207332 - DNA, 126 bp, Homo sapiens
  chr1:180896512-180896638
  hypo
gcaggagaggacagagggtgcggaacgatgctggagacagtgggctggctgtcgtgtgctctgctccgcttgcaattgacgttcgaccttgaacaatgtgccagcgttcttctctgctctggacac

SEQ ID NO: 207333 - DNA, 208 bp, Homo sapiens
  chr1:180918407-180918615
  hypo
gggtgtgccccgcagtccctccagcaaactcagcttgtgtctcagcccctgtgtccacccagcatgaagcatgggcatcagggggtccagcctgccctgggagagccagcacctcacttactctcccaggtgggagcagctggaggggaatttgaaaggtttccagccgcggttgaggccggcgggcgggggttgggggcagggggcc

SEQ ID NO: 207334 - DNA, 151 bp, Homo sapiens
  chr1:181066372-181066523
  hypo
ttatgttctacagctcctgccggtttctccccgcacccccctgcctcttcagaatgcattttgaaaggcgctcctagcctgcactgcagagagcagctgtaaagatgcggtgtgggggcgattctggtgcgtgggctggcccagctgtctg

SEQ ID NO: 207335 - DNA, 162 bp, Homo sapiens
  chr1:181765803-181765965
  hypo
gccacaagtctgacactcaccgctcagggggcagggagcggggacgatcaaaagagcgaaagcatcttctctctcctgatgtctcccgctgcaattcagaagagcgagggacccaggctgactgggagtccccagagcgccgtcaatccaggtcacccagtg

SEQ ID NO: 207336 - DNA, 209 bp, Homo sapiens
  chr1:181767549-181767758
  hypo
cctgattcgacacgcgggcagcatctctccacctgctgatggaagcgaggagggctccccgctgacctcccaagctctggagagcaacaatgcttgcctgaccgagtcttccaactctccgcacccccagcagagccaacatgcctccccacagcgctacatctccgagccctacttggccctgcacgaagactcccacgcctcagact

SEQ ID NO: 207337 - DNA, 106 bp, Homo sapiens
  chr1:181767807-181767913
  hypo
gggccgttccaacaccatcggctcagccccacccctgcggcatagctggcagatgcccaacgggcactatcggcggcggaggcgcggggggcctgggccaggcatg

SEQ ID NO: 207338 - DNA, 251 bp, Homo sapiens; identical to SEQ ID NO: 197874
  chr1:182583797-182584048
  hypo

SEQ ID NO: 207339 - DNA, 61 bp, Homo sapiens; identical to SEQ ID NO: 197875
  chr1:182584613-182584674
  hypo

SEQ ID NO: 207340 - DNA, 39 bp, Homo sapiens
  chr1:182767636-182767675
  hypo
acaggcatgagcagctgcgccagccaagacttgctttcc

SEQ ID NO: 207341 - DNA, 190 bp, Homo sapiens
  chr1:182827758-182827948
  hypo
ttgagattttgcccccggtaagcataaagctgtttagttcacatttacgtagaactctccgtagacaagcaaatcatattttttgtttgtttttcttattttttaatagcctgaagatccttctgtgccagttgcactcaacattggcaaattggctcagttcgaaccatctcagcgacaaaaccaagtg

SEQ ID NO: 207342 - DNA, 40 bp, Homo sapiens
  chr1:182856866-182856906
  hypo
ataaagtattacaccgaatacttgccgtgtagtttgtttg

SEQ ID NO: 207343 - DNA, 343 bp, Homo sapiens; identical to SEQ ID NO: 197876
  chr1:182992844-182993187
  hypo

SEQ ID NO: 207344 - DNA, 160 bp, Homo sapiens
  chr1:183129222-183129382
  hypo
tgtgcatgactgtacttccctctgccgcagacacctcagccaccgtctagccaggcaaacctgtttggtgtgctcactgcatgatgaaggcgggtgtggctcccagtgggagtgtcccgcctccagaacatggccagaggctacagaatcagacttttgc

SEQ ID NO: 207345 - DNA, 136 bp, Homo sapiens
  chr1:183338766-183338902
  hypo
ctgtctttaagcaaacagttcggtggcattaagtatattgccactgttgagcagccgtcgctgtcatccattttcagcactttttcatcttctcaaactgaaactctgtacccattaaacacgaactccccattcc

SEQ ID NO: 207346 - DNA, 507 bp, Homo sapiens; identical to SEQ ID NO: 197878
  chr1:184355381-184355888
  hypo

SEQ ID NO: 207347 - DNA, 278 bp, Homo sapiens; identical to SEQ ID NO: 197879
  chr1:184355936-184356214
  hypo

SEQ ID NO: 207348 - DNA, 146 bp, Homo sapiens; identical to SEQ ID NO: 197880
  chr1:184356541-184356687
  hypo

SEQ ID NO: 207349 - DNA, 259 bp, Homo sapiens
  chr1:184448490-184448749
  hypo
agagctaccatttatggagccgtcaccatgtgtcaaacatcgcaaggcatttacattcatttttatgttgaattttcacaacaatcttgtgaaatatgtgctacgcaaattttacatacttggaaactgaacacagagagacggacttgtccgaggttacccagctacgaagtgctagaatccagattgctcagactccaaagtccacctttctttctccatgttgtttcctgatgccgtgcagcctcccataggtctt

SEQ ID NO: 207350 - DNA, 39 bp, Homo sapiens
  chr1:184720865-184720904
  hypo
cttcagtaatttctgtaagtcggctttttctcttttttt

SEQ ID NO: 207351 - DNA, 38 bp, Homo sapiens
  chr1:184721205-184721243
  hypo
ttacgtctcctgcccacgtgctatagaaactggattgt

SEQ ID NO: 207352 - DNA, 225 bp, Homo sapiens; identical to SEQ ID NO: 197881
  chr1:184722805-184723030
  hypo

SEQ ID NO: 207353 - DNA, 39 bp, Homo sapiens
  chr1:185024836-185024875
  hypo
gccgccgtgcctggcctgtagtttcgttttatatgagag

SEQ ID NO: 207354 - DNA, 83 bp, Homo sapiens
  chr1:185336198-185336281
  hypo
aggcgtgagccaccgcgccaggcccagagaaggttaatgaatgctaaagtttgcgaaccaccgtttgataggctgaaaatggc

SEQ ID NO: 207355 - DNA, 176 bp, Homo sapiens
  chr1:188612098-188612274
  hypo
aaacttgcttgggttctctgcgaatacaagggccaggatcactgtggactcattgcaggttgtggactggttcgctggttctgaacttgctgctagttgtggactcgctgccggtgacaataccacattcttcattctagtaagtttcactttccgtatttgaaattttattttcc

SEQ ID NO: 207356 - DNA, 34 bp, Homo sapiens
  chr1:192197325-192197359
  hypo
gcacccggcccccggagagatacttcttaagatt

SEQ ID NO: 207357 - DNA, 417 bp, Homo sapiens
  chr1:193149421-193149838
  hypo
ttctaatgtagtttacggtggcgatacctgcctgccttttcttttgctgcgttggcacaggcattgtgcttattttgttgtaaatggttccagtattttatcagttcactaggctggaactgatgagaggtaattaggtggctgtatttacagctcgaataagagactcgccagtgattgaacacaaactcattgggagggggtacaggatcaattctcaacttggcaagacagatccctacatatacatcttccaagtgcaaacggcggatacctaaagaaactttaaaaatcttttctgccagatctccagaaaaaacataaccagttccagaacagaagacaggataacgctcacttgggtagaggtctggtggcatgtaccacttgctatctttgtttcgattgggtgcatat

SEQ ID NO: 207358 - DNA, 53 bp, Homo sapiens
  chr1:197091652-197091705
  hypo
agcaaggatggtaatggtggatcaggtaacataacacacggccgtctgagaaa

SEQ ID NO: 207359 - DNA, 32 bp, Homo sapiens
  chr1:197116742-197116774
  hypo
attacaggcctgagcggcgcccgaccctaggc

SEQ ID NO: 207360 - DNA, 38 bp, Homo sapiens
  chr1:197324919-197324957
  hypo
gcaggctgagggagccgactccattctcggccagccca

SEQ ID NO: 207361 - DNA, 39 bp, Homo sapiens
  chr1:197418769-197418808
  hypo
acaagcgtgagccaccacgcctggcccagaaaaatatta

SEQ ID NO: 207362 - DNA, 92 bp, Homo sapiens
  chr1:197704760-197704852
  hypo
ccgccatgaaggtcgagctatgcggtttcagccggtacaaggtctaccccggacacgggaggcgctacgccaggaccgacaggaaagttttc

SEQ ID NO: 207363 - DNA, 181 bp, Homo sapiens
  chr1:198828046-198828227
  hypo
cagttcaacccaccgacagcaatgaatgttgattgtgaccttttaaaaaataatctctgcacagggaagagaaagtcctggtgtgtccacctttggtttcctgtcttcagcgaattctgagcaccatggagtagatgatggttagccatagggtacaatcaacggtcgatggttttgattt

SEQ ID NO: 207364 - DNA, 156 bp, Homo sapiens
  chr1:199636236-199636392
  hypo
gtttcaacatggcttgactttctctctgggcgtgagctagccttgttgcgagtgagccataggcgcaagccgtatgtacagcatcggtaagatagttataccttttacagacaacaccagctctgagccagccacgagctcacatgagtggttacc

SEQ ID NO: 207365 - DNA, 283 bp, Homo sapiens; identical to SEQ ID NO: 197898
  chr1:200379703-200379986
  hypo

SEQ ID NO: 207366 - DNA, 34 bp, Homo sapiens
  chr1:200556912-200556946
  hypo
ggcaacaagaatgaaactccgtctcaaaataaaa

SEQ ID NO: 207367 - DNA, 92 bp, Homo sapiens
  chr1:200588800-200588892
  hypo
gcctatagagaagattgaattgattggtgtcacgaggcagattattcccaagtaccacaggcagtaagtacgataagtactgtaaattaatt

SEQ ID NO: 207368 - DNA, 39 bp, Homo sapiens
  chr1:200612481-200612520
  hypo
aacaagtaggccaggcgtggtggctcatgcctgtaatcc

SEQ ID NO: 207369 - DNA, 235 bp, Homo sapiens; identical to SEQ ID NO: 197899
  chr1:200708632-200708867
  hypo

SEQ ID NO: 207370 - DNA, 111 bp, Homo sapiens
  chr1:200942600-200942711
  hypo
ccaggctgctggggtcgagggtccgggggcatccctctgacctcactcctagggtgggccgctgtggggtaaccgccggacactccagaacttcaccgtcaggtcactggg

SEQ ID NO: 207371 - DNA, 50 bp, Homo sapiens
  chr1:200956136-200956186
  hypo
gggtaggcagactgacggtgcgcgagaccctgtcccggtaataggggtct

SEQ ID NO: 207372 - DNA, 78 bp, Homo sapiens
  chr1:201055718-201055796
  hypo
atagagaaggtacagtaaagatacaatcttagcgcaccactgttgtggatgcagcccgtcattgactgaaatgtcatc

SEQ ID NO: 207373 - DNA, 220 bp, Homo sapiens
  chr1:201058348-201058568
  hypo
aagggagatggttctgcaggcgcgggcccagacccacccagtaaaggacgtcagtccatccctccatggtaatgcactggtacacggtgagcatggagaagccgaagttgtcgaagtgggtgatgccatggttgggccctggccagccgccccggcactcactgccattgatggtgcaccggcgccctgagcccgtcctggcgcagggcgatggctcttc

SEQ ID NO: 207374 - DNA, 438 bp, Homo sapiens; identical to SEQ ID NO: 197900
  chr1:201083266-201083704
  hypo

SEQ ID NO: 207375 - DNA, 202 bp, Homo sapiens
  chr1:201168310-201168512
  hypo
ccctcttgctgggatcgtccacgccttagaggacagtggggagagcagggctctgggactccatcagtttctcaggaagaccatcaacatgtcttgcttctctccctgcttgtccacatcgactccttcctctcctccctggatgttgcagttggctttcggaagaatcggaagaggcacagggaaccgcaggaaggtaggc

SEQ ID NO: 207376 - DNA, 363 bp, Homo sapiens
  chr1:201194901-201195264
  hypo
gccctgctgggtcccctccacgtgacctccctctgccgtctctcctgaagcatgcccgcaggcccctgggcccatccacctgcaggagaacgtgcctgggacggtgacggccgagtgggaaccctctcctgacgaggcccaggatgtcccgctgcactacgcggtgttcacacgctcctcagcgcacggtccctggcacgaggcagccgaccgcatccacaccaaccgcttcaccctcctgggcatcctccccggccacgaataccacttcagggtggtggccaagaatgagctgggggccagcaaaccctcggacaccagccagccctggtgcatcccccggcagcgcggtaagcagcccct

SEQ ID NO: 207377 - DNA, 208 bp, Homo sapiens
  chr1:201261831-201262039
  hypo
cacagacagggtttccgatgggggagtctgaccatcgctttagagaaaaggagtgcatatccctcttaggaggctctcactggatcccactcaccttcatcccccaaggccatcacttaacaagagtgtgggccaggccacggagccatggcttgctcttcgtggagctcccagtatagctgagggaatgggacgcagggcagaatga

SEQ ID NO: 207378 - DNA, 41 bp, Homo sapiens
  chr1:201276067-201276108
  hypo
gattacaggcatgagccaccgcacctggactacattttttt

SEQ ID NO: 207379 - DNA, 169 bp, Homo sapiens
  chr1:201355458-201355627
  hypo
caacctggagtgtgacgggtgggaggcgggaggccacagtcggagggtctgaagccccctgctttgccaaagagggcaggttcttcccagggagggcccttcctctctgctccttggtggtggctgggcttcccccagaggctggcggctcctgcgccaggggctgctc

SEQ ID NO: 207380 - DNA, 196 bp, Homo sapiens
  chr1:201380509-201380705
  hypo
gacttgaggttggcccgcagatccatggacaccttgtgcttggagcccagcagggcccggagcatggcgtcagccgagacacggactcgacgcaggggcgggcgcttgaacttcccacggaggtccatcaccttcagcttcaggtccttaatctgtaggtgagaagcgcccggggctcactggagaggcagctagc

SEQ ID NO: 207381 - DNA, 34 bp, Homo sapiens
  chr1:201797541-201797575
  hypo
ggccatttcccacgaccagctgctgacaaccata

SEQ ID NO: 207382 - DNA, 120 bp, Homo sapiens
  chr1:201851175-201851295
  hypo
ccccattctcacggggatttagactaggtcttaaccatactttaccaagattccagtagcaaagcacccaaaagtaatcgcaataaaattccaatttttgtaggccgggcatagtggctc

SEQ ID NO: 207383 - DNA, 177 bp, Homo sapiens
  chr1:201982936-201983113
  hypo
gatggaggctggccttgcagcgcccagaggcacccacctgtgggagttcatccgggacatcctcatccacccggagctcaacgagggcctcatgaagtgggagaatcggcatgaaggcgtcttcaagttcctgcgctccgaggctgtggcccaactatggggccaaaagaaaaagaa

SEQ ID NO: 207384 - DNA, 37 bp, Homo sapiens
  chr1:201984009-201984046
  hypo
acaggtgtgagccaccgtgcccagctccctggcctta

SEQ ID NO: 207385 - DNA, 89 bp, Homo sapiens
  chr1:201997730-201997819
  hypo
aacatggcggacgacgcagaccagaaacgcactaccgacactgtagaggagcccctggatcttatcaggctaggcctagatgagctaat

SEQ ID NO: 207386 - DNA, 61 bp, Homo sapiens
  chr1:202097362-202097423
  hypo
gaacgtctgcaacatcgtggtggcctacctctccaccgagctgacccgccagaccctggac

SEQ ID NO: 207387 - DNA, 91 bp, Homo sapiens
  chr1:202115847-202115938
  hypo
ggattacaggcatgagccaccacgccaggccagcaatacatttctgttgtttagaagccacatggtttacggtagtgtgaattgttacagc

SEQ ID NO: 207388 - DNA, 201 bp, Homo sapiens
  chr1:202287405-202287606
  hypo
ctgctcactctggccgcagtgcagtgcagcgtctccgtctcctgtgtccgggcctatgggaagtccccctccctgggcagcgttcgagcaggggtcctaggctgcctggcactggcagggctggccgccgcgctgcccctggcctcagtgggagaatacggggcctccccactctgcctgccctacgcgccacctgagggt

SEQ ID NO: 207389 - DNA, 200 bp, Homo sapiens
  chr1:202287666-202287866
  hypo
gtcgtggccggtgcctacatcaaactgtactgtgacctgccgcggggcgactttgaggccgtgtgggactgcgccatggtgaggcacgtggcctggctcatcttcgcagacgggctcctctactgtcccgtggccttcctcagctttgcctccatgctgggcctcttccctgtcacgcccgaggccgtcaagtctgtcct

SEQ ID NO: 207390 - DNA, 37 bp, Homo sapiens
  chr1:202306336-202306373
  hypo
aggattacaggcgtgagccaccgcgcccagccaacac

SEQ ID NO: 207391 - DNA, 136 bp, Homo sapiens
  chr1:202934401-202934537
  hypo
cgtgcatacacatgtgtacacacagccatactgtgccaagaggactatgggaactgataaagtgggagacaggctcaaggagaagacaggtcattaccttttccagtgtaagtgagcaacccgcttggcccccgaa

SEQ ID NO: 207392 - DNA, 150 bp, Homo sapiens
  chr1:202995151-202995301
  hypo
gccaggtgcctgaaggcaagcgacacaattcactgaagagcatactacagatgtagtatccggatatcaagtttccccacttaaaaaatgggtgcgatcaaaggaaaagcaaggaacgggcaggagagcaagcgtgaaaggtgacaaact

SEQ ID NO: 207393 - DNA, 201 bp, Homo sapiens
  chr1:203690591-203690792
  hypo
agagaaagaaggtagcgtgagagcaagtgcacaggtcaggaataagcgcagcttcacctcccagtgcttgctgtgctcccgctacacggtgcattatgctactatatgtactcatacagtactcttgagtacagtgtgtactgtgtgtactcaagaatttcacaagggaggctttattatttctttctttctttttttttt

SEQ ID NO: 207394 - DNA, 1003 bp, Homo sapiens; identical to SEQ ID NO: 197918
  chr1:204043134-204044137
  hypo

SEQ ID NO: 207395 - DNA, 261 bp, Homo sapiens
  chr1:204093907-204094168
  hypo
caagcggctgcgcgtgggagagtacaaggccctgatgaggacccggcgtcaggatgcccgccagagctacgtgatcccgtgagcaggcccccccgcaggcagccaggagactgtgtgtacatgtgtagctctcatgagtggctgggtgtcagtgtgtggcctgcctttgtgtgtgaccccaggggtgctgtgtgtatgcgtacgtgtgtgtgttatctgtgtatagctgagcctgcacgtgcgacccgactgtgtatggct

SEQ ID NO: 207396 - DNA, 201 bp, Homo sapiens
  chr1:204124925-204125126
  hypo
agggggccgactcgaacctcacctgaaatacatagtccgcgctggtgagcgtgtattctttgcctcccaggtggaaagagatgtcggggagtgtagggccctcgttacacttcacgacatactggggtggggggcaaagagagccttcttgagtatggaagacgtctcagcagacaaggagtcctgcgctggtggcctggt

SEQ ID NO: 207397 - DNA, 195 bp, Homo sapiens
  chr1:204199536-204199731
  hypo
ttaccactttgtaggctggccggggactggggtcgggggccgggctggccgggagctgcaggctcctccgcttctccctcatggagccactctggtgccgccgcattcggtcaatctgctcctccacgctcatcttgaccttcccctcgccaggaaacacagcactcttggggcgttcctgctgccatgggaaaa

SEQ ID NO: 207398 - DNA, 58 bp, Homo sapiens
  chr1:204212336-204212394
  hypo
gagactccagggggacgtaggctttggggaggggaggccgaggcgggccaggttcctg

SEQ ID NO: 207399 - DNA, 103 bp, Homo sapiens
  chr1:204217170-204217273
  hypo
cgagccacactttcacggggctttttctgctgcttcttggagccattctccaagcagtctgtgtcggaaggtctgcccttacctgctgggaagtagtgaccag

SEQ ID NO: 207400 - DNA, 424 bp, Homo sapiens
  chr1:204226524-204226948
  hypo
cagcatagatgtcctcactgcgaggtggcagccgctcaaaacgggcactgggtgagcggacaggggagtaaatgcgggcacggctgtaggagccctggctgggtgagcggggcacagagtgggagcggggctgcagggacaggcggcgcagggagctagaggcggcatccagctcatcataatagactggctgccgggaggggcttgggatccagacggtggcatcctgccgcccgtagctggcgggctccttccactctcgcagctggtaggcagggccacccccattgcggaaggcatggcgcttgtcctccagggcccagggcgggctgatccgatcataggccggcatggaacagatgctctccggccgcactcctggcgggtagtactgataatcatcggggtactgggaggagtaggg

SEQ ID NO: 207401 - DNA, 305 bp, Homo sapiens
  chr1:204228355-204228660
  hypo
agccccaccccagccgccggcatgcctcacctccgaaggtcttcaggcgggggtaccccccggcgcagattcacccactgctgaagctggttcatggagctcttgcgctgggcaattttgtcagggttggtgcgtggtgggaaactccgccggtgtcccccagtctctccatcctgagacgggaaagctgtgctccctggccggcttggggagtggtactgccagccattgggctgggcaggctgttccccaccccctggcactcttgggccctcggggtaagggctgcccggctctgaggctgg

SEQ ID NO: 207402 - DNA, 281 bp, Homo sapiens; identical to SEQ ID NO: 197920
  chr1:204347106-204347387
  hypo

SEQ ID NO: 207403 - DNA, 215 bp, Homo sapiens
  chr1:204424271-204424486
  hypo
ggtgggggaggaagacgacatatgccgacatgaatgccaacacacgggggtccctgtggctcatgacaggtgcctgacagaagaggtcagagaaggccccggtttcccaggctgcctcctttgttctctgccaatcgcccagaggaatacattaagtaaggaacaaagagagaaggggaagggggttggggaaaggggaccggcaggggcggggt

SEQ ID NO: 207404 - DNA, 43 bp, Homo sapiens
  chr1:204486800-204486843
  hypo
attacaggcgtgagccaccgtgcccggccgaaaaccacagttt

SEQ ID NO: 207405 - DNA, 43 bp, Homo sapiens
  chr1:204487138-204487181
  hypo
atcagtgtcatagagcgagcttccagtcccagctacccaagag

SEQ ID NO: 207406 - DNA, 105 bp, Homo sapiens; identical to SEQ ID NO: 197922
  chr1:204487763-204487868
  hypo

SEQ ID NO: 207407 - DNA, 269 bp, Homo sapiens
  chr1:204530934-204531203
  hypo
atgaacatggttcctgttctcctgtctagggaaactggttaagcatgtaaatattagcatagtgaatgttttgttgtgagactacatgctgctatgagaaatacagaagggggacgtaatgtagccaagagcttctgaacaacctccgggaagagatgagctgagattaaaggaaggttaggagttaggagaggaagggaaaagtgccgtagttaggaggaaacatgccaaggtcttgaggtgagaaaacagtggcatctgggaagaac

SEQ ID NO: 207408 - DNA, 100 bp, Homo sapiens
  chr1:204531757-204531857
  hypo
tgagctgctcgcctgcggtcggactgctctccccttctacgcccaagcaccgccggtctgccctgctgcgccttccaccggcctcccagagcctccagcc

SEQ ID NO: 207409 - DNA, 178 bp, Homo sapiens
  chr1:204537857-204538035
  hypo
gtaagcattccctggggcaccgggctccgcacaggccaggagctgtcacaggagctaaagcagggattcctgtgccatctccggtcccttctggatctgagattcaggaattctggggctgtgattccttgaaggcagagccgggaacatgaaaaccgtagacactaatcaatgcctg

SEQ ID NO: 207410 - DNA, 102 bp, Homo sapiens
  chr1:204913446-204913548
  hypo
gccaggcagccaccgccgccctgggtccatgcagccttcctcctctgcctcctcagtcttggcggagccatcgaaattcctatggatcgtgagtcctgcccc

SEQ ID NO: 207411 - DNA, 212 bp, Homo sapiens
  chr1:204948536-204948748
  hypo
catgaccattccaagtaccccggcagcgttaactcagccgtcctccggctgtccccgtatgtcaactaccagttccgtgtcattgccatcaacgaggttgggagcagccaccccagcctcccatccgagcgctaccgaaccagtggagcacgtgagtacccgagggctgccagagaaggctccggaaccccgcaccccaaactcacactgag

SEQ ID NO: 207412 - DNA, 199 bp, Homo sapiens
  chr1:204954945-204955144
  hypo
aagcaaaggaaagaccggtcactaccaccaccactaacaactaacccagccctgcctgcctgacccctcaccagcctgcctctgtcccgaaggcctactactggagggagagcagcttgctgaagaacctgtgggtgtctcagaagagacagcaagccagcttccctggtgaccgcctccgtggcgtggtgtcccgcct

SEQ ID NO: 207413 - DNA, 313 bp, Homo sapiens
  chr1:204955353-204955666
  hypo
gaggcctccaggagcggatgacctgcaagccgagccactacagccattcccagaccaccatcgccaaggtgacctgccctgcgaggaggttgtatctcaagagaagacctgtgaggtctgctgacataattccagacgggttatgcagactgatccccgagggcacggcgggcacctgggccaccccaccaccttccgaggcagaaggcagcacgtccatcctgactgcctggaaccatctgatttgtttgccagcacccaacaccttcacggttctccccccacgttctcaagaagccgtcactgaaatagt

SEQ ID NO: 207414 - DNA, 341 bp, Homo sapiens
  chr1:205038772-205039113
  hypo
ctctgactcaaacgcggataacttcctgtcccccttccacgcacccgctgccccttacgcgaatccacgctgcaggcgtaggcgtccagggccgctactcttggcaaaggttgggtggggccagggaacgggcagggacacatgccgcggaccctcgcccatgccatgctcttgcccctcagcccatgtcacgggagtaccagaacggagacggcttcggctacctgctgtccttccgcaggcagggcagcactcactggcagaccgcccgggtgcctggcgccgatgcccagtactttgtctacagcaacgagagcgtccggccctacacgccctttgag

SEQ ID NO: 207415 - DNA, 32 bp, Homo sapiens
  chr1:205269967-205269999
  hypo
gccaccgcgccgtccccaaactccctttcaac

SEQ ID NO: 207416 - DNA, 213 bp, Homo sapiens
  chr1:205273424-205273637
  hypo
ccattctccaggagggggcgggaggaacgccggagccagtcagccatggaggcgcgggcagagtcactgccagggtgcccaccctcatgcggagcctcctgctctcccactcgggtggcgtagccccagttgacccaccagtgactggccacatcctccagggtggcccggcgggtggggttcaccatcaacagccaccggatcaggccacag

SEQ ID NO: 207417 - DNA, 60 bp, Homo sapiens; identical to SEQ ID NO: 197925
  chr1:205425836-205425896
  hypo

SEQ ID NO: 207418 - DNA, 240 bp, Homo sapiens; identical to SEQ ID NO: 197926
  chr1:205425997-205426237
  hypo

SEQ ID NO: 207419 - DNA, 660 bp, Homo sapiens
  chr1:205631796-205632456
  hypo
gttccacacccatgagaagccgtgtatgcagatggggtccatccccactttcctgacagagaagtcggggccaggatggagaggcaccagcccagacacagccccgagtgtcgtctctggtgggcggctcccacaccagcctctgctggctgccaaggccttaccttcatcatagtgtctccgggcctcggtgcccggctcagctctgggcacgccctggtacagcccctcgcccacgaaatccgtgtaaaacagcgtgaaggtcatgagtgccatccagctgcacagctcagccacgaagagccggcgcagggtgcggggcatgcggcagcacagctggtgcagccggggaagcagggcgcccaggttccggaaagccaagcgggcccggcatggacagcagtggggcgacaaggagggggccgacagcccttctgctggctcggtggggcccagcgctgcctcctcagccaccagcagtgtggctgctacgcaggtgaggaagatgagggtgagcaggccaaagaggcactcctcctgggtgcccaggtagggggccagggcactggtgtcccagtcaatggcaggcaggaggtagcccaggcagcccccaagactgatcatgaaggcatagacagagtaggcctggcgacagtggtc

SEQ ID NO: 207420 - DNA, 139 bp, Homo sapiens; identical to SEQ ID NO: 197928
  chr1:205721778-205721917
  hypo

SEQ ID NO: 207421 - DNA, 123 bp, Homo sapiens
  chr1:207087070-207087193
  hypo
tagtctgagcctccaatcagcggaggaacctaccactgtggacattcagggtgactttctgggtctttccccggtctgtgttcatgcccgctccgcaggcatagactccgctgtcactttctg

SEQ ID NO: 207422 - DNA, 189 bp, Homo sapiens
  chr1:207088568-207088757
  hypo
atacatcccatgagagagatcgcatggggttccctggaaggagcaaacccgggcgcctgatgtaggctgttgcagggggtggcgtggtcggaggagggctttctggaataagtgacgtctgagttgtgacctgaaggaatgggtatggagtgcaactgagagcgtgacgatgctcatcatggaggcagg

SEQ ID NO: 207423 - DNA, 140 bp, Homo sapiens
  chr1:207182657-207182797
  hypo
ggagctgcccaggatcctctcgcagcttcccaccgctgtgccctcaccagccctctttagccatccgtacggaggtggcttcatcttcagcatattgtgcccgtgtctcaagcaagcgcgccttactcagtgccaccatt

SEQ ID NO: 207424 - DNA, 297 bp, Homo sapiens
  chr1:207195376-207195673
  hypo
tgacactgacacagggggggcgaggaagcttgtcacggctctgtccttggtaggacaggcgcttggagctctgctcctgctccaggtcagccagcttgcctacctggatacctgcaaaatctttccccgtgcccagggaggccgggcggggccgagaattacgtaagacactgggcgagatcttgtccaagaaggagccctttcccagagaagtgctggttttggggctggcatctttctcagttgaaaggtagctgctcagtcccacgcctgagcgctccagagtgttggacttga

SEQ ID NO: 207425 - DNA, 224 bp, Homo sapiens
  chr1:207200594-207200818
  hypo
ctaatgaaaatcggcggaaaaagtctcatttgcccagttgctctctaaggtcgtcccatcctattctctatagagccagggctgactcaggcagaaagcacccactggtgttgtgaatcactccccaacaatgaaagagaaggtgcagtgagccaggatgggtggcaggaaaggatagggcagggcagggcagggcaggtgtgcagagagcagaccaggttgcg

SEQ ID NO: 207426 - DNA, 60 bp, Homo sapiens
  chr1:207227117-207227177
  hypo
gcactagaggagaaatgacgacgtgctagggctgtcttggggtccagttactgtttttcc

SEQ ID NO: 207427 - DNA, 73 bp, Homo sapiens
  chr1:207227556-207227629
  hypo
caaaactgagtcctaccgttagattggagttaatttcctggtaatgtacttcgtctatacataacccacccca

SEQ ID NO: 207428 - DNA, 153 bp, Homo sapiens
  chr1:207478915-207479068
  hypo
ggaaacttagactccagttacgtatttgaaatagcgaaaacctttgtcaaacagcccttcaatccgatgcaaaaccattagtgctttgtgcgcacattgggcaactgtgatccttcaggattggctgctctcgagaaagaaaactccctatgg

SEQ ID NO: 207429 - DNA, 37 bp, Homo sapiens
  chr1:207963085-207963122
  hypo
gagggtgttaggccgggtttggtggctcacgcctgta

SEQ ID NO: 207430 - DNA, 60 bp, Homo sapiens
  chr1:207991594-207991654
  hypo
gtcgcaagaaggtggggtggggtggggcggggcggggcggggcggggcggggcggggcgg

SEQ ID NO: 207431 - DNA, 105 bp, Homo sapiens; identical to SEQ ID NO: 197930
  chr1:207995292-207995397
  hypo

SEQ ID NO: 207432 - DNA, 212 bp, Homo sapiens
  chr1:208212991-208213203
  hypo
ggatgagcttgtcctcgctcagggagtagcgggcctcgcccgtgatggcatcaatggggcccttctccatctgctgcttgatggcacagtatagcatgaagagtggctcccctgcgcactcctgtgggcacagacagggcaggaggtgtgggcacggcctcctcaggtttgtacgttttccctttcctctctcggagcgaggccagtggaag

SEQ ID NO: 207433 - DNA, 495 bp, Homo sapiens
  chr1:208404584-208405079
  hypo
caggagatgaaaagtgctccctgagtgagaatctggccctggatgatgaatggggtgtgagagagaagccgggaaaagggtaaacagccaggagggacccaggagggaagcgggagggaggggtgaggagaaagaatgtggaggtcaaggagcaaagaaaatgctcctggagtgattgactcaagatccaacatgttccgcaccggatgaaggcacatgtgcacacagatgtgcctggtcacccgccctcccctccacacgcctgcgaaggtgtgagcacgtctgtctgctctcctcccagatgcattccatgcccttcggaaaaacctttcttctgatgtttggttctgagtgtgcaagggaccccactgtaatacgaacaagtatttgtgcaatgattttatagtttcctaaaaatttcacatgcatcatcccgctaacgtaccccttactcaagctggtgaggttgagagcagcatacgcatcaccagttta

SEQ ID NO: 207434 - DNA, 530 bp, Homo sapiens; identical to SEQ ID NO: 197931
  chr1:208416772-208417302
  hypo

SEQ ID NO: 207435 - DNA, 150 bp, Homo sapiens; identical to SEQ ID NO: 197932
  chr1:208418636-208418786
  hypo

SEQ ID NO: 207436 - DNA, 38 bp, Homo sapiens
  chr1:208837628-208837666
  hypo
catcatatgtggaacgtggcgctcgcatatttcatttt

SEQ ID NO: 207437 - DNA, 120 bp, Homo sapiens
  chr1:210032048-210032168
  hypo
gagctcctcggggaggcttgggcagcgcaggagcccacggcgggggtgggggaggcggctcaggcatggccagctgtaagttccgagtcctgccccgcgaggaggcagctgaggcccaag

SEQ ID NO: 207438 - DNA, 254 bp, Homo sapiens; identical to SEQ ID NO: 197936
  chr1:210465689-210465943
  hypo

SEQ ID NO: 207439 - DNA, 133 bp, Homo sapiens; identical to SEQ ID NO: 197937
  chr1:210466012-210466145
  hypo

SEQ ID NO: 207440 - DNA, 46 bp, Homo sapiens
  chr1:210560011-210560057
  hypo
gtgtgcatctctccacgctcctcttggcctccgtggtcctttctgg

SEQ ID NO: 207441 - DNA, 31 bp, Homo sapiens
  chr1:210714466-210714497
  hypo
gagccactgcgtctagccaagtattgctttt

SEQ ID NO: 207442 - DNA, 676 bp, Homo sapiens
  chr1:210856748-210857424
  hypo
ctcaatattggtcattttggcgtttaaggccttgatgtcctccttcagctcgtgcctcacctccaggactgtggcctgcagcgtctgctcagggatggggtagaacgaatgcttgacctctgccaggatgggactccgatcctggggactcctggcctcacccacgttgtccaggcgcaagtcgctcttggtgatgccactgtcacacgagtctgtcttcttcagtgtggcctcgcctgacgcttttgtcctctcgggaagtgtctccatcgactcagccttggacaccttgttccagtcctcactcttcccgcaagcatctttgaagcgggcccagcttttgcgcttggcacaatcgcccccgccccccttggggcccaggcactcggaccctggcgcctgtagctttgcgtggtctggcaccccggaggtggaggctgcctggaaggatacgggcgtggcaggactctcacgcacggtgaccacgctggccttcacgaggctgtggttggcggaggcatgctctgtaaggacattgcccttctccacatctaggtcatccaggtcccggccccctctctcagctgccagcctggcctctttctgctgtcggaatctctggaagaggcgccggacagggtggtccgggggcaagatcaggggggcctcattcttt

SEQ ID NO: 207443 - DNA, 767 bp, Homo sapiens; identical to SEQ ID NO: 197938
  chr1:212003416-212004183
  hypo

SEQ ID NO: 207444 - DNA, 33 bp, Homo sapiens
  chr1:212321601-212321634
  hypo
gcgtgagccaccgaacccagcctacagtgtttc

SEQ ID NO: 207445 - DNA, 44 bp, Homo sapiens
  chr1:212456677-212456721
  hypo
aagatgaaaaaaaaatgggccgggcgcggtggctcacgcctgta

SEQ ID NO: 207446 - DNA, 39 bp, Homo sapiens
  chr1:212555382-212555421
  hypo
cttgttttttttttttgagacggtgtctcgctctgttgc

SEQ ID NO: 207447 - DNA, 39 bp, Homo sapiens
  chr1:212555661-212555700
  hypo
gcatgagccaccacgcccggctggagtgttttatggttg

SEQ ID NO: 207448 - DNA, 174 bp, Homo sapiens; identical to SEQ ID NO: 197939
  chr1:212873550-212873724
  hypo

SEQ ID NO: 207449 - DNA, 224 bp, Homo sapiens; identical to SEQ ID NO: 197940
  chr1:212873750-212873974
  hypo

SEQ ID NO: 207450 - DNA, 447 bp, Homo sapiens
  chr1:213029991-213030438
  hypo
tccagatctcaagacggtgtctggcacataccattcaatacaagtttggtacctggaacccactgaatatgcatgtccagtaactattaactacatgtgttggtgcaagggagaaggtcgagcaaccggatctgctccatcatagcccgtctcagtcgcttcattcaagtcagcggggtgaggttgaggggattccaacttcacaagggcagatttctcatggactctctttctctggttgtactggaacactttctggcgttattcctctgctgggacagcatgaacttatgaaacgtggtcctgtctgccctaaagccagggtctcaccgacaaggacagcgatgctggggcgagaaataaagttcgtcctgggcctgcgtacggtacagcgcccttgggaagcccttgtggagttaagggtgatgcccacttctttgtctccct

SEQ ID NO: 207451 - DNA, 762 bp, Homo sapiens
  chr1:214556792-214557554
  hypo
gccccgttgacagccggcgggtcagtccgagacatgctgatggccttggctggcccatgcctcagcaccctggctctggccatggcgggaggaaggctggcttggtcctgcctcagagccccattgctcacactcttccttggaccggggtactcaggcgggggcttgttggggatgcgggccagggccgcctgcagctgggcactgtactccatcttctcccggagcatggggatctggggcaccgattctggagcctcctcctcctcctcctcactctcgctgctgtggattagcatagtggcatcagagaaggtcttcttgtggtgatactgagggagctgggggacctcgtggctgcctgacccctcctcgggcggtccctgctcccggagcgtgttgcggcgagccatggggaggtggagcgacttgagcgtcatggcctccatgccccgcaccatgctgttcatcacctccaggctgtggcgcttgttcacagtgccgtggtgcttggtggccgtgaggggctcgctcacctcctggagagactgatgaaccaccggagagctgtcctcttggaaggtcttcaccgagagctgcaccttccgggtcaccaggtccgggctgctgccgctgacgtacttgtggcggtggctggccaggtctggggtgctggtggcaggtcgtggccgtgggtaggggggcggtggcctgaagagatagttcttaagcatgtgggccgtgctgtagttatggctgccc

SEQ ID NO: 207452 - DNA, 224 bp, Homo sapiens
  chr1:214637793-214638017
  hypo
atgatggataagatcacagccgtgctaagaataacaggattcttataaacacatcgtcgcttaggccaaaaaacacaacagatgccaaaaaacagatggctggtcccttcggtgagttctccttcacatacccaacacgcatgcacgcgcacatgcgcacacagacacacccctcttacctctcgcagctccagcctctgggccacagcctccaggcattcttg

SEQ ID NO: 207453 - DNA, 66 bp, Homo sapiens
  chr1:214638090-214638156
  hypo
ttcttgctcaggacgttgtagcgccgtgtccggcggagcttcagaccaaaaggcatggctatgtgg

SEQ ID NO: 207454 - DNA, 51 bp, Homo sapiens
  chr1:214638186-214638237
  hypo
acacgcccctgagatggccttagcagtttcgtgactggaaaattacactat

SEQ ID NO: 207455 - DNA, 209 bp, Homo sapiens
  chr1:214788823-214789032
  hypo
gcatactgatggctcgtgttttctctgggtggaaaagctgctgtagagaatgagagggagaactagggaattataaaaggacggaatagcatggagggcccagttgagattggagacagaatataagcaggcccaatctgcaaggttgtgtgataatttaaaaaatgtttccttttggctgggctaggtggctcatgcctgtaatccca

SEQ ID NO: 207456 - DNA, 171 bp, Homo sapiens
  chr1:214809712-214809883
  hypo
atcaatcttgagatcggttggagctgccctttagttctgattgatatcttaattcgatagagtgtcagtttagcagcagggaagcaggatcaggacacggtagatgggagtataataactacaacaggttctgtcttattttaatgatgaaatgaacgcatatacatgaac

SEQ ID NO: 207457 - DNA, 325 bp, Homo sapiens; identical to SEQ ID NO: 197954
  chr1:215740713-215741038
  hypo

SEQ ID NO: 207458 - DNA, 90 bp, Homo sapiens
  chr1:215745301-215745391
  hypo
gcatgttttgataatgatagaaaatttattttggagactaaggcactttttatggaacagtgcatacacggcttctgctgttactgacac

SEQ ID NO: 207459 - DNA, 41 bp, Homo sapiens
  chr1:215764971-215765012
  hypo
aggcgtgagccaccgcgcccggccagcagcctttctttcct

SEQ ID NO: 207460 - DNA, 400 bp, Homo sapiens; identical to SEQ ID NO: 197955
  chr1:216774194-216774594
  hypo

SEQ ID NO: 207461 - DNA, 76 bp, Homo sapiens; identical to SEQ ID NO: 197960
  chr1:219347516-219347592
  hypo

SEQ ID NO: 207462 - DNA, 112 bp, Homo sapiens; identical to SEQ ID NO: 197961
  chr1:220102055-220102167
  hypo

SEQ ID NO: 207463 - DNA, 38 bp, Homo sapiens
  chr1:220376260-220376298
  hypo
ggtaagagagggagactccgtctcgaaaacaacaaaag

SEQ ID NO: 207464 - DNA, 37 bp, Homo sapiens
  chr1:220426847-220426884
  hypo
gtagagagtagggggcggtagtcgggggtggtgggag

SEQ ID NO: 207465 - DNA, 588 bp, Homo sapiens; identical to SEQ ID NO: 197963
  chr1:220701527-220702115
  hypo

SEQ ID NO: 207466 - DNA, 194 bp, Homo sapiens; identical to SEQ ID NO: 197965
  chr1:220921372-220921566
  hypo

SEQ ID NO: 207467 - DNA, 42 bp, Homo sapiens
  chr1:222222865-222222907
  hypo
tagtgacaagggagtgtctacgactgccttctgggtgctttt

SEQ ID NO: 207468 - DNA, 195 bp, Homo sapiens
  chr1:222260739-222260934
  hypo
gtatgggtgaactctgtgtgcgtttttcataatggagcctgaagcagtacagttagccctcggacagggagcaaatgacctcatttgagtcctttctttcacactttctaagcctggaccttattttttccaagcctcagtttcctgctttggcgtgtacactgaattggctccagggcgcggtgtggggattta

SEQ ID NO: 207469 - DNA, 44 bp, Homo sapiens
  chr1:223003690-223003734
  hypo
cctgacttctttcttccttccgtccttccttccaccttcctttt

SEQ ID NO: 207470 - DNA, 343 bp, Homo sapiens
  chr1:223211666-223212009
  hypo
ggggcgcagggtggccgaggctgcgcgtccacatctcatcattcctggactgttgagattggccattggtgactttacctcctgtctgcgctgtgccagcaaaggtggagcccacaccctggggtagaacagctcttgctcagggagggcccgctctgggcatggttgggctcggggcttcgttgggcccggggcatggttgggctccacgcctgagtctccctgcagctcccacgtgtgtgcctcctcctcagtgagacatagtccctgcagtgtttaaaggtggggatcacatgttttgctcagtggctttggggactgggtgtttctcctctcaaacaaa

SEQ ID NO: 207471 - DNA, 187 bp, Homo sapiens
  chr1:223257415-223257602
  hypo
ctaattaactgtggcgcgtatgtttgtcttctccagttgatgctggtgcacgtgtatagtctgaggtttgtttttccccagcctcacccccatggtgcctaatacaccacatcgtgcacagcaggcgcttggagcacgcctgtaaactgaaggctgcttgggatgcccatcacgttcccttatgcca

SEQ ID NO: 207472 - DNA, 198 bp, Homo sapiens; identical to SEQ ID NO: 197968
  chr1:223307128-223307326
  hypo

SEQ ID NO: 207473 - DNA, 86 bp, Homo sapiens; identical to SEQ ID NO: 197969
  chr1:223538641-223538727
  hypo

SEQ ID NO: 207474 - DNA, 164 bp, Homo sapiens
  chr1:223813496-223813660
  hypo
acaattttacctcttcgactccagtgacagagtacgcatgactcttaaccagcttctggctggtgatggcttcggcttcggctgcactggagacctgcgtagagaagaaagtccactcagtggctgaccctgacctctcaggggccggccgtagaatgctttcc

SEQ ID NO: 207475 - DNA, 56 bp, Homo sapiens
  chr1:223853104-223853160
  hypo
tccttaccgtgggccgcttccagatgatgccttgagtttgcggagagcctggtcca

SEQ ID NO: 207476 - DNA, 198 bp, Homo sapiens
  chr1:223888417-223888615
  hypo
ttttccctgggaacgctttgtgcctatgacccttcgttcaacaaacctttaccaagcacccaccaggtgccaggcactatgccaggatcacaaaggtgaacaagaaagacatggtgtctcattcagaaatggatgggctagcggggaaatggacactaaatatttgtatcaccaggtgatacgcgctctcacagaagt

SEQ ID NO: 207477 - DNA, 100 bp, Homo sapiens
  chr1:223894433-223894533
  hypo
aaactgagactgacacgtggaggtgcaaaattaaaaaggaagctttggttagtatctccagaacctggctaggcacggtggctcacatctgtaatctcag

SEQ ID NO: 207478 - DNA, 328 bp, Homo sapiens; identical to SEQ ID NO: 197970
  chr1:223899911-223900239
  hypo

SEQ ID NO: 207479 - DNA, 104 bp, Homo sapiens
  chr1:224051404-224051508
  hypo
aatgtaactaagtcacagtccgcctagaagcattcgcagtggacagtggaggggccagacttgtcatactcctcctgcttgctgatccatatctgctggaaggt

SEQ ID NO: 207480 - DNA, 101 bp, Homo sapiens
  chr1:224300432-224300533
  hypo
ttagtctttgtcttttgtaacgttaacacttttgaataatttatgggcccgtcatctagcgatgtctacctcaaacgcaactcgtgctttttttgcatgaa

SEQ ID NO: 207481 - DNA, 139 bp, Homo sapiens
  chr1:224300563-224300702
  hypo
attatattaataggcatatgatattggctcctcctataactgtggcgttagtcttgatcatttggttatgatggtgtccaccaaatttctctattgtaaactttttttttttttctcgctctgttgcccaggctggagt

SEQ ID NO: 207482 - DNA, 263 bp, Homo sapiens
  chr1:224345147-224345410
  hypo
aacaaatggtgctggcgtgactgttctcaggcgtgaaatttctgagcttcgcaccaaagtgcaagaacagcaaaaacagcttcaagaccaggaccagaaactgctagagcagacccagatcataggtgaacaaaatgcacggttggcagagctagaacgcaaactacgagaagtaatggaaagtgctgtaggaaattcctcagggtccgggcagaatgaggagtctcctcggaaacgaaaaaaggccacggaagccatagact

SEQ ID NO: 207483 - DNA, 90 bp, Homo sapiens
  chr1:224368628-224368718
  hypo
tcagactacagacgtaagcctccgcacaccttttggactggtgtgccagttcacacatgcctgtgatagcaactgcgttctgaactgcag

SEQ ID NO: 207484 - DNA, 34 bp, Homo sapiens; identical to SEQ ID NO: 197974
  chr1:224622766-224622800
  hypo

SEQ ID NO: 207485 - DNA, 250 bp, Homo sapiens; identical to SEQ ID NO: 197975
  chr1:224691180-224691430
  hypo

SEQ ID NO: 207486 - DNA, 49 bp, Homo sapiens
  chr1:225113074-225113123
  hypo
acttctggtttacagaactgcgagcataacattttcttgttttaagaac

SEQ ID NO: 207487 - DNA, 99 bp, Homo sapiens; identical to SEQ ID NO: 197977
  chr1:225117651-225117750
  hypo

SEQ ID NO: 207488 - DNA, 87 bp, Homo sapiens; identical to SEQ ID NO: 197978
  chr1:225117751-225117838
  hypo

SEQ ID NO: 207489 - DNA, 34 bp, Homo sapiens
  chr1:225581812-225581846
  hypo
gcccggccacagcgatgttatctttatgatttta

SEQ ID NO: 207490 - DNA, 408 bp, Homo sapiens
  chr1:225597844-225598252
  hypo
cacatggatggcctcgtcctcctctcaagcagccttggaggcaggccatgctcccctcactttgtgtgcaagaagccgaggctctgacaggtcactcacccactcaaagccatctgactccaaggcctcggctcttaaaattaattacctcattccagagagcatccaccacatagagaagctggaaactattaactaaaatcatggccaaggatggaacagcgcggtcctgtattttcatttcagccaaaagcatcaccaagttaataaccacctgaaacaaaaggggaaagtatatagcctcaaagcacctccccagagaccttagcactacaaaggcatgagtgagcttcacagctgagacacctggcagacgccaccgtaactcctacccgccaccaggaataa

SEQ ID NO: 207491 - DNA, 33 bp, Homo sapiens
  chr1:225608023-225608056
  hypo
aacaactttgatctttcacgtaatcagactgaa

SEQ ID NO: 207492 - DNA, 748 bp, Homo sapiens; identical to SEQ ID NO: 197979
  chr1:225614544-225615292
  hypo

SEQ ID NO: 207493 - DNA, 243 bp, Homo sapiens
  chr1:225637174-225637417
  hypo
ggaaaggcaggcgccgactgccaactatacgggtgcatatctcagcgcggtcacacccttcttgcccagacctgcctctgctctgtcctcctggcccctgaggagcacctggggcagaggaggagcccctaggaaccttccatgatagagcacaggagtctgcaagcggttgatttggtctcctctacccggcccctccctctctctggaccctgcaatgtcgaggtagagagtgttattccc

SEQ ID NO: 207494 - DNA, 78 bp, Homo sapiens
  chr1:225988363-225988441
  hypo
ttctgagcgcccagcttacccaccgagctcctttcggtcatcctcaggtttcctttgatgatgcgtcctccacttcca

SEQ ID NO: 207495 - DNA, 108 bp, Homo sapiens
  chr1:226053432-226053540
  hypo
gagccactccatacacgtgtggcagggccaggtccttctcagatctcacctggatacccaagcgagagacagaaggcgctcacctaaggtgctcgccctgcgggtggg

SEQ ID NO: 207496 - DNA, 104 bp, Homo sapiens
  chr1:226062774-226062878
  hypo
tcctcaggctgagccagaaacggtcagttttttcctctgagtttgattcccctgaaggcaggccccgcaggccctgcaatcccccagcagagagcatgcatgca

SEQ ID NO: 207497 - DNA, 263 bp, Homo sapiens
  chr1:226077115-226077378
  hypo
tagaggtggggctctcgttctctgcaagaggctcagttcccccagctgctggtaagtggacctagagtcttgttccttgctgcaaccaaacaactgacaggaaccagaatggctcaggcaacgccagggctctaagggccaatccagtctgcagggatgagcatccgggcccgtgctcagagggtcccggggcctcatgagatcctgagctggtggtccccagttgtgaaaccagatttcccactgttctggggggaccttcc

SEQ ID NO: 207498 - DNA, 147 bp, Homo sapiens
  chr1:226102816-226102963
  hypo
gctgaggctgactctcggtgtttctttggagagcgttgcttagtaacagttgcaggggacacgcacagacagggggatgaaagaaggatgcaggagatgagggagggtgcatttgttttctagcatgccccacgagtgggagcagtg

SEQ ID NO: 207499 - DNA, 158 bp, Homo sapiens
  chr1:226109458-226109616
  hypo
tgcccaagaggtgggcgccacccccagtccaagcctgcctgccagcccatcttgctgcctgggttcctagaaggctgagcgagcaaatgagggcctcacataggcaggcccgctgccactgagccccgtgacggcatcgatgaggtcctcttccacct

SEQ ID NO: 207500 - DNA, 126 bp, Homo sapiens
  chr1:226109706-226109832
  hypo
cttcctgcactaccacaggtgtgttggtcatgcagcgaatcactttgggggctggctggaatgccatcagcttctagggtgagggagagagccgaatgagtggccagggcacggctcccaccagca

SEQ ID NO: 207501 - DNA, 143 bp, Homo sapiens
  chr1:226163215-226163358
  hypo
acagaagtaataatgttatgggatattcagcaagactaaatgatttattcaccacctgtacagtgaaaactgaagctaaatctgagaattaaggaatcagaaagaacagggcgccgggcgcggtggctcacgtccgtaatccc

SEQ ID NO: 207502 - DNA, 171 bp, Homo sapiens; identical to SEQ ID NO: 197982
  chr1:226297380-226297551
  hypo

SEQ ID NO: 207503 - DNA, 342 bp, Homo sapiens
  chr1:226789939-226790281
  hypo
gctctggaaagcactgtgggcgcaggcaccagagcatcagagagtggggtggagatgagaacgcccacagagaggctgggatgctccggcaggctccaactggccttgctgtacccactgcccaccgcaaaggcacgccacgtctgctgggccgggccacaccgggccctgtctgggtgagcaggggctcaccaaggggacaggactgtggtagacccgtcctgtgggaccccacctgcctcaaaatctggtgccccgagtgtttactgtgtggtctcctgggggcagcaccagggtgtgggtgaggatggccaggctccaccctagcgtggaaaggcccac

SEQ ID NO: 207504 - DNA, 99 bp, Homo sapiens
  chr1:226908275-226908374
  hypo
acataaagtatttgacggaacatgcctggcacataataggcacttctgaaatcattgctgctattatttttattattattgtgcatcctaagactgttt

SEQ ID NO: 207505 - DNA, 1206 bp, Homo sapiens; identical to SEQ ID NO: 197984
  chr1:226925659-226926865
  hypo

SEQ ID NO: 207506 - DNA, 70 bp, Homo sapiens; identical to SEQ ID NO: 197985
  chr1:226926951-226927021
  hypo

SEQ ID NO: 207507 - DNA, 121 bp, Homo sapiens
  chr1:227175823-227175944
  hypo
tttctgaaatttgggattgccgagtagcagacccagtgggctccgggacaggatggagaggcctgggtggcgtccgtgaggctgcctggctagcagcggcgcccagcaccactgtcagatc

SEQ ID NO: 207508 - DNA, 82 bp, Homo sapiens
  chr1:227248038-227248120
  hypo
gaaccatatctacttcggcaatttctaacattcagtgcaacctaacatttgttgtgagctcacaatacgttggatactaagc

SEQ ID NO: 207509 - DNA, 44 bp, Homo sapiens
  chr1:227376422-227376466
  hypo
agagcatttttagggcagtgaaattattccgcataatactatta

SEQ ID NO: 207510 - DNA, 119 bp, Homo sapiens
  chr1:227422355-227422474
  hypo
ctattctatccaccacgtgagcaccatttcaatatggctctcagctcccatgtgacggaggcagacagacattcccaagttcaaaatttgtaagcctcactacacgccttcctacaaag

SEQ ID NO: 207511 - DNA, 34 bp, Homo sapiens
  chr1:227463301-227463335
  hypo
ctctccccctccccacggtctcccactttccatg

SEQ ID NO: 207512 - DNA, 210 bp, Homo sapiens
  chr1:227618270-227618480
  hypo
actcaacaccagcatcggtgggcggtggaaaaaaagcctttgccatcactgccatttaggctgtgggtcgaagatatgctcatgcggtgttgaggaaagcagactttgaccacaccaagagggcaggagaactcactgaggatgaggtggaacgtgtgatcaccattatacaggatccatgccagtacaagatcccggactggttcttga

SEQ ID NO: 207513 - DNA, 205 bp, Homo sapiens; identical to SEQ ID NO: 197990
  chr1:227652539-227652744
  hypo

SEQ ID NO: 207514 - DNA, 204 bp, Homo sapiens
  chr1:227948693-227948897
  hypo
gcattatagctaatacgcatgcatgtatacatatgtacacatgtgtatcaatgcctatgtattgtgcatgtatgtgacatgtacgtccacactataatgcgtgtctatacgtacagcatgtaaagctgtattcttcaggattttaaatgccaggtgtctgttaaaagtaagagatatttgctaccctttcggtttctctaattt

SEQ ID NO: 207515 - DNA, 747 bp, Homo sapiens
  chr1:227962631-227963378
  hypo
cagctccttgctctgcatggcgtttcctgtgcacgcctggagtgagctcagctggcccggctgaatcaaagtcccctctgagcagcgaggccgccgtgctcattgcctcgacccaccgccgcgggggcgtcctgaggaggggggccctgcatctgcccccccggctagtgcacagaccaccttggcctccaggaatgcagcggaggggacttgggcgggccgcagggtggtctgcgagtgccgagtgtgacagatcgcagcagagagtgttctttacggcctccagagcttggctgcggtgagagccaattttccccctttacattctctgcagcatattaatggccccaactggtagaactattttgagttgtagacagcttgatttatcccagctctgttcttaaatggttgctaatttctcactgcaagaaaattcacagttcctcagtgagtcagcttaatgacacggccagggcagcccagctaacagcagactgctctcggtgcttggcttggtacggtgatgtgccgcactccggcgtcgcgaggcgagccagagcagacatgtcccatgggacacaagagccgatgtcccgcagagtttggaggccaaggccgtgcgtgcctctggagcactgtcttcccgggctgctggtggcagcgaacgcacaaggctgggacgtcttcaggcccccagcactcagccttgccctaatggtgcgcgcatggacacacagctgcttt

SEQ ID NO: 207516 - DNA, 78 bp, Homo sapiens
  chr1:228003875-228003953
  hypo
ctacgcaggcctccacgtctgcggcggctccatcctcaatgagtactgggtgctgtcagctgcgcactgctttcacag

SEQ ID NO: 207517 - DNA, 184 bp, Homo sapiens
  chr1:228081945-228082129
  hypo
agcacagatgtctgtgcacggctctgtgcaccagcccaggtgcagggtgtccacagtgcaagagcccacaagcacacaaccacaataggtgttcgcacacgagcccaggatgtgtggtgcctgcaggcatgtgcccaggacccaaggtgtccacaaacgtacccatgcccttcacatggactca

SEQ ID NO: 207518 - DNA, 516 bp, Homo sapiens
  chr1:228109226-228109742
  hypo
tgcaggtgtagacctcctcacgctgcgtgcactgcctgcactccacatagcagcaccaacgcacctggcactggcagggccttgtcaccacccggctctgtgtgttatggccgcggccacagcagatgctctcgcagttcttctcacggtggcacctacggccagcggtgcccggggagaagcggccagccaggcagaagctaggcgagtcatccaggtgcaccagctctggagtgcggggcagcgggtcgctgccacctgcccccgaggcacggccccgtggtggggagatggcacctgcctcgccggcagcttcattggtggtgctgcccaccttgagtgccgtctcatacttgtgcttcagatgcttgcccacctcatggaaaggcgccaactgccgccagcaggtccgcaccgtgcatgagcctgacacgccgtggcacttgcaggtggtctccaccccagccttgatcacctggcagaagggtgcgggagggagggcagtgtgagggctgt

SEQ ID NO: 207519 - DNA, 32 bp, Homo sapiens
  chr1:228111802-228111834
  hypo
cctcccttcccaccccgccagccccaccccac

SEQ ID NO: 207520 - DNA, 175 bp, Homo sapiens
  chr1:228111864-228112039
  hypo
agtccacacgggctcgcagatccttgcttgaccgtctgcccaggaattccttgacgaacttgctgctgtacttaaggttgtctccgcagcccccccactgccaggcctcacggttctccaggtcgggtgcctcatcgcaggtacagcgctccatgcggcccgcgctgcacgcctt

SEQ ID NO: 207521 - DNA, 305 bp, Homo sapiens
  chr1:228112930-228113235
  hypo
ggccttcctgagggccaggccggccacactcacctcgcttgagcaggctggcccggtagcggccctccagcgtgcagttccagcgctcaaagcggaactggaactggcactcgagcgcactcatgctcacggcctccaccagcgtctctgccacgcccgggtcccggcggcacatgcgccgctgcttccgctccagcttcagccggtcgcaggccttgtagtgcgcctgggcagccgcctctggctccagggtcagcgggaggatggtcaggggctcgctgcccgtcagcctgggcacagagagg

SEQ ID NO: 207522 - DNA, 216 bp, Homo sapiens; identical to SEQ ID NO: 197992
  chr1:228134891-228135107
  hypo

SEQ ID NO: 207523 - DNA, 207 bp, Homo sapiens; identical to SEQ ID NO: 197993
  chr1:228135899-228136106
  hypo

SEQ ID NO: 207524 - DNA, 119 bp, Homo sapiens; identical to SEQ ID NO: 197994
  chr1:228136152-228136271
  hypo

SEQ ID NO: 207525 - DNA, 240 bp, Homo sapiens
  chr1:228281071-228281311
  hypo
aagcagtaaatgatgtaggggctgccaggtatagggtcctgtggggatgctggaacatgccgaggcaggacgtgccagccaccctctgcccatatgtgcagcagggccacagatgtgcttgtcggtaggagagaccaagctgtctgtgtgccgatgtcttgacacctgagacttcaggttcacccatcctggttctgccattccattgcagggtggcttccctcctttggggactcttaa

SEQ ID NO: 207526 - DNA, 36 bp, Homo sapiens
  chr1:228322365-228322401
  hypo
aagacacatctcaattcctgcgtggcaggccaagaa

SEQ ID NO: 207527 - DNA, 200 bp, Homo sapiens
  chr1:228322431-228322631
  hypo
ccactggtcaagtggtcgaacccaacatccaagacccagccagcagccaagctcagcgcaacctcccgacctctgactctgactgcaacagggtgagcacatcgccctcgcacacggggccttttacattgtggatgatggagcggctcgcatcctccataaattccatgcacacctgcgaccactgtcctttagagccc

SEQ ID NO: 207528 - DNA, 214 bp, Homo sapiens; identical to SEQ ID NO: 197997
  chr1:228444556-228444770
  hypo

SEQ ID NO: 207529 - DNA, 822 bp, Homo sapiens
  chr1:228461638-228462460
  hypo
gccagggggacacccacaccctgaccgtgcatggcgcccaggttctggacagcgccatctacagctgccgtgtgggcgcagaggggcaggacttcccagtgcaggtggaaggtgagccgggcatggggcgtggggcggggactcctccagacacctctgtcccagagctggacaggggcgaagctggggctcaagtctggtctgttaagagcccggctgatgtcccctttgtgcccacagaggtggccgccaagttctgccggctgctggagcctgtgtgcggcgagctgggtggcacggtgacactggcctgcgagctaagcccagcgtgtgcagaggtggtgtggcgctgcggcaacacgcagcttcgggtgggcaagcgcttccagatggtggccgaggggcccgtgcgctcactcactgtgttggggctgcgcgcagaggacgcaggggagtacgtgtgtgagagccgtgatgaccacaccagtgcgcagctcaccgtcagtggtatgtaaggggtcgagtgtccctatccagggcagcctcctggaggaggcggcctttggtactcctgcagcgtaagggctctgccagtcctgtgcgcccgcctcttaagcagtgctcctgtctgcagtgccccgagtggtgaagtttatgtctgggctgagcaccgtggtcgcagaggagggcggcgaggccaccttccagtgcgtggtgtcccccagtgatgtggcagtcgtgtggttccgggacggtgccctgcttcagcccagcgagaagtttgccatatcacagagtggcgccagccacagcctgaccatc

SEQ ID NO: 207530 - DNA, 330 bp, Homo sapiens
  chr1:228465319-228465649
  hypo
agggcagtaaactgcggcccactgacaacgtgcgcatccgccaggaaggttcgaggacaggcggctgtagcaggcacggcccggcccccaggtcttcctctgcccccgcccatactgagccgcctttgtccccaggaaggacatacactctcatctaccggagagtcctggcggaagatgcaggagagatccaatttgtagccgaaaatgcagaatcgcgagcccagctccgagtgaagggtgaggtgggggctgaggggagggcggggctggacggtgtgcatgtgtggccagctggctcagcacaggcccggacgccccaggcctgct

SEQ ID NO: 207531 - DNA, 212 bp, Homo sapiens
  chr1:228473690-228473902
  hypo
ctgtcctggggagcgtctgtcctggggagcactgctggccaagcctgcccaggacggtggggcccctgagcagtctgtgcctttgcaggccggagagtgcacatcatcgaggacctggaggatgtggatgtgcaggagggctcctcggccaccttccgttgccggatctccccggccaactacgagcctgtgcactggttcctggacaagac

SEQ ID NO: 207532 - DNA, 113 bp, Homo sapiens
  chr1:228473932-228474045
  hypo
cgatgcccagcccgggggctaccacgtgctgaccctgcggcagctggcgctcaaggactcgggcaccatctactttgaggcgggtgaccagcgggcctcggccgccctgcggg

SEQ ID NO: 207533 - DNA, 84 bp, Homo sapiens
  chr1:228504692-228504776
  hypo
gtgggcgagcttttccctcccctgcaggtcgggtctggggcgcgccccgcctccagagcttgcgagtgcgtgggtgaccatcct

SEQ ID NO: 207534 - DNA, 258 bp, Homo sapiens
  chr1:228509454-228509712
  hypo
tcaggtgagcaacaagtttggccaggtgacccacagtgcctgtgtggtggtcagtgggtcagagagtgaagccgagagctcctctgggggtgagctggacgatgccttccgccgggctgcccgtcggctgcaccggctcttccgcaccaaaagtccggctgaagtttcagatgaggagctcttcctgagtgcagacgagggccctgcagagccagaggagcccgcggactggcagacataccgcgaagatgagcattt

SEQ ID NO: 207535 - DNA, 362 bp, Homo sapiens
  chr1:228528429-228528791
  hypo
gatccgcaacaaggcgcggaacagacagaactgcgcgctgctggagcaggcctatgccgtggtgtctgccctgccacagcgcgctgagaacaagctgcacgtgtccctcatggagaactacccaggcaccctgcaggccctgggcgagcccatccgccaggttggggagggccaggggccggggccgggagatgcatgtgatgtgggtgggtattggggtgctgggggcttgtatctggggctgccaggaggtggcggtgtgtgcatgagttgggcagagcactgggtacctgggtggctgtggggcctgcaccgctgggcaatctggcccaccacaggctgaccgcagcccacaccctccc

SEQ ID NO: 207536 - DNA, 49 bp, Homo sapiens
  chr1:228529382-228529431
  hypo
aggtccctgcctgggtgggtgtgaggggtgggctcgttcctgggacaga

SEQ ID NO: 207537 - DNA, 91 bp, Homo sapiens
  chr1:228552502-228552593
  hypo
cttcacaggcctgacgctcgttcactctgtccgatgcctctgcagagtgggcatgggttgtcctgctctggccatgaccccacccaccctg

SEQ ID NO: 207538 - DNA, 82 bp, Homo sapiens
  chr1:228552623-228552705
  hypo
cctgcttgaagctcacgtgtacccgactcctacagccacctgccctgtctcccagcagccgtgcccccgagggtgccacagc

SEQ ID NO: 207539 - DNA, 120 bp, Homo sapiens; identical to SEQ ID NO: 197999
  chr1:228646026-228646146
  hypo

SEQ ID NO: 207540 - DNA, 328 bp, Homo sapiens; identical to SEQ ID NO: 198004
  chr1:228870899-228871227
  hypo

SEQ ID NO: 207541 - DNA, 133 bp, Homo sapiens
  chr1:228919237-228919370
  hypo
aagtgcttattacttcccaacgacggggagatgcacacaagcatctaatgtggtgggtggtactagatcgccatgattacctctgcagccacttttggacgctcgatgcagccacattagacactgaccgagg

SEQ ID NO: 207542 - DNA, 44 bp, Homo sapiens
  chr1:228919416-228919460
  hypo
aagccagccagtcctggggctccgtcagcatctggtccactgga

SEQ ID NO: 207543 - DNA, 54 bp, Homo sapiens
  chr1:229073283-229073337
  hypo
tggcaaagtcatctccggccctacgttctcaggtgtgaacggtggagtcagggg

SEQ ID NO: 207544 - DNA, 267 bp, Homo sapiens
  chr1:229104403-229104670
  hypo
gattacagacgtgagccaccgcgcccggccccacatcaaattacttttattgattttcagatgtgaaactaaccttgcaacttgatcttgatacattgccttttctatctagtgccgggtcgcatttgctaaacatttgtgtagagtttttctatctttaaatgagagttaccgtaatttttcttttttgcagttagaccaagaagatcacttccgtctcctggggacggcactaattcaaagctggctgcccgtgcctgtgagggt

SEQ ID NO: 207545 - DNA, 130 bp, Homo sapiens
  chr1:229155568-229155698
  hypo
tggggacctgaccccttccccgtcctgccttcttgggatatctgaggaccagagaggtagctctcgagacaagggccggaggcagcaaaaggaaagggcgacatggcccgctctcacactatccacccag

SEQ ID NO: 207546 - DNA, 163 bp, Homo sapiens
  chr1:229160202-229160365
  hypo
catgggctctggaggaccagcgcctctgactctctatggccccgggcaagtctccaggtctccattgcctcacctctaaagtgaacgtagagtctagaacgtaagccagtgcgtgctgacggtccccacaccgcactgccaggggcctcgggctctgctctag

SEQ ID NO: 207547 - DNA, 158 bp, Homo sapiens
  chr1:229202157-229202315
  hypo
atgtgggaaggggtgcggagcttccatgccctccctaagcgccacgctccaagaacctccatgtgtccagctatggggaagttccccacaccctgtcctcttgggtttttatggaagcttcgtgacatcagcattcctttccccgctttacagggtgg

SEQ ID NO: 207548 - DNA, 148 bp, Homo sapiens
  chr1:229252027-229252175
  hypo
taactcagtgtgtgcggccaggatccgtaatgatgtgttatggagacgagtaacgttgttggatactgagcagtgcgttcaggccgcattcctgtgggcacgcgctcaagtccatcatccctcagcagaggccgcgtatcacactgga

SEQ ID NO: 207549 - DNA, 143 bp, Homo sapiens
  chr1:229462409-229462552
  hypo
atgcccgatgacaggcgcatggcccagctggccactctcaaagggaacacagaaccacaagggcccagagcgcacctcgtgcacaggagcggacgcacagacgttgtgagtcttctggcttcctgtatcggtctgtttttctc

SEQ ID NO: 207550 - DNA, 150 bp, Homo sapiens
  chr1:229606406-229606556
  hypo
tgttgacaaggtcagaaagccgggagtggtggttcttgagaacaatggcggctgacagcttttcggcatgctcacagagcaacagtcgagtggccatcggtgtccctctaactggaaaactgcctagacgtccaaataagccaaccttgc

SEQ ID NO: 207551 - DNA, 345 bp, Homo sapiens
  chr1:229644893-229645238
  hypo
gggagatggggagagggttccttacctgtgtctagtcttcctccactctatcttctcactgccaacacaatgaattaaggcaaacgtaatgctgctcttgggcctgtaaatgcttcagtggctgaccattgccagtaggttatttgctaagctcctttgcaaggtcctatgtgatctaagtcaggttggcttttccgtccgtgttgtacttccagcacttcccacttgcactccacattccgagaacttaaaaacccaaatctccctccagtgcccatgtccatgtttctctcacctggaatgcactccctgccttgttggtccagaaggcgcctaccttccgca

SEQ ID NO: 207552 - DNA, 35 bp, Homo sapiens
  chr1:229678578-229678613
  hypo
aaaaaaccccattatcgggtggggtgtggtggctc

SEQ ID NO: 207553 - DNA, 200 bp, Homo sapiens
  chr1:230219680-230219880
  hypo
tggaggagctggagccgtggacaggcctgagctcatctccatcagcacccggatgttggcgtacatgcctgtgaaggtgagggtctgcacttccagcagccctccccctttgtatgtcactttggacacccgagatttccctgatttgcctggagcctctgtgtaatttttaatttgatcccctgcgtcccagtggactg

SEQ ID NO: 207554 - DNA, 219 bp, Homo sapiens; identical to SEQ ID NO: 198009
  chr1:230223230-230223449
  hypo

SEQ ID NO: 207555 - DNA, 307 bp, Homo sapiens
  chr1:230256221-230256528
  hypo
cctccacacatccctggagtcggctttggggaacactgtgttccatgtctaagtggagtcccgggcctctcccctccagtgtcgcctgtgccagctggacacgaagcagcagatcagtcatgaaaatggctgctcagctccgatctgcccttccttccgcaggactcagggacgcacagctccccagggctggtcacccaaacaacagcattcctttctcctcggcctctccccaggctgcttgggagagaaaacttccctcatcctcctccgcacacactaaatgccctgccggtatcttctttcc

SEQ ID NO: 207556 - DNA, 296 bp, Homo sapiens
  chr1:230266283-230266579
  hypo
tttactagggagtcagccagcgtgagtcacgtggtatcaggaacaccgggccctggggaccgacccctgtgtctcccctaagtaggatgctcccatgcaggagcagaaggacaagcagcccggagctgctgcccggctgtgcccaaagtgggatttctgctgatcaagagtctggaatttacactccagcaggtttggaagtctcggcgacagctcctgtatgttcagtcaagcttggctgaccatggctaaaccactttaatgagtttatgggacaccagcgaagctgcaaactg

SEQ ID NO: 207557 - DNA, 253 bp, Homo sapiens
  chr1:230308282-230308535
  hypo
tttgccaatcctctgggaaacgaatggttggactgcacagtgccctgcacgcatagattcgatcaatagtgcctaaggggcttgctcatcttccagccactgtacctcctcatccccacggcgcctttcctcctccactcccctgaccacttgcctttggcaactgagccaagaacacttcttatttttttcttatttggatcagagacagattatactgggaatattctattaacaacgaaacctatattta

SEQ ID NO: 207558 - DNA, 41 bp, Homo sapiens
  chr1:230393113-230393154
  hypo
cagtcatgcacctgtaacagcgtttcggtcggtgacagtag

SEQ ID NO: 207559 - DNA, 76 bp, Homo sapiens
  chr1:230393524-230393600
  hypo
gaagggaggtagagcgggaaattaatttagggtgatgcccaggagctttgttacacaactgcgctggcgtgctgcc

SEQ ID NO: 207560 - DNA, 216 bp, Homo sapiens
  chr1:230398195-230398411
  hypo
ccagctggagctgctgcacacccagagggagccgcctcagtcacacgccagcagacaggtgcaaatggagtgatgcagacagaaagaaaggaaatcacacctcaagatttattttctttctagaaacacccgccgggcagcagaggtctggatggatgaatacaaaaatttctattatgcagcagtgccttctgctagaaacgttccttatggaaa

SEQ ID NO: 207561 - DNA, 213 bp, Homo sapiens
  chr1:230404004-230404217
  hypo
atgcagacatgtggataattcgtgtagggttgggtgaagcttacctctggtctgtggatgacaaaacggacgaggtgcccacccaggttccgtactgtctgggtgttgggcctcttgtgatccctggccagcctcacctccgtgtttaatctctggagttcccactgtcactctgcagtgttctgatgatttatggaaggttggagaggtcac

SEQ ID NO: 207562 - DNA, 210 bp, Homo sapiens
  chr1:230404365-230404575
  hypo
ctggctcaccccccgccagcattgcaccttaattaccgcacagctagtaacacgagacagagtctgggccctgtggaggtggcaggtctacgggaaccaaagactttgtctgtgtagctgctgcctgtgaccctcctcacctgccctcaggaggacagcctgtgtcccgccttcagggctgtggccctcaccccccggtcctgcccagta

SEQ ID NO: 207563 - DNA, 168 bp, Homo sapiens
  chr1:230415001-230415169
  hypo
tcctttgcttgtgcccacactctaaggcactctcctgtgtcttgcagaaatgggaacagatcgagggcaactccaagctgaggcacgtgggcagcaacctgtgcctggacagtcgcacggccaagagcgggggcctaagcgtggaggtgtgtggcccggccctttcgc

SEQ ID NO: 207564 - DNA, 118 bp, Homo sapiens
  chr1:230821541-230821659
  hypo
tgctgagcaccagcccggcgggtccttgctgggacctcggattgcagtgctgccctttctctggggacagcgtgagtaacagacactcaggtaaaccagtcatcgcagtgtgaggagt

SEQ ID NO: 207565 - DNA, 345 bp, Homo sapiens
  chr1:230882795-230883140
  hypo
ccaacctcccttccgactacaaaactctgccattctctgatgcaggagatgggactcaagaccacaccgtgcacttctccgtaaagccacctcctggaccagttgggtttcttgctccttttccttctgaagcaatcctctctctcccatgaggccccctgagcgcactaagcagaggtgccgcctctgagtggaatgtgccaggccccagagctgcctctgagtctgcaggagtgcagagtgggcagagggctctctctgctgttttccatcagggcgtgtcccatctcagtctaacagggaggtgcccagaaaataggtggaggtgagggccactcagcccag

SEQ ID NO: 207566 - DNA, 359 bp, Homo sapiens
  chr1:230898511-230898870
  hypo
gctggaaaaagcctacgccaagtgagtgacagcttccccagctcaggcagcctcccgacaggagtctctacactagtctttgtagtgagcatctaagggctgggaaaaaatcagggctctgggtttgcaggtgaggctcggcaggacccaaccctctcagggctcaagcggggttggaggtggttttcctgtcgtagcctagatgtgcccatctttgggagcagtggctacattcatgaccctttttctccctgggccatgaatctggcctttggaagagctgggaaggcaagcggaggggaattctggctgtgccgacagcacttagtgcttcacacttccctcggacactggcatgg

SEQ ID NO: 207567 - DNA, 480 bp, Homo sapiens
  chr1:230979422-230979902
  hypo
cctcccctcgggaccgctcagcattgatcttccagaatgacgcttcctcctccttcctggtggggcccagggcgtccaggctggaggacctgctgccttgggaggacttgagggcctgggagccctgggaagctttggacagtggtctgggctcgctggcggcggtgccgttgctcggctcctggatggatagggcggagatactgaactccatctgactctagggtgggacatgagaaaggacagaaaaaagaaagagatcctgagaatcgaccgtcacaagtgtgccagctcacgcacccctcctcagcataaggacgcacaccagccacacacgagttgttgcccatgtgctggaactgtctgtcctgagtggtgggtatggtcaggactcccatcgcacacctgaaatgcatcagaagcttaaatgccaaggccgggtgacagagtgtgggtggtggtcccctcccaaatctcatg

SEQ ID NO: 207568 - DNA, 120 bp, Homo sapiens
  chr1:230980022-230980142
  hypo
cctcatgagatctggtcgtttaaaagggtgtggcacctccccctgactctctccctcttgctcctgctctgccatgtgagatacctgctctcctccgccttccaccatgagccacagccc

SEQ ID NO: 207569 - DNA, 180 bp, Homo sapiens
  chr1:231037685-231037865
  hypo
ggcaaacacactaggcaacattcaagagctatgacaggcaagtcacttctcccacctgagcccgtttgtcacctaagtggggataatactagcacttatctcacaggcctcttcaaaggattaaatgagtgaaacaatgtacaacacttagaaaaaattggccaggcgccgtggctcacg

SEQ ID NO: 207570 - DNA, 499 bp, Homo sapiens
  chr1:231038105-231038604
  hypo
caataaagagagactctgtctcgggattaaaaaaaaaaaaaaaaaaaaaaaaaggaaagaaaaatgccagccgtagtaagtgcttaaaacacattagctcccgaagggccccaaaccctggagacagaagcatccggttgcaacccctcatccctcgagaggtggcagcaagccttatagggaagcccaagcccaagcccagtgtggcatagaatagagcagggggcccgcagggagcctccacaatggcaggagttctgcacgctcagtaccggtagcccagggctctggaggtagagaagtctgcggaccagccggaggaggccgaagaggcagcgcatgcgctgttggccagcggacccgagcgggcagaggtcaatcaacagtagacgctgtacccactgaggcttgctgccctagcacagggagcatgagctaaacctcagtgcggaggatctgggcaaaggcccgagggtggccaagacgcctggctcaggaa

SEQ ID NO: 207571 - DNA, 201 bp, Homo sapiens
  chr1:231122192-231122393
  hypo
gaaggtttttacactcgcaactcttctattttatcttctcagagtttccaaatgttatgcgtttgaattgtagccattccagtagtccccgttctctttggggtatatgttccaggacccacagtgagtgcctgaaaccacagatagtatggaacccaattaccatccatcggaacacgtttctgttcgtgccttccaccc

SEQ ID NO: 207572 - DNA, 40 bp, Homo sapiens
  chr1:231127690-231127730
  hypo
ctactgctaccctccattccctccacggctgccacactgt

SEQ ID NO: 207573 - DNA, 228 bp, Homo sapiens; identical to SEQ ID NO: 198012
  chr1:231297569-231297797
  hypo

SEQ ID NO: 207574 - DNA, 31 bp, Homo sapiens
  chr1:231409278-231409309
  hypo
gagccaccgcgcccagccagaaattttttaa

SEQ ID NO: 207575 - DNA, 126 bp, Homo sapiens
  chr1:231475548-231475674
  hypo
ggaatgtgttccatccgtctcagcgaaccccttttgaagttgaggccaagaaaggatcttgtagaggtatttttcgtgtaaacttgcttcctagcgcagtaatttacaaatacttgtcaatgattt

SEQ ID NO: 207576 - DNA, 90 bp, Homo sapiens
  chr1:231476372-231476462
  hypo
accagtgtgagggcacgcttcacatttagagctggtacttacttctgctagcagaatggagcagtgggagctgaggcaggaggatctctt

SEQ ID NO: 207577 - DNA, 204 bp, Homo sapiens
  chr1:232192429-232192633
  hypo
gcgtgagccaccgtgctcggccgactttgtcttttttaaggttgaatccccagcgcgtaaaacaatgtccggcatgtagacaatcaatcaacgcttgttaaatggaaaaaaattacttcagcaatggaagcgtggaagtaatgcccttacgtttgactgtgttttatctaatatcattgggccgactcaggaattcttgtgaag

SEQ ID NO: 207578 - DNA, 198 bp, Homo sapiens
  chr1:232566620-232566818
  hypo
ggtggggagctccagcggagacacaatctcagtctcctctagtgtgcacacaacctgcgactcaagagacacaaacccctttctcacctcattctggacactgcctcgctctcactgagcattagtgccatcaaaccagtgcgtggaaatgcataaaccctgggcttttgcattaaaactgtccgaatgggctccttt

SEQ ID NO: 207579 - DNA, 60 bp, Homo sapiens
  chr1:232649854-232649914
  hypo
aaggacaactaaggacgaggtcgttacttttcccatcaccctcatcggcatccaggttct

SEQ ID NO: 207580 - DNA, 610 bp, Homo sapiens; identical to SEQ ID NO: 198016
  chr1:232765595-232766205
  hypo

SEQ ID NO: 207581 - DNA, 61 bp, Homo sapiens
  chr1:232909165-232909226
  hypo
aacggcagaacagcgcggcagagaaggagcgaaaagaaggaacatccggaggagttcggct

SEQ ID NO: 207582 - DNA, 203 bp, Homo sapiens
  chr1:233085194-233085397
  hypo
caaggccactgccacgtcattcgttggccggaacacttgcagtggtaaagtgagacggagaagctatttaattctttgcaagaggagatctttatacactttggtgtgaaagtaaagagggaaaactgggcgtcctatgcatggctgaggacgggaagcctgcctacaccagtggttctcaaccctagcgcacttcaggaact

SEQ ID NO: 207583 - DNA, 32 bp, Homo sapiens
  chr1:233264703-233264735
  hypo
gacagtgtgctggcagccctcgctcactcttg

SEQ ID NO: 207584 - DNA, 314 bp, Homo sapiens; identical to SEQ ID NO: 198020
  chr1:233749768-233750082
  hypo

SEQ ID NO: 207585 - DNA, 82 bp, Homo sapiens
  chr1:233799535-233799617
  hypo
caagctggtaactacatttgcgaatcgcttttcagttggctttttttttgcgggggggtggggacagagtctcgctgtgtca

SEQ ID NO: 207586 - DNA, 211 bp, Homo sapiens
  chr1:234541033-234541244
  hypo
agataaggaaacaagcgcagagacctggagatgcttatgacactgcagcctgcttctgcaccgtgacaggtgcggggaaagagaggcagacatgggaaccaccgtgggggcttcacagacactgggtcctgcaccgctccctcaccccatccacgtcacttgcttgatactgagcttccatgtatgattttgtctgcggaataggagagtt

SEQ ID NO: 207587 - DNA, 161 bp, Homo sapiens
  chr1:234541509-234541670
  hypo
cccagtccaagccctcgatgctccaggacggcagcatgaggatgtggaaggagaagctgacacagtatgggcactgccccctccctgtgggccctgctggaggagagtgagggcgatgaggttgacgagggctccttaccctgctccgtgcatgctttcca

SEQ ID NO: 207588 - DNA, 181 bp, Homo sapiens
  chr1:234691150-234691331
  hypo
gagatacacaacattcggtgggaggggaaagcctggatgtaagggtcaattataccgccttatggggaaaaaagtatccaactcggagtctggaatgggaatgacacacagctggagaccattttcatcaggtgacctaaggcacgctgctccagcttcatggtgacgtgattctgtgttg

SEQ ID NO: 207589 - DNA, 197 bp, Homo sapiens
  chr1:234724609-234724806
  hypo
gacccgacagaggcaaaacagctttgtaaaccataaatcattttgttcggagtcaacaggatgactttttcccctcacacaatttagaattatgtacctgttgaggtagcaacgccctcgtttaatcccagccatgtttggtccccaaatgcctctctcactcgcccagagtgatactgaggccacaaaaagctctg

SEQ ID NO: 207590 - DNA, 230 bp, Homo sapiens
  chr1:234724836-234725066
  hypo
ttccaacgtggtacacaggtacctggcgtgtgtctgctcagacagtggatggcccttgttcaaagactgatgggaacacctagtgtacgaggtggcgccggggccgcccacaccaacaggccgtgtgctcccatctcactgtgcacgaggaaccggtgtgcttttcggccaggctgcatcaccctccctcccttggctttctgtgtgacgtgcctgtgccagagactgca

SEQ ID NO: 207591 - DNA, 36 bp, Homo sapiens
  chr1:234795442-234795478
  hypo
ggggcagggctggagccctgcggatgctctgatgag

SEQ ID NO: 207592 - DNA, 159 bp, Homo sapiens
  chr1:234795508-234795667
  hypo
ctgcttaagcagaggtaaaggtccagctttgtaatagccggagtgtgaggatccctcgcactgatctgcccacaatgggccgccggcaggcccagagaccctcaagtctcatcctcagtggtctaccgagctgtgcacggccagcttccctgaattcac

SEQ ID NO: 207593 - DNA, 141 bp, Homo sapiens; identical to SEQ ID NO: 198023
  chr1:234828214-234828355
  hypo

SEQ ID NO: 207594 - DNA, 324 bp, Homo sapiens
  chr1:234845143-234845467
  hypo
tgaagagacctctttcaggcagagggaacaaaataagccacagtaagtatgcttggacctgcatagaagtagaaggaagatgaggggtgactgaaaggaagagcagtcaaagatgaggcggggaagcaagccgactgggtgtcaggagcaggctcagggacttgggcttggccggtgagcagtcaaggtgcacagagctgttcctgggtagcgcctctcatggtgccgctgactccaccggggtgaccgctgtgcccggggctgctggtcaggatgcaaaagcactttagagtgaaggtcacctcaggcaacaggcaaaacaga

SEQ ID NO: 207595 - DNA, 133 bp, Homo sapiens
  chr1:234868847-234868980
  hypo
tggtcctggggagggcgagggttccgacagtgggctccgccgaccatcactgccgcaagggatgctggtcacctgcctcagcaacacccctggtgtgcagttcaccggggagccccatcggtggacccaggca

SEQ ID NO: 207596 - DNA, 180 bp, Homo sapiens
  chr1:234869963-234870143
  hypo
attagatttttaaaaattaaatgagtttgttagaaggtgacaagtgctttttaaatgaaatggagtagagtggatggagagaggtggggtgaggaagggcacagctctaagccatgtgaagggtgggcttcttggcaaaggtgacggctgaacagagacttctggaggcgagggagcgag

SEQ ID NO: 207597 - DNA, 284 bp, Homo sapiens
  chr1:234871741-234872025
  hypo
accccgggagcactcgatggatggtattgactggctgactcaggccccgtctgcccacatgagccattttgagcagctttaactaaaatgcggacagaatcagtgagagccaaataagcagtctggtcgattctcttccctcccaccctattccgaatgcctcctggaaactgctggtcctcctcgcccacggttctctccttcactaggggcccagagtctgcaaagcgcccatctcctctccagtgccgtttgcatcctcagagcagcgccgcaccttgaac

SEQ ID NO: 207598 - DNA, 99 bp, Homo sapiens
  chr1:234893900-234893999
  hypo
ggtggatccaaagttgctctggaaagtcaagtctcgaatgccccaggaacgtgaagccttcatagagccagcgaagggggtctgcgtccaggatgtgga

SEQ ID NO: 207599 - DNA, 159 bp, Homo sapiens
  chr1:234895630-234895789
  hypo
aagcctctggatcaacgatatccaaagtctctgatctcagcttggaggtgctttgagcctctggccccggtgctctgcactgtcccagagaaaggggtgggccacttttggtcctaacaagcagttcaccaagaacagggcaacggctaaaagatgaag

SEQ ID NO: 207600 - DNA, 191 bp, Homo sapiens
  chr1:234957454-234957645
  hypo
tcatttactccctcacgtgttcatttattccatacaattttgcagagcttttttcatgggcttcctgcaaagcatctaaccgccaaccccagcgtctggttgtcactgtctggccgcagaaccagctttccctggctggacctgtcttcagagtcaggttgcttgccttgcagccccgcacccactcacat

SEQ ID NO: 207601 - DNA, 169 bp, Homo sapiens
  chr1:235037109-235037278
  hypo
aaacgtcatttcattaatgctcacggaggtccctcagtcgcttgggatccagcactcataatcccaaacatccactcttgtagccaggaaacccttctccgtggcttccccatattttttgccctatgtctttgtggggagggctaaggaaagccgctccctccaggtg

SEQ ID NO: 207602 - DNA, 79 bp, Homo sapiens
  chr1:235042107-235042186
  hypo
ccaccttgcccagccaataacttccaaactcttaccccagtgtccagcaccaggacggtggccacgtacatgcccccta

SEQ ID NO: 207603 - DNA, 280 bp, Homo sapiens
  chr1:235044523-235044803
  hypo
ggctgttaaacccaccgaatgcagacccaagtggggctggatgtgcacacacagtcccctgccactcgccgctgcctgctgggccttctccactgtggctgttacgtgtctcctcccagcaccctccgaggccgccttctcctatatttccaaagccagtctgtgtgtgcaggccccttgcctccagaggctccagcttcatctcaagaatcattcgctctctgttccagttcaccccaatgcacctcgcctcccatttctattgcgaacagagctctca

SEQ ID NO: 207604 - DNA, 76 bp, Homo sapiens
  chr1:235067968-235068044
  hypo
cctccctccagggctcgcatgctattcctgactcctagcaacccaaaaggtacagccccagcggcaccatagacga

SEQ ID NO: 207605 - DNA, 177 bp, Homo sapiens
  chr1:235129830-235130007
  hypo
gttcctgcagagtgacggtcacgcaagctgatctgaacctccactggcttctcagactcaaaccaagcacttctcttcctgggatcacgagttctattcagagtgggccctggaggccttcaaagctgggccccaggttctcacggtgaactaaactttctccgcaaacccccttgg

SEQ ID NO: 207606 - DNA, 206 bp, Homo sapiens
  chr1:235317095-235317301
  hypo
atatgagcaggataccgagctaaggattgcaacagttactatcacatgaacatgcagaagcaaagggcaggttttgcttcagtgatcgtcacacaacggaagaaactcaggacatcttcattctttaaacaacacatatttactatgcacaaggcaccatttcaggtgtcaagagacagaacgaggctgggtgcggttgctcatgc

SEQ ID NO: 207607 - DNA, 242 bp, Homo sapiens
  chr1:235613456-235613698
  hypo
cagacttgcactcagattatcgtttgcctgccctgattttagactctgctaattcaagtccctgttatcttgcttgacatcgacaaggatcaccgcaccgttccttcagtttccacagttccgtcagttcccacggagaatactgaggagaagacagcattcctgtctcacaggtcttctcacacagccacagactgtcctgttgagaaacaaccaaagccgatctgagagtggtgaaactg

SEQ ID NO: 207608 - DNA, 70 bp, Homo sapiens
  chr1:235665736-235665806
  hypo
aatcccatttattatctgaccagatatacagtactcattcaaagccaaagttaattaacataactagtat

SEQ ID NO: 207609 - DNA, 42 bp, Homo sapiens; identical to SEQ ID NO: 198026
  chr1:235813161-235813203
  hypo

SEQ ID NO: 207610 - DNA, 31 bp, Homo sapiens
  chr1:235855354-235855385
  hypo
gggcacagtggctcacgcatgtaatcccagc

SEQ ID NO: 207611 - DNA, 535 bp, Homo sapiens
  chr1:236156643-236157178
  hypo
taccattacaggtaccgctgtggcaggccccactgggtatttacaccctacacgtgtgtgtgttgggtggggaaggagaaagaagagggtaagagaacagagagggtgaggaggagaggaagcacggggaggagcggggtaagtgagagggaagaagggtgcagcaggagcgggtggggctggagccagtggaacagttcaagctttaggtccagcagaagagcaaagagcgtgttcagcaattccggtcccccgaggtccttctcaggcacacgcccaagcacggcctgcacccacttacacgggggcgtcatcccgggcctggtcctggtgccctccacctcgcggccgtcgcgatccacgcaccagcagtagccggtgctgccgtggcactgggtgggcgcgtagtgcccgtgcgcatcgcactcaggaacgaacagccccggaggaatgggtcgctgtgggtctgtcgcccccgctgccccgagaatgtgttctcgctcgtgctggcaccgggttttctccacctctatca

SEQ ID NO: 207612 - DNA, 181 bp, Homo sapiens
  chr1:236189253-236189434
  hypo
gtacaggacgaacacgctgtccaccgagagctgctgggtgctgggcagggctggccgggagtcatcgtggacgcattcctggaaggtgatggtctggcgccactggtaagtgtagatgcgtgaaggagatgccccatctcgctcgggctcagtcaccgtgtactcccgggtggaggaggaa

SEQ ID NO: 207613 - DNA, 282 bp, Homo sapiens
  chr1:236192826-236193108
  hypo
cctgggacacagctggggctcacctgaggtggagtagtggtacagctccgtgtagggctcaatgtgcacggaggagccgaacggaatctgcggcacgcggccctccagctccgtgtcgatggtcaggtgcccatgctcatcgatgccgctgaaccgctgcttaatgaccagattgcccgggtgccccacgaaggtcacctcagcctggcgagtgaactcaccccctgaaaaacaagatgagactgtcactttgctgactggggagcgcgcccttctgcccgc

SEQ ID NO: 207614 - DNA, 84 bp, Homo sapiens
  chr1:236194737-236194821
  hypo
agcctctcctttcttaagacggccacactttatgtatttatatgccataacttttggaggggttaccagcgtgcagcctggatg

SEQ ID NO: 207615 - DNA, 268 bp, Homo sapiens
  chr1:236212016-236212284
  hypo
gggcccttggtagggggccacggattcccaagtgacaaccaccgcgctactaggctggaaagagatctccgggaaccctctgtggacacactctgctgctcgctgagtgatggagggggataagtcttctcgataataaaccttccccaggccatcggtcgtgtccaagtccgccaggaaaggggcgactgcaccgaatgttggtgggaagagcccgggatgggattctttggccgggggttcactcgtagcaatgatgccatttgtg

SEQ ID NO: 207616 - DNA, 179 bp, Homo sapiens
  chr1:236274571-236274750
  hypo
ttcaccatcactccaggctccgagcagatccacgccaccattgagcgggacagctacgcacagattttgaggaatgtgggtggcatcgtcctggccaatgcttgtggcccctgcattggccgctgggacacgaaggacatcaagaaggggaagaagtacacaatcgtcacctcctacaa

SEQ ID NO: 207617 - DNA, 210 bp, Homo sapiens
  chr1:236339561-236339771
  hypo
tgtatcatgacacatgaggtcgaatccctaagacttcacagcgctctccatcatcacacagctcttggggggtggggggcactgttcccatcccactgcagccatgctggggtggcgggtcccctcctgcatgtccgactcgctcatctctccgatgcaagtactttgtccctcctccagggcacacacgttccttactgtggcaccttc

SEQ ID NO: 207618 - DNA, 205 bp, Homo sapiens; identical to SEQ ID NO: 198028
  chr1:236444198-236444403
  hypo

SEQ ID NO: 207619 - DNA, 264 bp, Homo sapiens; identical to SEQ ID NO: 198029
  chr1:236444643-236444907
  hypo

SEQ ID NO: 207620 - DNA, 450 bp, Homo sapiens; identical to SEQ ID NO: 198030
  chr1:236445121-236445571
  hypo

SEQ ID NO: 207621 - DNA, 120 bp, Homo sapiens
  chr1:236540755-236540875
  hypo
cagcccttaacaaattaataatagttattttaaattcccattctgataattccaacattcctgccatatatatatgagtctgattctgatgcttgcccggtctcttcaaactgtattttt

SEQ ID NO: 207622 - DNA, 56 bp, Homo sapiens
  chr1:236561305-236561361
  hypo
cccacactcttctcccgcctggtgttttcacaccattccaacgtaggttttcacac

SEQ ID NO: 207623 - DNA, 106 bp, Homo sapiens; identical to SEQ ID NO: 198031
  chr1:236850212-236850318
  hypo

SEQ ID NO: 207624 - DNA, 100 bp, Homo sapiens
  chr1:236907979-236908079
  hypo
tgcgggctctgctgcggaagcacgaggcgttcgagagcgacctggcagcgcaccaggaccgcgtggagcagatcgcagccatcgcgcaggagctcaagta

SEQ ID NO: 207625 - DNA, 36 bp, Homo sapiens; identical to SEQ ID NO: 198032
  chr1:237205188-237205224
  hypo

SEQ ID NO: 207626 - DNA, 45 bp, Homo sapiens
  chr1:238017558-238017603
  hypo
gcaataatttcctacattgccgaaggaaattattctcccaaatac

SEQ ID NO: 207627 - DNA, 82 bp, Homo sapiens
  chr1:239509033-239509115
  hypo
taaaaaaaaaaaaaaaacgcaactattcaattccgtcaagttgaggaatagaacaaatgtcgcccatttctggcattccaca

SEQ ID NO: 207628 - DNA, 45 bp, Homo sapiens
  chr1:241271635-241271680
  hypo
acaaaaattgatgcagaaaagaacgttggacagacaagtcaaaca

SEQ ID NO: 207629 - DNA, 150 bp, Homo sapiens
  chr1:241434339-241434489
  hypo
atcccttttaatttctgcacgggccctactttaagtatcgctgcagtggcgaaagcattcatcattgccgacctgtgtggaatgtgaacctgagtattttctattggcgggaacttacgtggctaaaacgtctcctttataatgtggagc

SEQ ID NO: 207630 - DNA, 50 bp, Homo sapiens; identical to SEQ ID NO: 198037
  chr1:241520533-241520583
  hypo

SEQ ID NO: 207631 - DNA, 147 bp, Homo sapiens; identical to SEQ ID NO: 198038
  chr1:241520612-241520759
  hypo

SEQ ID NO: 207632 - DNA, 97 bp, Homo sapiens; identical to SEQ ID NO: 198039
  chr1:241520789-241520886
  hypo

SEQ ID NO: 207633 - DNA, 84 bp, Homo sapiens
  chr1:241541312-241541396
  hypo
tggaatgtatgcatttgatacgctaggcagcagctgataatgaattctgaatattgggattgtctcttttttttgacggagtct

SEQ ID NO: 207634 - DNA, 88 bp, Homo sapiens
  chr1:241559203-241559291
  hypo
cagtcaagccctcagatgaccgtagtcaacatcggactacaattacccaagagacttcaggccaggtgcggtggctcacacctgtaat

SEQ ID NO: 207635 - DNA, 80 bp, Homo sapiens
  chr1:241753331-241753411
  hypo
tcaagctggttcatttttcagaagaacatggagagatttcttcatgcgattatgccatcgacctttatccctctctatac

SEQ ID NO: 207636 - DNA, 325 bp, Homo sapiens
  chr1:242767712-242768037
  hypo
attggagaagtcgccggtgtgatgagaatgcccaatgtgccccaagcagccgtctgtggcagaagccagccctcacaaatcaaaacaccactctgtcgtgcacggtgacgtggaaagtttttgaagagggaatctctgccctacgcagttagcggctggggcttgaccacaatgcataatgagcgggcagcggctgagctgcagatgatgcctgctgctctggagtccacgctactgtccctcttttcccgggtaaagctggaagctgaactgggaaccccggggcaatcatcaagatgcagaatgtgaacgataatgctgcaac

SEQ ID NO: 207637 - DNA, 161 bp, Homo sapiens
  chr1:243479808-243479969
  hypo
tccacaatagatgattgtcccgcacagatgccgtcctgccacgaaggctcttagcctttctggctgctccgcccgccgctcgccaagtgaggacagagggtctttctctggggtgtgctttatttcatatgtgctcagccggcctaccctggctcttctaa

SEQ ID NO: 207638 - DNA, 131 bp, Homo sapiens
  chr1:243566401-243566532
  hypo
gtgatctgggctggacgttgccggttgcctcatgtggagcttcccacataatcctgataatatcattttattaatgagaaaacagaggcttagattgagatgaggttccgccttgacgtgacacagctagc

SEQ ID NO: 207639 - DNA, 685 bp, Homo sapiens
  chr1:243637530-243638215
  hypo
gaaagaacttgggacgtgagcatggagttaatgaagctttcacccatctcctcctctcaaccgtcatcccggtttaatcctctccttctgccaaagtccagaggccctgcgagcccccgtggagtcgcctgagccagatgctccgcacccagcctccccaagccccggccggctgccctccaggtgcgggctccaggccctctcgcgcggcttcgggactcggccgagcccgggcctagtatccagagtcgaagcagccgccgggaggtctgggtgggcagggaggccgagaggacggtgcaccgcccggcagcgctgagacctggccgcctaggccaccctgcccggcgagggagaggggtgtctcctgcctggagcgctccgcggtggcccgagagcaggtgctggcgtgcgggaggcgcacgtggagccctgcggtctgttccacctgcagaggcacaattgcccagcgtggggtggaaggcaggctgggagctcccgggacgcggcgtggcagcgcagggctcggctagatgcgctcctcctcggactggttgagtaagggaggaggctcgtcctgaacgtgcacagccgctcctaactccgtcaacggaatttcactcaactccgagactgaagcattttattggcagcatttagaatcggggaaaaatctaccttctgt

SEQ ID NO: 207640 - DNA, 39 bp, Homo sapiens
  chr1:243750610-243750649
  hypo
ccttaaaaaataaaaatatacgctgggtacagtggctca

SEQ ID NO: 207641 - DNA, 331 bp, Homo sapiens
  chr1:244142626-244142957
  hypo
ccaagcagcttctgctgtacagtgcgggtaagtgttcaggagtgaactgccccgctttgttacatttcatggaaggactgtggcctccatgccagagctcttcgaacaaaaacactttcaatcccctcattctcattttgtggggattcccagctgaacgggcctggctttttgggagaagtttccagcccgtagctgccttggccaggagtgtggggggtgggacggaaggtacccacgagggtggcgggtggggccatcggccaggagtgtgggggggtgggacggaaggtacccaggagggtggcgggaggggccatcggccaggagt

SEQ ID NO: 207642 - DNA, 216 bp, Homo sapiens
  chr1:244345254-244345470
  hypo
aaatggtacccagcaaaagccggaactagcagcagcctacggtggcccaaccacgagcaggccaattgtccaactccaggatgctcggcaccagtccccaatctccaagccgccaggcctccccgggctcggtgtcagagcccatgctgctgtcgggagcagtcatgcgtgttacctcggcagctcaggcctcacggagctgtgccaatttacctt

SEQ ID NO: 207643 - DNA, 143 bp, Homo sapiens
  chr1:244641921-244642064
  hypo
cacaagtagacagagcgatgtgggagaagccagatgaatatttattcatttttcaatccttatgatgtgaaacatatttgaatttgtctctttgagtctatgagtatttgccaatttcaagaacacaattcatgccgggcgcg

SEQ ID NO: 207644 - DNA, 317 bp, Homo sapiens
  chr1:245032200-245032517
  hypo
tatcgtataccaattatacctccataaagctggggaggttgggggaggaagacaaaagaattcaggcctgcggggaatgatgggagtgggtaggagaggagagaggggagagaggaaaacacagatcaccagcagcctcgtgggtggttttgtaaaggactttggcttttgctttctgctatggactgaacgtttgtgtccccacaaaagtcctgtgttgaaacctaatcccccatgatattaggagctgaggcctttggaggcaacgaggtcatgagcgtggagccctcatcaatgggattagaaaatttatacag

SEQ ID NO: 207645 - DNA, 90 bp, Homo sapiens
  chr1:245032603-245032693
  hypo
cactgaggcgctgggcttcttagcttccagaactgcgaccaataagtgtctgttgtttataagctactcggcttatgatgtttgttagaa

SEQ ID NO: 207646 - DNA, 274 bp, Homo sapiens
  chr1:245254446-245254720
  hypo
gggcggagacggaggaggaaaggagtgtggtgatcctcggaacatcagcagacaggctgttgatgataggaacacattgcagcggggaaggaggatggctgagatatgaaatacccttcaaggtggacgcatacccaggggcatgtcattcggtggcaggggccagcacggacatgcagcactgaggcgtgtgctagcgcccagtgcgtcgacccaggcacggacttgtttggagcatacaggacagctctgcgttaagacctgtaagccatta

SEQ ID NO: 207647 - DNA, 97 bp, Homo sapiens
  chr1:245281663-245281760
  hypo
tgtggcttcctgaaggccctcgaagtttgcccctgcagctttcttcggagaactgggagaacaccatgtgtcaccttgtggagcattttaaaaacga

SEQ ID NO: 207648 - DNA, 99 bp, Homo sapiens
  chr1:245497279-245497378
  hypo
gacggagtgagactccgtgtcaaaaaaaaaaaaatctcctctacgagtggatgtcgggtgaggtgggctggggtgggcgatttatttggggcttagaag

SEQ ID NO: 207649 - DNA, 499 bp, Homo sapiens
  chr1:245499094-245499593
  hypo
gaaaggaaggtcccacgcagggaaagaagagccccacgcggagaaggaggagtcccacgaagggaaaggagggtcccacgaagggaaaggagggtcccacgcagggaaagaagagtcccacgcggggagagccccatgcagggaaagagggtcccacgcagggaaaggagagtcccacgcagggaaaggagggtcccacgcagggaaaggagagtcccacgcagggagagtcccacgcagggaaaggagggtcccacgcagggaaaggagagtcccacgcagggaaaggagggtcccacgcagggaaaggagggtcccacgcagggaaagaagagtcccacgcagggagagtcccatgcagggaaagaaggtcccacgcagggaaaggagagtcccacgcagggattgctgttccactctgcatagccgctgggctttctgctgcacggatgccatctagaagaagcaccatccactgttctcagaaagaagagagagg

SEQ ID NO: 207650 - DNA, 143 bp, Homo sapiens
  chr1:245499775-245499918
  hypo
ctgctctggggagggatgctgttttgcctttcttcacgcacgtggaatcaggactagctggactggcaggaaaaggttctctctggaataatggtttgcttctctgcaggctcgtgcggcggctcgtgcggagccctgtgagc

SEQ ID NO: 207651 - DNA, 164 bp, Homo sapiens
  chr1:245525398-245525562
  hypo
cgaagagagtctcgcggtgagaaatactctgggtgagaatgaccctctgtgtctccttggtccttcacaccccatcaagcacaggcggatcaggagatgtaaaggtcagggagctggtaagcatcgacgaacaaaatcttcctgaggaagggccgggtgcggtg

SEQ ID NO: 207652 - DNA, 260 bp, Homo sapiens
  chr1:245530128-245530388
  hypo
tctgtaggaccctgctttctcggctgtgattcacgacaaactccaggtccccaacaccatccggaaggcatggaacgaccgggacaaccgctgtgacatttgcgccactcacctgaaccagttgaagcaggaggccatccagatggtgctgacgttggagcaggcagccggcagtgagcactacgacgcctcgccctgctccccgccaccgctctccaacatccccaccctggtggggtcccggcacgtgggtgggctcc

SEQ ID NO: 207653 - DNA, 192 bp, Homo sapiens
  chr1:245576466-245576658
  hypo
gccactgcttttagacggtgacagtgacacatacacgtaacgaagataatgaggcctttccactagcactgtagggttttcaaacatgttagatggatatttggaggttttctcaggaagaatcatgtatctttcacagtatcgcaagagaagaaataaattcctaagagtctaacacgcagatgtaagcca

SEQ ID NO: 207654 - DNA, 282 bp, Homo sapiens
  chr1:245582887-245583169
  hypo
agctgatgacagagagtagccgggagggactaacagaagcagtgctgaaccgctacaatgcagacaagccttccgcctgcagtgtcccagcctcgcagggctcctgcgtggccagcgagacttccacaggcacatcggtggccgcctccttctttgcacggtaagagagctgttcagatccttggttctttccgatgagcccagctggttagcccctcacgtggactagctcagctgaaacactagaaagagtttggggccgttctgtgatgtcattcatta

SEQ ID NO: 207655 - DNA, 151 bp, Homo sapiens
  chr1:245764442-245764593
  hypo
aaaccctcagaggtagagtgcgtcccacactcgggctccttctactgggacactggcttccggatctccacggagaactgttcttaagttagaaggcaagcacagcggggacacggtgcaggacacctgcggacccagtgcccttgggatt

SEQ ID NO: 207656 - DNA, 606 bp, Homo sapiens
  chr1:245848541-245849147
  hypo
ggcgcgcgggcatggcaccccgagtggcccacgtgcgggaggccaacgggggtggctgtcagtagcctgtgtcgtcaggggccttcaccacttgccgcgcacagctgggctcccggggaaactgccacggaaaggccaccacattaactgccgtctcactcacagtacacatccagctcgtccggcggggagagctcctgcgaagaaggccgcatgcgcaggcccacccagctgagacccttccacaccagggccacggtggaccctgacttccccatcgctcacctgtccagcgaccccgactactcctccagcagcgagcagtcctgcgacaccgtcatctacatcgggcccaacggcacggccctctctgacaaggagctcaccgacaacgagggccccccagactttgtccctatcgtgccagccctgcagaagacccggggcgacagccggcccgcagaggcaggagaggctgcagccggcaagtcagaaagggactgcctgaagtgcaacacgtttgccgagctgcaggagaggctggactgcatcgacggcagcgaggagcccagcagctttcctttcgaagaactgcctgctcagttt

SEQ ID NO: 207657 - DNA, 291 bp, Homo sapiens
  chr1:245849623-245849914
  hypo
ggcgtctagggagtccttgctgcagcccgaggtgcgtacgcccccggttggaatgagcccccaggttttgaaaaaatccatgtctgctgggagcgaagggttcccggaaactcctgtcgatgatgagcagcaggcagctactccttcagagtccaagaaggagatcctgagcaccacgatggtgacggtgcagcagccactggagctgaacggtgaggacgagctggtgttcacgctggtggaggagctgaccatcagcggggtcctggacagcggccgccccaccagcat

SEQ ID NO: 207658 - DNA, 373 bp, Homo sapiens
  chr1:245849944-245850317
  hypo
ggccctggcctcgggctcgcggcccgtcagcatcatcagcagcatcagcgaggacctggagtgctactccagcacggcccccgtctccgaggtcagcatcacacagttcttgcccctcccgaagatgagcctggatgagaaggcccaggacgcagggagcagacgctcttccatcagctcctggctgagcgagatgagcgcgggcagtgagggtgagcagtcgtgccacagtttcatagcccagacgtgttttgggcacggggaggcaatggcagaacctgtggcctcggagtttgtcagcagcctccagaacaccgctgtggtgtgcagagagaagcccaaggccagccccgacaacttgctcatcctgtct

SEQ ID NO: 207659 - DNA, 463 bp, Homo sapiens
  chr1:245925792-245926255
  hypo
tcgactggctgacaagtacccccagaccagaaaaggaaagttctccctgaggctgcaacagacggtgcggtgttcttcccccgcctgggtaaacatgccagacatgataaaaagaacagaatagctgagtgccctcagggaatcctagtgttactcccgttggccacacgctgactttatttagagatcaagtaaaggcgctatggctagcattcggcgaaaatgagcactgtggaatctggcttttaagaatcccttcggcatttgtcatttctcttaggtccatgtgggcggctgccagtgttttgggatcagccggcccctggacacgccctgagcaaccctgacgcccgatccttccaccgtcactcttctgcacacaagggcatggcggcccagagggtcctgttaaagtgtcaagcgcttcctatgatacccgcacgccaggtctccatacaaccca

SEQ ID NO: 207660 - DNA, 101 bp, Homo sapiens
  chr1:245986517-245986618
  hypo
ctcttctacattgttcaggacgattgcaaaatccatttctccttctctgtccctgcttctctgcccttcccccaagctttcttgctctctgccacacgtgc

SEQ ID NO: 207661 - DNA, 133 bp, Homo sapiens
  chr1:246160270-246160403
  hypo
aattggcactgaggcgacgtcgctggtgcggaacaccatgacgtctgtgtctagggtatgcgcatatgctgcgtttttccgcaggtgcctcgcagtctgctctggctcttagggcttccgaactcagttcagg

SEQ ID NO: 207662 - DNA, 205 bp, Homo sapiens
  chr1:246310295-246310500
  hypo
cgtgacagtgttcggcagaggacaatctgttcgagaataattagattccccctcgcttcttgcgttggtggcggaagcacccggagtatttacaatacaccattttgcttccatccgagtccatatgttcgctggtcaggttaaaactgaggctgcatggcacatttttcactgtaaacaacgctgccccggcaaaccctagggg

SEQ ID NO: 207663 - DNA, 116 bp, Homo sapiens
  chr1:246330193-246330309
  hypo
tatcactacagaggaaaactcgatacccactgaaggcagctgctctcgggtgccccttcccacaagccctagcgaccatcaatctgcactccgtctctatggattcatctactttg

SEQ ID NO: 207664 - DNA, 74 bp, Homo sapiens
  chr1:246582057-246582131
  hypo
ttctgctggccgacggcctcccagcgtgctggcatctgttgctgtgctcttctgcctgcgtgctcccctttgtc

SEQ ID NO: 207665 - DNA, 85 bp, Homo sapiens
  chr1:246783954-246784039
  hypo
agtcgtgcatacacacgatgggctctgggaacactacagggaggacggcttcagtcgtggtgcatacacacgatgggctctggga

SEQ ID NO: 207666 - DNA, 395 bp, Homo sapiens; identical to SEQ ID NO: 198042
  chr1:246887311-246887706
  hypo

SEQ ID NO: 207667 - DNA, 333 bp, Homo sapiens
  chr1:246930842-246931175
  hypo
gtgttcctggtagattttcacgaatgagctggcaggtctaatgggggaggcggcgtcccagtctgtgttgcagcagcattctcatcgggggtgcgcacaccatcgttactgtcgggcagtaactgccgcttgccttgccgcagtaggagggaaatctcaccttccttccacatactgtcttgagcctttgctaaattaaactgcactttttgctatttttgcctagtttttcgccaatctacactgattttggactgttacctaagttgaaaaataaaaggttgtcaatcgaatggtggtttaatgtttggacctgccgatgtatttgtatag

SEQ ID NO: 207668 - DNA, 99 bp, Homo sapiens
  chr1:247017214-247017313
  hypo
ttggcaaaaagaggacgacgaaaaaccactttacaggcttctcatcaaatacataaaagtagtatacaaactttattggatacaacaataaaatattaa

SEQ ID NO: 207669 - DNA, 93 bp, Homo sapiens
  chr1:247027354-247027447
  hypo
ttgctgaataaactccgaacactgagaaggccgggggacaggctgaacaaccaaatctagcagtctgtaatcagaatgcgcatttattgagtt

SEQ ID NO: 207670 - DNA, 199 bp, Homo sapiens; identical to SEQ ID NO: 198043
  chr1:247170806-247171005
  hypo

SEQ ID NO: 207671 - DNA, 224 bp, Homo sapiens
  chr1:247348621-247348845
  hypo
aaggtctgaggggcacgggatacaagggtacactgtggtcctgcaggaattcacccaccaattcatcttcagaagctactcccaaaggcttggagactgcctcagaggctggggctcggaggcggggcaggggtcaggcgtcaggccttagtgccttctgctggggtcggcgggtgttttctctttttactgtatttaactacattaatcgtgctcagtatttc

SEQ ID NO: 207672 - DNA, 337 bp, Homo sapiens
  chr1:247587055-247587392
  hypo
ttaccactcgcttccgatgacaggccccagctgagagcgcatctcaggtggatgtgtgtatactttccccctaacttcctgtctttgccgtagattaccgtaagaagtacagaaagtacgtgagaagcagattccagtgcattgaagacaggaatgcccgtctgggtgagagtgtgagcctcaacaaacgctacacacgactgcgtctcatcaaggagcaccggagccagcaggagagggagcaggagcttctggccatcggcaagaccaagacgtgtgagagccccgtgagtcccattaagatggagttgctgtttgaccccgatgatgagcattc

SEQ ID NO: 207673 - DNA, 466 bp, Homo sapiens
  chr1:247587422-247587888
  hypo
ggcggcagggattgggaaaacaatcctggccaggaagatgatgttggactgggcgtcggggacactctaccaagacaggtttgactatctgttctatatccactgtcgagaggtgagccttgtgacacagaggagcctgggggacctgatcatgagctgctgccccgacccaaacccacccatccacaagatcgtgagaaaaccctccagaatcctcttcctcatggacggcttcgatgagctgcaaggtgcctttgacgagcacataggaccgctctgcactgactggcagaaggccgagcggggagacattctcctgagcagcctcatcagaaagaagctgcttcccgaggcctctctgctcatcaccacgagacctgtggccctggagaaactgcagcacttgctggaccatcctcggcatgtggagatcctgggtttctccgaggccaaaaggaaagagtac

SEQ ID NO: 207674 - DNA, 289 bp, Homo sapiens
  chr1:247614675-247614964
  hypo
cagtatggtgtcattcacagcggtgtcagcacacgacagcttgatcacggccggcacctcacagaaaaagttgttcagcacctgccgcccgcagaatggcaattgcaccgtcaggaccacctgcacgaaggagttgccgaagccactgagccaggccagagccacgagctgctgacagagagcacggtgcatgagaacggcatagtgcaggggcttgcagatggccacgtagcggtccagggccatggcggccaggacgatgcactccgtgcatcccagccagtggaag

SEQ ID NO: 207675 - DNA, 32 bp, Homo sapiens
  chr1:248000443-248000475
  hypo
aaaattatgtgtctcatggccgggcacggtgg

SEQ ID NO: 207676 - DNA, 125 bp, Homo sapiens
  chr1:248074927-248075052
  hypo
atacaattcccactatcgaagggggtgtacccccctgttgtattgttcctgatatccagggcgtgaggaaatgatatcactcttaatatcgcagggtgtgtacaccctcacgttgataatgttcg

SEQ ID NO: 207677 - DNA, 320 bp, Homo sapiens
  chr1:248099385-248099705
  hypo
agagtctcagccagagtgatgtgctgggcagcgtccaattttaccaccctccgcatcaggtcaaacagctgcacgtgctccagagagtcttggagcatgtcactcttcagacgtttgcagttcttcacatatgggctgtcagagctgttctcatcccaaactaggccccatttgtagaaatatttctgcttcttggtacaggagatcacgcgtaatgggatgagccgtagggtcttcaacatcaccaggcgctcttggttttcacaggtctggaagagtgtgaaacctggtagtacttaaagagaaggtagcccatgccc

SEQ ID NO: 207678 - DNA, 338 bp, Homo sapiens
  chr1:249106193-249106531
  hypo
gactgacgtggtccgagaggcctcgcaagtgctccacggagtcgcacttctgcaggtctgaagccaccgtgcgcaggctcagcagactcagggtatcggtgtcgggggcggggccgggccccaggctgctgccctcctccagccccgcaccctcggccccctcaatcccgctgtctccgtcctccatgtcctcgggtcctgcctcggcccccacgggggaggagcgccgagggcccagggggtggggaggcagacccccgcggcgccgtgcgtgaatctgctcgctgatctgctccaggttacgaagggccacggagtagcgcgtcttggcctgagct

SEQ ID NO: 207679 - DNA, 174 bp, Homo sapiens
  chr1:249141905-249142079
  hypo
caccaggcgcgggcgcaccccttggggacaacctctgaccctgctgccccaccccaccgctgcgcgcagtgcccgcgagccttccgaagcggcgccgggctgcggagtcacgcgcgcatccacgtgtcccggagccccacgcgaccccgtgtctcagacgcccaccagtgtggc

SEQ ID NO: 207680 - DNA, 234 bp, Homo sapiens; identical to SEQ ID NO: 198045
  chr1:249167654-249167888
  hypo

SEQ ID NO: 207681 - DNA, 38 bp, Homo sapiens
  chr1:249172380-249172418
  hypo
ctttttttttttttttgagacggagtctcgctctgtcg

SEQ ID NO: 207682 - DNA, 123 bp, Homo sapiens
  chr1:249212002-249212125
  hypo
agatcatcgtgtgccgctggcacgatagcagcgtggtcaacatttgctccaatgctgtgggcatagagccagtgaggctgaccagtcgtcactctggagcagctaaaacgcggactcaggtcc

SEQ ID NO: 207683 - DNA, 192 bp, Homo sapiens
  chr1:249218264-249218456
  hypo
agttccccaatgggacggcgtgtgggagccacaagtcactggcccctatagcgtgggagcagtgtgagccatctgcagtggcattgtctcctccagcagcagcgtccatccagaaatccatctcccaggtcttgctggaggtcattctgtgtgaagttgatggagttctttcttatgcgctttttttctaag

SEQ ID NO: 207684 - DNA, 267 bp, Homo sapiens; identical to SEQ ID NO: 198051
  chr2:264204-264471
  hypo

SEQ ID NO: 207685 - DNA, 88 bp, Homo sapiens
  chr2:314740-314828
  hypo
gacgcacaaatcaaatcgagtccacagcgtgtcaggtgacaacatgctgaggagaaacgcagagccagacgaggggcaggcagaaggg

SEQ ID NO: 207686 - DNA, 127 bp, Homo sapiens
  chr2:314858-314985
  hypo
gccccgccgcagggctgtgaggccgccgtgggactggttccaccgacactggaggccaggcgtgggccctccgtaaagtcccccgtgtgggattacgggacaggcggcggaaccccagtttaaccct

SEQ ID NO: 207687 - DNA, 210 bp, Homo sapiens
  chr2:315015-315225
  hypo
tagaaggacctgagatggattcggttcgcggggaacggaggtgccctagctcccgttcacgaccgcatcttaaaaagcaaagtgagccagtttttcgcaaagatgatttcactggatttccgcgtttagcgtcacgatatgggggcctccgagcgcctctctgggcttccacacaatgggccacatcacgtttctgaccagagaaacaca

SEQ ID NO: 207688 - DNA, 270 bp, Homo sapiens
  chr2:318853-319123
  hypo
tgtgtgtggttgtgtgtgtgcgggtgtgtgtgcacgggtgtgcatgtgtgcgggtgtgtgtgcgggcacgtgtgcaggcgtgcgtgcaggcgtgtgtgcaggcgtgtgtgcatgggtgtgtgtgcgtgtcgtgtgtggccctgtgtgtgcgggcgtgtgtgtgggcgtgtgtgtgtgggcgtgtgtgggcacgtgagtgtgggcatgtgtgtgcgggcatgtgagtgggcgtgtgagtgtgtctgtgtgtgcgcacaggcgtgtgtgcgg

SEQ ID NO: 207689 - DNA, 449 bp, Homo sapiens
  chr2:319183-319632
  hypo
gggcgtgtgtgggcgtgtgtgtgtcgtgtgtgcacaggcatgtgtgcggccgtgtgtgtgtggacacgtgtgtgtgggtgtgtgcggaaacgtgtgggggcacgtgtgtgtgggcacgtgtgtgcctgggcacgtgtatgcgggtgtgtgtgtgtgggcgtgtgtgcggatgtgtgtgtgggtgtgtgtgggtgtgtgcgtgggtgtgtgcaggcgtgtgtgcaggcacgtgtgtgcgggtgtgtgggggtgtgtgcgcgggtgtgtgcaggcgtgtgtgcgggcacgtgtgtgtgtgggcgtgtgtgcaggcagaaagcaccaagatgtaaacagctggcgctcacttgtgcaccaccaaagctagaatgtttcatctcccctggtggcttagtaagtgacagaacagcaccaagatgtaaacagccggtgctatgcttgcagggagg

SEQ ID NO: 207690 - DNA, 320 bp, Homo sapiens
  chr2:364117-364437
  hypo
tgaacgggtttgaacggctggtctcccagctgatgatggaacccgacttacagtgttagagataaaagtgaacgggtttgaacggctggtctcctggctgatgattgaacccgacttagagtgttagagatgaaagtgaacgggtttgaacggctggtctcctggctgatgatggaacccgacttagagtgttatagatgaaagtgaacgggtttgaacggctggtctcccggttgatgatggaacccgacttacagtgttagagatgaaagtgaacgggtttgaacggctggtctcccggttgatgattgaacctgact

SEQ ID NO: 207691 - DNA, 60 bp, Homo sapiens
  chr2:503731-503791
  hypo
cagcctttggtctcgcgccaagacctgccccaccagatcccacccgccccaccggcctgc

SEQ ID NO: 207692 - DNA, 398 bp, Homo sapiens
  chr2:522158-522556
  hypo
gatggcacagaaccagaacccgacagcatggaacctgacggtggcttggaacccaatggcagcatggaacccaacagcacggaaccggaactgacagcacagaacctgatgtctgctcggaacccaacggcagcatggaacccgaaagcacggaaccggaactgacagcacggaacctgatgtcggctcggaacccaacggcagcatggaacccaacagtacacaaccggaaccaacagtacggaaccagaactgacagcacagaacctgagggcacagaactcgacggcacagagctggaacctgacagatggaacccgacggctcagaaccctatggcacagaacctgagggcagcacggaacctggaagatgccggaggagactggagcatgaac

SEQ ID NO: 207693 - DNA, 103 bp, Homo sapiens
  chr2:816916-817019
  hypo
ctccaaacacaaacagggaacgctgtgaggatgttgaaagggaaggggtggggtggagcacgtgtcttgagcctcccgctggtgcaccacagaggagagacac

SEQ ID NO: 207694 - DNA, 67 bp, Homo sapiens
  chr2:817049-817116
  hypo
gccgatggatgaaggtccctgtgcaggtgtcgcaagcccggcaaagacagaagacaaatgtcgagct

SEQ ID NO: 207695 - DNA, 183 bp, Homo sapiens
  chr2:817146-817329
  hypo
tcgggaattaatttaatcctctccacgactattagtggaaaatggtatcctcatcacataacgagacacattgaggcttcgggagcccagacacactttaacgggagtgaaggacaaagcctgggctcgaatctcaggctgtgtgcgccctcggctcactgcgttttcagcaccaggctctag

SEQ ID NO: 207696 - DNA, 202 bp, Homo sapiens
  chr2:817621-817823
  hypo
cagggagggaggggtggccccgtgacatgacggctccaaagcagatgcctggtggacccgcggagggagcggtgaccgggcgccaggtgcccacgtgtggctgtggctcagcggcctgcaggctgggcttggccctctgacagggatggggccgtcccccggtccgaccacctacacactcgctgcagagcagtgcctggtt

SEQ ID NO: 207697 - DNA, 90 bp, Homo sapiens
  chr2:875847-875937
  hypo
tgtctgtttgggagatgctgcgaggccggtttcccgtcgggctgcaaacggcagagcacgcggccctgtcccgggcaggctcggctccag

SEQ ID NO: 207698 - DNA, 258 bp, Homo sapiens
  chr2:910392-910650
  hypo
aagatggaaggccccttccacgctctcccaatgactgggcaccacagggatgccggtgctgaccgtgatccaggaacccacatgcagaagatggaaggccccttccacgccgtcccaatgactgggcaccacagggatgccggtgctgaccgtgatccagaacccacaggcagaagatggaaggccccgtccatgctctcccaatgactgggcaccacagggatgccggtgctgaccgtgatccagaacacacaggca

SEQ ID NO: 207699 - DNA, 153 bp, Homo sapiens
  chr2:923246-923399
  hypo
acaagcacccccatgattccaatgcaggcaggaccccgggatccgcgggcaacaagcacgctcatgattccaatgcaggcaggaccccgggatccacgggcaacaagcacccccgtgattccaatgcaggcaggaccccgggatccgcgggca

SEQ ID NO: 207700 - DNA, 409 bp, Homo sapiens
  chr2:1311461-1311870
  hypo
attagggtccctgcttctttcgtctggagtcgcatgaaaacatttaaagcacaaatctcgctttcaaccaacatggctgcgagtgcattggcaggtgttcacgggctccgcagcctgaagcccagagaccttccgggcagagcccaggagcagagaacccaacccgggcttcccctcagaagcggcacgtgctggtccgggccgccctccgcacaaaccaccggccgcgggtgggatgcgcttcagactgcagaccttctcgcaccgtgtgaccgatgtagtttttgtttgtttttggtggtatccctgcagtactgcgctgctgcttggtggcggtgtaaattgtactgctcttcagaattttctcaggaaagtgccgcttccagcttctgccggaacatgcttgtgg

SEQ ID NO: 207701 - DNA, 332 bp, Homo sapiens
  chr2:1482074-1482406
  hypo
aggatgggctgtttgatatgcgagtcaccgtgtgtgtctgttgcaccaggccctgtggcggcctgggcatcgtgtctgcagtcctagccgggagcctgcagggaggtgcgcgtcagtcctgttctaaaggaggcactggagccttgtccgaggaggcacaggggctgtgtgtggcaccggctgcccccgggcaccatgcgcccctgccgctttctggccttcactgcactggggtccaggccccaaaggtcagagcagagggtctgggaagcctccatgcgctgggtgttaacccttagttcctgggtggcgaggggacctggagcttcctg

SEQ ID NO: 207702 - DNA, 271 bp, Homo sapiens
  chr2:1488388-1488659
  hypo
atccccaggatcctgggacccgaggccttccagcagtacgtgggtccctatgaaggctatgactccaccgccaaccccactgtgtccaacgtgttctccacagccgccttccgcttcggccatgccacgatccacccgctggtgaggaggctggacgccagcttccaggagcaccccgacctgcccgggctgtggctgcaccaggctttcttcagcccatggacattactccgtggaggtgagtgagtgcggtccctgcagctggtcccca

SEQ ID NO: 207703 - DNA, 69 bp, Homo sapiens
  chr2:1501008-1501077
  hypo
agtgtggcttcctggcggtaatttgagagcaggatggggaggcacctttcaggccgcaaggcaagacag

SEQ ID NO: 207704 - DNA, 278 bp, Homo sapiens
  chr2:1543306-1543584
  hypo
tcttccatgtacacctaggtcggagtccgcaagggtggggcggtgacggtgcactggactttgctggcggtgctggaatggctatgcggagggcgctgtggtgcggggactgcgctccccaggaggacctcgggagttgtttgtttgtaggtattacagtattgtctaacgttgccgcgttgacacagggtcacgggaagccacctccagggcctgtggtcctcttcaggcaggcggggcggggaatgctcaggaccggtgatgatggtgccatgcag

SEQ ID NO: 207705 - DNA, 296 bp, Homo sapiens
  chr2:1613967-1614263
  hypo
gcagcctgtcacagctgagccgccacagctggacacccgccggcccctgcagtgcagcctgtcacagccgagccaccacagctggacacccgctggcccctgcagtacagcccgccacagccgagccgccacagctggacacccgctggcccctgcagtgcagccgccactgagcatcacaaccgcagttgtccaccgagatccaaaccccgcatggtcctacctgaggcttcaagtcacgcttcttcactcagccaaaggtctgtgcacgcgtcgttctggcccccagattctgc

SEQ ID NO: 207706 - DNA, 279 bp, Homo sapiens
  chr2:1647057-1647336
  hypo
tctgcaggtcattaagcacccgccaagcagtcaccaaaaccagggatgaaaaaggaacagacatggtgcccctggcacgcaccttcacagcagtcctgccacacccggaggtctaccctggggatctcgtcacagctgccgtagccgtgagggaactccgccaccctgaacacgtcgctctgcacccgggtgatgttgtccgcgttgtcgcataggatcctggccagcgacgtctgcttgatctgagtcagctgggccggggagaacaccccagggttc

SEQ ID NO: 207707 - DNA, 318 bp, Homo sapiens
  chr2:1653230-1653548
  hypo
ccattctcgtacacggatttcagcaggcgctcgaaggcggtcagcgaggcgccccacatggggtgctgcaggttgttacaggtgccgtcgtgcgtccggtacttctggtggaagcacatgtccgagcagttgttcacgcgccggtgggcggtacagcccgacaggtttgcgatgaggttcaggtactgtggagacaccaggtcgttgtagtggtaacctgggacgtggagaaaagcaagacgcactcaattcccctggaggatgtgtgagggcccggtaccccttggcacctctgccgctgacatggggctatctacc

SEQ ID NO: 207708 - DNA, 142 bp, Homo sapiens
  chr2:1688942-1689084
  hypo
caggccacactgagtctctgcggacacctgcagccggagggcccccaaacgcagaccatccctgccccttgccccgggacaggtctgtgctcagcactccgcgcacgaatgggaaacgtgagggaaggaaaaactggagcag

SEQ ID NO: 207709 - DNA, 107 bp, Homo sapiens
  chr2:1689123-1689230
  hypo
ggcacctgacgcgcgggtcccgaggaaggccgaacccgacagaatccctggagcctcgtctctgccaggcagtgtgctgacagggcgcctgtggttttctggggtcc

SEQ ID NO: 207710 - DNA, 252 bp, Homo sapiens
  chr2:1709544-1709796
  hypo
atgcagggtgcagctccccacgacctgggatgcaggtgcggctgcctatgacctgggacgcagggtgcagggcacggctgcccacgacctgggacgcgtggagtgtcaccagcccttttggagagtttcccgcgtggagtgtggggctacaaggagcagttctccgtccattacggcctcccccaggcactccaggccctgccgctcaggcatccatgtggcttggacaccgtcaaggctactggcttctct

SEQ ID NO: 207711 - DNA, 320 bp, Homo sapiens
  chr2:1771820-1772140
  hypo
ccagcatcccatccaatccacggccactcactccagaagcccgtccaatccgcaaccactcactctttccaaggccagcgctccgatgatgctgtagcctcagtcccggcctctgtcaaaggccctccagcccctgacgccaggccacctttgagctcctcttctaagcgccccctttagtatcttgcacacggctgtccccgtgtgagcagctggtgtgagtagagcgtagggagcttatttggcaatctcttcgatgatccttgtgcgtgtctaatgacctgtgtttggcacacgacgtaaatggaaacccagagaaa

SEQ ID NO: 207712 - DNA, 600 bp, Homo sapiens
  chr2:1846365-1846965
  hypo
cttcctcccttggcctcctccgcccccgccccaccctctggctcctgacctgcctgcaggtcgctggggctctgaggccggcgtgggttgacctcacgtccacccctgcaccccactgaccgctgcacaactgcgcggatgccccaaaattagactcatcgtccacgtcaccaacccaaagccccagtccagcagaccgggtgcgtccttgctgagttttgcttccctcaggttccgttgatgtcacacccaaggcctctcctcgtctgtccagcttccgcttccaggcgcttccgcttccaggcgcttccgcttccaggcgcttccgcttccaggcgcttccgcttccaggcgcttccgcttccaggcgcgcggtgctagtaccggcccccgggctgggaacacctccaggccagcgctttagcatcatccgaggctctccgcttcctcagggggacccgagttcttccacgcgactcgtaggccccgccatcctcgctgggctctccctgcaacccttgccgccatccttcgggctggccgatgtccctgccttgtctgtggctcgttcccagctgcgtggcctctgcatcctgcaag

SEQ ID NO: 207713 - DNA, 309 bp, Homo sapiens
  chr2:1926247-1926556
  hypo
caggttccccttggtcatgtcgaacacctcttcagacctgtccgagttcacagaggtggtatcgtcgtcccgctcatgacacccatcctccttcgcacagctggcaaacactctcgaccgggggctcaactgctcctccagccgcatgaggttcagcatgtccgagtagtttctgtccggcgtccttccggggaagtcctcttctggccggacatgctgacggatgttcatgttctgctgcggattcctctcctgcgggttggtctcactgagcttcctggccaggtcgaagcactgattcctcaaaca

SEQ ID NO: 207714 - DNA, 167 bp, Homo sapiens
  chr2:1932938-1933105
  hypo
gagaagtcactttcccagcccgggtggccttcagtcgggcacctctcctaggtgcggcgctgacctcggcgcccctcagctgccggcagcacaggacatggcctggctccgggatcagctattctcacttccagcacgagatccccgcacccctcctctgcctccct

SEQ ID NO: 207715 - DNA, 953 bp, Homo sapiens
  chr2:2189143-2190096
  hypo
actcaccacaaattgtgtggcgtgcaaactaatatattcacctgattggcctccacacgtgagggggacgcagccgggcctcctcgagtcccgcgttccttctgtgagggggacgcagccaggccttccgggccttcccgagtcccgcgttccttctgtgaggcggacgcagccgggcctcctcgagtcccgcgttccttccgtgagggggacgcagccaggccttccgggccttcccgagtcccgcgttccttctgtgaggcggacgcagccgggcctcccagacgcccgcgttccttacgtgagggggacgcagccgggccttccgggccttcccgagtcccgcgttccttacgtgaggcggacgcagccgggcctcccagacgcccgcgttccttacgtgagggggacgcagccgggccttccgggccttccgggccttcccgagtcccgcgttccttctgtgagggggacgcagccgggcctcccagacgcccgcgttccttacgtgagggggacgcagccgggccttccgggccttcccaagtcccgcgttccttctgtgaggcggacgcagccgggcctcccagacgtccgcgttccttccttgagggggacgcagccaggccttccgggccttcccgagtcccgcgttccttccgtgaggcggacgcagccgggcctcccagacgcccgcgttccttccgtgagggggacgcagccaggccttccgggccttccggagtcccgcgttccttccgtgagggggacgcagccgggcctcccagacgcccgcgttccttacgtgagggggacgcagccaggccttccgggccttcccgagtcccgcgttccttacgtgagggggacgcagccaggccttccgggccttcccgagtcccgcgttcctttcgtgagggggacgtagccgggcctccccgagttccgcggtc

SEQ ID NO: 207716 - DNA, 54 bp, Homo sapiens
  chr2:2190245-2190299
  hypo
agggagaatctcatgcacccatcctggaattacgtttttagctttgcccccatc

SEQ ID NO: 207717 - DNA, 154 bp, Homo sapiens
  chr2:2584644-2584798
  hypo
ctctcgagggtgtatttccggggggtgcactgtgcatgtctgtcgagggtgtatgtccaggggtgcactgtgcatgtcatgtctgtcgaggttgtatgtctgggggtgcacggtgcgtgtctctcgagggtgttatgtccaggggtgcactgtg

SEQ ID NO: 207718 - DNA, 528 bp, Homo sapiens
  chr2:2584836-2585364
  hypo
gcatgtctgtcgagggcgtatgtccagggatgcactgtgcatgtctgtcgaggatgtatgtccaggaggtgcactgtgcatgtctgtcgagggcgtatgtccgggggtgcactgtgcatgtctctcgagggtgtatttccggggggtgcactgtgcatgtctgtcgagggtgtatgaccgggggtgcactgtgcatgtcatgtctgtcgaggttgtatgtctgggggtgcactgtgcatgtctttcgagggtgtatgtccgggggtgtactgtgcatgtcatgtctgtcgaggttgtatgtctgggggtgcactgtgcatgtctgtcgagggcgtatgtccagggggtacactgtgggtgtctgtggagggtgtatgtccgggaggtgcactatgggtgtctgtcgagggcgtatgtccaagtgtgcactgtgcatgtctgtcgaatgaacagatcaacagtacaaagcaggacgctgacgcaggcgcacagacacgctcggcttccatagatactctctacggagca

SEQ ID NO: 207719 - DNA, 61 bp, Homo sapiens
  chr2:2673023-2673084
  hypo
gctcaggccccttcatgcagcgaggagtcagggcccccgaatctctgggaggacgcatcct

SEQ ID NO: 207720 - DNA, 226 bp, Homo sapiens
  chr2:2673114-2673340
  hypo
aggacttaatgacgtcccttcccatgcgcacagtgtcccaggcacgtgcctcagcctcacatgccggggcacagggctgccctgcgaggtgggaggaagacctaggtgaggacccggagccaagggctttcctgaccgtgaaattgcaggtgaggacctggagccgagggccggttctagctgctccaagcgcccgagggccaacgttggcagtggcctccaatgc

SEQ ID NO: 207721 - DNA, 290 bp, Homo sapiens
  chr2:2737134-2737424
  hypo
gatctcccataggatgaaagcgaggccccaagagactgcatcgcactttcagtgctgtaagcaagtgcgtagtttggatggaaagagaggaagactcaggaaccggcagctgagaaccaccgcacacgcgtgtgcgggcaccgcgccgccccctgctgagaaccaccgcacacgcgtgtgcaggcaccacgccggctgctgcgagtccagtctcgctcagtctcttgagccagctggaagcgtgtgtggcattgaggggtccacctcccgggtgtggaaactgggattta

SEQ ID NO: 207722 - DNA, 147 bp, Homo sapiens
  chr2:2849145-2849292
  hypo
tgcaagtcacacctatcagacgcatgacagagatgaagccagctggtcccgagcgtgcctatgcctgtccatgtctgtgctgcctcgctgcaggcatgcactctcctgccgtgcgctgaggtggacgctgcatggctgggacattct

SEQ ID NO: 207723 - DNA, 117 bp, Homo sapiens
  chr2:2854224-2854341
  hypo
cccttcctgctcccagtcaccggggaagccttcctcagggtttctgcagaagccctgcccactgccccctgcagagagccatcctgccacagagatgcgccccagatgcgtcctgga

SEQ ID NO: 207724 - DNA, 181 bp, Homo sapiens
  chr2:2854463-2854644
  hypo
acatgaggccgcctgtgtcagccatcagggtacccaccggcgctgctcatccacctgccacccccacctgccacttactcctagcacaagcaggtgccccatgaatcccgcggaatgagttatttcaggatccgcggaacacacgtaaccagacccccccgtttgttgttttgggggacat

SEQ ID NO: 207725 - DNA, 219 bp, Homo sapiens
  chr2:2879707-2879926
  hypo
acctagcaagggccccggtacaaaggacacctgtgtacataccccaaccagcaagaatccagcagggtggcaagggccggtgggcatggcccacaaagcggctgggtcctgggtacaggctgggtgtccccacgctgtctgtgccccttgctgtgctgaggtgggccagtgaagggcttgaggcagccagggcctttgctcttgcgtgtgtttcctcag

SEQ ID NO: 207726 - DNA, 101 bp, Homo sapiens
  chr2:3173339-3173440
  hypo
gacgccaagccccctcggccagggctggcggcaggagggatggagtaagtgcctccacttaatagagccttgatcctatgcagtgccgatcccaacgtcct

SEQ ID NO: 207727 - DNA, 220 bp, Homo sapiens
  chr2:3176062-3176282
  hypo
ctggtggctgttctgcaagagttaccggcaggagagaccagcagcaagttctgggtaattacagccgtcatcaggtgagcctggacgttacccggaatcagccctcacacctgcaaggggctccgcgctttctgaagggcttctgcgccgtgcgctgtagtaatggtaatggaagtaggagtaagagtgataataacactatcgtcgtggtaataacttt

SEQ ID NO: 207728 - DNA, 72 bp, Homo sapiens
  chr2:3201717-3201789
  hypo
agaggcccaatgaccgagctggtgctggagtttattcagcatctcacaagatttaccgaggggctttgctgg

SEQ ID NO: 207729 - DNA, 263 bp, Homo sapiens
  chr2:3214999-3215262
  hypo
accagcagtcaggttccacgcatgaagttctccactttaacactaacgaaacaagcctctttcctctgtaccacgtctcttccagtttggagaacaagaaagatgaaaacagaacaggctttccaaggtgcgccggcaaggagccatagaacccaccgaccgcccacaaagttcccagcccctccccacgagctctgagattaagctcggcttctgcccactgctctcttggtccccaaaacacaaacgctatttgcattaca

SEQ ID NO: 207730 - DNA, 433 bp, Homo sapiens
  chr2:3260562-3260995
  hypo
gctcatgaagcagcgactggccagggagccacgtgaatgacacaccacatgccggacacgggcgggcttgggcacgcagccccacaggcacaccacgcattcatgctttgtccacgggaggaagggattgtaagcctcaacctgaagtggtaaataattgccatgtgagtgtgaataagtgcatgctgaccaagctgaaaagccacacagcgctcgagggcagtgcagtgcctgaccctttaccctctggcaggtccccacgggcaacactcctcttagatgaagaggagaaagtggggatgcaggcgcgctggctacatttctgtcaatgcggctaatctagaaaacacagggactaaaattaaaaatcaaattctcgcagctttttaaaagaaaggagcgtttccgaggtgtggacggtggctcctgcaaa

SEQ ID NO: 207731 - DNA, 189 bp, Homo sapiens
  chr2:3280943-3281132
  hypo
cctctccacccacgcggccccacacctgtctccacccacacggccccgcacctgtctccacccacgcggccccacacctgtctccacccacgcggccccacacctgtctccactcacacggctccacacgtgtcctctgttctccattcaacgcattgaaactacaactggaaacggtagaggacattt

SEQ ID NO: 207732 - DNA, 165 bp, Homo sapiens
  chr2:3285953-3286118
  hypo
gctgggttggtgtcggcaaccatcaccagccccgggccaccgtcaggtgggggcactgcccctctgtgcagcttgcacagaggcctgaagatggacagctctgcggacatggctagcagctgccctggactgaacatgcttttaccctcagaccaagtggtgaaa

SEQ ID NO: 207733 - DNA, 53 bp, Homo sapiens
  chr2:3290045-3290098
  hypo
acaactgccgtcaccgtgcctgcctgtgtatgacgtgtacacacactgctcct

SEQ ID NO: 207734 - DNA, 387 bp, Homo sapiens
  chr2:3290128-3290515
  hypo
gttcagctccaggtgtcaagtgccagattccaggaagccccaggagtgggcccagaaggagcagtgccaaggacccccgggggtggggccatcctaccaggcatgtcctgggcacatgggaagaccgagaggtgagggacacttggtgtccgtgacagggaaaggctgaggcatcaggcttcgggctgtgtctaccttggtgactctggaagcgttttcataagcacttgtcatatgtcatatgcagtgtgctccaggggagcaggggatctcacagtccagagtgccccgcagagcacccgagacagcggctggcagagcacaggcagcaatgccccagaggaacaagccagcccctgcgtccccacgtgctgagtccatcctccc

SEQ ID NO: 207735 - DNA, 180 bp, Homo sapiens
  chr2:3291263-3291443
  hypo
ttcgttcaccacactccagaaagtttgttcaccacgctccagaaagctcgttcaccacaatctagaaagcgcgttcaccacgctccagaaagcacgttcaccatgctccagaaagttcattcaggctccagaaagttcgttcaccacgctccggaaagctcgttcaccacaatccggaaa

SEQ ID NO: 207736 - DNA, 191 bp, Homo sapiens
  chr2:3303473-3303664
  hypo
ggttttgccaaatcacggaagacagacaacctggcagtttacatgcaatcttatacgtccctaagatgtcattcaccaagctgcattccctctcttgacagtctgtagaaagcttggttctctaggcagtgagtgaaaaggatctcgttcccagtctcggcaccaccactcacagtcgagtgatcctgggc

SEQ ID NO: 207737 - DNA, 215 bp, Homo sapiens
  chr2:3313498-3313713
  hypo
ttgagaccccaaaacgacagatgcttcccgatgggagtgaaggttgaagagaccggtccacacctccttctgttctaacaccccccttactacctgttcaaaggaggtaatcatgtgggagagaggcagcagagctgggggttaggaaagagacggtggtgtgggtaggattctccctgcaggctctggcagcgcccctgtgtacgcacaggtgt

SEQ ID NO: 207738 - DNA, 187 bp, Homo sapiens
  chr2:3321054-3321241
  hypo
ccccaggagcgcacgaggtgctgaccgagctgagggcctactgtgtgcctcgcacgcggggtggagcatggagccccaggagcgcacaaggtgctgaccgagctgagggcctactgtgtgcctcgcacgcagggtggagcacggagccctgggagcgcatgaggcactgaccgagctgagggcctac

SEQ ID NO: 207739 - DNA, 49 bp, Homo sapiens
  chr2:3347060-3347109
  hypo
cagctcacctgaaagtataaacaactgttttgttgaataaacatacgca

SEQ ID NO: 207740 - DNA, 104 bp, Homo sapiens
  chr2:3347154-3347258
  hypo
gtaactaaggtgagtgcaaaagattaccagggcccaaaagaaagacccattaacaccagctaggcaggtctgcaaaggcggtcgccctgtgagcagtacttaaa

SEQ ID NO: 207741 - DNA, 219 bp, Homo sapiens
  chr2:3352458-3352677
  hypo
tgcattatgcagtaacgatgcaggtaccgggcattttccagggaatcaacgactgaaaggagcgaggacctgaggcaacaccaggagctattaacccttcccagccaccactccccaggagagctggagctccagagtgagggatggcggcttccgactgtgcaggaggagaccagactccgttgtcacagaaggcaggggcagggctgcagtccacag

SEQ ID NO: 207742 - DNA, 85 bp, Homo sapiens
  chr2:3391389-3391474
  hypo
gggtcatggaggacgctggcggcggcgaggagaccccggccccggaggccccgcacccccctcagctcgcgcctccggaggagca

SEQ ID NO: 207743 - DNA, 492 bp, Homo sapiens
  chr2:3418353-3418845
  hypo
gctctgccgtgtgtcggcccgtttcctgaatcctcaggcatcagtgcctcacagagctgtgtgccagcagtgtcctcacagagctgtcaagcgtgtccatgccgtgccgcttgtgcctctgccccgcgagggacaccattccccgtcgttgacgtgcattcctcttgttcatcgtgcgagactccccacccctgtgccaccggtctcggtgtctcccacactggagtgtccgtatttcataaacacacgtatgtgtgcatgtatgtatttcttatggacatcacgtacgttggcccttcatatctacaggttccgcatccacagattccaccacccgcagttgggaaacacagtgaggtatgcacagcaacctttcagctgtggttggttgaatccacgcgtgtggaacctgcagatacggaggaccaaccaaggacttgagcagtcatggatttggtatcccaggagtcctggaaccggtccccggcagat

SEQ ID NO: 207744 - DNA, 154 bp, Homo sapiens
  chr2:3446897-3447051
  hypo
tcttcctcttcttagcgcacgcaaagccaggcagctctgggtgatggatttttcaagtccagctcccttgcctcctgtcagaggtggaacgcaggctccagggccacatggaatccagtgggaggcccatccccagggccgaggcctgagacgc

SEQ ID NO: 207745 - DNA, 270 bp, Homo sapiens
  chr2:3452947-3453217
  hypo
cgccctgcaggctgtctccctctggggtcgagagagcttcacagaccatttgggaaagagccaagcaaacacacttctgcaagccatttgcataagtagacataatccatacggaatgatgcactgttcggttgtagtttcattcgtcagtgacctgcatctgcccgcccagtcttgagttcagctccatccctccctgcagttccgcagcctccggcttccccacctcagcttggctgagagtttcacgttcatccaagtgcttcttta

SEQ ID NO: 207746 - DNA, 175 bp, Homo sapiens; identical to SEQ ID NO: 198054
  chr2:3465089-3465264
  hypo

SEQ ID NO: 207747 - DNA, 43 bp, Homo sapiens
  chr2:3467375-3467418
  hypo
agcactgaaagagcggttagggtgatgcggctggccacggcat

SEQ ID NO: 207748 - DNA, 191 bp, Homo sapiens
  chr2:3504356-3504547
  hypo
tgtccaccaggatcgcaggcaggggccacggaggctgccacggaaggacagctgtcacctcggacatcgcctgcggctccacagactctccttgaagcacaggtcgaggagtcccgagcccagcgaccgcgcttggagtctgcggaagccgcgcagttcagcggcagagatgccacggccagggccaccac

SEQ ID NO: 207749 - DNA, 355 bp, Homo sapiens
  chr2:3582016-3582371
  hypo
cctgaaccagggctgtagcacgccctgctcgccaagtcacaggtggtgggaacggttgagctgtgacacccttggggctctgcggttcctggtgtctctgagttttgggtgccaccacgttcccctcatccagacaccggtgcccaaggcagaagcgggttgcggcatgcccggcccaaccgccggctgagcgcggatcctgtggcaagcgtgggatctgggccggggtgcaagccgagcacagcccactgggccgaatgtgcagagtatcaccagcagtgatccttgggccgagtgaggccaggcaggggcgccagcggccatggaggtctccggctggtgaagtggcacagaa

SEQ ID NO: 207750 - DNA, 71 bp, Homo sapiens
  chr2:3593598-3593669
  hypo
gatcctcaacagcacgctgtccattcttcatgcgtttacgcaatggatgtgatttacgaacattccatttt

SEQ ID NO: 207751 - DNA, 91 bp, Homo sapiens
  chr2:3675048-3675139
  hypo
gggcatgatgatggagggcacgatgagcacgacgatggggtggatctgggcataataacggtagatcggggcatgatgatgctgggcatga

SEQ ID NO: 207752 - DNA, 282 bp, Homo sapiens
  chr2:3675169-3675451
  hypo
catgatggctctgggcacaacgatgctgggcatgaagatgggacacgatgatggggtggatctgggcataatgactctgggcacgatgacgctgagcacagtgacgctgggcacgatgacggtggatctaggtatgacgatgctgggcatgatgatggtagatctaggtatgacgatgctgggcatgacaacagcgtgaatctgggcacgacgatgctgggcacaatgctgcacacgatgatgctgggcataacactgggcgtgatgacaaagtgggtctca

SEQ ID NO: 207753 - DNA, 325 bp, Homo sapiens
  chr2:3681245-3681570
  hypo
tggagggggaaataagaagcataaacattgaggctgtcccaaccttcctcctgatggtcagcacagaacctctggaatagtgcggtggagagctgggcgagtttgtctttggacagaaggcccgaggaagatgcgtgttcccgaccttcctcctcatggtcagcacagaacctcaggaccggtgcggtggagagctgggtacaggaggcccgaggaagacacatgtttcctgcgcagacagggcctgggacaacacgaaacagcagatgtgcattttcagggaatatcagcttttctgtaggaccctctgcgggaggccgagcag

SEQ ID NO: 207754 - DNA, 308 bp, Homo sapiens
  chr2:3714208-3714516
  hypo
tggcacagcaaacagggcagcgcgcagtcagcatcacccagccttgatgagcacgccgcgatgctgctacgagctctgtgaagacgcgattttaattccagccagtcggtaggttgtgtgtctgtgtggcggtttagcaccgtttcaaattctgcattgcatggtgggggcgacggtggtgggtgagctctgcgtcgtaatcttttcggagctcttccagcacagtccagtcaaatcctctttgacgacaggcctgttccacacctgtgctgctcagcagggaggccgcaggtgcctagggagcacac

SEQ ID NO: 207755 - DNA, 57 bp, Homo sapiens
  chr2:6402889-6402946
  hypo
gtaaggacctgcatagaaggcgcggctcaggctgaagtagagcaggacgataacaaa

SEQ ID NO: 207756 - DNA, 729 bp, Homo sapiens; identical to SEQ ID NO: 198059
  chr2:7005469-7006198
  hypo

SEQ ID NO: 207757 - DNA, 270 bp, Homo sapiens
  chr2:7073081-7073351
  hypo
gactattagtatacgatgcatgcaaacagagaggtgctttattgaagcgggacaagacctctattcatagtaaagtcaaacaaaccacgcatgtgaaaacctccacttatagcggctgcataagcttaactgcgcagagctatactgctttttgaaatactaacttgcaagttcagcaacagctaagaaaacaatcctagacttggaaattgaaagattggaagagaagtggagggattcctttggaaccctttacgtacgtatgtgtaa

SEQ ID NO: 207758 - DNA, 98 bp, Homo sapiens
  chr2:7109819-7109917
  hypo
tttgacctcaagtgacggattgcaggcaaaatacagtcagtcttcctttcatgcacaaaattgttacaaatctttttgtttgtttgtttgtttcagac

SEQ ID NO: 207759 - DNA, 50 bp, Homo sapiens
  chr2:7164398-7164448
  hypo
ctcagtctgtgaagtggagccgatgcttccagcatagccagtgctcctgg

SEQ ID NO: 207760 - DNA, 102 bp, Homo sapiens
  chr2:7237053-7237155
  hypo
cacactctgccattttgcctcttagtgcgcatgtgttgagcccactcacctcacgccggaggagatctatctgaaagctgcgggcttcaggtgtttctatct

SEQ ID NO: 207761 - DNA, 182 bp, Homo sapiens
  chr2:7907358-7907540
  hypo
taccctgagaaagcgtagcctagtgcttctgaggaaccgcagacccctaggcaggagccaggagaagaccgccaagcacggcgaggccggccgtgctaccaaataaggcacctctcctgcagggagctgggacctaagggactcgcgctgggcacggggcaggcggcgcccatgtccccttc

SEQ ID NO: 207762 - DNA, 120 bp, Homo sapiens
  chr2:8647532-8647652
  hypo
tgctatcaccagaacgtacaggcgcacagcctctataggtcttctgctccattgatgaggcttctcatcaggtggaggccacctccagcaggtgccatcgttcttcgcccttattcactg

SEQ ID NO: 207763 - DNA, 125 bp, Homo sapiens
  chr2:8647900-8648025
  hypo
tagagggttagtgcagtcagcgtgattgttcaattcctaatgtacatgagcataatcactccgcaagtgccgcaccgctttcacacatgtgaacagctagagccgaaagcataaatatatgtctt

SEQ ID NO: 207764 - DNA, 31 bp, Homo sapiens
  chr2:8648363-8648394
  hypo
tggatatttgtccccgcccaaatctcatgtt

SEQ ID NO: 207765 - DNA, 165 bp, Homo sapiens
  chr2:8691181-8691346
  hypo
aatccaagtgccaaatcagacgagcacgtcttaaagatcatctgcgcgctcggctatgtaaagaaacacaagcgtatttgtatttcgctggtgtcaggccgaaaacttggcaccatccctcactcctccgctcccttgccatacgattccagtcagcccccaatt

SEQ ID NO: 207766 - DNA, 102 bp, Homo sapiens
  chr2:8736064-8736166
  hypo
tgcactagactccctacaggctcacagacacacaccagtgcacacactgcgcgttcctctctgctgacatctgagcgaggcaggttcacaagcagccagcgg

SEQ ID NO: 207767 - DNA, 48 bp, Homo sapiens
  chr2:8736256-8736304
  hypo
ccaaagctgcagtattcgggagagaaaaggaatcgaatgcttggtttt

SEQ ID NO: 207768 - DNA, 145 bp, Homo sapiens
  chr2:8768417-8768562
  hypo
ccctcccagcagggcgtccctccgctgcaccctcatggatgccccatccacctgatggcagcccctccttagttctggccactccttcagcaccaaggcctgggaggtggcttaggaggtgaagaggaaggagcagcagggatgc

SEQ ID NO: 207769 - DNA, 633 bp, Homo sapiens; identical to SEQ ID NO: 198060
  chr2:8818829-8819462
  hypo

SEQ ID NO: 207770 - DNA, 169 bp, Homo sapiens; identical to SEQ ID NO: 198061
  chr2:8821592-8821761
  hypo

SEQ ID NO: 207771 - DNA, 709 bp, Homo sapiens; identical to SEQ ID NO: 198062
  chr2:8821976-8822685
  hypo

SEQ ID NO: 207772 - DNA, 208 bp, Homo sapiens; identical to SEQ ID NO: 198064
  chr2:8825635-8825843
  hypo

SEQ ID NO: 207773 - DNA, 274 bp, Homo sapiens
  chr2:8834448-8834722
  hypo
catggtgggggacagtgggccggagcaaggcagccaggggcccagtgcgaggagaggagaacggacaggatgggggaggcccatcacacccagcctcacaggccgcgctaagagctttggcctttactttgtgtaaactgggaccttggagagctttgcgcaggagagtgatggaaccaaactatttagcagccacatttcttttaatgtttctcgtttataggttacacatttgttgttattattattgatttaataatactgtgtcaagata

SEQ ID NO: 207774 - DNA, 142 bp, Homo sapiens
  chr2:8834896-8835038
  hypo
accaacctaaatattataactaaggaaacgaatagaatggtgtgcatcagaggtacctccgccagtgcttaccccgtttgttatagagggacgggttgtccctgctgcttttttatggagcgctatatcaaaagggctgagt

SEQ ID NO: 207775 - DNA, 171 bp, Homo sapiens
  chr2:8854102-8854273
  hypo
gcatttccaatatgcgcgctgtgggtcatcttttggtccatgtttcagccaatcaccaaccagactgtgagaggctttccagcttgcttagctacagcatcaaatgcagaagctctgccagccggactcacaacgaactcagcctgctccggccttcggctcctcccagca

SEQ ID NO: 207776 - DNA, 160 bp, Homo sapiens
  chr2:8870179-8870339
  hypo
tcaccagccctccccgcatctactctcctaacagctcaggacagccccgtcacactactgccagccctggtgactcactttgttggcaatttttaaagccctcttcattatgtacttcctactcttcagaacctctgtgataagcaatacccctgccata

SEQ ID NO: 207777 - DNA, 57 bp, Homo sapiens
  chr2:8978298-8978355
  hypo
tggtgcggggtggggacaatggctcactcctgtaatcccagcattttgggaggccaa

SEQ ID NO: 207778 - DNA, 187 bp, Homo sapiens
  chr2:8983020-8983207
  hypo
aaatccctgaggatacgcagcatgcaacttgttctttcttaggaatgttttggaaagcaatccagataacagcctggaaagaagttattggaaacaggctcggctgtagccacattttgatggaggaggaaaggagggtcggacgccaggtgtggcagggggcagatgatggcgggctggtgatgag

SEQ ID NO: 207779 - DNA, 166 bp, Homo sapiens
  chr2:9002474-9002640
  hypo
tgtgagtgcctcctacctgccgggcacatagaaacgtgttttctcctcacaggaactgggcatggagcctagcccgtggtgagcgctcagcaaacatgcacgcagtacacacctcgcttctagtggaaaggacaatactgaccacgaccaaggaaagagggtctac

SEQ ID NO: 207780 - DNA, 389 bp, Homo sapiens
  chr2:9078568-9078957
  hypo
aggtgccagtgcttccacaccgtgtttcatgctgccgtgtttcattccaccacgtttcatgccgccacattttatgctgccacgtttcatgccgccacgtttcatgccgccatctcatgccgctgtgtctcaggccacatttcatgccgtgtttcatgccaccgtgtttcatgctgccacgtttcatgccaccgtctcatgccactgtgtctcatgccaccacatttcatgccgtgtctcatgccaccatgtttcatgctgtcacgtttcatgctgccatgtttcatgccaccgttgtctcatgccgccacatttcatgccgtgtttcatgccaccgtgtttcatgctgccatgtttcatgcctccacgcctctgcctgtgctgtccac

SEQ ID NO: 207781 - DNA, 210 bp, Homo sapiens; identical to SEQ ID NO: 198066
  chr2:9143658-9143868
  hypo

SEQ ID NO: 207782 - DNA, 260 bp, Homo sapiens; identical to SEQ ID NO: 198067
  chr2:9144090-9144350
  hypo

SEQ ID NO: 207783 - DNA, 96 bp, Homo sapiens
  chr2:9218664-9218760
  hypo
gggtttgagaagcacgcgaaagtgggtggtgcttacacgttactgaattgctggtagaatattgctgggacccagcctgggcaacatagcaagacc

SEQ ID NO: 207784 - DNA, 265 bp, Homo sapiens
  chr2:9245035-9245300
  hypo
ggcaacagagcgagactctgtctctaaataaataaataaaggaaaggggtacggagacaagcagcccaaccctatacatttgtccccagggtctctacaaagaggcaagctgggactgaaatctctcccgagtgtggaagacggacgggagcagcagccggacagcacagctcaaggccgagaggctcactgggtgactcgggccgctttggggtggctgtgagaagcgaagggaggctgactcggggtgtggtggggagtgaag

SEQ ID NO: 207785 - DNA, 59 bp, Homo sapiens
  chr2:9251105-9251164
  hypo
aggtagcaagacagcgccccctttgcccagctcagtgaagggccggggcagctgatgtg

SEQ ID NO: 207786 - DNA, 1192 bp, Homo sapiens; identical to SEQ ID NO: 198068
  chr2:9346368-9347560
  hypo

SEQ ID NO: 207787 - DNA, 316 bp, Homo sapiens; identical to SEQ ID NO: 198069
  chr2:9347677-9347993
  hypo

SEQ ID NO: 207788 - DNA, 187 bp, Homo sapiens
  chr2:9352815-9353002
  hypo
ggcagcctaagacaaatccagctctcagccgccacattgcaagtactcagtagccacacgtggctggtggctaccatattggctcagcaaccaccgggagagccatcacctggaaacttgctgaaatgcagagccccgggttccacccaggacaatttttacagcatctccacgtacaccacaggca

SEQ ID NO: 207789 - DNA, 174 bp, Homo sapiens
  chr2:9409365-9409539
  hypo
agaggaattattttgcgggggggagggggcgcgcataacatttatcttaattaatttgggttcagttggtctttcctgtgaccctgtccttgcattcattggaaatgttcgtctggaaacacccttagctcacggttggataaaagctgtcccgcaggccgtgtgtgcccaccc

SEQ ID NO: 207790 - DNA, 470 bp, Homo sapiens
  chr2:9455454-9455924
  hypo
cctgagaaggagcagtgaggcgcagccaaggcagtggacgtgagaatggcatggagggaatgttggaagacgggtctgcgtatgtagggttaagacctggaatttgttgagaagcgtgccgcacggctgggtggcagcactggggtcagagatgactcttgggtgtcaagcaagtgaggagggtgggagagagggctttgtaggaaggaagagcattggaggaaggagagctggctgcatacttggggctgcctgcaagtagagggaaatgtggccctggaggcgggaactgtgacgggagtttcattcctcactcacctgtctggctgccaggactgtcaatgacagtggaaatctaggcgtgcttgctgtcgtaggttactcatcagcacggccttctgtttgtccttgttccttccagtcgttcctaagaccgcaccttaaactgcgcttttcagcatttaaaaatt

SEQ ID NO: 207791 - DNA, 138 bp, Homo sapiens
  chr2:9456808-9456946
  hypo
tcctgactgaagtttcgcatcttgagttgactcgcatttgaactgctgtcacggagacttgcttgctcctcgtgtacctgttggttaggaggcttccattccacccaatttaatccatgcggacggtgtgtgtcccca

SEQ ID NO: 207792 - DNA, 180 bp, Homo sapiens
  chr2:9513162-9513342
  hypo
gagggaacccactgagaccacgtatctcacacacaagtcagccagcaccgcagtgagctcagtgcacgggttagcgctgtgtggacggggagcatgtgccgggggacgttgaggcacccgccttaacctaggccctgtagagcgggcagaactggagccggagcaggagggaggcagtgt

SEQ ID NO: 207793 - DNA, 401 bp, Homo sapiens
  chr2:9609462-9609863
  hypo
ctatcctgggacccccggttaaacagccctattgtagaaggtgggtgttgctgaccagggacttgactacaatagttctgttggcggccctgttccctggggctctacaagaatagaaaacccgtgtggccctggactggccccgctctcccacgtgctgcagtcggggtgcagaatggaagttcacattgctgtggctggtcctcaggagccgtggggagggcagtctgcgggaggctgcggcccttccactggactttcactctggccttcttccctgtcctcctgacaccactcctcccgcctcccctccctctccctcacctcccacaaacacaccagaactattcaactctgaggaacaggagtatgagacagcttccattcggccaggaatggga

SEQ ID NO: 207794 - DNA, 105 bp, Homo sapiens
  chr2:9960809-9960914
  hypo
tctctgagcctccgtctccctcactgtcccctcggggtgagggaggccactctataaggagaccatgtgtgtggaagcaccttgggaaacgctgcgcgcaggccg

SEQ ID NO: 207795 - DNA, 37 bp, Homo sapiens
  chr2:9977944-9977981
  hypo
taaaattgtgtctgtgtagccgggcgcggtggctcac

SEQ ID NO: 207796 - DNA, 213 bp, Homo sapiens
  chr2:10110633-10110846
  hypo
tgtgagcaggttgctcgcagagagatggaacttcgtctttttcttgatggcgtgatcttatctctgggtgtgccagagccaatttcaacatacttttgtctcttcccagttcagtccccgtccattttttcccttcagtgtgctgtctcagcctgtggagaaggggaaggggcagtcagagacaggacaaaatcagagcgccttgttccctgg

SEQ ID NO: 207797 - DNA, 300 bp, Homo sapiens
  chr2:10150735-10151035
  hypo
ggtcaggtggacaggcatgtgtatgggcaggtcaggtggccaggcgtgcgtatgggcgagtgaggtgggcaggcaagtgaggtgggcaggcgtgcatgtgggcgagtcaggtgggcaggcgtgggtgtgggcgagtctggacaggcgtgcatacgggcgggtcaggtgggcaggcgtttgtatgggcgggtcaggtgggcagacgtgtgtatggtcggtttaggtggacaggcttgagtatgggtgtgcgtatggacgagtcaggtggacaggcgtgcgtatgggagagtcaggtggaca

SEQ ID NO: 207798 - DNA, 120 bp, Homo sapiens
  chr2:10151095-10151215
  hypo
attgcgtatgggagagtcaggtggacaggcgtgcgtatgggtgtgcgtatggacgagtcagctgggcaggcgtgcgtacaggcgggtcaggtgggcaggcgtttgtatgggcgggtcagg

SEQ ID NO: 207799 - DNA, 33 bp, Homo sapiens; identical to SEQ ID NO: 198071
  chr2:10151842-10151875
  hypo

SEQ ID NO: 207800 - DNA, 180 bp, Homo sapiens; identical to SEQ ID NO: 198072
  chr2:10152415-10152595
  hypo

SEQ ID NO: 207801 - DNA, 93 bp, Homo sapiens
  chr2:10152955-10153048
  hypo
aggcgtgtgtatgggcaggtcaggtggacaggactgaatatgggggggtcaggtgggcaggcgtgcgtatggtcgggtcatgtgggcaggcgt

SEQ ID NO: 207802 - DNA, 333 bp, Homo sapiens
  chr2:10153555-10153888
  hypo
gggcaggcgtttgtatgggcgggtcaggtgggcaggagttcttatggtcgggtcaggtgggcaggcgtgcatatggtcggtttaggtggacaggcgtgtgtatgggtgtgcgtatggacgagtcaggtgggcaggcatcctacaggcgggtcaggtgggcaggcgtttgtatgggtgggtcaggtgggcaggtgttcttatggtcgggtcaggtgggcagacgtgcatatggtcgggtcaggtggacaggcatgtgtatgggtgtgcgtatggacgagtcaggtggacaggcgtgcgtatgggagagtcaggtggacaggcatgtgtatgggc

SEQ ID NO: 207803 - DNA, 33 bp, Homo sapiens
  chr2:10154875-10154908
  hypo
catgcgtacgggcaggtcaggtgggcaggcgtg

SEQ ID NO: 207804 - DNA, 89 bp, Homo sapiens
  chr2:10155175-10155264
  hypo
gcgtatgggcgagttaggtggacaggcatgtgtatggacgagtcagatgggcaggtgtgcgtatgggtgtgcgtatgggcgagtcaggt

SEQ ID NO: 207805 - DNA, 180 bp, Homo sapiens
  chr2:10155775-10155955
  hypo
gtgtgcgtatgggcgagtcaggtgggcagacgtgcatatgggtgtgcatatgggtgattcaggtggacaggcgtgcgtatgggcggctcacgtggacaggcgtgcgtgtcagcgtgtcacgtggacaggcgtgtgtgtgggcgggtcaggtgggcaggcgtgtgtatgggcgggtcaggt

SEQ ID NO: 207806 - DNA, 58 bp, Homo sapiens
  chr2:10156255-10156313
  hypo
tggctgtgcgtttgggcgagtcaggtgggcagacgtgcgtatgggcagtcaggtggac

SEQ ID NO: 207807 - DNA, 199 bp, Homo sapiens; identical to SEQ ID NO: 198073
  chr2:10183604-10183803
  hypo

SEQ ID NO: 207808 - DNA, 453 bp, Homo sapiens; identical to SEQ ID NO: 37134
  chr2:10183814-10184267
  hypo

SEQ ID NO: 207809 - DNA, 37 bp, Homo sapiens
  chr2:10289569-10289606
  hypo
tttgttgttgtttaattttcagcgaaaagtttgctgg

SEQ ID NO: 207810 - DNA, 150 bp, Homo sapiens
  chr2:10328931-10329081
  hypo
aggaagagggcgctgcggagagagtggtgtgtgtcttcctgtgtcctcctaggagcttctgtctgagaagtcagaagtcatgagttcccagtcctggccgcatttggaggctggatcattggagggaggcgccggcgccccatgtagctg

SEQ ID NO: 207811 - DNA, 344 bp, Homo sapiens
  chr2:10334743-10335087
  hypo
ccggcctggtgtcccgtgcccagcatgggctctggcccaagttagcacttgctgcctaagtgcctctgccttttactcacctccatctggagcgggctcagtggggttcctgctggggctctacgggggcatccagactttgccctctgaccagccccactgtcctgtccttccctcccctgcgtcctcatctgtcactccttggtcacagccgccccctgactttcctccctgcctccttggcatggtgggaaacatgcgagttccatttctgaggctgccttgtgcctgatcttgggcaagttgcttgctagacctctcggcgtctccgttctcagcggtgc

SEQ ID NO: 207812 - DNA, 217 bp, Homo sapiens; identical to SEQ ID NO: 198076
  chr2:10443618-10443835
  hypo

SEQ ID NO: 207813 - DNA, 244 bp, Homo sapiens
  chr2:10517932-10518176
  hypo
tccccagggtggtgagccaccgaggggggccaggcacgggggagggtattcaagggcggcaagccaccaaggggacggggcaggcacagggagggcatttcagagagtgcaaggaggcggcgaagatgctggttgagggcacgggtgaggcggggaggcgtttcgactttggactgaaggccttaattgaccaaggcggtaatttccagtcctgtgacctcacgacaggctggacattggagga

SEQ ID NO: 207814 - DNA, 341 bp, Homo sapiens
  chr2:10525934-10526275
  hypo
gattaagtgatttcagcaggagaatttggcttaatcccccactgccctggacgcctggttccaggctgctgatttgtcggcctcgtgtcggggggtgtccggagcctctcctctctgggggcttttcttcctgctctgcctgtttgggaagcctctggccactgagcatgtgctggccttgggttttacggctgtctggcaattagaatattaatgtcgataacacagcaggacttgcgtgtgacaagctgagccacataacgtcacagtcgctcttgaacatctcggactttcacatgggccagccacaccccagcctaggttgctccctcacctcctca

SEQ ID NO: 207815 - DNA, 114 bp, Homo sapiens; identical to SEQ ID NO: 15884
  chr2:10545012-10545126
  hypo

SEQ ID NO: 207816 - DNA, 220 bp, Homo sapiens
  chr2:10566935-10567155
  hypo
agtcagttctgagcgagcggcccctggacagttgcagagaaacacaggcttgtcgtgccgtttaagctttgcttgcaagagtggatgccccgcaatcgttcctgctctcccgggccccgggcctggggcatgcgttgcacctgcccagcccggtggctgcgcctccctcctccacctgaccaacgcgacattcctcccctcacgcctggcccggtccctt

SEQ ID NO: 207817 - DNA, 198 bp, Homo sapiens; identical to SEQ ID NO: 198077
  chr2:10588856-10589054
  hypo

SEQ ID NO: 207818 - DNA, 117 bp, Homo sapiens; identical to SEQ ID NO: 198078
  chr2:10589055-10589172
  hypo

SEQ ID NO: 207819 - DNA, 76 bp, Homo sapiens
  chr2:10600813-10600889
  hypo
gaatgacatccacagccgagacagcagcaatgagggcacatgggaaggatagggcgccacctggcccttcagagtc

SEQ ID NO: 207820 - DNA, 100 bp, Homo sapiens
  chr2:10601535-10601635
  hypo
cactgtctaatacagcggccatgagccacgtgtagttcttgagcacttgaaatgtggccagggtgactaagaaactgaattaattgtatttctatttttt

SEQ ID NO: 207821 - DNA, 79 bp, Homo sapiens
  chr2:10615284-10615363
  hypo
atgacatctgtagaacggagtccctcttccacagagggggacccagaggctcacggcggtcaggcggctcacccaaggc

SEQ ID NO: 207822 - DNA, 84 bp, Homo sapiens
  chr2:10615573-10615657
  hypo
tctcagggctggccacgggggagggggggctgtgtgaggtccccagggaaccctacccccggcccagggcggggagggctgcac

SEQ ID NO: 207823 - DNA, 31 bp, Homo sapiens
  chr2:10634410-10634441
  hypo
aatgccaacttagaattggtggagctgggaa

SEQ ID NO: 207824 - DNA, 277 bp, Homo sapiens
  chr2:10634471-10634748
  hypo
ccacatgggtgggccccacagtcaggacaagaggggtgggggctctgcagaaggatggggctgtgggtggacagccagggccttttccagacgtgggccatggaagtccagcagctggatcaaaaccccatgagctgagcctgcccctatggatcacaggtcacagacatgtcttcggaagccagtcggggaggccagggctggggcgggccaggaccaatccacaccagaggcacaacagcagttcccaaggaagagcagtcgagggcaagggcca

SEQ ID NO: 207825 - DNA, 306 bp, Homo sapiens
  chr2:10666472-10666778
  hypo
ccggctccccgtcccgcctcctcccaccatgccccagaactagcaccccctgagcacttgcttgagccacggtgagatccagaacccggccggagccaggcttcggccaagccgcggccacgctgccatctgacaagcccggggcctgtcccaacaagactgaggcccgtgtggagacaactgcacagtcgtgaccggttgtcctgacagacctgctagcacctcccgaggctgggagggcgctaaggggagctggcctgcctgcccgcctgctgcgggcggcacctccggcgcctgagctcccag

SEQ ID NO: 207826 - DNA, 117 bp, Homo sapiens
  chr2:10732499-10732616
  hypo
aaggggaagaaatcacgctccatttagggctgcctatgcctgtggcacagggagaagagcaccaggattcagacggacaccactaggtgtctgggaacgatgcgccatgtctcagga

SEQ ID NO: 207827 - DNA, 205 bp, Homo sapiens
  chr2:10742496-10742701
  hypo
cagtttacgactgtcgaccatttcccatgatccaaacagagcctaagatacggccaaaggtcagtaaggaatagggattagcaaagcccggatactccaaaaatggaaaacccatttaaaaatgctatcaggtttctagtggaggtgacaatatcaatcattctagcattatgtcccacagtacaattaccgcagaggtcataat

SEQ ID NO: 207828 - DNA, 360 bp, Homo sapiens
  chr2:10917641-10918001
  hypo
atgagaatgatttatttgtttgtgatgcatgtttgctgaaagattaataaatcatttctgtgcctttagcaaacttcctgtgttgctcttaaaaagggatcatccaccttcccggaccacaaggttaaggtaaccccgctaggtaaccctgataggcctgctgcggggcagaccgacagagagagagagagtgagggcgagggtgaggtaagcaacgccccgggaaccccggggtccctggctcacatctcctcgccagctcaggcgccttctgggaaaatgaatccttgcatttttctgttctctaatatggcttttgaggtcttaaatttgaggagccggaatcatgccttcctccta

SEQ ID NO: 207829 - DNA, 95 bp, Homo sapiens
  chr2:10926448-10926543
  hypo
gggaaagaaaacacccattaaccatattaaccaactacaatgagagagagctgggagggaaggagccacagtctgccccccgccggcagaggctg

SEQ ID NO: 207830 - DNA, 114 bp, Homo sapiens
  chr2:11053788-11053902
  hypo
tacaacaagcagcgcgtcctggagaccgcggccaagcacgagctggagctgatggaactcaactccagcagcgggggcgagggcaagaccgggggctcccgcagtgacctggac

SEQ ID NO: 207831 - DNA, 260 bp, Homo sapiens
  chr2:12005882-12006142
  hypo
ggaaatggtgagtttcggagacaaacttgggacccactcagcagtggaggcggcagttcatcctaacatccttgctcttttatgtttctccagaaattgtgatcaaccagaatccagaacacgctgtgcttaatggagtgaactgcctgtgaagcgcaggtgtgaggggcggatgataagtgacagtgccggtgcccccagcgcccttttacctgatggctcacccggcctacagctgcgcccttccctttgaatcgtct

SEQ ID NO: 207832 - DNA, 142 bp, Homo sapiens
  chr2:12103332-12103474
  hypo
aacaccattcatctttgcgtatctccctgtgactgctgccataaaacttcactctagagtagacgtccctacagctttatagggatgaaacttccagaactcttcacttaaaatgcacgtcgtttaaagattctcttctttt

SEQ ID NO: 207833 - DNA, 102 bp, Homo sapiens; identical to SEQ ID NO: 198084
  chr2:12858042-12858144
  hypo

SEQ ID NO: 207834 - DNA, 255 bp, Homo sapiens; identical to SEQ ID NO: 198088
  chr2:14774684-14774939
  hypo

SEQ ID NO: 207835 - DNA, 37 bp, Homo sapiens
  chr2:14961328-14961365
  hypo
gtgagccaccgcgcccggccaacagagacactcttaa

SEQ ID NO: 207836 - DNA, 453 bp, Homo sapiens
  chr2:15307076-15307529
  hypo
catggagaacaatcggcagatacacatgttgcttctgggaacagcattcaactccagatgctttttctgctaaggagcagggccacaggtggccctcacacccagtgctgtgctgcgcggagggctgtactgaaggttctgaaggcctggtgagtccccctcacggccagaaggagagacccggcttcggcttcatggccggcctcccgcaggtgtctgcccagctcctctgcatcccagcgcccttgctggaggctagccaagaggtggtcaacaatacgtggatagaagggagtggagacacacttcaccagcagcttggcatccaggagcagggaaagaagttcttggtcacaattggaatcattcaccttcaagaaataagacaggcacagcgtgagggggtgtttgctttgttcgcctcccccttggatccctcgctctccactgggc

SEQ ID NO: 207837 - DNA, 90 bp, Homo sapiens
  chr2:15474600-15474690
  hypo
cacgcctctcttctccttaagccaatttggcatcaaagtgttcacttgttctttacaggattttgacacgctggcaatattacatgcaca

SEQ ID NO: 207838 - DNA, 231 bp, Homo sapiens; identical to SEQ ID NO: 198090
  chr2:16079905-16080136
  hypo

SEQ ID NO: 207839 - DNA, 87 bp, Homo sapiens; identical to SEQ ID NO: 105506
  chr2:16080304-16080391
  hypo

SEQ ID NO: 207840 - DNA, 277 bp, Homo sapiens
  chr2:16124558-16124835
  hypo
ccccgtctccatggcgacgggagcagctgctctgttctgggccttggctgggctgtgcggggcggcctgcccgcctgtctgcctgcccgcccgcctgcccggccgtgggagctgccagcgccttgccctcccgctgcccacaggccctgccaggctgggcgcaagaaagcgtgtttactaacaccatccacacggctccctgggcatggtggctctgcccagaagatgtcaggccgagggcaccgggaggtgggcctggagccaggctgtctgcagc

SEQ ID NO: 207841 - DNA, 42 bp, Homo sapiens
  chr2:16274079-16274121
  hypo
aaaaaaaaaaaaaaaaaaaaaaaaaagcgaatgattatataa

SEQ ID NO: 207842 - DNA, 68 bp, Homo sapiens
  chr2:17830610-17830678
  hypo
gaacctacctcgtcgccccgattccatcccctcccgacacctgactgcgcgtgttctcctttgcagtt

SEQ ID NO: 207843 - DNA, 119 bp, Homo sapiens; identical to SEQ ID NO: 198102
  chr2:20101402-20101521
  hypo

SEQ ID NO: 207844 - DNA, 169 bp, Homo sapiens
  chr2:20111757-20111926
  hypo
attgagtcatctggctcaagcggccactctggtcctttttgtaacccgactattaggggaaagcgtatgtgacagaatgtgagtcaggacataaaaacattacaaaacccaggattcaggtgttgcggtctttccactccactggcacgttacactaacagtgttaatc

SEQ ID NO: 207845 - DNA, 219 bp, Homo sapiens; identical to SEQ ID NO: 198105
  chr2:20424156-20424375
  hypo

SEQ ID NO: 207846 - DNA, 107 bp, Homo sapiens
  chr2:20456228-20456335
  hypo
cttgctgtatttaaactgtcttcactgtgtaaatcatccgctaatatttatcgggcggtaactaacatgactaattcagaattacacacttccgccttacttagtac

SEQ ID NO: 207847 - DNA, 276 bp, Homo sapiens
  chr2:20574694-20574970
  hypo
ctagatggtgagacaagaaccggatgaaaagacagtcatttggcagcgaggagcaagcgacgggcctcatcctcactctcgcccggcttgtcctgggccctcctgcggccctaggaattgcctgagggacaaacaaagtggacaaagtcgctgacagacctgagttactgccttggtcctggtgaccctgctccaggcagtccatctctgtctgcgatccattgatcctggcgccactcctggtgcttcattatcgcccagaggggcctctggagt

SEQ ID NO: 207848 - DNA, 163 bp, Homo sapiens
  chr2:20594843-20595006
  hypo
attgcccgttttctttctctgttgtcataggctaattaatttggaacagcttgtactgtgcttgatgcgactctcttaagaacagtaagtaacatacaagggttttttcttttatttttttcctataagaaagaataaaatcagtatacggtaagaacaaaat

SEQ ID NO: 207849 - DNA, 95 bp, Homo sapiens
  chr2:20642251-20642346
  hypo
tttttaaagctcattgcatagagatggaagattgacaattttcctagagacattaaactactcctaaattaggaaatattttttttttttttttt

SEQ ID NO: 207850 - DNA, 361 bp, Homo sapiens; identical to SEQ ID NO: 198108
  chr2:20646413-20646774
  hypo

SEQ ID NO: 207851 - DNA, 423 bp, Homo sapiens; identical to SEQ ID NO: 198109
  chr2:20646843-20647266
  hypo

SEQ ID NO: 207852 - DNA, 139 bp, Homo sapiens
  chr2:20666559-20666698
  hypo
ctgaaaacaagcatctagaacggatccctgaaccggcttctgactcatcctcttcaaattacgctaagatttgtcaggcccctccttcatctttaggccaagtgttaaaatgccatgtgggccgggcgcggtggctcac

SEQ ID NO: 207853 - DNA, 420 bp, Homo sapiens
  chr2:20841129-20841549
  hypo
ataaaaacatcttagtggcccagaggaaagatgcaataacggtgccattctggacactgtcacaggtccagttaacaagatttgatacagggacccctgcccagcctgcacgtgatcagggccactgtgttcattcccagctttctgcatatcaggagggtgatctcaccggctggcaggtcatcttcctgcaacaccgtgaatcatctgttctcagcaccaacctcattctcccgtgaaccagtgtggccttcggcgggccagccaatgcaagcagtggagacagatatttccaaggcttgttctctgccctgcgtcaggcaggacctctctgcacgcaggcacccgagtcaagcaggccaggactcttgctgtcatcagaaggcagccttgagcaccatctgactcagagagggcagc

SEQ ID NO: 207854 - DNA, 257 bp, Homo sapiens
  chr2:23547040-23547297
  hypo
gcaaacacgcggagtgccagatctcccaacacaaacatggtcccaagcctggcgcacctggattgggcttgggatttttaagccaacaaatggggtgggagacagggaaagagagggccgggaagaaaaaccacaggctcccagaatccaaaggaaagtggcatcctcacccgatgagcagggtctggcacagggctgagcacatgacagccagtaagtctctgctgaaggatgcctgaaatctgcgcggttctacc

SEQ ID NO: 207855 - DNA, 355 bp, Homo sapiens
  chr2:23785004-23785359
  hypo
ccaccctgtcaccacaggtccgggctctgtttccctgtgagaagccgcctcggcccaccgagatgtcccggcaccatagccgcttcgaaagagattaccgggtgggctgggaccgccgcgaatggagcgtcaacgggacgcatgggaccaccagcatctgcagtgtcacctcgggggccggtggcggcacagccagcagcctcagcgtccggcccggcctcctgccgctgcccgtggtgccctcccggctgcccaccccggctacagctcctgctccctgcaccaccggcagcagcgaggccatcaccagcctcgtggccagctctgcgtctgcggtcaccaccaaggtaagatg

SEQ ID NO: 207856 - DNA, 214 bp, Homo sapiens
  chr2:23793022-23793236
  hypo
gagaactgagcagagcgagtgggccaggcatctgtatgcactcagagactgctgtcacatgcctttcctattgatggcagcaaaaatctgcatgcctagcttcccctcctctgctttctgggaaaggtgggtgaatactttgtacccttctggcactgtgaaaaggagtcccgggagctggggaatggcgcgaggtgcacgtctcaatagcaga

SEQ ID NO: 207857 - DNA, 210 bp, Homo sapiens
  chr2:23842953-23843163
  hypo
gaggataagatggagcgagcctcggtgagggggcccagtggacacacagaggccaggcttaggctgatgtgtggagattggacgcagcaaaccacatgagggtgctggcagagcatgaagtgccagcccaggggtggtgagagggggcaccaggaggccagcggggcccatcagggagttggcactcgatcccttcgacaatgggattgg

SEQ ID NO: 207858 - DNA, 44 bp, Homo sapiens
  chr2:23893204-23893248
  hypo
gggacctcatgagaccaggccgggtgcctcctcacaagctgggg

SEQ ID NO: 207859 - DNA, 174 bp, Homo sapiens
  chr2:24060295-24060469
  hypo
ctgcacccaggcccccgcaagagcacagggaggcccaggtccacagccacaacttgggcggctgcagctgcacccagggagctcccatcccaccgactcaaaaggggtgggattcccacttgtccccagtttccaaaagctccgtggaatgtgcagccccggctacacctcccc

SEQ ID NO: 207860 - DNA, 97 bp, Homo sapiens
  chr2:24240164-24240261
  hypo
gtgccctacacagcgctcaccatgctgctgactccctgcccaagggagcgggactcggccaccgcctaccgtgagtgcagccgtgggtttcgggttc

SEQ ID NO: 207861 - DNA, 39 bp, Homo sapiens
  chr2:24279835-24279874
  hypo
caggtgtaagccatggtgcccggccggttgtctttttct

SEQ ID NO: 207862 - DNA, 214 bp, Homo sapiens
  chr2:24443622-24443836
  hypo
ctcaagcattatccggcaggcagagacagcatttggaggatgtgagagcttccgtcactatttgtgaattcacacatcaaaagtgatgccttgctttgactctgcgtggaggcagccctgagtctgatgcccaccatctctcatgagagacagcagataccccgagagctagccagcagcagcctcctcacctcgacgacgagctgaaggtcag

SEQ ID NO: 207863 - DNA, 305 bp, Homo sapiens
  chr2:24584025-24584330
  hypo
tagtcacactccgccgagcagtaggaagactctgtccccatagagcatagcacgacgaagctaaactttcctccccacccctcgccaagggacaggcgaagctcctactcagaatttgtctcttttctcccctcccggttcctggtctcctcacaaaagaccagacttcaactcaagccgccaccgtatcccaaaaccccaaaggtttgcccttgacaagaagcttcttcaaggggaaaggctttcttttgattggggtgagggaggagttagtgtttcctaatgaacgtaaccaaatgtcggcc

SEQ ID NO: 207864 - DNA, 36 bp, Homo sapiens
  chr2:24763333-24763369
  hypo
tttttttttttgagacggagtttcgcttttgtcacc

SEQ ID NO: 207865 - DNA, 516 bp, Homo sapiens
  chr2:25044265-25044781
  hypo
gtgaacctccccacccgaattgcctcagttgtcctgagcctcatgtctctcctggtggtgggccaggcccctgcatgggaagggagcctgctgcggggcaggccagctgggggtgctcacctatgcgcagcatgaagttattgaaggactggttgttgatgttggtgagcgtatccttcatggccagcgcgaagtcggccaggtcagccaggtgctgccagcgctctctctcggacttgtcttcctgtgccaggggaccgtggagaaagtgtcaggggccgctcactgcagcagcctgctctgctgccttccctggcagtgttctgggggtggattccctacacctagatgttcaaggccttacttttcctcccacaaaggagtcgcagccacgctagctctgacttgccactgtgacaaagttcacgtagcaggtctaggcaaagactgggcaattgagcagaggagacggacctgtgagtctgaccacgaggcggaccccttcaccttggctgg

SEQ ID NO: 207866 - DNA, 205 bp, Homo sapiens
  chr2:25047257-25047462
  hypo
tcttggaccccaggaaatggcgtgccacgtgctcaggcaacatgttggtgaccaaggcctcgttccagcgtcgcatctcatagacacgttccttctggtcgtggacctcaatcttccacaagaaaagtgtccgtgccagtttttctacctacagacacagacaaggcgaggcatgtgctctaagctggccactggatagaaggat

SEQ ID NO: 207867 - DNA, 324 bp, Homo sapiens
  chr2:25057323-25057647
  hypo
actcgtggccctccccggcccctccctcaccaggggtcgatgagtatctcgaccagggccgtgcagagcaggacgacgcaggagcagctgaaggcagccccactctgcttctccttctccaccgagtagcgggtttccatctcggggtccatgaaccgcatggacaagaggaaggtgtttctcttctttactctgcagtgggaacaagccccatgaatcccaaatgccacatctgccttggcctagcaggggggccgtatttgggatgctcagtttcctgaatcccttgtcagggcccgggaggagtggtgggcctggacgctt

SEQ ID NO: 207868 - DNA, 275 bp, Homo sapiens
  chr2:25075399-25075674
  hypo
agaggaggggcccacgtggcaaagcccggcctcagagcaggcatgagtggccaccgtgtactcagaaagtactcaactgggctgagcgtgagaggcctgatgccaggacagccccggacctcgacagaggcctgctgctccccaacacccccagcagacgcctgcctgcctctccacggccaggagccgctgcccgaggacccgagctgccaacgcccgcggaaacttgggttgccctcgtcactgccacacagagtggccgagccggtgctggg

SEQ ID NO: 207869 - DNA, 79 bp, Homo sapiens; identical to SEQ ID NO: 198120
  chr2:25265055-25265134
  hypo

SEQ ID NO: 207870 - DNA, 59 bp, Homo sapiens
  chr2:25369951-25370010
  hypo
actggtgcagctgagcgcctgtgaactgtctgttctccagcgcccggcccctgttcagt

SEQ ID NO: 207871 - DNA, 120 bp, Homo sapiens; identical to SEQ ID NO: 198121
  chr2:25440006-25440126
  hypo

SEQ ID NO: 207872 - DNA, 149 bp, Homo sapiens; identical to SEQ ID NO: 198122
  chr2:25457152-25457301
  hypo

SEQ ID NO: 207873 - DNA, 139 bp, Homo sapiens; identical to SEQ ID NO: 198123
  chr2:25458563-25458702
  hypo

SEQ ID NO: 207874 - DNA, 95 bp, Homo sapiens; identical to SEQ ID NO: 198124
  chr2:25459791-25459886
  hypo

SEQ ID NO: 207875 - DNA, 108 bp, Homo sapiens; identical to SEQ ID NO: 198125
  chr2:25461984-25462092
  hypo

SEQ ID NO: 207876 - DNA, 448 bp, Homo sapiens; identical to SEQ ID NO: 198126
  chr2:25463164-25463612
  hypo

SEQ ID NO: 207877 - DNA, 172 bp, Homo sapiens; identical to SEQ ID NO: 198127
  chr2:25464417-25464589
  hypo

SEQ ID NO: 207878 - DNA, 774 bp, Homo sapiens; identical to SEQ ID NO: 198128
  chr2:25466755-25467529
  hypo

SEQ ID NO: 207879 - DNA, 98 bp, Homo sapiens; identical to SEQ ID NO: 198129
  chr2:25468111-25468209
  hypo

SEQ ID NO: 207880 - DNA, 310 bp, Homo sapiens; identical to SEQ ID NO: 198130
  chr2:25468877-25469187
  hypo

SEQ ID NO: 207881 - DNA, 173 bp, Homo sapiens; identical to SEQ ID NO: 198131
  chr2:25469474-25469647
  hypo

SEQ ID NO: 207882 - DNA, 123 bp, Homo sapiens; identical to SEQ ID NO: 198132
  chr2:25469906-25470029
  hypo

SEQ ID NO: 207883 - DNA, 162 bp, Homo sapiens; identical to SEQ ID NO: 198133
  chr2:25470449-25470611
  hypo

SEQ ID NO: 207884 - DNA, 192 bp, Homo sapiens; identical to SEQ ID NO: 198134
  chr2:25470892-25471084
  hypo

SEQ ID NO: 207885 - DNA, 90 bp, Homo sapiens; identical to SEQ ID NO: 198135
  chr2:25497816-25497906
  hypo

SEQ ID NO: 207886 - DNA, 237 bp, Homo sapiens; identical to SEQ ID NO: 198136
  chr2:25505304-25505541
  hypo

SEQ ID NO: 207887 - DNA, 180 bp, Homo sapiens
  chr2:25536757-25536937
  hypo
tccccagcagagcccgctgctcacctttcggtcctcctcccgctccgcagcagagctgctggtgtccccggggccgctggagggcatggcgggcatctgggcgccgggaggcaggctggggctgcgcggggctggggggctgctgggctttggggaaggaattatcgtggtctttggagg

SEQ ID NO: 207888 - DNA, 89 bp, Homo sapiens
  chr2:25627711-25627800
  hypo
gaaactctgtctcaaaaactaaaaaataataggccacagataggaaaactacacaacccgtggaaaatccaactcgccaccattattat

SEQ ID NO: 207889 - DNA, 40 bp, Homo sapiens
  chr2:25980217-25980257
  hypo
aataccctggctgggcgcggtggctcacatctgtaatccc

SEQ ID NO: 207890 - DNA, 104 bp, Homo sapiens
  chr2:26027551-26027655
  hypo
gttggttttcctgttcgtaagtgaaaagttattgataagtaaaggtctcttctcagtgcaggaatttgaaattggcaagcttgaaggccgggcacggtggctca

SEQ ID NO: 207891 - DNA, 99 bp, Homo sapiens
  chr2:26153169-26153268
  hypo
tacaatcagatgtttcgagagacagacacacctgcatcacttctattagagtatattgtgtttttgttgttgttttgagatggagtctcactctgtcac

SEQ ID NO: 207892 - DNA, 214 bp, Homo sapiens
  chr2:26204251-26204465
  hypo
ccttgatgtagacgccagtctcggggttctctttcagctctagcctcttgcccggctccttggagagcaggtctcgaatctcttcctggtagatctccaaataggaggcccggaccaggtactgttggttctgggagcgggagatgtgggtgaagatgtgctcaaaggcattcgggatgaccccgcgcagctcgggctccacccaggtcccctg

SEQ ID NO: 207893 - DNA, 171 bp, Homo sapiens
  chr2:26524653-26524824
  hypo
atattaaaaagccctttttttgtatgtgaataaacgaaagggaatggcagtcggagtcgtaactcagctgggctcttagcatcggccggtaacacacttatccaagagactggacttggtggccttaggttggccccactgcctcagggcgttggcagctactgcaatcct

SEQ ID NO: 207894 - DNA, 175 bp, Homo sapiens
  chr2:26534837-26535012
  hypo
agccagcaggagagtcgagcctgcccagggcttccgggcttgggccagggtccacagagacctggtgtccatatctaggaccttgtctgtggcaatcaggagattctgcagcacccaaaagaaagatgaaccccgtctgctggcgcccacaggactgagccgggggcaatgagaa

SEQ ID NO: 207895 - DNA, 112 bp, Homo sapiens
  chr2:26541946-26542058
  hypo
cgatgcaaatttccgcaaggaagagctggcagggcagtgtgcagatgggatgggagggaagaggggagggagccagggctgaatttacagaggaagcgctacagcctgtgac

SEQ ID NO: 207896 - DNA, 131 bp, Homo sapiens
  chr2:26706036-26706167
  hypo
gtgtgagttggtatgcgtgcgtgtatgagtgggtgcatgtgtgtgtgcgtgcctgtgtgtggacttgtctccactcttcccacacccccagcctctcctccctctcatgccccctgcgcagctctcagtct

SEQ ID NO: 207897 - DNA, 94 bp, Homo sapiens
  chr2:26832824-26832918
  hypo
gggcagaccaggcagcggaagcttagaaaactgcctagaacattcgctcctctgcttctcgtgggagcaggctgggttccgcttggagtggcag

SEQ ID NO: 207898 - DNA, 401 bp, Homo sapiens
  chr2:26986220-26986621
  hypo
ccatgcggaaggcacggatttttggagactggagaacccaagcgcaaatccctaccccactgctcaccagcaggttcttaagcaaatcactctgcttcgctgaatttactgtcctcagctataaaatggtgtcctcggcaactggagctagatgccttcgccactttgctgaaagatatgaactgtgcccaaggtgggcggtatcagataggagccccgaagtggaaacgtccagcgtgggaatctcctctctacagggtccccaaggaactcccggcaggcccacttcagggctcctttctgacaccgcccagctcaacctctcaaaacgattcacaaaatgctgtaatagccacgatgcaccctcactgcactgtcccatccgccccttttacaaatag

SEQ ID NO: 207899 - DNA, 120 bp, Homo sapiens
  chr2:27007230-27007350
  hypo
cacgcccgggctaatttgtgtgtgtgtgtatctttggtagaggtggggtttctttcttccttctcctccttctccttccccttctcttttttttttttttttttttttgagacagagtct

SEQ ID NO: 207900 - DNA, 250 bp, Homo sapiens; identical to SEQ ID NO: 198140
  chr2:27308893-27309143
  hypo

SEQ ID NO: 207901 - DNA, 111 bp, Homo sapiens; identical to SEQ ID NO: 1396
  chr2:27309206-27309317
  hypo

SEQ ID NO: 207902 - DNA, 135 bp, Homo sapiens
  chr2:27433170-27433305
  hypo
acaccctacattgatccaaacgctatggtctcgcatctctccagaaagagggcggccaaaagcaagagctagctgttgtttcactacaactataacatgccaaggcacaaacagcagattgtgggaccccccccc

SEQ ID NO: 207903 - DNA, 210 bp, Homo sapiens
  chr2:27601497-27601707
  hypo
gggcagtggggacagcggtagggcttctcgccagtgtgggtgcgggtatgtcgtgtcaggttgacgagctgggctgaggcgtaggggcagcggccacagcggaacggcttctctccgctgtgtgtctgcatgtgccgcttcaggtggctcgagtagtgggacacgaaggtgcagaggcggcatgagtacagtagccgtgggggcagcagg

SEQ ID NO: 207904 - DNA, 208 bp, Homo sapiens
  chr2:27703854-27704062
  hypo
aagcagagagtgttcgcagggaaagtaggcagtagataaaactggaaaggggacttacctgtcataacttcctagcacaacagactggcccccaggacttgatacagctgtggtgaactcccgctcctgagggtcacggctataatcaaaagtttgtagcatgtgaccttcttttccataggctacaattttccgatcacagcctgca

SEQ ID NO: 207905 - DNA, 284 bp, Homo sapiens
  chr2:28065675-28065959
  hypo
ttctacttgtaccatttctgccagctacattgaagatttatattgcgggatatcggaaatgctactcatgtttttttttttaccctgtttgcaaggttttctaacattatcaagaaccacaagactgtgaatctcacagatggaagaaagaatattttacgacagaaagagtattgctttgcttaacttaaaaggttaactttaattaagacagcgataaaagcttttatagaaagaatgacaaatatgtataattacctccactcctgcgggccattgttagg

SEQ ID NO: 207906 - DNA, 149 bp, Homo sapiens
  chr2:28586480-28586629
  hypo
acccttctcagcctccgggatgtttccccagcagcccgtgggcttccatcctcagttgtgggccttccagtgggtgggcattcatcactgcagacagcacgcagaggagcccacccgctgggtccctggggcaccgcagcccctctccc

SEQ ID NO: 207907 - DNA, 34 bp, Homo sapiens
  chr2:28919660-28919694
  hypo
ataaagtttggggagctgacgacagtacaagttg

SEQ ID NO: 207908 - DNA, 71 bp, Homo sapiens; identical to SEQ ID NO: 198145
  chr2:29033265-29033336
  hypo

SEQ ID NO: 207909 - DNA, 41 bp, Homo sapiens; identical to SEQ ID NO: 198146
  chr2:29337889-29337930
  hypo

SEQ ID NO: 207910 - DNA, 102 bp, Homo sapiens
  chr2:29469962-29470064
  hypo
cagctgagtgcagcgcctttcccccggcctccgcggcagcgccttttaccccggcctccgcggcagcgcctttcccccggcctccgcggcagcgccttgtgg

SEQ ID NO: 207911 - DNA, 180 bp, Homo sapiens; identical to SEQ ID NO: 198152
  chr2:30369411-30369591
  hypo

SEQ ID NO: 207912 - DNA, 47 bp, Homo sapiens; identical to SEQ ID NO: 198153
  chr2:30453520-30453567
  hypo

SEQ ID NO: 207913 - DNA, 360 bp, Homo sapiens
  chr2:30481995-30482355
  hypo
atgtcccctcaggtctccagtcagtccaggttgaccctcagttctggacgtgtgtatatagctgtatttaatacctcaaggtcattgtggctctggggatgccggggcaggaggacgagggtgcgctgtggacacagcagtccgcggaattccgttctgggaagccaatggtcgccggcaccccttgcttcctccctctgttgtctgcctgtgtgacacacatcaatggcaataacttcttccaactcctcgcagaagtgggagaggccggcagcctgcaccgagaggggctttcctctctcttgctccccgcttcgttctgttttggctgcagagagtggttcatccatactctcattc

SEQ ID NO: 207914 - DNA, 194 bp, Homo sapiens
  chr2:30495297-30495491
  hypo
ataacacacagctcccaagccggttttgcccatcgtcattcccttgcaggtctgttaaccagcaccaaggtgatgggtagagcaggttctctgtggcagcctgcatcactgcagctggtgccgaggaactacccgtggctctaccacattggcacagccaggcatacaagatcgctgtccttacagggccagta

SEQ ID NO: 207915 - DNA, 266 bp, Homo sapiens
  chr2:30525798-30526064
  hypo
aaactggttagcacagcacacgggacccctcaaggccggcctcactgcagcctcatctccgcacggaccagccctgccctccaccctccaggccccaggtttctttccgctcctgcccactctctcgcctcagcacctgtgcatgagctgttcccttgtccagcccacactcccacccgatccctcccagctgactccaactcactccagctaccagcttgaacagcacttcttccaggaagcatttctcacgtctgggttagacg

SEQ ID NO: 207916 - DNA, 68 bp, Homo sapiens; identical to SEQ ID NO: 198154
  chr2:31361021-31361089
  hypo

SEQ ID NO: 207917 - DNA, 178 bp, Homo sapiens; identical to SEQ ID NO: 198155
  chr2:31361118-31361296
  hypo

SEQ ID NO: 207918 - DNA, 84 bp, Homo sapiens; identical to SEQ ID NO: 198156
  chr2:31361690-31361774
  hypo

SEQ ID NO: 207919 - DNA, 265 bp, Homo sapiens
  chr2:31477235-31477500
  hypo
ctctgggtcttcccagactacgtgccggtacaggcacgcctgtgtgggcgctcctgtgcctgggcagagcagccgagtcctgacgcccttcaaaaggccttgccaaccatctgctcgggccgctctttgccgttacttctgggaagcatctaatgtggcatttcttccccgttgtcagccaaactcttcccacattttggaaattgatgccttgttattcctcttttgctcaaatgcctttaaatcttgacggagatttttttgg

SEQ ID NO: 207920 - DNA, 95 bp, Homo sapiens
  chr2:31550128-31550223
  hypo
ttggtacgttcttgcgctagaaaatttctattttgtagagagattgctatcgcacacttactacaaaggaccgacgttatcgtaatgaaacaact

SEQ ID NO: 207921 - DNA, 95 bp, Homo sapiens
  chr2:31551361-31551456
  hypo
tccttttgagacagtcgctctctgttacctaggctgaagtgcagtggtctgatttgaggtgcactgcagcctcaaacacctgggctcaagaaatc

SEQ ID NO: 207922 - DNA, 231 bp, Homo sapiens
  chr2:32142425-32142656
  hypo
ggacactgtgctaggcggtggggtatacagtagagaacaaaatagatattgtccctgtcctcgttcggctcacagtacagtgagtagcccatcacaggaagacctttagcaggtaccacgtaacagtctgtcgagcataccataaaagagattcatgtaccttgcacaaggttgaaataaatgacctccaacattaaatacaagcctaaaattttacgattaattatagca

SEQ ID NO: 207923 - DNA, 120 bp, Homo sapiens
  chr2:32244332-32244452
  hypo
tgactcactttttcatctactagctagatcagtgggactagtttttccatcaaagaaaaatttagacacacctgagaggtaatagggtattaagctaaaattagcctggcgtggtggtgc

SEQ ID NO: 207924 - DNA, 120 bp, Homo sapiens
  chr2:32291347-32291467
  hypo
gctccattctttatcacctcttaagaacatccaggatcccttggggagaattaaaacggttgcaaagttttagaatagaggaacatgtttaagcgtagatcattttttgggccagtcatg

SEQ ID NO: 207925 - DNA, 240 bp, Homo sapiens
  chr2:33281381-33281621
  hypo
gttttgttttgtttgcatttatttgcttttggctttgtggctttcggttttctttggtaacagaatggcctggatgttaggcaaaatgccgccctgggcgatggtgactttgcccagcagcttgtttagttccctgttgttgcaaattgccagctggaggtgatgagggatgatgcgcgtcttcttcttgtcccttcgtggttgcaaaaatgtgtccagatttggcgggttcttggtctc

SEQ ID NO: 207926 - DNA, 195 bp, Homo sapiens
  chr2:37076576-37076771
  hypo
aaggtgaagatgatgcattgcgtcatacaaagactttagccagtgcgtcagctccagcactggctatatagcatttggatgggtggaaagctacatcatgaatcgattcttcaaacttttttcgatgagctgtgaattcttggatacacgtcttactttctagattccataaacgtattgaacagtcatgaccta

SEQ ID NO: 207927 - DNA, 38 bp, Homo sapiens
  chr2:37149992-37150030
  hypo
tgaaaataaccactccgggccgcacgcggtggctcacg

SEQ ID NO: 207928 - DNA, 87 bp, Homo sapiens
  chr2:37241581-37241668
  hypo
ggtgtgagccaccgtgcccagccagtattattttttatatcaatggtaagcatagattttattgtactcctacgtagaaaacaaaat

SEQ ID NO: 207929 - DNA, 752 bp, Homo sapiens; identical to SEQ ID NO: 198162
  chr2:37898934-37899686
  hypo

SEQ ID NO: 207930 - DNA, 160 bp, Homo sapiens
  chr2:38157989-38158149
  hypo
gcccagcctctggcacggtgggccttccgcctccgcctgacatgaggacaaaggggcacagtgggcaggcagcgcatgggtctgtctctggcagggcagagggcggcaggagcagactccctccaggctcaagacacaggcccagcgctgctacccaccc

SEQ ID NO: 207931 - DNA, 201 bp, Homo sapiens
  chr2:38489624-38489825
  hypo
tttcctgctggactgagacccgcagaccacctgcatgcccacacatacccttctgactgcaatggagcatcaaagactgagagcgaggaccgggtggccagctgaggcggaaactccgccagagctgacttattcccaggcttatctcagcaggggcctgcagaagtggggacacggaattgaggccactgtgagttttcg

SEQ ID NO: 207932 - DNA, 120 bp, Homo sapiens
  chr2:38546370-38546490
  hypo
tcttctcaaatcagctcacactactactctctaggcttctaaataagtggggttatactcactttcccccttttctgaaagatatcctggctgggcatgacagctcatgcctgtaatccc

SEQ ID NO: 207933 - DNA, 31 bp, Homo sapiens
  chr2:38551439-38551470
  hypo
gtgctacaataataagcgagatcctccctag

SEQ ID NO: 207934 - DNA, 84 bp, Homo sapiens
  chr2:38585486-38585570
  hypo
aaagttcaaaaaagtcgaggtacataaaacaatctctacttaaaaaaggaaaaagctatagaaattattttaaaatggctgggc

SEQ ID NO: 207935 - DNA, 31 bp, Homo sapiens
  chr2:38649876-38649907
  hypo
agaaaaaaaaaacaaacgataaagcttgcaa

SEQ ID NO: 207936 - DNA, 120 bp, Homo sapiens
  chr2:39016315-39016435
  hypo
ggcgacacggtgacactccttttcaaagaaaacaaaaaacaacaaaaaacaaaaaaaattctacattcataaccctctagagtcatatactttaaaacaaaacaggctgggcgcagtgga

SEQ ID NO: 207937 - DNA, 244 bp, Homo sapiens
  chr2:39186667-39186911
  hypo
gaaggtgtgccttggagcaccgcaggtggtgaggagggtcagggcttccacgcggggtgatgacagtccctggcccgcaggccatttcccagaagctcagacaataccttcgggcctccgctcgacggactgccttgtccactctccgcctgggaacgggggttcgtgggagcgccttagtggaagtttgtggagctcgggaggtggcatgcacaggcgcctcggagcgcggccccgaggggcg

SEQ ID NO: 207938 - DNA, 59 bp, Homo sapiens
  chr2:39188204-39188263
  hypo
ttcttctgtctgtgaggtgtcgtttctatgttgagaatatggaacacggtgcgccagcc

SEQ ID NO: 207939 - DNA, 165 bp, Homo sapiens
  chr2:41223819-41223984
  hypo
taaaaacaagttaatatactcgcaatatattactgcctacgttttaccatttatcctcatgaagtgatttacatccatcgtatcctctattgcagcgatcaccaacctttttggcgctggggaccaattttttggaacacaatttttccacggaccagggagctg

SEQ ID NO: 207940 - DNA, 365 bp, Homo sapiens; identical to SEQ ID NO: 198168
  chr2:42274691-42275056
  hypo

SEQ ID NO: 207941 - DNA, 660 bp, Homo sapiens; identical to SEQ ID NO: 198169
  chr2:42275116-42275776
  hypo

SEQ ID NO: 207942 - DNA, 35 bp, Homo sapiens
  chr2:42403393-42403428
  hypo
tcatcccttttcttttccaccgctatagttcaggt

SEQ ID NO: 207943 - DNA, 153 bp, Homo sapiens; identical to SEQ ID NO: 198172
  chr2:42721246-42721399
  hypo

SEQ ID NO: 207944 - DNA, 43 bp, Homo sapiens
  chr2:43002056-43002099
  hypo
agtggctaaatttcccgtccctccccaccaacacacacacaca

SEQ ID NO: 207945 - DNA, 72 bp, Homo sapiens
  chr2:43103590-43103662
  hypo
gtacaaacacatgccgattttgccgcagattaaaaccatctcctgcgctccctggatcgtaacacataacag

SEQ ID NO: 207946 - DNA, 35 bp, Homo sapiens
  chr2:43123919-43123954
  hypo
caaagtactgggattataggcgtgagccaccacgc

SEQ ID NO: 207947 - DNA, 75 bp, Homo sapiens
  chr2:43148273-43148348
  hypo
cgatgatttccacctcgatgggcagtctcactggccaggattgaggcttgggtcactctccgcatcccaggtaca

SEQ ID NO: 207948 - DNA, 101 bp, Homo sapiens
  chr2:43173213-43173314
  hypo
ccccctgactgaggacgccagcctctgaccagtggctgaaacccgtcttctaggcattaatccagaagttagatgtaccatgaaccttctggtctttctta

SEQ ID NO: 207949 - DNA, 343 bp, Homo sapiens
  chr2:43248787-43249130
  hypo
agtactgcaagccgcgttttttttttttttttttttttttttttttttatccctggggaaatgagtgaatggctgggggacacagctgagatggaaaatctggaaggaaagtgctccaaccacgccgtctctctcccctgcacatgtgccctgtggcacctcaaagttcccttcaccgcggaggctgctgggtttctccgcattttcccatccagccccgccgccgcctgccatccagccctcctcccaggcttgctgcagccggcccagctgcgagggggcccgaggacggcactgcacaaaggccccattctcagctggcgggggctgttatcagcccagc

SEQ ID NO: 207950 - DNA, 173 bp, Homo sapiens
  chr2:43299388-43299561
  hypo
gatccaggtagcctccgtgtccggctgatgggctgagggaggacactagaatggccaggctcccgtggctggattccagcaagcctttcatagcgtcctctgccatgcaggcctggagggtgaagcagttcaggttgcaggctttgtgactcctcaggcgctgggccttgagg

SEQ ID NO: 207951 - DNA, 189 bp, Homo sapiens
  chr2:43373136-43373325
  hypo
ttgtggggggatgttcgggtaggaaaggggagtaattaattcactgtcgcctgaattaaccagtgactgattccatcagttcgatcaaccactgtttattgccatagattgtatgccaggtaccacgctaggggttggggcttcccaggcttgacatatactcaagggaggagccgcaggtgggagcag

SEQ ID NO: 207952 - DNA, 34 bp, Homo sapiens
  chr2:43388282-43388316
  hypo
aaccaggctggactcgggttccttggctcccaat

SEQ ID NO: 207953 - DNA, 416 bp, Homo sapiens; identical to SEQ ID NO: 198178
  chr2:43452443-43452859
  hypo

SEQ ID NO: 207954 - DNA, 35 bp, Homo sapiens
  chr2:43820774-43820809
  hypo
ttttttttttttttttgagacggagtcttgctcct

SEQ ID NO: 207955 - DNA, 35 bp, Homo sapiens
  chr2:43821049-43821084
  hypo
gcgtgagccaccgcgcccagccttagacttcttgt

SEQ ID NO: 207956 - DNA, 33 bp, Homo sapiens
  chr2:44113283-44113316
  hypo
cgccactgctctacaggccgggcaacagagtga

SEQ ID NO: 207957 - DNA, 44 bp, Homo sapiens
  chr2:44126057-44126101
  hypo
tttgtctttaatcatttcagcgaaactcgctgccccatacctac

SEQ ID NO: 207958 - DNA, 105 bp, Homo sapiens
  chr2:44126131-44126236
  hypo
caattctaaagacatttctagtttgatctggcatctttaaaaccagtaacctaaaatctaccatccagtccttgtcctgcaaccgtgattcacactgaatgtaaa

SEQ ID NO: 207959 - DNA, 32 bp, Homo sapiens
  chr2:44439162-44439194
  hypo
acaggcgtgaatcaccgcgcctggtttagtca

SEQ ID NO: 207960 - DNA, 33 bp, Homo sapiens
  chr2:44505288-44505321
  hypo
aagcagcctgtcaggccaggcgtggtggctcac

SEQ ID NO: 207961 - DNA, 520 bp, Homo sapiens
  chr2:44553939-44554459
  hypo
ttagacttggctgagaaaagccttggccatgaagcgtcttaatgcaagcctctaaatcagcaaggccattgagttttttagttaggcggccatcagcgtgccactggaggcctaactcaccaccacctctgaaattgaagggcaaaaaagttttagtggaaaaaaaaagttaatactgtaggctggggtcagcgaactacacctggaggcctgttttttgtgtggccctggagctaagactggtttttgctttttaaaggttgagtgaaaacaaggaatgtgcaacagaaactgtacgcggcctgcaaagcttaaaatgtgactatgtagctctttagagaaaaaggtttgccaactcctgatatagacaatccagaattgattcaacgaatatattttgagtgcctgcccatttatcagggattaagtacagaccttaaaagtagaaacaaacgaaaatcccctaccgtggagaagacagtaattttgtggggtaagaaaacaacgacttacccagcaa

SEQ ID NO: 207962 - DNA, 205 bp, Homo sapiens
  chr2:45927198-45927403
  hypo
gagccacaagatgaacgggggcagttaactaaccaggccgcctggggttgaggatgaaatgggtacctgagttttccttttaagtagcagagggctaacatctgaggccctgccgggagccagggtctcggtggagaggtgagaacacacctgggagcaatatagagaggtcttttttctttgcagcactcgaagtctgatggca

SEQ ID NO: 207963 - DNA, 41 bp, Homo sapiens
  chr2:45940266-45940307
  hypo
taaatgatctgtagtcgctgtcacctcgaggctcttataaa

SEQ ID NO: 207964 - DNA, 559 bp, Homo sapiens; identical to SEQ ID NO: 198187
  chr2:46524134-46524693
  hypo

SEQ ID NO: 207965 - DNA, 755 bp, Homo sapiens; identical to SEQ ID NO: 198188
  chr2:46524957-46525712
  hypo

SEQ ID NO: 207966 - DNA, 124 bp, Homo sapiens
  chr2:46707664-46707788
  hypo
aaggccaggctggcgacggacccaaacccgcagagctgcccccgacccctgggactgagcgcaatcccgagatggagctggagaaggtgcgcatggagttcgagctcacgcggctcaagtacct

SEQ ID NO: 207967 - DNA, 81 bp, Homo sapiens
  chr2:46834766-46834847
  hypo
agatgtggccttgatgttgacggctgctgactgatcagggtggtggttggggaggctgtggaaatttcttttctttttttt

SEQ ID NO: 207968 - DNA, 81 bp, Homo sapiens; identical to SEQ ID NO: 198192
  chr2:47167906-47167987
  hypo

SEQ ID NO: 207969 - DNA, 101 bp, Homo sapiens
  chr2:47247696-47247797
  hypo
ctggcagcttgagctcgcccacaaggtggctgtagggctgctctggtcagctgagtcgggcatggtgggcagacagcctctcccgccgtctccctccaggc

SEQ ID NO: 207970 - DNA, 172 bp, Homo sapiens
  chr2:47475844-47476016
  hypo
ctagagctatacttccgcatccctggggccatcgcagactcattagagatcagaagatgttgtggaccctcttgtcagagaaatgcacatatgtacaaagattgtcgtatgtcatttctagggtttctggaacactctgaagcatctcgttagactgcggaatgagaagccc

SEQ ID NO: 207971 - DNA, 329 bp, Homo sapiens; identical to SEQ ID NO: 198194
  chr2:47596115-47596444
  hypo

SEQ ID NO: 207972 - DNA, 60 bp, Homo sapiens; identical to SEQ ID NO: 198195
  chr2:47596505-47596565
  hypo

SEQ ID NO: 207973 - DNA, 55 bp, Homo sapiens; identical to SEQ ID NO: 198196
  chr2:47596794-47596849
  hypo

SEQ ID NO: 207974 - DNA, 41 bp, Homo sapiens; identical to SEQ ID NO: 37435
  chr2:47596941-47596982
  hypo

SEQ ID NO: 207975 - DNA, 79 bp, Homo sapiens; identical to SEQ ID NO: 198198
  chr2:47747971-47748050
  hypo

SEQ ID NO: 207976 - DNA, 78 bp, Homo sapiens; identical to SEQ ID NO: 198199
  chr2:47748523-47748601
  hypo

SEQ ID NO: 207977 - DNA, 38 bp, Homo sapiens
  chr2:47802077-47802115
  hypo
tatcccaaggaggccgggtgcggtggctcatgcctgta

SEQ ID NO: 207978 - DNA, 45 bp, Homo sapiens
  chr2:47918383-47918428
  hypo
atggcgtgctctccgcgttcgccgccacccgcaaaaggagacttg

SEQ ID NO: 207979 - DNA, 100 bp, Homo sapiens
  chr2:48539633-48539733
  hypo
atgatacatctctgaagtatcgtccagctctcaaattctgtgatccttctacagttaaacaggactgcttagccacctgattttaaaatagatggacggc

SEQ ID NO: 207980 - DNA, 91 bp, Homo sapiens
  chr2:49621663-49621754
  hypo
tacacctcaataatcagaggcggtgaagatttccataaaggaaaataaaagtttaagattccaataaatcggccgggcccggtggccacgc

SEQ ID NO: 207981 - DNA, 36 bp, Homo sapiens
  chr2:54019055-54019091
  hypo
aaaaaaaaaaaaagacggagcctcgctctttcgccc

SEQ ID NO: 207982 - DNA, 154 bp, Homo sapiens
  chr2:54097367-54097521
  hypo
tcataattttatcatcgtctgtcgagtacgtaacatgttctttgctgcgttcattacactagcatatgaaatacatcataaaatgttttactggttgcactatttcctataaagcttatatgccacaatttcttttcttttcgttttttttttt

SEQ ID NO: 207983 - DNA, 266 bp, Homo sapiens
  chr2:54312128-54312394
  hypo
gtggggaatgtttccggatggaatattctatgtcttcaacttactttcaaaaaaacaatacagcaagtcctcaaataagtctctttgttcaacgtcgttttgttcagtgtgagaaaaatgatgagaaaaaaaatcattcctggaaatatattcctggtcagggccactgtctgtgtagagttgcacgttctcctcacgtctgtgggatttttctccaggtgatccagtttcctcccacgttccaaggctgtgcacatttagttcac

SEQ ID NO: 207984 - DNA, 48 bp, Homo sapiens
  chr2:55289046-55289094
  hypo
aaaaacccgagaccctagcaaggcaaacacacaaaaacggctggacgt

SEQ ID NO: 207985 - DNA, 206 bp, Homo sapiens
  chr2:55366249-55366455
  hypo
ctaattcaggcctcctggtgcccaatagagccaacttcccaaaatgctgccttgtatagggggaccccgtttgatagccaggcccacgatgcaatgacacactgccataaagtacaataaagagtacccgcctctactcttcatggcagaggacaaagttcatccattgtattatcatgaagcatcattacgttgggcagtcattt

SEQ ID NO: 207986 - DNA, 84 bp, Homo sapiens
  chr2:55499046-55499130
  hypo
acaaaggtgtgtaatcggtgttactgaatgatttaatgcaaactcctctcctggacatttttttttttttgagatggagtctca

SEQ ID NO: 207987 - DNA, 529 bp, Homo sapiens; identical to SEQ ID NO: 198213
  chr2:55646458-55646987
  hypo

SEQ ID NO: 207988 - DNA, 33 bp, Homo sapiens; identical to SEQ ID NO: 198219
  chr2:58655395-58655428
  hypo

SEQ ID NO: 207989 - DNA, 101 bp, Homo sapiens; identical to SEQ ID NO: 198220
  chr2:58776940-58777041
  hypo

SEQ ID NO: 207990 - DNA, 36 bp, Homo sapiens
  chr2:60705871-60705907
  hypo
ggctgaatgaaggagcgctctggtgctgcgaggcca

SEQ ID NO: 207991 - DNA, 144 bp, Homo sapiens
  chr2:60706376-60706520
  hypo
ctacccacctagcaggtccacgtggggactcagcctatggacacctggcctctgcgggcacagcggccacacaccacggtgggacccggagaccattttttgttttgagtctctctaagactgcttgggaaatgaggtctctca

SEQ ID NO: 207992 - DNA, 207 bp, Homo sapiens
  chr2:60706550-60706757
  hypo
gaggctgaccagaggccaccaacgtcaagctctctcaggtctactaggaacaggaaagaataactctcccttaacaagcccctcaggctgaaatccttttgcttccagggcctcaaccttctactgctgggtagaaagccccctctgtcaccggcccacagatctcagctgccatcgcactcaaaccctgtcaggcggtggagagtg

SEQ ID NO: 207993 - DNA, 394 bp, Homo sapiens; identical to SEQ ID NO: 198223
  chr2:60784505-60784899
  hypo

SEQ ID NO: 207994 - DNA, 104 bp, Homo sapiens
  chr2:61135144-61135248
  hypo
caaaaatatcacagttgttttccttacctgagatgccctgaaagccttctcagttctcttaagtctgagataacatcttcctaattatacggtatactcagcaa

SEQ ID NO: 207995 - DNA, 53 bp, Homo sapiens
  chr2:61175238-61175291
  hypo
tgaagtgaatgacgcgagctcgcacagccaggggccttcggtgaaggacgcgc

SEQ ID NO: 207996 - DNA, 438 bp, Homo sapiens; identical to SEQ ID NO: 198227
  chr2:61175661-61176099
  hypo

SEQ ID NO: 207997 - DNA, 126 bp, Homo sapiens
  chr2:61304102-61304228
  hypo
agattttacttgcccgcgagatcttttgatatcagaaatgaagtactttgctgaatatttatctatggatgcccagcgctgggaagaggtggacatttcagttcattgcgacgttcacattttcaa

SEQ ID NO: 207998 - DNA, 139 bp, Homo sapiens
  chr2:61448896-61449035
  hypo
aagcagcaggatcagcgaggggtacaaagtcaaccgggaaccacgtatgatagatttttctggatgtcaagagtattttggaaaagataattataaaaatattctctaaattgacaaacactgtaaatacttacgatgt

SEQ ID NO: 207999 - DNA, 40 bp, Homo sapiens
  chr2:61471724-61471764
  hypo
ggcgacacagcaagaatccgacttgggggcaaaaaaaaaa

SEQ ID NO: 208000 - DNA, 120 bp, Homo sapiens
  chr2:61505031-61505151
  hypo
gctttcgcttggttctcattctttttttgcctgccgccatccacataagatgcgacttgctcggacttgcccggacttgccttccggcacgattgtgaggcctccccagccacatggaac

SEQ ID NO: 208001 - DNA, 35 bp, Homo sapiens
  chr2:61505211-61505246
  hypo
agcagtgtaaaaacggactaatacacaatgtaaca

SEQ ID NO: 208002 - DNA, 32 bp, Homo sapiens
  chr2:61556157-61556189
  hypo
tgtttgttttgtttttgagacggagtttcact

SEQ ID NO: 208003 - DNA, 401 bp, Homo sapiens; identical to SEQ ID NO: 198228
  chr2:61991002-61991403
  hypo

SEQ ID NO: 208004 - DNA, 323 bp, Homo sapiens; identical to SEQ ID NO: 198229
  chr2:61991463-61991786
  hypo

SEQ ID NO: 208005 - DNA, 92 bp, Homo sapiens
  chr2:62116629-62116721
  hypo
gccaccgcgcccacccggaggtgccctcctttaactccggctggatctatccgcgaggtggggtgggcgccggaataactctctaagggata

SEQ ID NO: 208006 - DNA, 38 bp, Homo sapiens
  chr2:62146652-62146690
  hypo
tgccatgtcgatcaggcttcatcgcgtttttttttttt

SEQ ID NO: 208007 - DNA, 38 bp, Homo sapiens
  chr2:62497414-62497452
  hypo
aagacatagtgaataggagtcgggcgcggtggctcagg

SEQ ID NO: 208008 - DNA, 37 bp, Homo sapiens
  chr2:62497692-62497729
  hypo
gacagagcgagactccgtctcaaaaaaaaaaagaaaa

SEQ ID NO: 208009 - DNA, 169 bp, Homo sapiens
  chr2:63118747-63118916
  hypo
actactgtgggacatgtaaacgcttcaatacctagattaaaagttgtaatctaaggattaatatatatattatatattggctccattagcgctattatcattaaaggtgtgttagcatcctcttcgcagacttgcatatagcgaggccgtttcactaggttttaagttt

SEQ ID NO: 208010 - DNA, 237 bp, Homo sapiens
  chr2:63123375-63123612
  hypo
tgaagcaagtaataacttgtcgtgtttaaagaatcgaaaaaaggctatgtaactggaaaggagtgagcaaggggacagtgatgttatacaagtcagagaacgtaggcactgcctgggatgtaaaggatcttacggaccattgtaacaattttggcattaaatcatgcgtggtggaaagccagttaagttagtgtatgtatgtatttgttgagggaaaggcaacgtgatttgtaactt

SEQ ID NO: 208011 - DNA, 217 bp, Homo sapiens
  chr2:63192034-63192251
  hypo
gcatgaaaccacaacgacttgattttttcagccattagtagatcagagcagtaatttcacagtattttggtcaaggtaattataataccacgaactgagtagatttgaaaattcacgaaagaagtccagaaataccaggtgagcttccttgtgttcactggaacgttatgattagtttaattggtctttgtttgattttagccgcagaaactgtttg

SEQ ID NO: 208012 - DNA, 149 bp, Homo sapiens
  chr2:63272200-63272349
  hypo
actggcagaagaccgaggcccagaagcgacgcgaacagcttctgctagatgagctggtggccctggtgaacaagcgcgatgcgctcgtcagggacctggacgcgcaggagaagcagtgagtgggcagtggggtcgggtcgaggctgggc

SEQ ID NO: 208013 - DNA, 133 bp, Homo sapiens
  chr2:64538768-64538901
  hypo
tcagaatcagaatcaaaagacggtgtaattagaagctgcaagtggatacacatgagggcgtaatacctgccgtcacgcagctgagagcgctcggggcactctggaagaaagcgcaaattcaaagtaatattat

SEQ ID NO: 208014 - DNA, 331 bp, Homo sapiens; identical to SEQ ID NO: 198243
  chr2:65215348-65215679
  hypo

SEQ ID NO: 208015 - DNA, 38 bp, Homo sapiens
  chr2:65829225-65829263
  hypo
gaaaattacatacaaatggccgggtgcggtggctcatg

SEQ ID NO: 208016 - DNA, 37 bp, Homo sapiens
  chr2:65829503-65829540
  hypo
acaagagtgaaactccgtctcaaaagaaaaaaaaaat

SEQ ID NO: 208017 - DNA, 92 bp, Homo sapiens
  chr2:66604303-66604395
  hypo
aaagttactttacaaagatgcgtcagtctgaatgaaagaggcatatcatatcgttggttacatgtaccaaagaattatgttggccgagttgg

SEQ ID NO: 208018 - DNA, 180 bp, Homo sapiens; identical to SEQ ID NO: 198249
  chr2:66661524-66661704
  hypo

SEQ ID NO: 208019 - DNA, 38 bp, Homo sapiens
  chr2:68287484-68287522
  hypo
tgagtcaggctgggcgcagtgactgacgcctgtaatcc

SEQ ID NO: 208020 - DNA, 79 bp, Homo sapiens
  chr2:68433262-68433341
  hypo
tcaaatacgtgaaagaacagagagaaacttccaggtacatgcaggatcaaaatcaaagagaagtcgactgtgttataaa

SEQ ID NO: 208021 - DNA, 246 bp, Homo sapiens
  chr2:68672443-68672689
  hypo
aagagcaggtggaagccgtcctgaacgaattaccccatgtacctagaagcctcttcccaaatcaagcagtgatcacctcactcataaacagagcacgcacccaaaggttttgcttgatgtattttgagactagtttcacgtgttgctgctaaacgtttccagggagttgcaaaagttaatccttatggatcggtgattgaaatacagtgacatccctgctgctctgcagtgtgcgcaaaggtcaaa

SEQ ID NO: 208022 - DNA, 40 bp, Homo sapiens; identical to SEQ ID NO: 198257
  chr2:69240028-69240068
  hypo

SEQ ID NO: 208023 - DNA, 312 bp, Homo sapiens; identical to SEQ ID NO: 198258
  chr2:69240720-69241032
  hypo

SEQ ID NO: 208024 - DNA, 120 bp, Homo sapiens
  chr2:69997975-69998095
  hypo
cgttgggagggtgaggcagacgatcgcttgagcctaggcattcaaggccagcctaggcaatgcagcgaggccttgtctagaaaatttaaaaaaaaaaaaaattagctgggcgtggtggca

SEQ ID NO: 208025 - DNA, 221 bp, Homo sapiens
  chr2:70165950-70166171
  hypo
cacgcccttcacaccgcgcatgctcattcccccgacgcgccgcgtgtggatgggagcagtatttctcactttaaaatggacaccttgatagtgtgtctctggggttgcacagctcatcaaagttccaaattgtttgttctcacaaacaaaacggtacaatctatttttgtgcgatgttcttgggacctcgctgtgttctgctatctcgaggcacattctcc

SEQ ID NO: 208026 - DNA, 48 bp, Homo sapiens
  chr2:70204037-70204085
  hypo
aatgggacaggcaaggtgactcatgcctgtaattccagcactttggga

SEQ ID NO: 208027 - DNA, 260 bp, Homo sapiens
  chr2:70224805-70225065
  hypo
tggccacctccagcccgatggcactgaaccacagatgagcaacagaatgacctggggaggcatttaaaatctagatcctgactcagttgatctggccgggtcaagcatgtgtatttttgcaaaagtgccccaggtgattctgacacatactcctagttaagaaccacggttacggccgcctcttcctcatcgttattaataacaagagaaacaacaattgacattttttgtgcacttacgtgcactgcctcatgtaatct

SEQ ID NO: 208028 - DNA, 60 bp, Homo sapiens
  chr2:70329617-70329677
  hypo
tcctggcaggggccgacgcagggaccggcgcgggggtgagagcgcgcggccggattcacc

SEQ ID NO: 208029 - DNA, 232 bp, Homo sapiens; identical to SEQ ID NO: 198262
  chr2:70351264-70351496
  hypo

SEQ ID NO: 208030 - DNA, 295 bp, Homo sapiens; identical to SEQ ID NO: 198264
  chr2:70369036-70369331
  hypo

SEQ ID NO: 208031 - DNA, 180 bp, Homo sapiens; identical to SEQ ID NO: 198265
  chr2:70418116-70418296
  hypo

SEQ ID NO: 208032 - DNA, 101 bp, Homo sapiens
  chr2:70427484-70427585
  hypo
aatccctactttttaaccctcgtattatttgtattgcaacaaatcaggtgaaaaagcactgaagccatagaaatcagaacttctggccgggcgcggtggct

SEQ ID NO: 208033 - DNA, 120 bp, Homo sapiens
  chr2:71355491-71355611
  hypo
tacacacccccaaagaagcgggaattcagaagtatttgtacacccacgttcatagctgtattacaatagccaaaaggtggggataacccaaatgtctatcaagagacgaatggataaaca

SEQ ID NO: 208034 - DNA, 174 bp, Homo sapiens
  chr2:71763615-71763789
  hypo
gatctcttcatctccgctctccatgtgtgccgctctgactgcgggcgatgagctgtgcgtgtctctgcgtgtttgcgcatgtggatgtgagtgggtgcggttgtctcctgtgttgtggatgtgtctggcccgagtccgggtgagctgtgtcaaaggcatcggcgtactgtacaa

SEQ ID NO: 208035 - DNA, 374 bp, Homo sapiens
  chr2:72359326-72359700
  hypo
gggctgggctgaggcgggtgggtcttgggttagactgtggcgctcagcatggcctccgtctccggcaggatctcgttctggttggagtccaggccaaagaacttgacgctgaggccatccacggggtgcaggacggggaccaaggtgatgcgggggaaggtccgtgtggccagctcaaagcggctggtgctagccagctccaccgccagcaccttcaggaacagcttggccaggtgcttgcccaggcaggtccggacaccgccaccgaacgggaggtaatggaagcggccatccttgtcctcgctccgcgcctggctgaagcgatcggggtcgaacacgttcacgtctttgaacacgggcgctgtgtcatgggt

SEQ ID NO: 208036 - DNA, 155 bp, Homo sapiens
  chr2:72359982-72360137
  hypo
ctgatgcatttggggcgcacttctcccatcggactgaaagctccctgaaagcaagcactgtttccccatcaggcctgaagtccctgaaatggaggctggtgccccgccttgcccctatcccggtgcccctgctcccccatcgcccccggtgccac

SEQ ID NO: 208037 - DNA, 55 bp, Homo sapiens; identical to SEQ ID NO: 198274
  chr2:72374932-72374987
  hypo

SEQ ID NO: 208038 - DNA, 304 bp, Homo sapiens; identical to SEQ ID NO: 198275
  chr2:72375582-72375886
  hypo

SEQ ID NO: 208039 - DNA, 709 bp, Homo sapiens; identical to SEQ ID NO: 198279
  chr2:73052644-73053353
  hypo

SEQ ID NO: 208040 - DNA, 276 bp, Homo sapiens; identical to SEQ ID NO: 198280
  chr2:73114226-73114502
  hypo

SEQ ID NO: 208041 - DNA, 489 bp, Homo sapiens; identical to SEQ ID NO: 198284
  chr2:73142998-73143487
  hypo

SEQ ID NO: 208042 - DNA, 282 bp, Homo sapiens
  chr2:73302643-73302925
  hypo
gaaggctatttgggggggcccggggggatctgcagcagcgtgggtgaggtctccatgatccgcaccagcagccggtcgatgtagctctccagctcctgcacatgctcgtcccgctggctcagctcccgctcccgctgcaggagcaggctgatgagctcatcgtgggtcaggtggtagtacttggccgactggtccagcacagctgagtcctgaggccggaccgaagacagtgagcagggcagccctaggcctgcctgcctgcctgcccgcttgcccgcccgc

SEQ ID NO: 208043 - DNA, 100 bp, Homo sapiens
  chr2:73440150-73440250
  hypo
cacgcccggcaaatttttctattttttggagagacaaggtctcactacgttgcccagtctgttcttgagcccgggagctggaggctgccgtgagccgaga

SEQ ID NO: 208044 - DNA, 119 bp, Homo sapiens
  chr2:73440293-73440412
  hypo
aacaaaactcacaaaatcaggggacaaggaaacaaaacaaggcttgatagtcaggcctagctgtggggacaaatgccataggtctgtggtttgcagcttcttggggtcctgagagaaca

SEQ ID NO: 208045 - DNA, 88 bp, Homo sapiens
  chr2:73493671-73493759
  hypo
gctgctgatgacctgcagctgccgctcggcacggtcagcccgctcaaggagctcctcaatgaactgctgcagccgcagcttggcgctg

SEQ ID NO: 208046 - DNA, 137 bp, Homo sapiens; identical to SEQ ID NO: 198294
  chr2:73520105-73520242
  hypo

SEQ ID NO: 208047 - DNA, 373 bp, Homo sapiens
  chr2:74152825-74153198
  hypo
gggtaggactttagccgctccagtagccattaacgccccaccctggttatccttaaaaaattcgattaaaaaaaaagttcttaatatataaacatgacctcagccatcctatatatacatcaacataagaaaaaggtcccgtgctttttatgggaacagcttcaagacaggtatcccagcccccggcccctccccagcccccttgcaatcagatccttgtcttctaaaacctgccacacctaagagcgctgcctgaaggccggtttggcctgttgactcctggttttgactgttggtgatttaagcgattggaactggaagcaccatttgacaacattttgtaaatcattacttctgaggttgttatgacgac

SEQ ID NO: 208048 - DNA, 104 bp, Homo sapiens
  chr2:74153227-74153331
  hypo
cagcagcttaggtccctgccctcctgcagagcacacttcaccgacagcaggactcaggttttatacaagtctctactcgccattgcttacgtccaagaacccag

SEQ ID NO: 208049 - DNA, 92 bp, Homo sapiens
  chr2:74155569-74155661
  hypo
aataaaataagcaaggcctcactgagaaggtgacatctgagcaaaaaactgaagatgagggagcaaatcacgtggatacctgggagaagaat

SEQ ID NO: 208050 - DNA, 41 bp, Homo sapiens
  chr2:74193107-74193148
  hypo
atttttattttttgagacagcgttgctctgtcgcccaggcc

SEQ ID NO: 208051 - DNA, 259 bp, Homo sapiens
  chr2:74327559-74327818
  hypo
gccctccctcaaggtggagccgcagaaccacttcagctccttcaagtacagcggcaacgcggtggtggagagctactcggtgctgggcaactgccggccctccgacccttacagcatgaacagcgtgtactcctaccactcctactatgcacagcccagcctgacctccgtcaatggcttccactccaagtacgctctcccgtcttttagctactatggctttccatccagcaaccccgtcttcccctctcagttcctg

SEQ ID NO: 208052 - DNA, 120 bp, Homo sapiens
  chr2:74350566-74350686
  hypo
aaccctgtctctactaaaaatacaaaaaactggacccggcctgtgggcggaaccgaccaagaaacacgccagccagggcaggggcgtgcaggagggattcggtaaccccagagaggagtg

SEQ ID NO: 208053 - DNA, 421 bp, Homo sapiens; identical to SEQ ID NO: 198296
  chr2:74405756-74406177
  hypo

SEQ ID NO: 208054 - DNA, 295 bp, Homo sapiens; identical to SEQ ID NO: 198297
  chr2:74425424-74425719
  hypo

SEQ ID NO: 208055 - DNA, 395 bp, Homo sapiens; identical to SEQ ID NO: 198298
  chr2:74425790-74426185
  hypo

SEQ ID NO: 208056 - DNA, 249 bp, Homo sapiens; identical to SEQ ID NO: 198299
  chr2:74426214-74426463
  hypo

SEQ ID NO: 208057 - DNA, 211 bp, Homo sapiens
  chr2:74663402-74663613
  hypo
ggtccgagggccgcgggaaatcggaggagccagggcgccagcatagctgcaccgcctccagctgcagcgctcaggacgccggtgacatcagctcccaattgccgcgagagcaactgaggggtaccagggcgctggaggtccctccgggcacctggctgggcttggctcaaggcggtgcctccaccgagactccatcgcggcgggaccggac

SEQ ID NO: 208058 - DNA, 38 bp, Homo sapiens
  chr2:74672959-74672997
  hypo
ctcccagaattaactttagagatcgtaatttggcagcc

SEQ ID NO: 208059 - DNA, 106 bp, Homo sapiens
  chr2:74753267-74753373
  hypo
tgcagctctaggacgtgtcaggacggcagtcagctccagacccacgtagtcaccaccaaccctgaccgtgtgaagtacaaaggtaaattccggctctacctcaggg

SEQ ID NO: 208060 - DNA, 231 bp, Homo sapiens
  chr2:74761647-74761878
  hypo
accctctcacccatggcactcgtgccacacccaggagtggcgcccagccttgggcctgaagtcagctcgtcccaggttgtggatctgggaggagaatcggagcagacgccggtgaccatagggccagttggctgagcgggctgagctggccaggcagttctcttccgcagcacagtacaacatatgcaggggccggtcttcgatgtaggcggtctcctgcaccagtgctga

SEQ ID NO: 208061 - DNA, 36 bp, Homo sapiens; identical to SEQ ID NO: 198305
  chr2:74776040-74776076
  hypo

SEQ ID NO: 208062 - DNA, 209 bp, Homo sapiens; identical to SEQ ID NO: 198307
  chr2:74781726-74781935
  hypo

SEQ ID NO: 208063 - DNA, 89 bp, Homo sapiens
  chr2:79933147-79933236
  hypo
tgccagaggcatggaagagccgaaggccttcgtgtggtcttactaaaaattagcatgtgtgggccaggtgcggtggcttatacctgtaa

SEQ ID NO: 208064 - DNA, 37 bp, Homo sapiens
  chr2:85227244-85227281
  hypo
taaatataactaagacgatattgattttttttgagat

SEQ ID NO: 208065 - DNA, 37 bp, Homo sapiens
  chr2:85227521-85227558
  hypo
agccgtaagccactgcgcccagctatgaaatatattt

SEQ ID NO: 208066 - DNA, 75 bp, Homo sapiens
  chr2:85280346-85280421
  hypo
caagagctccttctgtccactttagtgcgtgaagagagctcatcctcagatgaggatgatcggggggagatggca

SEQ ID NO: 208067 - DNA, 54 bp, Homo sapiens
  chr2:85290474-85290528
  hypo
ctccaatccctctgccgctcctccctctcagaggaaaggcggagtcctcaccac

SEQ ID NO: 208068 - DNA, 120 bp, Homo sapiens
  chr2:85356674-85356794
  hypo
attacagccgtgagccactgcgcctggcccttatgatctttttcaaccacttaaaaatgtaaaaaaagcggccgggcgacgtggctcacacctgtaaaaccagcacttgggcggatcacc

SEQ ID NO: 208069 - DNA, 31 bp, Homo sapiens
  chr2:85498072-85498103
  hypo
gcctcccaaaatgctgcgattacaagtgtga

SEQ ID NO: 208070 - DNA, 34 bp, Homo sapiens
  chr2:85729115-85729149
  hypo
agctacctgggaggccgaggcaggccaatcacct

SEQ ID NO: 208071 - DNA, 142 bp, Homo sapiens
  chr2:85776338-85776480
  hypo
tagctgtatgtcttcgggcaaattattttacctctcagcctaatgtaataatgcaggtaacactgctcacgcggtgtgttgcacatagcaaacacttgggaacagttagctattcatcgtggtacattaaattgcttttccc

SEQ ID NO: 208072 - DNA, 94 bp, Homo sapiens
  chr2:85819558-85819652
  hypo
ctgaaagtcaagggccacaccggtgtttgagatgagtcaggctgggagggttccacggcaggtggtatagaaagagagcagacaaggccgggcg

SEQ ID NO: 208073 - DNA, 235 bp, Homo sapiens; identical to SEQ ID NO: 198316
  chr2:85829251-85829486
  hypo

SEQ ID NO: 208074 - DNA, 90 bp, Homo sapiens
  chr2:85870244-85870334
  hypo
cacaaaatgattaaacgtagtatttctcttttgccgcatggacagttttggttcagtcatgaaatcttgagtataaagacttctccaaac

SEQ ID NO: 208075 - DNA, 227 bp, Homo sapiens
  chr2:85871981-85872208
  hypo
aacaattttgtggtccgtttgtgtaggacagtttccttaacctcacagcctttgtctgattattccggctttattttaaccattaacagaaatgtggatctgagagaatacttgtctgaagaagtacaagcagtacacaagaataccacctatgacctcattgccaacatcgtgcatgacggcaagccctccgagggctcctaccggatccacgtgcttcatcatgt

SEQ ID NO: 208076 - DNA, 157 bp, Homo sapiens
  chr2:85878688-85878845
  hypo
ctatcaaacattgtgcgtgcgtgcgtgcgtgtgtgtgtgtgtggtggtatgaggtacagccacctgtcttggagaggatattttgacataactctatactgttgacttccgagaaatgtctctgaggtggcaggcccctgaattgtttgtttgtttg

SEQ ID NO: 208077 - DNA, 44 bp, Homo sapiens
  chr2:85885944-85885988
  hypo
catactgcagcactttaaaggacggtgtctttttctttctcata

SEQ ID NO: 208078 - DNA, 265 bp, Homo sapiens
  chr2:85890607-85890872
  hypo
ggcgaccctggagatgtgagcattagggggaaagcaggcaaggccaccctacagaggtgtttggtttctgtcctccttggtgcattgcagtgggaccacagagggagagggtcatgcagtggcagggtagggggaggaggagagcaggcattgggctaaggagtgggcagtgggctcacttgggccagcgctgtcatccatggagcaccggaggacgaggcggcagaccagctggggcagcatgcggcccagcagcgtgtcgagc

SEQ ID NO: 208079 - DNA, 102 bp, Homo sapiens
  chr2:85890902-85891004
  hypo
tggcagatgccgcccgccaccagaggtaccacgcggcacacctgggccactgccacagctagcgcaccctggggcgggggcggagagaggccagcatgggac

SEQ ID NO: 208080 - DNA, 32 bp, Homo sapiens
  chr2:86344875-86344907
  hypo
tgcttgctcttgatccgcttctttttttgttt

SEQ ID NO: 208081 - DNA, 92 bp, Homo sapiens
  chr2:86345207-86345299
  hypo
tcttaagcatgggtatctttcttagatttttatgctcattttctctttttattgtgtatactcttctgtttcagtgacgcttataatccatt

SEQ ID NO: 208082 - DNA, 60 bp, Homo sapiens
  chr2:86425628-86425688
  hypo
gtgagctgtgatcgcaccactgcactcaagccttcgcaacagaccaagacctagtctcaa

SEQ ID NO: 208083 - DNA, 147 bp, Homo sapiens
  chr2:86425718-86425865
  hypo
tgccaattcaaagagcttttatgaatgtttcaatatacttgtctagcgtatgtgcctgtttttggactcaaagtggccaccataggtgggagatcaagttggcaacaatagtgttccaaggtaatacaccctatatcttgctctgta

SEQ ID NO: 208084 - DNA, 123 bp, Homo sapiens
  chr2:86783960-86784083
  hypo
tacctgtgtctgagtgtattctttcatccgtcgtttggccaggatctgcgggtcggacccggaacaccatccctactcctgtccatgaaacaagtacctgacgagctctttacacttcctgag

SEQ ID NO: 208085 - DNA, 53 bp, Homo sapiens; identical to SEQ ID NO: 198319
  chr2:86850368-86850421
  hypo

SEQ ID NO: 208086 - DNA, 167 bp, Homo sapiens; identical to SEQ ID NO: 198320
  chr2:87018396-87018563
  hypo

SEQ ID NO: 208087 - DNA, 76 bp, Homo sapiens
  chr2:87569214-87569290
  hypo
acactccctctccctcgagcctggaaggtgcactgggctcataggggtggaaacctctaccgcggcagaggcacag

SEQ ID NO: 208088 - DNA, 39 bp, Homo sapiens
  chr2:89601945-89601984
  hypo
tagcagcacacaggccgagtgaggtagctcacgcctgta

SEQ ID NO: 208089 - DNA, 133 bp, Homo sapiens
  chr2:95722588-95722721
  hypo
gctgtccatggacccaggaacgtgcagtgcccggtcaggcgccaggagggacacggggccagtgctcaataaacacggccgcataagtgagcaggcccagcgccccagggccgctccagctgacctgtgctca

SEQ ID NO: 208090 - DNA, 63 bp, Homo sapiens
  chr2:95941852-95941915
  hypo
tcctgctgctgaccaccctcttgctgctgtaaggcgctgcccagggcccgggtagggcgggct

SEQ ID NO: 208091 - DNA, 211 bp, Homo sapiens
  chr2:96754442-96754653
  hypo
tcaaaaaacattcagcgcagctttttctgtaatggtgaaaaaccagaagccacctgagtttccgataacaagagaagagttacataaatgaggaggtgcagctgtgccattctaagcagggcctgcagacactggtgaggcgggaagtgctgctgctgggaggtttgctgaaggcaggacacgaaacccagtggccgagacagcctggagc

SEQ ID NO: 208092 - DNA, 223 bp, Homo sapiens
  chr2:96821757-96821980
  hypo
ttctcatcagtttcacatcactttgcgggacaggaattacttgctattcccatttggcggatgaggaattttttccccaatgtcaaggcagaactgggactcccgcccatcctttcctcgttaaggcccctgggctctgtgcattagtcctgcctctccgatggtggtaaggtcctccaaggaagaggaggcctgacatgcccatggccgcactgccacccat

SEQ ID NO: 208093 - DNA, 121 bp, Homo sapiens
  chr2:96829031-96829152
  hypo
ccacaccactcaggccgggggtttcctctgcgccctgtgctggccgacctgcccggaatggcttcacccacccctcccctgcccatccttgagacccctcaggtttcgcttcctccaggaa

SEQ ID NO: 208094 - DNA, 210 bp, Homo sapiens; identical to SEQ ID NO: 198323
  chr2:97171202-97171412
  hypo

SEQ ID NO: 208095 - DNA, 226 bp, Homo sapiens; identical to SEQ ID NO: 198325
  chr2:97175214-97175440
  hypo

SEQ ID NO: 208096 - DNA, 62 bp, Homo sapiens; identical to SEQ ID NO: 198326
  chr2:97203314-97203376
  hypo

SEQ ID NO: 208097 - DNA, 37 bp, Homo sapiens; identical to SEQ ID NO: 198327
  chr2:97203545-97203582
  hypo

SEQ ID NO: 208098 - DNA, 204 bp, Homo sapiens; identical to SEQ ID NO: 198328
  chr2:97303997-97304201
  hypo

SEQ ID NO: 208099 - DNA, 148 bp, Homo sapiens
  chr2:97305376-97305524
  hypo
cagcaagactctgtctcaaaaaaaaaaaaaagataggtacagacatgcaaacactcgaaacattcagaaagccactcaaagctgtgttccacaaagatgagagggtaaactgagaagacggaaggcataggatcggggaagcagggtc

SEQ ID NO: 208100 - DNA, 77 bp, Homo sapiens
  chr2:97361031-97361108
  hypo
agcgtcccagccccgagggcaagcactgatccctcacaggacggggaagcctgtccttgtgcgccttcagacactgg

SEQ ID NO: 208101 - DNA, 36 bp, Homo sapiens
  chr2:97370003-97370039
  hypo
tatattttctggaaacgctatcgcttcaaactcata

SEQ ID NO: 208102 - DNA, 91 bp, Homo sapiens
  chr2:97427363-97427454
  hypo
gaccccatggagctgcgcatcgtgcagaactgtggcaccgagaaggagaggcgctatgcccgcaagattgagcccatccggcgcaagggca

SEQ ID NO: 208103 - DNA, 88 bp, Homo sapiens
  chr2:97437494-97437582
  hypo
tggaacacagtttagatgggttcttcagattccctgctgataagaaattaaatccttatccccatcatcctttcggagtctctcagag

SEQ ID NO: 208104 - DNA, 176 bp, Homo sapiens
  chr2:97463244-97463420
  hypo
ggcagctgacaaccgaagccggaagcgggtgtctgagaagaacaagcgtgacttctctgccttcaaggatgcggacaatgagctcaaagtgaaaatctccccgcagctcctcctggccgctcatcgcttcctagccacaggtagcatgaggaggaccttccggtcttggtggaaat

SEQ ID NO: 208105 - DNA, 97 bp, Homo sapiens
  chr2:97479660-97479757
  hypo
gaataataaaaaacacggagatgccccattggcctagtcacagctctgagtttacaatgcagaagagacactattaccatcttttaaaaatacacta

SEQ ID NO: 208106 - DNA, 298 bp, Homo sapiens; identical to SEQ ID NO: 198329
  chr2:97482863-97483161
  hypo

SEQ ID NO: 208107 - DNA, 112 bp, Homo sapiens
  chr2:97485585-97485697
  hypo
tttcattttccaaaccgccagtgtcaggatcttcgctgccatggtcttgtctttcagatgcgatggatgagcttggtccagggtggttggggattccacttggggaagaata

SEQ ID NO: 208108 - DNA, 36 bp, Homo sapiens
  chr2:97485727-97485763
  hypo
cagaggcaggatgtcccctggcgggggggcttgtgt

SEQ ID NO: 208109 - DNA, 96 bp, Homo sapiens
  chr2:97489047-97489143
  hypo
tgaggcctctctgcgccgaggtggccatttagatcctgggctttggtgctggaatccaagacattaaccaaaaccacatgtcgcacttggccttcc

SEQ ID NO: 208110 - DNA, 33 bp, Homo sapiens
  chr2:97511924-97511957
  hypo
gtggcactggaggagcggcgttttgcaccccca

SEQ ID NO: 208111 - DNA, 156 bp, Homo sapiens; identical to SEQ ID NO: 198330
  chr2:97535760-97535916
  hypo

SEQ ID NO: 208112 - DNA, 435 bp, Homo sapiens
  chr2:97544650-97545085
  hypo
tcgccttgctgacccgaggaggcagatggagagatgggagccgaaggttttggctgagcgtctgcacatctcgcctccatcctcattcctgccaactgcacactctcagcagtgaaaacaggacgcaggcctgctccatctggcccgagaacaatttgatcttgaggcacccctggactcttggtacccattcacttatgggatacgtgcttgctgtttagagaaaccgagccatggggagcatcccagggcgtgaggctccagaagggatgcagcctgccctggattcccaactgctgcccgcaggtgcgcccctccactcagagggccctgctgccttgtcctctcggctctctcttcatgtctaggatcaggaggtggcagatgaccagccccgaggacgagtaggggtgggagaggcgggctctagaaatg

SEQ ID NO: 208113 - DNA, 206 bp, Homo sapiens
  chr2:97545394-97545600
  hypo
acggctaaggcccacgggtggtctgactccacaggctgaccaggtggccttgcacacggcaggcagagaagacacagtgggggaaaccgaggcgtgcctccaggagagctgccctggggtggggaagacccaacctctctgaagcccagctccctctgcctgccgggtccctgcagcggcctgtggacgcccgagttgcccggccc

SEQ ID NO: 208114 - DNA, 158 bp, Homo sapiens
  chr2:97558027-97558185
  hypo
agaggtgtaggggagcgcagcagagggggtctaaggtggtctcgggctgcagtgaaggcttctgagagctgcctgggactcgcctgcctctccactgccctggaccagtgcaccctacccctttggggctctgccgagctgcacggtgcctccatgtt

SEQ ID NO: 208115 - DNA, 37 bp, Homo sapiens
  chr2:97651751-97651788
  hypo
accccaccaaggccggccgcgcagtggcctgtggaga

SEQ ID NO: 208116 - DNA, 311 bp, Homo sapiens
  chr2:97651885-97652196
  hypo
aggcctggaccagccaggagtcccagggaagtcgagtgctctctgagcgctaaccacgcgcccctgcggttcctcggcctcagtttccttacctgtaaaatggagccgctgatcctgcctcctgagttgtggagcgaggcccgcacctggaagccttggccacatagggcgggaagggcagggctccggggtgagggagggtggcgggaattcgcacggcctcagaggacggggccagctagccgggaaaggaagcaggagcaggctccccaggcggcgcagtgggaggaccccaagagttgcgtccctag

SEQ ID NO: 208117 - DNA, 82 bp, Homo sapiens
  chr2:97652405-97652487
  hypo
ggaagctcctgcccccaggcagtcctgggtcacgcgcacttgtagtagcttgcatttaccaagacagtgagacagtggcctg

SEQ ID NO: 208118 - DNA, 103 bp, Homo sapiens; identical to SEQ ID NO: 198331
  chr2:97779476-97779579
  hypo

SEQ ID NO: 208119 - DNA, 321 bp, Homo sapiens
  chr2:98349383-98349704
  hypo
ccctcatctatgggaagacggtgtaccactacctcatcagccaagacaaggcgggcaagtactgcattcccgagggcaccaagtttgacacgctctggcaggtaggctgcccgtgcaacttgttctgggagatgccgtgctcagatggggtgccgggctctggggaggagaggagcctctctgctagctgcctgctccctgcagctggtggagtatctgaagctgaaggcggacgggctcatctactgcctgaaggaggcctgccccaacagcagtgccagcaacgcctcaggtgacggcagcaggcgggcgggcggtggg

SEQ ID NO: 208120 - DNA, 593 bp, Homo sapiens
  chr2:98408814-98409407
  hypo
acatcacggatctccggcagtgggagatgattacctttgctttttggcaatggcgatggaggctgctctgtaaacacttctagggctggggagtcatggtggtcgaagtctttgtccatggcttctatgagactggtgatgtccgagtcctcggaactgtgcctcgcgctgctggcacgttctgggtgggaagggtgtgcgaggggggcgggagacagcctttcaggctgcggctcctggggctgaggcactggcggtggcagaggaggctgagggtgctgctccagcgggctgtgggcatggtgctggctgccgtgctggctctgctttgcccctttggactttctgcccgctgtatgaccttgagtcactgtgttcgaatctaagacaagggggcttgttttgttagcagactgtgaagaagctgcttgagcagaagtcctactagaggtacttgaactgtttttggctctgacgttttccacgtcagctgagtttctattgctgtgactgctgtgtgggtggaccgatgggccacactgcttatgactcccggcactgggtcgggatgatgaaccgcctgctccacagaa

SEQ ID NO: 208121 - DNA, 90 bp, Homo sapiens
  chr2:99386853-99386943
  hypo
tctctgcttggtgacgtgcaggcttctcaatctccctgctcctccctccgcctcagtaaatgctggcccaggctgctcgcttgctcaaga

SEQ ID NO: 208122 - DNA, 77 bp, Homo sapiens
  chr2:99386973-99387050
  hypo
cttttccctcactccccatatccaacccatccatgagttctttcggttccaccttaaaaatacccctaggggccggg

SEQ ID NO: 208123 - DNA, 66 bp, Homo sapiens
  chr2:100618385-100618451
  hypo
cgttctaagcggacggaagctgcccatcgagcagacaggaggaagcgcagagcgtaaccatccgtg

SEQ ID NO: 208124 - DNA, 264 bp, Homo sapiens; identical to SEQ ID NO: 198341
  chr2:100721641-100721905
  hypo

SEQ ID NO: 208125 - DNA, 43 bp, Homo sapiens
  chr2:101022688-101022731
  hypo
gagaattcccaactgcgagcctgagaggcgccctgctgcaagg

SEQ ID NO: 208126 - DNA, 155 bp, Homo sapiens; identical to SEQ ID NO: 198342
  chr2:101033436-101033591
  hypo

SEQ ID NO: 208127 - DNA, 197 bp, Homo sapiens
  chr2:101362900-101363097
  hypo
cctaggtaagaggtgcggacaggctgagaacccagattttcaagccaggctgcctgggccttgccagcggtgcaccctgggcaagtacttagcatttctgtgcctctacatcctcatccacaaagcggggctaagatgagaagcacaggccttagaaaattcgctgatatgtatgaggccttcgatatgaattagct

SEQ ID NO: 208128 - DNA, 177 bp, Homo sapiens
  chr2:101520349-101520526
  hypo
gtggagggaacccaggcctgcgtgtggtaggagaggaagctggatctgtgggcctgagaagcatcaagccagtggcctgggagagtagaggctccggtgttgaggaagaacattcctggattgttacgtaatctttcacatctgtgcaccttcgctgtctcaaggagagtaaacgcc

SEQ ID NO: 208129 - DNA, 151 bp, Homo sapiens
  chr2:101612186-101612337
  hypo
atctctggagtgcagcgcttgctgcagtggaaatgatcaggaatactgaccgtgtttctcttgcctccgaggttcttgggcacactctatagccatactggacaggaaccaggtgccccgtgtaggcatcgtcggtcggtttgccgtcaga

SEQ ID NO: 208130 - DNA, 175 bp, Homo sapiens
  chr2:101696583-101696758
  hypo
gatgagtgtaattatttgagcgtaagcaaaatgactttatttaaaacagtaagagcctggtgacagtaactccataatagaaaagaaacgtgaaccgcagcaccccgagcgtgaccgaaaacaagtgtaacaactcgcatcgcctgacctcagcgtggggacccagagaaaagca

SEQ ID NO: 208131 - DNA, 704 bp, Homo sapiens; identical to SEQ ID NO: 198348
  chr2:101767139-101767843
  hypo

SEQ ID NO: 208132 - DNA, 38 bp, Homo sapiens
  chr2:101772516-101772554
  hypo
cttgagccaccgcacccgccccacgctgaatagtttaa

SEQ ID NO: 208133 - DNA, 105 bp, Homo sapiens
  chr2:101875536-101875641
  hypo
agtgagctgtgattgcgccactgcactccagcctgcacaatatcgtgagacctgtctcgggatgctgaatagccaaaacccaacgttctcttggcatccttgttg

SEQ ID NO: 208134 - DNA, 67 bp, Homo sapiens
  chr2:101889654-101889721
  hypo
ccagtccagacaccgaggagccgaggaaacaggacagcaggcagggggctgcggagagcagcacagt

SEQ ID NO: 208135 - DNA, 955 bp, Homo sapiens; identical to SEQ ID NO: 198349
  chr2:101924527-101925482
  hypo

SEQ ID NO: 208136 - DNA, 186 bp, Homo sapiens
  chr2:101970928-101971114
  hypo
catggggttgtggatcgcccctccagctcaacacttgccttcgtgttactctccctctactgcagaccaatgccttctagcctgtttccattgctgcaccagcctgcaccccagctccgagcctgcacttccggcggtccctgcatggacacctgtggaaaggccacccccgcgtgcatgcgcggt

SEQ ID NO: 208137 - DNA, 332 bp, Homo sapiens; identical to SEQ ID NO: 198353
  chr2:102313750-102314082
  hypo

SEQ ID NO: 208138 - DNA, 70 bp, Homo sapiens; identical to SEQ ID NO: 198354
  chr2:102314091-102314161
  hypo

SEQ ID NO: 208139 - DNA, 79 bp, Homo sapiens
  chr2:102356564-102356643
  hypo
caacacaacatctgtcgctttcttggcttcaaagttgctttatatcatcttttttttttttttttttttgagacggagt

SEQ ID NO: 208140 - DNA, 176 bp, Homo sapiens
  chr2:102636186-102636362
  hypo
gatgctggctattaccgctgtgtcctgacatttgcccatgaaggccagcaatacaacatcactaggagtattgagctacgcatcaagagtaagtacttgccattgaggcacctatctatcctggttcaataacaagcatgcagagaacaaatgacggtgcacgtagaattccttgc

SEQ ID NO: 208141 - DNA, 32 bp, Homo sapiens
  chr2:102640214-102640246
  hypo
acacagagtttttggctgggcgtggtggctca

SEQ ID NO: 208142 - DNA, 160 bp, Homo sapiens
  chr2:102683382-102683542
  hypo
ctccgcatctttgccgacatttgttcttgcccatcttctaaattttagccgttctgataggtgtgcagcactcgcttgttgcgttaatttacattcccctttatcacagtgtattttaattatctgcttaagagtcagtctcacccgtcagaattcagtg

SEQ ID NO: 208143 - DNA, 51 bp, Homo sapiens
  chr2:102867171-102867222
  hypo
ggggaccctagggtccgctccttcgctgcccgagcacggtgcctgcagggg

SEQ ID NO: 208144 - DNA, 42 bp, Homo sapiens
  chr2:103130075-103130117
  hypo
ggcaaaactactgtaactaccgggccatttaaacttattggg

SEQ ID NO: 208145 - DNA, 47 bp, Homo sapiens; identical to SEQ ID NO: 198362
  chr2:105468516-105468563
  hypo

SEQ ID NO: 208146 - DNA, 350 bp, Homo sapiens; identical to SEQ ID NO: 198363
  chr2:105471072-105471422
  hypo

SEQ ID NO: 208147 - DNA, 245 bp, Homo sapiens; identical to SEQ ID NO: 198366
  chr2:105478381-105478626
  hypo

SEQ ID NO: 208148 - DNA, 248 bp, Homo sapiens
  chr2:105528549-105528797
  hypo
agcacccagggtgccgtcatgggagccatcccctccagggattcggagcagtgtgtttgattgccgtcactgcacagagcagtgccgagtttgttcgtgctggtcgggcaagcatcaagcacagaacctagcgcattgtgggtgcttgacaagtgtttcttgaataaacaaaggaagggggaaggagggagtttggggctggggaagcctccatcgtagctgagatcactcaccggcatcattggcca

SEQ ID NO: 208149 - DNA, 241 bp, Homo sapiens
  chr2:105697575-105697816
  hypo
tgcctccaaacgccgccggtttgatctgtggtaatatttgtgaaggttccatatggacttgagccccctgcagtgctaagaaataatgtacaacgcttcatggtgcagacgcaaattttctctgaaaagggatgcaatgctgcgttttagctgtcggaggggatgatggagctgacgcgctaggcctgtcaacttgttacacggatgggttgcacgcagcgaagctgtggaaaatctgtgc

SEQ ID NO: 208150 - DNA, 127 bp, Homo sapiens
  chr2:105719492-105719619
  hypo
ctggaccaagtgcgatagctgattggctgcaggagagctgggggcgggtattcggtatgagatccacaggctgctgggaatgcaaagagccaggaagacaggaagaaaagttgatgggaggaggagg

SEQ ID NO: 208151 - DNA, 205 bp, Homo sapiens
  chr2:105719728-105719933
  hypo
tgggaggctgctgcgtggaaggggaatttgaaacgtgggctggatcagcacggaggattgggcagggagaaggccaaggctcaagtggagaaacagccatcaagtttaaagtaggaaggagggaagagccagcaaagggggtggtgagcggtgataggaagacagcaagccaggcacagcggtcagggacgtcagtgatgaccaa

SEQ ID NO: 208152 - DNA, 385 bp, Homo sapiens
  chr2:105887868-105888253
  hypo
ctgatcagtcagggacggtggctgtgagtgaacagagattgcacagcggatcgccacagaaagtcctaatgtaggtgcaggtacaagccagaactagtgtttgctggtttcatgaaataccaacccacacctgtgttctggctctactgctcgtgggctgtgtgacctgtggcaagcggggtaacctctctgggcttcagtgcactcttctgtaaaaatggaggaaaaacaggcctcacttcacagggttgttgtggaaactgtgtcataaggcagcctcagcgtttcaacctatgctgggcatatctagtcaatcctcattatttgtggattctgtatttacaaagtcatctactcgctgaaatttatttgtaacctcccaatc

SEQ ID NO: 208153 - DNA, 205 bp, Homo sapiens
  chr2:105888313-105888518
  hypo
gccaaagaaggagcgccctccttccttgcttcagctgtcgtactagctacacgtttccttttcacgggctatttattgccatgcttttttgcattttggtgcttcttgttggtgatttcagtgtagtgctgaagtgctgcctagcgctcctaagctctggaaggttgtgatgtgctttatggagacaacacgtgtgttagatatg

SEQ ID NO: 208154 - DNA, 91 bp, Homo sapiens
  chr2:106064705-106064796
  hypo
cacccccatcatccacgcacccggttcctagcataaattccctctgttgaaattgtttgatgtagattctgtttccctatttagacctttt

SEQ ID NO: 208155 - DNA, 36 bp, Homo sapiens
  chr2:106081974-106082010
  hypo
cataaagaactggtgggggccgggtgcggtggctca

SEQ ID NO: 208156 - DNA, 214 bp, Homo sapiens; identical to SEQ ID NO: 198372
  chr2:106362018-106362232
  hypo

SEQ ID NO: 208157 - DNA, 105 bp, Homo sapiens
  chr2:106730106-106730211
  hypo
gtgggcttttacagtgtatacgtatctaatgtttgatccactgcagaacaaacgtgcactttctgggcacctgagggcagggagcctggggcgtgaggacctggg

SEQ ID NO: 208158 - DNA, 181 bp, Homo sapiens
  chr2:106730256-106730437
  hypo
gctcactgcccaggcctgccactgactcggtcgcagcaagactgggaaagaagcagtactcacctgaccgcctcagtgttctaagactgaagcacaggcccagtggctgtatttggtgccagttatcactaccagctgaaacagttcttttttcaatttcggccaacaccttaggctggca

SEQ ID NO: 208159 - DNA, 152 bp, Homo sapiens
  chr2:106778555-106778707
  hypo
ctgacacagtaatgcaggcacgcggatcacctgacttgctgaccaacctgaaggacggaaccattccagaatgagtcacctgcaagcagcccgagaggcaaatgtttgccctttgccactattttcaaggcggtttcacaggttgacaagaa

SEQ ID NO: 208160 - DNA, 64 bp, Homo sapiens
  chr2:106959095-106959159
  hypo
gttagtggccatatgccatgcgcttcacgtgctccaggcagagacgagctcaagagcctctggt

SEQ ID NO: 208161 - DNA, 61 bp, Homo sapiens
  chr2:106959839-106959900
  hypo
gccgtggtccccacggaagcggtgagaacgcacctggccggctcagccacacggcacggtg

SEQ ID NO: 208162 - DNA, 57 bp, Homo sapiens
  chr2:107459358-107459415
  hypo
aatattaggaacacctggtgcggagaccccagcttgccccgtcagagatccagaggc

SEQ ID NO: 208163 - DNA, 585 bp, Homo sapiens
  chr2:107459445-107460030
  hypo
cactggctcaagacagggcgacctggtccccccgctgagacctacctatttcctcgcccaaggaagagttgaggattgcgcctgcagacatgacgacagcgcagctgcgcaggccgcgggggtgcagctggctcaggggcacggcgggcaccaggcgccgccagcccagcgcagaaaagggcgcctcggtgccgtccagcgtccgcacgcgcgcgcggctccgcagctggcacagcagctgtgccctgctcagcccggcctcccgcttcccgcggaagcgcaccccgtgcttgttggcggtcaggtaatccttcatcgccttctgcaggcgcgggttcagcattttggaagagacgttccccttccagagccggtacaggaaggccctggacatggaggagtacagcctgtcgccgtcgtcgccctcctccaacacgtggctccttctctgcctccggtgcctcttcttcacccgcctcctctggacctgtgcagccggaaaagccccctcccgtgggcctggctccccgggggaagggaatcccaatgtcccctgagtgtggctgtgccaccctggctgaccag

SEQ ID NO: 208164 - DNA, 37 bp, Homo sapiens
  chr2:108160841-108160878
  hypo
agacctggtgcactgagaggcggacgtgaaaccgagt

SEQ ID NO: 208165 - DNA, 199 bp, Homo sapiens
  chr2:108160925-108161124
  hypo
gtggagatggaaggagacctggtgcactgagaggcggatgtgaaactgaggggagatggaaggagacctggcgcactgagaggcggatgtgaaactcaagagagatagaaggagacgtggcgcactgagagccggatgtgaaactgagggaagatggaaggagacctgacgcactgagagccggatgtgaaactgaggg

SEQ ID NO: 208166 - DNA, 87 bp, Homo sapiens
  chr2:108918020-108918107
  hypo
agcgagactccatctcaaaaaaaaagttctccccaaagggtaaacagatgaatcaggcagagcaacgctcttgaggacaccccacct

SEQ ID NO: 208167 - DNA, 39 bp, Homo sapiens
  chr2:109225030-109225069
  hypo
attacaggcgtgagccaccgcgcccggcccactcacatt

SEQ ID NO: 208168 - DNA, 37 bp, Homo sapiens
  chr2:109536234-109536271
  hypo
cacctgccctctccccgcactacgaagctgcctcatg

SEQ ID NO: 208169 - DNA, 37 bp, Homo sapiens
  chr2:109556840-109556877
  hypo
cctccatggccgagccggcccacgtgcctcctactct

SEQ ID NO: 208170 - DNA, 447 bp, Homo sapiens
  chr2:109558967-109559414
  hypo
atgaaccacggcgacggcaggggccagcgtccccgtctccctcccgttctagaagacataaatggtgccttcattttgtgagtctgcgctgagtgaggccgtgaggcgggcggttccgccacctgctttccacgccagaggcctttcaagacggcgggagccctgcggttccagcgcgttcctgttcccgcctctccttttaccacgaagccagcttcgctcccaggcaccaccctggccatctggactctcacgaaggttcgtgccctgagaacttcaggaggaggcgcgctaagaaaactcaacagcagcaacaaaaacattttcaggctcccagtcttttaagtttgagcgggtaggatttttgtttgtttgtttgttttgaacgattcaatagatggattttctccctgctcctaatcctgggattagaccatgccttcccgg

SEQ ID NO: 208171 - DNA, 70 bp, Homo sapiens; identical to SEQ ID NO: 198376
  chr2:109647969-109648039
  hypo

SEQ ID NO: 208172 - DNA, 329 bp, Homo sapiens
  chr2:110007741-110008070
  hypo
agcctgacctgtatgcttcagccattacaggacggggaccagggctagaatgcaaacaccaagaggacaggatgggaaaggcacatctgccatgtgctggagggatgcaggtcacccacaggctcggggaggggtgcgggtcacccatgggctcgggccttcactctggcagggccggcggcctcacacaggtctccagcacactcctgcagtgctctagtgttgctcagcctctgtcaaactaacttcaaggggggaatctcctccagggtagaagcctctcccatagcaggtgtgtggccacggcttgtggccgggcagggagcatc

SEQ ID NO: 208173 - DNA, 40 bp, Homo sapiens
  chr2:110008967-110009007
  hypo
cttctttttttttttggagacggagtctcgcactgttgcc

SEQ ID NO: 208174 - DNA, 40 bp, Homo sapiens
  chr2:110009247-110009287
  hypo
ggcgtcagccaccacgcacggccccctggcttcttactag

SEQ ID NO: 208175 - DNA, 197 bp, Homo sapiens
  chr2:110015123-110015320
  hypo
ccctctgactccggcgctgtggccagcgtggccccaagtcccactttaagcagctcaggggcggtcagtgcctttcagcggcgtgtggatggcaagaagaacaccaagaaacgccactccttcaccgcgctcagtgtgacgcacagatcctcccaggctgccagccacaggcattccatggaaattagtgctccagt

SEQ ID NO: 208176 - DNA, 110 bp, Homo sapiens
  chr2:110015364-110015474
  hypo
accttgctcatctgtcgtgcgctgctcccacccaggtaacatcccgcgggccagggcaggcatccctgggttctctggggttctatcctcagctccgtgttcagtgtccc

SEQ ID NO: 208177 - DNA, 262 bp, Homo sapiens
  chr2:110016729-110016991
  hypo
catatgcactcccacgcacatgtgcactcatacacatggcacacacatatacctgcacacccacacatgtgcacttacatacaccgccatccacatgcacacctacacatatacacatgcacgcacatatacacatatacacctgtgcacatatgtgcacttatatgcaccccttccacatgcacacacatacacatgtgcacacacatgcgtacaggtgcatttacacatacacccctccaggtgcacacctgcagataca

SEQ ID NO: 208178 - DNA, 142 bp, Homo sapiens
  chr2:110017051-110017193
  hypo
aacttatatgcgtcccttccacatacacacccacacatacacccgtgcacacatgtagacatttatacatgcgcacacacacattggtggatacacacctgcacgcatatgtgtgcacacacacaaacgctggctctcatcg

SEQ ID NO: 208179 - DNA, 466 bp, Homo sapiens
  chr2:110021654-110022120
  hypo
cgcctcaacttcagcgcatgccaggagcaaccgatgacacccctctttccgcaaacctgcttccccttctgtattccatctgttcctcaaggagtcaccactgtccttaggtgccctgagctaacactcttcgtcttcgctaatacccttcgtcttccccaacactgactccctgcccctgagttccctcctgagtcccttggaaggttctggggagccttcagactggcccttggttgcctctccagctcccggcagcactgtccattcccgtgagcctgtgcagatcttctccctgcgcaccacgctgctctggccctggtccatttctccccgaaactgccgtagctaatcccttcccacctgcccatgtcccttttgctgcccctcagcatggcattctacctaccaggcaacacacagacacatacctgtgcagaaggctcctgcccgcccttccagacca

SEQ ID NO: 208180 - DNA, 165 bp, Homo sapiens
  chr2:110028490-110028655
  hypo
gttccttggctgagccctcccgagcctcctgacaccgagccctgtgggttgctttacgttggactcacgcagggcagtcggtggatgccggcacagatgggatggtgagccttcggccgccgtggtccacgatgcgtgtgctccgcacagtgtgcactctcagcc

SEQ ID NO: 208181 - DNA, 49 bp, Homo sapiens
  chr2:110256842-110256891
  hypo
gttattgagtgccttcgccctgccaggcccatctcggtgctgctcagca

SEQ ID NO: 208182 - DNA, 194 bp, Homo sapiens
  chr2:110259063-110259257
  hypo
tgtgctgtttccccaggtaccgcgtggtggtctcgtacccaccccagagtgaggcggagatcgagctgaaggaaggcgacatcgtctttgtgcacaagaagcgtgaggacggctggtacaaggggaccctgcagcggaacggccgcacaggcctcttcccgggcagcttcgtcgagagcttctgagaactggtg

SEQ ID NO: 208183 - DNA, 37 bp, Homo sapiens
  chr2:110352252-110352289
  hypo
tcccaccacctcaccgtgatcctctgtgcgggcgcgt

SEQ ID NO: 208184 - DNA, 293 bp, Homo sapiens; identical to SEQ ID NO: 198383
  chr2:111490023-111490316
  hypo

SEQ ID NO: 208185 - DNA, 170 bp, Homo sapiens; identical to SEQ ID NO: 198384
  chr2:111490689-111490859
  hypo

SEQ ID NO: 208186 - DNA, 45 bp, Homo sapiens
  chr2:111935999-111936044
  hypo
gggcagcaggctttgcgaacactctgggagcgccagctttaatgt

SEQ ID NO: 208187 - DNA, 90 bp, Homo sapiens; identical to SEQ ID NO: 198389
  chr2:112656487-112656577
  hypo

SEQ ID NO: 208188 - DNA, 94 bp, Homo sapiens
  chr2:112786372-112786466
  hypo
ggaagctcattgcccgatgaacttttgtttgctgacgactcctcagaaggctcagaagtcctgatgtgaggagaggtgcggggagacattccaa

SEQ ID NO: 208189 - DNA, 47 bp, Homo sapiens
  chr2:112945140-112945187
  hypo
tcagcttcgggcaccgactgcgtggagcctcccgcctgttcccgccc

SEQ ID NO: 208190 - DNA, 213 bp, Homo sapiens
  chr2:113103033-113103246
  hypo
accaccgcccgttttcgaatccatttggcacctccttcgcctaagaatttgcttttccaggcgtcccctttctgttccgtctctgtactgcactaacttcacctatacacaggtctgtatcctcctgttaaaaccactgaccaggactgccgcttctgggtgcgatacagtaacaggcattggattcctcctcttccctcaaacaactagaaa

SEQ ID NO: 208191 - DNA, 110 bp, Homo sapiens
  chr2:113103431-113103541
  hypo
aaatggagcagaggtggagatgagaggagcaagggcagctgcgtgggagcactgccgaggagagcgctggcaggcacagaactccagacgtctatgtaagggtcctctgc

SEQ ID NO: 208192 - DNA, 35 bp, Homo sapiens
  chr2:113168035-113168070
  hypo
tgaactgtctatcaacggtgtttttaaaagattta

SEQ ID NO: 208193 - DNA, 188 bp, Homo sapiens
  chr2:113286635-113286823
  hypo
tccttcccctctccccgggaacggcagggcactgggacctctggtcggtgcctcccacccactgcagccctagtgccttagctccatgcccggctgcagccccactgctctggactatggattggacgtcagagcatattggaggttgcctgtgtgttccccacccatcccttcggtaacactctgcc

SEQ ID NO: 208194 - DNA, 33 bp, Homo sapiens
  chr2:113494876-113494909
  hypo
ccataccgttttccataacggctgccccagtct

SEQ ID NO: 208195 - DNA, 31 bp, Homo sapiens
  chr2:113804066-113804097
  hypo
gagccaccgcgcctgccctcttcagttttta

SEQ ID NO: 208196 - DNA, 188 bp, Homo sapiens
  chr2:113973331-113973519
  hypo
caccaccccaaatgccggggcacgtcgaattgtctttctttcgcccgatacataaatggccttattttctgagcccgaaaaggggacccatggtttgaccatgggcagaatattggatgggtactagccaaggcctgttacatggggaacacatcccacagtcaacaaacacccgctctgagcagagg

SEQ ID NO: 208197 - DNA, 360 bp, Homo sapiens
  chr2:114736770-114737130
  hypo
ttcaactaggaggaggaggttggaagcaggaccccgagctgacctgttgaccaggagaggagtaagcagaagggaggcaggagcgggcggaggagagaaggccggggagccgggatgggggtcaccgcccccggggagccgggatgggggtcaccgcccccggggagcccggatgggggtcaccgcccccgcccccgtgatgccgagctgaaaaagacagtctccaggtaggataatccgtcacactagatgcatatagcttcatgcaagaagagcgactgttgcgctgtcttctaccccctttggccgcgatcccgtgacaatgccggcatccgggcaccaactggcttttgcgaaccg

SEQ ID NO: 208198 - DNA, 163 bp, Homo sapiens
  chr2:120005202-120005365
  hypo
cccactcctgtggcctgtgacgccgtctgactgccccacttttctcccgcaggtgcccatctgcggtgaccagccagaagccaagcgtgctgtctcggagatggcgctcgccatgggcttcatgcccgtggacatgggatccctggcgtcagcctgggaggtg

SEQ ID NO: 208199 - DNA, 150 bp, Homo sapiens
  chr2:120011808-120011958
  hypo
ctgggattctggggccggaaaaccgtgagacggagccatgcttaagggctgtatttctggttgactccttactctgctgatgtgactgttctgattggctgccccggggcagatatgtgaaagccccaggagccccggtcattggcacca

SEQ ID NO: 208200 - DNA, 250 bp, Homo sapiens
  chr2:120020672-120020922
  hypo
acacgctcacctacggctggacccgcgccttcgaggagagccgctacaagttctacctgcctcccaccttcacgctcacgctgctggtgccctgcgtcgtcatcctggccaaagccctgtttctcctgccctgcatcagccgcagactcgccaggatccggagaggctgggagagggagagcaccatcaagttcacgctgcccacagaccacgccctggccgagaagacgagccacgtatgaggtgcctg

SEQ ID NO: 208201 - DNA, 82 bp, Homo sapiens
  chr2:120069741-120069823
  hypo
tgccatcctcacctggtcagcgacagagctgagcttccagctctggccagtccgacttctgagagaagcaagtatacttcct

SEQ ID NO: 208202 - DNA, 184 bp, Homo sapiens
  chr2:120247827-120248011
  hypo
tgtccctgtcccttgcgcagtggccgagtgcatgggctaaagcacatttgcagcatccatgctgctgcctccgctgctcacaaaccctcatgttcctctgcttccagctgctcctgacaaatgagggccgggagtgctccaggctggctcctgggttctcttcccttcccgctcctgcactctc

SEQ ID NO: 208203 - DNA, 161 bp, Homo sapiens
  chr2:120754214-120754375
  hypo
ttgctggggctggtggtaagcggagggacggtccaaaaaggaacacgaggaatcttttggcagtgacactgttctgttttgatcatggtggttttatgggaatataaaactatcaaaagtaactcaattggccgggtgcggtggctcacacctgtaatccc

SEQ ID NO: 208204 - DNA, 129 bp, Homo sapiens; identical to SEQ ID NO: 198413
  chr2:120770809-120770938
  hypo

SEQ ID NO: 208205 - DNA, 218 bp, Homo sapiens; identical to SEQ ID NO: 106596
  chr2:120770966-120771184
  hypo

SEQ ID NO: 208206 - DNA, 125 bp, Homo sapiens
  chr2:120974105-120974230
  hypo
ccgcctagcacctgcgcaggtgcagtctccacctcaagccagctgggccttatgatagtcaaaattggtattaatcagccacacctagcattccttcacatctgcatccacgccttttaaaaagc

SEQ ID NO: 208207 - DNA, 101 bp, Homo sapiens
  chr2:120982088-120982189
  hypo
cggagtggccctcccgcaccctcacagcactgccccaggcgggcatgagcagggtgtccaggtgtcgggcggacagtcccagcccccgaggcgctctccac

SEQ ID NO: 208208 - DNA, 284 bp, Homo sapiens
  chr2:121058175-121058459
  hypo
ggatgattcattgccacacacgtagctcaagtcggaatggggcctctggtcgtgtctgagaagcacagaaacctggctaagctgaggattcggcctcccacccaggttggtgaaggtgctgcggcctgggagcaggaacggagcccccagctgccaggagtgtgaagctgcttctccgcagtgcagcctccacaagccttctcaggtggcagtgaagaaggaccagatacctaaacagttttcaagttccggaatccttgggaaagttagtgtccatcaacttc

SEQ ID NO: 208209 - DNA, 264 bp, Homo sapiens
  chr2:121108590-121108854
  hypo
ccccagccatcagggctggccgtggacgtggcccctgcccactcacctgcccgcctgcccgcccgcccgcatagcacttgcagacctgcctgaacgcacatgacatagcacttgccgatctgcgtgtgtccagaagtggcccttggccgagcgccgaactcgctcgccctctagatgtccaagtgccacgtgaactatgcaatttaaagggttgacccacactagacgaaactggactcgtacgactctttttatattttttat

SEQ ID NO: 208210 - DNA, 134 bp, Homo sapiens
  chr2:121243025-121243159
  hypo
caatgagatgcccaacggagctcagcaagttaggggcagagcccatctcctgacctctcctgagctcttcctgcagcccccactgtccccaaggcttcttgtgccatgctttgagttctcgtgtttcttggtga

SEQ ID NO: 208211 - DNA, 39 bp, Homo sapiens
  chr2:121327691-121327730
  hypo
gggtctccagagtggcgagaaagacgcccacctcctgct

SEQ ID NO: 208212 - DNA, 96 bp, Homo sapiens
  chr2:121542641-121542737
  hypo
tggcctccttgagccggcgcatgtccaggctgcagcagaccacattattggatccgggtcccagacacctggcctgggctgcgatgaggtggctgc

SEQ ID NO: 208213 - DNA, 139 bp, Homo sapiens
  chr2:121609723-121609862
  hypo
aacccagatggcattcgcctgtgtggagggtgaacctgagcttggagtctttcaggagttggagagaggaggaggacaggttggagcacatggagtcatccctaccctgcccaggcctatggatcgcacagagacggat

SEQ ID NO: 208214 - DNA, 130 bp, Homo sapiens
  chr2:121726279-121726409
  hypo
tatcccacagtgtcccgtttctccagcccgcgggtgacgccccgcctgagccgcaagcgggcgctgtccatctccccactctcagacgccagcctggacctgcagcggatgatccgcacctcacccaact

SEQ ID NO: 208215 - DNA, 366 bp, Homo sapiens
  chr2:121742086-121742452
  hypo
acacagaccccagctctctccggaagcatgtgaaaacggtccacggcccagatgcccacgtcaccaagaagcagcgcaatgacgtgcacctccgcacaccgctgctcaaagagaatggggacagtgaggccggcacggagcctggcggcccagagagcaccgaggccagcagcaccagccaggccgtggaggactgcctgcacgtcagagccatcaagaccgagagctccggggtaagcggagctgggcagcccagccacgcaaggcgactccatagccgtgcccagggccaccccttgccacggttgcgggctctgccctaaggcccccctctaggggcacagcgatatccctcctctctccaac

SEQ ID NO: 208216 - DNA, 1125 bp, Homo sapiens
  chr2:121745649-121746774
  hypo
aagcatgcatctcctgagtgcgctgtgttgcaagccctcttctcgggctccaggcccagtgcgatgactgagcacggtcaaagcaagcagccacccacccttgtcccggtgctgacccctctgctctcccgcaggctccatcctggaaaacttcagtggcagtgggggcggcgggcccgcggggctgctgccgaacccgcggctgtcggagctgtccgcgagcgaggtgaccatgctgagccagctgcaggagcgccgcgacagctccaccagcacggtcagctcggcctacaccgtgagccgccgctcctccggcatctccccctacttctccagccgccgctccagcgaggcctcgcccctgggcgccggccgcccgcacaacgcgagctccgctgactcctacgaccccatctccacggacgcgtcgcggcgctcgagcgaggccagccagtgcagcggcggctccgggctgctcaacctcacgccggcgcagcagtacagcctgcgggccaagtacgcggcagccactggcggccccccgcccactccgctgccgggcctggagcgcatgagcctgcggaccaggctggcgctgctggacgcgcccgagcgcacgctgcccgccggctgcccacgcccactggggccgcggcgtggcagcgacgggccgacctatggccacggccacgcgggggctgcgcccgccttcccccacgaggctccaggcggcggagccaggcgggccagcgaccctgtgcggcggcccgatgccctgtccctgccgcgggtgcagcgcttccacagcacccacaacgtgaaccccggcccgctgccgccctgtgccgacaggcgaggcctccgcctgcagagccacccgagcaccgacggcggcctggcccgcggcgcctactcgccccggccgcctagcatcagcgagaacgtggcgatggaggccgtggcggcaggagtggacggcgcggggcccgaggccgacctggggctgccggaggacgacctggtgcttccagacgacgtggtgcagtacatcaaggcgcacgccagtggcgctctggacgagggcaccgggcaggtgtatcccacggaaagcactggcttctctga

SEQ ID NO: 208217 - DNA, 42 bp, Homo sapiens
  chr2:121924778-121924820
  hypo
attctcctgcctcggcctcccgagtttttctagttttttaag

SEQ ID NO: 208218 - DNA, 208 bp, Homo sapiens
  chr2:121975957-121976165
  hypo
gccaggtgggcccaccgtatgctagctgacaagggcagtcacacaccggtaagtgctgatacaggatgaggggtgcggagctgaggatgttgttctctttgatgaaggcctgaaaacttcccctggcccctgctgcccacctcagggctcctcaggacgaagggcatgaggacaggttcccactctggcccttcgctgggggacatgg

SEQ ID NO: 208219 - DNA, 88 bp, Homo sapiens
  chr2:122102164-122102252
  hypo
ccaaagtgctgggattacaggtatgagccgtgcccagccttcatttattaacttcatttaagcaaaaggagagcgtgttcccataggc

SEQ ID NO: 208220 - DNA, 261 bp, Homo sapiens
  chr2:122305114-122305375
  hypo
aaccactactaaggtcccttcctctgctgcccccaaactggaaaaaaaacataaacactgagattgtcccagagctgcaatgggcagctcgggaatgccaagctgcgatctatagccagtactcaaggtggagagaaacccacgctttttgagaattgagagggaacacggctgcaactgtgaggaaatacgggggagccacacaaccaagcaagagtgtaccatgaccagtatgcctacgtgccacataccagatcacaa

SEQ ID NO: 208221 - DNA, 237 bp, Homo sapiens
  chr2:122312635-122312872
  hypo
gttgtgggtggaaagcaacacggtctgtgcagacccagagtcctaatggagtcaagaactccctggagagctcacgctgcacacaaacctcagcaggtctctctgcggcccatgaatcctctgcagttttcctggatgtgctgtgctctcgcatgctcccgtctgcagcactgtgtgttctctctgctgtctgctcttgtgcctctttcaggactcgcttcaagcctcatcaactcc

SEQ ID NO: 208222 - DNA, 31 bp, Homo sapiens
  chr2:122497730-122497761
  hypo
agatgaggtcatgaccgggcacggtggctca

SEQ ID NO: 208223 - DNA, 227 bp, Homo sapiens; identical to SEQ ID NO: 198423
  chr2:127413501-127413728
  hypo

SEQ ID NO: 208224 - DNA, 96 bp, Homo sapiens
  chr2:127801058-127801154
  hypo
aagcctccaaacagcgcagccgaggaggggctcagccgtctaccctgtctccagcggaggagcttctgagaccaggagcgggggccgtcgggtgag

SEQ ID NO: 208225 - DNA, 115 bp, Homo sapiens
  chr2:127801235-127801350
  hypo
aaagtgaaccaagcaagggtcccagaaacgtcacacgtgaactcgcccattcacactcacccattcccatgcacactggccattcactcagccattcacacgtgcacacattcgc

SEQ ID NO: 208226 - DNA, 260 bp, Homo sapiens; identical to SEQ ID NO: 198426
  chr2:127864043-127864303
  hypo

SEQ ID NO: 208227 - DNA, 192 bp, Homo sapiens
  chr2:128127766-128127958
  hypo
actgaataaatgcccgcagcgcaagcacaggcttgtcagggcctcagccgctgactctttatacaccctcctcagtgtctgtgggcggcccagtcccctagcccactctttcactggcttcctgtgtctgagttcatttgttcatctgttgttcagccagggtctgcgggtcggacccggaaggtagagccc

SEQ ID NO: 208228 - DNA, 329 bp, Homo sapiens
  chr2:128158471-128158800
  hypo
cacccgccccttctgatccagtgtcccgcagtcctgcccgcttcaccgccctcgcctagcccccgcgggtggtaaaagtccagcccggcggagcgcccctgcctccttccacgcccctggcctgccctgcgcagctacgcccagcccgcgtccatcccggaccatcctgttgaaggcagtcccctggcacgcagggctgggagctcttagctgaggatggaaccgactgcaccaggagccgctgggaggaaggccgaggggcgcagaggagaggcaaggaaaaaacagcagcccaagaatcgggcctccctgttacagcaggagtcgca

SEQ ID NO: 208229 - DNA, 78 bp, Homo sapiens
  chr2:128273731-128273809
  hypo
acagaaggcagcctaggcaacgtggcaaaactccatgtctacaacacaaaaattagctgggcgtgtggtgtatgcctg

SEQ ID NO: 208230 - DNA, 77 bp, Homo sapiens
  chr2:128273869-128273946
  hypo
agatcgcgtcatggcactccagcctgggcgacagtgagactccgcaccccgcccccgcaatacacacacacaaaata

SEQ ID NO: 208231 - DNA, 212 bp, Homo sapiens
  chr2:128403131-128403343
  hypo
ccgcatcctcacggacaggacagcgccccattatgaggctcctgcagctgttcctcgctccagataaaggccatgatttattctgtgtgcccaaatggggcctcattatacagggcaggacacaaggaccctacagcaagtgtcctcaaagagtcgcctctcactccgtgagcaagactcctcggcctcccaccctccgttcacaggccccc

SEQ ID NO: 208232 - DNA, 105 bp, Homo sapiens; identical to SEQ ID NO: 198431
  chr2:128459399-128459504
  hypo

SEQ ID NO: 208233 - DNA, 32 bp, Homo sapiens
  chr2:128472923-128472955
  hypo
ctgggattacaggcatgcgccactgcacctgg

SEQ ID NO: 208234 - DNA, 218 bp, Homo sapiens
  chr2:128583666-128583884
  hypo
aaagtgctgggattacaggtgtgagccgctgcgcgtcaccaccaatccattttctccaggacctctctctgtgcagagagctcttctctttcacctattaaacttccactctgaacctcactctttgtatatccgcatcctagtgttctgtggctttagacaaggaacctcgagtatttacccaagacgatgatatcgtttcattggcagctcagata

SEQ ID NO: 208235 - DNA, 84 bp, Homo sapiens
  chr2:128600135-128600219
  hypo
ttctccttgtagctccacaccgacgctattcaaaatgggggctcaataaacatttgctagtaagtacgcagtgcaggccgggca

SEQ ID NO: 208236 - DNA, 41 bp, Homo sapiens
  chr2:128679951-128679992
  hypo
agcaaaggtaaggcttgctacgtcgattttcttttttattt

SEQ ID NO: 208237 - DNA, 40 bp, Homo sapiens
  chr2:128680172-128680212
  hypo
gttagccaggagttatgtcgattttcaaaataactggctg

SEQ ID NO: 208238 - DNA, 56 bp, Homo sapiens
  chr2:129027719-129027775
  hypo
ctgcatgcagactgccgaggaagggacaggcagctgtcatccgcccagtgttttct

SEQ ID NO: 208239 - DNA, 170 bp, Homo sapiens
  chr2:129250623-129250793
  hypo
tgcttatctaggccgccccctccgcgggcgcaccgatgcctggcactgcccgccggggcgtgggcgcgcccacaccgtccaccctgctcctgcccagagcgggtcctctgccgaaggaatttgcgctggcagctcccggagggtctggcccgcacgcggcagggcaataa

SEQ ID NO: 208240 - DNA, 158 bp, Homo sapiens
  chr2:129542648-129542806
  hypo
atggctcttggactggctcacgaggacccagagcctcatcctgtgcagactgcacggccgcagcagctctctgggtggcatcccttcgctcagggcgacgaccttgctgtttccactgcgactagactcttacctccgctctaaggctgtgcaatcaa

SEQ ID NO: 208241 - DNA, 94 bp, Homo sapiens
  chr2:130356761-130356855
  hypo
tctttcttcctttatcggctttttttccttttcgcttttgtttgttttttagttttgggttttttttgtgtgcgtatatatatatttttttaac

SEQ ID NO: 208242 - DNA, 36 bp, Homo sapiens
  chr2:130670341-130670377
  hypo
caggagcggaggccccgacaccgcagaggagacttg

SEQ ID NO: 208243 - DNA, 138 bp, Homo sapiens
  chr2:130943151-130943289
  hypo
cagcaggaggggggtcggcagagccccacacgtgtgagctggggcagtgggagggcgtgggtgaggcagagcgctgtccaggtgctggtaggccgggggcgggaggaggcaggtgggggggcacggtcaagatgtatg

SEQ ID NO: 208244 - DNA, 88 bp, Homo sapiens
  chr2:131502560-131502648
  hypo
ggccagggcccagtccgctctccaggctgccaggagctgaggcttcatcccaaagggcatgaacctgaggatccgtctccagagaagc

SEQ ID NO: 208245 - DNA, 138 bp, Homo sapiens
  chr2:131639163-131639301
  hypo
actaagagactacagctgtgcgtgagctgtttctgaggccatcctccgcagacgtacaaggttttgctatagtgaatgcttcgggagatgtaaggagggagcgctcactgtggctcagaagtgctggaggaccatcct

SEQ ID NO: 208246 - DNA, 39 bp, Homo sapiens
  chr2:131639331-131639370
  hypo
gatccagagcagatggtgatgccacgtgcagccagtgag

SEQ ID NO: 208247 - DNA, 120 bp, Homo sapiens
  chr2:131818952-131819072
  hypo
tagccagaaaatctccatggaaacaacagtcatgcatgaggtaaaagaacaagcaaggaagttagctgaaagggcccacggatcaccacacccaaacgcacccctagaagatgaattata

SEQ ID NO: 208248 - DNA, 394 bp, Homo sapiens
  chr2:131878434-131878828
  hypo
atagagactcgggccggacaggctattctctttctgggtatgattttgaacctgcctgtttttgttctgtaggtgaagagatggcgtttgtgaagagtggctggttgctgcgacagagtgagtacaggatgtgcggtctgcgatcggcattgccgaagggcagtctctatttctgtttgcttaaagttgatcatatttaaaagcaaataacaaagttttatgagtgctatggccttgagtttccccttggacattcctagatctctgtgaactgtcttgcacaccacggagctcctccttggttgctgagttgacaggaaccaggaaatgatggcagtccctgctgctttcgctctcctcactagcatgctttactttttaattttaatttatt

SEQ ID NO: 208249 - DNA, 209 bp, Homo sapiens
  chr2:132270120-132270329
  hypo
ggaatctgtgagagccgggggagacgggctgtgctcacagccagtgatctgtcccgttcacctgggaaggagcacacatgattgaacaggaatttgagcacaagatgagaaaatgtgttggccccttagcgctggtgggctggatggcggccacagcacacgggggcacctcattccgcaggagccactgcagaggagaggaggaacct

SEQ ID NO: 208250 - DNA, 318 bp, Homo sapiens
  chr2:132301069-132301387
  hypo
tgcgcgacctcagtacgtaaagcatgctgaggcggtgtcaggtcattttaggctcttcagtttcgcgtttggtatccggcatggctgccacctgtttctggctggagcctcggacactggctcactgcagttggtggtgtcgacagagcggtaggagggcggcgggcagcaggagcttctcctgctgggcaggaagacgagtagaagggagcggcaccgaggcatgctggaggctggagcctgagccaccccggctcgcctcgctgcggttggtggtgacctcggacactgcagctcggccagagtggtagaaatgtc

SEQ ID NO: 208251 - DNA, 159 bp, Homo sapiens
  chr2:132348675-132348834
  hypo
ggcttggctggcttgtaacggcttgcacgcgcacgccgcccccgcataaccgtcagactggcctgtaacggcttgcaggcgcacgccgcacgcgcgtaacggcttggctgccctgtaacggcttgcacgtgcatgctgcacgcgcgttaacggcttggc

SEQ ID NO: 208252 - DNA, 492 bp, Homo sapiens
  chr2:132415371-132415863
  hypo
cctctcttgtcagagtctctggcgcgaggtgggggtggggtgggggttttcctatgcgatagcccacggggcggtgaggccaggtcctcgcgtgcctttgtccagggcgcaggggggcgagggtcttcggtggtggagtccgcggagcggcaggacaggggtcctccagtgccatattccagagcacggcggagtgggggacctgtcctgcagtggtccagggcatgcgggagtggtgggcctcctgtgccatagtccaacgcgcggcggggcgggggtcacctcgtcctgcagtcaccatgcacgagaccccggtcctgctgtgcctcagtccagtgcgcggtgggacggctgttctgctatgctgtagtgcaggacgcggtggggcagcagtaacccagagagcgccgtggcagggggtcctccagtgctggaatccagtgcatggcgggtcaggggtcttaccgtgccgaagtcagtggcaagggtcct

SEQ ID NO: 208253 - DNA, 87 bp, Homo sapiens
  chr2:132586579-132586666
  hypo
cgagccaggacgtcacgctcacggtattttccgaagtcctccgtgtaaaaagggcgggcggtggagtgggcccggggctcctcaggg

SEQ ID NO: 208254 - DNA, 99 bp, Homo sapiens; identical to SEQ ID NO: 198434
  chr2:132767530-132767629
  hypo

SEQ ID NO: 208255 - DNA, 120 bp, Homo sapiens; identical to SEQ ID NO: 198435
  chr2:132795464-132795584
  hypo

SEQ ID NO: 208256 - DNA, 100 bp, Homo sapiens; identical to SEQ ID NO: 198436
  chr2:132796304-132796404
  hypo

SEQ ID NO: 208257 - DNA, 462 bp, Homo sapiens
  chr2:133175002-133175464
  hypo
agctttgagcgctacatcgccatctgtcaccccttcaggtacaaggctgtgtcgggaccttgccaggtgaagctgctgattggcttcgtctgggtcacctccgccctggtggcactgcccttgctgtttgccatgggtactgagtaccccctggtgaacgtgcccagccaccggggtctcacttgcaaccgctccagcacccgccaccacgagcagcccgagacctccaatatgtccatctgtaccaacctctccagccgctggaccgtgttccagtccagcatcttcggcgccttcgtggtctacctcgtggtcctgctctccgtagccttcatgtgctggaacatgatgcaggtgctcatgaaaagccagaagggctcgctggccgggggcacgcggcctccgcagctgaggaagtccgagagcgaagagagcaggaccgccaggaggcagaccatcatc

SEQ ID NO: 208258 - DNA, 353 bp, Homo sapiens; identical to SEQ ID NO: 198445
  chr2:135476396-135476749
  hypo

SEQ ID NO: 208259 - DNA, 96 bp, Homo sapiens
  chr2:135707351-135707447
  hypo
ggtaggcaaaatttttttttcggggggggggtgggggacagagtctcagtcgcccaggctatagagtgcggtggcgcaatctcggctcgctgcacc

SEQ ID NO: 208260 - DNA, 88 bp, Homo sapiens; identical to SEQ ID NO: 198446
  chr2:136288366-136288454
  hypo

SEQ ID NO: 208261 - DNA, 221 bp, Homo sapiens
  chr2:136785592-136785813
  hypo
cattcaatgtgtgcacacttcggtgtatcaattatacttcaataaagctaaaacaaaaaaaggatgctgagacagtacacgggggcgcttaaagcgctcctacttcccgactgcagtactaggagggtgtgggctacggtagaaagatggtataaaatctcacgggtagctaactgttgtaaccgtgggcatggtgggccgagggaagctcagtagtgggt

SEQ ID NO: 208262 - DNA, 912 bp, Homo sapiens; identical to SEQ ID NO: 198448
  chr2:136874020-136874932
  hypo

SEQ ID NO: 208263 - DNA, 482 bp, Homo sapiens; identical to SEQ ID NO: 198449
  chr2:136875399-136875881
  hypo

SEQ ID NO: 208264 - DNA, 42 bp, Homo sapiens
  chr2:137195177-137195219
  hypo
tgtgcaattccttcccgccatgctgcccgcatccctgttatc

SEQ ID NO: 208265 - DNA, 60 bp, Homo sapiens; identical to SEQ ID NO: 198452
  chr2:137523039-137523099
  hypo

SEQ ID NO: 208266 - DNA, 78 bp, Homo sapiens
  chr2:139436926-139437004
  hypo
gactcttcacctacgtggcagcgggggagtaggagaggcctgaattttttttttttttttttgagacggagtctcgct

SEQ ID NO: 208267 - DNA, 330 bp, Homo sapiens
  chr2:144478010-144478340
  hypo
tcacctctcgcaaccgagactccatcagaagagcctaatggcgtcaactaattgctagaaaaaaagactgccctctatcgacgcagatgcacctgtgccgtgtgactcattcaccaagcacagtaaacacttttaagtactagggcgaagggggattcgaatgaatgagggcatcgagggggtcaagtggtggacaataggaactgtgaagtctcctctgcctgccggtcctgtggccagcacttctgctgcactagcttccctaaaagaggcacacgacttcccaaacttcagtgtgctcacaaaccaaattacctagcaatcttgtta

SEQ ID NO: 208268 - DNA, 33 bp, Homo sapiens; identical to SEQ ID NO: 198457
  chr2:145090080-145090113
  hypo

SEQ ID NO: 208269 - DNA, 864 bp, Homo sapiens; identical to SEQ ID NO: 198459
  chr2:148601655-148602519
  hypo

SEQ ID NO: 208270 - DNA, 215 bp, Homo sapiens; identical to SEQ ID NO: 198460
  chr2:148602728-148602943
  hypo

SEQ ID NO: 208271 - DNA, 37 bp, Homo sapiens
  chr2:149045675-149045712
  hypo
aaagtgatttctggccgggcgcggtggctcacgcctg

SEQ ID NO: 208272 - DNA, 194 bp, Homo sapiens
  chr2:149227323-149227517
  hypo
ttctggagctgttgccggcagtggcaacactgaaggacatagcactttaaacaccatgttccctcctactgccaacatgcttctcccaacaggtgaagggcaaagtggtcgagcagcactaagagataagctgatgtctcagcaaaaagacgcattgcggaaaagaaaacaaccacctacgacagtgttgagtt

SEQ ID NO: 208273 - DNA, 32 bp, Homo sapiens
  chr2:149436588-149436620
  hypo
gcctgggtgacagagtgcgaccctgtcactaa

SEQ ID NO: 208274 - DNA, 198 bp, Homo sapiens
  chr2:149525279-149525477
  hypo
actctgcctcttgatcgtgcttccgattttcctaacattagctttgtcttcctatgcctcagacttcttttgtcccctggaatctaccccggggaatcgtagttaggaggaaggggtgatagattttatacacagaatttctgagactttgtgacacttcctgtgtatatcttagaataggtacgttatttgcaaagg

SEQ ID NO: 208275 - DNA, 57 bp, Homo sapiens; identical to SEQ ID NO: 198461
  chr2:149632585-149632642
  hypo

SEQ ID NO: 208276 - DNA, 143 bp, Homo sapiens
  chr2:150131807-150131950
  hypo
atacaggcatgagccaccacgcccggccgacaggcagaatttatgtgcttaacagctgggagaaaatgaagacatgtagtcgaaaatccagatgctttcaaatatatattcaattatttaacgttagatgaatcatagagata

SEQ ID NO: 208277 - DNA, 360 bp, Homo sapiens; identical to SEQ ID NO: 198468
  chr2:150187292-150187652
  hypo

SEQ ID NO: 208278 - DNA, 199 bp, Homo sapiens
  chr2:152154029-152154228
  hypo
gcctggaggccgagtccatagacggaaagtgaggtatttctaggtgtccctgtgtttcatgaaggggcggtatatgcaaagcagcccccaaatgccaaaggagttgagctaccaaagaacaaggcagacaaatccagttcgtcagtaaggagtgttttaatggaaagttaagatggaaatgtggcggcaaggcagatct

SEQ ID NO: 208279 - DNA, 206 bp, Homo sapiens
  chr2:152295716-152295922
  hypo
ggggtggaacttgctgtttccgggatggaagaaagtctgaataggagtggactcatgccgtccaaacccgtgtcgttcaagggtcaactgtacttagtattgttgatttagaaaaaataaatttttacagctctctgtatagtcatctctaaaattacatgcttagaaatacacccttctagccgggcgcggtggctcatgcctgt

SEQ ID NO: 208280 - DNA, 206 bp, Homo sapiens
  chr2:152642697-152642903
  hypo
gattggtccattgaacgctgtatagttcacttgcgtttccattgagccaaggagggtaggaactcttgactgctttcaggccactggggctcctgcatttatatgcttgacagtcttacactgcgaggaaacagacaactaacaaatgcctctgaaactcatttcttatatgtctgaaatgaaacgagcaacgtaggtttaaattc

SEQ ID NO: 208281 - DNA, 100 bp, Homo sapiens; identical to SEQ ID NO: 198475
  chr2:152956050-152956150
  hypo

SEQ ID NO: 208282 - DNA, 94 bp, Homo sapiens
  chr2:153079539-153079633
  hypo
taagtaaataataaaaagagaaagatatgaagagagaaaggacaaaaaaagagatttaaacacacataagtatactgacgagaagtgtacattc

SEQ ID NO: 208283 - DNA, 511 bp, Homo sapiens; identical to SEQ ID NO: 198476
  chr2:153192137-153192648
  hypo

SEQ ID NO: 208284 - DNA, 80 bp, Homo sapiens; identical to SEQ ID NO: 198482
  chr2:155553936-155554016
  hypo

SEQ ID NO: 208285 - DNA, 612 bp, Homo sapiens; identical to SEQ ID NO: 198483
  chr2:155554076-155554688
  hypo

SEQ ID NO: 208286 - DNA, 349 bp, Homo sapiens; identical to SEQ ID NO: 198484
  chr2:155554689-155555038
  hypo

SEQ ID NO: 208287 - DNA, 383 bp, Homo sapiens; identical to SEQ ID NO: 198486
  chr2:157189365-157189748
  hypo

SEQ ID NO: 208288 - DNA, 439 bp, Homo sapiens; identical to SEQ ID NO: 198487
  chr2:157292183-157292622
  hypo

SEQ ID NO: 208289 - DNA, 222 bp, Homo sapiens; identical to SEQ ID NO: 198488
  chr2:158485076-158485298
  hypo

SEQ ID NO: 208290 - DNA, 1840 bp, Homo sapiens; identical to SEQ ID NO: 198490
  chr2:159313054-159314894
  hypo

SEQ ID NO: 208291 - DNA, 157 bp, Homo sapiens
  chr2:159490660-159490817
  hypo
aacagctacctacgcggagccctacaggcctatacaataccgagtgcaagagtgcaattataacaggcttcagcatgcagtgccggctgatgatggcaccacaagatccccatcaatagacagcattcagaaggaccccaggcgagtaccagttagg

SEQ ID NO: 208292 - DNA, 153 bp, Homo sapiens
  chr2:159528148-159528301
  hypo
tgctgtgtgccagacgctcttctctatgctgggcttgcagcagcagacaggtcgcatgacagccccacccgaggtagcttacgttccatgggtgaggtagacgcagacaaggtgccaaacgaacagaaacgcgtggagcgtggtgggtggtgc

SEQ ID NO: 208293 - DNA, 204 bp, Homo sapiens
  chr2:159946996-159947200
  hypo
aaacagcctcgctcggcagggatcgggggtccctctgtgtggagggtgttggaaactgaatcaggtgtagcatcagtaggcctggcagagccacggaattcaagctgcagtgtgttccacaggactggtagacctggacaagtctgtgctggcaaggaaatgtagaatcccaaattccatgcagattgacggtgaatcctgcca

SEQ ID NO: 208294 - DNA, 212 bp, Homo sapiens
  chr2:160086244-160086456
  hypo
caacgactccgagaacgaagaggacaccccaacccctggcttaagtgaccactttcactctgaggagactgaagaggaagaaacttctccccaggaagaatctgtttccccaactcccaggtcccagccatcctcatctgtcccttcctcatacatccgaaaccttcaagaagggttacagtccaaaggaaggccggtatcgccacagagca

SEQ ID NO: 208295 - DNA, 506 bp, Homo sapiens; identical to SEQ ID NO: 198493
  chr2:160142449-160142955
  hypo

SEQ ID NO: 208296 - DNA, 42 bp, Homo sapiens
  chr2:160632631-160632673
  hypo
gggattacaggcgtgagccactgcgcccggcctgtgcctggc

SEQ ID NO: 208297 - DNA, 360 bp, Homo sapiens; identical to SEQ ID NO: 198495
  chr2:160654298-160654658
  hypo

SEQ ID NO: 208298 - DNA, 115 bp, Homo sapiens
  chr2:161113756-161113871
  hypo
attaaaagtgtgtgcgtcattctttaccgtgagaaggcagacaggttttgcaacaagctagaggatggtgtgtggagtaaataacaaatgcctcttggtcggaggctgtttgatc

SEQ ID NO: 208299 - DNA, 91 bp, Homo sapiens
  chr2:161127528-161127619
  hypo
aacacagccagatagagggccgcggacttcagcggcgagaagctacaacaaaaatagggtgaacaaaaacgaaggtgcccaggagcctgaa

SEQ ID NO: 208300 - DNA, 152 bp, Homo sapiens
  chr2:161128081-161128233
  hypo
gtgagggaaagaggagttctcgctcctccgtgaatgctgcacgggagcctccagtcgggaacagctgaacaggtagctctgaaagaggaccttggtcataaacgcatagataagattatcccgaggttctcgcccacatgcttccttaccac

SEQ ID NO: 208301 - DNA, 270 bp, Homo sapiens; identical to SEQ ID NO: 198497
  chr2:161263896-161264166
  hypo

SEQ ID NO: 208302 - DNA, 203 bp, Homo sapiens; identical to SEQ ID NO: 198498
  chr2:161264419-161264622
  hypo

SEQ ID NO: 208303 - DNA, 161 bp, Homo sapiens
  chr2:161989985-161990146
  hypo
atcctttcacttgtttaatccgtgggtatctaggcatctcttcatgcgtagctcgagctctgagaactgcctctctgcccacacagccagaactttgtatgcatcaccactcttaactttgtcaatgagcagagttaaacgtttgcacgtctatctcttgc

SEQ ID NO: 208304 - DNA, 262 bp, Homo sapiens; identical to SEQ ID NO: 198502
  chr2:162930659-162930921
  hypo

SEQ ID NO: 208305 - DNA, 84 bp, Homo sapiens; identical to SEQ ID NO: 198504
  chr2:165477479-165477563
  hypo

SEQ ID NO: 208306 - DNA, 243 bp, Homo sapiens; identical to SEQ ID NO: 198505
  chr2:165477596-165477839
  hypo

SEQ ID NO: 208307 - DNA, 214 bp, Homo sapiens
  chr2:165637158-165637372
  hypo
ggacaagagctgcagcgctcctatttattccacaaccattccacttttgtgtgttttcagctttatgccttatttagaaaccaaataatgtttgccctgggtggtgctgccggagtatctgccgggctaagtggaaatccacaaggcagggtaggcgacagacagagtgtaaatgctgtgttttcatggagactgctgtcgccttgtgaggtct

SEQ ID NO: 208308 - DNA, 1139 bp, Homo sapiens; identical to SEQ ID NO: 198506
  chr2:165697530-165698669
  hypo

SEQ ID NO: 208309 - DNA, 37 bp, Homo sapiens; identical to SEQ ID NO: 198509
  chr2:166650106-166650143
  hypo

SEQ ID NO: 208310 - DNA, 737 bp, Homo sapiens; identical to SEQ ID NO: 198510
  chr2:166650508-166651245
  hypo

SEQ ID NO: 208311 - DNA, 88 bp, Homo sapiens
  chr2:166790775-166790863
  hypo
tatgacagtcaagagcgaaaaaaagagccaacaaaactgttataagagaaacacggagaactccgtctctactaaaaatacaaaaaat

SEQ ID NO: 208312 - DNA, 86 bp, Homo sapiens
  chr2:166894501-166894587
  hypo
ctgcatgccgaccacggcaaaaatgaagacgatgatggccaagacgagggttaaatttcccagagcccccacggaattgccgatga

SEQ ID NO: 208313 - DNA, 239 bp, Homo sapiens; identical to SEQ ID NO: 198512
  chr2:168149264-168149503
  hypo

SEQ ID NO: 208314 - DNA, 220 bp, Homo sapiens; identical to SEQ ID NO: 198513
  chr2:168149556-168149776
  hypo

SEQ ID NO: 208315 - DNA, 203 bp, Homo sapiens
  chr2:169073153-169073356
  hypo
acctgacagaaatacgagtttttaggcaaagaaacgttgttataagccaccttcaaaagaagacattattcgtgtgctttcaactttctaaagccaaggctaatgccaccgccacacctcttaggcatggatgatctcatgaacagcagcggactttcatctcctgagaggtcttggtcaccggctctgtgccaggcactccc

SEQ ID NO: 208316 - DNA, 409 bp, Homo sapiens; identical to SEQ ID NO: 198515
  chr2:169312409-169312818
  hypo

SEQ ID NO: 208317 - DNA, 163 bp, Homo sapiens; identical to SEQ ID NO: 198516
  chr2:169312881-169313044
  hypo

SEQ ID NO: 208318 - DNA, 96 bp, Homo sapiens
  chr2:169337555-169337651
  hypo
gcaccaacctgggcttgactcgcagagaggcatctgcagaggatccttgaggagcttgtggtttgaaagagggacagttggccaggctggccgggc

SEQ ID NO: 208319 - DNA, 41 bp, Homo sapiens
  chr2:169436467-169436508
  hypo
ccttgataatcacaacgccacttttccgcccaagaaatata

SEQ ID NO: 208320 - DNA, 268 bp, Homo sapiens; identical to SEQ ID NO: 198518
  chr2:170218861-170219129
  hypo

SEQ ID NO: 208321 - DNA, 96 bp, Homo sapiens
  chr2:170282879-170282975
  hypo
ccagtgaaaaaggacgaacctgaagttgccagtgtgaagcccgtgagtgtgcagtgaaccgcagagaaagcttcttggtgagttgagtttgtggag

SEQ ID NO: 208322 - DNA, 39 bp, Homo sapiens
  chr2:170283080-170283119
  hypo
ttccccagccctctcaccgaaagccacagcaggaaaaac

SEQ ID NO: 208323 - DNA, 77 bp, Homo sapiens
  chr2:170373534-170373611
  hypo
aataaataaaagtaagtgctgaattgcaccagttcccactaatgaatttgaagaacgtgattttggataatgttctt

SEQ ID NO: 208324 - DNA, 204 bp, Homo sapiens; identical to SEQ ID NO: 198519
  chr2:170430256-170430460
  hypo

SEQ ID NO: 208325 - DNA, 37 bp, Homo sapiens
  chr2:170552126-170552163
  hypo
gacagagcgagactccgtctcaaaaaaaaaaaaagtt

SEQ ID NO: 208326 - DNA, 101 bp, Homo sapiens
  chr2:170569212-170569313
  hypo
acttgcatttctatagtaacgacacctgctccagggatagttattgctaaggggtggagccaccagagggtggcaaaaactgggaacgcagtgcctcccag

SEQ ID NO: 208327 - DNA, 144 bp, Homo sapiens
  chr2:170569586-170569730
  hypo
catcgtggtacctgcgatgggggcaccacgtgttctcccattagccagccccacccatcatagacactacgagtcagccagggggcaggcttgccatgggttttgcgacaccccctgtccaaagcctgccgtgttgcatcccac

SEQ ID NO: 208328 - DNA, 165 bp, Homo sapiens
  chr2:170584903-170585068
  hypo
aacacttaacaatagtagttcgcttagtttcttgccttcttgtcataaaacttatgatttggcgtactcatctttctacgccttgatggactgtcatagttttacgtttggatcaacttccaatgtgttatcctttgcattttcgatgtggtgaaatatctccaa

SEQ ID NO: 208329 - DNA, 180 bp, Homo sapiens
  chr2:170620609-170620789
  hypo
cttcttggtctatttgtttaaatacttctataaaaagagacattccctcatttactagttgtttactcagagttacagtttgtgtaggaaaggcaggttaaatgcttgattcttccctttatttactagtttgcaaaatagttgttagcgtcctccaaagatgatttattaggtttattt

SEQ ID NO: 208330 - DNA, 54 bp, Homo sapiens
  chr2:170682331-170682385
  hypo
acgtggccccggaagcggtggctcacccctgtgatcccaacattttgggaggcc

SEQ ID NO: 208331 - DNA, 49 bp, Homo sapiens; identical to SEQ ID NO: 198527
  chr2:171627264-171627313
  hypo

SEQ ID NO: 208332 - DNA, 632 bp, Homo sapiens; identical to SEQ ID NO: 38182
  chr2:171627346-171627978
  hypo

SEQ ID NO: 208333 - DNA, 224 bp, Homo sapiens
  chr2:171730911-171731135
  hypo
ctgtctcaaaaaaaaaaaaaaaaaaggaatactagtgcagtggcctcaaggagctgggacaatgccagaccgaaagtcagcaaggaagcaaggacttcagacctaccgctgcgaggaactggattcggccagcaacctgaatgagcttggaggcacgtctcccagcgaagcctggcaatgggagcccggcctcgggagcatgcgcatctaggcagtgagtccag

SEQ ID NO: 208334 - DNA, 551 bp, Homo sapiens
  chr2:171822567-171823118
  hypo
cggcgactccaccccagtcagcgagaagcctgtttctgcggctgtggatgccaatgcttctgagtcaccttaactttgaaccattctttggaattggcgtggtatatttaaccacgggagcgtgtctggaaacgcaaactatcattaatttcatactagtttgtaccgtatctgtaggcatcctgtaaataattccaaggggaaaactaaacgaggacgtgggttgtatcctgccaggttgagtggggctcacacgctagggtgagatgtcagaaagcgcttgtattttaaacaaccaaaaagaattgtaagggtggcttgctgccaggcttgcactgccgttcctgggggtgtgcatcttcgggaaaggtggtggcggggcgtccactaggtttcctgtcccctgctgctccttccgtaagaaaatgaaatattctatgcctaatactcacacgcaacatttcttgtactttgtaagtcgtttgcgagaatgcagaccacctcactaaactgtaaacggtaaagagatttttacttttggtctccgtgag

SEQ ID NO: 208335 - DNA, 35 bp, Homo sapiens; identical to SEQ ID NO: 198534
  chr2:172379091-172379126
  hypo

SEQ ID NO: 208336 - DNA, 181 bp, Homo sapiens; identical to SEQ ID NO: 198535
  chr2:172379723-172379904
  hypo

SEQ ID NO: 208337 - DNA, 39 bp, Homo sapiens
  chr2:173422734-173422773
  hypo
ttctgtatatgtgaggtctcattgtgttgcccaggctgg

SEQ ID NO: 208338 - DNA, 100 bp, Homo sapiens
  chr2:173423968-173424068
  hypo
ccgaccagagtcttaaggtagtagcagtattctttttttggctgggggcaggtgggggcaatgtatttgggcttgtgccctgaatcgtggactccacaac

SEQ ID NO: 208339 - DNA, 319 bp, Homo sapiens; identical to SEQ ID NO: 198551
  chr2:173940416-173940735
  hypo

SEQ ID NO: 208340 - DNA, 217 bp, Homo sapiens; identical to SEQ ID NO: 198553
  chr2:174349951-174350168
  hypo

SEQ ID NO: 208341 - DNA, 258 bp, Homo sapiens
  chr2:174890619-174890877
  hypo
gccgtcaaggaagatgaatgtctccccaaaagtgctcctcggggacaagtttccacgcagatgcaaccgggaacgccggccaggctccggaaggcgaggccccagagcgcagcggcctccaagcgcgggctcagcctgtcgcctccgcagccagggcccaggaggccgctcttccggggtcaccaacacggctcgttctgagcctagaggcccagggcacagtgtgagccggaatacggtgtaggggacacagctcag

SEQ ID NO: 208342 - DNA, 35 bp, Homo sapiens
  chr2:175383905-175383940
  hypo
ttaagattctctaccgggtgcggtggctcacacct

SEQ ID NO: 208343 - DNA, 35 bp, Homo sapiens
  chr2:175384180-175384215
  hypo
aagaacgagacttcgtcttaaaaaaaaaaaaagat

SEQ ID NO: 208344 - DNA, 286 bp, Homo sapiens
  chr2:175927666-175927952
  hypo
ctgcactctcctgctcgctctgccttcagggtcaccagcttaactctttccctctgggtgtaagcaagccgagctgtgtcctggctccctcttgccagtctgcaagacagacatctctggctttctctctctttctctgggcacgagcgcctgaacagtgtcagcagggcaattataccttttacagacaatagtagcgtaaagcccagtgatgaccttcccgtgttatgtacatagctgtgtttacattatacatggaattgtgcgcctgcgttccaatcctgct

SEQ ID NO: 208345 - DNA, 32 bp, Homo sapiens
  chr2:176569574-176569606
  hypo
tgttcctattcggccatcttggctcctctccc

SEQ ID NO: 208346 - DNA, 191 bp, Homo sapiens; identical to SEQ ID NO: 198581
  chr2:177052772-177052963
  hypo

SEQ ID NO: 208347 - DNA, 90 bp, Homo sapiens
  chr2:177178833-177178923
  hypo
gtagagtctgttcccttactcgtgtcagaaaccatcatatttaaagggctgggtgcggtggtgactcacgcctctaatcccagcactttg

SEQ ID NO: 208348 - DNA, 75 bp, Homo sapiens; identical to SEQ ID NO: 198582
  chr2:177502150-177502225
  hypo

SEQ ID NO: 208349 - DNA, 60 bp, Homo sapiens; identical to SEQ ID NO: 198583
  chr2:177502920-177502980
  hypo

SEQ ID NO: 208350 - DNA, 51 bp, Homo sapiens; identical to SEQ ID NO: 198584
  chr2:177503135-177503186
  hypo

SEQ ID NO: 208351 - DNA, 318 bp, Homo sapiens; identical to SEQ ID NO: 198585
  chr2:178257219-178257537
  hypo

SEQ ID NO: 208352 - DNA, 258 bp, Homo sapiens; identical to SEQ ID NO: 198586
  chr2:178257777-178258035
  hypo

SEQ ID NO: 208353 - DNA, 40 bp, Homo sapiens
  chr2:179303355-179303395
  hypo
tccagataaacttcaataaacgtgtatcaaggtccaaaat

SEQ ID NO: 208354 - DNA, 261 bp, Homo sapiens; identical to SEQ ID NO: 198590
  chr2:179316084-179316345
  hypo

SEQ ID NO: 208355 - DNA, 80 bp, Homo sapiens
  chr2:180027694-180027774
  hypo
gcaacagagcaagactccgtctcaaaaaaaaaaaaaaagaataaaggcaaataattgttgtctaacgagattgatatatt

SEQ ID NO: 208356 - DNA, 85 bp, Homo sapiens; identical to SEQ ID NO: 198592
  chr2:180129611-180129696
  hypo

SEQ ID NO: 208357 - DNA, 142 bp, Homo sapiens
  chr2:180886585-180886727
  hypo
attacaaaccacttcgcggggtcggtgtataataccccccgccgcgatgtggggagtgatatcaccctctctcaccctggatattacgaacaacctcgcggggggtggtggtccataatatccgggtggggggagaggctga

SEQ ID NO: 208358 - DNA, 39 bp, Homo sapiens
  chr2:180886910-180886949
  hypo
ccttggctctgccacttactgccccgtttgatcttgatc

SEQ ID NO: 208359 - DNA, 105 bp, Homo sapiens; identical to SEQ ID NO: 198599
  chr2:183902297-183902402
  hypo

SEQ ID NO: 208360 - DNA, 568 bp, Homo sapiens; identical to SEQ ID NO: 198600
  chr2:183902442-183903010
  hypo

SEQ ID NO: 208361 - DNA, 561 bp, Homo sapiens; identical to SEQ ID NO: 198601
  chr2:183903037-183903598
  hypo

SEQ ID NO: 208362 - DNA, 284 bp, Homo sapiens; identical to SEQ ID NO: 198604
  chr2:187454990-187455274
  hypo

SEQ ID NO: 208363 - DNA, 97 bp, Homo sapiens
  chr2:190703660-190703757
  hypo
ttttgcatgtctttcgtaaaagctgagagtctctgagttggaggaatacaatcacttttttttttctttttttgagacagagtctctctctctgttg

SEQ ID NO: 208364 - DNA, 82 bp, Homo sapiens; identical to SEQ ID NO: 198612
  chr2:191044992-191045074
  hypo

SEQ ID NO: 208365 - DNA, 516 bp, Homo sapiens; identical to SEQ ID NO: 198613
  chr2:191045505-191046021
  hypo

SEQ ID NO: 208366 - DNA, 139 bp, Homo sapiens; identical to SEQ ID NO: 198615
  chr2:191512982-191513121
  hypo

SEQ ID NO: 208367 - DNA, 120 bp, Homo sapiens
  chr2:191794489-191794609
  hypo
ccggccttataactttatttataaacatgttgataaaaatttatctacaatatttttaatgttgaaattctatggtatgtatatatatatattttttttttcgagagggagtctcactct

SEQ ID NO: 208368 - DNA, 206 bp, Homo sapiens; identical to SEQ ID NO: 198624
  chr2:192109717-192109923
  hypo

SEQ ID NO: 208369 - DNA, 253 bp, Homo sapiens; identical to SEQ ID NO: 198625
  chr2:192110303-192110556
  hypo

SEQ ID NO: 208370 - DNA, 179 bp, Homo sapiens; identical to SEQ ID NO: 198626
  chr2:192110584-192110763
  hypo

SEQ ID NO: 208371 - DNA, 84 bp, Homo sapiens
  chr2:192342592-192342676
  hypo
aactagccttccccacgtgctatgtaaacatcatacctaatcaaactaatctatgagtcctatgaaaatcggacatcccctcct

SEQ ID NO: 208372 - DNA, 145 bp, Homo sapiens
  chr2:192746555-192746700
  hypo
ccatgacttcctccccgttccgctgcccaaaaaaggcgtcaaacggatttttgccaccgaagaactcagcaaacatggcaagaggctctccatggaatgtgtagctgaaagaggtagcattggcaccaccgccgctaccgccact

SEQ ID NO: 208373 - DNA, 36 bp, Homo sapiens; identical to SEQ ID NO: 198627
  chr2:193058975-193059011
  hypo

SEQ ID NO: 208374 - DNA, 44 bp, Homo sapiens
  chr2:196402553-196402597
  hypo
aggagaaaggatcgcgtgggcccgggaggttgaggctgcagtga

SEQ ID NO: 208375 - DNA, 386 bp, Homo sapiens; identical to SEQ ID NO: 198628
  chr2:197035576-197035962
  hypo

SEQ ID NO: 208376 - DNA, 38 bp, Homo sapiens
  chr2:197095851-197095889
  hypo
tagaccatacttttcccgattaaaatttcactttttga

SEQ ID NO: 208377 - DNA, 121 bp, Homo sapiens; identical to SEQ ID NO: 198631
  chr2:198257786-198257907
  hypo

SEQ ID NO: 208378 - DNA, 106 bp, Homo sapiens; identical to SEQ ID NO: 198632
  chr2:198262740-198262846
  hypo

SEQ ID NO: 208379 - DNA, 148 bp, Homo sapiens; identical to SEQ ID NO: 198633
  chr2:198265015-198265163
  hypo

SEQ ID NO: 208380 - DNA, 178 bp, Homo sapiens; identical to SEQ ID NO: 198634
  chr2:198265429-198265607
  hypo

SEQ ID NO: 208381 - DNA, 341 bp, Homo sapiens; identical to SEQ ID NO: 198635
  chr2:198266479-198266820
  hypo

SEQ ID NO: 208382 - DNA, 376 bp, Homo sapiens; identical to SEQ ID NO: 198636
  chr2:198267374-198267750
  hypo

SEQ ID NO: 208383 - DNA, 70 bp, Homo sapiens; identical to SEQ ID NO: 198637
  chr2:198268366-198268436
  hypo

SEQ ID NO: 208384 - DNA, 93 bp, Homo sapiens; identical to SEQ ID NO: 198638
  chr2:198269812-198269905
  hypo

SEQ ID NO: 208385 - DNA, 81 bp, Homo sapiens; identical to SEQ ID NO: 198639
  chr2:198272718-198272799
  hypo

SEQ ID NO: 208386 - DNA, 147 bp, Homo sapiens; identical to SEQ ID NO: 198640
  chr2:198273117-198273264
  hypo

SEQ ID NO: 208387 - DNA, 104 bp, Homo sapiens
  chr2:198276038-198276142
  hypo
acttatatactgcctcgtaagtattccacaggatgtgtaatgtactttatatatttgttttaaagttgggagctcttggccgggtgcggtggctcacacccgta

SEQ ID NO: 208388 - DNA, 165 bp, Homo sapiens; identical to SEQ ID NO: 198641
  chr2:198669112-198669277
  hypo

SEQ ID NO: 208389 - DNA, 644 bp, Homo sapiens; identical to SEQ ID NO: 198642
  chr2:200320725-200321369
  hypo

SEQ ID NO: 208390 - DNA, 59 bp, Homo sapiens; identical to SEQ ID NO: 198644
  chr2:200322611-200322670
  hypo

SEQ ID NO: 208391 - DNA, 1349 bp, Homo sapiens; identical to SEQ ID NO: 198655
  chr2:201171095-201172444
  hypo

SEQ ID NO: 208392 - DNA, 119 bp, Homo sapiens; identical to SEQ ID NO: 198656
  chr2:201172480-201172599
  hypo

SEQ ID NO: 208393 - DNA, 143 bp, Homo sapiens
  chr2:201218934-201219077
  hypo
tgttgatgttcctcgctctcatacaatgagatgactttaactttaccctgtgatcctagaagtggagccataggtcttggacagtgtagccagccctagtaaagaatcaagttcaggtcgggcgcgatggctcacacctgtaa

SEQ ID NO: 208394 - DNA, 323 bp, Homo sapiens
  chr2:201354840-201355163
  hypo
cccgttctcagtccgcactcccaaggcacgggcagcttcgccgggaagcggcttgagggagttggcctgcctcgtggccgtgggggagggcaggcaaggcgcggtggcgcacagcggagtcctcttcagctttatcacccgctggggtgtaggcttcttgtcggagagtagcaccttagctggaggtaagtgcgtgcctccattttcagcgctcgcagccccaggggaagcctgaggatgcccaggtgcccccgtgcccaccagggccgtggctctggaaggtgcagagcgctgagctgcctttctgcggctaccactttgaa

SEQ ID NO: 208395 - DNA, 320 bp, Homo sapiens
  chr2:201652446-201652766
  hypo
gaccaatggctagtttctaacggccttcaccttcttcctacgccgcaaaccctaatacagtctccatccacggactcccctcctttacagcactgcgtctctcacatccccacgtctcattttccctccctgcttcttttgcatttctagatgcccagactcagtgagaactggcagcattaaaagcgccacctgtttagttcagtatctggagcccttcctccctgctgaaggaggagaggcacgtgaacattttgcatgctgccagacgcctggtttacccactcctctcgggcagttcactcccaaacactagccgt

SEQ ID NO: 208396 - DNA, 82 bp, Homo sapiens
  chr2:201712542-201712624
  hypo
tacagcaatctcattcgcagagttttacaatgtgtacatatgggcaggtgcaaatgcatagagagagaaccagaaagtaatg

SEQ ID NO: 208397 - DNA, 240 bp, Homo sapiens
  chr2:202004689-202004929
  hypo
agcgcagtgaacccgtcctcgaccacgtagccggtgctgctgctgataggtagtccctcatgctgccgcgagaccccgcgacccgacataaacgctgcagctgctgcgacgcggaggcgcgccgctgccacgctgcagccaggcgccgggtgggctgggtgggctgggggcgggggctgcggcagcggcggggcgggccagggcgccctatactccattcttcatgatgtttggtcgaag

SEQ ID NO: 208398 - DNA, 726 bp, Homo sapiens; identical to SEQ ID NO: 198661
  chr2:202898961-202899687
  hypo

SEQ ID NO: 208399 - DNA, 34 bp, Homo sapiens; identical to SEQ ID NO: 198662
  chr2:202900077-202900111
  hypo

SEQ ID NO: 208400 - DNA, 34 bp, Homo sapiens
  chr2:203250365-203250399
  hypo
cgtgagccaccacgcctggcaaaaaaaaaaaaaa

SEQ ID NO: 208401 - DNA, 162 bp, Homo sapiens
  chr2:203431925-203432087
  hypo
tgaaacatggagatgcgtagctgtcatgctttttctgaatggacaggagaaacataagctacggagtattcacttctgaggatgcttttccggaaaaagaaaggctagaaaatactcgcacttcctcagaaccctctttcttgttaacgggtatcttttgtt

SEQ ID NO: 208402 - DNA, 209 bp, Homo sapiens
  chr2:203484399-203484608
  hypo
tgattggtatcaccataaagaagatgaaaacgaacgcgtgggcagtaacaataacattgtacatctgatcatctcctagtagagtttctggttggtctagtcctgcttgaattaggaagcttaaggcggtgcctattatctccgctcttgcgccgaatagcaggtatagtgttccggtgactttgtggttagttgaaaacaatcaacga

SEQ ID NO: 208403 - DNA, 33 bp, Homo sapiens
  chr2:203498545-203498578
  hypo
aaaaggccttccaccaccgcgcaaagggaccca

SEQ ID NO: 208404 - DNA, 45 bp, Homo sapiens
  chr2:204055398-204055443
  hypo
cttaagaatcaaattgctctcggctttcggctcggaggaggccaa

SEQ ID NO: 208405 - DNA, 195 bp, Homo sapiens; identical to SEQ ID NO: 198663
  chr2:204399768-204399963
  hypo

SEQ ID NO: 208406 - DNA, 34 bp, Homo sapiens
  chr2:205984487-205984521
  hypo
agggagaaactccgtcttcaaaataaataaataa

SEQ ID NO: 208407 - DNA, 44 bp, Homo sapiens
  chr2:206166494-206166538
  hypo
gtactcagaaaaaagcgcacgcttttcctcgtcttcagccaaat

SEQ ID NO: 208408 - DNA, 114 bp, Homo sapiens
  chr2:206605278-206605392
  hypo
ctgaacaagctccacgctccactgctgacaaggtttgttagaatccgccctcagacctggcactcaggtatcgccctccggctggagctcttcggctgccgggtcacaggtgag

SEQ ID NO: 208409 - DNA, 153 bp, Homo sapiens
  chr2:206826960-206827113
  hypo
tgcccctgctgctttcggagttgaacccagtctctctgactgcacgacctggttgcagtggtccctgtacctatcacgatggtgctgaatatagtcttccttaccatgccttaccaagtgtcattgaataatatttttctgtttttgagacag

SEQ ID NO: 208410 - DNA, 43 bp, Homo sapiens
  chr2:206830587-206830630
  hypo
ttgctctccagagagaaccccggggccttgcaagtctcggcag

SEQ ID NO: 208411 - DNA, 73 bp, Homo sapiens
  chr2:206830660-206830733
  hypo
ggtgagatggcaaacagatgcgcgcttccactgagagcgtgcatgtgtgtgcgtgtatgtgagtgcgtgcatg

SEQ ID NO: 208412 - DNA, 148 bp, Homo sapiens
  chr2:206890498-206890646
  hypo
gaggctgtagtgacccgtgattacgccactgaattccagcctgggcgacagactgagaccttgtctgaacgacaacaaaaagaatcagaatttgaactctatttccttaaagtaagataatgttttgaaatttttttttttggaaggc

SEQ ID NO: 208413 - DNA, 41 bp, Homo sapiens
  chr2:206971201-206971242
  hypo
aggatcttttttttttgagacggagtcttgctctgtcgccc

SEQ ID NO: 208414 - DNA, 41 bp, Homo sapiens
  chr2:206971482-206971523
  hypo
gcgtgagccaccacgcgcccggcctaagaggatctatttag

SEQ ID NO: 208415 - DNA, 43 bp, Homo sapiens
  chr2:207021944-207021987
  hypo
gattacagacgtgagtcaccgcgcctggcagacaaccaatttt

SEQ ID NO: 208416 - DNA, 71 bp, Homo sapiens; identical to SEQ ID NO: 198668
  chr2:207307392-207307463
  hypo

SEQ ID NO: 208417 - DNA, 239 bp, Homo sapiens; identical to SEQ ID NO: 198669
  chr2:207308960-207309199
  hypo

SEQ ID NO: 208418 - DNA, 47 bp, Homo sapiens
  chr2:208410314-208410361
  hypo
tgaaaatgctgtagtcgttactacgtagtaggcgcagaatatttgtt

SEQ ID NO: 208419 - DNA, 155 bp, Homo sapiens
  chr2:208580710-208580865
  hypo
agagatgctcctaagaacctagtaaacatttcagatagactcaaagtattttctactaccttgcctttatttaacggtatgtctaacataactgacggtagtatcagtaacacaaaataagatactaagatcttattgtccgattttattagtac

SEQ ID NO: 208420 - DNA, 137 bp, Homo sapiens
  chr2:208622063-208622200
  hypo
gcctgagcgacagcatgagactgtgtctcaaaaaaacaaaaactaactgatcactgtgtcttgataagttgccgactaggataaaagatctaacttaggaaaaaaatctatcatacgtcactttataagatggtttg

SEQ ID NO: 208421 - DNA, 146 bp, Homo sapiens
  chr2:208688671-208688817
  hypo
ctagacttaactgtcgaaacaccgttccacatgacagaaatcaacacttgtctgtttacattaaccgagcagagcttagtcacccatcactggattcgacctcgagcagacagctctacctgactcagggtcggaagagtgataca

SEQ ID NO: 208422 - DNA, 68 bp, Homo sapiens
  chr2:208692452-208692520
  hypo
tcggctctgcttacgtgattccccgcctccacaggaggaactgaggcgggagcgccacggacaccagg

SEQ ID NO: 208423 - DNA, 150 bp, Homo sapiens
  chr2:208994585-208994735
  hypo
aggatggctgctgcgttggcaagaacaacacaaaaggggccctcagcggtaaggggattttatgcatctctttaacatcctgcattcactggaaatgattgtagattgtgtccttgttctctggtatattctaacgctgtcctgtacata

SEQ ID NO: 208424 - DNA, 78 bp, Homo sapiens; identical to SEQ ID NO: 198673
  chr2:209108240-209108318
  hypo

SEQ ID NO: 208425 - DNA, 261 bp, Homo sapiens; identical to SEQ ID NO: 198674
  chr2:209113128-209113389
  hypo

SEQ ID NO: 208426 - DNA, 211 bp, Homo sapiens; identical to SEQ ID NO: 198675
  chr2:209118761-209118972
  hypo

SEQ ID NO: 208427 - DNA, 201 bp, Homo sapiens
  chr2:209224958-209225159
  hypo
acaggtaagaagagcgccccacttgttctcccgccttctgcgtgagcagcccctacggggtctcctactggtccctaggaactttcgccacacccggagcggcggcctccccgagcccctcggggccccttccctggcagctgggatgagggcagcgtgctcctcgcaggttacttggtcctgaggtcctccctcaggcgc

SEQ ID NO: 208428 - DNA, 450 bp, Homo sapiens
  chr2:209225393-209225843
  hypo
ggctgccttctgtggtgaaggtgggggccagggttgcaaggccctcctcttgttggcatcagccaggcacgcagtgctgtcgtggctgacccaggccgtgaggcacccgctgactgagaagccaacctgagcacccagccgcacctaccgctggcctcagacatcagcaccccaaagggtatgttggagtcccatggtggaggtgccggccgctcctccacgcacttgatgtataccgaggatcccatgcttgacgtcgcagggggcattagccaggagcacgttgctgggatgccagtccaggctgaggatggtggagccaatgggcttcttgatgtacttgcacacccaccagttattctcccgctggaaataacagatggcgatgacacacagctgccgcccacagcaaacttgtcctgtgggcccagcacacacagcaggcagtgg

SEQ ID NO: 208429 - DNA, 210 bp, Homo sapiens
  chr2:210673260-210673470
  hypo
aaaaaaagtaaggcgggcccaggctgctactgcgcgagcccagccaggcccggcccacttgctcagagcgtggccttagggggaggcacgcctccaattggcgcgaaagtgataaagaggcgtggccggaaaggtcccaccctgctcccctggagtacttaagggagttggcggagcggctgcactcattgctccaaggctcggcctagt

SEQ ID NO: 208430 - DNA, 41 bp, Homo sapiens
  chr2:211055940-211055981
  hypo
tggcttttttgatattaggcgatatatgggaagagaaatag

SEQ ID NO: 208431 - DNA, 37 bp, Homo sapiens
  chr2:216196377-216196414
  hypo
catgggggtgagccattgtacccggctcatttttgtt

SEQ ID NO: 208432 - DNA, 45 bp, Homo sapiens
  chr2:216852232-216852277
  hypo
gctgggattacaggcgttagccaccatacccggcaacataagcaa

SEQ ID NO: 208433 - DNA, 183 bp, Homo sapiens
  chr2:216885426-216885609
  hypo
ggtaataacagctagcgatgcactgtttcaagcatggtgtgtgtatccaaggaggaccgccatctagaatggacagaaaggaccccacaaggaatagtcctgttgggccaaagccccgcaaaacacactacaggagctctctgcaagaggaacgtcagactcccactgcgtcccttaaaaatt

SEQ ID NO: 208434 - DNA, 41 bp, Homo sapiens; identical to SEQ ID NO: 198684
  chr2:217008385-217008426
  hypo

SEQ ID NO: 208435 - DNA, 56 bp, Homo sapiens
  chr2:217472021-217472077
  hypo
agtgagatggattggcacagcgctacgccaggtgcgtgtggcctgtgctgctgggg

SEQ ID NO: 208436 - DNA, 200 bp, Homo sapiens
  chr2:217528754-217528954
  hypo
ggaccccgagtgtcatctcttctacaatgagcagcaggaggctcgcggggtgcacacccagcggatgcagtagaccgcagccagccggtgcctggcgcccctgccccccgcccctctccaaacaccggcagaaaacggagagtgcttgggtggtgggtgctggaggattttccagttctgacacacgtatttatatttgg

SEQ ID NO: 208437 - DNA, 47 bp, Homo sapiens; identical to SEQ ID NO: 198689
  chr2:217559556-217559603
  hypo

SEQ ID NO: 208438 - DNA, 221 bp, Homo sapiens
  chr2:217674466-217674687
  hypo
gaacagctatgtgccagggacggcactgtgcgcatgtaacacatctcaaccaatctgctcaacgaccagcaggcatcgtacgaccccgtgttgcagacgaagaaactgaggcgcaaggaggttcctcggcttgtatgcctgggtgtcatgtatgagccaggccgtctaggtgagtatggcaggcagctccctgtgcccccgtcacacagagggtgtgtgtg

SEQ ID NO: 208439 - DNA, 201 bp, Homo sapiens
  chr2:217690998-217691199
  hypo
atgtcccgtcactccgccttcaaatctcacctccttcctgccatcagctcgcacctgtgctgtgcacctgcctcacaagggctctccttgagcccactctcaccgctctccatctgttcctcactcagtcgtcagggtgagctctttatcctttccttcattcaaaatctcccaatggcttctcgtcgcattgggaataaa

SEQ ID NO: 208440 - DNA, 46 bp, Homo sapiens
  chr2:218676420-218676466
  hypo
ggtgcccacctgccacgctccagggctgatgcgcctccatgagaga

SEQ ID NO: 208441 - DNA, 134 bp, Homo sapiens
  chr2:218678421-218678555
  hypo
tgcatgatggttggaggtggcgaagacaccttcatggccagcccgtacgcgcctcggaaggagtgactgtcgcggatgatgaaggcccccggctcctggtccttgaggagcgcgatggctgcatggggaaggga

SEQ ID NO: 208442 - DNA, 861 bp, Homo sapiens
  chr2:218682482-218683343
  hypo
ggacatgccgctggcgacaggcgaagacaccttcccattgatggtggcatagttggggaggctgcctgcccggtctcccactgacatccttcgcttctctggcaaggctggtgttgggctcccttgccggaaggctgcggagtctggtgacggggaggtggcagggctgctcaggccagggtagtaggcaggggagacagggaaggagggcgtggaaggagcctggtagccagaggcactgctctgccgggacagtgtgggtctccgatcctccggggtagaatagccaccataggccacatgccggtccaagcaggggctgccgggaaccacagatccagaccctccgaggtgacggcccaggctggggcttccagggctggctattgcattgctatgaagaccggaggccaggttgccttggtgagccccagggtgccggcccaggctgggactccccggggtggtggccactttgttgtggaggccagaaacctggtagacccctgctgggtgccgacacaggctggggctccccggggtggtcgctgcactgctctgggggctggagacagtgctaccatggaagccagtgcctggtggacccatcatctggtgatggctcaaactgggactgctgggggcagccatgctgggattgatggcccgccagccgaagccaggactagggggagtgttggtgcccactgttctgtggcgcgcctgagggctcccaggcaccgtgtggacgccagccacactgaactgagctcgagcctggctttccggagaggagctgaaatgctgaagtgagtagtcggggctgctgtagctactgcccacagtcgggagaggagaaga

SEQ ID NO: 208443 - DNA, 154 bp, Homo sapiens
  chr2:218686229-218686383
  hypo
ggcggaattgaatgcggcctgggaattataggtcactgggctccccacaggattcagcgcgcaggacatgtgccctcaatgcaccttgatgaactggtttgcaaggtaccgccatctgggtatgctttctgcctgtccacgccataggcaacag

SEQ ID NO: 208444 - DNA, 192 bp, Homo sapiens
  chr2:218697937-218698129
  hypo
cggacgagaggaccagacagggcaggagctctctcttggttcctcccttgttcacctccagctcctgaattcctcgttcccccagttcctgggcaattgggcccttctgctgaggcagatgagtgggcgacgctaaagccaggcaagtcttttgcttcctgagagaaaaattccacacgtttctccaccttc

SEQ ID NO: 208445 - DNA, 108 bp, Homo sapiens
  chr2:218700732-218700840
  hypo
ctcacctctttgggccgccctccaggattgagagcgatggtaagagccagctccggggagacacactggacaggggagcgaaccccagggctacgaggggatgtggct

SEQ ID NO: 208446 - DNA, 308 bp, Homo sapiens
  chr2:218704293-218704601
  hypo
ctcacacgcacactcgcacaccctgcaattctgggagctgtagccctgacacagaccgatacatgtactttggcaaagcactgctgcccaccacccctggatcacgtgacgagtaccctggtgtcaggcttcatgatgtgcctcctctgcaccccccagactggccactgccaccctcacagacccagctcttctttccagtcttccgatttccaaaagactggattcctcaggtccaggtagcagggctgggtgtccgacagcatgcctggggctccagaagcgaggggatccgggaggccacctgc

SEQ ID NO: 208447 - DNA, 989 bp, Homo sapiens
  chr2:218712768-218713757
  hypo
gctcgcgggaactcagggagactggggatgggggtctctgccaatggctgagggctgggcctgctggctacaagactctccaagtgggctctttcctgctggcgtggaggtgggcgaggctgctgctgctgctgctgctgctgctgccacgaattcagtcccctttgcacagcctcccggctgcttccccctcggaccggagctgggggcagctggggttcagcttccgaaaaggattgagagcggaacataccgctggggtcatgggcatagtgggaggtggtcactggctgtggccaggctgggtggggcccctccctctggtagccagctaaaccctcctgtgcagagtaggagggccgcatgggggccgtgtggccagcatgggcaggccccgcccggctggcagactcgtaggggtagcctcctccattgaccataggctccatggggtaggacttgtccagaccgttggtcagtggggacagggcctctgggtagcccccctcactggtgttggtgaccccgtccagagaagagagtgtgcccatgctgcccgcactgtgaccatcctggtttggcaattcatcgtccaggatgtctgtctcccgctcagatgctaacgccccaccattgacatgaacctgggctgggacaacgtggcgtccagaggagggcacagccgagccccctgctgggcgggacctgaggtgctgggtgtggtacatggcgccttgcttctctcgctctaagccaaagccactcagcaggcggtccagctcccgcttctcctggggactcaaggcagcagtggcactggaggccccggggacaggctcgtcggtcttgtcggtcttggtggaggctgtggagttgcccgagtcgctgctcacagaaagcgtgtgttccacgtggttgggggtggccgacagtgtaggacgtgtggcattaacagccccggtgctgccgtgcagggagtctttcttctt

SEQ ID NO: 208448 - DNA, 202 bp, Homo sapiens
  chr2:218757381-218757583
  hypo
aaggaaaagtggctccgaggagctggccgcatgggttgctcaggacagggcctgcctcccaaggctgccccaccagaacccctgatagagaagtggactctcctccctcccgccctctgtccacaggctcctgcctcagagccaggggccccttcccccgtcctcatcgcttctcattccctctgtgcgtatcccctcactc

SEQ ID NO: 208449 - DNA, 200 bp, Homo sapiens
  chr2:218765458-218765658
  hypo
caaaaggaagaatcccgaatgctgaggagtgcaccccactgggctggtgccatccacactgagggcacactcaacagttactgaatcaatggaaacacacttcactttgatacactcgccaacacaagagaaaccccaggaggagaatacgactgccaccacaaaaggagcgatgagagtaatggcgcccctctgtcttg

SEQ ID NO: 208450 - DNA, 398 bp, Homo sapiens
  chr2:219209330-219209728
  hypo
ggcactcagccccaacgggaacccatccatgctgaccccaggcctgcgagcacctccccaaaactctgacctctttggcccatgggccctcaagtcagaactcctgaactccaggatggggcaggggtcgggtcaggcttctctgtcttgggtccatttcccagcttctctccaccaaacctggttcctctcacccacagtgcccatctaccctgggagaggagcgctcctacaacccgttcctgagaacccactgcctggcgctacaggaggctctggggccggggccgggccccactggggatgatgactactcccgggcccagctcctggaagagctccgccggctgaaggatatgcacaagagcaagtgatgcccccagcgcccccagcccagc

SEQ ID NO: 208451 - DNA, 31 bp, Homo sapiens; identical to SEQ ID NO: 198690
  chr2:219232859-219232890
  hypo

SEQ ID NO: 208452 - DNA, 348 bp, Homo sapiens
  chr2:219256000-219256348
  hypo
ttaccagggggtgagcgcgggtgggtggggagggcgtgacccagagaggctccccgcctcgggcagggccaccggtcctaccacactcgtccctgcagggcgtgatcctgggctgcctgttcggccccgcggccctctacatctgggccataggtctcctggcggctgggcagagctccaccatgacgggcacctacgcgggacagttcgtgatggaggtagggcagggggcgggcccaggagggcaaggggtccaaggacagcaggcacactactgggggctagaactccgagccttgtgggtcctcttttcttttctttcttttcttcctttttttttgtttttgt

SEQ ID NO: 208453 - DNA, 165 bp, Homo sapiens; identical to SEQ ID NO: 198691
  chr2:219263453-219263618
  hypo

SEQ ID NO: 208454 - DNA, 764 bp, Homo sapiens; identical to SEQ ID NO: 198692
  chr2:219263678-219264442
  hypo

SEQ ID NO: 208455 - DNA, 44 bp, Homo sapiens
  chr2:219267986-219268030
  hypo
atggggggccttccgggcccggctgtttcgagagtcctgcgtct

SEQ ID NO: 208456 - DNA, 115 bp, Homo sapiens
  chr2:219294067-219294182
  hypo
gtggtggacggagagaatgaattggcatccccgaagctgatggaggtgatgaaccacgtgctgggcaagcgcagggagctgaaggcggccgtgcccgacacggtggtggagccgg

SEQ ID NO: 208457 - DNA, 31 bp, Homo sapiens
  chr2:219577395-219577426
  hypo
caccgcgcccggccccaatgaactctttttc

SEQ ID NO: 208458 - DNA, 614 bp, Homo sapiens; identical to SEQ ID NO: 198696
  chr2:219757351-219757965
  hypo

SEQ ID NO: 208459 - DNA, 754 bp, Homo sapiens; identical to SEQ ID NO: 198701
  chr2:219845643-219846397
  hypo

SEQ ID NO: 208460 - DNA, 61 bp, Homo sapiens; identical to SEQ ID NO: 198703
  chr2:219857662-219857723
  hypo

SEQ ID NO: 208461 - DNA, 177 bp, Homo sapiens
  chr2:219892664-219892841
  hypo
cgtcgaagaagaactcggtcatgggggggatataagggtactgcggggccggcatgtcctccagatcctgcatggggaaagacaggtggatagggctcaactgccattcctcttgctgttgcccctcctgggtacactcctgtctagaaaggctacaccagtcgccctgactactaa

SEQ ID NO: 208462 - DNA, 41 bp, Homo sapiens
  chr2:220049820-220049861
  hypo
ttacaggtgtgagccacggcgcccagcctcatgagggtcta

SEQ ID NO: 208463 - DNA, 185 bp, Homo sapiens
  chr2:220150656-220150841
  hypo
cagcttgccgctgacgctctctcctgtcaccccgcccctgctctctccccagatgtgttctgagctggatgccgggttccagaatcgctgcacagttccaacaggacagcgccttcccccatgcgctgggaggggaccctccatttctccccctcacccatgctgagtgtagagccggggcctgg

SEQ ID NO: 208464 - DNA, 335 bp, Homo sapiens
  chr2:220150871-220151206
  hypo
agtagtcttagcctgtgcactctcttccttgggtgtttggtgctggctcctggggactacaaatcccagagtgcggtgtgcccggcctcatttctgatagatcccgcttgggggaggtggtgtatggttacggagctgtgcatcttgggacatgtagtagcccaggtcggcttgtcactcgctgtgagatggggagattttgtcttttgatttatccctgtagggctggcagggttgtagatgaagggggaatgatctgagccttggttcccctgacacgtcttgctagccccagggttagagtgggcagggcagagccgcgcagcacctgggag

SEQ ID NO: 208465 - DNA, 83 bp, Homo sapiens
  chr2:220371685-220371768
  hypo
ccctaataaaccccgtgaaccttggagccagcacagactgtacttatgtctgggctgggggtgggggcggaagcggggcagct

SEQ ID NO: 208466 - DNA, 111 bp, Homo sapiens; identical to SEQ ID NO: 198717
  chr2:220378982-220379093
  hypo

SEQ ID NO: 208467 - DNA, 199 bp, Homo sapiens; identical to SEQ ID NO: 198718
  chr2:220407985-220408184
  hypo

SEQ ID NO: 208468 - DNA, 56 bp, Homo sapiens; identical to SEQ ID NO: 198719
  chr2:220408723-220408779
  hypo

SEQ ID NO: 208469 - DNA, 86 bp, Homo sapiens
  chr2:220421317-220421403
  hypo
gacggccccattgcgcagccaggtgacatcggcatctggtggggagacttcacaccggaacgtggcatcatcgccctcgtggacag

SEQ ID NO: 208470 - DNA, 117 bp, Homo sapiens
  chr2:220422087-220422204
  hypo
cggctgtcctggggcgcatcgcacaggtactccccagcgtccccgctccgtgccccctgcacccgcagcacctgcctggccccggcctgctccagctgcacccgcccctggcttgcc

SEQ ID NO: 208471 - DNA, 401 bp, Homo sapiens
  chr2:220427079-220427480
  hypo
cagggctgtctctgtgaccccggggagctgggctgggcccacacctgtgacggtgacagtgaaggaggccgactcatcgtcaatttcacacaagtactcgccggagtcctcgagctggacagcgggcagcaccaggcggcggacagtgtcttccttctgcaggagcagcgcggggctctccaccacctcctctccatccttggtccagcgcacctctgcccagggccggcatagctcacaggtcagcaccacacgctccaggcgcacggctgccacatacaccttgccgctgggatacacgatccacgaggagacgtctggaggacagggacagccactgccgggcatgaggggtgtgccctgccgtcctccctgaccccgttgtgttccctacccctgga

SEQ ID NO: 208472 - DNA, 57 bp, Homo sapiens
  chr2:220431758-220431815
  hypo
tgatggtggagagatcgagggagaagacggcatcttccccgtcgtatacctgcacat

SEQ ID NO: 208473 - DNA, 337 bp, Homo sapiens
  chr2:220432724-220433061
  hypo
tctgagcacctgcctgcctccgcctcagcctcttccccacgggccagctgacctttgactgtgacgttggccacggtgcgcacccggccccgcatctcgcacaggtagataccatcatcgtctgccttcagcctgtggatgatgaggcgccggacagtgccctcttcgatctgctcgtacttgcggcagggcagcagccgctggtcctcacggaaccaggccgtggggatgcgggagttgggtactttacattccagcacggcaatcccgtgctcacggccctccacgtcctgcaggggccgtgtgaaccggaggcggggctctgtggagaggggag

SEQ ID NO: 208474 - DNA, 80 bp, Homo sapiens; identical to SEQ ID NO: 198721
  chr2:220435309-220435389
  hypo

SEQ ID NO: 208475 - DNA, 209 bp, Homo sapiens; identical to SEQ ID NO: 198723
  chr2:220492470-220492679
  hypo

SEQ ID NO: 208476 - DNA, 148 bp, Homo sapiens
  chr2:220499163-220499311
  hypo
gcctgcagcagccttcgtgcgtctgaatgaggctgtactcctggagtctgtgcttgaggtccctgtcccggtccgcttcctcttcgtgatgctggggcccagccacaccagcactgactatcacgagcttgggcgctccattgccacc

SEQ ID NO: 208477 - DNA, 406 bp, Homo sapiens; identical to SEQ ID NO: 198725
  chr2:222436961-222437367
  hypo

SEQ ID NO: 208478 - DNA, 827 bp, Homo sapiens; identical to SEQ ID NO: 198726
  chr2:222437421-222438248
  hypo

SEQ ID NO: 208479 - DNA, 143 bp, Homo sapiens
  chr2:223562591-223562734
  hypo
agaatctttttttttttccttcaggtcagatgggtaatgtgccgatgttgtaacaaggttcagagggtggcacatttcacatgtgcccgtgagcacccaatcttcacgctcatgaactacagaaggaccgaattatcagactc

SEQ ID NO: 208480 - DNA, 200 bp, Homo sapiens
  chr2:224640636-224640836
  hypo
agcagctccacgtaacgatgcacaatctctagcgtcaagagctcattgtcctgattttctattgcacagcaaaaatataaactagcataccttgaaatgaaaaataacaaaagcaaaatatgacaatacattaagcaacctggagacagtttttcccacgaatatgcagtcacctcctcccccgccgagcctctcctcat

SEQ ID NO: 208481 - DNA, 341 bp, Homo sapiens; identical to SEQ ID NO: 198738
  chr2:224808957-224809298
  hypo

SEQ ID NO: 208482 - DNA, 207 bp, Homo sapiens; identical to SEQ ID NO: 198739
  chr2:224904434-224904641
  hypo

SEQ ID NO: 208483 - DNA, 39 bp, Homo sapiens
  chr2:225390998-225391037
  hypo
atcaagatgtgatgtatttccgggctgggcgctgtggct

SEQ ID NO: 208484 - DNA, 48 bp, Homo sapiens
  chr2:225692101-225692149
  hypo
cactgaaaggggtcacggaaagcaaacctcaatcggggaagataaact

SEQ ID NO: 208485 - DNA, 236 bp, Homo sapiens; identical to SEQ ID NO: 198740
  chr2:225906168-225906404
  hypo

SEQ ID NO: 208486 - DNA, 333 bp, Homo sapiens
  chr2:227841931-227842264
  hypo
ttgtgtctccccttcggcaagctccccctccctttagttttgcatttaacacagtcttgccttcatgactgccgcctcctttttttctgtaaacacaaatatgaagtgtatttgctttgcttttcagccttgtctgccccactgagtgtccgaaatagccggctggaattcatgagaatgttacgtcttcagatgtttataatccaaaagaatcccttatggtttttaataataaaacaacttagatgtcggtattttgtgttggaaaggcgagcaaagttcacaatgcagcaattacaatgcagtgcattatgtataatttgtagcctgccc

SEQ ID NO: 208487 - DNA, 90 bp, Homo sapiens
  chr2:228185366-228185456
  hypo
gctgtgtgcagtgctcgcaggccagcacgcgttccgtgtgggtgcgggcttggcaggccccacgctcaaagtggccggccagcaccgctg

SEQ ID NO: 208488 - DNA, 75 bp, Homo sapiens
  chr2:228212000-228212075
  hypo
gagctaatctttcctctgctcgtggcattttgtcgcttatccagtcttctactcgtagggcataccagcagatct

SEQ ID NO: 208489 - DNA, 213 bp, Homo sapiens
  chr2:228632609-228632822
  hypo
cattccgccccccaggagacaaccagctgtgtctcggacagttttgctggtcacagcaagcggccggggtggcggtgctagaggacgctgctaaacccccttggtgcacagggcaggccccatgggacgggaatcctgggctcggggcgcggctgcctgggtcccctctggcggcgccagctccaggaggcaggaaacgaggaggccctggct

SEQ ID NO: 208490 - DNA, 37 bp, Homo sapiens
  chr2:228638407-228638444
  hypo
gtgagccaccacgcccggcctaagtgttaagattatg

SEQ ID NO: 208491 - DNA, 120 bp, Homo sapiens
  chr2:230743170-230743290
  hypo
aaaagaaaacaaaacaaaaagaaatcacacgcaaagctgccctagtccaaagtccctatgcttaaccactaaatagtctgacatcaccatgatgtgcttttattctttacatttgacatt

SEQ ID NO: 208492 - DNA, 240 bp, Homo sapiens
  chr2:231530696-231530936
  hypo
tccagttcaaacgcaggttgagaatgaggtttgcagagccagcgggcagtgagtgctgaccgagaagacccatggcggcccactgcagtgggggcggcggcagtgtgaccttgttgaaactagccgctccagtgacccaaggctgggggagatttggctctgctactttccagcactgtgagcttgggagccttacctgctccgagcttcagtttccttacttgtataatggggattaaa

SEQ ID NO: 208493 - DNA, 160 bp, Homo sapiens
  chr2:231676879-231677039
  hypo
gctgctcaaaagaaacgtagcctttcctagcactgggacctgaaaccggtttctctccttggcgttcttaaaggagagtcaagttacagtatcatgtagtggacagtcattgccgtggcattgcagtaaataaaatgctcaactccgatgcagttccctg

SEQ ID NO: 208494 - DNA, 237 bp, Homo sapiens; identical to SEQ ID NO: 198744
  chr2:231692871-231693108
  hypo

SEQ ID NO: 208495 - DNA, 31 bp, Homo sapiens
  chr2:231744875-231744906
  hypo
ggagtttcgctcttgtcgcccaggctccgat

SEQ ID NO: 208496 - DNA, 458 bp, Homo sapiens; identical to SEQ ID NO: 198745
  chr2:231902081-231902539
  hypo

SEQ ID NO: 208497 - DNA, 140 bp, Homo sapiens
  chr2:232113118-232113258
  hypo
tcaggtgtcttacaggcatccgatcatattactatcttgctcaacaccgttatcaccttagggtgaagtggttttcatctcttttaacgtgcaagtgccccttctcgttaaaaagctggcagggccggacgtggtggctt

SEQ ID NO: 208498 - DNA, 125 bp, Homo sapiens
  chr2:232247495-232247620
  hypo
ttcctgccagccacccgctcgtatacccagggctcccgttaaccttccagccctgactcctgcgggatgacagcccaagaagaagagggcacaggggttccacccagcgacgagagggtctaagc

SEQ ID NO: 208499 - DNA, 78 bp, Homo sapiens
  chr2:232458617-232458695
  hypo
acctgctgcacagctcggggcccagcttgcgctcggtccccagcctggtgggaagcgtcagctcggccttctcctctg

SEQ ID NO: 208500 - DNA, 164 bp, Homo sapiens; identical to SEQ ID NO: 198750
  chr2:232479526-232479690
  hypo

SEQ ID NO: 208501 - DNA, 112 bp, Homo sapiens
  chr2:233198441-233198553
  hypo
gtctgtccacacatcgctgccgacggtgaggctgtgggtggtgccagccttccaggcctggctgggcagctctgggcttgtcaggctctgacccatcccgtcccgcagatgg

SEQ ID NO: 208502 - DNA, 143 bp, Homo sapiens
  chr2:233198583-233198726
  hypo
acccagcgcagttccggcactacgcgctcaatgtgcccctgtacacacacttcacctcgcccatccgccgctttgccgacgtcctggtgcaccgcctcctggctgccgcgttaggtgaggggtgcagtcggggtcagggcaga

SEQ ID NO: 208503 - DNA, 168 bp, Homo sapiens; identical to SEQ ID NO: 198753
  chr2:233283897-233284065
  hypo

SEQ ID NO: 208504 - DNA, 220 bp, Homo sapiens; identical to SEQ ID NO: 198754
  chr2:233284832-233285052
  hypo

SEQ ID NO: 208505 - DNA, 124 bp, Homo sapiens; identical to SEQ ID NO: 198755
  chr2:233285131-233285255
  hypo

SEQ ID NO: 208506 - DNA, 45 bp, Homo sapiens
  chr2:233355393-233355438
  hypo
ggggtggaggaaggccggagccgccgtggccgccacagccgccac

SEQ ID NO: 208507 - DNA, 209 bp, Homo sapiens; identical to SEQ ID NO: 198758
  chr2:233497971-233498180
  hypo

SEQ ID NO: 208508 - DNA, 48 bp, Homo sapiens
  chr2:233714270-233714318
  hypo
gaagcccagtaagcacgtgcacccatgggcgcacgcatacacacatgc

SEQ ID NO: 208509 - DNA, 192 bp, Homo sapiens
  chr2:233764817-233765009
  hypo
tcactcatatacacgttcactcacattctcacacacacacgctcacagtcactcatatacacgttcactcacattcacacacacgctctcacagtcactcatatacacgttcactcacattcacacacacacgctctcagtcactcatatacacgttcactcacattcacacacacacgctctcagtcactc

SEQ ID NO: 208510 - DNA, 143 bp, Homo sapiens
  chr2:233945670-233945813
  hypo
cagaaccactccctgcgtagttaggctggcattgctgccggctgcctcatcctcctgcccctgagtccactgcagcctctaaggcacatctgctgaaggctttccactggcctagggcgcccgcaggtttggcctggttctta

SEQ ID NO: 208511 - DNA, 192 bp, Homo sapiens
  chr2:234093875-234094067
  hypo
gaaatcaggaagaagcgtgtgctgccagttctgcccctctggtccctgcctccttctccaactgaggtgggcccaggcctggtgctagagcggcctttgtcactgagtccccaagctccagttcacccagcagggtcaaagcggttcgaaaaatgatgaggatttttgtgcgggtgtttttaataaactatc

SEQ ID NO: 208512 - DNA, 43 bp, Homo sapiens
  chr2:234206550-234206593
  hypo
gattgtaccccatttcgcaaatggggaaatgtttaacagctca

SEQ ID NO: 208513 - DNA, 205 bp, Homo sapiens
  chr2:234206623-234206828
  hypo
ggcccatctgcttcagcactgcctgccacaccaggcccacagggacaggcgtgacactaaggtgtgccttcaaaagtgaatgggctgtactcctccgcatggctttttctctcgtgtcctgctttaataagtcctgcttacgttagaaattcctatttttcatctaaaaaactttggaaatcccggcactttgggaggctgaggc

SEQ ID NO: 208514 - DNA, 91 bp, Homo sapiens
  chr2:234355709-234355800
  hypo
tttccaccctgtccgtgcatctcctcagctgcgcagtgagccccaaacggtgcgcgcccgttccctcccccgccgcggtgcccacgtgcct

SEQ ID NO: 208515 - DNA, 639 bp, Homo sapiens
  chr2:234372716-234373355
  hypo
cagagccctggagcggacctcacccccctgggcctcgcgctgatcagcagtgcacactctccatttctctctccctccctccgcctggagcagcagctggatccgcctcagaaggagcagctggggagtgctcttgccgagatggaccgacagctcaggaggctggcagacaccccgtggctctgccagtccgcagagcccggcgacgaagaggtatgtggctcatagggctgtgcctgggtctcccggacatggtggctctcgcctgaagtgcctgtgttccttgtgacccgtgtggctctgggatcaagatcgtgtcgctccggcagcccctgaggggccttctccagacttcgctattaaaatgctctttaaggcagggagggacagcaggtaggaaggagttctgggctgggattaagagtgccccttgaggaccagggacctgttgtcctctgaaacagaactgcagggcttcctggacagtgggtagaaggaaggctgagcccagccccacagcctcccccgagggtggagatgtatcatgggataaatggcagccttttgggatcccgctgtggacagggcgcagttggtgtgcgccactccccactcacactctcttcctgtgtgaacaga

SEQ ID NO: 208516 - DNA, 206 bp, Homo sapiens
  chr2:234373385-234373591
  hypo
gacccgaggacgcagggcatagcggaccctggggtggagtcacattcttctgcagggagtgctggctgaaggagccctggagagggccgtgtctggacaaggacaaaccccagcctgtctcttggcttccctgcttcagagatagaacacagaggggccctgaggaaagctcatcttgggcagtacagttgcagaaggcaaataac

SEQ ID NO: 208517 - DNA, 89 bp, Homo sapiens
  chr2:235460414-235460503
  hypo
atatttctataacaaataagaaaaaatggaattataacaacactgttggtttatagcatcgaatgaacaaaaatcggggtataaaggag

SEQ ID NO: 208518 - DNA, 37 bp, Homo sapiens
  chr2:235815939-235815976
  hypo
ctttcgggttgggtgcggtggctcatgcctgtaatcc

SEQ ID NO: 208519 - DNA, 592 bp, Homo sapiens; identical to SEQ ID NO: 198764
  chr2:235860154-235860746
  hypo

SEQ ID NO: 208520 - DNA, 207 bp, Homo sapiens
  chr2:235894218-235894425
  hypo
gcattttgactctccgcgcacaggtatttttgaccctctgcgcacagatatttttgaccctctgcgcacaggtgttttgactgtctgtttgtagcatcctcccttgatgtatgttcgggtgaagcagccctcgatgcacacctatgagctcagggactgtgcgcaggtgaaccagcctgtgacacacgcctacgagctcaaggagca

SEQ ID NO: 208521 - DNA, 164 bp, Homo sapiens
  chr2:235922810-235922974
  hypo
agaggtgtaattacccgttgcctgccgacatcagcctgatccttcaggaatgtttggcgagcaggatcgggcgatgccggatactttgggctcttaggaaagtccactcagcgagcgtggaggctggccgagttttgtggtggaggcctcgtccctctttttgg

SEQ ID NO: 208522 - DNA, 63 bp, Homo sapiens
  chr2:235931227-235931290
  hypo
ttgaaatgttgaaagcgggtgaatcgagacattgacggcccatcccctcgttgtcagataagc

SEQ ID NO: 208523 - DNA, 276 bp, Homo sapiens
  chr2:235941089-235941365
  hypo
cccgcatttttgtatgggaaggatttttactcctcactcagcctattgaagtcaggctgctctggaggtggccatcactggggtctccacagtggcctccaagcagcccgggggcttgcacacgtggcccttgcatttcggggctgccgggctgcctggctgtggtagggtggtctctcacgtggcggcaagaccccttcatccagctctacacgcaggctgtgcattcagagctacttggtcactgcttctggtagggggcgagggtgctgtgcc

SEQ ID NO: 208524 - DNA, 199 bp, Homo sapiens
  chr2:236024875-236025074
  hypo
cagtccccttccacccgcacacccccacctgatgctgctgtcatcgtgcctcatctggccacatctctcatctttggctctgcactcaaggtcatccataatgcgaagccacctctccagccatgccttagctcccacttttcctgaaagtgaagctctgcctctctcaccccgtggtccttcccgatgctcccatcct

SEQ ID NO: 208525 - DNA, 297 bp, Homo sapiens; identical to SEQ ID NO: 198767
  chr2:236402404-236402701
  hypo

SEQ ID NO: 208526 - DNA, 137 bp, Homo sapiens
  chr2:236415971-236416108
  hypo
aagagtctggatggtgatggcgggggagcgctggtggaggagtcgggggcgtcccgctggactggggcacagctctgcagcagcagccggtgcggttttgccttgtaagtgacaccgttgcctgcaggcatctctga

SEQ ID NO: 208527 - DNA, 106 bp, Homo sapiens
  chr2:236456629-236456735
  hypo
agaatgcaggtatagcggtgacagctacaatatttgttagccaagctgcggacagagggttggcctcaggctgctgtttctgccccagggtcgtgagaaatagctg

SEQ ID NO: 208528 - DNA, 201 bp, Homo sapiens
  chr2:236459169-236459370
  hypo
cccaccccacacctgcgactccagactcagagttgatgagggtctgcaggcgtcggtctgggagccacagacaggtgtgtttgccgcagaggtgccgagggcccagcaggactgtagcacaggatcagcaccatccacacctgaggcgtggggatctccgggcatgatgcggaatgtagtgacgatcgcaaatccttcctg

SEQ ID NO: 208529 - DNA, 322 bp, Homo sapiens
  chr2:236541634-236541956
  hypo
tccaaaccagaagcccgtggtgcagcctctgaacccccgactcttggtgggcttttgagttctgcttttgcttgaacttctagcggcagaaagggggtgatccctttcttctccatcataagggtcatggcccacatccctgtaacaaaagacaggttaacgagagaaaagcattatacatttacttgatcctggttttacggcatgcgggagcctacggaatgaagacccgaagattcaggggaggtcgtctgtgtgccttggttccatgacttgggggcagccaagtagaagtggaattggacaaatagggcatgagcgg

SEQ ID NO: 208530 - DNA, 94 bp, Homo sapiens
  chr2:236553452-236553546
  hypo
atggtgtgtcagcttcgctgtctttcaaggatgacttgcgtagattgcatttaagtatagtggagcaacagcaatcaaggtgtaagactttttt

SEQ ID NO: 208531 - DNA, 75 bp, Homo sapiens
  chr2:236602265-236602340
  hypo
gcggcgggaggatcacgagctcaggagttcgagtgcagcctgggcaacatagtgaggcctcgtctccaaaaaacc

SEQ ID NO: 208532 - DNA, 197 bp, Homo sapiens
  chr2:236603369-236603566
  hypo
ctcctgggcacctttcggggcaagtcctgctgtcactgcacagctcaccttgtatatgtggggtgctcttctcctctcctgaggagttatgggtgattaggaagcaaacgcgtctcagacttggagatcaaatgaagagaggctgtgtaagcaccaggatgcatggggggttccggcttcttcgcagtttcacctgg

SEQ ID NO: 208533 - DNA, 146 bp, Homo sapiens
  chr2:236613260-236613406
  hypo
gcctggcaacagagcgagactccgtctcaaaaaagaaatgccgatttgaaggttctgatttccagagtcccggctgatgctcacctgttgctggctttgctaagcgtcccaggttagtctagggcgagcaggctctgagcaacaca

SEQ ID NO: 208534 - DNA, 109 bp, Homo sapiens
  chr2:236616175-236616284
  hypo
tgggttgtgctcccccggcgtgtgacctggtgggacgtgctccccagcgtgtgacatggtgggttgtgctcccccggcgtgtgacttggtgggacgtgctccccagcat

SEQ ID NO: 208535 - DNA, 174 bp, Homo sapiens
  chr2:236617715-236617889
  hypo
gcaccatcttcagtgaccttcggatgtgaaaatggcccattggaggcattttgacttggcctttacgtgagttatggtgtctgactttgtgtcctcctctttttcagatgccttcgtgaacagccaggaatggacgctgagtcgatctgtcccggagctcaaagtggtgagtgg

SEQ ID NO: 208536 - DNA, 192 bp, Homo sapiens
  chr2:236618370-236618562
  hypo
attaaaatttttgtcttttacgaaccttaccctttcggtgaaattatgtagagcttcaaattggcacgtgtaaaaagtggtccatcgcagccaccctttccagccgctcccctctaccgtaggatggaaggaaggggcaagtctaactttgaaacaaccaggttctttgtcgtgaaatatgtggcatttgtg

SEQ ID NO: 208537 - DNA, 187 bp, Homo sapiens
  chr2:236619770-236619957
  hypo
tgcactgcccagtgccgtcacggctggcgccatgtggctgttgagtgattgaaacgtggccagtcagtgccatcaaggagctgcattttaagtttgattctagttcatttaaattgaaatagccacacagggccagcggccaccctactgccagcattacagactaactgatcgtcaagtattgaac

SEQ ID NO: 208538 - DNA, 188 bp, Homo sapiens
  chr2:236624442-236624630
  hypo
gtgcccaggagggagcggactccctgacttccagccactgggagtcggggatggcctccagctttctggcttgagaggctgggtgtgatgtggcctcagaagctgatgaggagactgggagagagaggcaaggtgtggacccatcgaggcgtgaataccgcataggtggcgtacggatgtatataaag

SEQ ID NO: 208539 - DNA, 192 bp, Homo sapiens
  chr2:236637398-236637590
  hypo
acattgaaatgaaagcgtgcctagtggagcaagagcggggcggggaggaggggaagccagcctgcagcattgccctctagacactaagaagaagggagtaggtttaggttggatgaagaagggaggtttggagcctggacgagagcaggggttgtggaggaatggtcaaaacccaggcgtgatgtgaccaca

SEQ ID NO: 208540 - DNA, 192 bp, Homo sapiens
  chr2:236647745-236647937
  hypo
caacttattactcctcgcctgctaggacatcatcccctttgcatctggggacactgagatggggcgaggtggggcaagactacacagctgtatgtggcagagccagggttcaggcagagctaggccagtatcggggtctgggggcgaccgtctgcagcaccgtcacatacgtggggacgtccacctgtgtca

SEQ ID NO: 208541 - DNA, 327 bp, Homo sapiens
  chr2:236648717-236649044
  hypo
ggtctcagagcccaggatctggagggggacgtctgtcattggagaaggcagaggagccagggtggaatccttcccgctgcccagcaggagcagggctggcctagcgggccgggctgggcactgcagcaaccttgtaccatcccctcctgagagcatcaggggccgggacgtccaaggtagcaccaggcccctcatgcccgcaccccctcctcatggtcacctctgttcctgcagggtcccggtggtctcccgctaaccccgcgtggtctctaacgcctcctgtcagccgctgctctgctgtctccacccgtgcggaggtcccatcca

SEQ ID NO: 208542 - DNA, 274 bp, Homo sapiens
  chr2:236660557-236660831
  hypo
tcctgctgcctctgtcgggagaatgtcctgtggggagtaaacctcatttcaagccgtgctggtgaacatgagtgagatgttagtgagacttggaagaactgtgcagggaggcccttagagctcttctgagaggtgcaccctaatggagcaaggtcactgtcggccgctgcgctgccgaggcccctgtgaatgttgaagtaaagcgtcgtagatgaagggtccccaggcccgtgcatgaggccagctgcctgttttcataaatagacttttcttc

SEQ ID NO: 208543 - DNA, 80 bp, Homo sapiens
  chr2:236669006-236669086
  hypo
agcgagactccgtctcaaaaaacaaaaccaaaaacaaaataaatacaaatgtgtaagatagaattcgttatgaagctaca

SEQ ID NO: 208544 - DNA, 201 bp, Homo sapiens
  chr2:236672625-236672826
  hypo
atctgtgtgtggctgtgatccgtgcgtggctgtgacccgtgcgtggctttggcccgtgcgtggctccggcccgtgtgtggcggttgcccatgtgtggctgtgacatgtggaggcgaacttccacggcagaagtgccatgcttccgtaagctcttccgactggttggtaggcgcttttatcggcacatgagcaccttacaga

SEQ ID NO: 208545 - DNA, 360 bp, Homo sapiens
  chr2:236674059-236674419
  hypo
agtgggaacatgtgcctgcactttttagtcgaacatgtaaattaatcagcagcagtccagcctaaaaagagaagctgaacactgttcgtttgggggctcatcggctcactgccgcgtggtcagtcctggtgccgtgagcacagccaaccggactgtaccacatgttcccttctccctgggctgagcaatcgcttccccgctaaatgttcggcagcactttgccttgtacgtgtctacgtctgcaggaggggctgtgactcatccccagccaactgtattccaagcacagccatagttcagagtgaatctttatggtctgtgaattctggagtttcagaaaactctctcattcaacgttgt

SEQ ID NO: 208546 - DNA, 210 bp, Homo sapiens
  chr2:236675951-236676161
  hypo
tggccaggcacctcacgttagcgtctgcagccttgaatcgggaggcaggttgggcgcaggcttctcgtgcgcaccagcgagcacccgggccaagcgtggaggctctgcgggctgggggtccggcccacaccatcagcctctgtgcagccgttgctttttccgttgaccaaagccatgaccttacctttatgcagtcgtgttcagagagag

SEQ ID NO: 208547 - DNA, 399 bp, Homo sapiens
  chr2:236685967-236686366
  hypo
tgggtgacagagcgagactctgtctcaaaaaaaaagacaaaagtgatttcctgagctgctccgagctggagacagaaccagcagacatgggacagaagaagaattacaggtgtgaagcgcccgtgtggggctgattcccacctgcctcctcgttatcagcaggcagccttgcgtctgcctctgggagcagaaaccgttgtttcaccagcaaattacgctggctgtactcgccatgtcctgttgccatagaggacgagtcacagctgtctcacctgcacccctccaatcgccttctcagaatccgacgctggtcctaagtgccttcagctgtcacctgagcacgttcaagcctcctgcccagcaccttcctagagcaccgccattggcataaggactagg

SEQ ID NO: 208548 - DNA, 162 bp, Homo sapiens
  chr2:236722553-236722715
  hypo
taccctggagtcgggccactcagtggccggactctcctcctaccgcccccgggtgaattccacgtcacccacatcgttctgccattggtggcctgccagagtctgttggtgtgttcttctgccggtgtgcttctctcgacgcccagccgcctgtgtgtgtgc

SEQ ID NO: 208549 - DNA, 59 bp, Homo sapiens
  chr2:236727033-236727092
  hypo
gttgcatccccttcccgccccatgccatctgtgctcaccatgaccgtcttttttttgtt

SEQ ID NO: 208550 - DNA, 98 bp, Homo sapiens
  chr2:236733470-236733568
  hypo
acccatcaaggtaaccggtgcattcacgggtttggataatttcaggaaaaggaaagcatgtttttatgtctcacgtttacaggcgcttttctgatttt

SEQ ID NO: 208551 - DNA, 188 bp, Homo sapiens
  chr2:236738719-236738907
  hypo
gctggctgatggagtcgttctcatttgtgaagacactgtccagggctaaggcagtacttgccaaggcaaggccaccgtgatccgagactgggaggcccagaaaagatgcagacaaggtaggagtcggctctgtgtgacttccccatgacaccagtgggccaggctacagtcaccgtttgagtgcccgt

SEQ ID NO: 208552 - DNA, 192 bp, Homo sapiens
  chr2:236739767-236739959
  hypo
ttagggaatcacattcgagactttaactagattggtccagagtgcttcactcttcttctttaaaaaaaaaaaaaaaaaacagtaaacgttcttttttagagcagttttaggtcacggcaaagttgagcagaaggacacccacagcctccgccattgtcccccacagtctgttgcagccgatgagcctgcact

SEQ ID NO: 208553 - DNA, 188 bp, Homo sapiens
  chr2:236741689-236741877
  hypo
agacctggagggggccggtgagccagggagcatggtagaagagacaagccggagagcagctggctctggaggggcactggcaggacccgagggtgcaggcagcaagcaggctgttgggtgctgcaggcgctctccattggagcagtgctgtggaagcaccgtcggcctgccgccgtgctgagtgatgc

SEQ ID NO: 208554 - DNA, 229 bp, Homo sapiens
  chr2:236750708-236750937
  hypo
tggaggagggcctctcgttggaagcccaggctcactccatggctgcccctctccccagcctgctggcgttgggcttcctccgctcctggtttcttagttctggagcacagactccgtgctctggagcaagagttcttcactgtggttctgtagatagaattcaggggtccgcgaatgtggctggggggaaattcattcgtatttccactgacttcgactgaaagttaac

SEQ ID NO: 208555 - DNA, 37 bp, Homo sapiens
  chr2:236751637-236751674
  hypo
tggagttacaggcgttagctgccgtgcccggcccgtg

SEQ ID NO: 208556 - DNA, 204 bp, Homo sapiens
  chr2:236759900-236760104
  hypo
cctggcgctcctgctgctcggtcggagctgggagggaaacgtggctccactacagacatggggtttgggctgggaggccatggaatggtgaagatgctaagcaaggccatctcctgggaagggcagaagcagcttggccccaggtgtccgcatgtcaccccctttccctaaacttcacccgtccaccaacgcaccatgtgccgc

SEQ ID NO: 208557 - DNA, 157 bp, Homo sapiens
  chr2:236760926-236761083
  hypo
agaagggcccgggcgtgcataatgcctattgtctgcgtctgcgtttgctttttaatgccagcgcccagcgagggagcagggccctcctagcgtgcgcggagggggcttggggtggaaaggggggggaaccccgaaacaggccgccttttgacaggcg

SEQ ID NO: 208558 - DNA, 240 bp, Homo sapiens
  chr2:236765520-236765760
  hypo
gtctgagagcacgcttggttcccacgctgcggtccggttggacgtggtagatgtgagaccagtgcctgaaagaatgccgctgtagggaaacatgaagacacacacactcagccacactgtatttaatgggccgggatttgtgtaagtgatctccatggagacgcaggtggtgagcctgagatgctacactttagagcaggagtcatccactcccagatggcagcctggtaccagtctgtg

SEQ ID NO: 208559 - DNA, 166 bp, Homo sapiens
  chr2:236796532-236796698
  hypo
tgcagttgtattaaacgtggaagattcagacagagatgagatagggccgtgcggcagcccatcaccggcagcgcttgctcgtggtggtgaggcctctcccttccggcacagacatttatcttctgtccacgtgtgtgccgctcacagtccacgtaaggctgcgccc

SEQ ID NO: 208560 - DNA, 263 bp, Homo sapiens
  chr2:236801867-236802130
  hypo
caccatgtctgtagcgcgggtgtgccatgtccatcataaggaagcgccgtgtctgtagcgtgggtgtagcgtgtctgtggcgcaggtgtgccgtgtctgtggcatgggtgtggcttgtctgtggtgtgggtgtgccgtgtccatcataggggtgtgctgtgtctgtggcgtgggtgtagcgtgtctttggtgtgggtgtgccgtgtccatcataaggaagagctgtgtctgtggtgcgggtgcaccatgtccatcataagggt

SEQ ID NO: 208561 - DNA, 565 bp, Homo sapiens
  chr2:236839044-236839609
  hypo
atcttgccggcctgccggatcgcggtgtctctgctaagactcgctgggtcttttgtcttcacttccactcgatgttgcggttgcggttgggttgcgtctttgtatagggttgttcggtgcgagccatctgtggcatcgggtcccttcacattgctttgtcaggcaccatcaagattggcgtcccccttttattcctcccgaatagtttctgtctggcgcttccgtttgccatgcaggcaggacaggggctgctctcggtggtaaggtgcactatgtgccagcgtgtgggtcccatagactaactcgcgctggtttctgtggtctgcagtccgcggtggtgttcacctgacttgtttattcctagggaatgtcactagtgcatctgggtctcagatggcaagcggcatcagcctggtctccttcaacagccgacccgacggcatgcaccagcgctcctactcagtctccagtgccgaccagtggagtgaggctacggtcattgcaaactcggccatcagcagtggtaagagggggctcagccccacggacccgcagccacctcaag

SEQ ID NO: 208562 - DNA, 37 bp, Homo sapiens
  chr2:236842447-236842484
  hypo
tacaggcatgagccaccgcgcccggcctttctaagga

SEQ ID NO: 208563 - DNA, 123 bp, Homo sapiens
  chr2:236847371-236847494
  hypo
ttttgagaaagacatcggcacactgggaagcacatgaagcggagggccgagatggggagaggggcctgaaacccacaacacctagcgtggctgaaaacctgggagggccggaggaccctctca

SEQ ID NO: 208564 - DNA, 35 bp, Homo sapiens
  chr2:236853751-236853786
  hypo
tttgtttttttgagacggagtctcgctcttttgcc

SEQ ID NO: 208565 - DNA, 35 bp, Homo sapiens
  chr2:236854026-236854061
  hypo
agaagcatggttaacgcgtgcgctagcagaaaagt

SEQ ID NO: 208566 - DNA, 208 bp, Homo sapiens
  chr2:236857148-236857356
  hypo
agttattttaaaatacgaatttcataacgagaacacaaattgagaggtgaacatttgagaatttccatggccgctttggcagtagggatgtttagtttgaaactttaatttaaaaagtgagtgcagtgagtctgtctttgtagcgctagagatgggtcctcagctggccatgatagagaaggatgggcagaggcgggtgtttgagact

SEQ ID NO: 208567 - DNA, 40 bp, Homo sapiens
  chr2:236863816-236863856
  hypo
ggctggagctgccttcgagtctgtgcggttccagttcatg

SEQ ID NO: 208568 - DNA, 148 bp, Homo sapiens
  chr2:236870133-236870281
  hypo
tggagtgaggccagccgtggacagcagtgcagagggacaggccctagggagttgtgctttaaagaagggcaggagtcaaatgtccagggtggaggtgtgcggccaagggagagttgtgttaaaaatgtgagatgacagggccgggcgt

SEQ ID NO: 208569 - DNA, 197 bp, Homo sapiens
  chr2:236872390-236872587
  hypo
agtatatgctcagaacggtcaagcataactaaggcgatagtgaagagtaacaacacataggcttagaacacagagacatagagtggtggcctggaatagagagcctagcggtagacctaccacgcccctgtggaagcctgtcgtgtggacggcatagctaatgtgtgtgttctgagtgtcttcgaaatagcggtgta

SEQ ID NO: 208570 - DNA, 47 bp, Homo sapiens
  chr2:236877179-236877226
  hypo
ccctcccctcacgccaacagaaagaagcaccgaaggaagaaaagcac

SEQ ID NO: 208571 - DNA, 80 bp, Homo sapiens
  chr2:236877399-236877479
  hypo
tttgcaaggtggcacgagagggcccttgggaccttttcatcactgtctgattctcatattacgcaaccaaatctgctgtc

SEQ ID NO: 208572 - DNA, 109 bp, Homo sapiens
  chr2:236881386-236881495
  hypo
aagccgtagagtgttcgtgcctttcacagcacctcctacaagcccctgaagcccgtgccatgccactctgttggtggtccacaaacacaggaaacgaagctctagaggg

SEQ ID NO: 208573 - DNA, 156 bp, Homo sapiens
  chr2:236900737-236900893
  hypo
tgatggtggccatcacgagacccagataacaggagtggttagaagcgcagcggaggagcctgtcttcctgggtccgagttgcgtggttaggagcgcagcggaggagccggtcttcctgggtccatgttgcgtggttaggagcgcagcggaggagcc

SEQ ID NO: 208574 - DNA, 198 bp, Homo sapiens
  chr2:236901358-236901556
  hypo
ggccgctgaggtcctgcacacctggggatgcgtcgtgggcgccgaggagagcgtagcctcctgttaacgtagcctcctgctgctctttggggtagaccagccgtttccacgcacaggctgcacattgtttcatggcctttgcagttgagcttgtgttggcctctttccgtcgtgaaccatggacgtctctccttgacc

SEQ ID NO: 208575 - DNA, 171 bp, Homo sapiens
  chr2:236909411-236909582
  hypo
ggccactaaggggggcggagaagacccctgacagcaagaaggagccccacttgtgctgttctgtaaggagggtcttccaggcacagagagtggctgatgagaaagggcctgtgtggaaggaaccagggccaagcgagggaggcagatgccgcgtggcgtgaggagggtgag

SEQ ID NO: 208576 - DNA, 252 bp, Homo sapiens
  chr2:236949322-236949574
  hypo
ctgatgttatcagtgatgtgcgtttctcccggggtgcttacgccttgtatttgtgtcttcctccgtgcccagtcccggctgacgagccagagcgaggccatggccctgcagtcgatccggaacatgcgcgggaactcccactgtgtggactgcgagacccagagtaagtgtgtgcggtggtagcaggggctggcgctgtgtagctggagaccacatggtcccactaggcccgggttgcaggggactcacatc

SEQ ID NO: 208577 - DNA, 165 bp, Homo sapiens
  chr2:236970494-236970659
  hypo
attttatggtatataaattatgtcaattttgaaaaaaaaaaaaaaggaatttccaaaggaaaacagatgagccagggcgttccacaaagagcagctggagcaaaggtgcaggcgtacaggaacgcatgctgggtggcgggggcctgggtgcgggccgagggctgg

SEQ ID NO: 208578 - DNA, 154 bp, Homo sapiens
  chr2:236996175-236996329
  hypo
gcacactgcccatgacgggctacttggacggctcatgcccacctctgactagtttgatgttctgaatcaggccccttggttaagcgtgataacatgatcacctggtgttttaaagcttttctctgtttccatgtggtgccgtgaatagtctcat

SEQ ID NO: 208579 - DNA, 39 bp, Homo sapiens
  chr2:237007808-237007847
  hypo
gcttggggccaggtgcggtggctcacgcctgtaatccca

SEQ ID NO: 208580 - DNA, 133 bp, Homo sapiens
  chr2:237015289-237015422
  hypo
aggtggctggagtcacgcacagccagctggtgggcagggctctctgcaggccatgggctcattttcccacctgcgtaagtcacggtgctggtggtagcaggatggggtctgcaggtctcgcaggagtaggtca

SEQ ID NO: 208581 - DNA, 157 bp, Homo sapiens
  chr2:237018158-237018315
  hypo
tggcagaagtgttctcgatcagcagccttggaaatgtcctagtcagcggcagcgtcggtgctctggaccggcagccatgggaatgtcctagtcggcagcagtgtcggtgttctagaccggcagccgtgggaacgtcctagtcggcggcagcgtcggt

SEQ ID NO: 208582 - DNA, 161 bp, Homo sapiens
  chr2:237020448-237020609
  hypo
aaagaaagggtccatcccggtatcaggcaatgtgaagtgctgggaacacacagacctgcccatggcatcccccagtcacttgaggacagataaaccatcacagttggttgttgccttttgattggagtcatcggcagtgttgtcacgcgactggtcttgct

SEQ ID NO: 208583 - DNA, 198 bp, Homo sapiens
  chr2:237022763-237022961
  hypo
tagctcattagctaacggaggctgtgaacggtgatcctcccggggattggaatgaggggaggtgatctactgccggctgcctgctcttgaactggccttccttggggaaaatgaaaggctcagccaagacaagccagggatcccagaagtagaattgcggcctccgagtgaccatttgagtctgtgtgctttgacatc

SEQ ID NO: 208584 - DNA, 164 bp, Homo sapiens
  chr2:237032441-237032605
  hypo
ttgtgtagctggccccgctgtccaagcacaagccacatgcaagggctgagagaaagcttccctgccccctccctccatcacatcccccatgatactaatgtgggctcccttacctccgcagtacggagtggacgtcacggcccgagatgcccacgggaacacag

SEQ ID NO: 208585 - DNA, 403 bp, Homo sapiens
  chr2:237032665-237033068
  hypo
gctgccccgacgagcgcttcgtgctcatggccacccctaacctgtccaggagaaacaataaccggaacaacagcagtgggagggtgcccaccatcatctgaggaacagccgtgcccgcctgctcgccgcacctgggacgcggcagcctcgccgcattctcgctcagaagtcgcagcacgtgagtcccgtcgcatcccctccctcttcctggtggccacctccctcccgcccacccactctcaccccaaacaaaatcacaaaacctggacatccctcaaggggcgaagaggcggccgggagactgcagaagtggctccttttcataaactcccctaaaccacacacaggagagagcgacgggcctcggccctttgatgatagcacatggcgcaggacccttgtc

SEQ ID NO: 208586 - DNA, 161 bp, Homo sapiens
  chr2:237037749-237037910
  hypo
cctttggcatcaatgcgtgcattctccacctttccgcggcttgcgcttggatttctgagtggctttcttcagggagcccttgtggtcatgtgtctttaatgctgctccccatgcccccaggccaggccagcacgctcaggtgatagcgagtggggccagga

SEQ ID NO: 208587 - DNA, 371 bp, Homo sapiens; identical to SEQ ID NO: 198773
  chr2:237076187-237076558
  hypo

SEQ ID NO: 208588 - DNA, 161 bp, Homo sapiens; identical to SEQ ID NO: 198774
  chr2:237076815-237076976
  hypo

SEQ ID NO: 208589 - DNA, 199 bp, Homo sapiens
  chr2:237542535-237542734
  hypo
tgagccggaggcaggagcaccgccttataatagcagctcccaactaacatgcagggcgacttcgggctggcctcccaatttctctggtcgatgtcctcagctctgaggtcggggctggcggggcggcggccgggtcgatgtcttcagctctgaggtcggggctagcggggcggcagccgagcactctttgtgctccaca

SEQ ID NO: 208590 - DNA, 56 bp, Homo sapiens
  chr2:237973044-237973100
  hypo
gcctgagacgatgcgaggctatcgctgccgcagtaccgggcggagggcctgtctga

SEQ ID NO: 208591 - DNA, 86 bp, Homo sapiens
  chr2:238280412-238280498
  hypo
atctgctctgaggtcagggtcgtgatgggcgtcagcagtttctgctccaggctgggcagctcccggaaggtgctcaccgagaacac

SEQ ID NO: 208592 - DNA, 256 bp, Homo sapiens
  chr2:238280812-238281068
  hypo
ccaccttggggtcatcgctgaactggatgacagccacccgggtggtgtcaaagcccacgtccaggtagtcaaccagcctctctatgagggtgcgaacgtactggaactcaggcccggcactttgggacccatcgatgagaaagaccacgtccctcttgccaccaacacctgcgaaacaaatgtgagcatggcttcaccttcatcgtcaccaaattcttagcgttcatgagccaccgcccagtttgtcatggattca

SEQ ID NO: 208593 - DNA, 535 bp, Homo sapiens
  chr2:238283029-238283564
  hypo
aggatgcaaagagttccctgcgtacctgggctcggtagaggctgcaacaccggctgcagcctgctcagctcctcgcgggtgagctgggtcaccctctcagagatgacctgttggacggtccccagctggcgaaaggtgggaatggccacggcaaagtccgggatgaaggagatggtctgcatctctgtgatgtcagcgttcccgatgccaatgccaatgggcacagccccacccctcttcacgaccacggaggggttccgcacatcatccccagacctgtcggccgtgaggacgatcagcagctggggcacaccttctgttatcctgcttcccgcagagctgaccaggatgttcctcaggacaaactccagggcggccccggtgttgggggtcggccctcccagcagggtcagctggcggacagcgttgacgacgtcctgcttgttcatgtatgaattcaggtagaactcgggcctggtccggtcgctgtactgcaccacggccacgcggacccggtcctggcccacatccaggc

SEQ ID NO: 208594 - DNA, 207 bp, Homo sapiens
  chr2:238359389-238359596
  hypo
gctgcatgggaggtggtgatgcccagccaggtgggcacggacctccccaccctgggtctcaggccaaggccacagggcagcaaaaggaggtgctgtaaggggccagcctgcgctgcatgcccaccttcgacgaatcccagtgaccagggaggagaggcacatgtggctggtggccaccaccgtgaacagggccggcaaatgtttcct

SEQ ID NO: 208595 - DNA, 151 bp, Homo sapiens; identical to SEQ ID NO: 198779
  chr2:238384223-238384374
  hypo

SEQ ID NO: 208596 - DNA, 82 bp, Homo sapiens
  chr2:238492723-238492805
  hypo
aggaactagggcctcgcgcctcattgtcggggcctccatccccctcacctgtaaaatacagaatgcccggcaccaccctgaa

SEQ ID NO: 208597 - DNA, 31 bp, Homo sapiens; identical to SEQ ID NO: 198783
  chr2:238536853-238536884
  hypo

SEQ ID NO: 208598 - DNA, 196 bp, Homo sapiens
  chr2:238706995-238707191
  hypo
acaagccaaaccccgggagggaccacgcggcctgggaaacagttcggcaaggaggccgggcccctgtcccgcctctgagggcggaggactcggcctgcaccggacccaagcgaggggcagtctggcctctgctggcagaagcagcgcttccaagtattttcatatggtgactttgcagagctgcgcggtccagacg

SEQ ID NO: 208599 - DNA, 40 bp, Homo sapiens
  chr2:238785779-238785819
  hypo
cgggctgcaggggcgcgcgggctggcggtgatacccctag

SEQ ID NO: 208600 - DNA, 176 bp, Homo sapiens
  chr2:238786045-238786221
  hypo
gggagagggggcaagcggaggaggagtggaccacgtgggagctgtggaagatcctttctagaccccggaagggttcttcccccagtggggggggccgggatgaagacagaggagggagccagtagcaggtggacgtgaagagtgacggtgggaggaggccacgtcctcaataatct

SEQ ID NO: 208601 - DNA, 33 bp, Homo sapiens
  chr2:238793664-238793697
  hypo
cgctctgggtccacacgacgttgggcagggtgc

SEQ ID NO: 208602 - DNA, 32 bp, Homo sapiens
  chr2:238820428-238820460
  hypo
gggcccaggctgcccgcgggtgcacccaggct

SEQ ID NO: 208603 - DNA, 157 bp, Homo sapiens
  chr2:238822319-238822476
  hypo
acctgcgataccgacggcatctctcagacaacctgcagccgggccaacctgggttggggggctgtgctgggacctaagtcagggaccaccggaggaggtagcccttgagccgccctggagcccgggccatggctgggtcggccggctaggcaggcgt

SEQ ID NO: 208604 - DNA, 210 bp, Homo sapiens; identical to SEQ ID NO: 198784
  chr2:238876150-238876360
  hypo

SEQ ID NO: 208605 - DNA, 39 bp, Homo sapiens
  chr2:239005248-239005287
  hypo
aagggagaaaggaagcgttttcttcggctcctgctgtga

SEQ ID NO: 208606 - DNA, 71 bp, Homo sapiens
  chr2:239011437-239011508
  hypo
tgtcttggctgagggcgaaccttcctgtcccccagggacccacctacctctgaccacggctcttctctttt

SEQ ID NO: 208607 - DNA, 169 bp, Homo sapiens
  chr2:239041690-239041859
  hypo
tagggcccaaggggacggacactcaagaagatgtaaaattgggaggggtggtattggccattggggcaggcagggccgggaagggaagtagcaccggccgcagccccaagccagtggcttttccacaagggcctatcctgcagccggcccgctccggcttcctccactg

SEQ ID NO: 208608 - DNA, 789 bp, Homo sapiens
  chr2:239049320-239050109
  hypo
cctaggagctcgggcggctccaggcacttcttcccttgagtgggtggactactgaggtcccctgggcacggcgtcatggtgcggaacgtggatgacctggatttccacctgccctcgcatgcccaggacatgctggatggcctgcagcgcctgcgctctcagcccaagctggccgacgtcacactgctggtgggcggccgggagctgccatgccaccgcggcctcctggcgctcagcagcccctacttccatgccatgtttgcgggtgacttcgccgagagcttctctgcgcgcgtggagctgcgggacgtggagcccgccgtggtgggacaactggtggacttcgtgtacacaggccggctgaccatcacgcagggcaacgtggaggcgctgacacgcacggctgcgcgcctgcacttcccctcggtgcagaaggtctgcggccgctacctgcagcagcaactggatgccgccaactgcctgggcatctgtgagttcggggagcagcaagggctgctgggcgtggctgccaaggcctgggccttcctgcgagagaactttgaggctgtggcacgtgaggacgagttcctgcagcttccccgagagcggctggtcacttgtctggccggcgacctgctgcaggtacagccggagcaaagccgactcgaggccctgatgcgctgggtgcgccatgacccgcaggcccgggccgcccacctgcccgagctgctcagcctagtgcacctggacgccgtgcccaggccctgcgtgcagcaactgctggcctca

SEQ ID NO: 208609 - DNA, 265 bp, Homo sapiens
  chr2:239056521-239056786
  hypo
gacagctggacgcccgtcagcccggccctcaaatacgtcagcaacttctcggctgccggctgccggggccggctctacctggtgggctccagcgcctgcaagtacaacgccctggccctgcagtgctacaaccctgtcacaggtgggtggggctcagggaccgaggatagaggaccacaggcccctctgacaggcgacagtccgctcgtagtgatggtgaggattggggctcctgaggatagacggggcccggggtggagagagc

SEQ ID NO: 208610 - DNA, 512 bp, Homo sapiens
  chr2:239059358-239059870
  hypo
tgtcctctctgccactcccccgaccctgctgagggcaccctcagccctgctctccagctcccgcccaccggacgctaacccgctgaccgtgcacaggtgcagtcacagcacagcctgcatgagaatggcgcgctggtgccactgggtgatgcgctgtacgtgacgggcggccgctggcagggcatggaaggtgactaccacgtggagatggaggcctacgacacggttcgggacacctggacccgccacggcgccctgccccggctctggctctaccacggggcctccaccgtcttcctggatgtctccaagtggacccagccctccggccccacccaggagcactaaaccagggccagggtccccggggaggagtccccacagcggcccctcatcagcctgtggaacggcccctttcattttcgcttatttgttcactcggagctaccattccttccaagctgcgctcaggccaccaggggtgatcagacggcatggcttggaggacacag

SEQ ID NO: 208611 - DNA, 174 bp, Homo sapiens
  chr2:239065004-239065178
  hypo
tgctccaactcatcacgcacctcttatttcacaccaactagaataggaggaaccctaacaagccaaacataaggccgtgaagatgtaacctgtccagtgggcaggagggcctctgcagccccacgccggctctgcccatgggctgcgtcctgggcaagccgcccacctctctgg

SEQ ID NO: 208612 - DNA, 282 bp, Homo sapiens
  chr2:239074294-239074576
  hypo
catctctgtgaatggcgtcctgtacctgcaggtgagtgcggcaggcttgggcatcgaggggcaccgcctgggcatggccacgggtggctgggtgcagaagggtgctgttagatgctcaggatcactgggtcgggtgcagcaccctcagactccaggcctgggagagggtccaggacatgccaagttctcactttggtctgggcgcagccaggcttcaagtcctgatctccttcctccaaacacagcccttccccgagggcacctgcccgcttgagcagctgc

SEQ ID NO: 208613 - DNA, 61 bp, Homo sapiens
  chr2:239082212-239082273
  hypo
cacagaggtgacaccgcagcgcttgtactgcccgtccccaatggagcgtgacacctctagc

SEQ ID NO: 208614 - DNA, 62 bp, Homo sapiens
  chr2:239083073-239083135
  hypo
aggcagagaaccatactcaacgtgtgagagagcactccgcaaatgccacggctgcgcatggg

SEQ ID NO: 208615 - DNA, 47 bp, Homo sapiens
  chr2:239083165-239083212
  hypo
atggaccaagcaagttcaggagatgcggtgcagatggctgcacatgg

SEQ ID NO: 208616 - DNA, 738 bp, Homo sapiens; identical to SEQ ID NO: 198785
  chr2:239148240-239148978
  hypo

SEQ ID NO: 208617 - DNA, 115 bp, Homo sapiens
  chr2:239188886-239189001
  hypo
aggtcgagcccattcgccggtgagccactccaggacagcctggtgagaggcggggctcatggagaatccacccacatcagtgtctggagaacagcagggccgactagacctcgcc

SEQ ID NO: 208618 - DNA, 55 bp, Homo sapiens
  chr2:239211886-239211941
  hypo
tttgtcgtctccatgcgcccgctcaggactcctgagttctcgaaaactcaaaact

SEQ ID NO: 208619 - DNA, 64 bp, Homo sapiens
  chr2:239265787-239265851
  hypo
acatgtgtgatgtgcttttgttgggacctgtggcctcttgccagccactaccctttccttgggc

SEQ ID NO: 208620 - DNA, 241 bp, Homo sapiens
  chr2:239306052-239306293
  hypo
ttggactgaggaggcgtgttcctcttcctatgtctccctgactgtaggagcgatctctctttgagtcggcatggaagaaggagaaggacatcgtttccaaggagatagagaagctccgcacgtccatccagaccctgtgcaagagcgcacttcccctggggaagatcatggactacatccaggaagacgtggatgccatgcagaatgagctgcagatgtggcacagcgagaacaggcagca

SEQ ID NO: 208621 - DNA, 467 bp, Homo sapiens
  chr2:239800520-239800987
  hypo
atgagcagccactgcgtgtgggaagattgggctatgtaggacaagctgtatttgtgcacctgcgcaaggcgggaccactgaaatttagccctggagttcgttcacggagccgctgaccacttatcccttcctcttcagcatgtgcttgccgctgagccatgcgggtgctgtgttctctgttatgtgccggtgtgtggactggaacccgcctgcagcagccactcccacctgccctcgggaccctgactgtacatgggctgagccaggcaaccaccggaagggtgagtccttccccaggactcagcgggtgagagactccggctcacctcacggcggaacgcagacacctgagagcccgcaagcctcaggacagagagaaacagaggtccaggtggaaatgcggaggcggcacgaggagggggccctggcctgggagcacgtgcgctgcaccacgtgttacccgtgag

SEQ ID NO: 208622 - DNA, 124 bp, Homo sapiens
  chr2:239888394-239888518
  hypo
tggtgagtggtcagccaggacgtggctccccgtccctccggtgaccaggtgggcactggctcctgatggttcgaagccccggtcagcccccgccatccctaaactagtgacttccacttgcgtt

SEQ ID NO: 208623 - DNA, 75 bp, Homo sapiens
  chr2:239888789-239888864
  hypo
cccgtgcctctgtctaggagcgactgtggcttcgggttaagcctctgtctttacctgtagtgggagatgtctgct

SEQ ID NO: 208624 - DNA, 933 bp, Homo sapiens
  chr2:239969832-239970765
  hypo
aggaagagagcgcacgggcagaaaccagagctgggagggcaagtaacgcagtctttatttacaccacaagataacacgttgcgtgatgtggtacagaatactggactccagtgaagtggaaagaaggtgaccgtcagaagaggatatcattggtcggtgaaaatccacccacacaaaacaagacaagaatgagaaaaccaaacacaaaacctccaactccactgagcaaaagaaagaaccatcgggcacgtccagacaatccaagagaaacggattaaattacagaggtgaatggtggccacggccagtgcgcagctcacggcgggcgcgaacaggcatcaggtaggttacagtgtcgttacaacttggttttctaccacattccgtaagaagctcttgggtgagtaaggttcaagccccctgtatagatagatagatagatagatagatagatagattatatatgtttgtcattctcatcaattggaaaatagcgcctccactatggagcacacacggcaaaaaaaacaaacaaaaactgttcgctttctttttctttcaatagcagacttttaatcaatgccagagacaaagtgaggccgagctaagaacacgctcagcttcgttacaatgaagaaatggtttcctttcgatgcaaagtataattgtaaaccacagtgctcgcacagttcacgactgcttaaagtgaaatcttagccatacatcacctaaaagtaattaaaaagtcaacacagctgtgcggaaaaggggactctttcgagtccgcccagttctcaatcagaataaaccgtcacaaggccagtgagggcgggcggcgctcgcctggcccgtggaaggagataaaaggaaacaaacaaaacaaaacaaaacaaaattcctccaaatcaactcgagagagacaggcagttcact

SEQ ID NO: 208625 - DNA, 420 bp, Homo sapiens
  chr2:239974289-239974709
  hypo
gaaaacgtcctctttaaaaaaaaataagctacaagatgagtcgagtggtttacacagagactgtggagttgtgggtaataaactttaagcaccagttttaatcaagtttgttttgtattattagatctttgatatttgttttctgtgcctcgtgtcaactgaattcggcagctcggccgcctgttgccacaggctcctttcttccacggcgtcccttgcgggacccgccagagtgtgcttggcttccgcgtgtccgtgtgtctgcgcgtcgccggcgtctgtcccgtgttccctgtgaggctgccacgcccaggcgtgcatgtgcgtctcgagacctgtgggcctgggcggcagaaaggcttcccgtggctgttgcacgctgggtgtccctgggtgctccaagagagccccacggtggga

SEQ ID NO: 208626 - DNA, 138 bp, Homo sapiens
  chr2:239999815-239999953
  hypo
tcttcatcgtcatcgtcatctccctacaagcccccacccccagcggctcagactttactcagcaacttcaaagccgcgtctggcaccgggactggtttgaattaaggttcccttttctcctacgagtctccgggcctg

SEQ ID NO: 208627 - DNA, 360 bp, Homo sapiens
  chr2:240002984-240003344
  hypo
ttggtgggcccctggggagagcccacgtgtcctgatctcctggtgcatattcattaagacgcgtgtgaaggggccccactgacaggggcacactgacatcagcaagggggcccttttcctggctgctgtaggctctcgccgaccctgcccttggcacaccaaggccctgcactgacatttctgcggacccgccgccctgtgttgtgtgccgtgtgttacatcagggaatcagacctgggtctctctgggcagaaagtgtctccgatgagcctgtcatttcctacttcctctaaaaaaataatatccagaggcagacggagcgtcttcctggatgaaagccctgctgttggagcctctgtt

SEQ ID NO: 208628 - DNA, 179 bp, Homo sapiens
  chr2:240015872-240016051
  hypo
gaccatgatggcccggatctgctcggacgctccgcctcagcttctcatggccgccctcgctattgccacccctgcccaggctgcatcaaggaggtcaggggccaggggagaactcttttgttattgagaagtttgattgcaagacctgacccttcctgtgtggacggatgggcagatgc

SEQ ID NO: 208629 - DNA, 40 bp, Homo sapiens
  chr2:240064716-240064756
  hypo
gctcagcactgatcacgccctgtcacgcatggctcctgga

SEQ ID NO: 208630 - DNA, 210 bp, Homo sapiens
  chr2:240066211-240066421
  hypo
atcgcctatggcaggaaggcctggcagagagggcagcggggcgggtgtacctgctcagccgacatacctgtgacatccaacggacgcttttttagagcagtgaccactggcccgtctttcctgcgtaacagggggctgctccgtctttcggccactttctgctttagcctggaccgtaatttcagattcggttcagaagctgcacaaaaa

SEQ ID NO: 208631 - DNA, 64 bp, Homo sapiens
  chr2:240067065-240067129
  hypo
actgggcgtgggtcggtttctgtgaacagctctgcctgtgtggacagagccatttgcgaatcta

SEQ ID NO: 208632 - DNA, 52 bp, Homo sapiens
  chr2:240067159-240067211
  hypo
atctgcatctggaacccaaacctccggcgcgaggcccgccttgggaagcact

SEQ ID NO: 208633 - DNA, 197 bp, Homo sapiens
  chr2:240077374-240077571
  hypo
cactgtttccgcccagaactggccaaaacctttggataacagagaatttgtttagcaaaaaaaagcggtgcccctaggctctcatctccaagagccgccccctagggaggacgccttgggatttcccacactgtcttgcagtttgtaggatccactggccacatctgggatgaggcactgcccgccctcagcacctg

SEQ ID NO: 208634 - DNA, 458 bp, Homo sapiens
  chr2:240116630-240117088
  hypo
ctgtgtctccagctcggtgcgcgtctccctacggacatggaagagtgcgggtcccctgaggagcagggaggcgaggggccctgcagagcagccaccttctgctgagaaggagcctggactcactggcacagtgcagccagagggggcttcggtgggcaccgaggctggggagtcgggctcaccaatgcgcagaatgctgtcgctgttctcactacggcacctcctgcattttcactcattgtggggaagggatgttcacactgccttggtttaccggactgccacgtgaaactccactatctgctaaagtaagctaagagcagagcagagaaaatcaacagcagcacacgccgcctgcatcccatgcgcacctccggccacggccattgctcacctctgaagacaatgctgcatttatgttggattcaataacacaaatggagcgttcacagggcaag

SEQ ID NO: 208635 - DNA, 188 bp, Homo sapiens
  chr2:240117493-240117681
  hypo
gagagcacaaaggccgcattcagagtccaatgggagacggtcagtgtgctgtgaatgaattctcaatcacaaacagaaaaacctgttagtctctctctctcgctcttttaaaataaatgttcataaagaagcatactgattttccacgacatgcttaggtcctcttctcaggacgcgatttcatgcca

SEQ ID NO: 208636 - DNA, 135 bp, Homo sapiens
  chr2:240167440-240167575
  hypo
tgccaggaataaagacgagcctgcccccaccttctattcaatatgtctttcctgagcatctgctgggtgatctacctaacttgttccttcacgaatatcccaacagtcttcagttcatccccagcccctatgtgt

SEQ ID NO: 208637 - DNA, 281 bp, Homo sapiens
  chr2:240167605-240167886
  hypo
tcagcgagcaggccctgagcgtctgggaacgtgagagtgagcaacgcagaggcctggccccggcccagcagaaccggcaacccacactggctgcctgcgtccagtcccgccatggggtctgcctggtgccagcacctgcccagacacagggcagaggagactgcaggggggtgtccagctgctctcacgtgccaggccaggcttgctaacacctgtggcttagtcgggtgatagggacaaaacgtgcaaactgagcccgctggacacgcagactcagcagg

SEQ ID NO: 208638 - DNA, 63 bp, Homo sapiens
  chr2:240169135-240169198
  hypo
aacgaggcacacagtacgtgcggggcgagagactccctttgctcctcccgcttcacctttgct

SEQ ID NO: 208639 - DNA, 41 bp, Homo sapiens
  chr2:240169831-240169872
  hypo
tgcttcagccaacacgccccttgggttgaaagacttactcc

SEQ ID NO: 208640 - DNA, 192 bp, Homo sapiens
  chr2:240170922-240171114
  hypo
gacagaggagacacggctgcaggtccgaaggccatggtaaggaccttccattccgacttcagccaccatgcggagtgtcgcccagggcggggaggggctgcggaaggcgggggaggcggagagagagctgggagagatggggaaagggatccatcaggactctgcgatggacttggcgtgggtgtgccacac

SEQ ID NO: 208641 - DNA, 131 bp, Homo sapiens
  chr2:240172542-240172673
  hypo
gagctgccagagatgggactcgggggcggttttccctcacccttggcgggatcctcccctctgcagacccggggaacctgcccacgtgtgttcacgtgcccccgccacacgcctggttcacctcgagacct

SEQ ID NO: 208642 - DNA, 511 bp, Homo sapiens
  chr2:240212280-240212791
  hypo
cacacacacacacacaggcacgtgcgcacaagcagtcacgtacacacatgtacgcacacacaaccacacatgcgcgcacgcatgcattcagttcgcacgcgcatgcacacacacgcacgcacacactcacatacgcactcacgtacgcacacacgcgcacgcactcacacacacaccacacacgctcccgtgtttagtgtgtttctagggcactatggggagggccggggttctatacagggcctggcccacctgaaagtccatgtgaaaggcagcctccagggctcctatcaagtgggtggcttcgctcattcactcaggaatttttcgtggcacagtaaggcaaggggtggggatttttctttaaaagctttatccaatcatgactaatggaataagtgagccaggcctcaagaaaaccgaggacaaaaggaaagagccgttcagaaggcagcgcctgcctccacctgctggtgcgtgcccgggacagggaggacggcaggttttacca

SEQ ID NO: 208643 - DNA, 299 bp, Homo sapiens
  chr2:240226678-240226977
  hypo
ataggacagtcccgcgctttcttccagccggcctggggcatgtcaggaggcagggcctgtactgcaggctctgtgttcttagacagcctttgcagggggcagaggtgcccactgccacatgggcacacacaggaggctcaccacgtttcttcaaatgcagatgacaaagcagcttgagtaacacaaatacggccacactcatctgaggattgctgctgtgttttctaactgcatggccatgaccaagcagtcggttttcatccaggttggtagtcaggtttctgaaagcgatggcagtc

SEQ ID NO: 208644 - DNA, 175 bp, Homo sapiens
  chr2:240227007-240227182
  hypo
gcacaccttcaccctcgttacattttctggacaatggtagggaacattccttactccgctggcctgtcagcttggctaagcctggtgcaagtggctcgctgtgggtccgcggctccattacgggggagtctgggtcatctgtgagcccaacagcgccctgcaggcacagacagcc

SEQ ID NO: 208645 - DNA, 46 bp, Homo sapiens
  chr2:240234573-240234619
  hypo
tgcagagggagaccgggagcctctgaagaccgctccagctctgcac

SEQ ID NO: 208646 - DNA, 1221 bp, Homo sapiens
  chr2:240270602-240271823
  hypo
agcaataaaaccgtaacacaaaactcacccagcagcagaggactttcacagaacacaggagaggaaagccacacacactgcactagaagggcacttcatcagcagggcaaagccaagtcacatgacaaatgtgagagggggcccatgggcggctggactcccccagcccggcctgcccagggagtgagggcggcacgggcacccacaccaggccacacaggagcagggcccccatgccagatgggcaggcaagggtgagccaggcaggcaagagtgagccgggtgggcagggcgaaggacagggccagctagcagaggacggcacgagagacacacggagggaggggaggtgcagccaggtaggccccgaacaccacgttgccaggactcggctcctcggctcaaggaaaagggacagcggttccgtggctgtgctctgacacacctagaaatttcccgctcaagagagcaaactgaatcctttagtattaatgatttctcttcctcccaaaacccactaaaatgatgaaaagcaggattggaaagcacttccagcaatgcctgggagcggacggacaggtgcatcagctgacaagaaacacagaggaacttcccgaaactagagatctctggggatggagctgcttgggaaggcacacaagcgagtgggcctcgcccaggagggagggcacggttctgggcaagccccatcccccgcctgagacgtgggcagaggccgctgggccaccagccagtgtgtgcaggtggtggtatgcacgtgttgggcacaaggggtcctgcctcccaagggacctccgggcggaagggcagacacggcagggaaagatgacagcggacagggcagaggaggcagccagcagacttcaggccccaggcaaaccacctcagctgtaccccctgcacagatggagagcagagaatgggctgggccaaggggcagccctgccctcaccagtgcggcctgtcttcagcctccaacccactgagagagagaatggagaggtcgtgggtggcaataaggcgcacacaacccaactcacatgggcaggacaggcccgggcaggccggtgatcaaactgaaccgcagcggctgaaattcccacagaaaaggccaaacaaacccagcaccccgcggtttccagagctgagcctcaaagaacccggcctgaaaaggttagagacaagcggatggagaaatat

SEQ ID NO: 208647 - DNA, 209 bp, Homo sapiens; identical to SEQ ID NO: 198786
  chr2:240294262-240294471
  hypo

SEQ ID NO: 208648 - DNA, 43 bp, Homo sapiens
  chr2:240312832-240312875
  hypo
caccatcacgagccgggctctgcataccgggtagggacgctgg

SEQ ID NO: 208649 - DNA, 120 bp, Homo sapiens
  chr2:240361083-240361203
  hypo
taatctgcagctgcacgaggcgagatgctgagccaccgcaatccaaacccttcagaagatgaagctgtgtgtgcacaaaatcgcctccttattgcattgctctctcggaggctggatgtg

SEQ ID NO: 208650 - DNA, 142 bp, Homo sapiens; identical to SEQ ID NO: 198787
  chr2:240402418-240402560
  hypo

SEQ ID NO: 208651 - DNA, 259 bp, Homo sapiens
  chr2:240599653-240599912
  hypo
acctgaggtcccaggaggcccgcttcagggcacccttctgacctgagacgggactcttgagtcccagccagcgtggccgatgcgcaatcccttggtcaaatgcccttcggtgggtcagcacctccggcccatcatgctgtgctggtcagtccccgtgggcgtattcttacccgttcagcctggcagctcttccgggtcccacaagagtctctgagcacagcggacgccccttcttcacgagctccacaccctgttctga

SEQ ID NO: 208652 - DNA, 34 bp, Homo sapiens
  chr2:240612328-240612362
  hypo
ccgaggagccggacgcagcgagagccaggcggag

SEQ ID NO: 208653 - DNA, 380 bp, Homo sapiens
  chr2:240700324-240700704
  hypo
caggcagctccccagcctcccgccagcatcccctcggggcctgggaacagcactgcgagccggccgcacctgtgctggaaatcgccctcaggctgccgagtaattagttccacggttggatgcaggcccgtgctgtgacttgaagtcagtcggcgtggaacacatttcccatgtcgaggctgggcctgaccacccttctcacggtaaaggaggaagaaaattgcttctttgatggcatttgtgataggctggaaagcgcacagtggagtgagccaggaggcgctggctgggttcccacactggccgccgtcagcacccatcttgggagggaaaaaggagggaccacctcgtgtccccacgtccctgtgctccaaccccag

SEQ ID NO: 208654 - DNA, 206 bp, Homo sapiens
  chr2:240733615-240733821
  hypo
tcaggagagcagagtgagtgcgaacgcttcgccttttgtgttatgcctttgtacctcctttcacgaggacaccaacagcaagttcctgtatgacacaccttctcggatgatggctgcaggtctgtcccgtcacggcacacacgcgggaatctgtagctgccccaatcctaaagtgtcccgtgttcgaggacagtcaggggcccttg

SEQ ID NO: 208655 - DNA, 105 bp, Homo sapiens
  chr2:240734677-240734782
  hypo
caccctgcccagctcactggggaaacgtctactggaggaacgtcaaccttagctttggacatcttggtcacgtttgcgccccacgccctggctacccattctcct

SEQ ID NO: 208656 - DNA, 55 bp, Homo sapiens
  chr2:240809701-240809756
  hypo
gacacgcagcctcacctgggacacctgtcactccgaaggagaatcctggacatgc

SEQ ID NO: 208657 - DNA, 173 bp, Homo sapiens
  chr2:241069130-241069303
  hypo
aaaacaactctcacgaaatgaattgcaagaacatagcactgaaaaaccccaccctctccaagtgcagacgacgtgcacgcctggccgctggaaaccctgctcctcgcctgcagataagccacgtgggtctcagaaacaaagcggcagcctcaacgtgcggcccagtgcagacc

SEQ ID NO: 208658 - DNA, 187 bp, Homo sapiens
  chr2:241157300-241157487
  hypo
gctgtagtccaaccacacgggcactgggcggtggccttgatctcagtccccgttgctcacggggtctcagatcccacctgtgaggggctgtgctgacccgaggccccttccaggacccgcggggttcacaattcaagtgactcaggccctagaaggcttgtaccatacaagtgcaggttgacgcccc

SEQ ID NO: 208659 - DNA, 285 bp, Homo sapiens
  chr2:241286544-241286829
  hypo
gcatccagaaccagagcccccgccgccagccctaccggggattcaggtgagtggccaagagcctggctggacttcacggggtatccagccgcggcacaggcagtcaggcccgccatgaagtggcacttggggcaacccgcagagcccagccaaagaaagcacgtgtttcggtgagaagcgagtgtggttgttctgcagggaaagaaaccctcccgggcgtgcagagcagatgagctcactgaacaattcgggggtgatttcagcgctaaactaacctgggctctc

SEQ ID NO: 208660 - DNA, 194 bp, Homo sapiens
  chr2:241328246-241328440
  hypo
tgacaggggttaaatcgggcagaggtggggttgggcaggagggagggggacggttgcaggagggaggggaccctgtgcaccacccaattctggcttgagcagctggtggcatgggacactccggaagactcctggggactccggggtcctgagaagcatccaggtgagatcctgggagccgctggtgggtgggg

SEQ ID NO: 208661 - DNA, 199 bp, Homo sapiens; identical to SEQ ID NO: 198788
  chr2:241374416-241374615
  hypo

SEQ ID NO: 208662 - DNA, 331 bp, Homo sapiens; identical to SEQ ID NO: 198789
  chr2:241375298-241375629
  hypo

SEQ ID NO: 208663 - DNA, 69 bp, Homo sapiens; identical to SEQ ID NO: 198791
  chr2:241393469-241393538
  hypo

SEQ ID NO: 208664 - DNA, 55 bp, Homo sapiens
  chr2:241542357-241542412
  hypo
agccacagcagttgtggcatctctaccctgcccagcaaaagtggaagtgttgcct

SEQ ID NO: 208665 - DNA, 48 bp, Homo sapiens
  chr2:241543042-241543090
  hypo
ctggactggacaggacgaccaccttgtgccaggcgccagctatctccc

SEQ ID NO: 208666 - DNA, 138 bp, Homo sapiens
  chr2:241545031-241545169
  hypo
gggctggtcggggcagggctgcccgggcaggacacaggatgcggccggccaggctggggccaaggtgttcagacctggactttgggctcgtgctttcttcatggttgcgccttgctcgctgtcccttggagtcttcat

SEQ ID NO: 208667 - DNA, 47 bp, Homo sapiens
  chr2:241555876-241555923
  hypo
ctgccaatctcctgtcgactgcgagtcagctccgatacttcaccaga

SEQ ID NO: 208668 - DNA, 33 bp, Homo sapiens
  chr2:241581263-241581296
  hypo
gctcctacacgctcggtcggggcccagtggcac

SEQ ID NO: 208669 - DNA, 40 bp, Homo sapiens
  chr2:241655278-241655318
  hypo
atgtaactgctcccacgggccacggcgggagaggggctct

SEQ ID NO: 208670 - DNA, 339 bp, Homo sapiens
  chr2:241689804-241690143
  hypo
aggggctccaatgccacacacggcctttggcccacacgcacctgagatggcctggacggccacgcggaggaagcccttcacctcgcccttctcgctgacgattgccacacggtgtaccaggggaacggggtacagcaggttgctcaggtacacgaaggccctggggagaagcagaggcggcggtcatgggccacccctccacgcatgttctgaacggcagcggtggcagcatggcctggctcacgacacaacatggagctgcaaagcagagggaagccgccggacaggacagccaaggccaggacagcaagagcgggcggggacaggcagggcaggcac

SEQ ID NO: 208671 - DNA, 229 bp, Homo sapiens
  chr2:241721305-241721534
  hypo
tggaactcctcacacgggccgcacagctcttcacaattcacacagttctctgtccccacacagccaccgccgagttccctgtgcgtttcccagtgagcacctcgcggatccccgtggtggcgcccgccctgtctcacgcattcccacgctggctcactccgttcctgccggtccctcgaacgctttcacggctgcccacgcggttcctcacacagtccccagcgtcgcc

SEQ ID NO: 208672 - DNA, 588 bp, Homo sapiens
  chr2:241721587-241722175
  hypo
ccgcctccccctgtggccccgtcacgcctacggctgctcagagtccagcacgcctgtcacccgcttcctctcagggctccccagccctctccatgtccgaggggctcctccgcgcccctttcagctcctcccagggcccccacgccccccgggccacactttcccacctcggtgtctcccagcagcccccgccccaggccctgccgtgaggccgccccggacgccctccgtccccgcaggcacaggcaccgcacggggcctcccacacccgctttcttccttcccgggatccacccccacgtcccccatctcccagcgcactcactgcccgccccgcccctcaccacagggcgccaatgcagggcagacaccgccaccagcctcccgcacctgccccggggctgaaggaagccgcttaccttgttgggtccggagtcctgaaaaggaaaagacagagagaggctgaggcccggagcgaagctggcgcgggctgtgggggcggaagagcaggcggcccggctgcctcgccctggccatgactcaggctctaccaccccgtggtctcctagacagcagctcccccaggca

SEQ ID NO: 208673 - DNA, 165 bp, Homo sapiens
  chr2:241722242-241722407
  hypo
ccatagccccactttacaggcggggaaactgagggtcccgggagaaaccagggcccctaccccttctccagcatgtgacactctggccatctccgggctctcccttgaacctggccacctcccagacacagggcccggaaacgagggtgacaggggcaggatggg

SEQ ID NO: 208674 - DNA, 457 bp, Homo sapiens
  chr2:241724229-241724686
  hypo
gggcggggggggggacgtccacacctggtgccagtgtaagtgtgaggacactacccgccctgcacaggccagcattgggcctgtccttgtgctgcccccactggcctgaccaccacccctaccctgaccaccagccactgcccttggtggcaccgcctgtgaggccactcactcaccttctccgtggtgatattggtctctgcgtcatggcgcttctgggtgaagatgatgttgaagacggcgtgggagcgactgctggtctcattcatgttggtggccgccacggtcctgaggagcagaaagccacgcacggttacccctcgtcctgtggccgggtgcgagatcgccggtggtgccagccctctgaaccaggtcatcggggggggcagttcccccagaccccaggggccgccctgctgggcctggcactgatggcgcctcctgccaggactccagc

SEQ ID NO: 208675 - DNA, 156 bp, Homo sapiens
  chr2:241750153-241750309
  hypo
atgacactccaggagcgatcagcaccgaattcatggtgctgggcgtggagggggtctaagggcctggacgccaccaaggccactcgatgtgcccgccatggtgacgtggaaggacctccttcccgccaggccccatctgtccgtcttcctccccag

SEQ ID NO: 208676 - DNA, 115 bp, Homo sapiens
  chr2:241858348-241858463
  hypo
ggacagtcctgggcccggtgctggccaaggtgacggcgtgggggacagtcctgggctcgcggctggccaaggtgatggcgtgggggacagtcctgggcccggggctgggcaaggt

SEQ ID NO: 208677 - DNA, 224 bp, Homo sapiens
  chr2:241872080-241872304
  hypo
tctgggcccctctatcccttcctctctgcaccttgaaggtggcccaggaggacgcccggtgcctggagctggcaggtagcagcatcactgaattgggggagccacggcgcccactgaggagcccccaacgtgccacatccccccatcaaggggcgtccccaccacacatctgctccccagccaccctggaccccgcactgcaggccatgcgggcagccatagag

SEQ ID NO: 208678 - DNA, 112 bp, Homo sapiens
  chr2:241896820-241896932
  hypo
acacaggccatggtgccaggcgcgggaggcagcccccttctctgcccattctgaacgggagcccttctcactgactgcacagaggcacgcgcaggccgcctgctggggggcc

SEQ ID NO: 208679 - DNA, 39 bp, Homo sapiens
  chr2:241897078-241897117
  hypo
tgcctgatgccacaacccggactcctagtcccttcaagc

SEQ ID NO: 208680 - DNA, 210 bp, Homo sapiens
  chr2:241989264-241989474
  hypo
cttcaacggaggctcctgcgatgcccatgacgactcctacacctgcgagtgcccgcgcgggttccacggcaagcactgcgagaaaggtatggcgggcaggggcgtccgggccggcgtcagcaccctggagagcgcccgcggtccgccgtcctgcttctctgctgtctctctccttgtttcgcgaattgctgacctcgtctagagccttgc

SEQ ID NO: 208681 - DNA, 215 bp, Homo sapiens
  chr2:241992512-241992727
  hypo
gtggggaggggccaggaaggcacaggaccgtgcgagacaggctgccgtgccttgcagaggtggactgcggccccccggaggaggtgaagcacgccacactgcgcttcaacggcacgcggctgggcgcggtggccctgtatgcatgtgaccgtggctacagcctgagcgcccccagccgcatccgggtctgccagccacacggtgtctggagtgag

SEQ ID NO: 208682 - DNA, 476 bp, Homo sapiens
  chr2:242004393-242004869
  hypo
cagtgagggagccacgagggggtcccctctccctagagggcccaacggtctccaagggcagagcgtctggccgctgcttgcccaggccccttccctgaggaacagggaggggataaaatcccccggtgggcttgaaacacggtcacacattcaaaagtgtgaccctcctggaggtacgtggccagggacaaagaaggactctgccagcgatggctgtgtcaggcccaagagccagacccggctgagccgccgacgggagccaggcatgcatagctaacggctgaccagtcccctccccttgttttgacccaaaccctgaagagctcttcccaccgacggccctcaagatggagagagtggaggagagtggggtctctatctcctggaacccgcccaatggtccagccgccaggcagatgcttgatggctacgcggtcacctacgtctcctccgacggctcctaccgccgcacagac

SEQ ID NO: 208683 - DNA, 217 bp, Homo sapiens
  chr2:242010983-242011200
  hypo
tctgcagcccccagggatggcgctgacagacgctggcaccagggaggacaccaccctcgggtgctcaagaacagaccgcccccggcgcgcctgccggagctgcgcctgctcaatgaccacagcgcccccgagacccccacccagccccccaggtacatgccccacccatcggccccatcgcccgaggcggcgctcggactgtggtgaccctcccacc

SEQ ID NO: 208684 - DNA, 212 bp, Homo sapiens
  chr2:242011230-242011442
  hypo
gcagaggaagagtgagcgccaggttcggtggctcacccagcaaagcagccaccgtgagatcacgtgagtgccagggcctccccacccaccttggtggcccaccctcgtcctcactgccactctcaccaggtcctgtcccctacatgatgagcccacccccaccgccagcgcagtctccagccagtgacccccaccccgactgtgcacaaggc

SEQ ID NO: 208685 - DNA, 92 bp, Homo sapiens
  chr2:242076563-242076655
  hypo
ggggccgcctcaccggtggtcgcctcctcgctgctgggttgggatttcagctttaagctcagagggaaggtggtaccgtccctggctcttcc

SEQ ID NO: 208686 - DNA, 359 bp, Homo sapiens
  chr2:242169867-242170226
  hypo
gttcccagcagacagagggccgcagcacgtactgtgcgctcttgcatgaaattcccacccacagaggacgagctcgccaggcagctgtcaaggagatgccctcctaatggccaccgtggcagtgcagcctcacacaggccgtcgcctgcactgacccgtggtgtccatgaggacagttccactgccagccctggggttgtggcctcatcatcttgaggggaaggccatgccctgctctttcttctggccagccaggtgcccccggtgagagaggattctcacccactgtgcttccagccggctcaccttgaattcgtccatgattttgcgaatggctttgccgcgggcaccaatgatgc

SEQ ID NO: 208687 - DNA, 138 bp, Homo sapiens
  chr2:242190665-242190803
  hypo
gtcaggcctaaacaaacgctacagttaaccaaaaccaaaacaaaaccgtaaaagcaagtttatggtgtatgtgtggttcaagtagtgcgcaaaaaggtcactttgtgcctacagactctcgtcgctgtcacgtaaaat

SEQ ID NO: 208688 - DNA, 120 bp, Homo sapiens
  chr2:242268832-242268952
  hypo
agacatcttcatgaaatagatgagtaggaaacacctaccagcctattttattaagccagcattatcctattacaaatgacaagaaaactacagactaatatatgttagaaatgcttgttt

SEQ ID NO: 208689 - DNA, 97 bp, Homo sapiens; identical to SEQ ID NO: 198798
  chr2:242269473-242269570
  hypo

SEQ ID NO: 208690 - DNA, 502 bp, Homo sapiens
  chr2:242350119-242350621
  hypo
caggcgggagccatcgcccctggccaatttcttttttttattgttcacatcagagtgccttagtgtgttcagcacttcctttgcgctctcccatgtgtgtgactcagtctgctgagttggtttatcatctgaccttcacttggtgactgtttgtttcatgaaaggccttttgtgactttgctgtttcgtgaccgccttgcgttttgctcactgttgggtcactgccacttcccagggctcatttgctgtcttgctgtggagacatgtctatgttacattcagagaacatttggaattgatctctgtcttattttgaactctcttctagatacttgtttgccttgcaacttaagagagacctgctggaagagcgtttgacctgtgctgacaccacagcggcccttctcacgtcccatctcctgcagtgtgagtatctccccgccagcggggagcattcactgaccatggcacagatatacccgcactcagaactacaattagt

SEQ ID NO: 208691 - DNA, 283 bp, Homo sapiens
  chr2:242353962-242354245
  hypo
gggagctggtttgaacggcacagactgaggtgcctacccatacagatcttaccttaccccgtaagattgtgtggatttcgtgcacctcaccactcccagtgtgggggatctcttgtgtttgcaggggagtgccttttgtgtgcccgacagcatggcagtcatgagatatacagatgcgtttctacagatgagaatgtgtgcagtgtagcgggagcatagctcatacgctgtgagctgaaagaaggccgagggcaggctcaaggaggctcgtgggaggacctag

SEQ ID NO: 208692 - DNA, 206 bp, Homo sapiens
  chr2:242438629-242438835
  hypo
agccaggcatggtgcccgcacctgcccgcccgctgcacccaccttgaagtcgtaggccgactgcttgatgacctcaggtgccatccagaagggggtgcccacgaatgtgttcctcttaatctgcgtgtctgtgagctgccctgctaccccaaagtccgccagcttcacgtcaccctgctccgagagtagcacgttggcagctgctt

SEQ ID NO: 208693 - DNA, 162 bp, Homo sapiens
  chr2:242439377-242439539
  hypo
gctggtttcctcagcgtacaaggaaaccgttacaagtagtatcttctggaaagggagcgagacaggactgctcagtttcagggtggccacaaggttctctatactccagaccctgggcaccactagccacttgcccctcacaggccccggcctctctaaggt

SEQ ID NO: 208694 - DNA, 95 bp, Homo sapiens
  chr2:242439569-242439664
  hypo
atccacccccagcaggacctttgatgtctcggtggatcttgcgttcggagtgcagataatccaggcccttcagaatctcccgcaggatcgtggca

SEQ ID NO: 208695 - DNA, 181 bp, Homo sapiens
  chr2:242523726-242523907
  hypo
caccacacccagcccccttcttaatttcttagggaacgctttggaaaacaaacatcagcagataaaaaaaaaatgtacagcctacgcaagtgataatattcaaaatcctcagccataaaaataaaggccttttatttggtttttctatgccagtacagaaacatctggacaacactcttga

SEQ ID NO: 208696 - DNA, 222 bp, Homo sapiens
  chr2:242524147-242524369
  hypo
ggagaatggaacaaagatagcttagttttatcttcaaaagattcaatcaatgcctgtgcgcccactgcatgccacacactcatcacgggctgtgagccaggcagtggccctgccagaggagggtagacacacagcccagggcccctgggcatgtcacaatccaggtgcccttcagctgcctccagaagaccaccaggggaacacagggattgtttatttaga

SEQ ID NO: 208697 - DNA, 402 bp, Homo sapiens
  chr2:242572245-242572647
  hypo
gaaatgctcaggggacgctggccaccttgcagagaaacccctcctaacgggaagggaacatgggtacgcgaggctccggtactgaccgcggctgggcgacagcaggctacttggataggggacgctcactctcctcagctcatccagcttctcctgtagcttccgcacctggctgtcggagcggctgaccctctgccgcaggctcttcagctcgccgttcttcttctccacctgctcccgcaggcagcacacctggctcttgttctgccgggaggagaagcagtaggagtgcagtgagtcgatgagcttgcaggcccctgacgccgacaggatgacctcgttgatggacatggggctggcgtcgctgtgctcgctctgcacggcttccgtggctggctttgg

SEQ ID NO: 208698 - DNA, 71 bp, Homo sapiens
  chr2:242585229-242585300
  hypo
ggaatgtatgactcgctcccaacagagggcaggattctcggggagggccggagtgcgtttctctggacgga

SEQ ID NO: 208699 - DNA, 165 bp, Homo sapiens
  chr2:242608286-242608451
  hypo
caggcaccacctcctgtgcagccttcatggccttcgagtggcccagagagcgtgtgtctggatgtgagcgtgtgtgggcgcgtgctgagtgtgcatggatgagtgtgagccatggtgagtgtgtccccctcacacctacatttaaacacacgggcggcccctcca

SEQ ID NO: 208700 - DNA, 184 bp, Homo sapiens
  chr2:242610782-242610966
  hypo
acatctggcctgccccgacgtcctgaacctgtccctaggtgagagctgccaagtccaggtggggtccctcggaggtacgatctgtgcccttgcttccccagtcctggcccccttggttttgaccattaaggtgtgtgtgagcctgagccgtgagcacttggcagtggttcgcctgtgagaccag

SEQ ID NO: 208701 - DNA, 206 bp, Homo sapiens
  chr2:242611928-242612134
  hypo
cagagtgttctctcgacactgccagccccgtgttagcacctgggcctcagtcccacttgctcccaggcgccggttctgtggttggtttggaattaaagtcctgtttgaagttgtcagacacagacatgaatttctgggcgctccctgagtcagagtctcagaagacctgtgcaggctggcgtgagaggagcggcagccacactgcg

SEQ ID NO: 208702 - DNA, 208 bp, Homo sapiens
  chr2:242616805-242617013
  hypo
ctgctatcccacctgcgttccgggaaacgaaaagctgcgtgaccagcatcatctgcaggcacagccagtcgggctggggcgagaccctcggccctgctctggaggaggagctcaagggactgaagctccgcgggccgtggccacaagcgacagtgctggcgcccgacgtgccagaagccctggctgccgcctggaaagaggccacgtg

SEQ ID NO: 208703 - DNA, 328 bp, Homo sapiens
  chr2:242617073-242617401
  hypo
agcagaggcggccagcctgcgagtccactgggaggggagagtccagcgtcctgggagcagagccagacctgggactgctgagattgaaggaggcaggactgaagggagaggcagcacacagcaccctcctgaacttagatggccaggtgctgctgcagggcccatgcccagcgagaggccgcaccagaggacacagtggcaggaacaggctggcgctcgtgtctgaagaggggctgaggatgtggaggattgcgcagactctcacctgacccaccagacaaagcgccaaatgtcaacatttagcaaaactcatcgggttagaatttgc

SEQ ID NO: 208704 - DNA, 138 bp, Homo sapiens
  chr2:242617756-242617894
  hypo
ggaccagacggaaacggcagcagctttgctgacacaactgtgccagccaccacggtgtcatcctgagccacttctccacgcttcctagtgtgcaattctgggattctcaccttccagttcaaagtcgtgtctttcatg

SEQ ID NO: 208705 - DNA, 545 bp, Homo sapiens
  chr2:242617924-242618469
  hypo
tggaaagccccgttctcatagcgctcatggccaaacgctccccgcttggcagcatccgccagctgtaactggaggaacaggaccaggtcgggtttgggaaggcccacgtctggctgtttacaccaatctagggaaaaattctgccaagaaagaacccaacagttaaagcttagtgtagtctaggtttttgtttcgaaagtcgtaaaaacaggaaaaaatgaggggacatttggtgaggtaccaagatgtgagactgtttatattgtggctcgtttaatttttagaacctcaaacgtgtcggtttctccagtgtcacctttgtttttcctttgtaaacagacaagtggacagaaaagtaggtagatagaacggctgccagtccccgccacccacagcccaggccccatggaggccctcccagcacagctacaggcctgctggccaggagcaaacagtctatgtacagaacccctggagacccccggcctagaacgcctgcagcacagagcagctgggtccggacacaggcacgaggtccttggcag

SEQ ID NO: 208706 - DNA, 164 bp, Homo sapiens
  chr2:242618723-242618887
  hypo
agggaaggcgtccacgagaacctcccacagagcctgcggctctgtcagctgatccgcacagcaggaagaagcaaaggaatcatgagtcttgtcctccttattatacaacgtaatacttcagaggggaaggactcaagctaacacatgaagaaatggcagaatta

SEQ ID NO: 208707 - DNA, 105 bp, Homo sapiens
  chr2:242637132-242637237
  hypo
gggccacaaaactatgctgtatgacatgtaatggggggtagctgacattatacatttgtcaaaacctataagaatgcacaaggcactgggcgtggtggctcacgc

SEQ ID NO: 208708 - DNA, 195 bp, Homo sapiens
  chr2:242665175-242665370
  hypo
ttctctgggaattggtgattttttactgtgaagatgaaattaccctaatagcatgaagatcgtgggtctgtgtgtccgtgaagtgagtcccgtctgccaggagctgacgaaccacgaatgcttctgcctgtgctgtgcattcccaggcccgcagctcccggtcgaggggactccgatgtgaatttgttgtgaatt

SEQ ID NO: 208709 - DNA, 78 bp, Homo sapiens
  chr2:242713977-242714055
  hypo
cttgcccgcccgcctgcagtgtcggctgaagagggtaacgtgcgtgcgccccggctgctcccggctgctcccggctgc

SEQ ID NO: 208710 - DNA, 71 bp, Homo sapiens
  chr2:242714085-242714156
  hypo
ctccccggctgctccccggctgctccccgctgctcccggctgctctcggctgctcccggctgctccccagc

SEQ ID NO: 208711 - DNA, 78 bp, Homo sapiens
  chr2:242734968-242735046
  hypo
ctggtgaagtcctgcgtgggccttatcagtgagttaatctctaactgtgcggagccgtaaaactgcccttcccacctc

SEQ ID NO: 208712 - DNA, 81 bp, Homo sapiens
  chr2:242735076-242735157
  hypo
gaagtccgcagaagtggcccaatggcagagcaggagctccgctctcagtgtggggcctcgtttgggtttgggaaaacatgt

SEQ ID NO: 208713 - DNA, 183 bp, Homo sapiens
  chr2:242735246-242735429
  hypo
tcctctctgtgcctgggaattctagtgtttactgggccttggccgctgggagcctcttcaaggtggttccattttgacgtaaggactggaggggtgcattgaagaattgtagagtgcaggtgaagggagggcctggaagctcctgtcccgtctcctagaagcgtggctgtggtggcactggca

SEQ ID NO: 208714 - DNA, 280 bp, Homo sapiens
  chr2:242754418-242754698
  hypo
ccaggcgtggtgtccggcatccggccatctccctcctccctccttcccttagccccgcatccaggtgccccgtgtgcccggcctgggcggctggccgtggatctgaccgctcctgcatggtggaggaccagcgttcccactgtctgcagctgtgccacctccctgtgccgggctgtgcgtgctcacgctcggctccgtctgcctttgtgcgatcagactgagagaccccccaggcaggtcccgcctgcaacaagcagaccccatgcgtgccccaaatgcc

SEQ ID NO: 208715 - DNA, 171 bp, Homo sapiens
  chr2:242755673-242755844
  hypo
agcagagcatgggggtccctcgtaccccttcacggacagtgctcttcgagcgggagaggacgggcctgacctaccgcgtgccctcgctgctccccgtgccccccgggcccaccctgctggcctttgtggagcagcggctcagccctgacgactcccacgcccaccgcctgg

SEQ ID NO: 208716 - DNA, 104 bp, Homo sapiens
  chr2:242762674-242762778
  hypo
ggcagaggctgcagtgatgccgccaccagccacgggggctgctcagagctggaagaggctgaaggaccctgcgctggagccttcagagagggtgcgggcctgtc

SEQ ID NO: 208717 - DNA, 253 bp, Homo sapiens
  chr2:242762831-242763084
  hypo
tcagcctccagtcggtgagatttgttgcggcagcctgggaagcagcacaccttcctgcctttgccgtctgtccgtccgtccgtctgtccacatgggcctcagaccccgggggatcctggccgtcactgcccggccatgtgcagcctcggcctgtgtcagacagacttgggctcgaggtccccaggagctccggtcgccgtggtggagcctctcgatgtctcgggctgtctgcggctggagcaccctctgagct

SEQ ID NO: 208718 - DNA, 180 bp, Homo sapiens
  chr2:242791134-242791314
  hypo
tttgagagctgtgagttctggacgctgatctcacaggcagcactctatggctttctcattgcctgtggtcattttccatgggacctatcgggttttgcggatggaaacccacatcatgtgcagagcccccgggcagcgttccctgccaggcctgatctgccggatctcaccgggagttcc

SEQ ID NO: 208719 - DNA, 175 bp, Homo sapiens
  chr2:242874827-242875002
  hypo
ggacggcgctgtgcggctctaggtggaatgcactgggctggccctgccggctatctcagccccgagacccacgaaggccctggccgtgctgtcctcacatcagcccggcccttttcgtccggcgtggagagttccagcctttacggttgtccagggccgcggaggtagccagggc

SEQ ID NO: 208720 - DNA, 189 bp, Homo sapiens
  chr2:242887764-242887953
  hypo
ccgatggtccctacgtagggaccaggcacaacagctctcagatgcaccacgaggcctgatgggatttgcacaggtgcggggacactgtggccaaaatggcttcagatgatctttttcaggaaaatattgtctcagcagtttgcagcacccgtggaccatggtcacccctgacccgttttacagacctca

SEQ ID NO: 208721 - DNA, 209 bp, Homo sapiens
  chr3:3179063-3179272
  hypo
aggagatgtttcagtcggctgggattcggatgataaacaacagaggagaaaagcacggaacaattactgccagggtgagtcaaaagtttgacaggtaattacattgcttttttggtaatttttaaaaacttaattttctctagttaaaagcaaataacgaaaagtctaataaaaaagtcagtctcttctatgcccgtcataaaccctgc

SEQ ID NO: 208722 - DNA, 165 bp, Homo sapiens
  chr3:3786390-3786555
  hypo
tttctaacttcaaagggagccgatcctctgattactggtaagcagcattgagagcgtgagtctttgtgtctctgtggaaccaattatcggtaggcctggaaaattaaaaagttgaattatgttctcgtggatgcatattcagacggtaggcactagtgcagagaa

SEQ ID NO: 208723 - DNA, 232 bp, Homo sapiens
  chr3:4347747-4347979
  hypo
gaatacaacaaacagaaaaacgcactctaccctcaaggtgtttacaactgtcacgattagcttcaatattcctgccgtgcgtgtgtgtgtgcgtttgagactattctataaatctgtttccaatcttgagtcatatttttctttgccatatccaagaacaatctgtaaaactatgtgcccgacgtatttttttaattaactcactttaagcgttaaattatttaaaaataaa

SEQ ID NO: 208724 - DNA, 96 bp, Homo sapiens
  chr3:4755878-4755974
  hypo
gggcagaaataacccggagccaaagaactaagctttctcaagcaaaccagttggcttgagtcaatataataaatgaggtgttctttggcctgggtg

SEQ ID NO: 208725 - DNA, 197 bp, Homo sapiens
  chr3:4756004-4756201
  hypo
ccgtttccctcctcccatccctgttttctgatgagtggcctcttatggagcttgtcccatgactgacacttccctggtgatgtccagaattgttctgcttctctgccctctcctgagccttcaccgccaaagaatcggatctggaggggccctggcatggcttcttccaactctccctgtgcctacgaggaggctgg

SEQ ID NO: 208726 - DNA, 137 bp, Homo sapiens; identical to SEQ ID NO: 198806
  chr3:4910151-4910288
  hypo

SEQ ID NO: 208727 - DNA, 224 bp, Homo sapiens; identical to SEQ ID NO: 198807
  chr3:4910550-4910774
  hypo

SEQ ID NO: 208728 - DNA, 37 bp, Homo sapiens
  chr3:4993606-4993643
  hypo
agctcttaggcactccgctcctttttttttcttttga

SEQ ID NO: 208729 - DNA, 157 bp, Homo sapiens; identical to SEQ ID NO: 198809
  chr3:5019132-5019289
  hypo

SEQ ID NO: 208730 - DNA, 84 bp, Homo sapiens
  chr3:6811742-6811826
  hypo
aacccggtacctcagatggaaatgcagaaatcacccgtattcggccatcttggctcctcccccgtaagtatgcagtgtctttct

SEQ ID NO: 208731 - DNA, 43 bp, Homo sapiens
  chr3:8595738-8595781
  hypo
atttttttagatacacggctctcactctctcacccaggctgga

SEQ ID NO: 208732 - DNA, 223 bp, Homo sapiens
  chr3:8595841-8596064
  hypo
cgcctcaacctcccaagtaataaacctctttaactcttggtaacaaccagtgagagaggttggggttgtgatacccatttcgcagatgaggaccctggggcgcagtgaggttaccccacgtgctgatgagagcggggcttcggttcaatccccagtccttctgcttcaccggcagagtgaagtctgaagccgtgttggggtggggcctcggcagggtgggtcc

SEQ ID NO: 208733 - DNA, 45 bp, Homo sapiens
  chr3:8669371-8669416
  hypo
agatgcccctaccttcgcctgccggaccccgcgcacagctgacat

SEQ ID NO: 208734 - DNA, 154 bp, Homo sapiens
  chr3:9782960-9783114
  hypo
tcatcctctgatcttcgttttgcctctacagagagattctgaggataagaactgggcccttaaagaacagctcaagtcctggcagcggctccggcatgacttggagcgagctcggctgctcgtggaattgatccgcaagcgggaaaaactcaaa

SEQ ID NO: 208735 - DNA, 39 bp, Homo sapiens
  chr3:9793443-9793482
  hypo
tggtctccaggtgtgcgactgctgcgacaagaccccatc

SEQ ID NO: 208736 - DNA, 257 bp, Homo sapiens
  chr3:9905283-9905540
  hypo
ctccacctatttcttcgtttccactggaaacactagtaaaacaattcctcagcctcgaccccagggagcggcccccactaaaccagctgacgtgggacccctgggtcaatgctggccaggagatgcggctgacatcaaagaccctgggcccctgggccccctacaaccctggtcacggtggccatgggattccaggcagcacacatctcagaatcagtatttcccccaccccacaaaaaatacatatatgggtcggg

SEQ ID NO: 208737 - DNA, 33 bp, Homo sapiens
  chr3:9947648-9947681
  hypo
gacttactatcaggccggctcatgcctgtaatc

SEQ ID NO: 208738 - DNA, 204 bp, Homo sapiens
  chr3:9991433-9991637
  hypo
tggtccttgagccatctggaggtcatcagttactgggagtcgttctctctgagctccttgtgctgctttgggcccgtacagggctgggccaaggggagaggctacaggcttctcaggcatctcttcagcaggggcgtggcggacatcagagttcctgtgactgtcagctctggggttctccgggaacacgtcaaaggcctgggg

SEQ ID NO: 208739 - DNA, 86 bp, Homo sapiens
  chr3:10011411-10011497
  hypo
tttgtttgtgtctgcgggcatggccatggctgctcccgtcatctgctcctgcatcattcgtgattggtcagcggctgtagcataag

SEQ ID NO: 208740 - DNA, 203 bp, Homo sapiens
  chr3:10131932-10132135
  hypo
agtgcatcatggtgtgggcacgcatgcttttcccgtcttctaggcatacttttgttgttttcttccgtgtgatgatggctgaactagagaagacggtgaaaaaaattgagcctggcacagcagcagactcgcagcaggtgagtaagataatagtcacttcaagaagtggactttggattacttggaagttgctgatttttttt

SEQ ID NO: 208741 - DNA, 139 bp, Homo sapiens
  chr3:10212191-10212330
  hypo
gttcctctctagcccatcaccgtgtttcatttccctcattccgcttcacagcctttgatgtcccctcgttcctgaattttttccacctgtctctccctatggaatggaagccccgtgcgggcaggggccttacctgtct

SEQ ID NO: 208742 - DNA, 41 bp, Homo sapiens
  chr3:10363448-10363489
  hypo
acccgcctcactacggctctgggtgcgactggtcttatgat

SEQ ID NO: 208743 - DNA, 119 bp, Homo sapiens
  chr3:10638628-10638747
  hypo
accacaggcgagtacgcgtgcacacacacaggcacacgcacacgcaggtgcacacgcacacaggcacacacgcacacaggcacacacccagacacacacaggtgcgcacacacacaggg

SEQ ID NO: 208744 - DNA, 201 bp, Homo sapiens
  chr3:10959983-10960184
  hypo
accctagtgcctctcgctgcttccccacagggactgcatcatgctctgttgcctgaacagcggcaccagcttcgtggctgggtttgccatcttctcagtcctgggttttatggcgtacgagcagggggtacccattgctgaggtggcagagtcaggtaagttcgccaaaggtggggatggaaaaggcggcaagggaggcca

SEQ ID NO: 208745 - DNA, 120 bp, Homo sapiens
  chr3:11133518-11133638
  hypo
caggcctggagcctccaccacggcctcaacctcactctctgccgcgtctcgggagcctgtgagcacccagtggaaggcgcagccgggactcgtgaagccggccccaaatgcattgggttc

SEQ ID NO: 208746 - DNA, 215 bp, Homo sapiens
  chr3:11210148-11210363
  hypo
aatgtggaggcagtgagaagcgaacagcttccaggtctgtttcgaaggcaggactgagcataagggacatctctctgatgcgctcgccccagtcaccccggtggactcaggcactgccgccgcacaatgccacagttggttgcctcatctataacatgagcgtaatcgttgtgcctgcgtcctggggcaacagcgagcatgcagggccctagcag

SEQ ID NO: 208747 - DNA, 42 bp, Homo sapiens
  chr3:11300932-11300974
  hypo
ggtggcggacttgatcgtgggtgccgtcgtcatgcctatgaa

SEQ ID NO: 208748 - DNA, 179 bp, Homo sapiens
  chr3:11581143-11581322
  hypo
tgtgaaactccccccgtcttaagctatattcgttttctcttatgaatttaaaaaataaaatctattgatgcgcatacaatcaaatatatgtaaaagtgcacatttctgagctttgagaaacgtactcgcttgtggaaccagcacagttcggcgacatcgagcaggtctgtctggcctgt

SEQ ID NO: 208749 - DNA, 209 bp, Homo sapiens
  chr3:11600065-11600274
  hypo
catgtgggcagaggggctggcgggctggcccctgcgagaggcggactcagggctgctggatgctccgtccttggccgctttgatctggagccacgtgtcacccagagctttggcaaagtggtcgtccacggagcccgtgatggacacggagttgggtgccggctcgggctccttgtaattcttgcccaggctcctgcggaaatgctcct

SEQ ID NO: 208750 - DNA, 38 bp, Homo sapiens
  chr3:11606285-11606323
  hypo
cggggtcagtgtgggcgagaggccggctggcctgctgg

SEQ ID NO: 208751 - DNA, 197 bp, Homo sapiens
  chr3:11655424-11655621
  hypo
gtgagtgggtgctccgaatctgctccaccaggagccggcgacgtcatctcagagcagctgcctgactttctatgactgtttccacatgtgtgaaaatggtagtgtgaacccacacacaggctcagagcgatacccggcacggtgccgcctcctccccacacacactctggacttacaggctttcttccatgcacgtt

SEQ ID NO: 208752 - DNA, 135 bp, Homo sapiens
  chr3:11707751-11707886
  hypo
tgtgctgcgggaaagcacatgcaaaggccccgaggcaggaggaggccagcgtgacttacaggtcatggaagagccacagttcttatctctgcatgagatgggaagctcctggagggcttccgaacagagcatggc

SEQ ID NO: 208753 - DNA, 81 bp, Homo sapiens
  chr3:12204374-12204455
  hypo
tgactttccataatacgcataaaatgcaggtggcttataattccaattttggaaatattaatcccccacttaaagtttaca

SEQ ID NO: 208754 - DNA, 43 bp, Homo sapiens
  chr3:12575984-12576027
  hypo
gctaatgatgtttacctaatcgtgtggttgtgtgggtaaagga

SEQ ID NO: 208755 - DNA, 60 bp, Homo sapiens
  chr3:12586167-12586227
  hypo
aactctgtctcggggaaaaaaaaaaggtataatcctttcttttgctttctaattcatcct

SEQ ID NO: 208756 - DNA, 144 bp, Homo sapiens
  chr3:12596374-12596518
  hypo
tgctttttgttttgaagaggcgggaactaaattgacaggagactgagacttttcactttacgcttttaaaatatttgaacataataacgttcagatcgtgaatgtattccataaagaatgagataagctgaattttaaaaataa

SEQ ID NO: 208757 - DNA, 101 bp, Homo sapiens
  chr3:12605273-12605374
  hypo
accacacccggccagaatcacctttctttttaagcttgattgtatggatagaccacatcttgtttatgcattcgtccattagcgcacgcttgagttgcttc

SEQ ID NO: 208758 - DNA, 118 bp, Homo sapiens
  chr3:12660087-12660205
  hypo
catctgatgcccggcgctgatagccaaactgctgaactattgtaggagagatgcagctggagccatcaaacacggcatctttgaatccaaaaccattgctgatcgtcttccaagctcc

SEQ ID NO: 208759 - DNA, 40 bp, Homo sapiens
  chr3:12743273-12743313
  hypo
tcgagtagttgggattacaggcatgcgccaccacgcccca

SEQ ID NO: 208760 - DNA, 78 bp, Homo sapiens
  chr3:12821389-12821467
  hypo
actaaagaatatacacggatagcaaataggcacataataattcttaacctcattttttttttttttttgagatggagt

SEQ ID NO: 208761 - DNA, 43 bp, Homo sapiens
  chr3:12940404-12940447
  hypo
agaattgatgagtcggagacaccagggcgcttccctgacagcc

SEQ ID NO: 208762 - DNA, 102 bp, Homo sapiens
  chr3:12940862-12940964
  hypo
ggggggcagtcctcgggtcccatggcttaggagcacagcactgacggctgcagtggctcgaaaggctgaaactacaaagtatggcccgtgggtgactcgggc

SEQ ID NO: 208763 - DNA, 215 bp, Homo sapiens
  chr3:12949721-12949936
  hypo
tcaggggaaatgccgcactggcttcgccgcaggccctgccccgcgtgatgcatgccctgaatgcagacgccctgcctcggtcttgcatgcgctgggctagcaaggtggttctaggccaagctcttaccggcttccgagaggtcccgcagggagctgctgagggcgctgcgcttgaggccctcaccgctggcatagctgtcgtccaggcaggcccg

SEQ ID NO: 208764 - DNA, 75 bp, Homo sapiens
  chr3:12956289-12956364
  hypo
agcagggccaggtagcggacagggcagggcctcagaggacacaccggggtctgtttcaggcgcagggtctggggg

SEQ ID NO: 208765 - DNA, 92 bp, Homo sapiens
  chr3:12976953-12977045
  hypo
aagaggttcaggccgatgcggtagtgcctcttgcggatgacatcgttgctaaaggcaggcgagtcccagctgttgcgggcctccttgtggta

SEQ ID NO: 208766 - DNA, 399 bp, Homo sapiens
  chr3:12984547-12984946
  hypo
tatatacattttctctaaatcttaaaagcagtctacaaagaggaatcatcgactcccctttttcaggtgaggagactgaggcctacagggggtgccaggatgacccaggtaggaagtaggtgagtcagagttcaagcccaagtggtgggaccctgagacccagtggtcccctccgcctcaccacctcctgtccctgcaatgtgcacacatttctctgacatctccaagcaccatgggggagcagtgcccctggtggggccatgcggggcgggctgacgagctcatcccgactcggaactcgcaagccttttcactgtgtgcagacgctggtttccgctgcaggtggcttctcagtgtaggacgagcagggaagggagcgagttatgtcacagtttccaa

SEQ ID NO: 208767 - DNA, 218 bp, Homo sapiens; identical to SEQ ID NO: 198825
  chr3:13008720-13008938
  hypo

SEQ ID NO: 208768 - DNA, 108 bp, Homo sapiens
  chr3:13083878-13083986
  hypo
tccagctggaccacggtaacgtctccgcggagacacggagaggggctagtgggaggtggagaaccggctgcttcggcccgccctggtccctgccacggcggcccccac

SEQ ID NO: 208769 - DNA, 94 bp, Homo sapiens
  chr3:13205534-13205628
  hypo
acatggtttcatcaacgccgctcaccgccaggattcagacacacggacagaggtggatgaagcacatacctgacgctccgcgagctttctcctt

SEQ ID NO: 208770 - DNA, 284 bp, Homo sapiens
  chr3:13611725-13612009
  hypo
gctgggcccctgcccgcgtgcgtgccggtgtgcaccgtgtctgtgtgtgcacacccagtactgacaggcttcctttctgattcccccagggtcttacaggagaggggaccgtcctgggctggcctggaccatggtgctgctctgggagcctgcaggagcctggcttgctctgggcctggccctggccctgggccccagcgtggccgcagctgcccctcggcaggactgcacgggcgtggagtgcccgccgctggagaactgcattgaggaggcgctggagccgg

SEQ ID NO: 208771 - DNA, 207 bp, Homo sapiens
  chr3:13612341-13612548
  hypo
cctgacgccggtggagagctcatctgctaccagctccccggttgccacgggaacttctcagatgccgaggagggtgaccccgagcgacactacgaagacccctacagctatgaccaggaggtggccgaggtggaagcagcaacagccctggggggtgaggtccaggcgggtgcagtccaggcaggcgcagggggccccccagctgct

SEQ ID NO: 208772 - DNA, 36 bp, Homo sapiens
  chr3:13679096-13679132
  hypo
agtgccagaactcgccagcgcgcatcacgcactacc

SEQ ID NO: 208773 - DNA, 144 bp, Homo sapiens
  chr3:14383872-14384016
  hypo
aggtgccttgccccccgccatctggagctgcctacccaatgtttccagtgctgccagtgtggagcaaggcctgctcctgccttgcccttccctgagacacacacccgatcctgaccctctgtgtgccagcgcccaggcccctgg

SEQ ID NO: 208774 - DNA, 265 bp, Homo sapiens
  chr3:14384852-14385117
  hypo
ttacaaatttaaagccggcaaccaggagcattaaacacaaatggcaggctctgagtgcccagcctggcccaggcgtgcggccagcctcaccctgctcccacccgccttagggcccttgccatgctattccctctgcttggaacactctattcctgccctccttcctgattcactcccactcagacaccgcccctggggagcccaccgggatctttcagcccgtgtcacccctccagtgtcgtgtccctcacgtctgaagccccgt

SEQ ID NO: 208775 - DNA, 420 bp, Homo sapiens; identical to SEQ ID NO: 198831
  chr3:14444178-14444598
  hypo

SEQ ID NO: 208776 - DNA, 176 bp, Homo sapiens
  chr3:14514231-14514407
  hypo
acatggcagatgggcgattcggagaagggacccacatttctgtgtgagctgatcattgtctgggccatcgtaataagttgcaagtgcccaggagaagcctacgccacactcaggattctgtgctccctggagcgtgcgaggggctgggcattggctccctcccgtgctttatacac

SEQ ID NO: 208777 - DNA, 178 bp, Homo sapiens
  chr3:15105348-15105526
  hypo
tcccattatctgcctggcagttgcccggggacaaaggtgtgcacagttgtgcagtaggttatgaaggagtatctgggtgcccatacaccctaagaccaagaccaagtcttccaggaagccatcaagccagctgattccaggcaagcaggtccaagttatcagattcacctgcgcagag

SEQ ID NO: 208778 - DNA, 163 bp, Homo sapiens
  chr3:15116204-15116367
  hypo
tccatgcggcccgcggccttggcctgcctgatgaatgatgtgatgttgtggatctgctggaggagcgggtctgagtcctcactctgcccctgacctcctgacagtgggagccagccctcagcctttctcaagggggcagggcccctgcggagagatgccacct

SEQ ID NO: 208779 - DNA, 98 bp, Homo sapiens
  chr3:15123750-15123848
  hypo
ggaactacaaataattcaaacgaacaacttcccaaagcattctccagaatctgcaggagtgtacataacaaacagccaaatctgcctaagaaattaga

SEQ ID NO: 208780 - DNA, 63 bp, Homo sapiens
  chr3:15123992-15124055
  hypo
ggaccgagctgacactgctcatgctgctgatgctgcctcggcgggagccatggacactgttgg

SEQ ID NO: 208781 - DNA, 79 bp, Homo sapiens
  chr3:15374528-15374607
  hypo
attgccgaaggctgcggcctctctgggcgagccccataccgaaacacagaggtgcggcggtcctacctgaatagccagg

SEQ ID NO: 208782 - DNA, 152 bp, Homo sapiens
  chr3:15540528-15540680
  hypo
cccccaccgagaccgtccaaggggagcctgccctcctctgcttcagggaagaccttcatggccaggggtctcagctctaatcctgtctgggccaaagtgttgctgacaaagctaaacgtaactaaaacaacaacaacgaaaccacaaacaaa

SEQ ID NO: 208783 - DNA, 215 bp, Homo sapiens
  chr3:16439262-16439477
  hypo
taggtatttggtctcggtctctctccctctctctctctctttcttttttctttctttctctcaccttgaaaaatagagcggtatttggagaggaggaaaagccaggagaaagttctcaggtcattttgaagaatgccaagttaaaccaagcaagcaagttttgcacccgggacctcttcagagccttgactcttttaagaagcatcatgggccgg

SEQ ID NO: 208784 - DNA, 92 bp, Homo sapiens; identical to SEQ ID NO: 198833
  chr3:16555426-16555518
  hypo

SEQ ID NO: 208785 - DNA, 210 bp, Homo sapiens; identical to SEQ ID NO: 198834
  chr3:16926010-16926220
  hypo

SEQ ID NO: 208786 - DNA, 206 bp, Homo sapiens; identical to SEQ ID NO: 198836
  chr3:16926812-16927018
  hypo

SEQ ID NO: 208787 - DNA, 152 bp, Homo sapiens
  chr3:18452751-18452903
  hypo
atgtgtgtgtgtgcacgtgtgcacgcgcgagtatgtacgcccacatgtgtggtgaaagagggaaggtaaaaatgcgcaaatcagattaaaacctccatgaaatatttgacctaaacatttttagaaggaagacattacgctggtagaagtaa

SEQ ID NO: 208788 - DNA, 130 bp, Homo sapiens
  chr3:18462328-18462458
  hypo
cttcctcttcctagcgggctcccgttctgctccaggcgggcaatcttggctggtggacccttcggatcactcacattgttagacatttctgaatgttctttcccctgagttgcctcgttcaaatgatcca

SEQ ID NO: 208789 - DNA, 277 bp, Homo sapiens; identical to SEQ ID NO: 198837
  chr3:18485652-18485929
  hypo

SEQ ID NO: 208790 - DNA, 86 bp, Homo sapiens
  chr3:19790879-19790965
  hypo
gcagagccacaattacataacggtgctcaggcgcgggcagggttgctgcggggaagtccaaatctggagcctcccgggctagcagc

SEQ ID NO: 208791 - DNA, 44 bp, Homo sapiens
  chr3:20070404-20070448
  hypo
agccactctgtgcacgttagtgaacactgcgctaattcatgagg

SEQ ID NO: 208792 - DNA, 97 bp, Homo sapiens
  chr3:20071112-20071209
  hypo
gcgtgagcctccacacccggcttcacacatcttttttttttttagtgtttatgacatgaggagctctctagactatgcgacccggcataggattcct

SEQ ID NO: 208793 - DNA, 162 bp, Homo sapiens
  chr3:23750593-23750755
  hypo
ctatattgaacaagacgcaagaataacatattgagggtggttataaagaagcaaagtggaagttaaaaaagccatatgccgtaatatttttacctccctgatttcttccatttgaatcccatcatgaaaatatccaagtggtggccaggcacggtggctcac

SEQ ID NO: 208794 - DNA, 204 bp, Homo sapiens; identical to SEQ ID NO: 198843
  chr3:23986746-23986950
  hypo

SEQ ID NO: 208795 - DNA, 441 bp, Homo sapiens
  chr3:24160975-24161416
  hypo
catgcttcaagggtgctcagcggttccttggaggctgagtctgtggggggcttagtgtcgaggaggggccagggcttgtacccctgttcatggaggagcaacaagaacggcgttgctggcacagagcgaaggcctggcagtccaccccaggcctgcactgcacactgaagagctgtcgcccggggcacaggtgaggggcttcgctgggctgaggcatcaacaggtcaagcgcgtcattgaggaccgaggctctagaaaaagctctgaggcggcacgtggtgttttgagcagaatcataaagaagaaaacatcttacttttttcattgtttctggaaatactgcacgtctaaattgagcaaagtacacttgagggtcacacacgcacgcgcatacactcacacgcacacacgccccacaccgctcatccctaaaagggaagt

SEQ ID NO: 208796 - DNA, 169 bp, Homo sapiens
  chr3:24344850-24345019
  hypo
cttgctcttgcttctcggccgctacctgggctagcctgctgcaggaagagaatatgttgtggagtttttccaatgttctagtagaggccatcctcaatcagcccacagctagccagccccagacaccagacacgtgagcatgcccgattatcatcgcagagctgctgag

SEQ ID NO: 208797 - DNA, 31 bp, Homo sapiens
  chr3:24374243-24374274
  hypo
aaggagataaaactcaaacacgggctgggcg

SEQ ID NO: 208798 - DNA, 195 bp, Homo sapiens
  chr3:24436870-24437065
  hypo
tctgtatctaaaatacgtaaaggactattataactcaataatgataaaacgaataatccaattggaaaataggcaaaggatctaaattagaagtttctccaaagatgataaacaagtgggcaaaaagcacataaaaagacgttcaacttgatttgcagtacacgcaaatcaaaactacagcgatataccatttca

SEQ ID NO: 208799 - DNA, 760 bp, Homo sapiens; identical to SEQ ID NO: 198844
  chr3:24536592-24537352
  hypo

SEQ ID NO: 208800 - DNA, 369 bp, Homo sapiens; identical to SEQ ID NO: 198845
  chr3:24563042-24563411
  hypo

SEQ ID NO: 208801 - DNA, 97 bp, Homo sapiens; identical to SEQ ID NO: 198846
  chr3:24563522-24563619
  hypo

SEQ ID NO: 208802 - DNA, 41 bp, Homo sapiens; identical to SEQ ID NO: 198847
  chr3:24563737-24563778
  hypo

SEQ ID NO: 208803 - DNA, 212 bp, Homo sapiens
  chr3:25728357-25728569
  hypo
ccgccgccagcaccggacccggagccgccatgcccaagtgccccaagtgcgacaaggaagtttacttcgccgagagggtgacctctctgggcaaggacttgcctcggccctgcctgaagtgcgagaatgtgggaagacgctgacctccgagggccacgctgagcacgaaagcaagccctactgcaaccacttgctatgccgccatgtttggg

SEQ ID NO: 208804 - DNA, 100 bp, Homo sapiens
  chr3:27519021-27519121
  hypo
tgtttggcaataccacgtaatattaagctgcattctctccccatcaaagtttaatgtctttatgtattataaggtttctcagagcctttttttttggaga

SEQ ID NO: 208805 - DNA, 35 bp, Homo sapiens
  chr3:27564148-27564183
  hypo
aagagcaaaactccgtctcaaaagaaaaaaaaaaa

SEQ ID NO: 208806 - DNA, 37 bp, Homo sapiens
  chr3:27587341-27587378
  hypo
caaaattggagagagcgtctccctctgtcgcccaggc

SEQ ID NO: 208807 - DNA, 36 bp, Homo sapiens
  chr3:30574870-30574906
  hypo
aaagaaaatcaatgacgtggtcgcccatgtgcccac

SEQ ID NO: 208808 - DNA, 174 bp, Homo sapiens
  chr3:30713673-30713847
  hypo
acaggagtacctgacgcggcatgtcatcagctgggaggacctgcgcaagctgggcagctccctcgcccgggggattgctcacctccacagtgatcacactccatgtgggaggcccaagatgcccatcgtgcacagggacctcaagagctccaatatcctcgtgaagaacgacct

SEQ ID NO: 208809 - DNA, 37 bp, Homo sapiens
  chr3:31717147-31717184
  hypo
aactgcagggccaggcgcagtggctcacgcctgtaat

SEQ ID NO: 208810 - DNA, 565 bp, Homo sapiens; identical to SEQ ID NO: 198866
  chr3:32433047-32433612
  hypo

SEQ ID NO: 208811 - DNA, 200 bp, Homo sapiens; identical to SEQ ID NO: 198867
  chr3:32433665-32433865
  hypo

SEQ ID NO: 208812 - DNA, 82 bp, Homo sapiens; identical to SEQ ID NO: 198868
  chr3:32434068-32434150
  hypo

SEQ ID NO: 208813 - DNA, 224 bp, Homo sapiens; identical to SEQ ID NO: 198871
  chr3:32612552-32612776
  hypo

SEQ ID NO: 208814 - DNA, 145 bp, Homo sapiens
  chr3:33012238-33012383
  hypo
cccgaataatcctacggcgaaacctaaccaccggtaagaaggacaactgccctgctctgaccacactggaagctaagctcttaccctaagctcttaccctatgaattctggtttgaggttcatattaaatcggagagagaaaaag

SEQ ID NO: 208815 - DNA, 202 bp, Homo sapiens
  chr3:36778835-36779037
  hypo
ggtctcctccctgcacgtactccaggatcaggtagatttccatgtctgtttcgtagacttcatgcaatttcacgatgttggggtgagagaggctctggatgatcaagatctcactgtccaccatgtcctccttgcccttgagtctggacttgtcaatgatcttcatcgcataggcctgcctggtctcgcggtgtctgcactc

SEQ ID NO: 208816 - DNA, 138 bp, Homo sapiens
  chr3:36984240-36984378
  hypo
actcccctgtgaaatgctgacggtctcctcatactctgggagagcggcggaaacagaacctgcagttgccccataaagctggtcagtcggtcataaagtgaagttaacaatttatgacccgctttaaaaaaaaaaaaa

SEQ ID NO: 208817 - DNA, 41 bp, Homo sapiens
  chr3:36984642-36984683
  hypo
attgcactccagcctgggtgacagagcgagaatccctctgg

SEQ ID NO: 208818 - DNA, 166 bp, Homo sapiens; identical to SEQ ID NO: 198877
  chr3:36985645-36985811
  hypo

SEQ ID NO: 208819 - DNA, 1448 bp, Homo sapiens; identical to SEQ ID NO: 198879
  chr3:37033965-37035413
  hypo

SEQ ID NO: 208820 - DNA, 162 bp, Homo sapiens
  chr3:38017265-38017427
  hypo
tcatgtgtttttcatcgtgggaactacgtgaaggacctgagtcgccttgggcgggagctgagcaaagtgatcattgttgacaattcccctgcctcatacatcttccatcctgagaatgcagtaagtggccccaaagaaagaaaatgtcgtgctccatctgag

SEQ ID NO: 208821 - DNA, 87 bp, Homo sapiens
  chr3:38030531-38030618
  hypo
gagacacagagggaggctggctccggagcaggcaggaggcgtgagagggagggccaggcccaggatccaccatgaaccagctgccga

SEQ ID NO: 208822 - DNA, 90 bp, Homo sapiens
  chr3:38030782-38030872
  hypo
gtgacagacggaagatggagacttaggccggggcaaggttcgggggagttgggtcagggagacactggcgtttccatgctatttgcagcc

SEQ ID NO: 208823 - DNA, 329 bp, Homo sapiens
  chr3:38033620-38033949
  hypo
cagtagtctttctggcactctgtcaccatgttgtactcttccatgagctacagctcacagtttctgtctgcacctctggtcactgcctgcctgggcctctggtaactgtcactggtcactatttctgcctattactcagtgtccttctacggggccaccactggtggacatcctgcttgtcacccaatgtcctcacgttttctgttgcttgagatcaccttttcatggccactatgtctgcctgtcactcatgtcattgtcacaccaacaggccatcaactgtggcaacagttcttggggcaattagggtgcacggacggctcccttct

SEQ ID NO: 208824 - DNA, 129 bp, Homo sapiens; identical to SEQ ID NO: 198883
  chr3:38182655-38182784
  hypo

SEQ ID NO: 208825 - DNA, 78 bp, Homo sapiens; identical to SEQ ID NO: 198884
  chr3:38495097-38495175
  hypo

SEQ ID NO: 208826 - DNA, 52 bp, Homo sapiens; identical to SEQ ID NO: 39102
  chr3:38495213-38495265
  hypo

SEQ ID NO: 208827 - DNA, 101 bp, Homo sapiens; identical to SEQ ID NO: 198886
  chr3:38495679-38495780
  hypo

SEQ ID NO: 208828 - DNA, 1234 bp, Homo sapiens; identical to SEQ ID NO: 198887
  chr3:38496021-38497255
  hypo

SEQ ID NO: 208829 - DNA, 202 bp, Homo sapiens; identical to SEQ ID NO: 198889
  chr3:39148307-39148509
  hypo

SEQ ID NO: 208830 - DNA, 106 bp, Homo sapiens
  chr3:39234910-39235016
  hypo
agtcctttcttctcgactcttccctctgactcagggcccaggctttctgggaatggaggggaggggaagggcggcatgcagggagctgaccgtggggttatttctg

SEQ ID NO: 208831 - DNA, 45 bp, Homo sapiens
  chr3:40172135-40172180
  hypo
gctgggattacaagcgtgagccaccgcgcccggcctctagtccaa

SEQ ID NO: 208832 - DNA, 68 bp, Homo sapiens
  chr3:40231758-40231826
  hypo
gcatggagagctggacgtgaacttcaacccccagttggccagcagggagacctcggacagcagcgagc

SEQ ID NO: 208833 - DNA, 220 bp, Homo sapiens
  chr3:40429618-40429838
  hypo
gttttgccaaatcgcaagagaaccccagcttcggcctacagtttttcatccatatcccctgcaaatgattgtttaactttattggtttgagactcagtactcagctgggtttcaacaccggcattcctcaaataaaagtaatgcttttcatcaaagccacacaaaacaaggactaacatgcatgtttcacttaaatggtttttccggtttgtataatcca

SEQ ID NO: 208834 - DNA, 153 bp, Homo sapiens
  chr3:40510132-40510285
  hypo
atagaacaaactcaccgtcttcataatactacgtcttcgatccaggagcatggtatatttccaactacttgggccgtcattcttttcaaaattaaaacaaaaaaacaaaaaaaaactgtatcttggcttattcctggtgattttttgtttgtt

SEQ ID NO: 208835 - DNA, 190 bp, Homo sapiens
  chr3:41119485-41119675
  hypo
ctacgggagagtgcccgcccaccagtgttcataccggagtttctaagcctggacagcggtccccacagtgggcctggacttggcagaggaaggtgacagcacggtggcctccaataacctggtctgacacgtgttcacacaagccatcttggagactcctagaagtaccttgagacgggatttttaaaag

SEQ ID NO: 208836 - DNA, 150 bp, Homo sapiens
  chr3:41289199-41289349
  hypo
gtgtgacagaaggaatgcgtttgaacttggcccacccctggctgagtctaggctagactagtggggccatgctgcgcccccgcacacagcaggcccagtgaggctggaaaggacaaactactggcagagcagcatcggaactgagaacaa

SEQ ID NO: 208837 - DNA, 270 bp, Homo sapiens
  chr3:42190936-42191206
  hypo
gtattctggaagggcggggaggcatggcagcgttttacttgacgttgatggtgctgtgaagtccattctttcctctgcaagactactgactatgcagaaatttatcgaagcggattattatgaactagactggtattatgaagaatgctcggatggtaattatggcccctgcaaaacagagccgggatgtataggggtattgtctccttctgggtggggggtgtcctgaaacctttaggggagacaggcggctggcgggtgggaggtacc

SEQ ID NO: 208838 - DNA, 104 bp, Homo sapiens
  chr3:42577666-42577770
  hypo
gaggcagcaacggcgccacgtgcagcacgcaggtttccatgctgacccgcgtcagcccaggtgcccgccgctcctccagcttccaagccgaagtctccctggtc

SEQ ID NO: 208839 - DNA, 39 bp, Homo sapiens
  chr3:42659548-42659587
  hypo
ttagaacaaactggccgggtgcggtggctcaagcctgta

SEQ ID NO: 208840 - DNA, 382 bp, Homo sapiens; identical to SEQ ID NO: 198897
  chr3:42696177-42696559
  hypo

SEQ ID NO: 208841 - DNA, 73 bp, Homo sapiens
  chr3:42906566-42906639
  hypo
tgtgtggaactgccacgcagatttcggcgggcatgggaccatttggaagctcttcctccgcttccagcagaac

SEQ ID NO: 208842 - DNA, 44 bp, Homo sapiens
  chr3:43075000-43075044
  hypo
cataccgagtgggcacgcctggcgctcttcgacttcctgttgca

SEQ ID NO: 208843 - DNA, 69 bp, Homo sapiens
  chr3:43121474-43121543
  hypo
gcctggatataggccgactgtccacttctgcttccgtggtcctggccggcccttcaccacgcgccgtat

SEQ ID NO: 208844 - DNA, 110 bp, Homo sapiens
  chr3:43121573-43121683
  hypo
ggtgtcctggtagattcggaagagccactcggggttccggcaacagagatgccgtgggacctcacggctttgcaggatacgggcttgctcagcccggtccagatgggtga

SEQ ID NO: 208845 - DNA, 257 bp, Homo sapiens; identical to SEQ ID NO: 198901
  chr3:43147024-43147281
  hypo

SEQ ID NO: 208846 - DNA, 120 bp, Homo sapiens; identical to SEQ ID NO: 198902
  chr3:43147607-43147727
  hypo

SEQ ID NO: 208847 - DNA, 163 bp, Homo sapiens
  chr3:43655492-43655655
  hypo
agatacacagaaaaccccaaggtttccaatcttggatatgggaagaataactatgcgtgaaaaaaatagcaaagttggaaagaatgtctagtttaagggaacaataaagtgttccgcagagtatctggggacacgcatcaaaggtcaacgtttttgaacattt

SEQ ID NO: 208848 - DNA, 214 bp, Homo sapiens; identical to SEQ ID NO: 198903
  chr3:43663334-43663548
  hypo

SEQ ID NO: 208849 - DNA, 50 bp, Homo sapiens; identical to SEQ ID NO: 198908
  chr3:44379864-44379914
  hypo

SEQ ID NO: 208850 - DNA, 206 bp, Homo sapiens; identical to SEQ ID NO: 198910
  chr3:44518642-44518848
  hypo

SEQ ID NO: 208851 - DNA, 540 bp, Homo sapiens; identical to SEQ ID NO: 198917
  chr3:44803071-44803611
  hypo

SEQ ID NO: 208852 - DNA, 37 bp, Homo sapiens
  chr3:44808574-44808611
  hypo
tacaggtgtgagccaccgtgcccggccaactttcttt

SEQ ID NO: 208853 - DNA, 210 bp, Homo sapiens
  chr3:44816761-44816971
  hypo
atcaaagtttttgtgcgaattcgtcctcctgcagaaagatctgggtcagctgatggagagcagaacttatgcttatctgtgctgtcctccacgagtctccggctgcactccaaccctgagcccaagaccttcacgtttgatcatgttgcagatgtggataccactcaggtaatgataattagaaacttaacttttttttttttttgaaaa

SEQ ID NO: 208854 - DNA, 76 bp, Homo sapiens
  chr3:44882438-44882514
  hypo
tacaggtgtgagccaccatgcccagccgtagctagaatattttttatgtacttgacatttacgtttaaaagaaatc

SEQ ID NO: 208855 - DNA, 260 bp, Homo sapiens
  chr3:44945261-44945521
  hypo
gaacaacctcagtgggtccccggtgatgaagatgtctctggcaattttggcgtatttatctctaactaggtttgggggtggtccggggtggggcccgttcccaatttgcggcaggaatttccatgtgtggacggatgcctggatgaagcgaccggatctgcccaagggctacgacggctggcaggctgtggacgcaacgccgcaggagcgaagccagggtgagtgggtggcaggaaggcgctgggcatccatgctgctct

SEQ ID NO: 208856 - DNA, 296 bp, Homo sapiens
  chr3:45719314-45719610
  hypo
aggatttttttttttgcccacgtgtttgcgctgtttttctctggagttctcaagagttggtgacttggaaggccgcttctgcaaggcaagtctcaggaacccatgcaggtacatcgcttgcacctgtttttagcttatttaatgacgggcttttgggaagagctgcccgcatactgagagacagcttcttataaacaaggagagtttttgtgtgtgcgagatctctaagccagcgtgggagggagcgcctcaggataagttattatattcatttcgttggtttctctcctgcccaa

SEQ ID NO: 208857 - DNA, 43 bp, Homo sapiens
  chr3:45968554-45968597
  hypo
aagcttgtccaacccgcggcccaggaaggctttgaatgcagcc

SEQ ID NO: 208858 - DNA, 42 bp, Homo sapiens
  chr3:45968717-45968759
  hypo
cttccaacgaggcccagggaagccaaacgattggacaccctt

SEQ ID NO: 208859 - DNA, 195 bp, Homo sapiens
  chr3:46943639-46943834
  hypo
tgaggaacaggtaggcggtgagtggccccgggaaggctgcagctcagctgaaacctgaggagcggactgtgggatagtgaggttcgaccgtggaggggagtgcttgccagctgagggctccacaggtgcgaagggcccagggacagggggactgtcatttgaagtccgctccgggacaccgctgagaaccaacgg

SEQ ID NO: 208860 - DNA, 31 bp, Homo sapiens
  chr3:46985694-46985725
  hypo
aaagtcacagaacccatcagcggtagctgca

SEQ ID NO: 208861 - DNA, 159 bp, Homo sapiens
  chr3:46985755-46985914
  hypo
ccctcagtcttgccaaggagacgagagagaggctatcaagagtggaagagtggcgctgagtttctaaagagctctgattctacccgcctctcctgcgctccccacacagttcagacctggtcccatgtgctcagatgcggccacagccagcccaagtcc

SEQ ID NO: 208862 - DNA, 38 bp, Homo sapiens
  chr3:47007698-47007736
  hypo
aaagaaagaaagaaagaaagcgggctgggcacggtggc

SEQ ID NO: 208863 - DNA, 81 bp, Homo sapiens
  chr3:47889946-47890027
  hypo
gctctgtcataggcggtggagttcctgtccaaggctgtggacagtccaaacatcaaggcagtggacgaggctgtgatcttg

SEQ ID NO: 208864 - DNA, 501 bp, Homo sapiens; identical to SEQ ID NO: 198923
  chr3:47890801-47891302
  hypo

SEQ ID NO: 208865 - DNA, 168 bp, Homo sapiens
  chr3:48263634-48263802
  hypo
cccagtggggacaaccgggacgttcatgggagtctcgaactcagagatacagactgggtggtgtctgcctattataactggtgtcctgggagagggcgtccccagggaaacccgaggccagggaagagaagcagcccaggaggtgaccccacacgctctcaatattaa

SEQ ID NO: 208866 - DNA, 32 bp, Homo sapiens
  chr3:48275732-48275764
  hypo
cgcacccagccggaaatctgttttaaactgca

SEQ ID NO: 208867 - DNA, 219 bp, Homo sapiens
  chr3:48459418-48459637
  hypo
cccctgatggtgacacgggtgcctccgtctacaggcccagtcagtggctccacctgttccaggacaaggactgctcacctctactcaactggaaaggcagccccaacctcccacctttgggcccccacaccctccctctaagggcagcactgaggaagggatggccagcctttcaacaaaccgagtggatgaggggcgctgggcactgggtggccacag

SEQ ID NO: 208868 - DNA, 296 bp, Homo sapiens
  chr3:48474263-48474559
  hypo
tgtggaggtccctctgctggcgggagtagctagacgcctgttctcgaatggcctcttggagactcacaggccccttctgcgcctccaggagtaaagccttcagctcctgtagtcgcacacggttcacataggtggagccagccacaccaatcagggcccccaggactgagccaatgagggaccagttcttggtcctctcagcccttgtgcgctccttctcatgactttcccgcacagctgcagagaagagggagaacttctctcgctcagagtcttctgcacgcagataggctgtg

SEQ ID NO: 208869 - DNA, 84 bp, Homo sapiens
  chr3:48563029-48563113
  hypo
cctggtcccgcagggcgaactccagtggataattatcctgaatttcctcgtaggtcatttcctcacagacgccctagggagata

SEQ ID NO: 208870 - DNA, 39 bp, Homo sapiens
  chr3:48607711-48607750
  hypo
atgcctggctccccacgctcgcctcggggcccaggcagc

SEQ ID NO: 208871 - DNA, 33 bp, Homo sapiens
  chr3:48698431-48698464
  hypo
tgaactgaggagcattgtcgttctcgtctagca

SEQ ID NO: 208872 - DNA, 257 bp, Homo sapiens; identical to SEQ ID NO: 198926
  chr3:48700956-48701213
  hypo

SEQ ID NO: 208873 - DNA, 120 bp, Homo sapiens
  chr3:48703692-48703812
  hypo
tgggattacaggcatgagccattgtgcccggcctgccctgttcttcttagacaaacttgctgggctaaaatctaaccccgttaaaatagactatttacgtattgtttgcctctagcgcag

SEQ ID NO: 208874 - DNA, 129 bp, Homo sapiens
  chr3:48731397-48731526
  hypo
tcagcaggtgccgacgagcgccttacaaacgactggctgaacacctttcctcccaggcctctctgccccagcatcactcaatctgctcagtcctcgactgctgcaggggaatgcgtgctcagagagaga

SEQ ID NO: 208875 - DNA, 35 bp, Homo sapiens
  chr3:48733584-48733619
  hypo
ggattacaggtgtgagcgaccgcacccagccccat

SEQ ID NO: 208876 - DNA, 31 bp, Homo sapiens
  chr3:48986829-48986860
  hypo
gtgcccagccgtgtttaacattttaagaaat

SEQ ID NO: 208877 - DNA, 85 bp, Homo sapiens
  chr3:49023684-49023769
  hypo
tatgcaagtgattcacgtgctctagcttccaggagcttccaatccatggggaacatagaaggaattgatcactagtgaatgtttg

SEQ ID NO: 208878 - DNA, 33 bp, Homo sapiens
  chr3:49034171-49034204
  hypo
gcaaagctacggaccggtaaaggttaatcaggt

SEQ ID NO: 208879 - DNA, 323 bp, Homo sapiens
  chr3:49035605-49035928
  hypo
cagactcacatgggcggtccaggcgggagccgttgttggccacagcagtgatacagagatcatggcccaaggggaagcgtccacaatgcaggatggctggccaggggtagctgtagcaggccatgatgggctcgcagctggcctgcatggcctcgcacaggctgtaggaggggtagatgaccctttgggggaaagggtcgggggctgcaccgccacaggctgagcacccagatcagctggaacctctccatgttcctacccctgtctcgtggcctggaactctctggttgctgggcaacgacactggtcgcctagcaacagcc

SEQ ID NO: 208880 - DNA, 42 bp, Homo sapiens
  chr3:49080008-49080050
  hypo
gtttgtttttttttttgagacggagtcgcgctctgtcaccag

SEQ ID NO: 208881 - DNA, 180 bp, Homo sapiens
  chr3:49095131-49095311
  hypo
agctgcttgcagctgcgagggactgggactctgcagagacggggtctgaatggagggggctgctgactgtggtgcctggccttggatctgcacctggacctggatgggttgctcagtaggctggtgaacggtgagttgtggggagagctgagccgagacctgttgcggagactgctgtac

SEQ ID NO: 208882 - DNA, 32 bp, Homo sapiens
  chr3:49145906-49145938
  hypo
gttcaggggctgtccgcgtgggggccacctcg

SEQ ID NO: 208883 - DNA, 31 bp, Homo sapiens
  chr3:49433706-49433737
  hypo
ttcaagaagtcagcccggggccaggcctggt

SEQ ID NO: 208884 - DNA, 36 bp, Homo sapiens
  chr3:49532336-49532372
  hypo
attacaggtgtgagccaccggcgcttggctgcttgg

SEQ ID NO: 208885 - DNA, 181 bp, Homo sapiens
  chr3:49688341-49688522
  hypo
caggaaaagaagacccgagtccccactaaagctgagcccatgccgaagccacctccagagactaccccaacccctgcgactcctaaagtaaagagtggggtgaggagggctgaacctgccacccctgtcgtcaaggctgttccagaagcccccaagggtggggaggcggaggtcagtccca

SEQ ID NO: 208886 - DNA, 117 bp, Homo sapiens
  chr3:49690065-49690182
  hypo
ggcaccgctcccacgggcccctgctacccaccatcgaggactcctcagaggaggaggagctgcgggaggaagaggagctgcttcgtgagcaagagaagatgcgggaggtggagcagc

SEQ ID NO: 208887 - DNA, 57 bp, Homo sapiens
  chr3:49690212-49690269
  hypo
ggcgggacaaggaagaactgcgggcccagcggaggcgagagcgctccaagacaccac

SEQ ID NO: 208888 - DNA, 165 bp, Homo sapiens
  chr3:49699608-49699773
  hypo
gggcaccttctgcatacagtggggagaagctgtccagccacgacttcagtggctggggcaaggggtacgaaagggaacgggaggctgtggagcgacttcaaaaagcgggccccaagccctcatccctaagtatggcccacagccgggtacgaccccccatgcgga

SEQ ID NO: 208889 - DNA, 569 bp, Homo sapiens
  chr3:49720264-49720833
  hypo
gtgtcttgcaggtgcgtggtggaggctggctttcctttcagcagtgactgcctgccagacctcagcgtgtgggctgagatgctggacaaatcgcccatcagatacatccctcaggtatgcagccccctccttgccctgtgtgctgcccatccatccagaatccagggcccagctcaacacagctccccactcttccccaaacacccaggtgaagacaccactgttactgatgttgggccaggaggaccggcgtgtgcccttcaagcagggcatggagtattaccgtgccctcaagacccggaatgtgcctgttcggtgagtgcagcatgaaggccctggcagctggtgggcaggtgagcacaggaggaccctccaaccttaaatgttgctgactaatccctacaggctcctgctctatcccaaaagcacccacgcattatcagaggtggaggtggagtcagacagcttcatgaatgctgtgctctggctacgcacacacttgggcagctgaagccctgccattctgcatgagctgatcagcctgtgccacacttcgctcttgaggagct

SEQ ID NO: 208890 - DNA, 233 bp, Homo sapiens
  chr3:49940594-49940827
  hypo
gctctaggtcatgcaggaagcagcggccctgcaggctggagccacaactgaccagcgcaggcagcgcgggatccagcaccagcacctttgtgtctgtgtcaccgggagggccgtggggtcctgggccacaggctgcacacgtctggcagccagggtctccagcagggcccgtggccaggctctggacagacttcaggtcaggcccaagcacatgcaggcgattgcgtatggct

SEQ ID NO: 208891 - DNA, 226 bp, Homo sapiens
  chr3:49948218-49948444
  hypo
agagcagctcctgcgccagctcttgtgccgactgccgcgtacgagccaccgccactagcaccagcgggctccggcgcacgaatactaccttgtagccatctgagagcgggacaggaaagaaggatgtcagcctcagcggcagctccctccgaaaaccgccttccagcgcagctcttcgctttccccatcctttcctcgctcagagctctgcgcacagtaggggttt

SEQ ID NO: 208892 - DNA, 114 bp, Homo sapiens; identical to SEQ ID NO: 198941
  chr3:50192966-50193080
  hypo

SEQ ID NO: 208893 - DNA, 57 bp, Homo sapiens
  chr3:50224043-50224100
  hypo
agccaacaagaatgccgtggagtctgtgcagtatggcgtggccggcagcgcagcctt

SEQ ID NO: 208894 - DNA, 319 bp, Homo sapiens
  chr3:50255800-50256119
  hypo
cagtacggtggcaccggtgggcagaggcctaggctaggctggggggaaggggctggttgtggccatggtgccctccataccgaggcgtgtggtgcctggctgtgccttgccgctgtggaggtgagtctgcatgccaatccccacagtgttggggtcccctaggcagctcagatcccacctccttcctggggccacctactgaccaccctccctgcctgccacagacggggtggagtcggagctgctgcacacctacagcaaggtggacccgtttgacgtcctgatcctgtgtgtgcgcgtggccgtgctgacagcagtc

SEQ ID NO: 208895 - DNA, 365 bp, Homo sapiens; identical to SEQ ID NO: 198943
  chr3:50374290-50374655
  hypo

SEQ ID NO: 208896 - DNA, 66 bp, Homo sapiens
  chr3:51996783-51996849
  hypo
cccagcaagccaccgtatggcataaggtctttgtttcctcacctatccaacggaggtgacaccctg

SEQ ID NO: 208897 - DNA, 195 bp, Homo sapiens; identical to SEQ ID NO: 198950
  chr3:52001297-52001492
  hypo

SEQ ID NO: 208898 - DNA, 166 bp, Homo sapiens
  chr3:52088124-52088290
  hypo
ggtggagtccttggcgcagccgaggtagaggtagggcaggatctggacagggaaggctggttggctggatggcacagggctgccgtctgactcggtggcactgctgggcagctctcggtccgactcgccgtcggagcagtcagagctgatgcgcaggccccccagg

SEQ ID NO: 208899 - DNA, 282 bp, Homo sapiens
  chr3:52257379-52257661
  hypo
tctcactcaggtccagcactcggaggtttcccagcccacggaaccaactggcattcagccaggagagagaactgtccttcaacaccaggccttcaagacggctcaggtggctgaaggtatcgggatgtagctgggggaagtgacgagggcactccatgcaggggttgggagcgtggtcgcagcggcggcaatttccgcccacatcgagcacacgcagggcggtcagattggccaggtcctcaggcgccagtttgacgatgcggttgtaggacaacagcagat

SEQ ID NO: 208900 - DNA, 36 bp, Homo sapiens
  chr3:52440357-52440393
  hypo
ccatcaggttgaagcggatgtcgtggtagggctccc

SEQ ID NO: 208901 - DNA, 203 bp, Homo sapiens
  chr3:52526332-52526535
  hypo
ctttggggaggtgccaggtggcccggctagagccagccagggccgtgaagtccagtggcaggtgtttgtccccagtgctgagagcagagagaagctcatctcgctgttggctcgccagtgggaggccctgtgtggccgtgagctgcctgtcgagctcaccggctagcccaggccacagccagcctgtcgtgtccagcctgacg

SEQ ID NO: 208902 - DNA, 212 bp, Homo sapiens
  chr3:52537789-52538001
  hypo
cttctgcacctgccggccaggcctggtcagcatcaacagcaacgcttctgcgggctgcttcgccttctgctcccccttctcctgcgaccggtctgccacttgccaggtgaccgctgatgggaagaccaggtgagcacaggtgcctgggagcagagacagtgggttgggcaagcgtgccctctgcgggaaggcgtggggggtgcggtgggggg

SEQ ID NO: 208903 - DNA, 211 bp, Homo sapiens
  chr3:52540175-52540386
  hypo
cttgccccagctgaccgttgagaagctcatctccaagggtcggatcctcaccatggcgaaccaggtcctggctgtgaacatttctgaggaggtgaggtgcacggacacctgggcggatggtggggctggcggtgaccagctgcccacttggcctctcagccttgtgtgctccgagccccgtggtgggcaggacactgctaggccatggcgg

SEQ ID NO: 208904 - DNA, 135 bp, Homo sapiens
  chr3:52552661-52552796
  hypo
ctgggtgctctggtggtggccctgcgtgggctgaggcggcagtcagggaccccactcccctcgcgactctgctccaggatgagctggcccggattcgtgcgcatcgccagctggtgtttcgctaccacgtggttg

SEQ ID NO: 208905 - DNA, 53 bp, Homo sapiens
  chr3:52553499-52553552
  hypo
tttatgagagcctttcctcagagaaatgtcaccgccgccgcccagggcttcgg

SEQ ID NO: 208906 - DNA, 566 bp, Homo sapiens
  chr3:52899903-52900469
  hypo
gtgtgtgtgtaggggcggtggggggacacaaaccgtcacatgctttacacgttgtctaaccttcctgctctcacctactgtacacatggctccattttctttcattagaggctacatggcatcccacagtgtggctgtgccatctcatttactctatgagctgctgccgcgaatgtccctgccatgtgctacctctgcctgtgtgggcccatatctgaggggcagattcctagaggcacacttgctacatcaaaagctatgtgcggcttattctgtggcgccgctctccacagaggctgtgccaactcacactcccactaatagcacgagtacccattcccacattcttgccagcatggtgtactagcaaaccttctcactctgacaatttgatcgctgaagaggctgtctcagcacggctgcggcgtgcacccatcaggccacttgggtgccagggcacctgcggggcttgccaccgtctaccgccttgaggggcctggcagggctcccagtcccaccccatctcacctgctctctcctctcggacatgagcccagagcccctcc

SEQ ID NO: 208907 - DNA, 215 bp, Homo sapiens
  chr3:52900499-52900714
  hypo
ataccagggtgtggtggtgctcactctcccagaagtttgggcagtgctactggtgccacacaataggacagcaattatggatgactcaactctacctgtcgacttcacacagcacccaggtcaccgactgctcacttaacgctatgttgtttggttttccacacgccactctcacttggcatgtggagggcggggaccaggcacccagctcgact

SEQ ID NO: 208908 - DNA, 329 bp, Homo sapiens
  chr3:53032404-53032733
  hypo
ctcaaaaaaaagaaaagaaaagaaaaaatgtagatcaataatattattttgctgacgcattggagaaagtaaaggctgggtgcagcttcaagctgaggaccacccaccatgcccccatcatggtggttcccctaggtgctgaagggcccagccatagctctcgccctcgcagggtccctccagggtctctgctgtttcctacctaggggtgactgcagccatggctaagaaagcgccagcgcccacccacctgggccaatggactggttctgctcgtgccacgctggttctgctcctcgccatctcggcagttcagaaagaaccccaac

SEQ ID NO: 208909 - DNA, 139 bp, Homo sapiens
  chr3:53054013-53054152
  hypo
ctcacccagccttctctacacgtgactgcttcttgccttccacagcttagtctaaaaccagtacataaagatttttttttttcttgccgtggccagtgagtaccaagaaaaaaaaaagtaggccgggcgtgatgtaatc

SEQ ID NO: 208910 - DNA, 124 bp, Homo sapiens
  chr3:53132045-53132169
  hypo
agtagaaagcatcagcgtgtcctacgcataactggggtacttcctgccttgtgaactcatgtctcagtcacacacacctaagtgcgtcctaggtcacagtgctccgtgtcgtttttactgtgaa

SEQ ID NO: 208911 - DNA, 226 bp, Homo sapiens; identical to SEQ ID NO: 198954
  chr3:53195774-53196000
  hypo

SEQ ID NO: 208912 - DNA, 111 bp, Homo sapiens
  chr3:53276152-53276263
  hypo
aaagcggtcattgtgcggattccgggggtcctgggacttgtagcgcatggtgtggaaaaagaggacagccatgatctctgcggcgctgcagcatgacgtggggtggctgtg

SEQ ID NO: 208913 - DNA, 34 bp, Homo sapiens
  chr3:53842746-53842780
  hypo
cccatcttcccccatcgcacggccctgcctctgc

SEQ ID NO: 208914 - DNA, 59 bp, Homo sapiens
  chr3:53857419-53857478
  hypo
tggcctccaggaatgcgcagtgcagcgggtggttggtcttgccccgggacacccgcagc

SEQ ID NO: 208915 - DNA, 212 bp, Homo sapiens
  chr3:54237684-54237896
  hypo
cagttctccttcaactccctcggccaaactccgtctcatcccgctggtcagtggcctgcctgtgtgctggcatctgtcggtgtgctgttctgccgacgtgcttcctcgatgtcctctcgctgtccggccgcttgtgtcttcttccgctgatgtgcctcttgacgtctggctgcctgcgtgtctgcttgctagggtctcagatttttataggc

SEQ ID NO: 208916 - DNA, 35 bp, Homo sapiens
  chr3:56093398-56093433
  hypo
gagccaccgtgcccggccacatagagatatttata

SEQ ID NO: 208917 - DNA, 82 bp, Homo sapiens
  chr3:56691370-56691452
  hypo
aaagtcaatataatcttatttcgtgtatcatctccctgggtgaaaagaaaacttccctggatttctacgtgccactgcaaaa

SEQ ID NO: 208918 - DNA, 168 bp, Homo sapiens
  chr3:56718075-56718243
  hypo
cactgtttcttccactggaacgttcatcaacgttttcctatagtaaatgtatattaaagaaaaaataaacttgcggtcacattaaaaaatacacagcaggtcgtcgctctcccataaagggaacaacttcatagttaagagccctttacatagtggtttctaccttat

SEQ ID NO: 208919 - DNA, 184 bp, Homo sapiens
  chr3:56718281-56718465
  hypo
tatttactgagtgctttctacgtgctagacacggactggacaagtgatttacgtgcattgtctccatttaatcctcacagcaacagacatgaggtagatactagtttgcagaatttgaaagaagcgttgcaagacactggacaaattatggtaaccgaagatttgaaaccgggtctatttaact

SEQ ID NO: 208920 - DNA, 97 bp, Homo sapiens
  chr3:56882998-56883095
  hypo
actgaggcatgttaatacacttgatgtaccagcggctttttaaagaggctgaactgaacactaattattatcagcaggtatccgctctttatttagt

SEQ ID NO: 208921 - DNA, 32 bp, Homo sapiens
  chr3:57101181-57101213
  hypo
aagaataacatttgtcggccaggcgcggtggc

SEQ ID NO: 208922 - DNA, 869 bp, Homo sapiens; identical to SEQ ID NO: 198964
  chr3:57112603-57113472
  hypo

SEQ ID NO: 208923 - DNA, 218 bp, Homo sapiens
  chr3:57131629-57131847
  hypo
ctgaagaggaggacacgctctccgtcagggaagacgtttctgtctggtccgtcgagagtccttccatcagtggcagagacagctcggatgagggcacagacgagtcatagatgcctgagtcccgcggcatgtccgaggggctgccggctttcaccgtgtgcagcaggggttgcagggcggcgctaccgtcaagggcaggccgggcctccccgtcttgg

SEQ ID NO: 208924 - DNA, 199 bp, Homo sapiens; identical to SEQ ID NO: 198967
  chr3:57261348-57261547
  hypo

SEQ ID NO: 208925 - DNA, 120 bp, Homo sapiens
  chr3:57529373-57529493
  hypo
atgatatcttagtcttgctgccttccaagaaagtgatgctatgatcaagcaaaaaataggcatacttgatgcatggcaaatataaaatgtcatgtaaatgctcaaaaattttactgtggg

SEQ ID NO: 208926 - DNA, 36 bp, Homo sapiens
  chr3:57539555-57539591
  hypo
ttttttttttttttccgagacagagtcttgctgtct

SEQ ID NO: 208927 - DNA, 283 bp, Homo sapiens
  chr3:57679350-57679633
  hypo
gcgacagagcgagattccgtctcaaaaaaataaaaataaaatatatgaacgcataatggtgacggtggctaacattgaacgcttactttgtgccagttgatatgccaagtacaagtgcgaatacttacaaatattaccttattgaatcttcacataatcgcaaataagtagactatttatttctttttacagataaggaaatggaggtcctggaggttacatgactagcccaacaagtatgacaactccgatatcggcttgcggttcactcattcagtttgct

SEQ ID NO: 208928 - DNA, 144 bp, Homo sapiens
  chr3:57679967-57680111
  hypo
cagaaaaatgagtaaaccagcgaggtgtcacgcctgtagtcccaggttcttgggaagctgaggccggctaagttcaaggaggatcgcttgagcaggagttccaggctgcagcgcgctatgatcgcgcctgcgaacagccattgc

SEQ ID NO: 208929 - DNA, 93 bp, Homo sapiens
  chr3:57906367-57906460
  hypo
aacctttctggtatacgttacctatggtatatctattttatattcaatccttgtctatcttccttctaaaaccttcagagatggcagaatagg

SEQ ID NO: 208930 - DNA, 136 bp, Homo sapiens
  chr3:58109087-58109223
  hypo
acccctctaaagtcgtggcatcggggccaggtctcgagcacgggaaggtgggtgaagctggcctccttagcgtcgactgctcggaagcgggaccgggggccctgggcctggaagctgtctcggactcgggaacaaa

SEQ ID NO: 208931 - DNA, 90 bp, Homo sapiens; identical to SEQ ID NO: 198973
  chr3:61656126-61656216
  hypo

SEQ ID NO: 208932 - DNA, 337 bp, Homo sapiens
  chr3:64547143-64547480
  hypo
attgtaaccgtgctcggtgacttctctggctttatagggaacagatgtgaggatagcaaggggcgcacacgtgaaatgcctggcaggtacccctttgtggctctacttacttcttgccattcctctgccctccaagtgtagaggggacaccgtgggccttggcagtcgcgttccgactccggtctggtgtatgggttgcactcggtctctctggctattttgtgtgttccgatctgacagcccacatgcctctgctgtacgcctcggccacaggacacagagcactaagaagacagagaacgtaagtgggagcttcggctcatttattttttggggg

SEQ ID NO: 208933 - DNA, 519 bp, Homo sapiens; identical to SEQ ID NO: 198988
  chr3:64673419-64673938
  hypo

SEQ ID NO: 208934 - DNA, 155 bp, Homo sapiens
  chr3:65364855-65365010
  hypo
gagtcagctttcactcgcaagagaacaaaaactcccaggcatggtgggaaaccctgggtaatttcacgttcagcactcaccaaaggtcgtgcctgcttcgggcctgctcaccgaggacacgatgacgaagccgaagccctcgttctccccgcgcc

SEQ ID NO: 208935 - DNA, 39 bp, Homo sapiens
  chr3:65435159-65435198
  hypo
caatcaggggccaggcgtggtgtctcatgcctgtaatcc

SEQ ID NO: 208936 - DNA, 1113 bp, Homo sapiens; identical to SEQ ID NO: 198990
  chr3:66024122-66025235
  hypo

SEQ ID NO: 208937 - DNA, 83 bp, Homo sapiens
  chr3:66053363-66053446
  hypo
tgattttcaggaaaaagaaccgggctataaaatgatttccaggtctgccctgagcacttgcgcaataaagagttagaaacggt

SEQ ID NO: 208938 - DNA, 103 bp, Homo sapiens
  chr3:66053766-66053869
  hypo
gtgcgattcaagtatcacttggatcgcaaatggtgcttctcaagtgtttgaaggtgattaaaagcactttgttttctaagccgtttaaatattccctttggaa

SEQ ID NO: 208939 - DNA, 360 bp, Homo sapiens
  chr3:66452301-66452661
  hypo
tggttagcgcttgccaaatcaagtggcaggtactgggggcaatgctcacatgggtccttgtactcatgtccttggaagtagccgcgacatgtgcactagcccccgcttcccacccacacacacaatgagttccactgcaggcccggcccccacataggcagggatggaggctgcgctcacatcagctctgcaagatcccccaaacatgccccttcccatgtgccctgtgtgggactctgcccctccctccgaggaatgccatggagccagctggaaccactgggcaggaagtcgcatacccaggtcactaactgctcctctctgcctgtaatttgggatccagaaattctcccttccctc

SEQ ID NO: 208940 - DNA, 196 bp, Homo sapiens
  chr3:66482908-66483104
  hypo
ttaccagtagctaggcgctggcttcgctcttaacatcttccctcatttaatcttcatgacaaccccagaggcggccactattaccgtccccattttacagatggggatgctaaggcacggaaaggtcaactcacttgctgaaggttacacagcagtaagcagtgcagttgggactggagcccggaacaggaatcca

SEQ ID NO: 208941 - DNA, 1604 bp, Homo sapiens; identical to SEQ ID NO: 198991
  chr3:66550298-66551902
  hypo

SEQ ID NO: 208942 - DNA, 577 bp, Homo sapiens; identical to SEQ ID NO: 198992
  chr3:67048277-67048854
  hypo

SEQ ID NO: 208943 - DNA, 158 bp, Homo sapiens; identical to SEQ ID NO: 198993
  chr3:69062098-69062256
  hypo

SEQ ID NO: 208944 - DNA, 76 bp, Homo sapiens
  chr3:69309454-69309530
  hypo
ttcgcgagttggcgagtcagcacgagttccgggtgggcgtgggctcggcagcctctgcacccggagcggctggtcg

SEQ ID NO: 208945 - DNA, 241 bp, Homo sapiens; identical to SEQ ID NO: 198994
  chr3:69434906-69435147
  hypo

SEQ ID NO: 208946 - DNA, 215 bp, Homo sapiens; identical to SEQ ID NO: 198995
  chr3:69788414-69788629
  hypo

SEQ ID NO: 208947 - DNA, 213 bp, Homo sapiens; identical to SEQ ID NO: 198996
  chr3:69789001-69789214
  hypo

SEQ ID NO: 208948 - DNA, 102 bp, Homo sapiens
  chr3:69937601-69937703
  hypo
gtacttctggctgtggagatcggtgccttaattagccacatgttctttttacctcctgggaaataagtacgggataaaattggggatcaagccgtagacgta

SEQ ID NO: 208949 - DNA, 292 bp, Homo sapiens
  chr3:71036185-71036477
  hypo
atattgattaaaatcgctggtactaactatagattgtcaacgctcaattaattttcacacagtgactccaagcaaaatcaaataaaggcagtgtacctttaaattttacaaatcttaaaatcaagaagcaaagcactgtctccattttgaataatcagttaaagctactaggagaattttagaaacgtaagaggaatatgaccgttaaagagatcgatttattacaaggaaggaggtccaagacaaacttttaggttcagacacgatccttctgcttcggtattaacagcct

SEQ ID NO: 208950 - DNA, 270 bp, Homo sapiens
  chr3:71049502-71049772
  hypo
atgtgtgtttaagatgtgcacggtgaactctcagttattcttagtggtggagagaaaaaaggacaatgcaaaatgagaaataaacccacatataacttccattgcgacttgggaaaacacggttttgggtgcactgccttgccgtcttggtctcgctcgctctttctctcttcattcacattcattctctcaaactctctttccccaagcttgtcttcctagctccagtttaatcatatgagcaacgtcgaggacttacactgacaacag

SEQ ID NO: 208951 - DNA, 1738 bp, Homo sapiens; identical to SEQ ID NO: 198997
  chr3:71113096-71114834
  hypo

SEQ ID NO: 208952 - DNA, 317 bp, Homo sapiens
  chr3:71163557-71163874
  hypo
ctcctaaaaggacacgctcactgaactgtgctcataactagagttgtaacaaataatacttttaagacactgcgtaaggttgagtggcgcctttgtgtttaagaggtgcaaaggaaagctaagaaacacaagcaccgatagatgagtgacaaagaaaagaccatgggaaagtggaaccctgctatcccacctgcctactgcatccacccccgtgtcccagggaggccttctgcctactgaactcaccacgaccagcccttcagatgtaatgcacaggctagttcatctgtgaagggagagacagattcgacaaggcc

SEQ ID NO: 208953 - DNA, 185 bp, Homo sapiens
  chr3:71357101-71357286
  hypo
ggatccatgcattgcggcccagctaagctccttgctgaaagagcgccggattcgggagcgaatggcacagacacagggattgtgacaaaaatccgtatgcaagctttagatgctgagtgacacatactgatgcacagagtcaaagatgtcatcctcacacaagcgccactcgctgtaagcttgag

SEQ ID NO: 208954 - DNA, 152 bp, Homo sapiens
  chr3:71366445-71366597
  hypo
cattttgctggctgacatgacgccacgctgtcacttgatcaggtgtggagtaccacatggaatgaataaatacttatccacaaccgcatattaaatgggaattcgcacaggcgggctctggagacaaagacgtttctatacagaaatattaa

SEQ ID NO: 208955 - DNA, 285 bp, Homo sapiens
  chr3:71410779-71411064
  hypo
cagtaacatgacattgatggcggggcacactaatgaccattctccaagacagggctgtcagcctgtcgttccagtgagacgccggtctgctttcaccgctgctcaggactggatgctcaactaattattcagacagcgacattaatgagagccctcatgtttattttcaacagactaaccagcgcttagcttccatttgtctgatatggtcactgattaaaatgtgtttcatgaatagtaaatttgaactctaatataacaaagaagcaccggagaaaaataagg

SEQ ID NO: 208956 - DNA, 817 bp, Homo sapiens; identical to SEQ ID NO: 198998
  chr3:71631082-71631899
  hypo

SEQ ID NO: 208957 - DNA, 302 bp, Homo sapiens; identical to SEQ ID NO: 199000
  chr3:71834745-71835047
  hypo

SEQ ID NO: 208958 - DNA, 126 bp, Homo sapiens; identical to SEQ ID NO: 199003
  chr3:72496657-72496783
  hypo

SEQ ID NO: 208959 - DNA, 152 bp, Homo sapiens
  chr3:72877846-72877998
  hypo
aaaaaaagagagagaaaagccgtgtggtataggtggggaaatgcaaacattcattattgctgtggtgtaaaacgtgagcagggagtggcaaaagtgaagctacagaggtaggcagggtcgggatcacagagaaattgcgatgacacacaaag

SEQ ID NO: 208960 - DNA, 126 bp, Homo sapiens
  chr3:73045605-73045731
  hypo
ctgaattctcacagcaactgcatagggcatcagtaccagtgcccttactgtacagatggggaaaatgaggctcagacaggcgaagtaagtagcttaagttcacacagagaggaaatggcagggatt

SEQ ID NO: 208961 - DNA, 261 bp, Homo sapiens; identical to SEQ ID NO: 199006
  chr3:74663366-74663627
  hypo

SEQ ID NO: 208962 - DNA, 154 bp, Homo sapiens; identical to SEQ ID NO: 199007
  chr3:74663660-74663814
  hypo

SEQ ID NO: 208963 - DNA, 36 bp, Homo sapiens
  chr3:87737840-87737876
  hypo
tgagccaccgcgcccggccatgatttttttttaaaa

SEQ ID NO: 208964 - DNA, 38 bp, Homo sapiens
  chr3:93697929-93697967
  hypo
tatttatttttgagacggagtcttgctctgttgcccag

SEQ ID NO: 208965 - DNA, 155 bp, Homo sapiens
  chr3:93707709-93707864
  hypo
tttagctgacaagtgcgcagatctcctcttgggctcttgcttcgccaccccttcggctgaactgaccttcctcttgggcatcttggcggcaggaggggcacttgctgggcacctgtgggccacggagctgagagccttcgcgaagctgggctgcc

SEQ ID NO: 208966 - DNA, 112 bp, Homo sapiens
  chr3:94656925-94657037
  hypo
cccctggtggcggcggtgttgagccggtggctagcgagaagtcggccggcagtggggccgcctccttttcttcctcctgcttggacgactgtcttccgcctcaactgtggag

SEQ ID NO: 208967 - DNA, 255 bp, Homo sapiens; identical to SEQ ID NO: 199020
  chr3:97690787-97691042
  hypo

SEQ ID NO: 208968 - DNA, 105 bp, Homo sapiens
  chr3:97744980-97745085
  hypo
gaaaacgaaaggaccgcaagattgtaaacagattaaggcagtgttctacaaagacaaaatgagcagaaaatacagggtgcaggctgagagcgcaccgggcagaat

SEQ ID NO: 208969 - DNA, 292 bp, Homo sapiens; identical to SEQ ID NO: 199024
  chr3:98619762-98620054
  hypo

SEQ ID NO: 208970 - DNA, 115 bp, Homo sapiens; identical to SEQ ID NO: 199025
  chr3:99594776-99594891
  hypo

SEQ ID NO: 208971 - DNA, 86 bp, Homo sapiens
  chr3:99944288-99944374
  hypo
cctacaaggggtgcccgagcggctgctgggggcggcggggaccgaagagaagaagaagttaatcagggattttgatgaaaagcaac

SEQ ID NO: 208972 - DNA, 149 bp, Homo sapiens
  chr3:101157528-101157677
  hypo
aaattacacatcaataaagtcggtttcaacgaatgagtaaatagaaaacttgaattgtcctataagggcgtgaccagatggcttcactgatgaattcaactgaacatttaaaaaagaatgagtatcggtctttgccgccgcgccggcga

SEQ ID NO: 208973 - DNA, 981 bp, Homo sapiens; identical to SEQ ID NO: 199027
  chr3:101231399-101232380
  hypo

SEQ ID NO: 208974 - DNA, 298 bp, Homo sapiens; identical to SEQ ID NO: 199030
  chr3:101497996-101498294
  hypo

SEQ ID NO: 208975 - DNA, 103 bp, Homo sapiens; identical to SEQ ID NO: 199031
  chr3:101498504-101498607
  hypo

SEQ ID NO: 208976 - DNA, 43 bp, Homo sapiens
  chr3:101575167-101575210
  hypo
acaggcgtgagccaccgcgcccggccaagaagcccagatttta

SEQ ID NO: 208977 - DNA, 221 bp, Homo sapiens
  chr3:101588926-101589147
  hypo
cctgctgtagggaaagaaccccttagctctgcagcagccacgatttcagatggtacaacttgtttaaaataaatagacacactcacttcagagactggtcaagaaatagttgccgagagctcttggaaccaagatgagaacttacattacagtttcttctgcagcctaggatcacagatgacgggcaggggctttattagtttaaccggcatctatttctc

SEQ ID NO: 208978 - DNA, 223 bp, Homo sapiens; identical to SEQ ID NO: 199033
  chr3:107244817-107245040
  hypo

SEQ ID NO: 208979 - DNA, 105 bp, Homo sapiens
  chr3:107530308-107530413
  hypo
gccacttgggtgaacgcttctggggtgcgcttctgggactagtgatcagaacacaccatctttccctgaactgggacaaaactgtggaagcgatttcattaagag

SEQ ID NO: 208980 - DNA, 210 bp, Homo sapiens
  chr3:108836864-108837074
  hypo
acgcagctgggcccgctgaagcgcagggtacctgtcgtccatgccctcgaacacgacccgcgcaactcaaggggacaaggacacctgaccggcagccgttcgcctgcgcccgcgcccactcccacgcccacgctcacgcgcagagggcgggttcagcaaacacgtgctcccccttgcggcgggaccgcgaagctcccactgcgtcgtcga

SEQ ID NO: 208981 - DNA, 69 bp, Homo sapiens
  chr3:109035957-109036026
  hypo
gaaaatctatgggaagaatctatattggaatagcttagggaaactttagagaagattacactttttgag

SEQ ID NO: 208982 - DNA, 145 bp, Homo sapiens
  chr3:109061756-109061901
  hypo
agcccaattcttgtccgttctcaggtccccctctcagagactacaatctgtacaaccataggggcagccctgtgtccctactttatttcaagtttgttaaacagattcagatgctttttaaaaaatccattttatggctgggcgc

SEQ ID NO: 208983 - DNA, 123 bp, Homo sapiens; identical to SEQ ID NO: 199038
  chr3:111393432-111393555
  hypo

SEQ ID NO: 208984 - DNA, 120 bp, Homo sapiens
  chr3:112207345-112207465
  hypo
ggcgtgagccaccgcactgggcctagcccagtaagtttatgcaaacttaccataccctcatatccccactccctagcaaatgtctgatgctattttgtgtgagatgcatcactccttttt

SEQ ID NO: 208985 - DNA, 38 bp, Homo sapiens
  chr3:112543790-112543828
  hypo
aattgcatgtaaggccgggcacggtggctcacgcctgg

SEQ ID NO: 208986 - DNA, 151 bp, Homo sapiens; identical to SEQ ID NO: 199044
  chr3:112930655-112930806
  hypo

SEQ ID NO: 208987 - DNA, 278 bp, Homo sapiens; identical to SEQ ID NO: 199045
  chr3:112931274-112931552
  hypo

SEQ ID NO: 208988 - DNA, 745 bp, Homo sapiens; identical to SEQ ID NO: 199046
  chr3:113251174-113251919
  hypo

SEQ ID NO: 208989 - DNA, 216 bp, Homo sapiens
  chr3:113957889-113958105
  hypo
gtttgcatgcccccgtgacgagtggtctgcaggtctctggtgtcacctcccagtacggggtcctctggggctggtccagctgctcccacttcttccaggttaagatcatggacatgtcctgcaccactgcctcggatgtcgctgcaatggagcaagacaaaagccacgcggcacctgcatccgcatatgcagagagtacttccgactacagatacc

SEQ ID NO: 208990 - DNA, 230 bp, Homo sapiens
  chr3:114070278-114070508
  hypo
gagtgccccgcggcgtgtcctggcccgagtcctggatccccgggaacacatcgcccacgttctgtgacacgatgcgcgtgcactcgtcgatgactgttttgatctgcaggatgctggcggccgtgaggatctgcagagcttccgactgcgagacccgtagcacgccgctgtacatgaagtcaatgagcttttgcactgactgcactgacaccaccgacgggatctcgatg

SEQ ID NO: 208991 - DNA, 150 bp, Homo sapiens; identical to SEQ ID NO: 199049
  chr3:115377489-115377639
  hypo

SEQ ID NO: 208992 - DNA, 37 bp, Homo sapiens; identical to SEQ ID NO: 199050
  chr3:115377953-115377990
  hypo

SEQ ID NO: 208993 - DNA, 38 bp, Homo sapiens
  chr3:119011022-119011060
  hypo
cgtgaaccactgcgcccggcctgtaaattatttataag

SEQ ID NO: 208994 - DNA, 42 bp, Homo sapiens
  chr3:119517358-119517400
  hypo
tctatgctccaaaaagtactcgggaggctgaggcaggagaat

SEQ ID NO: 208995 - DNA, 59 bp, Homo sapiens; identical to SEQ ID NO: 199059
  chr3:120627258-120627317
  hypo

SEQ ID NO: 208996 - DNA, 36 bp, Homo sapiens
  chr3:121215302-121215338
  hypo
tgagccaccgcgcccggcaatcagtaccttaatgag

SEQ ID NO: 208997 - DNA, 182 bp, Homo sapiens
  chr3:121438459-121438641
  hypo
tgacagtcattctaccgagttttagcaacacacctgttgcatctctgtttccacatctgcctgggttactaactgaagaagctcatcttcatgaagacgaacttgtgtttcaaagcgggcatctttctctcggaccacctgctgcatggaactcaactgaagacacataccagagaaactat

SEQ ID NO: 208998 - DNA, 94 bp, Homo sapiens
  chr3:121500624-121500718
  hypo
tcagttcaactcggcgtgcatcagtgagttcttggagtcctcgccaaggagcaaatagtttctttttcttacggcacttcgctaggaatttaag

SEQ ID NO: 208999 - DNA, 52 bp, Homo sapiens
  chr3:121637756-121637808
  hypo
gaaatctctgtggccactaccgcctctgtctgggccttgctctggcccactg

SEQ ID NO: 209000 - DNA, 39 bp, Homo sapiens
  chr3:121638077-121638116
  hypo
ttattcccgctgcccatagcttggcgagctgcccagggg

SEQ ID NO: 209001 - DNA, 240 bp, Homo sapiens
  chr3:122003336-122003576
  hypo
tttggcttgctggcgtgcatcttcttcaacaagatctacatcattctcttcaagccatcccgcaacaccatcgaggaggtgcgttgcagcaccgcagctcacgctttcaaggtggctgcccgggccacgctgcgccgcagcaacgtctcccgcaagcggtccagcagccttggaggctccacgggatccaccccctcctcctccatcagcagcaagagcaacagcgaagacccattccca

SEQ ID NO: 209002 - DNA, 45 bp, Homo sapiens
  chr3:122231267-122231312
  hypo
ttataaagtaacataatgcggctgggcgcggtggctcatgcctgt

SEQ ID NO: 209003 - DNA, 180 bp, Homo sapiens
  chr3:122451547-122451727
  hypo
aacaaaaaaccaaaacagagcaaaaaaaacacgctggtctcacccactacactgattttataataggtcactatctgcagtttgaaaaagtggtcaaaggagtagcaagcataaaaagtaaaatatctgcagtaaacgatgtctatttctgcaataggaatataccaaggtgggggtggt

SEQ ID NO: 209004 - DNA, 318 bp, Homo sapiens; identical to SEQ ID NO: 199062
  chr3:122514237-122514555
  hypo

SEQ ID NO: 209005 - DNA, 69 bp, Homo sapiens
  chr3:122573579-122573648
  hypo
acccaggtagaagaagaaatcgtttggtggacagctggcaatccctgtcacaagtgtaatgaaaaatat

SEQ ID NO: 209006 - DNA, 163 bp, Homo sapiens; identical to SEQ ID NO: 199063
  chr3:122785820-122785983
  hypo

SEQ ID NO: 209007 - DNA, 455 bp, Homo sapiens
  chr3:123166198-123166653
  hypo
gagtccagctgaggcctgcccgccccgcaatccagtcccggtggccaggtcggcccctacctgcttcagcaggaactggtcctgggcgttggtgcgcagggcgatggccaggtggagggcggacaggagcaccccgctgagcactgcggcccgcatgcgcacgggcagcagcgtgtagatggtgtagatgaagaacacggtccaccagatgccctcagaggcgctgcgtggctgcggcagcagcaggcccaccacctggacggccagcaccacggcgatgagcgcatagcaggccaggcccatgtggtcctggtggaaggcggcgcggttgcaaagcacagccatgatgaggatcacgccgacggcggccgccagcacggccaggtagggcagctggagcgggggccgcgccgcgtggaaggccaacatgaccaggcacacgagcaccagcacgg

SEQ ID NO: 209008 - DNA, 105 bp, Homo sapiens; identical to SEQ ID NO: 199064
  chr3:123168102-123168207
  hypo

SEQ ID NO: 209009 - DNA, 81 bp, Homo sapiens
  chr3:123340748-123340829
  hypo
acaacttaactgtgcgcagaaccaccgtgtggccctgcggagaatgcctctgcaggctcaggccacgtggcaacctttcat

SEQ ID NO: 209010 - DNA, 43 bp, Homo sapiens
  chr3:123667350-123667393
  hypo
tgccgggattacaggcgtttagccacggcgctcggccataaac

SEQ ID NO: 209011 - DNA, 323 bp, Homo sapiens
  chr3:124103487-124103810
  hypo
tgaggcacctagctggtgcccgcctgcaggctgctcgcttgctgagaggcggcgtgccagctccgcgcaccgcgcctcagtgccagatcagggagctgtcagctcagcgcccacgcccctccgcttcagctccggggagccccagggtgggctgctggaaggcgcgactgcaacttgactttgcctcactgttgttgctggcagaatacgtacaccaatgcggacaagctcctagaagcagcagagcagttggctcagacgggggaatgtgaccccgaggagatctacaaggcagctcgacacctggaggtgcgcatccaaga

SEQ ID NO: 209012 - DNA, 94 bp, Homo sapiens
  chr3:124126552-124126646
  hypo
gcacatacactaaactgaaacgatacagagattagcatgggccctgacgcacaaatacgtgaagcattccataaattttttttttattttttat

SEQ ID NO: 209013 - DNA, 208 bp, Homo sapiens
  chr3:124281715-124281923
  hypo
ggtcctccaggacttcagtgcgggccacagcagtgagctgaccatccaggtggggcagacggtagagctgctggagcggcccagcgagcggcctggttggtgtctggtccgtaccaccgaacggagcccgcccttggagggtctggtccccagcagcgccctgtgcatctcacactcccgaagcagcgtggagatggactgcttcttc

SEQ ID NO: 209014 - DNA, 95 bp, Homo sapiens
  chr3:124436154-124436249
  hypo
gtagctttctatatccgagacatcatggaggctctgcagtaccttcacaactgcagggttgcacatttggacataaaggtaataagaagtggcaa

SEQ ID NO: 209015 - DNA, 193 bp, Homo sapiens
  chr3:124518663-124518856
  hypo
tgaggtctacctcatcggggtgcgcagggagagccagcctggcttactaaagggaccccttgatggtgatccccaaagtggtggccagaggcatctccacatctttctgccgtgggctgggaacgatttgagcctgcagataggataagagtggggactatgcctgcccgaagccacccgtggggccatcaag

SEQ ID NO: 209016 - DNA, 453 bp, Homo sapiens; identical to SEQ ID NO: 199069
  chr3:124773932-124774385
  hypo

SEQ ID NO: 209017 - DNA, 185 bp, Homo sapiens
  chr3:124885658-124885843
  hypo
atcaagtgaaaggatccatgcggtatgatacaatgtatataaaattttcaaacgctgaacaatagccgacatcacttagggccagctacatatggtagaaaaataaaaacacatggggaggatgagcctccggacagtggtcccttggggaacaggacggggtcggtgaaggtacagcttaaact

SEQ ID NO: 209018 - DNA, 39 bp, Homo sapiens
  chr3:125026374-125026413
  hypo
cctgacctcgtgatccgcccgcttcggcctcccaaacca

SEQ ID NO: 209019 - DNA, 110 bp, Homo sapiens
  chr3:125078701-125078811
  hypo
cagacccaagtgggcggcagcccacccgccaccatgcagctccacgccgctgctccaccagctgctaagtgcaccgccagcacaggcccgcccatgcagctggcacaact

SEQ ID NO: 209020 - DNA, 149 bp, Homo sapiens
  chr3:125261068-125261217
  hypo
aaaagcttgtaccaaactaccgtaagaaaggtatatttaaaaagttacgccaatgattaacacaaagcaaaagaagttaggttatggaaagcgatgctttttcttttctttcttttttttttgagatgcagttccgttcttgtggagtg

SEQ ID NO: 209021 - DNA, 87 bp, Homo sapiens
  chr3:126218194-126218281
  hypo
acataggaagggtagcggaactctgtcctgccagcacctttcttctccacatccgctcctgtgggcagagcccggacagtcaccacc

SEQ ID NO: 209022 - DNA, 152 bp, Homo sapiens
  chr3:126254315-126254467
  hypo
cgctgtcctcagccgggagacacacagacagtatcgctgtcctcagccgggagacacacagacagcatccctgtcctcagccgggagacagacagacagacagcatcactttcctcagtcgggagacagccggacagcatcacttttctcag

SEQ ID NO: 209023 - DNA, 106 bp, Homo sapiens
  chr3:126261823-126261929
  hypo
gtcctccccacctcgcccaccctggcaaggacagctgcggccaaggacgaaagccctcccttggctggcctcacgatggggccgtcccgggagccaggtgggagct

SEQ ID NO: 209024 - DNA, 204 bp, Homo sapiens
  chr3:126472159-126472363
  hypo
tctgtgaagaagtcaaggttcggcagcaggagctgtgccgtccttttgcccacctggaggctgaggaggaggggcactgaggcactcgtagctgggtgcagatcattccaaagacattccaggagcatgctgcagcccgcctgcatgcctgccatagctgcggcttgtagaccggccttggggtggagttctctgtaaacattg

SEQ ID NO: 209025 - DNA, 422 bp, Homo sapiens
  chr3:126577518-126577940
  hypo
acacagccagaatgcggcaggcccactgttagcccacatctgtttgcacccggcccgctgggctcttgcctcctctgagttctataattctgagtacctcctcttctgaccaggttgctccatgtccattcagtctaatagagttgctaaaaccctgtgtcaggtgctgtgagacaagggtcatgggcacagaatgagggctgggtgtggagctacacctcactggagtgccccataggcaccgcagaatcgcctgctgctccgttgtctgtcccccgctgaggtttgagccctgtgcatattctagcacttgccacactctgtcttgttagcgcctgtggctgtctgctctgcatctgtgagcacagtccttgctggtctgattcatcaggtgattcatcgccaagggctgaggatgcagt

SEQ ID NO: 209026 - DNA, 164 bp, Homo sapiens
  chr3:126676242-126676406
  hypo
ctcttgtcttctgcaggccccgcagggtggagcccgtctgctcagggttgcaggcccagattctccactgctaccgagatcgcccgcatgaggtgctgctgtgctcggacctggtcaaggcataccagcgctgcgtgagcgccgcccacaaggtaaggccttgc

SEQ ID NO: 209027 - DNA, 402 bp, Homo sapiens
  chr3:126724696-126725098
  hypo
tggggagagtctcgcggttctcaacccctcacactgagcaggaggcaagcagggcagatcccaggccctggtcacctgggggctgagggggctggatgcgtgtttgatgcgactgatggtggcagctaggagggtctccgggcaagttgttcccctgtctggacttgccctgtgtgggagtcctgggcaagcagtcctggtgactcagccatgctgctcgtgcaggagaccagcgggtggtgaaactctacctaaagtccaaggagacagggaagaagtttgcgtctgtggacttcgtcttctacaactgcagcgtccaccagtcgtgagtgtctctaggcccctccgcccgcctgggcctgggctacttgccccactcccgtccctgtggtcccactgtgc

SEQ ID NO: 209028 - DNA, 284 bp, Homo sapiens
  chr3:126730849-126731133
  hypo
tggtaaaacccatcaccctggccgcacggaacctgccacagccacagtcaggccagcgtggatatgagtgcctcttccacatcccgggcagcccggcccgtgtcaccgccctgcgcttcaacagctccagcctgcagtgccagaattcctcggtgaggtggccagggcaggggctgggggccgtgagccggaatgggccggttatcctcacggccctgggtcctggcgtgtgcttgttcataaagggcagtgcacgtgctcacgtgtatctctgatgagtcaga

SEQ ID NO: 209029 - DNA, 168 bp, Homo sapiens
  chr3:126894145-126894313
  hypo
acaaatgtatctatggatcccgacaagaaagcggaaaggcagtaccacttgccatcggaggtacctgagaacacaagcacaatgagcgcctgaaacagccagcgagccaacttgcgattctgcctgccaaggctctggcctgacgccggtttgctctctattcaaaag

SEQ ID NO: 209030 - DNA, 79 bp, Homo sapiens
  chr3:127292370-127292449
  hypo
ttgatggccttccagcgctcgctgtctgtgctgttgatgctgccagtgtggcagggcatggaagcgatgtcatccaggt

SEQ ID NO: 209031 - DNA, 202 bp, Homo sapiens
  chr3:127325696-127325898
  hypo
taggggtgcccagtatgcaggacctgactggcctctcaggctgtggaagaccagtgtgggcagccgcaagaagcaagatagaattgtgtgttggccacaccctggggtggacccagtctgtctggccagtggacttagcttggcccacacgacgtttttaggaattcaagtcaatatttaagtcaggcgatttgtttaaacc

SEQ ID NO: 209032 - DNA, 202 bp, Homo sapiens
  chr3:127326110-127326312
  hypo
ccatattcaggagacgctgccaaagcctctgatgttaaggtcttaggcacatgtaatgtgcctttgtacttgagcgtccctgtaaatgggctcatcgccatcgctgtggtggcgcccaggccccttgactgccttgctgctgtggctgttggctgtcctcttctcaccgctctgcagtgcagttctgcgaactgtcccagct

SEQ ID NO: 209033 - DNA, 207 bp, Homo sapiens; identical to SEQ ID NO: 199079
  chr3:127348123-127348330
  hypo

SEQ ID NO: 209034 - DNA, 145 bp, Homo sapiens
  chr3:127394687-127394832
  hypo
taatttgggaaggcatcgccagagattcggagccccatgtgtgggaaggtggggaggagggacagggagattagaatttcccccaggccccttccctgctaactggtgagccctgcctcccccaggagcccgctgcgaggccaac

SEQ ID NO: 209035 - DNA, 198 bp, Homo sapiens
  chr3:127394909-127395107
  hypo
cacggcttcctgcaggaggcgggattactatgacgacttcttgcagcggtgagccagggcacacgaggggtgcagcatggggtgcggtggccctggtgggtgtggcgagtctgctctgactgtggcctgcactgggttctgagtgctccgaggaatggggtggggctgtgccaagtatcctccctcctggcttgtccc

SEQ ID NO: 209036 - DNA, 128 bp, Homo sapiens
  chr3:127395763-127395891
  hypo
tgacagctgaggtcccgcaggccctcatcctccccactgcccccaggccgcctggacattggcgtagagcatgtgagtgactgtgagcgcctggccaagcaatgccagctgtgggacctgctcagcga

SEQ ID NO: 209037 - DNA, 90 bp, Homo sapiens
  chr3:127534724-127534814
  hypo
ccaccctttccccaccctggcgcccaaggaccatgtagacgtcaataaggaagtatttgctgaatgaatcgctgctttggatcctgggag

SEQ ID NO: 209038 - DNA, 67 bp, Homo sapiens
  chr3:127534897-127534964
  hypo
agagactgacagagtggggttcaaaatggccacttgaagggacaataagctgtgtgatttagctgac

SEQ ID NO: 209039 - DNA, 129 bp, Homo sapiens; identical to SEQ ID NO: 199082
  chr3:127794264-127794393
  hypo

SEQ ID NO: 209040 - DNA, 214 bp, Homo sapiens
  chr3:128070501-128070715
  hypo
agagggacacacacacgtgtaatgacataattatatgcaccggcagccaagtccttgctcaaaggccagggacaatggggacccacctggcgtgtaagcaagcgcctggacttccatgtgcacagtgactgctcctcaggagctcagtccctccagtgactgaaggctaataaatagagcaaattattcatgcaaacagtgagaatccccactt

SEQ ID NO: 209041 - DNA, 136 bp, Homo sapiens
  chr3:128080966-128081102
  hypo
acctgggaggctgcgctcccaaagctcatcttggcaagccgtctgtcccaccgctgccaccctcccctctgcctcagtgtgccaggcatcagcactcactcacagaggcaggctggatggcgggtgggacaacagc

SEQ ID NO: 209042 - DNA, 62 bp, Homo sapiens
  chr3:128118207-128118269
  hypo
gggtgcatgagcccgtcgagtgcgcgcttgagagcctcggaaagagcgaggctcctgcgaag

SEQ ID NO: 209043 - DNA, 205 bp, Homo sapiens
  chr3:128182027-128182232
  hypo
tcttgatgtcctccggggaagcgctggcctgcacgcccagcacttcgtagtagttagccatggccaggggtgtgggtgagaggagagggaacgtggaggccaggtgggcgcaggggcccagctggtcagatggacgggggagaagtggccggtggtctggggcccttcagcaggggcctggctggactccgcaagctctaggcaa

SEQ ID NO: 209044 - DNA, 39 bp, Homo sapiens
  chr3:128290742-128290781
  hypo
acaggcgtgagccaccacgcccagcaattttattgttat

SEQ ID NO: 209045 - DNA, 226 bp, Homo sapiens
  chr3:128737541-128737767
  hypo
tctcacctcttgttcccacacgccttcctgcccttcaggcagtccctccccggtgatttctctgtatcttcttgttgggatgtgttcttgcgaagtgagtctttcgggtctgtttgcaccccattggcggcgttgtggcacatgtctcactgtgcctctgactccccactcggcgctggagttcccaccccaaatgttgttctgcgagtgcatcttctggctgctt

SEQ ID NO: 209046 - DNA, 163 bp, Homo sapiens
  chr3:128785014-128785177
  hypo
tcagactggctagaaatggactggaagtgagcggaaggtggaagctctgtcctggctcagctcggcctatgctgggagggtgactggtggtgtggaaagtccgctgggactcagcagcacctgggcctctaattgttagctttctaaccggctctggggctgc

SEQ ID NO: 209047 - DNA, 84 bp, Homo sapiens
  chr3:128791633-128791717
  hypo
gggattacaggcgtgagccaccgcgcccaacctacaaaatgtatttagttaaaatctcctgtcgtctcctaggcagggggcaaa

SEQ ID NO: 209048 - DNA, 31 bp, Homo sapiens
  chr3:129008731-129008762
  hypo
acataagaaaagagagtggccgggcacggtg

SEQ ID NO: 209049 - DNA, 106 bp, Homo sapiens
  chr3:129221882-129221988
  hypo
ctgagccacagaatcgtggagggcctttccacttgtcccttcattcagtcattgagaaaatcgttactgacagccagctctgccagggtggtgacaggcaccgggg

SEQ ID NO: 209050 - DNA, 359 bp, Homo sapiens
  chr3:129290347-129290706
  hypo
tcaccgtgggctcccggccaatgtggtggacggccatggacacattctgcaccatgtggaaacgctcaccagccactgtgatggtcctgccgccactgcgggggacagcaaaacctatcagtgcacctgcagccccagagagcctgggggaagggcggggtgccagtctcacctgacagggctgcggcggggactgatggccgtgatgaccgggttctgcatgtaccagaaggtgaggttgccgtgcacgcagccccgacgctcgaagcgcacacacacaggcaccggagccggcagggccccctcaggcatggtgcaggcgatgctggtatctgtgcgcctggggggagcagcaggtt

SEQ ID NO: 209051 - DNA, 124 bp, Homo sapiens; identical to SEQ ID NO: 199088
  chr3:129324048-129324172
  hypo

SEQ ID NO: 209052 - DNA, 365 bp, Homo sapiens; identical to SEQ ID NO: 199089
  chr3:129324202-129324567
  hypo

SEQ ID NO: 209053 - DNA, 234 bp, Homo sapiens; identical to SEQ ID NO: 199090
  chr3:129324659-129324893
  hypo

SEQ ID NO: 209054 - DNA, 86 bp, Homo sapiens
  chr3:129372595-129372681
  hypo
tgctattttttaactttatattatttaatttaaaagtctatattaccaagacctgattgtatattctgtatcgctcaattactaaa

SEQ ID NO: 209055 - DNA, 258 bp, Homo sapiens
  chr3:129983103-129983361
  hypo
ggacagggagaagctatggactctgtccctggaggccaaatgcaagggcattaccctctttgtgctggccttgggtccgggtgtggggacccatgagctagccgagctagccgagctggtcagtgctccctctgagcagcatctactgcgcctacaaggggtctcagagccagaggttaactacgctcagggattcactcgggccttcctgaacctcctaaaaagtgagcagtccccgggaactggggcaccttgggt

SEQ ID NO: 209056 - DNA, 84 bp, Homo sapiens; identical to SEQ ID NO: 199095
  chr3:130235709-130235793
  hypo

SEQ ID NO: 209057 - DNA, 43 bp, Homo sapiens
  chr3:130237352-130237395
  hypo
atttctccttttttttgagacggagtttctctcttgttgccgg

SEQ ID NO: 209058 - DNA, 151 bp, Homo sapiens
  chr3:132034534-132034685
  hypo
agcctatttgcgcatgtttcctactgccggaagaaggaacagttctcccatataccacattccagggcatcctatgatcacataagaacacaatcctcctgccacaggtaagcgcaatgtaccaggaaacaggttgcgggtaaaccattgt

SEQ ID NO: 209059 - DNA, 156 bp, Homo sapiens
  chr3:132398975-132399131
  hypo
ctgtgaatagtaactcggccttaagagaacattaaccaaaaccttaagctgagcaaactactgagcagcaagtattgacaacatttcaaggttttgttttttgttttgttttgttttgagatggagtctcactcgggctggagtgcagtggtgtga

SEQ ID NO: 209060 - DNA, 36 bp, Homo sapiens
  chr3:132399371-132399407
  hypo
caagttctaaaaaaagttcaacgtatttctttaaaa

SEQ ID NO: 209061 - DNA, 49 bp, Homo sapiens; identical to SEQ ID NO: 199099
  chr3:133276458-133276507
  hypo

SEQ ID NO: 209062 - DNA, 108 bp, Homo sapiens
  chr3:133560513-133560621
  hypo
gagaaaagcacagaacggtcaaaatcaaaaggtctcatgcaaaggggcaaaagcctagcgaccacaggtggtggcataaccagcaagaggggacgctcatgtcaggtc

SEQ ID NO: 209063 - DNA, 227 bp, Homo sapiens
  chr3:133648404-133648631
  hypo
aaccccgacagccccgcaaagctggtttaagtgtcccggtgagcaactgtgtccacctaggttcactacccacagtagagggttttagtgctcaaccatatctgctcttttcttctcctgagcacacagaatattctgttccgctcttgcggcagctaggctgggagcagagtgaagagcgttactttgggacaaagcattgcttagcagtgcgggatcttccagga

SEQ ID NO: 209064 - DNA, 52 bp, Homo sapiens; identical to SEQ ID NO: 199100
  chr3:133969907-133969959
  hypo

SEQ ID NO: 209065 - DNA, 93 bp, Homo sapiens
  chr3:134080496-134080589
  hypo
tgcgcagctcctcttcggctcgagctgcccggccctgcgcattgcccagagcctgctccagcagctcggcacgccgccgctggtcctcgatgg

SEQ ID NO: 209066 - DNA, 475 bp, Homo sapiens; identical to SEQ ID NO: 199102
  chr3:134092643-134093118
  hypo

SEQ ID NO: 209067 - DNA, 404 bp, Homo sapiens; identical to SEQ ID NO: 199103
  chr3:134093148-134093552
  hypo

SEQ ID NO: 209068 - DNA, 239 bp, Homo sapiens; identical to SEQ ID NO: 39653
  chr3:134093626-134093865
  hypo

SEQ ID NO: 209069 - DNA, 157 bp, Homo sapiens
  chr3:134203266-134203423
  hypo
ctgtcccccataggataactgcaagatatccctaacaccttggcaaaaattatacacagattggtgtgggaaagggtttacacccccatgacaaggatctcggcaaaagttaagcaaaatgcgccctgctacttctgtcaccggtgagccaggtgag

SEQ ID NO: 209070 - DNA, 294 bp, Homo sapiens; identical to SEQ ID NO: 199105
  chr3:135684610-135684904
  hypo

SEQ ID NO: 209071 - DNA, 275 bp, Homo sapiens
  chr3:135870037-135870312
  hypo
tgtgtactggcagctaaaaacgtcgttactggggaccctgtgacatttattacactggtgctggtactagcgttacgcacagcaatgctagtcacgttaatgcccaaagtgagcctggtctgctccaaggccttttctggcacggcaaatgcctccagcttcttctccccattggccatataggagttttggcagccacgacatatacaatctaagcaggctttgcggttagagtagcaagggcagcgttggcctcggcatgtaagaacacttgg

SEQ ID NO: 209072 - DNA, 37 bp, Homo sapiens
  chr3:136582612-136582649
  hypo
taaataaaatttgaaacctacgtgtaatgttttgttc

SEQ ID NO: 209073 - DNA, 36 bp, Homo sapiens
  chr3:136583309-136583345
  hypo
acagagcaagattccgtcacacacacacaaaaaaaa

SEQ ID NO: 209074 - DNA, 195 bp, Homo sapiens
  chr3:137822427-137822622
  hypo
agctcctgctgaccacgctgctgctggcccaggctggtctgcagccgtgcctccagctgggcaacactggcactcaggcaatcctggcagtgcagcaggtactcaatgatgagctgcgccaggcgcagcaccttgagcagtgccgggtccacaggctgcccacagcggctgcacacctcccggtccaagttgcag

SEQ ID NO: 209075 - DNA, 31 bp, Homo sapiens
  chr3:137891419-137891450
  hypo
gaaccagaccttgtctcgaaaaataaaggga

SEQ ID NO: 209076 - DNA, 34 bp, Homo sapiens
  chr3:138001202-138001236
  hypo
ttgtaggctgggcacggtggctcatgcctgtaat

SEQ ID NO: 209077 - DNA, 703 bp, Homo sapiens; identical to SEQ ID NO: 199114
  chr3:138067014-138067717
  hypo

SEQ ID NO: 209078 - DNA, 80 bp, Homo sapiens; identical to SEQ ID NO: 199115
  chr3:138067747-138067827
  hypo

SEQ ID NO: 209079 - DNA, 201 bp, Homo sapiens
  chr3:138158923-138159124
  hypo
ctgccatcattaaccagtcccgagcctgcttttctctggtgacacataccccacaggaccccactcgctgcctttcatgcctgtccccatctaactgggtgcgcactggggctgccggcagaagcaagcaccaggggaaaaaggtgagccgttcacacaaagcgatgggcattctgaggcgcagagcagtggtccctggga

SEQ ID NO: 209080 - DNA, 34 bp, Homo sapiens
  chr3:138542243-138542277
  hypo
acagaaaaaaaaaaaagcaacggtcgggcaaggt

SEQ ID NO: 209081 - DNA, 34 bp, Homo sapiens
  chr3:138542517-138542551
  hypo
ctggcgacagagcgaggctctgtctcaaaaaata

SEQ ID NO: 209082 - DNA, 38 bp, Homo sapiens
  chr3:138577523-138577561
  hypo
aaagatagaggcaaccgggcgcagtggctcatgcgtgt

SEQ ID NO: 209083 - DNA, 36 bp, Homo sapiens
  chr3:138981444-138981480
  hypo
ctgtgatacacagttcggcttcgatgagacagagtt

SEQ ID NO: 209084 - DNA, 270 bp, Homo sapiens; identical to SEQ ID NO: 199118
  chr3:139258672-139258942
  hypo

SEQ ID NO: 209085 - DNA, 107 bp, Homo sapiens
  chr3:139352980-139353087
  hypo
catttgtcacaggccgtcgcggaggcacagtaaggaaggcgacccgggaaggttaagtgccgtcactgcagatgtaacgtgcaaatgctcatcgcttgggaggcagt

SEQ ID NO: 209086 - DNA, 1525 bp, Homo sapiens; identical to SEQ ID NO: 199120
  chr3:140660223-140661748
  hypo

SEQ ID NO: 209087 - DNA, 232 bp, Homo sapiens
  chr3:141086062-141086294
  hypo
cagaaggcaacaaagacaagcgtggactctggctcccgccgaggtactctgtaccccgtggctctcggattttgcatctaccacatgccacaggcttgcgtccatccgacctccctagtttctcatccccacttgaacctgatgactgattcgccctcctggctacgctgagtaagccacccacttgccaaacctcagacctggtgttgacgcagtaagaaggcatgaggcc

SEQ ID NO: 209088 - DNA, 313 bp, Homo sapiens
  chr3:141161722-141162035
  hypo
acaaatgcattttccatcatcgaaacagaaaatagtaataacatgttttccccgctggacttgagggcaagtttcaaaaaggtctccgactccatgagaacagctagcctttgcctggagaggacggacgtctgccacgaggcagagcctgtccgcacacttgccgagcactcatacgctgtttcttccgtagctgaagcttacagaagtcagcctgtacgtgaacatgatggcagttcacctggtaacacagggaaagaaaattgtgaagcccttgcagcgaaaccgaaaacatgccggaagccaaagacat

SEQ ID NO: 209089 - DNA, 122 bp, Homo sapiens
  chr3:141174174-141174296
  hypo
gtgctcgacatctgcgtgagtgtggtgagtggaagagcatcaggccatgtcccaggtctttccaaatcagactccattatttctgacattcctcttcctaaagaccagaggtaggaattcag

SEQ ID NO: 209090 - DNA, 38 bp, Homo sapiens
  chr3:141509677-141509715
  hypo
ttacaggcgtaagccaccgcgcccggtcaacatgcact

SEQ ID NO: 209091 - DNA, 213 bp, Homo sapiens
  chr3:141622402-141622615
  hypo
aacatgcatacacacacacacgcacgtgcacatttcataagttttattttcttttacaggtttgatcttgctcttctacctagttttttatgggttcctggctgcactcttctcattcacgatgtgggttatgcttcagactctcaacgatgaggttccaaaataccgtgaccagattcctagcccaggtaattatcttgcagttatgacttt

SEQ ID NO: 209092 - DNA, 223 bp, Homo sapiens
  chr3:141656809-141657032
  hypo
ttatgtgtagacaagtctcccggtgcgggcccagcaggcaggtgacagccgcccttgcgggagtcatccttaaccaagcagtttcagaaatgtttcttgagaaactgtttccggaagtcccggagcctgtgttgcccattgacaagccttgtcggtctcagaagacagactccgggggtctacatccagagacccggctgaggactgaagcccggggtttcca

SEQ ID NO: 209093 - DNA, 135 bp, Homo sapiens
  chr3:141657079-141657214
  hypo
ggctaagggagcaaggaacccccgccatgctgtgtcccctccccccattccccgaatgcccgtctgttcaaagagggtgagaggaggggggaataccaactgctccgaggaaaatgcagttcatcatatgcatct

SEQ ID NO: 209094 - DNA, 35 bp, Homo sapiens
  chr3:141954424-141954459
  hypo
caggcatgagccactgtgcccggcccaaggtatat

SEQ ID NO: 209095 - DNA, 102 bp, Homo sapiens
  chr3:142321774-142321876
  hypo
cgcctcagcctcccaaagtgttgaggctgaggccacctctggccctcattctctcaacattcaaaagcttgtcacttcatccagttccgaattaacatttta

SEQ ID NO: 209096 - DNA, 63 bp, Homo sapiens
  chr3:142537575-142537638
  hypo
ttgtgcctggatgataaaatctgttttaagactctcatcggcaaaaagccaaattcaactagt

SEQ ID NO: 209097 - DNA, 76 bp, Homo sapiens
  chr3:142683683-142683759
  hypo
cttaaggccgggcgcggtggctcacgcctgtactcccagcacacagatcacgaggtcaagagatttgagaccatcc

SEQ ID NO: 209098 - DNA, 39 bp, Homo sapiens
  chr3:142727625-142727664
  hypo
ttttgatatggagtctctgtcgcctaggcggtagtgcag

SEQ ID NO: 209099 - DNA, 38 bp, Homo sapiens
  chr3:142727844-142727882
  hypo
gtgctcggattacaggcgtgagccactgcacctggccc

SEQ ID NO: 209100 - DNA, 44 bp, Homo sapiens
  chr3:142728140-142728184
  hypo
cagaaagagtgagatggggccgggtgcggtcgctcatgtctgta

SEQ ID NO: 209101 - DNA, 35 bp, Homo sapiens
  chr3:142788519-142788554
  hypo
gagctaccgcgtccggcaatccatcacaattttta

SEQ ID NO: 209102 - DNA, 34 bp, Homo sapiens; identical to SEQ ID NO: 199122
  chr3:142837797-142837831
  hypo

SEQ ID NO: 209103 - DNA, 441 bp, Homo sapiens
  chr3:142895423-142895864
  hypo
gctctctttagcgtcctgtgtgaaatcaaggagaaaaccggcctcagcattcggagctcccaggaggaggagccggtggacccacagctgatgcgcttggacaacatgcttctggcagagggtgtggctgggcccgagaaagggggcggctcagcagcagcagctgcagccgctgcagcctctggtggtggcgtgtcccctgacaactccatcgaacactcggactatcgcagcaaacttgcccagatccgtcacatataccactcggaactggagaagtatgagcaggcatgtaatgagttcacgacccatgtcatgaacctgctgagggagcagagccgcaccaggcccgtggcccccaaagagatggaacgcatggtgagcatcatccatcgaaagttcagcgccatccagatgcagctgaagcagagcacctgcgag

SEQ ID NO: 209104 - DNA, 99 bp, Homo sapiens
  chr3:142957651-142957750
  hypo
gaacatttttaactggcctctcatttccattttctccatcttccaatccatccctcattccgtggctctattcatcacgatgcttcagacctccagtgg

SEQ ID NO: 209105 - DNA, 98 bp, Homo sapiens
  chr3:143027449-143027547
  hypo
ggccacagagcattaaactaagcatggggcccttctgaatgggggtctctaggtaactgctcaagactcatgactgtgaagctcgccatggtgataat

SEQ ID NO: 209106 - DNA, 328 bp, Homo sapiens
  chr3:143316184-143316512
  hypo
aaagagagagccaaagctgtccttcttgcagacagacaggagggggccaaaacacagctcaggcttgtttgtgctcaaagagagaaagttaagctgttgaccctgaaggcaagggagaactggcctcgcaaccttgcgtgggggtggccaattcaagcagctgagacagagcggacagcgtaagaaaagctgctcaggagagaggtagtttaagaaagctgttgatgagagctgctgctgaataaaaccatattcacccgcctgtggccccccgagggttctttctgctcatccacccactcccctcggacttcagcatggtgtggac

SEQ ID NO: 209107 - DNA, 99 bp, Homo sapiens; identical to SEQ ID NO: 199126
  chr3:145878769-145878868
  hypo

SEQ ID NO: 209108 - DNA, 363 bp, Homo sapiens; identical to SEQ ID NO: 199127
  chr3:145878937-145879300
  hypo

SEQ ID NO: 209109 - DNA, 214 bp, Homo sapiens; identical to SEQ ID NO: 199133
  chr3:148709993-148710207
  hypo

SEQ ID NO: 209110 - DNA, 33 bp, Homo sapiens
  chr3:148726132-148726165
  hypo
catgcaactcattcccgccgagtccacttactc

SEQ ID NO: 209111 - DNA, 58 bp, Homo sapiens
  chr3:148867081-148867139
  hypo
ggctatttgtttttgcggtcatagctattctcatctgtccttccggtcccactgcagg

SEQ ID NO: 209112 - DNA, 143 bp, Homo sapiens
  chr3:149096959-149097102
  hypo
aaatcagtggagttgggaagcgtggaaccacccacctgctcaggcggaggcaggcaaatcctcataagagtgtcattgggtcaccactatgtgtccaacaacagggaacgtgtgtttggcccgatggcttagagacaggattc

SEQ ID NO: 209113 - DNA, 32 bp, Homo sapiens
  chr3:149233987-149234019
  hypo
gccaccatgcgcctggccgattggacagtttt

SEQ ID NO: 209114 - DNA, 103 bp, Homo sapiens
  chr3:150187004-150187107
  hypo
attaccggcgtgagccaccgcgcccggccaacatgcaacaatacttctaagcaaggcgatacagatcagcaactctggtgccgatgtgttctatttcctttgg

SEQ ID NO: 209115 - DNA, 163 bp, Homo sapiens
  chr3:150237438-150237601
  hypo
aacctctggtaaaactgacacgccactttaggtagctgcagccatgcaaaagtttgatatcaaagtatctgaaaagcatagcattcaccagttgtcgaagcaccgttccgggacttgcagcatcagcttcacttgagaacctgttagagatgcacattctcgg

SEQ ID NO: 209116 - DNA, 227 bp, Homo sapiens; identical to SEQ ID NO: 199137
  chr3:150320966-150321193
  hypo

SEQ ID NO: 209117 - DNA, 275 bp, Homo sapiens
  chr3:150329378-150329653
  hypo
gtaaagatgcctgcgctcttatccagctcgatcttcaccttctgggatatgctcttctggatcctcttgctgaagctggcgttgcctgctgcccgaccgcaccgctcaccatcctccgcaggcagcacagttgccaggagcccggcctggccgcccccaggggcccagccgctgagaccgcccctgcgcccggcccctcagccccgatttcccggacgaggcactggcgaccacagcggccactgcggctgccgcctccccactgcccaggcgtg

SEQ ID NO: 209118 - DNA, 186 bp, Homo sapiens
  chr3:150497417-150497603
  hypo
ttgaagacggcgtcgtggctcaggttgcccagcagcaccagctctccagagttcagagacagggcagggtccccctggtggaagacccgcaggattcaggagaacatgagctctatggagttctgcttgaagcaccgagaggtggccaggaggtgggtgtacgtgtagtacgagcagaaccgatcc

SEQ ID NO: 209119 - DNA, 86 bp, Homo sapiens
  chr3:150670268-150670354
  hypo
cattttcaatttaacgatatttcaacttatgacgggtttatcgggaagtaacatcatcataagtcgagtcacatctatactacaat

SEQ ID NO: 209120 - DNA, 61 bp, Homo sapiens; identical to SEQ ID NO: 199139
  chr3:150802826-150802887
  hypo

SEQ ID NO: 209121 - DNA, 91 bp, Homo sapiens; identical to SEQ ID NO: 199140
  chr3:150805097-150805188
  hypo

SEQ ID NO: 209122 - DNA, 156 bp, Homo sapiens
  chr3:151112506-151112662
  hypo
acatgctacagcggcgctcaggcgccatgatgcagccgccttctcttcatgcaatcacatcgcagcagcagttgatacagatgaagcttctgcagcagcagcagcaacagcgacttctcaggcaagcccagactcggcctttccaacaggtttgtc

SEQ ID NO: 209123 - DNA, 149 bp, Homo sapiens
  chr3:152877717-152877866
  hypo
gccatcagcctgaccggaagaggggcactgccagaggagagccagagggtggctgtgggcggaggtccctcttgggtttaagagccagtctgatcacacagcctctaaaatcaccctaagaaagaataacataccggaacattcatgtg

SEQ ID NO: 209124 - DNA, 45 bp, Homo sapiens
  chr3:153010523-153010568
  hypo
aatatatttttaggggaggccgaggtgggcagatcatgagatcag

SEQ ID NO: 209125 - DNA, 45 bp, Homo sapiens
  chr3:153010748-153010793
  hypo
gtctgggcaacagagcgaggctgcgtctccaaaacaagaaaaaga

SEQ ID NO: 209126 - DNA, 81 bp, Homo sapiens
  chr3:153824879-153824960
  hypo
ctgcctcctgggttcaagtgattctcctagtttggttactttttaaaaaataatcacagcgtgaaataggcctctctacaa

SEQ ID NO: 209127 - DNA, 39 bp, Homo sapiens
  chr3:155454719-155454758
  hypo
gcataaaagagtatacaggccgggcacagtggctcatgc

SEQ ID NO: 209128 - DNA, 38 bp, Homo sapiens
  chr3:155454998-155455036
  hypo
tgacagagcaagcctccgtctcaaaaaaaaaaaaaaaa

SEQ ID NO: 209129 - DNA, 41 bp, Homo sapiens; identical to SEQ ID NO: 199149
  chr3:155722292-155722333
  hypo

SEQ ID NO: 209130 - DNA, 65 bp, Homo sapiens
  chr3:156543100-156543165
  hypo
agtgccaaggaacaaggcactagtgttcagtacttcctggtgtcattaattagtagttatcaata

SEQ ID NO: 209131 - DNA, 123 bp, Homo sapiens
  chr3:156543195-156543318
  hypo
tcatttaatcacttctctaaatctataggttcaattaattttctttgtatttacttaatcttattttattcaatagcaaaccagtctctttgcctgctacagagccatcgatgttttctttgg

SEQ ID NO: 209132 - DNA, 167 bp, Homo sapiens; identical to SEQ ID NO: 199152
  chr3:156799361-156799528
  hypo

SEQ ID NO: 209133 - DNA, 42 bp, Homo sapiens
  chr3:157866879-157866921
  hypo
tatgcttttatgtatttgctgtactttcggtttactacttta

SEQ ID NO: 209134 - DNA, 1581 bp, Homo sapiens; identical to SEQ ID NO: 199171
  chr3:160472497-160474078
  hypo

SEQ ID NO: 209135 - DNA, 197 bp, Homo sapiens
  chr3:160879690-160879887
  hypo
cacaaaaggatttttcaaatgtttttttcgcggggaaagaagtttgaagactactgcaataaacaacaacagagaaaaaggaagaggaaagagtataaagatttttgcttatatcatgtgaattattaaaaagaatgaagggaaggggaaattattcaatcttctggccctccgcgtacatacgaggcagaagtctg

SEQ ID NO: 209136 - DNA, 145 bp, Homo sapiens
  chr3:168608963-168609108
  hypo
gcactaaattagctatgctgcgaaagcagatttggtgccaacgaagataattatatggacaatatttacaagaatgttttctgttagtgtggctttcaaataacatgaaagtacatgctcccgagccgggcgcggtgactcacgc

SEQ ID NO: 209137 - DNA, 31 bp, Homo sapiens
  chr3:169030445-169030476
  hypo
gtgagccgccgtgcctggccaactccaattt

SEQ ID NO: 209138 - DNA, 77 bp, Homo sapiens
  chr3:169200020-169200097
  hypo
gaaactaagacacactggggcgtgtactcgcctgtgtcattcaccatggggaggagcactgcagagctctgttacag

SEQ ID NO: 209139 - DNA, 77 bp, Homo sapiens
  chr3:169200397-169200474
  hypo
gggcgtgagccaccgcgcccggcaacccaccttctaacaagatgaagtcatgcatcgagaagtcagtgctcattgtc

SEQ ID NO: 209140 - DNA, 241 bp, Homo sapiens; identical to SEQ ID NO: 199188
  chr3:169482439-169482680
  hypo

SEQ ID NO: 209141 - DNA, 68 bp, Homo sapiens
  chr3:169540679-169540747
  hypo
cactgaagaaccttgaagtcctgggactggatgacaataaaataggacaggtacggattccttttctg

SEQ ID NO: 209142 - DNA, 110 bp, Homo sapiens
  chr3:169656714-169656824
  hypo
aacagaaatggagaagctgaccacgactccatctcttctcattccagatttccagcgtgaagcaggcccaagctagggaaggtgagaagctttaaccttaaattttcgag

SEQ ID NO: 209143 - DNA, 96 bp, Homo sapiens
  chr3:169896229-169896325
  hypo
attttaaaagggcttgaggctgcaaatttggtatcttgctctctagtcttccaccacggaatgaggcaataagacggccctcgtgagatgccagct

SEQ ID NO: 209144 - DNA, 100 bp, Homo sapiens
  chr3:169915438-169915538
  hypo
catttggagttagctgctcccgtaataatccgtctatacttgtctaataataacaggtgtttttttaattgagatataattcactggccgggtgcggtgg

SEQ ID NO: 209145 - DNA, 74 bp, Homo sapiens
  chr3:170179927-170180001
  hypo
tgtgtttggccctccgcggactttcctctgacatcttgggcccctggtaaaacctagtgcgaaaggggacggca

SEQ ID NO: 209146 - DNA, 96 bp, Homo sapiens
  chr3:170555017-170555113
  hypo
gtttctcttcttttattgttttctgcctctgctttcattgtaagccttctttagtattcatcttttatttcatccggcttaaaggaagaagaccag

SEQ ID NO: 209147 - DNA, 258 bp, Homo sapiens; identical to SEQ ID NO: 199192
  chr3:170626174-170626432
  hypo

SEQ ID NO: 209148 - DNA, 456 bp, Homo sapiens; identical to SEQ ID NO: 199193
  chr3:170626783-170627239
  hypo

SEQ ID NO: 209149 - DNA, 198 bp, Homo sapiens
  chr3:171362746-171362944
  hypo
tgaaatgtctccttcgaaccctggcagaagtggtatcacgacatatacccggtatttctggttttccctgcaaaggtcagatgcagagaaattcacccaaaaaataaaaggtagtatcaattttagatgacagccaagcagttcacatggtttttgagattgagtgaatggcttcctacaacacgttctgtcacattt

SEQ ID NO: 209150 - DNA, 163 bp, Homo sapiens
  chr3:171363249-171363412
  hypo
tctcatagcctagatcgcaggggcaaaaagacacactggacccattacattttccaaaacagaagtcatcattatctacttagaaactctgagttttcagctgtaaaatgttaccctaggccctttaagaattctgagtggccggccgggcgtggtggctcat

SEQ ID NO: 209151 - DNA, 78 bp, Homo sapiens
  chr3:171493948-171494026
  hypo
ccatctaagaagacactccttcctgggcctcagcactgcgccagtgctgcagcggacggtggtacctgtcaccccact

SEQ ID NO: 209152 - DNA, 45 bp, Homo sapiens
  chr3:171529766-171529811
  hypo
ataaaattatcaaggccaagcgcagtggctcacacctgtaatccc

SEQ ID NO: 209153 - DNA, 154 bp, Homo sapiens; identical to SEQ ID NO: 199199
  chr3:171758579-171758733
  hypo

SEQ ID NO: 209154 - DNA, 278 bp, Homo sapiens
  chr3:171965332-171965610
  hypo
atagtactggagtccgccgggtggtggtcacaccccagtctcctgagtgttatcccccaagctacccctcagccatgtctccaacccatcatctccctccctatctgactcaccatccacattttattcataactcacacacggcttactacccacctgttaccggacctggagatatgccgcctcagttttttccccagcatcatcttccccacacaatatatggtgagcaaggtgagtagattttcgttggcgtcaggagccgttgaaactgatta

SEQ ID NO: 209155 - DNA, 112 bp, Homo sapiens
  chr3:171976025-171976137
  hypo
tagatcacattccacgacatagactcacaggttctggttatgataccgaaagccagtgatgagggcattattcttgtgcatttgtctttcagagttcgcagattgctttctg

SEQ ID NO: 209156 - DNA, 116 bp, Homo sapiens
  chr3:172033319-172033435
  hypo
ttagagccatggggtttaataactgaccccgcatttttgtagatttttagccgctttcctccttcaggagacaccccattaggagcagaaaggcagaaggtcattttcaagtcttt

SEQ ID NO: 209157 - DNA, 420 bp, Homo sapiens
  chr3:172341540-172341960
  hypo
agggtcctagtcttgtgagggagtcagacctacctgcagacaattaccatgtcatgtgtggagtgcagtgtgagacccgaggaacgacccctaaatcctcctgagaaaggagttaggaaaggctcctggaggaggctggcaaagaaatacaagaacagtgaaaagcactctaaggagaaggaagggtgttcggtaagagaacatggcgcatgtgcggaacacgaacagaaccgcggtaataagttccgggttggctagctgtaccacagcacgatgtgcagggacggccaggagaggatgctacagagcagcagctctcaaacttttcagtctcaggactttacaatcttaaacattattgaggacccttccccctcccccacgaagagcttttgtttatgtgggcttcatttattgatg

SEQ ID NO: 209158 - DNA, 90 bp, Homo sapiens
  chr3:172355805-172355895
  hypo
tgggcgaaagagcaagaccctgtctcaaaataaaatcctgctaggtaattaaacatcttgacattcattgtagataaaatcaaatggaca

SEQ ID NO: 209159 - DNA, 80 bp, Homo sapiens
  chr3:172395702-172395782
  hypo
gcgagactccatctcaaaaaataaaaataaaaagcaagcaccagaactctcaaaagttcgactgatcctgacccactgct

SEQ ID NO: 209160 - DNA, 83 bp, Homo sapiens
  chr3:172475922-172476005
  hypo
tacaggcatgagccaccgtgccccgcttctttttgtttttaaacagcatttcaatatgagtcgtatgagagttagtccctatt

SEQ ID NO: 209161 - DNA, 108 bp, Homo sapiens
  chr3:172727654-172727762
  hypo
gctcaagagcctcagttacggaatttcttggggcttaaataccctttagacgtttccctttggtttactatatgcaaataaagttccgtgaccagtctgattggttgt

SEQ ID NO: 209162 - DNA, 36 bp, Homo sapiens
  chr3:173162774-173162810
  hypo
gccgggcgcggtcgcggctcacgcctgtaatcccag

SEQ ID NO: 209163 - DNA, 180 bp, Homo sapiens
  chr3:173864875-173865055
  hypo
tagctgagattggcctcccccgtcatccccagttatagaaaaagcattctagttacggccggtattttttgttaatgccaaaccacagctaagcctagattacccaggtgaactagggtttgtgtaaggatgtcataggtagcgtctgtaaaagttcccggctccaggagaccaatgaaa

SEQ ID NO: 209164 - DNA, 133 bp, Homo sapiens
  chr3:174095072-174095205
  hypo
gctgcgtttcccgcgcaggtgaagcaccgtcagggcacagcgcgcctgcgcgctgtggactgcccccagcggctacaagagcaccgtgaagggcgctatccactacccgggctgcggcgcgcccctcgccaag

SEQ ID NO: 209165 - DNA, 825 bp, Homo sapiens; identical to SEQ ID NO: 199205
  chr3:174158445-174159270
  hypo

SEQ ID NO: 209166 - DNA, 99 bp, Homo sapiens; identical to SEQ ID NO: 199206
  chr3:174159306-174159405
  hypo

SEQ ID NO: 209167 - DNA, 32 bp, Homo sapiens
  chr3:175307701-175307733
  hypo
tatatttaccaattcttggccgggtgtggtgg

SEQ ID NO: 209168 - DNA, 333 bp, Homo sapiens
  chr3:175338304-175338637
  hypo
tccactgcttgggagcatattacaagcccatttattcctgccactcacagatcggcaggcagaaaggagtaacactcagtggctttttcactcccgcaattcggcgagcaggagggggtgtgttacagctctcttgttcctgctgcctgcagctcagcgaacaggggcatgtcacagctctcttgttcttaccacctggaacgggtacatgttgccgctctcttcgtgcctgcacatgttgccgctcttttcgtgcctgcaatctggcaggttacaggttcttgtcctgtgaccaagagaaatgaggtatgcggacacaggatagcaaataag

SEQ ID NO: 209169 - DNA, 53 bp, Homo sapiens
  chr3:176545044-176545097
  hypo
ccctgaattttaaaagaggtcgccatatctttctgatgcattctctttttaaa

SEQ ID NO: 209170 - DNA, 34 bp, Homo sapiens
  chr3:176854102-176854136
  hypo
caggctggagtgcaaaagtacggatctcggctca

SEQ ID NO: 209171 - DNA, 75 bp, Homo sapiens
  chr3:176890964-176891039
  hypo
aactccatctcaaacaaaacaaaacaaaacaaaacaccatatttcttaattaccgtggtgattttaacatatgtc

SEQ ID NO: 209172 - DNA, 90 bp, Homo sapiens; identical to SEQ ID NO: 199207
  chr3:176915778-176915868
  hypo

SEQ ID NO: 209173 - DNA, 89 bp, Homo sapiens
  chr3:177158385-177158474
  hypo
tgtaatgatggtggcgaggatcactggaatctccctcctttaattgacagctgcgctgggccttccctgatgctcgggacctggtgccc

SEQ ID NO: 209174 - DNA, 120 bp, Homo sapiens
  chr3:177238893-177239013
  hypo
cagagcgagactccgtctcaaaaaaaaaaaaagtccttgcaaaaacttgtctcagaaagggaaaaaaagtgagatacaaaggtagttagagcagcggtcgccaacctttttgacaccagg

SEQ ID NO: 209175 - DNA, 180 bp, Homo sapiens
  chr3:178860953-178861133
  hypo
cctgacctcgtgatccacccacctcggcctcccaactaaatttttaaatcttgatataatccagagaaaaaagaaaaattacgtattgggggaaactatttgaatgaccacagatgagacctgaaaatagtcttttttatgttttttaaattaatttatttatttacttattggagacat

SEQ ID NO: 209176 - DNA, 40 bp, Homo sapiens; identical to SEQ ID NO: 199210
  chr3:179064154-179064194
  hypo

SEQ ID NO: 209177 - DNA, 44 bp, Homo sapiens
  chr3:179085022-179085066
  hypo
atagatgttcaaaagacagaatcgttaagagaaagatttcctgt

SEQ ID NO: 209178 - DNA, 36 bp, Homo sapiens
  chr3:179203080-179203116
  hypo
tgagccactgcgcccggcccatggcaactttataga

SEQ ID NO: 209179 - DNA, 141 bp, Homo sapiens
  chr3:179391536-179391677
  hypo
tttagataatgctttcctggcgggtgagacactcttagacttgggccgagttcacctagccctagacaagtgctacctaaagtgtgtcagctgactgggctgagagatgagtacaacactaagagtagtgtttcgagattt

SEQ ID NO: 209180 - DNA, 336 bp, Homo sapiens
  chr3:179449324-179449660
  hypo
agtaggagaaactccgtgggccagtcgttactaattaatagaaccactgaaagataggcttgatgttttaatggccagacctgcatttccactggaccctccctatgctgcttgttgtacaactccagagggtactactcataacttggtctttttgagtggtgcccttggaattgtgtagtgcacagcttacgcatctgtgtttggcaccgtcctctcccgttgccacagatgccctgagtggaacgcgtgccccacttccccgccacctgctctggcttcctagtatcctgtcttgacttactgggcaggctcgttcagttctgtgtctcaagt

SEQ ID NO: 209181 - DNA, 226 bp, Homo sapiens; identical to SEQ ID NO: 199213
  chr3:180397084-180397310
  hypo

SEQ ID NO: 209182 - DNA, 36 bp, Homo sapiens; identical to SEQ ID NO: 199220
  chr3:181430331-181430367
  hypo

SEQ ID NO: 209183 - DNA, 252 bp, Homo sapiens; identical to SEQ ID NO: 199221
  chr3:181430443-181430695
  hypo

SEQ ID NO: 209184 - DNA, 89 bp, Homo sapiens
  chr3:181521187-181521276
  hypo
ctataatgccaccccattgaaaatcaccgttaatttatcggtgtgaaatcacatcagtatttttatacgtatactatattcctttatgc

SEQ ID NO: 209185 - DNA, 292 bp, Homo sapiens; identical to SEQ ID NO: 199224
  chr3:182510867-182511159
  hypo

SEQ ID NO: 209186 - DNA, 170 bp, Homo sapiens; identical to SEQ ID NO: 199225
  chr3:182511623-182511793
  hypo

SEQ ID NO: 209187 - DNA, 34 bp, Homo sapiens
  chr3:182650849-182650883
  hypo
aaaacaagtttgcaacgcatcaaaaagaatactt

SEQ ID NO: 209188 - DNA, 127 bp, Homo sapiens
  chr3:182656910-182657037
  hypo
atccaatcgatacacgagttgggatgcctaggtataactcacacacataaagtaaatacccgccaggatggctgcaataaaaaagacaagtattggcaaggatgtgcagacacggcagtccgcatgc

SEQ ID NO: 209189 - DNA, 76 bp, Homo sapiens
  chr3:182778669-182778745
  hypo
atgtccctacaaaggacatgaactcatccttttttatggctgcgagcatctattaatattacgtaggaggctccca

SEQ ID NO: 209190 - DNA, 73 bp, Homo sapiens
  chr3:182788794-182788867
  hypo
gtctacaaacttctcgatcagcatagcatcatcattgaaagacttcttagcttctctccgtgctgactctaac

SEQ ID NO: 209191 - DNA, 147 bp, Homo sapiens
  chr3:182976758-182976905
  hypo
gtttagtgcataatgacaagaaaaaaatgtgcatgttcagtacagacacgaccataaatttttttttcaaatgtttttgatctgtagttggttgaatctgaggatgcggaacccatgaacgtacacgaccaactgcatatgggtttc

SEQ ID NO: 209192 - DNA, 190 bp, Homo sapiens
  chr3:183035119-183035309
  hypo
cttctgtgaaataatgggttcgttctgtttgtgcttctcaaggtagaaaggtgccaacactcatccagggagaagccccgggaagatttccctgtactgcatgagtgaaagaacctgccaagctcccttttctcggcaggttctgacgtgcttttacgaatcatttaataggtgcctgaccttcaactca

SEQ ID NO: 209193 - DNA, 76 bp, Homo sapiens
  chr3:183035339-183035415
  hypo
caaattcatccccaaataaaaagatgcactcctgagaaagtgaagcaataagtccgcttattagtctgccccaaaa

SEQ ID NO: 209194 - DNA, 821 bp, Homo sapiens; identical to SEQ ID NO: 199234
  chr3:183165026-183165847
  hypo

SEQ ID NO: 209195 - DNA, 120 bp, Homo sapiens
  chr3:183183284-183183404
  hypo
aaaaaaaaaaaaaaaaaaaagaaagaaaagaaaaagaaaatgcttatccctttactgaaatgaaataccttttcttacttgtcctgcgtggcaaattcctactcatcaaaaaggtttttt

SEQ ID NO: 209196 - DNA, 41 bp, Homo sapiens
  chr3:183209172-183209213
  hypo
ttacaggcgtgagccgccacgcccagcaagagccaggtttt

SEQ ID NO: 209197 - DNA, 246 bp, Homo sapiens
  chr3:183217392-183217638
  hypo
catttttcaatgtcacgcatgcaaactccacccacttcttattctcactctccagctcatgctctgttagcgggagcttggccacctccaggcggctgcgcctcagggggtccaggcaggtcacctctgccacaaaccgttcatccttcgtgcagccgccaatgatcatgaacacctcagactggaactcatgcatcctgggcttggtgcgttccgaaatgatctggaaatcgatgggggtacatg

SEQ ID NO: 209198 - DNA, 150 bp, Homo sapiens
  chr3:183275004-183275154
  hypo
aacttgacatctaaaattaacggtcacaagtacagtcatgcccagcacaatgacatttcaatcgatgatggactgaatatacaattgtggtcccaaaagattataatggagcatataaagaaacctgacggccgggcgtggtggctcatg

SEQ ID NO: 209199 - DNA, 120 bp, Homo sapiens
  chr3:183357000-183357120
  hypo
gggctttactcttaactgaggtttccaaaggctaccactgtaaataattcgtgtcactactaagataaatataaaccactgactatgtgcttttattcatagagaagtcatgtaaaatat

SEQ ID NO: 209200 - DNA, 171 bp, Homo sapiens
  chr3:183381135-183381306
  hypo
ctgtttataatagtgcgtggtttgtttttagagttttaagaaaaaatctggagtatattttaatgtaatattattatattatttatgtacgctaataattattattttaggtccactggctattctgaggtgatagttgtcgttggaggatgtgagcgagttggaggattt

SEQ ID NO: 209201 - DNA, 156 bp, Homo sapiens
  chr3:183419805-183419961
  hypo
cacctctaccttctccgcttaccgaaatgctcttcatccttcaagaatcaaattccgactcatccatgaagtgaactccagccttcgaaagctttttttccccctaactactacagaacagatgatatggaaacaatctgcatcaggccagccgcg

SEQ ID NO: 209202 - DNA, 220 bp, Homo sapiens
  chr3:183479752-183479972
  hypo
tggagtcattctttacgtatcaagtttcatcaattcattaatccctgcaaacggagaagagtcagatattagcagctttataaaatgggatgtttatggatgtttattcagtgtcattatgtttgttgcaaggtgatcatcaaacaggaacctggtgaagcccctcacgtgcccgcaacaggagctgccagccagtcaccactcccgcagtatgtgactg

SEQ ID NO: 209203 - DNA, 55 bp, Homo sapiens
  chr3:183525222-183525277
  hypo
ctcatgaggcacgtcgtactctttctgagttgcacgtcagcgcgtaatcctcccc

SEQ ID NO: 209204 - DNA, 168 bp, Homo sapiens
  chr3:183525714-183525882
  hypo
tccaaccaggcatcgctttgcatgtcagggaggtatgcttgtttggagagaggctgtttctaaagcagcgatacgaacaaacggctttcttctgcttttccagattgggatcaccctgcagcccgtggcactccacaggaacgtgtatgcgtccgtggtggaggacat

SEQ ID NO: 209205 - DNA, 300 bp, Homo sapiens; identical to SEQ ID NO: 199237
  chr3:183602745-183603045
  hypo

SEQ ID NO: 209206 - DNA, 66 bp, Homo sapiens
  chr3:183642828-183642894
  hypo
ccaggctgtgggaacgcctgaaacaacagggtaagaagtttggtgccgctgcgtgattgcaaaaaa

SEQ ID NO: 209207 - DNA, 58 bp, Homo sapiens
  chr3:183643595-183643653
  hypo
agttttacactatctattgttttcttttctttcttttttttttttttttgagacggag

SEQ ID NO: 209208 - DNA, 102 bp, Homo sapiens
  chr3:183648026-183648128
  hypo
actctagtgagaggacagcaggccggcaccgcctcattcctgctatctgggcatctctcgatctcctgggagattctgacccgccttgctctccagcgcctc

SEQ ID NO: 209209 - DNA, 101 bp, Homo sapiens
  chr3:183670355-183670456
  hypo
tggattcccccatgctattcttgtcgtgacagtgagttctcatgagatctgacagtttaaaagtgtttgacatgtcctcccgcacacgctgtcttgtctct

SEQ ID NO: 209210 - DNA, 31 bp, Homo sapiens
  chr3:183676454-183676485
  hypo
tgtcaggatctcactcggtcccccaggctgg

SEQ ID NO: 209211 - DNA, 40 bp, Homo sapiens
  chr3:183710273-183710313
  hypo
gaataaggtgagattttcatcgctttcaaagcatatacgc

SEQ ID NO: 209212 - DNA, 86 bp, Homo sapiens; identical to SEQ ID NO: 199238
  chr3:183851915-183852001
  hypo

SEQ ID NO: 209213 - DNA, 43 bp, Homo sapiens
  chr3:183872152-183872195
  hypo
gtctgtctcgctatcgctatatctcatgcgatatgccttatac

SEQ ID NO: 209214 - DNA, 136 bp, Homo sapiens; identical to SEQ ID NO: 18124
  chr3:183891939-183892075
  hypo

SEQ ID NO: 209215 - DNA, 197 bp, Homo sapiens
  chr3:183898698-183898895
  hypo
gggtatcaagtatcgtcggaatgagctcttcctggatgtgctggagagtgtgaacctgctcatgtccccacaaggtgaggtccctctcacgacaaagttggagggggcccagggcaggatcctgggcctgcctgcctgactccgctgctccccatttatctgttccatcaccagggcaggtgctgagtgcccatgtg

SEQ ID NO: 209216 - DNA, 265 bp, Homo sapiens
  chr3:184026093-184026358
  hypo
gtagtagggtgtatgaggggaggagtgtggattcagtcgtatgactgacgggttaaagggtcagcgctgaggtgggctctcaatgtttctggccaggcctgtctttttgtctcttaactttttgtcctgtctgcttccctcagttattctaggcaaatcacactatgtattgtatgggctggtggctgccatgcagccccgaatgctggttacgtttgatgaggagctgcggccattgccagtgtctgtccgtgtgggccaggtg

SEQ ID NO: 209217 - DNA, 73 bp, Homo sapiens
  chr3:184042661-184042734
  hypo
gcaggcagaggaacgaggacgcctgaaggaagagctggaagaggctcgggacatagcccggcggcgctcttta

SEQ ID NO: 209218 - DNA, 180 bp, Homo sapiens
  chr3:184057068-184057248
  hypo
gctgaaagcattatttgcaggtgacacttgagatgggccttaagtgatggcaagcattttttcacgtaaggatggcattcttggcccagaggaaagctgagttccttttcctggaggcaggcgggctgcttgctgacagggattggtggagaagggtttttgttttttgttatttatttt

SEQ ID NO: 209219 - DNA, 163 bp, Homo sapiens
  chr3:184059511-184059674
  hypo
gtgaatgttggagacacagtcgcgatgctgcccaagtcccggcgagccctaactatccaggagatcgctgcgctggccaggtcctccctgcatggtatgcagcccctcccatgtttctggccactttgtcctttctcctcccgtttgcacatccctttggaac

SEQ ID NO: 209220 - DNA, 184 bp, Homo sapiens
  chr3:184059893-184060077
  hypo
cgccatggcccagggccgagtggctcacctcattgagtggaagggctggagcaagccgagtgactcacctgctgccctggaatcagccttttcctcctattcagacctcagcgagggcgaacaagaggctcgctttgcagcaggtggatggcagaaaggggataagctacactcttggcacagg

SEQ ID NO: 209221 - DNA, 282 bp, Homo sapiens
  chr3:184071422-184071704
  hypo
agcacctgggacccctcctggcctcaccaggggactccactagggccagcattcggcccttggtcctgtgcagtgccaaacgcaggtcccggaaggtgcagctgagggccacatggggaacatcccgcaccatgatgtcctccacacgcacccggtactgcctgggggccgagagaggcgcttggtttgtggtcagcatggggagaggtgcccagagcattgccatcccagggccacaaggagggctccagagcccatccatggggacgggagctaaggacc

SEQ ID NO: 209222 - DNA, 33 bp, Homo sapiens
  chr3:184072073-184072106
  hypo
tgtcaccgctcctgccagcgcagctgcccctgg

SEQ ID NO: 209223 - DNA, 260 bp, Homo sapiens; identical to SEQ ID NO: 199240
  chr3:184098372-184098632
  hypo

SEQ ID NO: 209224 - DNA, 196 bp, Homo sapiens
  chr3:184133807-184134003
  hypo
tttccgcatggcttgcccttcatttcattcaatctccacatttccactcaaatcctacctctcagccatcactgtcaattgccctccacccgaagaccaccaggatcccacctatagtggagcacttggggtttatggctggttgcagtgaaggggaacgcacgccatggggcactgtgggcgtatcagtgagggg

SEQ ID NO: 209225 - DNA, 86 bp, Homo sapiens
  chr3:184186552-184186638
  hypo
gtgtctctgaccctggtgcacgctgctctcccagggtcctctgtgtagcctcccggggacggagcggggagtgagcactggaattt

SEQ ID NO: 209226 - DNA, 218 bp, Homo sapiens
  chr3:184225975-184226193
  hypo
ggggcctttggtgggtgggacgcatcaacacacacagccgcagcagctgcacatagatcaacaggccatccgtgcctcgaacacctacatcaacggccaaggccttggccaccctgcccagctccgtgcaccgctagttgccttggtggatcacagccgctccacgctccacaggaagaatcccaaacccggtgaccggctgccccagcattccaagt

SEQ ID NO: 209227 - DNA, 171 bp, Homo sapiens
  chr3:184273717-184273888
  hypo
tgatgcagtggttctcgagacttcccttccccttccccccagagtcagaaccaccttgggggctttggaaacgcacccctgcccagggcctactgcagaccagtatctctgcgggtggcgtccttcttcctaaaaacctccccaggtgattccgtgcgtgtttagggctga

SEQ ID NO: 209228 - DNA, 1017 bp, Homo sapiens; identical to SEQ ID NO: 199241
  chr3:184278877-184279894
  hypo

SEQ ID NO: 209229 - DNA, 165 bp, Homo sapiens
  chr3:184295484-184295649
  hypo
tccgtgcagctggacgggcttcggcctgacgcccgctatgtggtccaggtccgtgcccgcacagtagctggctatgggcagtacagccgccctgccgagtttgagaccacaagtgagagaggttagtagccccctgcgcctgtccccatcgcggccctcactctc

SEQ ID NO: 209230 - DNA, 71 bp, Homo sapiens; identical to SEQ ID NO: 199243
  chr3:184319719-184319790
  hypo

SEQ ID NO: 209231 - DNA, 103 bp, Homo sapiens; identical to SEQ ID NO: 199244
  chr3:184320096-184320199
  hypo

SEQ ID NO: 209232 - DNA, 148 bp, Homo sapiens
  chr3:184340018-184340166
  hypo
agtcaataaacatatgaaaacgtgcccagcctcactagtaatcaaagaaatgcaagtaaaaataacgccaagttaatggttttcacctgtcagatttgcaaaatttaaaagagatttgcgccgggcgcggtggctcactcctgtaatc

SEQ ID NO: 209233 - DNA, 45 bp, Homo sapiens
  chr3:184378704-184378749
  hypo
gagcaggattctggccgcagaggctgggtgcgagatagcagtgag

SEQ ID NO: 209234 - DNA, 49 bp, Homo sapiens
  chr3:184459043-184459092
  hypo
gggaccctgacagctcccatcgggagctgagaaagaagcagaggcctct

SEQ ID NO: 209235 - DNA, 326 bp, Homo sapiens
  chr3:184626082-184626408
  hypo
tctcggtcctttgccggacttgcagcaggggcaccctgtcttcttggcctgctgcgctcagccccttgtgggagggagcacatgagcaagccagtgtgggatccggctggccactccaagtgctgacacaggaacaagctccatgtgaggcccgcggtcttgaggggaatgcagcagcacccagacaagggtgcccacgaccctgaagccccagatggggtgttagtgtgctaattagctcttttagttttaccatccatagcctgatggacggcagcatgttagcagctcggtcggcctctggccccattgtgtggggtggctgc

SEQ ID NO: 209236 - DNA, 99 bp, Homo sapiens
  chr3:184661515-184661614
  hypo
tttttttgctcttgccgccaacacctgagttaataggattctcattcttgtatgtatagtttatgcatatttaatttaacatttacatgtatggccagg

SEQ ID NO: 209237 - DNA, 181 bp, Homo sapiens
  chr3:184784966-184785147
  hypo
atcttctacactgccggaattttctcactgttaacaagttttgcaaaggtggtttcaaatggatgcgtctatatcacacctgaagatagttacagtcaatttccagcttcacggaattctcccctgcgcctttttcttccctttgagcctccaggattgctcaatcgttcccttgggcaag

SEQ ID NO: 209238 - DNA, 304 bp, Homo sapiens
  chr3:184800484-184800788
  hypo
agattctctgcgaccatcacttcaccgccttcaaatctcccagtgaaattaaggcggggtcacaattcatgacaccagatgctacatagaaagtaagtcaggatacaaaagaaaactgtttataataaaaagaatgtcttagttgtaagacggagagaagctaatcagcataccactgaactgctacggttgttggttggagcggggcggggtgggtagaaaatatcaacagcattggaaaaaaggatccaccagacaaaggtacaaaagctcggcgtgggtccgaggctgtggcttcctgtct

SEQ ID NO: 209239 - DNA, 63 bp, Homo sapiens
  chr3:184800818-184800881
  hypo
aatcacttccaggtcagactgcgagggggagagaagggtgcactcatccggttcccagctgct

SEQ ID NO: 209240 - DNA, 93 bp, Homo sapiens
  chr3:184833596-184833689
  hypo
cttctcattgtgacctcacacggcaaaaagagcgctaaagagatccctggagtcactttcataacggcactaatcccattcatgaggactcca

SEQ ID NO: 209241 - DNA, 92 bp, Homo sapiens
  chr3:184833749-184833841
  hypo
taggatttcaatatatgaatttggacggtgggggaccaaacattcagtcccttgcagatggtctctgcaacggagcttgtcccagtccagtg

SEQ ID NO: 209242 - DNA, 301 bp, Homo sapiens; identical to SEQ ID NO: 199246
  chr3:184870307-184870608
  hypo

SEQ ID NO: 209243 - DNA, 142 bp, Homo sapiens
  chr3:185191405-185191547
  hypo
cataatcctctcttggaaaacgcccagagttctgagaaaacggaagaaaatgaattcagcggctgtaggtctgagtcatccctcggcacctctcatctcggcacccctccagcgctacctcgaaaaacaaggcctctgcaga

SEQ ID NO: 209244 - DNA, 33 bp, Homo sapiens
  chr3:185266642-185266675
  hypo
caggcatggtggctcacacccgtaatcacagca

SEQ ID NO: 209245 - DNA, 119 bp, Homo sapiens
  chr3:185277645-185277764
  hypo
cacatgtaacccaaaacttaaagtatagttaaaaaataaataagagctgccccccgccccgctcagctggaattgtctgagaacccatttcgtggcattcattgtaaactataagctct

SEQ ID NO: 209246 - DNA, 161 bp, Homo sapiens
  chr3:185277844-185278005
  hypo
tgaaaagaattcagaagatttaaagggagagattcctgactcctatcaggaggacacgacccacacgtaaaatatcaggtgttgagttatcatgggtcaggaaatgaccaaagaacagaaagttttttttgtttgtttgtttgttttgatatggagtctcg

SEQ ID NO: 209247 - DNA, 67 bp, Homo sapiens
  chr3:185303180-185303247
  hypo
ctagaagtgtgacattggaattatagagggagagtaacgagactcattacttactagcccagggtag

SEQ ID NO: 209248 - DNA, 300 bp, Homo sapiens
  chr3:185317867-185318167
  hypo
agccactgcgcccagcccaaagatgatattactttgaagccttttatttcatttaaaaagttaatataaattgaatttcatcatctgtttggaatatttgtttagaattgtttaccgttaagattgacacatatgaaggatggtagatttgtgcctgagatgctggcactactgtgtttctgtgagttttgtgtagtctagtcagagaagcccaggtattcctagggcaggtttcttgtgtaaagaggtccataatcggttatctgcaacccctgggagccagatgtgtttaggaattca

SEQ ID NO: 209249 - DNA, 80 bp, Homo sapiens
  chr3:185352337-185352417
  hypo
taggggttcatagaaaataccgataaggtaaagaaagttaattctgcaaattcacaaccagagttaatacctcttaacat

SEQ ID NO: 209250 - DNA, 403 bp, Homo sapiens
  chr3:185360805-185361208
  hypo
gagcgagactctgtgtcaaaaaaaaaaaaacaaaaaaaacccactgttttagacataatgctattgtacacttaatacagtgtaaacataactcacatgcagtgagacactaaaacgtgtatgactcattttattgcaaagttcgctttactgtggtggtctggaactgaacctgcgacgttcctgaggtatgcctgcacttactagtgagcttcccgtggaggcgtgaagtgcctcttcccggaactgccgggcatattatcctccccctttcctccacttaaaaagcagctttgcctggccaggcttgcagttccttaaggatagactggtcttctctagcttgacatgcagtcgatccatccctctagctccgaggttcggaaacttcagtgcgcacagc

SEQ ID NO: 209251 - DNA, 78 bp, Homo sapiens
  chr3:185362626-185362704
  hypo
cacaggtgatccagaactgccgtgagtgtccttccgacgagatttccctctgggtgaattttgtgcgggtggcctcaa

SEQ ID NO: 209252 - DNA, 48 bp, Homo sapiens
  chr3:185363305-185363353
  hypo
gcctgtgggagcctcacttgctgcgctgtgaggcgactccctgagggt

SEQ ID NO: 209253 - DNA, 104 bp, Homo sapiens
  chr3:185363652-185363756
  hypo
agttcactgctggacggacaggccaggaagcagaagcagggcgccagcaactgggggccgtgcagagtcagatgctacacttgggctcccgtgctgctcccgcc

SEQ ID NO: 209254 - DNA, 196 bp, Homo sapiens
  chr3:185365780-185365976
  hypo
tgcctcctacattccagctccgcctaaagcgcagtgtgtgccctggagcgccgactgcattctggagacggggaatcctttgattccacaccgcttcgttctttcgtataaagctgactcattacatctagaacttggttttgaattccgtttaagagtttctatgtaaagagctttacaacagctgggtgtggtg

SEQ ID NO: 209255 - DNA, 360 bp, Homo sapiens
  chr3:185375017-185375377
  hypo
ccgtgggatgagaggaggtggtagaagggccacagggccgtcaggagcagcctcaccttgatagaggctccggcgaatctcgccagctgtttgatgtgtgcccccttcttcccgatgatggcgcccacagcctgggttgggatgaagagattcacaatctcctgctctggatactgggagggcgagacaagaaagaagacatcattccaaccaggctttctcctccaggcactcaacaggtaccaagcaccttaccatgaaccccatggtgggaaggccccgccacccaaggaaatggccaaaatggtgcacaggatccttctgcggcctgcggctctgcaggtgtgaagcctgaggaag

SEQ ID NO: 209256 - DNA, 257 bp, Homo sapiens
  chr3:185407215-185407472
  hypo
tggggaccaggatccgcagcgggaaatcaatctgtctggcctgagaagtgcccccaggggcgtggccttgctcccgggaagagtggtccccacgctgggctcgctgagggggcgaaggggagctcacctcttcatccgggatgtaggaaatcttgaaggagtagttctcaaactgatgcccgcttagcttctccatggctctgaaatgcagcaggacaggggagcttcgtcagaaaccaacatcaagaaagaccctc

SEQ ID NO: 209257 - DNA, 210 bp, Homo sapiens
  chr3:185445847-185446057
  hypo
gggaggggcacttccgttacgtatacctgaactatgtttgcgattcacacaaaataaagaattgaccaggaccaaccccagcctatgagaggcaaagttactgctgcccgctttaccccaccctagagcgccctctgatccacactctcacactgccttccagctttcccacggcgccagacccttgctgctcctgggccccttcccctt

SEQ ID NO: 209258 - DNA, 34 bp, Homo sapiens
  chr3:185551485-185551519
  hypo
gcttaaaaaaaaaattaggccgggcacggtggct

SEQ ID NO: 209259 - DNA, 166 bp, Homo sapiens
  chr3:185551759-185551925
  hypo
ggacacaagagggaaactatgtctcaaaaaaaaaaaaaaaaagaaagaaagaaaagtctattcccagtacaatgataaaaaccagtaaataaacattgatactgtaatctgcagactcttcaaatttcaaattttatgaattgtgtcaatattattgcaaaagaaa

SEQ ID NO: 209260 - DNA, 37 bp, Homo sapiens
  chr3:185630673-185630710
  hypo
aacagagcaagattccgtctcaaaaaaaaaaaaaaaa

SEQ ID NO: 209261 - DNA, 92 bp, Homo sapiens
  chr3:185643232-185643324
  hypo
aaccagtttttcatcttacccgattcccaacatgacgcctgcgagtagacatgggagaatggctgtggctgtgccgtctacgataatctcga

SEQ ID NO: 209262 - DNA, 80 bp, Homo sapiens
  chr3:185656908-185656988
  hypo
ggaccttaatacacaggaatcagacacaatctctattctaaagttacaaagtaatgtgctagaaccgttaaacacaatta

SEQ ID NO: 209263 - DNA, 95 bp, Homo sapiens
  chr3:185668397-185668492
  hypo
cgcccgaccttctattaagtcttaaactggctaccagtgtactaggaaattttgtttggtataagatatagatcgtattatttttctccatatag

SEQ ID NO: 209264 - DNA, 80 bp, Homo sapiens
  chr3:185681620-185681700
  hypo
actgtgaaagactttgaaatgggaaaaaaaggttgctgggtgtccatgcccagggcaccgttctcacttttgtgagcctt

SEQ ID NO: 209265 - DNA, 713 bp, Homo sapiens; identical to SEQ ID NO: 199251
  chr3:185825460-185826173
  hypo

SEQ ID NO: 209266 - DNA, 1075 bp, Homo sapiens; identical to SEQ ID NO: 199252
  chr3:185826425-185827500
  hypo

SEQ ID NO: 209267 - DNA, 290 bp, Homo sapiens; identical to SEQ ID NO: 199253
  chr3:186079331-186079621
  hypo

SEQ ID NO: 209268 - DNA, 43 bp, Homo sapiens
  chr3:186142830-186142873
  hypo
agtgctcggtcagtggtggccatggctgcgcaggaggaggcag

SEQ ID NO: 209269 - DNA, 36 bp, Homo sapiens
  chr3:186271905-186271941
  hypo
ggattataggcgtgagccaccgcgcccagccttaca

SEQ ID NO: 209270 - DNA, 191 bp, Homo sapiens
  chr3:186409540-186409731
  hypo
tgtccttcatcagacatgtacgatcatgaattgcgtgcaaccccatttgacctatccgctccatcctggtgggcgtgaacattctccgattgccaagcctccatgtaaggatccttgccaagccccaaggatccagagatcatcgtcatcctgagaagccacatgaacacgatgcccacttccagtagatg

SEQ ID NO: 209271 - DNA, 99 bp, Homo sapiens
  chr3:186429029-186429128
  hypo
tgtcttcttgatgacactgccggcagacgctgcccgggcctgtttcttttgttgttattgttttgagatggagtttccagctcgtcgcccagcctggag

SEQ ID NO: 209272 - DNA, 47 bp, Homo sapiens; identical to SEQ ID NO: 199254
  chr3:186544979-186545026
  hypo

SEQ ID NO: 209273 - DNA, 167 bp, Homo sapiens
  chr3:186697396-186697563
  hypo
ggctgtagcatctgcgtaatagctgctcctaagaatgcaacgtgagctgaattcaaacatgaatttggagccagtacctgaatatgtgggttgttctatgccaccgggccccctgcctgtttaatttctccttcccctgctgccaaggcttccgagaagttgctgtg

SEQ ID NO: 209274 - DNA, 202 bp, Homo sapiens
  chr3:186783728-186783930
  hypo
agcccagaaagtaagcgacagaggtgggatttggttctaggtgtttgccaccagcactttaaatcaccaaagctttctggaagctccaacttttcttctcaagatactgaaagacaggtatctggatgggttggcagggcgggtgggaggtgggcgagatttccatcaacaacgggtctaaaaccagcgatggtgagctggg

SEQ ID NO: 209275 - DNA, 50 bp, Homo sapiens
  chr3:186938675-186938725
  hypo
gaatccctcctcccacggccttcctccagtcccccgcgcccccacactgc

SEQ ID NO: 209276 - DNA, 375 bp, Homo sapiens
  chr3:187443048-187443423
  hypo
gcccactctgctcacctacccgctctgctcacctgcccgctctgctcacctgcccgctctgctcacctgcacacggggactgagtgggactttctcctgcccgctctgctcacctgcccgctccgcttgcctgcccgctccacttgcctgcccactcctccgcttgcctgcccactcctccgctcgcctgcccgctccgctcgcctgcccgctccgctcgcctgcccactctgctcacctgtacaaatctggctccgcaggtttcgcatttgtagggcttctctccagagtgaattcgagtgtgggttttcaggttggctggccggttgaactgggccccacagatgttgcaacgatagggtttctcacctatta

SEQ ID NO: 209277 - DNA, 65 bp, Homo sapiens; identical to SEQ ID NO: 199255
  chr3:187455277-187455342
  hypo

SEQ ID NO: 209278 - DNA, 446 bp, Homo sapiens; identical to SEQ ID NO: 199256
  chr3:187456666-187457112
  hypo

SEQ ID NO: 209279 - DNA, 367 bp, Homo sapiens; identical to SEQ ID NO: 199260
  chr3:187462445-187462812
  hypo

SEQ ID NO: 209280 - DNA, 164 bp, Homo sapiens
  chr3:188070251-188070415
  hypo
gagctgtgtgactggcgagccctcagttgccacttggaaacggttggaaactgtagatcaggcacagacattgaatgtttaggagcaagaagggcttgtgaatatcccgtactctcatttgatgtgtgaggacagtgaggcgcattatgcggaggtgacttgct

SEQ ID NO: 209281 - DNA, 94 bp, Homo sapiens
  chr3:188353741-188353835
  hypo
acccaatgcctagcctagatcgttgaaaaggaaattgaaggatggtattcagattaagaaacagatccctggattatgtttaagaatttctggg

SEQ ID NO: 209282 - DNA, 93 bp, Homo sapiens
  chr3:189618732-189618825
  hypo
aaacaccaggcagaaaataacgaatcctgtgagcgctttaactcatctgacatttgctctgtaattggaaacgctattatttttctgtgaaag

SEQ ID NO: 209283 - DNA, 297 bp, Homo sapiens
  chr3:189900376-189900673
  hypo
agtactttcacaaacatttacgctctaaatgctgtcagtgaatcagtaagttattaatgttttcttttacgtttgaagaaatcgactcacagttaaagtggcttcgaggtcacagtaatatagagattcttgcccggagacaagaaagagcactgagttataatgccaaagtgaccagcatcgtgactttggaattataactcggtgctctgtcttgtctccggcacaagaagctctatattactgtgaagcatgtctataaccaaggcattacacgaatggagcagtgcaaatggt

SEQ ID NO: 209284 - DNA, 546 bp, Homo sapiens; identical to SEQ ID NO: 199265
  chr3:192635622-192636168
  hypo

SEQ ID NO: 209285 - DNA, 87 bp, Homo sapiens
  chr3:193235538-193235625
  hypo
tgggagccaccacgcccggcctacaaccgactgttttaaatgaatgcatttcaatggatttacctcgctgctcatccaatctggaca

SEQ ID NO: 209286 - DNA, 175 bp, Homo sapiens
  chr3:193391748-193391923
  hypo
tttgctctgctgactccctacgcgaggtggcaacagctggcccttttactggagcttgtggggattagagagtcgggctcgcagcagcgtgctcggcctcttgcctctgttgactgttctttattgtttgatgcctgagcatctcccagacagcgagcaattgtttctggaaact

SEQ ID NO: 209287 - DNA, 219 bp, Homo sapiens
  chr3:193392562-193392781
  hypo
acggatgagaatatcgtctgtgaagtagtatgagatggaaattttcctagaaagattattgtactcggaatttggaactgaaaagtgtagaaaggggaagtgatgtgtttaaaactgtttgcggaggtggggctctgccatgtgtattttgacaaagctacacaggtgattcttgccatccccgattaccgtgtacccgcctgcccctgagctggcact

SEQ ID NO: 209288 - DNA, 61 bp, Homo sapiens
  chr3:193419641-193419702
  hypo
tttcttatcctgttggtggagtgaggcatttggacctggatgctctccccattgggcgccc

SEQ ID NO: 209289 - DNA, 285 bp, Homo sapiens
  chr3:193419732-193420017
  hypo
ctatgattggctggccttttgatgtgcaggtactacaagttggtcacaaacttgtgtacaatgggcctgttctggttcatgtgaaaatcaacatccttttttgtgttaccgggtgacaggatgctacaatactattagcatttgcaaagagtgtgctctgtccaagggtgtaaccacaggtcgtgtgctgctcactttgtgtttctctattatgtgagagacacaaagaagctgagggctcgcaaaggcctgtcaaatcttgtaatgtggcgctcgacccccaaa

SEQ ID NO: 209290 - DNA, 87 bp, Homo sapiens
  chr3:193428478-193428565
  hypo
agggacccagaggccgcggagccggaccgcagagtggaggccaggccggtgggcaggaggaggtgggaacaccgaaggccgccagga

SEQ ID NO: 209291 - DNA, 67 bp, Homo sapiens
  chr3:193428950-193429017
  hypo
cagcccggattaggcgaggagggaattctccggaacatgtgtgcattgtttcgtggagggcagccag

SEQ ID NO: 209292 - DNA, 45 bp, Homo sapiens
  chr3:193438390-193438435
  hypo
ttttctttttcccttcgctcttattgcccaggctggagtgcaatg

SEQ ID NO: 209293 - DNA, 374 bp, Homo sapiens
  chr3:193455063-193455437
  hypo
ttcaagactcctcccgcgctgttggcaggaatgtttctttcctgggtgtcaatacaagcccagggtcatttttcagcatttgccaatcgctgtaattgcacaggcccgagtggctctccagagaattcctgccgttcctcattctctcctcctggactgtgctctatagatgcaccccaggccatggatcatgtttttcacataacccgttaattactaaagaaaacaacccagctttcaacctgattagcccagattaatggccagcagcgggtttcacgcgcctgcacaatttatcactgaaaagaactgtgtctttaatgatttagctacctggccgggcagggcttactccaggccgcaggcctcctgga

SEQ ID NO: 209294 - DNA, 251 bp, Homo sapiens
  chr3:193490130-193490381
  hypo
cgccatcatttttccgtggaggtgttgccatagagatgttgtctgatccatctctattgatatcaccctttaaaggggcccctgaataggcactgaggtaggtaaatgtatgcagtgacattgagcggatgattctattctgaaaaattcctgcaccatttgtttctgtgcttgtctgagggccgggacacggtgttgggttttgttgcacgtgctctcttcacaggcccggagttaatgcaagccttgtt

SEQ ID NO: 209295 - DNA, 35 bp, Homo sapiens
  chr3:193503310-193503345
  hypo
gttccccaggccgggcgcggtggctcacgcctgta

SEQ ID NO: 209296 - DNA, 208 bp, Homo sapiens
  chr3:193505272-193505480
  hypo
agctgccaccccattcggtacttctctcaaggcacacgggcggtgtggcagagcctgttccttgctgaccagtgtccattccccctttcttccttagtatcggattccagttttatctggagtggtgatgaggctacatttccagccctccttgcagcaaggatggccaacgagacgcaagcacaagtcatgacgtgggtcttcaagg

SEQ ID NO: 209297 - DNA, 390 bp, Homo sapiens
  chr3:193586965-193587355
  hypo
aaggatgcctgaaatgcctccgctgcagcttgctagaggccttctaattaacctgcgaagaaccgtctgcaggcccccagtccggtgttcactcgttcattcattcgctcttcactgggtgccctggcactccaagcctccagcgcacacccagccctaaccttgaccagggtgctgagcacgaggagccccaccctgagccaggcctggagaggcgcctttaagcgcaggtcctgcggctgctgacaggtcatcagagctgggaccaaagacccgccgggaggctggcagcctaggtcgcttcccaagctctccgggcccttcccttcggcggctaatttccacttttcataaggatgtgttcattcaggggactaggagcagaggcgc

SEQ ID NO: 209298 - DNA, 147 bp, Homo sapiens
  chr3:193659935-193660082
  hypo
gggctggaatttcagcgggtcttcaggggtgcacaggtaaagtcttggtggacgagcattctaggcaaaagccatgccggttcatggtgctgtgtacttcagactgtttagtagattccccgctacaaaaaatagtcctcggccggg

SEQ ID NO: 209299 - DNA, 169 bp, Homo sapiens
  chr3:193711554-193711723
  hypo
tgccttgtgttttctcgagcatcgctgtaatctggtcttatgtgatgtttcaggcgtatcttgctgttgttcagggaaagcacgcctacggagcctcagataaacttctattttcttgccattagcactcaaaccaagttgttgacaccagtcccgctaagtgtcccga

SEQ ID NO: 209300 - DNA, 444 bp, Homo sapiens; identical to SEQ ID NO: 199266
  chr3:193721237-193721681
  hypo

SEQ ID NO: 209301 - DNA, 213 bp, Homo sapiens; identical to SEQ ID NO: 199268
  chr3:193852644-193852857
  hypo

SEQ ID NO: 209302 - DNA, 484 bp, Homo sapiens; identical to SEQ ID NO: 199269
  chr3:193853887-193854371
  hypo

SEQ ID NO: 209303 - DNA, 33 bp, Homo sapiens; identical to SEQ ID NO: 199270
  chr3:193858570-193858603
  hypo

SEQ ID NO: 209304 - DNA, 246 bp, Homo sapiens; identical to SEQ ID NO: 199271
  chr3:193858636-193858882
  hypo

SEQ ID NO: 209305 - DNA, 282 bp, Homo sapiens; identical to SEQ ID NO: 3063
  chr3:193858949-193859231
  hypo

SEQ ID NO: 209306 - DNA, 160 bp, Homo sapiens
  chr3:193922615-193922775
  hypo
cactgtccgaaactcgcctggacaagtccaacttcattcttttcagtacgactagctcctgtgcgctgcagaagactcgggctgatctgaaagcgcctctcctattcgagactctcaggttttaagtaggtcttccgcacctgcagatgaaaaaagatgt

SEQ ID NO: 209307 - DNA, 331 bp, Homo sapiens
  chr3:193969963-193970294
  hypo
gtggcaccagcacccgaaacacactgctacatggggctggcccatggatagccgcgcacctcagagtgagcagtgccagaagccaggtagattgggggtggagggctgggggagagacatgaggcaggaagcagttaggcaccaaagcaggagtttctagaccttcggtcaacaaaaattcaaggagcacctgcttgcgctaagtgctggaaatgcagtgatgcgtaaaacacagagcccgcttcgtggaacttagcatcaagagagaacacttgacatgcagacaggcaatgccagtgtcgtgggatgcgtgctccccaggaaatgggct

SEQ ID NO: 209308 - DNA, 92 bp, Homo sapiens
  chr3:194012769-194012861
  hypo
tctcccagggagaccgcaggctttgctagtaattggcccattgtccttccactgcgattcctgcacaagccgggaatcgcctggctaggggc

SEQ ID NO: 209309 - DNA, 187 bp, Homo sapiens
  chr3:194048948-194049135
  hypo
agtcacccctggataactgaggacttgcctgtcaagtatgaaacatttagcacgtacagtcctttgagtggaattagagtggaagagtgtaactcagcgtgtaagagttgcctgctgctgctttgaacagagggtaattgcagcagatgccttcagcccctgctcttttcagcagccactgtacagg

SEQ ID NO: 209310 - DNA, 171 bp, Homo sapiens
  chr3:194061694-194061865
  hypo
gaaaagccaaggcttcggagactcagctcccctccgcccctacctgtcgcctggtcaggccccagaggcccccttccccagctcctgtatgcgctgctactagggccctgctgcccgagcctcgatagacacggtgagccgcagagaaccgcagctcgacctcaggtccca

SEQ ID NO: 209311 - DNA, 202 bp, Homo sapiens
  chr3:194066805-194067007
  hypo
agttcccaaagctcccgcacatacatcttgatcctcagcgcaaacctagaagtgcccagggcaggcagactggggctcccggagctacagtgactggcccaagggaacacaacacagaagcgaggggccagggccagtcctgacagcccgggctctgcagggaagatggacccggggaggcagcccacggaggccggggtcc

SEQ ID NO: 209312 - DNA, 263 bp, Homo sapiens
  chr3:194080454-194080717
  hypo
gcaggagccagttgcggagcggaaggatgtctgagtcacacctccagggattgtcatacagccgcagctcacacagtttccccaggtgatcgaagatgccgaggggcaagttctccagctggttgttctgcagctggatggccatgaggccattgacgttggcgaagatattccctgggagctgtctgaggcggttgttctgcagggagatgttctgcaggttggccaacatgcggaagacgttcccgtccaggtcctgcagt

SEQ ID NO: 209313 - DNA, 61 bp, Homo sapiens
  chr3:194208010-194208071
  hypo
ctttgggctatgacaacatcatagtccaatctcccattttatgaacagggaaactgaggct

SEQ ID NO: 209314 - DNA, 115 bp, Homo sapiens; identical to SEQ ID NO: 199273
  chr3:194278585-194278700
  hypo

SEQ ID NO: 209315 - DNA, 240 bp, Homo sapiens
  chr3:194301031-194301271
  hypo
tggcgagaatctttctttactcctgttctttctcacccagctggctttgaaaaacttccaacctacagaaaagatgaaagaataacgaacatgtttatgctattcgcctagattaatccattgttcccgtttttccgtttgctttgtctctctccaactacctgaaaaatttataatttttttctgctgaaatatttaaaagtcagttgcttggggccaggtgcggtggctcacacctgt

SEQ ID NO: 209316 - DNA, 496 bp, Homo sapiens; identical to SEQ ID NO: 199274
  chr3:194353932-194354428
  hypo

SEQ ID NO: 209317 - DNA, 219 bp, Homo sapiens
  chr3:194365661-194365880
  hypo
agacctagctcttcccatggcgccccagactaggatgaaatctctttcttcttttctcgtttgcattcccactcaagtattcttcagtatacggacatgatcatacttatggtgaatattttccaaaacaaaactcaagacataactggacagttacggtaatgccgggttagactgttaaagtcaggagagttcctcgactcctgtatgtggggttgc

SEQ ID NO: 209318 - DNA, 65 bp, Homo sapiens
  chr3:194374239-194374304
  hypo
ctcacaaaaaaaaaaaaaagatgaacaggggacaagcaaagttcgacggagatggaaaggtgaac

SEQ ID NO: 209319 - DNA, 123 bp, Homo sapiens
  chr3:194374356-194374479
  hypo
tcgagggtggcgccctcctggaggggagaattggaccttcccttcactttttactttatatgtttctgtactatttgaactctgtacaaagaacatgtattacttttgtaatttaaaataact

SEQ ID NO: 209320 - DNA, 186 bp, Homo sapiens
  chr3:194596888-194597074
  hypo
ttatggtgaactcttcgatcctatccttggactccggtgacatgggaaatcttcagttctttggttattcagggaggggtacagatgagatatgaggaacaccaggctgcggggactggagcagcctcaactattcacgcgtgggttagagagctgcctcccctccctccccgggccatggtgaga

SEQ ID NO: 209321 - DNA, 63 bp, Homo sapiens
  chr3:194766334-194766397
  hypo
ttggcttcagagtgccgccaggagaccgccctccaccctcactccatgcgggggttggcctgg

SEQ ID NO: 209322 - DNA, 84 bp, Homo sapiens
  chr3:194790286-194790370
  hypo
gcacagtgacctgcccggcaggaggtctcagcaccttaatcacaggacttccctgcggtgtctctctagcgggtcagacactgc

SEQ ID NO: 209323 - DNA, 38 bp, Homo sapiens
  chr3:194799662-194799700
  hypo
tctccatgaactttgcgaccagacgcactctgctccag

SEQ ID NO: 209324 - DNA, 69 bp, Homo sapiens
  chr3:194818059-194818128
  hypo
atcctcactaaactttgtgacgcgggttacagcaatggcaaatgcgtatcaacacgtatctagcaccac

SEQ ID NO: 209325 - DNA, 504 bp, Homo sapiens
  chr3:194851494-194851998
  hypo
catggccatacacaacaaaacgtgcatacaatttcagggtgcagggagaagggagaggagggcagtgaggctgaaagatcagcttgaggccagatcggaagaggtctttatgctgcaccaactgcggctttgtcccatacgctccgaaaaacaaggcagagctggacccaatggtgacaggatccccaagggtctgcttagcctgagacctgcaaacacaacaccattgccaagacctgcaaattctgcaagcaggaccattcaggtccctccttcaatgtatccctcgtgccctctacggcctattctcagaaatgggacccaaacagtgttctcccttgtgccggcctgctccattggccggttccttcccaagctgctgaggaagcagcctcgctttgtcacaggcatcctcattacccactacctgacccccacattgctcaaacaccctagactcagaagccgaaccaccctctttccgtctccccattcatttccaaa

SEQ ID NO: 209326 - DNA, 166 bp, Homo sapiens
  chr3:194866034-194866200
  hypo
attgatggggccctgcgagcatctctgtgaagccacatgaacgggcacatcactccacggtgactggcactgatggggccctgcgagcatctctgtgaagtcacatgaacgggcacctcactccacggtgactggcactgatggggccctgcgagcatctctgtga

SEQ ID NO: 209327 - DNA, 180 bp, Homo sapiens
  chr3:194927046-194927226
  hypo
aattttgaaagagagaatgggaaagactcaagagtcaaccaaatgaaacatgtagtcaattcaagaatgtgaatcctgcatggatactagatggcaataaggtgattatttattgttagttttgctaaatgtaataaaaatagcgcatttaatacaaatagtactttccagccagttgcg

SEQ ID NO: 209328 - DNA, 152 bp, Homo sapiens
  chr3:194935163-194935315
  hypo
accagcccccacccccgtcaatcctcagaccacttctttctgaagcaagcaggggccacagggctaactatgggaaccagcatgcaccgtcagcccctttcagtcaggatctcagaggctggaaaaccatctacatacggcatccacaatcg

SEQ ID NO: 209329 - DNA, 219 bp, Homo sapiens; identical to SEQ ID NO: 199278
  chr3:194980292-194980511
  hypo

SEQ ID NO: 209330 - DNA, 187 bp, Homo sapiens
  chr3:195012971-195013158
  hypo
atgtcattgtataaacgcatacccctaatacagcctgaataagtggtgtcgctttgttttcctctgaattggcccagttcacgtctgcaccatgagccaaagcctcagccattttaggaaggtttttttcatatgacgccctataaagctgaagtcctggattaagatgtttcgagtcaagaaacat

SEQ ID NO: 209331 - DNA, 80 bp, Homo sapiens
  chr3:195093140-195093220
  hypo
aggctggacacagtgactcacgcctccgacctcagcacctgggagtcccggagacgatcactttagcacaagacctcagc

SEQ ID NO: 209332 - DNA, 78 bp, Homo sapiens
  chr3:195134178-195134256
  hypo
aaaactgagcaaaagggggccggacacgatggctcatgactataatgacagcactttgagaggctgaggcgggcatat

SEQ ID NO: 209333 - DNA, 138 bp, Homo sapiens
  chr3:195172946-195173084
  hypo
tgagaagtccaaggtcttctcggggggcaggctgcaccttgtgagaaccttcttgctggtggggactccgtggcgtccccaaggtagggcaagggatcacgtggtgagaggctgagcgtgctaatgcttgctcaggtt

SEQ ID NO: 209334 - DNA, 38 bp, Homo sapiens
  chr3:195183766-195183804
  hypo
ctggcattacaggcgtgagccaccgtgcctggcctctt

SEQ ID NO: 209335 - DNA, 240 bp, Homo sapiens
  chr3:195194375-195194615
  hypo
gggatgacaggtgtgagccgccgcgcccagcttggttgggtactttcataattcttttttcaaacttattactggtgattaatttttaaacagtatctagtaatgtgagcactcgtcctatttatgaggtgaaacttctcatatcctatacttaataatttctaaaatataaacatacaaatgcctgccgtatcttgtctattctgtctctgtcttcgttttcttttttctttctttctt

SEQ ID NO: 209336 - DNA, 155 bp, Homo sapiens
  chr3:195393196-195393351
  hypo
gccttgatataaccacgtgagggtgatggcctttcccagccatggttcctcacctgtaaagggtgaggacagcagcacctgcctcggggtgagaaagcatggccctcattagtcggtagtggctgccgtcaggttcacagcgtacctctcccgat

SEQ ID NO: 209337 - DNA, 227 bp, Homo sapiens
  chr3:195419009-195419236
  hypo
ctcactggacagtgcagctacggaatgatgccatcaccggaaagttccatcagccagcaccgatgcagacctttgcaactgcccctcacgctggacagcacctgtttgatagattgtccactacgcagtgaaaagcctgggtgaaaagcggtatttggtagaagagcaaaaaggggaaaaaaattaaaagtagtaggtcattgtccgccaaactgaattctggcaga

SEQ ID NO: 209338 - DNA, 280 bp, Homo sapiens
  chr3:195536288-195536568
  hypo
gggggtgggggctgcccacccgcccttggtgactgcttttcctgccaaggccctggtcatgcccggtcagatgtgtgggtgccatctcccagccacgaccatctcctctcctggcccagctccacttggtccccttagcgacgcaaaggactcagcgctccacgacatgcctagcttcttcgggtcgtcatggagacgcccttgcacaccaacagtccttcactccttctccgggtcacgcccccgtgcttttccacgcccaccccaggtcttgcccctc

SEQ ID NO: 209339 - DNA, 195 bp, Homo sapiens
  chr3:195539283-195539478
  hypo
ctcagtgcaggcgcgtggcagaccccagacgcgtggcagaccccagacgcgtggcagaccccagacgcgtggcagaacctcagtgcagatgcgtggcagaccccagacgcacggcagatcccagacacatggcagaccccagacccatggcagactccagacgcgtggcagaccccagacgcgtggcagactcca

SEQ ID NO: 209340 - DNA, 219 bp, Homo sapiens
  chr3:195592096-195592315
  hypo
tcagtaagaaccacccgagacagtgacagacaggtgacagcgagtgcctgcgtcccaggtgcaaatcagtaagaaccacccgagacagtgacagacaggtgacagcgagtgcctgcgtcccgggtgcaaatcagtaagaaccacccgagacagtgacagacaggtgacacagagtgcctgcgtcccgggtgcaaatcagttaagaatgacccgagacag

SEQ ID NO: 209341 - DNA, 159 bp, Homo sapiens
  chr3:195595789-195595948
  hypo
gccccatgtgggccggtgagccccgcctcgctccgtctaagctgcagcaagcaacactggctcctgcctgacgctgcctccaccagcacaagaccccggcggccctgctcctgcgccctggcgagttagtgagccctcatccccgcccctgtcacggca

SEQ ID NO: 209342 - DNA, 253 bp, Homo sapiens; identical to SEQ ID NO: 199279
  chr3:195599433-195599686
  hypo

SEQ ID NO: 209343 - DNA, 246 bp, Homo sapiens
  chr3:195599840-195600086
  hypo
gccttgcactaggctgggggccaggcctccagctacaacctgcctcccgaatgcagacgcgggagagtctaggagcactcgggcaactcagtccctccctccaccgcttcacctgcttccggagctttccaccacctcccggaaggcctgcgggagcctccccgtctcctcaggaggggctctacctgtgtccaaaagggaactcagctctcccacagtgaccagacagtagggctgccagtcccc

SEQ ID NO: 209344 - DNA, 50 bp, Homo sapiens
  chr3:195601363-195601413
  hypo
cctcgggatggcgcccacgcacactccgaggcacaagaaactccccctcg

SEQ ID NO: 209345 - DNA, 268 bp, Homo sapiens
  chr3:195603994-195604262
  hypo
ttgcaatcccatccctggcccctcagctccaaacctgcagactgtttgcctcctgtccccaggcctctctttctagaaccttctgcattcttccccagcataacacccctaaccacaggccctgcagtctcagtatgtcattcctattcccagaccctgggcccaagggtgagggagccgggcctgggaaggctcggggtgtcggggccacagcggtgcaggtcacactccacacagccccccaggtctcctccacccacccccaaga

SEQ ID NO: 209346 - DNA, 146 bp, Homo sapiens
  chr3:195604388-195604534
  hypo
tcctccacttcactcttcttcctggtcctcaatactgcccctgcctcaaaggtacctgaaacctgccctgccccagccagttgctcagacaccctggggatcagccagcacaaggcagggccagcagtggtggggcctcagggcag

SEQ ID NO: 209347 - DNA, 115 bp, Homo sapiens
  chr3:195604987-195605102
  hypo
ctgcagggttcaggcccaaccgccagcctgtatgtggccaagggaatcttggaggccaaacagatctgtccacaggtccctccgacctgtgcccttcaagcgatcccagggcggg

SEQ ID NO: 209348 - DNA, 33 bp, Homo sapiens; identical to SEQ ID NO: 199281
  chr3:195636198-195636231
  hypo

SEQ ID NO: 209349 - DNA, 64 bp, Homo sapiens
  chr3:195637425-195637489
  hypo
tcagacacatcggaaactgtgtagggctggctctttctgcgctcacactgtccagcaatgggcc

SEQ ID NO: 209350 - DNA, 180 bp, Homo sapiens
  chr3:195639452-195639632
  hypo
ataggcctgagccactgcgtacagcttgtttttaaataaagcagtttttaaaactactgttgcaaccttttagagggaggtaaactgaatatggtggattttgaatgactatttttttgttttatgaaagaggataataatagaatagaaaatatgagaatgtttggccgggtgcggtgg

SEQ ID NO: 209351 - DNA, 71 bp, Homo sapiens
  chr3:195752039-195752110
  hypo
acacgcacgcgcaggcacacacatgcacacacacgcacacgcacacacacgtgcacacatacacccaatat

SEQ ID NO: 209352 - DNA, 180 bp, Homo sapiens
  chr3:195778982-195779162
  hypo
cggagccccagaagacatgtcggaaaggagactcttttggagatacgtagggagagaggaagtgatactccacctacgaaaacaacacacaaggcaatttacacagccctgtgacttttgtagtaaaacaacagttcacttcaaatgtaaaatgtcccaaatttaagaatgccgatcaga

SEQ ID NO: 209353 - DNA, 462 bp, Homo sapiens; identical to SEQ ID NO: 199282
  chr3:195808908-195809370
  hypo

SEQ ID NO: 209354 - DNA, 36 bp, Homo sapiens
  chr3:195863857-195863893
  hypo
gatgacaggcgtgagccactgcgcctggcccataag

SEQ ID NO: 209355 - DNA, 37 bp, Homo sapiens
  chr3:195866855-195866892
  hypo
accatcatttcttaacgagcatacattaaaatttcca

SEQ ID NO: 209356 - DNA, 35 bp, Homo sapiens
  chr3:195901887-195901922
  hypo
aactttggggacttgcggggaagggtgggaggggg

SEQ ID NO: 209357 - DNA, 44 bp, Homo sapiens
  chr3:195990771-195990815
  hypo
ggattacgggcatgagccactgcgcccagccaggatctggtttt

SEQ ID NO: 209358 - DNA, 98 bp, Homo sapiens
  chr3:196039618-196039716
  hypo
cgcgcctggcccatagtatattctactttaaaggcaaaaggcaggcattctcaaacacaaaagaatccagggaatacggcatttctgagtcctttctg

SEQ ID NO: 209359 - DNA, 38 bp, Homo sapiens
  chr3:196138792-196138830
  hypo
aaaatatgactgaaaaaaggcggccggccaggtgcggt

SEQ ID NO: 209360 - DNA, 138 bp, Homo sapiens
  chr3:196143804-196143942
  hypo
aagaaaggcctgcagtaccacgtgagggcaacttagggcaggaaaagacactgaacacctggagccacagacacagcaagaagttaaaataaatgtacacacaggcgcggcggctcacgcctgtaatcccagaacttt

SEQ ID NO: 209361 - DNA, 77 bp, Homo sapiens
  chr3:196144182-196144259
  hypo
gaaaactaaataaataaatcaaataaataaataaatgtataaaaacctttgcctccgccctgtcttatgcccagtaa

SEQ ID NO: 209362 - DNA, 242 bp, Homo sapiens
  chr3:196199259-196199501
  hypo
actgatcagtaggcacgactcttcattttctgtctcacctgtgttgtttccatttgtctgtgtcacccctgatgtgggggcgcacccactttctgttctgccacaaggcataactgcagtttctttcgagtagggaactctggttttaggtcgctcgtgacttaagacacataactctttcccatgattgcttggtcttgttttgacgtttccttcatggtaccattcggcaccacaggcac

SEQ ID NO: 209363 - DNA, 120 bp, Homo sapiens
  chr3:196263349-196263469
  hypo
tgtttagaagagacggggttccccttttacctcgttgcactcctgagagcaagatgggtcaccagcagctgtactggagccacgcgcgaaaattcggccagggttctcgctcttgtcgcg

SEQ ID NO: 209364 - DNA, 54 bp, Homo sapiens
  chr3:196387781-196387835
  hypo
ccaatgctaggaacatcactacacttgacatgagccacaatcagatctcacttt

SEQ ID NO: 209365 - DNA, 209 bp, Homo sapiens
  chr3:196402791-196403000
  hypo
ggatgacaggcgtgagccaccacctggccgagtttgcggttttcatcactcagtcacttgaggagctgtattcccggcgcgtggtatccaagatggcgaccgccacggcttctttgttaagccttaagcggtacctgggttttgatgttgtgaggtttgttcattctcagagggcattttaatgttgcgttactactatgttgccatgt

SEQ ID NO: 209366 - DNA, 126 bp, Homo sapiens
  chr3:196434731-196434857
  hypo
taactcttgtgtcgcggattattctttaattgttcagcagctctggtgcaatctgggagagagaagaaaactatataccacatacgtaccacgtacatcatatacgccataaactactgcaacagc

SEQ ID NO: 209367 - DNA, 202 bp, Homo sapiens
  chr3:196530355-196530557
  hypo
aatcaaaggaaaagacgctggttgatagacatgttcatactagaaacacatttattgttagcgggacaagaggaggttgaactaaaaaatgtttaggtccactcaaaaaattgaaactcgcaagtgtgcagataatagaatatatgtattttaatatataaaacagataaatcatatacgaaagaagcgttagaactaaaag

SEQ ID NO: 209368 - DNA, 291 bp, Homo sapiens
  chr3:196723696-196723987
  hypo
ctgggtgctgccacctgagccgaacgcttttgtctctttgctctgctgtcctgaccatgcggtccttttccttgtgcttcttgctccattttccagcgatcctgtccactttccgggcaggaagagggagacgggctccggggcaatgggctgtgctagctgtttgttcctcctaaacagctgccctgaaacttctcaggtttcttcagccagaaccgagttgcctgggcacgcaggagtgagtatttgtacttgggcacgctgccacccgaacaaaactggagtctgcta

SEQ ID NO: 209369 - DNA, 222 bp, Homo sapiens
  chr3:196728448-196728670
  hypo
agccagagaaccagtccaggtcgaagaagggcgcggggggcctcactgactagaggatgagagtggtccctgactggctcttggagaatggaatctgcccttctcggtggagcaggtaggcctttgagtgcctaacaaaacgaaagaaatcggcagcagaagtttctatcagggtccaagcctctgcatgtgctggcttgtttggctttattttagaaacca

SEQ ID NO: 209370 - DNA, 276 bp, Homo sapiens
  chr3:196752601-196752877
  hypo
tgccgtgtgtcatttgatggccattaattcaacaaggaaccagccagtgctttctccaagcgagatgctgtgtggagttccagagggtagacacaggggaagactggaccctcctctgaggactaacgagactgagcaggcagaggcttgcagaggccatgtgggtgcgggcaagagaggccctgctccagagagggaggggctcagggagcaccttggaggaggtgacagttgcgctggactgtgatggaggccaggcaccggccaagcagaggt

SEQ ID NO: 209371 - DNA, 124 bp, Homo sapiens
  chr3:196754392-196754516
  hypo
caggtgcctttctttgctggcgccctctgagcagcgggtcctcctgaggctcccacctcctggcctgggcccggcgggaggcaagctggcctcgtggccagggagactcgggagatcctatcgg

SEQ ID NO: 209372 - DNA, 139 bp, Homo sapiens
  chr3:196754758-196754897
  hypo
ccgcacctccatgccaccgagcactgcgggcaggggaccgtgaggcccggctcccccgccctgcccagccccggcccaccatggagggtggctccagcagttctgtgtgagcccattcgcctggacagccagtcctcta

SEQ ID NO: 209373 - DNA, 112 bp, Homo sapiens
  chr3:196766007-196766119
  hypo
agcagtgaatgaataggctgcggtgagtgcatccacacaatggaatactgctcagcaatgaaaaccatgcattcctacccaatacattttgctaagccacaccccaaacgct

SEQ ID NO: 209374 - DNA, 86 bp, Homo sapiens
  chr3:196766195-196766281
  hypo
ggggctgagaggaggtctggattacacagggaaaagcatcagagaatttctttgggacagtgggactgtttcgcagtcttgattgt

SEQ ID NO: 209375 - DNA, 192 bp, Homo sapiens
  chr3:196817782-196817974
  hypo
ctgacatagagggatcgcttctggctagttcgaagagaacctgaccctgaactaatactactattcatcatctgctcccgtaaatcatgtattttagcttcaaaacgactgtattctgatggaagaaaaagagaaataaattgatatattttcaaaaaataagttatttgaagataacgtattaaatatgta

SEQ ID NO: 209376 - DNA, 251 bp, Homo sapiens
  chr3:197133872-197134123
  hypo
acatcctcaggtctcgggtttatgtcacttccttggggaggcctttccagaccctcagtgctccatgagccgcccccattgctccctcacgcctccttcacaacactcgctgcgcctgtaatttttgactgactgtctattttcccatgagaaggtaattctgtacccatggactgtgcttcctcccgaggcctgcctgtggaggcacagagtggatactcgatacatcactctgacgggtagcgaggtgc

SEQ ID NO: 209377 - DNA, 74 bp, Homo sapiens
  chr3:197152285-197152359
  hypo
gaaggaaggtgcaggcgcagcagtgatgtccttccagcactgtgcctggcacaagtgggcgcccagcatgttca

SEQ ID NO: 209378 - DNA, 96 bp, Homo sapiens; identical to SEQ ID NO: 199284
  chr3:197222652-197222748
  hypo

SEQ ID NO: 209379 - DNA, 270 bp, Homo sapiens
  chr3:197241321-197241591
  hypo
atgggcttggcccagacattgcccatcagcctgcaggccagcctcctctctgcttctttcctgtgacttcccagcctctcgcccagtgctctcaagaaactttctagagtcactcaggaacgacaggaggtaaagaggcctaaagtgctgactgcagccctcccttgcgtctagaatgtccagtcctcacgtcacatctgcctggctcgagtctctgggcccatcatgacccagcctgccgtgtcccccggccttcagtctcacctcacc

SEQ ID NO: 209380 - DNA, 223 bp, Homo sapiens
  chr3:197243349-197243572
  hypo
caatgttctgaataaactcacggaggcatgcccgctggttgggtgacagcaactttcctgtaacatccccaagatcgcctccgcaccagtggcccctcagttctccttgggagtcacggctctctctcctcatcccatctcctgtctcgcttccacctgaatgtcccacgggtccctgactcaccctaaccacaaccaacacgtcaagtttccaagctgccca

SEQ ID NO: 209381 - DNA, 100 bp, Homo sapiens
  chr3:197246890-197246990
  hypo
gtcctgcatggggtgtgggtcggtggcggccactgcgggtcggaacgctctgggagggtgctccctggagttcacagccggcattgcctgagggggaatt

SEQ ID NO: 209382 - DNA, 211 bp, Homo sapiens
  chr3:197250416-197250627
  hypo
actgctaaacaggagaaaggcgtcactcgctcggcaaacatttcttgggcccctatcgtgttccggcactgtgctaggaactggaggtcaagatcaatcattcagcccctgttcccagagtcgtgttctagggaaggagacaggtgagcacgtaagcgacacagtgactgtgtgctgtatggaacctggcgggaggtgggaggggcacagg

SEQ ID NO: 209383 - DNA, 31 bp, Homo sapiens
  chr3:197327324-197327355
  hypo
ttgttgttctgagacagggtttccctgtcgc

SEQ ID NO: 209384 - DNA, 101 bp, Homo sapiens
  chr3:197327672-197327773
  hypo
atgccgaggcaggttgcactatcacccaccatgagccctccgaccctggcctgtggagtggagaaaagacgccaactgctcccctgcagcaccctgcgctt

SEQ ID NO: 209385 - DNA, 94 bp, Homo sapiens
  chr3:197330147-197330241
  hypo
atgtgtgagataataatagaagatattcctgagagttttgtgtatttttgtgtattttccttgcttgtggatggaagcgcgatgtcttctatta

SEQ ID NO: 209386 - DNA, 180 bp, Homo sapiens
  chr3:197330487-197330667
  hypo
gctgtcccttcagccgggggtctccaggggcgctgctgtggctgtctccagagctccccaaggggcaagtctgttgaaggtgccagagcgttctgcgttccctgccggccaacacatcatcagaggtggggcgatgctcctcctcaagcagttcactctctgccccgcgccagctgggcc

SEQ ID NO: 209387 - DNA, 97 bp, Homo sapiens
  chr3:197612489-197612586
  hypo
aaaacgcgccccatctcgctccaccacaagcgcctttatatactcaatgatgggtggaggaaaagggcccaagggctcacaccgcacaggagccttt

SEQ ID NO: 209388 - DNA, 114 bp, Homo sapiens
  chr3:197616593-197616707
  hypo
gaaaaggggagtgagtacgacgtatgctatgcctgacaagctgcattctttccacataaagggactgttgaataaagtaacttctgtctgacaaacagtctctctccaggacat

SEQ ID NO: 209389 - DNA, 76 bp, Homo sapiens
  chr3:197663680-197663756
  hypo
gggtctttcaggaaaagatacgagccacacactgagaatgaaaaggacatgaagcgggcaatttataagcaggttg

SEQ ID NO: 209390 - DNA, 210 bp, Homo sapiens
  chr3:197685522-197685732
  hypo
cgggggaaaacaaacggttgagactttaactcgagtaacttacatgtgcaatggcaaatgagactcaaaagcaaatacatgctcttccttactgagatgatgcagcatttgtaaataataaatgtatgtttttatgtttttctcctcccatatggaaattaagtcaaaagtactcaagtcaccgttgccaaaggaggagtcctgtggttt

SEQ ID NO: 209391 - DNA, 183 bp, Homo sapiens
  chr3:197764838-197765021
  hypo
tgcatcctcacagtccgtctgcctattgtcgttattgctggtcctgtcccttgcctcctcacagtctgtctgcctgttgtcgttattgatgctcctctcccttgcctcctcacagtccgtctgcctgttgtcattattgatggtcctctcccttgcatcctcacagtccgtctgcctgttgtc

SEQ ID NO: 209392 - DNA, 230 bp, Homo sapiens
  chr4:503184-503414
  hypo
cagtattcagacacgccccaaacacacacacaccccactctgacctgtgcccagactcagccgccagcctatgcactctgccctcgcggccgccggccttgctgtcctgtcggcggctgccttccacttgcgcctggcttctgctgccacactcgctgcctcactcttggtgagctcagcggtaatttctgccgtcaggcacagcagacgctttcgggcgctgctctcac

SEQ ID NO: 209393 - DNA, 150 bp, Homo sapiens
  chr4:512828-512978
  hypo
accgtttacatttcagcgtaaacatcagaccttcctggtccagcgcccactcccaatccaaaatcagttcctccccattaccaaaaatccctcattgataccctctacttttccttcctgggaaacttgtaattacagctgtaatgcagt

SEQ ID NO: 209394 - DNA, 696 bp, Homo sapiens
  chr4:513008-513704
  hypo
gtgcgtgtctgtgagccctactggatccaagccccagcaggcaaggattgcacctgcttgctcgccatgctgtgtctcccctggcacagcgcctggcacagtgcctggcacgtcgtccacgctccatggatatttgtttcgatgcatgcacaggtgcacccccatagctttgtgactctctgataggcggtggggtgtggacacaggcgtccccccatccagggtggtaggtgtagcaatgaaggatgccagccctggaaccagactgcctgagtttcatttgcagcttttacccactggcactgtggcccaggtgcgtgactcaccctctgtgtctcagttgcctcctctggataacagttctgatgctcatccctgcctcatagggtcattagggaggtgaaacgagcgagccgcctagtgttgctggctactggcacttagtgcagagcacctggtgccggcagcagtggggtgggcctgcaggcgtgtgggttcatgcttagggacttggtgcctgcagcagtggggtgggcctgcaggcgtgtgggttcacgctcagggacctggtgccggcagcagtggggtgggcctgcaggcgtgtgggttcatgcttagggacttggtgcctgcagcagtggggtgggcctgcaggcgtgtgggttcacgctcagggacctggtgccggcagcagtg

SEQ ID NO: 209395 - DNA, 279 bp, Homo sapiens
  chr4:513734-514013
  hypo
ttagggacttggtgcctgcagcagtcgggtgtgcttgcaggcgtgtgggttcacgctcagggacctggtgccggcagcagtggggcgggcctgcaggcgtatgagttcatgctcagggacttgtgccacagcaccctggacctcagtggcttgagcgcctgtggcagctctttcactgctgtgatagcaggcctggggcatgcagagccacagggtggggcgagcctgccaagaggcacagctgagacccttcttggcatggctcttctggagtaggaa

SEQ ID NO: 209396 - DNA, 253 bp, Homo sapiens
  chr4:616352-616605
  hypo
acaggtgcatctcacaggtgcgtctcacagctatgtctcacaggtgtgcctcataggtgcgtctcacgtgtgtctcacgtgtgtctcacaggtgcgtctcaggtgcgtctcacgtgtgtctcacaggtgcatctcacaggtgcatgtcacaggtgtgtctcacaggtgcatgtcacaggtgcgtctcacatgtgtgtctcacaggtgcatctcacgtgtttctcacaggtgcgtctcaggtgcatgtcacagg

SEQ ID NO: 209397 - DNA, 167 bp, Homo sapiens
  chr4:617078-617245
  hypo
agaggctgtggactccttgccgccctgaacctactcacctacaatcacgacgggctcctggggcaggacaaagccacaggtgaggaacgcggtgctgcgggtggaagctgctgtcacagtcgtgttagggtgagtggactatggccgcagactgtgggctcctccca

SEQ ID NO: 209398 - DNA, 39 bp, Homo sapiens
  chr4:617281-617320
  hypo
gtccagcaccccttccccgtcccacccactctccacact

SEQ ID NO: 209399 - DNA, 53 bp, Homo sapiens
  chr4:619879-619932
  hypo
cgaggtgggtctgtgcggagcctcagggaggcggctgtgtgcatctcttgcac

SEQ ID NO: 209400 - DNA, 43 bp, Homo sapiens
  chr4:628787-628830
  hypo
gtctgcctccttacctgcctgcccgcgtgttctgtgctgcgcg

SEQ ID NO: 209401 - DNA, 345 bp, Homo sapiens
  chr4:628950-629295
  hypo
ttctgtgctgcgcgtccacctccttacctgcctgcccgcctgcccgcgtgttctgtgctgcgtgtccacctccttacctgcctgcccgcctgcctgcgtgttctgtgctgcgcgtctgcctccctgcctgcctccctgcccgcctgcccgcgtgttctgtgctgtgcgtccacctccttacctgcctgcctgcctgcccgcgtgttctgtgccacgcgtctgcctccctgcctgcctgcccgtgtgttctgtgctgtgcgtccacctccttacctgcctgcctgcctgcctgcgtgttctgtgccacgcgtctgcctccctgcctgcctgcccgtgtgttctgtg

SEQ ID NO: 209402 - DNA, 43 bp, Homo sapiens
  chr4:651348-651391
  hypo
ccaggggtcacccaggggtctcggctgtgtggtgggggcaggt

SEQ ID NO: 209403 - DNA, 236 bp, Homo sapiens
  chr4:655879-656115
  hypo
acacgcttgccgccggagccctgtgtcctctcggctcccccaggtcctggtgcggttcctgttctccatcagcaaagggtaccggagaatcacctaccacaactggcgccacggcttcaacgtggcccagacgatgttcacgctgctcatggtacgtggctgccagaatcaccagggttgtgcaggccctcctggtaccaagggcagcactcaagcaccccgagggatgagatggg

SEQ ID NO: 209404 - DNA, 145 bp, Homo sapiens; identical to SEQ ID NO: 199288
  chr4:657712-657857
  hypo

SEQ ID NO: 209405 - DNA, 203 bp, Homo sapiens; identical to SEQ ID NO: 199289
  chr4:667540-667743
  hypo

SEQ ID NO: 209406 - DNA, 254 bp, Homo sapiens
  chr4:679512-679766
  hypo
cgggaatcacacacgggcacaggaacacggacacacttgggatcaggaacacacagacgtgcatgcgcacacaccacacagaccaggcacgggcgtctcatgacccctcaccattaacggaatgtcctcacccttcttgaccagcacaggggacagcacattggccacaaggacgcccagagggttcgctgggtgggcggatgcacaaagtgtcagctcggctgtggcctggcttcatcgccagcccacaggca

SEQ ID NO: 209407 - DNA, 187 bp, Homo sapiens
  chr4:722182-722369
  hypo
gtaatctggggatggcgtagagtgcgtggggggtggcgtgcacagcgtgttaagtgtcgtaagtaatctggggatggcgtagagcgcgttggggggcagcgtgcatagcttctgtgcagactcgacaccacttcatgtccgggacttgagcacctgtggattttggtatcagcggcgtcctggaact

SEQ ID NO: 209408 - DNA, 474 bp, Homo sapiens
  chr4:756822-757296
  hypo
tgagtgtcccacaggttggccggggatacggacagcacaccggggttggggagactcactgagcacgggctgcctggagatcatggagaaaccaagtcaggacacggggggaagggagagaaggaaatggggcaacgctttttgctaagtttctatcgttttgtttgcttttctgtgtagcgaaacagaaaagatggatggtagctggggacagagcaggccgaggaagtccttggattttcatgtggaggtgtagcgggaagctgccggacagtggggctgcagggggtggggaagaggttggccatttcccagcgcagggctggttcctccagggaagagtgtgaggtttgcgctgctgctgcgttaaccgtgcctctgagcccccaacccagccactcaggcaggtggggctgcttcaattcatgccttccccagggaggaatctgaagaactgtctacatgatcagggaa

SEQ ID NO: 209409 - DNA, 183 bp, Homo sapiens
  chr4:757326-757509
  hypo
accccatagaagggccagaatcccaagcactgacaacacattcgggaaacgccgggagcgcaggttcattcctgtgggaagtggaacccgcaggccctgtggagaacagcttggcagctgctgacaacacgaaacacactctcggcaaaccacccagcagccacacctcgtcatttacccact

SEQ ID NO: 209410 - DNA, 216 bp, Homo sapiens
  chr4:757737-757953
  hypo
cctctgaaaaggctgtaggccgtgcgactccagctctgcagcatggcgcactggaaaaggcagaaccatccggaggctgcaggggcttgaggagggtagtaggagtgggcgggcacagggctcctgggcggcgatgctgctgtttgtccacctgtggctgtgccaccagggcgacctgacatccgctctggactcggtggaggtgatgtcagtgca

SEQ ID NO: 209411 - DNA, 210 bp, Homo sapiens
  chr4:765529-765739
  hypo
agcagagccaagcctcggcctctctgctcgctggtggttttgtttctcccatgcagttctgtgtgcataagacaaaaatcctgtgttagtcatgtgtgttagtacacctgtgaccgggtgaaagccaaacagtgtcccctgaaaggcagcagaggaacagaaaaacaagggggtttgctgtgatgagacccgcaccgtctgcgttcagga

SEQ ID NO: 209412 - DNA, 209 bp, Homo sapiens; identical to SEQ ID NO: 199290
  chr4:819437-819646
  hypo

SEQ ID NO: 209413 - DNA, 121 bp, Homo sapiens
  chr4:854460-854581
  hypo
acccaggccctggcgcacctcgcactgtgcacacggggagaagggcacccaggccctggcgcacctcgcactgtgcactcgaggggacgggcacccaggccctggcgcacctcgcactgtg

SEQ ID NO: 209414 - DNA, 279 bp, Homo sapiens
  chr4:860686-860965
  hypo
tcagcctcatcactcatctactgtgaagccactcgccttcagaacagaaacacgtaccagcggcagggggccctcctcttggggtgctctgcacgctcaggggaggggccgggcttgccaggagcagcgggtcctcgctgagcagatcctccgggggcccctgggaggcggcctcagggggcccaaggaggcagctgagcaggtcggtgttgctggagggggccttgcaggcctgcgggggtacagctggccctgcgcccacctcggagtgcaggccca

SEQ ID NO: 209415 - DNA, 38 bp, Homo sapiens
  chr4:881388-881426
  hypo
tcatacaggcactcgcgcgcatgcgtacacatgcatgc

SEQ ID NO: 209416 - DNA, 135 bp, Homo sapiens
  chr4:882583-882718
  hypo
agcctggaacgagcgtgcggcaggtccagggctctggagcctcacactcacttagcgacggactggatgaccttggaggaggtgtccttgaggttggtgaagagccgctctgtcccaccccgcagaatgtccagg

SEQ ID NO: 209417 - DNA, 113 bp, Homo sapiens
  chr4:891957-892070
  hypo
cacaagacagccccgtgaacttggcgtagacagagatgggacttcagggaaaacgaacgggtgtgagacacagccagggcccttcgcagacagcactcgcccagggccacggc

SEQ ID NO: 209418 - DNA, 202 bp, Homo sapiens
  chr4:899761-899963
  hypo
ccagggggcaagacgcccaagcgtcaccgaagcaacaaccgcgtcagcatcccagcagctgagctggcatgccgttaacgtgagaaccacatcggcatcccagcagttgagctggcgtgccgttaacatgagaactacattggcgtcccagcagccgaggtggcaagccattaacgtgagaaccacactggcatctcagcag

SEQ ID NO: 209419 - DNA, 208 bp, Homo sapiens
  chr4:905662-905870
  hypo
tgaagtcagaatacttgaatcgaacccttacaattttagacgtcagagcggaagatgagggagagagcagtggacgaccgagagaaaggcagacagaggcaggaggagctgcaggagagggcggggacaaaggcaggcacaccggccacacacacctgaccacagcgacaccaaagtccatcccgcgcgtggcaggaggaggcagggc

SEQ ID NO: 209420 - DNA, 39 bp, Homo sapiens
  chr4:905932-905971
  hypo
gcagccggcgggctctccgagtgaacagagctaggagag

SEQ ID NO: 209421 - DNA, 41 bp, Homo sapiens
  chr4:949385-949426
  hypo
ggggctcccccactccgcccctcgggcgtccctgtcctgtc

SEQ ID NO: 209422 - DNA, 104 bp, Homo sapiens
  chr4:955747-955851
  hypo
gtagcccctgcggctccggtacctgcttgtgaacttgccaggctcctcttcccgtgcctggtggaagtccaggctcagctccgcgtcgatgccaatgccacagt

SEQ ID NO: 209423 - DNA, 213 bp, Homo sapiens
  chr4:968831-969044
  hypo
catggcagtgaaccacggtgcaaactgcagctggcttctgaggaaaaactgtttaaggacatacctttctccatttaggagacagtggagagcatcaaaaacatcttaaaaaggaaaaccctcatctaccatttctgccagaactttctgctttctgacgcacacgttaattaaaatggcgggcaaagcatccttccagcaaacactccacgg

SEQ ID NO: 209424 - DNA, 32 bp, Homo sapiens
  chr4:982809-982841
  hypo
ggccccgtagtctcggcgcaggtcctgcagcg

SEQ ID NO: 209425 - DNA, 38 bp, Homo sapiens
  chr4:995247-995285
  hypo
ctctgcaggtaggtacggactggcgcatgtttccaagt

SEQ ID NO: 209426 - DNA, 396 bp, Homo sapiens; identical to SEQ ID NO: 199291
  chr4:1004393-1004789
  hypo

SEQ ID NO: 209427 - DNA, 250 bp, Homo sapiens
  chr4:1007048-1007298
  hypo
ggtgacgtgtgcccgcagactcatgcccgccatgttccaggatccgggcacagcgctggctgcccccatggctaggcgggacctgtggccaggccggccctttgggcgtgttgaccactcaggattgtccgcgctgtgtccaccagtcctgaggcttcgcacccctcccctgccgcccagcaagcgcgccgcatccaacctggccttatatgggcacgttcgggtgctgggtggcgggcggtgaccaggt

SEQ ID NO: 209428 - DNA, 39 bp, Homo sapiens
  chr4:1008902-1008941
  hypo
gggctgtgcccgcagactggaccccggctgctgcatgct

SEQ ID NO: 209429 - DNA, 220 bp, Homo sapiens
  chr4:1016366-1016586
  hypo
ccccggcagaaagccttccttcggtgccctgccccacctcagctggctgcacctctgccaccatcccccaggtatcctgtcccgttcctgtccccgtcaggctccagcctcggagccttcctcccagcggagggcggagggtggagggcgggagccgaaggcagtggtcccacagaagggctggggcccgaggccttggcagggtgtgccggccgtcggc

SEQ ID NO: 209430 - DNA, 31 bp, Homo sapiens
  chr4:1093369-1093400
  hypo
ttttaaaagtcaagattgctcgcacaatccc

SEQ ID NO: 209431 - DNA, 61 bp, Homo sapiens
  chr4:1093475-1093536
  hypo
gtaacgaggatacatagttaaatctcacagcgtgactgaaggcctttgctgcgtctgacgt

SEQ ID NO: 209432 - DNA, 128 bp, Homo sapiens
  chr4:1189100-1189228
  hypo
gctctcccccatccactactcccacaggcaacaggaccggccccctggcccgtcggtgggcgcatcagcttggtggccctggccccctgcgcctcaggggtccctcacaggccggccagcttccagca

SEQ ID NO: 209433 - DNA, 520 bp, Homo sapiens
  chr4:1204211-1204731
  hypo
tgccactcacctccggagagggcagggagcagaggcctcagtcatgaggtggggctgtcctcggcgtgggcctcgagactgggagccactgcccatacccaagagacctctgcgagcactggggtgcagagccaggtaggagggggcaccccaccaaaggcagcagcccccccccgcttctttctgctttatatggggcagggagcaaggggaggttgacacttggcggatgacgcggcagggtctggacacttggggtggcaggataacccacctgcatgcagggaaaggcttgggatggaaacatcccgaggggacccgggttccccagcacccgctgcagcccctcctcgtactacctggacccgctgcagcccctcctcgcaccgcctggacccgctgcagccccttctcataaatgagttgggactctgctgatttgcatggaccacgcttccaaaagcagctctgagaaaccaggaggctgggattttgaagaggacgccggtaaacaggctca

SEQ ID NO: 209434 - DNA, 63 bp, Homo sapiens
  chr4:1204981-1205044
  hypo
cccactggggcactgcgggcaggccgcctccaagccaggaccctacagcgtcccacagaccca

SEQ ID NO: 209435 - DNA, 283 bp, Homo sapiens; identical to SEQ ID NO: 147744
  chr4:1206025-1206308
  hypo

SEQ ID NO: 209436 - DNA, 198 bp, Homo sapiens
  chr4:1208921-1209119
  hypo
aaggtcctcagggacggcagggctctgaccagcatccacgtgccacaccctgtcccctagaaggctccaaacccactgactctgtgaacaaaggaaggggcagcgggaacctggcctcatcctccttgtggctacaggctgctggggcagctagagtgggcgggtggcctctgacacgtgtgtacacacatgcacata

SEQ ID NO: 209437 - DNA, 135 bp, Homo sapiens
  chr4:1212170-1212305
  hypo
gacagagcgagactaccttccacaaaaaaaaaaaaggcaacacattttcggacaaagaaaagcaaaaggaatcggtcactggtgagccacatttctaagacagtctttaggctacaggaacgtgacgcccgagga

SEQ ID NO: 209438 - DNA, 87 bp, Homo sapiens
  chr4:1214807-1214894
  hypo
gaaaagtcaagccacggcctgagatattcgtaaacaagaaaaaacaaaaattttgaaattatgaaaatatccacaatgcatgtcgat

SEQ ID NO: 209439 - DNA, 253 bp, Homo sapiens
  chr4:1215162-1215415
  hypo
ctctgggactcagaaattccactcctaggtacaaacccaagagacgtgagtctatgtgcacaaaaaagacgggcagaaatgtgttcacacaagttttgtttgtaatattagccaaaaacttacaaaatgcatcaccaagagtctggagaagcaaatcgtgctgtgttcacgtgatggaaccgttatcagaaactgctgggtcgtatgaaaacacaggtgagacccagaggcatcaccccgactgacgggaggc

SEQ ID NO: 209440 - DNA, 82 bp, Homo sapiens
  chr4:1215451-1215533
  hypo
gcacagctggggaaggccctctgctctaggaagcgggacccgggtcctcgcagggtcgtcgcggggccgccacgggagaagg

SEQ ID NO: 209441 - DNA, 207 bp, Homo sapiens
  chr4:1216021-1216228
  hypo
tctgcagtcaagggtgccaggtgggcagccggggtggggtaggggtcccgtccacaaggtagaggctgcagcgtcagggggctcgtgtccctaaggacagaactgctctcctcagctcccgaggccgagggagcgctgacctggcctggttcatcacaagatcaccacagacagaggggcccgcgccgagagcgagggaagcagctg

SEQ ID NO: 209442 - DNA, 175 bp, Homo sapiens
  chr4:1222481-1222656
  hypo
ggggtcccgcctggcgaggacacaggagggggggtgcggccacacccaggaaggacactgagcaggtgcagctgggtggggtggccagggaacctgagacctgcaggcccggggatgcaggtagaaagtggtaagtccccgcggcacacaagcacgtcggcggaggcaggcagac

SEQ ID NO: 209443 - DNA, 365 bp, Homo sapiens
  chr4:1222883-1223248
  hypo
ccagtacatggcatcgctgtggtcacggccaaccccaccctgccaagggctcccagttacccccagcccagggagggcaggggcagtgtggggtgcagaggcacacaggtggaggaagtgccctaggccgaagaaccaggtgcagcactgggcacagggtggggatgtgtgtgcaccacctgcgcatccacccacacccaaacacatccacccgcacacgtccatcccacactcccgtgcatgacaacgcccacccacgggtgcagagatgctctgtgcgaacagccgtggctgaggacaccaggacatgcaggcctcgtccacatgggcatgtccgagtccccggagacaccagtgagcctccc

SEQ ID NO: 209444 - DNA, 40 bp, Homo sapiens
  chr4:1224485-1224525
  hypo
ctgaaccgcggcacgtcacctcccgcacattcggaggaga

SEQ ID NO: 209445 - DNA, 76 bp, Homo sapiens
  chr4:1224555-1224631
  hypo
tattcatccgcgcagccttaaggttgcttcctgcatcggctcttccgtgatgaaaatctatctcatctaggtaagc

SEQ ID NO: 209446 - DNA, 493 bp, Homo sapiens
  chr4:1225295-1225788
  hypo
aaacagaccccaggacgctcctggtggcagctggctcttgggggtcaggaaggggcccgccaagcccacctcctgccatgcagttctgccacctgcttctgtgctcaggactcgacgtcgcacttacctttccagacctcgtgcacaggggtggcttactctgtgaaactgctgctcacatcaggtcaccatcagggcagatgtttctctacgacacgcagccacatgcaggcccagggtggggctgggctgaagaccgcaggtttcagatttccagagaaactgccaaagcaccatcgagaccggcacggccgtttctatcccacatgaagggccaggcccaggctccctcagcacggctggtgcagggctcagcgcaggccaggccaggggttaccggcggtgcctgctgcacctgtgagaacccaggaggcgcaccccggttctcatacaccgctctgtctgtaccaaacgccaccgccctcatccattt

SEQ ID NO: 209447 - DNA, 140 bp, Homo sapiens; identical to SEQ ID NO: 199293
  chr4:1243421-1243561
  hypo

SEQ ID NO: 209448 - DNA, 57 bp, Homo sapiens
  chr4:1290582-1290639
  hypo
ggaccccactgcctcgagacgctcccatcactcggctcccgtgacaccatcctctgg

SEQ ID NO: 209449 - DNA, 357 bp, Homo sapiens
  chr4:1290669-1291026
  hypo
cttgcctatgctgtcttctctagtcttggaggccttttgttttatgtcaccagccagccctccagaggttgtgtggcttcacagacggtctccaagctcctgtccccacactgctgccctccccaggcctctctccctgaggccatcccgtgtagtcacctcccggagctctcttcgcatgtctggaaggcagttcaaagatacgataccaggcgcaaaaccaaatgccgcatctcggccttggggccccagacgagccccagacctgccttactaagccacccttcccaagtcagttgacagcgatgtcccccggcacttgttcagtgacagccgagaactcggaggttttctcga

SEQ ID NO: 209450 - DNA, 334 bp, Homo sapiens
  chr4:1309361-1309695
  hypo
aagctggcgcgccagagcggcatcgaggtgggtgcccgccagacgcaggcacagcgccccagctggccccaggcctatggccagccgccctgtggcatgtcccccggcatgcctgtgtccctacatgcttgtgttcccctccccccacccccgtatgcttgtgttcccctccccccacccccgtgtgcgtgtgtcccccctccagtgtgtgtgtgtgtccccctccccgtgtgcgtgtccccctccccccatgtgcatgtccccacccctgtgtgcgtgtgtccccttcccgtgtgtgtgcccccccccccccaatgtgcgtgtttctccccca

SEQ ID NO: 209451 - DNA, 110 bp, Homo sapiens
  chr4:1309945-1310055
  hypo
tctcaggcggggtgcgttttccgtgttttctgtggcaccctgtagaaacacgtggcacccttgccctctgtggctacagctgagcagacgctgggcggtgctgccctctg

SEQ ID NO: 209452 - DNA, 480 bp, Homo sapiens
  chr4:1317015-1317495
  hypo
agccaccgtgcccggccgagtaccgacttttgtagagaccaaaagaagcttaagaaatggactcctaaaggacaaaatttaaacctgcttattaaaaggcattgtcaccctaggggcttgcagaaatgttttaacttatgttaacacttctgcctccattagcaaaacttttctgtcttctaaactgagcgctgctttaacctcaccctggctgagtttggcagggtgcacgcagttaccagccaggagtgacacactgccactcagggccgccaaaacaagcacgaagcaaagacgggacgaaaaagtagagcggctagtagctcccctaaagagagtttggaccttggtatggaaaccctaaaaggaaagccagaattggtatgtaacctgcggccccactacacagtgccagccccacactccctcccagagagccggcacacacctcacagtgggaactctgccagggctgtttcc

SEQ ID NO: 209453 - DNA, 91 bp, Homo sapiens
  chr4:1322319-1322410
  hypo
ggccctcagctcccgggcgagtgcccagcaggtgtgtttgccaggagggggcacctgtccatgcccacagaaacccgaccgcgactccata

SEQ ID NO: 209454 - DNA, 223 bp, Homo sapiens
  chr4:1323177-1323400
  hypo
cataatgtctgagccgagctcagagctgtgccctctgcggcctcgtctgttgcaggggagcaggcaggtcccaggaagtgcgtgtccttcctcccgcaagcagacacgtgctgcctcgaagcctcagcagccagccgggcaggcatggcaaacaacaccccagtgtctcgggggcaggcgcagtgtgagctacatcctctgctggggccgtcttgggagtggt

SEQ ID NO: 209455 - DNA, 96 bp, Homo sapiens
  chr4:1323654-1323750
  hypo
ctgctgccagggtcccagcccgcaggagcttcccgtccacctctgaactcacggtccacatggcgctggagcgtcgggcaccatctacagggcttg

SEQ ID NO: 209456 - DNA, 218 bp, Homo sapiens
  chr4:1324885-1325103
  hypo
acttgtctccagagatggaatgagggggttgggtggggctcctcctggactcagacccacgcccacccacacgctccaaggagggggatgcatgggcactggaatctcggatggccgtccccagcccctgcacacgcaccctgcggggtcagccgtgtggactcacccccgactcccagtccctgtatgcaccctgcggggtcggccgtgtggattca

SEQ ID NO: 209457 - DNA, 135 bp, Homo sapiens
  chr4:1330875-1331010
  hypo
cctcccaccacagacagccccgagctcccgtgtgctgcacttgcgtggtgtctggatggtcggggtggggccgtgttgaggggcctcggatgcgtcgtgcagccttcactctgggaagtggcgcgcttcctctct

SEQ ID NO: 209458 - DNA, 48 bp, Homo sapiens
  chr4:1331117-1331165
  hypo
aaccttgcctgtgactgactctgtcccgcctgtgactgactctgtccc

SEQ ID NO: 209459 - DNA, 372 bp, Homo sapiens
  chr4:1331896-1332268
  hypo
gctcttgtcctgcctggagaggttgcgtggccggggagagggcggcgggcgacggagccactctgtgcctgtggtcctggtgctggaggccggggtgagaaggcgcaggcttcttgtctccaccgaggcctcagtggggctgtttagctgtcgagtgcagcacttcctgtgcctcgaaagacagccccgtgtagtcagcatggcgcccacatagccagaagggcacgcagcccagggcagagtggccacagggggctgggctcaccccggctgccctgagtggcccccaacccttccttgacccgatgctcagacagtgctacaaggaggacggcagctccaagagccctgactgccctgtgtgcagccgct

SEQ ID NO: 209460 - DNA, 218 bp, Homo sapiens; identical to SEQ ID NO: 199294
  chr4:1332660-1332878
  hypo

SEQ ID NO: 209461 - DNA, 87 bp, Homo sapiens
  chr4:1333183-1333270
  hypo
gcttctgaaaagtactttcaacttgcgaaggaaactcttctttaaagactgacctaaacaccgagggaaacttaagaacgtttaaaa

SEQ ID NO: 209462 - DNA, 334 bp, Homo sapiens
  chr4:1333390-1333724
  hypo
cagcggcaccggactgacctgcagtgacccgcgatgccgcgccacgagggacacttatggcttcattcgagagctgctgccaaaacgcctggcgccgccaccgtcgggggctggcttcgaggacgcccgcctgcctcgcgggtcgtgtccgcgggactgtgttcgtacgtgcatagtttcgatatcacatcgcggggctgtgttcgtagctgcgtcgtttcgatatcacaccctctgtgtgccgccttacttcctgcttcgagaatgtataacgtggaaatccacgggaccaaatttctgcagaggccttgccggatggttccataactgtaga

SEQ ID NO: 209463 - DNA, 200 bp, Homo sapiens
  chr4:1333954-1334154
  hypo
ttctaacaccgaggttgtgttctgctcctccccggggcccgggcagcatggcgggcatatgcgtagcttctggcaccacggccaccgggagttgagaagccggctggaggccactcctgcccggaccgcagtcctcctctcgggcgctgccctgaggcgtgatggccccagcgtcttgaggccccggcttgcagctgggt

SEQ ID NO: 209464 - DNA, 150 bp, Homo sapiens
  chr4:1336902-1337052
  hypo
aagaccacggactagcgggtttaaacaatggacatttatttcttcacggttctagaggagatgctggcagggttggctcccggtgaggcctctcttcccggcttgcagacggcccccttctcactgtgtacctctcgtggtggacttcct

SEQ ID NO: 209465 - DNA, 74 bp, Homo sapiens
  chr4:1338812-1338886
  hypo
tgccctgggatgggagccgtcggaggattttgtgtagaggaatcctgtgatccgaccttagactttcaaaggtc

SEQ ID NO: 209466 - DNA, 33 bp, Homo sapiens
  chr4:1348027-1348060
  hypo
tagagctctgccctgcgccggacactgagggtg

SEQ ID NO: 209467 - DNA, 203 bp, Homo sapiens
  chr4:1578415-1578618
  hypo
ggacgccgcaggggcgactgggactgtgccccggctggggccagggtccacattctggagaggtgcccggcaccatgctggcccctggggacagccccaggagaggagaggggctgtggcggaagcccggagagttgggcctagtttgtcagacatcagacttcacttcccactctgtaaaatggggcgcagggcggcctcct

SEQ ID NO: 209468 - DNA, 322 bp, Homo sapiens
  chr4:1600696-1601018
  hypo
ctcctctctgtagcgtgcgcaggggtgcgtgcgggtgcagcaccgcgttccttccccggcccgcttccctcctggcctggcagacccttcgtcaccgaggccaggggatccagggtgccggagcgcagggccgtcggctccaaccccgcctggtacttcaccgaggccaggggatccagggtgctggagctcagggccgtcggctccaaccccgcccgggacttcgccgaggccaggggatccagggtgccggagcgcagggccgtcagctccaaccctgcctggtacttcaccgaggccaggggatccagggtgccggagc

SEQ ID NO: 209469 - DNA, 127 bp, Homo sapiens
  chr4:1616406-1616533
  hypo
agcccaggggaggttcctgccgcctccggtcacaacagctccgtccgccaatcaatacccggccctgctttatgtgtggccctattcacagacaccgcactgagcgtgtatattgatcccttaacat

SEQ ID NO: 209470 - DNA, 206 bp, Homo sapiens
  chr4:1621151-1621357
  hypo
cccttgcccagctcggcgtctctggggttggcccacttcaggactggccggccttcccgccctgttcccagactcatgcacctgtggacatgggcactttcctccaagccgcatctccctcccgcaccaggtgctggcctatctctgggtctataccctgcaatcggcttctcaggtcttcaccccccggcctcccgtgaccaccc

SEQ ID NO: 209471 - DNA, 162 bp, Homo sapiens
  chr4:1656589-1656751
  hypo
agagaagaccagccggatgctaacagccacatccagagaatcagccagcctcaccccagcaccgccctgtccagatctacgcccctctgagcccctggaaataagaaagcctcacctgggtcattttcaggaagtccaaggatgggcgtgtccacctggcgt

SEQ ID NO: 209472 - DNA, 99 bp, Homo sapiens
  chr4:1658844-1658943
  hypo
accttccagaaagggcgcagcagacccctgggccccaccagctgaggagggagagacctggctgggcccgcaccctacacgagccgtcctgctcacaga

SEQ ID NO: 209473 - DNA, 50 bp, Homo sapiens
  chr4:1684725-1684775
  hypo
tcacgggacagcacggggaatcaactatcaagccacagaaggggatcagg

SEQ ID NO: 209474 - DNA, 35 bp, Homo sapiens
  chr4:1684805-1684840
  hypo
caaggaggcgggacaatggcgccggacgagggaaa

SEQ ID NO: 209475 - DNA, 386 bp, Homo sapiens
  chr4:1738656-1739042
  hypo
gctctgagctgtgaacagccccctgatgaggcagcactggctccgctcagcctgcagtgggtaatgaagcgtcaccgtgctctcccggaaggacaagcagccacgtgggatgggcaggtgagggaggggggcacggagcagcagagaggccgggcatgctggatgcgggtctgcgttttctaccactaccctgacttgagtggttttaaactaaaaagcaaagagcccggttagcttgtccacatggtcctctgtgtcctactcaacactgggagggcctagtgactgaggctgcctctgcttggtggcagcatgcacggtgcaaatgagactccctcaggacgtccgcgggaagccaagcttgtggagttcgatttcttgggagc

SEQ ID NO: 209476 - DNA, 368 bp, Homo sapiens
  chr4:1778329-1778697
  hypo
gggccactcggctgcgagcccgccctgctgtcctcaacctcgaccctggcctcagggctcttgcaagctgtaccctgggcccgggtgatgcagggacctggccacagcccattcactgggtgtctctcagccccaccctcactggccactgtgcaggtggcctgggcctggctggccacgtgagcacagcactgcccgcgctaggatggcatccattattcacccacagcgctcgtccaggctgggctgggctcatgtctgctcacgggcatctgccactcctggagggcacatagcttgctgggccgggtgggcgacagagcctgcggtccgctccttgggcctccggcccagcccccccatcccac

SEQ ID NO: 209477 - DNA, 328 bp, Homo sapiens
  chr4:1781228-1781556
  hypo
tggagggttccctggcgtggggagaagggggcatccatggctgtaatgggtggtctgccaggcctgccacctcccctggcgagtggcaggaccccagacaggcccagcgatgggccgaggggcaggtcctgggcttccgagtgctcccagggaatgggggccggggctccaggcagcatcagcccctgggctcagcctgaccaccctcatgctcaggacctggcccaagcgctgctcggagatccctggggcagggccccatgcagggctgacgcaccagcctccctgcacaaagtgcccaagggccccacctccagcctgggccacc

SEQ ID NO: 209478 - DNA, 97 bp, Homo sapiens
  chr4:1782913-1783010
  hypo
ctttgccctgcctgccgggcagctcagaccaagccaagggcccaagggcggtaattctctctccccaggttctgcagtgtttttattttctgggcct

SEQ ID NO: 209479 - DNA, 58 bp, Homo sapiens
  chr4:1787676-1787734
  hypo
ggggaggcaggcaggcgtggcggggaagggaggcctcaggaggcgaagatgtctctat

SEQ ID NO: 209480 - DNA, 60 bp, Homo sapiens
  chr4:1791209-1791269
  hypo
ggaggctctctctggcagctcgcctgccctgggttccaggtctccaagcctcggcctccc

SEQ ID NO: 209481 - DNA, 148 bp, Homo sapiens
  chr4:1791344-1791492
  hypo
actgtgctgggaatgtcctctctgccgaaggcgcctctgccattttccgagtacctgcaagggagacgcaggagacgcgggtgtgagcggggccatgggcaacctgcggaggccctgcacccaggatgggcctccctcccaggcaccc

SEQ ID NO: 209482 - DNA, 250 bp, Homo sapiens
  chr4:1791522-1791772
  hypo
gccaggctgcccagctctgagtcaccgccagggctgggctgggccgggccgtcagccgcacgcgccgcttgtctcggcccctgcctcccatactcaccttcaggggggacccctgggtatgggcctcaggaggtgggtgggggtgcagggggagtgggtagggaggtgtaaaccggagtccagcagatgggaagttcctgtccggccggcacctgcttggagcctcctgcacatgcggaccctcaacagg

SEQ ID NO: 209483 - DNA, 229 bp, Homo sapiens; identical to SEQ ID NO: 199296
  chr4:1794972-1795201
  hypo

SEQ ID NO: 209484 - DNA, 688 bp, Homo sapiens; identical to SEQ ID NO: 199297
  chr4:1795801-1796489
  hypo

SEQ ID NO: 209485 - DNA, 83 bp, Homo sapiens
  chr4:1804646-1804729
  hypo
atcagtgagagtgtggaggccgacgtgcgcctccgcctggccaatgtgtcggagcgggacgggggcgagtacctctgtcgagc

SEQ ID NO: 209486 - DNA, 207 bp, Homo sapiens
  chr4:1804884-1805091
  hypo
gctcccgccccggctcgcgctccactcggggccgcctcggcaaggctggcagctccagcctccacggtgaccgcccgcttcgagccctgtggcctgcgccgacccttcccgcacgcctgcgacccccacaggaggtgcccggtgcccaccgggccggctccgtgccgtctgtgagcacccctttgcgcctctctccacccctgcccg

SEQ ID NO: 209487 - DNA, 55 bp, Homo sapiens
  chr4:1805637-1805692
  hypo
gacggacgggaatcctgtgacttacggccgtcccgcttcttgagccctcactcct

SEQ ID NO: 209488 - DNA, 92 bp, Homo sapiens
  chr4:1805992-1806084
  hypo
ggcatccatgggagccccgtgggggggggggccaggccaggcctcaacgcccatgtctttgcagccgaggaggagctggtggaggctgacga

SEQ ID NO: 209489 - DNA, 92 bp, Homo sapiens
  chr4:1827205-1827297
  hypo
ttgggaagagcctccgagtggcctttcgaggctgatgtttcccttgagcccgtgccggcctggcaccaggccaatattcacgcacctgcttc

SEQ ID NO: 209490 - DNA, 344 bp, Homo sapiens
  chr4:1828221-1828565
  hypo
accttccccagctcccggtgctgcccgttcacagacgcgcttgtctccatgtctgctgctgtcacctggagtgctctctgaacaggatcatgcaggagtcacctctggggttccctgaggacccactgggggtgctatgggtgtgccgggttaggcctctcactgccatgcggcattctgcagcatgcgtgccctccttagccgaacccttcgcccactaagctgggctccgccagttgatcaggaatgaagatgctttctgtctgctttcttctccctgtcctcctgggggctggctggcctccgtttgatttcgctctggtggtctggagtctgtgcagcat

SEQ ID NO: 209491 - DNA, 140 bp, Homo sapiens
  chr4:1835054-1835194
  hypo
aaaccactgacttctgactccggtgctgggctagcctggggaaaggtggcgtctggcctgtggacctctcctgcctgaaccagcaaagctgaggctgctgtctgctgggggagacgcccgggcccacaggctgctgcatg

SEQ ID NO: 209492 - DNA, 141 bp, Homo sapiens
  chr4:1844710-1844851
  hypo
cccccgggtggcccgagctcacctaaaaggccatgtgtgtcgcataacttcacatcagctcctcctgcttccatcagctctctgtgcatggcctgacgccagcagcaaggcccgagctccggagcagactgttagagctca

SEQ ID NO: 209493 - DNA, 285 bp, Homo sapiens
  chr4:1955051-1955336
  hypo
gattcactcatgtttcgtgtgtaaagagagcaagacagatgttaagcgctgtgtggtaactcagtgtggaaaattttaccatgaggcttgtgtgaaaaaataccctctgactgtatttgagagccgaggtttccgctgccccctccacagctgtgtgagctgccatgcttccaacccttcaaacccaaggccgtcaaaaggtacaggtgcacctgcgcagccttgctgtgggttcagatgcaggccagacgcaggcccatgggcgcttgggaaggtgggctgttg

SEQ ID NO: 209494 - DNA, 91 bp, Homo sapiens
  chr4:1960866-1960957
  hypo
ctaagcaatcaacacgctttttctctcttcatcttacaatggcctggctggatacgtgtcagctcttgttcatcagcgatgtgcacagaca

SEQ ID NO: 209495 - DNA, 329 bp, Homo sapiens
  chr4:1986404-1986733
  hypo
attctggctgaggcagaagggggacaacagagatgcaggagtgagaaccgcagccctggcagcgcccgtgggcaaggtcatgtcctggcaggcagcttggctggttccaggctggggccagcagactcacctgggggcgtctcggagctggggatgtaggaggaggcgggaaccacgctgggcgtggagggaaggtagctcgtggagggcagcgcaggctcattgttcagggacccaagtttctggaacacagagtttaaggttccttccagaagaggccatgcttccggcatgtgctaacacatggcccgacccggagctccactgcc

SEQ ID NO: 209496 - DNA, 64 bp, Homo sapiens
  chr4:1993651-1993715
  hypo
caaggccccggcatccggtgccctcccagcagcctcccacctcccagcagcacccagtccactg

SEQ ID NO: 209497 - DNA, 410 bp, Homo sapiens
  chr4:1994335-1994745
  hypo
agccccaggccttcctgacacccactccctgcgtcaggcgccagagacccgtcctacgagggctgcggccatcacgtccccgcgagcgccgcctcctggtggcctctgagtgggaggaccttccagcgcttccctcactgtcctcatgggcttcctgccctgagggaagttggctcgaagggcagagatcagaggtcgtgccaggggagcctgcctgctgccaagcccctctgcatctgccctgcaggacacccagctgccctcaggagtcaagaaccccccgcgtggcccagccccttctgttccttgggcaaccagggagggtgtcgccccggccgctgaccctgcgccccgggccctcactcccgacgcccgcccgagctgagtgcgcgatgcggcagaagatgcta

SEQ ID NO: 209498 - DNA, 221 bp, Homo sapiens
  chr4:1994830-1995051
  hypo
agccccagggaaaccctacgcctgccaagaggcaagcgcgcggcattttataaaaatggtaaggataaaaaaagtcggggatgttaatttaaaacaaaaaggaccactgttgtggagtcaatgttttctctccagaacgcgcatgttgaagcctggctcgctctactggggcttcttgtaggaaaacgcttggctttcccgggcgcggtagctcatgtctg

SEQ ID NO: 209499 - DNA, 188 bp, Homo sapiens
  chr4:2045628-2045816
  hypo
tgcctgctggccagcggggcactgaggaccacgctgctccgtgtgaataaatgcccagtggcacgcctgtgtcctgtctctctgttctggccaccagagcccctgcgtcgcccccggcagtcctgggttgggcccctctctgggcttgggtttccccagctgttccagctgggcgagccctcttggct

SEQ ID NO: 209500 - DNA, 119 bp, Homo sapiens; identical to SEQ ID NO: 199300
  chr4:2061357-2061476
  hypo

SEQ ID NO: 209501 - DNA, 44 bp, Homo sapiens
  chr4:2427613-2427657
  hypo
gccctgttcccccatcgtcaggatggcggcgttgaccccaggga

SEQ ID NO: 209502 - DNA, 96 bp, Homo sapiens
  chr4:2459899-2459995
  hypo
tttgctcattgtctggttgactgagacgggaatcttggtattttttggtgcccactttcttcacctcatatttctacacaacgtattaccaagttt

SEQ ID NO: 209503 - DNA, 81 bp, Homo sapiens
  chr4:2524117-2524198
  hypo
gagcgagactccgtctcaaaaaaaaaaaaaaaaaaaaagttttggggctaatagccaaaaaatgagcgttctgtgtgtctc

SEQ ID NO: 209504 - DNA, 31 bp, Homo sapiens
  chr4:2559965-2559996
  hypo
atcgtgtttgacagagcgagactgcatctca

SEQ ID NO: 209505 - DNA, 120 bp, Homo sapiens
  chr4:2568040-2568160
  hypo
tgggattataggcgtgagccaccgcgcctggccaatggaaaattgctttttgatagaaggttgctgtgatgagcgttttgtaaatggacgtttaggccagttgcggtggctcacacctgt

SEQ ID NO: 209506 - DNA, 78 bp, Homo sapiens
  chr4:2622586-2622664
  hypo
taattaacaagtagcgacaggtcagccacccagatccgtgaagtgaatgctaaagaatatggccggggcagatttagg

SEQ ID NO: 209507 - DNA, 78 bp, Homo sapiens
  chr4:2626193-2626271
  hypo
cttgttcctcagagcaggcagtgcaggctatgggattccccaggacggagaggcctctgccccggctgcttgatgcaa

SEQ ID NO: 209508 - DNA, 268 bp, Homo sapiens
  chr4:2626993-2627261
  hypo
agattttcttcttcactcctcgcttggtggctcccagccagaggccggcagtggtgggaggctcgctctgggtgcacagacgctgccttcagacaccgcatgctcgtgcgaggcctgcagtgagcgcaggtatgtgacgtgtgtgccacgttgctcacacctgtccacaatgacatgcagacctgcatattggagctggacggagaaactgggctaatgtgacagacagcaacaagagtaaggcagttgcttcgctattgagagaaag

SEQ ID NO: 209509 - DNA, 240 bp, Homo sapiens
  chr4:2639921-2640161
  hypo
gtcttgtagctgaatcgtaagtcaggtcactgcctactcttctgttccccgggaactcctggagagcagcggactattgtagcaggaggtagtcttcgtgtcctcgtacctggcacagggcctgggcagcatgggcttggcatttcacctgcttattattacaagcacatttgtgggttccagcctggggctgggtatcagttacctggccctggtctcctgccacgtgcatttttcctg

SEQ ID NO: 209510 - DNA, 146 bp, Homo sapiens
  chr4:2640600-2640746
  hypo
ccctgtgagtgacccgactcaggagacgtggagtagccaagcatgatgaagtgcagcttccagagctggcggttgttgaagtcaggaacattcacccaaagatgtaacgtgatctgaacacaagtagtgtccgtgtagttgacaga

SEQ ID NO: 209511 - DNA, 200 bp, Homo sapiens
  chr4:2687362-2687562
  hypo
tggggatacaactggaactcatttttgctcggatgcttagtgttgggaacctctcacgtgtgggcctcatgactcagtctgcggctcttgctcctcatgtcttgcacccatgttccatgtccgagtgggtgtgggtggtagaggacaggcgagtcacctagctcctggataaactcagtgtgtgcgcagtggaaagcagt

SEQ ID NO: 209512 - DNA, 758 bp, Homo sapiens
  chr4:2704073-2704831
  hypo
ctttgtgtcatggttcgatgctccgggctcatctcgtgtcttctctctcccagccctgaaccagccatttctccaaggagccctcctctttcttcaacagtggtgttcagaaacccagacctggacactgccatatggcattgcttttaggccctctcagtcagcagagcaggaggagtgggggtgtgagcatgtgcacacgagcgcctgccacctacacacactaattgctatgtacaagccgtgagttcccacagatatcccagccccactcctgtgctacagtgagcgttctcccttccccgtccacctttgtaactccttagacagtaagaacctggaccccatcatccatggtgcctttactgacttgctgagtcctacaacacaggtaaagggttcagaagtccctgcccttacccgatggaaaactccgggcatgctttcggtatttgttcagttctttttgtctttagcctcagggtgtggtgattacactgaatttacaaatgacttaaattagttcttttcacctttagtacaattacgttattgattgaaaacacacctgattgcgtttttccatttgtgttccatttgttttctcccctacccagttcctctttttttttaatctgttcccacccactccctgtaggtaactaatcagtttcttatttgcttttcttttttacataaaaggtagtgtattatagacataatagtgacttctgggttcttttctacttcatatattc

SEQ ID NO: 209513 - DNA, 76 bp, Homo sapiens
  chr4:2926396-2926472
  hypo
aatttgagttgctgaattgtttttcagtgtcacaccgctatttactattcaggccgccacacacaccaggccctgc

SEQ ID NO: 209514 - DNA, 109 bp, Homo sapiens
  chr4:2926880-2926989
  hypo
cagcaccttttcccggttgaggctgtatgctcactcagctaggtggtatggcggcctttttatggacacctggcttctggaaggtagctgccaacgtggtacttgggga

SEQ ID NO: 209515 - DNA, 38 bp, Homo sapiens
  chr4:2957244-2957282
  hypo
ctctagtcacctgcacgccacggcgccccctctagtca

SEQ ID NO: 209516 - DNA, 142 bp, Homo sapiens
  chr4:3208227-3208369
  hypo
gaacctccatgactccgagcacttaacgtggctcattgtaaatcacattcaagatctgatcagcctttcccacgagcctccagtacaggacttcatcagtgccgttcatcggaactctgctgccagcggcctgttcatccag

SEQ ID NO: 209517 - DNA, 122 bp, Homo sapiens
  chr4:3216985-3217107
  hypo
ttaaaaatcattcacagagacgtgcaccgcggtgagtgtggactcctggaagcgcaccgtagctccgctgtgtcctgctgctcctccctagctgtcagggaggctgtagtccattgctttgc

SEQ ID NO: 209518 - DNA, 77 bp, Homo sapiens
  chr4:3217154-3217231
  hypo
gtctctgaccctacagaccagctgggatgccactgggggagcgctcccttccccccgcacttcccacactctgcagt

SEQ ID NO: 209519 - DNA, 155 bp, Homo sapiens
  chr4:3240561-3240716
  hypo
cagcaccgggcagtcgtccatggtccgggactgggtcatgctgtccctctccaacttcacgcagagggccccggtcgccatggccacgtggagcctctcctgcttctttgtcagcgcgtccaccagcccgtgggtcgcggcgatgtatcctctct

SEQ ID NO: 209520 - DNA, 267 bp, Homo sapiens
  chr4:3245188-3245455
  hypo
cagacgaggacactcgcttgccgggcctgggcctcctgggaaggagggagctgctcagaatgccgcatgacaactgaaggcaacctggaaggttcaggggccgctcttcccccatgtgcctgtcacgctctggtgcagtcaaaggaacgccttcccctcagttgtttctaagagcagagtctcccgctgcaatctgggtggtaactgccagccttggaggatcgtggccaacgtggacctgcctacggagggtgggctctgacccaa

SEQ ID NO: 209521 - DNA, 525 bp, Homo sapiens
  chr4:3252218-3252743
  hypo
ggtgagggtcttgcagggtgtgaaggtcataggtgtgcggtgaaggtcacaggtgtggggtgatggttttgggtgtggggagggtcttgcacggagcgagggtggcagcaagagctggaagctgcagggggagaatggcagcagagagcacccggccctgtgggcggcctggacagggctgggcctggggctgccggagagcctgtcagcttccaggatgggagtggcctcactcagctgctccacctccgggtcaggcaggtgagcctggggcagagaggctgagagcacctgagccacttgtgggagaggccacccccactgcccccctcaggcgaggagccggcctccagcacagcagaagggaacccccagtccccagccctagtgggagtggggaagaggcccagcaaggccccggacagaccgccagcctgtgaggtctccgctttcagttgcgttgatttgattttttctgagccttgaaggaggggtccggggcctggccctgcccaaaggccccta

SEQ ID NO: 209522 - DNA, 222 bp, Homo sapiens
  chr4:3252797-3253019
  hypo
agcggctggcttgcgacgtgagggctgaggtgtgagcctgggtatcttcagaggttcggtggacacaggcagctgcccgcggccccactgttcccgtggcctcctagtcctgctcaggcacctggtgaggaagggacgcagagggcagtgggaggtggccacgactgttccagcaggctcccctctgactcaggaattcacgggcaccacctccctggctgg

SEQ ID NO: 209523 - DNA, 121 bp, Homo sapiens
  chr4:3292280-3292401
  hypo
acgcccccacaccccgagtcccgtggaagaattatcatccatcccacttgttcaactcaggagtgcctccttaagcaactgtagcctatgagctgtgggtagggccgctgagccgctgcct

SEQ ID NO: 209524 - DNA, 193 bp, Homo sapiens
  chr4:3324703-3324896
  hypo
gtgtactggagtacccgagagctacatctgagtgagatagtggtacctgcatcacctgaagtacatctgaaaatcgcgctcataaaaaaggcaaaatacagaagcctcaagcccgtgagcagcgcagtctgctgtccagggtggcgcgtgcccctcggtgggaggacaagccaggggcgagcgggaggacgag

SEQ ID NO: 209525 - DNA, 198 bp, Homo sapiens
  chr4:3345083-3345281
  hypo
ttgcccccttaaagacggggcgtgatccacagacatgggtaagtgtcattttgtgtggctcgtctatctgtgtttcttttgtaaagaacaatgaaaagattttattttttatagcagttttaggtttacagaaagtacagagagttcccttatgcccccacccacttgttaaaaatgcgccgtcgggatcattacgtc

SEQ ID NO: 209526 - DNA, 108 bp, Homo sapiens
  chr4:3413102-3413210
  hypo
gtctgtgtgtgttctcgtgttaggcctgtctggctctgcgtgttcgggattgtggtctgtgtgtgttctcgtgttaggctggcctgctctggcgtcttgctcatcttg

SEQ ID NO: 209527 - DNA, 147 bp, Homo sapiens
  chr4:3415798-3415945
  hypo
agttgacgggcgccgacctgaaggactgcgtcagcaacaacagcctgagcagcaatgccagcctccccagcgtgcagagctgccggcgcctgcgtgagaggagggtcgccagctgggccgtgtcctttgagcgcctgctgcaggacc

SEQ ID NO: 209528 - DNA, 136 bp, Homo sapiens
  chr4:3417330-3417466
  hypo
gtggcctggcttccaggcttcggggctgctttcgtctgctcgcaatgctcagagggcgctgctctcctgcactcccaccttgccaagaccaggtgtgtggcgacacacggcagtattgcccctgcgcagctgctgc

SEQ ID NO: 209529 - DNA, 92 bp, Homo sapiens
  chr4:3417496-3417588
  hypo
ctttaagtatccgtttaaacaatcgtagaggagcccgcgcagtgctgctgcattctggccacacttttatttatttattcaagcaagaggta

SEQ ID NO: 209530 - DNA, 197 bp, Homo sapiens
  chr4:3417888-3418085
  hypo
gggctcggggtatagggtccaccttcaaagaacacgtgctatcaggcaggccagtggatcgagagcatcacagacgcaggtagagaaacgcagacagaaagtggggctttcagtagggtagagaaacgcagacagaaagtggggctttcagtagggccatgaaataagtcccgaaccactgcgtgtctgtctgcaat

SEQ ID NO: 209531 - DNA, 199 bp, Homo sapiens
  chr4:3425119-3425318
  hypo
aactggggggcacaccgaggccttgagggcggcctggggctgtgctgtagttctgctcgtgagactgatctcctaatgagggctgacatgagttggtagtgaattttttcatcccccaccaggctggatcttgttccgattaaccggtcagtgggactcaaggccaagcccaccaagcccgtcacggaggtgctgcggc

SEQ ID NO: 209532 - DNA, 197 bp, Homo sapiens
  chr4:3426136-3426333
  hypo
gaagcctcttccccgcgctgcaggctccatcctggagtccagaaatctgcaggtgggagacagacctggcctggctcccaggtgtgcccctctggccgactctggggagacgctgcgcaattgtttagcccctgtgtgtcacagtttccctgactgtaaaatggggttggtcgtggcagcgtgctcgtggcatggtt

SEQ ID NO: 209533 - DNA, 221 bp, Homo sapiens
  chr4:3446222-3446443
  hypo
acacccgagtgggaggaatggcctgaggtcacccagaaacaagggacaaggggtggaccccggccccgactccgctgtcgtggggcactgcgcggcccctggcccagctcctcggccctgcccccagcttgtctgagcagcccttgcctgaacgggggcacctgccacctgatcgtggccaccgggaccaccgtgtgtgcctgcccaccaggcttcgctgg

SEQ ID NO: 209534 - DNA, 72 bp, Homo sapiens
  chr4:3447170-3447242
  hypo
tgcatctctgacaaatggggaaactggagctcacgggatcaggctggtccaaggtcacgcagtgggtcggta

SEQ ID NO: 209535 - DNA, 49 bp, Homo sapiens
  chr4:3448500-3448549
  hypo
ggggagaccctgagacggagcagcctgggccagacgcccttccaccttc

SEQ ID NO: 209536 - DNA, 77 bp, Homo sapiens
  chr4:3449842-3449919
  hypo
tgtgtcccacagacgtgagcggctactccagctccctgcgggaggccctggtccccctggtcgccgaccacaagtgc

SEQ ID NO: 209537 - DNA, 149 bp, Homo sapiens
  chr4:3452962-3453111
  hypo
ccggcacatgataggttttctaactcaggttggccttgtattcctcgagtggacggtattgagctgaagtgtgagctggggtcttccctttgcccctcccacttgtgccctgcttgttcccgtcgtgctctgccgcgggaggctggcct

SEQ ID NO: 209538 - DNA, 220 bp, Homo sapiens
  chr4:3478050-3478270
  hypo
tgccccgcctgcccgcagtgcataggttccatgtgacagtggctccaggcaccaagttggagagcggcccggctaccctgcacctctgcaatgatgtcctcgtcttggccagggacatccccccggctgtcacggggcagtggaagctgtctgacctccggcgctacggggccgtgccaagcggattcatctttgaaggcgggaccaggtgtgggtactg

SEQ ID NO: 209539 - DNA, 367 bp, Homo sapiens
  chr4:3480304-3480671
  hypo
cagaacccgcaaacgggggctggccccacagaacccgcctttgcagctcagtgctgaatgttctcgtccccggtggtaccctggcctgagagaggaagggctctgggaattcggtcaccgacggctgcacaccccgtagggtaggtgggttctggaggccaggctggaaggcttggccgagccacccatccctgtccccagcaggccctgctgggctgtatcctcctggagacaggcgtggccaccaccctgggtggtttaggctgggtcttagactcggccaagcggtggtgttctcaacgcagcactgagtgcaggccgtctggctggagggacggggagtctgcggcacgtgtgggcagcctgg

SEQ ID NO: 209540 - DNA, 111 bp, Homo sapiens
  chr4:3514613-3514724
  hypo
ggcgggctgtccacggaaatgccacggccaagagcccaggtccttcacgctggcctcttccctgccgggctgggctccccaatgccttcagagttcgttgtgccgagctct

SEQ ID NO: 209541 - DNA, 150 bp, Homo sapiens
  chr4:3588428-3588578
  hypo
agcaacaacaaggaacgcagctgcagcagcgggggccctgggcaggcggcctgccctcacttaggccaccatgtgcctgtcgaagtgcgtaggagcctggagctgccatcactgctgctttataactgtgggcaccgaggttaaacagtt

SEQ ID NO: 209542 - DNA, 261 bp, Homo sapiens
  chr4:3748239-3748500
  hypo
tgctctcagaaacacgcatgcgtgcgtcatgctctcagaaacacgcatgcgtgcgtcatgctctcagaaacacgcatgcgtgcgtcatgctctcagaaacacgcatgcgtgcgtcatgctctcagaaacacgcatgcgtgagtcatgctctcagaaacacgcatgcgtgagtcatgctctcagaaacacgcatgcgtgagtcatgctctcagaaacacgcatgcgtgagtcatgctctcagaaacacgcatgcgtgagtca

SEQ ID NO: 209543 - DNA, 161 bp, Homo sapiens; identical to SEQ ID NO: 199306
  chr4:4389011-4389172
  hypo

SEQ ID NO: 209544 - DNA, 204 bp, Homo sapiens
  chr4:4487535-4487739
  hypo
tgcgctctcctccgtatcttttctcctgctcccaaagctctcctttttctcgatgctactggtactttcctgcacggaacagtctttgactcaccacacactttttctgggatcactgcttatactagaattccatgagcagcctatatcctttgctctcttagaagtacgagtggtggatggtcagcacgcaggcagagggcg

SEQ ID NO: 209545 - DNA, 312 bp, Homo sapiens
  chr4:5024029-5024341
  hypo
acttggtgactactcgtgttactcagagattaaggcacaagcccactaagaaacctacgcaggacagcctgacgtggctccccaccaggggctccctatgagacgccgcactggatacaggctggtggacccccgcacgtgtgttctgttctcaaatgtctccttcaccacgaatcacctgcatcctcccaccagctctttctctgcccccttctgaggctccttcagcagttggctgctccgaatattaaaaatccaggcaggaatttgcccacaaatcaggtaagcccttgtctccgccaaaaggtctct

SEQ ID NO: 209546 - DNA, 70 bp, Homo sapiens; identical to SEQ ID NO: 199323
  chr4:5052365-5052435
  hypo

SEQ ID NO: 209547 - DNA, 289 bp, Homo sapiens; identical to SEQ ID NO: 199324
  chr4:5052556-5052845
  hypo

SEQ ID NO: 209548 - DNA, 166 bp, Homo sapiens; identical to SEQ ID NO: 199327
  chr4:5890606-5890772
  hypo

SEQ ID NO: 209549 - DNA, 236 bp, Homo sapiens
  chr4:5970096-5970332
  hypo
gtggagggcttaatactctgcggcatgggttatggctcagccgtcttctggtagtgaccggatcacaccagcactcctgggaggcttcggtaccaggcacaatgcctgctcctgaacggtgctcttagagcactttgctgtcaccctttcgacactgttgtgtcttcaagtaccctggactctcccaccccggtgcctgtgtccactcaggtcccgcagccttgagaccttcactc

SEQ ID NO: 209550 - DNA, 780 bp, Homo sapiens; identical to SEQ ID NO: 199331
  chr4:6271380-6272160
  hypo

SEQ ID NO: 209551 - DNA, 182 bp, Homo sapiens
  chr4:6586518-6586700
  hypo
acaggagggagtaagcgtgccacatttggcttagatcaactgtgattcgtcccttgaggctgggcatggtgcaccctgaacagagggaaggttctgcgagtgaaaaaggggtgctgacttggcagccttcagcctgcccccaccggctgccctgtctggtgcgaggccgtaccctccagagc

SEQ ID NO: 209552 - DNA, 94 bp, Homo sapiens
  chr4:6588779-6588873
  hypo
ttgacccgtttggcgcctctgccacgacgcccaccctatttgcgctggcgggcttcaatgcccacctcggctcccggatcgactacgacctgaa

SEQ ID NO: 209553 - DNA, 40 bp, Homo sapiens
  chr4:6590875-6590915
  hypo
tttctccaacaggtacgtgcccttccgcagtgcctttggg

SEQ ID NO: 209554 - DNA, 304 bp, Homo sapiens
  chr4:6600488-6600792
  hypo
attgaacctgaacacggtgctgcccagccttggcagagagtacgccggtgtcctcaggggcccggtcccttcctggctcctggcactccctcccgaactccacttggctgacatcacagcagggcagccgtgggaccagcctctttgactgtgagttttcccacgtgtagagtgactgatcacatgccagtgtgcctgggactgaggggtttccaaactgggaagatcctggacaaatgaagacaggttggcggccctccgcccgcatgagacttttgtgtgcataggccgccaggtcccaccc

SEQ ID NO: 209555 - DNA, 480 bp, Homo sapiens
  chr4:6733173-6733653
  hypo
acagacagaagcacacacaggcgcctctcctcatgtgcagctggctctgagattcatggaacaagaagagccaactcctaggaggaggccagttcaaattctgcctttttccggctgtgtactcttggagaagttacacacctctctgaaaaattgttgaaagtaaacttactgcacaggacactttctgtgctcagttatgtctgccgagttcagctggcgtgcaggcactgccacaggccccgagaaaagaacggggtgcagagcaggggctgctttcagggacccgccgtgctagtgaaggtggaacggtaaagagggtcccgggtttaagggcgcgggcagtgatgggagcacagacccagtgaggcaggggagggtgagggaggccttctgcagagggggtaccctgcagacagagtcagggagagatcaagagacggggatggccaggagggcacagggctcactggccaggca

SEQ ID NO: 209556 - DNA, 96 bp, Homo sapiens
  chr4:6738169-6738265
  hypo
aaaataaacaaacaaataaataaaataaattaaaaagtacatttacagtgttgcgcagccatcacctcctcacccatctcccgaacttgttcaatt

SEQ ID NO: 209557 - DNA, 34 bp, Homo sapiens
  chr4:6786668-6786702
  hypo
ttttttttttttttttgagacggagtctcgctct

SEQ ID NO: 209558 - DNA, 34 bp, Homo sapiens
  chr4:6786942-6786976
  hypo
cgtgagccaccgcgcctggctgattagatggatt

SEQ ID NO: 209559 - DNA, 93 bp, Homo sapiens
  chr4:6883785-6883878
  hypo
tgggactggctcccgtttctccttggtgagcccggggagccggcgcatcttgtgagtcgcgtctgtgcatggcgatccgctcctccggctctc

SEQ ID NO: 209560 - DNA, 35 bp, Homo sapiens
  chr4:6902912-6902947
  hypo
cttccccggctgtgcggcgcggggctgggagccct

SEQ ID NO: 209561 - DNA, 178 bp, Homo sapiens
  chr4:6950156-6950334
  hypo
ttgttgtctagttttcggctgtatgggtatcccactctttgttctcccatgtgtggaggtttgatttgttcagggtccaatggttacaaataatgcccaccatggtgttctcacggatgtcactggcgtgtgcgtgcctggggggtgggacaggtgggtctcccgtgggtcccactcg

SEQ ID NO: 209562 - DNA, 190 bp, Homo sapiens
  chr4:7004175-7004365
  hypo
ttaaattaaaacctatggaccgtattgttttggattgggctaaaccgctgacgagtcagttacatgtttagacatgagtcttagacatttatccaaaccttggtattggctcgatttgtgtacattgtgtctgtcttgtattgtgaaccgcgcagtgtcagtggcccccgctagcactggtactcaggaa

SEQ ID NO: 209563 - DNA, 134 bp, Homo sapiens
  chr4:7033374-7033508
  hypo
ggaagcagggcccacgtggcggtccgctggcaggctggtcctggggagcattctgcggacccggtcacgggcttggttagtcatgcgtacatgtgtgccttggggtgctctgcactccacggcccttctcagcc

SEQ ID NO: 209564 - DNA, 108 bp, Homo sapiens
  chr4:7035497-7035605
  hypo
tgttatctcctatgcgttctctgcaggccatggtgagaggacgggccacaggcgtgatggtggcagcagtcacagccacgccaggcgctgggccgagtgctgcctgtg

SEQ ID NO: 209565 - DNA, 123 bp, Homo sapiens
  chr4:7035978-7036101
  hypo
gcgtagacgcggacagtggtcagaactgggtttcagactccagccttgtgaatgactcccaagcccttgtcagaaacaccctctaggggagggggcctttgcgagccttgttcttgtagggct

SEQ ID NO: 209566 - DNA, 220 bp, Homo sapiens
  chr4:7047283-7047503
  hypo
ctacctagagtgctctccctgtaaatcatggcccaggattgagctttccacttaaatatcagtgcctcagagggcccttcccttcaccatcccagcacttacctctacgttagctgctaaggaggcgcagagccttggtggcatatctgtgcgtatctcaggacattttcccgacagcccttggcagttggctttggacggaccagtttgacttcagagc

SEQ ID NO: 209567 - DNA, 119 bp, Homo sapiens
  chr4:7167402-7167521
  hypo
gcccttctgcaggaacgtcccgagtgtgaatctcggcctttgtgatccagctgtctcgcccgatgccctcctcctgcttgggcagacacacaggctcgcaaggccggttctggaggccc

SEQ ID NO: 209568 - DNA, 217 bp, Homo sapiens
  chr4:7432357-7432574
  hypo
agatgctcctctgtgcggcgcagtcaccacctctgggaaatccatgctcaacatctgtcttgatttcccatccttgctgggatgggtctcccaaacttctaggcccagtagggccagctgctcttctcctgggctggtatctcctctcccacagctggacagttacagcaccctccgctgaaaagccttttccagcctgaacgcggcggctatggag

SEQ ID NO: 209569 - DNA, 91 bp, Homo sapiens
  chr4:7741694-7741785
  hypo
ctctcaggccctctggggcccactgcttgtgatggcaccgggagagcccactcctcaggcacccacctaggaaccgcggagaccccctgca

SEQ ID NO: 209570 - DNA, 450 bp, Homo sapiens
  chr4:7758026-7758476
  hypo
taggtcctgcacaaagctgccccaggaggagtggagcagcaggaagaggcaattgtgcttgctcttggtcttgctctgaggcacttacttcccctgggggcagtcggctgcgtgctgccctcctgctgcgacttaggatctcacccgagggccaggagattggcttggtctgtgcaccatcgacccgagggccagaaggttggcttggtctgtgcacaattgacccgagggccagaaggtgggcttggtctgtgcaccatcgacccgagggccagaaggtgggcttggtctgtgcaccatcgacccgagggccagaaggtgggcttggtctgtgcacaatcgacctgagggcgagaaggttggcttggtctgtgcacaatcaggacggccctgagagcagagtggcggcagggctgtcatcccagtgccttcggggactgcgccgaggag

SEQ ID NO: 209571 - DNA, 74 bp, Homo sapiens
  chr4:7789549-7789623
  hypo
cgctgtggcttcctgcgctcggtcagtctcctgggtgccccggcactcccctggctctcgcggctcccccagcc

SEQ ID NO: 209572 - DNA, 306 bp, Homo sapiens
  chr4:7813251-7813557
  hypo
gcccccaccacagccaaacacgctagggcggcagaacatacccctggtgtctcctgcctcgggccttgccctcccacactccaccctcccgcttaggtcctggtcctatagcgttagtgcccttctaagaagagacggcacaggcacagaagaaaggccgtgtgaaggcgcgggaggggagccgccttggaggaagacagccctcgctagacaccaaccctggcggcacccgggtcttggacttccagcctccagggccgtctaaatgcatgttgtttcagccacgcagtctgtggtattctgtta

SEQ ID NO: 209573 - DNA, 49 bp, Homo sapiens
  chr4:7967943-7967992
  hypo
aataaggctggaggccgctcccctgcggagggaccgtaaaattaaactc

SEQ ID NO: 209574 - DNA, 190 bp, Homo sapiens
  chr4:8001655-8001845
  hypo
agaggtcaaagtcaccgctggacattcaaggccgggcaccttgtgggcagaggactgtggctcacacagcatccgggtctgctttgtggacacctgacccatgaaccactcacttgggcagttcccatccgctcctgggtgcacgggcaggaggcttggaggctgtggcactgcacgggttcaggtcccc

SEQ ID NO: 209575 - DNA, 149 bp, Homo sapiens
  chr4:8012068-8012217
  hypo
tgaacaattacacaaaaacccgtctccgtccccagcccgccacgaagacccaggcctcaggaaggacacgccgaggtgggcttcttacctgcagcgggcggcgggctcgggcccgtctgtcttttgccgtaccctgcctcctgcaccac

SEQ ID NO: 209576 - DNA, 261 bp, Homo sapiens
  chr4:8032213-8032474
  hypo
gtgatgagcaaaggaattcccggtctgggcccatggctcccctggcctgtcagagcacgtctcccaccccgaggtgtgctgtccctaacgcctgcctggtgcgccacctccatgcgctcaggccagccctcatgctaggttcctacctgcgcttcaccctgctccctttggcgactgtctaaccccagcccggggcgcactctctcgggccggctagtgccctgcctctctaccccgggcgtcctctgcacagccctgtcc

SEQ ID NO: 209577 - DNA, 165 bp, Homo sapiens
  chr4:8153834-8153999
  hypo
accctcaccaagaagcgccatcatgatgcccccaaacgggccaggctttatccacaccaacactcagccacgcgttatgaggcagcaaccaatcccccacagccaccggctaaagcacgcaggcaggggataggcagacagcgcccgcctagccagggatacgcg

SEQ ID NO: 209578 - DNA, 111 bp, Homo sapiens; identical to SEQ ID NO: 199338
  chr4:8160429-8160540
  hypo

SEQ ID NO: 209579 - DNA, 318 bp, Homo sapiens
  chr4:8372557-8372875
  hypo
ccacaggagcatctcagctccgcagaaatgcccatcaacccttggggcactcccgtgaggccctgtcctccctttacctcgccgtcggctctgccaatcggtgagtccagaacaaagtcaggaggagcgatcacgtctaccagggcaactgcatcgtctttcagctgttggaaaacaaagcccagacacttggcacctcccgggaatttccatggtgaccaaagcataacagccccgtgtgtggttgccaggacccactagcaacgggtcacctgagcggcacgtgcggctctgctgcccatgcgtgatctcttcacc

SEQ ID NO: 209580 - DNA, 111 bp, Homo sapiens
  chr4:8386732-8386843
  hypo
ctgtggccccccacacgcagcagccccccaccgagggcaccatggcctggcccctgccaggtggcatggggtgaccgcattccctccccactgtctcgcagaaggaaaaca

SEQ ID NO: 209581 - DNA, 173 bp, Homo sapiens
  chr4:8389738-8389911
  hypo
cctttccaccaggcctcttgcgctcacctcccgtcattcacagcaggggaacgagatgcatgctcacatcgagatgagctcggcatgggctgggccctgctgcctccgcctcctgacacacccgtccatcgggggtccccatggctgcccccgcctttcactgacctcaattc

SEQ ID NO: 209582 - DNA, 121 bp, Homo sapiens
  chr4:8396396-8396517
  hypo
ggtccaggaagagcgacttggagaaatggtctaaggcgtagacagctgccagatatggaagcaagcgccattgctagaacagacaagacacctgcgtgaacacatcgtggttcccatgaag

SEQ ID NO: 209583 - DNA, 172 bp, Homo sapiens
  chr4:8398723-8398895
  hypo
agtggctgagaagcgaagagcgatggccacggccagctttaggttaaggatggccaggctcacgatggagacccggcccgaggacaggctccccagggacgctccaaagcgctgcctgacgtcctacgggagggacacagatgataagctcaagcccggctgcgcggccacc

SEQ ID NO: 209584 - DNA, 90 bp, Homo sapiens
  chr4:8455168-8455258
  hypo
ctgggcaacatagtgaaaccccatctctgcaaaaaaaagaaaaacaaataagagaagcttcagttctggctcggacggccagtcatgtat

SEQ ID NO: 209585 - DNA, 178 bp, Homo sapiens
  chr4:8466217-8466395
  hypo
gccacagttgcctccgcacggggagctgtgtgtgtccgagagacttggtcacgaagcaggttgtgctgctcctcgttgacgtttcgttgctgagtctccttatctcagattcttctgagctgttttcattctcaaggagtaactaggtgaaagatcaggtcttcgctcaggcttcgtt

SEQ ID NO: 209586 - DNA, 56 bp, Homo sapiens
  chr4:8473097-8473153
  hypo
ggacgtgggtcaccccgttccctccttgctcctctggacctcgtcccatgcgatgt

SEQ ID NO: 209587 - DNA, 281 bp, Homo sapiens
  chr4:8549955-8550236
  hypo
caggcagtggttgccggggtcggccgctgccttagggcagattgttacacgctcaggaatgtcttgcgcaggctgatgctatgcatcaactcactggggcttgggggtgcccaggtagctgccgctgcaacattatttctgggtgcctgagaggtgtttctggaagggactagcattagaatgaggaaactgaggaaagaagatggccctccccagtgtgggcggcatcatcccatctactatgggtgcagagggaacaaggcagcggaggagggaggcag

SEQ ID NO: 209588 - DNA, 42 bp, Homo sapiens; identical to SEQ ID NO: 199340
  chr4:8594310-8594352
  hypo

SEQ ID NO: 209589 - DNA, 131 bp, Homo sapiens; identical to SEQ ID NO: 199341
  chr4:8609443-8609574
  hypo

SEQ ID NO: 209590 - DNA, 162 bp, Homo sapiens
  chr4:8615920-8616082
  hypo
ctcacctgcctgctgggcacttggctgacaccccgacgtcccggctgtctctgcgcggctgacaccccggcgtcccggctgtctctgtgcggctgacacccctgacgtcccggctgtctctgtgcggctgacacccctgacgtccccgctgtctctgtgcca

SEQ ID NO: 209591 - DNA, 269 bp, Homo sapiens
  chr4:8621150-8621419
  hypo
agaactttattcatgggctgcggaggactgggccccacgacccactgggaggtgccagctctttgggggaggccacggagcccgacccgctccgggcgcgcaggcagccctcggccgacgggagtaagccctggtggtggtcctacttcacatcgctgagcacccacaggccacgctggctgctcaagtactagccccggccccagcacccgccaggatgtggagaccgaggcccatctccgcatcccgggctcctggctcttgatttt

SEQ ID NO: 209592 - DNA, 110 bp, Homo sapiens
  chr4:8647631-8647741
  hypo
accctccagcagggtgccagcgagagctatttgacgcagatgtcggagtggaattttgcagtacgaaccctgactctgcctggccacgcggtgtggccagtgcttctgta

SEQ ID NO: 209593 - DNA, 330 bp, Homo sapiens
  chr4:8739498-8739828
  hypo
catggcagccccaggagatgcgtgccgtgggaataggaagcccagccctgtggccccgccagcatattccgcctcctccgtctcagccagagcccttcgggcccatccagactgcagttcaaacccaagcgtgtctccacctgaacctatgcccgccctcagcccagatgagttgggggctccaggctggcgagacagctgagcgtctgcctccctctgcacagtgcggtgatttcgccctgatggttaagtggagcgcttagctcctaattgctgtaatggtgctcggggagggccctcgtggtgggcggatcaggtgtgagcccagag

SEQ ID NO: 209594 - DNA, 209 bp, Homo sapiens; identical to SEQ ID NO: 199346
  chr4:9684933-9685142
  hypo

SEQ ID NO: 209595 - DNA, 62 bp, Homo sapiens
  chr4:10086436-10086498
  hypo
ccaaggcccagcacgtcagcacctgagcacctaacgtgtgcagacacgtggcctgcaccccg

SEQ ID NO: 209596 - DNA, 348 bp, Homo sapiens
  chr4:10087761-10088109
  hypo
aagccttactcacccgtgtacaatttctcaccatcccacttggaggcccactggagcatggtctcgacaagagccctcagctcccccaggcaacaacctcctcggccccatgctgtgcgtgccttcctttttatactcatcaccctgggctgtgagcccagcaaggaggcgctcccgattcccctctatcctcgaggccacgtctagtgaacctttatggttcagccttccccctctcagcagtgctgctgcccccactgccccggcacaaaggaaccgtgactctatgcatgagcgttgaggtgacctggtccgtaggagtcacacacacaacgttaacgaggcccc

SEQ ID NO: 209597 - DNA, 58 bp, Homo sapiens; identical to SEQ ID NO: 199347
  chr4:10089890-10089948
  hypo

SEQ ID NO: 209598 - DNA, 236 bp, Homo sapiens; identical to SEQ ID NO: 199348
  chr4:10090133-10090369
  hypo

SEQ ID NO: 209599 - DNA, 39 bp, Homo sapiens; identical to SEQ ID NO: 199350
  chr4:10459327-10459366
  hypo

SEQ ID NO: 209600 - DNA, 339 bp, Homo sapiens
  chr4:13601004-13601343
  hypo
ctctcaggtgggcaggtgagttagcattcccctctaagccccttcctgctgaataacttgctgtgctactgccccctgctgtccctgtctctgggctcttatcttctttctgaagggagttcaacaatacattcttctcttctgcatttatgaggtgtaaagtgctctctttctgtcctcttcctgcaaatggtcctatttcggggcactccttgccatgcttctcttctttttccgcacaaacagcacttggatggccttgccctgcagagggcttgtggactgatggcccgttgtgcccctcctcggtgctcactgccaacacgggacccggttctt

SEQ ID NO: 209601 - DNA, 140 bp, Homo sapiens; identical to SEQ ID NO: 199357
  chr4:16228990-16229130
  hypo

SEQ ID NO: 209602 - DNA, 120 bp, Homo sapiens; identical to SEQ ID NO: 199358
  chr4:16229202-16229322
  hypo

SEQ ID NO: 209603 - DNA, 120 bp, Homo sapiens
  chr4:17817849-17817969
  hypo
gcaacctggatacctcatgtgcgcagttcacaatagagttcctgcgcctgagagaatctaatgcatctgctgatctgacagtaggaagagctcaggtggtaatgctcgttagaccacggc

SEQ ID NO: 209604 - DNA, 137 bp, Homo sapiens
  chr4:17818029-17818166
  hypo
caggggttggggagcctgagagaatctgcttataggaatgatattttttgaagtttttaactctcatgagaaggccaagatggctctattgcgctgtagtgagaaaaccgacttgcgtttgaaaacattgtcagagg

SEQ ID NO: 209605 - DNA, 106 bp, Homo sapiens; identical to SEQ ID NO: 199361
  chr4:18024246-18024352
  hypo

SEQ ID NO: 209606 - DNA, 53 bp, Homo sapiens
  chr4:19280790-19280843
  hypo
tgaagaagcccgcacgagttacacagccagagcaggagcgagagagggtggga

SEQ ID NO: 209607 - DNA, 429 bp, Homo sapiens; identical to SEQ ID NO: 199366
  chr4:22517070-22517499
  hypo

SEQ ID NO: 209608 - DNA, 33 bp, Homo sapiens
  chr4:24422943-24422976
  hypo
ttttttttttaatggagtctcgctctgtcgccc

SEQ ID NO: 209609 - DNA, 33 bp, Homo sapiens
  chr4:24423216-24423249
  hypo
agccaccgcgccgggccaacagtttacatttga

SEQ ID NO: 209610 - DNA, 106 bp, Homo sapiens; identical to SEQ ID NO: 199367
  chr4:24914300-24914406
  hypo

SEQ ID NO: 209611 - DNA, 281 bp, Homo sapiens; identical to SEQ ID NO: 199374
  chr4:25864009-25864290
  hypo

SEQ ID NO: 209612 - DNA, 209 bp, Homo sapiens
  chr4:26823270-26823479
  hypo
ccctgcacttgcctgcgaatgcaggtcctggcccagtggttcaatggtggggctgtcctgtaactgtgccagggagtcagaagccatggcggggctcaccgtggtcatgctggaagtccctgtccctgtctgctcatcacacacaggtcagcaggtacccgttctttatgtgtggcagacctctggtggccaggcggaccacttttctc

SEQ ID NO: 209613 - DNA, 99 bp, Homo sapiens
  chr4:26856540-26856639
  hypo
ctgaaaagtgcgggcgagtttgcatctcctgcagaaacctttgactgatgggagccaaaagttccatttttctcccttcttctcgcactgttccaaaac

SEQ ID NO: 209614 - DNA, 799 bp, Homo sapiens; identical to SEQ ID NO: 199382
  chr4:36245409-36246208
  hypo

SEQ ID NO: 209615 - DNA, 145 bp, Homo sapiens; identical to SEQ ID NO: 109945
  chr4:36246257-36246402
  hypo

SEQ ID NO: 209616 - DNA, 86 bp, Homo sapiens; identical to SEQ ID NO: 199386
  chr4:37688564-37688650
  hypo

SEQ ID NO: 209617 - DNA, 188 bp, Homo sapiens
  chr4:38278935-38279123
  hypo
taattacacttgcaacgatcctgttgcaacctcacattctgaggtaccaggggttagaagttcaacatacgaactttagaggtggtgggggggcggtacaattcaacctagagcaggagctctgtgtcactgcaaggcctatgtcatacaataacacgaaaatcttatgactgcgataaagagaaaaa

SEQ ID NO: 209618 - DNA, 206 bp, Homo sapiens
  chr4:38729967-38730173
  hypo
ttgaggaacaagggctggagcggtgtctccaaggtcacgaagctagtaagagtgggtatagatcgcagatgcagtggctggtcttaaccgttaagggagagctacgaagtcccacgtgtggacagtaagtactcagtaaaagtacactgttactgttactgctgctgccattgtgctggacagccggggaaagtgaggggcagaga

SEQ ID NO: 209619 - DNA, 740 bp, Homo sapiens; identical to SEQ ID NO: 199390
  chr4:38868924-38869664
  hypo

SEQ ID NO: 209620 - DNA, 263 bp, Homo sapiens; identical to SEQ ID NO: 199392
  chr4:39183810-39184073
  hypo

SEQ ID NO: 209621 - DNA, 322 bp, Homo sapiens
  chr4:39447939-39448261
  hypo
tgtttttcacagcccgagtctgtggcttcgtccccacagttcagcgatcctcatctgtacgtgtggaacgccactggcaacagactgttgcaccgagtggaaggggtgaggctgaaaacacgacccgctcaatgcacagattttgtaaacatcaaaaaacaacttgagatgttggcaagaatgaaagtcacccactaccggtttgctctggattgggcctcggtccttcccactggcaacctgtccgcggtgaaccgacaggccctgaggtactacaggtgcgtggtcagtgaggggctgaagcttggcatctccgcgatgg

SEQ ID NO: 209622 - DNA, 153 bp, Homo sapiens
  chr4:39481996-39482149
  hypo
gaggatgcgccgacgccccgagcgcccggccctccgcagcagcccggcagactgcctctgtcatcaggaccctccgtccacgtcccctgtgcggccagcgtcagagccatggcgatggaggagaggaagcccgagaccgaggcaacgagagca

SEQ ID NO: 209623 - DNA, 248 bp, Homo sapiens; identical to SEQ ID NO: 199394
  chr4:39529737-39529985
  hypo

SEQ ID NO: 209624 - DNA, 120 bp, Homo sapiens
  chr4:39623588-39623708
  hypo
accgcactcggcctcattttctttcttaataatatggagaaatgatcacaacataatgttaaaagtatatttaaaagggcataaaaataaacatagcaaatgcacttttttgttttttgt

SEQ ID NO: 209625 - DNA, 97 bp, Homo sapiens
  chr4:39745202-39745299
  hypo
gacagagcgagactccgtctcaaaaaaaaaaaaaaagaatataatgaaacctcttcagccagctttaataactatcagctcacggccatctgtgatc

SEQ ID NO: 209626 - DNA, 39 bp, Homo sapiens
  chr4:39761181-39761220
  hypo
gcgtgagccactgtgcccggcccctggtttatttcttaa

SEQ ID NO: 209627 - DNA, 37 bp, Homo sapiens
  chr4:39913158-39913195
  hypo
aatgcacatgttggccgggcgcggtggctcacacctg

SEQ ID NO: 209628 - DNA, 218 bp, Homo sapiens
  chr4:39937634-39937852
  hypo
agacttctaattcgcgataaaaggaacctgacagaagcaaggcgcaaatggggagcagagaggactaaaaagcaaaaggaggaaacttatgagggtgataagttcactttaattgaagtgatggtttcaatgctgtgtatgtatgtcaaaacttgtcaggttgttattccccgacagcaattctctgacaccaaataggtgtcctacatttcaattca

SEQ ID NO: 209629 - DNA, 38 bp, Homo sapiens
  chr4:39964135-39964173
  hypo
agtaggcaggttgggcgcagtggatcatgcctgtaaac

SEQ ID NO: 209630 - DNA, 83 bp, Homo sapiens
  chr4:39972695-39972778
  hypo
gttccattcttgaaaactgacgagaacaggaccaaacaccgctgaattcctttgtaattgcctttaagatgttttttgttttg

SEQ ID NO: 209631 - DNA, 104 bp, Homo sapiens
  chr4:40161797-40161901
  hypo
aaaaactaaatgacacggactagcttaataagtgctaatggcaggaagtacattagtcaaaacatgtttttggcattgctacattagcccgccctatttaatat

SEQ ID NO: 209632 - DNA, 83 bp, Homo sapiens
  chr4:40492771-40492854
  hypo
agagagaaaaaaaatctaaataaatggaaagacactgcttgttcatgaatagaagactgaacgctgctaaaatgacaatactc

SEQ ID NO: 209633 - DNA, 100 bp, Homo sapiens
  chr4:40857394-40857494
  hypo
gctagaactaaacaacgtggcggctgttagaaaagtgtgtttctcacatctgcaaagtgagaatgataaaatgaggccaggcatggtggctcatgcctgt

SEQ ID NO: 209634 - DNA, 39 bp, Homo sapiens
  chr4:40983409-40983448
  hypo
agacagagcaagccagaattaattcgaatccagaatgat

SEQ ID NO: 209635 - DNA, 188 bp, Homo sapiens
  chr4:41012740-41012928
  hypo
acttaaaaagactgacgtagaaaaatggactgatctacaaaatacgttcttacgtgaaaaaaagcaaagcattcataaaacaatctaattggagtaactttttcctggttttaactatttattgtggcaaattttaaacatacaaaattagagaatagaataatgaacccgcacgtacccataatgca

SEQ ID NO: 209636 - DNA, 34 bp, Homo sapiens
  chr4:41198150-41198184
  hypo
ggtcgacagagcaagactccgtctcaaaaaaaaa

SEQ ID NO: 209637 - DNA, 138 bp, Homo sapiens; identical to SEQ ID NO: 199395
  chr4:41216265-41216403
  hypo

SEQ ID NO: 209638 - DNA, 315 bp, Homo sapiens; identical to SEQ ID NO: 199396
  chr4:41218383-41218698
  hypo

SEQ ID NO: 209639 - DNA, 209 bp, Homo sapiens; identical to SEQ ID NO: 199400
  chr4:42657889-42658098
  hypo

SEQ ID NO: 209640 - DNA, 138 bp, Homo sapiens; identical to SEQ ID NO: 199401
  chr4:42659535-42659673
  hypo

SEQ ID NO: 209641 - DNA, 150 bp, Homo sapiens
  chr4:48017182-48017332
  hypo
agactccgtctcaaaaaaaaccaaaccaagccaaacaaacaaacaagcaaacaaaaagaagtctaagttttaaggcttgttatggaaaattggcataaatctccctcgctttcaactttcacctattccactctccgtggtgttccttct

SEQ ID NO: 209642 - DNA, 151 bp, Homo sapiens
  chr4:48572779-48572930
  hypo
gcgaaaagagattacgttctctaggatcattccagagttttaacaatgtgaatccaatactgacctgtgactaatgacaccagcatctgccagcagttcaaatattcgtaccagttgtactcgtaaaatgtctcgacgcctgcgccgtttc

SEQ ID NO: 209643 - DNA, 148 bp, Homo sapiens
  chr4:48678685-48678833
  hypo
gcgtgagccactgcgcctggccaagtttcaatttctttaaagtgacagaagaaactgaaggtatccaagggcaaaatccttccaatcttgtatactttcctggcctatgtgaaattcaaatgcacatttttctcgggaattaatcttt

SEQ ID NO: 209644 - DNA, 136 bp, Homo sapiens
  chr4:48679320-48679456
  hypo
agctagacttattctcggttgattctctcacaaacgtacaactgtcagtacagattacaatcttacctaaaatatcttaggaaaaaataacgattttttgtgtgtgtgtttttgtttttttttttgagacagagtc

SEQ ID NO: 209645 - DNA, 196 bp, Homo sapiens
  chr4:48679696-48679892
  hypo
ggattacaagcgtgagccaccgcgtcagcccgaaaaaataactttttaaatattgaattagtaattaaagaagttggaaacaactgattcaagtataaagctttgagattacatgccatttttttctctaaaagaatagctctttctttgcatctttttacatgaagtctctccatatcatcgagttctcctttca

SEQ ID NO: 209646 - DNA, 89 bp, Homo sapiens
  chr4:53230797-53230886
  hypo
tatatattttgacttcatggcgctcgtattagagaaactaatctcacagaggtatgttgataggaataaaagaaaataggctgggcaca

SEQ ID NO: 209647 - DNA, 43 bp, Homo sapiens
  chr4:53587809-53587852
  hypo
gcctgggcgacagagcgacaccgtcttaaaaaaaaaaaaaaga

SEQ ID NO: 209648 - DNA, 208 bp, Homo sapiens; identical to SEQ ID NO: 199418
  chr4:55524012-55524220
  hypo

SEQ ID NO: 209649 - DNA, 138 bp, Homo sapiens; identical to SEQ ID NO: 199419
  chr4:55524294-55524432
  hypo

SEQ ID NO: 209650 - DNA, 229 bp, Homo sapiens; identical to SEQ ID NO: 199420
  chr4:55561714-55561943
  hypo

SEQ ID NO: 209651 - DNA, 91 bp, Homo sapiens; identical to SEQ ID NO: 199421
  chr4:55564469-55564560
  hypo

SEQ ID NO: 209652 - DNA, 75 bp, Homo sapiens; identical to SEQ ID NO: 199422
  chr4:55569950-55570025
  hypo

SEQ ID NO: 209653 - DNA, 45 bp, Homo sapiens; identical to SEQ ID NO: 199423
  chr4:55592094-55592139
  hypo

SEQ ID NO: 209654 - DNA, 43 bp, Homo sapiens; identical to SEQ ID NO: 199424
  chr4:55593675-55593718
  hypo

SEQ ID NO: 209655 - DNA, 34 bp, Homo sapiens; identical to SEQ ID NO: 199425
  chr4:55598031-55598065
  hypo

SEQ ID NO: 209656 - DNA, 96 bp, Homo sapiens; identical to SEQ ID NO: 199426
  chr4:55602683-55602779
  hypo

SEQ ID NO: 209657 - DNA, 103 bp, Homo sapiens
  chr4:56222930-56223033
  hypo
caatggcgcgatcttggctcactgcaacctccgcctcctgggtagcctagagggatttttaaaacataaattactacctcacgtcactcatctgcccaaatgg

SEQ ID NO: 209658 - DNA, 34 bp, Homo sapiens; identical to SEQ ID NO: 199431
  chr4:56412390-56412424
  hypo

SEQ ID NO: 209659 - DNA, 105 bp, Homo sapiens
  chr4:56936357-56936462
  hypo
agggcagccagctccgtccctctcctctcctcccggttccacgccttctccacgttgtgctttgcctactctccttccacttcctctctccctatctgagtcctt

SEQ ID NO: 209660 - DNA, 38 bp, Homo sapiens
  chr4:57051388-57051426
  hypo
ctgggattacaggcgtgagccagcgcacccggccttca

SEQ ID NO: 209661 - DNA, 89 bp, Homo sapiens
  chr4:57082785-57082874
  hypo
atgtagtatttggagagaagcggcatttaaaatcggcctttgcaaaaatatgaaaattattctgaagtagaaaatgtcaggccgggcgc

SEQ ID NO: 209662 - DNA, 174 bp, Homo sapiens
  chr4:57178037-57178211
  hypo
ctgtaggtacaggcgtggtgtcctaccttctaattcagtgtggcctgtgggttcgggctgtgtcacgatctctctgatctttccaaatctacccttcatctgaggttgtgtttttttttagtgattgcatctgtattctagagctgcaggccattccacaattcatcctttgaa

SEQ ID NO: 209663 - DNA, 360 bp, Homo sapiens
  chr4:57180134-57180494
  hypo
gtgaataggaaaaggaacgactgtgggtggagaaagcaaaaggctaattgtgttttcctttccaatgttaggatccacaacatgagcaaggcggccttgagagtcggccctgcctggaccagaacggacacccaggcgaggacaagccaacgtggcacgaagaggaacccaatccgctggattccgaggaagagagaagacgccaagaagactactggcgagaactggaggccaagtgcaagcggcaaaaggcggaagcagccgagaagagacgcctagaggagcagaggctgcaggcgctggagaggaggctttgggaagagaacagaaggcaggagctcttggaggaggagggcgagg

SEQ ID NO: 209664 - DNA, 190 bp, Homo sapiens
  chr4:57180734-57180924
  hypo
aggagctcaaaaggcaggaggaggaggaggctgagggatgggaagagctggaacagcaggaggcggaggtgcaggggccgcccgaggcgttggaggagactggggagggccggcggggcgcggaggaggaggatctgggggaagaggaggaggagggccaggcgcacctggaggactggagggggcagct

SEQ ID NO: 209665 - DNA, 1211 bp, Homo sapiens
  chr4:57180972-57182183
  hypo
cctgaaacccgaaggacaaagagaacactccgaggagccaggtatttgcgaggagcagaacccagaggccgagcggcgaagagagcagcagggaaggagcggggatttccagggggccgatcgtcctgggcccgaggaaaagagagaagaaggggacacggagcctctcctgaaacaagaggggccggtggaagccgcgcagcctccggtggagaggaaagaagccgccgcccttgaacaaggccgcaaggtggaggagctgcggtggcaggaggtggacgagagacagaccatgccccggccctacacgttccaggtgtcctccggagggaagcagattctctttcccaaagtcaacctgagccccgtgacgcccgcaaaggacacggggctcaccgctgctccccaggaaccaaaggcccccaaagccagcccagtccagcacgccctaccgtcgtccctgagcgttccccacaccgccattctggtcacgggcgcgcagctctgtggcccggcagtcaacctgagccagatcaaggacaccgcgtgcaagtccctcctgggcttggaggagaagaagcacgcggaagccccagctggggagaaccctccccgaggccccggcgacgcgagggcgggcagcgggaaggctaagccccgccaggagtctcccagcagcgcgtccgcactcgcagaatgggcttccattcggtccagaatcctgaagaacgcagagagtgacccgcgcagcagcgagagggaccagttgaggcccggtgatgagtccactcccaggggccggtgtgattcccgcgggaaccaacggaagactccgccagtcaatgcaaagttctctattatgcctgcctggcagaaattttccgatggtggcacggagacctccaaacagagcacggaagctgaaagcatacgaaaaagacccatgctgggacccagcgaagagacagccccccagcctcctcctgctggtgttcgcgagctcgggaagggtccggagaagtcggagatgcaccgggagcccgcagacaccaccgagggatgcaaatttgccaaagacctcccgtctttccttgtcccaagccttccttaccctccgcagaaagtggtggcccacacagagttcacgacctcgtcggacagcgagactgcaaacgggatagcaaagccagaccctgtgatgccaggtggag

SEQ ID NO: 209666 - DNA, 92 bp, Homo sapiens
  chr4:57182262-57182354
  hypo
acagaagaagaagaagaggcacagcagcaccggagacagcgcggatgcagggccgcctgcagcggggagcgctcgtggagagaaagagatgg

SEQ ID NO: 209667 - DNA, 106 bp, Homo sapiens; identical to SEQ ID NO: 199432
  chr4:57687532-57687638
  hypo

SEQ ID NO: 209668 - DNA, 320 bp, Homo sapiens
  chr4:57921816-57922136
  hypo
tcctggactgctttccattttcataaaatagggcagtcatctcccacctgcaccctgtccctcttctgccctcctcattcctgcccttgactgttctgtatggagatggggctctgtgtctggagtgcatgggtcttatctaaaatccctcgaacttgggagccgccctttgctcatttctggtccgattgcctctctgttaagacattcggtttggctttaagcgggcaaggaggaggttgaataaagggatctctgtgtgcgaatagcccccttcagacttccatggagcagagcgcagggcgtgatggctgcttggc

SEQ ID NO: 209669 - DNA, 227 bp, Homo sapiens; identical to SEQ ID NO: 199436
  chr4:57977107-57977334
  hypo

SEQ ID NO: 209670 - DNA, 44 bp, Homo sapiens; identical to SEQ ID NO: 199438
  chr4:66536636-66536680
  hypo

SEQ ID NO: 209671 - DNA, 217 bp, Homo sapiens
  chr4:70647970-70648187
  hypo
ctgatgccctcaagtgtgaggagtgccacctcaactggtgccccgtgtgaggaaccatgtgaggaaccgtgtgaggaacgttaggggtctgcagaaacagactccccgcagatagagcccctcgtggggcaagctgcgaaggaagtgtgaagagcaatacctcaaccggtgccccttgtgaggaccgccgtgtgaggaaagccgtgtgaagagccgt

SEQ ID NO: 209672 - DNA, 75 bp, Homo sapiens
  chr4:71566925-71567000
  hypo
gcctccccaggttcaagcgattctgctgcctcagtcttacaggcgtgagccaccgcacccagcccaccaaaggat

SEQ ID NO: 209673 - DNA, 38 bp, Homo sapiens
  chr4:71642192-71642230
  hypo
taattaaaaattaaagaggccgggagcagtggctcacg

SEQ ID NO: 209674 - DNA, 37 bp, Homo sapiens
  chr4:71756389-71756426
  hypo
tacaggcatgagccaccatacccggctagtatcgtgt

SEQ ID NO: 209675 - DNA, 730 bp, Homo sapiens; identical to SEQ ID NO: 199439
  chr4:71767778-71768508
  hypo

SEQ ID NO: 209676 - DNA, 149 bp, Homo sapiens
  chr4:71857969-71858118
  hypo
tgagttgtctgggtttttggcgtgttgaacaaagaattgaacaaaacgtagaaacaaagcaacaaaagaagcaacgaaagacaaaacaacaaaagaacgaagtaacaaaagcacaaatttattgaagcgaaccaagtgcttcaagagtc

SEQ ID NO: 209677 - DNA, 224 bp, Homo sapiens; identical to SEQ ID NO: 199444
  chr4:74702525-74702749
  hypo

SEQ ID NO: 209678 - DNA, 209 bp, Homo sapiens
  chr4:75137755-75137964
  hypo
caaaaattctggcatcgctttgatatcttcaatttgggcttgatttggatacaaaggtattggtaagtctacgtcgctatcgaaactagctatgaatagggcatcctaagggattttaagaaagagataaatcaggacatcatttaatctggcaactcccctttcagagtatcaaattaacaggtgtgggatcacggaggaggaaagac

SEQ ID NO: 209679 - DNA, 34 bp, Homo sapiens
  chr4:75949441-75949475
  hypo
tgggcggcagagcgagactctgtcaaaaaaaaaa

SEQ ID NO: 209680 - DNA, 116 bp, Homo sapiens
  chr4:76554738-76554854
  hypo
gccaatgggcaaggtgttatttctggatggttctaaaagcaacaattttgataaaaatatttggagaatgctaattttttattttgtttaagacagattaaagggccgggagcggt

SEQ ID NO: 209681 - DNA, 37 bp, Homo sapiens
  chr4:76917507-76917544
  hypo
tacaggcgtgagccaccgcacccggccttttattgta

SEQ ID NO: 209682 - DNA, 504 bp, Homo sapiens; identical to SEQ ID NO: 199458
  chr4:77227525-77228029
  hypo

SEQ ID NO: 209683 - DNA, 36 bp, Homo sapiens
  chr4:77448700-77448736
  hypo
actccagcctgtaacgtttcaggagtgctttttgtt

SEQ ID NO: 209684 - DNA, 692 bp, Homo sapiens; identical to SEQ ID NO: 199465
  chr4:78979792-78980484
  hypo

SEQ ID NO: 209685 - DNA, 92 bp, Homo sapiens
  chr4:79702947-79703039
  hypo
ttcagtgatacagatgctgccggttcaggaaccacgtcttgagtaccgagtaccactgatttcgagcgggcgaagaagactaagaagaaggt

SEQ ID NO: 209686 - DNA, 150 bp, Homo sapiens
  chr4:79828974-79829124
  hypo
gaatgttacttggaggtgtccgtgagcaggcgtgaggtgtgaatgttgtggctgtgggtgggtatgcagctcgaggagtaatacgttaaacgtttcacagtcagggatgatgggaaatcttctggaaccgtacatattttattttcattt

SEQ ID NO: 209687 - DNA, 123 bp, Homo sapiens
  chr4:79832671-79832794
  hypo
aaaagtaatgggaagcggcatcatggcacgccaactagcacaaagaagactttgaagcctacctatcgcactccagagagggctcgcaggcacaaaaaagtgggccgccgagactctcaaagt

SEQ ID NO: 209688 - DNA, 150 bp, Homo sapiens; identical to SEQ ID NO: 199467
  chr4:81124731-81124881
  hypo

SEQ ID NO: 209689 - DNA, 46 bp, Homo sapiens
  chr4:81307565-81307611
  hypo
ttcatctcctccagccccagcgggtcaggcaagggggtcaccacct

SEQ ID NO: 209690 - DNA, 44 bp, Homo sapiens
  chr4:81605694-81605738
  hypo
tacaggcgtgagccactgcgcccggcctgagatgactattttaa

SEQ ID NO: 209691 - DNA, 49 bp, Homo sapiens
  chr4:83323708-83323757
  hypo
cggcggggggcagcgggagcagtagttcgtcttcagcagccatcttggg

SEQ ID NO: 209692 - DNA, 32 bp, Homo sapiens
  chr4:83700298-83700330
  hypo
tgagtcactgcgatcagctgccaactagctaa

SEQ ID NO: 209693 - DNA, 45 bp, Homo sapiens
  chr4:83808872-83808917
  hypo
acaaacatcactacttaaaacgtctaccaccacgaaacttcaaaa

SEQ ID NO: 209694 - DNA, 250 bp, Homo sapiens; identical to SEQ ID NO: 199476
  chr4:85503985-85504235
  hypo

SEQ ID NO: 209695 - DNA, 321 bp, Homo sapiens; identical to SEQ ID NO: 199477
  chr4:85886793-85887114
  hypo

SEQ ID NO: 209696 - DNA, 518 bp, Homo sapiens; identical to SEQ ID NO: 199478
  chr4:85887200-85887718
  hypo

SEQ ID NO: 209697 - DNA, 407 bp, Homo sapiens; identical to SEQ ID NO: 199479
  chr4:85887958-85888365
  hypo

SEQ ID NO: 209698 - DNA, 63 bp, Homo sapiens; identical to SEQ ID NO: 199480
  chr4:85888399-85888462
  hypo

SEQ ID NO: 209699 - DNA, 161 bp, Homo sapiens
  chr4:86167317-86167478
  hypo
ggtgctctacagaccgtgcctccctagggcgtgggtgtgcaggaacgccggacagggcagcggccggcactaccgtgccacgatttgcgcagagctgaagtagtccctgaccatcgaagaggtggcccccgccccgtcgggcctcacgaggacctgtggca

SEQ ID NO: 209700 - DNA, 160 bp, Homo sapiens
  chr4:86801948-86802108
  hypo
tgcgattacaggaatgcataactttttaatgtggccttaacctttgcagtttgaggtacaatgcaaaactagtgcagacttctttttccttcttcacaaattcacaggtggaagactcattcttactgtagatgttagcaacctccgcacaccttttatt

SEQ ID NO: 209701 - DNA, 36 bp, Homo sapiens
  chr4:87797488-87797524
  hypo
ggctgcagcgcagcgacggccggggccgggagcggg

SEQ ID NO: 209702 - DNA, 39 bp, Homo sapiens
  chr4:87922650-87922689
  hypo
agccaccgcgcccggctcgtgcttttctttttcaagtgg

SEQ ID NO: 209703 - DNA, 143 bp, Homo sapiens
  chr4:87993064-87993207
  hypo
aaaagattggagtttcgggtcaggagctctggattaaaggccaacgggaatcttttaaacttcttggttgtgtgtgtgtgtcggtgtgtgaagtcagaggcagacgatgagagaaataaattgagatggagagaaaataatat

SEQ ID NO: 209704 - DNA, 83 bp, Homo sapiens
  chr4:87993507-87993590
  hypo
ccgtctcaaaaaaaaaaaaaaaaaaaatttaaattcagaaggcattaagaggacatttattttttaaacgattttctccttgg

SEQ ID NO: 209705 - DNA, 48 bp, Homo sapiens
  chr4:88259021-88259069
  hypo
attaacatctatccctcagtgttcttttgtggaatcaatgtgttacta

SEQ ID NO: 209706 - DNA, 105 bp, Homo sapiens
  chr4:88296902-88297007
  hypo
aagtaaaactaatgtggcaaaatcagggactactacagagaattgtggaaaactgattacactattaagctggccacattttctatttatttctgtttattttct

SEQ ID NO: 209707 - DNA, 182 bp, Homo sapiens
  chr4:88941048-88941230
  hypo
gtgactgtggacttgcgtttaacacaggacgggagaggcaaagagttcaattccaatttagaatttggtcaagttctcttctgcactctggtaaacattaattaaaaatcagcattatctgaccagccagttcatcgtcagtggtggtgattttcactatgagatacgcgtggcaacttgcc

SEQ ID NO: 209708 - DNA, 145 bp, Homo sapiens
  chr4:88957314-88957459
  hypo
tatgtgaatgtgtgccggttcccttggggcgttcatttggatctttctgtgttccagtgacctacggcatgatgagctccaatgtgtactactacacccggatgatgtcacagctcttcctagacacccccgtgtccaaaacgga

SEQ ID NO: 209709 - DNA, 31 bp, Homo sapiens
  chr4:90043371-90043402
  hypo
tagaaattccaggggctggccgggcgcggtg

SEQ ID NO: 209710 - DNA, 120 bp, Homo sapiens
  chr4:90043642-90043762
  hypo
actccagcctgggggacagggcaaaaaaaaaaaaaaaaagaaaagaaattccaggggctaatcttgaaacagcccaggcctggagacccagctgcagattacctcaaggtggttaatcta

SEQ ID NO: 209711 - DNA, 180 bp, Homo sapiens
  chr4:91052008-91052188
  hypo
atgatcaacccgcctcggcctcctgtgctgggattacaggcgtgacccactgcgccctgcccacattctattcttgaatttaattgttaatatttacacatttaagaagacaaatctttagctttatgttgtctttttgtttgttagtttgttttttgagatggagtttcgttcttgtcg

SEQ ID NO: 209712 - DNA, 36 bp, Homo sapiens
  chr4:91052428-91052464
  hypo
ggcgtgagctaccacgcctggcttatattgcctttt

SEQ ID NO: 209713 - DNA, 148 bp, Homo sapiens
  chr4:91640271-91640419
  hypo
aagcttcagctgtgcttacagctgctccgcatcattgccattaccaactgagctccacctgcctttcagatcagctgcggcattagagacccttaggagcgctaaccctagtgtgaactgcgcatgcgaggtttgaatgctccttatg

SEQ ID NO: 209714 - DNA, 85 bp, Homo sapiens
  chr4:95461557-95461642
  hypo
cgcacccagcctattattcttttaataaagatgaggaagtagaggagcagtgcctaaataatttgtctaacgtcacacagccagg

SEQ ID NO: 209715 - DNA, 31 bp, Homo sapiens
  chr4:95578063-95578094
  hypo
tgtgagccactgcgcccggccccattatgtt

SEQ ID NO: 209716 - DNA, 876 bp, Homo sapiens
  chr4:100573749-100574625
  hypo
ccgcgctgctcctgaggaggctctgctccaccctggccccaacacccccacattttaagtccaggaaagttgaccagcgcccaaagcccacttcggagagcgtggtggaggactcccgggagctgatgttcagagcctcaaagtaggggtaagccaggctccggaaggcccgggaggtcaggttacgcacctctttgtccgcatcgtccagttcgctcacggcactggaggctccgctggagtagtccaccagctccttcgcccggatggccccgcacctggtttgcaggcgagcaggtacagcaatgaatttctttgcatggtcctgagccactgctgcagccgggttttgcttcagcgaacttgaattgtgttcagcagctgtagagacgcggaggctcatgtcgccttcatgcttggcagcataaataatgttttgctttgcacgcacgttgctaggctcatttatagcccgggaagccggtttgattgataggaggatctggcttgctgcactcccacagctgcttgcggcggcggctgctgcccctgaagctgcctccggggtctcaggcaagggctcagtcaggggggcagtgccaggcccagtgggtgggggagtggggccactgtcagaggggccactgcccacttcggtgctgctggtgtcgcggccactgcggcctgcattggggcgggccaggtcgctgcttgtagggctgggcgtccgggtggtgttggtgctgggagtggtgctgaggtagcagctgttgtcgtcgtcctcttcggtcagactggtgatgtcccctggggtctcgtcgctgccaccaaaggaagcataatccacgaacgagtagatcacgttgttgtcctcga

SEQ ID NO: 209717 - DNA, 257 bp, Homo sapiens; identical to SEQ ID NO: 110403
  chr4:100867945-100868202
  hypo

SEQ ID NO: 209718 - DNA, 199 bp, Homo sapiens
  chr4:103421132-103421331
  hypo
tgtgagccaccgcacccggctcacagaatttcttaaaaagtcattgtgttcagtctttatggatcctctaaattccagctgctcagcctcccggagctaaatgagatcacttaaaggtcgactgttggggcctccaaggtcgcctcggagactcacctcataggcaatcaaatggatcgctgggtttttgtgtgtgtgg

SEQ ID NO: 209719 - DNA, 42 bp, Homo sapiens
  chr4:103494439-103494481
  hypo
gcgcaacaagaaagaaactccgtctcaaaaaaaaagaattat

SEQ ID NO: 209720 - DNA, 81 bp, Homo sapiens
  chr4:103806371-103806452
  hypo
gtttcagaatggcttcggttattgcctttccttggtgtactcgcacttcttggctaccttgcagttcgtccattcctcccg

SEQ ID NO: 209721 - DNA, 323 bp, Homo sapiens
  chr4:103941524-103941847
  hypo
ccagtaatagaatccgcgcttcctataaaagacaaaaacaactgttattggagaaagtgtaaacttcttagaaagacaaactgccctttcctatctaatgtttctcctgacactcaatgtttactcttgaacactgtattcctttttgcctcagtgcgttctgtaaagttaattcctctaccggagtgttctttttcttagtcatcatctaagatctgatccaaattaccgttccttcttgggtaacttaaatacgaaattatctttttattggttttgttgacgttgttgagacagggtctcactctattaccccggctgga

SEQ ID NO: 209722 - DNA, 81 bp, Homo sapiens
  chr4:104854486-104854567
  hypo
aaacagatattatcattaaccgtctccaggaataaattctaatttaaaagtgcatttaaaaaaagatcagccccgggcgcg

SEQ ID NO: 209723 - DNA, 42 bp, Homo sapiens; identical to SEQ ID NO: 199516
  chr4:106067031-106067073
  hypo

SEQ ID NO: 209724 - DNA, 281 bp, Homo sapiens; identical to SEQ ID NO: 199517
  chr4:106067220-106067501
  hypo

SEQ ID NO: 209725 - DNA, 295 bp, Homo sapiens; identical to SEQ ID NO: 199518
  chr4:106067841-106068136
  hypo

SEQ ID NO: 209726 - DNA, 277 bp, Homo sapiens; identical to SEQ ID NO: 199519
  chr4:106068588-106068865
  hypo

SEQ ID NO: 209727 - DNA, 146 bp, Homo sapiens; identical to SEQ ID NO: 199520
  chr4:106111516-106111662
  hypo

SEQ ID NO: 209728 - DNA, 4461 bp, Homo sapiens; identical to SEQ ID NO: 199521
  chr4:106155053-106159514
  hypo

SEQ ID NO: 209729 - DNA, 240 bp, Homo sapiens; identical to SEQ ID NO: 199522
  chr4:106159634-106159874
  hypo

SEQ ID NO: 209730 - DNA, 180 bp, Homo sapiens; identical to SEQ ID NO: 199523
  chr4:106160114-106160294
  hypo

SEQ ID NO: 209731 - DNA, 120 bp, Homo sapiens; identical to SEQ ID NO: 199524
  chr4:106161134-106161254
  hypo

SEQ ID NO: 209732 - DNA, 2721 bp, Homo sapiens; identical to SEQ ID NO: 199525
  chr4:106161374-106164095
  hypo

SEQ ID NO: 209733 - DNA, 230 bp, Homo sapiens; identical to SEQ ID NO: 199526
  chr4:106164712-106164942
  hypo

SEQ ID NO: 209734 - DNA, 177 bp, Homo sapiens; identical to SEQ ID NO: 199527
  chr4:106180762-106180939
  hypo

SEQ ID NO: 209735 - DNA, 107 bp, Homo sapiens; identical to SEQ ID NO: 199528
  chr4:106182911-106183018
  hypo

SEQ ID NO: 209736 - DNA, 161 bp, Homo sapiens; identical to SEQ ID NO: 199529
  chr4:106190752-106190913
  hypo

SEQ ID NO: 209737 - DNA, 376 bp, Homo sapiens; identical to SEQ ID NO: 199530
  chr4:106193708-106194084
  hypo

SEQ ID NO: 209738 - DNA, 3101 bp, Homo sapiens; identical to SEQ ID NO: 199531
  chr4:106196198-106199299
  hypo

SEQ ID NO: 209739 - DNA, 1601 bp, Homo sapiens; identical to SEQ ID NO: 199532
  chr4:106199359-106200960
  hypo

SEQ ID NO: 209740 - DNA, 34 bp, Homo sapiens
  chr4:106335456-106335490
  hypo
ccacaggattcttcagctgtcgcttttccagctg

SEQ ID NO: 209741 - DNA, 214 bp, Homo sapiens
  chr4:106335550-106335764
  hypo
cacccactcggcctggcaggctgcgctccgctcgtgctaagcctggatcccacgcatgccaagggcaagccaggtatggagtggcaaagggcaggcaactccgggcaccagcacaggcaccggctccctgcgaggctgcagctggaccaggcaaaccccgcaagtggcttccactagaggctccaggaaacacggtggcacttagaagcttgga

SEQ ID NO: 209742 - DNA, 57 bp, Homo sapiens
  chr4:106631892-106631949
  hypo
tgttagccatttgcgctgtcgatcactgttaattatgaggtcgggtttagctgaagg

SEQ ID NO: 209743 - DNA, 218 bp, Homo sapiens
  chr4:108132182-108132400
  hypo
caacagtagttgtttcgaggagtcgtgaggctgggacagttgtcgtctgctgggaagacagatgagtggccacaggctgcagcactggacatgaagccagtctgcacagtgctcagagcggacagcaccgatgcggccgcttgctgtttactccccagcttaaaccgtagcctcatcgcaacaatgtctgaatctgcccttcccgtctcctctgccaa

SEQ ID NO: 209744 - DNA, 43 bp, Homo sapiens
  chr4:108446495-108446538
  hypo
cgcccagctgggaaatgaagcttttaagcgaagacttagagaa

SEQ ID NO: 209745 - DNA, 81 bp, Homo sapiens
  chr4:108975407-108975488
  hypo
tacctcatcaggtgcgctgcgggatgtgggagacgtatgtgcagagccgggcgagtgcagggcagacgccctgaagcagcg

SEQ ID NO: 209746 - DNA, 168 bp, Homo sapiens
  chr4:109009508-109009676
  hypo
accctgttgaagtccaagtgcgcatgtgcatgcaaagaggaacgagccaccctgagagcaaatccatccttgaggtttgcgccctgagtgatgggaccagaaggcttggtgcaccagagctctctgtcctactcccaactcgtacccgtacacatcaggcagaaacag

SEQ ID NO: 209747 - DNA, 143 bp, Homo sapiens; identical to SEQ ID NO: 199542
  chr4:109094283-109094426
  hypo

SEQ ID NO: 209748 - DNA, 211 bp, Homo sapiens; identical to SEQ ID NO: 199548
  chr4:110651657-110651868
  hypo

SEQ ID NO: 209749 - DNA, 44 bp, Homo sapiens
  chr4:111096241-111096285
  hypo
tcaagacataagtatcggccagtcacagtggctcatgcctgtaa

SEQ ID NO: 209750 - DNA, 86 bp, Homo sapiens
  chr4:111097859-111097945
  hypo
ttaagcctctcaaggcgatcactctctttgtcattctttgtcattatttttgagatggagtttcattcttgttgcccaggctggag

SEQ ID NO: 209751 - DNA, 220 bp, Homo sapiens; identical to SEQ ID NO: 199549
  chr4:111117165-111117385
  hypo

SEQ ID NO: 209752 - DNA, 36 bp, Homo sapiens
  chr4:111383532-111383568
  hypo
ctcacactatctcttattaatcggtgctgctctgga

SEQ ID NO: 209753 - DNA, 577 bp, Homo sapiens
  chr4:111508744-111509321
  hypo
cccttcccttgacttttaaccaggcttttggagaaagcgtggaatagtaaaaggccaaaacaatagcctccctttcccgggtgtggacacccttcccggtcctcaggagcctcagaggatcaccctctccgccccttcctctagggcctcgcttgggaacgcagcgaaggcgaggcccgaccctgcctgggacgccgcagccctggcccaccagtgctcccagcccgcctgttctcaggattccgtgcgtccagcgtcgggctagtgcctcctccaggtcagagcgccgttccctctaggatgcaggagcaagagatgtgcgcggaaaggtccccaggacgaggacgaagcctcaggcttctcaaaataaatggcgcacttggccttggagggaaaggaggaggcctccgggaaggtgtggaggagactggcagccttgacagcatcgaactgggttccgcccaccgagatttctgcctcgaggaccttgcggagcagccacaggcagcctcatgcgggtgcccagcgtgcgggacacgaggcttctgctcttggcggggtccagtgaaccccagga

SEQ ID NO: 209754 - DNA, 232 bp, Homo sapiens; identical to SEQ ID NO: 199554
  chr4:111543735-111543967
  hypo

SEQ ID NO: 209755 - DNA, 242 bp, Homo sapiens; identical to SEQ ID NO: 199560
  chr4:113436585-113436827
  hypo

SEQ ID NO: 209756 - DNA, 228 bp, Homo sapiens; identical to SEQ ID NO: 199561
  chr4:113438278-113438506
  hypo

SEQ ID NO: 209757 - DNA, 37 bp, Homo sapiens
  chr4:113559165-113559202
  hypo
gcgaggctgggcacggtggctcacgcctgtaatccca

SEQ ID NO: 209758 - DNA, 183 bp, Homo sapiens
  chr4:114417171-114417354
  hypo
gtgctggatgggttatgaggcggagaggcattgcggcatacagcgacaggtcctgcaaactgtggctacagccacaaaccaaaggacggtcttcacatgtatacagtgtggaaagaactactgctacacatcactgactctaggcacacccacacccctggcgaggagtgcagtttgtactgt

SEQ ID NO: 209759 - DNA, 101 bp, Homo sapiens
  chr4:114528566-114528667
  hypo
ccaagcctgcaggtacgcattaagatggtctggagcaactgaggaaccgcaggagaggtgaaaatagccaggtcctgccttgactgatgacattccaccat

SEQ ID NO: 209760 - DNA, 139 bp, Homo sapiens; identical to SEQ ID NO: 199567
  chr4:115520945-115521084
  hypo

SEQ ID NO: 209761 - DNA, 38 bp, Homo sapiens
  chr4:119501591-119501629
  hypo
tcccatagtgccgggataacaggcgtgagtcaccacgc

SEQ ID NO: 209762 - DNA, 333 bp, Homo sapiens; identical to SEQ ID NO: 199577
  chr4:120549978-120550311
  hypo

SEQ ID NO: 209763 - DNA, 276 bp, Homo sapiens; identical to SEQ ID NO: 199580
  chr4:121843731-121844007
  hypo

SEQ ID NO: 209764 - DNA, 138 bp, Homo sapiens; identical to SEQ ID NO: 199581
  chr4:121844206-121844344
  hypo

SEQ ID NO: 209765 - DNA, 76 bp, Homo sapiens
  chr4:122615463-122615539
  hypo
aagcttctaatgaacaattacgtagcctagttttgccttcatgacattcttactgctcagacgccgcacccaactt

SEQ ID NO: 209766 - DNA, 34 bp, Homo sapiens
  chr4:122924455-122924489
  hypo
gtcattgtccacaaccgtacggccttctttcggg

SEQ ID NO: 209767 - DNA, 307 bp, Homo sapiens
  chr4:123300366-123300673
  hypo
ctgtaggggggcacgggacagtaagggaggaggctgaactgcgcgattttacctggcttctccagaagggtaaggcggccagttggacccggtccttgtgttcggagaacagagtcacccaggcctcgaacgcctgcgatggtcggcgtctcttccctaggtgacgcaagacgcggagctcggctgcacgacgctggcgcaagcgcgggggcaagagcgccggcctccgagacggttagtgattggacgaagcagggcgcgggggcgcaagcccgggtcctgcaggggcgacgcgaggcctcttttg

SEQ ID NO: 209768 - DNA, 182 bp, Homo sapiens
  chr4:124036406-124036588
  hypo
ctggggcagatcgcgggccccaaacccagttgtcgggagcgccaggctgaacagtcactccgacgtggggtggatcctggggttgcagcgtcggtggcccgggctgagcctccagctgaggtgcaggaacttggagccgccagcagggtgggtgcggcgacagagtcgcttgccaggtctgg

SEQ ID NO: 209769 - DNA, 139 bp, Homo sapiens
  chr4:124106851-124106990
  hypo
ttcttatgattctcacgctctgattttctaaactaaaaatatgttcctgttccattgttatcaaaatgtaaaaatcagttaagtaccacaatatatgggggctttaaaaagttacttagaaaatatgcattgtacagtg

SEQ ID NO: 209770 - DNA, 1571 bp, Homo sapiens; identical to SEQ ID NO: 199587
  chr4:124317731-124319302
  hypo

SEQ ID NO: 209771 - DNA, 157 bp, Homo sapiens
  chr4:124335555-124335712
  hypo
gcctcaaaaaaaaaaaaaagaaaagaaaaaaaatgtttgcaacataaagagtcttggttttccttattccctgtatttttctctgcctgctggtggtggtgatgatgatagagaaaggaaggaaggtgattgggcaatatgtaatccctgtaatccc

SEQ ID NO: 209772 - DNA, 481 bp, Homo sapiens
  chr4:124468461-124468942
  hypo
tctgagaagtggcccgacattctaggtaacctgattccccagacgggataggcggcggcctgctgctgcgaaggcgcgaccacgtgacctttcctgcctgcaccggggaaatgcataccttgttcagaaaactaggggacaggtgagcccaaggtagtgttttgaatcagaattaaaaacatgtatttatttaaaaggtgcttgcttctacatcagacagctaccactttgatcattccaaatgaaaaggcacgattggccatggggttttatggcgtgaactgagctgcaagacaaaggaaggacgatctccaggaggaaaaggcggagcgggttttatgggagctgctgcacaagtctgaacgcggaggctgcacacggggagggcaaagccgccctggcaggagcccgagctgcaggcctcggctgggaagcctgtccctcctgtccatttccctggctctcgcggtccctcgtttgt

SEQ ID NO: 209773 - DNA, 39 bp, Homo sapiens
  chr4:124533356-124533395
  hypo
attacaggcataagccacgacgcccggcagctcaatttc

SEQ ID NO: 209774 - DNA, 34 bp, Homo sapiens
  chr4:125038668-125038702
  hypo
ctgcccctgcggagcgtggtgactcacgcctgta

SEQ ID NO: 209775 - DNA, 34 bp, Homo sapiens
  chr4:125038942-125038976
  hypo
agagccagactccgtctcaaaacaaacaaacaaa

SEQ ID NO: 209776 - DNA, 360 bp, Homo sapiens; identical to SEQ ID NO: 199589
  chr4:125633141-125633501
  hypo

SEQ ID NO: 209777 - DNA, 96 bp, Homo sapiens; identical to SEQ ID NO: 199590
  chr4:125633621-125633717
  hypo

SEQ ID NO: 209778 - DNA, 257 bp, Homo sapiens; identical to SEQ ID NO: 199591
  chr4:125633784-125634041
  hypo

SEQ ID NO: 209779 - DNA, 137 bp, Homo sapiens; identical to SEQ ID NO: 199594
  chr4:128703235-128703372
  hypo

SEQ ID NO: 209780 - DNA, 31 bp, Homo sapiens
  chr4:128889349-128889380
  hypo
gcgagactccgtctcaaaaaataaacaaaca

SEQ ID NO: 209781 - DNA, 167 bp, Homo sapiens
  chr4:130168457-130168624
  hypo
aagacagatgggtgcgcagcaagtgttcgcgacacaaccatttatgccgatagagtttgcagacaccagctccaccttggcctgtgtgcaatggctgctcccttgtggaggggaccaacgcaaacatcggagcttggatcataatcgccatacactaacattttgcc

SEQ ID NO: 209782 - DNA, 102 bp, Homo sapiens; identical to SEQ ID NO: 199600
  chr4:140097254-140097356
  hypo

SEQ ID NO: 209783 - DNA, 263 bp, Homo sapiens
  chr4:140357386-140357649
  hypo
ccccgtggtcctggcgacatcggtctcacgtgtgggaagaccagtgtcctgtggagagaaaacagggttaggggtcggcagcctgggtcaggagccagaccacgcgagcggccgcacccagggagaggccgcggggcctgttggggctgggtttcaccgccgcacatgtgtcagcgtgcggtgagctgaggcccctggaggctctgggcgccgaatctcacccgctgccatggccaaagccggggggtgattttcaaccaatg

SEQ ID NO: 209784 - DNA, 39 bp, Homo sapiens
  chr4:140641398-140641437
  hypo
ttctgtgccatcagccgtgacgttcgcatgctctggagg

SEQ ID NO: 209785 - DNA, 141 bp, Homo sapiens
  chr4:140751843-140751984
  hypo
aggcgtgagccactgcgcctggcctacactgtgttaatttttaaggaggattaaaaaaaataagacacgatcctattatttctcctttcctcaagaaggcatgccaatgatcccatgaacaatcaccggcctcttacaaaa

SEQ ID NO: 209786 - DNA, 287 bp, Homo sapiens
  chr4:140754365-140754652
  hypo
cctctggcccgggaacccagagaggggctggggaagacagagaaagacagggggagggggccgcgtggaagcgcctagagcagtcggcaggtcacacacacgcggtgctcggcggcaaactcagtttacaaagagacatctgttccattactccaatgcattgtggctaattacatcctggcccgtctgtgaaatgacagccacttattctccagtgaaccgtaaaatctgtacatgttcgatttggggagtgggagagcagaggcgtggaggctagagtgggagga

SEQ ID NO: 209787 - DNA, 37 bp, Homo sapiens
  chr4:141014855-141014892
  hypo
acaggcgtgagccaccgtgcccagccaagactcatgt

SEQ ID NO: 209788 - DNA, 138 bp, Homo sapiens
  chr4:141067295-141067433
  hypo
ggattacaggtatgagccactgtgcccggccaccttttgagattttttaattaaatttctccaagaatagtatacacagcttgccatagtagtaacttcctgctcctatccatgcgtgcatgcggccctcagagaacg

SEQ ID NO: 209789 - DNA, 1319 bp, Homo sapiens; identical to SEQ ID NO: 199602
  chr4:141071488-141072807
  hypo

SEQ ID NO: 209790 - DNA, 660 bp, Homo sapiens; identical to SEQ ID NO: 199603
  chr4:141073132-141073792
  hypo

SEQ ID NO: 209791 - DNA, 671 bp, Homo sapiens; identical to SEQ ID NO: 199604
  chr4:141073852-141074523
  hypo

SEQ ID NO: 209792 - DNA, 685 bp, Homo sapiens; identical to SEQ ID NO: 199605
  chr4:141074706-141075391
  hypo

SEQ ID NO: 209793 - DNA, 102 bp, Homo sapiens
  chr4:141207750-141207852
  hypo
tgtttggagcccagactgggcggcatgtgcagccgtgtgcccgcgccgttcctcacgtgcacatgggtggcttgagcgcataagcatgactgccaatatcac

SEQ ID NO: 209794 - DNA, 47 bp, Homo sapiens; identical to SEQ ID NO: 18936
  chr4:141207918-141207965
  hypo

SEQ ID NO: 209795 - DNA, 600 bp, Homo sapiens
  chr4:141563928-141564528
  hypo
tttgctgctcagctttccgctactgttgcagttcttccccctcttgcgggcgggcgacagggctctcgggggcgtgggtctgtttccacggcctgcgtgccaagcttccatgggactcctcgtgcctgtcctcggagtcccggcgccgctgcagcttcaccagctcatgctgcttctccttgtactggtgctggacctcggcccgccacattctgaagtccagttccaggacgtccatgtcctccacggaggacttcatggggtacatccgctcctccttcttgcgcatccagctgtacttattgtgggcttcagctcccgtgggagccgcaggttcttgagcgggtcccaccacgggcccatccagcacctccctcagcatgtggctgccggctgccagcaggctctccagtgagggccgagccaccagggcccgctccgcacctcccaccttcttgctcctcctctccagctccagctctgcgatctcgctcagcagggtgatgccgtgcagaaagctctgctccaagacaaggctctcggcagcttcctgcttctccaaggcctggactccagtagcacctggggagggcagaggcc

SEQ ID NO: 209796 - DNA, 688 bp, Homo sapiens
  chr4:141564588-141565276
  hypo
ggaactgctcagagcttgcctcttccaggtagcaggtgctgccgggcacaggcacggcctcccggggctccagtctcgggcactctccctccccggcgggcacgtcacagtctgacatttctaggctgggctggggctcgctcagggccgcctgggccaggccttcctccggcgctgcctctgccgcaggaaccgccacaggcacctccactggctcctccttggcctccactagcgtctcgggtgtcagctgcacccccaggtccaatgcggccgtgcagggttctgtccggcccggggaatccacgcatgcttcaggcccctccgcaaagtctgggcactcagagggctcggtgcagccctgcccggtggcactcagcgcctgggcctccaacgggccacctctgcatccgcctgcagggctcggggtagccatggtttccatggcgggcagtggcagcggcaactccagaggcggcagctctgcggggcgctcgtccacatcctccacctccaccttcgcctcctgttcagccagcggctcttcctccgggtcctcccgcagcggctctgggatcttggagggggacaggaggatgagcttgtcttcgggcgagagtgtcaggcgcttggtcccatcagctgggagcagcacatcaggggccaggccatccgcatcggcggccac

SEQ ID NO: 209797 - DNA, 204 bp, Homo sapiens; identical to SEQ ID NO: 199611
  chr4:141678017-141678221
  hypo

SEQ ID NO: 209798 - DNA, 60 bp, Homo sapiens; identical to SEQ ID NO: 199612
  chr4:142054594-142054654
  hypo

SEQ ID NO: 209799 - DNA, 176 bp, Homo sapiens; identical to SEQ ID NO: 199613
  chr4:142054757-142054933
  hypo

SEQ ID NO: 209800 - DNA, 456 bp, Homo sapiens; identical to SEQ ID NO: 199615
  chr4:142557229-142557685
  hypo

SEQ ID NO: 209801 - DNA, 216 bp, Homo sapiens; identical to SEQ ID NO: 199616
  chr4:142557865-142558081
  hypo

SEQ ID NO: 209802 - DNA, 185 bp, Homo sapiens
  chr4:142677009-142677194
  hypo
taagtggatttgctgcgtggccagcaaatttccacaacaaatttactgtctataggtaacctgccattgagaacgctttgcaaaatgcgtaactacagcagagtttcagtatgacggaattttccacttttcaaggctaaattggccagagctcaggggggacagggttgcggagaaaggaggta

SEQ ID NO: 209803 - DNA, 196 bp, Homo sapiens
  chr4:143477972-143478168
  hypo
tgcaggggaaagtatcgattgcagtttttatcatctaagctgatacctaggaaacctcgctatctcctcatatattcagtcaggagaatagaagacagaggtctggaagaggctttatcttctctttattagatacatcaaaaccgatacagcacaaagctgctcctcaaagctgccctgtcgtgaccaccggagg

SEQ ID NO: 209804 - DNA, 74 bp, Homo sapiens
  chr4:144141584-144141658
  hypo
tacagttggcagactcgtattttgatcctgagagagtccaaaatgcactggtcacgaaacgtctaatactatga

SEQ ID NO: 209805 - DNA, 540 bp, Homo sapiens; identical to SEQ ID NO: 199619
  chr4:144256959-144257499
  hypo

SEQ ID NO: 209806 - DNA, 189 bp, Homo sapiens; identical to SEQ ID NO: 199620
  chr4:144257937-144258126
  hypo

SEQ ID NO: 209807 - DNA, 300 bp, Homo sapiens; identical to SEQ ID NO: 199621
  chr4:144258375-144258675
  hypo

SEQ ID NO: 209808 - DNA, 540 bp, Homo sapiens; identical to SEQ ID NO: 199623
  chr4:146402787-146403327
  hypo

SEQ ID NO: 209809 - DNA, 442 bp, Homo sapiens; identical to SEQ ID NO: 199624
  chr4:146403447-146403889
  hypo

SEQ ID NO: 209810 - DNA, 36 bp, Homo sapiens
  chr4:146449670-146449706
  hypo
ggcgtgagctaccgcgcctgaccataatgttcttta

SEQ ID NO: 209811 - DNA, 33 bp, Homo sapiens; identical to SEQ ID NO: 199629
  chr4:148538935-148538968
  hypo

SEQ ID NO: 209812 - DNA, 99 bp, Homo sapiens
  chr4:148782279-148782378
  hypo
gcgagccaggcacggagtggcgaggagttcgtgagtgagttcagggtcatccggccactgtgcacagccgggcatgccgactgtggtggggcaggcagc

SEQ ID NO: 209813 - DNA, 93 bp, Homo sapiens; identical to SEQ ID NO: 199632
  chr4:149364560-149364653
  hypo

SEQ ID NO: 209814 - DNA, 78 bp, Homo sapiens; identical to SEQ ID NO: 199633
  chr4:149364662-149364740
  hypo

SEQ ID NO: 209815 - DNA, 347 bp, Homo sapiens; identical to SEQ ID NO: 199635
  chr4:149365911-149366258
  hypo

SEQ ID NO: 209816 - DNA, 37 bp, Homo sapiens
  chr4:149905345-149905382
  hypo
acagttctgggataccgatgggatgcagtatctgaag

SEQ ID NO: 209817 - DNA, 213 bp, Homo sapiens
  chr4:151897750-151897963
  hypo
aatacaagccttcaccgatcatcgccgcgacagaaacaacaaatttaacaaccatgtccacaaaaaagcaccttcataaaaaccaaaaataaggtgagcaatcacttcgtatcacagaaaggggcactgaagaaggtaagcaagacagtcttgaattgctattccccccaaaagcagctgtgtgtcatggagcacctacgcgcctgggagtgg

SEQ ID NO: 209818 - DNA, 900 bp, Homo sapiens; identical to SEQ ID NO: 199642
  chr4:152329838-152330738
  hypo

SEQ ID NO: 209819 - DNA, 86 bp, Homo sapiens
  chr4:153889785-153889871
  hypo
cctgatgtatttgtttagggacagtgcttctgcgaggctcctgttgttcactgctcagtttgcacgattgcagtttactgtggtga

SEQ ID NO: 209820 - DNA, 215 bp, Homo sapiens
  chr4:153896057-153896272
  hypo
tcccgcctctccctgggtccctctgctgaccgggagctgctgaccttcttggagagctccaccggcagccctgaggagcccaataagttccacagcctgccccggagcagcccccggcaggcccggcccacgatagcctgcctggagcctgcagaagtgaggcaccaggactccagctttgcacacaaacctcaggcctcggggggccaggagga

SEQ ID NO: 209821 - DNA, 564 bp, Homo sapiens
  chr4:153897156-153897720
  hypo
tcatgcccatcaccaagtccagcagaggcgccggctggaggcgaccagagctgtcatcccgggggccctcccagaatccccccagcagcacagatactgtgtggtcacgccagaactccgtgcggagggcctccacaggcgccgaagagcagaggctgccgcgggggagcagcggctccagcagcacccgtccggggagggacgttcccctgcagcccaggggttctttcaagaagcccagtgccaaaccactcaggaacctccccagacagaagcctgaggaaaataagacctgccgcgcccactccgagggccctgagagtcccaaagaagagcccaagaccccgtcagtgcccagcgtcccccacgaactaccccgtgtcccgagctttgcccggaacacagtggcctcctcctctcgaagcatgagaacagatcttcctcccgtggccaaagcccccggcatcactcggacagtgtcgcagcggcagctgagggtgaaaggggaccccgaggatgccgctcccaaggacagcagcactttgaggcgagccagcagtgccc

SEQ ID NO: 209822 - DNA, 360 bp, Homo sapiens
  chr4:153943334-153943694
  hypo
tgactgggacacgggagggctccagacagccgctatttgccacacggaaccaaagcatttcactgttttaacaagcggttcagctggtccggagtatccctgctggctctcagccctaaagtggcgtgagggctgggcacgtcgacagcacttgatccgctccttccctctggaaatgcatttccttccattaccagaacagcctctcacagtttggcctgcctcttctcatgctatgtcgaaacaaagccacctgcctcccatgaaagacggcattgtttttccacctgagccacccacacctgggcaggtagaacagcgggtccccactccagggagctctcccactcgggcctgtca

SEQ ID NO: 209823 - DNA, 207 bp, Homo sapiens
  chr4:153985892-153986099
  hypo
gcctgaggcccagtcgcccggtctctcacggggaagcgcacatttcctttcctggctctctgcacctacctgggaaggcggcccgccttgctgctacctgccagtctgctggcccgcctggtcctgtggctctccgtggagctttctggagcaaagaggctgaagaatacagcggcacagggccagaagctggcttctaggggctgg

SEQ ID NO: 209824 - DNA, 352 bp, Homo sapiens
  chr4:154216898-154217250
  hypo
gatcctggacaacaagaacggcacctatgagtttttgtacactgtccagaaggaaggggactttaccctgtctctgagactctatgaccagcacatccgaggcagcccgtttaagctgaaagtgatccgatccgctgatgtgtctcccaccacagaaggcgtgaagaggcgcgttaagtccccggggagcggccacgtcaagcagaaagctgtgaaaagacccgcaagcatgtacagcactggaaaacgaaaagagaatcccatcgaagacgatttgatctttcgagtgggtaaggagagggcttctgtgcccgacgcctgagctggcactggttaaggggtaactgggcac

SEQ ID NO: 209825 - DNA, 40 bp, Homo sapiens
  chr4:154394646-154394686
  hypo
aagatttgcccaggggtggccgggcacagtggctcacgcc

SEQ ID NO: 209826 - DNA, 96 bp, Homo sapiens
  chr4:154410569-154410665
  hypo
gtatctgtaggagcacgtccaaggaaaattctttattttcacaagattgtgagcactggggagaagtatttttttcttgagacagagtctcactct

SEQ ID NO: 209827 - DNA, 180 bp, Homo sapiens
  chr4:154420429-154420609
  hypo
cgggaggtttggaggatgcccagcgcttgtctgcccattgttgctgacctgccgcattgtgtgatatggctccatgtgcacatcttccatggatttatcagtcttgacaggagtcttccactttctgccagtgatgaaatagatctttatgatttttttttttttttttgagatgcgtct

SEQ ID NO: 209828 - DNA, 126 bp, Homo sapiens
  chr4:154421943-154422069
  hypo
cacacgctcacacacgcgtgcatgcacacacacacaggcatgtgcacttttttcctagttgtgaaaatcgatggaatgactacatggcttagtctcctctttctccagagacgccgtttaatgatc

SEQ ID NO: 209829 - DNA, 103 bp, Homo sapiens
  chr4:154469359-154469462
  hypo
agcatacctcttctccgaccgtgttcaaaacaagtgaagagattgacaagaattaggcagatggagcccaaggcattactttatttttttttaatttcttttt

SEQ ID NO: 209830 - DNA, 143 bp, Homo sapiens
  chr4:154520339-154520482
  hypo
gctaaagcaggagcacgagaggggagaaggtgtcacacacttttaaacaaccagatctcacgacaactcactatcacagtgacagcattgcgggagtcgggggagggtgctaaaccatgagagaccaccgccatgatccattg

SEQ ID NO: 209831 - DNA, 204 bp, Homo sapiens; identical to SEQ ID NO: 199649
  chr4:154714010-154714214
  hypo

SEQ ID NO: 209832 - DNA, 61 bp, Homo sapiens; identical to SEQ ID NO: 199652
  chr4:156298073-156298134
  hypo

SEQ ID NO: 209833 - DNA, 246 bp, Homo sapiens; identical to SEQ ID NO: 199660
  chr4:157892475-157892721
  hypo

SEQ ID NO: 209834 - DNA, 149 bp, Homo sapiens; identical to SEQ ID NO: 199661
  chr4:157892762-157892911
  hypo

SEQ ID NO: 209835 - DNA, 639 bp, Homo sapiens; identical to SEQ ID NO: 199667
  chr4:159690017-159690656
  hypo

SEQ ID NO: 209836 - DNA, 111 bp, Homo sapiens
  chr4:164394802-164394913
  hypo
gatggaatggatccgcaggcggttggctgtgtcccgcagcacctgcacggtcttcacgtcgggcttggcgtcgttggccatcatctctcttttgtcggtttggcaaagcaa

SEQ ID NO: 209837 - DNA, 43 bp, Homo sapiens
  chr4:169198694-169198737
  hypo
atgaaaattccaggccgggcgcagtggctcacacccgtaatcc

SEQ ID NO: 209838 - DNA, 32 bp, Homo sapiens
  chr4:169224159-169224191
  hypo
aaaaaattattcagccgggctcggtggctcac

SEQ ID NO: 209839 - DNA, 33 bp, Homo sapiens
  chr4:169358978-169359011
  hypo
ttcacttaaacccttcggctgactccatggggt

SEQ ID NO: 209840 - DNA, 163 bp, Homo sapiens
  chr4:169377152-169377315
  hypo
cagctttctgcctggcggctgtgttctttttacttactaagacacgatggtacattctcaaggatagtgaacatgaagtgacacagagaacacgctggatgtccgatccttctgaccataggtgctgaagcagaaatagagtctgatacgcctatcaaaaaag

SEQ ID NO: 209841 - DNA, 33 bp, Homo sapiens
  chr4:169562060-169562093
  hypo
gaaaaatagagattccaggccgggcacggtggc

SEQ ID NO: 209842 - DNA, 185 bp, Homo sapiens
  chr4:170043184-170043369
  hypo
gacctctgaggtttggacttcgtttaaatgaacacataagcagtaacagacgacacgctcacttacacactggggcgagtctgcggccgtaaatgtgcaatctggtcagtggatcctgccatgggcctcggtcccattccagcagcagcagcagcggcggtggcgcctggtggtgtggaggcaag

SEQ ID NO: 209843 - DNA, 214 bp, Homo sapiens
  chr4:170105281-170105495
  hypo
tcagggcactcccaccggcaggcttactgtgaaccgacatcccctacttctgaaatccatttggtacggcaggagatctcttgcgggatgtctgcattttcagaagaaattatctactgactgctttggccaatgtgctttttcacctctaaattttaaggtgtttttagctttatcagcaataccagagcacatcacacgtgcacacatccaa

SEQ ID NO: 209844 - DNA, 73 bp, Homo sapiens; identical to SEQ ID NO: 199677
  chr4:170192274-170192347
  hypo

SEQ ID NO: 209845 - DNA, 76 bp, Homo sapiens
  chr4:170566083-170566159
  hypo
ggaagctagaaaaggcgaggaaacagattctcccctgaagcctccaaaaggaacactgccctgctgacacaccttg

SEQ ID NO: 209846 - DNA, 75 bp, Homo sapiens
  chr4:170566219-170566294
  hypo
aagtttatggcagtgtgttacgataacagtaggaaacggacacggatatcttagtattatcgaaagtgttgtttt

SEQ ID NO: 209847 - DNA, 37 bp, Homo sapiens
  chr4:170612105-170612142
  hypo
cctaatgttctttgacgggttagttgttactttgctg

SEQ ID NO: 209848 - DNA, 215 bp, Homo sapiens
  chr4:170652116-170652331
  hypo
gaattaaatgatctgcgtgtgggtatgcactcgtgcacatgtgcacacatatcttacaggtaaagaaacagatgcaaaggtgttggaaagcttgcccgatcttacacactgggaagatgtgatttacaaccagtttggccccagaaacaggtcatatccgctacaccttattgcctctttgatcttcaggcaactatggtcgagtaagcactggt

SEQ ID NO: 209849 - DNA, 67 bp, Homo sapiens
  chr4:170865287-170865354
  hypo
caaaatgtggaaagtgggacaatcacgcccttgtgaaacaacaatcgcagcacttcagccttcctgg

SEQ ID NO: 209850 - DNA, 1620 bp, Homo sapiens; identical to SEQ ID NO: 199684
  chr4:174089776-174091396
  hypo

SEQ ID NO: 209851 - DNA, 51 bp, Homo sapiens
  chr4:174136653-174136704
  hypo
tgcaggtgtcagccaccatacccggcctgctgttctccttttaatgcaccc

SEQ ID NO: 209852 - DNA, 52 bp, Homo sapiens
  chr4:175940748-175940800
  hypo
agcaacttgaggctgcaccccgggctgccactccaagagcggaggcagtgag

SEQ ID NO: 209853 - DNA, 99 bp, Homo sapiens; identical to SEQ ID NO: 199694
  chr4:177240753-177240852
  hypo

SEQ ID NO: 209854 - DNA, 195 bp, Homo sapiens
  chr4:183809396-183809591
  hypo
attcatataccctcacgatgaaatggctttagattcttccaacagttccgaaataaaagtcgagctagctaaaggtatctccagaacaattctggggcaccctgctctaaatgtgactcctgggcccagggttattttgccggcacctctgcagccagtaatccataactctagtcatcacggttccctgacaag

SEQ ID NO: 209855 - DNA, 317 bp, Homo sapiens
  chr4:183815957-183816274
  hypo
aaggcacctagagcggccaggacggccgaggtcaagtgccttccccaccctaagcgcagctccgcttcacggctccacaagaccctggggcatgaaagtgcccacctgagctggctcattggtgtgctgacacgcacacatggggaagttcaccgtggctgttaagagggctaggggattttaagagcaagagaatcaacaagtgacgaagctgagcgtgtccatcctgagggatctgctttaccacatcgtgctcagcccacatacgcacaaggaaaaacgccagcagccagactgggtctcgttctgttgcccag

SEQ ID NO: 209856 - DNA, 203 bp, Homo sapiens
  chr4:183824599-183824802
  hypo
tgtgtgtgtgaaaataaagacgagaaacgggggtgatgtggagaaacccgccgcatgcgtggaaaatgtgtgggctctgttctgtttccaccctgtgcccagagaggagggctctgctagaagaaaatgacagcgcaaaggaattctaccaaggtctggggagaaagtggtgggtcactcacgtaaaaggcagcccatcctgc

SEQ ID NO: 209857 - DNA, 206 bp, Homo sapiens; identical to SEQ ID NO: 199699
  chr4:184019900-184020106
  hypo

SEQ ID NO: 209858 - DNA, 32 bp, Homo sapiens
  chr4:184051481-184051513
  hypo
cgtgagccagcgctcccagccattcctaagta

SEQ ID NO: 209859 - DNA, 41 bp, Homo sapiens
  chr4:184160138-184160179
  hypo
cactctaaaatattgcgcaacagaatgtgtttaaaacttaa

SEQ ID NO: 209860 - DNA, 82 bp, Homo sapiens
  chr4:184166102-184166184
  hypo
gggatgggagaaatcttagccgcctgtgattaaaagagaaaggaggggctgagacgtgcggatcacgaggtcaggagttcaa

SEQ ID NO: 209861 - DNA, 150 bp, Homo sapiens
  chr4:184289435-184289585
  hypo
ctgctaaactcccacgttgacacctgtcaagaggagcttctgctatttttgcaagtttcaatgctatttgagcaccgatacgatgccgcaagtagaaaattccacaactaacctcaagtgagactgacaggttgcagttaaaacacagtc

SEQ ID NO: 209862 - DNA, 139 bp, Homo sapiens
  chr4:184667665-184667804
  hypo
agttgtgcgggaacccactgcagggcgggagcgagctcgggcatggcaggctgcaggtcccgagctcttccccatgcagaggccgctgagaccgggtgagaattcaagcatggcacgggcccgccggcagtgctggggg

SEQ ID NO: 209863 - DNA, 325 bp, Homo sapiens
  chr4:184678229-184678554
  hypo
tggggagagatgagcgcgggacagcagcccctctctgcagagcctcgaggcttctgtggccccgtggggtcagatgcgtggcatggcttgctggtcttgttcccatggcacagaagaaactacacttccttttgcccaaactcagccaccatggagcctactcctcagtctttcatttacttctagaatgctgacaggtgagaatgctacctccgggctgccaagccacaaagcgtgacagcccgctccctgggaaccacaaatatttggaatctgaagtggattgggaactaaaaatacaacaccttaagaaactacagtttgg

SEQ ID NO: 209864 - DNA, 37 bp, Homo sapiens
  chr4:185185202-185185239
  hypo
ccaaccctggcatgacgtcaaacgcagcagaagtgag

SEQ ID NO: 209865 - DNA, 124 bp, Homo sapiens
  chr4:185239992-185240116
  hypo
tttagtcctgtgtatcgccttcccagcccctgcagccatctgaattggtgggaccatgctcctacagtgggcctcataggtccactccacagagcgctgggccagagctcgttctggtgccatt

SEQ ID NO: 209866 - DNA, 36 bp, Homo sapiens
  chr4:185241303-185241339
  hypo
gagcacagcttttccgtcttctgtgtaggttcccca

SEQ ID NO: 209867 - DNA, 204 bp, Homo sapiens
  chr4:185344310-185344514
  hypo
gttgctatgtgtgtgtagaccccgtgacgtcagtatgtgccaggtgtctcatccccgagtgaccagtcctgcacacgtggtggtggtacatgctgtgtatagacagacgcgccatgccagggcccaccatttgtacgtgtgtgcacaactctgcccatctgaaggaaggcaggagagatgagcgctgcttgacttcagaaaagc

SEQ ID NO: 209868 - DNA, 156 bp, Homo sapiens
  chr4:185352799-185352955
  hypo
aggggtaggtatagtggtcacgagtagagagcaacagacgccagttctcctgacagcctgacgtgcagaagtgctgtgcgtggtccctggcgctgcagctgagcctgagcctggcaatatggaaacacgagaggcgtgtggaagtggccctgcctc

SEQ ID NO: 209869 - DNA, 280 bp, Homo sapiens
  chr4:185353277-185353557
  hypo
cctgtgtgtgaagacacattcgatccacactgttcgcagattctgtatctgtgaatttgcctactcactgaaatatatccacaacccccaaatcaatactcagatgcgttggtggtcactcggggacatgtgctgaattcaagtcatctgatgcacgtgttcccagctgaggctggacaaggccacactctgccttcccgctcttgctctcctatggcagacaagtgttcttttcacaggctacagagtgcgacatttgtcacatcgttgtgcttttttt

SEQ ID NO: 209870 - DNA, 181 bp, Homo sapiens
  chr4:185386797-185386978
  hypo
aatattttcccatcactaaacgctgctcgaaaacacgagctttataagctacctatagtctgtctggatgtgccgtaattcgttcaaatgtgtctctattgttggatatttagcttgtttccaagtttttacataacaaaagctaattcaataaacatccgtgtacatacatctttgttcc

SEQ ID NO: 209871 - DNA, 89 bp, Homo sapiens
  chr4:185426628-185426717
  hypo
acacagacacagacactacacgtgtgcacacacagacgaatgaccatgtgaacacacagcaagaaagcagccacctgcaagctgccggg

SEQ ID NO: 209872 - DNA, 47 bp, Homo sapiens
  chr4:185480839-185480886
  hypo
cctgcacctcagaagcggttgctgctgctgccgcggttgaaaccgcc

SEQ ID NO: 209873 - DNA, 281 bp, Homo sapiens; identical to SEQ ID NO: 199709
  chr4:185747618-185747899
  hypo

SEQ ID NO: 209874 - DNA, 69 bp, Homo sapiens
  chr4:185873079-185873148
  hypo
gtggccatgcgtgttcgtgcctggtgtgtatggggtgggggacgcatggccatgcgtgttggctcctgg

SEQ ID NO: 209875 - DNA, 83 bp, Homo sapiens; identical to SEQ ID NO: 199711
  chr4:185939294-185939377
  hypo

SEQ ID NO: 209876 - DNA, 211 bp, Homo sapiens; identical to SEQ ID NO: 199712
  chr4:185939443-185939654
  hypo

SEQ ID NO: 209877 - DNA, 68 bp, Homo sapiens; identical to SEQ ID NO: 199713
  chr4:186130483-186130551
  hypo

SEQ ID NO: 209878 - DNA, 95 bp, Homo sapiens
  chr4:186319410-186319505
  hypo
cacacatttttattaatgaaaacggtatgaaaaagcaaactaaaagaactaatcaaaaataaaaagcttttgcagcttaccgaggaaaaaaacaa

SEQ ID NO: 209879 - DNA, 136 bp, Homo sapiens
  chr4:186348209-186348345
  hypo
ctccgtctcaaaaaaaaaaaaaaattaataagaaaaaagttaagtgatgggaaagttctaggcaagaatttcttccctccctcctccctggctcgcttgtgtgccgggagctgcgcagatgcggggataccgtgag

SEQ ID NO: 209880 - DNA, 37 bp, Homo sapiens
  chr4:186348628-186348665
  hypo
aaaggccgggcgcggtggctcacgcctgaaatcccag

SEQ ID NO: 209881 - DNA, 177 bp, Homo sapiens
  chr4:187550654-187550831
  hypo
tccataatgaaaagacgtatggatttggcacagcggaaatcactgccaattataaaacatgctttagagtttaagaagaagaaaactgcgcttcgtgggggcatatggaacaaagggatctgctggtccaagcagcacagggggccagggtcccaggcagagcggtcaaccacatgg

SEQ ID NO: 209882 - DNA, 393 bp, Homo sapiens; identical to SEQ ID NO: 199720
  chr4:187647669-187648062
  hypo

SEQ ID NO: 209883 - DNA, 176 bp, Homo sapiens; identical to SEQ ID NO: 199721
  chr4:187648119-187648295
  hypo

SEQ ID NO: 209884 - DNA, 42 bp, Homo sapiens
  chr4:187796040-187796082
  hypo
atcctccttattgccaataggataagtcgtcctattttccca

SEQ ID NO: 209885 - DNA, 203 bp, Homo sapiens
  chr4:188428112-188428315
  hypo
ggtgcgctttccgttcccagagcgcactggaacctctttcccgctggcctcagccttttcttggaatgccctttccagccttttcacgtggaagcaccactcagcttcaaagccacctccttgggaggccttctctgaccgcccagcctcgttcgcgccacgtgtacattctcagtgcagccagtaaccgcccatttatgtat

SEQ ID NO: 209886 - DNA, 94 bp, Homo sapiens
  chr4:189100360-189100454
  hypo
ggttcaggccctacagcctgccatgcctgagtttcccctccgctgcgggctcctgcgcggcccgagcctgccctacgagcgctgtcccctgctc

SEQ ID NO: 209887 - DNA, 523 bp, Homo sapiens
  chr4:189552365-189552888
  hypo
caaatgctgcctctactccacgttcctacaccggttgacctcaccgtgatgcccaagtgctaattctactccacgttcctgcaccggttgacctcaccgcgatgcccaagtgctaattctactccacgttcctgcaccggttgacctcaccgcgatgcccgaattctacctctactccacgttcctgtacctgttgacctcaccgcgatgcccgaatgctacttctactccgtgttcctgcaccagttgacctcaccgcgatgcccgaatgctacctgtactccacgttcctacaccggttgacctcaccacgatgctggaatgctacctgtactccacgttcctgtaccggttgacctcaccacgatgccggaatgctacctgtactccacattcctgcaccggttgacctcaccgcgatgcccgagtgctacttctactccaagttttgtctccgtgtaaatatcgccatgtccccagaataatgtgtctcaactatttcgtggcttctgccctgagggac

SEQ ID NO: 209888 - DNA, 284 bp, Homo sapiens
  chr4:189956760-189957044
  hypo
tctctttgagcagtgatggtcgccccattgcgtatagaggaaatggaggaaaacttggaagtaccgccttccatacaaagtcaaggatcgagaccttcctctccgcgttccagaatccctcaggaaatacgcgcgtgccttcgcatctagagcaagcgctgcaagaattcacagaacggccagaagttccccatcccgctggtggcactcactgcgttaggcgctcagcctccagtccgggccgctttggcttgaagacggccgttttccttcctgatacctgc

SEQ ID NO: 209889 - DNA, 224 bp, Homo sapiens
  chr4:190345362-190345586
  hypo
cactgcatggaacccctgtacgcatacacacacacacacacacactgcacggaactcctgtatgcatacgcacacgcactcacactgcacggaacccctgtacgcatatacacacaggcacacacgcactcacactgcacggaactcccgtatgcatatacacacaggcacacacgcactcacactgcatggaacccctgtacgcatatatacacacaggcaca

SEQ ID NO: 209890 - DNA, 743 bp, Homo sapiens
  chr4:190462467-190463210
  hypo
ctaagcaaaatgcaccaagccgaggcatcatacaacccgacttcaaaatgcaccaagccggaggcatcatataacccgacttcaacatgcaccaagccggaggcatcatataacccgacttcaaaatgcaccaagctgcaggcttcatataacccgacttcaacatgcaccaagctgcaggcatcatacaacccgacttcaaaatgcaccaagccggaggcatcatataacccgacttcaaaatgcaccatgccagaggcatcctatcactcgacttcaaaatgcaccaagccggaggcatcatgtaacccaacttcaacatgcaccaagccggaggcatcatataatccgacttcaaaatgcaccaagccgcaggcatcatacaacccgacggcaacatgcaccaagccgcaggcaccatataacccgacttcaaaatgcaccaagccagaggcatcatataacccgacatcaaaatgcaccaagccgcaggcatcatataacccgacatcaaaatgcaccaagccgcaggcatcatataacccgacgtcaaaatgcaataagccgcaggcaccatataacccgatgtcaaaatgcaccaagccgcaggcatcatacagtccgacttcaaaatgcaccaagccgcaggcatcatacagtccgacttcaaaatgcaccaagccgcaggcatcatacagtccgacttcaaaatgcaccaagccgcaggcatcatataacccaac

SEQ ID NO: 209891 - DNA, 43 bp, Homo sapiens
  chr4:190767154-190767197
  hypo
tgaactatggttccgtgctgtgtccctcggctctctcccattc

SEQ ID NO: 209892 - DNA, 43 bp, Homo sapiens
  chr5:139643-139686
  hypo
gcgcccatgagaaggtggtggtgcagctggcgtccctgcacgg

SEQ ID NO: 209893 - DNA, 248 bp, Homo sapiens
  chr5:139745-139993
  hypo
ctagactggtcttgaaatgcctgtcccggctgggaagaggcacagaggaagtcaccgtccctgaggccatgtatggctgtgtcttcacgggggcgttcctggagtgggtgaaccgggagcggcgccatgtccccctgcaaacctgcttgctgacctcaggcttggccgtccaccgagccccgtggagcgacgtcactgaccctgtctttgtccccagccctggagccatcctgcagagctactccagc

SEQ ID NO: 209894 - DNA, 126 bp, Homo sapiens
  chr5:140023-140149
  hypo
ccctcagaggccccagtccccacccaagccacagcaggcccccatttccagggaagcgcctcttgccccgacaccctgacctcaccctgccgccgagggcatacgggcagcgaccagctcaggcac

SEQ ID NO: 209895 - DNA, 120 bp, Homo sapiens
  chr5:164903-165023
  hypo
ctgacggggcggagctcacacactaatgctgtgacggagcggagctcacactaatgctgtgacagggggcggggctcacagtaatgctctgacggggcggagctcacacagtaatgctgt

SEQ ID NO: 209896 - DNA, 197 bp, Homo sapiens
  chr5:192468-192665
  hypo
ccgggagctcagcaagatggcgcagctcactgagctcagtgtggccttctccacgctgaccgggaagatcccgacgctgcttgggtgagtcttggggaggggactgagggcgggctggtggctgcagaggcaaggagagatcgtccaggggcctgctcatgtccaaggccatgaggctacacggcctccagcctctc

SEQ ID NO: 209897 - DNA, 122 bp, Homo sapiens
  chr5:233693-233815
  hypo
tcgcgaaggacctggcgtctagagatgtggtgtctcggtccatgactctggagatccgagaaggaaggtgcgtgtgatttaccaccagcactgtctgagcgggcacacgggccggggttgct

SEQ ID NO: 209898 - DNA, 47 bp, Homo sapiens
  chr5:235348-235395
  hypo
gacagccatgatcttcgctggcgtggacgtcacgaaggagccgatcc

SEQ ID NO: 209899 - DNA, 180 bp, Homo sapiens
  chr5:286417-286597
  hypo
tgagggccatgcagctggagacccatgggggagctgatgttgttttgagagccgtgcagctggagatccgggggtgagctgatgttcccgtttgagggctgtgcagctggaggcctagcgaggagctaatgttcctgtttgaggtccttgcagctggagacctggggaggagctgatgtt

SEQ ID NO: 209900 - DNA, 82 bp, Homo sapiens; identical to SEQ ID NO: 199724
  chr5:368381-368463
  hypo

SEQ ID NO: 209901 - DNA, 259 bp, Homo sapiens; identical to SEQ ID NO: 199725
  chr5:373104-373363
  hypo

SEQ ID NO: 209902 - DNA, 285 bp, Homo sapiens; identical to SEQ ID NO: 199726
  chr5:374579-374864
  hypo

SEQ ID NO: 209903 - DNA, 372 bp, Homo sapiens
  chr5:453928-454300
  hypo
ctgacaagatgtggcttgtccgccacctggaaattataaggaagtacgtcctggatgacctcattgtcgccaaaaacctgatggttcagtgctttcctccccactatgagatctttaagaacctcctgaacatgtaccaccaagccctgagcacgcggatgcaggacctcgcatcggaagacctggaagccaatgagatcgtgagcctcttgacgtgggtcttaaacacctacacaaggtaaagctaacctggcgcctgtgttggctcttaggtagaagccgtgtgtgagaggggcctgcagctgcttgctggagagccgacctcagggtgttgctctgggcaggtgctccgagcccacagccttggtttcc

SEQ ID NO: 209904 - DNA, 44 bp, Homo sapiens
  chr5:457006-457050
  hypo
tgagatgatgaggaacgtggagctggccccggaagtggatgtcg

SEQ ID NO: 209905 - DNA, 190 bp, Homo sapiens
  chr5:462213-462403
  hypo
gagcggtggaggccggcctgcccagccgctgtgttgaacctgaaccctttccttgcagggaatccatagtcagtttaaaaagaaagtatttaaagaatgaagtggaagagggtgtgtctccgagccagcccagcatggacgggattttagacgccatcgcgaaggagggctgcagcggtttgctggagga

SEQ ID NO: 209906 - DNA, 59 bp, Homo sapiens
  chr5:463463-463522
  hypo
aaatgggcaaaagacatgaacggccacctcacattaaaagcaacaccagtgtcctcatc

SEQ ID NO: 209907 - DNA, 76 bp, Homo sapiens
  chr5:463552-463628
  hypo
agcaatgaatgctcaacaggacctgctgctcagcaggatggcaggagccggagacgtggatgctgttcaggcttgt

SEQ ID NO: 209908 - DNA, 441 bp, Homo sapiens
  chr5:465381-465822
  hypo
gcgtccgtgagtgtcgcgcaggtccgggctggagaaggcctgtcgctccgcggccctgttcagcctccaccccgggactcgggccagtagatgggagtgtgtcgtgtgtttgtcaggcggggggagcctgggtccaggtcctgcctgaccttgtggttggacacgaatgtccacagaggtagacgcgccggccccgccggcttcccgaggccgcccacagctccctgacggacgcttcccagtctgtcctgcgctgcgaggtgctggctgcctcccacggtctcgccctcaccccagacccctggccctgtcactgagctttcagagtagatcctgaggagtcaggtgaagagggaggttcccagtcaggaaggggctcagccagaatccagctgctcccagcgccgcgggacagccgagggcggctcctcacattgctgc

SEQ ID NO: 209909 - DNA, 1414 bp, Homo sapiens; identical to SEQ ID NO: 199727
  chr5:472580-473994
  hypo

SEQ ID NO: 209910 - DNA, 258 bp, Homo sapiens
  chr5:476620-476878
  hypo
ctgcggggtcctccagcccccagcccgcagtgcccacctcctgccgcggcttgtacaggtactgctgtagcgtgtggtgcgtgaccatgtcctccgcgtcccggatgctccgccgtcgctgctccagagactgcatgtccaggcagacagcgctgacattttctctcctgcgtggggaccagcgctgagccatacaggctccctcagggtggggtctcttgcgcgcccctcgccttcccacggcgggcatctggccct

SEQ ID NO: 209911 - DNA, 281 bp, Homo sapiens
  chr5:488214-488495
  hypo
cagggcctgggaactgtggaagatacaaagaagcctcgcgaaagctgccagtcgttctgagctgggaggaaggaggtggagggacgggacgcccccgggaggggagtttgaggacagggtttcacgccctcctttgctgactgaccgatggggggtgagacggggcccaggcctcccacggctcgcccgctctggagcggtggctccgttgctcaccacggtgactgcgtcgttcagcagcgactccccgaagacgatgatgaacaggacctcgttgacat

SEQ ID NO: 209912 - DNA, 51 bp, Homo sapiens
  chr5:488553-488604
  hypo
aaacaggaggaagtccagcagcccaatctgcaggtcgcctggaagacaagc

SEQ ID NO: 209913 - DNA, 96 bp, Homo sapiens; identical to SEQ ID NO: 199728
  chr5:491127-491223
  hypo

SEQ ID NO: 209914 - DNA, 40 bp, Homo sapiens
  chr5:500465-500505
  hypo
cggcatgcgactggcgtggatccctggcgagaatggaagg

SEQ ID NO: 209915 - DNA, 57 bp, Homo sapiens
  chr5:500535-500592
  hypo
ccagggacacaggaaacacacaccaagcacggagaggccaggcgggccggtgtggac

SEQ ID NO: 209916 - DNA, 397 bp, Homo sapiens
  chr5:510012-510409
  hypo
tcagaggggccctgcgggcagccggcgttgtccctcctgcagtcagcgctccactgccccacactcagctggcttcccagggcctgagcaaggatgggggaggcttcgggagaagaggggctccaacgatgtggaggagaatgtgttggggagacaggtgctgggctggaccggggagccgctggaggcctgggggcattggaagcaggaggatccgtgggtgcttgggcccctggcggagcgcggcagcttgttgggagctgggagcagagccacttactgtgagctcagagaggctgccaagagcagcgacagagaccatcgttccctccaggcaaagccagatgctgtgtgggaaaggaaacgtggccgtacgctgccacggagctctaaggtg

SEQ ID NO: 209917 - DNA, 36 bp, Homo sapiens
  chr5:537376-537412
  hypo
cccgatgaaagcccgctcaacggcatctgcagggca

SEQ ID NO: 209918 - DNA, 60 bp, Homo sapiens
  chr5:554571-554631
  hypo
tgacccgggggtgggtcacgggataaaccaggggtggggggctgggtcacgggatgaacg

SEQ ID NO: 209919 - DNA, 60 bp, Homo sapiens
  chr5:554751-554811
  hypo
gatgaacggggggcgggtcacaggatgaaccgtgggtgggtcatgggataaaccagggtg

SEQ ID NO: 209920 - DNA, 240 bp, Homo sapiens
  chr5:554931-555171
  hypo
acgggatgaacggggttgggggctgggtcacgggatgaacggggggtgggtcacgggatgaacagggggtgggtcacgggataaaccggggtggggggctgggtcatgggatgaacggggggtgggtcacgggatgaaccggggtggggggtgggtcatgggatgaaccggggtggggggctgggtcatgggatgaaccggggtggggggctgggtcatgggatgaacgggggggtgggt

SEQ ID NO: 209921 - DNA, 180 bp, Homo sapiens
  chr5:600957-601137
  hypo
ccttctgacaaggtctgtggcgcccaccatggcgttagggccacagcctcctgccccatgtgccaggcccggctctgcccagctccctgcagctgcgccagtgtgtgctgtgactcgtgctcctggtttgtcatctgcctctcagtagacaccacggccttcaagctttctccgctccgt

SEQ ID NO: 209922 - DNA, 239 bp, Homo sapiens
  chr5:601222-601461
  hypo
agaagtgaacggcgcggccctccctgagttccggcctggctctggataccaaggagcaaggtggtcaggggtcaggggctggagtggggagattgcctgggagggggctggagggtgtggtggaactgcaggttctctccttgacatgcctgtgggggagcctttcccggccctctctccgctggttttcaccctttctccggtgcagccacactgggcatcccaccccagggatccag

SEQ ID NO: 209923 - DNA, 189 bp, Homo sapiens
  chr5:623330-623519
  hypo
gaaggagcacaaccgtctccccgcatgtgagagatgcttcctgcagtggcgctggcagtcagaggcgctgcgggaaccacggaggtgcggggccccgggacggcctgctgccctgcgtggtgcctcctggagtgggctcggtccttggctccgcgtgggtcatggaaaggccccggtggtggaggaggc

SEQ ID NO: 209924 - DNA, 89 bp, Homo sapiens
  chr5:633969-634058
  hypo
tcattgcagagtgcgagtgggacctcggcaggcctcccgggagcacgagcttcagccagaaggggcgtgaggccgactctcgtggttcc

SEQ ID NO: 209925 - DNA, 522 bp, Homo sapiens
  chr5:640161-640683
  hypo
gccactgtcccagtgtggagttgccagctgtcgtctgcatggtggtttccacacagggcagtcggtgcttgtggaaggcgcagcgagttgtggcggcgccactgaaaccttgagacgtggcggcccctggttgccccttttcttggaggtcacctcttctctttcttcagttcccaccctgcccgtgtgtggacgcacagagcctgaggtggttttgtggcgccaacacccctttcccctctccctacctgtcgtctttttgaggcatcgtctgtgtgattcaaaacatactgagccgattttgtttacatttcatcctttaagcctaagtgctaatgtaatatttggttttcactcctagctcaggcaagacacatcttgtcatctgttgaagaattcacagcagctcaggacagctctgcgatggtgggtgaagatgtcggctccctggctctggagagtaagtccctgcaaagccgccttgctgagcagcagcagcagcacgcccgggagatgagcgag

SEQ ID NO: 209926 - DNA, 97 bp, Homo sapiens
  chr5:646057-646154
  hypo
tcactcctgctcccgttggcgccctgtgtggatggtgaattcggcttccttacactgtgggagcgtcactcttgctcccatcggcggcctgtgtgga

SEQ ID NO: 209927 - DNA, 262 bp, Homo sapiens
  chr5:652921-653183
  hypo
aggaggcaggtgggcggtagccagtgggacacagaaggtgatggggccacagagataggtctgtgtgcagggccagggcaccttcgtgcccatgcagggaggtgggcaggcccagcaggtgagggccacaccgctggagaggacggaagtgccaagcagccgcttccctgttgttctgcagctccctggtcagcaccaatgaacacctgctgcaggagctgagccaggtgcgggcgcagcacagagccgaggtggagcagat

SEQ ID NO: 209928 - DNA, 95 bp, Homo sapiens
  chr5:667282-667377
  hypo
tacccaactccaaagctcatcgaggcttgactgcaaagtggcagcgacgtgggcacgggcacgcggccagccccgcagcccagggggagtctggc

SEQ ID NO: 209929 - DNA, 263 bp, Homo sapiens; identical to SEQ ID NO: 199729
  chr5:676505-676768
  hypo

SEQ ID NO: 209930 - DNA, 377 bp, Homo sapiens; identical to SEQ ID NO: 199730
  chr5:676926-677303
  hypo

SEQ ID NO: 209931 - DNA, 59 bp, Homo sapiens
  chr5:677571-677630
  hypo
tcataggccacctcccatgccgaaaccctacacacccacggggctgagaggagccaggg

SEQ ID NO: 209932 - DNA, 61 bp, Homo sapiens
  chr5:678094-678155
  hypo
tgcccggtccttcgaggggtcccccggggacttggggggcgtcctgttggcagctttggca

SEQ ID NO: 209933 - DNA, 35 bp, Homo sapiens; identical to SEQ ID NO: 199731
  chr5:693798-693833
  hypo

SEQ ID NO: 209934 - DNA, 145 bp, Homo sapiens
  chr5:750521-750666
  hypo
ctgcctccatcctcacgaggccccctcccctctgcgtctctcctttctcttacaagcacactcgtggctagatttgggctccctgggacatcccagcatgaccctcccacctcagatattaagtcacagccgcaggcccatttcc

SEQ ID NO: 209935 - DNA, 153 bp, Homo sapiens
  chr5:873761-873914
  hypo
tcctggcccaccttgcttggcgccctgcaaatacacacgtcctttctatgacaaaacctcggcatgggtgtctgggtttactgcaccaggcatgtggaccccagttcatctgtaacaagcacagatgaaaccgtcaggtcaagggactgaccc

SEQ ID NO: 209936 - DNA, 204 bp, Homo sapiens
  chr5:876062-876266
  hypo
gtgcagagaagcacgcagatcctgacgaggagccggcagcagagtccctgcgacagctcctcgtccccgaaagcctggtcaggctgcaggctcttcccgccagcagcaccccaagggcacctgccccccaaccccggtgcgagtgcagcccacctgcttcagctggaagagcgtcctagagtggtctccgcctgtgatctggtc

SEQ ID NO: 209937 - DNA, 256 bp, Homo sapiens
  chr5:881857-882113
  hypo
ccacctggcctgagaagagccggacgtttgtgtgggggcagctccccaccgcggatccatgcaaagtctcagagcccacaggatggccagggccctgggggagaggcggaaggtcagctcaatgggacacggagttgatacgaagattaggagacaagtcctcacggcgcagatacaaaactgaaagggaagaagtgggcggaacccacggggcacgagggaactggaagtttccgtgtaaaaacagttttcaacc

SEQ ID NO: 209938 - DNA, 215 bp, Homo sapiens
  chr5:885339-885554
  hypo
gggtgggaaatgcaacgcacgtggggagaccgccttaggggactgtcgtccgttgccaagcaacacactctggccacgcagcgcaccctgtctcctaagccaaggctgcaggacctgaggggctggtctcaagaccactctcccttttgacggttggagggagctgctcagagcagaagcaccgagcccagcaccgctgccgccccacctgttaa

SEQ ID NO: 209939 - DNA, 256 bp, Homo sapiens
  chr5:886193-886449
  hypo
tcccccgcagcatccacaccttcctgaccacaggcctgcacctgctccactccagcgtctacacagacacagaagcgagcagttcaggagtgtgcatctgccccacagcaacaaagaagccccctgccaatgctggctgcccaaagtcagcccgcttgtgcggcacagtctgggacaagggcacagccttggctgccggcaggcgctgtgcaggggagggaggggccaatgatcttaacggcgtgtagagacagag

SEQ ID NO: 209940 - DNA, 396 bp, Homo sapiens
  chr5:887038-887434
  hypo
caccgccagagcgcggcaggtgccgcacctcccctttaccttctcctacgtgggatgcatgcagcctggctcacggcacagatctgggaagccactcaggatggccaaggaagacaaggatgtcccgtctggattcagtgaggcagtcacgcaaaacaagcccgcaatgctggctgccatccagcaagactgacacctgacacccaggcttaagatcaagagatgcggaactttccaccaaccctcaatgagatgttacagctaggtcatgagcagagagggcggccggggacgtctaccctagagcaaagggggcaacaccatgagggtggcgggtggatggagcacgtgttcactgtgaggctcccttcgggcacaagcgacggggggcagagc

SEQ ID NO: 209941 - DNA, 192 bp, Homo sapiens
  chr5:902318-902510
  hypo
tgttgtcaatatcaccgggtagaatggggacacgggaattgagtggactcgagagtatgaaactgtagccaagtgttaaatagaagcttgaagggtacttggcttctttaagtcagttaagattgcgtgacaaagtgaccttaaaacacaatgttcttttaaagagcagacaggccccgcatactgccctca

SEQ ID NO: 209942 - DNA, 45 bp, Homo sapiens
  chr5:909638-909683
  hypo
tgcaggaatgtgtgccaagaccagctcggtcggggagaccctaac

SEQ ID NO: 209943 - DNA, 203 bp, Homo sapiens
  chr5:912352-912555
  hypo
gtaccagtcagtgtaggggacgtcagtgaccggctgtgtttacctggctggctgcacaaaccttagttctcagcttaccccgggcttttccaatgccctgcctctcgggggcctgtatccttacctgaaagaggaaacatcacgggcgtagtatgggcctggttttggtcacggggtccacatgacgtcacgttcttgagtcg

SEQ ID NO: 209944 - DNA, 228 bp, Homo sapiens
  chr5:913180-913408
  hypo
tgggggttggggaaaggagacggagctctgtggagctttgcctggagaatgccagtgatctgaagactgattctacagcagttttgctgccaaggagccccacgtgatagcagatcctgcgaggaagtcgtgtgtgttggaggtcctcacgcaccttcagtgtgggttccagccctcgcagtgtgacgtttatacacttgtacactcgtgctgtgaatccaggggctg

SEQ ID NO: 209945 - DNA, 139 bp, Homo sapiens
  chr5:919456-919595
  hypo
aaagatagatgagtgataaacgtgccatttcatttacaccacttctgaaaccacacttgaattctggaggccgctggctcgtgcgtctcaggcaggcccactggatgtggtgggactcggcagtggcagggacttctca

SEQ ID NO: 209946 - DNA, 198 bp, Homo sapiens
  chr5:962518-962716
  hypo
aggggccagggtctgcgggaatgagggggcagaccacccccaccgagcccagatgccagggaaggagcctggccagaaagatccagaaggactcagtgtctggcggccctcgctgctccccattctttgaggccgttgttcccagatgggatgtcggatgcgtctctggcccgggcccctggtgaaatgtgatggagg

SEQ ID NO: 209947 - DNA, 239 bp, Homo sapiens
  chr5:1029657-1029896
  hypo
agtgaaatcccccacaagtgcgctcagaatttttagaaacacggcacgggctgcgtttacattttcactgtattagctttatgcgtggagtgcgtgatgtgctgtttctcacttgacatgttcagcaaatcgtgggaaacacttaaaaatccttaaaaaatactccaccccgtccaacccgtcgcccgctgcctgtcctcaggagccaccgcacctccggctcctctgagttctggcac

SEQ ID NO: 209948 - DNA, 214 bp, Homo sapiens
  chr5:1031595-1031809
  hypo
gctctcaggaaatgctccagggcggtgtgtgctgggccgaggggctccgcacctccaccactgcgcaaggcccctgccctgaccacaggtctgtctccttctctgtgtcctgaaggctgcagattattcatgagaaccatgtgagcttcggctcagctgaaacaccgctgggatgtgtttgaagtttttccccattttccgtaactggtctcgg

SEQ ID NO: 209949 - DNA, 191 bp, Homo sapiens
  chr5:1032282-1032473
  hypo
accccaaggaggggcctttccgggaggaccagtgtcccctacagggtgagtgcagctcccgcagccctccctccccaaactcacagacttcatcccgtaccaaggcaacgccgaaaaccacccttaaaacaaccccgtgtgcggagcgagggcacttcccaggcttagacgcactttgttcttaaaaagcc

SEQ ID NO: 209950 - DNA, 358 bp, Homo sapiens
  chr5:1033254-1033612
  hypo
tggttgcagttgggggccaccgtgggctggtgagaggagggcacacccggctgtggctggccgggatagggcctccctcccctccgcaggggtcccaagatcgggctctcagctcaggcccgtctggacaggatcatggtgtggtgaggggagagcagcgagggtccccaatggcgggccacatcctccatgtgccctctgccagccccttcgcctcctcttgtccccctagtggcactccccgctgagaaagctgagggccgcgagcacccgggacaactcctcagcgcagatgacggagagagggcagcaaaccgcgagggcccgcgaggaccgggcgggcagcgcctcaacattg

SEQ ID NO: 209951 - DNA, 51 bp, Homo sapiens
  chr5:1033674-1033725
  hypo
aggcatgtgttgccctaaactgggcatctgtggacacggcgtagttcactc

SEQ ID NO: 209952 - DNA, 321 bp, Homo sapiens
  chr5:1039292-1039613
  hypo
tcacggtcccaacactcacggggcgacttctgtgacatgtcagctttggagaaaggtgtgtcctgcaagggtcaggagacggttgcaggccagaaggacgtcccagtgacgtttcggagtcttgcagcctgcaggggtccatgtggttacccggaacaggaaccgtgggggtgctttccgggacccagggggcccgtgccaatgtttctgagtcttggagcctgcaggggtccacgtgtttaccctgaacaggaacatgcgggtgttttccggaatctggcgaggccgcgcggcagttttgcatttacattccttgttttg

SEQ ID NO: 209953 - DNA, 140 bp, Homo sapiens
  chr5:1039683-1039823
  hypo
gaatggcttggatgtttgtcgcctccgagtctcatgctgagacgtgatccgtggtgctgggtggggtctgtgggaggggtttgagccatggcggaagatccctggtgaatggcttggatgtttgtcgcctccgagtctca

SEQ ID NO: 209954 - DNA, 266 bp, Homo sapiens
  chr5:1039853-1040119
  hypo
ggtctgtgggaggggtttgagccatggcggaagatccctggtgaatggcttggatgtttgttgcctccaagtctcatgctgagacgtgatccgcagtgctgggtggggtctgtgggaggggtttgagtcatgaggacagatccctggtgaatatggcttggcgcccttgccgtggtgatgagtgagctctcattcggtgtttgtgggagatctggttctttagagcaagggccacaacccccaggctgtggactgctactggtttg

SEQ ID NO: 209955 - DNA, 78 bp, Homo sapiens
  chr5:1046857-1046935
  hypo
tggttagtgtgtgaatgagtcggtgggttagtgtgtgaatgagttcgtgtgtgaatgggtgagttagtgtgaatgaat

SEQ ID NO: 209956 - DNA, 259 bp, Homo sapiens
  chr5:1049743-1050002
  hypo
caggagtggacctgccggggaaggggcggctctgtctctcacactttcaggaaccacaggcccttcccgtgcagctacaaccctgcaagaggggtccgattccgcacgtcctccccgcgattctctggttttggctgtgaccatcacaggtgtgagttggcatctcacgagttagaacacgctgtccccactcatggcggactctctggtgcctccatccttatataaattaaattataaatcgaatggccgggcatgg

SEQ ID NO: 209957 - DNA, 219 bp, Homo sapiens
  chr5:1050399-1050618
  hypo
ctggtcagccctgacgctcctgctagaaaaggggcggccagtacattttctccagctgtctttcatgctgaatgagactcaagagattcttcaacgtactcagatttcataggattttatttttctactaacacagacagacagggaaacctacaaaaggaaacggagtcaattgtaaatggctgtagttactggttacacggagttgacaacacaaag

SEQ ID NO: 209958 - DNA, 295 bp, Homo sapiens
  chr5:1051292-1051587
  hypo
agctatctcttcagtgccaccgccgcctccatgcaaggcacaggccatggcaggggacgcccgggactcagccagacagacctgacaccaggcgccactgctgcctgaggacctcccacgtcgggtccgtgtcctccttccctggagcaccggggtggggatggcacgtgtgagccagctcagaggctgaactgtgtgccgtgctcctggggtggggtggggtggggagggcagtcctggctgtcgtgggctgtcgggggaactcactgttcactctgcgcgcgtgtgcccctgg

SEQ ID NO: 209959 - DNA, 1168 bp, Homo sapiens
  chr5:1051990-1053158
  hypo
ctcggaggtgaccggggccctgagcggagccatggccagggctgacgtttcaccttcatcatcagggacagcttcagctccgggtgctcttccaagaatgttctggatggggtagaaatgcaacctaaccactgggtaaatccagccaaggaaaagaacttccagaaaccaaggcaagggctcactggcttcttgtgacctgcgagaagatctggccacgtccaggtcactccggtagcagcgtctgccctcagatgcaaggaaatcgtccagccacgccctgatttgctgagcctgttaaggctgaacaggagagccctaggtgacgggcctagaaacttccgtaggaagccccatgggcagcttgggcggcatcactgggggacaggtgtgtctgccgtctgtttccctgggccaagcccaggcccaggctgcccacgccgtcctccgtgcctgtcccagagtgccgtgatgctgttgggcattaggagtagatggtgatcacctcccggccgccacccctgaccaggaggactctgttcagcccctcggtcaggacttcaagaaactccatgtctgtggtcaacagagttaaggccacagctgatcttacctgagcgtgtgtagctgaaatcgtgataggagtgaggtttatcctctcctggttagctaagatttggtttgagaaacccagagccaaggtgaaaagagaggtggggattagagagaccccccaggcggggaggagcagggcaggggagagaggggccagtgctcgggaaagagagggagcaccgtggccacagggaggacgagcagagacagcgacacagcccacggtgctgaccccacccgacagggaaccccagccacgggactgggtcctcaccagcctacaggggacctgggccacggattccgatcaggacgcatggaggacatgccctcactggccccagttcttggtgccaacctggcagggatgtgccaggcgtcaccctgtctgtgccaatacgcccagatgcactgcggagttctccttccaaagcacaaattcccaaagctgcgaccaattgtggccttaaagccgagagctgggctcctcacctcccaccgttgtcggcgcagggtggggctgagccccagcggaggtcccagaatgcacagc

SEQ ID NO: 209960 - DNA, 1544 bp, Homo sapiens
  chr5:1053386-1054930
  hypo
cccacaaacccaggtcttagcgagaagccaccagggggtgcccgcacgctcagcaggcacactgcaagaaaggatacagttctcgtctccctgccggtttttgggaggacctggcatgttgagcaggaccagctgcgcatcctgggacttgttgaggacgacgccattgagcttcacagccgtgtgcatccgcctgacgttggactggtccctgcaggggaggtgggcacggtcagcgggcggcgggtgcaccccacgctccggacacgaggctgagctgagccctgatgagctgcattcacacgtgttggaaagggctgtgtgagtcaggatcaggcggattctctgaccctgaaggatgcagaagtggcggctccgagcgaaaggcgctgactgcagccagggcgggcgttcagcagcgggatgctttggcctccagggacctagaactcagcccactaaggctgccaagcttctaagggctacagtcacacaacacaaaccgcaagcgctttcctaactacatctacatctgcaaagcaggcagaacagtggaagccgtctgggtggcccatgtgcctgacgccttcaaggctgacacgcttctcttgacatctacatcatcgcccctaaaccccacgtcagacactgccaaacacagacccgtcaggctgggcacacatggcctcctctccgagggtcctgatacaactgggtccaaggggccggaagctcaggaaggaaaggcccagagtcccccacaccggcctgtgcagccgttgctgctgaagctcccaggcctgacaaggacagggtatgccgaggactcagctggaggcacaggccctcagtggccactactgggtcccctcctacggcccaccctgcccctgtctggccaagggctaaaggacaagcacttccaccgtgtggccgtccagcccccgccttccgtcctcacaacgcagctctgctccacgaccctccctgtctgctctctgaagctgctgtggccggtccatgtctcaaagcgtccctggcggcctgggcccggccacagccccacaggaggctccccaaccaagtaggtttggggacactgcagaatcatgctgtgaggtgctcaggcccttgcgggacagagcttatctccctcctctaccccacggtcccctcctaggcaggcccctaaactgcagcagaactggcgttccaggaggccacctggggaaacgctgggcggaggggagcacttgcgtttctgtgttggaaaaacccggcccgtgtgtggacttgaaagtcggagcgggtctcaggccagctgcagccgtgcggtcgtgactgtggccccctgggggaggtcaccagcgccctggacgcagaggggcggcggcggacagacagaggccgcccatgcagggtcatggagaggccccacggacgctatccaggctcacgccctttgatccgcttgacgcttaagccacataaacgtgatcataaccaccaatttccaggaggaacacagggagagaccttctatc

SEQ ID NO: 209961 - DNA, 142 bp, Homo sapiens
  chr5:1055406-1055548
  hypo
cacacagacatgcacactaacgtacgtggacgtgcacacaggcaggtacacgtccaccggcaggtgcgctgacaggtacatgcgagcacgcacacaaacagacatccgttaagtgtgctcccggggacgtcacagtaagcca

SEQ ID NO: 209962 - DNA, 460 bp, Homo sapiens
  chr5:1055578-1056038
  hypo
aggtcagggccgacctccagatcttcggagggcttctcccagcccaaccccgagaaactgctgggccaagagagtcaatgccatcccagacgcacgccacacatgaatacaaagcccacgcgttgtccattctggcccaccttctcctgaccctacaggcctgtggggacctgcccccgccccgaccaaggggaggcaagccccggcgctgggaggaggcacaggtgccactgagggtccccgagtgtgtgtgcctgtgcatgtgtgtgtcaaaccctactcctgggtctacgtcgttcttcggctttaattaacacgctattctgaaggcactttcagatttacagaacggagcaggaagtacagggattccctgcacgcctcgcacatagctgcacagtttcttgagtctgattaattcaggtttcggggttaaagataaaaagggaagggaagtgtg

SEQ ID NO: 209963 - DNA, 1876 bp, Homo sapiens
  chr5:1056068-1057944
  hypo
caccaggcactgcctgcccacaaggaaaacatggcccaggcggttactggcgggggcaggcaggggacagagacggcatcgaggactcccagggagcaccctgggggtccgtccagggtacaccctcccacctgccccggagctcagacgcaggtagctcctgccgagggtccgaccacacagagaactgatctgcacccctctccgcctggaggctggacagctttaacatggaaggcattccaggtgggaacgcgactcagctagcgcctgacccagaaggacgtggatggactcactgacgggccctgcgaggcgcacgcctcccctccactccggagcggctcggacacctcccaggtctcagttcctgggcctcacttaggaagaggcttcaggcgtgtgctggagccaccgtgaacagaggggagcgaaggcaacaggaaactgacgtgggagccgcagcagctctgggtgagctctggctgtacgcggacgcacacaagccaccgtgcacggggcaggcacaggcctagaacacgcgcacagacacacgcaggccacacacacacaggcatgcagggcaaccgggcccggaaggcgacctggttgtagcgagtggacttacaggtttccccattctctatgcaggagaaaaaaacaagagtgtgttactgacttcaggagagagcaccaggctgttccagatcgcatggctgcccaggaggacgccgcctcatcccaccccacagggcccaggagcccccagcccttcctgagaacctggctttagggtctggctctgaccccgggtgagaggtgtctcttgcgctctcatctggaactcagaggctgcgtctgcagaaccaaacccacacccgcaaggaccctgtacagccctggtgttcgcagcccaaggccacaggtgggagccttggcgtagggcaggccctaaggcccgacagcagcctgaactacccacagggtgaaggccaggaattctgtgcccagcggcacaagcctcctcgcctccatggaacagacccatctgcctgctgcagtgaggcttgcctgagtaaagcaggcctggccgcagggctgacttcagggctggcccaggtaccaggaggactgctcgtcacccagctgtggggttaacatcaggacccaccctaggtcctacaaggacccctcagcgcttggcactagaaggacccctcagcgcttggcactagaaggacccctcagcacttggcacccaggtcttacaaggactcccggccttggcactagaaggatccctcagcgcccggccacagggctgaactcagggcccggccttggcaccaaaaggacccctcagtgcccactcaggcggctccctgttctctaacgggcccactggcctgcagggttgccccgaagctcttcagtggtcagggaagggactctgtcctcactgccgggccagcactgccaggatctgttccccccaggccacacgcacggacactcacggcttcatgctgaagaggtctttgaaaccagataggctggtgtctctgctcctgtacttctcagcgatcagcttctccctggtccaggtcatctgcaccttgtctggcgtaggcggcgcttgggtcctggctgccgccgcggtgtgggacgcggtgttcctgtcgtggatcagctgggcctggcgggcccgggacttggtgagaccagccggtctcaaaactcctctgggcgagagcgacccgggatgccaggccggaggtgagggcagctcacagaacctgaagggccctgtgtgcctgacccgggacccagcctggcgtcccacactggtcctgcgccgcccccgtgactgcctccc

SEQ ID NO: 209964 - DNA, 128 bp, Homo sapiens
  chr5:1057974-1058102
  hypo
cccctcaccttcccgccctggccctgaactggaaaggccccatgaccccgtactgacaggaggtgacacgtgctggcagagtctccccctcacctgacggggctccacacacgtgttcaccccagacc

SEQ ID NO: 209965 - DNA, 102 bp, Homo sapiens
  chr5:1058147-1058249
  hypo
gaggcttggggcaggtggggccgtaccagcatccaggccctgtccccggggaagcaggctgtgtctgaccagccaggggacgtttgggggccggccaggctg

SEQ ID NO: 209966 - DNA, 347 bp, Homo sapiens
  chr5:1058827-1059174
  hypo
caggcctctactcattgtggcgcccggcccagcctaaatttcccatggccttgaacgtgaaaccagagcccaagggctgcccgctctcggcagagccagcgccgcccacctggcccgagggccaccgtgtaagtcactagagggtgtccacccagcgtctgcacagcagctcatccaaacccttctgcagagcggtgacacctccaacccccacctggcccaggaggggcccttcgagctcgagcttgctgttcccgctcccggtccctcctcggtcagcatttgctgactctccacactgaacttcccatgaagccatgggtggattcttgttcctagctggaccc

SEQ ID NO: 209967 - DNA, 98 bp, Homo sapiens
  chr5:1059425-1059523
  hypo
gctgcttagtgattccggctgtcagcacatatggccccacacgcagacccgtgtactgcaggttcctgctgaggccaaggccccagggcaggcaaatc

SEQ ID NO: 209968 - DNA, 338 bp, Homo sapiens
  chr5:1059556-1059894
  hypo
agaaaaccaacacctgcacctggtctgcagacacacgtgtgtgataccagcctggtgggacccacgaagaccccatgaggccgtgacctcacagagctgagcatcccgctaccaggtgacccccgtgctgtcctccagtgcgaagtgaccacaaagacacctgcccttggggtctcacagtggccatggggcccaggccagtataactcaggtggatacacccagacgtcctcagcagcctacagttacccacggagccaaagccgctgcagccaggcggccagcttccacgcacggaggctgcacaggtctgtgtcggggggtggggggtggggggg

SEQ ID NO: 209969 - DNA, 182 bp, Homo sapiens
  chr5:1060413-1060595
  hypo
tacttctcagaaagcctggtgtctgtggccacggcccccacgtacctctcgctcctgctcgttcttggacagctgcatctgcttcagcatctgcgacctctgctccatcattagtgtcctctcgtaggtgaaagcagatatgtcgttttcaacctagaaagttcccaagcacgtagtaagcc

SEQ ID NO: 209970 - DNA, 111 bp, Homo sapiens
  chr5:1060667-1060778
  hypo
gaaaggccacgcgtcccgggccccacaggccccctctggctctcaggccccccgcccagtggccaggaaggtgtgagcgcacgatgggcagtcacgccgcacacacgctct

SEQ ID NO: 209971 - DNA, 395 bp, Homo sapiens
  chr5:1060818-1061213
  hypo
gcagctgtgagggcaaggccacagccacaaaccaacctggcacacacggctcagggcgaggcactgccccatggggctgcatgatccacgctcacaggtgtcattgtctatgctcaggggggcttggcaccatgggaaacccacccagaacacatggagaagccacagcacaacctcagcgcccgccatgcaggaccctgggtctcacccattgcacccaccgtgcgggacccctgcgcctcacccggaacatccacagtgtgggactgctgcgtctcacccactgcacctgccgtgcaggatccctgagtctcacccgccgcacccgccgtgcgggatccctgagtctcacccgccgcacccgccgcacctgccgcatccgccatgcggaaccc

SEQ ID NO: 209972 - DNA, 219 bp, Homo sapiens; identical to SEQ ID NO: 199734
  chr5:1061582-1061801
  hypo

SEQ ID NO: 209973 - DNA, 840 bp, Homo sapiens
  chr5:1062887-1063727
  hypo
cttcctgggggacagcgtgacagtctctatccagctttatgtcttcccagcacccacctccaggagtccaggcccctgaggacctgcaaaaccatgcgctggggtcacgggagccggaagaaaccaggactttgcgggttctgacttcaagaccagtgttgtcggcgtgatccaagtggggtcagaacccacaaagtcccgggaccgccagcaggaccggaggggaaggcacagccgtggatccgggtgggctggtagcgagcaggcatggttccatccagcacaaggggcccaccagatccccaggatccagagctccatgcttgggggccgggggcaagcgctccaatgccaggcctccgcccatcaaccccgtcctctccaggcgtgaaggacgggacgagtctctgtccaggccctgcctatagctgaccgagggcctgtctgtcccacgtgacagctgcagcctggcctcactgaccagtgcccctctccccgggtcccgactgctgatgtgtggtttccagccgtgggaaggtgagcccatctggggagagcacccaaaacgggaggtgctcagaggtgcacccaccatggcaacaccactgaggtgtgaggtcctggacggggtcccgggccgaggaggacacgggaccatggaggacacggagatgctgatgccggctctagggcaacacccacacccgtgttacacgaggtgtccacaagcaacacacggggctctgtgctttctgtgatgtcctggcgattccaaaaccaagcctccttgaccaccccgcaaggcctggcagcccccgccacaatcgccaccaccttctc

SEQ ID NO: 209974 - DNA, 1239 bp, Homo sapiens; identical to SEQ ID NO: 199735
  chr5:1064042-1065281
  hypo

SEQ ID NO: 209975 - DNA, 929 bp, Homo sapiens
  chr5:1065311-1066240
  hypo
gagacacacaggggacagcgaggggacactgagaggacacagaggggacggtgaggggatgccgaagggccgccagccatgcctacccacaaagttcttccaggagaaggggttgtcctcctgcttccaggatgcgggccaggccatgagcaccgtgttgtgcttcaggccgcccaggccggccgactggatcaggtgggacatgccatcccgcaggctggacgagaccaccagctggcagaagcccttggtcttctctgtgctcattagggaccgtatgttctgcgggagacaggacaggttggtgctacagcaggaatggggtgcacagacccacgcccaccacccacggtggccagggcacccgcaccacctcccctgtggacccagcaggagggaaggcccgaaggctcaacggtgtgctgcggtgctcccggccgctgtgtgtgtatgtgtgtatgtgcgtgctcacacactggggagagagacacagagcaggtgtgactgatgccacgtgcaggggatgtggagggctgctctggggacacaacgccaggcagttctctgaggcgatccacaacatcccagacccacccccagttcactcggacgctctgggccaggttcatccacctggtgcatcagaaacacccgaaaatgggccaaattagcagctcttcaaagggaggccgtggggtccaggatgcagcaccctaacagcaacggcggggggcgggggtgggggactgccgtgtggtctcctcccggggttggagggggtcactgctgtgtgcagtctcttcccaggggtgtctgatgaggctgcaccacggaacggcttgactccatggggtttgcacgtgcgtggccgaggacctgccacgcactaaagccatgcatgtgtggacgcaggcctcccaccctctgac

SEQ ID NO: 209976 - DNA, 222 bp, Homo sapiens
  chr5:1066841-1067063
  hypo
gggaggaagagactgcgtggaggcacaggcgcccagggtcgcccgggggcccaggagctggaggaggcaggaggatcctcccgggagactctggaggcagcgtggcctgcggtctccttcatctcagactcctgggctccagaactaggagagaacagacgccctttgctgtgagccgtgtggtctgtgtcccatcacagcagccccgggccactcagggat

SEQ ID NO: 209977 - DNA, 218 bp, Homo sapiens
  chr5:1068045-1068263
  hypo
cccggcgcagcagtcgcagaggcctccgtgcagacagacctcaacccggaggacaactttacgagcggggagcaagaacaccagggccttaggaccccttttatgccaatcagtgccacacagaacagagcacaagggcgcgcatgagcctccctggcgactgcatgagtcacgaagctgcacgcttcttagagaaatgtccatgctttacagccttg

SEQ ID NO: 209978 - DNA, 1478 bp, Homo sapiens
  chr5:1068563-1070041
  hypo
attaaaaaacaaataaataaaaaagatttgcccagatttctctaatttcacactaacatagccacgatggaggagaatacggctccccagggcagtgcagccccaaaggcagccaagggaaggcggggcctgcggctggctccagccctcgcaaccaatgcagctaagtcacagccaaaggctcgctgagagcagcgggggcagggtgcgctcgtcctcccgtccgcaagagcgggctcctgtctgaggctgccccagaccccccagccgaagggctgtcggacggagaggatctgcctgtgagctccgttaacgtgagagtataagtgagcgcagctcttcccatggccgtgaagactgtggcagagcgtggcagggggtcccgtcatcccccagtcactgcaatccctgccctgtccctcgtgcgcacagacgcgccctcacacacctccagggaggccaggcagtgccaggattcttagaatccacgccagcagggcagttccaactccgggattcctcctaagagcattccagcatgggataaggaacacggaaagggacatatggggaccaggaccgtgaacatccccccgaaaaccacgatacctaaatccacgggttcacagtcaatagcagctaacgcctgaacccgtggtgagccatgacgccgccgtcagggaaagggaaggcccagagcatctcctgtcttccctgggaaggcgaacctgtgcaacagcctgagaaggtggccatccacgtggccaacgtggcgggagcggcgggggccattttttacctccatgggatcctggccctaggccacaccacctgaggctgctaccatccacgtgcccacagccctcttgagcagggttcccacccctaggctgaccggcccagacctggacgggcctcagtgcggctgtggttgtgcagagaaacggaccggggaggcggtggggggcggctgcagatgcctggacacacccacaaggtcccagtgggggcctggcagcagggagctggctcccaacccacagcaaggacagagggggcacccgcatgggagggacctcggacacacaccactgcaacaggcacgtggtataggccccacagactcccacacacatgagggggaaggaggaggctcgaggcgcccacggcagccagccctgcctgggaatgaggtgcccttggcatgaaaatcacgcaggtgggcactcaaaagctccctgctttagcaagaaatacagaagtaactccaggtgacgtgacgtgacgtgacgtgatgggaccccacaggctttcatcgtgtcatcattccgtttctggatagtgtgaagcttcccataagaagtttgaaaatcagagaaatgaagacacaaagtctcagaccccgatgtcctggggcagccgactgcagcagcagggctcagagctggcaccagcatgctacacgcccggggcactca

SEQ ID NO: 209979 - DNA, 3180 bp, Homo sapiens
  chr5:1075558-1078738
  hypo
tgaacatcagcgccaggcacaggctcatacccagaaaggacagggtcctgggggcggggcaagtggctcggggcggcccaacgccatgcagcccccacacctcagccaccaccacacggacactgcccctccctcagtaaaactctctgttaacactaggaaaacagtcactgacgcctgacgaccatggctgtactcaaccacctctgaggggtgacgtggctccctgggcccctgtgggagctgtcactccaaaacccagtacatagctccagctcccagcgtgcacacagcacctcggctgtgcatgcaacaaggggctgaagcgtccacccagcgcctgattcctggggaggggagttaagaagacccacagccctgatgggctacgccccaagcctgggaaggctgggctgaccacgggaggtacaaggcacatgcagacacctgggcatcctcgtaaccagaggccttcctcaggtgcagtctcatcagctgcgcaggggcttactccgcaaaggaacagtcaaggacgcgctggggtcttcaggcccagagcagctggccttgtagaggcacccagtgtcccagcctgtggggctcctgacgcctgtgctgagcggcctcaccagtggcagaggcacccagtgtcccagcctgtggggctcctcacgcccgtgctgagtggcctcaccagtggtagaacttgaagcgtggacgccagttgggggtacgtagcagggtctgcacggcgcaggccaggttcacgaacaggtagcacatgaggaagaacctgcagggacggccggccactgatacgggcccactgggcccccctgagcccccagtcactgccacctgggagaccacccttgtcactgtccctcccacctgcgccttgtctccccatgtctgtctctgcacgtgagctgactcagactgattccgaatcaggccccctcaggttccagccatcctgtgaccacctggtccatcaagagatgggccatcgtcccttccccagcagccgtctgtccagccacactgtccctggctgaccccagcgggcggctgcctggaggcctgtgtacttgtcttccccggcgcaactcccttcccggcaggatcctgactgcccacagctggccatgcctgtctactgcttgtcctgagcaggacctcccatccacactgccccacgctccaggcccatacacccatccccaggtccccgtcctgtgggggctcacatggagaggatcggggccacgctgtccagagaggcgatgaggatgccagtctcgcagatgaggactgtcagcagcagcgcccacgtgggctccccgttggccttcccgtggccaaacacctgcagggagaagggcaggaagatggggcagatgacaccacccttttaggagagaagctgcaggctggtcaggtctagcccagatgaatcttaaagacacagaccagcagaaacgcctttcacagtaggtccccgggacatcacgcggctggcctgggaagaagccctgacaaagggctgcagcccaggaggcttcagagctgtgcctacgcccggcttgcctgcaacctgtgtggccccagcctgcccccccgcctcagtttccccgaccacacaacacaggaccagcgtctccagggcactcgcggttccccagaccctgtggtgacctttctcatcaggccaccctcacctcccagaagctgaggcccacggggcctgtgtgcctgtccccttcctggacaccatgccctaggcccggctgggactgaagatgcaaccacacaaaggccctgcgggtcggcaccctgccgagggaccagcgacgggcaaggatggctctgccatccacgaccttcccacagctgcccctgggcccaggtagcaggaggagccacaatcggcagctctgggcacagcacacggacaggacccatgcgggcgtccgtgcaatcctcagagcagccacacacactggctgcaggtggctggtgacgccacctcccacgggctgaagagctcagccacacagagaaagatgtggcaggcaggcagagggcttctgaccagacaacagaccaggcacctctggacacgtggctgtgggccctcacagccgctcctgacacacccggggccgagctcggagggacctgcaggcaggagggctagaattgcctctgcccaccacccacctcccaccactcccatgctctgtgcagtggccaggggcagaatgaccaccatggggtccaagccgcgggcatgcgtcccacacacggcactgtgaggatcccgcaggggaggagagcccccgaccctgaccttccagggtccccccgacgagggtgcgggactcacctgcaggaaggggacgatgccgtcacgggcaatggcctgcagtaggcgcggtgcccccgtgaggctctgcaggccggcaccgcaggtggagaagaaggagccgatgacgatgacccagggggagggccaggccagcatgccgatgaccaggttcccctgcagggcctccccgaacctgcaggcaggcgggcaggcgggcgggcggctttcagaagtgagcctgagtcagacaaaatgtcttctcccacccagagcgaggggcccagtgcagtgggggcgactccttggaaagctgaggcccggcctccagtccccgttggctgaaacctccaccaggctctgcccagcatggccagaatgctctggagggtcttcagcgggggagggggtcctgctcacctcagggtcgctcttgggagcagggaagacccagcctggcatcagcttcagtcagggaccacccaggacccccggggccttggggctgccagacacgcacaccccatgaggatgcagggtcagtgatgacctgcctgggaccccactacttctccacttgccagcagggctgagggatctcccagggccaagcctcacccgtccacacccctgtggcctccccaggaagggcctgcgcccccagccgcatcagggcttggagttggctctgaacggttccccaggccctaggctccagcggaagagacgacacatcagaccaagggatcccaaccctgggaccaggacgccttcagctctgcacgcggacatgaagtcctagggcgatgtaa

SEQ ID NO: 209980 - DNA, 1587 bp, Homo sapiens
  chr5:1078798-1080385
  hypo
tgcaggtggaaacgtacttatctcgtaagaccacgccttcaatgcaggccccaaacagcacaatgcaggagagatccacagccctcgtcaaggaaaggcaggtccgtgggtgcagggtcctcaggtacggggggtggggtggggtggggtggggtgggtggggagatgcactggccagcgggccgcaggatccaggtgggcggggaccgttctgcatcccatcccatcccgggcacgtcctgtcccccgtgtcctcagcgcaccctcctggggctctgtccagcgccacagaacggggccctggggtggtggacacacacctggcctggtgcttgaccgccagggattggcaggggaccatgctgaggggacaatgctcggctggaaagaggcagccttgggattgagaagccagaggccccgcgggcccagcctgccggcggcacaccccacacaccgctgcgcatcactgtccacacgcggcagggtgactgcttctgttttctctacgatcgcatcacacagtggtgaagaagccagggtcctgacagcagcccttgccccgtctcccagggaggatgacgtggtgagagcacagcctaacctgggaagtcacatgctggtggccgagggtatgatgctgagccggggagggcatgggggcctccccccaggcagaggctggaaccctcgcctgcacccctccaaggatacagatgaaagacgtcgtcactatggccaggatggtccccgtggggatggacttctgtgcatccttgaggtccccggaccggtttgaacccgccatgatacctgtgaacatggaaaatgctgcaaagacccatctgaggagtcagtgccatgtgatggcagcccctgcccagaaagctggaaaggcggtctctggggagaccccgagcgtgagctgcagccgaggctgcagtccaagctccgccagcccacgctgcaatactgcggctgaggggatgcgggcccaggcacgcggatgagcacccacgtctactgctcccctggatccgaggacgagaaccgaccccgtcactgacccccacgccccccacacccagggcttctctggagcctgtgttaatcccatggccaagggtcagcccagagacggtgctgagcaatggctcacaggcccccaggacctaaggactttgggaatgagatcctagaacgactcagcccagccagccaggccagcagacgctgcgacccctcccgctgtggcaccaccttgctctagggagccacggccggggatgtttccacacaatcggctcctacaaagctctgggaagccgggtcggtgggggccacttcacgcctggctcggtcccatccaaggcgcagcctgaagcacccattgctcggggtggcctgggaggcagcagagcccacaatccagtgccgcggagacacccggagccacgcagaggctctgcccccacgccctccacccgcggctcagagacacccggagccacgcagaggctctacccccacgccctccacccgcggcgcggagacaccaggagccacgcagaggctctgcccccacgc

SEQ ID NO: 209981 - DNA, 89 bp, Homo sapiens
  chr5:1080415-1080504
  hypo
ccacgcagaggctctgcccccacgccctccacccacggcgcggagcgcactcagacggacgggggaggctggagcggaggtacagggag

SEQ ID NO: 209982 - DNA, 93 bp, Homo sapiens
  chr5:1081414-1081507
  hypo
aatacagacattaaccgggcgtggtaccgtgtgcctggggtcccggctgcccccctctacaaaaaatacagatattagccgggcgtggtactg

SEQ ID NO: 209983 - DNA, 734 bp, Homo sapiens
  chr5:1083626-1084360
  hypo
gcttgctgaccatgacggaggctgtctccctgccacaccgtgtttggcttctatggctctgccaggggtgtgtacagggacccccaggctcatcagcagcagctgggaaggggctcggccaggcaggaggaattggggccctgagagtgactctaaggcgagagcagccaccagggccagcgcctgctgcccccgccaccccccagctccagctgcagccctgtgagcctcacccaggaagacaccactggccgcgcccgggatgccctggatttcggtgacgttgttctggatgaagtactcgtcacaggcggcgctgggctgggagccgttgcagaagaggccccagagcgcggaggtggctgagttgttgtggatgccgtaggccttgacgcaggcatcgaagctgcgccgtgacagcgtgcggttccccaggaggcagaccctgggcgggacagggaggcacggcacgtgtgctgccaccgaagtggcttttactgccccacccagctcccccaacgggcacccatggtgtcgcccgcgagtggctcctggcaccctgcacctcccaagacaggaaggccacagatcacgccagggaccgggcccaggccaggctgcagcaggaatgcaagggccagggatcacactggggaccggggactggggaccagggaccggggaccaggccaggctgcagcaggaacgctgtactgtacagccgtcccctcatc

SEQ ID NO: 209984 - DNA, 526 bp, Homo sapiens
  chr5:1084390-1084916
  hypo
ctaaatgaagcgttctagacgtaaacaattcacacgttttccaccgcgcggtgccgagtagtgaggtggaacccagcaacctccccccgcgccagcacagccacgctgcagccgctccctccccgaggccctcggcggcgtcctggccgggtcagctgtcacaatctcagtgtctgagttcaagccaccctcgtgccacgtgccaacggccaagagcacaggagtgccgcccccgacgtataagccaggcctgtacgtggaaaacagtctacacagggccgtagcgtcaagcatcggcagggggtctcaggacgggtccccgagggggagggcagctgtgcttccctaaaacgggcttgtggggttgcagctgttctgcctccctctgttttgaggcctctatgaggctgttccttcaggggctccctccacgcagagacggcaaaaccgcgggagcctcaaggggcttggctgctggccctttctggacctgctccctgcgggctctggtggccactcccatgtt

SEQ ID NO: 209985 - DNA, 1658 bp, Homo sapiens
  chr5:1085200-1086858
  hypo
cccacgggggttcccgccacggtcacacccagcccaccccttgcggggagctcggcgtcaaggatgatggacgagaggcgggcagagcccatgggacctggccccagccccacacccacccacggctcagaggccccgagactcacgggatgtccggggggtcgaaggcagacttgatgacgccggcatagatggccaggatggacagcacgacgcaggccaggaagaccagcgccagcttgttgacatacttgacgcccacgaagaccaccagggccatgagcacgagcgtgcacgtgccgtacacacgcatgttgtgcagcatggcggccgcctcgccacctgcagcctccgcctggaagatggccgcacccggggagatgtacgtctgtgggaacaaggccggtcgggaggccgtccccggacacaactccccagtgcccgtccctcccgcaagcccccagcgccacacaggggcctcctcccaacaggtgccggggccatcgggacgcatccgtgctggacggagcccgcgggggtcagcgcacaggcaagggacggagcccgcgggggtcagcgcacaggcgagggacggagcccgcgggggtcagcgcacaggcgagggacggagcccgcgggggtcagcgcacaggccatggacagccaggggcctgaacgtttcccaggaaccacccgggagccttagagtaaagcaacttcaggacccggggcatccgcatgtccgcactcaaaagaaacaccttctgctaagaggaatgtgactgctgcccagagagctcggcccaccccggctggacgtcctggacacacacagggtctgaccacgccggcggggggcaacctctgttctgcccagattcaagggaagggacggagacgtgagacagtgctgctcagctccctcaagaccaggacaggactggggtgcagcaggcatggagggcatggcacccacccccaccaaaggggatcctgggagtgcggcagccacggcacccggggcaggtggaaagatggagggacatggccaggggactcgggttgggacgggtgtgggtgcgaccccactgaaaggtttcagaaccttcttggccatgtggctctcttcaggaacccaggaggccaggaaccaggtctggcagcagagggaggggcagaaagactggggacaggggctcaggtgagcgtctctgaagccctgcagggacagcgggtttcagaacctcagcaggaaggacagcacccgtcggccagagaagggcggttcccgtccccacgaggaccaaggaactcaggccacagctctcagctgtgctcaggtgatgtgggacatgctttgagcatgcctgttttgagaaggtgatgacatcacctggttgtacattgctgggctctgggaccctcggccaagtgcccagatcaggcagagaagaggctgggatcctggcaaaaggttcttctaagccgagttccagccctgctcctaaaacagctccgactgcaggactgcacctacgcggggctcagatctacagtccagatgtctacccagctcatgccaggcacgcctcacggagggcagcaatggtgctcaagggggacacaggtcgctgctgagtggacgctgcccagtggct

SEQ ID NO: 209986 - DNA, 2216 bp, Homo sapiens
  chr5:1087080-1089296
  hypo
gcagaggccgacagcgcctccaaactcgggtcccagcgagcgcgatatcatgtagtaggacccgccagctgcggagacaaaggcggcagccgcgggtcaggggcgcacttggactcggacccgaggtgcggtctgcgctgccattcacgggcaaaggagggcctgtctctgcgaaggcagcgtgtagaccctcgtccacccgcaaagcagcacatggagacgcttccacggtgaactctcccctcccgaggctcggcacacgttccacaccaagagcacgcgctctcatggacatgaggaccaggtgagatcagggataaggctctctggggagcaggaggccccagcaggtcccagaaaaagtcccgcgtacatcagtggcagccccagcccccacttccactaagttttgcttatgaaaaaggcaaaagagaaactaggatgttcaggagtcgtctcgtgtactgtgaaccacgcacgctatcactggcgggaaagccgggcgcaaccccagggctgcctggagaacacagctctccctgctctgagcagtgcgtgtggcatgtggaaggggtcctaatggacgcggccatcgtgaagcagagactggtcccttggctgcggagggagacccctggtgaaggccctcgtgctctcctgaggccggggaagtccgctgagcaccaagcgatgcccccgtggggatggggaccagctgcgtgaggacctggtgctgagcaagcccagccgttaacacgcgcagcacacatgcactcagaagcagacgtggcagcgtctccgttcactagttatttcgtatcgtaattcgtttattactaattaacagtatcatctcagtttactagttattacgtattgtaattaacttattactaattaatatcatctcggttcactagttatttagttattatgtattgtaattaacttattactaattaacaaggtcagggcagtgttttgtcttcaccttccctcgtgagatacaggttccaagaactcagcctatggcacacgctgggctacaggagccactggaatcgcccgtgcctccccctccccagcccgctgcctggtgggcactgcctaccctggcaagagacggtcaccacgcagcaaaatggggaagaaaaccaaacagccgtgacctcacggctcaaacgccagaggagccagtggagaacacgcagaaggcccggctgagacccccaggcagcccccggcccggcctcgccaagcggcctcctcgcggttgccgtgcggcaaaacacagactcctctaacaggactcagggccgcggctggcgggcaccccttacctgggaccacaccgttggtagcgatcgcactcatggaaatggcggtcagcattgtctgcaaaaagacaggcagccatctgaggagagttttccaacagcctgccggcatcgcaacactcccaagtcagggtctatgacccggctcccgccgaatgccagcccccaactccagggctctccatctcaatggagtggctaggaaacaggacctggaggctcccgggcaccaggcatgcgtgtcctggttcccaccccttcccctatgacagcgacccctgaaagtgcccaaggtccttccaaactggaggtgatgtcatcaaaacacagggtgtcccttcccttggaagcctcagcccccgggtgccgccccatgacacccaccactggctgagatgcctgtccgcagacacgggtaaatgaggtgccagcacgccagtcaacacgccagcactaaccccggacagtgtggcatctcatccccgcagctgcccggctctcgtggaggagacggcgctgaacgacgtctacacgggcgtctggggagggccctactgtccggctgccaccgcccgaaggcacaaccacagcggccaggggagacggcatctggggagagccctactgtccagctgccaccgcccgaaggcacagccacacctggccgggggagactcacacatgtgcagcacatggccacgatgaggaaggactccaggacaccagccacccccacgatccacgtcaggcgcaggaagaggatgacgcccaggatgttctgcaggcacggcaggtagacgccgatgaaggtgcccatgcgcggagcctgcgacagagcatagcgtgtcccaggggctcgtaccccacacccagagggag

SEQ ID NO: 209987 - DNA, 241 bp, Homo sapiens
  chr5:1090422-1090663
  hypo
aatgtaagagcagctcggagcgtgggaagccctggatctgagagcctgggggattcacttggttccctgagccctaggtgggaagcaacaggggagcgacttgcttctgacgggggccctggagaggagagggtgacggggctgggggccgctgctgggccctccaaatctgggtatgctttgttcttggtgcaaacgagagaagcggtggcggatggtggagaaccggctttgggacatt

SEQ ID NO: 209988 - DNA, 166 bp, Homo sapiens
  chr5:1091065-1091231
  hypo
aagaggaccaggggcggcccctgcccttccaccccaggggccgagccacggtcccctaagggagccgaaggagtcactgccaactgaaacccgccaccgtcaaacaacaggcctgctggggtcacgggccctggtccctccacgactgaaacgcaggcagcatcag

SEQ ID NO: 209989 - DNA, 37 bp, Homo sapiens
  chr5:1092774-1092811
  hypo
aagactgggggaggccgtcgcccggcttcagagcagg

SEQ ID NO: 209990 - DNA, 155 bp, Homo sapiens
  chr5:1094049-1094204
  hypo
ccaggaaggagcccagaaggcaccagccgaggagcacgtcccagctcaagtgcgggactgggcccccgccacagccttcaggacagggaggccccagttccttccacgtggtgtccagtcctgtgggaggccccggcctgggggcccccaggggc

SEQ ID NO: 209991 - DNA, 417 bp, Homo sapiens
  chr5:1095613-1096030
  hypo
tgggaacgaccaagccgggacccttcctaggggtgctcggcccatccttgcccagtccaccctagccctgcacagaatggtgtgggaccctgagggtgcagaagaaacggtcaaggcaggatgcgaggtggccggaggagggcaggccaagacctcatcactgcaccaaacaaccccagctgggagggtgggcattctctatgggacatttcagatgtgccagagcccactggcggccaccctggctggctgacaggcaccagccgcaggagtggtgggttccagccgtgccagcaaagagggcatcgccgtctgggggcaggcgggcagcacgtgctcccagtagggtgcctggggcggaaagcacagccttcagggtgtgcaggtccttggtgcgaccatgagtgactgcagatg

SEQ ID NO: 209992 - DNA, 570 bp, Homo sapiens; identical to SEQ ID NO: 199736
  chr5:1111381-1111951
  hypo

SEQ ID NO: 209993 - DNA, 390 bp, Homo sapiens; identical to SEQ ID NO: 199737
  chr5:1112011-1112401
  hypo

SEQ ID NO: 209994 - DNA, 664 bp, Homo sapiens
  chr5:1115142-1115806
  hypo
agtatatttgtacatcgctgatgaaacacattggtgggtctcagtcgatcaccattagtgccctttccaagcatcggtgtccagctttgcccagggggcctcttcaaatgcaatctcgcatccttatgatgtgagcctggtcatctgcgatggcctcttggccgtgtgcagggcacagccaggggaaccctgggatttagtgcgaaagtgtagccgatggtggttacattctgtgtgtagattctcgaaacagtccctgctgcctgccaccctggggtggagtttctaatggattaggacggacacccaatgccagcttccaagccaggaggccgctcgtgcccacggcttggaatcagggctgtggcctgggagggctctcaccagacgcaggctgcctccaggtatctgtgtgcctctgcccacggagcttctccccaggtccgcgggtccccccagtccacttctgctttcctgttagggtggggggctcatctcctggtgcgccatctgcatccttctgggctgggaacctgctgtcgggtatcaggcagggcgcacctccagggctgaaggatgcaggtggggctggcaggcagagtgtccgtggagagctccgtgtccagggaaggggacacctggaggaggccggccctggaggccc

SEQ ID NO: 209995 - DNA, 285 bp, Homo sapiens
  chr5:1116660-1116945
  hypo
cagtcctgtaattcacggacactgagtcttcgctcaagttccctctggaagattccgtggatgagtccgacacactcttcccctcactcaggaggctccaggatttttagaccacgtgtgtggctttccttctctcaaagtgtaactcacataatgttactcagaatctcacacggacgcccgtgagttgcagacacagggaaggttcgcatctcctctgaagtccaagctgcccagaagcccacccaccccccgccagctctcgttcctgctccacaggtgact

SEQ ID NO: 209996 - DNA, 209 bp, Homo sapiens
  chr5:1120339-1120548
  hypo
cacttctctttctcagaagacgctctcaagggcaggggagcaagcccgggtgcagctgggtgggcacctgccgtccacagggcccccccaccggcagtgtccggatcacacgaagacggcttacagaccagcaaggaaacgctgaacccggaggacaagagggcaaagacttgaactaacatggaggagcacgtggagatgccacctcg

SEQ ID NO: 209997 - DNA, 123 bp, Homo sapiens
  chr5:1120578-1120701
  hypo
ggggacaccacggtgtgctggccagatgctcacagccgctgtacctccccacacaactggaggtccgtggaatgcacggccactgtggaaaactccagacacgcctccatcaccacccagaaa

SEQ ID NO: 209998 - DNA, 31 bp, Homo sapiens
  chr5:1121007-1121038
  hypo
aacggccacgcttcgacgcgaagggctcctg

SEQ ID NO: 209999 - DNA, 195 bp, Homo sapiens
  chr5:1122644-1122839
  hypo
gtccgacggacgaaccgcattcccacagctgtgcgtccaccttcaccaccggtctccagagtcctcccaaactgaaggcctctccccagcctggcacctgccattctgcgttcggtctctacagatctgggaactccagggacctcccaggagaggatcagacagggccccgcggcatgacgtccacacagctcc

SEQ ID NO: 210000 - DNA, 333 bp, Homo sapiens
  chr5:1129368-1129701
  hypo
gagctgttgcagggtacaacgcctcctggctccaagtgaaagtcggaggtgggcaggacgttcaggtaacacccccacctccgaagtccagtctcacagagccttagcagccacccaaggcaaggaggtggccatgggccaccaggagtgtcccgagcatcccaggcccacaagggccagagaaagttccgggcttcccctagcgtaagggacagaaccaggcgccctcccctcctggccccctcagctttcctgtgacgcccaggaccaggaccaggaccagggaaaccacagcgtcccaggcgacagggtggagggcggctccaggagccc

SEQ ID NO: 210001 - DNA, 86 bp, Homo sapiens
  chr5:1177291-1177377
  hypo
agcccacccacagcgtggctcccaccgcccccggggttgcccacggcggggatcccaccacccctcgggccgcccatggcagggct

SEQ ID NO: 210002 - DNA, 287 bp, Homo sapiens
  chr5:1215723-1216010
  hypo
ttcatggtgtgcatgggctacggtttgtgcatatccatccatggacattttccacgttttggctgtcatgagtcatgctgacgtgagcctgtgtgtacgcgtttttgtggacgcatgctttcgttcttctgggtgtgcgcctaggagtggagttgctgcgtcatgctggcctctacatgcagtccttcgaggagctgtcaggctgttttccacggtggctgcaccactcacgttcccaccagcgtgcaggaagctccagtttccccgtatcctcaccaacacttgtt

SEQ ID NO: 210003 - DNA, 147 bp, Homo sapiens
  chr5:1216988-1217135
  hypo
aacgcctccgaccccgcggcctacgcgcagctggtgttccagacctgcgacatcaacgccttcctctcagaggtaggtccattccggagctcgaggcagggagagggcaccccttgctggcacctcagagtccggccacccctgggc

SEQ ID NO: 210004 - DNA, 295 bp, Homo sapiens
  chr5:1232524-1232819
  hypo
ctcctggatgagaggtggggcgggggcgggtccatgcctgtggtacggaagcggccaggccaggccggcgggtggggtggcagggagcccttgggtgtgtgtgagaagcagcggtgactcggggagaattagagatggagaacatgtgtgccaggacatcccggaaggacctggaagctggtgttgccattcacatgtgaggtgtgagggaggcctggctttcagctgcgcccttcagcatgtgttattttatgttgttattttgttttattctcactgcttctgggcagaggga

SEQ ID NO: 210005 - DNA, 51 bp, Homo sapiens
  chr5:1233291-1233342
  hypo
tgttagatttaagacgttaggtcggacgccgtggctcacgcttgtcaaccc

SEQ ID NO: 210006 - DNA, 105 bp, Homo sapiens
  chr5:1253819-1253924
  hypo
gcctggctgtgggcgggtggccatcagtccaggatggtcttgaagtctgagggcagtgccgggttggctgcggcctccagggcagtcagcgtcgtccccgggagc

SEQ ID NO: 210007 - DNA, 303 bp, Homo sapiens
  chr5:1264407-1264710
  hypo
ttgggattggcagtcgcctgccccacacggaagcagaggtggacgcaacggccctgcagcagcacctgccccagccgggcacaggctccacttccggccaggtgcgctcacctggagtagtcgctctgcacctccagggtccgggtatccagcagcaggccgcaccaggggaataggccgtgggccggcatctgaacaaaagccgtgccacccagggcctcgtcttctacagggaagttcaccactgtcttccgcaagttcaccacgcagccatactcagggacacctcggaccagggtccta

SEQ ID NO: 210008 - DNA, 192 bp, Homo sapiens
  chr5:1272061-1272253
  hypo
ctggagagaggccgcgcagtcaaacgtgagcaggtgcctgaatgcagcagctgtcgcagcctggcatggcccagctcagatttcgccaaggcacacagctcatcatgcccccatcacagctcattccccccactgccccccagggccaacagtctgtccggtcatgagcccagtgattgcccaggggaggac

SEQ ID NO: 210009 - DNA, 274 bp, Homo sapiens
  chr5:1277142-1277416
  hypo
cgccccatacagagcggggcaggacggacagccacctcccgcaagagccccggggcggccagcacgggaacactgtgggcacgtgggcatcaagagagccccctgcacaatcccacgaggcggcttcgacaccttcaggccagcggccaccggaggcatcgccctcacaagcagccagccggggtgtcactgtcacccccctggaaactcccacaacatccctaaagcacgtctgtgacccagcaaccccacccctggaattcacccagaggcg

SEQ ID NO: 210010 - DNA, 111 bp, Homo sapiens
  chr5:1318452-1318563
  hypo
tgcacttggctggcggcagcccgggcggccttcagtccgtgtggggcgcccgcgtggccttctcctcgtaggactccccaaactcgttcactctgcgtttatccacaggat

SEQ ID NO: 210011 - DNA, 213 bp, Homo sapiens
  chr5:1326183-1326396
  hypo
agggcagttctttacgccactctgcctgcacccaaataagcccccacctacttctgcctgccactcgggcagccctggagccagttttgggaccgctctgagagccgccacctcatggctaaatgcttggaaggcatcacccacggagctcaggacgggtgccagagccgggcacggcactgtgactcgtacctatggagggaccctgcctgt

SEQ ID NO: 210012 - DNA, 261 bp, Homo sapiens
  chr5:1331474-1331735
  hypo
tggcaggccccacacgcccaggcctgcgctggtcggggaaggaacaccggcgggaggacggggcgagggaaccaagacaggggatgtgaggccccagccctgctcagcgcccatgagcagccgggaaggctcgagaggtccatgcatctcactctccacagcccagacccagaccccatgcacgccagagtccgcagccaggccctgagctgtgcagccgctggaggccctgagccgtgcagcctctgatggtcccaccac

SEQ ID NO: 210013 - DNA, 207 bp, Homo sapiens
  chr5:1342379-1342586
  hypo
gaagggcagcagccacgagggctccaggtgcctcggcccacactactggaacctcagaaatttaatgtgggtagtttttttgggtgttgtagttttaaggataaaaagatgatcagccacaaaggactgactttcaaggctgtcagtcctgactgtgtggcatccagcacgagctgaggaaaggcccggcgagctgctacaactgta

SEQ ID NO: 210014 - DNA, 159 bp, Homo sapiens
  chr5:1468060-1468219
  hypo
tcctgctgcagcgcgctgtgatcttgtgagcgtttgctccaccctccgagaagtgggctgcctgggaggggcgtcgcctctcttcagggaggggctgcgccttcacctccaccggctcctccttgcggtgctcagggaagaaacgctgacgcctccagc

SEQ ID NO: 210015 - DNA, 320 bp, Homo sapiens
  chr5:1476401-1476721
  hypo
gtattgttcagagctgcctgtggtgggggttgagtggagctttgcgggacagagactgccgggcccatttctaccctcggacacatgctttgggagggagaggatgggaacgtgagggaacgggccgcccagctgaatcttcagggtgtcagcggagtgtgaacaaagtggctcggaggtcagagccaggcacactctgatgggcccggccgtggctgtgttcccctctgggctctctggagaggcgagttcccagccatgccccgacctgctgcagcaggagcctgggggtggggccggtggaccgaggctgatgtggc

SEQ ID NO: 210016 - DNA, 95 bp, Homo sapiens
  chr5:1490331-1490426
  hypo
ccctagattggaccccgccttccccctgtgggttgaactgcatcccctaaaagacaagctgaagtcctcactcctggtaccgggaatgggacctc

SEQ ID NO: 210017 - DNA, 202 bp, Homo sapiens
  chr5:1517524-1517726
  hypo
ccaagcagtacagcacagggcgccttctcagacaagagcggtgagacggagtgggacagggagccacgttctccgctgcctgggccctcccagcactcaagggcgctctgcccctgcaggcacaggaggcaccgggcatgggccagacacccagcaagtgtggtagtcgagtcccgtgcccggctcctgaagcagggctcct

SEQ ID NO: 210018 - DNA, 189 bp, Homo sapiens
  chr5:1546897-1547086
  hypo
gcgcgcagctgtcctgagaccgggcctggcccacagcgggtgcttactcaatgctgatgtctcggcacgtgcgtcatgttccgttctggagttagtcgtctttcatgaacacgcgggaaattttggggtgggcaggggcccatcaccggatcaaggtagggtttgaccgatgtgactggttagctggaa

SEQ ID NO: 210019 - DNA, 144 bp, Homo sapiens
  chr5:1641262-1641406
  hypo
ggctgtggggctgcccgccgccctcctcctcccacgctaggctgcccgccgccctcctcctcccaccctaggctacctgacccatggagaccggcctgagacagacgcatccccgaacaccaggtgccccgtcttctaggccat

SEQ ID NO: 210020 - DNA, 82 bp, Homo sapiens
  chr5:1704649-1704731
  hypo
cttgaaggtgcaatgcttgccgccaatccccactgcgcagagctgaccaggtggaggggacgaggccttgctggcacaggtg

SEQ ID NO: 210021 - DNA, 61 bp, Homo sapiens
  chr5:1729754-1729815
  hypo
agatgtgagctgtaagattccgcggctgtgttagaggaggcgccggggcctgggtgcagaa

SEQ ID NO: 210022 - DNA, 330 bp, Homo sapiens
  chr5:1729886-1730216
  hypo
cctccagacccagcctgtgtgcagaggggctggcggagctcggacgccgggctcgctggcctttgccgatggacctcgggtgtgtccaggccgggcgagggccggcagctccagtgaggcgggacctcactctatctgtgttgtgcatcctgttcgagtttctgggtcccgatcttgagcaagccaactgacctctctgatgttggtttgctcagatgtaacgtgcggttgacagcgtctatgctggagcacgtggcggcttaagagcaataggtgaaaggggtatctcagaagacgccctcaggacacggggatgccataggcctcggg

SEQ ID NO: 210023 - DNA, 77 bp, Homo sapiens
  chr5:1730252-1730329
  hypo
cctggcaggctggcacccgcgcgtgggctggggctcactctagctgttcccttggcgcttttatggatgttcacaga

SEQ ID NO: 210024 - DNA, 148 bp, Homo sapiens
  chr5:1747177-1747325
  hypo
gctctgtccccggcctctcccctcggcgcccctgcccggccaagcattgcgccaagcccacccccacctcacgtggcggcctcctccccggcttggggacttctctctgtcacttgcaaaaacacgcgtccttggatttagggccctc

SEQ ID NO: 210025 - DNA, 327 bp, Homo sapiens
  chr5:1786634-1786961
  hypo
aaaaccaaatcatcatgtctcgaggctcttcctctgcgccattggcggccgtccattctacaaatgacctgcctgcttgcctaaatgcgtcctgacggggccgagggaaggccgcacccctcgtgtgagatgctgtggatgtgttctggagatttctgtggccgtgtcacgggcaggggcgtcccgcgtgcacctgcagctcttgcctttgtccgattcttctttcagcacagggggtgccggtttcaggtggagcccgtgctgcgtggcccttctgttttcaggtcacaccagtgtccacccagcgggtttctgggtttgatggct

SEQ ID NO: 210026 - DNA, 226 bp, Homo sapiens
  chr5:1808311-1808537
  hypo
ttgtcttgaagcaacctgggcgtcctttagggggtgtttgagacgcgggcggtgcgatgtgcgccatggctgctctccagagcttttgtgtggcttcccgcttctgcatgctcctcctcctgagcttccctcccaaatacgccatctttatagtggagtgaaggcaatcggattttaaaagaaatcttctggatggataagaaccgtgggtctttgcttcctttag

SEQ ID NO: 210027 - DNA, 185 bp, Homo sapiens
  chr5:1815267-1815452
  hypo
aaaagaacacaggaccggagaaagagaccgtgggctgaagctgggatgtggaactggggtgcagggtgggagggaggctgccacagatcactcagggactcgggcggctgctgacctggggtgcagggagagggggaggccaccgacagtggagcactcagggactcaggcggctgctgggcttg

SEQ ID NO: 210028 - DNA, 275 bp, Homo sapiens
  chr5:1910374-1910649
  hypo
ggatagagtcttgggccacacggctgctcatgtgccgacatgccatgtcacccaggtggggatccggtcattaccacggagtggtcttgggcctctgtggaggggccctgcacctgcccaggccggcgtctgactccacatcgcgtgctctgtgggaagagcccagtggagccctgtacctgcccaggccggtgtctgactccagatcgcatgctctgtgggaagagcccagccagccacgcacaggctcctgccttgaaatatctgcgccttcc

SEQ ID NO: 210029 - DNA, 174 bp, Homo sapiens
  chr5:1922813-1922987
  hypo
tctgagggactcaccgctgctgctcagggacccctcctcccattctggaaaccatcggcaaaacctcagcagaccacggggccattactgtgggctccggtttccagccactgcacttccagacttttctcttcggagccagtgggaatttagcaaatgactggatggggtctg

SEQ ID NO: 210030 - DNA, 69 bp, Homo sapiens
  chr5:1923074-1923143
  hypo
cctgccagggcggccatgcctgctgctagagcctctgagaaaacagccgcctcctccccttcccatggc

SEQ ID NO: 210031 - DNA, 100 bp, Homo sapiens
  chr5:1951411-1951511
  hypo
gtgcgtgagtcgtctgctgtgcgtgtgccgtctgctgtgcgtgagtcgtctgctgtgcgtgtgtcgtttgctgtgcgtgtgccgtctgctgtgcgtgtgt

SEQ ID NO: 210032 - DNA, 146 bp, Homo sapiens
  chr5:1951710-1951856
  hypo
tgttgtctgctgtgcatgcatgcgccgtctgctgtgcgtgcatgtgttgtctgttgtgcatgtgtcatctgctgtgcatgcatgcattgtcttctatgggcacaggcgtcatctgctatgggtgtgtgcgtcgtctgctgtgggcc

SEQ ID NO: 210033 - DNA, 375 bp, Homo sapiens
  chr5:2111864-2112239
  hypo
gccaccgctggggtcggggtccagtcctggggaacgcgggtccctggagcacagcagggcctgaccgcctccgcgccgccctccccgcatttcctctcctcctccccaagcccatggctcagaacaccgagacctgcctcgccaagaaacgcccatttatttccttcctatttatttattttgcaaaagccgccttttgaaagccggagtgcagtgcggactggctgaggccggggcccaggcgcgcgcctccttcctgcaggcggcccggggcatcgatcgcgcggggcgtaatgaaccctaataacagctctatcaccgcccgcccgccaattggcccgggtgccctccaaattagccacaaagaagccagtc

SEQ ID NO: 210034 - DNA, 112 bp, Homo sapiens
  chr5:2112274-2112386
  hypo
gtgggagaacaaaggtgttctggcttgagctgaacaacttaactccttgtctcataaaatttaagctgctattgatcgcctccttgcattgtgtgaggattaaacacgtgcg

SEQ ID NO: 210035 - DNA, 165 bp, Homo sapiens
  chr5:2155744-2155909
  hypo
acttatttgtggaagtgaaccgtgacaggtagacggaatcctccgcagtcctccccggagttgccgcgatccaccactgaacgcagggcctgcggagtccacactcccctgctttcgtcaggcgcacgctagaggtggggctacgtgtttgccctgcataggtat

SEQ ID NO: 210036 - DNA, 75 bp, Homo sapiens
  chr5:2225364-2225439
  hypo
ctgaacccagaccccgcaggtgcacagcaagggagccgagtttcctccagcgcttgaaaaaaaagtgtttacttt

SEQ ID NO: 210037 - DNA, 154 bp, Homo sapiens
  chr5:2225469-2225623
  hypo
acggcctggaagcgcacttgtgatctcagcaaactgctgaaatctgtactgattgaggaaaagtatccctgttaaaggacgcgtgttcatgtatgaaagaagtggcttgaaatggaagatcgttcttgttcccgtgtctataatttaacatctg

SEQ ID NO: 210038 - DNA, 46 bp, Homo sapiens
  chr5:2541643-2541689
  hypo
tattgtgtgccctgtgtgcatactcgcatgtggagactctgctgta

SEQ ID NO: 210039 - DNA, 32 bp, Homo sapiens
  chr5:2990179-2990211
  hypo
ccccaacggggatgcgtcgttgccgtggatgc

SEQ ID NO: 210040 - DNA, 47 bp, Homo sapiens
  chr5:3221000-3221047
  hypo
cagatgcaggccggcgcactgtgctcctggtcctggcgcgagcatct

SEQ ID NO: 210041 - DNA, 156 bp, Homo sapiens
  chr5:3221181-3221337
  hypo
ttccagatgtcacttccaatgccagcccttccgcatgatagctctgtcaccaggagcgctcgggcgccttcactctgcttgcgcctctaaagcacacctgccccgcccacctggatctgctgtcaatagctgtcgggcgtgcggtgtgcaatttgg

SEQ ID NO: 210042 - DNA, 358 bp, Homo sapiens
  chr5:3282932-3283290
  hypo
caggcacagacatgcacaggcgcacacatgggcacagacacgcacaggcgcacacacgggcacagacacgcacaggtgcacacacgggcacagacacgcacaggcgcacacacatgaacacaggcacagacacgcacaggcggacacacaggcacagacacgcacaggcggacacacaggcacagacacacacaggcgcacacacatgaacacaggcacagacacccacaggtgcacacacaggcacagacatgcacaggcgcacacacgggcacagacacgcacaggtggacacacaggcacagacacacacaggcgcacacacgggcacagacacgcacaggtgcacacacaggca

SEQ ID NO: 210043 - DNA, 44 bp, Homo sapiens
  chr5:3324709-3324753
  hypo
gtggggctgggtcccaggctggctccccgccctccctcctactg

SEQ ID NO: 210044 - DNA, 171 bp, Homo sapiens
  chr5:3326308-3326479
  hypo
tggctctgctggagtccacccgcgccgcggcgggcgctgcgtcttaattcaatgttccggcttcagagcagccgtggaagccgggccctgaagtgtgtgcacatggtcgataaactgtaataaactttacgggttcggtaacgaggctgcgtgtataattcaattttttaa

SEQ ID NO: 210045 - DNA, 612 bp, Homo sapiens
  chr5:3535785-3536397
  hypo
tctcggcccgagggagaaacattttgaaattctttaagaagcaagttttccgtgggctgagtggacttctagggccctgaccacactgacctgggcttgtcgagctctgcccgcaggcccctcgaggtctgggtttcggccccatggccgtggctgtgcttggaaggccccgggagcagccagggagcgcggtgcctgccctccacggcggccgcctgcggggaacagggcagcgtccagcaggcggaaggcgagtgaggcagagtgaagcacacagagccaaaccatatcaccgccaccccgtgtgactgaggtcagggcttgcctttgaggcccagggtcagctggggactagcaggagctctaatctcgcgctgcgtcagggcgggaactgcaagaggccgcccccggcaggccgcgcatgcgcactcccgcgcgcacgctcacccgcgctgacccggctacgctggacccaggtgcggggacccaggtgcgctggacccaggcgtgcgccaccgccacctcctgcgcctacaccccgagagcggccgccgccagcagtggcatccgggctgtcccaagtcatccttcgtctgtttcagtgtctttatg

SEQ ID NO: 210046 - DNA, 189 bp, Homo sapiens; identical to SEQ ID NO: 199746
  chr5:3590922-3591111
  hypo

SEQ ID NO: 210047 - DNA, 94 bp, Homo sapiens; identical to SEQ ID NO: 199747
  chr5:3591458-3591552
  hypo

SEQ ID NO: 210048 - DNA, 218 bp, Homo sapiens
  chr5:3627912-3628130
  hypo
ctgtccgccggacctggacctgcagccgccatgctcaccgagaccttcatttctgcagatccgacggtgtgtggcgcctcttctcctgactcagcttctccatcgcatctggcacacttggcctctctggccccgtagcgggaaagcatgatttagatgtggcttctgggcttgcctacaccctagctgtccttcccgctcactggccatctacctcc

SEQ ID NO: 210049 - DNA, 127 bp, Homo sapiens
  chr5:3761440-3761567
  hypo
catctccctggcctttgcgtctctgtgtgggtgcacatgccctccctcctccctccatctccctggcctttgcgtctctgagtgggtgcacatgcgctccctccatctccgtggcctttgcgcctct

SEQ ID NO: 210050 - DNA, 322 bp, Homo sapiens
  chr5:3761623-3761945
  hypo
gcacatgccctccctcctccctccatctccgtggcctttgcgtctctgtgtgggtgcacatgcgctccctccatctccgtggcctttgcgtctctgtgtgggtgcacatgcgctccctccatctccgtggcctttgcgtctctgtgtgggtgcacatgcgctccctccatctctgtggcctttgcgtctctgagcgggtgcacatgccctccctccatctctgtggcctttgcgtctctgagtgggtgcacatgcgctccctccatctctgtggcctttgcgtctctgagtgggtgcacacgttctttttctatcttgatgg

SEQ ID NO: 210051 - DNA, 394 bp, Homo sapiens
  chr5:4144516-4144910
  hypo
acacagctaagtgtgttctgtgtggcatgctctagtgtgcgcatggaatgctgactgcacagcttactacgtgtgttctgtgttccgtgctctcacatgcatgcggaattctgacggcacagcttactaagtgtgttcggtatgccacacacttgtgtgcatgcggaatgctgactgcatagcttactatacgtgttctgtgtgccccactctcctgtgcatgtggaatgctgactgcatagcttactatgtatgctctgtgggctgtgctctcatgtgcacgtggaatgctgaccgcacagcttactaagggcgtcctacgtgcggtgctctcatgcacatgcacaatgccgatggcacagcttactaagtgtgtactgtgtgctctgctctc

SEQ ID NO: 210052 - DNA, 116 bp, Homo sapiens
  chr5:4580998-4581114
  hypo
cacatgcacacacgcgtggacaggcacacgcacagcgacactcttgcacatggtcatacacgtggacaggaacatgcacagcaacactcttgcacacacacacacacacacacggt

SEQ ID NO: 210053 - DNA, 267 bp, Homo sapiens
  chr5:4581329-4581596
  hypo
cacatacatgtggacaggcacacgcacagtgacgctcttgcacacgcacacacacgtggacaggcacatgcacagcgacactcttgcacacacacacacgtggacaggcacacacacagcgacgctcttggagagcacatacatacatgtggacaggcacacgcacagcgacgctcttgcacacgcacacacacgtggacaggcacatgtttgcagcacggctcactctcaagtccacgcccacacgcacagaggcagcttcgtgaa

SEQ ID NO: 210054 - DNA, 165 bp, Homo sapiens
  chr5:5303414-5303579
  hypo
acgtgtggcgggggtgcccagagccgccccgtgcagtgcacacggcgggtgcactatgactcggagccagtcccggccagcctgtgccctcagcctgctccctccagcaggcaggcctgcaactctcagagctgcccacctgcatggagcgccgggccctgggca

SEQ ID NO: 210055 - DNA, 87 bp, Homo sapiens
  chr5:6758954-6759041
  hypo
cgtgaccagcttccgtgtgttccttttgatttgcccagggtctcgagtgccacctctctaccctgtgagatacgcagaggaccctgt

SEQ ID NO: 210056 - DNA, 215 bp, Homo sapiens
  chr5:6846210-6846425
  hypo
gccttgggttcgtccggagcgcctggaaggtttgcagtcccccctccccgccacccccgaggccttgggttcgtccggagcttctagaaggtttgcagtcccccctccccccaagccccgaggccttgggttcgtccggagcgtctagaagggtcccccctcccctccacccccgaagccttgggtccccagagcgcgcccagggcttttttttt

SEQ ID NO: 210057 - DNA, 36 bp, Homo sapiens
  chr5:7704693-7704729
  hypo
aaaacatgtggctagttggccgggcgcggtgggtca

SEQ ID NO: 210058 - DNA, 147 bp, Homo sapiens
  chr5:7825240-7825387
  hypo
actgctgtgtcccataataacgctgctgtgtgccacgacaacgctgctgtgcgccacgacaacgctgctgtgcgccacgacaacgctgctgtgcgccacgacaacgctgctgtgtgacatgacaacgctgctgtgtgccatgacaat

SEQ ID NO: 210059 - DNA, 92 bp, Homo sapiens
  chr5:8649803-8649895
  hypo
ttcttgaaataaatttcctttcttgggatgcgccacataacactctcctgttttctttttatctccttcacgctttcttcaatttcacttac

SEQ ID NO: 210060 - DNA, 155 bp, Homo sapiens
  chr5:9066591-9066746
  hypo
cttcccacttccagcaaattcggatcagccaggcgggctttgcatgtgtatcggaatcgttgctcatagtggccgccgttgtcagagatgttgacaggtgtccagggtgtccagggcgtggtcttcttcagctcaggacacgggttggtgttgca

SEQ ID NO: 210061 - DNA, 255 bp, Homo sapiens
  chr5:9119015-9119270
  hypo
ggcagatccaaaactaaaaccgcggggaactcgacctggccggaatgagagtaagcgtgaggctggcggtgctggcagcagggtgggcacgtacctttcctcgcggttctgtcccacgcacacccggcccccgtgcctgggagtggggttgctgcaggagcgctgccgcacctggaagccgatcccacaggtagtgctgcagggagaccacgaggtccagggagtccagcctccgttcctgagggaagggaagca

SEQ ID NO: 210062 - DNA, 402 bp, Homo sapiens
  chr5:9122692-9123094
  hypo
aaatgatgtcccaaactcctcgagaatctgagtttaatacacagcagcacaactggcgtgttctgagcggcacacctggaacagttggcgatctccatgccagggccctcgcactgccagccaccacactgcggggccgggctgtcgcaggagcgggttcgacagaggcaggatcccacggcgctgccatctgtgtgcgtgcaaggcgtccacggagaccacacaccaaagtgcccatccacggtgagattcctggtctaggaagcaaaaccaagcagaggtgtcagaaaaggttaaagctgaacacataatggagtaaaaattaaaaatccctcataagacaatcaaaactcctctagaatttgttgttgttgttgctgcagttagaaaaagggccaggcg

SEQ ID NO: 210063 - DNA, 179 bp, Homo sapiens
  chr5:9497476-9497655
  hypo
tttcaaatatacagtccatacggttcagacacaatggactggggatagagacggctatagtgccgataatggagaaactagccagagcttcagatatttgttttccaggacatctcaataattgggtacacctcacaatatgtgagacttgacgtcgagtggcacggcatactctggcg

SEQ ID NO: 210064 - DNA, 279 bp, Homo sapiens
  chr5:10453597-10453876
  hypo
tcatttttatgctttaaaaaaataccttcaaaaaggaggaaatgaagtgcgatgagaataatttgtagtggattaccacctgcagaagtttatttcacataggatgctgtgtaattggtggctagccgctgcctgcgtgagcgggatagatgtcgttcctgctccctgcatctatggcgggggcgtggcttgtggcaggtgtactctctgtgctgtttacatttatttatcttagaaatcactctagtcaaattcatcgagttgaagatctctaaaaag

SEQ ID NO: 210065 - DNA, 106 bp, Homo sapiens
  chr5:10486101-10486207
  hypo
cacccaggtggccagcgctggtggttccatctcagatggagctgggcatgactgggccaggcagatgtgtgggccttggccaagcctgggccggcccctgctctgg

SEQ ID NO: 210066 - DNA, 40 bp, Homo sapiens
  chr5:10548513-10548553
  hypo
gatagatacacacggcggtgcattgcgcttttgtttacaa

SEQ ID NO: 210067 - DNA, 141 bp, Homo sapiens; identical to SEQ ID NO: 199757
  chr5:10564330-10564471
  hypo

SEQ ID NO: 210068 - DNA, 36 bp, Homo sapiens
  chr5:10618606-10618642
  hypo
ccgtggccagagcaccgccgccgggcagcccgggct

SEQ ID NO: 210069 - DNA, 107 bp, Homo sapiens
  chr5:10702260-10702367
  hypo
ggaatttgttgtgtgcccagcgcctggcacatggtctggtgcgcacacatactcaacaaatgctttgagcaccaaatgacatcaccggtcagcgaccctcagcttag

SEQ ID NO: 210070 - DNA, 100 bp, Homo sapiens
  chr5:10936742-10936842
  hypo
aaagtacctgcagggcatgacggcgtgttctcctctgaaggtctttaagaatagcatggattccgcctgggcgcggcagctcacgtcagtaatcccagca

SEQ ID NO: 210071 - DNA, 400 bp, Homo sapiens
  chr5:12794952-12795352
  hypo
tgtcccaccttctcctgtgacgcgtctccctgcggcagcgccgcgctgaggtgccacactgctggttccaacaccgcagccgccaccgccgccgccattttcgtggcggatgagggcccgtggctgcccttcatggctgctgtgccggcgaagaggcattctgacctccagggctgccgcaggcctcaccatgtccttggatgtgtgatgccctacggggacagccaggccgctgtggggccacccccgaaggccactggccactccgacgagcacccggcccagaccaagagccctgcaaacaaccgtcataggaagcggccaggccgcaaccaggctgtcgcagctcagaggcctccagggcggggtctgtttcctcggcctttgcagccatcttctc

SEQ ID NO: 210072 - DNA, 99 bp, Homo sapiens
  chr5:14122606-14122705
  hypo
aagtctcctgtaactcggttgtgaagggcatgggggctacagaggaaaacacatgcataaagggccagagtgtaaatagtttggtgtgatggaaagcgt

SEQ ID NO: 210073 - DNA, 1289 bp, Homo sapiens; identical to SEQ ID NO: 199764
  chr5:14142816-14144105
  hypo

SEQ ID NO: 210074 - DNA, 124 bp, Homo sapiens; identical to SEQ ID NO: 3833
  chr5:14144285-14144409
  hypo

SEQ ID NO: 210075 - DNA, 181 bp, Homo sapiens
  chr5:14273915-14274096
  hypo
ttagaaaatctcacacgacaaccaccagaattaagaacgcattcttttttaactgtttattatggaacattttaacatcaaaaggaaagaaaatagtatagtgaatttgtacgaattcgttgcccacttcagcaacttgtttcatctatatttccacttagtcttccgttcactctggata

SEQ ID NO: 210076 - DNA, 190 bp, Homo sapiens
  chr5:14303326-14303516
  hypo
tggaggagattgagccgggattgggatggctgccgcaggaccgttgatgatcctggagatggagggtggcagtggaggagattgagccgggattgggatggctgccacaggaattgatgatcctggagatggagggtgtcagtggaggagattgagccgggattgggatggctgccgcaggaattgatga

SEQ ID NO: 210077 - DNA, 191 bp, Homo sapiens
  chr5:14319946-14320137
  hypo
aacatggttaattttggtttcgaggttaattttttcccctcttaataagcgggggccaattcataacttctgtgtagaaggcattttggatggtagtcaggcgtggcgggaaaggtggttgaagctgctgtgtgtagcacacttaccgtgcttccaatttagagctgggcggggaattgggaagacctgct

SEQ ID NO: 210078 - DNA, 105 bp, Homo sapiens
  chr5:14325452-14325557
  hypo
accagcatgtgcttctggggaggcctcaggctgcttccactcagcatggaaggcaaaggggagccggagctgcgtgtacagaacacacggcgagagagaagcaag

SEQ ID NO: 210079 - DNA, 481 bp, Homo sapiens
  chr5:14328242-14328723
  hypo
ccagttaaagtgcacgcccaatacgctagttaaaacaaagcactcaatacaccagttaaaacaacgcgctcaatacatgagttaaagtaatgtgcactcaatacgttaaaacaatgtgcaagttaaaacaatgcactacttaaaacaatgagctcaatacgctagttaaaacaatgtgctcaatacactagttaaaacaatgcactgaatacgcttgttaaaacaatgcactcgttaaagtaatgtgcactcaatgcactagttaaaacaatgcgcccaatatgctatttaaaacaatgtgctcaatacactagttagtgtgctcaatacgtgagttaaaacaatgcgctcaatacacgagttaaaataatgcgctcaatacgccagttaaaacaatggactcaatactctagttaaaataatgtaccgaatacattagttaaaatggaatatgtacagcctgtgccgtcaggagcttgaa

SEQ ID NO: 210080 - DNA, 315 bp, Homo sapiens
  chr5:14332850-14333165
  hypo
cagtggaaaacttcatctctcggagcctcggttttccttgctgtaaaatgatacctaacacctaccttcaccgagtcgctgtgatgagaatacatgtagaaatgcctgacacccagcaggcgcttgtggtgctgtctttgcctagaacagtacgatcattcagattattcagatcttttggtgaatactagccttgtgtttacgttttgggacaagagccactagaagccaaatgcgcctgcgactttgcccttcctgcagtcttcagctgcaggaccagtttttactaaagacggccagaggctgtatttggaa

SEQ ID NO: 210081 - DNA, 159 bp, Homo sapiens
  chr5:14338464-14338623
  hypo
ttccaggacccctcccgctcaacacagtatcccctgatccagaactttctggcacctttgagacaaggatgggcgtggttagccgctctcccttgcaccttctagagctccctctacatgcacctgttaacggcagttgtcatgcgtgtgattgtgtgt

SEQ ID NO: 210082 - DNA, 314 bp, Homo sapiens
  chr5:14348848-14349162
  hypo
cctctgtgtgtgtacgcacatgagcatgtgtgtttttcctgcatgtttgtgtgtgtacgcacgtgagcatgtgtttttcctgcgtgtttatgtgtgtgtacgcacgtgagcatgtttttcctgtatatgtgtatgcacatgagcatgtgtttttcctgcatgtttgtgtgtgtacgcacgtgagcatgtgtttttcctgtatgtgtgtacacacgtgagcatgtgtgtttttcctgtgtgtatatgtgtgcgcacgcacatgagcatgtttttcttgtgtgtttatttatgtgtacgcacgtgagcatgtgttt

SEQ ID NO: 210083 - DNA, 175 bp, Homo sapiens
  chr5:14378048-14378223
  hypo
aatgaatggaatttcgcggttgttttaattgattgcaagcaccaacatacatcattttcttttttctctcagatatcttgaatgaactcttccaacgggagaacagggtattgcattactggaccatgaggaagagacggctggaccagtgtcagcagtacgtggtctttgagag

SEQ ID NO: 210084 - DNA, 102 bp, Homo sapiens
  chr5:14381249-14381351
  hypo
gatccatgacaatggcgagttctacctttccacacacacctccacgggctccagtatacagcacacccaggagctcctgaaagagcacgaggagttccagat

SEQ ID NO: 210085 - DNA, 221 bp, Homo sapiens
  chr5:14390754-14390975
  hypo
agccagctctgcacgcgtgactgtggaaagagaggactggtgctcagcccgacgtgtcggggtcggggaggctgctgcagctgcatgctgtcagaacgatgtgtttcttatttcagtagctttctttttaaaatagagtctcttcaactcgaggcttaaatttccgttatccatactgcttcttttctatatgaaagtttatcatgcgttgacttgttatg

SEQ ID NO: 210086 - DNA, 435 bp, Homo sapiens
  chr5:14409998-14410433
  hypo
ttgcctctccagccccgctcctgggaggctctttcttactgaggaccgcagcctgccacgcagcaacactcaccctggtattctcatggttaaccatcttgaaggaatgacactccagactcagtttcttaaacagacctggcgaattttcttaatgccacttgctgagagcatcggtccttagtaggctctaaagcacagaaaggatgaaatgtcgtgtcgtgagaacagaaccacagcgggtgtcttactccgttctggagacctgcatttgggattaaacggcgtatgagacttgccaataagtcagaatttggaatttggagaggacgtacccatgcggccttacaaacaagaaggtgcacgtttgctgcccacgtgtgcctgcgtttgtgtgtgctctgcttatgtgacgttttctcttagccatctccc

SEQ ID NO: 210087 - DNA, 327 bp, Homo sapiens
  chr5:14427574-14427901
  hypo
cagcacgggggatacgccggtgctgtttccctgctcagaatacaaccagttaccagaaacgacctcacccctccaaccactttccaaggtgccaggacagagaagcccttcactggcccacccagggcagttgacagagggatgccctccttggaggggagcctcacctctacccacagggccgcggccttgtcctggattctcaccggggcagtcacgtcaggatggagaggtcccatgtcagccagttctttggtgggggtcatgtagtctgaaatgacctgccgatggtccaggctgagccagggaagccgagcctgggtgcct

SEQ ID NO: 210088 - DNA, 105 bp, Homo sapiens
  chr5:14435287-14435392
  hypo
gctgagtacagcagggttttattgggtgaaaagggaaaaaaagggggaaagaaggatcctccacgaggccggactccctgctagagcacccgcagtttgaatccc

SEQ ID NO: 210089 - DNA, 160 bp, Homo sapiens
  chr5:14454341-14454501
  hypo
ttgatctttcatggtatttctcaggtcagttctgtcctgagcccccaccccgacactgctttacatgacaggcagtgttcacgtacacttagtctggactctgccttctgagacagcaaagcagtaacacaagtgagagatgagtcgctagaagggttgc

SEQ ID NO: 210090 - DNA, 155 bp, Homo sapiens
  chr5:14460339-14460494
  hypo
taaaatgtggtggcgtttttgttcattgttgctgatatttacttcagcacatgtggtaagtttctcaagactgtgagcaaagtcccggtgtgccgccgtggcctggccgtgaacaggaaagaggctgagggccgctcctccgagagccccaccag

SEQ ID NO: 210091 - DNA, 268 bp, Homo sapiens
  chr5:14461124-14461392
  hypo
cagactcgctctccgtctccagcaatgacgccagtccacccgcatccgtggcttccctccagccccacatgatcggggcccagagctcgccgggccccaagcggccgggcaacaccctgcgcaagtggctcaccagccccgtgcggcggctcagcagcggcaaggccgacgggcacgtgaagaagctggcgcacaagcacaagaagagccgcgaggtccgcaagagcgccgacgccggctcgcagaaggactccgacgacagtgcggc

SEQ ID NO: 210092 - DNA, 187 bp, Homo sapiens
  chr5:14485223-14485410
  hypo
aatttgctctgacatcgaggacgggtgacgtggtagagaccttcattttgcattcatctagtccaagtgtccggcaaacttggatccatgaaatcaaccaaattttagaaaaccagcgcaattttttaaatggtaatgtgtgttctgttactagatgtgtgctttctttcctcgtgtactcacttgt

SEQ ID NO: 210093 - DNA, 709 bp, Homo sapiens
  chr5:14487989-14488698
  hypo
ccaggaaaggcgccgcgaacgcctcggggtcgagcccagacgcccccgccaaggacgcgcgcgctagcctgggcaccctgccgcttgggaagccccgggccggggccgcttcgccgctgaactcgccgctctccagcgcggtcccttctctcggcaaggagcccttcccccccagcagccccctgcagaaggggggctccttctggagctccatccccgcctcccccgccagccgacccggctccttcaccttcccgggggacagcgactccctccagcggcagacaccccgccacgcggcccctggcaaggatactgaccgcatgagcacgtgctcctcggccagcgagcagtccgtgcagtccacccagagcaacggggtaagcgcgtcggggggcccgcgccctcccgcccccctgcctctgtcccgccagctctaaacgccaccgcggctgttctcactaactcggctgcccagcgctctccgccgcccgttgcggcctctacctgggaccaggctaaccctcctgcgggccggcccacggcgctactaactactccttgctttgttcgtgtcttctaataagagcaagccgatcattaaccttctcaacgcagcgtcttttggtttcttccatttccaaccagcagaatatcttcttggaactttcttttttaacctctgccttcctcacgcacctattttttg

SEQ ID NO: 210094 - DNA, 183 bp, Homo sapiens
  chr5:14489508-14489691
  hypo
ttcagttaggttggacgtgctaggtaggcaggtatgctaggcgggtgagcatagatttgagtccagtgtggggtggtggggagatgcagtcaacccagtgacgggctatacccgtcagcacttagttggatactcagtatccaggtgtggccttatagctgtgaccctcgctgaatctgccag

SEQ ID NO: 210095 - DNA, 168 bp, Homo sapiens
  chr5:14492758-14492926
  hypo
ctaccaaggagaggtcgttcaaattctggccagcaaccagcagaacatgtttctggtgttccgagccgccactgaccagtgccccgcagctgagggctggattccaggctttgtcctgggccacaccagtgcagtcatcgtggagaacccggacgggactctcaagtg

SEQ ID NO: 210096 - DNA, 175 bp, Homo sapiens
  chr5:14493321-14493496
  hypo
aggaccagtagggagcgtgcggagatgttggcatagacacaggcacacctcaggttgttttgtgctttgctttaatgtgctttgaagacattgccttttttacacgagttttgtggcaaccctatgtcaagcaagtctctcggtgccatttgtccaacaacgtatgctcacactc

SEQ ID NO: 210097 - DNA, 508 bp, Homo sapiens
  chr5:14498282-14498790
  hypo
ccccaaagcctcaattacctggaagggccctgaacacaacaccttgaacaacgatggtcactacagcatctcctacaggtgagggaggcccactcctggtgggtttcgctggctgggagcaccatcttgtcacttggcaactggaaattcctccttcacggatggatttctttggctgccttcggcactccacttcttccgtgagagcccatttcacgcctgggtgtacagctcctcatcagcacttgagctcctgccttcccttgatcctgaaggaggaggccagcgctgatggccacgtgctcagcttttctgatgcgcagtgtgttcccatctgtgccgcagtgacctgggagaggccacgctgaagattgtgggcgtgaccacggaagatgacggcatctacacgtgcatcgctgtcaatgacatgggttcagcctcatcgtcggccagcctgagggtcctaggtaagcaccgtgcaacgaggattctacgtgacccagtgggg

SEQ ID NO: 210098 - DNA, 98 bp, Homo sapiens
  chr5:14504056-14504154
  hypo
acacccccacaggggcgaggctgaggcagtgaccacagcagacgcacctttcaaacgtgcagggaaaggtggctgacgggaggcgtgagcagccatcc

SEQ ID NO: 210099 - DNA, 275 bp, Homo sapiens
  chr5:14507312-14507587
  hypo
gttctggaagctgtccggtacctgcacaactgcaggatagcacacctggacctaaaggttggtgaggccccgggcaggtgaaggggggtctgagcacaccggcttggccatgcgggacacagagccccctctgaagccaggccaggagcccccaagtgactagggacaaaaagggtgggtggggcagcgcagacactgattgctaatctctctctctaagcgtttgcgttcagtgatgcacacggtcaggagcacactgggtaaaacgccggagc

SEQ ID NO: 210100 - DNA, 142 bp, Homo sapiens
  chr5:14508326-14508468
  hypo
cctgcaggaggaccccgccaagcgtccctcggctgcgctggccctccaggagcagtggctgcaggccggcaacggcagaagcacgggcgtcctcgacacgtccagactgacttccttcattgagcggcgcaaacaccagaat

SEQ ID NO: 210101 - DNA, 110 bp, Homo sapiens
  chr5:14849840-14849950
  hypo
atagctgtgccggacgatccctctgccctggatgagaatacacacttgttaagtcacattgtcatccaggcagacgctgcttgtcacggtcactcggatgtgcatcctca

SEQ ID NO: 210102 - DNA, 93 bp, Homo sapiens; identical to SEQ ID NO: 199768
  chr5:15499745-15499838
  hypo

SEQ ID NO: 210103 - DNA, 127 bp, Homo sapiens; identical to SEQ ID NO: 199769
  chr5:15499947-15500074
  hypo

SEQ ID NO: 210104 - DNA, 384 bp, Homo sapiens
  chr5:16670787-16671171
  hypo
gtccagcatctgctcctcctcgaccttctgccggaccacggatcctgtccggaagctccgcctcagggtcccctctaggaagctcgtccgcctcttctccagccgttcacaaggggtgaaggttttggttgactggctgatgcgggccttgagtctctgcagggaataaacctcttcgagaggtgggatggcagcgtgcagagtataatccccctgcagatactggagtcgcagggcagcaagaacctggaggttttcttccggggctggatggtggccatggataaccgcttcgtgggcctgaaaggagacagtcaacagctttccggtcaacgcactgccatgccatgggatgcccacgtcgcttgctccctcacttcatga

SEQ ID NO: 210105 - DNA, 42 bp, Homo sapiens
  chr5:16674283-16674325
  hypo
tgaaaattcttggccgggcgccgtggctaacgcctgtaatcc

SEQ ID NO: 210106 - DNA, 311 bp, Homo sapiens
  chr5:16681935-16682246
  hypo
ggggagtctgttaagcagaccgaggaagcagggcaggcagtcacctctcacgatgaattcctggccctccactctggtgtcccctttggacctctgcagcagggttatccagtggtgcatctcctccggcgtgtcggcgttgcagtgcagcacccggttggccgtgatgatcacaaacgagttgggtctgagccacaagatgagaaggaaacaaagccccttagccctaccgtcagcatcacctctgtgtgaaccgagactcagtgccttcttcctggcttctgggtcacgggatatacactgctaggcta

SEQ ID NO: 210107 - DNA, 702 bp, Homo sapiens
  chr5:16701010-16701712
  hypo
gcaacaggggtgggtgtgaccggccacccatttcactgggacacgccaggcaggtacttaccgaggactgcgccccctcagagctgaaccggtaggcacccgagctgttgtaggtccccacagagcagcggtagtcgggggaccactggctgccgtaggagttggagaaggtcacgctgctgccggaagtgatggcaccgtcctcatagtcatcctggtcgtagtcgtagtcgccgtctggggagggcaagtccccagcgttctggggcatgcagtaggtggactcgccgctggaggagttgtgtaggctcccggagtcctgcactgatggggcgagcagcaccgtgctgtccgcactggggctggtgggcaccaccgtgtcgttcatgtatgggtcctcctctgaagagtcatcgctggtccggatgccacttgttcgctggtctgagtggccgtgctcgctggggttgggggagtccttgaaggcgtcgtcgtcggcttcgaagccctcatcgacctcctcctctgggtagggctggctgaagttgaagttgggcttctcctcgcatgcgctctcagccagctcgctggaaaattcgcttcccaccgacagggaccgctcgatattccggacacactcgtcgatctcgtcgaaattgagggactcgaggaactcctgggccgccctgcacgcttcctcct

SEQ ID NO: 210108 - DNA, 31 bp, Homo sapiens
  chr5:16729562-16729593
  hypo
ttttttttttttttttgagacggagtctcac

SEQ ID NO: 210109 - DNA, 311 bp, Homo sapiens
  chr5:16794680-16794991
  hypo
ggaggctggggttgggggtgcgcggagggactcctgggccatgggaaagtccgactggctgtgagccccgttacctgatgaggatgcactggttgtcgtggcgcttccacaggcagcggtagcactcgttggcgatggcgaagatgtgcgggggcagctcgcccaggtggcgccggctgtactgctccatggtggcaggctcgtacagcccggcgatgggctggtaggggttcacggaggccaggatggagccgatgtaggtctgcaagcacagagtgagacagggatgcgtcacttctaacccaggccac

SEQ ID NO: 210110 - DNA, 32 bp, Homo sapiens
  chr5:16816658-16816690
  hypo
ttgagatggagtcttgctgtcgcctggttgga

SEQ ID NO: 210111 - DNA, 98 bp, Homo sapiens; identical to SEQ ID NO: 199772
  chr5:16935458-16935556
  hypo

SEQ ID NO: 210112 - DNA, 266 bp, Homo sapiens; identical to SEQ ID NO: 199773
  chr5:16935617-16935883
  hypo

SEQ ID NO: 210113 - DNA, 33 bp, Homo sapiens; identical to SEQ ID NO: 199774
  chr5:16936321-16936354
  hypo

SEQ ID NO: 210114 - DNA, 70 bp, Homo sapiens; identical to SEQ ID NO: 199775
  chr5:16936514-16936584
  hypo

SEQ ID NO: 210115 - DNA, 33 bp, Homo sapiens
  chr5:16952528-16952561
  hypo
gccaccgtgcccggccttgtatcacattcttta

SEQ ID NO: 210116 - DNA, 120 bp, Homo sapiens
  chr5:16969886-16970006
  hypo
ccgtctcaaaaaaaaaaaaaatggactcatttaggctgggcggtggctcacgcctgtaatcctaacacttttggaggcctcggttcatgaggtcaagagattgagaccatcctggccaac

SEQ ID NO: 210117 - DNA, 32 bp, Homo sapiens
  chr5:17032024-17032056
  hypo
aaggcaatggcggacccaaagagtgagcagca

SEQ ID NO: 210118 - DNA, 35 bp, Homo sapiens
  chr5:17161190-17161225
  hypo
catgttatgaatgaaaagtccgggccaggcgcggt

SEQ ID NO: 210119 - DNA, 48 bp, Homo sapiens; identical to SEQ ID NO: 199778
  chr5:17217633-17217681
  hypo

SEQ ID NO: 210120 - DNA, 236 bp, Homo sapiens
  chr5:17275349-17275585
  hypo
aagaagggctacaatgtgaacgacgagaaagccaaggagaaagacaagaaggccgagggcgcggcgacggaagaggaggggaccccgaaggagagtgagccccaggcggccgcagagcccgccgaggccaaggagggcaaggagaagcccgaccaggacgccgagggcaaggccgaggagaaggagggcgagaaggacgcggcggctgccaaggaggaggccccgaaggcggagcc

SEQ ID NO: 210121 - DNA, 307 bp, Homo sapiens
  chr5:17275617-17275924
  hypo
ctgagcccccgaaggcgcccgagcaggagcaggcggcccccggccccgctgcgggcggcgaggcccccaaagctgctgaggccgccgcggccccggccgagagcgcggcccctgccgccggggaggagcccagcaaggaggaaggggaacccaaaaagactgaggcgcccgcagctcctgccgcccaggagaccaaaagtgacggggccccagcttcagactcaaaacccggcagctcggaggctgccccctcttccaaggagacccccgcagccacggaagcgcctagttccacacccaaggccca

SEQ ID NO: 210122 - DNA, 378 bp, Homo sapiens
  chr5:17354380-17354758
  hypo
gttcttcaaagccacatcatcgcggtcaaagtagtaagacatggacaggtaaacgcaggaggcgtagagctccaggttgatctggcggttgatggcggcctttagtcctggtggtagtcctggcgcacctgtgaggtggacgcggtcgtcatggcggcgactaaggagaggcggctgcgttcgcggtggtgactgcgcagtgctggagcggcggcgggggccttggggcagtccgagggcgcggtgaggaggtgacggagggctggctatgggcagccggccggtgtgggggacgagcgccaggttctgtccaagcactgttgaagcaggaaaccccgacgactctcgtggaagaacgtccatctctctacttttaag

SEQ ID NO: 210123 - DNA, 159 bp, Homo sapiens
  chr5:17670364-17670523
  hypo
ggttggtgtcttcaaagaggcgcaccaggtaggccttgctgggctcctgcagggcgctagtggttgcgctctggaagcgcaggtccgggctgatggcctgggtgatctcgcgcaccaggcgctggaagtgcagcttgcgcaggagcagctgagtggact

SEQ ID NO: 210124 - DNA, 76 bp, Homo sapiens; identical to SEQ ID NO: 199779
  chr5:17987028-17987104
  hypo

SEQ ID NO: 210125 - DNA, 110 bp, Homo sapiens
  chr5:18482130-18482240
  hypo
gcagacaggacacataaatgtgggaaacataagaaagagccttgaggaaagagagcagcctgatgatcccaggctacgaacatggaggaagacgccgggtaaggtatctg

SEQ ID NO: 210126 - DNA, 33 bp, Homo sapiens
  chr5:27121727-27121760
  hypo
aggctgaggggggcagatcacgaggtcaggaga

SEQ ID NO: 210127 - DNA, 33 bp, Homo sapiens
  chr5:27121940-27121973
  hypo
gggcgacagagcgaaactccaaaaaaaaaaaaa

SEQ ID NO: 210128 - DNA, 121 bp, Homo sapiens; identical to SEQ ID NO: 199781
  chr5:29296854-29296975
  hypo

SEQ ID NO: 210129 - DNA, 32 bp, Homo sapiens
  chr5:30864345-30864377
  hypo
ttgaaagagtgggaggaggccgggcgcggtgg

SEQ ID NO: 210130 - DNA, 31 bp, Homo sapiens
  chr5:31670494-31670525
  hypo
aaaatacttgtcttagtttgcgtttatttta

SEQ ID NO: 210131 - DNA, 31 bp, Homo sapiens
  chr5:31724694-31724725
  hypo
gtgaaattccgtctcaaaaaaaaaaaaaaaa

SEQ ID NO: 210132 - DNA, 498 bp, Homo sapiens; identical to SEQ ID NO: 199784
  chr5:31854442-31854940
  hypo

SEQ ID NO: 210133 - DNA, 57 bp, Homo sapiens
  chr5:31908394-31908451
  hypo
cagctccaagctccgggctcctagaaggcagcgccactggtcgtctccctttagctg

SEQ ID NO: 210134 - DNA, 101 bp, Homo sapiens
  chr5:32314457-32314558
  hypo
tgggtggcagagcaagactgtgtctcaaacagaaaaaaaaaagtgtcaaatcaagtgttaacaaggcagtgaggaataagtttgagcgtttgataataaaa

SEQ ID NO: 210135 - DNA, 44 bp, Homo sapiens
  chr5:32333128-32333172
  hypo
ggattacaggcgcgagccaccgcgcccagcctacacctggtttt

SEQ ID NO: 210136 - DNA, 228 bp, Homo sapiens
  chr5:32445349-32445577
  hypo
cacaccctaaacatccctcccggacatacctcttgctataccctttcctcgacctgcacccactccctgagccatccggcgtatatcggtcacccagcagggtgtcaggcagtgttgtaggtgctggagatacggcagagaacaaaacaaagtccctgttcccgtggagtttacgttctaggagcgggtatatgtcagccaacagccggtagccaaaacacagaaatt

SEQ ID NO: 210137 - DNA, 33 bp, Homo sapiens
  chr5:32446098-32446131
  hypo
cattaaaaggaaatgctggccgggcgcggtggc

SEQ ID NO: 210138 - DNA, 214 bp, Homo sapiens; identical to SEQ ID NO: 199785
  chr5:32709879-32710093
  hypo

SEQ ID NO: 210139 - DNA, 35 bp, Homo sapiens
  chr5:32764594-32764629
  hypo
cttcaaaaaaagaatttggccgggcacggtggctc

SEQ ID NO: 210140 - DNA, 359 bp, Homo sapiens
  chr5:32782525-32782884
  hypo
gggtgggatagtgccttatccgatgaacaaagcaaaagccgggaattccgagattattccttttccacgagggggtagtgactgaagaatcctaggggcagcactgacagggctgggccttcagtgagtgcagagcccaggggacaccactctcaccgcttcccacatcctgctctggcacgaccgctcttaatgctctcttgagagcaccatcagcgacttcaaatcttgacttgtgaagtccccagaacacaccatgaccatcagtgtggacaaccgaggaacgtgcccaatgtaccacgcttttctgaagcacttgctgtccttgccctggagacggtgatttgatgaaatgccca

SEQ ID NO: 210141 - DNA, 271 bp, Homo sapiens
  chr5:33162235-33162506
  hypo
tggcttaagatttttttgggcggtttctctttccagccagcgccgagcgatgggcatctctcgggacaactggcaccagcgccgcaaaaccgggggcaagagaaagccctaccacaagaagcggaagtatgagttggagcgcccagctgccaacaccaagattggcccccgccgcatccacacagtccgtgtgcagggaagtaacaagaaataccgtgccctgaggttggacgtgggggaatttctcctggggctcagagtgttgtactcg

SEQ ID NO: 210142 - DNA, 126 bp, Homo sapiens
  chr5:33162602-33162728
  hypo
cacaccgtgccgacagtggtaagatgtcccactacgtgctgcccctgggccgcaagaagggagccaagctgactcctgaggaagaagagattttaaacaaaaaacgatttaaacaaattcagaaga

SEQ ID NO: 210143 - DNA, 38 bp, Homo sapiens
  chr5:33311279-33311317
  hypo
agtcatcgcacccggccgagaaaagtttttatcctgag

SEQ ID NO: 210144 - DNA, 179 bp, Homo sapiens
  chr5:33502053-33502232
  hypo
ccggagcaggcgccgccgccagtgagaacccgggccctgagccgggcggtagtttgctggggctgagtctggggcgcgcaggccctgacctccgccctctgagctctcccatcgcaggtgaccatggggaaagtgttggcagtcagctccctgcctgcagggccgccgccaccacctgt

SEQ ID NO: 210145 - DNA, 40 bp, Homo sapiens
  chr5:33509454-33509494
  hypo
atttcttgctttttttggttgttgttcgtttcttttttta

SEQ ID NO: 210146 - DNA, 38 bp, Homo sapiens; identical to SEQ ID NO: 199786
  chr5:33936115-33936153
  hypo

SEQ ID NO: 210147 - DNA, 359 bp, Homo sapiens
  chr5:33984387-33984746
  hypo
ggccccacctggaccggcagtggtcgctggccgatccgaccacgggctgcagcaggaatcccaggatggggctgaggaaccacacaatgctgtacaggctgctgggcagacctacgctgagcaggactggggtcacatacgctgcctccaccgcgtagcagaactctcttccgaacatggccatgctgtgcatgatgagtctgctggtgggtcttttaggcggctccacagagtcaaaggggccatcatcagctagggatttatagatgtggcggccagcctgcccactgttgctacccatggccactgggagaggaaccttcctgcgagcccaccacctcctgcgtggtcctagggtc

SEQ ID NO: 210148 - DNA, 83 bp, Homo sapiens
  chr5:34551767-34551850
  hypo
acttgttggattttaactccgagctctgagcatccacatcttcatcagccgaaagggacttgacccgtcggctggctcccagg

SEQ ID NO: 210149 - DNA, 38 bp, Homo sapiens
  chr5:34586707-34586745
  hypo
catatggccaggtacggcggctcacgcctgcaatctca

SEQ ID NO: 210150 - DNA, 42 bp, Homo sapiens
  chr5:39053667-39053709
  hypo
aaataaatgtttattaaatccgcagaattagaaagcaagaat

SEQ ID NO: 210151 - DNA, 102 bp, Homo sapiens
  chr5:39209363-39209465
  hypo
acaagctcctctatcgataatagaacagcagtgatcttttttatcccgattaacactgtttaaatatgtttttttttttttttgagacggagcctccctcta

SEQ ID NO: 210152 - DNA, 129 bp, Homo sapiens
  chr5:39740632-39740761
  hypo
aaaagaactcatgacgaacccgtgattcagtcgcggctacgcatgcaggcgtgtctgtacacatacttaccagccctgagacctggcgacagtggagcagcgctctagggaacccggccagcgggctga

SEQ ID NO: 210153 - DNA, 223 bp, Homo sapiens
  chr5:39808822-39809045
  hypo
atgcaagattgaccccgggtgaaaaagagacggagagaaggttgggtaaaaggattttagacttcagtgcagtctaaggaagatttgacaagtcccttgagggatcctcaagccaaagctgtccatcagcagtaccgtgttgtccaagaaggagtgctacagcattcctgttatactcagtcgctggccaggaacagtctgtgaaaaccgtggcttctgttct

SEQ ID NO: 210154 - DNA, 214 bp, Homo sapiens
  chr5:40066713-40066927
  hypo
aagtctgagtcctgtgctctcgctgtcctccccagacagcatgagcttcaccattcctccaccttctgcaccaactaccggtccctgggctccgtccagccgcccagctaccgcgcccgaccgctaaccagcgcggccagcttctaggcaagcgccgggggctctggttcccggatctccgtgttccgctccaacagcttcctgggtggcttgg

SEQ ID NO: 210155 - DNA, 148 bp, Homo sapiens
  chr5:40066955-40067103
  hypo
cggggtctggcaggaatgggaggcatccagaactaaaaggagaccatgcaaagcctgagcgacagcctggcctcctacctggaaagagtgaggatcctggaggcggagaaccggaagctggagagcaaaatccgggagcacctgtaga

SEQ ID NO: 210156 - DNA, 758 bp, Homo sapiens; identical to SEQ ID NO: 199810
  chr5:41870078-41870836
  hypo

SEQ ID NO: 210157 - DNA, 39 bp, Homo sapiens
  chr5:41991877-41991916
  hypo
ttaagtatttatataccttccggccgggcacagtggctc

SEQ ID NO: 210158 - DNA, 39 bp, Homo sapiens
  chr5:41992156-41992195
  hypo
gcaacaggagcaaaaatcggtctcataaaaaaatatata

SEQ ID NO: 210159 - DNA, 278 bp, Homo sapiens; identical to SEQ ID NO: 199814
  chr5:42424337-42424615
  hypo

SEQ ID NO: 210160 - DNA, 36 bp, Homo sapiens
  chr5:42476009-42476045
  hypo
ttttttttttttttttgagacggagtctcgctctgt

SEQ ID NO: 210161 - DNA, 31 bp, Homo sapiens
  chr5:42984043-42984074
  hypo
tgttttttgagatggagtctcggtctgtcgc

SEQ ID NO: 210162 - DNA, 105 bp, Homo sapiens
  chr5:43147787-43147892
  hypo
gctgggattacaggcgtgagccaccgcgcccggccagtttggaagtttaaaaaaaaaaaaaacagtttggaagttttttggttttatggccgggtgtggtggttt

SEQ ID NO: 210163 - DNA, 36 bp, Homo sapiens
  chr5:43233244-43233280
  hypo
tggccaatgagatggagatgcggtcacgcatgatta

SEQ ID NO: 210164 - DNA, 52 bp, Homo sapiens
  chr5:43233310-43233362
  hypo
gacaaggagagattgttgcttcttacagtgcgactcttaggtgattgatata

SEQ ID NO: 210165 - DNA, 344 bp, Homo sapiens; identical to SEQ ID NO: 199828
  chr5:43557421-43557765
  hypo

SEQ ID NO: 210166 - DNA, 79 bp, Homo sapiens
  chr5:45196607-45196686
  hypo
aagtatttcttttcttatttcgctgaggaagacagcaaaggaaaaaaatgtagagatcgtgttttatataatgtagctt

SEQ ID NO: 210167 - DNA, 44 bp, Homo sapiens
  chr5:45225672-45225716
  hypo
gagccactctctggactggccgaggacggagctggctccctctg

SEQ ID NO: 210168 - DNA, 51 bp, Homo sapiens; identical to SEQ ID NO: 199831
  chr5:49737299-49737350
  hypo

SEQ ID NO: 210169 - DNA, 33 bp, Homo sapiens
  chr5:49903305-49903338
  hypo
cctctcttctcccctttcttcggtctccctcca

SEQ ID NO: 210170 - DNA, 78 bp, Homo sapiens
  chr5:53821871-53821949
  hypo
ggtatggtagacagctggagcgacttctctctgacccaaattaataggactaccaaagagataaattatgacagtttt

SEQ ID NO: 210171 - DNA, 139 bp, Homo sapiens
  chr5:54069074-54069213
  hypo
ccttacgttgtgcacgctgtgtttgtctacatgtatctgtgctcctcgggtctaatgttacccatctacctgattctttctttttttccggttttgttttttttttttgggttttttttttttttttttgagatggagt

SEQ ID NO: 210172 - DNA, 107 bp, Homo sapiens; identical to SEQ ID NO: 199844
  chr5:54469036-54469143
  hypo

SEQ ID NO: 210173 - DNA, 98 bp, Homo sapiens
  chr5:54665639-54665737
  hypo
agccagtcactaacccgtgttatttctttttaccaatgagaattcctgacagcttttgtaatctagccgctcttctaattcatccctttttcttttct

SEQ ID NO: 210174 - DNA, 32 bp, Homo sapiens
  chr5:54734440-54734472
  hypo
gtacataggccaggcgcggtggctcacgcctg

SEQ ID NO: 210175 - DNA, 34 bp, Homo sapiens
  chr5:55330547-55330581
  hypo
atttatttatttttttgagacggagtctcactct

SEQ ID NO: 210176 - DNA, 33 bp, Homo sapiens
  chr5:55330821-55330854
  hypo
tagaggcgtgagccaccgcgtctggcctctttc

SEQ ID NO: 210177 - DNA, 277 bp, Homo sapiens; identical to SEQ ID NO: 199854
  chr5:57755330-57755607
  hypo

SEQ ID NO: 210178 - DNA, 420 bp, Homo sapiens; identical to SEQ ID NO: 199855
  chr5:57755667-57756087
  hypo

SEQ ID NO: 210179 - DNA, 217 bp, Homo sapiens; identical to SEQ ID NO: 199856
  chr5:57756387-57756604
  hypo

SEQ ID NO: 210180 - DNA, 203 bp, Homo sapiens; identical to SEQ ID NO: 199868
  chr5:60626141-60626344
  hypo

SEQ ID NO: 210181 - DNA, 45 bp, Homo sapiens
  chr5:60676638-60676683
  hypo
atttatgggccgggcgaggtggctcacgcctatagtcccagcact

SEQ ID NO: 210182 - DNA, 200 bp, Homo sapiens
  chr5:60821632-60821832
  hypo
cgaacaggccacatcggacagtgttcacccgagccatcgaggcatgcgatctccactggcaggatagccacttgcagcacattatcagcagtgacctatacaccaactactgttaccatgacgacactgaaaactccctcttcgactcccgcgggtggcccctctggcatggtaagtgaccaaaccggaaagacatttcc

SEQ ID NO: 210183 - DNA, 83 bp, Homo sapiens
  chr5:61690791-61690874
  hypo
actgaagaggcagattgtgacgttcaatgtttccttgatttgacgggttaaaagatgtagactttttttttttttttgagacg

SEQ ID NO: 210184 - DNA, 138 bp, Homo sapiens
  chr5:64339982-64340120
  hypo
taaggagacacaaaacgaaaacaactgctgcctcacagaagtttcaatactaaaataggtagcacatatctattaagtactcattcaacttatcatttttattttatttcatttttgagacagagtctcgccctgttg

SEQ ID NO: 210185 - DNA, 41 bp, Homo sapiens
  chr5:65020927-65020968
  hypo
ggcagaagtggcactgtttcgcatttttgcaaaactaatgt

SEQ ID NO: 210186 - DNA, 40 bp, Homo sapiens
  chr5:65107351-65107391
  hypo
gttctttttcaggcaaggcacggtgactcacgcctgtaat

SEQ ID NO: 210187 - DNA, 77 bp, Homo sapiens
  chr5:65465907-65465984
  hypo
gacagaaagacagacgtagatctaagagcccacataaaaaacgctctaaatcaagggagagacggaagtcaaggagt

SEQ ID NO: 210188 - DNA, 205 bp, Homo sapiens
  chr5:65988337-65988542
  hypo
gaaccagggctattccgcaagctgggcttccgtcctttgaatattcgaggcaataggtgttccaccatcagaacacttaagctagtctgttacttctgcagtggactcattaaatcattttgctaggggtcctaatatataaaacaaccaacttgtttgcatatcattcatcgccttttgattcccttaccgttctgcaatcatc

SEQ ID NO: 210189 - DNA, 186 bp, Homo sapiens
  chr5:66441263-66441449
  hypo
tgctcagtcccagggcgggcctcgccaggcagtaaagatgggtgttttatgctgctagactttctccatggcctcagtccttaggcttgggacacgatcttctgagagctaagatcagatgtctcagacccctcctcagtgctcggccatgcagcaaactgttattgcttccgtttgaccttgggg

SEQ ID NO: 210190 - DNA, 34 bp, Homo sapiens
  chr5:66911431-66911465
  hypo
aattttagccagctgcggtggctcacgcctgtaa

SEQ ID NO: 210191 - DNA, 162 bp, Homo sapiens
  chr5:66938604-66938766
  hypo
gaattgattttaaaccgcaaaaatgaatcgttttattttgctaacagggaaatcatattacatagcctactccatgtaaagtagtttcggtttctgcaaaggaaaaagaacatgatcggatttagcaaaatggtgtattacatagggcgaaaatcagatcat

SEQ ID NO: 210192 - DNA, 36 bp, Homo sapiens
  chr5:67015513-67015549
  hypo
acaggcgtgagccaccgcgaccggcccagtaatgtt

SEQ ID NO: 210193 - DNA, 174 bp, Homo sapiens
  chr5:67617620-67617794
  hypo
ttcctatgtgccagacgccgaactaaatgttttacaaggatagtctcagttaattctcagcacaccctatgagttgagtactatctgcgtcatccccactatattgatgttaaaactgactgaggcacacagagcgcatcagtaactttcttaaggtcacgaagttactaagtt

SEQ ID NO: 210194 - DNA, 137 bp, Homo sapiens
  chr5:67717789-67717926
  hypo
aaaaccagtttacctgaagccgagcgtttatgtgggagagcggtagagcataacgtgtctgtaaggagtcctcatgtctgtgcgagctgggctgtgttctaggctgaggagtttgcgatgtgttctaagggcagagg

SEQ ID NO: 210195 - DNA, 37 bp, Homo sapiens
  chr5:67753209-67753246
  hypo
aaagataacttggccaggtgcggtggctcacatctgc

SEQ ID NO: 210196 - DNA, 36 bp, Homo sapiens
  chr5:67753366-67753402
  hypo
ttaaaaaaaataaccgagccaccaagtgatcctatc

SEQ ID NO: 210197 - DNA, 39 bp, Homo sapiens
  chr5:71780024-71780063
  hypo
ttaatcgccgggcgcggtggctcacgcctgtaatcccag

SEQ ID NO: 210198 - DNA, 181 bp, Homo sapiens
  chr5:72388279-72388460
  hypo
tcagaacaagtcattcgccctttctttacggttggagtatggcagccatagctccagactgtatgtgtttacatccacagctaggagggacagttccagtatgtctgtcttttttttgtacgaagagtaaaagtttttccagaagctcccagctcgtatctgtttacgttctgttggcctg

SEQ ID NO: 210199 - DNA, 216 bp, Homo sapiens; identical to SEQ ID NO: 199888
  chr5:72744481-72744697
  hypo

SEQ ID NO: 210200 - DNA, 1143 bp, Homo sapiens; identical to SEQ ID NO: 199891
  chr5:72921423-72922566
  hypo

SEQ ID NO: 210201 - DNA, 194 bp, Homo sapiens
  chr5:73081113-73081307
  hypo
aattaatggatcacacgagagtccttttttcgcagttctcaacctctcatagaaaccgtctgtgaaaggtactttgaaaatgttgttcttcctcaactctgtggcacctccctctctggatcttatgtcctccattttcactatcacctgggttcccgccatctgttagtccagtaatgcgcacaccagagaag

SEQ ID NO: 210202 - DNA, 87 bp, Homo sapiens
  chr5:73205664-73205751
  hypo
ctggaagcacggccggcagaggagcctgcccgcggtgctccttccgggtggccccgaggtatggaccttctgcggtgctgtgaggca

SEQ ID NO: 210203 - DNA, 45 bp, Homo sapiens
  chr5:73247793-73247838
  hypo
acacgacaaaagaaccgttagtttcgggccgagcacggtggctca

SEQ ID NO: 210204 - DNA, 178 bp, Homo sapiens
  chr5:73627934-73628112
  hypo
gtttttctcattttacggatgagaaaactgggttcagggatgacaacccatgcaagtccacacaacaaagaatgatttctcccggctgtcacttcggtgctaaaatgctctgtagtttttctttctgccacagacacccaggagcttctcttcgctgtgttcccgtggcattggagtg

SEQ ID NO: 210205 - DNA, 35 bp, Homo sapiens
  chr5:73665486-73665521
  hypo
gttaacaaacagggccgggcactgtggctcacgcc

SEQ ID NO: 210206 - DNA, 193 bp, Homo sapiens; identical to SEQ ID NO: 199892
  chr5:73843885-73844078
  hypo

SEQ ID NO: 210207 - DNA, 264 bp, Homo sapiens; identical to SEQ ID NO: 199893
  chr5:73935724-73935988
  hypo

SEQ ID NO: 210208 - DNA, 516 bp, Homo sapiens; identical to SEQ ID NO: 41639
  chr5:73936032-73936548
  hypo

SEQ ID NO: 210209 - DNA, 202 bp, Homo sapiens; identical to SEQ ID NO: 199895
  chr5:73936857-73937059
  hypo

SEQ ID NO: 210210 - DNA, 103 bp, Homo sapiens; identical to SEQ ID NO: 199897
  chr5:74162616-74162719
  hypo

SEQ ID NO: 210211 - DNA, 260 bp, Homo sapiens; identical to SEQ ID NO: 199898
  chr5:74348635-74348895
  hypo

SEQ ID NO: 210212 - DNA, 590 bp, Homo sapiens; identical to SEQ ID NO: 199899
  chr5:74348906-74349496
  hypo

SEQ ID NO: 210213 - DNA, 37 bp, Homo sapiens
  chr5:74652649-74652686
  hypo
cacacctgtggtcctcgctacacggtaggctggggca

SEQ ID NO: 210214 - DNA, 373 bp, Homo sapiens; identical to SEQ ID NO: 199901
  chr5:75379694-75380067
  hypo

SEQ ID NO: 210215 - DNA, 1185 bp, Homo sapiens; identical to SEQ ID NO: 199902
  chr5:75698274-75699459
  hypo

SEQ ID NO: 210216 - DNA, 40 bp, Homo sapiens; identical to SEQ ID NO: 199903
  chr5:75700173-75700213
  hypo

SEQ ID NO: 210217 - DNA, 136 bp, Homo sapiens
  chr5:76327277-76327413
  hypo
tttaaggttgctcttctgggcgtttatcatcttcggctttcttgtgtaagtagggacgatatataactgcttttgttggagacgttaagcagcttatttcgtttccaagatggtaggggcaaatgttaatacttaa

SEQ ID NO: 210218 - DNA, 37 bp, Homo sapiens
  chr5:76328105-76328142
  hypo
gaggtggctgggcgcggtggctcacgcctgtaatcct

SEQ ID NO: 210219 - DNA, 169 bp, Homo sapiens
  chr5:76372312-76372481
  hypo
tgaagcaagggaaggatggccgaggggagacagagtgcacctggtattggttgaataatatgggcagtaaaaaagcgggctctgggactgccccgatgagggctagagatgatgcgggtctacagcagtcatggaaactagaggggacgtccctcacccacccttcaga

SEQ ID NO: 210220 - DNA, 70 bp, Homo sapiens; identical to SEQ ID NO: 199912
  chr5:76507202-76507272
  hypo

SEQ ID NO: 210221 - DNA, 57 bp, Homo sapiens; identical to SEQ ID NO: 199916
  chr5:77268310-77268367
  hypo

SEQ ID NO: 210222 - DNA, 111 bp, Homo sapiens
  chr5:77816710-77816821
  hypo
tgaaaaatcactgaccgttcctttcttatatacttttccttcctgtttcagacaactaaaatgcttggaatcacgaacaatttgatagctgtatgccgaaagacatggcag

SEQ ID NO: 210223 - DNA, 34 bp, Homo sapiens
  chr5:77848659-77848693
  hypo
ctccttcaacaaagcgtcacgggctatacagaat

SEQ ID NO: 210224 - DNA, 57 bp, Homo sapiens
  chr5:78105382-78105439
  hypo
gctccccaagtcagcggcacttcttgccttcagctgaagctgggagacccatcctac

SEQ ID NO: 210225 - DNA, 91 bp, Homo sapiens
  chr5:78105545-78105636
  hypo
tcctgctctgaaaatcacgtcctggcaacctgcccatcggacctggagccagccttgccctctccactgcgggcctgtaggcctggccttg

SEQ ID NO: 210226 - DNA, 139 bp, Homo sapiens
  chr5:78264451-78264590
  hypo
gtgagccaccgcacccagcctggaaatattcttacattaggttttgccaggcattaaaaaaataaaaaatcaatccatatccctttttggtaataagggtctctgagagtacagcggtctccaacgtggatagtaaact

SEQ ID NO: 210227 - DNA, 50 bp, Homo sapiens
  chr5:78264837-78264887
  hypo
tatcaaatcctcggcgggttggaaggcattctttccggtacattcccagg

SEQ ID NO: 210228 - DNA, 80 bp, Homo sapiens
  chr5:78469179-78469259
  hypo
gttaactctcttctaaattacgtttgcctatgtgtcttgaattaaaaaatggctttaatcgtaaataaacatgagaaaaa

SEQ ID NO: 210229 - DNA, 36 bp, Homo sapiens
  chr5:78882208-78882244
  hypo
cgctccagcctgggcgacagagtgagactcaaaaag

SEQ ID NO: 210230 - DNA, 36 bp, Homo sapiens
  chr5:78949955-78949991
  hypo
gagttaatgaaaaaggaggccgggcacggtggctca

SEQ ID NO: 210231 - DNA, 118 bp, Homo sapiens
  chr5:79498689-79498807
  hypo
cacggacaaacttacgtgctctttcatcttgtgagccacggttgttgacatcatgatgcagcagaggacgacgaccagaatgaagtagagggcgtacatgaagcgggtgctgagggac

SEQ ID NO: 210232 - DNA, 206 bp, Homo sapiens; identical to SEQ ID NO: 199919
  chr5:79551152-79551358
  hypo

SEQ ID NO: 210233 - DNA, 41 bp, Homo sapiens; identical to SEQ ID NO: 199922
  chr5:79865662-79865703
  hypo

SEQ ID NO: 210234 - DNA, 90 bp, Homo sapiens; identical to SEQ ID NO: 199923
  chr5:79865744-79865834
  hypo

SEQ ID NO: 210235 - DNA, 254 bp, Homo sapiens
  chr5:79911325-79911579
  hypo
ggtctccaaacagacaattacccggttccacttaacagagtgactcaaggacggatctgagggctgggtcttgtgaacgcgggctgttgtcctgccctctcccagctctaacattgtgctgaaaagttaaaatacaaaacgccaaagctccccaatcccatcccacgcccctgcctgcgcagcctttcatgcattgaatgggcagcttcatgatgctgctgcgacaatagcgacaatagcgggggcagaggagt

SEQ ID NO: 210236 - DNA, 163 bp, Homo sapiens
  chr5:79986401-79986564
  hypo
ctgggattacagacgtgagccactgcacctagccatccagttcaattttaaaactactgttttatttttctcattaaactttaaccgttaagtgctccttattactaatgtgatcttaaacataaacagaaatgcagaaactgaagcacgtagcaatattcat

SEQ ID NO: 210237 - DNA, 80 bp, Homo sapiens
  chr5:80076659-80076739
  hypo
ctgggcaacagagcgtgactgtctcaaataaataaataaaaccttaaacagtaaaaattcagtgacgtccttcagggagc

SEQ ID NO: 210238 - DNA, 48 bp, Homo sapiens
  chr5:80550827-80550875
  hypo
tcgacgagcattacgtgctgtcttctcgggtgcgcactggccgcagca

SEQ ID NO: 210239 - DNA, 183 bp, Homo sapiens
  chr5:80652824-80653007
  hypo
accttcttcctctcccgcctccctctaccttgcattttctctctagcaatactcttgtgttggtggcttcccagcacacagtgtgctggttcatgcctccgtgccttcaccctcactgctacgcaattcctcgccttcccaactttcttctcatagcccctcctgcagcgagtctctcgtgaa

SEQ ID NO: 210240 - DNA, 140 bp, Homo sapiens
  chr5:81570369-81570509
  hypo
gcgccccgcctcgcggtcacaagggccccaccgcccggggagagctgcccaccccgcgcctgacgcccagggcctggaatcgcgctgcaaccgcggcctctttccctggttctggccaggtgagcgaggcctagcaatct

SEQ ID NO: 210241 - DNA, 438 bp, Homo sapiens; identical to SEQ ID NO: 199931
  chr5:87437087-87437525
  hypo

SEQ ID NO: 210242 - DNA, 34 bp, Homo sapiens
  chr5:90257315-90257349
  hypo
aaaaaaaaagggggggtggcggtcatttcaagaa

SEQ ID NO: 210243 - DNA, 144 bp, Homo sapiens
  chr5:93077276-93077420
  hypo
atggcacccgcagcggctctggtaggaactgatggccctcgaggcttcagaacagccaccggccccctcaagccccgccccccagtgggcggagaaggcgttacaagccaagggtgcctgtgcgtaggcggggaaatctggtag

SEQ ID NO: 210244 - DNA, 38 bp, Homo sapiens
  chr5:94762453-94762491
  hypo
ttaagaagcttgtcccaggccgggcgcggtggctcacg

SEQ ID NO: 210245 - DNA, 37 bp, Homo sapiens
  chr5:94762731-94762768
  hypo
gatagagcaagactccgtctcaaaaaaaagaaaagaa

SEQ ID NO: 210246 - DNA, 94 bp, Homo sapiens
  chr5:94981773-94981867
  hypo
attgaaccattcctccgtgttatcacttcagctattttcactacttcacagcaataaacattttttttttttttgagatggagtttcgctcgtg

SEQ ID NO: 210247 - DNA, 32 bp, Homo sapiens
  chr5:95290421-95290453
  hypo
gcatgagccactgcgcccggccaatatcttgt

SEQ ID NO: 210248 - DNA, 98 bp, Homo sapiens
  chr5:95515382-95515480
  hypo
agggagcatgtgcaggagcacgagagcacttgtcacgttgagagaacgttacacggtttagaactggtagagtgtaggccgggcgcggtggctcacac

SEQ ID NO: 210249 - DNA, 268 bp, Homo sapiens
  chr5:96111422-96111690
  hypo
aagagggtcccctctcggagctaagaccctcaggggaggccagcccgaggcatcccgcaagggaatcagggaagaacacctccacctactacctcctccgaccccagctccagctctccggctccccactgaccaacatccaaagggcaagaaagcttgatgacttggcctttacaagtcagcccctgggcatggagcaaggaagagggatgggcagcgggtctggaggggtgagccgggagagctttaacccagtcatcgtccggct

SEQ ID NO: 210250 - DNA, 91 bp, Homo sapiens
  chr5:96114496-96114587
  hypo
ggtaagagcagagagaagtgcgcaagatccagtgcatgtgctgagggaagaccggcaggacttgcgtagttagatgtctggggaagaaagg

SEQ ID NO: 210251 - DNA, 67 bp, Homo sapiens
  chr5:96114632-96114699
  hypo
attatgataacatctcgggctctttacttttcatgccctgcttcaggatcttcgcacctgatatttc

SEQ ID NO: 210252 - DNA, 166 bp, Homo sapiens
  chr5:96121446-96121612
  hypo
agctgctttcagaaataaaccgcgactttgtgcagcgtgtattacctgacgagctgaaatgcattgttaatgagactcgcccgatcattactgctgactgctgtgtgtgttccttttaaaaggccagtcaaagagtcccatccatcatcctcgtaatgcacaatgt

SEQ ID NO: 210253 - DNA, 33 bp, Homo sapiens
  chr5:96173522-96173555
  hypo
ggtgaaagtggctctcagcgtgaaggggagctg

SEQ ID NO: 210254 - DNA, 85 bp, Homo sapiens
  chr5:96362698-96362783
  hypo
ggttacttagctcagcgtggctacagactatttcatagcaaccatttagctatgcatattgaaaaatacctctgtatggccgggc

SEQ ID NO: 210255 - DNA, 447 bp, Homo sapiens; identical to SEQ ID NO: 199958
  chr5:98109213-98109660
  hypo

SEQ ID NO: 210256 - DNA, 203 bp, Homo sapiens; identical to SEQ ID NO: 199959
  chr5:98109927-98110130
  hypo

SEQ ID NO: 210257 - DNA, 132 bp, Homo sapiens
  chr5:98239920-98240052
  hypo
agaggctgagtcagaatatacgtcaacgatgtcactaggcacattgttttagctcagatttgagcggggggccggtagcaacatttttctctatgaaggaatctgtgtgtcgatttatattctggccctcaa

SEQ ID NO: 210258 - DNA, 76 bp, Homo sapiens
  chr5:98242969-98243045
  hypo
tattgagttgttctttagtacgataaagaatatgcaaaaagagctgggagcggtggctcatgcctgtaatcccagc

SEQ ID NO: 210259 - DNA, 199 bp, Homo sapiens; identical to SEQ ID NO: 199967
  chr5:102201407-102201606
  hypo

SEQ ID NO: 210260 - DNA, 298 bp, Homo sapiens; identical to SEQ ID NO: 199969
  chr5:107005685-107005983
  hypo

SEQ ID NO: 210261 - DNA, 449 bp, Homo sapiens; identical to SEQ ID NO: 199970
  chr5:107006260-107006709
  hypo

SEQ ID NO: 210262 - DNA, 102 bp, Homo sapiens; identical to SEQ ID NO: 199971
  chr5:107007963-107008065
  hypo

SEQ ID NO: 210263 - DNA, 206 bp, Homo sapiens; identical to SEQ ID NO: 199973
  chr5:107359033-107359239
  hypo

SEQ ID NO: 210264 - DNA, 262 bp, Homo sapiens
  chr5:107703569-107703831
  hypo
ggaagtctaaacaaaggtcacgccagtacttgcaaaccaatgatgcggaaaggcaacgctcatccagtgacaaattggaaaatatctgtgaataaaaaacggtaccatataatatgtgctaaacattttcaaggcacaggaaaaggtttttattagttagaaaaagttaactttgtaaaaagaaaaccttcttgaataaaagaggccattattgtaagtcaccgtaagagatcaccttaaagagaaactatgatacaggagc

SEQ ID NO: 210265 - DNA, 38 bp, Homo sapiens
  chr5:108730038-108730076
  hypo
atgcccagccacatgctagttctcgacttggctggtgt

SEQ ID NO: 210266 - DNA, 265 bp, Homo sapiens; identical to SEQ ID NO: 199974
  chr5:109024744-109025009
  hypo

SEQ ID NO: 210267 - DNA, 289 bp, Homo sapiens
  chr5:109162076-109162365
  hypo
atatataaactggacgtaacctgtaaatcttttttcattctagtccggatcattttttttttcaacatgaaagcagttggtaggaaatagagataccagaatcacctgaaatgctttcttccaaactatataccttcccgtgtttgtatttgagctcctcttaacaaatctccctctgggaaaagataagcccggttgtggagagagtctttccttagtaatcttcatgactcacctgtctctcctgtttttcacataccattgcctgaacactcgggttgtctcaatc

SEQ ID NO: 210268 - DNA, 637 bp, Homo sapiens; identical to SEQ ID NO: 199975
  chr5:110074663-110075300
  hypo

SEQ ID NO: 210269 - DNA, 1030 bp, Homo sapiens; identical to SEQ ID NO: 199976
  chr5:110847625-110848655
  hypo

SEQ ID NO: 210270 - DNA, 122 bp, Homo sapiens
  chr5:111065740-111065862
  hypo
tctaagtcaggcaggcgaggctacggaaaggaagagatttggtaagtaaattacagttttgtgattgctcccgctaccgtgactgcatgtccgtgagcgccagccaacgagacaatggtctc

SEQ ID NO: 210271 - DNA, 74 bp, Homo sapiens; identical to SEQ ID NO: 199977
  chr5:111093930-111094004
  hypo

SEQ ID NO: 210272 - DNA, 241 bp, Homo sapiens
  chr5:115570379-115570620
  hypo
aatttacacacagatcgagttaggaacttccgaaaaaatagtactcgttctaaaaacatccaattggataatttcacttataagggtaaagagtactgattttaaaaggttctcagagtctgttttgtgaagagatcccttaaagtataatggtggcggagcacagggaagagctcacatgcagccgcaggagagctagggaaaaagggtgacagctctgctaagccgccacttagaaaag

SEQ ID NO: 210273 - DNA, 540 bp, Homo sapiens
  chr5:115783186-115783726
  hypo
ccgtgttgccgggagtggcgagcttgccgttgtgcatgagtggcgtgaggatggcctccggctttgggtctttggattgagtgtccccaaagaggccgctgagcttggtgacgctgctcatggagccccggcgcgagtgggtgagctccttctccttgcgctgcaccacagccacgtctttgcgccgatgatcacagacgcagtagacggtgatgcccgagaagacggcccccatgacgaaagccaggatgactgcaatggccaagagggtgacgggaaccagctggtcgtggcctttgaggtaactttcccgaatcactcctgcaatagacatcgcatatggcgttaagaaatgaaagcacaccccgaggcttgtttttgcttggcattcaccttgttaattaataacagtagtaagtgacaacagcacctctgcacaacttgtcttccaagctcagcttgccaaacattaaccaattaatcctccccaagcccctcgtgtgcagtatgtaaatggactccatttgtagccttctttgt

SEQ ID NO: 210274 - DNA, 156 bp, Homo sapiens
  chr5:118309319-118309475
  hypo
gcctccttgctcgcggcagcctccttgctcgcggcagcctccttgctcgccgcagccgcctccgccacgcgcctcctccgccgccgcggactccggcagctttatcgccagagtccctgaactctcgctttctttttaatcgcctgcatcggatca

SEQ ID NO: 210275 - DNA, 35 bp, Homo sapiens
  chr5:118461528-118461563
  hypo
gaatacaggcgtgagccaccgcgcctggccaatat

SEQ ID NO: 210276 - DNA, 34 bp, Homo sapiens
  chr5:118717629-118717663
  hypo
aaaaacaccgaacaaaaaacggagtacctttgta

SEQ ID NO: 210277 - DNA, 149 bp, Homo sapiens
  chr5:121187995-121188144
  hypo
ggtatttccttcaccagtcccgggaggagaccgagcacgcggagaagctgatgaggctgcagaaccagcgaggaggccggatccgcctgcaggacatcaagaagccggaacaggacgactgggaaagcgggctgcatgccatggagtgt

SEQ ID NO: 210278 - DNA, 54 bp, Homo sapiens
  chr5:122152701-122152755
  hypo
caagatgaatgaatcggatgcagtaagagctgatttttcggcttgaataatgag

SEQ ID NO: 210279 - DNA, 57 bp, Homo sapiens; identical to SEQ ID NO: 200011
  chr5:124084138-124084195
  hypo

SEQ ID NO: 210280 - DNA, 74 bp, Homo sapiens; identical to SEQ ID NO: 200012
  chr5:124084302-124084376
  hypo

SEQ ID NO: 210281 - DNA, 125 bp, Homo sapiens; identical to SEQ ID NO: 200013
  chr5:124084646-124084771
  hypo

SEQ ID NO: 210282 - DNA, 85 bp, Homo sapiens; identical to SEQ ID NO: 200014
  chr5:124084977-124085062
  hypo

SEQ ID NO: 210283 - DNA, 39 bp, Homo sapiens
  chr5:125911666-125911705
  hypo
ggacaggcagggcgcggtggctcacgcctgtaatcccag

SEQ ID NO: 210284 - DNA, 200 bp, Homo sapiens
  chr5:126073559-126073759
  hypo
cttttctttagaacccgatccaatagcgactactcgcttgcagtacttttccttgagatttttctggaagcataatgcctcctttggttacagtttcggcagtactcctttcaaccgatactcggtcagagtggaagaaagtttctaaaggtttgtcccgacatgactccctccgccgcagcctcgtactctgctctcgt

SEQ ID NO: 210285 - DNA, 152 bp, Homo sapiens
  chr5:126193333-126193485
  hypo
gcaggccttcttgccgcctgcctggcctccctggcattggctgcactgggaccggtgttctgcagatctgccctcttggtggcttccagacattctctctcacaaatctcaagactgacttaaaaaaaattcctaacgtcagcagtctttaa

SEQ ID NO: 210286 - DNA, 303 bp, Homo sapiens
  chr5:126250500-126250803
  hypo
cacagtcacatagctattaccgtgcttcagtaaagctgtacagggcttgtgatccaggcataaaaacagacatcatttgctcattagagctaagttttcaggacgtgccccacttactgacctccactaacggcctgggtttgcgctcgactgcaaacctgaagtggcagagttcacagtagctggtgtttgaggatgacagccagtgctccaggcagctccgatgaattgtccccaaggtccctgtacattcacatggagagagcaagtcctcttggctgctgccctcgtggcagatcctgc

SEQ ID NO: 210287 - DNA, 34 bp, Homo sapiens; identical to SEQ ID NO: 200020
  chr5:129240901-129240935
  hypo

SEQ ID NO: 210288 - DNA, 143 bp, Homo sapiens; identical to SEQ ID NO: 200021
  chr5:129240962-129241105
  hypo

SEQ ID NO: 210289 - DNA, 273 bp, Homo sapiens; identical to SEQ ID NO: 200022
  chr5:129241140-129241413
  hypo

SEQ ID NO: 210290 - DNA, 97 bp, Homo sapiens
  chr5:130636510-130636607
  hypo
cataaattgtgactatcacaagcaaagaaggatgaatggtcattctagttataatgtgcatattgcataataaaatagtttccgttttttagctatg

SEQ ID NO: 210291 - DNA, 65 bp, Homo sapiens
  chr5:130661706-130661771
  hypo
tttcattactgttaacgtctgagtattttaaaattttcttaatgtttttacgttttaatctgagt

SEQ ID NO: 210292 - DNA, 42 bp, Homo sapiens
  chr5:130723958-130724000
  hypo
attacagccatgagccaccacgcctggctgagtaacttttct

SEQ ID NO: 210293 - DNA, 55 bp, Homo sapiens; identical to SEQ ID NO: 200023
  chr5:130970375-130970430
  hypo

SEQ ID NO: 210294 - DNA, 189 bp, Homo sapiens
  chr5:131037383-131037572
  hypo
tctaaaccattctaacgggtctacccacctctcgtctcttactccagtctcttcaaaacgcactaccaagtgctcgtttcagcagccatatacaaaacacactgccaagttaatctccccaaagtacaacttgcaaacagccttaaagacaaagtcagaactccctggcaagcacgctacattttttgt

SEQ ID NO: 210295 - DNA, 197 bp, Homo sapiens; identical to SEQ ID NO: 200025
  chr5:131133198-131133395
  hypo

SEQ ID NO: 210296 - DNA, 278 bp, Homo sapiens; identical to SEQ ID NO: 41939
  chr5:131563558-131563836
  hypo

SEQ ID NO: 210297 - DNA, 163 bp, Homo sapiens
  chr5:131608067-131608230
  hypo
gctcccgagtacagtagtatctgcttaggtgccaggcatgtcctaggctctgggtgcagtagtgagcaggacgggtaccatgctgccctgaagggggccacagcctgggtggaaggcagacctgaatcacaacgggccagctctagtaatacgaaggtgaggt

SEQ ID NO: 210298 - DNA, 57 bp, Homo sapiens
  chr5:131608260-131608317
  hypo
aggtatgacctgggtggggtcagggaaagtcttagctgagaactaagagatgaggga

SEQ ID NO: 210299 - DNA, 80 bp, Homo sapiens
  chr5:131608347-131608427
  hypo
tgcaaaggtgagctgggggcgagaaaggcctctgtggccgtcatcggcactagcgggttgggggtggtggtggggtgctg

SEQ ID NO: 210300 - DNA, 131 bp, Homo sapiens
  chr5:131609888-131610019
  hypo
ccaaggggtcagactgtgtgcgttgaggccctgagggcgccccaccgtagcgctgcgcaggtgtgcacgcacacacgctccctgcagccacacccaaatagggtggggtggtggaggagtctgcccttgcc

SEQ ID NO: 210301 - DNA, 131 bp, Homo sapiens
  chr5:131725264-131725395
  hypo
aaacatgtccaagtgcacatcgctagcttttgctcagcggccgaaccctgggattctaggcgacttctggagcctggtgggttagcggtgagaagatgggcgaggagggcggacttcatctcagagtcctt

SEQ ID NO: 210302 - DNA, 238 bp, Homo sapiens; identical to SEQ ID NO: 200029
  chr5:131831522-131831760
  hypo

SEQ ID NO: 210303 - DNA, 101 bp, Homo sapiens
  chr5:131982464-131982565
  hypo
ggcggtaatgctccctcacctgtcactcacctcctgttgtgcgactctgttcctaacaggctgaggacaggtaatggtctgcagcccgggggttggggacc
